United States Patent Application Publication US 2007/0042381 A1 - sequence listing, part 17

SEQ ID NO: 724527 - RNA, 22 nt, Human
ccaggcaagagaggcucuggca

SEQ ID NO: 724528 - RNA, 22 nt, Human
ggugagugccuggccuggccac

SEQ ID NO: 724529 - RNA, 22 nt, Human
cucacagcagccagucugccuu

SEQ ID NO: 724530 - RNA, 22 nt, Human
uguuuugcuucucuguuuccca

SEQ ID NO: 724531 - RNA, 22 nt, Human
aagugacauaccuuacauaugu

SEQ ID NO: 724532 - RNA, 22 nt, Human
cgggcagugcccagcggggcag

SEQ ID NO: 724533 - RNA, 22 nt, Human
caguggggaggccaggauagaa

SEQ ID NO: 724534 - RNA, 22 nt, Human
ggcuucagugagcugagcucac

SEQ ID NO: 724535 - RNA, 22 nt, Human
caagagcuggagaggcagucua

SEQ ID NO: 724536 - RNA, 22 nt, Human
cuggaagagcauuugcauaggg

SEQ ID NO: 724537 - RNA, 22 nt, Human
cagccacuguggaauagccccc

SEQ ID NO: 724538 - RNA, 22 nt, Human
ucagaagguggagguugcagug

SEQ ID NO: 724539 - RNA, 22 nt, Human
acagaauuaaaguguuugugga

SEQ ID NO: 724540 - RNA, 22 nt, Human
ugggcuucauaauugguccuag

SEQ ID NO: 724541 - RNA, 22 nt, Human
gccauggggcucagcugcacua

SEQ ID NO: 724542 - RNA, 22 nt, Human
ucagagaaggcugagucacggc

SEQ ID NO: 724543 - RNA, 22 nt, Human
uucauguaauuccauaagguaa

SEQ ID NO: 724544 - RNA, 22 nt, Human
acagagcaugcucaguguguga

SEQ ID NO: 724545 - RNA, 18 nt, Human
cuggucagggcaaugggc

SEQ ID NO: 724546 - RNA, 22 nt, Human
caugcacaaagguaagaugcgu

SEQ ID NO: 724547 - RNA, 22 nt, Human
cccagcaguuguuggugcacau

SEQ ID NO: 724548 - RNA, 22 nt, Human
gagcugaguuaccuccagauca

SEQ ID NO: 724549 - RNA, 22 nt, Human
agagaacagccuccuagagaaa

SEQ ID NO: 724550 - RNA, 22 nt, Human
gagcuucuuguuucuucaucug

SEQ ID NO: 724551 - RNA, 22 nt, Human
uuucacagcuuccacuuaagga

SEQ ID NO: 724552 - RNA, 20 nt, Human
guccugggagccacagcaca

SEQ ID NO: 724553 - RNA, 22 nt, Human
ugccagcccaccuuggggccuc

SEQ ID NO: 724554 - RNA, 22 nt, Human
gaguaagagcuggcuuuggugu

SEQ ID NO: 724555 - RNA, 22 nt, Human
aggcacaggccucagcacccag

SEQ ID NO: 724556 - RNA, 22 nt, Human
aauuccugucuuaacaguucug

SEQ ID NO: 724557 - RNA, 22 nt, Human
guaaaguaaacccacuuuguag

SEQ ID NO: 724558 - RNA, 22 nt, Human
ccaaggaguagagcaggaagcu

SEQ ID NO: 724559 - RNA, 22 nt, Human
acucuguuugcagguagcucag

SEQ ID NO: 724560 - RNA, 22 nt, Human
aguggcagagcugggauuuggg

SEQ ID NO: 724561 - RNA, 22 nt, Human
auuuagcaagcaggcaaauuca

SEQ ID NO: 724562 - RNA, 22 nt, Human
gcagucaucaguccuuuaauua

SEQ ID NO: 724563 - RNA, 22 nt, Human
cucacacacgaagcccuuggcc

SEQ ID NO: 724564 - RNA, 22 nt, Human
agcacuuaaguuaauugaacug

SEQ ID NO: 724565 - RNA, 22 nt, Human
augagguacuaguauauacgua

SEQ ID NO: 724566 - RNA, 22 nt, Human
ggagccugugcccaagcccaga

SEQ ID NO: 724567 - RNA, 22 nt, Human
cguuuacuguguaccaggcacu

SEQ ID NO: 724568 - RNA, 22 nt, Human
ugcucagacuuaagaagaucag

SEQ ID NO: 724569 - RNA, 21 nt, Human
uagcaggauuugguuuauuuu

SEQ ID NO: 724570 - RNA, 22 nt, Human
gccucugcugacaagauggaca

SEQ ID NO: 724571 - RNA, 19 nt, Human
ucucuggcuugucugccug

SEQ ID NO: 724572 - RNA, 22 nt, Human
gaacauuacugcuugggagagg

SEQ ID NO: 724573 - RNA, 22 nt, Human
acagguccuuauaagagcacuc

SEQ ID NO: 724574 - RNA, 22 nt, Human
acaggaagugggaagaaacagg

SEQ ID NO: 724575 - RNA, 22 nt, Human
gcugcuggggucacaugguaag

SEQ ID NO: 724576 - RNA, 23 nt, Human
cacaggcagaaaucaagacggua

SEQ ID NO: 724577 - RNA, 22 nt, Human
ucaucuuccucauuucuccagg

SEQ ID NO: 724578 - RNA, 22 nt, Human
cagagcagcagagcuuccaugg

SEQ ID NO: 724579 - RNA, 22 nt, Human
uguuggcacuaucucauguuuu

SEQ ID NO: 724580 - RNA, 22 nt, Human
uuugcaaagaaauuauugcugu

SEQ ID NO: 724581 - RNA, 22 nt, Human
agggccugguucuguguaggga

SEQ ID NO: 724582 - RNA, 22 nt, Human
ucccaguuuuucuccacuaagg

SEQ ID NO: 724583 - RNA, 22 nt, Human
uguacacaauucuuaacauaca

SEQ ID NO: 724584 - RNA, 22 nt, Human
agccaugcaccuuacucuugcu

SEQ ID NO: 724585 - RNA, 22 nt, Human
uggccuggugcucaggcaguag

SEQ ID NO: 724586 - RNA, 20 nt, Human
ucaggugacacacguggcac

SEQ ID NO: 724587 - RNA, 22 nt, Human
aagauguugucguuagugauga

SEQ ID NO: 724588 - RNA, 22 nt, Human
auauagucaaacauauaugugu

SEQ ID NO: 724589 - RNA, 22 nt, Human
ccucauggccuugagcugaggg

SEQ ID NO: 724590 - RNA, 22 nt, Human
gaagugucuccguuuuuaaagg

SEQ ID NO: 724591 - RNA, 22 nt, Human
gucuggguggcugcuuucagcu

SEQ ID NO: 724592 - RNA, 22 nt, Human
uauguuauuuucauacaacaga

SEQ ID NO: 724593 - RNA, 22 nt, Human
ccugcuuccuucaaguuuaucu

SEQ ID NO: 724594 - RNA, 22 nt, Human
acuucucugguugagguccaau

SEQ ID NO: 724595 - RNA, 22 nt, Human
gcuccuggcucucugagggcug

SEQ ID NO: 724596 - RNA, 23 nt, Human
aggcaggcaguucagcuguuguu

SEQ ID NO: 724597 - RNA, 22 nt, Human
uauuucaacguaugaaaagcug

SEQ ID NO: 724598 - RNA, 22 nt, Human
gauuucuugagcaaguugcuua

SEQ ID NO: 724599 - RNA, 22 nt, Human
gucacaaauccccucagcaacu

SEQ ID NO: 724600 - RNA, 22 nt, Human
uguguacaaacuaacaacauau

SEQ ID NO: 724601 - RNA, 22 nt, Human
ggcgguggcgugaagguggcug

SEQ ID NO: 724602 - RNA, 22 nt, Human
agcaauaaccacucuaauuuau

SEQ ID NO: 724603 - RNA, 22 nt, Human
uguccagguuagcuucaaacac

SEQ ID NO: 724604 - RNA, 22 nt, Human
guugcagauguggaacucgugc

SEQ ID NO: 724605 - RNA, 23 nt, Human
ugucuggagccugagcaggugcu

SEQ ID NO: 724606 - RNA, 22 nt, Human
agcgugaauuaguugguacaca

SEQ ID NO: 724607 - RNA, 22 nt, Human
uauuuaugucucugcagagaau

SEQ ID NO: 724608 - RNA, 17 nt, Human
ugacuuuauuugcuugg

SEQ ID NO: 724609 - RNA, 20 nt, Human
ugcuggaggcgccggcgcuc

SEQ ID NO: 724610 - RNA, 22 nt, Human
ucaaauaaugccauucaucauc

SEQ ID NO: 724611 - RNA, 19 nt, Human
ucacuugaaguucagaaau

SEQ ID NO: 724612 - RNA, 22 nt, Human
guauuaggagguggagccuuug

SEQ ID NO: 724613 - RNA, 22 nt, Human
acaugaauauaugaaguucaac

SEQ ID NO: 724614 - RNA, 18 nt, Human
cccacggugcuguagggc

SEQ ID NO: 724615 - RNA, 22 nt, Human
ugggcuccucgucacucgcugu

SEQ ID NO: 724616 - RNA, 22 nt, Human
auauuuacugcuguggugaagg

SEQ ID NO: 724617 - RNA, 22 nt, Human
ucccugggguaacauuagaggg

SEQ ID NO: 724618 - RNA, 20 nt, Human
gcugacuguuuggguggcgg

SEQ ID NO: 724619 - RNA, 22 nt, Human
ugauuagacaaaggaaucaugc

SEQ ID NO: 724620 - RNA, 19 nt, Human
ccacauggcuggaugacag

SEQ ID NO: 724621 - RNA, 17 nt, Human
aucugcauuucuaauga

SEQ ID NO: 724622 - RNA, 22 nt, Human
ccagccccgggccuuaccgugc

SEQ ID NO: 724623 - RNA, 22 nt, Human
aguguccuuaguuagcuuuggg

SEQ ID NO: 724624 - RNA, 22 nt, Human
ugacagugucaguuuccuaaua

SEQ ID NO: 724625 - RNA, 22 nt, Human
augaguucauugcauuugacag

SEQ ID NO: 724626 - RNA, 22 nt, Human
ccugugucuuccccacuggugu

SEQ ID NO: 724627 - RNA, 22 nt, Human
agggccaggcucccaugucagg

SEQ ID NO: 724628 - RNA, 18 nt, Human
acaaaggaucaugaggga

SEQ ID NO: 724629 - RNA, 22 nt, Human
acacugaauaauugagaguuga

SEQ ID NO: 724630 - RNA, 22 nt, Human
uccagcagguccgagacaaguu

SEQ ID NO: 724631 - RNA, 22 nt, Human
uucacaauaauguccauccucu

SEQ ID NO: 724632 - RNA, 22 nt, Human
uccagaaaauuuuacagugccu

SEQ ID NO: 724633 - RNA, 22 nt, Human
ugguccugcuacaggggauuag

SEQ ID NO: 724634 - RNA, 22 nt, Human
aaauuauucucauguguuucuu

SEQ ID NO: 724635 - RNA, 19 nt, Human
accaggccucagaggcccu

SEQ ID NO: 724636 - RNA, 18 nt, Human
cuagaugagcuuggcaag

SEQ ID NO: 724637 - RNA, 22 nt, Human
ugugaggaugugagcgugaacc

SEQ ID NO: 724638 - RNA, 22 nt, Human
ugagauguaagguaugcuuacu

SEQ ID NO: 724639 - RNA, 22 nt, Human
uuugcacacacaauaacaaaug

SEQ ID NO: 724640 - RNA, 22 nt, Human
uuguuuccauaauuaaguguga

SEQ ID NO: 724641 - RNA, 22 nt, Human
caggcugggaacgccacccgcu

SEQ ID NO: 724642 - RNA, 23 nt, Human
aucagucuugguagcugugccca

SEQ ID NO: 724643 - RNA, 22 nt, Human
uaacacuuuggauuaaaauucu

SEQ ID NO: 724644 - RNA, 22 nt, Human
uuugcugugaauccauuacugu

SEQ ID NO: 724645 - RNA, 22 nt, Human
gcaaaaacugcaauuacuuuug

SEQ ID NO: 724646 - RNA, 22 nt, Human
gaucugaagagcaaugaaauau

SEQ ID NO: 724647 - RNA, 20 nt, Human
cuuuggcaaugagaacaggg

SEQ ID NO: 724648 - RNA, 19 nt, Human
cacacccaugcuugccaag

SEQ ID NO: 724649 - RNA, 22 nt, Human
uaagagcucccuucuccuugca

SEQ ID NO: 724650 - RNA, 22 nt, Human
gaaguauaggagacaaacaaga

SEQ ID NO: 724651 - RNA, 22 nt, Human
ccucugacuccacacuugaacu

SEQ ID NO: 724652 - RNA, 22 nt, Human
ggcacugagcgggcucugagcg

SEQ ID NO: 724653 - RNA, 22 nt, Human
gucugcuuuuguuuuacuggua

SEQ ID NO: 724654 - RNA, 22 nt, Human
cuucucuggcauagcaagcagg

SEQ ID NO: 724655 - RNA, 18 nt, Human
gucauugcaacauacugu

SEQ ID NO: 724656 - RNA, 22 nt, Human
uggcuggagccccucaagagca

SEQ ID NO: 724657 - RNA, 22 nt, Human
ucugaggcugcaucuaugugac

SEQ ID NO: 724658 - RNA, 22 nt, Human
auuugcuugacuauggcuugca

SEQ ID NO: 724659 - RNA, 22 nt, Human
gcuggccucgcaggcaggaugu

SEQ ID NO: 724660 - RNA, 22 nt, Human
ucagugugaggucuuccacccg

SEQ ID NO: 724661 - RNA, 22 nt, Human
gccucugcugcaagccugguug

SEQ ID NO: 724662 - RNA, 19 nt, Human
acagcagggauuuuuggag

SEQ ID NO: 724663 - RNA, 22 nt, Human
uacauucacaguuguucaucuc

SEQ ID NO: 724664 - RNA, 22 nt, Human
aguggccaauaugucaugcucu

SEQ ID NO: 724665 - RNA, 22 nt, Human
ucaaugcaugugacaaagagua

SEQ ID NO: 724666 - RNA, 22 nt, Human
ucugagcugcagaguggggugg

SEQ ID NO: 724667 - RNA, 22 nt, Human
uuuucaggugcaguaaucauau

SEQ ID NO: 724668 - RNA, 22 nt, Human
aggcuaggguaacagauguggc

SEQ ID NO: 724669 - RNA, 22 nt, Human
aggcccugcaggaagcaggaug

SEQ ID NO: 724670 - RNA, 22 nt, Human
aaguguuuaaauuauuugcagg

SEQ ID NO: 724671 - RNA, 22 nt, Human
augcaacaggucagccaggaag

SEQ ID NO: 724672 - RNA, 22 nt, Human
caggcagccugagggaucuggg

SEQ ID NO: 724673 - RNA, 21 nt, Human
ggcugcagggagcccuggggu

SEQ ID NO: 724674 - RNA, 21 nt, Human
uccucagggccccagagcacu

SEQ ID NO: 724675 - RNA, 22 nt, Human
uugccccuggucagaggaggcu

SEQ ID NO: 724676 - RNA, 22 nt, Human
ggaggccuaagguacaguuugc

SEQ ID NO: 724677 - RNA, 22 nt, Human
agagaaacugauguccuuugaa

SEQ ID NO: 724678 - RNA, 22 nt, Human
cuguuucucccaacgcccuagu

SEQ ID NO: 724679 - RNA, 22 nt, Human
aagccaaguuggaagacugaau

SEQ ID NO: 724680 - RNA, 22 nt, Human
cugugggcucccagcuucucuc

SEQ ID NO: 724681 - RNA, 21 nt, Human
ccucaaagaugaugggguuuc

SEQ ID NO: 724682 - RNA, 22 nt, Human
ucacagggcauuauggcuccag

SEQ ID NO: 724683 - RNA, 22 nt, Human
cugagccaguagucagggacaa

SEQ ID NO: 724684 - RNA, 22 nt, Human
guauuccuaagucaugacaaau

SEQ ID NO: 724685 - RNA, 22 nt, Human
agccauuuuccugaaauauaac

SEQ ID NO: 724686 - RNA, 22 nt, Human
gcuggcuuugucaagggcagca

SEQ ID NO: 724687 - RNA, 22 nt, Human
uguacaagaauaauuuuauaua

SEQ ID NO: 724688 - RNA, 22 nt, Human
ggagccagaggcugcugcugug

SEQ ID NO: 724689 - RNA, 22 nt, Human
gcugcucuacccaugcaucugu

SEQ ID NO: 724690 - RNA, 22 nt, Human
gcucaggaucagccaccucuuu

SEQ ID NO: 724691 - RNA, 22 nt, Human
aggcuguugcaugccacagaua

SEQ ID NO: 724692 - RNA, 22 nt, Human
gcagcagaugugggcccagagc

SEQ ID NO: 724693 - RNA, 22 nt, Human
gucaagcagaagauaauuuaaa

SEQ ID NO: 724694 - RNA, 22 nt, Human
acaagacugugcucuaagagug

SEQ ID NO: 724695 - RNA, 22 nt, Human
agcaggaaggggccuagccugg

SEQ ID NO: 724696 - RNA, 22 nt, Human
acucucucacacacgccuauau

SEQ ID NO: 724697 - RNA, 22 nt, Human
agcaguggugugaggagggcuc

SEQ ID NO: 724698 - RNA, 22 nt, Human
uccccaccuacacacugcuccu

SEQ ID NO: 724699 - RNA, 19 nt, Human
gggcuuuacuccaaguggg

SEQ ID NO: 724700 - RNA, 22 nt, Human
auguuucuacagcguccacuga

SEQ ID NO: 724701 - RNA, 22 nt, Human
aguucucaggucagcugagucu

SEQ ID NO: 724702 - RNA, 20 nt, Human
acacaugcauucaugugggc

SEQ ID NO: 724703 - RNA, 22 nt, Human
aaaaaaucagaucuuugguuaa

SEQ ID NO: 724704 - RNA, 22 nt, Human
aguggaccagaagacugaagcu

SEQ ID NO: 724705 - RNA, 22 nt, Human
uugaaacuuuucuuggagaaac

SEQ ID NO: 724706 - RNA, 22 nt, Human
aaacuucuggcuacaagcaaua

SEQ ID NO: 724707 - RNA, 19 nt, Human
agagaugcuaagagucuuu

SEQ ID NO: 724708 - RNA, 22 nt, Human
gcacuuggaggugcccacacag

SEQ ID NO: 724709 - RNA, 22 nt, Human
uuucucuaaauagggaggcuua

SEQ ID NO: 724710 - RNA, 22 nt, Human
uguguucaugucacuggaaucc

SEQ ID NO: 724711 - RNA, 22 nt, Human
auugaaacaaguugcuuucuau

SEQ ID NO: 724712 - RNA, 22 nt, Human
ugggccagcucccugccccugg

SEQ ID NO: 724713 - RNA, 22 nt, Human
ucaucucuccccagugucuuua

SEQ ID NO: 724714 - RNA, 18 nt, Human
ugagcaggggcugaccuu

SEQ ID NO: 724715 - RNA, 22 nt, Human
ucaguuucuucaucucccuaac

SEQ ID NO: 724716 - RNA, 21 nt, Human
guuugcaugaacaagucagcc

SEQ ID NO: 724717 - RNA, 22 nt, Human
gaacccaggagguugcagugag

SEQ ID NO: 724718 - RNA, 22 nt, Human
aguggcuggacgacaaggguga

SEQ ID NO: 724719 - RNA, 22 nt, Human
uucugcuguugugacguuaguu

SEQ ID NO: 724720 - RNA, 22 nt, Human
ugggcugcuucuauuggugguc

SEQ ID NO: 724721 - RNA, 22 nt, Human
uaagcauggugguaaaagaggu

SEQ ID NO: 724722 - RNA, 22 nt, Human
gguggcagagacauaggacaua

SEQ ID NO: 724723 - RNA, 16 nt, Human
ggggaaggcaagaggg

SEQ ID NO: 724724 - RNA, 22 nt, Human
ccaggacuuauuacaguauaac

SEQ ID NO: 724725 - RNA, 22 nt, Human
ggcuucuuccugugaacauguu

SEQ ID NO: 724726 - RNA, 22 nt, Human
ccaggaggaaagaccagcccau

SEQ ID NO: 724727 - RNA, 22 nt, Human
ccucaggggugcccacagcugc

SEQ ID NO: 724728 - RNA, 22 nt, Human
uccuggccuuauccccaaacug

SEQ ID NO: 724729 - RNA, 22 nt, Human
gcccacuuucugccagcucacc

SEQ ID NO: 724730 - RNA, 22 nt, Human
gcugugugacccuagccaguag

SEQ ID NO: 724731 - RNA, 22 nt, Human
uuccacucuaugauagaagggu

SEQ ID NO: 724732 - RNA, 22 nt, Human
aagugagauuauauguacggga

SEQ ID NO: 724733 - RNA, 22 nt, Human
uuuaauauuucuuuccugaagc

SEQ ID NO: 724734 - RNA, 22 nt, Human
augggcaggccucucauuucug

SEQ ID NO: 724735 - RNA, 22 nt, Human
caggaaugaucugcugagugau

SEQ ID NO: 724736 - RNA, 22 nt, Human
caggaagcugugaaggagacgg

SEQ ID NO: 724737 - RNA, 22 nt, Human
uuccucagccagcacuuagggg

SEQ ID NO: 724738 - RNA, 22 nt, Human
ggagucugauacugaguuccuc

SEQ ID NO: 724739 - RNA, 22 nt, Human
gaagaaacaggggcuuggggag

SEQ ID NO: 724740 - RNA, 22 nt, Human
uuagcuaaacuguaacuagaau

SEQ ID NO: 724741 - RNA, 22 nt, Human
agucucagaguaccugagggac

SEQ ID NO: 724742 - RNA, 23 nt, Human
auuguuuuuggcucucagggaau

SEQ ID NO: 724743 - RNA, 22 nt, Human
acacaaugucaucauaauguca

SEQ ID NO: 724744 - RNA, 22 nt, Human
ucuggcuugagcuucgaccagu

SEQ ID NO: 724745 - RNA, 22 nt, Human
agacagguagcaggacagauau

SEQ ID NO: 724746 - RNA, 22 nt, Human
uacagucaacauugaugaugau

SEQ ID NO: 724747 - RNA, 22 nt, Human
ugugcaaauuaaguagauuuuc

SEQ ID NO: 724748 - RNA, 22 nt, Human
gaggagcaugggaaggcucugg

SEQ ID NO: 724749 - RNA, 22 nt, Human
aaagagcuuuagaaaucucaga

SEQ ID NO: 724750 - RNA, 22 nt, Human
ccaccagcagugugcaaggauu

SEQ ID NO: 724751 - RNA, 22 nt, Human
ggcaaaaaguucccaucagugu

SEQ ID NO: 724752 - RNA, 22 nt, Human
ggcccagccucagacaugcccu

SEQ ID NO: 724753 - RNA, 22 nt, Human
ccuccuggugacaaggcaaagc

SEQ ID NO: 724754 - RNA, 22 nt, Human
cucuguguauccaaguucaggu

SEQ ID NO: 724755 - RNA, 22 nt, Human
gcuuuacacagcugguucuugu

SEQ ID NO: 724756 - RNA, 22 nt, Human
uauguacuacacuagaacauuu

SEQ ID NO: 724757 - RNA, 22 nt, Human
caaaccugcugcuauuuuaucc

SEQ ID NO: 724758 - RNA, 22 nt, Human
agcagguuguuuuguggccagg

SEQ ID NO: 724759 - RNA, 22 nt, Human
acugcaucugaaacauggguca

SEQ ID NO: 724760 - RNA, 22 nt, Human
gcaaauggagugaagagcugga

SEQ ID NO: 724761 - RNA, 22 nt, Human
gugaacugcugaguuuuaucau

SEQ ID NO: 724762 - RNA, 22 nt, Human
gcuauuuuugagccauuuauaa

SEQ ID NO: 724763 - RNA, 22 nt, Human
uauagcacacaguuuauaaaag

SEQ ID NO: 724764 - RNA, 22 nt, Human
gcugcuggagagcgagacuguu

SEQ ID NO: 724765 - RNA, 22 nt, Human
guacaagaggagaaaauggagu

SEQ ID NO: 724766 - RNA, 17 nt, Human
auacaguuuauuuuaca

SEQ ID NO: 724767 - RNA, 22 nt, Human
uuacagacaaacuguguuaagu

SEQ ID NO: 724768 - RNA, 22 nt, Human
ccagagaggggaagggcuugcc

SEQ ID NO: 724769 - RNA, 22 nt, Human
cuuuggcagccucagcugcagg

SEQ ID NO: 724770 - RNA, 22 nt, Human
ucuuucuuuaucaccugauaug

SEQ ID NO: 724771 - RNA, 23 nt, Human
uggauaaaauacuuacauucaac

SEQ ID NO: 724772 - RNA, 22 nt, Human
cagggcagagccaggauuucaa

SEQ ID NO: 724773 - RNA, 22 nt, Human
ccagcuuuccugcgaguugauu

SEQ ID NO: 724774 - RNA, 19 nt, Human
acauguuuugcagaacagc

SEQ ID NO: 724775 - RNA, 22 nt, Human
aggugccaauuuucagugaaca

SEQ ID NO: 724776 - RNA, 22 nt, Human
ugcacuauuucgccaugguugu

SEQ ID NO: 724777 - RNA, 22 nt, Human
cucagaauuacaucccauuuua

SEQ ID NO: 724778 - RNA, 22 nt, Human
cagcagcucaggcugcuuccca

SEQ ID NO: 724779 - RNA, 22 nt, Human
agugcuccuuucauugcugccc

SEQ ID NO: 724780 - RNA, 22 nt, Human
aucuaacagcaacaccagaaua

SEQ ID NO: 724781 - RNA, 22 nt, Human
ucaggacagguucgggugggua

SEQ ID NO: 724782 - RNA, 22 nt, Human
ugugagagcagaagacacauag

SEQ ID NO: 724783 - RNA, 22 nt, Human
uccagaccaaggaaggcugggc

SEQ ID NO: 724784 - RNA, 22 nt, Human
ccugucugaggaggugcucuuu

SEQ ID NO: 724785 - RNA, 20 nt, Human
ucccuggggcccuacuuccu

SEQ ID NO: 724786 - RNA, 19 nt, Human
aggagaaguagcagaaauu

SEQ ID NO: 724787 - RNA, 22 nt, Human
uccucugccccagaugaaauuu

SEQ ID NO: 724788 - RNA, 22 nt, Human
cuugccagcacuuggccagcug

SEQ ID NO: 724789 - RNA, 22 nt, Human
aucuggaagccagauacucagu

SEQ ID NO: 724790 - RNA, 22 nt, Human
cacugaaggacaguaggaaggg

SEQ ID NO: 724791 - RNA, 22 nt, Human
agcuguuccaggccucauugcu

SEQ ID NO: 724792 - RNA, 22 nt, Human
cuggcaggucucgcugacgugu

SEQ ID NO: 724793 - RNA, 22 nt, Human
accaucuuaguggccagcucuc

SEQ ID NO: 724794 - RNA, 22 nt, Human
caagucacuuaugugcagauau

SEQ ID NO: 724795 - RNA, 22 nt, Human
ugcauacauaaagugcuaucau

SEQ ID NO: 724796 - RNA, 22 nt, Human
cugcccugcccaggccuugggc

SEQ ID NO: 724797 - RNA, 22 nt, Human
uggcaguguuucuaaggggcuc

SEQ ID NO: 724798 - RNA, 22 nt, Human
gcugccaggggcagcugucuca

SEQ ID NO: 724799 - RNA, 22 nt, Human
uacugcauguguuugaugaugg

SEQ ID NO: 724800 - RNA, 22 nt, Human
gaaguuauuuuaccuguuaaag

SEQ ID NO: 724801 - RNA, 22 nt, Human
agcuguguuauuagaaaccugc

SEQ ID NO: 724802 - RNA, 20 nt, Human
uacugcaggaaucagcuagc

SEQ ID NO: 724803 - RNA, 22 nt, Human
agaaauguaauugcaacugucu

SEQ ID NO: 724804 - RNA, 22 nt, Human
augcauauguacccauguucug

SEQ ID NO: 724805 - RNA, 22 nt, Human
uuauccaagcagaagcugcaca

SEQ ID NO: 724806 - RNA, 22 nt, Human
uaacagaauuugcuaaacuccg

SEQ ID NO: 724807 - RNA, 22 nt, Human
cuuuagaauuugauauaaucaa

SEQ ID NO: 724808 - RNA, 22 nt, Human
aaggccagauucacuuuacaau

SEQ ID NO: 724809 - RNA, 22 nt, Human
aucuugaaugaaugacucuuua

SEQ ID NO: 724810 - RNA, 22 nt, Human
ugcugggcuggagcugccaggg

SEQ ID NO: 724811 - RNA, 22 nt, Human
aucuuugcuauuguaaaucacg

SEQ ID NO: 724812 - RNA, 22 nt, Human
gggccccuuguaucucuggcuc

SEQ ID NO: 724813 - RNA, 22 nt, Human
gcugagaaucaagauggagagg

SEQ ID NO: 724814 - RNA, 22 nt, Human
ucuaugucagcaucuuucuacc

SEQ ID NO: 724815 - RNA, 22 nt, Human
ugaauuuaucaaagauucuuaa

SEQ ID NO: 724816 - RNA, 22 nt, Human
caggcugcggccgugugagcau

SEQ ID NO: 724817 - RNA, 22 nt, Human
cacccccaggagcuccagggac

SEQ ID NO: 724818 - RNA, 22 nt, Human
cuggccuaaaauugcuucugca

SEQ ID NO: 724819 - RNA, 22 nt, Human
aaaucucaaaggcuuagcaucu

SEQ ID NO: 724820 - RNA, 22 nt, Human
cagcuuugccaaguaaggucuu

SEQ ID NO: 724821 - RNA, 22 nt, Human
gggcuucugcucuuuuggugcu

SEQ ID NO: 724822 - RNA, 22 nt, Human
uguggggaagaguaugacuugg

SEQ ID NO: 724823 - RNA, 22 nt, Human
cauaauccuguccuggauucuu

SEQ ID NO: 724824 - RNA, 18 nt, Human
ucucuugcaucuucugua

SEQ ID NO: 724825 - RNA, 22 nt, Human
cccaggcagccugcagggaagg

SEQ ID NO: 724826 - RNA, 22 nt, Human
ugcauuuuuaacaaggcuaauu

SEQ ID NO: 724827 - RNA, 22 nt, Human
ucucaucuucauaucugaaaga

SEQ ID NO: 724828 - RNA, 22 nt, Human
ugagcugggaguggugaugagg

SEQ ID NO: 724829 - RNA, 22 nt, Human
agggcagagagaugaaugggau

SEQ ID NO: 724830 - RNA, 22 nt, Human
gaggcucccaaggggcuaggcc

SEQ ID NO: 724831 - RNA, 22 nt, Human
gcaguguguuuggauaacacac

SEQ ID NO: 724832 - RNA, 22 nt, Human
cugugcagugugggguaggccu

SEQ ID NO: 724833 - RNA, 22 nt, Human
uguuaggguccugugcaggggc

SEQ ID NO: 724834 - RNA, 22 nt, Human
aagaguuuccaguuguggcuca

SEQ ID NO: 724835 - RNA, 22 nt, Human
auucuuuuaaauggcaguagua

SEQ ID NO: 724836 - RNA, 22 nt, Human
agauauaguuguugagaagaac

SEQ ID NO: 724837 - RNA, 22 nt, Human
agggggcucagugacugaagug

SEQ ID NO: 724838 - RNA, 22 nt, Human
uggcaaaggaaccuauuuuaaa

SEQ ID NO: 724839 - RNA, 22 nt, Human
ugccuagggccuaaccagagcc

SEQ ID NO: 724840 - RNA, 22 nt, Human
uauucauuaugaccaaaucuag

SEQ ID NO: 724841 - RNA, 22 nt, Human
cagcuaauccucucuauccaag

SEQ ID NO: 724842 - RNA, 22 nt, Human
accuggacaccugcugucaucu

SEQ ID NO: 724843 - RNA, 22 nt, Human
ggaggcugcugccucacguggg

SEQ ID NO: 724844 - RNA, 22 nt, Human
ggccaggcacugugugagauau

SEQ ID NO: 724845 - RNA, 22 nt, Human
uuuccuaacacaaugcaugaga

SEQ ID NO: 724846 - RNA, 23 nt, Human
cuggcuccgaagacuccaggauc

SEQ ID NO: 724847 - RNA, 22 nt, Human
aucauucuagcuguuguguuga

SEQ ID NO: 724848 - RNA, 22 nt, Human
gguguuggaacauggugagauu

SEQ ID NO: 724849 - RNA, 20 nt, Human
gaguauauuucuuccuuugc

SEQ ID NO: 724850 - RNA, 22 nt, Human
cuggaggacagaggccaugucu

SEQ ID NO: 724851 - RNA, 22 nt, Human
ccucuggcuuacuguuggguuu

SEQ ID NO: 724852 - RNA, 22 nt, Human
uuaggaagaaggaggcaguauu

SEQ ID NO: 724853 - RNA, 22 nt, Human
acugaucaaggguuuaauuuua

SEQ ID NO: 724854 - RNA, 19 nt, Human
uggcccagaugguccuggg

SEQ ID NO: 724855 - RNA, 22 nt, Human
gaauuuaaggaccaagcauuuu

SEQ ID NO: 724856 - RNA, 22 nt, Human
gcccagcugcacccuggugggu

SEQ ID NO: 724857 - RNA, 22 nt, Human
ugaaucaauaguugcaaguauu

SEQ ID NO: 724858 - RNA, 22 nt, Human
caggugggagccacagcguaca

SEQ ID NO: 724859 - RNA, 22 nt, Human
ggcaguguucugguugucagga

SEQ ID NO: 724860 - RNA, 22 nt, Human
aacuauacauauuuacauagac

SEQ ID NO: 724861 - RNA, 22 nt, Human
caucucaguguacagggagucu

SEQ ID NO: 724862 - RNA, 22 nt, Human
uuagggagcucaguccucagau

SEQ ID NO: 724863 - RNA, 22 nt, Human
ggccuugauccuccagagcacu

SEQ ID NO: 724864 - RNA, 21 nt, Human
aaauuucugcaagccucaacu

SEQ ID NO: 724865 - RNA, 22 nt, Human
ugaggauggcagugugcucagc

SEQ ID NO: 724866 - RNA, 22 nt, Human
uguucaaaucuuuugcuuauuu

SEQ ID NO: 724867 - RNA, 22 nt, Human
auggggcugggauucuccucgg

SEQ ID NO: 724868 - RNA, 22 nt, Human
caggaaugcauucuagaauggc

SEQ ID NO: 724869 - RNA, 19 nt, Human
ugcucaggccaaggagccc

SEQ ID NO: 724870 - RNA, 22 nt, Human
agcuggcaaguugaagguggcu

SEQ ID NO: 724871 - RNA, 22 nt, Human
uccagggaagagcagaggcuac

SEQ ID NO: 724872 - RNA, 22 nt, Human
ugucugguggguugacaggcag

SEQ ID NO: 724873 - RNA, 22 nt, Human
gccagccccuuagggcucuccc

SEQ ID NO: 724874 - RNA, 22 nt, Human
cugggcagccucacacaauguu

SEQ ID NO: 724875 - RNA, 21 nt, Human
ggagaaggacaauguugagua

SEQ ID NO: 724876 - RNA, 22 nt, Human
cagggugggcacccagccucca

SEQ ID NO: 724877 - RNA, 22 nt, Human
agagcuguguccugugcacuag

SEQ ID NO: 724878 - RNA, 22 nt, Human
guaaaacugcagaacuuggagg

SEQ ID NO: 724879 - RNA, 21 nt, Human
uucucuggcuucuguagcugg

SEQ ID NO: 724880 - RNA, 22 nt, Human
acccugagucacugucugucug

SEQ ID NO: 724881 - RNA, 22 nt, Human
gcgugugugauaugccucugca

SEQ ID NO: 724882 - RNA, 22 nt, Human
augacaccauauuagccuagag

SEQ ID NO: 724883 - RNA, 22 nt, Human
accagcucuucugcucuaguug

SEQ ID NO: 724884 - RNA, 22 nt, Human
uuugaacuguucuaggauuuaa

SEQ ID NO: 724885 - RNA, 22 nt, Human
uucacauuacaaggccauauuu

SEQ ID NO: 724886 - RNA, 22 nt, Human
ugcuguauauauuuugaaguga

SEQ ID NO: 724887 - RNA, 22 nt, Human
gucaggaugacaagugcuuuca

SEQ ID NO: 724888 - RNA, 22 nt, Human
aaucuggcauguaagcuuagag

SEQ ID NO: 724889 - RNA, 22 nt, Human
ugucuccuacugccuguggauc

SEQ ID NO: 724890 - RNA, 22 nt, Human
cccacugaggguuaaugccugc

SEQ ID NO: 724891 - RNA, 22 nt, Human
uucagugacuuaccuggagcca

SEQ ID NO: 724892 - RNA, 20 nt, Human
guugcuuuagucugguuugg

SEQ ID NO: 724893 - RNA, 22 nt, Human
ucaucagcucaucugcuccuag

SEQ ID NO: 724894 - RNA, 22 nt, Human
aaaauccugcugacucgagaug

SEQ ID NO: 724895 - RNA, 22 nt, Human
gccacacuuauucucaugcaca

SEQ ID NO: 724896 - RNA, 22 nt, Human
ccagaagcuucuacacaggaga

SEQ ID NO: 724897 - RNA, 22 nt, Human
gacccggcuccaggcccagcag

SEQ ID NO: 724898 - RNA, 21 nt, Human
gaggggcagcucuuagcauua

SEQ ID NO: 724899 - RNA, 22 nt, Human
ucaaugcacacaggacuuggug

SEQ ID NO: 724900 - RNA, 19 nt, Human
uucaggauugacccuacug

SEQ ID NO: 724901 - RNA, 22 nt, Human
gcucagugugcacgaguacucu

SEQ ID NO: 724902 - RNA, 18 nt, Human
auccucuagcuucucaga

SEQ ID NO: 724903 - RNA, 22 nt, Human
uagauaauuuggcaucauauug

SEQ ID NO: 724904 - RNA, 22 nt, Human
gggagggaggugcugguucacg

SEQ ID NO: 724905 - RNA, 22 nt, Human
uuccagaaaaaaauguauaucu

SEQ ID NO: 724906 - RNA, 22 nt, Human
gaggaugguaugaggcaagcaa

SEQ ID NO: 724907 - RNA, 22 nt, Human
aaaaggaggacaugguuacaga

SEQ ID NO: 724908 - RNA, 22 nt, Human
uuagaaaaaacgucuucuagug

SEQ ID NO: 724909 - RNA, 22 nt, Human
gcagggggauggaguugaaaug

SEQ ID NO: 724910 - RNA, 22 nt, Human
acaguguucacuuaacaaugga

SEQ ID NO: 724911 - RNA, 22 nt, Human
aagaaauuaaugugccauuacu

SEQ ID NO: 724912 - RNA, 22 nt, Human
gcugaggugaggcuggaaagga

SEQ ID NO: 724913 - RNA, 22 nt, Human
gaggagcugaggcugaggccuc

SEQ ID NO: 724914 - RNA, 22 nt, Human
uggcagcugcaggccuccugag

SEQ ID NO: 724915 - RNA, 22 nt, Human
uagaauuaugccuugcugucca

SEQ ID NO: 724916 - RNA, 21 nt, Human
ccuuuagauuucuaugcaguu

SEQ ID NO: 724917 - RNA, 22 nt, Human
auuauacauuuuguguagagau

SEQ ID NO: 724918 - RNA, 18 nt, Human
ugcauauacugccuaucu

SEQ ID NO: 724919 - RNA, 22 nt, Human
gccuucaguaacugagacggaa

SEQ ID NO: 724920 - RNA, 19 nt, Human
gcaccccaucuuccuccug

SEQ ID NO: 724921 - RNA, 22 nt, Human
ugcauacacaugugcacauacg

SEQ ID NO: 724922 - RNA, 22 nt, Human
gugacugugaucuuauuugcaa

SEQ ID NO: 724923 - RNA, 22 nt, Human
gccugggugucgaucacuagug

SEQ ID NO: 724924 - RNA, 22 nt, Human
cuaggcuggagugcaguggcau

SEQ ID NO: 724925 - RNA, 22 nt, Human
uauggcuuucaaaggaacucgg

SEQ ID NO: 724926 - RNA, 22 nt, Human
ccccucugcaaauagccaggcu

SEQ ID NO: 724927 - RNA, 20 nt, Human
uucugagauuagguuacaaa

SEQ ID NO: 724928 - RNA, 22 nt, Human
acaaaauagaguucuccccugg

SEQ ID NO: 724929 - RNA, 22 nt, Human
cucaggacuuucaaauagaaau

SEQ ID NO: 724930 - RNA, 22 nt, Human
aauggcagagacuguugaaaua

SEQ ID NO: 724931 - RNA, 22 nt, Human
gcugccuggauuugcaauccuc

SEQ ID NO: 724932 - RNA, 22 nt, Human
uuucuggaacaguaauugaaga

SEQ ID NO: 724933 - RNA, 22 nt, Human
gucugggcagcagcauuucuua

SEQ ID NO: 724934 - RNA, 22 nt, Human
gaaggcacccggcgugcggcgg

SEQ ID NO: 724935 - RNA, 22 nt, Human
ugcagcugggucugcccuggcu

SEQ ID NO: 724936 - RNA, 22 nt, Human
cucugcuuggaacagggguuug

SEQ ID NO: 724937 - RNA, 22 nt, Human
gaaaggagaggguuaaggagcu

SEQ ID NO: 724938 - RNA, 22 nt, Human
guccuugcuugagacaggcagu

SEQ ID NO: 724939 - RNA, 22 nt, Human
gguggcugaagcagucuucggg

SEQ ID NO: 724940 - RNA, 22 nt, Human
augcuuuaguucaaaggacuua

SEQ ID NO: 724941 - RNA, 22 nt, Human
ucuguccuccggagcucccagu

SEQ ID NO: 724942 - RNA, 22 nt, Human
uugcuuuaacuaguaaaugggg

SEQ ID NO: 724943 - RNA, 22 nt, Human
cuucugugguaaacuuuguugu

SEQ ID NO: 724944 - RNA, 22 nt, Human
agacagcuguuccuucauguuu

SEQ ID NO: 724945 - RNA, 22 nt, Human
gagucagaugaagauaaaaggg

SEQ ID NO: 724946 - RNA, 22 nt, Human
cagcucuggggcagagugacua

SEQ ID NO: 724947 - RNA, 22 nt, Human
uccuguuuaucugugugacucg

SEQ ID NO: 724948 - RNA, 22 nt, Human
ucuucagcuguagucauuguuc

SEQ ID NO: 724949 - RNA, 22 nt, Human
gaauaacauuggaacccugaag

SEQ ID NO: 724950 - RNA, 22 nt, Human
uuuccuuucuagaagccuaaau

SEQ ID NO: 724951 - RNA, 22 nt, Human
auaauaacaccugaauaggaaa

SEQ ID NO: 724952 - RNA, 22 nt, Human
uuugaaacccgucacuuugagu

SEQ ID NO: 724953 - RNA, 22 nt, Human
aaaugcacugaauauuccaaau

SEQ ID NO: 724954 - RNA, 22 nt, Human
ccucugugccucguguccucug

SEQ ID NO: 724955 - RNA, 22 nt, Human
cagcaggugucuagcaaggguc

SEQ ID NO: 724956 - RNA, 20 nt, Human
ccugucuccucuuaccuggc

SEQ ID NO: 724957 - RNA, 22 nt, Human
ggugggagggcugcguuccucu

SEQ ID NO: 724958 - RNA, 21 nt, Human
accuuuggguguuuauaauag

SEQ ID NO: 724959 - RNA, 22 nt, Human
uuccugagggccccagaggagg

SEQ ID NO: 724960 - RNA, 22 nt, Human
gcagggcaugggcccugucugc

SEQ ID NO: 724961 - RNA, 22 nt, Human
gaacuaaauuugacagacaaca

SEQ ID NO: 724962 - RNA, 18 nt, Human
agggccagcugugaguag

SEQ ID NO: 724963 - RNA, 22 nt, Human
cacugcuugcaguaugagugga

SEQ ID NO: 724964 - RNA, 22 nt, Human
ucugacuugcaucuuaaaggag

SEQ ID NO: 724965 - RNA, 22 nt, Human
aguguuccacacaucuggggaa

SEQ ID NO: 724966 - RNA, 22 nt, Human
acaaaagaauaagaugagucau

SEQ ID NO: 724967 - RNA, 22 nt, Human
cagaauguuaccaguuagucug

SEQ ID NO: 724968 - RNA, 21 nt, Human
aggcucagagaucaaacagua

SEQ ID NO: 724969 - RNA, 22 nt, Human
uuggcagaaugggcagcuugag

SEQ ID NO: 724970 - RNA, 22 nt, Human
auguagaguagaauaguacaac

SEQ ID NO: 724971 - RNA, 22 nt, Human
aagagucuauuggaacuagaca

SEQ ID NO: 724972 - RNA, 22 nt, Human
caguggccucuggcuuugcugu

SEQ ID NO: 724973 - RNA, 22 nt, Human
ucuauuuguucucaggaucauc

SEQ ID NO: 724974 - RNA, 19 nt, Human
ccugccugagcugucccuc

SEQ ID NO: 724975 - RNA, 22 nt, Human
caucuucauuuuguccaguacu

SEQ ID NO: 724976 - RNA, 22 nt, Human
uuucuuuccaugagccuaugua

SEQ ID NO: 724977 - RNA, 22 nt, Human
ucucagugcagcaaggaauuua

SEQ ID NO: 724978 - RNA, 22 nt, Human
auuuagugaccugaacugaaac

SEQ ID NO: 724979 - RNA, 22 nt, Human
uaccucaaguuccaggaaagcg

SEQ ID NO: 724980 - RNA, 22 nt, Human
uuacaaugcacucaccuuuaga

SEQ ID NO: 724981 - RNA, 22 nt, Human
uauauucugauuccaucugugu

SEQ ID NO: 724982 - RNA, 22 nt, Human
gagacaggccaggugguacuua

SEQ ID NO: 724983 - RNA, 22 nt, Human
caggccggggcggcgccaucuu

SEQ ID NO: 724984 - RNA, 22 nt, Human
agggccucgggcucaguggguc

SEQ ID NO: 724985 - RNA, 22 nt, Human
agacaucagcuugugugcaggg

SEQ ID NO: 724986 - RNA, 22 nt, Human
uguuuacuucaucgaguacuuc

SEQ ID NO: 724987 - RNA, 22 nt, Human
acauguguggacaugaaucuac

SEQ ID NO: 724988 - RNA, 22 nt, Human
ugcuucuggaaacaguggcugu

SEQ ID NO: 724989 - RNA, 22 nt, Human
acuuuagagaaauguagaagua

SEQ ID NO: 724990 - RNA, 22 nt, Human
caaauagauuguucaauccuga

SEQ ID NO: 724991 - RNA, 22 nt, Human
agcacacaggacuugauucaug

SEQ ID NO: 724992 - RNA, 22 nt, Human
gcauuucagagaaaaucugcuu

SEQ ID NO: 724993 - RNA, 22 nt, Human
ucauuuguugaacuuuagugcg

SEQ ID NO: 724994 - RNA, 22 nt, Human
gacugagguauuaagauggcuu

SEQ ID NO: 724995 - RNA, 22 nt, Human
ugaggcaggaauggggaaaagu

SEQ ID NO: 724996 - RNA, 22 nt, Human
ggcaagagugaggagugucucu

SEQ ID NO: 724997 - RNA, 22 nt, Human
uauucucauuagucuguauucc

SEQ ID NO: 724998 - RNA, 22 nt, Human
uacaugcaugauacaaaguugc

SEQ ID NO: 724999 - RNA, 22 nt, Human
uugagaaacaucuaaucuuugu

SEQ ID NO: 725000 - RNA, 22 nt, Human
cauguguguccaugugacuaag

SEQ ID NO: 725001 - RNA, 22 nt, Human
agcagggcugcagugugucuuu

SEQ ID NO: 725002 - RNA, 22 nt, Human
ucucaguguuguucugcagaug

SEQ ID NO: 725003 - RNA, 22 nt, Human
gcuggcugccuuacuuugugga

SEQ ID NO: 725004 - RNA, 22 nt, Human
auguacagccacuucacaguua

SEQ ID NO: 725005 - RNA, 22 nt, Human
agguucagucuuuggaccccuc

SEQ ID NO: 725006 - RNA, 22 nt, Human
uucaugaauauauugaauuagc

SEQ ID NO: 725007 - RNA, 22 nt, Human
ucaugcuuauugcauauuugga

SEQ ID NO: 725008 - RNA, 22 nt, Human
aggcaguguucuucuaagggca

SEQ ID NO: 725009 - RNA, 22 nt, Human
aaacucuuuccacgauuacuuu

SEQ ID NO: 725010 - RNA, 22 nt, Human
agagaggcugggcguagggcuu

SEQ ID NO: 725011 - RNA, 22 nt, Human
uccaugagaacccuuggagaua

SEQ ID NO: 725012 - RNA, 22 nt, Human
aaagccuugggauuugugauca

SEQ ID NO: 725013 - RNA, 22 nt, Human
gugcuuuaauaagauuucacuu

SEQ ID NO: 725014 - RNA, 22 nt, Human
gggccagguggaccccagccuc

SEQ ID NO: 725015 - RNA, 22 nt, Human
gcucugacuggugggccacagu

SEQ ID NO: 725016 - RNA, 22 nt, Human
aaaauagcuauggaaugucacu

SEQ ID NO: 725017 - RNA, 22 nt, Human
acagauguugcuugucauucuc

SEQ ID NO: 725018 - RNA, 19 nt, Human
ucagggaaguucaaagcuc

SEQ ID NO: 725019 - RNA, 22 nt, Human
cgucacuggcgugaagugagga

SEQ ID NO: 725020 - RNA, 23 nt, Human
agugccagggagaucaggacgga

SEQ ID NO: 725021 - RNA, 22 nt, Human
uagaaaucauuuagaaguauug

SEQ ID NO: 725022 - RNA, 22 nt, Human
auggcaguguuucaguuuuugg

SEQ ID NO: 725023 - RNA, 22 nt, Human
ucugagguugaacuuugcaaag

SEQ ID NO: 725024 - RNA, 19 nt, Human
uucuugaacauguuucuca

SEQ ID NO: 725025 - RNA, 22 nt, Human
guuuuccuguugaguaguauuc

SEQ ID NO: 725026 - RNA, 22 nt, Human
ugccagcaagaauagacaguaa

SEQ ID NO: 725027 - RNA, 17 nt, Human
auuuccucagggcugag

SEQ ID NO: 725028 - RNA, 22 nt, Human
gcugcuuccuagaaggcccagu

SEQ ID NO: 725029 - RNA, 22 nt, Human
gugugccuguaucaugguaacc

SEQ ID NO: 725030 - RNA, 22 nt, Human
gugguaccaguaggucagccau

SEQ ID NO: 725031 - RNA, 22 nt, Human
agacccaggauuggggcugccg

SEQ ID NO: 725032 - RNA, 22 nt, Human
gaauuggggguuuugcaaggca

SEQ ID NO: 725033 - RNA, 22 nt, Human
agacaauggaccaagcaccuuc

SEQ ID NO: 725034 - RNA, 20 nt, Human
aaggaauauuuguaucuggg

SEQ ID NO: 725035 - RNA, 22 nt, Human
gugucacaagagcccaggaaac

SEQ ID NO: 725036 - RNA, 22 nt, Human
augggaguuuucucugaugcuc

SEQ ID NO: 725037 - RNA, 22 nt, Human
acacuccagggagggagggaau

SEQ ID NO: 725038 - RNA, 22 nt, Human
gacacagacaguuagagguaau

SEQ ID NO: 725039 - RNA, 22 nt, Human
cugagguuuacaagcuauugcu

SEQ ID NO: 725040 - RNA, 22 nt, Human
ggcugcugguagggguaggaag

SEQ ID NO: 725041 - RNA, 22 nt, Human
guuccaggcaguggcaacagcu

SEQ ID NO: 725042 - RNA, 23 nt, Human
uggccagguagaggagguaguga

SEQ ID NO: 725043 - RNA, 22 nt, Human
gugcucuaugaggauauagggu

SEQ ID NO: 725044 - RNA, 22 nt, Human
cuggcucuucagugcuugguuc

SEQ ID NO: 725045 - RNA, 22 nt, Human
cagcagccagacaagauacauc

SEQ ID NO: 725046 - RNA, 23 nt, Human
cugacucaucccaccaccuccuc

SEQ ID NO: 725047 - RNA, 22 nt, Human
uugcaaaaacugcaauuacuuu

SEQ ID NO: 725048 - RNA, 22 nt, Human
gccugucaauuuuguguacaau

SEQ ID NO: 725049 - RNA, 22 nt, Human
gcuucauuaauagaauuaguau

SEQ ID NO: 725050 - RNA, 22 nt, Human
gggcacuggcagucggggacgc

SEQ ID NO: 725051 - RNA, 22 nt, Human
cccuggaggaccccaauguggc

SEQ ID NO: 725052 - RNA, 22 nt, Human
cacugaaaggcaaugcugacag

SEQ ID NO: 725053 - RNA, 22 nt, Human
cagcugagaaauggggaaaggg

SEQ ID NO: 725054 - RNA, 22 nt, Human
gcagcagugugggcugaaccua

SEQ ID NO: 725055 - RNA, 23 nt, Human
gcagagcugcccuauugccuugg

SEQ ID NO: 725056 - RNA, 22 nt, Human
gcacaggcuguuggccuucaga

SEQ ID NO: 725057 - RNA, 22 nt, Human
ucuuaaaccacaaaauucagag

SEQ ID NO: 725058 - RNA, 22 nt, Human
ggggccagcuucgcgugcucuu

SEQ ID NO: 725059 - RNA, 22 nt, Human
uggaccugagccuggcccugcc

SEQ ID NO: 725060 - RNA, 22 nt, Human
guggccucuguuggcuccuagg

SEQ ID NO: 725061 - RNA, 22 nt, Human
ggaggccaauuuucuaacugca

SEQ ID NO: 725062 - RNA, 22 nt, Human
ucagcaggcugucagcaggggc

SEQ ID NO: 725063 - RNA, 23 nt, Human
gccagaggaacgcagagcuuucu

SEQ ID NO: 725064 - RNA, 22 nt, Human
uauuaaauauaucuguuaguug

SEQ ID NO: 725065 - RNA, 22 nt, Human
ucacagagaaauguggcacaaa

SEQ ID NO: 725066 - RNA, 22 nt, Human
uacuuucuaagacauacaacuu

SEQ ID NO: 725067 - RNA, 22 nt, Human
cacugugggguuuggcuggaac

SEQ ID NO: 725068 - RNA, 20 nt, Human
ugcuggaaauuguucuagga

SEQ ID NO: 725069 - RNA, 20 nt, Human
ucuaaacaguuggcaugggg

SEQ ID NO: 725070 - RNA, 22 nt, Human
uggcuucuugacuucuuggcug

SEQ ID NO: 725071 - RNA, 22 nt, Human
ggccuugguaaugggggacugu

SEQ ID NO: 725072 - RNA, 22 nt, Human
aggcugagcggggucccagagc

SEQ ID NO: 725073 - RNA, 22 nt, Human
agccuaggggguccugggccac

SEQ ID NO: 725074 - RNA, 22 nt, Human
uaaacaagaaacauuuucuguu

SEQ ID NO: 725075 - RNA, 22 nt, Human
uucuggaauacuaaguuccuuu

SEQ ID NO: 725076 - RNA, 22 nt, Human
acaggcagguccugucccagcu

SEQ ID NO: 725077 - RNA, 22 nt, Human
agcagcugagaugguaagauuc

SEQ ID NO: 725078 - RNA, 22 nt, Human
ucauaaauuagcugucuuugaa

SEQ ID NO: 725079 - RNA, 22 nt, Human
aacuuuaaagaggaggcuuggg

SEQ ID NO: 725080 - RNA, 22 nt, Human
ucccaggguccucuucuggaau

SEQ ID NO: 725081 - RNA, 22 nt, Human
cuggaaggggcagucuuugggc

SEQ ID NO: 725082 - RNA, 22 nt, Human
ucuggggacggggcccagcaau

SEQ ID NO: 725083 - RNA, 22 nt, Human
aguggcagagccaagauaugau

SEQ ID NO: 725084 - RNA, 22 nt, Human
guuuagaaugaaacuuuugagc

SEQ ID NO: 725085 - RNA, 22 nt, Human
uuuauuaaaacuguuggcucug

SEQ ID NO: 725086 - RNA, 22 nt, Human
uguguugguagaucugaggucu

SEQ ID NO: 725087 - RNA, 22 nt, Human
ucaggagguugaccacggggca

SEQ ID NO: 725088 - RNA, 22 nt, Human
uuggccagguguccagcccagg

SEQ ID NO: 725089 - RNA, 22 nt, Human
ggugggggagacuuggucaaga

SEQ ID NO: 725090 - RNA, 22 nt, Human
augccugcuuacuccaggugcu

SEQ ID NO: 725091 - RNA, 22 nt, Human
auuagauacacagauuuccacu

SEQ ID NO: 725092 - RNA, 22 nt, Human
cugccaaggcuggggaggacaa

SEQ ID NO: 725093 - RNA, 22 nt, Human
aaaccuuuaccagacuagcaag

SEQ ID NO: 725094 - RNA, 22 nt, Human
aagcaguguucccagcuggccc

SEQ ID NO: 725095 - RNA, 22 nt, Human
cugugucccaguaccuugggua

SEQ ID NO: 725096 - RNA, 22 nt, Human
guucauuguguguggucuucuu

SEQ ID NO: 725097 - RNA, 22 nt, Human
ggcuggaaggcccuuuguugau

SEQ ID NO: 725098 - RNA, 20 nt, Human
gcagaugagacucacagagg

SEQ ID NO: 725099 - RNA, 22 nt, Human
ccacaugcucucucuccagguu

SEQ ID NO: 725100 - RNA, 22 nt, Human
cuggaaggcucugcugccuguc

SEQ ID NO: 725101 - RNA, 19 nt, Human
ccagagagcuagguacaga

SEQ ID NO: 725102 - RNA, 22 nt, Human
ccucugggagacugcuacugag

SEQ ID NO: 725103 - RNA, 22 nt, Human
agcugcuguggggcucggccug

SEQ ID NO: 725104 - RNA, 22 nt, Human
aggacagcccuugagagcacau

SEQ ID NO: 725105 - RNA, 22 nt, Human
acugggaaccugugcuaggagg

SEQ ID NO: 725106 - RNA, 22 nt, Human
cagcuggacuuuugauagaagu

SEQ ID NO: 725107 - RNA, 22 nt, Human
gcugucuuuccccugcuccaga

SEQ ID NO: 725108 - RNA, 22 nt, Human
ugugcuaaggcagucuaucaca

SEQ ID NO: 725109 - RNA, 21 nt, Human
uccuucaguucugcacuuucu

SEQ ID NO: 725110 - RNA, 22 nt, Human
uuggcagauuugucaguaagcu

SEQ ID NO: 725111 - RNA, 22 nt, Human
aauguguagauguugcauuccu

SEQ ID NO: 725112 - RNA, 22 nt, Human
cacagauaaggauguuaauuuu

SEQ ID NO: 725113 - RNA, 22 nt, Human
cuauuuauguccaaguguuuua

SEQ ID NO: 725114 - RNA, 22 nt, Human
uagcacaucuggcgcuuauagg

SEQ ID NO: 725115 - RNA, 22 nt, Human
ggcuccagaugucuccuggcaa

SEQ ID NO: 725116 - RNA, 22 nt, Human
gacaggguuugcaaggacuucg

SEQ ID NO: 725117 - RNA, 22 nt, Human
agaaggcucacuaagagugacu

SEQ ID NO: 725118 - RNA, 22 nt, Human
agguggcuccucccauggcugg

SEQ ID NO: 725119 - RNA, 22 nt, Human
uaugaagaagacaaaugacacu

SEQ ID NO: 725120 - RNA, 22 nt, Human
acuuagaauuaaauauuuuugg

SEQ ID NO: 725121 - RNA, 22 nt, Human
ggggcagaaagcccacagagug

SEQ ID NO: 725122 - RNA, 19 nt, Human
caggccagugucagggggc

SEQ ID NO: 725123 - RNA, 22 nt, Human
ucccucagagaccguggugcag

SEQ ID NO: 725124 - RNA, 22 nt, Human
ggcuuuaacaacagaaauuuau

SEQ ID NO: 725125 - RNA, 22 nt, Human
uccucugcuggaagggcaagag

SEQ ID NO: 725126 - RNA, 22 nt, Human
uugucucuguguggcuucccua

SEQ ID NO: 725127 - RNA, 22 nt, Human
gaaggcaacaccaggaugcacu

SEQ ID NO: 725128 - RNA, 21 nt, Human
gggccuggcugcgcaggacgg

SEQ ID NO: 725129 - RNA, 22 nt, Human
uggucugaacacauuuuaggua

SEQ ID NO: 725130 - RNA, 21 nt, Human
ggaaagaaggcaaggcucagg

SEQ ID NO: 725131 - RNA, 22 nt, Human
guugaguguugugcaugcacca

SEQ ID NO: 725132 - RNA, 22 nt, Human
cccucacuucacgcucugcaga

SEQ ID NO: 725133 - RNA, 18 nt, Human
uccugggaacuugcuagc

SEQ ID NO: 725134 - RNA, 22 nt, Human
uggccccauuuuacagaugaaa

SEQ ID NO: 725135 - RNA, 22 nt, Human
caguaguggucuaucacuggag

SEQ ID NO: 725136 - RNA, 22 nt, Human
gaguuauuggguggaaagguag

SEQ ID NO: 725137 - RNA, 22 nt, Human
acacaguaugaaaagucuaguu

SEQ ID NO: 725138 - RNA, 22 nt, Human
uacagcuuuagcaaauuaccua

SEQ ID NO: 725139 - RNA, 22 nt, Human
uuucagggaaguguugaaaagg

SEQ ID NO: 725140 - RNA, 18 nt, Human
uaaaggaagugggagagg

SEQ ID NO: 725141 - RNA, 22 nt, Human
uguuaacauguguauuguauga

SEQ ID NO: 725142 - RNA, 23 nt, Human
ucccugagcuggagagacugcac

SEQ ID NO: 725143 - RNA, 22 nt, Human
ccuuccaagugcugcuuuuucc

SEQ ID NO: 725144 - RNA, 20 nt, Human
accagagauagcaauagugc

SEQ ID NO: 725145 - RNA, 22 nt, Human
ucucugagccccugccucuuuc

SEQ ID NO: 725146 - RNA, 22 nt, Human
ugaaugaggauccuugaccuua

SEQ ID NO: 725147 - RNA, 18 nt, Human
guuuugaauugucuuaca

SEQ ID NO: 725148 - RNA, 22 nt, Human
uaggaaauuagaacuuggaaac

SEQ ID NO: 725149 - RNA, 22 nt, Human
ggcccuguccccuucaguuuug

SEQ ID NO: 725150 - RNA, 20 nt, Human
agcuccagugcugacgcuuc

SEQ ID NO: 725151 - RNA, 22 nt, Human
ugcugcuuccugguagauagga

SEQ ID NO: 725152 - RNA, 22 nt, Human
uuaauaaguaguaguuauuguu

SEQ ID NO: 725153 - RNA, 22 nt, Human
ccuagcagggaagcagugagga

SEQ ID NO: 725154 - RNA, 22 nt, Human
uuuuuguguauccugcuccaug

SEQ ID NO: 725155 - RNA, 22 nt, Human
uacaggagcugcucugugauac

SEQ ID NO: 725156 - RNA, 22 nt, Human
acaauagauacugggcacauau

SEQ ID NO: 725157 - RNA, 22 nt, Human
gaagaucugcagccucaggcga

SEQ ID NO: 725158 - RNA, 22 nt, Human
caguuucucucaauaagcaucg

SEQ ID NO: 725159 - RNA, 22 nt, Human
aaagucacaguuuaggggauau

SEQ ID NO: 725160 - RNA, 22 nt, Human
acuuuaauuaaugaacuguggc

SEQ ID NO: 725161 - RNA, 18 nt, Human
auauguuaauuagguagg

SEQ ID NO: 725162 - RNA, 22 nt, Human
uuuggaauuccauuucugcauu

SEQ ID NO: 725163 - RNA, 22 nt, Human
aaaugcacugaacacauguugu

SEQ ID NO: 725164 - RNA, 22 nt, Human
uucuggagcuaaaguccacucu

SEQ ID NO: 725165 - RNA, 23 nt, Human
auagaagauuauugcaacagucc

SEQ ID NO: 725166 - RNA, 22 nt, Human
uggaaaaugugacuauucuaaa

SEQ ID NO: 725167 - RNA, 22 nt, Human
cagugaaguucuacugaauggu

SEQ ID NO: 725168 - RNA, 22 nt, Human
gcagccuccgcacugcgagucc

SEQ ID NO: 725169 - RNA, 22 nt, Human
uccccaggggccugggcacagu

SEQ ID NO: 725170 - RNA, 22 nt, Human
ggaggugggagacauaggcggc

SEQ ID NO: 725171 - RNA, 22 nt, Human
gaccacuggcgcugcgagaccc

SEQ ID NO: 725172 - RNA, 22 nt, Human
ucuguaaucaagauauuugaga

SEQ ID NO: 725173 - RNA, 22 nt, Human
aaaaaguauuggccaugguuga

SEQ ID NO: 725174 - RNA, 22 nt, Human
cucuccccacacccucugcaug

SEQ ID NO: 725175 - RNA, 22 nt, Human
guccuggugagguagugggagg

SEQ ID NO: 725176 - RNA, 22 nt, Human
aaggcagccauagcaccaucca

SEQ ID NO: 725177 - RNA, 20 nt, Human
auuuuggugaacacagcuuc

SEQ ID NO: 725178 - RNA, 22 nt, Human
augaaugcuuauuaaauugaaa

SEQ ID NO: 725179 - RNA, 22 nt, Human
agaggaguauuuucuaagggaa

SEQ ID NO: 725180 - RNA, 22 nt, Human
aaggagcugggagggacacaug

SEQ ID NO: 725181 - RNA, 22 nt, Human
ugggccuggagcccuggagagu

SEQ ID NO: 725182 - RNA, 22 nt, Human
ggcaucuggaucugcuucuccc

SEQ ID NO: 725183 - RNA, 22 nt, Human
caucaucugugcuggagagccu

SEQ ID NO: 725184 - RNA, 22 nt, Human
ugugugaccuggggugagauag

SEQ ID NO: 725185 - RNA, 22 nt, Human
agaacuguccuuggaggagagu

SEQ ID NO: 725186 - RNA, 20 nt, Human
cccagccccuaccuguugcc

SEQ ID NO: 725187 - RNA, 22 nt, Human
cucuucagauaaaagggauauu

SEQ ID NO: 725188 - RNA, 22 nt, Human
ccuuagcaacacuuagcaacug

SEQ ID NO: 725189 - RNA, 22 nt, Human
ucaauucuagagccuuacauug

SEQ ID NO: 725190 - RNA, 23 nt, Human
uugcuuucaucaugagaugcucc

SEQ ID NO: 725191 - RNA, 22 nt, Human
gcuuuagagaagaaagguugcu

SEQ ID NO: 725192 - RNA, 17 nt, Human
ugcugucugcuucccua

SEQ ID NO: 725193 - RNA, 22 nt, Human
uaaaaguauacuuucaaaggag

SEQ ID NO: 725194 - RNA, 22 nt, Human
cuguucaugcugauucuguaug

SEQ ID NO: 725195 - RNA, 22 nt, Human
agacaaagacagcaucucaggu

SEQ ID NO: 725196 - RNA, 22 nt, Human
gcugacugguugcacagagggu

SEQ ID NO: 725197 - RNA, 20 nt, Human
ccuuuagaaacucauaugua

SEQ ID NO: 725198 - RNA, 22 nt, Human
uaaaugagauuuguucuuuugu

SEQ ID NO: 725199 - RNA, 22 nt, Human
gaagucuuuuagcaaaacgaac

SEQ ID NO: 725200 - RNA, 22 nt, Human
ccagcagcaggccaggcccucc

SEQ ID NO: 725201 - RNA, 22 nt, Human
ggauggcaggacaaggacccag

SEQ ID NO: 725202 - RNA, 22 nt, Human
augcacccagugucuggacuau

SEQ ID NO: 725203 - RNA, 21 nt, Human
acaaaggaagucucuuuuaag

SEQ ID NO: 725204 - RNA, 22 nt, Human
agguauauauucugguccuuau

SEQ ID NO: 725205 - RNA, 22 nt, Human
uauggguaaagggcuaggguuu

SEQ ID NO: 725206 - RNA, 22 nt, Human
uacauaauuaaucuuuaaguuc

SEQ ID NO: 725207 - RNA, 22 nt, Human
ucagguccuuacugugcucccu

SEQ ID NO: 725208 - RNA, 20 nt, Human
aaugaucagcauagcaagga

SEQ ID NO: 725209 - RNA, 22 nt, Human
uuaaaauguacaggggaaagug

SEQ ID NO: 725210 - RNA, 22 nt, Human
ggcaguuuuaacagagguagua

SEQ ID NO: 725211 - RNA, 22 nt, Human
acuuauaagagugcuaugggga

SEQ ID NO: 725212 - RNA, 22 nt, Human
uauaaagaaguguaaacaggaa

SEQ ID NO: 725213 - RNA, 22 nt, Human
uccugcaggccagaggggugag

SEQ ID NO: 725214 - RNA, 23 nt, Human
uuguccugccgaucucugagaau

SEQ ID NO: 725215 - RNA, 22 nt, Human
uagugccaccuuccaaguauca

SEQ ID NO: 725216 - RNA, 21 nt, Human
uuuagcaagaguauagugcau

SEQ ID NO: 725217 - RNA, 22 nt, Human
aaaaucacaagcuugggucacu

SEQ ID NO: 725218 - RNA, 22 nt, Human
uugauaaaaugaugaaaucacu

SEQ ID NO: 725219 - RNA, 22 nt, Human
gcaggcucagagcagauuagca

SEQ ID NO: 725220 - RNA, 22 nt, Human
ggccuggaaugcuuuccuacca

SEQ ID NO: 725221 - RNA, 22 nt, Human
ccuucaaauuuagaacaaguga

SEQ ID NO: 725222 - RNA, 22 nt, Human
uuuacaagucuguugaucccaa

SEQ ID NO: 725223 - RNA, 22 nt, Human
cacuuugaugcagggcucagua

SEQ ID NO: 725224 - RNA, 22 nt, Human
gguauuuacugagagccacucu

SEQ ID NO: 725225 - RNA, 23 nt, Human
aaguucuuuuagaugucuucgug

SEQ ID NO: 725226 - RNA, 22 nt, Human
cagaugaaggccugaaugucua

SEQ ID NO: 725227 - RNA, 22 nt, Human
ucaggauggagggaagcacaga

SEQ ID NO: 725228 - RNA, 22 nt, Human
auguccucggcucugugcugcu

SEQ ID NO: 725229 - RNA, 22 nt, Human
uuuuuauaccaccucucacuua

SEQ ID NO: 725230 - RNA, 22 nt, Human
gggcagguggagggcccagcca

SEQ ID NO: 725231 - RNA, 22 nt, Human
cugggacucagaccaguucugu

SEQ ID NO: 725232 - RNA, 22 nt, Human
ugaaggagaaauggaaaguggg

SEQ ID NO: 725233 - RNA, 22 nt, Human
uggcaggaaggagacucagccc

SEQ ID NO: 725234 - RNA, 22 nt, Human
aauaacugcacuuguugaaugc

SEQ ID NO: 725235 - RNA, 20 nt, Human
agaaaucagcauguccucug

SEQ ID NO: 725236 - RNA, 22 nt, Human
cuugggcacaucccugguauuu

SEQ ID NO: 725237 - RNA, 22 nt, Human
agaacaucugaagauacaaagu

SEQ ID NO: 725238 - RNA, 17 nt, Human
ucucuuguucacugcug

SEQ ID NO: 725239 - RNA, 22 nt, Human
ucauuucuccgaccugcugucc

SEQ ID NO: 725240 - RNA, 22 nt, Human
uaguguuccagaagcaaacaag

SEQ ID NO: 725241 - RNA, 22 nt, Human
uccuuuaaacuccuuucaaguc

SEQ ID NO: 725242 - RNA, 22 nt, Human
uuucuaaaauagauuuuauggu

SEQ ID NO: 725243 - RNA, 22 nt, Human
uguuuguacucaaagccaugag

SEQ ID NO: 725244 - RNA, 22 nt, Human
auuuacaccuucuucgauucuc

SEQ ID NO: 725245 - RNA, 22 nt, Human
cugaagaaauaugauugcuuaa

SEQ ID NO: 725246 - RNA, 22 nt, Human
uccuugaauauaauaacaguag

SEQ ID NO: 725247 - RNA, 22 nt, Human
cagaggcauacucccagucuug

SEQ ID NO: 725248 - RNA, 22 nt, Human
gcagaugcugcuccucucuaga

SEQ ID NO: 725249 - RNA, 22 nt, Human
ugaagauuuccaccaaaucaca

SEQ ID NO: 725250 - RNA, 19 nt, Human
uucauuuguaucugcucac

SEQ ID NO: 725251 - RNA, 22 nt, Human
gucuccuggaaauaugcccaua

SEQ ID NO: 725252 - RNA, 22 nt, Human
acacauuugcauaauaccucau

SEQ ID NO: 725253 - RNA, 22 nt, Human
agaggcacggaggcugcaugga

SEQ ID NO: 725254 - RNA, 22 nt, Human
guaaaguucuacuagaaucaac

SEQ ID NO: 725255 - RNA, 22 nt, Human
ucagccuacacuccaacagcau

SEQ ID NO: 725256 - RNA, 22 nt, Human
ccagauauucacuuuuacaugc

SEQ ID NO: 725257 - RNA, 22 nt, Human
ucagagugggagaaugugccaa

SEQ ID NO: 725258 - RNA, 22 nt, Human
cugcugcaggaugggcacucug

SEQ ID NO: 725259 - RNA, 22 nt, Human
ugaggcucaaggucugguggag

SEQ ID NO: 725260 - RNA, 22 nt, Human
uggcacagugcuggauggugcu

SEQ ID NO: 725261 - RNA, 22 nt, Human
agaaaccugugugcugugauga

SEQ ID NO: 725262 - RNA, 21 nt, Human
uguuacaguccaaauguuugu

SEQ ID NO: 725263 - RNA, 22 nt, Human
aagguggcgcuggagcuggucc

SEQ ID NO: 725264 - RNA, 22 nt, Human
cccaggagguagagguugcagu

SEQ ID NO: 725265 - RNA, 22 nt, Human
ggcaugggguguauguggcacg

SEQ ID NO: 725266 - RNA, 22 nt, Human
auuuacuaaugucauaucgcgu

SEQ ID NO: 725267 - RNA, 22 nt, Human
ugauuuccuaggucuggagaag

SEQ ID NO: 725268 - RNA, 22 nt, Human
cagcuuuagagaaaacauauuu

SEQ ID NO: 725269 - RNA, 22 nt, Human
gaauuuuaucuuauuacuugca

SEQ ID NO: 725270 - RNA, 22 nt, Human
aaagccaaaugaaagaugguuc

SEQ ID NO: 725271 - RNA, 22 nt, Human
uuuaagaaguuauguuauaaau

SEQ ID NO: 725272 - RNA, 22 nt, Human
acuuagcaauuugauuaaaaga

SEQ ID NO: 725273 - RNA, 22 nt, Human
uaugaacugcucuuguguuuug

SEQ ID NO: 725274 - RNA, 22 nt, Human
cacacacugacaccuuaucuug

SEQ ID NO: 725275 - RNA, 22 nt, Human
agucaaaacauguacuuuccuu

SEQ ID NO: 725276 - RNA, 22 nt, Human
uuguuugaggucacugauauuu

SEQ ID NO: 725277 - RNA, 22 nt, Human
uccugagcuucaaaacacuuug

SEQ ID NO: 725278 - RNA, 22 nt, Human
ggcucagguuaccagucccucc

SEQ ID NO: 725279 - RNA, 22 nt, Human
acuuuauguuugauaucuaugg

SEQ ID NO: 725280 - RNA, 22 nt, Human
ucagaggccaaacugagcaggg

SEQ ID NO: 725281 - RNA, 22 nt, Human
ugagcaccuacuguauuccagg

SEQ ID NO: 725282 - RNA, 22 nt, Human
auuaaagugaaguucucagaug

SEQ ID NO: 725283 - RNA, 22 nt, Human
uaaugaggcaagagucauggcu

SEQ ID NO: 725284 - RNA, 22 nt, Human
cuggcagcauggagccugugcu

SEQ ID NO: 725285 - RNA, 22 nt, Human
ggugcaggcgguggggcaagua

SEQ ID NO: 725286 - RNA, 22 nt, Human
acccuggccugguucaugugau

SEQ ID NO: 725287 - RNA, 22 nt, Human
cuugucagccaauuguggauuu

SEQ ID NO: 725288 - RNA, 22 nt, Human
auggcuccauccuguugcuagu

SEQ ID NO: 725289 - RNA, 22 nt, Human
gguggcagagaggagguaguuu

SEQ ID NO: 725290 - RNA, 22 nt, Human
agacaugccaagaaacccagug

SEQ ID NO: 725291 - RNA, 22 nt, Human
cccuggagcaucucugcugucu

SEQ ID NO: 725292 - RNA, 22 nt, Human
uggccuggccacauccagcagg

SEQ ID NO: 725293 - RNA, 22 nt, Human
gguagaaggggaagagguccau

SEQ ID NO: 725294 - RNA, 21 nt, Human
uuaaucagucucccugucucc

SEQ ID NO: 725295 - RNA, 22 nt, Human
acagcacagagugguauggcug

SEQ ID NO: 725296 - RNA, 22 nt, Human
gcuguggccuaguuuguuauau

SEQ ID NO: 725297 - RNA, 22 nt, Human
ucucagagggaggauuacugcc

SEQ ID NO: 725298 - RNA, 22 nt, Human
gagaugcaagcaagucuauuuu

SEQ ID NO: 725299 - RNA, 22 nt, Human
uccucuccaggugagccgaaau

SEQ ID NO: 725300 - RNA, 22 nt, Human
ggauguagugcaaggagugaau

SEQ ID NO: 725301 - RNA, 22 nt, Human
aaugagaacugggaguuggugg

SEQ ID NO: 725302 - RNA, 22 nt, Human
acccucugagaggcacacuuug

SEQ ID NO: 725303 - RNA, 22 nt, Human
ggcauagaaugugcugugacaa

SEQ ID NO: 725304 - RNA, 22 nt, Human
cacaugcuagaauaaaucucca

SEQ ID NO: 725305 - RNA, 20 nt, Human
uuagcaguagagugugcuuc

SEQ ID NO: 725306 - RNA, 22 nt, Human
ccgggggacuacugggaaacug

SEQ ID NO: 725307 - RNA, 22 nt, Human
ucuugcagacagcuuccagccu

SEQ ID NO: 725308 - RNA, 22 nt, Human
cugcuagcccgccggccagcga

SEQ ID NO: 725309 - RNA, 22 nt, Human
caaaggagguaaugggugugag

SEQ ID NO: 725310 - RNA, 22 nt, Human
aacaggggauuagauagcaggc

SEQ ID NO: 725311 - RNA, 22 nt, Human
auuuuaaggcuuauuuaaaggc

SEQ ID NO: 725312 - RNA, 22 nt, Human
gucuggagggaagagaugucag

SEQ ID NO: 725313 - RNA, 22 nt, Human
gcugucacucuccggccuuccc

SEQ ID NO: 725314 - RNA, 22 nt, Human
ugaaaucaugaacaagguaggu

SEQ ID NO: 725315 - RNA, 22 nt, Human
uuuccuuugggagcaugaauuu

SEQ ID NO: 725316 - RNA, 22 nt, Human
uucaagcagagauauuucaaga

SEQ ID NO: 725317 - RNA, 22 nt, Human
uuucuaguauauaacuagaucu

SEQ ID NO: 725318 - RNA, 22 nt, Human
cguucuuuucauauuuacaugg

SEQ ID NO: 725319 - RNA, 22 nt, Human
gcauucaucuucaugaaagcac

SEQ ID NO: 725320 - RNA, 22 nt, Human
aacugcaaaauaaucaaguugu

SEQ ID NO: 725321 - RNA, 22 nt, Human
ucugggcugugggaauucaaca

SEQ ID NO: 725322 - RNA, 22 nt, Human
ucucugaagauauuuauuauua

SEQ ID NO: 725323 - RNA, 22 nt, Human
ucccugggccuaucuuagcucc

SEQ ID NO: 725324 - RNA, 22 nt, Human
aguuuaugaaacacagauuuga

SEQ ID NO: 725325 - RNA, 22 nt, Human
uggaaggggagcuggaaagggg

SEQ ID NO: 725326 - RNA, 22 nt, Human
gugacaggcccagugggaugca

SEQ ID NO: 725327 - RNA, 22 nt, Human
guggaagguaaugcagcuuacu

SEQ ID NO: 725328 - RNA, 22 nt, Human
gcagccacuuugcaaccaagag

SEQ ID NO: 725329 - RNA, 22 nt, Human
ggcagccaugucccagggcuuc

SEQ ID NO: 725330 - RNA, 22 nt, Human
augacuuuuaaaagcugguacu

SEQ ID NO: 725331 - RNA, 22 nt, Human
gaauacacgaaggcaagagucc

SEQ ID NO: 725332 - RNA, 22 nt, Human
ggaggggagauguuugggcuca

SEQ ID NO: 725333 - RNA, 22 nt, Human
uuuacagucuauguugaauuaa

SEQ ID NO: 725334 - RNA, 22 nt, Human
cucaggccagguuucucccaca

SEQ ID NO: 725335 - RNA, 22 nt, Human
aaguuguauauaccgcuuuaag

SEQ ID NO: 725336 - RNA, 22 nt, Human
agccucuguagaaagcagugug

SEQ ID NO: 725337 - RNA, 22 nt, Human
ugucuuuaguuuuacugucugg

SEQ ID NO: 725338 - RNA, 22 nt, Human
ggcuggcacgaagcccugcugg

SEQ ID NO: 725339 - RNA, 22 nt, Human
ggggccugcgagguucaacuuc

SEQ ID NO: 725340 - RNA, 22 nt, Human
gccucagguaaaacuugaguuu

SEQ ID NO: 725341 - RNA, 22 nt, Human
ucagaauaaguuaugaaaugaa

SEQ ID NO: 725342 - RNA, 22 nt, Human
augcacaguauguagggucuau

SEQ ID NO: 725343 - RNA, 22 nt, Human
acaauuagugaucagugaugcc

SEQ ID NO: 725344 - RNA, 22 nt, Human
augaggccagaccacucugcau

SEQ ID NO: 725345 - RNA, 17 nt, Human
ggagccaggagcccacc

SEQ ID NO: 725346 - RNA, 22 nt, Human
aacucaaagaugcaugacgcuu

SEQ ID NO: 725347 - RNA, 22 nt, Human
agugucuggugagggcucucuc

SEQ ID NO: 725348 - RNA, 22 nt, Human
uucacagagaguaugcagagaa

SEQ ID NO: 725349 - RNA, 23 nt, Human
cuaggcaggauuguaggcgggua

SEQ ID NO: 725350 - RNA, 22 nt, Human
acaauuuuucaaagaagcuuau

SEQ ID NO: 725351 - RNA, 22 nt, Human
gcacagggagcaggucucuggu

SEQ ID NO: 725352 - RNA, 22 nt, Human
uguggaaaauuggaacguuccu

SEQ ID NO: 725353 - RNA, 22 nt, Human
agaggccagggacacugcucaa

SEQ ID NO: 725354 - RNA, 22 nt, Human
uuaaagcaaccaucaauuugga

SEQ ID NO: 725355 - RNA, 22 nt, Human
uccagcucugcuucacagucuc

SEQ ID NO: 725356 - RNA, 22 nt, Human
gcuguccucugaucucuggagg

SEQ ID NO: 725357 - RNA, 22 nt, Human
gcugaagggagugcugagucug

SEQ ID NO: 725358 - RNA, 22 nt, Human
uuaugcaacaggugagcagaca

SEQ ID NO: 725359 - RNA, 22 nt, Human
agguaacauugccuccaucuga

SEQ ID NO: 725360 - RNA, 22 nt, Human
gaacacugaggacacugagaau

SEQ ID NO: 725361 - RNA, 22 nt, Human
agggcccuagggaaugagacau

SEQ ID NO: 725362 - RNA, 22 nt, Human
gagcuccagggaacagcagcua

SEQ ID NO: 725363 - RNA, 22 nt, Human
aguguuuacauauaaggcccuu

SEQ ID NO: 725364 - RNA, 22 nt, Human
acaugacagugcuuagcaaacu

SEQ ID NO: 725365 - RNA, 22 nt, Human
uagaaagaacuucauguaaaac

SEQ ID NO: 725366 - RNA, 22 nt, Human
ucagaggcuacagucugggagu

SEQ ID NO: 725367 - RNA, 22 nt, Human
gcuggagcggguucgggccgcu

SEQ ID NO: 725368 - RNA, 22 nt, Human
gcuuccauguaugcucuugaca

SEQ ID NO: 725369 - RNA, 22 nt, Human
uuuauuacaccagguuaacuca

SEQ ID NO: 725370 - RNA, 22 nt, Human
caauguuuuguugaaugaauag

SEQ ID NO: 725371 - RNA, 22 nt, Human
acagugugugcuuucccuuacg

SEQ ID NO: 725372 - RNA, 22 nt, Human
auagauauuugaguuguuucca

SEQ ID NO: 725373 - RNA, 22 nt, Human
ugccuggguccaggccaagccu

SEQ ID NO: 725374 - RNA, 22 nt, Human
acagcagccugcagcccugugu

SEQ ID NO: 725375 - RNA, 22 nt, Human
ugaagcugugggcaguggagcc

SEQ ID NO: 725376 - RNA, 21 nt, Human
cggagcugggcagggcauccc

SEQ ID NO: 725377 - RNA, 22 nt, Human
ggucucuggccuuggagauuga

SEQ ID NO: 725378 - RNA, 23 nt, Human
gcucagagguuuuucucuggaug

SEQ ID NO: 725379 - RNA, 20 nt, Human
agcagcauuguucuagagca

SEQ ID NO: 725380 - RNA, 22 nt, Human
aauucaaucuguagauugugau

SEQ ID NO: 725381 - RNA, 19 nt, Human
aggugaugugacucuagaa

SEQ ID NO: 725382 - RNA, 22 nt, Human
ugguggcaaaagaggcaaagug

SEQ ID NO: 725383 - RNA, 22 nt, Human
uagcuguuacccauaaaagcca

SEQ ID NO: 725384 - RNA, 22 nt, Human
ggcggcuacuccuccuggugag

SEQ ID NO: 725385 - RNA, 22 nt, Human
guuucuuauuucaacuggaaca

SEQ ID NO: 725386 - RNA, 22 nt, Human
agucacauucugggguacuggg

SEQ ID NO: 725387 - RNA, 22 nt, Human
ccugugcuuuaggccucaaacu

SEQ ID NO: 725388 - RNA, 22 nt, Human
ugaaggagcucaaugaugaugc

SEQ ID NO: 725389 - RNA, 22 nt, Human
cuauuucagcugccuuugacug

SEQ ID NO: 725390 - RNA, 22 nt, Human
gcagggugugucucauacaguu

SEQ ID NO: 725391 - RNA, 22 nt, Human
auauucacaguaaguguagcag

SEQ ID NO: 725392 - RNA, 22 nt, Human
gugucccacucuggaggugaag

SEQ ID NO: 725393 - RNA, 22 nt, Human
ggccugaaauagcucugagguu

SEQ ID NO: 725394 - RNA, 22 nt, Human
ucaaaggaauuugauuuugaug

SEQ ID NO: 725395 - RNA, 22 nt, Human
ucugggcugaaaugaaggccuu

SEQ ID NO: 725396 - RNA, 22 nt, Human
uacagugaaugaauggcugugc

SEQ ID NO: 725397 - RNA, 22 nt, Human
agguccugaggguucgucugca

SEQ ID NO: 725398 - RNA, 22 nt, Human
uaagacaugagacucagccagu

SEQ ID NO: 725399 - RNA, 22 nt, Human
uguaaaugaaguaugcuuuacu

SEQ ID NO: 725400 - RNA, 22 nt, Human
ggagggugcagacccuuugcaa

SEQ ID NO: 725401 - RNA, 20 nt, Human
cuccagggaacagacuggag

SEQ ID NO: 725402 - RNA, 22 nt, Human
gcagaagucagaccaucugaau

SEQ ID NO: 725403 - RNA, 22 nt, Human
agacaggcaugaggcuggauug

SEQ ID NO: 725404 - RNA, 22 nt, Human
uuucuaaucuuuaguuacaaaa

SEQ ID NO: 725405 - RNA, 22 nt, Human
gacagcaagagacagagcaucc

SEQ ID NO: 725406 - RNA, 19 nt, Human
uauuauuuguagcaaggcc

SEQ ID NO: 725407 - RNA, 22 nt, Human
acaccuuugccccaagucauag

SEQ ID NO: 725408 - RNA, 22 nt, Human
acagagcauuugggacagagag

SEQ ID NO: 725409 - RNA, 22 nt, Human
cauaacugggagauccaagggu

SEQ ID NO: 725410 - RNA, 19 nt, Human
uuaggaaaccacuuuccuu

SEQ ID NO: 725411 - RNA, 22 nt, Human
acagaauuaaugaaaauuacaa

SEQ ID NO: 725412 - RNA, 22 nt, Human
uucucaugaugcaauucauccc

SEQ ID NO: 725413 - RNA, 22 nt, Human
caaugaaaaugaggacuccugu

SEQ ID NO: 725414 - RNA, 22 nt, Human
ucccaaagguccgagcgggaau

SEQ ID NO: 725415 - RNA, 22 nt, Human
gugcaauagacugugguauuaa

SEQ ID NO: 725416 - RNA, 22 nt, Human
caguccuugauccaauaguggg

SEQ ID NO: 725417 - RNA, 22 nt, Human
uuggcuucuugugaaaucugag

SEQ ID NO: 725418 - RNA, 22 nt, Human
auacacauguguaugugcaugc

SEQ ID NO: 725419 - RNA, 22 nt, Human
gccagcuguucagacauucuuu

SEQ ID NO: 725420 - RNA, 22 nt, Human
auacacauuacuuucugucuga

SEQ ID NO: 725421 - RNA, 22 nt, Human
aucugguucuucuuaggcauca

SEQ ID NO: 725422 - RNA, 22 nt, Human
cacuuguugguggugaaaucac

SEQ ID NO: 725423 - RNA, 19 nt, Human
gaggucagcaagaaguauu

SEQ ID NO: 725424 - RNA, 22 nt, Human
cagaggcugagcagucaguuug

SEQ ID NO: 725425 - RNA, 22 nt, Human
ggcacagagcuuugucccaguu

SEQ ID NO: 725426 - RNA, 22 nt, Human
cagcuucagggacagcuucuuu

SEQ ID NO: 725427 - RNA, 22 nt, Human
ccccagcccacaagcauauuaa

SEQ ID NO: 725428 - RNA, 22 nt, Human
cugucuguaucccuguugguaa

SEQ ID NO: 725429 - RNA, 22 nt, Human
uucuuacaaguauuccaggucc

SEQ ID NO: 725430 - RNA, 20 nt, Human
agaaacagcacaauucuguu

SEQ ID NO: 725431 - RNA, 22 nt, Human
augggaggaugcucgggugcuc

SEQ ID NO: 725432 - RNA, 22 nt, Human
uggcucagaguucaucuuuuag

SEQ ID NO: 725433 - RNA, 20 nt, Human
uuuggcuucaagugcauugc

SEQ ID NO: 725434 - RNA, 22 nt, Human
gacagcuuagugaaaauguaaa

SEQ ID NO: 725435 - RNA, 22 nt, Human
agagcugcaggguggacccagg

SEQ ID NO: 725436 - RNA, 22 nt, Human
gacugaggcuccccuaggcuca

SEQ ID NO: 725437 - RNA, 22 nt, Human
uguuauugauaucuaaugcucu

SEQ ID NO: 725438 - RNA, 22 nt, Human
ugggaaauauaauuuagcugug

SEQ ID NO: 725439 - RNA, 22 nt, Human
uucucuguuuuccccucgaugu

SEQ ID NO: 725440 - RNA, 22 nt, Human
cugcagcugccagugauuucag

SEQ ID NO: 725441 - RNA, 18 nt, Human
gggcccuggcguccgccc

SEQ ID NO: 725442 - RNA, 22 nt, Human
aaccagcacugcuggggccugc

SEQ ID NO: 725443 - RNA, 22 nt, Human
ugaaaugagauagauaaucagg

SEQ ID NO: 725444 - RNA, 22 nt, Human
auuccaaaggcuggccuggagg

SEQ ID NO: 725445 - RNA, 22 nt, Human
ucaggaguaaguuauaaguauu

SEQ ID NO: 725446 - RNA, 22 nt, Human
ucuucucuccugcuuggcagaa

SEQ ID NO: 725447 - RNA, 22 nt, Human
gucagcacuuuuccgaggcaga

SEQ ID NO: 725448 - RNA, 22 nt, Human
cuccugagaggaucucuguugu

SEQ ID NO: 725449 - RNA, 22 nt, Human
ucucauggagucaggagcagaa

SEQ ID NO: 725450 - RNA, 18 nt, Human
cuuccugacuagcucugg

SEQ ID NO: 725451 - RNA, 22 nt, Human
agggugcagguguggagucuag

SEQ ID NO: 725452 - RNA, 22 nt, Human
gacuuaaaggcugaauguagga

SEQ ID NO: 725453 - RNA, 22 nt, Human
uccuucaugaugcuuagcagag

SEQ ID NO: 725454 - RNA, 22 nt, Human
cauuccuggacaaacaucaaaa

SEQ ID NO: 725455 - RNA, 21 nt, Human
aaugugugcuauuuaucuuuu

SEQ ID NO: 725456 - RNA, 22 nt, Human
uggagcagcauucauccagcag

SEQ ID NO: 725457 - RNA, 22 nt, Human
ugggcagaaggaagagccaccu

SEQ ID NO: 725458 - RNA, 21 nt, Human
uaucuacuggugucuuucaga

SEQ ID NO: 725459 - RNA, 22 nt, Human
gucagcuagaggaugugacauu

SEQ ID NO: 725460 - RNA, 22 nt, Human
ugucccagcagcuggguucucu

SEQ ID NO: 725461 - RNA, 22 nt, Human
ugaggccauggucuucccaguc

SEQ ID NO: 725462 - RNA, 22 nt, Human
uuguuuuuaugaacauccagga

SEQ ID NO: 725463 - RNA, 22 nt, Human
aggaggugcuagagaagauguu

SEQ ID NO: 725464 - RNA, 22 nt, Human
auuucucugcaguguucggaau

SEQ ID NO: 725465 - RNA, 22 nt, Human
uuccauaaugagauucccagcc

SEQ ID NO: 725466 - RNA, 22 nt, Human
agaaaacugcagaguagccuca

SEQ ID NO: 725467 - RNA, 22 nt, Human
ccagcagaggggcggagugcag

SEQ ID NO: 725468 - RNA, 22 nt, Human
cccugggagcugccuggcugac

SEQ ID NO: 725469 - RNA, 20 nt, Human
gcucaggugacagucaggag

SEQ ID NO: 725470 - RNA, 22 nt, Human
auggcagagggauugaacagcu

SEQ ID NO: 725471 - RNA, 22 nt, Human
caaaugcauagaaagaugaaac

SEQ ID NO: 725472 - RNA, 22 nt, Human
gcauguggugcugaggcugucg

SEQ ID NO: 725473 - RNA, 22 nt, Human
gacaaacugaaguauauuuaga

SEQ ID NO: 725474 - RNA, 22 nt, Human
ccccuuucucccgcgucuggcc

SEQ ID NO: 725475 - RNA, 20 nt, Human
gagagcuggaaauaaagucc

SEQ ID NO: 725476 - RNA, 22 nt, Human
gacaaugguggauacaugucau

SEQ ID NO: 725477 - RNA, 19 nt, Human
ugucuuaauuaacucagag

SEQ ID NO: 725478 - RNA, 22 nt, Human
acagcuaugacagauggauaau

SEQ ID NO: 725479 - RNA, 22 nt, Human
cccuggagugccggaaucaaga

SEQ ID NO: 725480 - RNA, 19 nt, Human
uugaaagauuagcuuucua

SEQ ID NO: 725481 - RNA, 22 nt, Human
gagucucuggaggggucagacc

SEQ ID NO: 725482 - RNA, 22 nt, Human
gagauguuauucuucagugugu

SEQ ID NO: 725483 - RNA, 22 nt, Human
uuaugauuugccacagauuggu

SEQ ID NO: 725484 - RNA, 22 nt, Human
ucugggagguguuuugagaacu

SEQ ID NO: 725485 - RNA, 22 nt, Human
aucaagaauugggagcuauuga

SEQ ID NO: 725486 - RNA, 18 nt, Human
cuuucagauggauaugcu

SEQ ID NO: 725487 - RNA, 22 nt, Human
guccuuggcacccaugugauuc

SEQ ID NO: 725488 - RNA, 22 nt, Human
uggauaaacucacuguaaguug

SEQ ID NO: 725489 - RNA, 22 nt, Human
gaaggcuggcuuucugagagca

SEQ ID NO: 725490 - RNA, 22 nt, Human
ccucuggccaucccccauuaag

SEQ ID NO: 725491 - RNA, 20 nt, Human
uucacagaggacucagguca

SEQ ID NO: 725492 - RNA, 22 nt, Human
cugggccucaugcacagagaug

SEQ ID NO: 725493 - RNA, 22 nt, Human
uuacagauggcaguuucuugag

SEQ ID NO: 725494 - RNA, 22 nt, Human
aaauagcacagcagcugaggcu

SEQ ID NO: 725495 - RNA, 22 nt, Human
ugaugaaaaccagaacucucau

SEQ ID NO: 725496 - RNA, 21 nt, Human
agguuccugagucaugccuua

SEQ ID NO: 725497 - RNA, 22 nt, Human
acaaaguccugguguauggcca

SEQ ID NO: 725498 - RNA, 22 nt, Human
uuggaauucaaguuguagcuua

SEQ ID NO: 725499 - RNA, 22 nt, Human
uuagcugagauuaagugaacuu

SEQ ID NO: 725500 - RNA, 22 nt, Human
cuaaaugauggauuuaaacuuu

SEQ ID NO: 725501 - RNA, 22 nt, Human
auaugcuuacagcuuaaaaucc

SEQ ID NO: 725502 - RNA, 22 nt, Human
uuuggucuuggauuuaucagug

SEQ ID NO: 725503 - RNA, 22 nt, Human
agcuguucccucacugcaguca

SEQ ID NO: 725504 - RNA, 22 nt, Human
ucugcugacauuuaugaauaga

SEQ ID NO: 725505 - RNA, 22 nt, Human
cuccuggccacguucuugcugg

SEQ ID NO: 725506 - RNA, 22 nt, Human
aggcucugguuggcaaguaaag

SEQ ID NO: 725507 - RNA, 22 nt, Human
caguuuuauacacugcagcucc

SEQ ID NO: 725508 - RNA, 22 nt, Human
aaagaagguagggcuggugacu

SEQ ID NO: 725509 - RNA, 20 nt, Human
caucaucacaugagccaauu

SEQ ID NO: 725510 - RNA, 22 nt, Human
cuauuagacacaauuagugauu

SEQ ID NO: 725511 - RNA, 22 nt, Human
cagcugccuguauuguccucau

SEQ ID NO: 725512 - RNA, 22 nt, Human
agggggcuccuccggugcuucc

SEQ ID NO: 725513 - RNA, 22 nt, Human
ucauuguuucugcuuuucauga

SEQ ID NO: 725514 - RNA, 22 nt, Human
ugugggaaugacgaggaagagg

SEQ ID NO: 725515 - RNA, 19 nt, Human
uugcagcaaaguuaggacc

SEQ ID NO: 725516 - RNA, 22 nt, Human
cauucccaugacuccugcucag

SEQ ID NO: 725517 - RNA, 22 nt, Human
caggugggagcggagacugauu

SEQ ID NO: 725518 - RNA, 19 nt, Human
gcuuuaguuuacucaucua

SEQ ID NO: 725519 - RNA, 22 nt, Human
gggauggacuuggggacuccag

SEQ ID NO: 725520 - RNA, 22 nt, Human
ugucuucaguaaaauacacuau

SEQ ID NO: 725521 - RNA, 22 nt, Human
agugcauuugggguaguggaag

SEQ ID NO: 725522 - RNA, 22 nt, Human
uaggcuccucucacauucuauu

SEQ ID NO: 725523 - RNA, 22 nt, Human
ugccugggaucugugcccuuug

SEQ ID NO: 725524 - RNA, 22 nt, Human
ggcugccucaaagcucaagcuc

SEQ ID NO: 725525 - RNA, 22 nt, Human
caggaacuggaacccuggccga

SEQ ID NO: 725526 - RNA, 22 nt, Human
cccuaggcugaggccagggugc

SEQ ID NO: 725527 - RNA, 22 nt, Human
ugaccuuucuuugagauuccug

SEQ ID NO: 725528 - RNA, 22 nt, Human
cuggagggaguuaggacccgga

SEQ ID NO: 725529 - RNA, 22 nt, Human
ugagcccuggagcccucuguua

SEQ ID NO: 725530 - RNA, 22 nt, Human
cugagagcaucgcuggagauag

SEQ ID NO: 725531 - RNA, 22 nt, Human
uguaguagcauucacgaagugu

SEQ ID NO: 725532 - RNA, 19 nt, Human
gcucagagggcccugugcu

SEQ ID NO: 725533 - RNA, 22 nt, Human
gccugcagauauauaggauggu

SEQ ID NO: 725534 - RNA, 22 nt, Human
ugucugcugaugucacauagcc

SEQ ID NO: 725535 - RNA, 22 nt, Human
uuauccugguggccccuaaauc

SEQ ID NO: 725536 - RNA, 22 nt, Human
acgcaguuuguggacauuuuuu

SEQ ID NO: 725537 - RNA, 22 nt, Human
gcugccuuuagggggugcucag

SEQ ID NO: 725538 - RNA, 22 nt, Human
cagugggauaugggggcagcau

SEQ ID NO: 725539 - RNA, 22 nt, Human
gcaggaggaucacuugagccca

SEQ ID NO: 725540 - RNA, 21 nt, Human
uaagcuaaacauucaguuaac

SEQ ID NO: 725541 - RNA, 22 nt, Human
gcagagaaggauugaaaccaga

SEQ ID NO: 725542 - RNA, 20 nt, Human
ugggagaugaucuccuugcu

SEQ ID NO: 725543 - RNA, 22 nt, Human
auucuuggcaaggagauuuaaa

SEQ ID NO: 725544 - RNA, 22 nt, Human
ugcccacuucaaaaucuucauu

SEQ ID NO: 725545 - RNA, 22 nt, Human
uuucugaaaucucuuuugagga

SEQ ID NO: 725546 - RNA, 20 nt, Human
uguauucuuugcucuccacu

SEQ ID NO: 725547 - RNA, 22 nt, Human
ugacaaacucuuugagaacaag

SEQ ID NO: 725548 - RNA, 22 nt, Human
ggaagcugaggcccagugaagg

SEQ ID NO: 725549 - RNA, 22 nt, Human
uuggaggaugcaaugagggagu

SEQ ID NO: 725550 - RNA, 22 nt, Human
gcacuagagcagcucucagaga

SEQ ID NO: 725551 - RNA, 21 nt, Human
gggcucuccugaggccaugaa

SEQ ID NO: 725552 - RNA, 20 nt, Human
aggcuuggcuuggcaggaac

SEQ ID NO: 725553 - RNA, 22 nt, Human
caugcauuucuaccaaggaaua

SEQ ID NO: 725554 - RNA, 22 nt, Human
aaguucuagagguugauuuggu

SEQ ID NO: 725555 - RNA, 22 nt, Human
gggcuggaggugagcaggacag

SEQ ID NO: 725556 - RNA, 22 nt, Human
uuaacagagaacauagaaguag

SEQ ID NO: 725557 - RNA, 22 nt, Human
ugcuggaaaaaucauuugcuuu

SEQ ID NO: 725558 - RNA, 22 nt, Human
cacagguuagguauuauacuau

SEQ ID NO: 725559 - RNA, 19 nt, Human
auaaggcagugacuuuuuu

SEQ ID NO: 725560 - RNA, 22 nt, Human
cuggcagcccaaccuagagucu

SEQ ID NO: 725561 - RNA, 22 nt, Human
cuggccccuguggcuaaaauca

SEQ ID NO: 725562 - RNA, 22 nt, Human
acacugcucacuucuucccuug

SEQ ID NO: 725563 - RNA, 22 nt, Human
uuuaggaucucucuuguuacau

SEQ ID NO: 725564 - RNA, 22 nt, Human
aggaacacaacuuccugagagc

SEQ ID NO: 725565 - RNA, 22 nt, Human
cagaaauggagcccaggaaucu

SEQ ID NO: 725566 - RNA, 22 nt, Human
agauuuuggcuggcuggagaga

SEQ ID NO: 725567 - RNA, 22 nt, Human
ugagagaggaugcccucauauu

SEQ ID NO: 725568 - RNA, 22 nt, Human
caaggcagcccgcugaaccaca

SEQ ID NO: 725569 - RNA, 22 nt, Human
ccuggccacagggcucugcauu

SEQ ID NO: 725570 - RNA, 22 nt, Human
ucuggcagggucagggcccagg

SEQ ID NO: 725571 - RNA, 22 nt, Human
ugaagauuuucggguacuugau

SEQ ID NO: 725572 - RNA, 22 nt, Human
gcugccaugguccaggcuccag

SEQ ID NO: 725573 - RNA, 22 nt, Human
uaaaggauuuuguauaauauaa

SEQ ID NO: 725574 - RNA, 23 nt, Human
ugguccugccaacggugccccuc

SEQ ID NO: 725575 - RNA, 22 nt, Human
ugggcacuguagcuggugcugg

SEQ ID NO: 725576 - RNA, 22 nt, Human
gagucccaggaaugagcauagu

SEQ ID NO: 725577 - RNA, 22 nt, Human
gcaccagggagggugugcuuca

SEQ ID NO: 725578 - RNA, 23 nt, Human
agccacuucuaucuugcuccugg

SEQ ID NO: 725579 - RNA, 20 nt, Human
uacaaagagccccucucuuc

SEQ ID NO: 725580 - RNA, 22 nt, Human
auuacacauagacauucguuca

SEQ ID NO: 725581 - RNA, 22 nt, Human
aaagaaucuauauaucaccacc

SEQ ID NO: 725582 - RNA, 22 nt, Human
cuggccuuuaaaaugaccuuau

SEQ ID NO: 725583 - RNA, 22 nt, Human
gaagagagaacauuacauaaac

SEQ ID NO: 725584 - RNA, 22 nt, Human
ucagaggauugccucagcgagc

SEQ ID NO: 725585 - RNA, 22 nt, Human
uuaaggaaagccaaaaugaauu

SEQ ID NO: 725586 - RNA, 22 nt, Human
uauaacacucagaaagaaucau

SEQ ID NO: 725587 - RNA, 22 nt, Human
ucuggccccuggucucuggugu

SEQ ID NO: 725588 - RNA, 22 nt, Human
uuuacaaggcaguuauuuuccu

SEQ ID NO: 725589 - RNA, 22 nt, Human
uuucaauaacaaagcucauuuu

SEQ ID NO: 725590 - RNA, 16 nt, Human
uuucucucugcuauuu

SEQ ID NO: 725591 - RNA, 22 nt, Human
gacuuucugauguaaacauuua

SEQ ID NO: 725592 - RNA, 22 nt, Human
acagcaggcaugaaugacacug

SEQ ID NO: 725593 - RNA, 22 nt, Human
uaguaaaucucagaaaaagauc

SEQ ID NO: 725594 - RNA, 22 nt, Human
cucaaauauguggucagaaagc

SEQ ID NO: 725595 - RNA, 22 nt, Human
uggaauguuguguauaggucag

SEQ ID NO: 725596 - RNA, 22 nt, Human
uuacuuuugcaccaaacuaaua

SEQ ID NO: 725597 - RNA, 22 nt, Human
cucugcugguagcucauuccau

SEQ ID NO: 725598 - RNA, 22 nt, Human
uaaagcauaaugaauaucuaga

SEQ ID NO: 725599 - RNA, 22 nt, Human
agagaccagaauccagcugccu

SEQ ID NO: 725600 - RNA, 22 nt, Human
aaggcugguuuccuugauguuu

SEQ ID NO: 725601 - RNA, 22 nt, Human
ccuuuucuauguaccagcagug

SEQ ID NO: 725602 - RNA, 22 nt, Human
ugcccucccacauuauggcugu

SEQ ID NO: 725603 - RNA, 22 nt, Human
gccugcaggcuguaguuuguga

SEQ ID NO: 725604 - RNA, 22 nt, Human
gugggccaguuccucacaggua

SEQ ID NO: 725605 - RNA, 22 nt, Human
agcugguggaagggagcccaaa

SEQ ID NO: 725606 - RNA, 22 nt, Human
accagagagccuaggcugggca

SEQ ID NO: 725607 - RNA, 22 nt, Human
cccagcuggccagguggcuuug

SEQ ID NO: 725608 - RNA, 22 nt, Human
ccccugcuggccugcugguuuc

SEQ ID NO: 725609 - RNA, 22 nt, Human
uaugcacacaggcuuaauucau

SEQ ID NO: 725610 - RNA, 20 nt, Human
aaucacaguuaacucuuucu

SEQ ID NO: 725611 - RNA, 22 nt, Human
auggccagcaaguucagaauuu

SEQ ID NO: 725612 - RNA, 22 nt, Human
caugaaugcuggguucauguaa

SEQ ID NO: 725613 - RNA, 22 nt, Human
aacuccaggcagggaggccacu

SEQ ID NO: 725614 - RNA, 20 nt, Human
uuucugcagauguuuacaug

SEQ ID NO: 725615 - RNA, 19 nt, Human
cugaggugaggggcaucau

SEQ ID NO: 725616 - RNA, 22 nt, Human
ccaaagaaacccaagcucaggg

SEQ ID NO: 725617 - RNA, 22 nt, Human
cggcugagcagugcugauggaa

SEQ ID NO: 725618 - RNA, 22 nt, Human
aguuuaauuggaggcguggcuc

SEQ ID NO: 725619 - RNA, 22 nt, Human
ugcauuuauggaguuaccucau

SEQ ID NO: 725620 - RNA, 22 nt, Human
ccuuagcaaauuggcaucuucu

SEQ ID NO: 725621 - RNA, 22 nt, Human
gaucucugaaucugaagccuuc

SEQ ID NO: 725622 - RNA, 22 nt, Human
acaucauuucuaguuccuguca

SEQ ID NO: 725623 - RNA, 20 nt, Human
ccuguggagcugccuccucc

SEQ ID NO: 725624 - RNA, 22 nt, Human
uugaagaucuuugcauugcagg

SEQ ID NO: 725625 - RNA, 22 nt, Human
aacuguaagaaauaaaauucug

SEQ ID NO: 725626 - RNA, 22 nt, Human
cugaggccucacuguagucccu

SEQ ID NO: 725627 - RNA, 22 nt, Human
ggucagggggaucugugaggua

SEQ ID NO: 725628 - RNA, 22 nt, Human
agcuggggcugcagagaacagg

SEQ ID NO: 725629 - RNA, 22 nt, Human
auucagcaaacauuuauuaucu

SEQ ID NO: 725630 - RNA, 22 nt, Human
gccuggcugcuuagccuacuuc

SEQ ID NO: 725631 - RNA, 22 nt, Human
ugcugagguuguggagugcauu

SEQ ID NO: 725632 - RNA, 22 nt, Human
agccagagauccaucccuagga

SEQ ID NO: 725633 - RNA, 22 nt, Human
cauacauuuauacacaucuaug

SEQ ID NO: 725634 - RNA, 22 nt, Human
cugucuuuucuucucauugaug

SEQ ID NO: 725635 - RNA, 22 nt, Human
agcagggcaguuaaaggguccu

SEQ ID NO: 725636 - RNA, 22 nt, Human
uacacuguuuuuggaaagaaga

SEQ ID NO: 725637 - RNA, 22 nt, Human
caguauuuucaggauuuggaag

SEQ ID NO: 725638 - RNA, 22 nt, Human
caggcuggucccagagcauugc

SEQ ID NO: 725639 - RNA, 22 nt, Human
ucaucuuuaccccuugcuucaa

SEQ ID NO: 725640 - RNA, 22 nt, Human
gcuuucuggagccugggggaac

SEQ ID NO: 725641 - RNA, 22 nt, Human
uggccagugauuaaugacgcuu

SEQ ID NO: 725642 - RNA, 19 nt, Human
cucugccucccuccugggu

SEQ ID NO: 725643 - RNA, 22 nt, Human
uagucagacccaagagagccau

SEQ ID NO: 725644 - RNA, 22 nt, Human
uugauucugggcucauuucuuu

SEQ ID NO: 725645 - RNA, 22 nt, Human
uuuugugaauaguuuaucuaag

SEQ ID NO: 725646 - RNA, 22 nt, Human
cguccugggucugggaaggcau

SEQ ID NO: 725647 - RNA, 22 nt, Human
auuggcuugcacuguauuuuaa

SEQ ID NO: 725648 - RNA, 22 nt, Human
ggccuuugcguccacgccgcuu

SEQ ID NO: 725649 - RNA, 22 nt, Human
ugccuuuaaggaaucauucuug

SEQ ID NO: 725650 - RNA, 22 nt, Human
uccaaguccauuaugguggucu

SEQ ID NO: 725651 - RNA, 22 nt, Human
aagcagugacucucagaggcag

SEQ ID NO: 725652 - RNA, 21 nt, Human
cucuucaguggugagcucuuc

SEQ ID NO: 725653 - RNA, 22 nt, Human
uggcagcagggaggccaguguu

SEQ ID NO: 725654 - RNA, 22 nt, Human
ucugggaaaguaaauguaaagg

SEQ ID NO: 725655 - RNA, 22 nt, Human
gauuucagaagcaagaggaggu

SEQ ID NO: 725656 - RNA, 22 nt, Human
auuaucaaguuuacugugugga

SEQ ID NO: 725657 - RNA, 22 nt, Human
ggcagcagcaagguuggagcug

SEQ ID NO: 725658 - RNA, 22 nt, Human
ugggaggcagaaguugacugga

SEQ ID NO: 725659 - RNA, 19 nt, Human
gauauaaagagauggugaa

SEQ ID NO: 725660 - RNA, 21 nt, Human
aggcugugacuuacacuaucu

SEQ ID NO: 725661 - RNA, 22 nt, Human
acauauaugcgugggcucaugg

SEQ ID NO: 725662 - RNA, 22 nt, Human
caggaaguuguguguucgaggc

SEQ ID NO: 725663 - RNA, 22 nt, Human
aaugcuuuuacgacauguaccu

SEQ ID NO: 725664 - RNA, 22 nt, Human
ucugggaauaaaacuagggacu

SEQ ID NO: 725665 - RNA, 22 nt, Human
cugggagacgcagcuggggauc

SEQ ID NO: 725666 - RNA, 21 nt, Human
agagacagagaaaguaacauu

SEQ ID NO: 725667 - RNA, 22 nt, Human
ccauggaacucaguaaauuaua

SEQ ID NO: 725668 - RNA, 22 nt, Human
cacugagaguagggcacaagug

SEQ ID NO: 725669 - RNA, 22 nt, Human
agaggcuuccugccaccugaga

SEQ ID NO: 725670 - RNA, 22 nt, Human
ucuuggaaucuccauagaguga

SEQ ID NO: 725671 - RNA, 22 nt, Human
caagagcuggguggcaagcuag

SEQ ID NO: 725672 - RNA, 22 nt, Human
cagaagcauuccagcaaauagu

SEQ ID NO: 725673 - RNA, 22 nt, Human
ucuuggauuuuaauggaucaaa

SEQ ID NO: 725674 - RNA, 22 nt, Human
acauccauguuguaauguuccu

SEQ ID NO: 725675 - RNA, 22 nt, Human
gaggcaguuugccaugccagga

SEQ ID NO: 725676 - RNA, 22 nt, Human
gggagcugagcucugagccacg

SEQ ID NO: 725677 - RNA, 22 nt, Human
uuagaaagcuuuccauagucaa

SEQ ID NO: 725678 - RNA, 20 nt, Human
uucuucucuaguuaucuuca

SEQ ID NO: 725679 - RNA, 22 nt, Human
auucuccaucaccacuggcacu

SEQ ID NO: 725680 - RNA, 22 nt, Human
gacaaugugacagaccaaugau

SEQ ID NO: 725681 - RNA, 22 nt, Human
uccaggcaagggaggagcaugg

SEQ ID NO: 725682 - RNA, 22 nt, Human
cuggcccuugacuuacagcagg

SEQ ID NO: 725683 - RNA, 22 nt, Human
ucugaugucugaaaugcucuug

SEQ ID NO: 725684 - RNA, 22 nt, Human
auuucuuaucugaggucuacau

SEQ ID NO: 725685 - RNA, 22 nt, Human
cagaauguauaugaucuaaggu

SEQ ID NO: 725686 - RNA, 22 nt, Human
ccugccugaaggucagccaccc

SEQ ID NO: 725687 - RNA, 22 nt, Human
uuuggaauauuaaaaugucuca

SEQ ID NO: 725688 - RNA, 22 nt, Human
ucacuccucauugcugcccauu

SEQ ID NO: 725689 - RNA, 22 nt, Human
uuagaacuuaaacuucagaaag

SEQ ID NO: 725690 - RNA, 22 nt, Human
uuggaacuggaggaacaugcua

SEQ ID NO: 725691 - RNA, 22 nt, Human
uccaagaaguuucguuaaaugu

SEQ ID NO: 725692 - RNA, 22 nt, Human
ugggcaagucacuucugucuuu

SEQ ID NO: 725693 - RNA, 22 nt, Human
uacccagcaaucccuagagguu

SEQ ID NO: 725694 - RNA, 22 nt, Human
ugagcugucugaauggugagga

SEQ ID NO: 725695 - RNA, 22 nt, Human
aauauacuauacuacuuucugg

SEQ ID NO: 725696 - RNA, 22 nt, Human
uaaagcagugugguuguguccc

SEQ ID NO: 725697 - RNA, 22 nt, Human
gcucugugccacaugcaguguu

SEQ ID NO: 725698 - RNA, 22 nt, Human
cuccagccucagaugacgguac

SEQ ID NO: 725699 - RNA, 23 nt, Human
uuuaacuuuccaauaauucauug

SEQ ID NO: 725700 - RNA, 22 nt, Human
uuccaaaggaauggggagcuau

SEQ ID NO: 725701 - RNA, 22 nt, Human
cucugggacaucccuuggccua

SEQ ID NO: 725702 - RNA, 22 nt, Human
gaaaugcauaaucuuaguagau

SEQ ID NO: 725703 - RNA, 19 nt, Human
cugggcugaggucugccuu

SEQ ID NO: 725704 - RNA, 22 nt, Human
uuuaguauucucuauuuccauc

SEQ ID NO: 725705 - RNA, 22 nt, Human
agggagucaacacaguaauguu

SEQ ID NO: 725706 - RNA, 22 nt, Human
gcaguguuccuucuacuggggc

SEQ ID NO: 725707 - RNA, 22 nt, Human
uauauucuauuguaccucuccu

SEQ ID NO: 725708 - RNA, 22 nt, Human
aacugcaauuacuuuugcacca

SEQ ID NO: 725709 - RNA, 22 nt, Human
ggugcaugguggaggugacccu

SEQ ID NO: 725710 - RNA, 22 nt, Human
aucuuccaagcucccuggugua

SEQ ID NO: 725711 - RNA, 22 nt, Human
gcuccaggagagggaagcagau

SEQ ID NO: 725712 - RNA, 19 nt, Human
uccagacuguccaggcuau

SEQ ID NO: 725713 - RNA, 21 nt, Human
acugugauaaugcuuuuucug

SEQ ID NO: 725714 - RNA, 22 nt, Human
auucaaauuaaguuaauucagc

SEQ ID NO: 725715 - RNA, 22 nt, Human
gcagggcuguaauuugagccug

SEQ ID NO: 725716 - RNA, 22 nt, Human
uggagccugagucagcggaggc

SEQ ID NO: 725717 - RNA, 22 nt, Human
cuccccauccaggcagcaggug

SEQ ID NO: 725718 - RNA, 22 nt, Human
agacaugugguauaaucagggg

SEQ ID NO: 725719 - RNA, 22 nt, Human
gaugaaauucagaauugagggg

SEQ ID NO: 725720 - RNA, 21 nt, Human
agcucagcaagauggaggcuc

SEQ ID NO: 725721 - RNA, 22 nt, Human
uucuccgcuaaguucucugcag

SEQ ID NO: 725722 - RNA, 22 nt, Human
uuuaaccugucaauuugcaugc

SEQ ID NO: 725723 - RNA, 22 nt, Human
ucagaccauccugcuguuagug

SEQ ID NO: 725724 - RNA, 22 nt, Human
aauggcaugacuugcccaaggc

SEQ ID NO: 725725 - RNA, 22 nt, Human
guauuucugguaacugcugcua

SEQ ID NO: 725726 - RNA, 22 nt, Human
gagaauaaaucuaaaguuucuu

SEQ ID NO: 725727 - RNA, 22 nt, Human
gucauaaagacagaaacauucc

SEQ ID NO: 725728 - RNA, 22 nt, Human
cuuucacagccuucguucugaa

SEQ ID NO: 725729 - RNA, 22 nt, Human
gagaacugauuagcauuugcca

SEQ ID NO: 725730 - RNA, 22 nt, Human
aaagcaaucuaguuccaauucu

SEQ ID NO: 725731 - RNA, 22 nt, Human
caugccaugugugaggagagga

SEQ ID NO: 725732 - RNA, 22 nt, Human
uuuaagauucaguaaggcaaac

SEQ ID NO: 725733 - RNA, 22 nt, Human
uuuguauuuuucccagcuagcu

SEQ ID NO: 725734 - RNA, 22 nt, Human
ggcuuugguagacacagauuga

SEQ ID NO: 725735 - RNA, 22 nt, Human
uggacacacauguaugucagag

SEQ ID NO: 725736 - RNA, 22 nt, Human
acaguaccugcucucaagcaaa

SEQ ID NO: 725737 - RNA, 22 nt, Human
cuauacaguaaccacagugauu

SEQ ID NO: 725738 - RNA, 19 nt, Human
ugcuggaacaucaguagcu

SEQ ID NO: 725739 - RNA, 22 nt, Human
uuucaguguaucuuccaaaagc

SEQ ID NO: 725740 - RNA, 19 nt, Human
cacuuuauuucuguuuugu

SEQ ID NO: 725741 - RNA, 21 nt, Human
augugugcuagaggacuacug

SEQ ID NO: 725742 - RNA, 22 nt, Human
uucucuccaguccuggauucug

SEQ ID NO: 725743 - RNA, 22 nt, Human
cagcagacuggaguaggcagug

SEQ ID NO: 725744 - RNA, 21 nt, Human
aggcuuggaucuagacaggcc

SEQ ID NO: 725745 - RNA, 22 nt, Human
augcccuggggcuaccucugag

SEQ ID NO: 725746 - RNA, 22 nt, Human
uucagggcuuagggaaauagug

SEQ ID NO: 725747 - RNA, 22 nt, Human
ggguccaggucuucaggcagag

SEQ ID NO: 725748 - RNA, 22 nt, Human
gcauuucuuccuggugugagcc

SEQ ID NO: 725749 - RNA, 22 nt, Human
ggcggggucugagcgccgcgcc

SEQ ID NO: 725750 - RNA, 22 nt, Human
uacuuuauauuguggcuggcca

SEQ ID NO: 725751 - RNA, 22 nt, Human
gggccccaagaaccuccuccug

SEQ ID NO: 725752 - RNA, 19 nt, Human
uuucugcagcucagagaag

SEQ ID NO: 725753 - RNA, 22 nt, Human
aauuauguagccauaugaaaca

SEQ ID NO: 725754 - RNA, 22 nt, Human
uuagcugcauuaucaaaguuau

SEQ ID NO: 725755 - RNA, 22 nt, Human
uuagaaagggugucugaaucug

SEQ ID NO: 725756 - RNA, 19 nt, Human
ucuugaugagguuucucca

SEQ ID NO: 725757 - RNA, 22 nt, Human
guagggacaauauguuauuaga

SEQ ID NO: 725758 - RNA, 22 nt, Human
cugucuggaaugcaguacauag

SEQ ID NO: 725759 - RNA, 22 nt, Human
cugcugguuagucuuaguggga

SEQ ID NO: 725760 - RNA, 22 nt, Human
cucagaaaucccacucugugua

SEQ ID NO: 725761 - RNA, 22 nt, Human
uggaagaaggcagagaggcauu

SEQ ID NO: 725762 - RNA, 22 nt, Human
ccagccugaaaugccucauccu

SEQ ID NO: 725763 - RNA, 22 nt, Human
uccuggccaaguuacucucugc

SEQ ID NO: 725764 - RNA, 22 nt, Human
aagcugaggcccauggcaaggu

SEQ ID NO: 725765 - RNA, 22 nt, Human
ccaggaccuggagcucuaugaa

SEQ ID NO: 725766 - RNA, 22 nt, Human
guuccucaaaaaggagagcccc

SEQ ID NO: 725767 - RNA, 22 nt, Human
uccucagcauggaaucuggacu

SEQ ID NO: 725768 - RNA, 22 nt, Human
gagcacaguguguugugauuuc

SEQ ID NO: 725769 - RNA, 22 nt, Human
guggccagagauuaaauagagu

SEQ ID NO: 725770 - RNA, 22 nt, Human
uaggcucagggcugggugacgg

SEQ ID NO: 725771 - RNA, 22 nt, Human
gggcuccaguuuggccaggaag

SEQ ID NO: 725772 - RNA, 22 nt, Human
cuccagugcccuccuugggggc

SEQ ID NO: 725773 - RNA, 22 nt, Human
cuggcccuggagggcugugcga

SEQ ID NO: 725774 - RNA, 22 nt, Human
uguacacauaucauuuguggga

SEQ ID NO: 725775 - RNA, 22 nt, Human
cagagguagaaggcaugcagug

SEQ ID NO: 725776 - RNA, 22 nt, Human
ugggagaagcagugggacagua

SEQ ID NO: 725777 - RNA, 22 nt, Human
agacccugguaaacacuccagg

SEQ ID NO: 725778 - RNA, 22 nt, Human
uucaguuugaauucuguagaac

SEQ ID NO: 725779 - RNA, 22 nt, Human
ugugugugaaccauugagggcu

SEQ ID NO: 725780 - RNA, 22 nt, Human
uggccacaguguccagcagcag

SEQ ID NO: 725781 - RNA, 22 nt, Human
cuguggcagggaagaggccaug

SEQ ID NO: 725782 - RNA, 22 nt, Human
ugucugugacagaccuuugcua

SEQ ID NO: 725783 - RNA, 22 nt, Human
ugucucuggcugcagccuguuc

SEQ ID NO: 725784 - RNA, 18 nt, Human
ggaaggaguggaccccag

SEQ ID NO: 725785 - RNA, 22 nt, Human
uccagccauaucuuguagcccu

SEQ ID NO: 725786 - RNA, 22 nt, Human
aaacaugaugccuguacuaaga

SEQ ID NO: 725787 - RNA, 22 nt, Human
cccuccagcucaaagcaaccgg

SEQ ID NO: 725788 - RNA, 22 nt, Human
uucuaugaagguaagauguacg

SEQ ID NO: 725789 - RNA, 22 nt, Human
uccaggccacgaccuccuggau

SEQ ID NO: 725790 - RNA, 22 nt, Human
ugcagggcaguuuguuucggca

SEQ ID NO: 725791 - RNA, 22 nt, Human
agauaugguuugcauaaauaag

SEQ ID NO: 725792 - RNA, 23 nt, Human
agauugaaguauugaccagagcu

SEQ ID NO: 725793 - RNA, 21 nt, Human
ccacuguagacucauucugag

SEQ ID NO: 725794 - RNA, 22 nt, Human
aaggguugaagauaaauaaggu

SEQ ID NO: 725795 - RNA, 22 nt, Human
gcugugaguggaguucugugcu

SEQ ID NO: 725796 - RNA, 21 nt, Human
uggcagcacccacacccucug

SEQ ID NO: 725797 - RNA, 23 nt, Human
aagaggaggcccugcucccgucc

SEQ ID NO: 725798 - RNA, 22 nt, Human
cuaguaaaucagaagcuguggg

SEQ ID NO: 725799 - RNA, 22 nt, Human
gauggcuuacagacaguuagga

SEQ ID NO: 725800 - RNA, 22 nt, Human
ugcaauuuucagaaauuccaaa

SEQ ID NO: 725801 - RNA, 22 nt, Human
ggugagaaagggauuccuguuc

SEQ ID NO: 725802 - RNA, 22 nt, Human
uggagacucugcaucugugaca

SEQ ID NO: 725803 - RNA, 22 nt, Human
gcuuugcuagcacugcgcuucc

SEQ ID NO: 725804 - RNA, 21 nt, Human
cagaucuguagguacuaccau

SEQ ID NO: 725805 - RNA, 22 nt, Human
cagauaaaauuaauauuaccaa

SEQ ID NO: 725806 - RNA, 22 nt, Human
acauuuguacauuggcaugucu

SEQ ID NO: 725807 - RNA, 22 nt, Human
caaagugcuggaauuacaggug

SEQ ID NO: 725808 - RNA, 22 nt, Human
guuauacacauuccuggugagg

SEQ ID NO: 725809 - RNA, 22 nt, Human
ucacccuuaguguacuaucaug

SEQ ID NO: 725810 - RNA, 22 nt, Human
caggcccuggcagggcugaguc

SEQ ID NO: 725811 - RNA, 22 nt, Human
gccuccuggccuuugcuccuca

SEQ ID NO: 725812 - RNA, 22 nt, Human
cuaggaaagacacagagaguuu

SEQ ID NO: 725813 - RNA, 20 nt, Human
accauaauguuaauuacaaa

SEQ ID NO: 725814 - RNA, 22 nt, Human
agaaaauauucauugagaggcu

SEQ ID NO: 725815 - RNA, 22 nt, Human
aauucugaugauacugcauugu

SEQ ID NO: 725816 - RNA, 22 nt, Human
agugggggccaacgagggcagc

SEQ ID NO: 725817 - RNA, 22 nt, Human
guuuacaacaucuuguccuuca

SEQ ID NO: 725818 - RNA, 22 nt, Human
ugcuuuauaacuuaguuuaugg

SEQ ID NO: 725819 - RNA, 22 nt, Human
agcagaacauuuucagggcugu

SEQ ID NO: 725820 - RNA, 22 nt, Human
acagauauuaugguuucuccuu

SEQ ID NO: 725821 - RNA, 22 nt, Human
agcugcccagauaggaggaggc

SEQ ID NO: 725822 - RNA, 22 nt, Human
ucacguuuuacugagugagaua

SEQ ID NO: 725823 - RNA, 22 nt, Human
ccugggagccgacugacugugc

SEQ ID NO: 725824 - RNA, 21 nt, Human
cgcagagcgaacuugcggcgc

SEQ ID NO: 725825 - RNA, 22 nt, Human
cucuguccuccaccugcuuuca

SEQ ID NO: 725826 - RNA, 22 nt, Human
cugaggccccucuugugagcau

SEQ ID NO: 725827 - RNA, 18 nt, Human
ugaccugcgcuucacggu

SEQ ID NO: 725828 - RNA, 22 nt, Human
gcugaggacaucauggaaggaa

SEQ ID NO: 725829 - RNA, 23 nt, Human
agcagggccagaauacuugcugu

SEQ ID NO: 725830 - RNA, 22 nt, Human
gggggcagaauguacucuuguc

SEQ ID NO: 725831 - RNA, 22 nt, Human
aaacccauggcugauaucacua

SEQ ID NO: 725832 - RNA, 22 nt, Human
aguaaacauuucagauuuauuu

SEQ ID NO: 725833 - RNA, 22 nt, Human
agaauccugaugaaaaggagag

SEQ ID NO: 725834 - RNA, 22 nt, Human
ugaaucaaugaauugcacuuca

SEQ ID NO: 725835 - RNA, 22 nt, Human
gagggaugguaguugacacuga

SEQ ID NO: 725836 - RNA, 22 nt, Human
uucagcaaauggcuugagauaa

SEQ ID NO: 725837 - RNA, 22 nt, Human
agcagcagauccaaaaaaugug

SEQ ID NO: 725838 - RNA, 22 nt, Human
gggucagcucccuccccagggc

SEQ ID NO: 725839 - RNA, 22 nt, Human
uuccuuucacguuuuaaugcac

SEQ ID NO: 725840 - RNA, 22 nt, Human
uucaggaauaauuaucauauga

SEQ ID NO: 725841 - RNA, 22 nt, Human
cagcacaggccugucuuugucu

SEQ ID NO: 725842 - RNA, 22 nt, Human
gcugaguugaaagcagaggaua

SEQ ID NO: 725843 - RNA, 22 nt, Human
acucugagcaucccaagucuua

SEQ ID NO: 725844 - RNA, 22 nt, Human
auguucuuuggaauuuaugaaa

SEQ ID NO: 725845 - RNA, 22 nt, Human
guggugcauccuugaguaagcu

SEQ ID NO: 725846 - RNA, 22 nt, Human
caagacuucaccgcucugugcu

SEQ ID NO: 725847 - RNA, 22 nt, Human
gccuaauaacuagcuguguaac

SEQ ID NO: 725848 - RNA, 22 nt, Human
aaauagcuucuaagccuuuuga

SEQ ID NO: 725849 - RNA, 22 nt, Human
gcuuuacaaguggugcagauua

SEQ ID NO: 725850 - RNA, 19 nt, Human
guucuuuucaccucugugc

SEQ ID NO: 725851 - RNA, 22 nt, Human
uuguucuugccaagacaugaag

SEQ ID NO: 725852 - RNA, 22 nt, Human
cccucgcucuaggcagcccugu

SEQ ID NO: 725853 - RNA, 22 nt, Human
guucacaauggcuuuaccuaag

SEQ ID NO: 725854 - RNA, 18 nt, Human
gagguccugcucuagccc

SEQ ID NO: 725855 - RNA, 23 nt, Human
uccuaacugauucugcagucucu

SEQ ID NO: 725856 - RNA, 21 nt, Human
ugacauuuccaauauaaagcc

SEQ ID NO: 725857 - RNA, 22 nt, Human
gcuggccugaccagccacaggc

SEQ ID NO: 725858 - RNA, 20 nt, Human
gaacauuuggccauacugag

SEQ ID NO: 725859 - RNA, 18 nt, Human
acauuucuaugcuucugg

SEQ ID NO: 725860 - RNA, 22 nt, Human
ugcuggcucaguuugcagacuc

SEQ ID NO: 725861 - RNA, 22 nt, Human
gggcacuguacacugugcaugg

SEQ ID NO: 725862 - RNA, 22 nt, Human
aagugauucuagucaugauucu

SEQ ID NO: 725863 - RNA, 22 nt, Human
uggcucaaguaacaaaaauaua

SEQ ID NO: 725864 - RNA, 22 nt, Human
uuagcugaaaaaauucaugcaa

SEQ ID NO: 725865 - RNA, 22 nt, Human
uccuuaaaugaacucugcauga

SEQ ID NO: 725866 - RNA, 22 nt, Human
cucugccaccaugcuuccugac

SEQ ID NO: 725867 - RNA, 23 nt, Human
acagagaucuugacuuguaugga

SEQ ID NO: 725868 - RNA, 22 nt, Human
cagagccagcccacuguucccg

SEQ ID NO: 725869 - RNA, 22 nt, Human
acaggaaaugaaaugguaucua

SEQ ID NO: 725870 - RNA, 22 nt, Human
acauaccauacauggugagaug

SEQ ID NO: 725871 - RNA, 17 nt, Human
uuucccuccuuccacuc

SEQ ID NO: 725872 - RNA, 22 nt, Human
ccuucuagcaaaucaacauaaa

SEQ ID NO: 725873 - RNA, 22 nt, Human
aaaugcauucuguuuucacuag

SEQ ID NO: 725874 - RNA, 22 nt, Human
ucacugcucuccaauguggagu

SEQ ID NO: 725875 - RNA, 22 nt, Human
gcuucugcgcacgcuucuuccc

SEQ ID NO: 725876 - RNA, 22 nt, Human
aagcauuucaauauaauauuca

SEQ ID NO: 725877 - RNA, 22 nt, Human
ucacagaaagcuguguccugac

SEQ ID NO: 725878 - RNA, 22 nt, Human
acagcagugucugguacugagu

SEQ ID NO: 725879 - RNA, 23 nt, Human
aggaagaggcaauuucucuuaga

SEQ ID NO: 725880 - RNA, 22 nt, Human
ugaaucaugccacugagcuccc

SEQ ID NO: 725881 - RNA, 22 nt, Human
cucaggccuugaagucuuuucu

SEQ ID NO: 725882 - RNA, 21 nt, Human
agauccuggggucuggggagg

SEQ ID NO: 725883 - RNA, 22 nt, Human
acagauggccauauuacuauau

SEQ ID NO: 725884 - RNA, 22 nt, Human
aucugaggguuugggcaucagc

SEQ ID NO: 725885 - RNA, 22 nt, Human
auucugggcaagccuucuuaua

SEQ ID NO: 725886 - RNA, 22 nt, Human
auuguaaauagugccacaauaa

SEQ ID NO: 725887 - RNA, 22 nt, Human
uugaauaauuaauuacacucag

SEQ ID NO: 725888 - RNA, 22 nt, Human
uucauugaagcacaagugaucu

SEQ ID NO: 725889 - RNA, 22 nt, Human
ccagcuccugggucuuagucag

SEQ ID NO: 725890 - RNA, 22 nt, Human
aauaucagcucugucacuuacu

SEQ ID NO: 725891 - RNA, 22 nt, Human
ugagcuugcagugccagccuug

SEQ ID NO: 725892 - RNA, 22 nt, Human
aaagcagcacauggauaucagu

SEQ ID NO: 725893 - RNA, 22 nt, Human
acauucauugagcaacaacaau

SEQ ID NO: 725894 - RNA, 22 nt, Human
aagugugguuuaggcaucuuuu

SEQ ID NO: 725895 - RNA, 22 nt, Human
ugaguccagaugggccagcagg

SEQ ID NO: 725896 - RNA, 22 nt, Human
auacagaagccuguauuucugg

SEQ ID NO: 725897 - RNA, 22 nt, Human
uucaggauuguguuuuuccuga

SEQ ID NO: 725898 - RNA, 22 nt, Human
uccaggcuagguuuacaggaca

SEQ ID NO: 725899 - RNA, 22 nt, Human
guggguggacggugcuuuuguu

SEQ ID NO: 725900 - RNA, 22 nt, Human
auguuuuauuaccaacuuguac

SEQ ID NO: 725901 - RNA, 22 nt, Human
ugugccugcuagaugguugucg

SEQ ID NO: 725902 - RNA, 22 nt, Human
uggcccaggucucucugagccc

SEQ ID NO: 725903 - RNA, 22 nt, Human
gcuccuggagagauugagaaag

SEQ ID NO: 725904 - RNA, 22 nt, Human
ugugugggcgaagacagccuuu

SEQ ID NO: 725905 - RNA, 22 nt, Human
ggcguuucaccauguugaccag

SEQ ID NO: 725906 - RNA, 23 nt, Human
ggugguggugagucacgggcuca

SEQ ID NO: 725907 - RNA, 22 nt, Human
aagggacccuggaucaaaugga

SEQ ID NO: 725908 - RNA, 22 nt, Human
acuucucuuccccggaacucua

SEQ ID NO: 725909 - RNA, 22 nt, Human
acucucccugcuauccacuucc

SEQ ID NO: 725910 - RNA, 22 nt, Human
acacucacccucccacugccug

SEQ ID NO: 725911 - RNA, 22 nt, Human
cugcuccaguagccccaugugg

SEQ ID NO: 725912 - RNA, 22 nt, Human
uucucacaggcuggaaugauga

SEQ ID NO: 725913 - RNA, 21 nt, Human
cuguccaguaauuccuggcac

SEQ ID NO: 725914 - RNA, 22 nt, Human
aggucagcaugcuccucucugu

SEQ ID NO: 725915 - RNA, 22 nt, Human
cugaggugcuagggucccugcu

SEQ ID NO: 725916 - RNA, 22 nt, Human
cccuugggugccagccacaagu

SEQ ID NO: 725917 - RNA, 22 nt, Human
agcacagggacaaugccaggug

SEQ ID NO: 725918 - RNA, 22 nt, Human
cuuggaacaaauuaaacaauac

SEQ ID NO: 725919 - RNA, 22 nt, Human
uggcugugggauaugugacuga

SEQ ID NO: 725920 - RNA, 22 nt, Human
acacaguugauugucacucagg

SEQ ID NO: 725921 - RNA, 22 nt, Human
cccagcucugccaucuacccac

SEQ ID NO: 725922 - RNA, 22 nt, Human
cugaagagcucuccuguccccu

SEQ ID NO: 725923 - RNA, 22 nt, Human
auacaaaguauuaauccuggau

SEQ ID NO: 725924 - RNA, 18 nt, Human
aggccagcccugcuacug

SEQ ID NO: 725925 - RNA, 22 nt, Human
ucccaaaguauuagcauuucaa

SEQ ID NO: 725926 - RNA, 20 nt, Human
ucuguacacucaucuucugc

SEQ ID NO: 725927 - RNA, 22 nt, Human
ccaggccugauugggaaucuug

SEQ ID NO: 725928 - RNA, 22 nt, Human
cauugucugguaggaagugggc

SEQ ID NO: 725929 - RNA, 22 nt, Human
agagcacugagugagcaaggcc

SEQ ID NO: 725930 - RNA, 22 nt, Human
ucauugaagacuuacuggcuuc

SEQ ID NO: 725931 - RNA, 20 nt, Human
uuagaguuagcuguuaugca

SEQ ID NO: 725932 - RNA, 22 nt, Human
cccuaggguuuggccagagccc

SEQ ID NO: 725933 - RNA, 22 nt, Human
uagauuucgcugcaucucaauc

SEQ ID NO: 725934 - RNA, 22 nt, Human
uuuucauuguuccucgagcauu

SEQ ID NO: 725935 - RNA, 22 nt, Human
aguauguugaguuuugcuuuag

SEQ ID NO: 725936 - RNA, 22 nt, Human
cuggggcaucauccauucuuuc

SEQ ID NO: 725937 - RNA, 22 nt, Human
uggaggugagugugguacagca

SEQ ID NO: 725938 - RNA, 22 nt, Human
gcuaaauaaucuucuucugaca

SEQ ID NO: 725939 - RNA, 22 nt, Human
uuucuaaguguauugagcuugg

SEQ ID NO: 725940 - RNA, 18 nt, Human
uccagagcuggugcuucu

SEQ ID NO: 725941 - RNA, 22 nt, Human
cucucccuggccagcugugcag

SEQ ID NO: 725942 - RNA, 22 nt, Human
gaaagauaaucaauuacuccuu

SEQ ID NO: 725943 - RNA, 22 nt, Human
augcuuccaacaguucugugaa

SEQ ID NO: 725944 - RNA, 22 nt, Human
agauaaaaugauuuucuggauc

SEQ ID NO: 725945 - RNA, 22 nt, Human
auucuuuaguuggcuucuugcc

SEQ ID NO: 725946 - RNA, 22 nt, Human
cucagggucugguccuuagauu

SEQ ID NO: 725947 - RNA, 23 nt, Human
auauucacgccgccagagguccc

SEQ ID NO: 725948 - RNA, 22 nt, Human
uuguuuuaacgacucagcuugu

SEQ ID NO: 725949 - RNA, 22 nt, Human
aauguauuccucaugcaagagu

SEQ ID NO: 725950 - RNA, 22 nt, Human
cagguccuggcaucaggcaggu

SEQ ID NO: 725951 - RNA, 22 nt, Human
uuauuuggaaauauggcuucug

SEQ ID NO: 725952 - RNA, 22 nt, Human
aaucuguuuguuuacaccuuuu

SEQ ID NO: 725953 - RNA, 22 nt, Human
ugggccaggggccucuucugau

SEQ ID NO: 725954 - RNA, 22 nt, Human
acucagaaugacugaugcugug

SEQ ID NO: 725955 - RNA, 22 nt, Human
aggcucuggaguuagccaggca

SEQ ID NO: 725956 - RNA, 22 nt, Human
gccuggcugaggccucugcuaa

SEQ ID NO: 725957 - RNA, 22 nt, Human
cuucuuuugaagggcguugugu

SEQ ID NO: 725958 - RNA, 22 nt, Human
aguuguauuagagaacacaaac

SEQ ID NO: 725959 - RNA, 22 nt, Human
uagcuucagggaaaccacugcu

SEQ ID NO: 725960 - RNA, 23 nt, Human
aucucucuuuauucuuggggaua

SEQ ID NO: 725961 - RNA, 23 nt, Human
agcaggcaucuguggcacaaggc

SEQ ID NO: 725962 - RNA, 18 nt, Human
uguuuauucuccugacag

SEQ ID NO: 725963 - RNA, 22 nt, Human
acuuccaguuuuaauuaaauug

SEQ ID NO: 725964 - RNA, 20 nt, Human
acuggcagccugccugcugu

SEQ ID NO: 725965 - RNA, 22 nt, Human
ggcaagauccaaggggcuagga

SEQ ID NO: 725966 - RNA, 22 nt, Human
gacagaaucaucuccugggacu

SEQ ID NO: 725967 - RNA, 20 nt, Human
cuagccuggccuugcucugg

SEQ ID NO: 725968 - RNA, 22 nt, Human
aggaaggguggauaguaacgug

SEQ ID NO: 725969 - RNA, 22 nt, Human
uaugaaaugauggggaaaauag

SEQ ID NO: 725970 - RNA, 22 nt, Human
ugcugccuuagcagccaggcaa

SEQ ID NO: 725971 - RNA, 22 nt, Human
aaauguaagucuuuguuucuua

SEQ ID NO: 725972 - RNA, 22 nt, Human
augacaguacuggugacaauac

SEQ ID NO: 725973 - RNA, 22 nt, Human
cuuugugauaguguuaagacca

SEQ ID NO: 725974 - RNA, 22 nt, Human
aguggggaagagcaugggcccu

SEQ ID NO: 725975 - RNA, 22 nt, Human
cuggcagucugguggaaggccu

SEQ ID NO: 725976 - RNA, 22 nt, Human
gccagcugaagggaagcuccug

SEQ ID NO: 725977 - RNA, 22 nt, Human
gaguggguaccggagcaggugc

SEQ ID NO: 725978 - RNA, 22 nt, Human
ucaguguuuuuaaagcaauaua

SEQ ID NO: 725979 - RNA, 22 nt, Human
ugaggccuggacucugcaugga

SEQ ID NO: 725980 - RNA, 22 nt, Human
ucauggggugaauuaguaugcu

SEQ ID NO: 725981 - RNA, 22 nt, Human
cagcuacagaggccacauggcu

SEQ ID NO: 725982 - RNA, 22 nt, Human
cagcccaaagccccaggcuaga

SEQ ID NO: 725983 - RNA, 22 nt, Human
aacuuucagaauccuaugcauu

SEQ ID NO: 725984 - RNA, 22 nt, Human
aauaugcagcaugaugaaguaa

SEQ ID NO: 725985 - RNA, 22 nt, Human
agaauucuccuucagggcagga

SEQ ID NO: 725986 - RNA, 22 nt, Human
gcugggaaugauuuuggagagg

SEQ ID NO: 725987 - RNA, 19 nt, Human
agcuccuguucagcagcuc

SEQ ID NO: 725988 - RNA, 22 nt, Human
agaguuauauugguugagaauu

SEQ ID NO: 725989 - RNA, 22 nt, Human
uuacaacuggugaauuuuaugg

SEQ ID NO: 725990 - RNA, 21 nt, Human
guuuuaagggagaaaaccuag

SEQ ID NO: 725991 - RNA, 22 nt, Human
gucauuuaucaucagaagucau

SEQ ID NO: 725992 - RNA, 22 nt, Human
uuuccauguguacuggccagaa

SEQ ID NO: 725993 - RNA, 22 nt, Human
ccacagagacaggguccuugcu

SEQ ID NO: 725994 - RNA, 20 nt, Human
ugcucuggggguggagagac

SEQ ID NO: 725995 - RNA, 22 nt, Human
aacaguaucuuuuaucagaaau

SEQ ID NO: 725996 - RNA, 22 nt, Human
acuccaggauguagaaucagag

SEQ ID NO: 725997 - RNA, 22 nt, Human
gacaaccgagcagcugugggaa

SEQ ID NO: 725998 - RNA, 22 nt, Human
aggacacaccagguccagcugu

SEQ ID NO: 725999 - RNA, 22 nt, Human
uuccucaggcugcuuucacaua

SEQ ID NO: 726000 - RNA, 22 nt, Human
uugcaaggucaucaugcauugg

SEQ ID NO: 726001 - RNA, 22 nt, Human
ucaccuugugaucucccugccu

SEQ ID NO: 726002 - RNA, 22 nt, Human
aaucaagaguuguguaauauuu

SEQ ID NO: 726003 - RNA, 22 nt, Human
uucuccagaccuugugacuaug

SEQ ID NO: 726004 - RNA, 22 nt, Human
gguuucaacuucaaccucucca

SEQ ID NO: 726005 - RNA, 20 nt, Human
ggcugcccacuccagaguac

SEQ ID NO: 726006 - RNA, 22 nt, Human
gauuucagaguuuauuagguua

SEQ ID NO: 726007 - RNA, 22 nt, Human
agcagguggauuuagacgggag

SEQ ID NO: 726008 - RNA, 22 nt, Human
aggaggccuguuuucuccugga

SEQ ID NO: 726009 - RNA, 22 nt, Human
ggagauagacuuggugagccac

SEQ ID NO: 726010 - RNA, 22 nt, Human
gggugagggaugagccuucuuc

SEQ ID NO: 726011 - RNA, 22 nt, Human
cugaggggauaaagguuugggu

SEQ ID NO: 726012 - RNA, 22 nt, Human
ccucccauggagcucuguccau

SEQ ID NO: 726013 - RNA, 22 nt, Human
cagcugaacauguagagcaucu

SEQ ID NO: 726014 - RNA, 22 nt, Human
auucuuuuaagccccagggauu

SEQ ID NO: 726015 - RNA, 22 nt, Human
caggagcaaauccaaaagaauu

SEQ ID NO: 726016 - RNA, 21 nt, Human
cucugcagcccugcuuccagg

SEQ ID NO: 726017 - RNA, 22 nt, Human
gacaauaagaacagauacugug

SEQ ID NO: 726018 - RNA, 22 nt, Human
cuggaagaggaagccagcugga

SEQ ID NO: 726019 - RNA, 22 nt, Human
cugggcucagaugagaggaagg

SEQ ID NO: 726020 - RNA, 22 nt, Human
cugcaaggcuggggugagcugg

SEQ ID NO: 726021 - RNA, 22 nt, Human
caggcacugugcugagcucugc

SEQ ID NO: 726022 - RNA, 22 nt, Human
ucagaguccuuuggccugacag

SEQ ID NO: 726023 - RNA, 22 nt, Human
acguauauugaaauaucaugag

SEQ ID NO: 726024 - RNA, 22 nt, Human
ucuguagcuucuugagaggcca

SEQ ID NO: 726025 - RNA, 22 nt, Human
uccgaggccaaagcugugaaua

SEQ ID NO: 726026 - RNA, 22 nt, Human
uauuucugaggcccaggaagug

SEQ ID NO: 726027 - RNA, 22 nt, Human
ucugucugcucauuuaccucag

SEQ ID NO: 726028 - RNA, 22 nt, Human
acuuuguuuuauagcacauaag

SEQ ID NO: 726029 - RNA, 22 nt, Human
uccggguuuuacacucacauca

SEQ ID NO: 726030 - RNA, 22 nt, Human
cuuugcauacaauuuuuagaaa

SEQ ID NO: 726031 - RNA, 22 nt, Human
caggaccuggaaugcuugugaa

SEQ ID NO: 726032 - RNA, 22 nt, Human
uggaagugcucuucugaccaac

SEQ ID NO: 726033 - RNA, 22 nt, Human
aaucagaaagaucuugaugaga

SEQ ID NO: 726034 - RNA, 22 nt, Human
cuucuugcugggggccucagug

SEQ ID NO: 726035 - RNA, 22 nt, Human
gagccuggacaucucaggccca

SEQ ID NO: 726036 - RNA, 22 nt, Human
cacacauuccaaaaucaagggu

SEQ ID NO: 726037 - RNA, 22 nt, Human
ucccugggacucagacauggaa

SEQ ID NO: 726038 - RNA, 22 nt, Human
uguacauugucacucaucaagu

SEQ ID NO: 726039 - RNA, 22 nt, Human
aaaugcuugcaacaucccaggu

SEQ ID NO: 726040 - RNA, 20 nt, Human
gcccucagucuugucuuuau

SEQ ID NO: 726041 - RNA, 22 nt, Human
ggcuuguggcaaguguuuuaag

SEQ ID NO: 726042 - RNA, 22 nt, Human
guugcugcaaaggaguguaggu

SEQ ID NO: 726043 - RNA, 22 nt, Human
uucagacaaauuugaggaagcu

SEQ ID NO: 726044 - RNA, 22 nt, Human
cugguuccagaauugccugugg

SEQ ID NO: 726045 - RNA, 22 nt, Human
cuuaggaagcuuuugaggacaa

SEQ ID NO: 726046 - RNA, 22 nt, Human
cuccaggacacuaacccaggcu

SEQ ID NO: 726047 - RNA, 19 nt, Human
agacucugccacucuucuc

SEQ ID NO: 726048 - RNA, 22 nt, Human
uucacagggcagaucauuucug

SEQ ID NO: 726049 - RNA, 22 nt, Human
uuugagaaaaccagaaagaucu

SEQ ID NO: 726050 - RNA, 22 nt, Human
uggcucuguugugcugagccag

SEQ ID NO: 726051 - RNA, 20 nt, Human
cucuuuacaugucucuuccu

SEQ ID NO: 726052 - RNA, 22 nt, Human
aaaauauuuuagggccaggaga

SEQ ID NO: 726053 - RNA, 22 nt, Human
cagauacagguuuuuguuagau

SEQ ID NO: 726054 - RNA, 22 nt, Human
ccaggcuggagugcaauggugc

SEQ ID NO: 726055 - RNA, 22 nt, Human
uccaguacugaagcuccuucaa

SEQ ID NO: 726056 - RNA, 22 nt, Human
accugccagaauccaagccaca

SEQ ID NO: 726057 - RNA, 22 nt, Human
cuguggcucucagaggcugcug

SEQ ID NO: 726058 - RNA, 22 nt, Human
cagcagcuaccugcucuugugg

SEQ ID NO: 726059 - RNA, 22 nt, Human
aauuccacagaugucuaucugu

SEQ ID NO: 726060 - RNA, 22 nt, Human
cugaggucaauuaaucaacaac

SEQ ID NO: 726061 - RNA, 22 nt, Human
ugaguguauaugaagguuguaa

SEQ ID NO: 726062 - RNA, 22 nt, Human
agcgugaaggcgggcagucggc

SEQ ID NO: 726063 - RNA, 22 nt, Human
uugugaaacauucauggauuug

SEQ ID NO: 726064 - RNA, 22 nt, Human
ugcuaagcugaggaagaugaga

SEQ ID NO: 726065 - RNA, 22 nt, Human
ucagcuggaagauggugcagaa

SEQ ID NO: 726066 - RNA, 23 nt, Human
agcuccugaggccagccucuccu

SEQ ID NO: 726067 - RNA, 22 nt, Human
aaguucaauggaaaagcuuuag

SEQ ID NO: 726068 - RNA, 20 nt, Human
ccucaagcagacugacagcu

SEQ ID NO: 726069 - RNA, 22 nt, Human
ugucuguacaaauuuucugugu

SEQ ID NO: 726070 - RNA, 22 nt, Human
cugucgccugguccucucugga

SEQ ID NO: 726071 - RNA, 22 nt, Human
ucucuaaauacagaugucaugg

SEQ ID NO: 726072 - RNA, 22 nt, Human
cuguaugaaauuaaguaaacag

SEQ ID NO: 726073 - RNA, 22 nt, Human
cuggcucauccagguguugcuc

SEQ ID NO: 726074 - RNA, 22 nt, Human
uggcaucuccgacagucuugau

SEQ ID NO: 726075 - RNA, 16 nt, Human
agcagccagcacugga

SEQ ID NO: 726076 - RNA, 23 nt, Human
gggcaccaggagcaccggacagg

SEQ ID NO: 726077 - RNA, 18 nt, Human
uccaggacucugcguggc

SEQ ID NO: 726078 - RNA, 22 nt, Human
ccucagagaaaugucuauucaa

SEQ ID NO: 726079 - RNA, 22 nt, Human
uccaggagguagugcuuaauuu

SEQ ID NO: 726080 - RNA, 22 nt, Human
gacuacagauagccaauuaagu

SEQ ID NO: 726081 - RNA, 22 nt, Human
ggaagacaucugcuugcaccag

SEQ ID NO: 726082 - RNA, 22 nt, Human
gaguccaguuagugaggcuggg

SEQ ID NO: 726083 - RNA, 22 nt, Human
ccagaggcuggcaagggcuccu

SEQ ID NO: 726084 - RNA, 19 nt, Human
ucagggcaguccggucccc

SEQ ID NO: 726085 - RNA, 23 nt, Human
ucccagccucuucucuugcauac

SEQ ID NO: 726086 - RNA, 22 nt, Human
uagcacuauuuuucacuauccu

SEQ ID NO: 726087 - RNA, 22 nt, Human
ccugucacgaugacugcacucu

SEQ ID NO: 726088 - RNA, 22 nt, Human
ugggcugcggauaggccucgga

SEQ ID NO: 726089 - RNA, 22 nt, Human
cugccugcuuaccaugcaucag

SEQ ID NO: 726090 - RNA, 22 nt, Human
ccacagggacuguuaaaacccu

SEQ ID NO: 726091 - RNA, 22 nt, Human
ugaagauuuagaccucuuugcc

SEQ ID NO: 726092 - RNA, 22 nt, Human
ucucuuucuauugcaccaugcu

SEQ ID NO: 726093 - RNA, 23 nt, Human
uucauugauugcaaggagauugg

SEQ ID NO: 726094 - RNA, 22 nt, Human
gggcucagccccauugaaccag

SEQ ID NO: 726095 - RNA, 23 nt, Human
gcagcugguuagaagggaaggag

SEQ ID NO: 726096 - RNA, 22 nt, Human
guuuuauaauugcuucauaaga

SEQ ID NO: 726097 - RNA, 22 nt, Human
auggcuuggcaccaucuccuug

SEQ ID NO: 726098 - RNA, 22 nt, Human
cagcuucagacccugggcugca

SEQ ID NO: 726099 - RNA, 22 nt, Human
aaacuacugauuugugaauuga

SEQ ID NO: 726100 - RNA, 22 nt, Human
cugggccaugggccagcgaggc

SEQ ID NO: 726101 - RNA, 22 nt, Human
ugaggagcaggguggcuuacuc

SEQ ID NO: 726102 - RNA, 22 nt, Human
cagggccaagcugcagcaucug

SEQ ID NO: 726103 - RNA, 22 nt, Human
aggccagaguuaaggagaacag

SEQ ID NO: 726104 - RNA, 22 nt, Human
agcagaaccacagcacuguuga

SEQ ID NO: 726105 - RNA, 22 nt, Human
gaacagcuauaaucaucugucc

SEQ ID NO: 726106 - RNA, 22 nt, Human
aguucuucauaaccuuacugug

SEQ ID NO: 726107 - RNA, 22 nt, Human
gucugcccaucuccgggcgggg

SEQ ID NO: 726108 - RNA, 22 nt, Human
aaucacaggcauagauugcucc

SEQ ID NO: 726109 - RNA, 23 nt, Human
acuggacagaguggacgaggcug

SEQ ID NO: 726110 - RNA, 22 nt, Human
uguguacagcaggauuucucaa

SEQ ID NO: 726111 - RNA, 21 nt, Human
cuggagucuggggguggcagu

SEQ ID NO: 726112 - RNA, 23 nt, Human
aguacauucgaaaaauucuguga

SEQ ID NO: 726113 - RNA, 22 nt, Human
ugagcuaggugugcagauauga

SEQ ID NO: 726114 - RNA, 22 nt, Human
aggccgccuggggagaggcccu

SEQ ID NO: 726115 - RNA, 22 nt, Human
cuauucuguguauuuacuggcu

SEQ ID NO: 726116 - RNA, 22 nt, Human
caccagcuuugcccacugccca

SEQ ID NO: 726117 - RNA, 22 nt, Human
uccugggcgaguggugguacac

SEQ ID NO: 726118 - RNA, 22 nt, Human
aggcucagccccugggaggaga

SEQ ID NO: 726119 - RNA, 22 nt, Human
ggugggcaacauuuggccugag

SEQ ID NO: 726120 - RNA, 21 nt, Human
ugcuugcagaacuuucaggcu

SEQ ID NO: 726121 - RNA, 22 nt, Human
agugcuguuggauaaugcuguc

SEQ ID NO: 726122 - RNA, 22 nt, Human
uccauugucuuugguccuagcc

SEQ ID NO: 726123 - RNA, 22 nt, Human
acaguacaggacgaguuuuccu

SEQ ID NO: 726124 - RNA, 22 nt, Human
aauagcaaaguuaucaaauuaa

SEQ ID NO: 726125 - RNA, 22 nt, Human
ccagagguccccugccaggagg

SEQ ID NO: 726126 - RNA, 18 nt, Human
augaacacugagcugaau

SEQ ID NO: 726127 - RNA, 22 nt, Human
aguaacacuuggaaugauagca

SEQ ID NO: 726128 - RNA, 22 nt, Human
ucgggcucgcucuccuagcgga

SEQ ID NO: 726129 - RNA, 22 nt, Human
gguagcagggcugugagucaga

SEQ ID NO: 726130 - RNA, 22 nt, Human
gaagguuugaaauagguauaga

SEQ ID NO: 726131 - RNA, 22 nt, Human
gaagccagauuuggggcauauc

SEQ ID NO: 726132 - RNA, 22 nt, Human
gaggugggaugugugugcuacu

SEQ ID NO: 726133 - RNA, 22 nt, Human
auaaaggcagauuuuggaccuc

SEQ ID NO: 726134 - RNA, 22 nt, Human
uuuugcagccacaucugaccug

SEQ ID NO: 726135 - RNA, 22 nt, Human
acaaauuucauaggcaaauuuu

SEQ ID NO: 726136 - RNA, 21 nt, Human
aguuuucugaguuauaaaaua

SEQ ID NO: 726137 - RNA, 22 nt, Human
uuucagauuaucucaacuuugg

SEQ ID NO: 726138 - RNA, 22 nt, Human
aaagcuaucaucaaugcaacuu

SEQ ID NO: 726139 - RNA, 22 nt, Human
ccugcccagagccccuuucacu

SEQ ID NO: 726140 - RNA, 22 nt, Human
auugugcaaauauuaucuguag

SEQ ID NO: 726141 - RNA, 22 nt, Human
ucccacagaugcuguccagagu

SEQ ID NO: 726142 - RNA, 22 nt, Human
acuugaauucaaagcgaaagca

SEQ ID NO: 726143 - RNA, 22 nt, Human
cuguacauaugucuccagagug

SEQ ID NO: 726144 - RNA, 22 nt, Human
cuucaucaacucuaacaaaugu

SEQ ID NO: 726145 - RNA, 22 nt, Human
uuugaaaggaauuaggaugaca

SEQ ID NO: 726146 - RNA, 22 nt, Human
acauuuuuauccugagugccag

SEQ ID NO: 726147 - RNA, 22 nt, Human
aagaaggaaguguggacaucac

SEQ ID NO: 726148 - RNA, 22 nt, Human
ugcuauuagaagccaugcuguu

SEQ ID NO: 726149 - RNA, 22 nt, Human
gcaccugaggaggcaucuggag

SEQ ID NO: 726150 - RNA, 22 nt, Human
augggcucuaugucuaggagau

SEQ ID NO: 726151 - RNA, 22 nt, Human
ggucugagcuugagcccaugcu

SEQ ID NO: 726152 - RNA, 22 nt, Human
agccccuugugggcgcacagca

SEQ ID NO: 726153 - RNA, 22 nt, Human
ugggcauggacuguggagccgc

SEQ ID NO: 726154 - RNA, 22 nt, Human
aggcugugggugauuuacugug

SEQ ID NO: 726155 - RNA, 22 nt, Human
augaaagcaaauuauaggccau

SEQ ID NO: 726156 - RNA, 22 nt, Human
uaaacaucugucauguguuuau

SEQ ID NO: 726157 - RNA, 22 nt, Human
cugaagaugucugagaugcuca

SEQ ID NO: 726158 - RNA, 22 nt, Human
auuugcuuucagccuuaaggau

SEQ ID NO: 726159 - RNA, 22 nt, Human
ucugcaggagagugcccuagag

SEQ ID NO: 726160 - RNA, 22 nt, Human
caggaagcaucuggcuagcuaa

SEQ ID NO: 726161 - RNA, 22 nt, Human
ggccagaggccauccuccugcu

SEQ ID NO: 726162 - RNA, 22 nt, Human
agaauuuuugauuaucuacucg

SEQ ID NO: 726163 - RNA, 22 nt, Human
cacagaaucugugacuccaaga

SEQ ID NO: 726164 - RNA, 22 nt, Human
ccaccuccucggccaugugacg

SEQ ID NO: 726165 - RNA, 22 nt, Human
auggcugcucuggauggagucc

SEQ ID NO: 726166 - RNA, 22 nt, Human
cagaaauguuuguuaauauugu

SEQ ID NO: 726167 - RNA, 22 nt, Human
guagaagugaugucauguuaua

SEQ ID NO: 726168 - RNA, 22 nt, Human
ucacccagggacugugauggaa

SEQ ID NO: 726169 - RNA, 22 nt, Human
aggaaugucgucauaaacauga

SEQ ID NO: 726170 - RNA, 22 nt, Human
aguaugcauauuucaaaguaag

SEQ ID NO: 726171 - RNA, 22 nt, Human
cugggcccaggcggcucucgga

SEQ ID NO: 726172 - RNA, 22 nt, Human
uaagguuucuucagauacuagu

SEQ ID NO: 726173 - RNA, 22 nt, Human
uuacuuugcuuucucauuacag

SEQ ID NO: 726174 - RNA, 22 nt, Human
ggcucuggggaagcucucuuca

SEQ ID NO: 726175 - RNA, 22 nt, Human
ccucuccaguuuuaacgugacc

SEQ ID NO: 726176 - RNA, 22 nt, Human
ccucuuugacucucaggucuuu

SEQ ID NO: 726177 - RNA, 22 nt, Human
ugaggaggugggcacacagagu

SEQ ID NO: 726178 - RNA, 22 nt, Human
acugggagucaugaggaaggag

SEQ ID NO: 726179 - RNA, 20 nt, Human
gagcacaguaaugacugcua

SEQ ID NO: 726180 - RNA, 22 nt, Human
uuccaaguugagcgauuuuccu

SEQ ID NO: 726181 - RNA, 22 nt, Human
ucagcaaguggaccauccuggg

SEQ ID NO: 726182 - RNA, 19 nt, Human
uguggggagucagggggcu

SEQ ID NO: 726183 - RNA, 22 nt, Human
cuuccaaaauuuauauguugaa

SEQ ID NO: 726184 - RNA, 18 nt, Human
ucucuccaucuauuuguu

SEQ ID NO: 726185 - RNA, 22 nt, Human
aggcugucuuccucccucuugg

SEQ ID NO: 726186 - RNA, 22 nt, Human
uagagguguuguugauauagaa

SEQ ID NO: 726187 - RNA, 22 nt, Human
cuuguuuaaauaagauagcagu

SEQ ID NO: 726188 - RNA, 22 nt, Human
ugcugaggacuaaaggagauga

SEQ ID NO: 726189 - RNA, 22 nt, Human
uagaauaugauuaauuuucuua

SEQ ID NO: 726190 - RNA, 22 nt, Human
cuguuuucaaagagagagaaug

SEQ ID NO: 726191 - RNA, 22 nt, Human
aggcaucuauacauuauguuca

SEQ ID NO: 726192 - RNA, 22 nt, Human
acugagaacuugccaaggacug

SEQ ID NO: 726193 - RNA, 22 nt, Human
agccugggcaugggacgggagg

SEQ ID NO: 726194 - RNA, 22 nt, Human
uuuauuauccaguguugucaug

SEQ ID NO: 726195 - RNA, 22 nt, Human
ccuacauucucugaguuuuccu

SEQ ID NO: 726196 - RNA, 22 nt, Human
cccugugucuucuugccuuugu

SEQ ID NO: 726197 - RNA, 18 nt, Human
gaaaccugaggaagaaag

SEQ ID NO: 726198 - RNA, 22 nt, Human
gagccagagcuacaagugucug

SEQ ID NO: 726199 - RNA, 22 nt, Human
ugaaaugaucaguuugguuacu

SEQ ID NO: 726200 - RNA, 22 nt, Human
auauauuugagaauauucauga

SEQ ID NO: 726201 - RNA, 22 nt, Human
uauuugcuuugcuuuauagaga

SEQ ID NO: 726202 - RNA, 22 nt, Human
auauuuggaaagaaaaucauug

SEQ ID NO: 726203 - RNA, 22 nt, Human
gcuuggcuggaaauagguugag

SEQ ID NO: 726204 - RNA, 22 nt, Human
augggcaggcaagguggcgagu

SEQ ID NO: 726205 - RNA, 22 nt, Human
auucacaguauggacgaaauga

SEQ ID NO: 726206 - RNA, 22 nt, Human
cagguuggggacuuaggaugac

SEQ ID NO: 726207 - RNA, 22 nt, Human
aaaugugucaguuucauucucu

SEQ ID NO: 726208 - RNA, 22 nt, Human
aaaggucuuaagguuaagcagg

SEQ ID NO: 726209 - RNA, 22 nt, Human
ccucucucuuguagucccugcc

SEQ ID NO: 726210 - RNA, 22 nt, Human
aucucagagaaauuugaaugca

SEQ ID NO: 726211 - RNA, 22 nt, Human
agccacagugcaagagagaaaa

SEQ ID NO: 726212 - RNA, 22 nt, Human
aaaagcaguuaucugggaggaa

SEQ ID NO: 726213 - RNA, 22 nt, Human
uaagauuauacuuaaagagaaa

SEQ ID NO: 726214 - RNA, 22 nt, Human
acccuuuguccaauagaaauga

SEQ ID NO: 726215 - RNA, 22 nt, Human
uaaguucaaugaacucaguucu

SEQ ID NO: 726216 - RNA, 21 nt, Human
caagccagaccaauagcagcc

SEQ ID NO: 726217 - RNA, 22 nt, Human
gauacauuuuaucuccuaacag

SEQ ID NO: 726218 - RNA, 22 nt, Human
uccacaggcaagucucuuggca

SEQ ID NO: 726219 - RNA, 22 nt, Human
gacaggcccgaguagcugauga

SEQ ID NO: 726220 - RNA, 22 nt, Human
uggcagggucuugcuguguugc

SEQ ID NO: 726221 - RNA, 22 nt, Human
ugucauuuauuuugcugucugu

SEQ ID NO: 726222 - RNA, 22 nt, Human
uugaagaacauaauagcuacuu

SEQ ID NO: 726223 - RNA, 21 nt, Human
gguguccagaggaguccccag

SEQ ID NO: 726224 - RNA, 22 nt, Human
caggccaagccuccccagcucc

SEQ ID NO: 726225 - RNA, 22 nt, Human
auuaacagaauuuuacaugcuu

SEQ ID NO: 726226 - RNA, 22 nt, Human
gcccagggugaagugcaguugu

SEQ ID NO: 726227 - RNA, 22 nt, Human
cugugccaucuuuuugcuaccu

SEQ ID NO: 726228 - RNA, 22 nt, Human
ucugucacccagagugcagugg

SEQ ID NO: 726229 - RNA, 22 nt, Human
gaauggcuaucggauuauuagg

SEQ ID NO: 726230 - RNA, 22 nt, Human
cuacagcagagcuacacuaacu

SEQ ID NO: 726231 - RNA, 22 nt, Human
gaaugcuuggaaccugaaguuc

SEQ ID NO: 726232 - RNA, 22 nt, Human
ugguugccucucagagauuccg

SEQ ID NO: 726233 - RNA, 22 nt, Human
gucaggaucaaauugaaguuau

SEQ ID NO: 726234 - RNA, 22 nt, Human
gcauucuucacaguauuccucc

SEQ ID NO: 726235 - RNA, 22 nt, Human
ugcugcacaauuggaaaguauc

SEQ ID NO: 726236 - RNA, 22 nt, Human
ggcuggaaaagacaaagcuauu

SEQ ID NO: 726237 - RNA, 22 nt, Human
agcugccugugcugggagccca

SEQ ID NO: 726238 - RNA, 22 nt, Human
ucucugugagauuuguauuaag

SEQ ID NO: 726239 - RNA, 22 nt, Human
uauuaucauuaacuguugaauu

SEQ ID NO: 726240 - RNA, 22 nt, Human
ucaguguuuauucaauguuauu

SEQ ID NO: 726241 - RNA, 23 nt, Human
uugcauguagcccaugaguaacu

SEQ ID NO: 726242 - RNA, 22 nt, Human
acugugugacuguuauuacugu

SEQ ID NO: 726243 - RNA, 22 nt, Human
agucaacugcauuaggaaauga

SEQ ID NO: 726244 - RNA, 22 nt, Human
acagugugguuguuucugguua

SEQ ID NO: 726245 - RNA, 22 nt, Human
gccuggcccagggcucuuguug

SEQ ID NO: 726246 - RNA, 22 nt, Human
cugcugcuuagcauagcagagg

SEQ ID NO: 726247 - RNA, 22 nt, Human
uagcugacgcuaaauaaauguu

SEQ ID NO: 726248 - RNA, 21 nt, Human
gccagggaguuaaagagucuu

SEQ ID NO: 726249 - RNA, 22 nt, Human
uccagggagucaaaugaacuac

SEQ ID NO: 726250 - RNA, 22 nt, Human
acagcccaagucaccugcagga

SEQ ID NO: 726251 - RNA, 22 nt, Human
cccuguggaggcagcauccugc

SEQ ID NO: 726252 - RNA, 22 nt, Human
ggcagcucgaugacuucugcau

SEQ ID NO: 726253 - RNA, 22 nt, Human
caagggcuucaaguggccaaga

SEQ ID NO: 726254 - RNA, 20 nt, Human
augcauugugauucuguuuu

SEQ ID NO: 726255 - RNA, 22 nt, Human
acagaagaccagagagcuaacu

SEQ ID NO: 726256 - RNA, 16 nt, Human
ccucugggccugcaag

SEQ ID NO: 726257 - RNA, 22 nt, Human
gcagaaggucaaagcaagaugu

SEQ ID NO: 726258 - RNA, 22 nt, Human
cauuucacaaauggccacauca

SEQ ID NO: 726259 - RNA, 22 nt, Human
agaaaugaauauguagugguua

SEQ ID NO: 726260 - RNA, 22 nt, Human
cuucucugcaccccacuuuugc

SEQ ID NO: 726261 - RNA, 22 nt, Human
acacagaguuauuaugugaacu

SEQ ID NO: 726262 - RNA, 22 nt, Human
auggguaaggcugaaggaaagu

SEQ ID NO: 726263 - RNA, 22 nt, Human
agcaauaaauguaaagguuaag

SEQ ID NO: 726264 - RNA, 22 nt, Human
uggaaaauauuuaggugaauga

SEQ ID NO: 726265 - RNA, 22 nt, Human
aacaucuccaaccuacauccac

SEQ ID NO: 726266 - RNA, 22 nt, Human
agaaggguucaggaauauguua

SEQ ID NO: 726267 - RNA, 22 nt, Human
ucagugcucaggggagccgagg

SEQ ID NO: 726268 - RNA, 22 nt, Human
aacugcaagcucuuuacugcua

SEQ ID NO: 726269 - RNA, 16 nt, Human
ccccucaggaaguaca

SEQ ID NO: 726270 - RNA, 18 nt, Human
ggucuuuaggucaguguc

SEQ ID NO: 726271 - RNA, 22 nt, Human
aaaacauucugugaacucucaa

SEQ ID NO: 726272 - RNA, 20 nt, Human
gcuggugggggcuugacaug

SEQ ID NO: 726273 - RNA, 22 nt, Human
acaguccuagcugcaaagaagu

SEQ ID NO: 726274 - RNA, 22 nt, Human
gcaggaccaggcacgagggcca

SEQ ID NO: 726275 - RNA, 22 nt, Human
guacaguacuucagaaccagcc

SEQ ID NO: 726276 - RNA, 22 nt, Human
gccuggagccucagcaaggagg

SEQ ID NO: 726277 - RNA, 19 nt, Human
ugcucacucucagucccuc

SEQ ID NO: 726278 - RNA, 22 nt, Human
uggccacaugcgucugugaggc

SEQ ID NO: 726279 - RNA, 22 nt, Human
uacaaagauggaagguuauguu

SEQ ID NO: 726280 - RNA, 22 nt, Human
agggcugacacaccuuauccuc

SEQ ID NO: 726281 - RNA, 21 nt, Human
caaugucugcucucugccuag

SEQ ID NO: 726282 - RNA, 22 nt, Human
augcugugucaccuuaggauuu

SEQ ID NO: 726283 - RNA, 22 nt, Human
uuaaaccaccagaagccauuau

SEQ ID NO: 726284 - RNA, 22 nt, Human
cuggcuguggauuaucacaggc

SEQ ID NO: 726285 - RNA, 22 nt, Human
gccugggagcacaucggggucc

SEQ ID NO: 726286 - RNA, 22 nt, Human
uccagugguacauggagacacu

SEQ ID NO: 726287 - RNA, 22 nt, Human
ggcagcuuuuaucccugacaga

SEQ ID NO: 726288 - RNA, 22 nt, Human
acacacaaaucuauuagugaau

SEQ ID NO: 726289 - RNA, 22 nt, Human
ggggugugaguagagcugggga

SEQ ID NO: 726290 - RNA, 19 nt, Human
ggccuggauuuagggcucc

SEQ ID NO: 726291 - RNA, 22 nt, Human
ccaggagucaauaaaggaagcu

SEQ ID NO: 726292 - RNA, 22 nt, Human
ccaggcagagugcuccagaaag

SEQ ID NO: 726293 - RNA, 22 nt, Human
ccagcuuuucuuaucauuauaa

SEQ ID NO: 726294 - RNA, 22 nt, Human
accuucuggucugccugacagc

SEQ ID NO: 726295 - RNA, 22 nt, Human
gacugcuuauauguuaaagaua

SEQ ID NO: 726296 - RNA, 22 nt, Human
gaagacauuuuaugcauacucu

SEQ ID NO: 726297 - RNA, 22 nt, Human
acccacacaucucuaauucagu

SEQ ID NO: 726298 - RNA, 22 nt, Human
cuccaggcgggaggcgguucca

SEQ ID NO: 726299 - RNA, 22 nt, Human
agacaacugcagagcaaagaau

SEQ ID NO: 726300 - RNA, 22 nt, Human
uugacaggauauaaagacauaa

SEQ ID NO: 726301 - RNA, 22 nt, Human
aagcuggggacucagaccccau

SEQ ID NO: 726302 - RNA, 22 nt, Human
ugcaggcuauaucuuauuugac

SEQ ID NO: 726303 - RNA, 22 nt, Human
acucugagaaucccuggacuuu

SEQ ID NO: 726304 - RNA, 22 nt, Human
cccacucuggcucccuucuagu

SEQ ID NO: 726305 - RNA, 19 nt, Human
aggugagugugggaaaggg

SEQ ID NO: 726306 - RNA, 22 nt, Human
ugaacauauucaccucuaaaua

SEQ ID NO: 726307 - RNA, 22 nt, Human
aagccacugcagcaggagcugc

SEQ ID NO: 726308 - RNA, 22 nt, Human
cuugucuuuauuucauauucca

SEQ ID NO: 726309 - RNA, 22 nt, Human
ccagagguggugggugcuacag

SEQ ID NO: 726310 - RNA, 19 nt, Human
auggcuguguuccaguaaa

SEQ ID NO: 726311 - RNA, 22 nt, Human
uaguuuaugauuuuuuggaagg

SEQ ID NO: 726312 - RNA, 22 nt, Human
gaaagagaggggcugagaugca

SEQ ID NO: 726313 - RNA, 18 nt, Human
gucugccuucucccuucc

SEQ ID NO: 726314 - RNA, 16 nt, Human
guucucucacuguacc

SEQ ID NO: 726315 - RNA, 22 nt, Human
gcaauagauuaugaucuacagu

SEQ ID NO: 726316 - RNA, 22 nt, Human
gcccauggucagggaggcaggg

SEQ ID NO: 726317 - RNA, 22 nt, Human
gcugguagaccucacugcacuc

SEQ ID NO: 726318 - RNA, 22 nt, Human
cgucugcccgacuguucuucac

SEQ ID NO: 726319 - RNA, 22 nt, Human
agaaacaucauuggaacacaag

SEQ ID NO: 726320 - RNA, 22 nt, Human
cugccugcaggacaccucgcua

SEQ ID NO: 726321 - RNA, 22 nt, Human
agugaauacaugucacucagca

SEQ ID NO: 726322 - RNA, 22 nt, Human
acagagcaaugcguguucucua

SEQ ID NO: 726323 - RNA, 22 nt, Human
acauacaaauagagcuguagua

SEQ ID NO: 726324 - RNA, 22 nt, Human
guguggcuaccucagaggagca

SEQ ID NO: 726325 - RNA, 22 nt, Human
uuucacauggacuuuuuguucu

SEQ ID NO: 726326 - RNA, 19 nt, Human
cugguccugacugaggggu

SEQ ID NO: 726327 - RNA, 22 nt, Human
ugcaggugcuacaagaacucac

SEQ ID NO: 726328 - RNA, 22 nt, Human
cccaggcacauccacucuguga

SEQ ID NO: 726329 - RNA, 22 nt, Human
uguauacauuuaacuagauaga

SEQ ID NO: 726330 - RNA, 22 nt, Human
uacaugugguagggagggcagu

SEQ ID NO: 726331 - RNA, 22 nt, Human
gcuggccauucucuuugagaug

SEQ ID NO: 726332 - RNA, 22 nt, Human
uugaaucuuagcucugccacuu

SEQ ID NO: 726333 - RNA, 22 nt, Human
aaucuguugucaggaauccaca

SEQ ID NO: 726334 - RNA, 22 nt, Human
ugcugccaccugguggcugaag

SEQ ID NO: 726335 - RNA, 22 nt, Human
aaaugauggaaaugaggcugaa

SEQ ID NO: 726336 - RNA, 22 nt, Human
aauggcuucaugucuguggaaa

SEQ ID NO: 726337 - RNA, 22 nt, Human
gccuggcuggucacugccuggc

SEQ ID NO: 726338 - RNA, 22 nt, Human
uuccuuagauccuucaaucacg

SEQ ID NO: 726339 - RNA, 22 nt, Human
gaauucugucgcuuacuagaug

SEQ ID NO: 726340 - RNA, 22 nt, Human
agaggccagcccaggccaccga

SEQ ID NO: 726341 - RNA, 18 nt, Human
ugucucugaauuccagug

SEQ ID NO: 726342 - RNA, 22 nt, Human
aaagccacugcauguguaguau

SEQ ID NO: 726343 - RNA, 22 nt, Human
uggcagugugggaggaagguac

SEQ ID NO: 726344 - RNA, 22 nt, Human
gacccagcuuaagucacauguu

SEQ ID NO: 726345 - RNA, 22 nt, Human
guggagcuggacccaggccucu

SEQ ID NO: 726346 - RNA, 22 nt, Human
ccagcuuuuggggugacaauuu

SEQ ID NO: 726347 - RNA, 22 nt, Human
augucuuugccauaguucauau

SEQ ID NO: 726348 - RNA, 22 nt, Human
uugcuuuaggauuuaaguggca

SEQ ID NO: 726349 - RNA, 22 nt, Human
auggacagggcacaggcgcaga

SEQ ID NO: 726350 - RNA, 22 nt, Human
cuggcugaguuacuccacugag

SEQ ID NO: 726351 - RNA, 22 nt, Human
uauggguagaaguggcccaagc

SEQ ID NO: 726352 - RNA, 22 nt, Human
uccaucuggagacuuccugguc

SEQ ID NO: 726353 - RNA, 22 nt, Human
caucuuaacaggucucugaggg

SEQ ID NO: 726354 - RNA, 22 nt, Human
ccacagugguucucaaccaggg

SEQ ID NO: 726355 - RNA, 22 nt, Human
cagggaaacuaggaaauaagcu

SEQ ID NO: 726356 - RNA, 22 nt, Human
uaugaaauuuaaacacagauca

SEQ ID NO: 726357 - RNA, 22 nt, Human
uucugucugauggugccagaac

SEQ ID NO: 726358 - RNA, 22 nt, Human
ggcugggccgcggcuacccaga

SEQ ID NO: 726359 - RNA, 22 nt, Human
ccuguggcacaugcagggauuc

SEQ ID NO: 726360 - RNA, 22 nt, Human
gguggcagggagugucccuggg

SEQ ID NO: 726361 - RNA, 22 nt, Human
guuuccugcgugugccacucau

SEQ ID NO: 726362 - RNA, 22 nt, Human
caggucuggguugauggccugg

SEQ ID NO: 726363 - RNA, 19 nt, Human
agugcaugggcgaggugca

SEQ ID NO: 726364 - RNA, 22 nt, Human
gguucacagguccugggagcag

SEQ ID NO: 726365 - RNA, 22 nt, Human
gucauagguucaaaaggcagau

SEQ ID NO: 726366 - RNA, 22 nt, Human
ugucaaauuauguaaugggaag

SEQ ID NO: 726367 - RNA, 22 nt, Human
ucugcagaagaauuaaggacag

SEQ ID NO: 726368 - RNA, 22 nt, Human
auguucagcauucuauaaauau

SEQ ID NO: 726369 - RNA, 22 nt, Human
gaaaucugaacaacagcuguca

SEQ ID NO: 726370 - RNA, 22 nt, Human
cugggccugccaccaucuuagg

SEQ ID NO: 726371 - RNA, 22 nt, Human
agggggucuccuaucauggaag

SEQ ID NO: 726372 - RNA, 22 nt, Human
cucuuaaaaacuugauauauuu

SEQ ID NO: 726373 - RNA, 22 nt, Human
uagggccagauaggcuucuuga

SEQ ID NO: 726374 - RNA, 22 nt, Human
ucagaagccggaagugcuccuc

SEQ ID NO: 726375 - RNA, 22 nt, Human
cccccagucugaacagcagcug

SEQ ID NO: 726376 - RNA, 22 nt, Human
uggcgugcccuccagacuuggc

SEQ ID NO: 726377 - RNA, 22 nt, Human
aaguuuaacuugaauucuuucu

SEQ ID NO: 726378 - RNA, 22 nt, Human
gauagagacuauaaugcucuuu

SEQ ID NO: 726379 - RNA, 22 nt, Human
caugagauuugggaggggccag

SEQ ID NO: 726380 - RNA, 23 nt, Human
aucauucuccaaucuggagcagg

SEQ ID NO: 726381 - RNA, 19 nt, Human
agucugucugcuuucccuc

SEQ ID NO: 726382 - RNA, 22 nt, Human
auuucucuaagcauccguuugc

SEQ ID NO: 726383 - RNA, 22 nt, Human
cuuccuguuguauuugugagcc

SEQ ID NO: 726384 - RNA, 22 nt, Human
cacucugacacaugaacuugau

SEQ ID NO: 726385 - RNA, 22 nt, Human
uuguuuaagccacccaaucugu

SEQ ID NO: 726386 - RNA, 22 nt, Human
guguuuaacaucugguuuauac

SEQ ID NO: 726387 - RNA, 22 nt, Human
ggcccugcgauuagguggcagg

SEQ ID NO: 726388 - RNA, 22 nt, Human
cucagggaggcccugggacccu

SEQ ID NO: 726389 - RNA, 22 nt, Human
gccuccuggaagucacauguuu

SEQ ID NO: 726390 - RNA, 22 nt, Human
uccagcucuuguugcccacugc

SEQ ID NO: 726391 - RNA, 22 nt, Human
cacaauuuguauuuugcaucca

SEQ ID NO: 726392 - RNA, 22 nt, Human
ugcuggaauaauuucauguuaa

SEQ ID NO: 726393 - RNA, 22 nt, Human
guucccacuagacugcuacuua

SEQ ID NO: 726394 - RNA, 17 nt, Human
ugagcaguagaagaugc

SEQ ID NO: 726395 - RNA, 21 nt, Human
acagauauuucauugaacauu

SEQ ID NO: 726396 - RNA, 22 nt, Human
auuuccaagaaagcuuuaggau

SEQ ID NO: 726397 - RNA, 17 nt, Human
gcacagugauauuauuu

SEQ ID NO: 726398 - RNA, 22 nt, Human
gagcuucucaacaguuaucucu

SEQ ID NO: 726399 - RNA, 22 nt, Human
uggcucaucuuuuuagacuuau

SEQ ID NO: 726400 - RNA, 22 nt, Human
agggagaaaauuggaugcacaa

SEQ ID NO: 726401 - RNA, 22 nt, Human
ggaaccaggaguuacacgaguu

SEQ ID NO: 726402 - RNA, 22 nt, Human
cagucacauugcccugcauuua

SEQ ID NO: 726403 - RNA, 22 nt, Human
uuugggaauuguagcugucuug

SEQ ID NO: 726404 - RNA, 22 nt, Human
auccuugaaugacucugcccuc

SEQ ID NO: 726405 - RNA, 22 nt, Human
ugcagguggacacgggagacgg

SEQ ID NO: 726406 - RNA, 22 nt, Human
uguguuugaguccucacagugc

SEQ ID NO: 726407 - RNA, 22 nt, Human
auaaaguagcuuucagugccaa

SEQ ID NO: 726408 - RNA, 22 nt, Human
caaaggcaguuacugaaugaag

SEQ ID NO: 726409 - RNA, 22 nt, Human
ggggccccucggacacgugcgg

SEQ ID NO: 726410 - RNA, 22 nt, Human
ucagcacugauagaagucaaua

SEQ ID NO: 726411 - RNA, 22 nt, Human
cucuucccagcuccacgagagg

SEQ ID NO: 726412 - RNA, 22 nt, Human
ccaguccaggccauggauuuug

SEQ ID NO: 726413 - RNA, 22 nt, Human
gagccugaugaaacaggcagac

SEQ ID NO: 726414 - RNA, 22 nt, Human
uggugccuugggccuacagcgc

SEQ ID NO: 726415 - RNA, 22 nt, Human
agagcagacauccuugucuugu

SEQ ID NO: 726416 - RNA, 22 nt, Human
gaagccacccuccuuccagccc

SEQ ID NO: 726417 - RNA, 22 nt, Human
ucagcaaugagaacuggcauuu

SEQ ID NO: 726418 - RNA, 22 nt, Human
gcucucugcaagucagcagccu

SEQ ID NO: 726419 - RNA, 22 nt, Human
aaaggaagugccacucuucuuc

SEQ ID NO: 726420 - RNA, 22 nt, Human
uggacaacauagugagaccuca

SEQ ID NO: 726421 - RNA, 22 nt, Human
aggaagaggguggcagauaauc

SEQ ID NO: 726422 - RNA, 22 nt, Human
cuuguuauuggaaaugucaugc

SEQ ID NO: 726423 - RNA, 22 nt, Human
acacauggucuacuucuucuca

SEQ ID NO: 726424 - RNA, 22 nt, Human
cuagccugggauuugaacuuau

SEQ ID NO: 726425 - RNA, 22 nt, Human
cuucaaguugggcggcgggcag

SEQ ID NO: 726426 - RNA, 22 nt, Human
uccuagugcaaauuggagcaug

SEQ ID NO: 726427 - RNA, 20 nt, Human
gcuucauuugcaagucuagu

SEQ ID NO: 726428 - RNA, 22 nt, Human
uacagacagacuucccacccuc

SEQ ID NO: 726429 - RNA, 22 nt, Human
aaaggccacuugaaggauuuuu

SEQ ID NO: 726430 - RNA, 23 nt, Human
agccccucauggugucuagacag

SEQ ID NO: 726431 - RNA, 22 nt, Human
ggggagcuuagggucucugaau

SEQ ID NO: 726432 - RNA, 22 nt, Human
cuuuacaaauagggagggagug

SEQ ID NO: 726433 - RNA, 21 nt, Human
aauagcugaggucacccagcc

SEQ ID NO: 726434 - RNA, 22 nt, Human
cccagggucccugcucucugug

SEQ ID NO: 726435 - RNA, 22 nt, Human
ugaaauagacacagugcuauac

SEQ ID NO: 726436 - RNA, 22 nt, Human
uuuucuguuugcuucaagacau

SEQ ID NO: 726437 - RNA, 22 nt, Human
uagagcugggcagugcucugag

SEQ ID NO: 726438 - RNA, 20 nt, Human
gcacuguuacaaagcacacc

SEQ ID NO: 726439 - RNA, 22 nt, Human
ugaggcuggcaaggcugguauu

SEQ ID NO: 726440 - RNA, 22 nt, Human
auacagaucccacagcauguga

SEQ ID NO: 726441 - RNA, 22 nt, Human
uccuggccuugcgucuugggag

SEQ ID NO: 726442 - RNA, 22 nt, Human
uccuggcacauugcaggggcuc

SEQ ID NO: 726443 - RNA, 22 nt, Human
gcacaugagaagcuggcgaugc

SEQ ID NO: 726444 - RNA, 22 nt, Human
gggggcugaggcuguucugagg

SEQ ID NO: 726445 - RNA, 22 nt, Human
uauucccacuccucagcaauuu

SEQ ID NO: 726446 - RNA, 22 nt, Human
cacagggaggacaucaacagug

SEQ ID NO: 726447 - RNA, 22 nt, Human
auugaguacuuagugucauaua

SEQ ID NO: 726448 - RNA, 21 nt, Human
gccugcccucugugauggcca

SEQ ID NO: 726449 - RNA, 22 nt, Human
caccaggcuggagugcagaggu

SEQ ID NO: 726450 - RNA, 22 nt, Human
gaccaggaaagagugugacuaa

SEQ ID NO: 726451 - RNA, 22 nt, Human
cagagcuggagaaguggauuua

SEQ ID NO: 726452 - RNA, 22 nt, Human
cagcccugaguuagcccacgga

SEQ ID NO: 726453 - RNA, 22 nt, Human
aucuuugugaaucucaacuugg

SEQ ID NO: 726454 - RNA, 20 nt, Human
cugggcugggcuacaggguc

SEQ ID NO: 726455 - RNA, 22 nt, Human
cucucucuaugcguuguuccua

SEQ ID NO: 726456 - RNA, 22 nt, Human
auguuauucaauuugaauccaa

SEQ ID NO: 726457 - RNA, 18 nt, Human
uggcuucuauuuuacuca

SEQ ID NO: 726458 - RNA, 20 nt, Human
gucuuuauguuuuaugaccu

SEQ ID NO: 726459 - RNA, 21 nt, Human
acagagccgggcacaaagcug

SEQ ID NO: 726460 - RNA, 22 nt, Human
acccugcuuggccccacuucua

SEQ ID NO: 726461 - RNA, 22 nt, Human
cauuauggcagccaggauauug

SEQ ID NO: 726462 - RNA, 22 nt, Human
auuuggcaacauuaauugaauc

SEQ ID NO: 726463 - RNA, 22 nt, Human
augauguugauaaauuacuuua

SEQ ID NO: 726464 - RNA, 22 nt, Human
gacaguuuugcugaaauugagc

SEQ ID NO: 726465 - RNA, 22 nt, Human
cugcgugucucugucucauggc

SEQ ID NO: 726466 - RNA, 22 nt, Human
auauacuuccccauuauggggg

SEQ ID NO: 726467 - RNA, 22 nt, Human
cccagcuugucugauucagccu

SEQ ID NO: 726468 - RNA, 20 nt, Human
gggugugggcccggccaggc

SEQ ID NO: 726469 - RNA, 22 nt, Human
auucacaaguucuagggauuag

SEQ ID NO: 726470 - RNA, 22 nt, Human
ccugccugcaccuucucugggg

SEQ ID NO: 726471 - RNA, 22 nt, Human
ccauggaguuccucuggucuau

SEQ ID NO: 726472 - RNA, 22 nt, Human
gauaagcacuauauaaguauuu

SEQ ID NO: 726473 - RNA, 22 nt, Human
gcugaaaucccagcauucccca

SEQ ID NO: 726474 - RNA, 22 nt, Human
gaaguuauaaacuuuuccuccc

SEQ ID NO: 726475 - RNA, 22 nt, Human
gccuucccucucauccugcugg

SEQ ID NO: 726476 - RNA, 22 nt, Human
ggaacauuuaaauucuuauuug

SEQ ID NO: 726477 - RNA, 22 nt, Human
agacacaguauaagcacaacaa

SEQ ID NO: 726478 - RNA, 22 nt, Human
cuccgcagcgggccaauccgga

SEQ ID NO: 726479 - RNA, 22 nt, Human
guggccagaaguuaagugguua

SEQ ID NO: 726480 - RNA, 22 nt, Human
uguuaacuuccuccuccucugc

SEQ ID NO: 726481 - RNA, 20 nt, Human
agaaaaaguguggaaauuuc

SEQ ID NO: 726482 - RNA, 22 nt, Human
acauacauaugacaacuuuccu

SEQ ID NO: 726483 - RNA, 22 nt, Human
gcugcccaggaagccugggguu

SEQ ID NO: 726484 - RNA, 22 nt, Human
ugauaacucucaguuucucaug

SEQ ID NO: 726485 - RNA, 22 nt, Human
gccuguucuccagcauccaggu

SEQ ID NO: 726486 - RNA, 22 nt, Human
uggcaguguugugccacauucc

SEQ ID NO: 726487 - RNA, 22 nt, Human
uccucaggagagcuccuaugcc

SEQ ID NO: 726488 - RNA, 22 nt, Human
gaugauuucuccauucccuucu

SEQ ID NO: 726489 - RNA, 22 nt, Human
cugccgaguacagccauagaaa

SEQ ID NO: 726490 - RNA, 22 nt, Human
uguaaugagaaagagagugaau

SEQ ID NO: 726491 - RNA, 22 nt, Human
ugguuaguguauauuuggacug

SEQ ID NO: 726492 - RNA, 22 nt, Human
aauguuuuguaugccucugagc

SEQ ID NO: 726493 - RNA, 22 nt, Human
uauaaaguuggggcugaaguaa

SEQ ID NO: 726494 - RNA, 22 nt, Human
acacuuugggcuggauaauuau

SEQ ID NO: 726495 - RNA, 22 nt, Human
uuauucuguauuucagguaugu

SEQ ID NO: 726496 - RNA, 22 nt, Human
guuuuucuagaaaucuccuccu

SEQ ID NO: 726497 - RNA, 22 nt, Human
cuagggaguggcagagcuggga

SEQ ID NO: 726498 - RNA, 22 nt, Human
guggcuuucauuucaggaugug

SEQ ID NO: 726499 - RNA, 22 nt, Human
ccuccagucaccuggaugagaa

SEQ ID NO: 726500 - RNA, 18 nt, Human
guccugagcucugcugua

SEQ ID NO: 726501 - RNA, 22 nt, Human
cagggacuacagccagcccucc

SEQ ID NO: 726502 - RNA, 22 nt, Human
ggggcggggcucugagaagcau

SEQ ID NO: 726503 - RNA, 22 nt, Human
auuaaggaagccuauucucucc

SEQ ID NO: 726504 - RNA, 22 nt, Human
uggcagaggcucugugauguug

SEQ ID NO: 726505 - RNA, 22 nt, Human
aaugucuacauucugaauucgu

SEQ ID NO: 726506 - RNA, 22 nt, Human
auuucaugugaagaagagauaa

SEQ ID NO: 726507 - RNA, 22 nt, Human
aguggcaauugacaacaaagga

SEQ ID NO: 726508 - RNA, 22 nt, Human
gugggaugcuuaggaucuugcc

SEQ ID NO: 726509 - RNA, 22 nt, Human
uucugcauuuaaaauauuacua

SEQ ID NO: 726510 - RNA, 22 nt, Human
ccaaagucugcauuuuaacaug

SEQ ID NO: 726511 - RNA, 22 nt, Human
agggcugaguggugcagucaaa

SEQ ID NO: 726512 - RNA, 22 nt, Human
cugaaaaauauguuuuggagaa

SEQ ID NO: 726513 - RNA, 22 nt, Human
gaaggcugucagagaggagggc

SEQ ID NO: 726514 - RNA, 19 nt, Human
gggcauggaugagcuuacc

SEQ ID NO: 726515 - RNA, 22 nt, Human
uucccugguuaaccauuuucug

SEQ ID NO: 726516 - RNA, 22 nt, Human
ucagagaauucucagaugacuc

SEQ ID NO: 726517 - RNA, 22 nt, Human
aaaucucagcccuuauuuuaga

SEQ ID NO: 726518 - RNA, 22 nt, Human
uggcucugggaaugggaagaug

SEQ ID NO: 726519 - RNA, 22 nt, Human
uucuucugccucccaccugaua

SEQ ID NO: 726520 - RNA, 22 nt, Human
cacgcacgcuggguggaggcgc

SEQ ID NO: 726521 - RNA, 22 nt, Human
cugucucagcaggaagucauca

SEQ ID NO: 726522 - RNA, 22 nt, Human
ccucaaaggccuggcaccagaa

SEQ ID NO: 726523 - RNA, 22 nt, Human
cucucugggaauauuuuauucu

SEQ ID NO: 726524 - RNA, 22 nt, Human
uuuuaaaggcuguaugaccaag

SEQ ID NO: 726525 - RNA, 22 nt, Human
ggggaccuuuccauuucugaga

SEQ ID NO: 726526 - RNA, 23 nt, Human
uaugagaauuaagugcgagugcc

SEQ ID NO: 726527 - RNA, 22 nt, Human
ggcaggcuuugagaaagagcau

SEQ ID NO: 726528 - RNA, 22 nt, Human
uccuucagauuccugcuucugg

SEQ ID NO: 726529 - RNA, 22 nt, Human
uccuccagagauuugaguuauu

SEQ ID NO: 726530 - RNA, 21 nt, Human
gaggacugcacacucugauug

SEQ ID NO: 726531 - RNA, 22 nt, Human
aacugcuugagauauguuuguc

SEQ ID NO: 726532 - RNA, 22 nt, Human
aacuguagcaaagaacagcucu

SEQ ID NO: 726533 - RNA, 22 nt, Human
gaaaccugguucugcgugaggg

SEQ ID NO: 726534 - RNA, 22 nt, Human
aguguuuaaacugaagugauga

SEQ ID NO: 726535 - RNA, 22 nt, Human
aacauguauuuuccuuggcaac

SEQ ID NO: 726536 - RNA, 22 nt, Human
aguggcagaguugaauaauuga

SEQ ID NO: 726537 - RNA, 22 nt, Human
uuuccacaauguuuuugcagga

SEQ ID NO: 726538 - RNA, 18 nt, Human
gagaagcugauugaaugc

SEQ ID NO: 726539 - RNA, 22 nt, Human
uuccucacacucccccauucga

SEQ ID NO: 726540 - RNA, 19 nt, Human
ucaugucucucaucuguga

SEQ ID NO: 726541 - RNA, 18 nt, Human
ggcugugcguggaggcug

SEQ ID NO: 726542 - RNA, 22 nt, Human
ugugaucucuauaggauucaau

SEQ ID NO: 726543 - RNA, 22 nt, Human
gcaauacucaacacuuuugcuu

SEQ ID NO: 726544 - RNA, 21 nt, Human
auacagaacauugauccaaga

SEQ ID NO: 726545 - RNA, 22 nt, Human
cuucacaugauguccgugcugu

SEQ ID NO: 726546 - RNA, 22 nt, Human
uuuuagacuccaucugauucag

SEQ ID NO: 726547 - RNA, 22 nt, Human
uguguauuaccauuuuacagcu

SEQ ID NO: 726548 - RNA, 21 nt, Human
ccagauccugcuuccucaccc

SEQ ID NO: 726549 - RNA, 22 nt, Human
cucuuauuccuacaguaacagg

SEQ ID NO: 726550 - RNA, 22 nt, Human
ggagguucucucuuugcagagc

SEQ ID NO: 726551 - RNA, 22 nt, Human
aggccucagugaucaucaucag

SEQ ID NO: 726552 - RNA, 22 nt, Human
ugaaauaggaaacagauguuuc

SEQ ID NO: 726553 - RNA, 22 nt, Human
cauuuuaagaugaccugguuuc

SEQ ID NO: 726554 - RNA, 22 nt, Human
aaauugcagaugcuaaaugacu

SEQ ID NO: 726555 - RNA, 20 nt, Human
ccugucucacguuccgcccc

SEQ ID NO: 726556 - RNA, 22 nt, Human
auguucuacagauggaaagggg

SEQ ID NO: 726557 - RNA, 22 nt, Human
aggcagugguguuugcuggugg

SEQ ID NO: 726558 - RNA, 22 nt, Human
gcugugagugagcugccuaggc

SEQ ID NO: 726559 - RNA, 22 nt, Human
guuucuaugguuuauauuacug

SEQ ID NO: 726560 - RNA, 22 nt, Human
cucuccugguguggaggacagg

SEQ ID NO: 726561 - RNA, 22 nt, Human
cucaaggacuuauucaugccug

SEQ ID NO: 726562 - RNA, 22 nt, Human
uacacaaucuguuuuuccauuu

SEQ ID NO: 726563 - RNA, 22 nt, Human
aaauugcucuuuaaaaguacug

SEQ ID NO: 726564 - RNA, 22 nt, Human
ggcuuggaaaugguaaugagcu

SEQ ID NO: 726565 - RNA, 22 nt, Human
cucuuaguaaugccaugaagca

SEQ ID NO: 726566 - RNA, 22 nt, Human
cuuccugcauugugccagaguu

SEQ ID NO: 726567 - RNA, 22 nt, Human
uccaggccacauggauggcgau

SEQ ID NO: 726568 - RNA, 22 nt, Human
ccaaggaggccccaggucagcu

SEQ ID NO: 726569 - RNA, 22 nt, Human
cuccagcuagggcuggcuuacu

SEQ ID NO: 726570 - RNA, 22 nt, Human
ggugguggagccagcugggagu

SEQ ID NO: 726571 - RNA, 22 nt, Human
ucugaaagagaguacauacagu

SEQ ID NO: 726572 - RNA, 19 nt, Human
ggggagaacuagagacagc

SEQ ID NO: 726573 - RNA, 22 nt, Human
aaaguucuggagaaaauaauga

SEQ ID NO: 726574 - RNA, 22 nt, Human
ucccuuggaaaguagccucaca

SEQ ID NO: 726575 - RNA, 22 nt, Human
cacgcauguggaucagaugaag

SEQ ID NO: 726576 - RNA, 22 nt, Human
cugggucuggccacaggaagua

SEQ ID NO: 726577 - RNA, 22 nt, Human
ccagaagaccccguccaccucc

SEQ ID NO: 726578 - RNA, 22 nt, Human
gcccaggagguggaggugcagu

SEQ ID NO: 726579 - RNA, 22 nt, Human
aaauggaucuuuuuauaaugca

SEQ ID NO: 726580 - RNA, 22 nt, Human
acugauuaugcguacucucuac

SEQ ID NO: 726581 - RNA, 22 nt, Human
ugucugagcuggggcagacaga

SEQ ID NO: 726582 - RNA, 22 nt, Human
cuuugcagugauuguucuugga

SEQ ID NO: 726583 - RNA, 22 nt, Human
agagggguuaagugcuaguccg

SEQ ID NO: 726584 - RNA, 22 nt, Human
uucaauaucauuguuuagucuc

SEQ ID NO: 726585 - RNA, 22 nt, Human
agcuccugugugaagccucccu

SEQ ID NO: 726586 - RNA, 22 nt, Human
ggagucuggaguggggcccaag

SEQ ID NO: 726587 - RNA, 22 nt, Human
agccaggcagacucucuuucuu

SEQ ID NO: 726588 - RNA, 22 nt, Human
gucauucaacugcacauuaggu

SEQ ID NO: 726589 - RNA, 22 nt, Human
cagaucaugggacugucucagc

SEQ ID NO: 726590 - RNA, 22 nt, Human
guuaagaacuuguugaaggucu

SEQ ID NO: 726591 - RNA, 22 nt, Human
gagaaaugcaugcaugucauca

SEQ ID NO: 726592 - RNA, 22 nt, Human
uaaguuuccagauuguaagucc

SEQ ID NO: 726593 - RNA, 22 nt, Human
gauuuauuuuuaaucagcaggg

SEQ ID NO: 726594 - RNA, 22 nt, Human
cacagguguucuugcagugaaa

SEQ ID NO: 726595 - RNA, 22 nt, Human
aggccaggaccauuagcccaga

SEQ ID NO: 726596 - RNA, 22 nt, Human
cuacacaguucugccuaauggc

SEQ ID NO: 726597 - RNA, 22 nt, Human
gaguguggaucccagaagcaga

SEQ ID NO: 726598 - RNA, 22 nt, Human
uagaugauggaaaaaagcaaua

SEQ ID NO: 726599 - RNA, 22 nt, Human
uaugagguauuacaggaaauau

SEQ ID NO: 726600 - RNA, 22 nt, Human
caccacuggaggucuuggcuuu

SEQ ID NO: 726601 - RNA, 22 nt, Human
uuacauguucucauacacagag

SEQ ID NO: 726602 - RNA, 22 nt, Human
guccucuugcucauuggggcag

SEQ ID NO: 726603 - RNA, 21 nt, Human
agagaauugccuuagauguuc

SEQ ID NO: 726604 - RNA, 22 nt, Human
agaucuuuugguuauuauaaga

SEQ ID NO: 726605 - RNA, 22 nt, Human
ucugucuuggccagccaucugg

SEQ ID NO: 726606 - RNA, 22 nt, Human
gucagaggggcagcugccaggc

SEQ ID NO: 726607 - RNA, 22 nt, Human
cuucuguguuaaaugagucuuu

SEQ ID NO: 726608 - RNA, 22 nt, Human
aaagcuagaaggaaauuuuaug

SEQ ID NO: 726609 - RNA, 18 nt, Human
gacccaggaaagaguccu

SEQ ID NO: 726610 - RNA, 22 nt, Human
guucugggucuggacacacaga

SEQ ID NO: 726611 - RNA, 22 nt, Human
ucugggucuuuacccauggaau

SEQ ID NO: 726612 - RNA, 22 nt, Human
cugaauauuagucaugucugau

SEQ ID NO: 726613 - RNA, 22 nt, Human
uuauugucaaaaacaggacacu

SEQ ID NO: 726614 - RNA, 22 nt, Human
ucccucagcaggaauguggcag

SEQ ID NO: 726615 - RNA, 22 nt, Human
ccugcucaccugauguggcaac

SEQ ID NO: 726616 - RNA, 22 nt, Human
augcuuggaugcugccauggga

SEQ ID NO: 726617 - RNA, 22 nt, Human
cacugcuuuucagacaguuauu

SEQ ID NO: 726618 - RNA, 19 nt, Human
gacuaaauaauaauagcag

SEQ ID NO: 726619 - RNA, 22 nt, Human
uugcaguagguggagugaauuu

SEQ ID NO: 726620 - RNA, 22 nt, Human
uccagccuccuauuuacccuaa

SEQ ID NO: 726621 - RNA, 19 nt, Human
ugggaaaguaacauacaaa

SEQ ID NO: 726622 - RNA, 22 nt, Human
uugcugagagcgugucaacaag

SEQ ID NO: 726623 - RNA, 21 nt, Human
auucuuugaugugcaauaagu

SEQ ID NO: 726624 - RNA, 22 nt, Human
caguuucuuaucuucaaaauug

SEQ ID NO: 726625 - RNA, 22 nt, Human
uucacagacuuuccauagauug

SEQ ID NO: 726626 - RNA, 22 nt, Human
aggcuggcuucccaagcguccu

SEQ ID NO: 726627 - RNA, 22 nt, Human
uacauugugucucuaucuaguc

SEQ ID NO: 726628 - RNA, 22 nt, Human
cagagccucucagccccuuggg

SEQ ID NO: 726629 - RNA, 22 nt, Human
auaaaaguaggaccaacuuaca

SEQ ID NO: 726630 - RNA, 22 nt, Human
ugacagacagcuucucauuuua

SEQ ID NO: 726631 - RNA, 22 nt, Human
aaugcacagcguuccaugcuug

SEQ ID NO: 726632 - RNA, 22 nt, Human
gucccaggggagcucucugauu

SEQ ID NO: 726633 - RNA, 22 nt, Human
uacugugggauguugugauuag

SEQ ID NO: 726634 - RNA, 22 nt, Human
uguacucagcucagaucucagg

SEQ ID NO: 726635 - RNA, 22 nt, Human
gagagguccauuccccugucag

SEQ ID NO: 726636 - RNA, 21 nt, Human
ucacagagccacagaauuggu

SEQ ID NO: 726637 - RNA, 22 nt, Human
cuuccugaagagguuggucagg

SEQ ID NO: 726638 - RNA, 22 nt, Human
caggguggcacucagcgcaucu

SEQ ID NO: 726639 - RNA, 22 nt, Human
aagugugucuugggaagggagg

SEQ ID NO: 726640 - RNA, 22 nt, Human
uucucuuagcuguaaagucaau

SEQ ID NO: 726641 - RNA, 22 nt, Human
gcuuuuucaaaugaaagcuggu

SEQ ID NO: 726642 - RNA, 22 nt, Human
uuucagacaugggggcaaacag

SEQ ID NO: 726643 - RNA, 22 nt, Human
aggaauuguguuguaguggaga

SEQ ID NO: 726644 - RNA, 17 nt, Human
ugguccagguggagcca

SEQ ID NO: 726645 - RNA, 22 nt, Human
uucccuccgaaccucagugcug

SEQ ID NO: 726646 - RNA, 22 nt, Human
gcaaguacaaacgcaucggcug

SEQ ID NO: 726647 - RNA, 22 nt, Human
acuggcugaaguuuacuuuuug

SEQ ID NO: 726648 - RNA, 22 nt, Human
aaggccuugccgaaggaugcca

SEQ ID NO: 726649 - RNA, 22 nt, Human
ggccuaggaaggggauguaacu

SEQ ID NO: 726650 - RNA, 22 nt, Human
aguccauaguuuacauuacagc

SEQ ID NO: 726651 - RNA, 22 nt, Human
ucccuuugaucacuaacagaac

SEQ ID NO: 726652 - RNA, 22 nt, Human
cucccacuccuggcucaccaca

SEQ ID NO: 726653 - RNA, 17 nt, Human
aguguggcccugguuaa

SEQ ID NO: 726654 - RNA, 22 nt, Human
agcacaaugugaaaagagcucu

SEQ ID NO: 726655 - RNA, 22 nt, Human
uccuucagcuuauuucuuagga

SEQ ID NO: 726656 - RNA, 22 nt, Human
gcauuauuaauagcugcaugag

SEQ ID NO: 726657 - RNA, 22 nt, Human
ugaacuuuguaguaauggagau

SEQ ID NO: 726658 - RNA, 22 nt, Human
gccuccugacuuacacugagcu

SEQ ID NO: 726659 - RNA, 22 nt, Human
ucccuggguccugcuugcucuc

SEQ ID NO: 726660 - RNA, 22 nt, Human
agccuggcuaaauucucccaug

SEQ ID NO: 726661 - RNA, 22 nt, Human
auuguacacuaguggcagcagu

SEQ ID NO: 726662 - RNA, 22 nt, Human
cuuggcuguaaaaucagaggcu

SEQ ID NO: 726663 - RNA, 22 nt, Human
acaaaugacuauuugguacagg

SEQ ID NO: 726664 - RNA, 22 nt, Human
ccguuaaucccauaauauggau

SEQ ID NO: 726665 - RNA, 22 nt, Human
cauccacuagaaugacagaguu

SEQ ID NO: 726666 - RNA, 20 nt, Human
uggguccugcacauucucca

SEQ ID NO: 726667 - RNA, 22 nt, Human
uucccacaacagaucuguauua

SEQ ID NO: 726668 - RNA, 22 nt, Human
ucugugcagucagggcucaguc

SEQ ID NO: 726669 - RNA, 22 nt, Human
caaauucaaugaacauguuuaa

SEQ ID NO: 726670 - RNA, 22 nt, Human
aagggcuuuuaagauuuauccu

SEQ ID NO: 726671 - RNA, 18 nt, Human
uccagagguguuggagcc

SEQ ID NO: 726672 - RNA, 22 nt, Human
agguuucuaugcuguuuaucuu

SEQ ID NO: 726673 - RNA, 22 nt, Human
uccaaguugauguuucuuaaau

SEQ ID NO: 726674 - RNA, 22 nt, Human
ccuguguguaggccaggggagu

SEQ ID NO: 726675 - RNA, 22 nt, Human
ucccuggggauguuggccugcc

SEQ ID NO: 726676 - RNA, 19 nt, Human
uuugaaagaguuuuauugg

SEQ ID NO: 726677 - RNA, 22 nt, Human
ucugcugaggccuucccacucc

SEQ ID NO: 726678 - RNA, 22 nt, Human
uuauauauauguagaggucacg

SEQ ID NO: 726679 - RNA, 22 nt, Human
ucugaagaacugucuagagaac

SEQ ID NO: 726680 - RNA, 22 nt, Human
gagccuggauugaagugggugg

SEQ ID NO: 726681 - RNA, 20 nt, Human
auauuucuuaagaacuuuca

SEQ ID NO: 726682 - RNA, 22 nt, Human
ugcaggaaaacaccuaucaccc

SEQ ID NO: 726683 - RNA, 22 nt, Human
agagccaggcucccauggggca

SEQ ID NO: 726684 - RNA, 22 nt, Human
uucuuuccacagaggggaugau

SEQ ID NO: 726685 - RNA, 22 nt, Human
acccagggucaccccguagggu

SEQ ID NO: 726686 - RNA, 22 nt, Human
agggcuggcaucucuaaugcug

SEQ ID NO: 726687 - RNA, 22 nt, Human
ggcuuccugggcauguguucua

SEQ ID NO: 726688 - RNA, 22 nt, Human
ccagcagcagcguccaaggaga

SEQ ID NO: 726689 - RNA, 22 nt, Human
acaaggagagcacacaugggga

SEQ ID NO: 726690 - RNA, 22 nt, Human
cagaguccuggacacagagaca

SEQ ID NO: 726691 - RNA, 22 nt, Human
gcaauaaacauguuugaugcgc

SEQ ID NO: 726692 - RNA, 22 nt, Human
gaggcccaggucaagcagccac

SEQ ID NO: 726693 - RNA, 22 nt, Human
uaucuacaggugucagguaaga

SEQ ID NO: 726694 - RNA, 22 nt, Human
uaaggcagugagaagaaacagg

SEQ ID NO: 726695 - RNA, 22 nt, Human
ccagcucugcauguuucccuug

SEQ ID NO: 726696 - RNA, 22 nt, Human
uggucugauuccaccuaacuga

SEQ ID NO: 726697 - RNA, 22 nt, Human
auccucuguggauuacaccuag

SEQ ID NO: 726698 - RNA, 22 nt, Human
uucuucagucccacuagccaca

SEQ ID NO: 726699 - RNA, 22 nt, Human
acagagaaagugggcugaagau

SEQ ID NO: 726700 - RNA, 22 nt, Human
gagcccugaacaacagcaggaa

SEQ ID NO: 726701 - RNA, 22 nt, Human
cacuucagguucuggcagggcg

SEQ ID NO: 726702 - RNA, 22 nt, Human
cagagcugcagauugaaggcau

SEQ ID NO: 726703 - RNA, 22 nt, Human
auucacaguuuccucauauucu

SEQ ID NO: 726704 - RNA, 18 nt, Human
ucauucauuaaacuuggc

SEQ ID NO: 726705 - RNA, 23 nt, Human
cccuucagcgagggcauuaaggu

SEQ ID NO: 726706 - RNA, 22 nt, Human
ugaaagaguuugacaugauucu

SEQ ID NO: 726707 - RNA, 22 nt, Human
cagguaaagcuucaaaucacuu

SEQ ID NO: 726708 - RNA, 22 nt, Human
cacuaaauguuucaauguggga

SEQ ID NO: 726709 - RNA, 22 nt, Human
ucacucucuaagcaugacagac

SEQ ID NO: 726710 - RNA, 22 nt, Human
acuuuacccgcacucagacaca

SEQ ID NO: 726711 - RNA, 22 nt, Human
gcucccaguucccaaagugacc

SEQ ID NO: 726712 - RNA, 22 nt, Human
gggccaggucggugaaugguca

SEQ ID NO: 726713 - RNA, 22 nt, Human
gcccaggcuggagugcaguagc

SEQ ID NO: 726714 - RNA, 20 nt, Human
agccucugcccuucccacug

SEQ ID NO: 726715 - RNA, 22 nt, Human
aacaugucuuuagagaaacauu

SEQ ID NO: 726716 - RNA, 22 nt, Human
aggugucuggauggguguccuu

SEQ ID NO: 726717 - RNA, 21 nt, Human
agcuuccugcagugggagguc

SEQ ID NO: 726718 - RNA, 22 nt, Human
ucccugggaauuaauauuugga

SEQ ID NO: 726719 - RNA, 22 nt, Human
aaugucaaagugcuuugcaaac

SEQ ID NO: 726720 - RNA, 22 nt, Human
uuggggcagagaggauacggca

SEQ ID NO: 726721 - RNA, 22 nt, Human
uugagcaucaauuaagugaguu

SEQ ID NO: 726722 - RNA, 22 nt, Human
cagagcaguagaaaacagccuu

SEQ ID NO: 726723 - RNA, 22 nt, Human
uccucacagaguggcaggcaau

SEQ ID NO: 726724 - RNA, 22 nt, Human
cgcagagggagccgcgggcugc

SEQ ID NO: 726725 - RNA, 22 nt, Human
caaagcucaugcucuuagccau

SEQ ID NO: 726726 - RNA, 22 nt, Human
auauacuguaggccacuauaag

SEQ ID NO: 726727 - RNA, 22 nt, Human
uaggccaguugguggcccugga

SEQ ID NO: 726728 - RNA, 22 nt, Human
ggcugcugggucaugaugcaga

SEQ ID NO: 726729 - RNA, 22 nt, Human
uccuuugguaguuuucuuaaag

SEQ ID NO: 726730 - RNA, 22 nt, Human
auaauguagguauguguauuua

SEQ ID NO: 726731 - RNA, 22 nt, Human
augaggcaucuaacauugcaaa

SEQ ID NO: 726732 - RNA, 22 nt, Human
gggcacugcuuugcucugucac

SEQ ID NO: 726733 - RNA, 22 nt, Human
ucuacagggucagaguuucaug

SEQ ID NO: 726734 - RNA, 22 nt, Human
cauguccuucucauugccucau

SEQ ID NO: 726735 - RNA, 22 nt, Human
caagaaacuuuauucugccaua

SEQ ID NO: 726736 - RNA, 22 nt, Human
gcuuggagaugggggaugagcc

SEQ ID NO: 726737 - RNA, 22 nt, Human
gcagggcuaggucuucuagggc

SEQ ID NO: 726738 - RNA, 22 nt, Human
acguguguaugaguguacauau

SEQ ID NO: 726739 - RNA, 22 nt, Human
uagaaacauauguuugagacau

SEQ ID NO: 726740 - RNA, 22 nt, Human
uuggcccuuuaugggaugggca

SEQ ID NO: 726741 - RNA, 22 nt, Human
uauuacaauuuacauugcacuu

SEQ ID NO: 726742 - RNA, 22 nt, Human
uuuugguacaugcaauagcaau

SEQ ID NO: 726743 - RNA, 22 nt, Human
uuucacaucagagguagauuag

SEQ ID NO: 726744 - RNA, 22 nt, Human
ugaagguguaugcuguggguca

SEQ ID NO: 726745 - RNA, 21 nt, Human
gcccagaagacuggcucugcc

SEQ ID NO: 726746 - RNA, 22 nt, Human
uccugguuuauagacugauggc

SEQ ID NO: 726747 - RNA, 22 nt, Human
cugcccuguuuggacagcccgg

SEQ ID NO: 726748 - RNA, 18 nt, Human
agauugugucuacaaauc

SEQ ID NO: 726749 - RNA, 22 nt, Human
agagccuggcaaaagguccugc

SEQ ID NO: 726750 - RNA, 23 nt, Human
ggccucagcgcacagaaacugcu

SEQ ID NO: 726751 - RNA, 17 nt, Human
ggagaucuggcagaggg

SEQ ID NO: 726752 - RNA, 22 nt, Human
ggcucaagcagucugccugccu

SEQ ID NO: 726753 - RNA, 22 nt, Human
uccuggaggcaaaugagcacau

SEQ ID NO: 726754 - RNA, 22 nt, Human
aguugaaaauuaagugaauuuc

SEQ ID NO: 726755 - RNA, 22 nt, Human
uauuugaugguucuaaaacagc

SEQ ID NO: 726756 - RNA, 22 nt, Human
ggugccaggcucccagcucagg

SEQ ID NO: 726757 - RNA, 22 nt, Human
ucugagcuacgaugccugucac

SEQ ID NO: 726758 - RNA, 21 nt, Human
uggucugaaaguauuuguggc

SEQ ID NO: 726759 - RNA, 22 nt, Human
ucaugacaacuauauuauucca

SEQ ID NO: 726760 - RNA, 22 nt, Human
auuaguugggguggagaaggau

SEQ ID NO: 726761 - RNA, 22 nt, Human
gugacauugcuaggaacagauu

SEQ ID NO: 726762 - RNA, 22 nt, Human
ggugugaauuuugaccuuuuaa

SEQ ID NO: 726763 - RNA, 22 nt, Human
uguccucaaggagcuucagucu

SEQ ID NO: 726764 - RNA, 22 nt, Human
ggcuggcagaggggagucugug

SEQ ID NO: 726765 - RNA, 22 nt, Human
cugagacuuucaugugcuuuua

SEQ ID NO: 726766 - RNA, 22 nt, Human
augacaugaccugguagagaca

SEQ ID NO: 726767 - RNA, 22 nt, Human
aggccagcacgacagccgcagg

SEQ ID NO: 726768 - RNA, 23 nt, Human
ucccuggaggcagguccagggcc

SEQ ID NO: 726769 - RNA, 22 nt, Human
agucacauggcagagagaaguu

SEQ ID NO: 726770 - RNA, 22 nt, Human
agggcaucuaguucccucucuu

SEQ ID NO: 726771 - RNA, 22 nt, Human
cugagcaccccaggaccugcgc

SEQ ID NO: 726772 - RNA, 22 nt, Human
uuguacaacacauauucuacag

SEQ ID NO: 726773 - RNA, 22 nt, Human
ucaggaaguauaaucagauuca

SEQ ID NO: 726774 - RNA, 22 nt, Human
uaggaaauuuuacuggucuggg

SEQ ID NO: 726775 - RNA, 23 nt, Human
aggagacagggaagugccuggcu

SEQ ID NO: 726776 - RNA, 22 nt, Human
uuguuuuggaagaacuuacucu

SEQ ID NO: 726777 - RNA, 22 nt, Human
cuccagacagaucuucuagcag

SEQ ID NO: 726778 - RNA, 22 nt, Human
ucaaaggcauugccaauaagua

SEQ ID NO: 726779 - RNA, 22 nt, Human
augcucacuucagagaagauga

SEQ ID NO: 726780 - RNA, 22 nt, Human
cagcaguuaugaguagaauagu

SEQ ID NO: 726781 - RNA, 22 nt, Human
aagccagauuccuuaagcacag

SEQ ID NO: 726782 - RNA, 22 nt, Human
augaaggauggcuggcugcccu

SEQ ID NO: 726783 - RNA, 22 nt, Human
uucagugcacaguacugagacu

SEQ ID NO: 726784 - RNA, 22 nt, Human
uuucacagaaagaagcuaguuu

SEQ ID NO: 726785 - RNA, 17 nt, Human
gagguaggaagugaguc

SEQ ID NO: 726786 - RNA, 22 nt, Human
cugagcuuggccaggaaugaau

SEQ ID NO: 726787 - RNA, 22 nt, Human
aucucagaucuacagaucuaca

SEQ ID NO: 726788 - RNA, 22 nt, Human
agacccucuccaugcccacugc

SEQ ID NO: 726789 - RNA, 22 nt, Human
auuuggucauguucaguguaga

SEQ ID NO: 726790 - RNA, 22 nt, Human
aaaaguaauugcaguuuuugcc

SEQ ID NO: 726791 - RNA, 23 nt, Human
agucaagaugcaucugugaggaa

SEQ ID NO: 726792 - RNA, 22 nt, Human
uaaacaaggguuacugagcaug

SEQ ID NO: 726793 - RNA, 22 nt, Human
ucuggcuggcagugauggugug

SEQ ID NO: 726794 - RNA, 22 nt, Human
guuucucaacaugcuuucuaac

SEQ ID NO: 726795 - RNA, 22 nt, Human
ugcagcucaggauucucagggc

SEQ ID NO: 726796 - RNA, 22 nt, Human
uguauuagaucugagaacuucu

SEQ ID NO: 726797 - RNA, 22 nt, Human
cagaggcuuauaccugauuagg

SEQ ID NO: 726798 - RNA, 20 nt, Human
gagugggccauggagugaga

SEQ ID NO: 726799 - RNA, 16 nt, Human
cucagcuaaggagagg

SEQ ID NO: 726800 - RNA, 22 nt, Human
gccugcuggcuguccauugcag

SEQ ID NO: 726801 - RNA, 16 nt, Human
ccucucuuauuccucc

SEQ ID NO: 726802 - RNA, 22 nt, Human
auucucaauggcuacuuucaua

SEQ ID NO: 726803 - RNA, 22 nt, Human
gaaaguuuucucacacaguaau

SEQ ID NO: 726804 - RNA, 22 nt, Human
ucugugcucaaguucugccucu

SEQ ID NO: 726805 - RNA, 22 nt, Human
ggacugaacacuuaaaugucca

SEQ ID NO: 726806 - RNA, 22 nt, Human
ugaauccuaauucuaucacuua

SEQ ID NO: 726807 - RNA, 22 nt, Human
gcaaagguagccaaggagcuca

SEQ ID NO: 726808 - RNA, 20 nt, Human
aaagcaguaugcaaguagag

SEQ ID NO: 726809 - RNA, 22 nt, Human
cagauggcagggcagcucugca

SEQ ID NO: 726810 - RNA, 21 nt, Human
cucagagacaaaugccauccc

SEQ ID NO: 726811 - RNA, 22 nt, Human
ugggugagccacaggaguuguc

SEQ ID NO: 726812 - RNA, 22 nt, Human
gugucugcacauaggaucucaa

SEQ ID NO: 726813 - RNA, 22 nt, Human
aggagaucagcuuagggaaggu

SEQ ID NO: 726814 - RNA, 22 nt, Human
uaagacauaaauaggcuuuuua

SEQ ID NO: 726815 - RNA, 22 nt, Human
uagcagaggaaaagagaacauu

SEQ ID NO: 726816 - RNA, 22 nt, Human
caaggcugcugcgggucgcacc

SEQ ID NO: 726817 - RNA, 22 nt, Human
accugugcaaagacuggucagg

SEQ ID NO: 726818 - RNA, 22 nt, Human
ccuggguuggagagcaauggug

SEQ ID NO: 726819 - RNA, 22 nt, Human
aaauccuuuggaggacaugaug

SEQ ID NO: 726820 - RNA, 22 nt, Human
gacugaggugcccagaggugac

SEQ ID NO: 726821 - RNA, 22 nt, Human
gggggaaguaauuauaaaccaa

SEQ ID NO: 726822 - RNA, 23 nt, Human
auuuuacaggucaguuccuugaa

SEQ ID NO: 726823 - RNA, 22 nt, Human
ggcggcgcguagccggagacuu

SEQ ID NO: 726824 - RNA, 22 nt, Human
ucagaacagugccuggcacuaa

SEQ ID NO: 726825 - RNA, 22 nt, Human
uguuugaaaaguggagauuuau

SEQ ID NO: 726826 - RNA, 22 nt, Human
ccuggcagcaggugggcccgug

SEQ ID NO: 726827 - RNA, 22 nt, Human
uggcccugggcaucuuucguga

SEQ ID NO: 726828 - RNA, 22 nt, Human
uuacaugacugcccuugucagg

SEQ ID NO: 726829 - RNA, 22 nt, Human
gggccugggaacuugcauuuag

SEQ ID NO: 726830 - RNA, 20 nt, Human
uaucaguaggauauucugcc

SEQ ID NO: 726831 - RNA, 22 nt, Human
ccacacagggggaugaguuauu

SEQ ID NO: 726832 - RNA, 22 nt, Human
cugacaaaccacugcuccagcu

SEQ ID NO: 726833 - RNA, 23 nt, Human
aguuuguaaagaaauauuugcac

SEQ ID NO: 726834 - RNA, 19 nt, Human
gcagguggauguggucagc

SEQ ID NO: 726835 - RNA, 22 nt, Human
aaugaugguuaaacacuggagg

SEQ ID NO: 726836 - RNA, 22 nt, Human
uuuuccuggagauggaguuguu

SEQ ID NO: 726837 - RNA, 22 nt, Human
ggggcaggagguguucucuuuu

SEQ ID NO: 726838 - RNA, 22 nt, Human
acaguauauauagucuaaaagc

SEQ ID NO: 726839 - RNA, 22 nt, Human
uugauuuugccugaucugagag

SEQ ID NO: 726840 - RNA, 22 nt, Human
ucagauuuacugcagagcagau

SEQ ID NO: 726841 - RNA, 22 nt, Human
cucuggagcaccgggcuaucca

SEQ ID NO: 726842 - RNA, 22 nt, Human
cagcuuguuuuauuuggggacc

SEQ ID NO: 726843 - RNA, 22 nt, Human
gcuacauaguaacccacaaauc

SEQ ID NO: 726844 - RNA, 22 nt, Human
aggucaagguucacaggggauc

SEQ ID NO: 726845 - RNA, 22 nt, Human
uuuaagagcauuugcaauuuau

SEQ ID NO: 726846 - RNA, 22 nt, Human
cacuguaucuuuuccaaagucu

SEQ ID NO: 726847 - RNA, 22 nt, Human
aaaaucacacaaguagaugggg

SEQ ID NO: 726848 - RNA, 22 nt, Human
uaucuauaaguacuaacauggu

SEQ ID NO: 726849 - RNA, 22 nt, Human
uuccaugagcucugaguucaca

SEQ ID NO: 726850 - RNA, 22 nt, Human
gcuuccagaccccagucccuca

SEQ ID NO: 726851 - RNA, 22 nt, Human
cuaagcaagaaugagugcaaca

SEQ ID NO: 726852 - RNA, 22 nt, Human
aggaaagcucccaguagggcuc

SEQ ID NO: 726853 - RNA, 22 nt, Human
gugucugaguuuggaaagucca

SEQ ID NO: 726854 - RNA, 22 nt, Human
gcaggagagccagcaggcuucc

SEQ ID NO: 726855 - RNA, 22 nt, Human
uauuuugucuucugcucaucac

SEQ ID NO: 726856 - RNA, 22 nt, Human
cuccuggagggccaaagaaaua

SEQ ID NO: 726857 - RNA, 22 nt, Human
agaaaggacaucucccuuuaag

SEQ ID NO: 726858 - RNA, 22 nt, Human
agggccaggaacaccugaaggg

SEQ ID NO: 726859 - RNA, 18 nt, Human
agccugggcucugccugg

SEQ ID NO: 726860 - RNA, 22 nt, Human
guccuuaacaaacggggaaaag

SEQ ID NO: 726861 - RNA, 22 nt, Human
guucacaguuuuauaccugaga

SEQ ID NO: 726862 - RNA, 22 nt, Human
ugcugagaaucacagguuauaa

SEQ ID NO: 726863 - RNA, 22 nt, Human
aagagaauucugguuuuccuau

SEQ ID NO: 726864 - RNA, 22 nt, Human
cugccuuuuaaagccaguguua

SEQ ID NO: 726865 - RNA, 22 nt, Human
gcugggucagaaucucccugug

SEQ ID NO: 726866 - RNA, 22 nt, Human
gcuuagcaaacaucuguagucc

SEQ ID NO: 726867 - RNA, 22 nt, Human
agaggcugcaggcuggaaauca

SEQ ID NO: 726868 - RNA, 22 nt, Human
ugugggcucccccucacucugu

SEQ ID NO: 726869 - RNA, 22 nt, Human
cccugugcacacacuucacucu

SEQ ID NO: 726870 - RNA, 22 nt, Human
ugacccaucaggccacaugagg

SEQ ID NO: 726871 - RNA, 22 nt, Human
gcugcagcaagcccuccagggg

SEQ ID NO: 726872 - RNA, 22 nt, Human
ugcagcagccucaucugguuuc

SEQ ID NO: 726873 - RNA, 21 nt, Human
aaacugaggcuucaagcagug

SEQ ID NO: 726874 - RNA, 22 nt, Human
ccuccaggauaagucagggccu

SEQ ID NO: 726875 - RNA, 22 nt, Human
guaugaaaauuguaaaguucuu

SEQ ID NO: 726876 - RNA, 19 nt, Human
cacagggcaggucucaugu

SEQ ID NO: 726877 - RNA, 22 nt, Human
gggcuccuggcagucaugcuca

SEQ ID NO: 726878 - RNA, 23 nt, Human
uugcagggauggaguucaaaaug

SEQ ID NO: 726879 - RNA, 22 nt, Human
cuccaggcgcuuaccaagcgcu

SEQ ID NO: 726880 - RNA, 22 nt, Human
auugcacaaacacagucagacu

SEQ ID NO: 726881 - RNA, 22 nt, Human
ggcccaggcuggagugcggugg

SEQ ID NO: 726882 - RNA, 22 nt, Human
augucuaaaagauaaaguuuaa

SEQ ID NO: 726883 - RNA, 22 nt, Human
aagaguuuuagacaaacugauu

SEQ ID NO: 726884 - RNA, 22 nt, Human
uggucugauuuuucaucuguug

SEQ ID NO: 726885 - RNA, 22 nt, Human
uuuuccuggggcuucuggacuc

SEQ ID NO: 726886 - RNA, 20 nt, Human
aguaccuuuuguauguuacc

SEQ ID NO: 726887 - RNA, 22 nt, Human
ccagccaugcacaaaccaugag

SEQ ID NO: 726888 - RNA, 22 nt, Human
ccagcaggggaauauuuuuagg

SEQ ID NO: 726889 - RNA, 22 nt, Human
acacccagcuuuugaaugcccu

SEQ ID NO: 726890 - RNA, 22 nt, Human
uuuuaucuucauuccuaucuac

SEQ ID NO: 726891 - RNA, 21 nt, Human
ucugugcuuuuuuggcuccua

SEQ ID NO: 726892 - RNA, 22 nt, Human
cuccauggaaccggggcugcuu

SEQ ID NO: 726893 - RNA, 22 nt, Human
guggcuguauagccaagucaga

SEQ ID NO: 726894 - RNA, 22 nt, Human
aaggaaaugagguugauggaug

SEQ ID NO: 726895 - RNA, 23 nt, Human
ugcaggcuaggaagagagccuuc

SEQ ID NO: 726896 - RNA, 22 nt, Human
auuuucuauguuguaauuguua

SEQ ID NO: 726897 - RNA, 21 nt, Human
auuacagcaguggccaaaugc

SEQ ID NO: 726898 - RNA, 22 nt, Human
acagaagccuuuggccauuuga

SEQ ID NO: 726899 - RNA, 22 nt, Human
agcagccacagucugggacagg

SEQ ID NO: 726900 - RNA, 22 nt, Human
acagaugaggaagagucagcca

SEQ ID NO: 726901 - RNA, 22 nt, Human
acacacaugguauuguucagaa

SEQ ID NO: 726902 - RNA, 20 nt, Human
ugucugugccacggcacucc

SEQ ID NO: 726903 - RNA, 22 nt, Human
cuucucucccuggcacucagac

SEQ ID NO: 726904 - RNA, 22 nt, Human
acuuuuugcuggucucuuccau

SEQ ID NO: 726905 - RNA, 22 nt, Human
cuuuucaaacgcugaugucagu

SEQ ID NO: 726906 - RNA, 22 nt, Human
caaaugugguuucucagcauuc

SEQ ID NO: 726907 - RNA, 22 nt, Human
aucuacccacugaacacaauau

SEQ ID NO: 726908 - RNA, 22 nt, Human
ucucaaacuaacaaugauuaua

SEQ ID NO: 726909 - RNA, 22 nt, Human
gaagguagcugcugagaugaca

SEQ ID NO: 726910 - RNA, 22 nt, Human
guucagcuaggaauggagaugc

SEQ ID NO: 726911 - RNA, 22 nt, Human
uuuuugauacucaagaggggua

SEQ ID NO: 726912 - RNA, 22 nt, Human
uggcccaggcgaggugggcaga

SEQ ID NO: 726913 - RNA, 22 nt, Human
caggaagcugagcugcacugca

SEQ ID NO: 726914 - RNA, 22 nt, Human
uaaugcacagaauugacauggg

SEQ ID NO: 726915 - RNA, 22 nt, Human
ccagggaaaaucaacuucuacu

SEQ ID NO: 726916 - RNA, 22 nt, Human
ucacgugagggaccugugucug

SEQ ID NO: 726917 - RNA, 22 nt, Human
gcacuugaaaagaucaggugca

SEQ ID NO: 726918 - RNA, 23 nt, Human
aacaccaaggcucagagagauaa

SEQ ID NO: 726919 - RNA, 21 nt, Human
agccugccugaacucuguggc

SEQ ID NO: 726920 - RNA, 22 nt, Human
uucuguguucugugcaaugagc

SEQ ID NO: 726921 - RNA, 22 nt, Human
caguuuuaugaaugcuuauuag

SEQ ID NO: 726922 - RNA, 22 nt, Human
caacuaauccuuugaaaagaag

SEQ ID NO: 726923 - RNA, 22 nt, Human
caacagcuggaggcuuggcccg

SEQ ID NO: 726924 - RNA, 22 nt, Human
agcagggccugagugaccuaac

SEQ ID NO: 726925 - RNA, 22 nt, Human
guguaaacacccuuacuguggc

SEQ ID NO: 726926 - RNA, 22 nt, Human
uggcccugugugcaggcugcac

SEQ ID NO: 726927 - RNA, 22 nt, Human
cuaauguaucauggcucucagc

SEQ ID NO: 726928 - RNA, 22 nt, Human
augugucuugcggcaguuggua

SEQ ID NO: 726929 - RNA, 22 nt, Human
caaagucauaaaacuuguaagu

SEQ ID NO: 726930 - RNA, 22 nt, Human
uuucuauaaaaagugcuaggau

SEQ ID NO: 726931 - RNA, 22 nt, Human
uugcucugucagggccucaguc

SEQ ID NO: 726932 - RNA, 22 nt, Human
auugcaaagcauugugagcgca

SEQ ID NO: 726933 - RNA, 22 nt, Human
ggugagcagcugucuguaugga

SEQ ID NO: 726934 - RNA, 22 nt, Human
acagaaauugcuaauagcucau

SEQ ID NO: 726935 - RNA, 22 nt, Human
ugcaagcuuggcugauguugau

SEQ ID NO: 726936 - RNA, 22 nt, Human
aaaucaugaggacauuaugcca

SEQ ID NO: 726937 - RNA, 22 nt, Human
aauucucuccaggguaacauca

SEQ ID NO: 726938 - RNA, 22 nt, Human
uuccucagccaaggcugggauc

SEQ ID NO: 726939 - RNA, 22 nt, Human
uucagagaguuugugaguccuu

SEQ ID NO: 726940 - RNA, 22 nt, Human
cagagucagagcaccugggauu

SEQ ID NO: 726941 - RNA, 22 nt, Human
uguuccugacggccaaagaggu

SEQ ID NO: 726942 - RNA, 19 nt, Human
uuuugaaguaugagacagg

SEQ ID NO: 726943 - RNA, 22 nt, Human
uuuaaauguguucuuaguagcu

SEQ ID NO: 726944 - RNA, 22 nt, Human
cuaguauuacauuuuugugugu

SEQ ID NO: 726945 - RNA, 22 nt, Human
ucagaacauauauuuugugaug

SEQ ID NO: 726946 - RNA, 22 nt, Human
ggcuagaugguauauaaggaug

SEQ ID NO: 726947 - RNA, 22 nt, Human
uaugcccuuacaaugagcacaa

SEQ ID NO: 726948 - RNA, 22 nt, Human
ccuggagugggguccgugcaug

SEQ ID NO: 726949 - RNA, 22 nt, Human
cagguaggcagccggucucugg

SEQ ID NO: 726950 - RNA, 22 nt, Human
cacagcugaaguagccaugugg

SEQ ID NO: 726951 - RNA, 22 nt, Human
gcugagaggcacuaucuccgga

SEQ ID NO: 726952 - RNA, 22 nt, Human
uggagcccagggugagaaggag

SEQ ID NO: 726953 - RNA, 22 nt, Human
gagcccaggaugguguauggcu

SEQ ID NO: 726954 - RNA, 22 nt, Human
ucacaaauauagugagaaccag

SEQ ID NO: 726955 - RNA, 22 nt, Human
agugugagugcucauguccauc

SEQ ID NO: 726956 - RNA, 22 nt, Human
agcacuagagccaaaauuuggg

SEQ ID NO: 726957 - RNA, 22 nt, Human
auguccagggcacacagcagug

SEQ ID NO: 726958 - RNA, 22 nt, Human
ucaggcuggagugcaguggcgc

SEQ ID NO: 726959 - RNA, 22 nt, Human
cugcuuuagacggcuuucgcug

SEQ ID NO: 726960 - RNA, 22 nt, Human
caucagcaggcaacacucuugg

SEQ ID NO: 726961 - RNA, 20 nt, Human
ccucucugaagaggucaucu

SEQ ID NO: 726962 - RNA, 22 nt, Human
ucucagaaaaaggagaaacugg

SEQ ID NO: 726963 - RNA, 22 nt, Human
ugucacaccucguuuagcauuc

SEQ ID NO: 726964 - RNA, 22 nt, Human
augaugaaauuuucuaucaugu

SEQ ID NO: 726965 - RNA, 22 nt, Human
ccucuggggugagugggccacu

SEQ ID NO: 726966 - RNA, 22 nt, Human
gauauuuuuaggugaugcaggc

SEQ ID NO: 726967 - RNA, 22 nt, Human
uuuuuguagucauuagaagagg

SEQ ID NO: 726968 - RNA, 22 nt, Human
uucauccauaugcagagagcuu

SEQ ID NO: 726969 - RNA, 22 nt, Human
cuuggacuuuagucucucucca

SEQ ID NO: 726970 - RNA, 22 nt, Human
uguacaguuuuaacucugaggg

SEQ ID NO: 726971 - RNA, 22 nt, Human
ucugaaaugcaaauuugacuga

SEQ ID NO: 726972 - RNA, 18 nt, Human
ucucaaaaauaauggcuu

SEQ ID NO: 726973 - RNA, 22 nt, Human
uuugaauauacuucaaacaaag

SEQ ID NO: 726974 - RNA, 19 nt, Human
uggcaggcccaggauggac

SEQ ID NO: 726975 - RNA, 22 nt, Human
ugaggggcgcuggcagguuccu

SEQ ID NO: 726976 - RNA, 22 nt, Human
ucccaagcuuagggcucucagu

SEQ ID NO: 726977 - RNA, 22 nt, Human
uuagagaugucccaaaaugaag

SEQ ID NO: 726978 - RNA, 22 nt, Human
auaccaccaucuaugaaaggua

SEQ ID NO: 726979 - RNA, 22 nt, Human
auguguacacuggacuucugau

SEQ ID NO: 726980 - RNA, 22 nt, Human
ccucugggaagccaguccugcu

SEQ ID NO: 726981 - RNA, 22 nt, Human
ucaggguugcugugaucagucc

SEQ ID NO: 726982 - RNA, 22 nt, Human
acaggcagggaccucuugaguu

SEQ ID NO: 726983 - RNA, 22 nt, Human
ucucuuaauccggugcuuucug

SEQ ID NO: 726984 - RNA, 22 nt, Human
uauuuuacaugacagguguuua

SEQ ID NO: 726985 - RNA, 22 nt, Human
aauaucucaccaugacaaagca

SEQ ID NO: 726986 - RNA, 22 nt, Human
uauuuuaucugccagaguggag

SEQ ID NO: 726987 - RNA, 22 nt, Human
uuugaacuucuaccugucauau

SEQ ID NO: 726988 - RNA, 22 nt, Human
uggaaagaaaguaaaggcguau

SEQ ID NO: 726989 - RNA, 22 nt, Human
ggcuccagauguccccuggcaa

SEQ ID NO: 726990 - RNA, 22 nt, Human
uagcacauaacuuagaauaguu

SEQ ID NO: 726991 - RNA, 22 nt, Human
uggggagugaugccucggauaa

SEQ ID NO: 726992 - RNA, 23 nt, Human
aucuguucaucugacacagauuc

SEQ ID NO: 726993 - RNA, 20 nt, Human
caaggggaguaguaugggcc

SEQ ID NO: 726994 - RNA, 22 nt, Human
aaacuucauggauaauauaaag

SEQ ID NO: 726995 - RNA, 22 nt, Human
gucugcccugcagacaugccuc

SEQ ID NO: 726996 - RNA, 22 nt, Human
uaauuagaguuugguaaacaau

SEQ ID NO: 726997 - RNA, 22 nt, Human
cuuuguuuauauuucuccucga

SEQ ID NO: 726998 - RNA, 22 nt, Human
uggcagaguucgcuccuauuca

SEQ ID NO: 726999 - RNA, 22 nt, Human
gcauuuauuucuuuacugcauc

SEQ ID NO: 727000 - RNA, 18 nt, Human
ucccugggauauaauuac

SEQ ID NO: 727001 - RNA, 22 nt, Human
agguccugaagauuuuacuaga

SEQ ID NO: 727002 - RNA, 23 nt, Human
agcaggcugcuucuccacagcug

SEQ ID NO: 727003 - RNA, 20 nt, Human
ggugcugauaagaaagaagu

SEQ ID NO: 727004 - RNA, 22 nt, Human
aaaaaccuuucccauacuaaga

SEQ ID NO: 727005 - RNA, 22 nt, Human
uuuguugugaacagaauaauau

SEQ ID NO: 727006 - RNA, 22 nt, Human
uuucacauaaauauuaugccua

SEQ ID NO: 727007 - RNA, 22 nt, Human
ugcaauaaggaguaauaguaaa

SEQ ID NO: 727008 - RNA, 22 nt, Human
ugugacuggcagaggugucugg

SEQ ID NO: 727009 - RNA, 22 nt, Human
uagggcuauaagagaauaagac

SEQ ID NO: 727010 - RNA, 23 nt, Human
ucagugcaaaaauaggauuuugg

SEQ ID NO: 727011 - RNA, 22 nt, Human
cagccugcccuggaagcccagc

SEQ ID NO: 727012 - RNA, 22 nt, Human
agccacaccuguccugccagcu

SEQ ID NO: 727013 - RNA, 22 nt, Human
uaacugaauguauuacaacaga

SEQ ID NO: 727014 - RNA, 22 nt, Human
ucuuguauguguauuuugcugu

SEQ ID NO: 727015 - RNA, 22 nt, Human
ugggaacaccugcugcccagug

SEQ ID NO: 727016 - RNA, 23 nt, Human
agcuccagggaacaggcaguagg

SEQ ID NO: 727017 - RNA, 18 nt, Human
uguuuccuccuggaggcu

SEQ ID NO: 727018 - RNA, 22 nt, Human
aguacaaguagaaugcuacaag

SEQ ID NO: 727019 - RNA, 22 nt, Human
uccgcccgcacguauggagugg

SEQ ID NO: 727020 - RNA, 22 nt, Human
ucaggcugauaggaggaacuga

SEQ ID NO: 727021 - RNA, 22 nt, Human
gauucagugagggugagaagaa

SEQ ID NO: 727022 - RNA, 22 nt, Human
uuucagaggaaaucucauugag

SEQ ID NO: 727023 - RNA, 22 nt, Human
gggaaauuuuagguuugucucg

SEQ ID NO: 727024 - RNA, 22 nt, Human
uauaaccuggauucuggcacua

SEQ ID NO: 727025 - RNA, 22 nt, Human
ggcggcacgcaggcugcugucg

SEQ ID NO: 727026 - RNA, 22 nt, Human
ucuguuccucaaggucugugug

SEQ ID NO: 727027 - RNA, 22 nt, Human
aagcacagacacaaaaggcuuu

SEQ ID NO: 727028 - RNA, 22 nt, Human
ccugcccuucuuuccccagcau

SEQ ID NO: 727029 - RNA, 22 nt, Human
agggugcagaacaaauuaagac

SEQ ID NO: 727030 - RNA, 22 nt, Human
ucagcuugggaaauugagcaag

SEQ ID NO: 727031 - RNA, 22 nt, Human
gggcagccugcuuucugaucca

SEQ ID NO: 727032 - RNA, 22 nt, Human
augaugaagaguaacaggcuga

SEQ ID NO: 727033 - RNA, 22 nt, Human
uccuggcccaaucugcccauga

SEQ ID NO: 727034 - RNA, 22 nt, Human
agcagcagggcaugucuuacuc

SEQ ID NO: 727035 - RNA, 22 nt, Human
gaggcugggaaguccaauauca

SEQ ID NO: 727036 - RNA, 22 nt, Human
gugugggaauggcggucgugca

SEQ ID NO: 727037 - RNA, 22 nt, Human
cugugacaguuucucagacuuu

SEQ ID NO: 727038 - RNA, 22 nt, Human
gccuaggaguggggauggcggu

SEQ ID NO: 727039 - RNA, 20 nt, Human
cacaguauucuuccuuaaaa

SEQ ID NO: 727040 - RNA, 22 nt, Human
auggcucagcgccuuucugugg

SEQ ID NO: 727041 - RNA, 19 nt, Human
ugcuuccucaccaucuccc

SEQ ID NO: 727042 - RNA, 22 nt, Human
aagauacaucaaagcaaauugg

SEQ ID NO: 727043 - RNA, 22 nt, Human
gaaagcacaguucaugagacaa

SEQ ID NO: 727044 - RNA, 22 nt, Human
gggcuuuaacacccagucaggg

SEQ ID NO: 727045 - RNA, 22 nt, Human
ccugccaggcuuugggcuucug

SEQ ID NO: 727046 - RNA, 22 nt, Human
cucccuggugacucccaaagcu

SEQ ID NO: 727047 - RNA, 22 nt, Human
aaggucauggcaaauuacuuuu

SEQ ID NO: 727048 - RNA, 21 nt, Human
agucacauuggggguuuaggg

SEQ ID NO: 727049 - RNA, 22 nt, Human
uggcaguggauaggggagcggu

SEQ ID NO: 727050 - RNA, 22 nt, Human
uagcugguucuccaggagcuag

SEQ ID NO: 727051 - RNA, 22 nt, Human
uuugucaaucccuugaaaaccu

SEQ ID NO: 727052 - RNA, 22 nt, Human
agcccuggauucugagguccaa

SEQ ID NO: 727053 - RNA, 22 nt, Human
ggcaaaggaaaacgucucagcu

SEQ ID NO: 727054 - RNA, 19 nt, Human
ugaucuggaaggaaccagg

SEQ ID NO: 727055 - RNA, 22 nt, Human
gcugugucagaaacucugggga

SEQ ID NO: 727056 - RNA, 22 nt, Human
aacuguauacaauugucagaca

SEQ ID NO: 727057 - RNA, 22 nt, Human
aucauccuagaaggaagcuagg

SEQ ID NO: 727058 - RNA, 22 nt, Human
gggcuucuauucaagucuguuu

SEQ ID NO: 727059 - RNA, 22 nt, Human
acuauaacccauggaauauaag

SEQ ID NO: 727060 - RNA, 22 nt, Human
uucuuucuucucaggcugggua

SEQ ID NO: 727061 - RNA, 22 nt, Human
uuugugaacaaacaugaagaug

SEQ ID NO: 727062 - RNA, 22 nt, Human
augcuugcccauguuucugaag

SEQ ID NO: 727063 - RNA, 22 nt, Human
ucucuaaagauauuuauggcaa

SEQ ID NO: 727064 - RNA, 22 nt, Human
gggcugagucugcugccuguca

SEQ ID NO: 727065 - RNA, 22 nt, Human
agaggcucagaggccugguccu

SEQ ID NO: 727066 - RNA, 22 nt, Human
uccuguccugaggcuccaggcc

SEQ ID NO: 727067 - RNA, 22 nt, Human
uuagucaauagugaauauagag

SEQ ID NO: 727068 - RNA, 22 nt, Human
acucugugugaguagagccugu

SEQ ID NO: 727069 - RNA, 23 nt, Human
cucuccugaaggacaagcugccg

SEQ ID NO: 727070 - RNA, 22 nt, Human
gacagaagaggaacuuggacag

SEQ ID NO: 727071 - RNA, 22 nt, Human
uguaaauaauuccuaggcuuuu

SEQ ID NO: 727072 - RNA, 22 nt, Human
accccagcucugagccacacca

SEQ ID NO: 727073 - RNA, 22 nt, Human
auggaaaucgaugucuaaguua

SEQ ID NO: 727074 - RNA, 22 nt, Human
gggcaggggucaguggccccaa

SEQ ID NO: 727075 - RNA, 22 nt, Human
aaccaggauuuaagauucuaga

SEQ ID NO: 727076 - RNA, 22 nt, Human
uccagcaaagugauaggauuuc

SEQ ID NO: 727077 - RNA, 22 nt, Human
gcagcaguggcaguuaauauuu

SEQ ID NO: 727078 - RNA, 22 nt, Human
uuggaugagagggugugguaca

SEQ ID NO: 727079 - RNA, 22 nt, Human
uugugguuaaccgcacauuuuu

SEQ ID NO: 727080 - RNA, 22 nt, Human
cccaggcugccacgauuacugc

SEQ ID NO: 727081 - RNA, 22 nt, Human
agcauuaauaagaaauggcucc

SEQ ID NO: 727082 - RNA, 22 nt, Human
cucagagcacaguuuaugacag

SEQ ID NO: 727083 - RNA, 22 nt, Human
uuacaagauaaccugaugcugu

SEQ ID NO: 727084 - RNA, 22 nt, Human
ucaagagauugaauaauaacug

SEQ ID NO: 727085 - RNA, 22 nt, Human
ggcugugccucuggcagcacau

SEQ ID NO: 727086 - RNA, 22 nt, Human
cugccugcuuuucugggagccg

SEQ ID NO: 727087 - RNA, 22 nt, Human
aagggcagggaguuugugucua

SEQ ID NO: 727088 - RNA, 22 nt, Human
acacauuugggcuccuacauaa

SEQ ID NO: 727089 - RNA, 22 nt, Human
aggcugugggacaguuaggaga

SEQ ID NO: 727090 - RNA, 22 nt, Human
acagggcuggggaaagaggcua

SEQ ID NO: 727091 - RNA, 22 nt, Human
cggagaggaccugcaacucgcu

SEQ ID NO: 727092 - RNA, 22 nt, Human
uauaauaugaggcaggagugau

SEQ ID NO: 727093 - RNA, 22 nt, Human
guuuauaaauucugcuuuuguu

SEQ ID NO: 727094 - RNA, 22 nt, Human
ugcaaagccacaaugaaaucag

SEQ ID NO: 727095 - RNA, 22 nt, Human
uucuccuggggccgugauguga

SEQ ID NO: 727096 - RNA, 22 nt, Human
gcaggucuaucaggcugcaggu

SEQ ID NO: 727097 - RNA, 22 nt, Human
ggcuuuugcuguguuuuccaga

SEQ ID NO: 727098 - RNA, 22 nt, Human
uaacacaaaagaauaugugugu

SEQ ID NO: 727099 - RNA, 22 nt, Human
aaguuuuacugaggacacaugu

SEQ ID NO: 727100 - RNA, 19 nt, Human
guggcucauguagugggcc

SEQ ID NO: 727101 - RNA, 22 nt, Human
cucagaggggaugcuuggagaa

SEQ ID NO: 727102 - RNA, 22 nt, Human
aagcccuggcccaaccuugauu

SEQ ID NO: 727103 - RNA, 20 nt, Human
ugccuggccuuucucugccc

SEQ ID NO: 727104 - RNA, 20 nt, Human
uccaccaggaaggguaggga

SEQ ID NO: 727105 - RNA, 22 nt, Human
ucagaggacuaccuucuccagu

SEQ ID NO: 727106 - RNA, 22 nt, Human
uuaaggcauugauauggugcua

SEQ ID NO: 727107 - RNA, 22 nt, Human
aaccaaggacagcuagugaugc

SEQ ID NO: 727108 - RNA, 22 nt, Human
ggccucacccaucggugccuuu

SEQ ID NO: 727109 - RNA, 22 nt, Human
guaauugaacauuaaguugaag

SEQ ID NO: 727110 - RNA, 21 nt, Human
cuggcccagggaucugcauuu

SEQ ID NO: 727111 - RNA, 22 nt, Human
uggcccaggccaaagcccugga

SEQ ID NO: 727112 - RNA, 22 nt, Human
uuuagcaaagguaggguucaga

SEQ ID NO: 727113 - RNA, 22 nt, Human
guuucucuuugaagccuggcug

SEQ ID NO: 727114 - RNA, 22 nt, Human
cuucccuucugugcagggcaga

SEQ ID NO: 727115 - RNA, 22 nt, Human
caaaauagauguuaaccuggaa

SEQ ID NO: 727116 - RNA, 22 nt, Human
ggucagaauuaggucuagagua

SEQ ID NO: 727117 - RNA, 22 nt, Human
ugugaagauuuggcaugcagaa

SEQ ID NO: 727118 - RNA, 22 nt, Human
ucuggcuugcuggcuugguccc

SEQ ID NO: 727119 - RNA, 22 nt, Human
aauuucagagguagagauucua

SEQ ID NO: 727120 - RNA, 22 nt, Human
ggagacucaccccgcauucuag

SEQ ID NO: 727121 - RNA, 22 nt, Human
ugaugaggagacuguggcuugg

SEQ ID NO: 727122 - RNA, 22 nt, Human
ccaggccuccugugaguggacc

SEQ ID NO: 727123 - RNA, 22 nt, Human
uuucuccuugugucuccuuuga

SEQ ID NO: 727124 - RNA, 22 nt, Human
gcagagcauuucgguugcuucc

SEQ ID NO: 727125 - RNA, 20 nt, Human
acaggggcagcacaauaaug

SEQ ID NO: 727126 - RNA, 22 nt, Human
cuagucucuggaggucagggcu

SEQ ID NO: 727127 - RNA, 22 nt, Human
uggccucaccacuagcugggug

SEQ ID NO: 727128 - RNA, 22 nt, Human
uggagcagcucuagcgggcgcc

SEQ ID NO: 727129 - RNA, 22 nt, Human
auguaguuuggggcuagauuua

SEQ ID NO: 727130 - RNA, 22 nt, Human
uaaaaaguagugagaauggcgc

SEQ ID NO: 727131 - RNA, 22 nt, Human
ggcuuugcuuuggcuguuucag

SEQ ID NO: 727132 - RNA, 22 nt, Human
cacuucaccacuaggcuauacu

SEQ ID NO: 727133 - RNA, 22 nt, Human
uccugggaggcugugccuggcu

SEQ ID NO: 727134 - RNA, 22 nt, Human
aggcugggaaauguauuccagc

SEQ ID NO: 727135 - RNA, 21 nt, Human
aaauccaaacacuaguccaca

SEQ ID NO: 727136 - RNA, 22 nt, Human
cuucuuaacuguauauacuaug

SEQ ID NO: 727137 - RNA, 22 nt, Human
aaggcugaccaguuuacacuuu

SEQ ID NO: 727138 - RNA, 19 nt, Human
cuggaaggagggacuguuc

SEQ ID NO: 727139 - RNA, 22 nt, Human
uuuggcaacggagaacuuacuc

SEQ ID NO: 727140 - RNA, 18 nt, Human
gucauggguaguuuagua

SEQ ID NO: 727141 - RNA, 22 nt, Human
gggacauggaggcgcgcaggca

SEQ ID NO: 727142 - RNA, 22 nt, Human
gaagaauauucuugaucuuaga

SEQ ID NO: 727143 - RNA, 22 nt, Human
ccaggaggaaauucuaaaggua

SEQ ID NO: 727144 - RNA, 19 nt, Human
uccauaagcuuguguucau

SEQ ID NO: 727145 - RNA, 22 nt, Human
gucuauaagcaggggaaaacuu

SEQ ID NO: 727146 - RNA, 22 nt, Human
ggagggguggaaggagugccug

SEQ ID NO: 727147 - RNA, 20 nt, Human
uuggucagugguucaguuug

SEQ ID NO: 727148 - RNA, 22 nt, Human
auaaacuugagucucagaguau

SEQ ID NO: 727149 - RNA, 22 nt, Human
uauacacaggaaucugugaaaa

SEQ ID NO: 727150 - RNA, 22 nt, Human
uagucaaaagcuucacucggaa

SEQ ID NO: 727151 - RNA, 22 nt, Human
aacagauuugugaagcuacuca

SEQ ID NO: 727152 - RNA, 22 nt, Human
aacugaaacggugaucuuuuaa

SEQ ID NO: 727153 - RNA, 22 nt, Human
auaaaaacugacccauccuuug

SEQ ID NO: 727154 - RNA, 22 nt, Human
cucugcuagaaggucaaucucu

SEQ ID NO: 727155 - RNA, 22 nt, Human
ggagcugcuccuucagccaagu

SEQ ID NO: 727156 - RNA, 22 nt, Human
gccagguugcugacgacgaucu

SEQ ID NO: 727157 - RNA, 22 nt, Human
acaggcacuuugacaugccauc

SEQ ID NO: 727158 - RNA, 22 nt, Human
ucagaaaagaccacauuauucu

SEQ ID NO: 727159 - RNA, 22 nt, Human
agcagcauaucagagaaaguca

SEQ ID NO: 727160 - RNA, 22 nt, Human
ucacuugccuagcccaguucag

SEQ ID NO: 727161 - RNA, 22 nt, Human
uuagaguuaggauuugucuuua

SEQ ID NO: 727162 - RNA, 22 nt, Human
gcugccguuggcucuucaggcc

SEQ ID NO: 727163 - RNA, 22 nt, Human
ggagugguggucaggccauggc

SEQ ID NO: 727164 - RNA, 22 nt, Human
gacuggacucugaagaugggug

SEQ ID NO: 727165 - RNA, 22 nt, Human
gcaaugcauauguggguagcau

SEQ ID NO: 727166 - RNA, 22 nt, Human
augcuaaauucagacaggguua

SEQ ID NO: 727167 - RNA, 22 nt, Human
auccaugauuaguaggauaaag

SEQ ID NO: 727168 - RNA, 22 nt, Human
auuuuuuagaaccuggccugau

SEQ ID NO: 727169 - RNA, 22 nt, Human
uuacacaggcacuuaaaaugca

SEQ ID NO: 727170 - RNA, 20 nt, Human
cugcccacuagaacuaccug

SEQ ID NO: 727171 - RNA, 22 nt, Human
uggcuuuauaaauccacugguu

SEQ ID NO: 727172 - RNA, 22 nt, Human
uaauggauuaacgucccugucg

SEQ ID NO: 727173 - RNA, 22 nt, Human
ccacagaaaauaaagcacgauu

SEQ ID NO: 727174 - RNA, 22 nt, Human
gaggguggaagagcugcugaga

SEQ ID NO: 727175 - RNA, 22 nt, Human
uccuggaguggagucuguuguu

SEQ ID NO: 727176 - RNA, 22 nt, Human
ucccagaaaaaggaggcuauga

SEQ ID NO: 727177 - RNA, 22 nt, Human
ggacccagaggggagucuggca

SEQ ID NO: 727178 - RNA, 22 nt, Human
acaguaaagccuucugguugac

SEQ ID NO: 727179 - RNA, 22 nt, Human
uaauaccuagagaugauacaaa

SEQ ID NO: 727180 - RNA, 22 nt, Human
accagggcacauuccggccaga

SEQ ID NO: 727181 - RNA, 21 nt, Human
agauucaggacagcagucacu

SEQ ID NO: 727182 - RNA, 22 nt, Human
uagccauguguggaacacagcc

SEQ ID NO: 727183 - RNA, 22 nt, Human
uuuuguaugagaagugcuuuac

SEQ ID NO: 727184 - RNA, 22 nt, Human
ggcuggcagaagugugcuggcu

SEQ ID NO: 727185 - RNA, 22 nt, Human
aguauuuucgccaucacaagaa

SEQ ID NO: 727186 - RNA, 22 nt, Human
aggcugaggaucccuguguucu

SEQ ID NO: 727187 - RNA, 22 nt, Human
cuuauguauaauguuccacaua

SEQ ID NO: 727188 - RNA, 22 nt, Human
cugggggucuugaaagggagag

SEQ ID NO: 727189 - RNA, 22 nt, Human
cuguuuauggagguaaggcauc

SEQ ID NO: 727190 - RNA, 22 nt, Human
acacauauaccacuguaaauga

SEQ ID NO: 727191 - RNA, 22 nt, Human
cagggccuuucaggguaaaagg

SEQ ID NO: 727192 - RNA, 22 nt, Human
uaguucuugguucuuaguucuu

SEQ ID NO: 727193 - RNA, 22 nt, Human
accugggcauuuuggaugauua

SEQ ID NO: 727194 - RNA, 18 nt, Human
agaguccagggugaggug

SEQ ID NO: 727195 - RNA, 22 nt, Human
cagccuggccugggacugcuga

SEQ ID NO: 727196 - RNA, 23 nt, Human
aucaagauaauccagaugaccua

SEQ ID NO: 727197 - RNA, 20 nt, Human
agcugcccuuuucacauguu

SEQ ID NO: 727198 - RNA, 21 nt, Human
uauacagaggggaacaggaga

SEQ ID NO: 727199 - RNA, 22 nt, Human
aaaaaucacuuuuauaggcagc

SEQ ID NO: 727200 - RNA, 22 nt, Human
cacuuguagaggcauuauucca

SEQ ID NO: 727201 - RNA, 22 nt, Human
uugcagcauauugaucuccugu

SEQ ID NO: 727202 - RNA, 22 nt, Human
ggcaccuguguaagaucuggaa

SEQ ID NO: 727203 - RNA, 22 nt, Human
cugcagagcuaggcugagugaa

SEQ ID NO: 727204 - RNA, 22 nt, Human
aguggcaggcagaagcuucuca

SEQ ID NO: 727205 - RNA, 22 nt, Human
gcuagcuuuauaaugcugggcg

SEQ ID NO: 727206 - RNA, 22 nt, Human
uagucccauuuugagguauuug

SEQ ID NO: 727207 - RNA, 22 nt, Human
agguggaguuggcuguaguuca

SEQ ID NO: 727208 - RNA, 22 nt, Human
agaaaauuuauucauguuaguu

SEQ ID NO: 727209 - RNA, 22 nt, Human
agucacuguucugucaugucaa

SEQ ID NO: 727210 - RNA, 22 nt, Human
ccucccucuuucagucccacag

SEQ ID NO: 727211 - RNA, 22 nt, Human
aggcacugugcuucuuauaugu

SEQ ID NO: 727212 - RNA, 22 nt, Human
cucacugugaccucagcagaca

SEQ ID NO: 727213 - RNA, 22 nt, Human
uguggccaaaauaaaaugaggu

SEQ ID NO: 727214 - RNA, 22 nt, Human
gagcugcuuccagaguugagug

SEQ ID NO: 727215 - RNA, 22 nt, Human
cugggagauucaggugaaguuu

SEQ ID NO: 727216 - RNA, 22 nt, Human
gacagugauuaguuacuauaaa

SEQ ID NO: 727217 - RNA, 22 nt, Human
gcagggacaacugugcaccuga

SEQ ID NO: 727218 - RNA, 18 nt, Human
uggcagguccagcugugg

SEQ ID NO: 727219 - RNA, 22 nt, Human
cucaccauaugacuuuacuaac

SEQ ID NO: 727220 - RNA, 22 nt, Human
cucucucaguguaauacaggau

SEQ ID NO: 727221 - RNA, 22 nt, Human
aagaugaugcagacuuugaugu

SEQ ID NO: 727222 - RNA, 22 nt, Human
uuaacaauagaguuucuucagg

SEQ ID NO: 727223 - RNA, 22 nt, Human
uuuacacauaccucuuuaaagu

SEQ ID NO: 727224 - RNA, 22 nt, Human
cuucaugagacuccacugccau

SEQ ID NO: 727225 - RNA, 22 nt, Human
aguuagaauggauguugagagc

SEQ ID NO: 727226 - RNA, 22 nt, Human
uauaauuuuaagugguaaauua

SEQ ID NO: 727227 - RNA, 22 nt, Human
aagauauauuuuggugauuuca

SEQ ID NO: 727228 - RNA, 22 nt, Human
ccagugcccagcugcccaggca

SEQ ID NO: 727229 - RNA, 22 nt, Human
ugaggaagaacaagaauuuaga

SEQ ID NO: 727230 - RNA, 22 nt, Human
ucaggaaggcaaauugcaugau

SEQ ID NO: 727231 - RNA, 19 nt, Human
cagaguacaccagauagga

SEQ ID NO: 727232 - RNA, 21 nt, Human
guucaauagcucuuugaaugc

SEQ ID NO: 727233 - RNA, 22 nt, Human
ccauguggugggaaggagaaug

SEQ ID NO: 727234 - RNA, 22 nt, Human
agugaugucuaacuugaucccu

SEQ ID NO: 727235 - RNA, 22 nt, Human
agaugaagaugccacuaagacc

SEQ ID NO: 727236 - RNA, 22 nt, Human
cugggccuccucugcccaagcu

SEQ ID NO: 727237 - RNA, 22 nt, Human
uuguuauuauuacuaagucuuc

SEQ ID NO: 727238 - RNA, 22 nt, Human
ugcagaaggccugacauugcac

SEQ ID NO: 727239 - RNA, 22 nt, Human
caggagaggaggcuacuucuua

SEQ ID NO: 727240 - RNA, 22 nt, Human
auuuucucacaauccuaugggg

SEQ ID NO: 727241 - RNA, 18 nt, Human
uccaggcuccaggcuaac

SEQ ID NO: 727242 - RNA, 22 nt, Human
ugccugaguuuaacccucagag

SEQ ID NO: 727243 - RNA, 22 nt, Human
gugggugugguucguuuaagac

SEQ ID NO: 727244 - RNA, 22 nt, Human
cccuucagugcgugagaaugag

SEQ ID NO: 727245 - RNA, 22 nt, Human
uuuacauagugcuuucccacua

SEQ ID NO: 727246 - RNA, 19 nt, Human
uuucucugugcaccuuuuc

SEQ ID NO: 727247 - RNA, 22 nt, Human
auacaucucauguaagagauaa

SEQ ID NO: 727248 - RNA, 22 nt, Human
cagcacagggcuugagaggugu

SEQ ID NO: 727249 - RNA, 22 nt, Human
gccugcagccucagagaauuuu

SEQ ID NO: 727250 - RNA, 22 nt, Human
uugauagguuuuauguauaguu

SEQ ID NO: 727251 - RNA, 22 nt, Human
cacccaguaagcaugaggcccu

SEQ ID NO: 727252 - RNA, 22 nt, Human
ucuggggcaguuacuggggccu

SEQ ID NO: 727253 - RNA, 19 nt, Human
cugauguuccagagaagcu

SEQ ID NO: 727254 - RNA, 22 nt, Human
caucauaauaacccagacacag

SEQ ID NO: 727255 - RNA, 22 nt, Human
cuguggcuggcucaucauaggu

SEQ ID NO: 727256 - RNA, 22 nt, Human
uaagaugguuguagauggacug

SEQ ID NO: 727257 - RNA, 22 nt, Human
cugugcuggcagaccuggaguu

SEQ ID NO: 727258 - RNA, 21 nt, Human
ggacaauuguucauuuucuuu

SEQ ID NO: 727259 - RNA, 22 nt, Human
acccagagaacugaggcaugaa

SEQ ID NO: 727260 - RNA, 22 nt, Human
cccguguggacagcgugccagu

SEQ ID NO: 727261 - RNA, 23 nt, Human
uuccuuaacuguuaagauugucu

SEQ ID NO: 727262 - RNA, 22 nt, Human
augggcaguuaggaggccagga

SEQ ID NO: 727263 - RNA, 22 nt, Human
uagggcagaguccaggaugggc

SEQ ID NO: 727264 - RNA, 22 nt, Human
ucaaaguaaaaguauagaguuu

SEQ ID NO: 727265 - RNA, 22 nt, Human
uugcagggccuuggcuucuucc

SEQ ID NO: 727266 - RNA, 22 nt, Human
uagucuuuuuaauaaauaaugc

SEQ ID NO: 727267 - RNA, 22 nt, Human
uuuccuguugccaucaagaaug

SEQ ID NO: 727268 - RNA, 22 nt, Human
cugaacaucccgcagugcacga

SEQ ID NO: 727269 - RNA, 22 nt, Human
gcgucucaaggcccccaggcca

SEQ ID NO: 727270 - RNA, 22 nt, Human
gaagagcugacagugucauccu

SEQ ID NO: 727271 - RNA, 22 nt, Human
ugguuggcugagcagagucacu

SEQ ID NO: 727272 - RNA, 22 nt, Human
uucacagaauugucuugacugg

SEQ ID NO: 727273 - RNA, 22 nt, Human
cccaggucuaugccagcucuga

SEQ ID NO: 727274 - RNA, 22 nt, Human
auucaaaccucauuuauuguuc

SEQ ID NO: 727275 - RNA, 22 nt, Human
agagcuggaagcugcucuuaga

SEQ ID NO: 727276 - RNA, 22 nt, Human
ggggauggaggcgugugguccu

SEQ ID NO: 727277 - RNA, 22 nt, Human
gcucuguggcaggaggucuugu

SEQ ID NO: 727278 - RNA, 19 nt, Human
cugagaauccuacuuauuu

SEQ ID NO: 727279 - RNA, 17 nt, Human
ucuggaugucauggaag

SEQ ID NO: 727280 - RNA, 22 nt, Human
ggagggcacaggaccagaaauc

SEQ ID NO: 727281 - RNA, 22 nt, Human
uccugugugggcaggaugagaa

SEQ ID NO: 727282 - RNA, 22 nt, Human
gagguggcacugugaggagcac

SEQ ID NO: 727283 - RNA, 22 nt, Human
aucagcaucuuuaacaauuacc

SEQ ID NO: 727284 - RNA, 22 nt, Human
ucugugucagaagauaucaugg

SEQ ID NO: 727285 - RNA, 22 nt, Human
cucugugggaggaggaguaggc

SEQ ID NO: 727286 - RNA, 22 nt, Human
agggaaaguaagcauuucauua

SEQ ID NO: 727287 - RNA, 22 nt, Human
uuagaacauuuuuagaccaaua

SEQ ID NO: 727288 - RNA, 22 nt, Human
uagaucaagaauguccacuugu

SEQ ID NO: 727289 - RNA, 22 nt, Human
cgagugucccuaccauuuccua

SEQ ID NO: 727290 - RNA, 22 nt, Human
ccuugguucugccuggccugga

SEQ ID NO: 727291 - RNA, 22 nt, Human
ugccagggucagcugcagcucu

SEQ ID NO: 727292 - RNA, 19 nt, Human
ggugugccaaaugggaaug

SEQ ID NO: 727293 - RNA, 22 nt, Human
agaggggagagcuaagcaauuc

SEQ ID NO: 727294 - RNA, 21 nt, Human
ggcugggcaggacccaccccu

SEQ ID NO: 727295 - RNA, 22 nt, Human
uuuguagaauaauaucuuucug

SEQ ID NO: 727296 - RNA, 22 nt, Human
uggagccuguguuucugcccag

SEQ ID NO: 727297 - RNA, 22 nt, Human
gcucuguguaaauguagggucc

SEQ ID NO: 727298 - RNA, 22 nt, Human
aagcacaguaaaagcagauuuu

SEQ ID NO: 727299 - RNA, 22 nt, Human
aauaacuggcacauaucacaua

SEQ ID NO: 727300 - RNA, 22 nt, Human
augugucugauggcccugaauu

SEQ ID NO: 727301 - RNA, 22 nt, Human
gcucagggaacuuuuugcaggc

SEQ ID NO: 727302 - RNA, 22 nt, Human
ucugcaagggcacagccaaccc

SEQ ID NO: 727303 - RNA, 22 nt, Human
auuccaaagguuaaugcccauu

SEQ ID NO: 727304 - RNA, 22 nt, Human
aagggacuuugucagcuuucca

SEQ ID NO: 727305 - RNA, 22 nt, Human
auuaaaagcuucccaagaguua

SEQ ID NO: 727306 - RNA, 22 nt, Human
uacaugucuacagccaugucug

SEQ ID NO: 727307 - RNA, 22 nt, Human
gaugcaggauagcuucacccag

SEQ ID NO: 727308 - RNA, 22 nt, Human
cagcuuggcuucacauucugua

SEQ ID NO: 727309 - RNA, 22 nt, Human
uuuccagugauugcugcucuca

SEQ ID NO: 727310 - RNA, 22 nt, Human
cgaguccaggguuaggaguccg

SEQ ID NO: 727311 - RNA, 20 nt, Human
agcagcagauguuggaggug

SEQ ID NO: 727312 - RNA, 22 nt, Human
cugugucuccuuggugggauau

SEQ ID NO: 727313 - RNA, 22 nt, Human
uucaaaugcaaguuacuacuuu

SEQ ID NO: 727314 - RNA, 22 nt, Human
cagaagcaaguagugauucuuu

SEQ ID NO: 727315 - RNA, 22 nt, Human
cucggagaugcuggcugagauc

SEQ ID NO: 727316 - RNA, 22 nt, Human
cuuaacagcaagaucuguguca

SEQ ID NO: 727317 - RNA, 22 nt, Human
aaagucugagcagaauuucuca

SEQ ID NO: 727318 - RNA, 22 nt, Human
uuaaguacuucccuguuggaca

SEQ ID NO: 727319 - RNA, 22 nt, Human
aggaccuguguuuuccuugaau

SEQ ID NO: 727320 - RNA, 22 nt, Human
uccauccacauuaacagauacg

SEQ ID NO: 727321 - RNA, 21 nt, Human
cacuuuaauggauauuuguuu

SEQ ID NO: 727322 - RNA, 22 nt, Human
acaggaaguuuggaaagccuca

SEQ ID NO: 727323 - RNA, 21 nt, Human
ucaguugccaaagugauguca

SEQ ID NO: 727324 - RNA, 22 nt, Human
ugugugggcaugcuuuuaauuu

SEQ ID NO: 727325 - RNA, 22 nt, Human
uaugagaagguauggugacuug

SEQ ID NO: 727326 - RNA, 22 nt, Human
acuccagggcuucuaugauggu

SEQ ID NO: 727327 - RNA, 22 nt, Human
cacuugaacuguuugaaugaga

SEQ ID NO: 727328 - RNA, 22 nt, Human
ugagaauuugugaacuuuucuc

SEQ ID NO: 727329 - RNA, 22 nt, Human
uucuggaggagaaagggugggc

SEQ ID NO: 727330 - RNA, 22 nt, Human
caggcaaggagcuggcucaagu

SEQ ID NO: 727331 - RNA, 22 nt, Human
uuucacagcagugugcugcuuu

SEQ ID NO: 727332 - RNA, 21 nt, Human
ucaggcugaugucgauguuag

SEQ ID NO: 727333 - RNA, 22 nt, Human
auacaucuaugccuuucugaca

SEQ ID NO: 727334 - RNA, 22 nt, Human
uagcauucagaacugagagcaa

SEQ ID NO: 727335 - RNA, 22 nt, Human
gcuugcuggugccugcaggcuc

SEQ ID NO: 727336 - RNA, 22 nt, Human
gcuuuacagagaaaguuugccu

SEQ ID NO: 727337 - RNA, 22 nt, Human
gcacacauucuagccuuuugug

SEQ ID NO: 727338 - RNA, 22 nt, Human
uugcuucaucagaguaaacaag

SEQ ID NO: 727339 - RNA, 22 nt, Human
uaguucuggacacacguuccca

SEQ ID NO: 727340 - RNA, 22 nt, Human
cagaguggugcaagggcagugu

SEQ ID NO: 727341 - RNA, 22 nt, Human
agcacuccugucuuuccccuuu

SEQ ID NO: 727342 - RNA, 22 nt, Human
agggucucuggagagcugagga

SEQ ID NO: 727343 - RNA, 22 nt, Human
cauuguuuugagaacaaccuga

SEQ ID NO: 727344 - RNA, 19 nt, Human
aggucauugauagugcagg

SEQ ID NO: 727345 - RNA, 22 nt, Human
auagcaaacuggcagcuugugg

SEQ ID NO: 727346 - RNA, 22 nt, Human
acaguacaaaacccaccagagg

SEQ ID NO: 727347 - RNA, 22 nt, Human
acaguauaccauugugacuuug

SEQ ID NO: 727348 - RNA, 22 nt, Human
gcugcuucuccucccuggggau

SEQ ID NO: 727349 - RNA, 22 nt, Human
auuuccuauuucuuguccccua

SEQ ID NO: 727350 - RNA, 22 nt, Human
auguuuccagcucagcugcagg

SEQ ID NO: 727351 - RNA, 22 nt, Human
aaauggucacuggugaguguca

SEQ ID NO: 727352 - RNA, 22 nt, Human
ucugagguuacugcuuuguaga

SEQ ID NO: 727353 - RNA, 22 nt, Human
ccuguggcucucuuuggagguc

SEQ ID NO: 727354 - RNA, 17 nt, Human
cagucacaggucuuuuc

SEQ ID NO: 727355 - RNA, 22 nt, Human
uaccuuggaaaugcuagaguaa

SEQ ID NO: 727356 - RNA, 22 nt, Human
uccuggcuuccacuccucuguu

SEQ ID NO: 727357 - RNA, 22 nt, Human
gccuggaggggccaggguggua

SEQ ID NO: 727358 - RNA, 22 nt, Human
cuaaggaaaggaaauacaguaa

SEQ ID NO: 727359 - RNA, 22 nt, Human
uuuaucuuuggaucuucagaaa

SEQ ID NO: 727360 - RNA, 22 nt, Human
caguggcuuacaaugaacuaga

SEQ ID NO: 727361 - RNA, 22 nt, Human
aggugaguuacaggaggagguc

SEQ ID NO: 727362 - RNA, 22 nt, Human
ugauacuuuggagacuugagua

SEQ ID NO: 727363 - RNA, 22 nt, Human
uccaaaguaauuucacuucugu

SEQ ID NO: 727364 - RNA, 22 nt, Human
cuuucucuuacccaaggaucug

SEQ ID NO: 727365 - RNA, 22 nt, Human
gugagcagagaucgcgugauug

SEQ ID NO: 727366 - RNA, 22 nt, Human
aaaauaaguugguccuguccuu

SEQ ID NO: 727367 - RNA, 22 nt, Human
ccagguccuguuuucaccacag

SEQ ID NO: 727368 - RNA, 22 nt, Human
uggcaggagguuuucuccagga

SEQ ID NO: 727369 - RNA, 22 nt, Human
cccugguguccacuggaggaag

SEQ ID NO: 727370 - RNA, 22 nt, Human
agaaagugaacguguucaguuu

SEQ ID NO: 727371 - RNA, 22 nt, Human
uuuaaagugguccauuucagaa

SEQ ID NO: 727372 - RNA, 22 nt, Human
ggaaguuugggagcugguaauc

SEQ ID NO: 727373 - RNA, 22 nt, Human
gcugagcucccagcaguaucug

SEQ ID NO: 727374 - RNA, 22 nt, Human
agagagguuugcuggaagauuc

SEQ ID NO: 727375 - RNA, 22 nt, Human
aauuucagaacuaucugggagu

SEQ ID NO: 727376 - RNA, 22 nt, Human
aggaagcugggaaacugacauu

SEQ ID NO: 727377 - RNA, 22 nt, Human
ugacuucugauugcuucuauuu

SEQ ID NO: 727378 - RNA, 22 nt, Human
cuucacauggguacugcugauc

SEQ ID NO: 727379 - RNA, 22 nt, Human
acuuuggggaacuuuucuccuc

SEQ ID NO: 727380 - RNA, 22 nt, Human
gcccuuggcaaauucuccuuua

SEQ ID NO: 727381 - RNA, 22 nt, Human
uagcuccuggugagccuacucu

SEQ ID NO: 727382 - RNA, 20 nt, Human
gcuucaaagccauccuuuua

SEQ ID NO: 727383 - RNA, 22 nt, Human
cacaaagucugcagcugcugua

SEQ ID NO: 727384 - RNA, 22 nt, Human
agcuggcuaugcccugugaacc

SEQ ID NO: 727385 - RNA, 22 nt, Human
auacauguucguguacauguuc

SEQ ID NO: 727386 - RNA, 22 nt, Human
acuaaaguauggaagugaauaa

SEQ ID NO: 727387 - RNA, 22 nt, Human
gccaccugugugggccuuugug

SEQ ID NO: 727388 - RNA, 18 nt, Human
ggacaggagacaugggug

SEQ ID NO: 727389 - RNA, 22 nt, Human
gaacaacuccaagggacaucau

SEQ ID NO: 727390 - RNA, 22 nt, Human
aaaguccuugcaguuuccucuu

SEQ ID NO: 727391 - RNA, 22 nt, Human
acccaggcuagggugcaguggc

SEQ ID NO: 727392 - RNA, 22 nt, Human
caauacaauuaccaguuaauca

SEQ ID NO: 727393 - RNA, 22 nt, Human
agcacaugacuuuuagucgagu

SEQ ID NO: 727394 - RNA, 22 nt, Human
gacaggcagaccugugcccugg

SEQ ID NO: 727395 - RNA, 22 nt, Human
auugacaaggaaacuauaccag

SEQ ID NO: 727396 - RNA, 22 nt, Human
acugcccagugauuggugguua

SEQ ID NO: 727397 - RNA, 22 nt, Human
caccagaguuguccaaaugauu

SEQ ID NO: 727398 - RNA, 18 nt, Human
uccagucccaaggccagc

SEQ ID NO: 727399 - RNA, 22 nt, Human
ugcagcucauauuagagagaag

SEQ ID NO: 727400 - RNA, 22 nt, Human
uguucuuuggcuucacagcucu

SEQ ID NO: 727401 - RNA, 21 nt, Human
uccugugaggaccugucagug

SEQ ID NO: 727402 - RNA, 22 nt, Human
ucaggcugaaggaggccuaucu

SEQ ID NO: 727403 - RNA, 22 nt, Human
guggccagcugucagcacccuu

SEQ ID NO: 727404 - RNA, 22 nt, Human
agggcugcaucugccuggugaa

SEQ ID NO: 727405 - RNA, 22 nt, Human
acacuuuaugucuagaucuggg

SEQ ID NO: 727406 - RNA, 22 nt, Human
aauaaaggcaccauaaggcaaa

SEQ ID NO: 727407 - RNA, 22 nt, Human
uuggagaguuaauugacaguua

SEQ ID NO: 727408 - RNA, 23 nt, Human
aguuuccacccaggguagaaggg

SEQ ID NO: 727409 - RNA, 20 nt, Human
ucaggcuccgcauuaacuua

SEQ ID NO: 727410 - RNA, 22 nt, Human
ugugugcauuagcauucuaggg

SEQ ID NO: 727411 - RNA, 22 nt, Human
gugugaaaugguucucuuuguu

SEQ ID NO: 727412 - RNA, 21 nt, Human
ugcaggcaggcagagaugcug

SEQ ID NO: 727413 - RNA, 20 nt, Human
aggaagauccuuucuuuuaa

SEQ ID NO: 727414 - RNA, 22 nt, Human
ccugggaagcccauagcagcuu

SEQ ID NO: 727415 - RNA, 19 nt, Human
uuucuaauguguuuuucuu

SEQ ID NO: 727416 - RNA, 22 nt, Human
ucacaggcucuagggauuaaga

SEQ ID NO: 727417 - RNA, 22 nt, Human
aguaaaaauaugcuuguggcua

SEQ ID NO: 727418 - RNA, 22 nt, Human
gccaagcuuggaaggaucaugg

SEQ ID NO: 727419 - RNA, 22 nt, Human
uugagacagugggguguugccg

SEQ ID NO: 727420 - RNA, 22 nt, Human
gcugugcagccaagugccucug

SEQ ID NO: 727421 - RNA, 22 nt, Human
agggccagccgacuuccagccu

SEQ ID NO: 727422 - RNA, 22 nt, Human
ucucucagcuuugagaccugcu

SEQ ID NO: 727423 - RNA, 22 nt, Human
uccaccugggcaacagugccuc

SEQ ID NO: 727424 - RNA, 22 nt, Human
ucagaacagcaggguguggcug

SEQ ID NO: 727425 - RNA, 22 nt, Human
ugagguaauguguacguuaauu

SEQ ID NO: 727426 - RNA, 22 nt, Human
gucugaagccagugguaguccg

SEQ ID NO: 727427 - RNA, 22 nt, Human
acauuucucauucuccccuaac

SEQ ID NO: 727428 - RNA, 22 nt, Human
uacauugacuuggauuguuaga

SEQ ID NO: 727429 - RNA, 22 nt, Human
cagaggcacagcuucuuuuaau

SEQ ID NO: 727430 - RNA, 22 nt, Human
uggagccaggagccugggaguc

SEQ ID NO: 727431 - RNA, 22 nt, Human
ccuggcucuguccucgcgcaaa

SEQ ID NO: 727432 - RNA, 22 nt, Human
agaguaacuuuuaacuuuacgu

SEQ ID NO: 727433 - RNA, 21 nt, Human
aagcuuggcugauguuauugg

SEQ ID NO: 727434 - RNA, 22 nt, Human
uacagcaaugccugaaauagua

SEQ ID NO: 727435 - RNA, 22 nt, Human
acagacugauucauugcucagg

SEQ ID NO: 727436 - RNA, 22 nt, Human
uguguguggggaggcagcagau

SEQ ID NO: 727437 - RNA, 22 nt, Human
cccuggaagguucucuggcuca

SEQ ID NO: 727438 - RNA, 22 nt, Human
uaauacaucauucaucuaagga

SEQ ID NO: 727439 - RNA, 22 nt, Human
augggcugacuaaugguaaacu

SEQ ID NO: 727440 - RNA, 22 nt, Human
ucccagcacagggcagauguga

SEQ ID NO: 727441 - RNA, 22 nt, Human
uuuacagcagcaugauuuauaa

SEQ ID NO: 727442 - RNA, 22 nt, Human
ucaauucaguccaacaguaauu

SEQ ID NO: 727443 - RNA, 17 nt, Human
agugucagaagacaguu

SEQ ID NO: 727444 - RNA, 22 nt, Human
cagaaauaucaccuggacucua

SEQ ID NO: 727445 - RNA, 22 nt, Human
acugggcauuuugaacguucuu

SEQ ID NO: 727446 - RNA, 22 nt, Human
cuguggaauugaugcuuagugu

SEQ ID NO: 727447 - RNA, 22 nt, Human
uugacaagaacaccgguuugag

SEQ ID NO: 727448 - RNA, 22 nt, Human
gaacagagcugacuacaaggca

SEQ ID NO: 727449 - RNA, 22 nt, Human
guggacacaggagagagaacug

SEQ ID NO: 727450 - RNA, 22 nt, Human
uguugaguauauaccuacaagu

SEQ ID NO: 727451 - RNA, 22 nt, Human
caguguccucagccagcagcua

SEQ ID NO: 727452 - RNA, 22 nt, Human
caaacauuugacuucucucagg

SEQ ID NO: 727453 - RNA, 22 nt, Human
caguaacacaaccacuccguga

SEQ ID NO: 727454 - RNA, 22 nt, Human
uuucacaaguuucaggauucug

SEQ ID NO: 727455 - RNA, 22 nt, Human
gcucuauuacuuucaauaaaaa

SEQ ID NO: 727456 - RNA, 22 nt, Human
uaaagugcgacccaguccccag

SEQ ID NO: 727457 - RNA, 22 nt, Human
uucuacacucacccagcuguaa

SEQ ID NO: 727458 - RNA, 16 nt, Human
ggguggucuuggagac

SEQ ID NO: 727459 - RNA, 22 nt, Human
ugaaauguguucuaguguuuug

SEQ ID NO: 727460 - RNA, 22 nt, Human
auucagauugguuuaagcuagu

SEQ ID NO: 727461 - RNA, 22 nt, Human
aagcagccagccaucaugcccg

SEQ ID NO: 727462 - RNA, 22 nt, Human
gaggcagugaacaauuccugug

SEQ ID NO: 727463 - RNA, 22 nt, Human
uguucugcaagcccugccaccu

SEQ ID NO: 727464 - RNA, 22 nt, Human
guuucauuaccugacccaugag

SEQ ID NO: 727465 - RNA, 22 nt, Human
uagaaacagaaaacuguaauag

SEQ ID NO: 727466 - RNA, 22 nt, Human
ucaguucuaagugcuuuacaug

SEQ ID NO: 727467 - RNA, 22 nt, Human
ccagccuugcaccgagccagcc

SEQ ID NO: 727468 - RNA, 22 nt, Human
cuucugcugccgccucggcaca

SEQ ID NO: 727469 - RNA, 22 nt, Human
agacaugacagauaguugcuag

SEQ ID NO: 727470 - RNA, 20 nt, Human
agcuggccuguccuaggccu

SEQ ID NO: 727471 - RNA, 22 nt, Human
uagaaugagaaaguguagcagg

SEQ ID NO: 727472 - RNA, 22 nt, Human
acacauaugguugcugcaguga

SEQ ID NO: 727473 - RNA, 22 nt, Human
cuguggccuuggaccagcaucu

SEQ ID NO: 727474 - RNA, 22 nt, Human
auaugcuuugggauuagaucau

SEQ ID NO: 727475 - RNA, 22 nt, Human
ucugugaaacagcucuggcaug

SEQ ID NO: 727476 - RNA, 22 nt, Human
ggccacagaacagcuacaggac

SEQ ID NO: 727477 - RNA, 22 nt, Human
ugagcuacacacuaggcauggg

SEQ ID NO: 727478 - RNA, 22 nt, Human
uccagccuucucaaggcuggcu

SEQ ID NO: 727479 - RNA, 22 nt, Human
aggcagaaccagcugggacuuu

SEQ ID NO: 727480 - RNA, 22 nt, Human
gagcugccggcccacaguacua

SEQ ID NO: 727481 - RNA, 22 nt, Human
agaauacaucaaucuauuuucu

SEQ ID NO: 727482 - RNA, 22 nt, Human
ugugaaaagcguguguucuagg

SEQ ID NO: 727483 - RNA, 22 nt, Human
cuggguguagcccaguaugagg

SEQ ID NO: 727484 - RNA, 22 nt, Human
gcacugggugggagaucugaau

SEQ ID NO: 727485 - RNA, 22 nt, Human
acauuccugaaugggcacauuu

SEQ ID NO: 727486 - RNA, 22 nt, Human
uucagcgauauuauucaugagc

SEQ ID NO: 727487 - RNA, 22 nt, Human
aagcccagggaauggucgggag

SEQ ID NO: 727488 - RNA, 22 nt, Human
uuguuacagcagugauuucaga

SEQ ID NO: 727489 - RNA, 22 nt, Human
auuuagacacaaaagugccaug

SEQ ID NO: 727490 - RNA, 22 nt, Human
aggaguuucaaagcuuccaugu

SEQ ID NO: 727491 - RNA, 22 nt, Human
ucauucauaaaaauuaguuggc

SEQ ID NO: 727492 - RNA, 20 nt, Human
aggccaggaaauguaguucu

SEQ ID NO: 727493 - RNA, 22 nt, Human
cuguuauuuuauaauucaagaa

SEQ ID NO: 727494 - RNA, 22 nt, Human
gucaaauauacuaagagguaaa

SEQ ID NO: 727495 - RNA, 22 nt, Human
ugagagaguaauugagugguaa

SEQ ID NO: 727496 - RNA, 23 nt, Human
ccacgucugcacuguagcuguug

SEQ ID NO: 727497 - RNA, 22 nt, Human
cgggcgcacuccgggcagcugu

SEQ ID NO: 727498 - RNA, 22 nt, Human
cugcaaaauuguucuuugcucc

SEQ ID NO: 727499 - RNA, 22 nt, Human
gcaauacagaagaguggcaagg

SEQ ID NO: 727500 - RNA, 22 nt, Human
cuuccagagcugggcugaccuu

SEQ ID NO: 727501 - RNA, 21 nt, Human
uccaacaugccugauggugcc

SEQ ID NO: 727502 - RNA, 22 nt, Human
uuuauuauucucuggagaaugu

SEQ ID NO: 727503 - RNA, 22 nt, Human
uuugaggaagaucggagggaaa

SEQ ID NO: 727504 - RNA, 22 nt, Human
ggagcaagagguggugaaaaau

SEQ ID NO: 727505 - RNA, 22 nt, Human
ccacagaaugaugacacuucag

SEQ ID NO: 727506 - RNA, 22 nt, Human
uuggggcucugaaaaagaugua

SEQ ID NO: 727507 - RNA, 22 nt, Human
guuuacagagacagaaaguagu

SEQ ID NO: 727508 - RNA, 22 nt, Human
aguuuuauuccaaugugcagca

SEQ ID NO: 727509 - RNA, 22 nt, Human
ccuggcucccuggaccucauua

SEQ ID NO: 727510 - RNA, 22 nt, Human
cauugcacucuggcuggaacgg

SEQ ID NO: 727511 - RNA, 22 nt, Human
ugcacauggcaaugcugcuccc

SEQ ID NO: 727512 - RNA, 22 nt, Human
cugaggcugggcuugccuucuu

SEQ ID NO: 727513 - RNA, 22 nt, Human
uuuccuuguucauuugcccuau

SEQ ID NO: 727514 - RNA, 22 nt, Human
uugagcccaggaggccugggug

SEQ ID NO: 727515 - RNA, 22 nt, Human
ucugggaacauggcuuggaauc

SEQ ID NO: 727516 - RNA, 22 nt, Human
cuggcugugaaauggcaguguc

SEQ ID NO: 727517 - RNA, 22 nt, Human
aaugucugagucucuguauccc

SEQ ID NO: 727518 - RNA, 23 nt, Human
ucacugugcccauugagguagag

SEQ ID NO: 727519 - RNA, 20 nt, Human
ccuggcuuugcaucugugau

SEQ ID NO: 727520 - RNA, 22 nt, Human
cugaaauucugccucugcacaa

SEQ ID NO: 727521 - RNA, 22 nt, Human
gaggagagaagcuaacggugcu

SEQ ID NO: 727522 - RNA, 23 nt, Human
cuaguaaauccugaauagcaggc

SEQ ID NO: 727523 - RNA, 21 nt, Human
agggaaaaggcugagugaggg

SEQ ID NO: 727524 - RNA, 22 nt, Human
cuauuagguaugugguugcuau

SEQ ID NO: 727525 - RNA, 22 nt, Human
ucugagagauacaaggaggcaa

SEQ ID NO: 727526 - RNA, 22 nt, Human
auuugcaagaguaagaauuucu

SEQ ID NO: 727527 - RNA, 22 nt, Human
guggcuucugcggugugcgcag

SEQ ID NO: 727528 - RNA, 22 nt, Human
aagauuuagggccaguuuacau

SEQ ID NO: 727529 - RNA, 22 nt, Human
gcugcagggaauguauggauuu

SEQ ID NO: 727530 - RNA, 22 nt, Human
aacaugcugccuuucuacgagu

SEQ ID NO: 727531 - RNA, 22 nt, Human
uggcuuuagguugcauguuucu

SEQ ID NO: 727532 - RNA, 22 nt, Human
cugcaguaaccacuguaggugu

SEQ ID NO: 727533 - RNA, 22 nt, Human
ucuacaaauaaauuacuaugua

SEQ ID NO: 727534 - RNA, 19 nt, Human
aucuuuagcaacuuucaaa

SEQ ID NO: 727535 - RNA, 22 nt, Human
uggcucagagccuugagagcug

SEQ ID NO: 727536 - RNA, 22 nt, Human
agaugguuaucuaagugaaaaa

SEQ ID NO: 727537 - RNA, 22 nt, Human
ggcacugagaacaggcugacuu

SEQ ID NO: 727538 - RNA, 22 nt, Human
cacaggaagagguauacaauuc

SEQ ID NO: 727539 - RNA, 22 nt, Human
ucuugugcuugcagcuggggag

SEQ ID NO: 727540 - RNA, 22 nt, Human
aaacuguaaugcaggaucaaga

SEQ ID NO: 727541 - RNA, 22 nt, Human
gcagaagcuguucgaaggccgc

SEQ ID NO: 727542 - RNA, 22 nt, Human
aaagaugucauacacauuaaga

SEQ ID NO: 727543 - RNA, 22 nt, Human
ccuggggaauagagucaagggg

SEQ ID NO: 727544 - RNA, 22 nt, Human
ugguuugacaaugaggacuggu

SEQ ID NO: 727545 - RNA, 22 nt, Human
gagucuuugguaaagucugcug

SEQ ID NO: 727546 - RNA, 22 nt, Human
cacaagucuguggucuccaaca

SEQ ID NO: 727547 - RNA, 22 nt, Human
uagacaggaaacauuaggaugg

SEQ ID NO: 727548 - RNA, 22 nt, Human
ucaucagaggcaucuggcaagg

SEQ ID NO: 727549 - RNA, 22 nt, Human
agcagcucagaggcaccagggc

SEQ ID NO: 727550 - RNA, 22 nt, Human
acacaugugauucuaagacagc

SEQ ID NO: 727551 - RNA, 22 nt, Human
acacuuauuuuuguccacuucc

SEQ ID NO: 727552 - RNA, 22 nt, Human
cuggaggcaaagcagaggcaug

SEQ ID NO: 727553 - RNA, 22 nt, Human
aggcugugacuacgcagggaag

SEQ ID NO: 727554 - RNA, 22 nt, Human
uccuggauuuaacccuggcucu

SEQ ID NO: 727555 - RNA, 22 nt, Human
agcugcagccgcagcuguggcc

SEQ ID NO: 727556 - RNA, 22 nt, Human
accacuguacagcagauauagu

SEQ ID NO: 727557 - RNA, 22 nt, Human
uuacagaguagugcagaacuca

SEQ ID NO: 727558 - RNA, 23 nt, Human
uucagggccucagaggugaagcu

SEQ ID NO: 727559 - RNA, 22 nt, Human
uaucauuuguuauuauuagugg

SEQ ID NO: 727560 - RNA, 22 nt, Human
ccugagagagugagcccugaca

SEQ ID NO: 727561 - RNA, 23 nt, Human
agagaaaaauaucugggcacauu

SEQ ID NO: 727562 - RNA, 22 nt, Human
uaccuggaauagagucucucca

SEQ ID NO: 727563 - RNA, 22 nt, Human
auuagauauuugcuguuggauu

SEQ ID NO: 727564 - RNA, 22 nt, Human
guacaacaugauuuuacucucu

SEQ ID NO: 727565 - RNA, 22 nt, Human
caguuuauauucuagugcuguu

SEQ ID NO: 727566 - RNA, 22 nt, Human
gagggugcucugagcccuuuug

SEQ ID NO: 727567 - RNA, 19 nt, Human
uuucuuccaaagacuaugg

SEQ ID NO: 727568 - RNA, 22 nt, Human
gggaagugaaguguagcugucu

SEQ ID NO: 727569 - RNA, 22 nt, Human
gcgaggcugggcccugcaggcg

SEQ ID NO: 727570 - RNA, 22 nt, Human
gugugccugacaugaugguuaa

SEQ ID NO: 727571 - RNA, 22 nt, Human
uucccacauucuuuacauucau

SEQ ID NO: 727572 - RNA, 22 nt, Human
cuacagaauggagggucagaga

SEQ ID NO: 727573 - RNA, 22 nt, Human
cuagaaauacaggcacgugcca

SEQ ID NO: 727574 - RNA, 22 nt, Human
ggugcaaagggccuagagagug

SEQ ID NO: 727575 - RNA, 22 nt, Human
gggcucagggacacaugugugu

SEQ ID NO: 727576 - RNA, 22 nt, Human
caaugacagguucaugacuccu

SEQ ID NO: 727577 - RNA, 22 nt, Human
acaugagaggcuguggaguaca

SEQ ID NO: 727578 - RNA, 22 nt, Human
ggccucaguuucuccauggguu

SEQ ID NO: 727579 - RNA, 22 nt, Human
ccuccagccuuccugaagagcc

SEQ ID NO: 727580 - RNA, 22 nt, Human
ccugugggucacaugggugacu

SEQ ID NO: 727581 - RNA, 22 nt, Human
ugaucuuugggccauuaauaaa

SEQ ID NO: 727582 - RNA, 22 nt, Human
aaauuccauuaggaaacuucca

SEQ ID NO: 727583 - RNA, 22 nt, Human
agaggggcagggucuccggauu

SEQ ID NO: 727584 - RNA, 22 nt, Human
cuuccugggucuggagacugga

SEQ ID NO: 727585 - RNA, 22 nt, Human
uuauggaaaugaaauuuuauug

SEQ ID NO: 727586 - RNA, 22 nt, Human
cuuuugcaccuuuuaaguaaug

SEQ ID NO: 727587 - RNA, 22 nt, Human
cagaacaguaccuagcacauag

SEQ ID NO: 727588 - RNA, 22 nt, Human
aaaccuagaaggaagggucucu

SEQ ID NO: 727589 - RNA, 22 nt, Human
cucucuggaauuaaagcccaau

SEQ ID NO: 727590 - RNA, 22 nt, Human
gcagcacugauccuaaacuuag

SEQ ID NO: 727591 - RNA, 22 nt, Human
cucugagguccuacagugaccc

SEQ ID NO: 727592 - RNA, 22 nt, Human
cuuuuuccagcuucaggguggg

SEQ ID NO: 727593 - RNA, 22 nt, Human
gccagccacaagggaggcuugu

SEQ ID NO: 727594 - RNA, 22 nt, Human
gcuccaggugucccagguaaaa

SEQ ID NO: 727595 - RNA, 22 nt, Human
cucugcaguguaacagcgcuug

SEQ ID NO: 727596 - RNA, 22 nt, Human
guguuuccaguucagaaagcaa

SEQ ID NO: 727597 - RNA, 22 nt, Human
uagcugugagcacccaggcugu

SEQ ID NO: 727598 - RNA, 22 nt, Human
agugucauuuuguccaucuucu

SEQ ID NO: 727599 - RNA, 22 nt, Human
auuuccaugaauucccacucau

SEQ ID NO: 727600 - RNA, 22 nt, Human
ugcugaaaaugcguaucuucca

SEQ ID NO: 727601 - RNA, 22 nt, Human
guagaauuaccucucuaugucc

SEQ ID NO: 727602 - RNA, 22 nt, Human
ccucagcucccaugagaucugc

SEQ ID NO: 727603 - RNA, 22 nt, Human
uuaaguccuugguaauuuucuu

SEQ ID NO: 727604 - RNA, 22 nt, Human
auucuucauuuacuguuacuug

SEQ ID NO: 727605 - RNA, 22 nt, Human
ucccacugucugucuugcugca

SEQ ID NO: 727606 - RNA, 22 nt, Human
ucuuucaaagcuguaguagauu

SEQ ID NO: 727607 - RNA, 22 nt, Human
ggacagcccauacacaugucug

SEQ ID NO: 727608 - RNA, 22 nt, Human
cucugaggcuccaugcaggcuu

SEQ ID NO: 727609 - RNA, 22 nt, Human
gcugggcucuuuaccccuguac

SEQ ID NO: 727610 - RNA, 22 nt, Human
ugggcuggagcuuguugcuucc

SEQ ID NO: 727611 - RNA, 22 nt, Human
ucacuuuagaggaaacauugag

SEQ ID NO: 727612 - RNA, 21 nt, Human
caggaaaagcggaagucuagc

SEQ ID NO: 727613 - RNA, 20 nt, Human
ugcugaggccugaggccugg

SEQ ID NO: 727614 - RNA, 22 nt, Human
cuucuggcguuggaggucugag

SEQ ID NO: 727615 - RNA, 22 nt, Human
uccaggugggcugcacccaggc

SEQ ID NO: 727616 - RNA, 22 nt, Human
guguacaugagaaaucaacuuu

SEQ ID NO: 727617 - RNA, 22 nt, Human
uagcccugcugugaugugaagu

SEQ ID NO: 727618 - RNA, 22 nt, Human
uauggcuugucccuggucaguc

SEQ ID NO: 727619 - RNA, 22 nt, Human
aaagcuuucuagcuauguucua

SEQ ID NO: 727620 - RNA, 21 nt, Human
gccagccaugcuugccuaggc

SEQ ID NO: 727621 - RNA, 22 nt, Human
augauacucuaggugauuuaca

SEQ ID NO: 727622 - RNA, 19 nt, Human
gcaggcuugggucucccca

SEQ ID NO: 727623 - RNA, 22 nt, Human
ccucagccuuggccccaggcag

SEQ ID NO: 727624 - RNA, 22 nt, Human
agagagcaggacuucacugagc

SEQ ID NO: 727625 - RNA, 22 nt, Human
cuguggcucugcagucccaaca

SEQ ID NO: 727626 - RNA, 22 nt, Human
acuucacagaaauuuuaugagg

SEQ ID NO: 727627 - RNA, 17 nt, Human
agcacuaaaaugcuucc

SEQ ID NO: 727628 - RNA, 22 nt, Human
aacagcuugaggaauaucauca

SEQ ID NO: 727629 - RNA, 22 nt, Human
cugggaguggugacagcucucg

SEQ ID NO: 727630 - RNA, 23 nt, Human
agccccucauaucugcuuucucu

SEQ ID NO: 727631 - RNA, 22 nt, Human
cuccugagcugcagccuugugu

SEQ ID NO: 727632 - RNA, 22 nt, Human
cugcuggccuagcccauccucu

SEQ ID NO: 727633 - RNA, 22 nt, Human
caguggguccuaaguacaguuc

SEQ ID NO: 727634 - RNA, 22 nt, Human
acagcagagccaguggcucuag

SEQ ID NO: 727635 - RNA, 22 nt, Human
cugagucucccggcaguggagg

SEQ ID NO: 727636 - RNA, 22 nt, Human
aagaggcuggaggauacugcgc

SEQ ID NO: 727637 - RNA, 22 nt, Human
gaacaguaaauuuaugcagcac

SEQ ID NO: 727638 - RNA, 22 nt, Human
cuucacagucuuuauuuccucc

SEQ ID NO: 727639 - RNA, 22 nt, Human
acacuucaaaugguuggaaaau

SEQ ID NO: 727640 - RNA, 22 nt, Human
gucuuucuucagagcuuggacu

SEQ ID NO: 727641 - RNA, 22 nt, Human
aggaaacuaaagcccagagagg

SEQ ID NO: 727642 - RNA, 22 nt, Human
acuguacacgugucauuuacag

SEQ ID NO: 727643 - RNA, 22 nt, Human
uccuucaagugcaguaccugag

SEQ ID NO: 727644 - RNA, 22 nt, Human
uuacaguguuacuugaugucca

SEQ ID NO: 727645 - RNA, 22 nt, Human
cucagggcucugcaugcacacg

SEQ ID NO: 727646 - RNA, 22 nt, Human
agcugcagucaagcugggccac

SEQ ID NO: 727647 - RNA, 22 nt, Human
uuguguacagguguuuccaagu

SEQ ID NO: 727648 - RNA, 22 nt, Human
cuucccugauaagagccucaga

SEQ ID NO: 727649 - RNA, 18 nt, Human
ccagguggugacagagau

SEQ ID NO: 727650 - RNA, 22 nt, Human
gccagaggcccaaggacagcug

SEQ ID NO: 727651 - RNA, 22 nt, Human
uagcagcuaccuggcuaagagu

SEQ ID NO: 727652 - RNA, 22 nt, Human
uucucugcucucacauacagaa

SEQ ID NO: 727653 - RNA, 22 nt, Human
acguuuucagccuuaauguaga

SEQ ID NO: 727654 - RNA, 22 nt, Human
cuccagaggaaagcacauagug

SEQ ID NO: 727655 - RNA, 22 nt, Human
aagacacugggggcugcagcca

SEQ ID NO: 727656 - RNA, 22 nt, Human
cucucuggcccauccuguugcc

SEQ ID NO: 727657 - RNA, 22 nt, Human
agcaggcugccuuccaaagccu

SEQ ID NO: 727658 - RNA, 22 nt, Human
ugucuuaaacuugugggacuuc

SEQ ID NO: 727659 - RNA, 22 nt, Human
acagggcagagggcaguuggua

SEQ ID NO: 727660 - RNA, 22 nt, Human
agcagcuuggggccgagauaga

SEQ ID NO: 727661 - RNA, 22 nt, Human
agauuaugcuggcugcuacaag

SEQ ID NO: 727662 - RNA, 22 nt, Human
gcagccaggaaagcuggacccu

SEQ ID NO: 727663 - RNA, 22 nt, Human
cccucagucuggcugggaagac

SEQ ID NO: 727664 - RNA, 22 nt, Human
guggccaacucaauguuuuuca

SEQ ID NO: 727665 - RNA, 22 nt, Human
agagcacagaaguuauauguua

SEQ ID NO: 727666 - RNA, 20 nt, Human
aacuccuagccucaagugau

SEQ ID NO: 727667 - RNA, 22 nt, Human
aaggcacaugaccuaggccugg

SEQ ID NO: 727668 - RNA, 22 nt, Human
uccuuacagguuacagaaagca

SEQ ID NO: 727669 - RNA, 22 nt, Human
ucugaaauauauuuugaguguu

SEQ ID NO: 727670 - RNA, 22 nt, Human
uggcagauuguaggcaguuagg

SEQ ID NO: 727671 - RNA, 22 nt, Human
uaugagcaagaguuugugaagg

SEQ ID NO: 727672 - RNA, 22 nt, Human
ggcaccagcacuugggauggcu

SEQ ID NO: 727673 - RNA, 23 nt, Human
gccaucacguucaaccaaagccu

SEQ ID NO: 727674 - RNA, 22 nt, Human
gagggcugcugccagauaugcc

SEQ ID NO: 727675 - RNA, 22 nt, Human
gaugaaauccagaucacaggug

SEQ ID NO: 727676 - RNA, 22 nt, Human
ucugugucugguugggccagua

SEQ ID NO: 727677 - RNA, 22 nt, Human
aacugcuuugugagcuuucugg

SEQ ID NO: 727678 - RNA, 22 nt, Human
cucaaguuggcaugaacaaauu

SEQ ID NO: 727679 - RNA, 21 nt, Human
uggcugccuggcucugugguu

SEQ ID NO: 727680 - RNA, 22 nt, Human
cuguacagaagcuagagcaaau

SEQ ID NO: 727681 - RNA, 17 nt, Human
aggccucccuccaggcc

SEQ ID NO: 727682 - RNA, 22 nt, Human
cuccucuucugaguaccaggga

SEQ ID NO: 727683 - RNA, 22 nt, Human
ucugucugaggaguuuuugacc

SEQ ID NO: 727684 - RNA, 22 nt, Human
aaacaaagccagggaaguuaug

SEQ ID NO: 727685 - RNA, 22 nt, Human
gcccaagggcaucaaguucuac

SEQ ID NO: 727686 - RNA, 22 nt, Human
ugcuuuaaaguauuucucgcaa

SEQ ID NO: 727687 - RNA, 22 nt, Human
acaaugucaaaauaggaaacau

SEQ ID NO: 727688 - RNA, 22 nt, Human
ugacugccaugagggugagggc

SEQ ID NO: 727689 - RNA, 22 nt, Human
uaggaagccuaaauuaaguggu

SEQ ID NO: 727690 - RNA, 19 nt, Human
uuuuuaaugggcuggagca

SEQ ID NO: 727691 - RNA, 23 nt, Human
ggcuggaagaaaacagaauuguu

SEQ ID NO: 727692 - RNA, 22 nt, Human
cagcagcaguggcugcagaaca

SEQ ID NO: 727693 - RNA, 22 nt, Human
aaaguauucuugacuguuuuuc

SEQ ID NO: 727694 - RNA, 22 nt, Human
gagcugaaucagagauauuauu

SEQ ID NO: 727695 - RNA, 22 nt, Human
uguguagcuuucuucugugggg

SEQ ID NO: 727696 - RNA, 22 nt, Human
gcaugugggagggucuucccac

SEQ ID NO: 727697 - RNA, 22 nt, Human
cuguaacuuaaugagaggcaga

SEQ ID NO: 727698 - RNA, 22 nt, Human
uucacauuaucaggauuguuuc

SEQ ID NO: 727699 - RNA, 17 nt, Human
ucgguuugccaggcuuc

SEQ ID NO: 727700 - RNA, 22 nt, Human
gaauagcuguaggcuagugucu

SEQ ID NO: 727701 - RNA, 22 nt, Human
ugaauaaaguauguccugggaa

SEQ ID NO: 727702 - RNA, 22 nt, Human
gaggaggcuggcgccgccugcc

SEQ ID NO: 727703 - RNA, 22 nt, Human
uacaaagaggcagcuccauuuu

SEQ ID NO: 727704 - RNA, 22 nt, Human
aagauuauuuaagacaggaacc

SEQ ID NO: 727705 - RNA, 19 nt, Human
uuugggaagcccagagugu

SEQ ID NO: 727706 - RNA, 22 nt, Human
ugcagaacagggccaugucacc

SEQ ID NO: 727707 - RNA, 22 nt, Human
uucugggcagagcuggagcugc

SEQ ID NO: 727708 - RNA, 22 nt, Human
ccuggcugcuauagcagcaugu

SEQ ID NO: 727709 - RNA, 23 nt, Human
cucagaggccuguccaggguggu

SEQ ID NO: 727710 - RNA, 22 nt, Human
gugugcagaagacacaagacau

SEQ ID NO: 727711 - RNA, 22 nt, Human
aaacagauugaaauucguagua

SEQ ID NO: 727712 - RNA, 22 nt, Human
guguggggaggagagagcccuu

SEQ ID NO: 727713 - RNA, 22 nt, Human
cauucucugaucuucacauacc

SEQ ID NO: 727714 - RNA, 22 nt, Human
cauugagaggcugccugccuga

SEQ ID NO: 727715 - RNA, 22 nt, Human
ggcccagagucugcaauggagu

SEQ ID NO: 727716 - RNA, 22 nt, Human
acugagcugugacaaugcuuaa

SEQ ID NO: 727717 - RNA, 23 nt, Human
ccaggcucuuucaccugcuauuc

SEQ ID NO: 727718 - RNA, 20 nt, Human
ccucaaauaagugccagcau

SEQ ID NO: 727719 - RNA, 22 nt, Human
gggagccacucagcugagaguu

SEQ ID NO: 727720 - RNA, 22 nt, Human
gaguucucaagcaaucaaagag

SEQ ID NO: 727721 - RNA, 22 nt, Human
caucucaggucugugguucacu

SEQ ID NO: 727722 - RNA, 22 nt, Human
caggucucccauccccucuguu

SEQ ID NO: 727723 - RNA, 22 nt, Human
agcuggccggccuccaggugga

SEQ ID NO: 727724 - RNA, 22 nt, Human
guggucaucuggguuuguggca

SEQ ID NO: 727725 - RNA, 22 nt, Human
ugagcaggucaggaaguacauu

SEQ ID NO: 727726 - RNA, 22 nt, Human
ucagagaguuagugucuuagcu

SEQ ID NO: 727727 - RNA, 22 nt, Human
ucccaggacaugggcucugcuc

SEQ ID NO: 727728 - RNA, 22 nt, Human
cugaggcaccggcaauguucug

SEQ ID NO: 727729 - RNA, 22 nt, Human
cuggaagggucagagugaugag

SEQ ID NO: 727730 - RNA, 22 nt, Human
aagugcuuagaaguugcauuag

SEQ ID NO: 727731 - RNA, 22 nt, Human
cagguccaauugcgcuaaaauc

SEQ ID NO: 727732 - RNA, 22 nt, Human
acagauugaucuugagaauuau

SEQ ID NO: 727733 - RNA, 22 nt, Human
gagacugauggggcucccagaa

SEQ ID NO: 727734 - RNA, 22 nt, Human
aagaaauuaaggaaugcaacga

SEQ ID NO: 727735 - RNA, 22 nt, Human
agugcuuauaccaaagacucuu

SEQ ID NO: 727736 - RNA, 22 nt, Human
aauuggcuauauuauuuagccu

SEQ ID NO: 727737 - RNA, 22 nt, Human
ugcaggugcugugucaagagag

SEQ ID NO: 727738 - RNA, 22 nt, Human
cucugcugucucagaugggcca

SEQ ID NO: 727739 - RNA, 22 nt, Human
ucaaugcaaucauuggacaagu

SEQ ID NO: 727740 - RNA, 22 nt, Human
uuggaagacagugaaacagcac

SEQ ID NO: 727741 - RNA, 22 nt, Human
gucccagaugucuggaacuccc

SEQ ID NO: 727742 - RNA, 22 nt, Human
auccuuaagaaaguuuucuaua

SEQ ID NO: 727743 - RNA, 22 nt, Human
ggagucaccaaguaggagucuu

SEQ ID NO: 727744 - RNA, 22 nt, Human
aucagaaaucuaggauucagaa

SEQ ID NO: 727745 - RNA, 22 nt, Human
gagcaucuaugugcuggguacu

SEQ ID NO: 727746 - RNA, 19 nt, Human
auuuauuguaugauuccau

SEQ ID NO: 727747 - RNA, 22 nt, Human
gagcaugagggaaggcagcaga

SEQ ID NO: 727748 - RNA, 22 nt, Human
cucccaggcagggcugcccacu

SEQ ID NO: 727749 - RNA, 22 nt, Human
aggcugccaaagcuucugucuc

SEQ ID NO: 727750 - RNA, 22 nt, Human
ucacaucucccuggaggacaca

SEQ ID NO: 727751 - RNA, 22 nt, Human
ugugacuuaauccuuggguggg

SEQ ID NO: 727752 - RNA, 23 nt, Human
ugacagagcaagacuuggucuca

SEQ ID NO: 727753 - RNA, 22 nt, Human
cauaaucagauguguacauaag

SEQ ID NO: 727754 - RNA, 22 nt, Human
ucacaggcuugugaacauugca

SEQ ID NO: 727755 - RNA, 22 nt, Human
cacagaggaaaugacuuucuua

SEQ ID NO: 727756 - RNA, 22 nt, Human
aaaagcucuuucugcuguagau

SEQ ID NO: 727757 - RNA, 22 nt, Human
uuucucagccuccuugcuggag

SEQ ID NO: 727758 - RNA, 22 nt, Human
gcguggcuuagagugggguacc

SEQ ID NO: 727759 - RNA, 22 nt, Human
uuuaaauuuagaagaaacacug

SEQ ID NO: 727760 - RNA, 22 nt, Human
ucaucugaaauuguauauguag

SEQ ID NO: 727761 - RNA, 22 nt, Human
uaucagcaggccaaagcugcaa

SEQ ID NO: 727762 - RNA, 22 nt, Human
uugaaagaaggugguagagaau

SEQ ID NO: 727763 - RNA, 22 nt, Human
acugucaugaucgaagauguca

SEQ ID NO: 727764 - RNA, 22 nt, Human
uacuuagagcgauaauuuauac

SEQ ID NO: 727765 - RNA, 22 nt, Human
cuggcacucauaggccaguuca

SEQ ID NO: 727766 - RNA, 22 nt, Human
aaagucaugcaguugaacuuuu

SEQ ID NO: 727767 - RNA, 22 nt, Human
aauaccagagacaguguuuacc

SEQ ID NO: 727768 - RNA, 22 nt, Human
cccuggccuccaggcaguccug

SEQ ID NO: 727769 - RNA, 22 nt, Human
acagauggcacuuuuuaggacu

SEQ ID NO: 727770 - RNA, 22 nt, Human
ccagaaucaucaucugaagccu

SEQ ID NO: 727771 - RNA, 22 nt, Human
acuucauugcuaagaacaaggu

SEQ ID NO: 727772 - RNA, 22 nt, Human
cacaggagagguuaaugggggc

SEQ ID NO: 727773 - RNA, 22 nt, Human
ucugggcuugccugguugugca

SEQ ID NO: 727774 - RNA, 21 nt, Human
cagaggcagguccugggacgg

SEQ ID NO: 727775 - RNA, 22 nt, Human
ucuuaaaugacugauaagagga

SEQ ID NO: 727776 - RNA, 22 nt, Human
agcuccagcggauggucuuaua

SEQ ID NO: 727777 - RNA, 22 nt, Human
ucugagcagagcaucauuucag

SEQ ID NO: 727778 - RNA, 22 nt, Human
acuggccaggcacagcuguggg

SEQ ID NO: 727779 - RNA, 22 nt, Human
uggcuggaccugggcuggaauu

SEQ ID NO: 727780 - RNA, 22 nt, Human
cuuuuacugugaaaagaaacug

SEQ ID NO: 727781 - RNA, 22 nt, Human
guaaauauaaaugcuagcugcc

SEQ ID NO: 727782 - RNA, 22 nt, Human
agccccaggaugggccgcagga

SEQ ID NO: 727783 - RNA, 16 nt, Human
acagugugcuaagcau

SEQ ID NO: 727784 - RNA, 22 nt, Human
ggcuggagacaacguccugccc

SEQ ID NO: 727785 - RNA, 22 nt, Human
acugucccauuuauguagacau

SEQ ID NO: 727786 - RNA, 22 nt, Human
aaauugcaaccaggucucuguc

SEQ ID NO: 727787 - RNA, 22 nt, Human
uaggaggguuagagggaaauau

SEQ ID NO: 727788 - RNA, 23 nt, Human
uccaggcugggacuucaacuggc

SEQ ID NO: 727789 - RNA, 22 nt, Human
uucaaguaaugcuacuccuaug

SEQ ID NO: 727790 - RNA, 22 nt, Human
uggcccaggugcaagagacaga

SEQ ID NO: 727791 - RNA, 22 nt, Human
aaggcugaaagaccuugaaccu

SEQ ID NO: 727792 - RNA, 22 nt, Human
aucaaugcucuguacccagaau

SEQ ID NO: 727793 - RNA, 22 nt, Human
ucaguagcccuugaguucaugu

SEQ ID NO: 727794 - RNA, 19 nt, Human
cucaccuggaggugcugau

SEQ ID NO: 727795 - RNA, 22 nt, Human
ccagggcugccuggccgugugu

SEQ ID NO: 727796 - RNA, 22 nt, Human
cagcuaguaaauggcaagacua

SEQ ID NO: 727797 - RNA, 22 nt, Human
ugguccuggggugcaggcugac

SEQ ID NO: 727798 - RNA, 22 nt, Human
guuuggauagugagagauacuu

SEQ ID NO: 727799 - RNA, 22 nt, Human
gccuucagcggccgcucgcugc

SEQ ID NO: 727800 - RNA, 22 nt, Human
auacaugugcuauguuggugua

SEQ ID NO: 727801 - RNA, 22 nt, Human
ucuacuuccgcaaaaggcacau

SEQ ID NO: 727802 - RNA, 22 nt, Human
agauccugccaauggaagcagg

SEQ ID NO: 727803 - RNA, 22 nt, Human
cagggcuguggaaaacuggugc

SEQ ID NO: 727804 - RNA, 22 nt, Human
cuggcucugaguggcucuaauu

SEQ ID NO: 727805 - RNA, 22 nt, Human
gccuuccaccuaggccucugcu

SEQ ID NO: 727806 - RNA, 22 nt, Human
ucccaggcuggggccaggugac

SEQ ID NO: 727807 - RNA, 22 nt, Human
uuguagcagggaucagaauaca

SEQ ID NO: 727808 - RNA, 22 nt, Human
uagcucauguaauccgaacaua

SEQ ID NO: 727809 - RNA, 22 nt, Human
gcagcccagguguagcucuuug

SEQ ID NO: 727810 - RNA, 22 nt, Human
aacagaacuguuguucuggagg

SEQ ID NO: 727811 - RNA, 22 nt, Human
ucacuguaccuuccauuucauu

SEQ ID NO: 727812 - RNA, 18 nt, Human
acuccccacaggcucugu

SEQ ID NO: 727813 - RNA, 22 nt, Human
guacaguaguaaaagugaauga

SEQ ID NO: 727814 - RNA, 22 nt, Human
ggguggugggcacagaaucugg

SEQ ID NO: 727815 - RNA, 22 nt, Human
cagacagguugcaaaacuucaa

SEQ ID NO: 727816 - RNA, 23 nt, Human
uccuggguuugaauucuagucuu

SEQ ID NO: 727817 - RNA, 22 nt, Human
uccaggcagagcaacaaaauau

SEQ ID NO: 727818 - RNA, 22 nt, Human
aaguacauccuagucucuuuca

SEQ ID NO: 727819 - RNA, 22 nt, Human
ugugccagccucuggcuguguc

SEQ ID NO: 727820 - RNA, 22 nt, Human
ggacugucuccuugcugguagg

SEQ ID NO: 727821 - RNA, 22 nt, Human
caggacuggcucgcagugggug

SEQ ID NO: 727822 - RNA, 22 nt, Human
gguaugaaaugauuccauguua

SEQ ID NO: 727823 - RNA, 21 nt, Human
ucuuuccugcccaguugcccu

SEQ ID NO: 727824 - RNA, 22 nt, Human
ggagagcugacaucaugauguu

SEQ ID NO: 727825 - RNA, 22 nt, Human
uaagacauccuggauguucaaa

SEQ ID NO: 727826 - RNA, 22 nt, Human
agaggccaauaguagguggcau

SEQ ID NO: 727827 - RNA, 22 nt, Human
aaugacucugcugcagagacac

SEQ ID NO: 727828 - RNA, 22 nt, Human
uuacaacagcgauuuaccuguc

SEQ ID NO: 727829 - RNA, 22 nt, Human
ccuggcagcgccgaagcuggcc

SEQ ID NO: 727830 - RNA, 22 nt, Human
ccuaguccccaggaggucagug

SEQ ID NO: 727831 - RNA, 22 nt, Human
gaaccuuaugguaaaucuagag

SEQ ID NO: 727832 - RNA, 22 nt, Human
gaugucugccaaagaaucaagc

SEQ ID NO: 727833 - RNA, 22 nt, Human
gcuguguggcaaagggauuaca

SEQ ID NO: 727834 - RNA, 22 nt, Human
cccuccagagcuugaccugcug

SEQ ID NO: 727835 - RNA, 22 nt, Human
uaguggggccugggaggguucc

SEQ ID NO: 727836 - RNA, 22 nt, Human
aaaguacaaggaaaggaucuga

SEQ ID NO: 727837 - RNA, 22 nt, Human
cacagagaucggaacagaagua

SEQ ID NO: 727838 - RNA, 21 nt, Human
aaagaaucauggguaauuuca

SEQ ID NO: 727839 - RNA, 22 nt, Human
uggcagagagacucuccuugau

SEQ ID NO: 727840 - RNA, 22 nt, Human
uccagcucaaauucagcuucca

SEQ ID NO: 727841 - RNA, 22 nt, Human
ugaucuagguuggcuucaacug

SEQ ID NO: 727842 - RNA, 22 nt, Human
cuggcaugccuugggugccucu

SEQ ID NO: 727843 - RNA, 22 nt, Human
gagaaugggaaugaaaguagca

SEQ ID NO: 727844 - RNA, 22 nt, Human
gaccugccugagcugccucugc

SEQ ID NO: 727845 - RNA, 22 nt, Human
auuuguaccauacuguuuauua

SEQ ID NO: 727846 - RNA, 20 nt, Human
aaaauauguauaacucuucu

SEQ ID NO: 727847 - RNA, 22 nt, Human
cccuccuggaggcggaugccca

SEQ ID NO: 727848 - RNA, 22 nt, Human
cagccagagaggaaggaaugca

SEQ ID NO: 727849 - RNA, 22 nt, Human
aaggugugaacugauucauugg

SEQ ID NO: 727850 - RNA, 22 nt, Human
ggagcccuagcugugcaucaga

SEQ ID NO: 727851 - RNA, 22 nt, Human
cugcaguucuucuccucaaggc

SEQ ID NO: 727852 - RNA, 22 nt, Human
gcccucagaguuccccacagug

SEQ ID NO: 727853 - RNA, 22 nt, Human
uagcaucuugauuucagaccag

SEQ ID NO: 727854 - RNA, 22 nt, Human
augaaguucucaauaaucaugu

SEQ ID NO: 727855 - RNA, 22 nt, Human
aggugcccaucaccucacaguc

SEQ ID NO: 727856 - RNA, 22 nt, Human
uaaagguuauaaagguuagggg

SEQ ID NO: 727857 - RNA, 22 nt, Human
auaaucugacaaagacuuaagc

SEQ ID NO: 727858 - RNA, 22 nt, Human
ggagaagccaggugauaagcaa

SEQ ID NO: 727859 - RNA, 22 nt, Human
aacaggcuauuucuuuacaaac

SEQ ID NO: 727860 - RNA, 22 nt, Human
uacaaacuguccagcccagagg

SEQ ID NO: 727861 - RNA, 22 nt, Human
caguguuccaggcggcagugaa

SEQ ID NO: 727862 - RNA, 22 nt, Human
acugucugcuggccccugguua

SEQ ID NO: 727863 - RNA, 21 nt, Human
auguagugacuucauuccuuc

SEQ ID NO: 727864 - RNA, 22 nt, Human
uggccaugggauagugcagggg

SEQ ID NO: 727865 - RNA, 22 nt, Human
gaaguacaguuuuaucuagcca

SEQ ID NO: 727866 - RNA, 22 nt, Human
cuggucagggcucuuugggagc

SEQ ID NO: 727867 - RNA, 22 nt, Human
uaugucugcuugguuuuggaau

SEQ ID NO: 727868 - RNA, 22 nt, Human
aguaugucagagugaaaauggu

SEQ ID NO: 727869 - RNA, 22 nt, Human
guggccagccccauggacaguu

SEQ ID NO: 727870 - RNA, 22 nt, Human
uaaacagagagugcaguuauag

SEQ ID NO: 727871 - RNA, 22 nt, Human
gaaagaaugagcaucaugacuu

SEQ ID NO: 727872 - RNA, 22 nt, Human
gcuuuucuucagcagccugaug

SEQ ID NO: 727873 - RNA, 22 nt, Human
cagcugaauucuucagacucca

SEQ ID NO: 727874 - RNA, 22 nt, Human
cacagcauugccuuccaaaagg

SEQ ID NO: 727875 - RNA, 19 nt, Human
aacuagaaagguuuugaga

SEQ ID NO: 727876 - RNA, 22 nt, Human
ucacagugaugacgugggagca

SEQ ID NO: 727877 - RNA, 22 nt, Human
agagauuugucaaugauuucca

SEQ ID NO: 727878 - RNA, 20 nt, Human
cagcagaaauggggugggaa

SEQ ID NO: 727879 - RNA, 22 nt, Human
gacaugcaacaauuuggcauuu

SEQ ID NO: 727880 - RNA, 22 nt, Human
uguuugaacugaauaacauagu

SEQ ID NO: 727881 - RNA, 22 nt, Human
gcugagccccccugcguggguc

SEQ ID NO: 727882 - RNA, 20 nt, Human
caauaauuuacuucccuauu

SEQ ID NO: 727883 - RNA, 22 nt, Human
uuagauuuacaagcacuguuua

SEQ ID NO: 727884 - RNA, 22 nt, Human
ucagcaucuacagcuuugcuau

SEQ ID NO: 727885 - RNA, 22 nt, Human
uuuaauguuaaauuuguagaug

SEQ ID NO: 727886 - RNA, 22 nt, Human
ugacaucuaguagguagagacc

SEQ ID NO: 727887 - RNA, 22 nt, Human
ggacaggggcguggggauuguu

SEQ ID NO: 727888 - RNA, 22 nt, Human
caugugcuguagcagagaggaa

SEQ ID NO: 727889 - RNA, 22 nt, Human
guggccugccgugugguauggg

SEQ ID NO: 727890 - RNA, 22 nt, Human
agcuucuagcccauccagcagg

SEQ ID NO: 727891 - RNA, 22 nt, Human
gaggcucccucaacucugggug

SEQ ID NO: 727892 - RNA, 22 nt, Human
aagcaauguguuugaaaggcca

SEQ ID NO: 727893 - RNA, 22 nt, Human
uuaguuaauugacuauguugca

SEQ ID NO: 727894 - RNA, 22 nt, Human
acuguuacagagcaggaaauug

SEQ ID NO: 727895 - RNA, 21 nt, Human
ugaaugcuucgucauccuggc

SEQ ID NO: 727896 - RNA, 22 nt, Human
cuccugguucagagagcugaga

SEQ ID NO: 727897 - RNA, 22 nt, Human
ggacagugugggccaucucacu

SEQ ID NO: 727898 - RNA, 22 nt, Human
caggcugaggguuaggccuuag

SEQ ID NO: 727899 - RNA, 22 nt, Human
gagcacuguacucauuugcacu

SEQ ID NO: 727900 - RNA, 22 nt, Human
ucaggaaagaguguauccauca

SEQ ID NO: 727901 - RNA, 22 nt, Human
acagcucugcauuuuggguuaa

SEQ ID NO: 727902 - RNA, 22 nt, Human
acacagaggcaugacaguggcu

SEQ ID NO: 727903 - RNA, 22 nt, Human
gcugucuuggguagaaagaggu

SEQ ID NO: 727904 - RNA, 18 nt, Human
aguaggcacugugggguu

SEQ ID NO: 727905 - RNA, 22 nt, Human
guccuggaguggcauggcaugg

SEQ ID NO: 727906 - RNA, 22 nt, Human
auguauuuacugagaaggaaac

SEQ ID NO: 727907 - RNA, 19 nt, Human
ugagauuucuuaggugauu

SEQ ID NO: 727908 - RNA, 22 nt, Human
gcaggaaucuaacccaaggaga

SEQ ID NO: 727909 - RNA, 22 nt, Human
aaacacauuagcccuguggaaa

SEQ ID NO: 727910 - RNA, 22 nt, Human
aaggaugugacucagucagcua

SEQ ID NO: 727911 - RNA, 22 nt, Human
aucaaaguggaaguuuacuagg

SEQ ID NO: 727912 - RNA, 21 nt, Human
uuucuuaggcucuaaaaugac

SEQ ID NO: 727913 - RNA, 22 nt, Human
ugggccugauucuugaauccug

SEQ ID NO: 727914 - RNA, 22 nt, Human
ggagaagccacacauugggugu

SEQ ID NO: 727915 - RNA, 22 nt, Human
aggacacuuggcuauuguucca

SEQ ID NO: 727916 - RNA, 22 nt, Human
auaagguuggucuuaacuaccu

SEQ ID NO: 727917 - RNA, 22 nt, Human
agccucugcuuaugcaaaggua

SEQ ID NO: 727918 - RNA, 20 nt, Human
uggagagccucuggacugug

SEQ ID NO: 727919 - RNA, 22 nt, Human
ugcugaaagucccaaaucucau

SEQ ID NO: 727920 - RNA, 22 nt, Human
aaaugaccagaauacaggcuuc

SEQ ID NO: 727921 - RNA, 23 nt, Human
auaugucaugcaccagcacuuua

SEQ ID NO: 727922 - RNA, 22 nt, Human
ucuacuucuccuucauuuccca

SEQ ID NO: 727923 - RNA, 22 nt, Human
cacuuagauacuagaucacaaa

SEQ ID NO: 727924 - RNA, 20 nt, Human
gcagagugugagagggugaa

SEQ ID NO: 727925 - RNA, 22 nt, Human
ucugccaggccugcuuccgggg

SEQ ID NO: 727926 - RNA, 22 nt, Human
ccuuccagugacuaaggaggaa

SEQ ID NO: 727927 - RNA, 22 nt, Human
ucagaagaguaauagggugaga

SEQ ID NO: 727928 - RNA, 22 nt, Human
acaugcagaauucuuagagagc

SEQ ID NO: 727929 - RNA, 19 nt, Human
cagaugagaaaagugaggu

SEQ ID NO: 727930 - RNA, 22 nt, Human
ucuuaacugacaguuuaauggg

SEQ ID NO: 727931 - RNA, 22 nt, Human
aguuuguaaacuugagcuagcc

SEQ ID NO: 727932 - RNA, 22 nt, Human
cugccuggggcaucagucaagg

SEQ ID NO: 727933 - RNA, 22 nt, Human
cuugagaacaggguuagguaac

SEQ ID NO: 727934 - RNA, 20 nt, Human
uccaguggccugaaucugga

SEQ ID NO: 727935 - RNA, 22 nt, Human
aguuucucuuugacaccaaaau

SEQ ID NO: 727936 - RNA, 23 nt, Human
ugcagccacucaggagcucagug

SEQ ID NO: 727937 - RNA, 22 nt, Human
gagcagugaagacagaaguaca

SEQ ID NO: 727938 - RNA, 22 nt, Human
acagaaauugggcaaauggaag

SEQ ID NO: 727939 - RNA, 22 nt, Human
uugaucaucuaagaguaauagu

SEQ ID NO: 727940 - RNA, 22 nt, Human
uggaggaugccauccaggauac

SEQ ID NO: 727941 - RNA, 22 nt, Human
uggccucagauuauugcacagu

SEQ ID NO: 727942 - RNA, 22 nt, Human
gaauaacauuuuuuccuuuaca

SEQ ID NO: 727943 - RNA, 21 nt, Human
gaggcugucugcugcuggccu

SEQ ID NO: 727944 - RNA, 22 nt, Human
ugguggagccuaggcuaagucu

SEQ ID NO: 727945 - RNA, 22 nt, Human
ucucucagauggggcacuagua

SEQ ID NO: 727946 - RNA, 22 nt, Human
ucugugacugauggaggcuuuu

SEQ ID NO: 727947 - RNA, 19 nt, Human
aggaauuucucagggaggc

SEQ ID NO: 727948 - RNA, 22 nt, Human
uagugaaagucaaagacagcua

SEQ ID NO: 727949 - RNA, 22 nt, Human
uccagagguauguagagaguau

SEQ ID NO: 727950 - RNA, 22 nt, Human
cugcagcuauauuuucccacag

SEQ ID NO: 727951 - RNA, 22 nt, Human
agucagugaaaacuagaauguu

SEQ ID NO: 727952 - RNA, 22 nt, Human
ugcucauuaggacugcaaauuc

SEQ ID NO: 727953 - RNA, 22 nt, Human
acagggaauggagggaucagua

SEQ ID NO: 727954 - RNA, 22 nt, Human
ucucccuacugacuccaggacc

SEQ ID NO: 727955 - RNA, 22 nt, Human
uugagcaggaacuagaagauag

SEQ ID NO: 727956 - RNA, 22 nt, Human
gccugaccucuucugcccuggg

SEQ ID NO: 727957 - RNA, 22 nt, Human
cagacagggaccucgcuccaga

SEQ ID NO: 727958 - RNA, 22 nt, Human
ccugagcuccaguagcagccag

SEQ ID NO: 727959 - RNA, 22 nt, Human
auacaaugaaguauagaugaaa

SEQ ID NO: 727960 - RNA, 22 nt, Human
aaacuguugugguuuaucauua

SEQ ID NO: 727961 - RNA, 22 nt, Human
agugucuggucucugaacuaaa

SEQ ID NO: 727962 - RNA, 22 nt, Human
accccucagcucuucgugcccc

SEQ ID NO: 727963 - RNA, 22 nt, Human
ugacaagucacuguucuucaau

SEQ ID NO: 727964 - RNA, 23 nt, Human
cacaggcugcgcauaagcuucuc

SEQ ID NO: 727965 - RNA, 22 nt, Human
gagaaguuuggagugaagguuu

SEQ ID NO: 727966 - RNA, 22 nt, Human
gugaggauugcucuggagaauu

SEQ ID NO: 727967 - RNA, 22 nt, Human
gauuuguuucaaguuagcaucu

SEQ ID NO: 727968 - RNA, 22 nt, Human
auugaacauuguucuaggaggc

SEQ ID NO: 727969 - RNA, 22 nt, Human
aguaugaaaguuaaucaauuua

SEQ ID NO: 727970 - RNA, 18 nt, Human
ggcacuggugaugcagag

SEQ ID NO: 727971 - RNA, 22 nt, Human
uagaagaacaugucaaacuaua

SEQ ID NO: 727972 - RNA, 22 nt, Human
gggcagugaauauuggugggaa

SEQ ID NO: 727973 - RNA, 22 nt, Human
uuugucuuauccaaucucucag

SEQ ID NO: 727974 - RNA, 22 nt, Human
ucccagccuuccuuguggugaa

SEQ ID NO: 727975 - RNA, 22 nt, Human
ugccuuuuauggcuagccucag

SEQ ID NO: 727976 - RNA, 22 nt, Human
cugagaaaagcuuucuuauaca

SEQ ID NO: 727977 - RNA, 22 nt, Human
caggaaauuuaagaguguacaa

SEQ ID NO: 727978 - RNA, 22 nt, Human
auacaucguuuauuuuaguuca

SEQ ID NO: 727979 - RNA, 22 nt, Human
ugcagcagagugggccugggug

SEQ ID NO: 727980 - RNA, 22 nt, Human
gcuggcucagggacuagaguuu

SEQ ID NO: 727981 - RNA, 22 nt, Human
cugucccaggagcuguaagaca

SEQ ID NO: 727982 - RNA, 22 nt, Human
uuuauuugucuugccauuuagu

SEQ ID NO: 727983 - RNA, 22 nt, Human
gggacaugccccucagugggug

SEQ ID NO: 727984 - RNA, 22 nt, Human
aagcagcauguggguuaucggg

SEQ ID NO: 727985 - RNA, 22 nt, Human
cucaagauauuccagcucucaa

SEQ ID NO: 727986 - RNA, 22 nt, Human
gcccaagagagcgaagguuggc

SEQ ID NO: 727987 - RNA, 20 nt, Human
acaguguuaguuaucaucuc

SEQ ID NO: 727988 - RNA, 23 nt, Human
ucugaguuauguccuuacauuug

SEQ ID NO: 727989 - RNA, 22 nt, Human
uccugacucugguguccucuac

SEQ ID NO: 727990 - RNA, 22 nt, Human
aagggcccauucucucagaaaa

SEQ ID NO: 727991 - RNA, 22 nt, Human
gugaguguuaacccacugcuuc

SEQ ID NO: 727992 - RNA, 22 nt, Human
guuacaacucccugaaccucgg

SEQ ID NO: 727993 - RNA, 22 nt, Human
gauaaaauauguggccuuuagu

SEQ ID NO: 727994 - RNA, 22 nt, Human
ucucuaaagcacuuuaaccaca

SEQ ID NO: 727995 - RNA, 22 nt, Human
uucuaugucagugugcucugug

SEQ ID NO: 727996 - RNA, 22 nt, Human
agucagcuacaaguucauucac

SEQ ID NO: 727997 - RNA, 22 nt, Human
caaggccaguucaccaagggca

SEQ ID NO: 727998 - RNA, 22 nt, Human
ucuagagacaaaggaaggaggg

SEQ ID NO: 727999 - RNA, 22 nt, Human
acccagggcucaagcguaggca

SEQ ID NO: 728000 - RNA, 22 nt, Human
gugagagggcugggcucaugau

SEQ ID NO: 728001 - RNA, 22 nt, Human
ucaaauaugugauagaagcuaa

SEQ ID NO: 728002 - RNA, 22 nt, Human
ccgggccucgggacaccgggua

SEQ ID NO: 728003 - RNA, 22 nt, Human
aggaacaagggagccuuuucuc

SEQ ID NO: 728004 - RNA, 22 nt, Human
gugcaggagccagggguaggaa

SEQ ID NO: 728005 - RNA, 22 nt, Human
ugcuggaaagugaggugaauga

SEQ ID NO: 728006 - RNA, 22 nt, Human
aauuguaacuacauugagaaca

SEQ ID NO: 728007 - RNA, 22 nt, Human
aagaaaguguggagagccuagc

SEQ ID NO: 728008 - RNA, 22 nt, Human
gugcugagcacaaggcccagag

SEQ ID NO: 728009 - RNA, 22 nt, Human
ccugggaggcagagguugcagu

SEQ ID NO: 728010 - RNA, 22 nt, Human
ugguuuuagaguauauucaggg

SEQ ID NO: 728011 - RNA, 22 nt, Human
gaugauuuuaugucuugucauu

SEQ ID NO: 728012 - RNA, 22 nt, Human
gcucagcucuauggacacaaag

SEQ ID NO: 728013 - RNA, 22 nt, Human
ccucagaauaguccucagauca

SEQ ID NO: 728014 - RNA, 22 nt, Human
uggcacaggagcacugcccugg

SEQ ID NO: 728015 - RNA, 22 nt, Human
uccugagauguggagcuccaug

SEQ ID NO: 728016 - RNA, 22 nt, Human
cuucccaagacuguauugcaag

SEQ ID NO: 728017 - RNA, 22 nt, Human
aggucuggugggcuuuagauug

SEQ ID NO: 728018 - RNA, 22 nt, Human
ugugggaaguuuggagggaaag

SEQ ID NO: 728019 - RNA, 22 nt, Human
uuccagaggcucuaggggagaa

SEQ ID NO: 728020 - RNA, 21 nt, Human
aggcccagagucuugggggga

SEQ ID NO: 728021 - RNA, 22 nt, Human
gccagcaguggccaccaccagg

SEQ ID NO: 728022 - RNA, 22 nt, Human
uacaagagaacuaauguaaguc

SEQ ID NO: 728023 - RNA, 22 nt, Human
uuaaccuguaaaaugggagaag

SEQ ID NO: 728024 - RNA, 22 nt, Human
gaagcugaguggacucuggcca

SEQ ID NO: 728025 - RNA, 22 nt, Human
ccuucaugucauuggacaccuu

SEQ ID NO: 728026 - RNA, 22 nt, Human
aaguguauuaagcaacguuauu

SEQ ID NO: 728027 - RNA, 17 nt, Human
gcugagaggcagcacag

SEQ ID NO: 728028 - RNA, 22 nt, Human
uugacaaauacccauuagacca

SEQ ID NO: 728029 - RNA, 22 nt, Human
uucuuuauugagacuucauugu

SEQ ID NO: 728030 - RNA, 22 nt, Human
gguaacugcagaaugugccuca

SEQ ID NO: 728031 - RNA, 22 nt, Human
auuaucucaagggauagcagau

SEQ ID NO: 728032 - RNA, 22 nt, Human
ugcugcaggaacuuaagaagcu

SEQ ID NO: 728033 - RNA, 22 nt, Human
gcugccucaggcaccuccuggc

SEQ ID NO: 728034 - RNA, 18 nt, Human
agagagaauuccaguagg

SEQ ID NO: 728035 - RNA, 22 nt, Human
uguaaacauauguauguaugua

SEQ ID NO: 728036 - RNA, 20 nt, Human
cccugugauuggcaaguguc

SEQ ID NO: 728037 - RNA, 22 nt, Human
agacugaaauagugcacaccaa

SEQ ID NO: 728038 - RNA, 22 nt, Human
ucugugcuaaugcuucacaaua

SEQ ID NO: 728039 - RNA, 22 nt, Human
aagcacugagcacaguggcuga

SEQ ID NO: 728040 - RNA, 22 nt, Human
ggcagcgcccgaguccgcagcu

SEQ ID NO: 728041 - RNA, 22 nt, Human
ccagcuuuuagugggcuuauua

SEQ ID NO: 728042 - RNA, 22 nt, Human
aaagaugaguccggcagacaua

SEQ ID NO: 728043 - RNA, 22 nt, Human
acuguacacagugguguacugu

SEQ ID NO: 728044 - RNA, 22 nt, Human
uccaggacuuggcaggagauga

SEQ ID NO: 728045 - RNA, 22 nt, Human
ucucaugcuguagugcacuaac

SEQ ID NO: 728046 - RNA, 22 nt, Human
uuaagggccauuauggaugggu

SEQ ID NO: 728047 - RNA, 22 nt, Human
uuacagcagugggaaggaguca

SEQ ID NO: 728048 - RNA, 22 nt, Human
ugagcagagacuucaagggcag

SEQ ID NO: 728049 - RNA, 22 nt, Human
auuccacaagaccauaaauuag

SEQ ID NO: 728050 - RNA, 22 nt, Human
ucauauaacuggauauuuucaa

SEQ ID NO: 728051 - RNA, 22 nt, Human
gggaugucacugugccuggcac

SEQ ID NO: 728052 - RNA, 22 nt, Human
cauugcucaggcccagcaggaa

SEQ ID NO: 728053 - RNA, 22 nt, Human
aauguguuuuaugagagaauau

SEQ ID NO: 728054 - RNA, 22 nt, Human
acuccacauuugaacacaguuc

SEQ ID NO: 728055 - RNA, 22 nt, Human
uugugugucuucuucacugccc

SEQ ID NO: 728056 - RNA, 22 nt, Human
uacaguagcugagguucucagg

SEQ ID NO: 728057 - RNA, 22 nt, Human
uaauugucuuaggugugaugau

SEQ ID NO: 728058 - RNA, 22 nt, Human
caaauugcuaacugucagacua

SEQ ID NO: 728059 - RNA, 22 nt, Human
ucaguauccacaaaugcucaaa

SEQ ID NO: 728060 - RNA, 22 nt, Human
augauucaagaaaauaggaugg

SEQ ID NO: 728061 - RNA, 22 nt, Human
ggacacagcugcagccacaccc

SEQ ID NO: 728062 - RNA, 22 nt, Human
uggccagccuugucaucgcuuu

SEQ ID NO: 728063 - RNA, 22 nt, Human
agguuaaaaaggauucaguuaa

SEQ ID NO: 728064 - RNA, 23 nt, Human
aggauaugacuugucugccaacc

SEQ ID NO: 728065 - RNA, 22 nt, Human
agugaagaggaaguggggcaca

SEQ ID NO: 728066 - RNA, 22 nt, Human
auuucuguugcuuauaaauuac

SEQ ID NO: 728067 - RNA, 22 nt, Human
auaauuuacaacugcuuuuaau

SEQ ID NO: 728068 - RNA, 22 nt, Human
uacauacacaaauauacuguuu

SEQ ID NO: 728069 - RNA, 21 nt, Human
uccaggcuggaaggggcguug

SEQ ID NO: 728070 - RNA, 22 nt, Human
guggccaggccgacugccaggc

SEQ ID NO: 728071 - RNA, 22 nt, Human
cuuauacagaucaagggaaaag

SEQ ID NO: 728072 - RNA, 22 nt, Human
cugcaagauuggaagaugcaau

SEQ ID NO: 728073 - RNA, 22 nt, Human
ucagaggugagcaugugaccaa

SEQ ID NO: 728074 - RNA, 22 nt, Human
cauguacaugccuacuaucaau

SEQ ID NO: 728075 - RNA, 22 nt, Human
ccuggcagacagcacugaagcu

SEQ ID NO: 728076 - RNA, 22 nt, Human
uggagagcugguucaaagcaga

SEQ ID NO: 728077 - RNA, 22 nt, Human
ccagggccugccacuuagcaag

SEQ ID NO: 728078 - RNA, 22 nt, Human
cuccuggaccagggcuauuggg

SEQ ID NO: 728079 - RNA, 22 nt, Human
uuagcucagaaaauuuaaacuu

SEQ ID NO: 728080 - RNA, 22 nt, Human
gcugggcaccggagagacccca

SEQ ID NO: 728081 - RNA, 22 nt, Human
aacauacauauuucagugucca

SEQ ID NO: 728082 - RNA, 22 nt, Human
caggcagagucagauuagacuu

SEQ ID NO: 728083 - RNA, 22 nt, Human
agcagacuccauugagugaguc

SEQ ID NO: 728084 - RNA, 22 nt, Human
auggcagggcacagcucuaguu

SEQ ID NO: 728085 - RNA, 22 nt, Human
gacaugggaugagaugaagcau

SEQ ID NO: 728086 - RNA, 22 nt, Human
caaauguugcuguaauguuugu

SEQ ID NO: 728087 - RNA, 22 nt, Human
ucauacaggcucaagcuauacg

SEQ ID NO: 728088 - RNA, 22 nt, Human
caugcacagugauaucugaaga

SEQ ID NO: 728089 - RNA, 22 nt, Human
cucccucaccaugacccgcugu

SEQ ID NO: 728090 - RNA, 22 nt, Human
cacuaguggccccaugugguug

SEQ ID NO: 728091 - RNA, 21 nt, Human
uuguuacaaugcaagaguaug

SEQ ID NO: 728092 - RNA, 22 nt, Human
uaugcuguauucuguauguuag

SEQ ID NO: 728093 - RNA, 22 nt, Human
ucuucaaagaauuuuaguaauu

SEQ ID NO: 728094 - RNA, 22 nt, Human
cacuuuaugggaagcaaaaauu

SEQ ID NO: 728095 - RNA, 22 nt, Human
ucugaaaacuccaugagcucgu

SEQ ID NO: 728096 - RNA, 22 nt, Human
ucuccuugcuacccaguauguc

SEQ ID NO: 728097 - RNA, 22 nt, Human
ggccuggcucuugcccagccug

SEQ ID NO: 728098 - RNA, 22 nt, Human
cagaauggcuuuuauggcucag

SEQ ID NO: 728099 - RNA, 22 nt, Human
uucccacaguucagaacaaagg

SEQ ID NO: 728100 - RNA, 22 nt, Human
agcagggcaaagucaggcuaac

SEQ ID NO: 728101 - RNA, 22 nt, Human
caggacaggcccuguggggucu

SEQ ID NO: 728102 - RNA, 22 nt, Human
aagcaggaagcucagguccuug

SEQ ID NO: 728103 - RNA, 22 nt, Human
ucaggaugacuucaaggaggaa

SEQ ID NO: 728104 - RNA, 22 nt, Human
augaggcaugugaggagaaggg

SEQ ID NO: 728105 - RNA, 22 nt, Human
ucacagcagaauuuaggaggca

SEQ ID NO: 728106 - RNA, 22 nt, Human
cauguguuucgagacuguugag

SEQ ID NO: 728107 - RNA, 22 nt, Human
auuaaauuggacgcugggggaa

SEQ ID NO: 728108 - RNA, 22 nt, Human
cuuuaccagauuccauugcaag

SEQ ID NO: 728109 - RNA, 22 nt, Human
cccugccucugaagcugcucag

SEQ ID NO: 728110 - RNA, 22 nt, Human
ugugccugauggucacguggcc

SEQ ID NO: 728111 - RNA, 22 nt, Human
uagguucagcuuucauccugaa

SEQ ID NO: 728112 - RNA, 22 nt, Human
uuacaagacagugugguaaaua

SEQ ID NO: 728113 - RNA, 22 nt, Human
ucaguucugaaguucugccucc

SEQ ID NO: 728114 - RNA, 22 nt, Human
ccauccugaauggucucagcca

SEQ ID NO: 728115 - RNA, 22 nt, Human
augcacagcugaacacucuaaa

SEQ ID NO: 728116 - RNA, 22 nt, Human
gagcuuccacucuagaaggagu

SEQ ID NO: 728117 - RNA, 23 nt, Human
gagagcugacugucaagacuguu

SEQ ID NO: 728118 - RNA, 22 nt, Human
uucaacaaaauauauuuuucca

SEQ ID NO: 728119 - RNA, 22 nt, Human
cuaggccauauuuugagaacug

SEQ ID NO: 728120 - RNA, 22 nt, Human
cagugcuccugauguacccuug

SEQ ID NO: 728121 - RNA, 20 nt, Human
auggagugaagagugaaagc

SEQ ID NO: 728122 - RNA, 22 nt, Human
uauggcuuuuuauucaucuuac

SEQ ID NO: 728123 - RNA, 22 nt, Human
gaucuagaccagaagcuguugu

SEQ ID NO: 728124 - RNA, 22 nt, Human
uugaggcagggcaugguggccc

SEQ ID NO: 728125 - RNA, 22 nt, Human
auacucagcugcuagacagaag

SEQ ID NO: 728126 - RNA, 22 nt, Human
uuucacagcagaauuucugagg

SEQ ID NO: 728127 - RNA, 22 nt, Human
aacacagcuaauuucugucaau

SEQ ID NO: 728128 - RNA, 22 nt, Human
uccugccucuccaugcuaacua

SEQ ID NO: 728129 - RNA, 22 nt, Human
uaucagcgugcaaaucuuugga

SEQ ID NO: 728130 - RNA, 22 nt, Human
acacagaguccuuacugaggua

SEQ ID NO: 728131 - RNA, 22 nt, Human
agcaacuuuucuagacaugguc

SEQ ID NO: 728132 - RNA, 22 nt, Human
gggagcugaauggcaauggaga

SEQ ID NO: 728133 - RNA, 22 nt, Human
gguccucaaucccaacaaggca

SEQ ID NO: 728134 - RNA, 22 nt, Human
ugucugcccucaacccagaggc

SEQ ID NO: 728135 - RNA, 19 nt, Human
ggcugcagagccccggcgc

SEQ ID NO: 728136 - RNA, 22 nt, Human
caggcucccacccuccugcagc

SEQ ID NO: 728137 - RNA, 22 nt, Human
uguuaaaaaugcagauuccuau

SEQ ID NO: 728138 - RNA, 22 nt, Human
ucuguuagcugucaaaguguuu

SEQ ID NO: 728139 - RNA, 22 nt, Human
acucauugaaacuuaagaucua

SEQ ID NO: 728140 - RNA, 22 nt, Human
uaugcauagguaucuauacuca

SEQ ID NO: 728141 - RNA, 22 nt, Human
ucaauucaacacaugcacauug

SEQ ID NO: 728142 - RNA, 22 nt, Human
gagaccugcagcuguagucugc

SEQ ID NO: 728143 - RNA, 22 nt, Human
uuagcuuuucucuauguuggcu

SEQ ID NO: 728144 - RNA, 22 nt, Human
ccugggucuguauugguaggua

SEQ ID NO: 728145 - RNA, 22 nt, Human
ccacagggaacaugacagccuu

SEQ ID NO: 728146 - RNA, 22 nt, Human
aauguucauuagcauuguugac

SEQ ID NO: 728147 - RNA, 22 nt, Human
gcugucugagaacaugguggaa

SEQ ID NO: 728148 - RNA, 21 nt, Human
ucaggcaggcgcagagggaag

SEQ ID NO: 728149 - RNA, 22 nt, Human
ugagcccaggaguaugaggcug

SEQ ID NO: 728150 - RNA, 22 nt, Human
cagcagagcuuauuaacuaaaa

SEQ ID NO: 728151 - RNA, 22 nt, Human
ucacaugcccuguauuuaccag

SEQ ID NO: 728152 - RNA, 22 nt, Human
ugaggcucagaagugccaagug

SEQ ID NO: 728153 - RNA, 22 nt, Human
gugccugguuuggggaauguuc

SEQ ID NO: 728154 - RNA, 22 nt, Human
agguucuugacucuaccuucca

SEQ ID NO: 728155 - RNA, 22 nt, Human
agguucaggcacuugcccaaca

SEQ ID NO: 728156 - RNA, 22 nt, Human
agaggcuggauugagcauagac

SEQ ID NO: 728157 - RNA, 22 nt, Human
gcucaggaaacagcagggcuug

SEQ ID NO: 728158 - RNA, 22 nt, Human
auauauaucgaguucaugucuc

SEQ ID NO: 728159 - RNA, 22 nt, Human
augcuuguacuaaaaaaauauu

SEQ ID NO: 728160 - RNA, 22 nt, Human
aaucaggaugacugucauuuca

SEQ ID NO: 728161 - RNA, 22 nt, Human
ccagugugguuuaggauaggga

SEQ ID NO: 728162 - RNA, 22 nt, Human
accagcugugugaccugaggca

SEQ ID NO: 728163 - RNA, 22 nt, Human
uuggcucuggaacuauuucuga

SEQ ID NO: 728164 - RNA, 22 nt, Human
uuuacaguauaguaggacucau

SEQ ID NO: 728165 - RNA, 22 nt, Human
aauuucaagucuugaagaagua

SEQ ID NO: 728166 - RNA, 22 nt, Human
uuguaacuuugcauacuccugu

SEQ ID NO: 728167 - RNA, 22 nt, Human
cugugcacuaaccacacccacg

SEQ ID NO: 728168 - RNA, 22 nt, Human
aagcugcagcacagagaggugg

SEQ ID NO: 728169 - RNA, 18 nt, Human
agcuggcccuggcugccg

SEQ ID NO: 728170 - RNA, 22 nt, Human
cccugccccaggcggcuucacu

SEQ ID NO: 728171 - RNA, 22 nt, Human
aaggccauuauucugauauauu

SEQ ID NO: 728172 - RNA, 22 nt, Human
gcccuagggcuuuugggccugu

SEQ ID NO: 728173 - RNA, 22 nt, Human
auguguauauuuauuguaguuu

SEQ ID NO: 728174 - RNA, 19 nt, Human
ugggaugaugcagaaggua

SEQ ID NO: 728175 - RNA, 22 nt, Human
aagcacaggggaaauaaguugu

SEQ ID NO: 728176 - RNA, 22 nt, Human
ggaguggccacgacugggagau

SEQ ID NO: 728177 - RNA, 22 nt, Human
uagguuuacugaauuaguggaa

SEQ ID NO: 728178 - RNA, 22 nt, Human
ucacugugauucuguauggauu

SEQ ID NO: 728179 - RNA, 20 nt, Human
gcucuaaagccacagauuga

SEQ ID NO: 728180 - RNA, 22 nt, Human
gccauggcccauaccaggugca

SEQ ID NO: 728181 - RNA, 22 nt, Human
aggucugaucaugggcccacuu

SEQ ID NO: 728182 - RNA, 22 nt, Human
ugcccucauuauaagaggcuca

SEQ ID NO: 728183 - RNA, 21 nt, Human
ucccugugagcagcucuuccu

SEQ ID NO: 728184 - RNA, 23 nt, Human
auguuaaacauaacugaagagcc

SEQ ID NO: 728185 - RNA, 22 nt, Human
acauuucuuugcuagacagcag

SEQ ID NO: 728186 - RNA, 22 nt, Human
acaggcagauuaaggguaggca

SEQ ID NO: 728187 - RNA, 22 nt, Human
aguauaaagugguuuucagcac

SEQ ID NO: 728188 - RNA, 22 nt, Human
gccagcuguaagcagugauucu

SEQ ID NO: 728189 - RNA, 22 nt, Human
auccugucucuacccaucggcu

SEQ ID NO: 728190 - RNA, 19 nt, Human
cccucaggucugagcaguc

SEQ ID NO: 728191 - RNA, 22 nt, Human
augucuguuaaucgacccuaau

SEQ ID NO: 728192 - RNA, 22 nt, Human
ugcugggcuugaaagcugcuaa

SEQ ID NO: 728193 - RNA, 22 nt, Human
uggggccagguggcugcagguc

SEQ ID NO: 728194 - RNA, 22 nt, Human
auccacucccuaacaccauguu

SEQ ID NO: 728195 - RNA, 22 nt, Human
ccagggccucguguucugagug

SEQ ID NO: 728196 - RNA, 22 nt, Human
uggcagcuacagacagagguga

SEQ ID NO: 728197 - RNA, 22 nt, Human
gcucaggauuucauccaugugu

SEQ ID NO: 728198 - RNA, 22 nt, Human
cagcaucccucaggggccucug

SEQ ID NO: 728199 - RNA, 21 nt, Human
aguacaaaaauuccuuucuca

SEQ ID NO: 728200 - RNA, 22 nt, Human
auggaacaagaacucagauuua

SEQ ID NO: 728201 - RNA, 22 nt, Human
cauuuccagcuccugcaucaug

SEQ ID NO: 728202 - RNA, 18 nt, Human
ucaggcugggccuccuuc

SEQ ID NO: 728203 - RNA, 22 nt, Human
uacuauuuggaauuuuaaauug

SEQ ID NO: 728204 - RNA, 17 nt, Human
ugcaugcgucugugaua

SEQ ID NO: 728205 - RNA, 22 nt, Human
uucuagaugauaaaccagcagc

SEQ ID NO: 728206 - RNA, 22 nt, Human
agaaggguagggacuuauccaa

SEQ ID NO: 728207 - RNA, 22 nt, Human
ucagucaucccagcuuucaucu

SEQ ID NO: 728208 - RNA, 22 nt, Human
agucccagcuacucaagaggcu

SEQ ID NO: 728209 - RNA, 22 nt, Human
cggcccuggcggaggcgggaga

SEQ ID NO: 728210 - RNA, 22 nt, Human
ccugcguccacggcugggagac

SEQ ID NO: 728211 - RNA, 22 nt, Human
aagcugaugucccaguuugaag

SEQ ID NO: 728212 - RNA, 22 nt, Human
uacacagaagccagaaggccug

SEQ ID NO: 728213 - RNA, 22 nt, Human
ugcugccugcuacgagggaaga

SEQ ID NO: 728214 - RNA, 22 nt, Human
cuuuacacauccuaaccagugu

SEQ ID NO: 728215 - RNA, 22 nt, Human
cuuaucugagaaagaugcuaca

SEQ ID NO: 728216 - RNA, 22 nt, Human
cucucaguuuccucaacuguaa

SEQ ID NO: 728217 - RNA, 22 nt, Human
aucuggagaauaaauguccaag

SEQ ID NO: 728218 - RNA, 22 nt, Human
uuagcacugucugguuaucuug

SEQ ID NO: 728219 - RNA, 22 nt, Human
agagacaaacacugcaacuucu

SEQ ID NO: 728220 - RNA, 22 nt, Human
uuacuuuccagcucuagcuuca

SEQ ID NO: 728221 - RNA, 22 nt, Human
cagucacugguucuauaggccc

SEQ ID NO: 728222 - RNA, 21 nt, Human
ggggucaagugaaugguguug

SEQ ID NO: 728223 - RNA, 22 nt, Human
agcaguggcugacagacuuacc

SEQ ID NO: 728224 - RNA, 22 nt, Human
agaggucuaugcuaggggaacu

SEQ ID NO: 728225 - RNA, 22 nt, Human
caguuuuagcuagagcaaacca

SEQ ID NO: 728226 - RNA, 22 nt, Human
aacuacagaaaagguaagcucu

SEQ ID NO: 728227 - RNA, 22 nt, Human
aaaggcaggcuuucacaucuca

SEQ ID NO: 728228 - RNA, 22 nt, Human
cuuguuaaaaugcagauuccaa

SEQ ID NO: 728229 - RNA, 22 nt, Human
gauuuuauuagcccaaacuuug

SEQ ID NO: 728230 - RNA, 22 nt, Human
uggcugagcucccuguguguug

SEQ ID NO: 728231 - RNA, 22 nt, Human
ucacaguaucacacaaggauua

SEQ ID NO: 728232 - RNA, 22 nt, Human
acuuucugugguuaccagggag

SEQ ID NO: 728233 - RNA, 22 nt, Human
aguugcugguaaauguuaucaa

SEQ ID NO: 728234 - RNA, 22 nt, Human
ucaggccccuugucagcucugu

SEQ ID NO: 728235 - RNA, 22 nt, Human
cccagcaucuccaggcauggcc

SEQ ID NO: 728236 - RNA, 22 nt, Human
ucuaaugaggacuuuauagaga

SEQ ID NO: 728237 - RNA, 22 nt, Human
auccaacacguauuugcuggcc

SEQ ID NO: 728238 - RNA, 22 nt, Human
gagacguggccuuugccugagc

SEQ ID NO: 728239 - RNA, 22 nt, Human
cugcauccuggaaauagcuaag

SEQ ID NO: 728240 - RNA, 18 nt, Human
gagcagcaggaucaagaa

SEQ ID NO: 728241 - RNA, 22 nt, Human
cagucaggggugggaucaaggc

SEQ ID NO: 728242 - RNA, 22 nt, Human
cucuucaaaagucuaauccuua

SEQ ID NO: 728243 - RNA, 23 nt, Human
uucaagauacgguuuccaggcug

SEQ ID NO: 728244 - RNA, 20 nt, Human
ugcugccuguuuuugugaau

SEQ ID NO: 728245 - RNA, 22 nt, Human
acaggcaggcgggacagcccga

SEQ ID NO: 728246 - RNA, 22 nt, Human
uuuccucugacugcuccccugc

SEQ ID NO: 728247 - RNA, 22 nt, Human
caaauaucuuuggcaaagagaa

SEQ ID NO: 728248 - RNA, 22 nt, Human
auugcucagcacaagcagcaga

SEQ ID NO: 728249 - RNA, 22 nt, Human
ggaggugggaguuuaguucuug

SEQ ID NO: 728250 - RNA, 22 nt, Human
uuuacuaaguacuuguaucccu

SEQ ID NO: 728251 - RNA, 21 nt, Human
gacuggagagaggaagucugg

SEQ ID NO: 728252 - RNA, 22 nt, Human
ggccucaguuucuucaacugua

SEQ ID NO: 728253 - RNA, 22 nt, Human
uacagugaggugguuuccuuua

SEQ ID NO: 728254 - RNA, 22 nt, Human
agcacagauuugucaacauaga

SEQ ID NO: 728255 - RNA, 22 nt, Human
ucuucuggaucgaucacauugu

SEQ ID NO: 728256 - RNA, 22 nt, Human
gagugucuaaucacguuucaca

SEQ ID NO: 728257 - RNA, 22 nt, Human
ugcuggagaagcuccugggacu

SEQ ID NO: 728258 - RNA, 22 nt, Human
caaagcaccacaaaccagguga

SEQ ID NO: 728259 - RNA, 22 nt, Human
ccugggcucuauccugacccag

SEQ ID NO: 728260 - RNA, 22 nt, Human
guccuuaaagagagcaucauuc

SEQ ID NO: 728261 - RNA, 22 nt, Human
agcaggcuuguuaugucugaga

SEQ ID NO: 728262 - RNA, 22 nt, Human
guuauuuaacuuuguagcaugg

SEQ ID NO: 728263 - RNA, 22 nt, Human
uagaaacucucacgagugaaac

SEQ ID NO: 728264 - RNA, 22 nt, Human
aauuuucugguguguaaugaag

SEQ ID NO: 728265 - RNA, 20 nt, Human
aggaaggaaguuugcaugga

SEQ ID NO: 728266 - RNA, 22 nt, Human
cccagggcuguagaauguccaa

SEQ ID NO: 728267 - RNA, 22 nt, Human
gacaguggagggcugauguuaa

SEQ ID NO: 728268 - RNA, 22 nt, Human
uuuaaaccuaucuaagaaauag

SEQ ID NO: 728269 - RNA, 22 nt, Human
gaaccagcagacuuugacaggu

SEQ ID NO: 728270 - RNA, 22 nt, Human
ggcugagcucaggggcagcagg

SEQ ID NO: 728271 - RNA, 22 nt, Human
agaaaucuauguuuugguuaga

SEQ ID NO: 728272 - RNA, 22 nt, Human
uuuccagagcaugucugcucag

SEQ ID NO: 728273 - RNA, 22 nt, Human
ucuggcucugacacuacuguua

SEQ ID NO: 728274 - RNA, 22 nt, Human
ccccaaaguguuggauaauuga

SEQ ID NO: 728275 - RNA, 22 nt, Human
gagcugcagaguaaccuuugca

SEQ ID NO: 728276 - RNA, 20 nt, Human
gaggaaccacugggaggaga

SEQ ID NO: 728277 - RNA, 22 nt, Human
agcccuucaagagcucuguccu

SEQ ID NO: 728278 - RNA, 22 nt, Human
ccucucagccggacugucaggc

SEQ ID NO: 728279 - RNA, 22 nt, Human
auguguacaaccaagcacuaaa

SEQ ID NO: 728280 - RNA, 22 nt, Human
uugaaaauaucacaggagcagc

SEQ ID NO: 728281 - RNA, 22 nt, Human
agugcuuucagugugcucuuuu

SEQ ID NO: 728282 - RNA, 22 nt, Human
uaggagcuauaaugugaagucu

SEQ ID NO: 728283 - RNA, 22 nt, Human
ucugagcaccuuauauucuuga

SEQ ID NO: 728284 - RNA, 22 nt, Human
uugagaaauaagcaugucuaga

SEQ ID NO: 728285 - RNA, 22 nt, Human
ccagggucuucgaggcagcaau

SEQ ID NO: 728286 - RNA, 22 nt, Human
ccagggcagcagaauuggggca

SEQ ID NO: 728287 - RNA, 22 nt, Human
ggaacccaugauuaugguuagg

SEQ ID NO: 728288 - RNA, 22 nt, Human
uucuacacugaguuuuuucccu

SEQ ID NO: 728289 - RNA, 22 nt, Human
agcagaagaggucuuguugcug

SEQ ID NO: 728290 - RNA, 22 nt, Human
ugagcuucaaaauaugugaauc

SEQ ID NO: 728291 - RNA, 22 nt, Human
gugacagucaaagacaugacuu

SEQ ID NO: 728292 - RNA, 22 nt, Human
uagauucuuugcuagaucauug

SEQ ID NO: 728293 - RNA, 22 nt, Human
aaguuuuauuggaacauagcca

SEQ ID NO: 728294 - RNA, 22 nt, Human
guugguuaggucaggauucaga

SEQ ID NO: 728295 - RNA, 22 nt, Human
caggcacccagcccagucgcac

SEQ ID NO: 728296 - RNA, 22 nt, Human
aaagugcucggcgcugguccca

SEQ ID NO: 728297 - RNA, 22 nt, Human
uuaagcauuuauuaugugccag

SEQ ID NO: 728298 - RNA, 22 nt, Human
cuguauuaaaggcagugaucuu

SEQ ID NO: 728299 - RNA, 19 nt, Human
auucuuguuaagugucauc

SEQ ID NO: 728300 - RNA, 22 nt, Human
ugaagccaucccucagauggcc

SEQ ID NO: 728301 - RNA, 22 nt, Human
acuccugguuuguguccuggcu

SEQ ID NO: 728302 - RNA, 22 nt, Human
ggcguggggccuucugcccgcu

SEQ ID NO: 728303 - RNA, 22 nt, Human
uggcauguuaaaguaguauuaa

SEQ ID NO: 728304 - RNA, 22 nt, Human
ccagguggaaggucugugcucu

SEQ ID NO: 728305 - RNA, 22 nt, Human
ugaugaaugucauacauaauga

SEQ ID NO: 728306 - RNA, 22 nt, Human
gauaugaaguggcauugugaag

SEQ ID NO: 728307 - RNA, 22 nt, Human
agaaauguauagugaauuuuuc

SEQ ID NO: 728308 - RNA, 22 nt, Human
aguuucaguguugacagauggu

SEQ ID NO: 728309 - RNA, 17 nt, Human
ggaaagguagaguaauc

SEQ ID NO: 728310 - RNA, 22 nt, Human
ugggccuggacaucuguauuuu

SEQ ID NO: 728311 - RNA, 22 nt, Human
acuuuugaagaauuaugcaaaa

SEQ ID NO: 728312 - RNA, 22 nt, Human
gauuuuacaaacugcaggaccc

SEQ ID NO: 728313 - RNA, 22 nt, Human
ccagcagcuguggcuuugccuc

SEQ ID NO: 728314 - RNA, 22 nt, Human
aaagaccugaaauauaaucuag

SEQ ID NO: 728315 - RNA, 22 nt, Human
gcuguauuggaacacauccaug

SEQ ID NO: 728316 - RNA, 22 nt, Human
ggagugacucucggggccacua

SEQ ID NO: 728317 - RNA, 22 nt, Human
ugaggugaauggugucccugga

SEQ ID NO: 728318 - RNA, 18 nt, Human
cagagcagagguggagcg

SEQ ID NO: 728319 - RNA, 22 nt, Human
gccugcucagaccuagcaggcc

SEQ ID NO: 728320 - RNA, 22 nt, Human
gagcugccaagauuacaaucag

SEQ ID NO: 728321 - RNA, 22 nt, Human
gcagugaagcaguccuuguuga

SEQ ID NO: 728322 - RNA, 22 nt, Human
cauuucucauaauauuagcacu

SEQ ID NO: 728323 - RNA, 22 nt, Human
ucuaaugaguuagauaauuuug

SEQ ID NO: 728324 - RNA, 22 nt, Human
auuuccuagccucucuugcagu

SEQ ID NO: 728325 - RNA, 22 nt, Human
acacaaacugcuagaaaauugg

SEQ ID NO: 728326 - RNA, 22 nt, Human
ugccuucauccauguuauagug

SEQ ID NO: 728327 - RNA, 22 nt, Human
ucaaacuagccugacugguauu

SEQ ID NO: 728328 - RNA, 22 nt, Human
cagggcagggauguugcggcag

SEQ ID NO: 728329 - RNA, 22 nt, Human
aaacaaagcaucuugcuaugca

SEQ ID NO: 728330 - RNA, 22 nt, Human
gucuggagccugggucccugcu

SEQ ID NO: 728331 - RNA, 22 nt, Human
ugguggcaugauagugugaaug

SEQ ID NO: 728332 - RNA, 23 nt, Human
aauauuccugccauuaaugacuc

SEQ ID NO: 728333 - RNA, 21 nt, Human
uauuaauaugucuaagcugau

SEQ ID NO: 728334 - RNA, 18 nt, Human
ugcaggcuguugaaacug

SEQ ID NO: 728335 - RNA, 22 nt, Human
auaacaauagugguagugcugg

SEQ ID NO: 728336 - RNA, 22 nt, Human
aggcaauccucuuacagauggg

SEQ ID NO: 728337 - RNA, 22 nt, Human
ugaaagggguugaguuacagcu

SEQ ID NO: 728338 - RNA, 22 nt, Human
aucuccagauugugaucaucag

SEQ ID NO: 728339 - RNA, 22 nt, Human
uccuuccugcucuaacauucag

SEQ ID NO: 728340 - RNA, 19 nt, Human
gaggugucuuuccugagua

SEQ ID NO: 728341 - RNA, 22 nt, Human
agacacuguguacagaaaaaga

SEQ ID NO: 728342 - RNA, 19 nt, Human
ugcacguuggaaucaccug

SEQ ID NO: 728343 - RNA, 22 nt, Human
aaucagaacuucucaggguggg

SEQ ID NO: 728344 - RNA, 22 nt, Human
aguguacaaaaugauagauaaa

SEQ ID NO: 728345 - RNA, 22 nt, Human
ucugagcauaugcagcaccugg

SEQ ID NO: 728346 - RNA, 22 nt, Human
uugcugccuuggagaagcuccu

SEQ ID NO: 728347 - RNA, 22 nt, Human
aguuugauuugucuaucuucau

SEQ ID NO: 728348 - RNA, 22 nt, Human
gcuggccuucugcagaguucug

SEQ ID NO: 728349 - RNA, 22 nt, Human
uuuauuauguacaggcacuaua

SEQ ID NO: 728350 - RNA, 22 nt, Human
cagauucucacuguauucaggu

SEQ ID NO: 728351 - RNA, 22 nt, Human
cacacaguaguaugaggcaaaa

SEQ ID NO: 728352 - RNA, 22 nt, Human
agccucucugaugugacagcua

SEQ ID NO: 728353 - RNA, 22 nt, Human
uuacaauggguauacuuccauu

SEQ ID NO: 728354 - RNA, 22 nt, Human
cagugggauugggauuggaacc

SEQ ID NO: 728355 - RNA, 22 nt, Human
agugacaugcucucaggcauaa

SEQ ID NO: 728356 - RNA, 22 nt, Human
aauucaguugugucugaccucg

SEQ ID NO: 728357 - RNA, 22 nt, Human
ucaggagcagggucuguuacca

SEQ ID NO: 728358 - RNA, 22 nt, Human
uuccaaauuccaauccccugaa

SEQ ID NO: 728359 - RNA, 22 nt, Human
uaacucugcuuguucucugagu

SEQ ID NO: 728360 - RNA, 22 nt, Human
aagagaaggugaggaagccggu

SEQ ID NO: 728361 - RNA, 22 nt, Human
caggaggcccacaggccccugc

SEQ ID NO: 728362 - RNA, 22 nt, Human
aauguauaaaguguuaauaacu

SEQ ID NO: 728363 - RNA, 22 nt, Human
gcaguaagaaagucaagcaguu

SEQ ID NO: 728364 - RNA, 20 nt, Human
uggaauaaguuaaguuguuu

SEQ ID NO: 728365 - RNA, 23 nt, Human
ugccguguuagaaauguuuuaca

SEQ ID NO: 728366 - RNA, 22 nt, Human
cugugucuucacauuugugugc

SEQ ID NO: 728367 - RNA, 22 nt, Human
agccagagcugaugucauucuc

SEQ ID NO: 728368 - RNA, 22 nt, Human
uuaucuguuuaacaaaguaucu

SEQ ID NO: 728369 - RNA, 22 nt, Human
uucaagucuuccaugguauucu

SEQ ID NO: 728370 - RNA, 22 nt, Human
gcauggaugggaguggacagau

SEQ ID NO: 728371 - RNA, 22 nt, Human
ucagaggcuucuggccagucug

SEQ ID NO: 728372 - RNA, 22 nt, Human
gaaacacaugcagcuccauaga

SEQ ID NO: 728373 - RNA, 22 nt, Human
uccuguggucauucuucugccc

SEQ ID NO: 728374 - RNA, 22 nt, Human
ccuuuugaggcuugggcucaga

SEQ ID NO: 728375 - RNA, 22 nt, Human
guggaaggugaaggagcagcga

SEQ ID NO: 728376 - RNA, 22 nt, Human
gauaccaaaaucaucuuauagg

SEQ ID NO: 728377 - RNA, 22 nt, Human
uugcucuguaauaaucuggggu

SEQ ID NO: 728378 - RNA, 22 nt, Human
gcugggccagagcagcagcacu

SEQ ID NO: 728379 - RNA, 23 nt, Human
ccacucucccaccauaucuguau

SEQ ID NO: 728380 - RNA, 22 nt, Human
cagguggcuucucccuaggcca

SEQ ID NO: 728381 - RNA, 22 nt, Human
ugucuagggagcugcucaggcu

SEQ ID NO: 728382 - RNA, 22 nt, Human
uucugcaucccagaagaggaca

SEQ ID NO: 728383 - RNA, 22 nt, Human
gagcuggccucaggcacaggag

SEQ ID NO: 728384 - RNA, 22 nt, Human
guaguucuuucucaauguucaa

SEQ ID NO: 728385 - RNA, 22 nt, Human
guaugcuuauuccuuguuguga

SEQ ID NO: 728386 - RNA, 22 nt, Human
ccacccuggguucugaugugga

SEQ ID NO: 728387 - RNA, 22 nt, Human
ccuccugguccagcaucucuuu

SEQ ID NO: 728388 - RNA, 22 nt, Human
uaaagguuauugcacuggaguu

SEQ ID NO: 728389 - RNA, 22 nt, Human
uucacuuauuucuugaguagca

SEQ ID NO: 728390 - RNA, 22 nt, Human
cugccaaucugaagagcuucuu

SEQ ID NO: 728391 - RNA, 22 nt, Human
acaggcugcugagccauuugcu

SEQ ID NO: 728392 - RNA, 22 nt, Human
ugggccaguccugccuaaggug

SEQ ID NO: 728393 - RNA, 21 nt, Human
ucagaggcugggggaaugccc

SEQ ID NO: 728394 - RNA, 22 nt, Human
cagacuugacggcagcugcuuu

SEQ ID NO: 728395 - RNA, 22 nt, Human
uaugggucuggaaaauggcuug

SEQ ID NO: 728396 - RNA, 22 nt, Human
ugguuacccagucgcuggaguu

SEQ ID NO: 728397 - RNA, 22 nt, Human
agcacauuaagugaguucaugu

SEQ ID NO: 728398 - RNA, 22 nt, Human
gacagggcgcccagccuguuuc

SEQ ID NO: 728399 - RNA, 22 nt, Human
uuccccaggugauucucauggc

SEQ ID NO: 728400 - RNA, 22 nt, Human
cuuauucagauacagacucuug

SEQ ID NO: 728401 - RNA, 22 nt, Human
gcccaggaguugaagggcugac

SEQ ID NO: 728402 - RNA, 18 nt, Human
acacaggcugacagcacc

SEQ ID NO: 728403 - RNA, 22 nt, Human
cacagcuucuuccauuccacuc

SEQ ID NO: 728404 - RNA, 22 nt, Human
ccugcucugccaaguccucuuu

SEQ ID NO: 728405 - RNA, 21 nt, Human
uccaagcucaacucccuuccu

SEQ ID NO: 728406 - RNA, 22 nt, Human
uauaauuuaucaugucacaguu

SEQ ID NO: 728407 - RNA, 22 nt, Human
cccugcagacgucuugaugccu

SEQ ID NO: 728408 - RNA, 22 nt, Human
gcucuguccagcgugcacagaa

SEQ ID NO: 728409 - RNA, 23 nt, Human
acaaaugcccauacaucuaguuc

SEQ ID NO: 728410 - RNA, 17 nt, Human
cugucugcugcuuccuc

SEQ ID NO: 728411 - RNA, 18 nt, Human
acccaggcucaugguccu

SEQ ID NO: 728412 - RNA, 22 nt, Human
cagagagcaugggaggcccgag

SEQ ID NO: 728413 - RNA, 22 nt, Human
ggagcauguggggugagcaggg

SEQ ID NO: 728414 - RNA, 22 nt, Human
aggacagagcccuaguuucaua

SEQ ID NO: 728415 - RNA, 22 nt, Human
ucgaagguuauugucuuuacgu

SEQ ID NO: 728416 - RNA, 22 nt, Human
ucuguaucacccguucccagaa

SEQ ID NO: 728417 - RNA, 22 nt, Human
uucaacaggaaagcacuuuaca

SEQ ID NO: 728418 - RNA, 22 nt, Human
ccuucacaccaucuuuaccagg

SEQ ID NO: 728419 - RNA, 21 nt, Human
aguggucuuuuucacccagug

SEQ ID NO: 728420 - RNA, 22 nt, Human
caugaagcauguuuugucauga

SEQ ID NO: 728421 - RNA, 23 nt, Human
gguuccugagcagggaucuggaa

SEQ ID NO: 728422 - RNA, 22 nt, Human
ucagacagucaucagagcuugu

SEQ ID NO: 728423 - RNA, 22 nt, Human
cuggucuguccgcaggucaccu

SEQ ID NO: 728424 - RNA, 21 nt, Human
aucaccagcagaagcugcaga

SEQ ID NO: 728425 - RNA, 22 nt, Human
gagaacuucaggauuauucaag

SEQ ID NO: 728426 - RNA, 22 nt, Human
agcuggguuucuggcaggcuua

SEQ ID NO: 728427 - RNA, 22 nt, Human
agggaggauaguagucaguuua

SEQ ID NO: 728428 - RNA, 22 nt, Human
ggaaagcucagaucuuguugga

SEQ ID NO: 728429 - RNA, 22 nt, Human
uucacaaacaccagaauggcua

SEQ ID NO: 728430 - RNA, 22 nt, Human
ugggauauaaucugaaaaguau

SEQ ID NO: 728431 - RNA, 22 nt, Human
uccuuugguuguagacaggaau

SEQ ID NO: 728432 - RNA, 22 nt, Human
auugcaaaugagucuuaauaua

SEQ ID NO: 728433 - RNA, 22 nt, Human
cuguguuccccugcugcugagg

SEQ ID NO: 728434 - RNA, 21 nt, Human
aggaggccaguacugcugaac

SEQ ID NO: 728435 - RNA, 22 nt, Human
uuucaagacucauugaguauug

SEQ ID NO: 728436 - RNA, 22 nt, Human
agcucagagggaggugaagugg

SEQ ID NO: 728437 - RNA, 22 nt, Human
cagcuguccaaacacauuaacu

SEQ ID NO: 728438 - RNA, 22 nt, Human
ggccucucuagcauccagccug

SEQ ID NO: 728439 - RNA, 22 nt, Human
uauggcuugacuugcaccggca

SEQ ID NO: 728440 - RNA, 22 nt, Human
auuauuaaagcuacaucaagga

SEQ ID NO: 728441 - RNA, 22 nt, Human
uugaauaguuuuggauagcaua

SEQ ID NO: 728442 - RNA, 22 nt, Human
ugcaggcugaggcuggcucaac

SEQ ID NO: 728443 - RNA, 22 nt, Human
cacaugcaguuuacgucacuga

SEQ ID NO: 728444 - RNA, 22 nt, Human
cgucccuaccuggcagcugcgc

SEQ ID NO: 728445 - RNA, 22 nt, Human
cacugcuaugaugaugauauuu

SEQ ID NO: 728446 - RNA, 21 nt, Human
agauucauaaucuguaaaaug

SEQ ID NO: 728447 - RNA, 22 nt, Human
cuaaagcauucucagauuuugc

SEQ ID NO: 728448 - RNA, 22 nt, Human
gaagggugugugugagggacac

SEQ ID NO: 728449 - RNA, 22 nt, Human
uagcagcaaaaugaccuucuaa

SEQ ID NO: 728450 - RNA, 22 nt, Human
ggagcagcacugccacacagag

SEQ ID NO: 728451 - RNA, 22 nt, Human
aauaauuacccaucuuuuugua

SEQ ID NO: 728452 - RNA, 22 nt, Human
gugugugcuccccaggagagcu

SEQ ID NO: 728453 - RNA, 22 nt, Human
caauguuugugaucuacugacu

SEQ ID NO: 728454 - RNA, 22 nt, Human
gauuuuacaugucauaucuauu

SEQ ID NO: 728455 - RNA, 22 nt, Human
uugaggucugugauaaaaguca

SEQ ID NO: 728456 - RNA, 22 nt, Human
aaggaggcccucuccuucugga

SEQ ID NO: 728457 - RNA, 22 nt, Human
ucuuccagugcuguguagagcu

SEQ ID NO: 728458 - RNA, 22 nt, Human
caccucuuugauuugaggcaag

SEQ ID NO: 728459 - RNA, 22 nt, Human
ucacccagacugucugacucuu

SEQ ID NO: 728460 - RNA, 20 nt, Human
ccauucugggugcagucugg

SEQ ID NO: 728461 - RNA, 22 nt, Human
cuucccuuggugaacagagcau

SEQ ID NO: 728462 - RNA, 22 nt, Human
aucuuucaguuucauaccaauu

SEQ ID NO: 728463 - RNA, 22 nt, Human
agggugaaucucacaacucuua

SEQ ID NO: 728464 - RNA, 22 nt, Human
gagcagcugugggguugaccau

SEQ ID NO: 728465 - RNA, 22 nt, Human
agauuuguaugucuaaauguaa

SEQ ID NO: 728466 - RNA, 22 nt, Human
ggaaggggccuugagcaaacug

SEQ ID NO: 728467 - RNA, 22 nt, Human
uucaguauacuucauaacauuu

SEQ ID NO: 728468 - RNA, 22 nt, Human
uuggcucagugugagggagaug

SEQ ID NO: 728469 - RNA, 22 nt, Human
cagcaauaagccagguuagaca

SEQ ID NO: 728470 - RNA, 22 nt, Human
cuucacagccaacaugggcaca

SEQ ID NO: 728471 - RNA, 18 nt, Human
cauuguacaaugcuuuau

SEQ ID NO: 728472 - RNA, 22 nt, Human
cugcccuguagcuguucuagca

SEQ ID NO: 728473 - RNA, 17 nt, Human
auuuacauugucaccga

SEQ ID NO: 728474 - RNA, 22 nt, Human
auuccaaagcacaucagaacua

SEQ ID NO: 728475 - RNA, 20 nt, Human
agugugucucggagguaagu

SEQ ID NO: 728476 - RNA, 22 nt, Human
aaauucacucuguuccucaugg

SEQ ID NO: 728477 - RNA, 22 nt, Human
uuuaagacuuaggaaagaggau

SEQ ID NO: 728478 - RNA, 22 nt, Human
ugcagcagaaguguucuucucu

SEQ ID NO: 728479 - RNA, 22 nt, Human
uuugugaagggaacagaagugu

SEQ ID NO: 728480 - RNA, 22 nt, Human
ugcugcuuggcacccucagagu

SEQ ID NO: 728481 - RNA, 22 nt, Human
cugagaucccaggcaggguggc

SEQ ID NO: 728482 - RNA, 22 nt, Human
agugucugagcuaucauuaggg

SEQ ID NO: 728483 - RNA, 22 nt, Human
cucccccuuagcucuugucuuu

SEQ ID NO: 728484 - RNA, 22 nt, Human
agggucaggagacacuggcaac

SEQ ID NO: 728485 - RNA, 22 nt, Human
aagcaacauucucuguggcauu

SEQ ID NO: 728486 - RNA, 22 nt, Human
aagaugcgguugaccauggugu

SEQ ID NO: 728487 - RNA, 22 nt, Human
ugacagcagcauagugagcaau

SEQ ID NO: 728488 - RNA, 22 nt, Human
ccagggcauccucacaucgcag

SEQ ID NO: 728489 - RNA, 22 nt, Human
aggauuuaaucaguuggcauuu

SEQ ID NO: 728490 - RNA, 22 nt, Human
gagaaagggaacuuacagagug

SEQ ID NO: 728491 - RNA, 22 nt, Human
cagugguuuuauaucuaagcuu

SEQ ID NO: 728492 - RNA, 22 nt, Human
ugcagaugaaugcugagacacu

SEQ ID NO: 728493 - RNA, 22 nt, Human
uuuccaagcugucuuggcccac

SEQ ID NO: 728494 - RNA, 22 nt, Human
auguguuuuuauucuggcaugu

SEQ ID NO: 728495 - RNA, 22 nt, Human
uaugucuuuuucucacuauagu

SEQ ID NO: 728496 - RNA, 22 nt, Human
aucuggagagaucuucacaaaa

SEQ ID NO: 728497 - RNA, 22 nt, Human
ucucauuuugagucagacacua

SEQ ID NO: 728498 - RNA, 22 nt, Human
ggagauguagugucacuggacu

SEQ ID NO: 728499 - RNA, 22 nt, Human
agcugagccagcagcaacagga

SEQ ID NO: 728500 - RNA, 20 nt, Human
guggagaggcuggcgggacu

SEQ ID NO: 728501 - RNA, 22 nt, Human
uggcugagaaaaaagagcuaua

SEQ ID NO: 728502 - RNA, 22 nt, Human
aaaacaguuuaggcaucacagu

SEQ ID NO: 728503 - RNA, 22 nt, Human
guguuuauacagcaaagagcau

SEQ ID NO: 728504 - RNA, 22 nt, Human
ccugccuggcacauaguacucu

SEQ ID NO: 728505 - RNA, 22 nt, Human
cccagggguucuagaccagcuu

SEQ ID NO: 728506 - RNA, 22 nt, Human
acagcaguggguugccaguggg

SEQ ID NO: 728507 - RNA, 22 nt, Human
aaguggagccagggaaacugaa

SEQ ID NO: 728508 - RNA, 22 nt, Human
ucugaauucugacaauuugaau

SEQ ID NO: 728509 - RNA, 22 nt, Human
uacuuccagcaaucugcauauu

SEQ ID NO: 728510 - RNA, 22 nt, Human
gguaggcacuggugggaagaga

SEQ ID NO: 728511 - RNA, 22 nt, Human
ccagggaaggcugcuggcugug

SEQ ID NO: 728512 - RNA, 19 nt, Human
uuggaaggagccagagugg

SEQ ID NO: 728513 - RNA, 22 nt, Human
cacauguccugggaaaauaacu

SEQ ID NO: 728514 - RNA, 18 nt, Human
ucagggaagagaauauga

SEQ ID NO: 728515 - RNA, 22 nt, Human
cagcaugcaaguccagaugugg

SEQ ID NO: 728516 - RNA, 22 nt, Human
uaacauuagguagacauaagcc

SEQ ID NO: 728517 - RNA, 22 nt, Human
uuugggcaggcuuuucccuaga

SEQ ID NO: 728518 - RNA, 22 nt, Human
uaagcuucaaagaacauauugg

SEQ ID NO: 728519 - RNA, 23 nt, Human
aggguccagggaucaccaggugu

SEQ ID NO: 728520 - RNA, 22 nt, Human
aacuguaagacaaaugacuucu

SEQ ID NO: 728521 - RNA, 22 nt, Human
cagcuggcauaccugggcccgg

SEQ ID NO: 728522 - RNA, 22 nt, Human
uucugcauaggcuauauuuguu

SEQ ID NO: 728523 - RNA, 22 nt, Human
uuuaaaaucagaugggaguugg

SEQ ID NO: 728524 - RNA, 22 nt, Human
aaagugcugaagaccuagcugu

SEQ ID NO: 728525 - RNA, 22 nt, Human
ugguuaaguccagaaaggaagc

SEQ ID NO: 728526 - RNA, 22 nt, Human
ggguaggcugcuccuggggccc

SEQ ID NO: 728527 - RNA, 22 nt, Human
gcugccagccaacuugcugugc

SEQ ID NO: 728528 - RNA, 22 nt, Human
uauucuuguauacuacaaucuu

SEQ ID NO: 728529 - RNA, 22 nt, Human
accugcccagacucagauccua

SEQ ID NO: 728530 - RNA, 22 nt, Human
cgcuccuugagcgugucggccu

SEQ ID NO: 728531 - RNA, 22 nt, Human
agggaccuugauggguuuggga

SEQ ID NO: 728532 - RNA, 22 nt, Human
uccuuguaacguugggcugggg

SEQ ID NO: 728533 - RNA, 22 nt, Human
uauccauaccacuacuucccuu

SEQ ID NO: 728534 - RNA, 22 nt, Human
agacacugccacuucuguuccc

SEQ ID NO: 728535 - RNA, 22 nt, Human
aauuagaagggaguuauugaua

SEQ ID NO: 728536 - RNA, 22 nt, Human
gcucugggcugaaucauuuauc

SEQ ID NO: 728537 - RNA, 22 nt, Human
caggcuggagugcaauggcaca

SEQ ID NO: 728538 - RNA, 20 nt, Human
uccacaucuuuugagaugug

SEQ ID NO: 728539 - RNA, 22 nt, Human
cuguggcugcagaccuuaaaca

SEQ ID NO: 728540 - RNA, 22 nt, Human
cauggacucugguuuggggagc

SEQ ID NO: 728541 - RNA, 22 nt, Human
aaugccuuauaggcugaaaauu

SEQ ID NO: 728542 - RNA, 22 nt, Human
uuccaggggcagcagugauggu

SEQ ID NO: 728543 - RNA, 22 nt, Human
aagugacaccucuucccuuucc

SEQ ID NO: 728544 - RNA, 22 nt, Human
guacacagagugguggaagaaa

SEQ ID NO: 728545 - RNA, 22 nt, Human
caugaguuuuuuaguucaugca

SEQ ID NO: 728546 - RNA, 22 nt, Human
aucaccacuacaaacaucauug

SEQ ID NO: 728547 - RNA, 18 nt, Human
aguguuuauuuaggugaa

SEQ ID NO: 728548 - RNA, 22 nt, Human
uuucuagaggcuccaggggagu

SEQ ID NO: 728549 - RNA, 22 nt, Human
ucaauuacagcaaugacuguac

SEQ ID NO: 728550 - RNA, 22 nt, Human
ugggaaaguguugaggugucuu

SEQ ID NO: 728551 - RNA, 22 nt, Human
cacagucacauaucuaugugug

SEQ ID NO: 728552 - RNA, 22 nt, Human
uucugugcccauuuuaaaaugg

SEQ ID NO: 728553 - RNA, 19 nt, Human
cuggaauguggcuggugca

SEQ ID NO: 728554 - RNA, 22 nt, Human
augcuccucgagugucucacag

SEQ ID NO: 728555 - RNA, 22 nt, Human
cuugaaagcuuugcgucuucua

SEQ ID NO: 728556 - RNA, 22 nt, Human
ucuguuuaugugucuaaauaaa

SEQ ID NO: 728557 - RNA, 23 nt, Human
ggcuggugcccuuggccagucgg

SEQ ID NO: 728558 - RNA, 22 nt, Human
cugggcugcgggcgccccucca

SEQ ID NO: 728559 - RNA, 22 nt, Human
gagagcugggggacuguggaug

SEQ ID NO: 728560 - RNA, 22 nt, Human
aagcccugcagucucugccaca

SEQ ID NO: 728561 - RNA, 22 nt, Human
uugaacauuaacuucagucuau

SEQ ID NO: 728562 - RNA, 20 nt, Human
acagaauaugcugguugugg

SEQ ID NO: 728563 - RNA, 22 nt, Human
gggguggccuguaggcagcaug

SEQ ID NO: 728564 - RNA, 22 nt, Human
uagcugccauugcuccaggaag

SEQ ID NO: 728565 - RNA, 22 nt, Human
gacacauacagcaguaagucua

SEQ ID NO: 728566 - RNA, 22 nt, Human
uguggccaggaaaaggagaugg

SEQ ID NO: 728567 - RNA, 22 nt, Human
gagcuggacuuucagauacauc

SEQ ID NO: 728568 - RNA, 22 nt, Human
aguuuguaucaauuugcuuuau

SEQ ID NO: 728569 - RNA, 22 nt, Human
aggggagccccugguccuggug

SEQ ID NO: 728570 - RNA, 22 nt, Human
gcuucuugccuguguagagaau

SEQ ID NO: 728571 - RNA, 22 nt, Human
ugcuagugugugagauguucaa

SEQ ID NO: 728572 - RNA, 22 nt, Human
gucuacuuuuuaaucuuggcag

SEQ ID NO: 728573 - RNA, 19 nt, Human
gggaaauucacuugcuucc

SEQ ID NO: 728574 - RNA, 22 nt, Human
aagggccaucccagaacagaaa

SEQ ID NO: 728575 - RNA, 22 nt, Human
uugcuguaaguaucuuucuacc

SEQ ID NO: 728576 - RNA, 22 nt, Human
uaccagggaacagggauauuaa

SEQ ID NO: 728577 - RNA, 21 nt, Human
agaguaauuccugcuggaaag

SEQ ID NO: 728578 - RNA, 22 nt, Human
ccuguuugguacaaucugccaa

SEQ ID NO: 728579 - RNA, 22 nt, Human
aaauuucuaagcagccacuucc

SEQ ID NO: 728580 - RNA, 20 nt, Human
uacauuguagaaauauucaa

SEQ ID NO: 728581 - RNA, 22 nt, Human
cuaaacaugaacuacauuuagg

SEQ ID NO: 728582 - RNA, 22 nt, Human
cccaggaacagggcucagaccc

SEQ ID NO: 728583 - RNA, 22 nt, Human
uacauugcuagaaauguauuuu

SEQ ID NO: 728584 - RNA, 22 nt, Human
acacaugagaaacaucaguugu

SEQ ID NO: 728585 - RNA, 17 nt, Human
augcacauguaagagga

SEQ ID NO: 728586 - RNA, 22 nt, Human
acacuuugauagauaaugcagg

SEQ ID NO: 728587 - RNA, 20 nt, Human
uguggaugagguaaggauag

SEQ ID NO: 728588 - RNA, 22 nt, Human
cugcuuaaaaugcagauucugu

SEQ ID NO: 728589 - RNA, 22 nt, Human
aggaggguggccucaugugagu

SEQ ID NO: 728590 - RNA, 22 nt, Human
acaggguggggauggugagcuu

SEQ ID NO: 728591 - RNA, 22 nt, Human
gcucagggccauggaccagcag

SEQ ID NO: 728592 - RNA, 22 nt, Human
aaacauguuuagaaagcagcug

SEQ ID NO: 728593 - RNA, 22 nt, Human
ggccugccucacagucagcacc

SEQ ID NO: 728594 - RNA, 22 nt, Human
aaaguacugaugccaucagcac

SEQ ID NO: 728595 - RNA, 22 nt, Human
gcuucagaaauaucaucauuau

SEQ ID NO: 728596 - RNA, 22 nt, Human
cauuucuccugggugauaaauu

SEQ ID NO: 728597 - RNA, 21 nt, Human
cacugaggucagggguagggu

SEQ ID NO: 728598 - RNA, 23 nt, Human
uuccagaggaagaagucaugacu

SEQ ID NO: 728599 - RNA, 18 nt, Human
uucaggucagaaagaugg

SEQ ID NO: 728600 - RNA, 22 nt, Human
auugugcagaauuggaauugca

SEQ ID NO: 728601 - RNA, 22 nt, Human
uucuccucagcaaggcagcuuu

SEQ ID NO: 728602 - RNA, 23 nt, Human
aggcugagcucucccagcuucag

SEQ ID NO: 728603 - RNA, 21 nt, Human
cauuccucggcucauagagga

SEQ ID NO: 728604 - RNA, 22 nt, Human
uggcagggugccaguugcgagu

SEQ ID NO: 728605 - RNA, 22 nt, Human
aggagagagcugagcuuugcug

SEQ ID NO: 728606 - RNA, 22 nt, Human
ggguacuuaauauuuacggggu

SEQ ID NO: 728607 - RNA, 22 nt, Human
aguuauucauuuauucuguaca

SEQ ID NO: 728608 - RNA, 22 nt, Human
ccuguacacggucuaugccucc

SEQ ID NO: 728609 - RNA, 22 nt, Human
cagagguagccgagugcaaucg

SEQ ID NO: 728610 - RNA, 22 nt, Human
ugcaguggaaagacucagacuu

SEQ ID NO: 728611 - RNA, 22 nt, Human
ucagaggcaaagaacuuuauua

SEQ ID NO: 728612 - RNA, 20 nt, Human
gcuaggcuggugauugucaa

SEQ ID NO: 728613 - RNA, 22 nt, Human
uggggcugucccgguuuggcga

SEQ ID NO: 728614 - RNA, 22 nt, Human
auuugcugagcucaaagaaaag

SEQ ID NO: 728615 - RNA, 22 nt, Human
uguuacaacuauagaucccaag

SEQ ID NO: 728616 - RNA, 22 nt, Human
ggggaagaaaucuggguucuuc

SEQ ID NO: 728617 - RNA, 22 nt, Human
uagcugucaccagaaauggcca

SEQ ID NO: 728618 - RNA, 22 nt, Human
augcuguggaugccuugcccca

SEQ ID NO: 728619 - RNA, 22 nt, Human
uugauauuagaguauuuguuug

SEQ ID NO: 728620 - RNA, 22 nt, Human
guagcuucaaguacucucccug

SEQ ID NO: 728621 - RNA, 22 nt, Human
aacaguaguggucaauaugcca

SEQ ID NO: 728622 - RNA, 22 nt, Human
ccagucugugugccagccugcg

SEQ ID NO: 728623 - RNA, 22 nt, Human
acuuacaaucaaccaccuugga

SEQ ID NO: 728624 - RNA, 22 nt, Human
cacauauaccagccgcgguacg

SEQ ID NO: 728625 - RNA, 22 nt, Human
ugagcccuaagggucaagcagg

SEQ ID NO: 728626 - RNA, 22 nt, Human
aucucuguaauuacaugauauu

SEQ ID NO: 728627 - RNA, 22 nt, Human
uucuuuuccuguggcucaucca

SEQ ID NO: 728628 - RNA, 22 nt, Human
ggaggcucuaaacuuuccuugg

SEQ ID NO: 728629 - RNA, 22 nt, Human
auauguuuugugcuucauuggu

SEQ ID NO: 728630 - RNA, 19 nt, Human
acagaagcauagaaaagga

SEQ ID NO: 728631 - RNA, 22 nt, Human
agcuggcuuuaugguuggcuaa

SEQ ID NO: 728632 - RNA, 22 nt, Human
gagcucugccauggcucccacc

SEQ ID NO: 728633 - RNA, 22 nt, Human
aaugaagccagguagaagagaa

SEQ ID NO: 728634 - RNA, 22 nt, Human
cuggcuuugcuggacugggagu

SEQ ID NO: 728635 - RNA, 22 nt, Human
cacagagaauucccauauguga

SEQ ID NO: 728636 - RNA, 22 nt, Human
ucagaacauuugggacuuuggg

SEQ ID NO: 728637 - RNA, 22 nt, Human
auuuacagacccucccacuaag

SEQ ID NO: 728638 - RNA, 22 nt, Human
acugagguauaauugacauaac

SEQ ID NO: 728639 - RNA, 22 nt, Human
uguauauucacugagcaagggg

SEQ ID NO: 728640 - RNA, 22 nt, Human
caucaucuggcuuuuagaaaaa

SEQ ID NO: 728641 - RNA, 22 nt, Human
uauaugcaugcccauguauaca

SEQ ID NO: 728642 - RNA, 22 nt, Human
cugugacaguuucucagaauuu

SEQ ID NO: 728643 - RNA, 18 nt, Human
ccucagggagagagacgc

SEQ ID NO: 728644 - RNA, 22 nt, Human
cauucauucuguaaguaacuau

SEQ ID NO: 728645 - RNA, 22 nt, Human
gggagaaguggaaaucucauua

SEQ ID NO: 728646 - RNA, 19 nt, Human
ucauggaucagguaguuua

SEQ ID NO: 728647 - RNA, 20 nt, Human
ugccaggcacggagugcaug

SEQ ID NO: 728648 - RNA, 22 nt, Human
cugcuucacguugugccuuguu

SEQ ID NO: 728649 - RNA, 22 nt, Human
acagagcuaauguugcauaggc

SEQ ID NO: 728650 - RNA, 17 nt, Human
uaguaaaugaguagagc

SEQ ID NO: 728651 - RNA, 22 nt, Human
guccuguguguugccggcugaa

SEQ ID NO: 728652 - RNA, 22 nt, Human
ccucccuucaguagagcccaau

SEQ ID NO: 728653 - RNA, 22 nt, Human
aggcuuuaaguggccuacagcu

SEQ ID NO: 728654 - RNA, 22 nt, Human
cugcaguguucuggaaugcauu

SEQ ID NO: 728655 - RNA, 22 nt, Human
agagccuggcucccagcuaccg

SEQ ID NO: 728656 - RNA, 22 nt, Human
ccuuagugugccugaggcagau

SEQ ID NO: 728657 - RNA, 22 nt, Human
uugagucucugccaaaacacaa

SEQ ID NO: 728658 - RNA, 21 nt, Human
agcaggugaaccuccaguaca

SEQ ID NO: 728659 - RNA, 20 nt, Human
uaaggcuguuuuguauuccu

SEQ ID NO: 728660 - RNA, 22 nt, Human
aggaauguuuagaaugucagaa

SEQ ID NO: 728661 - RNA, 22 nt, Human
acagaaauauucguggugcuug

SEQ ID NO: 728662 - RNA, 22 nt, Human
uuucagugcuucuguuuaccgg

SEQ ID NO: 728663 - RNA, 21 nt, Human
cuucagcaaauacuuggcagg

SEQ ID NO: 728664 - RNA, 20 nt, Human
cuggggagccucgcgguggc

SEQ ID NO: 728665 - RNA, 22 nt, Human
ucugucuucuguagcuaauaau

SEQ ID NO: 728666 - RNA, 22 nt, Human
auaauuacauuauacuguuaga

SEQ ID NO: 728667 - RNA, 22 nt, Human
gagauucuaauauaaggauggg

SEQ ID NO: 728668 - RNA, 20 nt, Human
aaagauacuuuuuguaaugg

SEQ ID NO: 728669 - RNA, 22 nt, Human
ugcaccauuaauuuaugugaga

SEQ ID NO: 728670 - RNA, 21 nt, Human
agccuguugguuuacugcuca

SEQ ID NO: 728671 - RNA, 22 nt, Human
ucccugggccacagcugugagc

SEQ ID NO: 728672 - RNA, 22 nt, Human
cagaggggcugacacccuuggc

SEQ ID NO: 728673 - RNA, 22 nt, Human
agaggggcucauauccugucau

SEQ ID NO: 728674 - RNA, 22 nt, Human
cugggacccccacugcguagcu

SEQ ID NO: 728675 - RNA, 22 nt, Human
ggcaugggagugagcaaccuua

SEQ ID NO: 728676 - RNA, 19 nt, Human
ugagaaauuccacaggaug

SEQ ID NO: 728677 - RNA, 22 nt, Human
uuauuucuacuauuuugccuga

SEQ ID NO: 728678 - RNA, 22 nt, Human
uuccucagggcggaugggcagg

SEQ ID NO: 728679 - RNA, 22 nt, Human
aggagcuguuuuguucagcaaa

SEQ ID NO: 728680 - RNA, 22 nt, Human
ugcauauugugaaaauguagau

SEQ ID NO: 728681 - RNA, 22 nt, Human
uuccuaacucuggcaccuaguc

SEQ ID NO: 728682 - RNA, 22 nt, Human
ucacagugcacagcaggcgugg

SEQ ID NO: 728683 - RNA, 22 nt, Human
auguguuaaugucaaccagaaa

SEQ ID NO: 728684 - RNA, 22 nt, Human
augagaaaauucauuccaucca

SEQ ID NO: 728685 - RNA, 22 nt, Human
uaacagaaauuuuaguuagggg

SEQ ID NO: 728686 - RNA, 22 nt, Human
caaacugaacacgaaagucuuu

SEQ ID NO: 728687 - RNA, 22 nt, Human
aagcauuuuguuuuaagaauga

SEQ ID NO: 728688 - RNA, 22 nt, Human
ugguuggauggcucuuguggcu

SEQ ID NO: 728689 - RNA, 22 nt, Human
gcaggaugagugaguacauuua

SEQ ID NO: 728690 - RNA, 22 nt, Human
gugggcagacagugcuuugcag

SEQ ID NO: 728691 - RNA, 22 nt, Human
caugcacaugcaauagugcuuu

SEQ ID NO: 728692 - RNA, 22 nt, Human
ugcuaucaccaacucugcuaag

SEQ ID NO: 728693 - RNA, 20 nt, Human
cccagagccauagccagaca

SEQ ID NO: 728694 - RNA, 22 nt, Human
aauucaguuggcaaacaugcug

SEQ ID NO: 728695 - RNA, 22 nt, Human
uugugccuggcuuguauucaca

SEQ ID NO: 728696 - RNA, 22 nt, Human
cauuagggucucucagcugaau

SEQ ID NO: 728697 - RNA, 19 nt, Human
augagguagcagcuggugc

SEQ ID NO: 728698 - RNA, 22 nt, Human
gcuggcuggcgggugcguccuc

SEQ ID NO: 728699 - RNA, 22 nt, Human
ugaggcagugugagauaauaaa

SEQ ID NO: 728700 - RNA, 22 nt, Human
uugcagagugguugugaggauu

SEQ ID NO: 728701 - RNA, 22 nt, Human
ucauaaaaguacucauguucau

SEQ ID NO: 728702 - RNA, 21 nt, Human
ucaaaucagguaucacuauug

SEQ ID NO: 728703 - RNA, 20 nt, Human
acagaaagcugccuuguccc

SEQ ID NO: 728704 - RNA, 22 nt, Human
ugaaagaaacagguauauuggg

SEQ ID NO: 728705 - RNA, 22 nt, Human
aacucuuuguggacauuaaauu

SEQ ID NO: 728706 - RNA, 22 nt, Human
uuuuggcacugcgucuacaugg

SEQ ID NO: 728707 - RNA, 22 nt, Human
agugaaaucagguuuugacugc

SEQ ID NO: 728708 - RNA, 22 nt, Human
uauugccaaaugucugcuggaa

SEQ ID NO: 728709 - RNA, 22 nt, Human
uggcucuccagcucuaaggccu

SEQ ID NO: 728710 - RNA, 22 nt, Human
ggcaggcacugugcuaggcgcu

SEQ ID NO: 728711 - RNA, 22 nt, Human
cagggccaggcugauggccugg

SEQ ID NO: 728712 - RNA, 22 nt, Human
ccuggcagucaggggaguccuu

SEQ ID NO: 728713 - RNA, 22 nt, Human
ccuuucugauggccucccagcc

SEQ ID NO: 728714 - RNA, 22 nt, Human
ugcuggagagccuuggccaagg

SEQ ID NO: 728715 - RNA, 22 nt, Human
ucacauguguggcagugcaagu

SEQ ID NO: 728716 - RNA, 22 nt, Human
caggaaccuaaagagacauuac

SEQ ID NO: 728717 - RNA, 22 nt, Human
uggcugaguguuccaaggagca

SEQ ID NO: 728718 - RNA, 22 nt, Human
ucugaacagcauggaaucauuu

SEQ ID NO: 728719 - RNA, 22 nt, Human
uuuaggagucaaauguuuuagg

SEQ ID NO: 728720 - RNA, 22 nt, Human
uccaaagagcuuaggagagaaa

SEQ ID NO: 728721 - RNA, 22 nt, Human
gcugggucucucccugguccug

SEQ ID NO: 728722 - RNA, 22 nt, Human
gugucugcuuggucaucuuuca

SEQ ID NO: 728723 - RNA, 22 nt, Human
caauuucauuaauagauauaga

SEQ ID NO: 728724 - RNA, 21 nt, Human
gagauggcccaguagcgggcc

SEQ ID NO: 728725 - RNA, 22 nt, Human
acaaaaucaaaggagugauuca

SEQ ID NO: 728726 - RNA, 22 nt, Human
uccugcccagagcucuccacuc

SEQ ID NO: 728727 - RNA, 22 nt, Human
ugccuuuugaagccucacaggu

SEQ ID NO: 728728 - RNA, 22 nt, Human
ugucugggucaccccuccuggc

SEQ ID NO: 728729 - RNA, 22 nt, Human
augcugaagaaucacagggacu

SEQ ID NO: 728730 - RNA, 22 nt, Human
cauggcuucgucacagagggca

SEQ ID NO: 728731 - RNA, 22 nt, Human
acuuucuaggucucaguccuuu

SEQ ID NO: 728732 - RNA, 22 nt, Human
agcagcugaaaggcaaacuucu

SEQ ID NO: 728733 - RNA, 22 nt, Human
uuucuaaaugguggcugcauug

SEQ ID NO: 728734 - RNA, 22 nt, Human
ggccacaacuugcuccuagccc

SEQ ID NO: 728735 - RNA, 22 nt, Human
ugucaacagaucucaaagcugg

SEQ ID NO: 728736 - RNA, 22 nt, Human
ccuggcuuuuguuuauaaauuc

SEQ ID NO: 728737 - RNA, 22 nt, Human
ugucuugauuagaaugaugggc

SEQ ID NO: 728738 - RNA, 22 nt, Human
uuacagaagaguaacuuggcaa

SEQ ID NO: 728739 - RNA, 22 nt, Human
ugagccaguggaagauggcagu

SEQ ID NO: 728740 - RNA, 22 nt, Human
aagaaaguggguaauaugauuu

SEQ ID NO: 728741 - RNA, 22 nt, Human
aagucccugugggguggaggcu

SEQ ID NO: 728742 - RNA, 22 nt, Human
agaaguuaccacauacuucucu

SEQ ID NO: 728743 - RNA, 22 nt, Human
ucaggcagguggcuggcuaugg

SEQ ID NO: 728744 - RNA, 19 nt, Human
cugucccagacucugcucu

SEQ ID NO: 728745 - RNA, 18 nt, Human
uaucuuuuccagugguau

SEQ ID NO: 728746 - RNA, 22 nt, Human
acagggugacuuugugacagau

SEQ ID NO: 728747 - RNA, 22 nt, Human
aggcugcaggucugggucaugu

SEQ ID NO: 728748 - RNA, 22 nt, Human
ccuguguuucaccaaaagaguc

SEQ ID NO: 728749 - RNA, 22 nt, Human
caggaacaaucuuacuacuauu

SEQ ID NO: 728750 - RNA, 22 nt, Human
cagcuuuguggccuugaccucg

SEQ ID NO: 728751 - RNA, 22 nt, Human
auagaaucuuuguaaaacacuu

SEQ ID NO: 728752 - RNA, 22 nt, Human
caucuguuuccuaaucuguagc

SEQ ID NO: 728753 - RNA, 22 nt, Human
ucuacagacuccuauguaacac

SEQ ID NO: 728754 - RNA, 22 nt, Human
ugucacaugaaacuugcucauc

SEQ ID NO: 728755 - RNA, 22 nt, Human
aggggagcaaggccguggugua

SEQ ID NO: 728756 - RNA, 23 nt, Human
ccuccccuucccacagcugggug

SEQ ID NO: 728757 - RNA, 22 nt, Human
cccaggcagccccagaagcuug

SEQ ID NO: 728758 - RNA, 22 nt, Human
aggcaagcgcagaagcggagga

SEQ ID NO: 728759 - RNA, 22 nt, Human
agggcugacaaauggcagugac

SEQ ID NO: 728760 - RNA, 22 nt, Human
gugaacaaggagacuacaacuu

SEQ ID NO: 728761 - RNA, 22 nt, Human
ugugcugagugaucccauuccu

SEQ ID NO: 728762 - RNA, 22 nt, Human
ccagauguuccccuggaggccu

SEQ ID NO: 728763 - RNA, 22 nt, Human
uacaagaagaggcagagcugga

SEQ ID NO: 728764 - RNA, 22 nt, Human
ugguccuguagcacuugauuag

SEQ ID NO: 728765 - RNA, 22 nt, Human
cagcaaggucugucaauagugg

SEQ ID NO: 728766 - RNA, 18 nt, Human
uggcucugccacucaccg

SEQ ID NO: 728767 - RNA, 22 nt, Human
uaucuuagggaauuaacuaaaa

SEQ ID NO: 728768 - RNA, 22 nt, Human
cggcaggaccucauuuccuucu

SEQ ID NO: 728769 - RNA, 22 nt, Human
uaaagcccucugaucacacugg

SEQ ID NO: 728770 - RNA, 22 nt, Human
cugucugucaccaaaacagacu

SEQ ID NO: 728771 - RNA, 22 nt, Human
aaucaagagcugacuauauuuu

SEQ ID NO: 728772 - RNA, 19 nt, Human
cuggugcuugagugaguca

SEQ ID NO: 728773 - RNA, 22 nt, Human
ccugcagagggacuggcaggaa

SEQ ID NO: 728774 - RNA, 23 nt, Human
uccaggcugaaggagcagauuuu

SEQ ID NO: 728775 - RNA, 22 nt, Human
aaaugccucuggguuauucuag

SEQ ID NO: 728776 - RNA, 22 nt, Human
cacaucuacugauauuccagga

SEQ ID NO: 728777 - RNA, 22 nt, Human
gaaaugcagauucugauucugu

SEQ ID NO: 728778 - RNA, 22 nt, Human
cacgggcuguuuccaugcaaaa

SEQ ID NO: 728779 - RNA, 22 nt, Human
cuaaacuucuuggcaauuuuau

SEQ ID NO: 728780 - RNA, 22 nt, Human
gguggcauucagaagagcuggc

SEQ ID NO: 728781 - RNA, 22 nt, Human
aggacuuagaacauuauguacu

SEQ ID NO: 728782 - RNA, 22 nt, Human
aggcuccaggccucccugcaug

SEQ ID NO: 728783 - RNA, 22 nt, Human
uaggaaacucucagcuggucau

SEQ ID NO: 728784 - RNA, 22 nt, Human
aagcagagccugagacagggau

SEQ ID NO: 728785 - RNA, 22 nt, Human
augaaauuugaccaauuauuua

SEQ ID NO: 728786 - RNA, 22 nt, Human
caggcacagacgcaaacuucuu

SEQ ID NO: 728787 - RNA, 21 nt, Human
cugcucuggggaccggcugug

SEQ ID NO: 728788 - RNA, 22 nt, Human
aucuguuguuuguuugcuaaag

SEQ ID NO: 728789 - RNA, 22 nt, Human
cccaagagaucgcauguaguug

SEQ ID NO: 728790 - RNA, 22 nt, Human
ugcuggaaagagaguuucaaug

SEQ ID NO: 728791 - RNA, 22 nt, Human
cugagagaguaaaguagaauua

SEQ ID NO: 728792 - RNA, 22 nt, Human
ccaaaaagcucagagauauguu

SEQ ID NO: 728793 - RNA, 22 nt, Human
gcugagacuggcagcaggaagu

SEQ ID NO: 728794 - RNA, 22 nt, Human
agggcccaugugggagcacuug

SEQ ID NO: 728795 - RNA, 22 nt, Human
uuggcuuccugcacuugaguuu

SEQ ID NO: 728796 - RNA, 22 nt, Human
cuacauaaucuggauuugucug

SEQ ID NO: 728797 - RNA, 22 nt, Human
agacacuucauguaaguggaau

SEQ ID NO: 728798 - RNA, 22 nt, Human
cagggagaagucuggucagucc

SEQ ID NO: 728799 - RNA, 22 nt, Human
uuggcucagcugggacuguuga

SEQ ID NO: 728800 - RNA, 22 nt, Human
accaaagggcagaacaugagca

SEQ ID NO: 728801 - RNA, 22 nt, Human
cugugugccuccugugaucagg

SEQ ID NO: 728802 - RNA, 22 nt, Human
gagaaggaggcgaagcgugugc

SEQ ID NO: 728803 - RNA, 22 nt, Human
caggcagaaggaaguaccaggc

SEQ ID NO: 728804 - RNA, 22 nt, Human
aaagaugugccuguuucauagu

SEQ ID NO: 728805 - RNA, 22 nt, Human
uggaagccaggcccgcuccuaa

SEQ ID NO: 728806 - RNA, 21 nt, Human
ugaaugaugccccagaguugu

SEQ ID NO: 728807 - RNA, 22 nt, Human
caucuggguucucagauggaua

SEQ ID NO: 728808 - RNA, 22 nt, Human
uugaaaggguuaaagugguaaa

SEQ ID NO: 728809 - RNA, 22 nt, Human
ugaugcugagccugggacugac

SEQ ID NO: 728810 - RNA, 22 nt, Human
aauuaguauugcgauucauuag

SEQ ID NO: 728811 - RNA, 22 nt, Human
agccagcugugggcucaggcgg

SEQ ID NO: 728812 - RNA, 22 nt, Human
gccaggcccugggcacuucgug

SEQ ID NO: 728813 - RNA, 22 nt, Human
acagaauucucucugcagaggc

SEQ ID NO: 728814 - RNA, 22 nt, Human
ggcacagcucaggucccagcuc

SEQ ID NO: 728815 - RNA, 22 nt, Human
agggggugcuacuuccagaguu

SEQ ID NO: 728816 - RNA, 22 nt, Human
caucacugacgcugagauucca

SEQ ID NO: 728817 - RNA, 22 nt, Human
uggucugaagguggauuugaga

SEQ ID NO: 728818 - RNA, 22 nt, Human
aagagcauuuccacuggcacug

SEQ ID NO: 728819 - RNA, 22 nt, Human
gaacacauguccuccuuggauu

SEQ ID NO: 728820 - RNA, 22 nt, Human
cuucccagaccuuagagugcag

SEQ ID NO: 728821 - RNA, 19 nt, Human
uaggccagaaguuuuccac

SEQ ID NO: 728822 - RNA, 22 nt, Human
caaauagaagguacucagagaa

SEQ ID NO: 728823 - RNA, 22 nt, Human
gaagcagcucagauugacugaa

SEQ ID NO: 728824 - RNA, 22 nt, Human
uuacaaguauuuaagaugcugu

SEQ ID NO: 728825 - RNA, 22 nt, Human
uucuuuuccuacacagcgauuu

SEQ ID NO: 728826 - RNA, 22 nt, Human
augugugugcauuucucucccu

SEQ ID NO: 728827 - RNA, 22 nt, Human
uuccaaguuaggcgagcuggug

SEQ ID NO: 728828 - RNA, 22 nt, Human
aagcagucuuggcuggguucag

SEQ ID NO: 728829 - RNA, 18 nt, Human
uugagggaggggcagagu

SEQ ID NO: 728830 - RNA, 22 nt, Human
auuacaagggucugacuggagg

SEQ ID NO: 728831 - RNA, 22 nt, Human
uauggaaacuaauucauuuuuc

SEQ ID NO: 728832 - RNA, 22 nt, Human
uccugaaggcagauggggauca

SEQ ID NO: 728833 - RNA, 18 nt, Human
gagcuucaggcuaaccug

SEQ ID NO: 728834 - RNA, 22 nt, Human
ccucagagguucugugugggaa

SEQ ID NO: 728835 - RNA, 22 nt, Human
acauguaaacauuuacaguauu

SEQ ID NO: 728836 - RNA, 22 nt, Human
guuuacacauaacuccuaucaa

SEQ ID NO: 728837 - RNA, 22 nt, Human
uuucuuggagcucuuagggucg

SEQ ID NO: 728838 - RNA, 23 nt, Human
uaaccugaguuuuuuagaugcaa

SEQ ID NO: 728839 - RNA, 19 nt, Human
aaaaggagagaucagaguu

SEQ ID NO: 728840 - RNA, 22 nt, Human
ucuuuuggaaaugaugugcagg

SEQ ID NO: 728841 - RNA, 22 nt, Human
aucaggugaagucacugagugg

SEQ ID NO: 728842 - RNA, 22 nt, Human
gauuauuuugugcaauaaucgg

SEQ ID NO: 728843 - RNA, 22 nt, Human
ccuguucagagcuaagcaucau

SEQ ID NO: 728844 - RNA, 21 nt, Human
aaaguguguggggaagaagga

SEQ ID NO: 728845 - RNA, 22 nt, Human
aaagugcagggugcucugguau

SEQ ID NO: 728846 - RNA, 22 nt, Human
acauuuacccuggaacauugga

SEQ ID NO: 728847 - RNA, 22 nt, Human
cuacccuuaaguuucugugggg

SEQ ID NO: 728848 - RNA, 22 nt, Human
uuuagucuagucuccucagaaa

SEQ ID NO: 728849 - RNA, 22 nt, Human
gagacacagcagauauucaauc

SEQ ID NO: 728850 - RNA, 22 nt, Human
ggggaccuucccagagcaguug

SEQ ID NO: 728851 - RNA, 19 nt, Human
ugggcagugccagggcuua

SEQ ID NO: 728852 - RNA, 22 nt, Human
acagccugcugccugcuucuug

SEQ ID NO: 728853 - RNA, 22 nt, Human
uccaacuaggcacacagcuggu

SEQ ID NO: 728854 - RNA, 22 nt, Human
uuauuugaaucuggcuagagaa

SEQ ID NO: 728855 - RNA, 22 nt, Human
ugcuuuacaagccugcuuccuc

SEQ ID NO: 728856 - RNA, 23 nt, Human
aagucagagccaagucaaugaga

SEQ ID NO: 728857 - RNA, 22 nt, Human
aagcaggcaucuuggaggucaa

SEQ ID NO: 728858 - RNA, 21 nt, Human
uuguaaauggcuuuuuccuuc

SEQ ID NO: 728859 - RNA, 22 nt, Human
cugcacagagcggcaguucuua

SEQ ID NO: 728860 - RNA, 22 nt, Human
ggauggcauguugggcucuguu

SEQ ID NO: 728861 - RNA, 22 nt, Human
gggucucucucggcuccacgcg

SEQ ID NO: 728862 - RNA, 21 nt, Human
gcucccuggcugugugaccug

SEQ ID NO: 728863 - RNA, 22 nt, Human
cccaggguggaugcaagcagca

SEQ ID NO: 728864 - RNA, 20 nt, Human
ugucuuccagcagguguuua

SEQ ID NO: 728865 - RNA, 18 nt, Human
uggagcugagugcugugc

SEQ ID NO: 728866 - RNA, 22 nt, Human
aacagcaugcuggguaacauug

SEQ ID NO: 728867 - RNA, 22 nt, Human
aggccugagccccagguuuguu

SEQ ID NO: 728868 - RNA, 22 nt, Human
ggaggccaaagugugggcggcu

SEQ ID NO: 728869 - RNA, 22 nt, Human
acugggaagacuggaauugcuc

SEQ ID NO: 728870 - RNA, 22 nt, Human
gaggcugcuuuccuccuauccu

SEQ ID NO: 728871 - RNA, 22 nt, Human
uaauacaaggcaggaagcagua

SEQ ID NO: 728872 - RNA, 22 nt, Human
gagguggcaauuuaaugcaguc

SEQ ID NO: 728873 - RNA, 17 nt, Human
gcacugaacaauccugu

SEQ ID NO: 728874 - RNA, 22 nt, Human
gccuggcuaagcagaaggaccc

SEQ ID NO: 728875 - RNA, 22 nt, Human
ggagcuguugcgcaugcgcucg

SEQ ID NO: 728876 - RNA, 22 nt, Human
cugcugugagcacuccagccug

SEQ ID NO: 728877 - RNA, 22 nt, Human
aguaguggggccaggguuugaa

SEQ ID NO: 728878 - RNA, 22 nt, Human
agugauggagcuuccucugcua

SEQ ID NO: 728879 - RNA, 22 nt, Human
aagugugauuuguagaaugccu

SEQ ID NO: 728880 - RNA, 22 nt, Human
cuccuggaggcuccaagggaga

SEQ ID NO: 728881 - RNA, 22 nt, Human
gugccuggaacuggguaggcug

SEQ ID NO: 728882 - RNA, 21 nt, Human
auguacauucggcaacagaua

SEQ ID NO: 728883 - RNA, 22 nt, Human
uguuuacuuuuaauuaccuguc

SEQ ID NO: 728884 - RNA, 22 nt, Human
ccaggggcuggugcugagcugg

SEQ ID NO: 728885 - RNA, 22 nt, Human
augacugcucugggcucccaug

SEQ ID NO: 728886 - RNA, 20 nt, Human
auucacaaagccaguguugc

SEQ ID NO: 728887 - RNA, 22 nt, Human
agagccuugaagaucuggaaaa

SEQ ID NO: 728888 - RNA, 22 nt, Human
uuacagaaagguugugggauag

SEQ ID NO: 728889 - RNA, 22 nt, Human
auggccagagaaggcaggguca

SEQ ID NO: 728890 - RNA, 18 nt, Human
aggccacacuccagaaca

SEQ ID NO: 728891 - RNA, 22 nt, Human
gccacagggaggcguuuucagg

SEQ ID NO: 728892 - RNA, 21 nt, Human
aaggcuccuccucuaggccuc

SEQ ID NO: 728893 - RNA, 22 nt, Human
cucaguuuuugcugucugguuc

SEQ ID NO: 728894 - RNA, 22 nt, Human
ggucugaaaugugacuuuugaa

SEQ ID NO: 728895 - RNA, 22 nt, Human
aguguuuacucccugcccucca

SEQ ID NO: 728896 - RNA, 19 nt, Human
agucucacccaagcagucu

SEQ ID NO: 728897 - RNA, 22 nt, Human
ugcaggcuccaggugcacauau

SEQ ID NO: 728898 - RNA, 22 nt, Human
uacuaacuuguacacagccuaa

SEQ ID NO: 728899 - RNA, 22 nt, Human
aaagccacaguucuaugucugc

SEQ ID NO: 728900 - RNA, 22 nt, Human
ucuaggguugaggccacaggga

SEQ ID NO: 728901 - RNA, 22 nt, Human
agagaugcaggguacauggaau

SEQ ID NO: 728902 - RNA, 21 nt, Human
cuggaggcagguggugccagg

SEQ ID NO: 728903 - RNA, 22 nt, Human
aaguuuuucacauugcuguugu

SEQ ID NO: 728904 - RNA, 22 nt, Human
gagucagaauguccuccugcgg

SEQ ID NO: 728905 - RNA, 22 nt, Human
uguucccaagauaagauuauga

SEQ ID NO: 728906 - RNA, 22 nt, Human
caguuucuacgacuuaagcaca

SEQ ID NO: 728907 - RNA, 22 nt, Human
cagccuucgacaguuggaguag

SEQ ID NO: 728908 - RNA, 17 nt, Human
gucaacaggauuucuuu

SEQ ID NO: 728909 - RNA, 22 nt, Human
cuuuagguuuugccugagaucu

SEQ ID NO: 728910 - RNA, 22 nt, Human
agagccucugucauggagagaa

SEQ ID NO: 728911 - RNA, 22 nt, Human
acacauaugucauugaaaaauc

SEQ ID NO: 728912 - RNA, 22 nt, Human
cuguugcaucauggcucuuaau

SEQ ID NO: 728913 - RNA, 22 nt, Human
cacaggagaaaggggaagcucg

SEQ ID NO: 728914 - RNA, 22 nt, Human
auauagcacuuguuuugcaugu

SEQ ID NO: 728915 - RNA, 22 nt, Human
uacacagacucuucaauucaga

SEQ ID NO: 728916 - RNA, 22 nt, Human
gcagccagugggaugagaaaga

SEQ ID NO: 728917 - RNA, 19 nt, Human
ccugucugucuucagcuag

SEQ ID NO: 728918 - RNA, 22 nt, Human
gaaagguugggugaauggugga

SEQ ID NO: 728919 - RNA, 22 nt, Human
cuggugauuacaaugaugacaa

SEQ ID NO: 728920 - RNA, 22 nt, Human
ucugguuucccaguuccuccgu

SEQ ID NO: 728921 - RNA, 22 nt, Human
uuagcuuuucacuugcauuauc

SEQ ID NO: 728922 - RNA, 22 nt, Human
acaaacacgagacgccacugug

SEQ ID NO: 728923 - RNA, 22 nt, Human
ggccaggagcugcacagggcuc

SEQ ID NO: 728924 - RNA, 22 nt, Human
ggcuaggcucaccuggagaguu

SEQ ID NO: 728925 - RNA, 22 nt, Human
uagcacaaagagucuuucagag

SEQ ID NO: 728926 - RNA, 22 nt, Human
aucguaaagcccuauggcuuca

SEQ ID NO: 728927 - RNA, 20 nt, Human
agcugaggcaccugagguua

SEQ ID NO: 728928 - RNA, 22 nt, Human
cagggccagggcuauggugaag

SEQ ID NO: 728929 - RNA, 22 nt, Human
gccugaagaacagcugugagga

SEQ ID NO: 728930 - RNA, 22 nt, Human
auugaacauacauauccacacc

SEQ ID NO: 728931 - RNA, 22 nt, Human
uucaggauggaguaccuuuuau

SEQ ID NO: 728932 - RNA, 22 nt, Human
acucagaggcagcugcucaccc

SEQ ID NO: 728933 - RNA, 22 nt, Human
agcuguguuuccagaugguagc

SEQ ID NO: 728934 - RNA, 22 nt, Human
accagcuggucagggcuuuucu

SEQ ID NO: 728935 - RNA, 22 nt, Human
ugcaugugcccacucuggcuua

SEQ ID NO: 728936 - RNA, 23 nt, Human
auaauaacgucugucuugucucu

SEQ ID NO: 728937 - RNA, 22 nt, Human
ugaaaccucaaccaaagguuac

SEQ ID NO: 728938 - RNA, 22 nt, Human
uuaggaaguguguccagaagcg

SEQ ID NO: 728939 - RNA, 22 nt, Human
uugaaauacugcauuguucagu

SEQ ID NO: 728940 - RNA, 22 nt, Human
cagcuguguagaugcaggguca

SEQ ID NO: 728941 - RNA, 22 nt, Human
cucagcuggcaauucuggcucc

SEQ ID NO: 728942 - RNA, 22 nt, Human
cauguuucugagaaaaguagga

SEQ ID NO: 728943 - RNA, 22 nt, Human
gguggccaggccagcucuggcc

SEQ ID NO: 728944 - RNA, 22 nt, Human
ccugcuguccccugagccugga

SEQ ID NO: 728945 - RNA, 22 nt, Human
uuggacugagaguuccaccauu

SEQ ID NO: 728946 - RNA, 22 nt, Human
cugccugcucaccagggcucug

SEQ ID NO: 728947 - RNA, 22 nt, Human
gaaauaacagcucuggaagagu

SEQ ID NO: 728948 - RNA, 22 nt, Human
uugcaggaaacugagugugagc

SEQ ID NO: 728949 - RNA, 20 nt, Human
agucuggcaccuauuccugu

SEQ ID NO: 728950 - RNA, 22 nt, Human
aggcacagauuuggggaaagca

SEQ ID NO: 728951 - RNA, 22 nt, Human
ggucaugagggagcagugcagg

SEQ ID NO: 728952 - RNA, 22 nt, Human
aguccuggcucuacgggcuuca

SEQ ID NO: 728953 - RNA, 21 nt, Human
uuugcuucaauuccagaagcu

SEQ ID NO: 728954 - RNA, 23 nt, Human
auccaugcuuaaguaaucauuug

SEQ ID NO: 728955 - RNA, 22 nt, Human
ggucucuguuuggggcuggcaa

SEQ ID NO: 728956 - RNA, 22 nt, Human
uaaaaugaucucucauguucuu

SEQ ID NO: 728957 - RNA, 22 nt, Human
uaauacagauacaaaggaggac

SEQ ID NO: 728958 - RNA, 22 nt, Human
ugcuucaaggacacugacuuuu

SEQ ID NO: 728959 - RNA, 22 nt, Human
ugcuggcuuccugugcacagca

SEQ ID NO: 728960 - RNA, 22 nt, Human
uuuuccuucaccucuugagccu

SEQ ID NO: 728961 - RNA, 22 nt, Human
aaucuguugaugcaaaccuccc

SEQ ID NO: 728962 - RNA, 22 nt, Human
caguggccaugguggcaggggu

SEQ ID NO: 728963 - RNA, 22 nt, Human
aaggcacuagcaagcugccugg

SEQ ID NO: 728964 - RNA, 22 nt, Human
aauaagauccugaagauauguu

SEQ ID NO: 728965 - RNA, 22 nt, Human
aaaguugaccgaaagauuuuga

SEQ ID NO: 728966 - RNA, 22 nt, Human
ugcaggcuguuugguggaucuc

SEQ ID NO: 728967 - RNA, 22 nt, Human
ggagcuccuggcagugacagag

SEQ ID NO: 728968 - RNA, 22 nt, Human
ccagguacuugguaugcauuca

SEQ ID NO: 728969 - RNA, 22 nt, Human
ucucacagcaucauugcucaug

SEQ ID NO: 728970 - RNA, 23 nt, Human
ggcagcucucaucugaugacuga

SEQ ID NO: 728971 - RNA, 22 nt, Human
ugggcagacgggagcuugccuu

SEQ ID NO: 728972 - RNA, 22 nt, Human
ucaguauagcuaaaaguuuguc

SEQ ID NO: 728973 - RNA, 22 nt, Human
gaaguauaugucuuuaaucuau

SEQ ID NO: 728974 - RNA, 22 nt, Human
uuggaaggaccaggccuugauu

SEQ ID NO: 728975 - RNA, 22 nt, Human
ggcuggguacagggcagugugc

SEQ ID NO: 728976 - RNA, 22 nt, Human
uaggcuggggguaggaauugag

SEQ ID NO: 728977 - RNA, 22 nt, Human
auucucuguggugaugcuggug

SEQ ID NO: 728978 - RNA, 22 nt, Human
gccucaugagggaucugcccuc

SEQ ID NO: 728979 - RNA, 22 nt, Human
gggguagggcgauugcugcuuu

SEQ ID NO: 728980 - RNA, 22 nt, Human
agagggcugcugcacagugcuc

SEQ ID NO: 728981 - RNA, 22 nt, Human
ucagacagaaggacuauuugaa

SEQ ID NO: 728982 - RNA, 22 nt, Human
agcaggcuaaucuugcugaaca

SEQ ID NO: 728983 - RNA, 22 nt, Human
guggucagugguacaguuugaa

SEQ ID NO: 728984 - RNA, 22 nt, Human
uaugcacacauuagcacagggu

SEQ ID NO: 728985 - RNA, 22 nt, Human
cagggcacggagaagucacccc

SEQ ID NO: 728986 - RNA, 22 nt, Human
uuguaauggagcaaacagguug

SEQ ID NO: 728987 - RNA, 22 nt, Human
ugaggccagagaguuugcauuu

SEQ ID NO: 728988 - RNA, 22 nt, Human
agagcccugccaauggaugagg

SEQ ID NO: 728989 - RNA, 22 nt, Human
ccucagcugcugcacagcuuuu

SEQ ID NO: 728990 - RNA, 22 nt, Human
agugaacuguggcccgugaacu

SEQ ID NO: 728991 - RNA, 22 nt, Human
uacagagagauaaguguaaaag

SEQ ID NO: 728992 - RNA, 22 nt, Human
uauccaaaguggcauauuauag

SEQ ID NO: 728993 - RNA, 22 nt, Human
gcccccucaaagaggaagcucu

SEQ ID NO: 728994 - RNA, 21 nt, Human
aauacagugaagaauuucuuu

SEQ ID NO: 728995 - RNA, 22 nt, Human
aggaguggaauuacuggguucu

SEQ ID NO: 728996 - RNA, 22 nt, Human
guggaagggucacagccccuac

SEQ ID NO: 728997 - RNA, 22 nt, Human
gucucuuuuauggugaguugau

SEQ ID NO: 728998 - RNA, 22 nt, Human
aaguugauuaaucuuucgagaa

SEQ ID NO: 728999 - RNA, 22 nt, Human
ugucagggcaugcgguccagcc

SEQ ID NO: 729000 - RNA, 22 nt, Human
cugaggcaccuacagucucggg

SEQ ID NO: 729001 - RNA, 22 nt, Human
aucaugacauacuuuugagaag

SEQ ID NO: 729002 - RNA, 22 nt, Human
ucaagaaacugugcuacagagu

SEQ ID NO: 729003 - RNA, 22 nt, Human
gagccugcaggccucggccuca

SEQ ID NO: 729004 - RNA, 22 nt, Human
uguucucucuggcugccaguac

SEQ ID NO: 729005 - RNA, 22 nt, Human
uggucccuagcacagcuguccu

SEQ ID NO: 729006 - RNA, 22 nt, Human
aguucuuugucaucucuggagu

SEQ ID NO: 729007 - RNA, 22 nt, Human
aaucuuuaaggacucagucucu

SEQ ID NO: 729008 - RNA, 22 nt, Human
guguccaucagcagccacugug

SEQ ID NO: 729009 - RNA, 22 nt, Human
acauuuaaccaaacuguuuaau

SEQ ID NO: 729010 - RNA, 22 nt, Human
uggcuucaguuucccagucugg

SEQ ID NO: 729011 - RNA, 22 nt, Human
uuuacuaagcccaguuauaugc

SEQ ID NO: 729012 - RNA, 23 nt, Human
cccugcccauugagcaggacguc

SEQ ID NO: 729013 - RNA, 22 nt, Human
ugguaaauauguccauucucuu

SEQ ID NO: 729014 - RNA, 20 nt, Human
uugcagcagugaggugaagg

SEQ ID NO: 729015 - RNA, 22 nt, Human
guguaauugaaauugagaacca

SEQ ID NO: 729016 - RNA, 22 nt, Human
ucagcaggcagugggucacaau

SEQ ID NO: 729017 - RNA, 22 nt, Human
gugugugccaacuuuaugugca

SEQ ID NO: 729018 - RNA, 21 nt, Human
aauggaaguuuaaagguaucc

SEQ ID NO: 729019 - RNA, 20 nt, Human
ggcagaugcagagcuaugca

SEQ ID NO: 729020 - RNA, 22 nt, Human
uagugucugaaugcaccuguuu

SEQ ID NO: 729021 - RNA, 22 nt, Human
cuuuggcaugguccucacuaua

SEQ ID NO: 729022 - RNA, 22 nt, Human
uugggggcauauugaguagugg

SEQ ID NO: 729023 - RNA, 22 nt, Human
agagaagacuuacagccacagu

SEQ ID NO: 729024 - RNA, 22 nt, Human
cuggaugcugagagguaccaag

SEQ ID NO: 729025 - RNA, 22 nt, Human
uuagugugcauggaugccucaa

SEQ ID NO: 729026 - RNA, 22 nt, Human
ugaagaauaaaugguugagacu

SEQ ID NO: 729027 - RNA, 22 nt, Human
uuuaguguaagcauaaagaaca

SEQ ID NO: 729028 - RNA, 22 nt, Human
agcagcugccacuggaauagga

SEQ ID NO: 729029 - RNA, 23 nt, Human
acugccugcuacuaugcccacgg

SEQ ID NO: 729030 - RNA, 22 nt, Human
gcacacuggagccuggaagauu

SEQ ID NO: 729031 - RNA, 19 nt, Human
agggcggggcccaggcaca

SEQ ID NO: 729032 - RNA, 22 nt, Human
uacaauaugugaacuuuggugu

SEQ ID NO: 729033 - RNA, 22 nt, Human
cucuauuuauggcaucuuuaug

SEQ ID NO: 729034 - RNA, 22 nt, Human
cucaguuugaaugcugacacug

SEQ ID NO: 729035 - RNA, 20 nt, Human
ucuguagucuguggcaagac

SEQ ID NO: 729036 - RNA, 22 nt, Human
guuuuuaucuaauagcaguuau

SEQ ID NO: 729037 - RNA, 22 nt, Human
gcugcccuagaaguacagagag

SEQ ID NO: 729038 - RNA, 22 nt, Human
aaagguuugccgaccucugcuu

SEQ ID NO: 729039 - RNA, 19 nt, Human
ccagaagggcagcuaugga

SEQ ID NO: 729040 - RNA, 22 nt, Human
ccugaagaaaauuccacgagaa

SEQ ID NO: 729041 - RNA, 22 nt, Human
gaaauucacuguauuucuuggg

SEQ ID NO: 729042 - RNA, 22 nt, Human
ugacugaaggacuagauugauu

SEQ ID NO: 729043 - RNA, 22 nt, Human
gagcuaguagaacaagugagga

SEQ ID NO: 729044 - RNA, 19 nt, Human
uuuaccuucuugagagcag

SEQ ID NO: 729045 - RNA, 22 nt, Human
uuugagaagcugucuugggcuc

SEQ ID NO: 729046 - RNA, 22 nt, Human
ccaggcacuuguuugccaggca

SEQ ID NO: 729047 - RNA, 22 nt, Human
uugaguucagggguugauugga

SEQ ID NO: 729048 - RNA, 22 nt, Human
gcuuuuauuucuucacaaaagu

SEQ ID NO: 729049 - RNA, 22 nt, Human
ggaagaaagcacacaaacuuga

SEQ ID NO: 729050 - RNA, 22 nt, Human
ugggaaguaggacagugcaguu

SEQ ID NO: 729051 - RNA, 21 nt, Human
agguggagugcuuagcaucca

SEQ ID NO: 729052 - RNA, 22 nt, Human
cagucuggcacagcacacugaa

SEQ ID NO: 729053 - RNA, 22 nt, Human
gucuggcauaugcaaagugcau

SEQ ID NO: 729054 - RNA, 22 nt, Human
gagguauguaugcuacauucuu

SEQ ID NO: 729055 - RNA, 22 nt, Human
acacugcagaugaaagcauaag

SEQ ID NO: 729056 - RNA, 22 nt, Human
caggcugggcagccuccccggc

SEQ ID NO: 729057 - RNA, 22 nt, Human
uacugugguuacugcuauuaga

SEQ ID NO: 729058 - RNA, 22 nt, Human
auacuuuagagcuagauugccu

SEQ ID NO: 729059 - RNA, 22 nt, Human
cauacauacugaguggacugau

SEQ ID NO: 729060 - RNA, 22 nt, Human
caguuuagcaaauuuguaucaa

SEQ ID NO: 729061 - RNA, 22 nt, Human
ucucagggcgcagugaggcagu

SEQ ID NO: 729062 - RNA, 22 nt, Human
ucccugugagaaaugaagcagg

SEQ ID NO: 729063 - RNA, 22 nt, Human
ugauugcugaauuuuaggaacu

SEQ ID NO: 729064 - RNA, 22 nt, Human
cuacauuuugugauuaugaaau

SEQ ID NO: 729065 - RNA, 22 nt, Human
auuuguuucagggccuugguau

SEQ ID NO: 729066 - RNA, 22 nt, Human
uccgcagaggaggaguugcugu

SEQ ID NO: 729067 - RNA, 18 nt, Human
agccuggaggguugaagu

SEQ ID NO: 729068 - RNA, 22 nt, Human
ccucucuguagcagcccccagu

SEQ ID NO: 729069 - RNA, 22 nt, Human
augaccagacucucaguggggu

SEQ ID NO: 729070 - RNA, 22 nt, Human
cuggcuuugaaaugcauuucag

SEQ ID NO: 729071 - RNA, 21 nt, Human
ugcauauucuucugguggcug

SEQ ID NO: 729072 - RNA, 22 nt, Human
uggugaggucauagagaacugu

SEQ ID NO: 729073 - RNA, 22 nt, Human
uuuguucuuaguaucugugugc

SEQ ID NO: 729074 - RNA, 22 nt, Human
uguguacaagaguguuuacugu

SEQ ID NO: 729075 - RNA, 22 nt, Human
cauuugaaugagauugcuguaa

SEQ ID NO: 729076 - RNA, 22 nt, Human
uggcucaguuucugcccagcug

SEQ ID NO: 729077 - RNA, 22 nt, Human
cagcacaguagaguaguuguaa

SEQ ID NO: 729078 - RNA, 22 nt, Human
uaacauucuuaacuuagaaaca

SEQ ID NO: 729079 - RNA, 22 nt, Human
uggccacucagggaugcaggaa

SEQ ID NO: 729080 - RNA, 22 nt, Human
uugugcccucaaagggugcguc

SEQ ID NO: 729081 - RNA, 22 nt, Human
agugaauuguugccacagagac

SEQ ID NO: 729082 - RNA, 22 nt, Human
uagcacaaguaucugcuuuucc

SEQ ID NO: 729083 - RNA, 22 nt, Human
uuuccauguuggugaaaugagg

SEQ ID NO: 729084 - RNA, 22 nt, Human
cugugcuugacagugggaagca

SEQ ID NO: 729085 - RNA, 20 nt, Human
ugggauuguuuuuuagcuuc

SEQ ID NO: 729086 - RNA, 22 nt, Human
caaagugcagaaggaacugggu

SEQ ID NO: 729087 - RNA, 22 nt, Human
aagaugguuauuucaucaccua

SEQ ID NO: 729088 - RNA, 22 nt, Human
agguuuacugagggugcugguu

SEQ ID NO: 729089 - RNA, 22 nt, Human
gcccucuguguaacaauccaga

SEQ ID NO: 729090 - RNA, 22 nt, Human
cacagugcacuaagcuccgggg

SEQ ID NO: 729091 - RNA, 22 nt, Human
uucacuuaacaucauaucauga

SEQ ID NO: 729092 - RNA, 22 nt, Human
ccugggcaucucaugcaccugc

SEQ ID NO: 729093 - RNA, 22 nt, Human
aacagaguggagccaaacuuug

SEQ ID NO: 729094 - RNA, 20 nt, Human
aguggcugauggaaagaagc

SEQ ID NO: 729095 - RNA, 22 nt, Human
augagcauccagaacagugccu

SEQ ID NO: 729096 - RNA, 19 nt, Human
aggugaggggcaccauguc

SEQ ID NO: 729097 - RNA, 18 nt, Human
aguccuggagaucaccaa

SEQ ID NO: 729098 - RNA, 22 nt, Human
ugugauucaagaaaguaaaaug

SEQ ID NO: 729099 - RNA, 17 nt, Human
agcaggcugcagaggcc

SEQ ID NO: 729100 - RNA, 22 nt, Human
aaccauuagucaaucagcaaga

SEQ ID NO: 729101 - RNA, 22 nt, Human
ugcaaagaaggggaggaggauu

SEQ ID NO: 729102 - RNA, 22 nt, Human
ugucccagucaaggcugucauc

SEQ ID NO: 729103 - RNA, 22 nt, Human
agagagggaauauuugggguau

SEQ ID NO: 729104 - RNA, 22 nt, Human
acacggcacuuuaggaaggggc

SEQ ID NO: 729105 - RNA, 22 nt, Human
acugagacugccccuguaacaa

SEQ ID NO: 729106 - RNA, 22 nt, Human
cugggucuaaaaauucucagau

SEQ ID NO: 729107 - RNA, 22 nt, Human
aggucucaauuccugcuccugu

SEQ ID NO: 729108 - RNA, 22 nt, Human
aucuggguuucaaagaagccuu

SEQ ID NO: 729109 - RNA, 19 nt, Human
uucugggcauucauauuua

SEQ ID NO: 729110 - RNA, 22 nt, Human
ggccucuucugcucauacuuuc

SEQ ID NO: 729111 - RNA, 22 nt, Human
aggagagagaacacuugggucc

SEQ ID NO: 729112 - RNA, 22 nt, Human
uuuaccauccucuuuuagaauu

SEQ ID NO: 729113 - RNA, 22 nt, Human
aaugcacacauuugguacugaa

SEQ ID NO: 729114 - RNA, 22 nt, Human
ggguggcaaaggcgcugaaagg

SEQ ID NO: 729115 - RNA, 22 nt, Human
ucugucugggugccucgaguac

SEQ ID NO: 729116 - RNA, 22 nt, Human
acagugaggaagcagcugugcu

SEQ ID NO: 729117 - RNA, 22 nt, Human
gaaggucaccuccccucucugg

SEQ ID NO: 729118 - RNA, 22 nt, Human
uuggaauccugagaugagaauu

SEQ ID NO: 729119 - RNA, 22 nt, Human
cauucacaaaaccacaugccau

SEQ ID NO: 729120 - RNA, 22 nt, Human
ucaaggaagauagcuauuauga

SEQ ID NO: 729121 - RNA, 22 nt, Human
aagcagcaaguuuauuucuauc

SEQ ID NO: 729122 - RNA, 17 nt, Human
aggcagcucagaacauc

SEQ ID NO: 729123 - RNA, 22 nt, Human
cauuagggacugaggaauaagg

SEQ ID NO: 729124 - RNA, 22 nt, Human
gcacagagguggaggacaaaua

SEQ ID NO: 729125 - RNA, 22 nt, Human
cugcagagggguugaagggucc

SEQ ID NO: 729126 - RNA, 22 nt, Human
gugagaguaccaccucaacauc

SEQ ID NO: 729127 - RNA, 22 nt, Human
uucagaaagguaaauggauuuc

SEQ ID NO: 729128 - RNA, 22 nt, Human
cuuuccagaccuccuuguagcu

SEQ ID NO: 729129 - RNA, 22 nt, Human
ccagagguccugugaugcugca

SEQ ID NO: 729130 - RNA, 22 nt, Human
cggcuggagcugagaaaggagc

SEQ ID NO: 729131 - RNA, 22 nt, Human
aggaacccggucugucacugug

SEQ ID NO: 729132 - RNA, 15 nt, Human
aucucucuagcugcu

SEQ ID NO: 729133 - RNA, 22 nt, Human
uuacauuuugggguaaggauaa

SEQ ID NO: 729134 - RNA, 22 nt, Human
ugagaacugaggauuugaauuc

SEQ ID NO: 729135 - RNA, 22 nt, Human
cucaucugucugggcugguuuu

SEQ ID NO: 729136 - RNA, 23 nt, Human
augcagagaauaacaaaugccau

SEQ ID NO: 729137 - RNA, 22 nt, Human
aauacagaggcuuccaguaaaa

SEQ ID NO: 729138 - RNA, 22 nt, Human
cauccugacaagaaagccagaa

SEQ ID NO: 729139 - RNA, 20 nt, Human
ucuggccccuuccuguccug

SEQ ID NO: 729140 - RNA, 22 nt, Human
uccagcucaaagugcuccuguc

SEQ ID NO: 729141 - RNA, 22 nt, Human
aggagccagcguuccucaggau

SEQ ID NO: 729142 - RNA, 22 nt, Human
cuucucagaucucagcuuugag

SEQ ID NO: 729143 - RNA, 22 nt, Human
uaggacagaguucccugauggc

SEQ ID NO: 729144 - RNA, 22 nt, Human
ucuccugcucagaacagccuca

SEQ ID NO: 729145 - RNA, 22 nt, Human
aaguuucuguucauaucucuga

SEQ ID NO: 729146 - RNA, 22 nt, Human
ugauggaaauauugacaccaca

SEQ ID NO: 729147 - RNA, 22 nt, Human
uuucugucugacaucccugccu

SEQ ID NO: 729148 - RNA, 22 nt, Human
gaaacacuaugccaagacaggg

SEQ ID NO: 729149 - RNA, 22 nt, Human
uggggagucgcugcagagcgau

SEQ ID NO: 729150 - RNA, 23 nt, Human
aggcagguuugggcucuucuugu

SEQ ID NO: 729151 - RNA, 22 nt, Human
gcagcagccacuauucuggcau

SEQ ID NO: 729152 - RNA, 22 nt, Human
uugaacaguuuugucagguuca

SEQ ID NO: 729153 - RNA, 22 nt, Human
uagggucccagauaggagccag

SEQ ID NO: 729154 - RNA, 22 nt, Human
ucuauuuaccaaauguaguucc

SEQ ID NO: 729155 - RNA, 22 nt, Human
ggcggugguugagaggacggcg

SEQ ID NO: 729156 - RNA, 22 nt, Human
uggauuugcuaccuucugauau

SEQ ID NO: 729157 - RNA, 20 nt, Human
gcugaccauaaaucacacug

SEQ ID NO: 729158 - RNA, 22 nt, Human
uccucuggauauaagccucacc

SEQ ID NO: 729159 - RNA, 22 nt, Human
uuguagaaucauuauuucuagu

SEQ ID NO: 729160 - RNA, 22 nt, Human
cccagagaaucuuucagaaagg

SEQ ID NO: 729161 - RNA, 22 nt, Human
cacugagaccagagucccugac

SEQ ID NO: 729162 - RNA, 22 nt, Human
auggcaggaugagacaacaauu

SEQ ID NO: 729163 - RNA, 22 nt, Human
ucauacaacuaagaguuucaga

SEQ ID NO: 729164 - RNA, 22 nt, Human
aagauucuuaccuauacccagu

SEQ ID NO: 729165 - RNA, 22 nt, Human
gcagcaggagaguuuguccugc

SEQ ID NO: 729166 - RNA, 17 nt, Human
aggcaccucuuccugcu

SEQ ID NO: 729167 - RNA, 22 nt, Human
ugaguuauugcagcuuccuccu

SEQ ID NO: 729168 - RNA, 20 nt, Human
ggaagccagggugcagggga

SEQ ID NO: 729169 - RNA, 22 nt, Human
ugaaaucauugggguugaauaa

SEQ ID NO: 729170 - RNA, 22 nt, Human
cgugucuguguaugcaggccgu

SEQ ID NO: 729171 - RNA, 22 nt, Human
uaacagaagaaaacauauugga

SEQ ID NO: 729172 - RNA, 22 nt, Human
uuaguugauagccaaaauuuau

SEQ ID NO: 729173 - RNA, 22 nt, Human
acaucugggccuaaggcuauau

SEQ ID NO: 729174 - RNA, 22 nt, Human
gcaaugcauaacagagugggcc

SEQ ID NO: 729175 - RNA, 22 nt, Human
guaguaauaguacauuagaaug

SEQ ID NO: 729176 - RNA, 17 nt, Human
agcaggaccccagagca

SEQ ID NO: 729177 - RNA, 22 nt, Human
ggaagccaguugcuuggugugg

SEQ ID NO: 729178 - RNA, 22 nt, Human
uggcauggguggagagagcaca

SEQ ID NO: 729179 - RNA, 22 nt, Human
caaauguuugguggcauuuugu

SEQ ID NO: 729180 - RNA, 22 nt, Human
uuucacauacaguguauaguag

SEQ ID NO: 729181 - RNA, 22 nt, Human
ucaaguuaggugguuguuagga

SEQ ID NO: 729182 - RNA, 22 nt, Human
ugauucaauaggaauugaguag

SEQ ID NO: 729183 - RNA, 22 nt, Human
acuacaaaagcacuggguauua

SEQ ID NO: 729184 - RNA, 22 nt, Human
gcugucucggggcuuucuccug

SEQ ID NO: 729185 - RNA, 22 nt, Human
accaggaauauuuugcucauuu

SEQ ID NO: 729186 - RNA, 22 nt, Human
uugggcaaaguguuucuggagc

SEQ ID NO: 729187 - RNA, 22 nt, Human
aaaugugugcacaaagacagcu

SEQ ID NO: 729188 - RNA, 22 nt, Human
uuuaaaccuccugauucagcua

SEQ ID NO: 729189 - RNA, 22 nt, Human
cccagagcugauuguuggagcc

SEQ ID NO: 729190 - RNA, 22 nt, Human
aaugcaccuuggcagggauuca

SEQ ID NO: 729191 - RNA, 22 nt, Human
uccccacagcagaagaucugag

SEQ ID NO: 729192 - RNA, 22 nt, Human
guaagaggagugggaagccuca

SEQ ID NO: 729193 - RNA, 22 nt, Human
ccuuuccugccucaggaaguag

SEQ ID NO: 729194 - RNA, 22 nt, Human
ggaaagccaggugcucuggugu

SEQ ID NO: 729195 - RNA, 22 nt, Human
gauggagugccaggguggaacu

SEQ ID NO: 729196 - RNA, 22 nt, Human
uuucaacaccagagaccaugcg

SEQ ID NO: 729197 - RNA, 22 nt, Human
cuauacacuuuuugaaaauaga

SEQ ID NO: 729198 - RNA, 22 nt, Human
aguggggaguuuccagaugugu

SEQ ID NO: 729199 - RNA, 22 nt, Human
cgugggaggaaaaaugggcuuc

SEQ ID NO: 729200 - RNA, 22 nt, Human
ccacauacaaauggggugcugu

SEQ ID NO: 729201 - RNA, 23 nt, Human
gcuugccugguguguggcugacc

SEQ ID NO: 729202 - RNA, 22 nt, Human
agacuggaagccugccaagcaa

SEQ ID NO: 729203 - RNA, 21 nt, Human
ucugagaacuucugcugcagc

SEQ ID NO: 729204 - RNA, 22 nt, Human
augaguuaggggccugagugga

SEQ ID NO: 729205 - RNA, 23 nt, Human
ccucagggucuagcagagagaag

SEQ ID NO: 729206 - RNA, 22 nt, Human
ucagugcuugccucuggaggag

SEQ ID NO: 729207 - RNA, 22 nt, Human
acagugaaugcccaagaaaagu

SEQ ID NO: 729208 - RNA, 22 nt, Human
ucuccuggcucuaaaaggcugu

SEQ ID NO: 729209 - RNA, 22 nt, Human
gcaguccuggaggaagguguga

SEQ ID NO: 729210 - RNA, 22 nt, Human
agguucagugccuggaacaggg

SEQ ID NO: 729211 - RNA, 22 nt, Human
agguuuauaggaaauuuguucc

SEQ ID NO: 729212 - RNA, 18 nt, Human
gcagcaaagggcccgggg

SEQ ID NO: 729213 - RNA, 22 nt, Human
agcucagggcgaucugucucgg

SEQ ID NO: 729214 - RNA, 22 nt, Human
acucauuugcaugaugugcuau

SEQ ID NO: 729215 - RNA, 22 nt, Human
cuuggugcauuacucaaucugu

SEQ ID NO: 729216 - RNA, 22 nt, Human
uacuauaaagucuuaaugaguc

SEQ ID NO: 729217 - RNA, 22 nt, Human
agggccugugaauucucccugc

SEQ ID NO: 729218 - RNA, 22 nt, Human
uuuguucagcucucauugauua

SEQ ID NO: 729219 - RNA, 22 nt, Human
ucaguuuuuaagaguuaugcga

SEQ ID NO: 729220 - RNA, 22 nt, Human
cccugccuugggguccacaccg

SEQ ID NO: 729221 - RNA, 22 nt, Human
auucaguaggugugaacuuauu

SEQ ID NO: 729222 - RNA, 22 nt, Human
cugucucuguugccuguaggug

SEQ ID NO: 729223 - RNA, 21 nt, Human
uuguuacauucuuauggcaua

SEQ ID NO: 729224 - RNA, 22 nt, Human
agauacaaaagauaagauuuag

SEQ ID NO: 729225 - RNA, 20 nt, Human
gagccugggaagucuaaggu

SEQ ID NO: 729226 - RNA, 22 nt, Human
aagcagagagcagaauuaaguu

SEQ ID NO: 729227 - RNA, 22 nt, Human
cuugggugcucagggaaagcuu

SEQ ID NO: 729228 - RNA, 22 nt, Human
cuuggucauuucuuguccuguu

SEQ ID NO: 729229 - RNA, 22 nt, Human
cagugauucagacucaucauuu

SEQ ID NO: 729230 - RNA, 22 nt, Human
ggaggccaaggcagguggaucg

SEQ ID NO: 729231 - RNA, 22 nt, Human
uggggugacagugcagugguca

SEQ ID NO: 729232 - RNA, 22 nt, Human
caaugcauacuucgaaauuuca

SEQ ID NO: 729233 - RNA, 22 nt, Human
acaaaguuauucuuucagagga

SEQ ID NO: 729234 - RNA, 22 nt, Human
uccuucaccuuagcccuccuag

SEQ ID NO: 729235 - RNA, 22 nt, Human
caucuaaauuugacuccaagga

SEQ ID NO: 729236 - RNA, 23 nt, Human
ggguccagagaagccauuagggc

SEQ ID NO: 729237 - RNA, 22 nt, Human
uaacaauacccauucuaauuac

SEQ ID NO: 729238 - RNA, 22 nt, Human
acaaaguuugugguauuccaag

SEQ ID NO: 729239 - RNA, 22 nt, Human
cuggagccuucaccaggggaaa

SEQ ID NO: 729240 - RNA, 22 nt, Human
ccuugucuugcacagaugcagc

SEQ ID NO: 729241 - RNA, 22 nt, Human
uccugaggaugguugaagugca

SEQ ID NO: 729242 - RNA, 22 nt, Human
cuccucuguauugauugggacu

SEQ ID NO: 729243 - RNA, 22 nt, Human
uuaaacacuggagcuggguguu

SEQ ID NO: 729244 - RNA, 22 nt, Human
aguuagaaaguaaaucauuuga

SEQ ID NO: 729245 - RNA, 22 nt, Human
ucuacuguagugaugcugcagu

SEQ ID NO: 729246 - RNA, 22 nt, Human
uuugcuuugacugucagcaagu

SEQ ID NO: 729247 - RNA, 19 nt, Human
ccacuuugcuucucugggu

SEQ ID NO: 729248 - RNA, 17 nt, Human
agacagaccucugcauc

SEQ ID NO: 729249 - RNA, 22 nt, Human
agagcagauuucaaauauuggc

SEQ ID NO: 729250 - RNA, 23 nt, Human
agcuggaggcugucuacucccaa

SEQ ID NO: 729251 - RNA, 22 nt, Human
acuguaaugguggauccauguc

SEQ ID NO: 729252 - RNA, 22 nt, Human
ccuggcaggccccuccuggauu

SEQ ID NO: 729253 - RNA, 22 nt, Human
uacuguuuuuuagacucauggu

SEQ ID NO: 729254 - RNA, 22 nt, Human
ugagugaauucaaguaaagggc

SEQ ID NO: 729255 - RNA, 22 nt, Human
acacaaugauucacaagcagca

SEQ ID NO: 729256 - RNA, 22 nt, Human
uuugcauuuugauaagaucacu

SEQ ID NO: 729257 - RNA, 22 nt, Human
uacuauugaaucauugucaauc

SEQ ID NO: 729258 - RNA, 22 nt, Human
agcugaaguucaguccagagaa

SEQ ID NO: 729259 - RNA, 22 nt, Human
gucccuggucuaccguggcuuc

SEQ ID NO: 729260 - RNA, 22 nt, Human
uccuacagauacuaaggagauc

SEQ ID NO: 729261 - RNA, 22 nt, Human
ggggacugccuuccacagacac

SEQ ID NO: 729262 - RNA, 22 nt, Human
gugggcaggccccaaagcaggg

SEQ ID NO: 729263 - RNA, 22 nt, Human
ugcagagguuugugguguugcu

SEQ ID NO: 729264 - RNA, 22 nt, Human
aaguauacugaagguauccagg

SEQ ID NO: 729265 - RNA, 19 nt, Human
caccccaguccucuuuccc

SEQ ID NO: 729266 - RNA, 19 nt, Human
acuuccugcccgcuccuuu

SEQ ID NO: 729267 - RNA, 22 nt, Human
auuucuuucuggccacgguuuu

SEQ ID NO: 729268 - RNA, 22 nt, Human
uugcaggggaaggagcagagcu

SEQ ID NO: 729269 - RNA, 22 nt, Human
ucacagagaacuauaauccauc

SEQ ID NO: 729270 - RNA, 22 nt, Human
aagcagaaagaacaacugagug

SEQ ID NO: 729271 - RNA, 22 nt, Human
gggcagagaaauggacaguugg

SEQ ID NO: 729272 - RNA, 22 nt, Human
ucaacacuauccaggcaaucuu

SEQ ID NO: 729273 - RNA, 22 nt, Human
aauucagagacucauucuggag

SEQ ID NO: 729274 - RNA, 22 nt, Human
gaggagaagcuaagaaacacag

SEQ ID NO: 729275 - RNA, 22 nt, Human
ggcaggugggaacccuccccac

SEQ ID NO: 729276 - RNA, 22 nt, Human
ucucugagaaguuccuuuguga

SEQ ID NO: 729277 - RNA, 22 nt, Human
ccuggagggacccuggcccugu

SEQ ID NO: 729278 - RNA, 22 nt, Human
ugcuggagcggaggugagccag

SEQ ID NO: 729279 - RNA, 22 nt, Human
uccaguugcccaucucucuucu

SEQ ID NO: 729280 - RNA, 22 nt, Human
aggcuaggcugaugccucuucc

SEQ ID NO: 729281 - RNA, 22 nt, Human
gucagcaauucaagagcucuua

SEQ ID NO: 729282 - RNA, 22 nt, Human
ugcacagugaccccuggugacu

SEQ ID NO: 729283 - RNA, 22 nt, Human
agcucugggaguaguuccaccu

SEQ ID NO: 729284 - RNA, 22 nt, Human
uccaucucaccugcacucugcg

SEQ ID NO: 729285 - RNA, 22 nt, Human
uauccauauucagacugugaau

SEQ ID NO: 729286 - RNA, 22 nt, Human
guggggugggcugaguuaggcc

SEQ ID NO: 729287 - RNA, 22 nt, Human
uucuuaagcaguuuggcauguu

SEQ ID NO: 729288 - RNA, 22 nt, Human
cuuuacacuuggacccacacuu

SEQ ID NO: 729289 - RNA, 22 nt, Human
gcucccaacucaggccuccucc

SEQ ID NO: 729290 - RNA, 22 nt, Human
ggguccaguuucaucugagguu

SEQ ID NO: 729291 - RNA, 22 nt, Human
ggugucuggacagugagccagg

SEQ ID NO: 729292 - RNA, 22 nt, Human
aacaaauuuagcucugagugcu

SEQ ID NO: 729293 - RNA, 22 nt, Human
gucuggacagcagcaccucggc

SEQ ID NO: 729294 - RNA, 22 nt, Human
guuuuauuuccaugagagaccg

SEQ ID NO: 729295 - RNA, 22 nt, Human
ggguccaccugagcagcagccu

SEQ ID NO: 729296 - RNA, 22 nt, Human
auucacauuuagccucugacau

SEQ ID NO: 729297 - RNA, 22 nt, Human
acaugcuuguuuuucacaaccu

SEQ ID NO: 729298 - RNA, 22 nt, Human
aggcaugugacccuggacucag

SEQ ID NO: 729299 - RNA, 22 nt, Human
ugcugcucgccacggcccaggg

SEQ ID NO: 729300 - RNA, 22 nt, Human
augcugugucaggaauuugaua

SEQ ID NO: 729301 - RNA, 22 nt, Human
ugaauucuuuuagaauucagug

SEQ ID NO: 729302 - RNA, 22 nt, Human
auggcaaaaauuaacagaucaa

SEQ ID NO: 729303 - RNA, 22 nt, Human
aaaaucugcuuccuuuuacaga

SEQ ID NO: 729304 - RNA, 22 nt, Human
uagaggcucuucauugcaguag

SEQ ID NO: 729305 - RNA, 22 nt, Human
gugugggcuaugugcgugggca

SEQ ID NO: 729306 - RNA, 19 nt, Human
ggcucucccuugagagagc

SEQ ID NO: 729307 - RNA, 22 nt, Human
cacagcagcguuccuccgugug

SEQ ID NO: 729308 - RNA, 22 nt, Human
uuucacagaaagacaacagaua

SEQ ID NO: 729309 - RNA, 22 nt, Human
cuccucagagagcagcuugggg

SEQ ID NO: 729310 - RNA, 22 nt, Human
uccagugcauucagacacuugg

SEQ ID NO: 729311 - RNA, 20 nt, Human
gccaggcacuguucucaaua

SEQ ID NO: 729312 - RNA, 22 nt, Human
ucaggcugcagcugucagcagc

SEQ ID NO: 729313 - RNA, 22 nt, Human
gucagugugagauaaucuugga

SEQ ID NO: 729314 - RNA, 22 nt, Human
gggcagguacaagaugcuucuu

SEQ ID NO: 729315 - RNA, 22 nt, Human
aacuugguaccaccuucugaag

SEQ ID NO: 729316 - RNA, 22 nt, Human
aaaugcacaauaaaguaaaggc

SEQ ID NO: 729317 - RNA, 22 nt, Human
uccugauggaggggucaucuuu

SEQ ID NO: 729318 - RNA, 22 nt, Human
gggcacagucuaaaguugggcc

SEQ ID NO: 729319 - RNA, 22 nt, Human
ucaggggagguugaaucgucuc

SEQ ID NO: 729320 - RNA, 20 nt, Human
aacucagagaugaaaaagac

SEQ ID NO: 729321 - RNA, 22 nt, Human
ugcuggaaggguaguauuaacu

SEQ ID NO: 729322 - RNA, 22 nt, Human
ggccagagaauaugccuuacgu

SEQ ID NO: 729323 - RNA, 22 nt, Human
ccuggcucugggaucuucgcuu

SEQ ID NO: 729324 - RNA, 22 nt, Human
ucugucugagggagugacauuu

SEQ ID NO: 729325 - RNA, 22 nt, Human
ggcaggugcucugugggccugg

SEQ ID NO: 729326 - RNA, 22 nt, Human
augcacaagcaagagauaaugg

SEQ ID NO: 729327 - RNA, 21 nt, Human
aaggcuggagaugcaggucug

SEQ ID NO: 729328 - RNA, 22 nt, Human
ugaggucugcagggcugugcau

SEQ ID NO: 729329 - RNA, 22 nt, Human
acagcagguuacaguggcacag

SEQ ID NO: 729330 - RNA, 23 nt, Human
agucuucauuguauuuccagacc

SEQ ID NO: 729331 - RNA, 22 nt, Human
uugauucuaugagguaagcuau

SEQ ID NO: 729332 - RNA, 22 nt, Human
uggaacacuuuguugaaaugca

SEQ ID NO: 729333 - RNA, 22 nt, Human
ucaaugucagcugguaggaaau

SEQ ID NO: 729334 - RNA, 22 nt, Human
guacacuauuaaaccugcucau

SEQ ID NO: 729335 - RNA, 22 nt, Human
uaucuuuaacuugcaguauuua

SEQ ID NO: 729336 - RNA, 19 nt, Human
ugcuggaggguagugaguc

SEQ ID NO: 729337 - RNA, 22 nt, Human
cagcccagagaaggggcccgug

SEQ ID NO: 729338 - RNA, 23 nt, Human
gaagccacacaaaggucgccaag

SEQ ID NO: 729339 - RNA, 22 nt, Human
ggcagccaugcuccaggugcag

SEQ ID NO: 729340 - RNA, 22 nt, Human
gaaguccagaauacugcucuga

SEQ ID NO: 729341 - RNA, 22 nt, Human
uggaacuucaugagauuaugga

SEQ ID NO: 729342 - RNA, 22 nt, Human
cauagagugauguaagguaugu

SEQ ID NO: 729343 - RNA, 22 nt, Human
agaaaguuguuggaggaaauga

SEQ ID NO: 729344 - RNA, 22 nt, Human
acucuggcccuccugcugccag

SEQ ID NO: 729345 - RNA, 22 nt, Human
aaggcacuagcagaauuaguga

SEQ ID NO: 729346 - RNA, 22 nt, Human
augagcuugguccagcaggcuu

SEQ ID NO: 729347 - RNA, 22 nt, Human
agagaauuuuaaaagccuugaa

SEQ ID NO: 729348 - RNA, 20 nt, Human
uccagagaguggcaaagcuc

SEQ ID NO: 729349 - RNA, 22 nt, Human
aauagcauaagaugucaaauag

SEQ ID NO: 729350 - RNA, 22 nt, Human
agagcuguuaauuuugcacugg

SEQ ID NO: 729351 - RNA, 22 nt, Human
guccuggauugaacauaggcag

SEQ ID NO: 729352 - RNA, 22 nt, Human
agaaacauuuagauuauauguc

SEQ ID NO: 729353 - RNA, 22 nt, Human
aaucauuguaaaugguuuuguu

SEQ ID NO: 729354 - RNA, 18 nt, Human
aagucuuggaauuuccac

SEQ ID NO: 729355 - RNA, 22 nt, Human
cagugagggcauucagugcugg

SEQ ID NO: 729356 - RNA, 22 nt, Human
agaaacuauuaugguaaacaaa

SEQ ID NO: 729357 - RNA, 19 nt, Human
gcgggcggcgccugcgagg

SEQ ID NO: 729358 - RNA, 22 nt, Human
acucugcuauugcagugcaaaa

SEQ ID NO: 729359 - RNA, 22 nt, Human
cccagagcaugugcugccuuug

SEQ ID NO: 729360 - RNA, 22 nt, Human
aagcagcauucagugaaaugug

SEQ ID NO: 729361 - RNA, 22 nt, Human
gcaguguuaccucuucaguggg

SEQ ID NO: 729362 - RNA, 22 nt, Human
auagcaaugaucaagacagaca

SEQ ID NO: 729363 - RNA, 21 nt, Human
ucaggguucaaaggaacugau

SEQ ID NO: 729364 - RNA, 21 nt, Human
uggcuuugcccugcuugcccc

SEQ ID NO: 729365 - RNA, 22 nt, Human
auccagucaaaauuaguaaggu

SEQ ID NO: 729366 - RNA, 17 nt, Human
cugaggauuaugguugu

SEQ ID NO: 729367 - RNA, 22 nt, Human
ucacugcuuucaaaaauuauug

SEQ ID NO: 729368 - RNA, 22 nt, Human
ucuuuaauaucugccccagagc

SEQ ID NO: 729369 - RNA, 22 nt, Human
ugcugaaaaguaaauaggccua

SEQ ID NO: 729370 - RNA, 22 nt, Human
aauaauguuuauuuguauucuc

SEQ ID NO: 729371 - RNA, 22 nt, Human
ggucuggcaggugaggacucag

SEQ ID NO: 729372 - RNA, 20 nt, Human
aacaguaccauuuaucucag

SEQ ID NO: 729373 - RNA, 22 nt, Human
aagcaaaacgugcucuaggagg

SEQ ID NO: 729374 - RNA, 22 nt, Human
aagcaaggcaaccuauguccag

SEQ ID NO: 729375 - RNA, 22 nt, Human
gacagggcauggugcagaguuc

SEQ ID NO: 729376 - RNA, 22 nt, Human
acacuggagcuucuagcccacg

SEQ ID NO: 729377 - RNA, 23 nt, Human
uucaggaaaugaauacagacaca

SEQ ID NO: 729378 - RNA, 22 nt, Human
ucugauaaaugccaucuuuuug

SEQ ID NO: 729379 - RNA, 22 nt, Human
agcugcuguuucuugcacguau

SEQ ID NO: 729380 - RNA, 22 nt, Human
acugagcauggcucacagagag

SEQ ID NO: 729381 - RNA, 22 nt, Human
ccuggagcacauggcaggaggc

SEQ ID NO: 729382 - RNA, 22 nt, Human
aggggagcuaacaccagagccc

SEQ ID NO: 729383 - RNA, 22 nt, Human
accuaauaaagguaaauucugu

SEQ ID NO: 729384 - RNA, 22 nt, Human
gugcugaggaaggaagacuuau

SEQ ID NO: 729385 - RNA, 20 nt, Human
ggcugcaggacucauuggcu

SEQ ID NO: 729386 - RNA, 22 nt, Human
ggccuggccuccagaugugggc

SEQ ID NO: 729387 - RNA, 22 nt, Human
ucaggagugauaccauuuguca

SEQ ID NO: 729388 - RNA, 22 nt, Human
agaaauuaugcaguaguuuuau

SEQ ID NO: 729389 - RNA, 22 nt, Human
agcuacaacuuuuccaugagca

SEQ ID NO: 729390 - RNA, 22 nt, Human
ggcccugaucuccuggauucuu

SEQ ID NO: 729391 - RNA, 22 nt, Human
auuuuccuccaugugagcaguu

SEQ ID NO: 729392 - RNA, 22 nt, Human
cagugcuggaggcuggagggaa

SEQ ID NO: 729393 - RNA, 22 nt, Human
aacaucaucaugaacaacuaau

SEQ ID NO: 729394 - RNA, 22 nt, Human
caucccugguuccuguguuuaa

SEQ ID NO: 729395 - RNA, 22 nt, Human
uccuuggcagcagggagcauga

SEQ ID NO: 729396 - RNA, 22 nt, Human
agaaauguacgauguuaugcag

SEQ ID NO: 729397 - RNA, 22 nt, Human
gagugcaguuggggugagggga

SEQ ID NO: 729398 - RNA, 23 nt, Human
aaacugcuuccaauuccugccau

SEQ ID NO: 729399 - RNA, 22 nt, Human
acagaguuaauggauaggcagg

SEQ ID NO: 729400 - RNA, 22 nt, Human
gucugacaccuagaguccagga

SEQ ID NO: 729401 - RNA, 22 nt, Human
agccaaggagugcagguggcuu

SEQ ID NO: 729402 - RNA, 22 nt, Human
aguaaacacugucuuuauauau

SEQ ID NO: 729403 - RNA, 20 nt, Human
uccuggagucugguuuggcu

SEQ ID NO: 729404 - RNA, 22 nt, Human
ucugaaguucuuaaauuaguuu

SEQ ID NO: 729405 - RNA, 19 nt, Human
gucaggcacgugagagcau

SEQ ID NO: 729406 - RNA, 22 nt, Human
acacagagguggccacucuuuu

SEQ ID NO: 729407 - RNA, 22 nt, Human
auugaagaaacccaaauaaugg

SEQ ID NO: 729408 - RNA, 21 nt, Human
uacaucaguuuucuuggcuca

SEQ ID NO: 729409 - RNA, 22 nt, Human
uuucucauuuagaguggcaggg

SEQ ID NO: 729410 - RNA, 22 nt, Human
agcuccaguuuccugacugagc

SEQ ID NO: 729411 - RNA, 22 nt, Human
ccugaagaugcuguggccuggu

SEQ ID NO: 729412 - RNA, 22 nt, Human
ccugcugugaaacuggcauaug

SEQ ID NO: 729413 - RNA, 20 nt, Human
agcuacaaugcgaagcuggc

SEQ ID NO: 729414 - RNA, 22 nt, Human
acaguauauaugguuaucugau

SEQ ID NO: 729415 - RNA, 22 nt, Human
gaguuauauuugcgauauugga

SEQ ID NO: 729416 - RNA, 22 nt, Human
ccagcugugccguguggauagc

SEQ ID NO: 729417 - RNA, 22 nt, Human
aaccccgcucaggcugggugag

SEQ ID NO: 729418 - RNA, 22 nt, Human
guggcagucggaagucaggaga

SEQ ID NO: 729419 - RNA, 22 nt, Human
agccacacagcuuaaugacaga

SEQ ID NO: 729420 - RNA, 22 nt, Human
ggcucugaaauucucacuuuua

SEQ ID NO: 729421 - RNA, 22 nt, Human
ccacagaccuuggcuuccaccu

SEQ ID NO: 729422 - RNA, 22 nt, Human
ugcaugcaugugagcaugcaua

SEQ ID NO: 729423 - RNA, 22 nt, Human
cugccugcugcccuccagagcc

SEQ ID NO: 729424 - RNA, 22 nt, Human
uacagaguauuuuuaauauggu

SEQ ID NO: 729425 - RNA, 22 nt, Human
aaauacucucaauaaagaaagu

SEQ ID NO: 729426 - RNA, 22 nt, Human
uuacacaugaagguccaauguu

SEQ ID NO: 729427 - RNA, 22 nt, Human
gggcugacuccuauuggaugaa

SEQ ID NO: 729428 - RNA, 22 nt, Human
uagcugcuucucacaugggcaa

SEQ ID NO: 729429 - RNA, 22 nt, Human
agugucuguugcuuuugcagug

SEQ ID NO: 729430 - RNA, 22 nt, Human
uugcuugcagacuuagcaaauu

SEQ ID NO: 729431 - RNA, 22 nt, Human
cuagagaaacagugcucugaac

SEQ ID NO: 729432 - RNA, 18 nt, Human
aguccuucuugguuuuac

SEQ ID NO: 729433 - RNA, 22 nt, Human
aaggagugcaugacucagagua

SEQ ID NO: 729434 - RNA, 22 nt, Human
guggauggagcuggaagccauu

SEQ ID NO: 729435 - RNA, 22 nt, Human
ugaggcucagagaagugcuguu

SEQ ID NO: 729436 - RNA, 21 nt, Human
cagacccucuagaggccaccu

SEQ ID NO: 729437 - RNA, 17 nt, Human
aggcuggccuucacagu

SEQ ID NO: 729438 - RNA, 22 nt, Human
acagcucagacaucacugcucu

SEQ ID NO: 729439 - RNA, 22 nt, Human
guggggggagcugcaagcugga

SEQ ID NO: 729440 - RNA, 22 nt, Human
agccagcacuuuuucucugggc

SEQ ID NO: 729441 - RNA, 22 nt, Human
uccucagcuuuuauuucacuug

SEQ ID NO: 729442 - RNA, 22 nt, Human
augcauuguaugaaaggaaaua

SEQ ID NO: 729443 - RNA, 22 nt, Human
aaacuguaaacacagcaguaca

SEQ ID NO: 729444 - RNA, 22 nt, Human
uuugcauaagucauguccagug

SEQ ID NO: 729445 - RNA, 21 nt, Human
acuggccaccacuggcagggg

SEQ ID NO: 729446 - RNA, 22 nt, Human
agggccagccccacccucucug

SEQ ID NO: 729447 - RNA, 22 nt, Human
gacuagaagggcaagagucccu

SEQ ID NO: 729448 - RNA, 22 nt, Human
acauauauuacuaguaaagaca

SEQ ID NO: 729449 - RNA, 22 nt, Human
gcugucacauuuggagcacugg

SEQ ID NO: 729450 - RNA, 22 nt, Human
acaugcauacguguguuuaaaa

SEQ ID NO: 729451 - RNA, 22 nt, Human
ccacccugaggaaugguccggc

SEQ ID NO: 729452 - RNA, 22 nt, Human
acagaugcuuacuggugguucc

SEQ ID NO: 729453 - RNA, 22 nt, Human
agcagugagugggaggaccaug

SEQ ID NO: 729454 - RNA, 22 nt, Human
uuugcuuaaaguucuuucuggu

SEQ ID NO: 729455 - RNA, 22 nt, Human
ucugggagcacacgcagugauc

SEQ ID NO: 729456 - RNA, 23 nt, Human
uuacuacacaaguaacgauuccc

SEQ ID NO: 729457 - RNA, 22 nt, Human
uauguacaauuuguuguauguc

SEQ ID NO: 729458 - RNA, 22 nt, Human
caguuuauagcucuagcagcuu

SEQ ID NO: 729459 - RNA, 19 nt, Human
ucauuuguuaguagaaguu

SEQ ID NO: 729460 - RNA, 22 nt, Human
gauucuggaguuaaggaugccu

SEQ ID NO: 729461 - RNA, 22 nt, Human
agucagcaucugcacugugcug

SEQ ID NO: 729462 - RNA, 22 nt, Human
cugggagcuuggagccuuuggu

SEQ ID NO: 729463 - RNA, 22 nt, Human
agaggccagaaaguaugccacc

SEQ ID NO: 729464 - RNA, 22 nt, Human
uuuacagaucuguugauuuguu

SEQ ID NO: 729465 - RNA, 22 nt, Human
gcuuuacauguuucccuuuaag

SEQ ID NO: 729466 - RNA, 22 nt, Human
acagcagcagaccagcauaugu

SEQ ID NO: 729467 - RNA, 22 nt, Human
ccagaggugaacaggaggcugu

SEQ ID NO: 729468 - RNA, 22 nt, Human
ccuccuggaaaaauucccuggc

SEQ ID NO: 729469 - RNA, 22 nt, Human
auauauaauacuugcugugggc

SEQ ID NO: 729470 - RNA, 22 nt, Human
aguggcagaagccaagucugca

SEQ ID NO: 729471 - RNA, 22 nt, Human
gcucagagcuugaaguuccacu

SEQ ID NO: 729472 - RNA, 22 nt, Human
aggacucaucccugcuugucag

SEQ ID NO: 729473 - RNA, 20 nt, Human
ccagggcuggcuccugggau

SEQ ID NO: 729474 - RNA, 22 nt, Human
guccagagcuggcacacuguca

SEQ ID NO: 729475 - RNA, 22 nt, Human
caaacuauuguucacaagacaa

SEQ ID NO: 729476 - RNA, 22 nt, Human
uaaaaggagguugaagcuguca

SEQ ID NO: 729477 - RNA, 22 nt, Human
agagcuguguuaagaacaggcc

SEQ ID NO: 729478 - RNA, 22 nt, Human
aaauagcagaagcagagggggu

SEQ ID NO: 729479 - RNA, 22 nt, Human
cauggcagugauucagccuuug

SEQ ID NO: 729480 - RNA, 22 nt, Human
gccagcugcucgcguaggguag

SEQ ID NO: 729481 - RNA, 22 nt, Human
uugcaaauugcaagaguuggau

SEQ ID NO: 729482 - RNA, 22 nt, Human
agaauuuguaaaagauaagaca

SEQ ID NO: 729483 - RNA, 22 nt, Human
gagcuggucgaaaugggcugac

SEQ ID NO: 729484 - RNA, 22 nt, Human
ucucagugaagaguauaacaaa

SEQ ID NO: 729485 - RNA, 22 nt, Human
ugcugggccucuucccuggaua

SEQ ID NO: 729486 - RNA, 22 nt, Human
gccucugcaugcucagcaccca

SEQ ID NO: 729487 - RNA, 21 nt, Human
uccugccuuaguccagagcag

SEQ ID NO: 729488 - RNA, 22 nt, Human
augcaugaaagaauccaagccu

SEQ ID NO: 729489 - RNA, 22 nt, Human
gucaggaugcuauuguuauuaa

SEQ ID NO: 729490 - RNA, 22 nt, Human
gaauguuuuuaggaauguuaug

SEQ ID NO: 729491 - RNA, 22 nt, Human
uuaccuaaaauagcucaauuua

SEQ ID NO: 729492 - RNA, 22 nt, Human
aucucugguuguuuugcuccca

SEQ ID NO: 729493 - RNA, 22 nt, Human
ucagccagagguggaugaguca

SEQ ID NO: 729494 - RNA, 22 nt, Human
auucugcauguagguuugcuca

SEQ ID NO: 729495 - RNA, 22 nt, Human
acaaaguuaacaguuggauagu

SEQ ID NO: 729496 - RNA, 22 nt, Human
cuacccagcaccuaggcugccu

SEQ ID NO: 729497 - RNA, 22 nt, Human
uucuuuuaaaagagagcagaaa

SEQ ID NO: 729498 - RNA, 22 nt, Human
agaauauaguuaccaaauucug

SEQ ID NO: 729499 - RNA, 22 nt, Human
uucaaucauuuuuacauagucc

SEQ ID NO: 729500 - RNA, 22 nt, Human
auggcuuucagauuucuauguu

SEQ ID NO: 729501 - RNA, 22 nt, Human
aggauccuuuuucugcuguuug

SEQ ID NO: 729502 - RNA, 22 nt, Human
cauuacaacaaucugccauggc

SEQ ID NO: 729503 - RNA, 22 nt, Human
cugagcgcaugguugcugggga

SEQ ID NO: 729504 - RNA, 22 nt, Human
ucuugugugguggaagauaugg

SEQ ID NO: 729505 - RNA, 22 nt, Human
gugacucuguuucugaaaacag

SEQ ID NO: 729506 - RNA, 23 nt, Human
cuggcuucuggggccucuguuuc

SEQ ID NO: 729507 - RNA, 22 nt, Human
agagcucugcagcuggccucag

SEQ ID NO: 729508 - RNA, 22 nt, Human
uuuccuaugauauucuaugugu

SEQ ID NO: 729509 - RNA, 22 nt, Human
uguucucuucucauugaacaug

SEQ ID NO: 729510 - RNA, 23 nt, Human
agacuggggcauaagaagauggc

SEQ ID NO: 729511 - RNA, 21 nt, Human
cgggugaguugagcaggacac

SEQ ID NO: 729512 - RNA, 23 nt, Human
gaacuguugaugaauagaauaua

SEQ ID NO: 729513 - RNA, 22 nt, Human
uuugauucucaauugcccucug

SEQ ID NO: 729514 - RNA, 20 nt, Human
gaggcccagagaggugaagc

SEQ ID NO: 729515 - RNA, 22 nt, Human
cagggccacugcaugagguuca

SEQ ID NO: 729516 - RNA, 22 nt, Human
gugcauaugguuacagcaccgc

SEQ ID NO: 729517 - RNA, 22 nt, Human
aggaagaguguuaccuaugggu

SEQ ID NO: 729518 - RNA, 22 nt, Human
uggcuggagugggagaaguuua

SEQ ID NO: 729519 - RNA, 22 nt, Human
gucucuggguuaagcagugcau

SEQ ID NO: 729520 - RNA, 19 nt, Human
uggcuucuucgguguuccc

SEQ ID NO: 729521 - RNA, 22 nt, Human
auuauucauggucuuccacaau

SEQ ID NO: 729522 - RNA, 22 nt, Human
cagcaucucugcacccuccccc

SEQ ID NO: 729523 - RNA, 22 nt, Human
cugcacacaucgcacugcccgu

SEQ ID NO: 729524 - RNA, 22 nt, Human
cuucauuacuugcucguagcac

SEQ ID NO: 729525 - RNA, 22 nt, Human
cuauagaaacaaccucucuuuc

SEQ ID NO: 729526 - RNA, 22 nt, Human
auaacuucaucaaauaggcaca

SEQ ID NO: 729527 - RNA, 20 nt, Human
uaacaguaagugauguuaca

SEQ ID NO: 729528 - RNA, 22 nt, Human
ccaaggcaacguuggugucagg

SEQ ID NO: 729529 - RNA, 22 nt, Human
ugggcgaggcccagggcugcgu

SEQ ID NO: 729530 - RNA, 22 nt, Human
uccaggucugguuggacagguu

SEQ ID NO: 729531 - RNA, 22 nt, Human
ugaugacagcaaaaaaugcuag

SEQ ID NO: 729532 - RNA, 22 nt, Human
ugcuggaaaaagauuguguuuu

SEQ ID NO: 729533 - RNA, 22 nt, Human
uagauucaugcaguaugcuagu

SEQ ID NO: 729534 - RNA, 22 nt, Human
agccccaggcccggacgccucu

SEQ ID NO: 729535 - RNA, 22 nt, Human
uauuuugacgauuuuaugcaaa

SEQ ID NO: 729536 - RNA, 22 nt, Human
gagauauuuauucauacuguca

SEQ ID NO: 729537 - RNA, 22 nt, Human
uggaggcagucaaaugacugac

SEQ ID NO: 729538 - RNA, 22 nt, Human
caaauguaauugcgguuuuugc

SEQ ID NO: 729539 - RNA, 22 nt, Human
agcuuaggaggaugaugaacau

SEQ ID NO: 729540 - RNA, 22 nt, Human
acaacauuauacauagaaagcu

SEQ ID NO: 729541 - RNA, 22 nt, Human
cuuucccagaguaguugaugcu

SEQ ID NO: 729542 - RNA, 22 nt, Human
ggagggagcagagaacccaacc

SEQ ID NO: 729543 - RNA, 22 nt, Human
gcugaaaugggcacugaaggcc

SEQ ID NO: 729544 - RNA, 22 nt, Human
gccaccaugucuggcugaguuu

SEQ ID NO: 729545 - RNA, 22 nt, Human
auuugcuuggucuucucuccgu

SEQ ID NO: 729546 - RNA, 16 nt, Human
ccuuucucugccuucc

SEQ ID NO: 729547 - RNA, 22 nt, Human
uaauccguacauuauucugaac

SEQ ID NO: 729548 - RNA, 22 nt, Human
uaacagaaaagaacugaguuug

SEQ ID NO: 729549 - RNA, 22 nt, Human
uucuucagucuaggccuuucuu

SEQ ID NO: 729550 - RNA, 22 nt, Human
augugcuuuuacuccccagagu

SEQ ID NO: 729551 - RNA, 22 nt, Human
uugcuuaauucugaaaauauag

SEQ ID NO: 729552 - RNA, 22 nt, Human
acucugaaccagagaucauacc

SEQ ID NO: 729553 - RNA, 22 nt, Human
agcuucuggaaggcaaggcuug

SEQ ID NO: 729554 - RNA, 22 nt, Human
aagauacagacagagccaaaau

SEQ ID NO: 729555 - RNA, 22 nt, Human
uacauucugaaauaaaugguuu

SEQ ID NO: 729556 - RNA, 22 nt, Human
uucugcagugugcagggccugu

SEQ ID NO: 729557 - RNA, 22 nt, Human
ggccaccaguccucuggcaggg

SEQ ID NO: 729558 - RNA, 15 nt, Human
cacacagacagcuug

SEQ ID NO: 729559 - RNA, 22 nt, Human
aggcucaggaggagcugccgga

SEQ ID NO: 729560 - RNA, 22 nt, Human
auuauguauuugguauaguuug

SEQ ID NO: 729561 - RNA, 22 nt, Human
gagcuguccaagauggucguaa

SEQ ID NO: 729562 - RNA, 22 nt, Human
cagucaggcugcgcuucucuga

SEQ ID NO: 729563 - RNA, 22 nt, Human
cuguuucaccacuggcucuuug

SEQ ID NO: 729564 - RNA, 22 nt, Human
ccagaggucuccugcacgggau

SEQ ID NO: 729565 - RNA, 22 nt, Human
guuucccaggcuguggggcccu

SEQ ID NO: 729566 - RNA, 22 nt, Human
agugucugccaacugcaugguc

SEQ ID NO: 729567 - RNA, 22 nt, Human
ccaggugugccagcagggacug

SEQ ID NO: 729568 - RNA, 22 nt, Human
cacagaagaaucaugcuguguu

SEQ ID NO: 729569 - RNA, 22 nt, Human
gggugcaagcaaguggcacaga

SEQ ID NO: 729570 - RNA, 21 nt, Human
uauucaguccauugauguuua

SEQ ID NO: 729571 - RNA, 22 nt, Human
caugauuuugucuuguguuaau

SEQ ID NO: 729572 - RNA, 22 nt, Human
ccucucaguauugaacuuuaua

SEQ ID NO: 729573 - RNA, 23 nt, Human
uccuucaggcucuuccccuggac

SEQ ID NO: 729574 - RNA, 22 nt, Human
guacauuggcaacucucuuaga

SEQ ID NO: 729575 - RNA, 22 nt, Human
auagauucauucuauuucuccg

SEQ ID NO: 729576 - RNA, 22 nt, Human
gggaucugcuccagagggaaaa

SEQ ID NO: 729577 - RNA, 22 nt, Human
aggagccaaacauauugagaga

SEQ ID NO: 729578 - RNA, 22 nt, Human
acucagcuuccuacagcuagaa

SEQ ID NO: 729579 - RNA, 20 nt, Human
ugcugcugugagcgucccug

SEQ ID NO: 729580 - RNA, 22 nt, Human
aaguuuagugaaacucuagggg

SEQ ID NO: 729581 - RNA, 22 nt, Human
uucuguuuuagaaauaaguagu

SEQ ID NO: 729582 - RNA, 22 nt, Human
aggaauguaguuugaguagaaa

SEQ ID NO: 729583 - RNA, 22 nt, Human
aagagaugauggcagccagagg

SEQ ID NO: 729584 - RNA, 22 nt, Human
aauuccauaucugugauuauua

SEQ ID NO: 729585 - RNA, 22 nt, Human
ugcugggcaucguaggagguac

SEQ ID NO: 729586 - RNA, 21 nt, Human
gcagagccggggcgagaaggc

SEQ ID NO: 729587 - RNA, 21 nt, Human
gggcucagcgcucggcuccuc

SEQ ID NO: 729588 - RNA, 22 nt, Human
gaagauuaaacauauuuagugu

SEQ ID NO: 729589 - RNA, 22 nt, Human
cagugucugguuggcucuacgu

SEQ ID NO: 729590 - RNA, 22 nt, Human
aguacaaaggcccuugauuacu

SEQ ID NO: 729591 - RNA, 19 nt, Human
ggagaucccgcugcagaug

SEQ ID NO: 729592 - RNA, 22 nt, Human
gauugcuucuggaaagcaguuu

SEQ ID NO: 729593 - RNA, 22 nt, Human
cuguguuuugagauauuauuaa

SEQ ID NO: 729594 - RNA, 22 nt, Human
gacaggggcuuugcaugcuuua

SEQ ID NO: 729595 - RNA, 20 nt, Human
aguaugauccacucugcucu

SEQ ID NO: 729596 - RNA, 17 nt, Human
ugaggccauggcaccau

SEQ ID NO: 729597 - RNA, 22 nt, Human
cagaaacuagauuuagacacaa

SEQ ID NO: 729598 - RNA, 22 nt, Human
cccaggcuccugacucauucua

SEQ ID NO: 729599 - RNA, 22 nt, Human
uccuggagccaugauuccccuc

SEQ ID NO: 729600 - RNA, 22 nt, Human
acugugcacacaaaaauagauu

SEQ ID NO: 729601 - RNA, 22 nt, Human
auugaaaauauaauucuaggag

SEQ ID NO: 729602 - RNA, 22 nt, Human
gcugugcacuaccuauacaucc

SEQ ID NO: 729603 - RNA, 22 nt, Human
auggcuggcauccaggugggcu

SEQ ID NO: 729604 - RNA, 18 nt, Human
agccucuggcagagagaa

SEQ ID NO: 729605 - RNA, 22 nt, Human
ugaggaaacugaggcacagaug

SEQ ID NO: 729606 - RNA, 22 nt, Human
ucuuugcaucccuuccauaguu

SEQ ID NO: 729607 - RNA, 22 nt, Human
uagacauuuucucaacaucucu

SEQ ID NO: 729608 - RNA, 22 nt, Human
aaaguccuagcgauccacagaa

SEQ ID NO: 729609 - RNA, 22 nt, Human
agcuccagccucuucuggaggu

SEQ ID NO: 729610 - RNA, 22 nt, Human
agcugaccaaaugccuacaguu

SEQ ID NO: 729611 - RNA, 22 nt, Human
gaucaguguuuugugcauucuu

SEQ ID NO: 729612 - RNA, 19 nt, Human
aggcugcaagguggugggc

SEQ ID NO: 729613 - RNA, 22 nt, Human
uuaacaaggugacugcauuaaa

SEQ ID NO: 729614 - RNA, 22 nt, Human
aggcuggggaauugaauuugcu

SEQ ID NO: 729615 - RNA, 21 nt, Human
aggaggaacccguggcugggc

SEQ ID NO: 729616 - RNA, 22 nt, Human
uacuagcuaacauucucaccaa

SEQ ID NO: 729617 - RNA, 22 nt, Human
agcugcugaaugacacugcaag

SEQ ID NO: 729618 - RNA, 22 nt, Human
aggggagcuugaggcauggccu

SEQ ID NO: 729619 - RNA, 22 nt, Human
uucauuaguucugaagaugucu

SEQ ID NO: 729620 - RNA, 15 nt, Human
ugauuuccuacuaac

SEQ ID NO: 729621 - RNA, 22 nt, Human
ugaaggaaagagggaacauccc

SEQ ID NO: 729622 - RNA, 22 nt, Human
caggucucggguucagcaguga

SEQ ID NO: 729623 - RNA, 22 nt, Human
gucaggcauuuaggaugaguuc

SEQ ID NO: 729624 - RNA, 19 nt, Human
agagauccagcuucuagcu

SEQ ID NO: 729625 - RNA, 22 nt, Human
uggaggccagugaaaguagauu

SEQ ID NO: 729626 - RNA, 22 nt, Human
ucucauucauacccuacaugcu

SEQ ID NO: 729627 - RNA, 22 nt, Human
aacauucuucaaauaucacucu

SEQ ID NO: 729628 - RNA, 22 nt, Human
uacaguuuagaaccauagaugg

SEQ ID NO: 729629 - RNA, 22 nt, Human
agguggaguuaagugugaacug

SEQ ID NO: 729630 - RNA, 22 nt, Human
cuacugaugcuauacuucucag

SEQ ID NO: 729631 - RNA, 22 nt, Human
gccagaaacauacacaucacuu

SEQ ID NO: 729632 - RNA, 22 nt, Human
uaggcugacuuguuucauaaag

SEQ ID NO: 729633 - RNA, 22 nt, Human
ccugggcucugucagaauuggg

SEQ ID NO: 729634 - RNA, 22 nt, Human
cugggcagcacaucaucguauc

SEQ ID NO: 729635 - RNA, 22 nt, Human
gagccugagugcugccuccccu

SEQ ID NO: 729636 - RNA, 22 nt, Human
uacacuuuauggauccuacuuu

SEQ ID NO: 729637 - RNA, 22 nt, Human
ccuguggaccaggaggcagccc

SEQ ID NO: 729638 - RNA, 22 nt, Human
auugaggagcagagauggggua

SEQ ID NO: 729639 - RNA, 22 nt, Human
agauuggaucaagcagcaguug

SEQ ID NO: 729640 - RNA, 22 nt, Human
auuucaggagcaguuucagugg

SEQ ID NO: 729641 - RNA, 22 nt, Human
ugcagcaugccaaacgaggagg

SEQ ID NO: 729642 - RNA, 22 nt, Human
uauugcuuugugucauaagcaa

SEQ ID NO: 729643 - RNA, 22 nt, Human
aacaguguguacacaucauagg

SEQ ID NO: 729644 - RNA, 22 nt, Human
ucugcagguagagcucaggaau

SEQ ID NO: 729645 - RNA, 22 nt, Human
ucacuuauaaaaugcaagaucu

SEQ ID NO: 729646 - RNA, 22 nt, Human
uaggcuaggcugaagguuuugg

SEQ ID NO: 729647 - RNA, 22 nt, Human
agaauaaccaguguuucacagu

SEQ ID NO: 729648 - RNA, 22 nt, Human
cuuggcugucuauaggaaagag

SEQ ID NO: 729649 - RNA, 22 nt, Human
ucuuucauguauaugcaaccua

SEQ ID NO: 729650 - RNA, 22 nt, Human
ccacugaaggucaacauagagc

SEQ ID NO: 729651 - RNA, 22 nt, Human
uguaaacaaaugcauucuugcu

SEQ ID NO: 729652 - RNA, 22 nt, Human
guggcagucgcugacagauaca

SEQ ID NO: 729653 - RNA, 22 nt, Human
uaggaacuuagaugaacacaug

SEQ ID NO: 729654 - RNA, 22 nt, Human
ccaauacuuagauuaaaauagu

SEQ ID NO: 729655 - RNA, 22 nt, Human
cccaggcagugugugcaugcgu

SEQ ID NO: 729656 - RNA, 22 nt, Human
cuacacuuguucgacugcagga

SEQ ID NO: 729657 - RNA, 22 nt, Human
uuccaggacuggguguuugaag

SEQ ID NO: 729658 - RNA, 22 nt, Human
cuggccaauccauuaauuuguu

SEQ ID NO: 729659 - RNA, 21 nt, Human
uucaaaaugguguguuugucu

SEQ ID NO: 729660 - RNA, 22 nt, Human
uagaguauagcuaacuguauua

SEQ ID NO: 729661 - RNA, 22 nt, Human
guuucuuaaauguagcaggacc

SEQ ID NO: 729662 - RNA, 22 nt, Human
agucuucuuucauuuacucagu

SEQ ID NO: 729663 - RNA, 22 nt, Human
ccagggucuuggagaggagugc

SEQ ID NO: 729664 - RNA, 22 nt, Human
gugcugaaauggaccucaggaa

SEQ ID NO: 729665 - RNA, 22 nt, Human
uccaggacagaguagaagcagc

SEQ ID NO: 729666 - RNA, 22 nt, Human
uuucauucauuauacaguagag

SEQ ID NO: 729667 - RNA, 18 nt, Human
gacacaggagagaguccc

SEQ ID NO: 729668 - RNA, 21 nt, Human
gggcucaguggaaaagagugu

SEQ ID NO: 729669 - RNA, 22 nt, Human
gcagggacaaggcagguguucu

SEQ ID NO: 729670 - RNA, 22 nt, Human
cuuccugaaaguaguagguuga

SEQ ID NO: 729671 - RNA, 22 nt, Human
aacaugagcauucuugugcuug

SEQ ID NO: 729672 - RNA, 19 nt, Human
aggaaaggaucaaaauagc

SEQ ID NO: 729673 - RNA, 22 nt, Human
ucacugggcaucggagcugaaa

SEQ ID NO: 729674 - RNA, 19 nt, Human
ggcucuggcggcuguagcc

SEQ ID NO: 729675 - RNA, 22 nt, Human
uguuaguguaauuccaguuuuc

SEQ ID NO: 729676 - RNA, 22 nt, Human
caagccugucucaccagugcua

SEQ ID NO: 729677 - RNA, 22 nt, Human
ccucagaguaggucucagcugu

SEQ ID NO: 729678 - RNA, 22 nt, Human
gcuccugucaucaaacaauccu

SEQ ID NO: 729679 - RNA, 22 nt, Human
cauguaucuuaauugcuuugga

SEQ ID NO: 729680 - RNA, 22 nt, Human
ucccaucuccaacauuuuucuu

SEQ ID NO: 729681 - RNA, 22 nt, Human
guggcagauugcucaccauggu

SEQ ID NO: 729682 - RNA, 22 nt, Human
cacagcuagauggauagauaga

SEQ ID NO: 729683 - RNA, 22 nt, Human
ucuuuagagcucagaaauacag

SEQ ID NO: 729684 - RNA, 22 nt, Human
gagucuggcccugaugcaucau

SEQ ID NO: 729685 - RNA, 22 nt, Human
acugugagugauuuccuucugg

SEQ ID NO: 729686 - RNA, 22 nt, Human
agcugccugcauuuauauccug

SEQ ID NO: 729687 - RNA, 22 nt, Human
cucccaggacuggcucuaacug

SEQ ID NO: 729688 - RNA, 22 nt, Human
gcagggcagagggagaaucucu

SEQ ID NO: 729689 - RNA, 22 nt, Human
uaucagauuuagaggagucaua

SEQ ID NO: 729690 - RNA, 22 nt, Human
uauguguaaucaaacacaugcu

SEQ ID NO: 729691 - RNA, 22 nt, Human
ugggaagggucaacagcuggaa

SEQ ID NO: 729692 - RNA, 22 nt, Human
ggcagauggagaagcagcaggu

SEQ ID NO: 729693 - RNA, 22 nt, Human
augcucucuguccugcucagag

SEQ ID NO: 729694 - RNA, 22 nt, Human
uuucauugccuuuggaaggucu

SEQ ID NO: 729695 - RNA, 19 nt, Human
ccacacagugugcaauuua

SEQ ID NO: 729696 - RNA, 22 nt, Human
uuggccacaauccaagccuugg

SEQ ID NO: 729697 - RNA, 22 nt, Human
auugauucuguaagucaacaau

SEQ ID NO: 729698 - RNA, 22 nt, Human
cuuggagaaaggaaagggcuug

SEQ ID NO: 729699 - RNA, 22 nt, Human
auccaggcugcuuucuaugccc

SEQ ID NO: 729700 - RNA, 22 nt, Human
ucaaauaaggagucaugaccau

SEQ ID NO: 729701 - RNA, 22 nt, Human
ccacagugaaaucuugauggag

SEQ ID NO: 729702 - RNA, 17 nt, Human
ccugccugagccauagc

SEQ ID NO: 729703 - RNA, 22 nt, Human
uguacaguacauguguagugau

SEQ ID NO: 729704 - RNA, 22 nt, Human
ccuucaaucuuaagucagccca

SEQ ID NO: 729705 - RNA, 22 nt, Human
uacucaaacucacuaagacaga

SEQ ID NO: 729706 - RNA, 22 nt, Human
gaggccugaggcugccuggagc

SEQ ID NO: 729707 - RNA, 22 nt, Human
ucugggcccacucaacuucacu

SEQ ID NO: 729708 - RNA, 22 nt, Human
gcugcagcuuuaggauccagug

SEQ ID NO: 729709 - RNA, 22 nt, Human
aagacucuaucuuuagagauca

SEQ ID NO: 729710 - RNA, 22 nt, Human
uguguucuggaaagcucacuga

SEQ ID NO: 729711 - RNA, 18 nt, Human
ccuggcuuuucuacuugc

SEQ ID NO: 729712 - RNA, 22 nt, Human
uuacaguuagaaucugaugaaa

SEQ ID NO: 729713 - RNA, 22 nt, Human
aaaguaacaauaagguucuauu

SEQ ID NO: 729714 - RNA, 20 nt, Human
uuuaacuggccuucuggcuc

SEQ ID NO: 729715 - RNA, 22 nt, Human
uuauuccaccuccauuuuccua

SEQ ID NO: 729716 - RNA, 20 nt, Human
ccagaagguaggauggaaca

SEQ ID NO: 729717 - RNA, 22 nt, Human
gggcucaggaguuugaggcugc

SEQ ID NO: 729718 - RNA, 22 nt, Human
uuuucuaaaauauccaggacag

SEQ ID NO: 729719 - RNA, 22 nt, Human
acagcagugcacagagaacccu

SEQ ID NO: 729720 - RNA, 22 nt, Human
uuccugugaagaucugggugcu

SEQ ID NO: 729721 - RNA, 22 nt, Human
agcagcugagccccagcuguga

SEQ ID NO: 729722 - RNA, 20 nt, Human
cuggcuggaaacuuagccuu

SEQ ID NO: 729723 - RNA, 22 nt, Human
agcuuuccacuaucuuaggggu

SEQ ID NO: 729724 - RNA, 22 nt, Human
gcugccuucccggaaugucauc

SEQ ID NO: 729725 - RNA, 22 nt, Human
uagcagcucuuuacuaaccagu

SEQ ID NO: 729726 - RNA, 21 nt, Human
uaggcagaggagcagguaucu

SEQ ID NO: 729727 - RNA, 22 nt, Human
aaaugaguuugccucuagauag

SEQ ID NO: 729728 - RNA, 20 nt, Human
ucacagaaacaaauagagaa

SEQ ID NO: 729729 - RNA, 22 nt, Human
gcagcaagaauaauuuggguag

SEQ ID NO: 729730 - RNA, 22 nt, Human
ucauccaugugcaaacuuuggu

SEQ ID NO: 729731 - RNA, 22 nt, Human
ggugggccaggaaggccgccag

SEQ ID NO: 729732 - RNA, 22 nt, Human
accagcucucuagcccuggucc

SEQ ID NO: 729733 - RNA, 22 nt, Human
gacaggaggcagagcucaggug

SEQ ID NO: 729734 - RNA, 22 nt, Human
augggcugcuucuccagcaccu

SEQ ID NO: 729735 - RNA, 22 nt, Human
caggaggaggugagguagaacu

SEQ ID NO: 729736 - RNA, 22 nt, Human
gaucaaugguguaacuuguccu

SEQ ID NO: 729737 - RNA, 22 nt, Human
aagccaggaagggagcuguccc

SEQ ID NO: 729738 - RNA, 22 nt, Human
gcuggccugggcagccugucgg

SEQ ID NO: 729739 - RNA, 22 nt, Human
ggaugcugauuccagucuccag

SEQ ID NO: 729740 - RNA, 22 nt, Human
ccuggcuguggcggugcucuca

SEQ ID NO: 729741 - RNA, 22 nt, Human
cuuuuguugcccuugucgcagg

SEQ ID NO: 729742 - RNA, 22 nt, Human
ugaggcagaaauuccuguuuuc

SEQ ID NO: 729743 - RNA, 22 nt, Human
guucaguauuaaugagaugauu

SEQ ID NO: 729744 - RNA, 22 nt, Human
uguggaaaagaauaagggagau

SEQ ID NO: 729745 - RNA, 22 nt, Human
gccugugccucagccugcagcc

SEQ ID NO: 729746 - RNA, 20 nt, Human
ggcagcucuagucgaggccc

SEQ ID NO: 729747 - RNA, 22 nt, Human
uagggaggcuacuucuuguagg

SEQ ID NO: 729748 - RNA, 22 nt, Human
caggagcugggucuggaagcag

SEQ ID NO: 729749 - RNA, 22 nt, Human
cagagacauguggccugcacgu

SEQ ID NO: 729750 - RNA, 21 nt, Human
gcugggcuccagucugccgcu

SEQ ID NO: 729751 - RNA, 22 nt, Human
guacaguaaucccguucuucug

SEQ ID NO: 729752 - RNA, 22 nt, Human
ccucaggccagggggcggccag

SEQ ID NO: 729753 - RNA, 21 nt, Human
aaagauguuucaucugagaaa

SEQ ID NO: 729754 - RNA, 22 nt, Human
aucccgaaccucuacuucuuuc

SEQ ID NO: 729755 - RNA, 22 nt, Human
aaacucuggagauguuuaugca

SEQ ID NO: 729756 - RNA, 22 nt, Human
ggggugggcgugcagggacacc

SEQ ID NO: 729757 - RNA, 22 nt, Human
aggcucagcaucugauucauau

SEQ ID NO: 729758 - RNA, 22 nt, Human
auggagggugguaagacagaga

SEQ ID NO: 729759 - RNA, 22 nt, Human
ugucccagaucacaggagggga

SEQ ID NO: 729760 - RNA, 22 nt, Human
uccucugcucagcauuccucac

SEQ ID NO: 729761 - RNA, 22 nt, Human
aaagcugcaagcuccugaggaa

SEQ ID NO: 729762 - RNA, 19 nt, Human
gcugcucugggucucaucu

SEQ ID NO: 729763 - RNA, 22 nt, Human
guuucaaagggaagacgcugga

SEQ ID NO: 729764 - RNA, 22 nt, Human
cacuggcagauuugggaucugg

SEQ ID NO: 729765 - RNA, 22 nt, Human
acagcagcuggguucccaccau

SEQ ID NO: 729766 - RNA, 22 nt, Human
uccaggcuucacgucugcccuc

SEQ ID NO: 729767 - RNA, 22 nt, Human
cuggcuuucugaacaucaguga

SEQ ID NO: 729768 - RNA, 22 nt, Human
cugaggcugcccagggccaggu

SEQ ID NO: 729769 - RNA, 22 nt, Human
cacacagguauauauauguaca

SEQ ID NO: 729770 - RNA, 22 nt, Human
gaucacaguauuuuagaugugu

SEQ ID NO: 729771 - RNA, 22 nt, Human
auacagucagacuuuagccauu

SEQ ID NO: 729772 - RNA, 22 nt, Human
cugccaggcugucccagguccg

SEQ ID NO: 729773 - RNA, 22 nt, Human
agagcagcugugacauggacag

SEQ ID NO: 729774 - RNA, 22 nt, Human
aaaaaauuaucauaguuccuga

SEQ ID NO: 729775 - RNA, 22 nt, Human
aguaggcauuuaauaaacauga

SEQ ID NO: 729776 - RNA, 22 nt, Human
aacugcaaagccaaucucagga

SEQ ID NO: 729777 - RNA, 22 nt, Human
agcaaggcuucagagcugucug

SEQ ID NO: 729778 - RNA, 22 nt, Human
gcaagcagacauucagguaggu

SEQ ID NO: 729779 - RNA, 22 nt, Human
uauuugucacuagaaaggguaa

SEQ ID NO: 729780 - RNA, 18 nt, Human
ggacuacaggcacaggga

SEQ ID NO: 729781 - RNA, 22 nt, Human
agggcagcacaaggcauggacu

SEQ ID NO: 729782 - RNA, 22 nt, Human
agccacagucugaugccugaga

SEQ ID NO: 729783 - RNA, 22 nt, Human
agcagagucugugugcacuuua

SEQ ID NO: 729784 - RNA, 22 nt, Human
uacauacagagaugcuaguuaa

SEQ ID NO: 729785 - RNA, 22 nt, Human
ggagccuggucagguuggcucc

SEQ ID NO: 729786 - RNA, 22 nt, Human
auuacaauaagguuuauuugua

SEQ ID NO: 729787 - RNA, 22 nt, Human
gagggcagagacagugauucac

SEQ ID NO: 729788 - RNA, 22 nt, Human
agaaugcauuuuguguagcuau

SEQ ID NO: 729789 - RNA, 22 nt, Human
agaaaguuaaacagugauaaga

SEQ ID NO: 729790 - RNA, 22 nt, Human
ggcuuuacuauaugguacauuu

SEQ ID NO: 729791 - RNA, 22 nt, Human
uauugaggaucuccugcuaauu

SEQ ID NO: 729792 - RNA, 22 nt, Human
ccugcccaggagucucucugug

SEQ ID NO: 729793 - RNA, 22 nt, Human
aaaucagaguagaauugagcca

SEQ ID NO: 729794 - RNA, 21 nt, Human
aaugaugaaagaugacagagu

SEQ ID NO: 729795 - RNA, 22 nt, Human
ucucuuauuuugccuuugacaa

SEQ ID NO: 729796 - RNA, 19 nt, Human
aagcuuucccauuaacccc

SEQ ID NO: 729797 - RNA, 22 nt, Human
uuuaauuagcaagccagagagc

SEQ ID NO: 729798 - RNA, 22 nt, Human
ucuagguggaugaggaacauag

SEQ ID NO: 729799 - RNA, 22 nt, Human
gggcauggugcugguguucaug

SEQ ID NO: 729800 - RNA, 22 nt, Human
aaggcagaaagggaugugagug

SEQ ID NO: 729801 - RNA, 22 nt, Human
aucuucuggucaaauuuuugca

SEQ ID NO: 729802 - RNA, 22 nt, Human
acaugaaauucuagcugaaccc

SEQ ID NO: 729803 - RNA, 22 nt, Human
auacaaauuuauagaugcauuu

SEQ ID NO: 729804 - RNA, 19 nt, Human
acauauguggauauacaug

SEQ ID NO: 729805 - RNA, 22 nt, Human
ucuggagaccuagcccuguugu

SEQ ID NO: 729806 - RNA, 22 nt, Human
gacaugcaaugcagugguaagu

SEQ ID NO: 729807 - RNA, 22 nt, Human
agugugaccuuauuuggaaaca

SEQ ID NO: 729808 - RNA, 22 nt, Human
ucccugcagcaggugaucaaug

SEQ ID NO: 729809 - RNA, 22 nt, Human
gggcugagucaucuggggccuc

SEQ ID NO: 729810 - RNA, 22 nt, Human
gcugccaguguggcaugaugca

SEQ ID NO: 729811 - RNA, 22 nt, Human
uaaguuuggggaaaauguuaag

SEQ ID NO: 729812 - RNA, 22 nt, Human
agccagugggauuagagccucu

SEQ ID NO: 729813 - RNA, 22 nt, Human
gauccugucuccgcaccguguu

SEQ ID NO: 729814 - RNA, 22 nt, Human
acuucauuguaauauuauagca

SEQ ID NO: 729815 - RNA, 22 nt, Human
cucuccagucaggaacucugac

SEQ ID NO: 729816 - RNA, 22 nt, Human
ugccaggcagugucagauugag

SEQ ID NO: 729817 - RNA, 22 nt, Human
uggcaggaaccuuaaccacaaa

SEQ ID NO: 729818 - RNA, 22 nt, Human
gagcuuggggcauauggugcua

SEQ ID NO: 729819 - RNA, 22 nt, Human
acauugaucagccucccaugca

SEQ ID NO: 729820 - RNA, 22 nt, Human
uucugugugcuuacugguguuc

SEQ ID NO: 729821 - RNA, 22 nt, Human
gggcuucagcuggggauggagc

SEQ ID NO: 729822 - RNA, 22 nt, Human
gcagcaucaauccaugcuucuc

SEQ ID NO: 729823 - RNA, 22 nt, Human
ucagcuuuugucagaaauugua

SEQ ID NO: 729824 - RNA, 22 nt, Human
uuaaauuucuacgugauccagg

SEQ ID NO: 729825 - RNA, 22 nt, Human
uauggguaggccugccgccugu

SEQ ID NO: 729826 - RNA, 22 nt, Human
uaaggcaagagcagggucuuug

SEQ ID NO: 729827 - RNA, 22 nt, Human
uuccuagcuauaaagcucuucc

SEQ ID NO: 729828 - RNA, 22 nt, Human
uuccugaggugauucuaaugug

SEQ ID NO: 729829 - RNA, 22 nt, Human
uggcuggcuagaauggaaaugu

SEQ ID NO: 729830 - RNA, 22 nt, Human
gaaaggaaauauucuaagcacu

SEQ ID NO: 729831 - RNA, 22 nt, Human
ggccagguccaguggaaggccc

SEQ ID NO: 729832 - RNA, 22 nt, Human
cugccagagaucugggcagagu

SEQ ID NO: 729833 - RNA, 22 nt, Human
cuacaucaaguaaucuucaaaa

SEQ ID NO: 729834 - RNA, 22 nt, Human
caggaaauuuugugaucuguuc

SEQ ID NO: 729835 - RNA, 22 nt, Human
cagcccuccuuucacucccagg

SEQ ID NO: 729836 - RNA, 22 nt, Human
acugacuuuggaauauuucuag

SEQ ID NO: 729837 - RNA, 22 nt, Human
gucuucuguucugugaggcuuc

SEQ ID NO: 729838 - RNA, 22 nt, Human
aaucuugagggacucaugaggu

SEQ ID NO: 729839 - RNA, 22 nt, Human
gacuuuauaaaugagaggcgga

SEQ ID NO: 729840 - RNA, 22 nt, Human
uccuggacagauccccaucauc

SEQ ID NO: 729841 - RNA, 22 nt, Human
agcagcaauuuucacugucaau

SEQ ID NO: 729842 - RNA, 22 nt, Human
cucacaugauggccuuuuucau

SEQ ID NO: 729843 - RNA, 21 nt, Human
agaaacaugaucaaaggaacc

SEQ ID NO: 729844 - RNA, 22 nt, Human
caugcaaaugugcuaaucugaa

SEQ ID NO: 729845 - RNA, 22 nt, Human
aagaagcacuuuccuacauguu

SEQ ID NO: 729846 - RNA, 22 nt, Human
ucuggaaauaaaauuauaguug

SEQ ID NO: 729847 - RNA, 22 nt, Human
caggaaaugcuaucauagcuga

SEQ ID NO: 729848 - RNA, 18 nt, Human
auugucagaagucaugug

SEQ ID NO: 729849 - RNA, 22 nt, Human
cugucagcuucuccuggccaga

SEQ ID NO: 729850 - RNA, 23 nt, Human
ggacuaggcaacagaugggacag

SEQ ID NO: 729851 - RNA, 22 nt, Human
cuacaguagagaggauguagaa

SEQ ID NO: 729852 - RNA, 22 nt, Human
gcagcugcugggaucauuuagg

SEQ ID NO: 729853 - RNA, 22 nt, Human
uagagguagaguuacauuaguc

SEQ ID NO: 729854 - RNA, 21 nt, Human
agacugccaucuuugggccac

SEQ ID NO: 729855 - RNA, 22 nt, Human
gggcuccacgcacgcgagaggu

SEQ ID NO: 729856 - RNA, 22 nt, Human
cgggcuuccuccagggaagugc

SEQ ID NO: 729857 - RNA, 23 nt, Human
ucugggccacuugucugcacuuc

SEQ ID NO: 729858 - RNA, 22 nt, Human
uuuaaacauaucuguugaggga

SEQ ID NO: 729859 - RNA, 22 nt, Human
ggcugcggaucuaaggcuggga

SEQ ID NO: 729860 - RNA, 22 nt, Human
cagugagguggauggauggccu

SEQ ID NO: 729861 - RNA, 22 nt, Human
uggcuguggguggaaggaaacc

SEQ ID NO: 729862 - RNA, 22 nt, Human
auuugccuuacugaagaaggag

SEQ ID NO: 729863 - RNA, 22 nt, Human
aagaguuucuuacuggcaucua

SEQ ID NO: 729864 - RNA, 21 nt, Human
uacaugaagcugguguuuguc

SEQ ID NO: 729865 - RNA, 22 nt, Human
gggagcugguuccugcccucca

SEQ ID NO: 729866 - RNA, 22 nt, Human
cccugugcagauggcagcuggg

SEQ ID NO: 729867 - RNA, 22 nt, Human
gcaggcaguuauuuaguagaau

SEQ ID NO: 729868 - RNA, 22 nt, Human
ugcaugugugacaaggacaguu

SEQ ID NO: 729869 - RNA, 22 nt, Human
aaagaacaaaugauauaugguu

SEQ ID NO: 729870 - RNA, 22 nt, Human
uggagagccuucccggcaucgc

SEQ ID NO: 729871 - RNA, 22 nt, Human
ccuugggagaaauugcagaguc

SEQ ID NO: 729872 - RNA, 22 nt, Human
acugggcaaggauaugaugggu

SEQ ID NO: 729873 - RNA, 22 nt, Human
cacaugcaucacgacuuccuuu

SEQ ID NO: 729874 - RNA, 22 nt, Human
acagcagcauaaacugacuaag

SEQ ID NO: 729875 - RNA, 22 nt, Human
ucugcagaaaguggcucagugg

SEQ ID NO: 729876 - RNA, 22 nt, Human
ugagaugcuaaagggcugcuca

SEQ ID NO: 729877 - RNA, 22 nt, Human
agugcaaagcagccuguacacc

SEQ ID NO: 729878 - RNA, 22 nt, Human
uaacuucucugagccucauucc

SEQ ID NO: 729879 - RNA, 22 nt, Human
uuguuuauguguugucuauggc

SEQ ID NO: 729880 - RNA, 22 nt, Human
auacauagauagauaaucuggc

SEQ ID NO: 729881 - RNA, 23 nt, Human
uuucaacaggcagagaagacuua

SEQ ID NO: 729882 - RNA, 22 nt, Human
ugcagaagugagucaugaggaa

SEQ ID NO: 729883 - RNA, 22 nt, Human
uuccuauuuccaugaaacacaa

SEQ ID NO: 729884 - RNA, 22 nt, Human
uauaauuaguaaauggcagauu

SEQ ID NO: 729885 - RNA, 22 nt, Human
ugcagaccucccauggcugccu

SEQ ID NO: 729886 - RNA, 22 nt, Human
ugucuccucauacugucauauu

SEQ ID NO: 729887 - RNA, 22 nt, Human
uauguuauauuuugucaauugu

SEQ ID NO: 729888 - RNA, 22 nt, Human
agggggcaggagagaccugcug

SEQ ID NO: 729889 - RNA, 22 nt, Human
ucaggcagaugcagggauggau

SEQ ID NO: 729890 - RNA, 22 nt, Human
agcgugugccucgggguacacg

SEQ ID NO: 729891 - RNA, 17 nt, Human
cagcucugcagacuucc

SEQ ID NO: 729892 - RNA, 22 nt, Human
auacacaugcacacaugugugu

SEQ ID NO: 729893 - RNA, 22 nt, Human
gguguggaucaucugaggucag

SEQ ID NO: 729894 - RNA, 22 nt, Human
agugcuuuauguuguugugcaa

SEQ ID NO: 729895 - RNA, 22 nt, Human
aacgucuucucuccaaguaaau

SEQ ID NO: 729896 - RNA, 22 nt, Human
agcagggacugagccaguggga

SEQ ID NO: 729897 - RNA, 22 nt, Human
cucaggggaccuggcuccgagu

SEQ ID NO: 729898 - RNA, 22 nt, Human
aacaugcaugaagaaguuauau

SEQ ID NO: 729899 - RNA, 21 nt, Human
aggagcuguguuagcuggucg

SEQ ID NO: 729900 - RNA, 19 nt, Human
aaggcugguaccauagguu

SEQ ID NO: 729901 - RNA, 22 nt, Human
uaagcauuaacucugcugcaag

SEQ ID NO: 729902 - RNA, 23 nt, Human
ugcuggcuguguuauugccaaca

SEQ ID NO: 729903 - RNA, 22 nt, Human
ugggaccugaagcagguuggca

SEQ ID NO: 729904 - RNA, 22 nt, Human
agcaggagaacacuguggcucu

SEQ ID NO: 729905 - RNA, 22 nt, Human
ggaggagcugcugugggggccc

SEQ ID NO: 729906 - RNA, 22 nt, Human
ggucccagcugcucaagaggcu

SEQ ID NO: 729907 - RNA, 22 nt, Human
aggugcugggcagcagucauug

SEQ ID NO: 729908 - RNA, 22 nt, Human
aggauuuggccauggcuucggg

SEQ ID NO: 729909 - RNA, 22 nt, Human
uggagcagagaugguggccuuc

SEQ ID NO: 729910 - RNA, 22 nt, Human
caucauauauuucuacaagugc

SEQ ID NO: 729911 - RNA, 22 nt, Human
ucuaaucuacaaaaggaaauuc

SEQ ID NO: 729912 - RNA, 22 nt, Human
uaguccaguaaaacagcuaacg

SEQ ID NO: 729913 - RNA, 22 nt, Human
ccaucacaguccccaucgugau

SEQ ID NO: 729914 - RNA, 22 nt, Human
gagagagagcuaauauuaagcu

SEQ ID NO: 729915 - RNA, 22 nt, Human
uaagaauagucccuagaugugu

SEQ ID NO: 729916 - RNA, 22 nt, Human
gcagcuccuccugggcuggaga

SEQ ID NO: 729917 - RNA, 20 nt, Human
ugccagggccagcagaggcu

SEQ ID NO: 729918 - RNA, 22 nt, Human
gagcugagaucgugccauugca

SEQ ID NO: 729919 - RNA, 21 nt, Human
gucagagaugcccaacugccu

SEQ ID NO: 729920 - RNA, 22 nt, Human
cugaauaauauuccauuaugag

SEQ ID NO: 729921 - RNA, 22 nt, Human
gggcugagcuguucugaguuua

SEQ ID NO: 729922 - RNA, 22 nt, Human
gugggcagguaggcaccagcua

SEQ ID NO: 729923 - RNA, 22 nt, Human
uaagacacgggcugaucuaaag

SEQ ID NO: 729924 - RNA, 22 nt, Human
caucugugccggguguuuguca

SEQ ID NO: 729925 - RNA, 22 nt, Human
aggaaaaugaaacagcaacugu

SEQ ID NO: 729926 - RNA, 22 nt, Human
uuuaguguaauucugccuuuug

SEQ ID NO: 729927 - RNA, 18 nt, Human
gugggguguugugaggau

SEQ ID NO: 729928 - RNA, 22 nt, Human
uuuagcauuaagcuuuucaaau

SEQ ID NO: 729929 - RNA, 21 nt, Human
ucacugugcaaauguugaugg

SEQ ID NO: 729930 - RNA, 20 nt, Human
auacaguaggugcucaauau

SEQ ID NO: 729931 - RNA, 22 nt, Human
ggacccuggagacccacuggga

SEQ ID NO: 729932 - RNA, 22 nt, Human
ucauugaguucaaauccuucau

SEQ ID NO: 729933 - RNA, 22 nt, Human
ucuuuagaaacuuuucuucaug

SEQ ID NO: 729934 - RNA, 22 nt, Human
uccaaagccgacugacaucuga

SEQ ID NO: 729935 - RNA, 22 nt, Human
gcccaggaagugacucagaugu

SEQ ID NO: 729936 - RNA, 22 nt, Human
aagccgggccugagaaaugaca

SEQ ID NO: 729937 - RNA, 22 nt, Human
gccacagcccgagcaccaugag

SEQ ID NO: 729938 - RNA, 22 nt, Human
acaggcugguuuguaaaagaug

SEQ ID NO: 729939 - RNA, 22 nt, Human
ggccucuguucugcauuccucc

SEQ ID NO: 729940 - RNA, 22 nt, Human
cucuccagaucugcugagccag

SEQ ID NO: 729941 - RNA, 22 nt, Human
cagcccagccuugucucuuuau

SEQ ID NO: 729942 - RNA, 22 nt, Human
aaccaugucuuguuuuccuagu

SEQ ID NO: 729943 - RNA, 22 nt, Human
aguguuuauuagauuucccuuu

SEQ ID NO: 729944 - RNA, 22 nt, Human
ggaaggaagaggaccgagcugg

SEQ ID NO: 729945 - RNA, 22 nt, Human
uuggcugagagaggaaaagggc

SEQ ID NO: 729946 - RNA, 22 nt, Human
caaacauuuugagugguuucug

SEQ ID NO: 729947 - RNA, 22 nt, Human
ucugcauggagaggagaugcua

SEQ ID NO: 729948 - RNA, 22 nt, Human
ucccuagucgcaucuguggaga

SEQ ID NO: 729949 - RNA, 22 nt, Human
ccaaaauuaagccucuuauguu

SEQ ID NO: 729950 - RNA, 22 nt, Human
caggccagcagggccuccgugg

SEQ ID NO: 729951 - RNA, 22 nt, Human
cugcugggauagaaguaucuca

SEQ ID NO: 729952 - RNA, 22 nt, Human
aggagcucuugaugcuugaggg

SEQ ID NO: 729953 - RNA, 22 nt, Human
ccuggcagacugugagggcagg

SEQ ID NO: 729954 - RNA, 23 nt, Human
ugccuauucagcagagugauagc

SEQ ID NO: 729955 - RNA, 22 nt, Human
aggcacugaagugguaaaugua

SEQ ID NO: 729956 - RNA, 22 nt, Human
cauucugggucuggcucaggga

SEQ ID NO: 729957 - RNA, 22 nt, Human
ucaguaucaggcuggaauuaag

SEQ ID NO: 729958 - RNA, 22 nt, Human
acacacugcucgcucagauuaa

SEQ ID NO: 729959 - RNA, 22 nt, Human
gauuuguggugugaggaagagc

SEQ ID NO: 729960 - RNA, 22 nt, Human
aaauaaguuaaacuagaaugau

SEQ ID NO: 729961 - RNA, 22 nt, Human
ugacaugcuuguuuuccuugaa

SEQ ID NO: 729962 - RNA, 22 nt, Human
ugcugggugguugcuccucccg

SEQ ID NO: 729963 - RNA, 22 nt, Human
gagaaggaguagcugaccuggg

SEQ ID NO: 729964 - RNA, 22 nt, Human
uuuucuuauggugaagcacaaa

SEQ ID NO: 729965 - RNA, 17 nt, Human
uuccuggaagucauucc

SEQ ID NO: 729966 - RNA, 22 nt, Human
aaggcaggaugcggacccaucu

SEQ ID NO: 729967 - RNA, 22 nt, Human
auguucuuagcaaaguacuugc

SEQ ID NO: 729968 - RNA, 22 nt, Human
ggcuggaagagacugaggacac

SEQ ID NO: 729969 - RNA, 22 nt, Human
uuucccaauugagagguucugu

SEQ ID NO: 729970 - RNA, 22 nt, Human
uccaagaucuacagcaguuuag

SEQ ID NO: 729971 - RNA, 22 nt, Human
uuucucaacagaguaugcccuu

SEQ ID NO: 729972 - RNA, 22 nt, Human
cucuggguccuggggcuacaag

SEQ ID NO: 729973 - RNA, 22 nt, Human
uaaguggaagguuauaugcuaa

SEQ ID NO: 729974 - RNA, 22 nt, Human
cuggcuguuucaggcagugucc

SEQ ID NO: 729975 - RNA, 22 nt, Human
ucagggcagguuaacuugggug

SEQ ID NO: 729976 - RNA, 17 nt, Human
cccguucucuucgcugg

SEQ ID NO: 729977 - RNA, 22 nt, Human
agccugugugaagcccucagag

SEQ ID NO: 729978 - RNA, 22 nt, Human
auauucauugaacaccuacuac

SEQ ID NO: 729979 - RNA, 22 nt, Human
cagagccccucagcucucuccc

SEQ ID NO: 729980 - RNA, 22 nt, Human
caugcagugccucuggauucuu

SEQ ID NO: 729981 - RNA, 22 nt, Human
acaaugcucauauuuaugccaa

SEQ ID NO: 729982 - RNA, 22 nt, Human
cagccccagcacuuagcugagu

SEQ ID NO: 729983 - RNA, 22 nt, Human
ugcucauugcugauuuacaugu

SEQ ID NO: 729984 - RNA, 22 nt, Human
ucuuuucuucuuaaugguuaau

SEQ ID NO: 729985 - RNA, 22 nt, Human
uccuggaggcaaaugaagacuc

SEQ ID NO: 729986 - RNA, 22 nt, Human
ggaggaggggugacugaaugcu

SEQ ID NO: 729987 - RNA, 21 nt, Human
gccuguguaaauugaguuucc

SEQ ID NO: 729988 - RNA, 22 nt, Human
gacauuuagaaguuagauucaa

SEQ ID NO: 729989 - RNA, 22 nt, Human
aggaaaaaagucugugauuaua

SEQ ID NO: 729990 - RNA, 18 nt, Human
gcugagguggugucagag

SEQ ID NO: 729991 - RNA, 22 nt, Human
gcauugauucugaagugaaaug

SEQ ID NO: 729992 - RNA, 20 nt, Human
ugagugauggaggcggguca

SEQ ID NO: 729993 - RNA, 22 nt, Human
ggcaccagggcaagggucuuuc

SEQ ID NO: 729994 - RNA, 22 nt, Human
gacaggcuucauccucagaguu

SEQ ID NO: 729995 - RNA, 23 nt, Human
ugcagguagggcccagcagucuu

SEQ ID NO: 729996 - RNA, 22 nt, Human
aaaucagacacagugaaaguua

SEQ ID NO: 729997 - RNA, 22 nt, Human
cauacauugcucauucaguauc

SEQ ID NO: 729998 - RNA, 19 nt, Human
auggcugcugauuggggau

SEQ ID NO: 729999 - RNA, 22 nt, Human
agagguaugugucagugcuuau

SEQ ID NO: 730000 - RNA, 22 nt, Human
cuagucacgucuuucaguuacc

SEQ ID NO: 730001 - RNA, 21 nt, Human
acacaagcacucguacauacg

SEQ ID NO: 730002 - RNA, 17 nt, Human
cguggcugagccauaga

SEQ ID NO: 730003 - RNA, 22 nt, Human
agagaugaaaaguggagacugg

SEQ ID NO: 730004 - RNA, 22 nt, Human
guggugaagcauugagaaguca

SEQ ID NO: 730005 - RNA, 22 nt, Human
gggagcugaggagccccgucgg

SEQ ID NO: 730006 - RNA, 22 nt, Human
ucuggagggguuuagagggaca

SEQ ID NO: 730007 - RNA, 22 nt, Human
gaugguggcaagagccaagucu

SEQ ID NO: 730008 - RNA, 22 nt, Human
cuguaugaguugggaauagaau

SEQ ID NO: 730009 - RNA, 19 nt, Human
gccugggaugggcagaacu

SEQ ID NO: 730010 - RNA, 22 nt, Human
uggcucagccauucguguugcc

SEQ ID NO: 730011 - RNA, 18 nt, Human
ucuggcucaggacugaac

SEQ ID NO: 730012 - RNA, 22 nt, Human
ucaacaaauacuuaaagcagag

SEQ ID NO: 730013 - RNA, 22 nt, Human
ugcggagggagcagucggcugu

SEQ ID NO: 730014 - RNA, 22 nt, Human
guccugugggcccaccaugagc

SEQ ID NO: 730015 - RNA, 22 nt, Human
uaaauguacugaggcaacagga

SEQ ID NO: 730016 - RNA, 21 nt, Human
gccacguuucagucuucucag

SEQ ID NO: 730017 - RNA, 22 nt, Human
gggacaauggaggccucucucc

SEQ ID NO: 730018 - RNA, 22 nt, Human
uuuccaauaaagugucauuguu

SEQ ID NO: 730019 - RNA, 22 nt, Human
ugagucagucugcccuggcuuc

SEQ ID NO: 730020 - RNA, 22 nt, Human
aguuacaaccaugacacaagca

SEQ ID NO: 730021 - RNA, 22 nt, Human
guauuuuauggcaugcaguggc

SEQ ID NO: 730022 - RNA, 22 nt, Human
gcacagcagcugggggcccugg

SEQ ID NO: 730023 - RNA, 22 nt, Human
ugccuuuacugauuagcugugu

SEQ ID NO: 730024 - RNA, 22 nt, Human
agccaggguuagaagauaguca

SEQ ID NO: 730025 - RNA, 22 nt, Human
ugacucuuaaauauacuguuga

SEQ ID NO: 730026 - RNA, 22 nt, Human
agucucuuuguggacucugccu

SEQ ID NO: 730027 - RNA, 22 nt, Human
ucugggagccugaaagugaaug

SEQ ID NO: 730028 - RNA, 22 nt, Human
uuauuaugccauuaccucccug

SEQ ID NO: 730029 - RNA, 22 nt, Human
augagcugugggauuccagagg

SEQ ID NO: 730030 - RNA, 22 nt, Human
uguuuaaauagaacauacugca

SEQ ID NO: 730031 - RNA, 20 nt, Human
aagagucuuuacugagcuaa

SEQ ID NO: 730032 - RNA, 22 nt, Human
aaaaacugcaauuacuuuuguc

SEQ ID NO: 730033 - RNA, 22 nt, Human
acacagggggcauucuaggagu

SEQ ID NO: 730034 - RNA, 22 nt, Human
gaagcaauguguuuucaacauu

SEQ ID NO: 730035 - RNA, 23 nt, Human
aaucuauacuuaggcugguaaua

SEQ ID NO: 730036 - RNA, 22 nt, Human
gcucagaggaugcuccuuuaug

SEQ ID NO: 730037 - RNA, 22 nt, Human
aggaagccuggcauuaaaaagc

SEQ ID NO: 730038 - RNA, 22 nt, Human
gggaugcagacuacagggcuua

SEQ ID NO: 730039 - RNA, 22 nt, Human
aagacagcagcaccucucguuu

SEQ ID NO: 730040 - RNA, 22 nt, Human
aagcuuccugaaugcucauuua

SEQ ID NO: 730041 - RNA, 20 nt, Human
auuguuucauuuaauguaca

SEQ ID NO: 730042 - RNA, 22 nt, Human
ggggccacuggcaggaccuugg

SEQ ID NO: 730043 - RNA, 22 nt, Human
uccuggccgccgcguggggccg

SEQ ID NO: 730044 - RNA, 22 nt, Human
uucacaagucauuagcugcaua

SEQ ID NO: 730045 - RNA, 22 nt, Human
ggucuccagcugggacccugca

SEQ ID NO: 730046 - RNA, 22 nt, Human
acagaagcagcgcggcucuucu

SEQ ID NO: 730047 - RNA, 23 nt, Human
acucucagguucuuuccagcagg

SEQ ID NO: 730048 - RNA, 22 nt, Human
auagaagauagcuuuuguuucu

SEQ ID NO: 730049 - RNA, 22 nt, Human
uaacacuguaaaccuagauguu

SEQ ID NO: 730050 - RNA, 22 nt, Human
gugcccaggugucccugagaag

SEQ ID NO: 730051 - RNA, 22 nt, Human
ugccaggcauauggccucuuug

SEQ ID NO: 730052 - RNA, 22 nt, Human
aggcccagcugggccaggaaca

SEQ ID NO: 730053 - RNA, 22 nt, Human
uggcauccucccucaagcugaa

SEQ ID NO: 730054 - RNA, 22 nt, Human
gaaauguagaauugcuuaacug

SEQ ID NO: 730055 - RNA, 22 nt, Human
uggaugagauuaaagugagguu

SEQ ID NO: 730056 - RNA, 22 nt, Human
ugguuuauuucucugaaagguu

SEQ ID NO: 730057 - RNA, 22 nt, Human
cgcccuccacacagccccuggc

SEQ ID NO: 730058 - RNA, 22 nt, Human
ucacaugccuuuuacucugcac

SEQ ID NO: 730059 - RNA, 22 nt, Human
agauauuaccagcagucuaugc

SEQ ID NO: 730060 - RNA, 23 nt, Human
aaacaugcagcacaugaaugcua

SEQ ID NO: 730061 - RNA, 22 nt, Human
agugaacaguuuggaacacaug

SEQ ID NO: 730062 - RNA, 22 nt, Human
acaauuacucaacuuugcugcu

SEQ ID NO: 730063 - RNA, 22 nt, Human
auuuaaaugcuuaagaggguuu

SEQ ID NO: 730064 - RNA, 22 nt, Human
ucucagcucagcuuccacagag

SEQ ID NO: 730065 - RNA, 22 nt, Human
acaggaaccaggcaggucgauu

SEQ ID NO: 730066 - RNA, 22 nt, Human
aguacacuggcaaauguggugg

SEQ ID NO: 730067 - RNA, 22 nt, Human
cuugcaggcagggccuccugga

SEQ ID NO: 730068 - RNA, 22 nt, Human
gcuuuagacauaaaguucuuca

SEQ ID NO: 730069 - RNA, 22 nt, Human
acacugugcaugcauauacaca

SEQ ID NO: 730070 - RNA, 22 nt, Human
cauggccucaaaggacugcaga

SEQ ID NO: 730071 - RNA, 22 nt, Human
aaaauguaugauggaggugcua

SEQ ID NO: 730072 - RNA, 22 nt, Human
agaagggagagaaaguugguua

SEQ ID NO: 730073 - RNA, 22 nt, Human
ccacucccuuccgguccagggc

SEQ ID NO: 730074 - RNA, 23 nt, Human
uggacagcagcagcagugucacc

SEQ ID NO: 730075 - RNA, 20 nt, Human
caguagcaauaauuagaagc

SEQ ID NO: 730076 - RNA, 22 nt, Human
uugcagaggcaaaaaugaacuc

SEQ ID NO: 730077 - RNA, 22 nt, Human
cagcacagcuggcucuggaagc

SEQ ID NO: 730078 - RNA, 22 nt, Human
ccugcuggccaguggagggcug

SEQ ID NO: 730079 - RNA, 22 nt, Human
gcaggucuggagggcacugggg

SEQ ID NO: 730080 - RNA, 22 nt, Human
ucagagaacuccacaccuuagg

SEQ ID NO: 730081 - RNA, 20 nt, Human
ucuggcaggugaacgagcug

SEQ ID NO: 730082 - RNA, 22 nt, Human
aguucuuauugaauagaaauca

SEQ ID NO: 730083 - RNA, 22 nt, Human
agggcgaggagacggaggcaca

SEQ ID NO: 730084 - RNA, 22 nt, Human
uuaagugcaaaaaugaaaguau

SEQ ID NO: 730085 - RNA, 22 nt, Human
caaugauguuuagauaaaaucc

SEQ ID NO: 730086 - RNA, 22 nt, Human
auagaacuccaucccucugacc

SEQ ID NO: 730087 - RNA, 22 nt, Human
aucaaagugauuuguaaacagg

SEQ ID NO: 730088 - RNA, 22 nt, Human
uuucuuuaggcuguguugccaa

SEQ ID NO: 730089 - RNA, 22 nt, Human
caugugugaaucuugugaucau

SEQ ID NO: 730090 - RNA, 22 nt, Human
acagcuuuuaugggaccagcca

SEQ ID NO: 730091 - RNA, 22 nt, Human
uucauugacugguucguuaagu

SEQ ID NO: 730092 - RNA, 22 nt, Human
cuguccagaaagggggcaacaa

SEQ ID NO: 730093 - RNA, 22 nt, Human
aaaucccugauaauguaggucu

SEQ ID NO: 730094 - RNA, 22 nt, Human
gacaguccuugcccaguaucua

SEQ ID NO: 730095 - RNA, 22 nt, Human
aaagguuuuuauuuauccugga

SEQ ID NO: 730096 - RNA, 22 nt, Human
gucauuuugcugcauauuuaga

SEQ ID NO: 730097 - RNA, 21 nt, Human
cccaggaggagcuccggcucc

SEQ ID NO: 730098 - RNA, 22 nt, Human
cugaggcucaagggcagguggg

SEQ ID NO: 730099 - RNA, 22 nt, Human
cuggcucuaucuccaaggcugg

SEQ ID NO: 730100 - RNA, 23 nt, Human
aggaggaaaaguuaucugcugag

SEQ ID NO: 730101 - RNA, 22 nt, Human
acaggcuuacuguuucauaggg

SEQ ID NO: 730102 - RNA, 22 nt, Human
uuuucuauuaacucauuuugca

SEQ ID NO: 730103 - RNA, 22 nt, Human
cccaauggcuggauggagggau

SEQ ID NO: 730104 - RNA, 23 nt, Human
agucugaauugagaugugcugug

SEQ ID NO: 730105 - RNA, 22 nt, Human
cucccucaggccuuagcccugc

SEQ ID NO: 730106 - RNA, 22 nt, Human
ucuguguauaggguugugcgcu

SEQ ID NO: 730107 - RNA, 22 nt, Human
augugcuugcagaugagccuca

SEQ ID NO: 730108 - RNA, 22 nt, Human
guuauucuaccacuauguacag

SEQ ID NO: 730109 - RNA, 22 nt, Human
gauucacaacugcccugaaggg

SEQ ID NO: 730110 - RNA, 22 nt, Human
gaggcacugaauacuugagggu

SEQ ID NO: 730111 - RNA, 22 nt, Human
gcccuccaccagagcccuucuc

SEQ ID NO: 730112 - RNA, 22 nt, Human
ucuggccaggauggcaagacca

SEQ ID NO: 730113 - RNA, 22 nt, Human
gagccuccuccuggugugccga

SEQ ID NO: 730114 - RNA, 22 nt, Human
aggcuucaaggacagcagccac

SEQ ID NO: 730115 - RNA, 22 nt, Human
gacuggauauugaguacugcaa

SEQ ID NO: 730116 - RNA, 22 nt, Human
gacagacauuuccugauccaau

SEQ ID NO: 730117 - RNA, 22 nt, Human
cuggugggaagauggaaaacau

SEQ ID NO: 730118 - RNA, 22 nt, Human
aaucuagucuccuuaagucuuu

SEQ ID NO: 730119 - RNA, 22 nt, Human
cucaggaaaauauugaagaagu

SEQ ID NO: 730120 - RNA, 22 nt, Human
agggaggugguuccccagugga

SEQ ID NO: 730121 - RNA, 22 nt, Human
aagcagcuuucuuuccugugaa

SEQ ID NO: 730122 - RNA, 22 nt, Human
cugcucugcagcuuggacuccc

SEQ ID NO: 730123 - RNA, 22 nt, Human
aagggccauaacuugcaguguu

SEQ ID NO: 730124 - RNA, 22 nt, Human
uuaaagucuauguacuacacuu

SEQ ID NO: 730125 - RNA, 22 nt, Human
cugcauccuaaccuccaugcag

SEQ ID NO: 730126 - RNA, 21 nt, Human
ugcuugucaugaaugggccag

SEQ ID NO: 730127 - RNA, 22 nt, Human
ccaagagguaucuugccauaaa

SEQ ID NO: 730128 - RNA, 22 nt, Human
uugauucagagaagauuggccc

SEQ ID NO: 730129 - RNA, 22 nt, Human
aaaagagagcugaggagcucca

SEQ ID NO: 730130 - RNA, 22 nt, Human
uucuugggugugaccagucuga

SEQ ID NO: 730131 - RNA, 22 nt, Human
uuaaaagagacuuccuuuguuu

SEQ ID NO: 730132 - RNA, 21 nt, Human
uuuaauuugcauguaugacgc

SEQ ID NO: 730133 - RNA, 22 nt, Human
gaagugaugacgcuguguuuuu

SEQ ID NO: 730134 - RNA, 22 nt, Human
aagcugccaccagcccagggca

SEQ ID NO: 730135 - RNA, 22 nt, Human
gcagagcccuggggguauggug

SEQ ID NO: 730136 - RNA, 22 nt, Human
aucacuguguauguauaugcag

SEQ ID NO: 730137 - RNA, 19 nt, Human
cuccaggauggcugggcga

SEQ ID NO: 730138 - RNA, 22 nt, Human
gacuuucucuccucccaggugu

SEQ ID NO: 730139 - RNA, 22 nt, Human
cuguuauuugcuggaagaguuu

SEQ ID NO: 730140 - RNA, 22 nt, Human
acaugcacagcaagggugagag

SEQ ID NO: 730141 - RNA, 22 nt, Human
guggccagaagacugcaaugcu

SEQ ID NO: 730142 - RNA, 22 nt, Human
gcccugcucuggucucugcccg

SEQ ID NO: 730143 - RNA, 22 nt, Human
uacccagcuccucagaagacca

SEQ ID NO: 730144 - RNA, 22 nt, Human
accaagcuguauauuauugguu

SEQ ID NO: 730145 - RNA, 22 nt, Human
ccuggggauucugacacggagu

SEQ ID NO: 730146 - RNA, 22 nt, Human
ccagcuguuggaguuucacugc

SEQ ID NO: 730147 - RNA, 23 nt, Human
aacagccaacuuuagcggguggc

SEQ ID NO: 730148 - RNA, 22 nt, Human
uuacuaguauaugucaagcaac

SEQ ID NO: 730149 - RNA, 22 nt, Human
cuucuccuuauaugucccguuc

SEQ ID NO: 730150 - RNA, 21 nt, Human
uagggcucucugugucaggug

SEQ ID NO: 730151 - RNA, 22 nt, Human
uugcagcagggugaauucacuc

SEQ ID NO: 730152 - RNA, 22 nt, Human
ccagagcuucggggcggcugua

SEQ ID NO: 730153 - RNA, 22 nt, Human
augacaaacccaggauguaaca

SEQ ID NO: 730154 - RNA, 20 nt, Human
agugucuggugcagggccuc

SEQ ID NO: 730155 - RNA, 22 nt, Human
cagggcugaaaucaagguguag

SEQ ID NO: 730156 - RNA, 23 nt, Human
uucuuacaaggcuggcccacuug

SEQ ID NO: 730157 - RNA, 22 nt, Human
guagggacuuguuuuacuagua

SEQ ID NO: 730158 - RNA, 22 nt, Human
aggcuuuacugccucaggacuc

SEQ ID NO: 730159 - RNA, 22 nt, Human
uucugggcuuggcuguuuccau

SEQ ID NO: 730160 - RNA, 22 nt, Human
auuagugucugugaauaauucu

SEQ ID NO: 730161 - RNA, 22 nt, Human
gcuggaggaucacuugagccca

SEQ ID NO: 730162 - RNA, 22 nt, Human
ggccugcuauuggugggcagac

SEQ ID NO: 730163 - RNA, 22 nt, Human
acacagaugcuauuuagucucu

SEQ ID NO: 730164 - RNA, 22 nt, Human
gguucacacuuucaugauuuca

SEQ ID NO: 730165 - RNA, 22 nt, Human
ggucagcaauuuggacugggcu

SEQ ID NO: 730166 - RNA, 22 nt, Human
gccaggcucuugguuauguuuu

SEQ ID NO: 730167 - RNA, 22 nt, Human
auaugcaugcaugcuugugaga

SEQ ID NO: 730168 - RNA, 22 nt, Human
agagugaaguuuuugaaaguga

SEQ ID NO: 730169 - RNA, 22 nt, Human
auggcugcaucauccugguuga

SEQ ID NO: 730170 - RNA, 22 nt, Human
gaggucaggggagaggcugaug

SEQ ID NO: 730171 - RNA, 19 nt, Human
ggcccaaguacugagugcc

SEQ ID NO: 730172 - RNA, 21 nt, Human
ugcucacagaugugcucagug

SEQ ID NO: 730173 - RNA, 22 nt, Human
uuaagaaugugccuuuugguug

SEQ ID NO: 730174 - RNA, 22 nt, Human
uggcacagagggacccagcagc

SEQ ID NO: 730175 - RNA, 22 nt, Human
uuauuugcccauguuuagcaga

SEQ ID NO: 730176 - RNA, 22 nt, Human
uucugcaggaugcucugguggu

SEQ ID NO: 730177 - RNA, 22 nt, Human
caaggaaacaugaaaugcauug

SEQ ID NO: 730178 - RNA, 22 nt, Human
aagaacauuuaugauggcauuu

SEQ ID NO: 730179 - RNA, 22 nt, Human
auccugggcugcacccucagcc

SEQ ID NO: 730180 - RNA, 23 nt, Human
agaucacaugcugauggaaaaug

SEQ ID NO: 730181 - RNA, 22 nt, Human
caaaugauccuugcaagcugug

SEQ ID NO: 730182 - RNA, 22 nt, Human
gagaugggcgagaagguggacu

SEQ ID NO: 730183 - RNA, 22 nt, Human
uaguauaucuuuaguacauagu

SEQ ID NO: 730184 - RNA, 23 nt, Human
ucagagaaugguaugcuuuuccu

SEQ ID NO: 730185 - RNA, 22 nt, Human
cugcauaugauagaugccuugc

SEQ ID NO: 730186 - RNA, 22 nt, Human
uccagcuuauagguagauuuaa

SEQ ID NO: 730187 - RNA, 21 nt, Human
uuuauuuauauaggacacaug

SEQ ID NO: 730188 - RNA, 22 nt, Human
aaaugcacagaggccagagagg

SEQ ID NO: 730189 - RNA, 22 nt, Human
uuuauccauucaccaguugaac

SEQ ID NO: 730190 - RNA, 22 nt, Human
augaaaacuuuagccucauuag

SEQ ID NO: 730191 - RNA, 22 nt, Human
gagccccagcccugcuucuaua

SEQ ID NO: 730192 - RNA, 22 nt, Human
uugccugggcuaguaagccaga

SEQ ID NO: 730193 - RNA, 22 nt, Human
uugagggaacaugagaaucauc

SEQ ID NO: 730194 - RNA, 22 nt, Human
aagauauacuauuaaguaccau

SEQ ID NO: 730195 - RNA, 22 nt, Human
uggcccugucccuggagccugg

SEQ ID NO: 730196 - RNA, 22 nt, Human
ggagggggaaacuuuggcugcc

SEQ ID NO: 730197 - RNA, 22 nt, Human
ccaacagguugagagucugaau

SEQ ID NO: 730198 - RNA, 22 nt, Human
ccagaugggccagggguuuguu

SEQ ID NO: 730199 - RNA, 22 nt, Human
ugggccuccuggaagaaugugg

SEQ ID NO: 730200 - RNA, 22 nt, Human
uggcuggggccugaauccugca

SEQ ID NO: 730201 - RNA, 22 nt, Human
ucuggagagaucuuccacaaca

SEQ ID NO: 730202 - RNA, 22 nt, Human
aguugcugcuucucucuagaga

SEQ ID NO: 730203 - RNA, 22 nt, Human
gggaggcuggcucuggccacag

SEQ ID NO: 730204 - RNA, 22 nt, Human
auguauuuugccagacugucuc

SEQ ID NO: 730205 - RNA, 22 nt, Human
auuucucacugagcagauaaaa

SEQ ID NO: 730206 - RNA, 22 nt, Human
ugagcuguagcagaugcuguug

SEQ ID NO: 730207 - RNA, 22 nt, Human
aacagcauauuucauauauuga

SEQ ID NO: 730208 - RNA, 22 nt, Human
cuggagucuccccaggagcgug

SEQ ID NO: 730209 - RNA, 22 nt, Human
aguuugauuguauggguuuuaa

SEQ ID NO: 730210 - RNA, 22 nt, Human
uccaggagcucauccacgucaa

SEQ ID NO: 730211 - RNA, 22 nt, Human
caccugccugcaggggcuccac

SEQ ID NO: 730212 - RNA, 18 nt, Human
ugcaugcuuuuguuucca

SEQ ID NO: 730213 - RNA, 22 nt, Human
gagcugaguaugaaggauguga

SEQ ID NO: 730214 - RNA, 22 nt, Human
agcagcucuuaacaaagcaugg

SEQ ID NO: 730215 - RNA, 22 nt, Human
ugggagaguuuguuuagaguga

SEQ ID NO: 730216 - RNA, 22 nt, Human
ggccaguccccuaauccagggc

SEQ ID NO: 730217 - RNA, 22 nt, Human
uagaaaagauaacauucugugc

SEQ ID NO: 730218 - RNA, 22 nt, Human
uugggagcaaauaggaaagagg

SEQ ID NO: 730219 - RNA, 22 nt, Human
aguccagccuucaaucuuagug

SEQ ID NO: 730220 - RNA, 22 nt, Human
uuugacagauccuuaacucagc

SEQ ID NO: 730221 - RNA, 18 nt, Human
ggcuccaggaccuaccca

SEQ ID NO: 730222 - RNA, 22 nt, Human
cuaguaaagcuaugauucugcc

SEQ ID NO: 730223 - RNA, 22 nt, Human
ccuggcuucucugcauuguucu

SEQ ID NO: 730224 - RNA, 22 nt, Human
gggcgccgugggaaacagccgg

SEQ ID NO: 730225 - RNA, 22 nt, Human
ggguccagcuacaucagggugg

SEQ ID NO: 730226 - RNA, 22 nt, Human
cagguccagaaaccaaaggauu

SEQ ID NO: 730227 - RNA, 22 nt, Human
caggagcucacagucuuugggu

SEQ ID NO: 730228 - RNA, 22 nt, Human
gucugccucuuucuuucugggu

SEQ ID NO: 730229 - RNA, 22 nt, Human
aacacuuucuauuauuaugguu

SEQ ID NO: 730230 - RNA, 22 nt, Human
gaaauagaucucugggaugcaa

SEQ ID NO: 730231 - RNA, 22 nt, Human
gaccuggcauauucauuggcac

SEQ ID NO: 730232 - RNA, 22 nt, Human
gcugugggacagguccagccag

SEQ ID NO: 730233 - RNA, 22 nt, Human
uuaugcagucgacaucugauca

SEQ ID NO: 730234 - RNA, 22 nt, Human
agcuccaguuacuuaccuagag

SEQ ID NO: 730235 - RNA, 22 nt, Human
auuaguguuguggcuucauggc

SEQ ID NO: 730236 - RNA, 22 nt, Human
uuuuuccaccguacuuccugag

SEQ ID NO: 730237 - RNA, 22 nt, Human
cagacaggcaggugagagcucc

SEQ ID NO: 730238 - RNA, 22 nt, Human
aauuucagcucaaacuuguguu

SEQ ID NO: 730239 - RNA, 22 nt, Human
ccuggagucugugacuuuccuc

SEQ ID NO: 730240 - RNA, 22 nt, Human
acuuuuaugauaaucaauguuc

SEQ ID NO: 730241 - RNA, 22 nt, Human
guucacaguuaggacaacugcu

SEQ ID NO: 730242 - RNA, 22 nt, Human
cugggcuggcgcauccgacacg

SEQ ID NO: 730243 - RNA, 17 nt, Human
ugcagcaaaugggggac

SEQ ID NO: 730244 - RNA, 22 nt, Human
caugcacacugcaacaaggacu

SEQ ID NO: 730245 - RNA, 22 nt, Human
caaaaugcaucugagaccaggc

SEQ ID NO: 730246 - RNA, 22 nt, Human
gagagcuguccggcugagcagc

SEQ ID NO: 730247 - RNA, 23 nt, Human
aaaaaaccauguaggcacucagu

SEQ ID NO: 730248 - RNA, 22 nt, Human
uacagguuacacuuuuaaaagu

SEQ ID NO: 730249 - RNA, 22 nt, Human
caggggcuuaagugacagaagg

SEQ ID NO: 730250 - RNA, 22 nt, Human
gggcucaggccuggccucucac

SEQ ID NO: 730251 - RNA, 22 nt, Human
uuuuagaaauacugauuuagug

SEQ ID NO: 730252 - RNA, 22 nt, Human
uugcuuuauucacaucuauauu

SEQ ID NO: 730253 - RNA, 22 nt, Human
aaagguuugcauggaauuuacc

SEQ ID NO: 730254 - RNA, 22 nt, Human
aguuucacagaggguuagacgc

SEQ ID NO: 730255 - RNA, 22 nt, Human
auucacaaaugcugccccauuc

SEQ ID NO: 730256 - RNA, 23 nt, Human
gguuccaggaacacagccugaug

SEQ ID NO: 730257 - RNA, 22 nt, Human
gccagagguaucaaagauagua

SEQ ID NO: 730258 - RNA, 22 nt, Human
ugugccagaaaauaugcugagg

SEQ ID NO: 730259 - RNA, 22 nt, Human
uuccagucuggccugugcuuag

SEQ ID NO: 730260 - RNA, 22 nt, Human
uaacaguagccuuauguggucu

SEQ ID NO: 730261 - RNA, 19 nt, Human
agaagcaccagucauuccu

SEQ ID NO: 730262 - RNA, 22 nt, Human
aauucaguuauauguccacuuc

SEQ ID NO: 730263 - RNA, 23 nt, Human
uagaaucuguauuucugcaguuc

SEQ ID NO: 730264 - RNA, 19 nt, Human
aaagaucugggauugagac

SEQ ID NO: 730265 - RNA, 22 nt, Human
guucccacgccuccucuccagc

SEQ ID NO: 730266 - RNA, 22 nt, Human
uuaacuauuauuagcaucuuug

SEQ ID NO: 730267 - RNA, 22 nt, Human
ugagagagccugaaucucuuac

SEQ ID NO: 730268 - RNA, 22 nt, Human
ugucuaaaugcaauggauuucc

SEQ ID NO: 730269 - RNA, 22 nt, Human
uucucuucccacuuucuguauu

SEQ ID NO: 730270 - RNA, 22 nt, Human
ugagacacucucgggcacauuu

SEQ ID NO: 730271 - RNA, 22 nt, Human
gguccaggaucaaggcaucacc

SEQ ID NO: 730272 - RNA, 22 nt, Human
acugcucuguuuucauauguuu

SEQ ID NO: 730273 - RNA, 22 nt, Human
aggaagcccaagucucaucuuc

SEQ ID NO: 730274 - RNA, 22 nt, Human
ggccagaggugguacauagcuu

SEQ ID NO: 730275 - RNA, 22 nt, Human
gggcuggcucugucuagaaagg

SEQ ID NO: 730276 - RNA, 22 nt, Human
gcaggcugaguauuacccuagu

SEQ ID NO: 730277 - RNA, 23 nt, Human
uauuuggaaagagggaagaagac

SEQ ID NO: 730278 - RNA, 22 nt, Human
ucugggaagcugcgugccuguu

SEQ ID NO: 730279 - RNA, 22 nt, Human
acauaucugugagguuuuguug

SEQ ID NO: 730280 - RNA, 22 nt, Human
cuuggagaccagugacauugcu

SEQ ID NO: 730281 - RNA, 22 nt, Human
gacugucauucuagugcccaug

SEQ ID NO: 730282 - RNA, 22 nt, Human
uguguuuuggaaggaacaugca

SEQ ID NO: 730283 - RNA, 22 nt, Human
uuauccugcauccuggaacuca

SEQ ID NO: 730284 - RNA, 22 nt, Human
uuuucguuuauuugacauguaa

SEQ ID NO: 730285 - RNA, 22 nt, Human
gccugugacucgucuugggcca

SEQ ID NO: 730286 - RNA, 22 nt, Human
uauacugaguguguuaaugaug

SEQ ID NO: 730287 - RNA, 22 nt, Human
acauacacaugaauauauuuuu

SEQ ID NO: 730288 - RNA, 22 nt, Human
ugucacagagcaacuauuucuu

SEQ ID NO: 730289 - RNA, 21 nt, Human
acacaaaccuccucagccugg

SEQ ID NO: 730290 - RNA, 19 nt, Human
agggccacggggagguauu

SEQ ID NO: 730291 - RNA, 22 nt, Human
ugcaccauguaaguggccacgu

SEQ ID NO: 730292 - RNA, 22 nt, Human
uuauguuaugaauggaugaucu

SEQ ID NO: 730293 - RNA, 22 nt, Human
cuucaggaguaguuaccuagca

SEQ ID NO: 730294 - RNA, 22 nt, Human
gagaaagaugaagaguggcguu

SEQ ID NO: 730295 - RNA, 22 nt, Human
ugcagcugagucacccagccau

SEQ ID NO: 730296 - RNA, 22 nt, Human
ucagaaauaaugaaugaugggg

SEQ ID NO: 730297 - RNA, 22 nt, Human
cauagaaugcagcaggaaaguu

SEQ ID NO: 730298 - RNA, 22 nt, Human
cagugccagagguacuagugga

SEQ ID NO: 730299 - RNA, 22 nt, Human
ucaucccucugccaggcccagg

SEQ ID NO: 730300 - RNA, 22 nt, Human
agaaaacauaggagacaggaaa

SEQ ID NO: 730301 - RNA, 22 nt, Human
acagaauaguagcuuaaaguca

SEQ ID NO: 730302 - RNA, 22 nt, Human
uggcacuauggaugagacugau

SEQ ID NO: 730303 - RNA, 22 nt, Human
cucagggagagccaagaguucc

SEQ ID NO: 730304 - RNA, 22 nt, Human
ccaggagcauuaagagaacaua

SEQ ID NO: 730305 - RNA, 22 nt, Human
guaacauuauucaugagauaca

SEQ ID NO: 730306 - RNA, 22 nt, Human
ucuuauacagaagauguuuaau

SEQ ID NO: 730307 - RNA, 22 nt, Human
auguauguuuucaguuguauua

SEQ ID NO: 730308 - RNA, 22 nt, Human
aaagcagaggugauaugacuua

SEQ ID NO: 730309 - RNA, 22 nt, Human
agacagcagggagcaggauuca

SEQ ID NO: 730310 - RNA, 22 nt, Human
uuuuuacagucauggucacuca

SEQ ID NO: 730311 - RNA, 18 nt, Human
acuugggacuuuugcauu

SEQ ID NO: 730312 - RNA, 22 nt, Human
cuaaggaaaaggauauauaugu

SEQ ID NO: 730313 - RNA, 22 nt, Human
ucuauucaggcagagugcagca

SEQ ID NO: 730314 - RNA, 19 nt, Human
gcugagguggaggaaggag

SEQ ID NO: 730315 - RNA, 22 nt, Human
ugcaggaaguuuccugaacuuu

SEQ ID NO: 730316 - RNA, 22 nt, Human
cucauacauaugccauuccugc

SEQ ID NO: 730317 - RNA, 22 nt, Human
guguacaguuagccaccaaauu

SEQ ID NO: 730318 - RNA, 22 nt, Human
ucccagcagaugagcugaccua

SEQ ID NO: 730319 - RNA, 22 nt, Human
uggaggcagguggaggagugaa

SEQ ID NO: 730320 - RNA, 23 nt, Human
ucugucuguguaugugcagaaag

SEQ ID NO: 730321 - RNA, 22 nt, Human
ucuugaaagcaugagauggaca

SEQ ID NO: 730322 - RNA, 22 nt, Human
gaccagggucacucacagggcu

SEQ ID NO: 730323 - RNA, 22 nt, Human
gaaacaauuuuuguugucuaag

SEQ ID NO: 730324 - RNA, 22 nt, Human
aaacaucuuucuauugcaaguu

SEQ ID NO: 730325 - RNA, 22 nt, Human
gggucagcugcugggggcugac

SEQ ID NO: 730326 - RNA, 22 nt, Human
ucuggggagggagccacagguc

SEQ ID NO: 730327 - RNA, 22 nt, Human
gacuucaacuucuggggagcaa

SEQ ID NO: 730328 - RNA, 22 nt, Human
auuuucaucauggguuuaacau

SEQ ID NO: 730329 - RNA, 22 nt, Human
gagcuggaggaccaggacuggg

SEQ ID NO: 730330 - RNA, 22 nt, Human
gcagcugggucugugugggcug

SEQ ID NO: 730331 - RNA, 22 nt, Human
gugaggagcugacacuggggug

SEQ ID NO: 730332 - RNA, 22 nt, Human
aagcagcugugugacauaaucu

SEQ ID NO: 730333 - RNA, 22 nt, Human
uaggggcuuguaauuuaauaga

SEQ ID NO: 730334 - RNA, 22 nt, Human
ggacacugaagaaucucagaug

SEQ ID NO: 730335 - RNA, 22 nt, Human
uuaagaucaagauaagcaauaa

SEQ ID NO: 730336 - RNA, 22 nt, Human
gagaagggauaugccacucucg

SEQ ID NO: 730337 - RNA, 22 nt, Human
acacaucaugccaaguuucacc

SEQ ID NO: 730338 - RNA, 22 nt, Human
gucugcucaugcuaccgcgggc

SEQ ID NO: 730339 - RNA, 22 nt, Human
gcagacagacugcagugauuuu

SEQ ID NO: 730340 - RNA, 22 nt, Human
uggcagugucuugcuggggcag

SEQ ID NO: 730341 - RNA, 22 nt, Human
uugccuuugacggugcagcagu

SEQ ID NO: 730342 - RNA, 22 nt, Human
aucagcuggaacaagugucuga

SEQ ID NO: 730343 - RNA, 22 nt, Human
gcagaugcuuggcacugacagu

SEQ ID NO: 730344 - RNA, 22 nt, Human
ugucuauuaacacaagaaagga

SEQ ID NO: 730345 - RNA, 21 nt, Human
ccuucuccauuacaguaagcu

SEQ ID NO: 730346 - RNA, 22 nt, Human
acauucaggccacaguggaguc

SEQ ID NO: 730347 - RNA, 21 nt, Human
gaaaaccauuugcaucaugag

SEQ ID NO: 730348 - RNA, 20 nt, Human
uuacaaguuucuaauaacca

SEQ ID NO: 730349 - RNA, 22 nt, Human
ugguauuacagcauuccauauu

SEQ ID NO: 730350 - RNA, 22 nt, Human
agucugggagaaggugagauua

SEQ ID NO: 730351 - RNA, 19 nt, Human
uuacacuccugggcagugg

SEQ ID NO: 730352 - RNA, 22 nt, Human
augcuguuaagaaucucuuccu

SEQ ID NO: 730353 - RNA, 22 nt, Human
ugcuggaagcuccugcaugucu

SEQ ID NO: 730354 - RNA, 22 nt, Human
agaaagcuggagucaagcagag

SEQ ID NO: 730355 - RNA, 22 nt, Human
acaaugcauaccuagcagcuca

SEQ ID NO: 730356 - RNA, 22 nt, Human
gcagugaauuuaacacucagau

SEQ ID NO: 730357 - RNA, 22 nt, Human
gagugaguggccaggaggcaga

SEQ ID NO: 730358 - RNA, 22 nt, Human
uuggccagcagcucuggcuuag

SEQ ID NO: 730359 - RNA, 22 nt, Human
acagaagagcacauuuaguaug

SEQ ID NO: 730360 - RNA, 22 nt, Human
ccaauguuaggcucugguuuua

SEQ ID NO: 730361 - RNA, 22 nt, Human
uucccucuccaggagcccugag

SEQ ID NO: 730362 - RNA, 22 nt, Human
gaguuuauucaggaaauagcca

SEQ ID NO: 730363 - RNA, 22 nt, Human
aggcuguguggaugagucuuac

SEQ ID NO: 730364 - RNA, 22 nt, Human
ucucagaaccucaguuugcucu

SEQ ID NO: 730365 - RNA, 22 nt, Human
ugugcuucucacaucacuguug

SEQ ID NO: 730366 - RNA, 22 nt, Human
cauguaaagcacuucauaacag

SEQ ID NO: 730367 - RNA, 22 nt, Human
ugacauuucgguguaugugaug

SEQ ID NO: 730368 - RNA, 22 nt, Human
uuucagagguaugcugcuuauc

SEQ ID NO: 730369 - RNA, 22 nt, Human
auggcugcagccggcccugcgc

SEQ ID NO: 730370 - RNA, 22 nt, Human
agccucagcacgcagcucugug

SEQ ID NO: 730371 - RNA, 22 nt, Human
ucacuuagauggggaucaucac

SEQ ID NO: 730372 - RNA, 22 nt, Human
uguccucagauaugucuacucu

SEQ ID NO: 730373 - RNA, 22 nt, Human
acacugugcuuagaugcugaac

SEQ ID NO: 730374 - RNA, 22 nt, Human
gaagcacacugauuuuauuucu

SEQ ID NO: 730375 - RNA, 21 nt, Human
aucacauuggcuguuauuauu

SEQ ID NO: 730376 - RNA, 22 nt, Human
gguggcacacuggggagcucgg

SEQ ID NO: 730377 - RNA, 22 nt, Human
augaugaaacuaggaacuagag

SEQ ID NO: 730378 - RNA, 22 nt, Human
guccucagaagccugcuuagcu

SEQ ID NO: 730379 - RNA, 21 nt, Human
cccaggucguggucuucccag

SEQ ID NO: 730380 - RNA, 22 nt, Human
agggucagagaucggccaugug

SEQ ID NO: 730381 - RNA, 21 nt, Human
uugaauuguaugauuaaacug

SEQ ID NO: 730382 - RNA, 22 nt, Human
agccauccuacuaccucagcau

SEQ ID NO: 730383 - RNA, 22 nt, Human
cugaacucuuuaugacagcuug

SEQ ID NO: 730384 - RNA, 22 nt, Human
ucaguuuuguauguuguaaguc

SEQ ID NO: 730385 - RNA, 22 nt, Human
guuuaugaguuacguagggguu

SEQ ID NO: 730386 - RNA, 22 nt, Human
aaguuuguagcuggaugucugu

SEQ ID NO: 730387 - RNA, 22 nt, Human
ugcauuccacagaagggaaaac

SEQ ID NO: 730388 - RNA, 22 nt, Human
auucugggaacuuugucucuca

SEQ ID NO: 730389 - RNA, 22 nt, Human
agguccagugcucuuggugguu

SEQ ID NO: 730390 - RNA, 22 nt, Human
agacuucuugagcuggcacuuc

SEQ ID NO: 730391 - RNA, 17 nt, Human
auggaggcagacagguc

SEQ ID NO: 730392 - RNA, 22 nt, Human
ucugaaauaagggagaagggaa

SEQ ID NO: 730393 - RNA, 22 nt, Human
ucucagagaccugaacucccug

SEQ ID NO: 730394 - RNA, 22 nt, Human
gaaccucuuuaaagaacagaau

SEQ ID NO: 730395 - RNA, 22 nt, Human
uaggaaauugccaauauaugac

SEQ ID NO: 730396 - RNA, 22 nt, Human
uuaaaugucuguagaugugcug

SEQ ID NO: 730397 - RNA, 22 nt, Human
uucuguauuucaaugucuuuau

SEQ ID NO: 730398 - RNA, 22 nt, Human
acugcauuugucugucucaauu

SEQ ID NO: 730399 - RNA, 22 nt, Human
gcucagcuacuuacagguggcu

SEQ ID NO: 730400 - RNA, 22 nt, Human
gccaggcucaguagcgauuccu

SEQ ID NO: 730401 - RNA, 22 nt, Human
gcugagauuacgggcaugagcc

SEQ ID NO: 730402 - RNA, 22 nt, Human
caggcucagaagccaguggagc

SEQ ID NO: 730403 - RNA, 22 nt, Human
ucacuuuacagaugggaaaacu

SEQ ID NO: 730404 - RNA, 22 nt, Human
ggauuuuagaguaccuaagugu

SEQ ID NO: 730405 - RNA, 21 nt, Human
gccagagcaguacaaugaggu

SEQ ID NO: 730406 - RNA, 22 nt, Human
uauuguacauuucaaaguagcu

SEQ ID NO: 730407 - RNA, 22 nt, Human
cucugaguuucauuucccuccu

SEQ ID NO: 730408 - RNA, 22 nt, Human
gauggguagaaguggaagaggu

SEQ ID NO: 730409 - RNA, 22 nt, Human
ccuggcucagaccccaguucug

SEQ ID NO: 730410 - RNA, 22 nt, Human
ucugcauauuguuaauggaaug

SEQ ID NO: 730411 - RNA, 22 nt, Human
gagaaggggugauguggguaau

SEQ ID NO: 730412 - RNA, 22 nt, Human
uuggcccugagguuaucaucua

SEQ ID NO: 730413 - RNA, 22 nt, Human
ucauuuguaccauuuuuuaaga

SEQ ID NO: 730414 - RNA, 22 nt, Human
ccaggcuugguguguggucagg

SEQ ID NO: 730415 - RNA, 22 nt, Human
gcaggagcucguuuccaggcug

SEQ ID NO: 730416 - RNA, 18 nt, Human
cauuccaaguucuaccuc

SEQ ID NO: 730417 - RNA, 22 nt, Human
uguugguaggauuugcuucagc

SEQ ID NO: 730418 - RNA, 22 nt, Human
uuauugcaaccuuuucuggugu

SEQ ID NO: 730419 - RNA, 23 nt, Human
gccuuggagaagucacucaggga

SEQ ID NO: 730420 - RNA, 22 nt, Human
gcucccagaaccaaggcugggg

SEQ ID NO: 730421 - RNA, 22 nt, Human
agaugguguuuccccaggugga

SEQ ID NO: 730422 - RNA, 22 nt, Human
ggaguuggugagcaccaggcuu

SEQ ID NO: 730423 - RNA, 22 nt, Human
acugcaauuauuuguucaccaa

SEQ ID NO: 730424 - RNA, 22 nt, Human
agcucugacaaggauuuucugc

SEQ ID NO: 730425 - RNA, 20 nt, Human
uuucuauggggccagcacau

SEQ ID NO: 730426 - RNA, 22 nt, Human
uuuguagagaauaaaacaaauu

SEQ ID NO: 730427 - RNA, 22 nt, Human
ugcuguagcccugcacagugca

SEQ ID NO: 730428 - RNA, 22 nt, Human
cagcauucuacuuugugaacug

SEQ ID NO: 730429 - RNA, 22 nt, Human
uuucaugagauuccuccacauc

SEQ ID NO: 730430 - RNA, 20 nt, Human
aguuuucagcagaacaccca

SEQ ID NO: 730431 - RNA, 22 nt, Human
gcacauggcggccagcagguga

SEQ ID NO: 730432 - RNA, 22 nt, Human
agaggaggauuuguaaaggucu

SEQ ID NO: 730433 - RNA, 22 nt, Human
caugcagugacucagacacagg

SEQ ID NO: 730434 - RNA, 22 nt, Human
auucuuuuuuaaggaauagaac

SEQ ID NO: 730435 - RNA, 22 nt, Human
cuuauguaaaacggaaagggaa

SEQ ID NO: 730436 - RNA, 22 nt, Human
ccuggcaguggugaagaagagg

SEQ ID NO: 730437 - RNA, 22 nt, Human
uaauugcagggagccugggggc

SEQ ID NO: 730438 - RNA, 22 nt, Human
gcugaaggcccggaggacaggg

SEQ ID NO: 730439 - RNA, 22 nt, Human
agccuccaucucccaucuguga

SEQ ID NO: 730440 - RNA, 22 nt, Human
ugguggcaucaauugacuucuc

SEQ ID NO: 730441 - RNA, 22 nt, Human
caauccaucaauuacacaggcu

SEQ ID NO: 730442 - RNA, 22 nt, Human
ggugggcaggucacucugccuc

SEQ ID NO: 730443 - RNA, 22 nt, Human
uguauauaagcauuuacuuguu

SEQ ID NO: 730444 - RNA, 22 nt, Human
cuuauucuugucuuauugugcu

SEQ ID NO: 730445 - RNA, 22 nt, Human
aaacaaugagcuuuuacacacu

SEQ ID NO: 730446 - RNA, 22 nt, Human
caggaaggggcucacucuggcc

SEQ ID NO: 730447 - RNA, 22 nt, Human
gaccagaaucuggacucugauu

SEQ ID NO: 730448 - RNA, 22 nt, Human
cucuucuugcuagacugagugc

SEQ ID NO: 730449 - RNA, 22 nt, Human
gggcagguggcaaagccagagg

SEQ ID NO: 730450 - RNA, 22 nt, Human
cacuugggagcauugcacaugu

SEQ ID NO: 730451 - RNA, 18 nt, Human
cagcugccagcucaugga

SEQ ID NO: 730452 - RNA, 22 nt, Human
gcuggcugcacaggggcucacu

SEQ ID NO: 730453 - RNA, 23 nt, Human
uguagcaucucuuauuucucagc

SEQ ID NO: 730454 - RNA, 22 nt, Human
uguguggaugcagcgugggucu

SEQ ID NO: 730455 - RNA, 22 nt, Human
cugcauaucaaauuacuccugg

SEQ ID NO: 730456 - RNA, 22 nt, Human
aagaauacuucguaaguaggau

SEQ ID NO: 730457 - RNA, 22 nt, Human
cucuagcugaggucacugcuau

SEQ ID NO: 730458 - RNA, 22 nt, Human
uguaaacuguagaaaauacuuu

SEQ ID NO: 730459 - RNA, 22 nt, Human
ggcaggcaaggcagccugguga

SEQ ID NO: 730460 - RNA, 22 nt, Human
guugggcugggagcugcccuga

SEQ ID NO: 730461 - RNA, 22 nt, Human
gagauucuaagucguugguuag

SEQ ID NO: 730462 - RNA, 22 nt, Human
cugcucuggggaagccagaugu

SEQ ID NO: 730463 - RNA, 22 nt, Human
ucuggaaagaucauuaaaucca

SEQ ID NO: 730464 - RNA, 22 nt, Human
ugacucugggguugaccagaug

SEQ ID NO: 730465 - RNA, 22 nt, Human
agcuguugaaaaugguguccua

SEQ ID NO: 730466 - RNA, 22 nt, Human
uccaguggaacagauguugccu

SEQ ID NO: 730467 - RNA, 22 nt, Human
cagucacauuucgacauaacua

SEQ ID NO: 730468 - RNA, 22 nt, Human
gauguagacacuuggaggcuua

SEQ ID NO: 730469 - RNA, 22 nt, Human
cuccagagucaucgagcauucc

SEQ ID NO: 730470 - RNA, 22 nt, Human
cuucuuggcugcaagucucugu

SEQ ID NO: 730471 - RNA, 20 nt, Human
ggaaaaaugcaugcucaaga

SEQ ID NO: 730472 - RNA, 16 nt, Human
gaggggagcaguaggc

SEQ ID NO: 730473 - RNA, 22 nt, Human
aaagaugaucuacaaguucauu

SEQ ID NO: 730474 - RNA, 22 nt, Human
gggcacagucugcagcccccca

SEQ ID NO: 730475 - RNA, 22 nt, Human
ugaggcucacaaaucugcauuu

SEQ ID NO: 730476 - RNA, 19 nt, Human
acauugaauuuucuucuuu

SEQ ID NO: 730477 - RNA, 22 nt, Human
uuugucagucaugucugcuuuu

SEQ ID NO: 730478 - RNA, 22 nt, Human
auggccacauuuaguaacuggu

SEQ ID NO: 730479 - RNA, 22 nt, Human
agggaauguagcaagaugccaa

SEQ ID NO: 730480 - RNA, 22 nt, Human
gcuggacucaggggacucaggg

SEQ ID NO: 730481 - RNA, 17 nt, Human
uuacacaggagagcucu

SEQ ID NO: 730482 - RNA, 22 nt, Human
gcagaggccugaagguggcggg

SEQ ID NO: 730483 - RNA, 22 nt, Human
cucugcugaucucagcugggcu

SEQ ID NO: 730484 - RNA, 22 nt, Human
aggaccugacauuguguuuucu

SEQ ID NO: 730485 - RNA, 22 nt, Human
ugcauuugucuugucucaugaa

SEQ ID NO: 730486 - RNA, 22 nt, Human
acacacagaaggaagccccacu

SEQ ID NO: 730487 - RNA, 22 nt, Human
ugaaagggaaccugcuggacug

SEQ ID NO: 730488 - RNA, 22 nt, Human
acacuuuacagaauguuuugau

SEQ ID NO: 730489 - RNA, 22 nt, Human
auuuguugcuagcagcacugau

SEQ ID NO: 730490 - RNA, 22 nt, Human
ucuuuccaaggacucuguagca

SEQ ID NO: 730491 - RNA, 22 nt, Human
uucuucaaaguaauagagacua

SEQ ID NO: 730492 - RNA, 22 nt, Human
aggagcugggcccaaggaugcu

SEQ ID NO: 730493 - RNA, 22 nt, Human
aacagucuuacagaaguagcca

SEQ ID NO: 730494 - RNA, 22 nt, Human
auuucaugaguuauuauagugg

SEQ ID NO: 730495 - RNA, 22 nt, Human
acaguucuuaaaacuugaauua

SEQ ID NO: 730496 - RNA, 22 nt, Human
cagaggagugggccguuauggu

SEQ ID NO: 730497 - RNA, 20 nt, Human
aggcaguuagaaggagauga

SEQ ID NO: 730498 - RNA, 22 nt, Human
uugugcuccugugagaaucuag

SEQ ID NO: 730499 - RNA, 22 nt, Human
aggaguccucaugucugugcga

SEQ ID NO: 730500 - RNA, 22 nt, Human
ggucacaugugauuugagccaa

SEQ ID NO: 730501 - RNA, 22 nt, Human
auuauggacaucaaauaacucu

SEQ ID NO: 730502 - RNA, 22 nt, Human
gcucaggcuggauugcaguggc

SEQ ID NO: 730503 - RNA, 22 nt, Human
ucugucuccucagaugacucca

SEQ ID NO: 730504 - RNA, 22 nt, Human
cucccuggaggcccagaccugg

SEQ ID NO: 730505 - RNA, 22 nt, Human
gggcaagcagugaggacagcac

SEQ ID NO: 730506 - RNA, 22 nt, Human
gguagcacauugcauuaggaga

SEQ ID NO: 730507 - RNA, 22 nt, Human
ugcuggaaugagucggggaggg

SEQ ID NO: 730508 - RNA, 22 nt, Human
uauucacaugaaaacaaauuuu

SEQ ID NO: 730509 - RNA, 22 nt, Human
gcuuugaagucugugucuuuug

SEQ ID NO: 730510 - RNA, 22 nt, Human
ugucuggcauaguugcucccug

SEQ ID NO: 730511 - RNA, 22 nt, Human
cuggcuggccggagcgaggcgg

SEQ ID NO: 730512 - RNA, 22 nt, Human
agccugcuucccuuugugcccc

SEQ ID NO: 730513 - RNA, 22 nt, Human
ugugcugacaagaucagaaggu

SEQ ID NO: 730514 - RNA, 22 nt, Human
aaaugauguuauaagaccagga

SEQ ID NO: 730515 - RNA, 15 nt, Human
ugggcagaucacuug

SEQ ID NO: 730516 - RNA, 22 nt, Human
uuccuucugaagccuuuguguu

SEQ ID NO: 730517 - RNA, 22 nt, Human
gguuuuauuaccccuuaaacac

SEQ ID NO: 730518 - RNA, 22 nt, Human
agggggguggaucaccugaggu

SEQ ID NO: 730519 - RNA, 22 nt, Human
gcucagagcccgaggcuugcau

SEQ ID NO: 730520 - RNA, 22 nt, Human
cucuggucauuuggaagagcau

SEQ ID NO: 730521 - RNA, 20 nt, Human
cacaggccuugugagcagac

SEQ ID NO: 730522 - RNA, 22 nt, Human
agucucagccacacagaccuau

SEQ ID NO: 730523 - RNA, 22 nt, Human
auucuuaaauuuaggucuguga

SEQ ID NO: 730524 - RNA, 19 nt, Human
gucucuggauuucaggucc

SEQ ID NO: 730525 - RNA, 22 nt, Human
ggcaguggguggaucucaggga

SEQ ID NO: 730526 - RNA, 22 nt, Human
agguuggccaagcugcuggccc

SEQ ID NO: 730527 - RNA, 22 nt, Human
guggcagcagaggggugguaug

SEQ ID NO: 730528 - RNA, 22 nt, Human
uggcuuaguucuagaaauuugg

SEQ ID NO: 730529 - RNA, 22 nt, Human
uuucacagcugauaccucuucc

SEQ ID NO: 730530 - RNA, 22 nt, Human
gagcugaacaaauugcgagugg

SEQ ID NO: 730531 - RNA, 17 nt, Human
uugacuguuaauggguu

SEQ ID NO: 730532 - RNA, 22 nt, Human
ucucagagaugucaagagucua

SEQ ID NO: 730533 - RNA, 22 nt, Human
gugagagaucccccacucaucu

SEQ ID NO: 730534 - RNA, 22 nt, Human
gcaaguccuuugcaugcaggga

SEQ ID NO: 730535 - RNA, 22 nt, Human
ggcuuccuccuuccugcuguca

SEQ ID NO: 730536 - RNA, 20 nt, Human
cugcucugcuuugcaggugg

SEQ ID NO: 730537 - RNA, 22 nt, Human
ucaggccaaagaaacagcauga

SEQ ID NO: 730538 - RNA, 22 nt, Human
ggccagguuggguggaaguggc

SEQ ID NO: 730539 - RNA, 22 nt, Human
cuguccuguagcuccaucaguc

SEQ ID NO: 730540 - RNA, 22 nt, Human
uaacaucaaacauguuuuaaag

SEQ ID NO: 730541 - RNA, 22 nt, Human
aguguuugcaucucauugauuu

SEQ ID NO: 730542 - RNA, 22 nt, Human
uuauuuucuccucagaaagugg

SEQ ID NO: 730543 - RNA, 22 nt, Human
gaucgaguuguuuguucugggg

SEQ ID NO: 730544 - RNA, 22 nt, Human
uagggacccucccugcucuaac

SEQ ID NO: 730545 - RNA, 22 nt, Human
gagagacugggcagggccggca

SEQ ID NO: 730546 - RNA, 22 nt, Human
cuuacauacugagaaaauaucc

SEQ ID NO: 730547 - RNA, 19 nt, Human
uuucuguuugcuucugguu

SEQ ID NO: 730548 - RNA, 23 nt, Human
aagcugccuucgcaguuggucug

SEQ ID NO: 730549 - RNA, 22 nt, Human
ucugggucuggcugcuggugca

SEQ ID NO: 730550 - RNA, 22 nt, Human
guauucuguuuacagugagcaa

SEQ ID NO: 730551 - RNA, 22 nt, Human
uucacagaauggcaaguuaugg

SEQ ID NO: 730552 - RNA, 22 nt, Human
uaugcacaauaugaucuauuug

SEQ ID NO: 730553 - RNA, 21 nt, Human
ucucacaauaugaugccagau

SEQ ID NO: 730554 - RNA, 22 nt, Human
cuauuuguacagcauucgaguu

SEQ ID NO: 730555 - RNA, 22 nt, Human
auggcuguuccugggaguucua

SEQ ID NO: 730556 - RNA, 22 nt, Human
agccucugggggagcugggagc

SEQ ID NO: 730557 - RNA, 22 nt, Human
ggcuggaaguccaagaucaaga

SEQ ID NO: 730558 - RNA, 22 nt, Human
uugaaacucaucuuagugaugu

SEQ ID NO: 730559 - RNA, 22 nt, Human
ugcagugguugagagcccagac

SEQ ID NO: 730560 - RNA, 22 nt, Human
uuccuucuggaagcuucagggg

SEQ ID NO: 730561 - RNA, 22 nt, Human
cauuucaauacuaucugagaau

SEQ ID NO: 730562 - RNA, 22 nt, Human
ucaggagaguguucaguggagg

SEQ ID NO: 730563 - RNA, 22 nt, Human
aggagcugcauggauaccuggu

SEQ ID NO: 730564 - RNA, 22 nt, Human
uggguccuugcuaacuucuaug

SEQ ID NO: 730565 - RNA, 22 nt, Human
gcucccucccaccagccugcag

SEQ ID NO: 730566 - RNA, 22 nt, Human
cuuauguacacacauauauugu

SEQ ID NO: 730567 - RNA, 18 nt, Human
aaagcuguuauuccagaa

SEQ ID NO: 730568 - RNA, 22 nt, Human
ucagcuuuuuggauugcccaag

SEQ ID NO: 730569 - RNA, 22 nt, Human
ucaggcucuacacuugacacac

SEQ ID NO: 730570 - RNA, 22 nt, Human
gcccaggauggagaauaguggu

SEQ ID NO: 730571 - RNA, 22 nt, Human
gcucaggccuggcccaugggac

SEQ ID NO: 730572 - RNA, 22 nt, Human
agcagcuugaggcuggauucca

SEQ ID NO: 730573 - RNA, 22 nt, Human
gucuauguaaacgucuacauua

SEQ ID NO: 730574 - RNA, 22 nt, Human
caggcuccucacucaugcuccc

SEQ ID NO: 730575 - RNA, 22 nt, Human
ugauaugcauguaagggagaca

SEQ ID NO: 730576 - RNA, 22 nt, Human
uauuccuggguuccagcccaga

SEQ ID NO: 730577 - RNA, 22 nt, Human
auuacaguagcaaaagaccgga

SEQ ID NO: 730578 - RNA, 22 nt, Human
caggaaagggaugggcugccac

SEQ ID NO: 730579 - RNA, 22 nt, Human
caacauauaauauuugaguucu

SEQ ID NO: 730580 - RNA, 22 nt, Human
ggaccagagcucgggcuucuca

SEQ ID NO: 730581 - RNA, 21 nt, Human
ucucuggaguuagcagagaga

SEQ ID NO: 730582 - RNA, 22 nt, Human
uaugcacgucuauuuaugaaga

SEQ ID NO: 730583 - RNA, 22 nt, Human
ugcugcaggaauucucaaggga

SEQ ID NO: 730584 - RNA, 22 nt, Human
uagcagcugugaguaaaagcca

SEQ ID NO: 730585 - RNA, 22 nt, Human
ucaaaggaaacacaagcuucug

SEQ ID NO: 730586 - RNA, 22 nt, Human
guuguuuguaaugacaggagac

SEQ ID NO: 730587 - RNA, 22 nt, Human
aggagcugaugauucuuugauc

SEQ ID NO: 730588 - RNA, 22 nt, Human
ucagccagggggagagaaugga

SEQ ID NO: 730589 - RNA, 22 nt, Human
augugugcauguuagagagagu

SEQ ID NO: 730590 - RNA, 23 nt, Human
gccagcuuuggucugucuccuag

SEQ ID NO: 730591 - RNA, 22 nt, Human
uucaguaaaacacugcaauguc

SEQ ID NO: 730592 - RNA, 22 nt, Human
ccuggacucagaggugcuggug

SEQ ID NO: 730593 - RNA, 20 nt, Human
ugcaauguccauguuccagg

SEQ ID NO: 730594 - RNA, 22 nt, Human
gucuccugagccuugacugcaa

SEQ ID NO: 730595 - RNA, 22 nt, Human
uaguuauuauuguuacuaucag

SEQ ID NO: 730596 - RNA, 22 nt, Human
uucucuuuugugaugugagaug

SEQ ID NO: 730597 - RNA, 22 nt, Human
cagcccaccuggcacguguguu

SEQ ID NO: 730598 - RNA, 22 nt, Human
uggggccuggucagagcugcac

SEQ ID NO: 730599 - RNA, 20 nt, Human
cucuuaauugcucacauuag

SEQ ID NO: 730600 - RNA, 22 nt, Human
aauacuuuugaacugaaaggca

SEQ ID NO: 730601 - RNA, 22 nt, Human
auagucuuagaaucuugagugu

SEQ ID NO: 730602 - RNA, 22 nt, Human
gacccaggguggucaccugaaa

SEQ ID NO: 730603 - RNA, 22 nt, Human
gacuguggacucucaugauaga

SEQ ID NO: 730604 - RNA, 22 nt, Human
uagcaaaguuuuguggugauua

SEQ ID NO: 730605 - RNA, 22 nt, Human
gcuggcuguguuucaucucuga

SEQ ID NO: 730606 - RNA, 22 nt, Human
auuuugugaacccucaagcaau

SEQ ID NO: 730607 - RNA, 22 nt, Human
aaauuguagagaucgcuuugug

SEQ ID NO: 730608 - RNA, 22 nt, Human
aggacagaccuaggacuggagc

SEQ ID NO: 730609 - RNA, 22 nt, Human
ugcccugggaggcuuuccuguu

SEQ ID NO: 730610 - RNA, 22 nt, Human
aaugaaguucuauucauuuucu

SEQ ID NO: 730611 - RNA, 22 nt, Human
uggcuucuuagaccaguggccu

SEQ ID NO: 730612 - RNA, 22 nt, Human
ucacugcuauauuggauacuga

SEQ ID NO: 730613 - RNA, 22 nt, Human
ugcaguuuugccaggcaaugga

SEQ ID NO: 730614 - RNA, 22 nt, Human
gaaaaguauguuuauuuugacu

SEQ ID NO: 730615 - RNA, 22 nt, Human
acauguuugauaaauauuuggg

SEQ ID NO: 730616 - RNA, 22 nt, Human
uugaaaggcacaggcaccuggg

SEQ ID NO: 730617 - RNA, 22 nt, Human
uucugcaaucgcucugaccauu

SEQ ID NO: 730618 - RNA, 22 nt, Human
gacugaaccucaaauuuggcuc

SEQ ID NO: 730619 - RNA, 22 nt, Human
cugagccccaucugaggugccc

SEQ ID NO: 730620 - RNA, 21 nt, Human
gcagaggaaugguauacauaa

SEQ ID NO: 730621 - RNA, 22 nt, Human
agggccagucguguauuacugu

SEQ ID NO: 730622 - RNA, 22 nt, Human
acaguucugaagacuagagccu

SEQ ID NO: 730623 - RNA, 22 nt, Human
ggcagggaguggagacucccua

SEQ ID NO: 730624 - RNA, 18 nt, Human
cuggcauucuucccugga

SEQ ID NO: 730625 - RNA, 21 nt, Human
uccagggcuuugauucucuca

SEQ ID NO: 730626 - RNA, 22 nt, Human
ucagagguuccggccauaacca

SEQ ID NO: 730627 - RNA, 22 nt, Human
uacagauuuugugaagaagugu

SEQ ID NO: 730628 - RNA, 20 nt, Human
ucagcucuuagaggucgcuu

SEQ ID NO: 730629 - RNA, 22 nt, Human
gagcaggucuuucauggugcau

SEQ ID NO: 730630 - RNA, 22 nt, Human
cuacagcuguaaaaggaauguc

SEQ ID NO: 730631 - RNA, 22 nt, Human
ucucuuugacccuuuagcucca

SEQ ID NO: 730632 - RNA, 22 nt, Human
gacauuuauuggauuuuacgag

SEQ ID NO: 730633 - RNA, 22 nt, Human
guuggcucauuuuauagacagc

SEQ ID NO: 730634 - RNA, 22 nt, Human
agggccagaaucccucagucua

SEQ ID NO: 730635 - RNA, 22 nt, Human
uuacuguugguguauccauagc

SEQ ID NO: 730636 - RNA, 22 nt, Human
cacaggagauugaucuauuggu

SEQ ID NO: 730637 - RNA, 22 nt, Human
ugcaggcuggcagauaucucau

SEQ ID NO: 730638 - RNA, 22 nt, Human
cugucauucuuacauaauguga

SEQ ID NO: 730639 - RNA, 19 nt, Human
agcugugcagacacuucgc

SEQ ID NO: 730640 - RNA, 22 nt, Human
ggcaggacauugacuacaguga

SEQ ID NO: 730641 - RNA, 23 nt, Human
augcucugggcugugggaccugc

SEQ ID NO: 730642 - RNA, 22 nt, Human
cuuuagaaggguaacggaauua

SEQ ID NO: 730643 - RNA, 22 nt, Human
aauaucaacaguguccuucuaa

SEQ ID NO: 730644 - RNA, 22 nt, Human
uucuaugccauguucagcuacu

SEQ ID NO: 730645 - RNA, 22 nt, Human
aggaaagggguagguguggacg

SEQ ID NO: 730646 - RNA, 21 nt, Human
uuuauguacuucauagaguag

SEQ ID NO: 730647 - RNA, 22 nt, Human
gccuuguuucauuacacguggu

SEQ ID NO: 730648 - RNA, 22 nt, Human
cuggaagaacuccaguucugug

SEQ ID NO: 730649 - RNA, 22 nt, Human
auccuaaagcagacagcagguu

SEQ ID NO: 730650 - RNA, 22 nt, Human
ggcucacaaaauguugcuuaau

SEQ ID NO: 730651 - RNA, 22 nt, Human
uuuagcauuccugggaugauuu

SEQ ID NO: 730652 - RNA, 22 nt, Human
cagcagcugauggggaagugau

SEQ ID NO: 730653 - RNA, 22 nt, Human
cuguaugaaauugucauuuuua

SEQ ID NO: 730654 - RNA, 22 nt, Human
ugugcucuugggcaauagcugc

SEQ ID NO: 730655 - RNA, 22 nt, Human
gaggaacagagggcaaggccag

SEQ ID NO: 730656 - RNA, 22 nt, Human
cuguggcuucagcauucagagc

SEQ ID NO: 730657 - RNA, 22 nt, Human
gacaggguggcugauagggcuc

SEQ ID NO: 730658 - RNA, 22 nt, Human
uguggugguaaugagccagaug

SEQ ID NO: 730659 - RNA, 22 nt, Human
gcaaaauuuacacuccuucuuc

SEQ ID NO: 730660 - RNA, 16 nt, Human
ucccaggaggcggaac

SEQ ID NO: 730661 - RNA, 22 nt, Human
uagguucagugucuuguucugc

SEQ ID NO: 730662 - RNA, 22 nt, Human
ugggccugccccaggcuucagc

SEQ ID NO: 730663 - RNA, 22 nt, Human
uugggccaagugauucucugcc

SEQ ID NO: 730664 - RNA, 22 nt, Human
aagucuggaagucucaguuuuc

SEQ ID NO: 730665 - RNA, 22 nt, Human
ucagaacauccugguuuaaaau

SEQ ID NO: 730666 - RNA, 22 nt, Human
cagggacauugguggccagguu

SEQ ID NO: 730667 - RNA, 22 nt, Human
ggguccagggccaguggcugag

SEQ ID NO: 730668 - RNA, 22 nt, Human
ccucccuccauugccaucgucu

SEQ ID NO: 730669 - RNA, 20 nt, Human
ggaggguggaagaaagcaag

SEQ ID NO: 730670 - RNA, 22 nt, Human
gucugagacuuuuucugugugg

SEQ ID NO: 730671 - RNA, 22 nt, Human
uuccccaggcuggagugcagug

SEQ ID NO: 730672 - RNA, 19 nt, Human
uggaccugugcccauggcu

SEQ ID NO: 730673 - RNA, 22 nt, Human
cagaguccaauugcucagagcg

SEQ ID NO: 730674 - RNA, 22 nt, Human
ugugaaagcaagucuaguucuc

SEQ ID NO: 730675 - RNA, 19 nt, Human
ccugaguugggugaagaga

SEQ ID NO: 730676 - RNA, 22 nt, Human
acuucaaauuuucagaagaaau

SEQ ID NO: 730677 - RNA, 22 nt, Human
cagaaugcauugcuucugaugg

SEQ ID NO: 730678 - RNA, 22 nt, Human
auugacuuucccuucuccucau

SEQ ID NO: 730679 - RNA, 22 nt, Human
uggaagcggacguuguggggug

SEQ ID NO: 730680 - RNA, 22 nt, Human
ucuuccagaaugcauucucuuu

SEQ ID NO: 730681 - RNA, 22 nt, Human
uugaauugaaacauacccuggu

SEQ ID NO: 730682 - RNA, 22 nt, Human
gcuggcucgggaagcaggggau

SEQ ID NO: 730683 - RNA, 23 nt, Human
ugcugggguaguuuguggcacag

SEQ ID NO: 730684 - RNA, 20 nt, Human
agcuaggagaaagcauggag

SEQ ID NO: 730685 - RNA, 22 nt, Human
aaaugguccauccuaaagaagu

SEQ ID NO: 730686 - RNA, 22 nt, Human
gugggacagcggggugggacag

SEQ ID NO: 730687 - RNA, 22 nt, Human
acuguaaagaaguaaguauggg

SEQ ID NO: 730688 - RNA, 22 nt, Human
uagaaagugaagguuaauuaau

SEQ ID NO: 730689 - RNA, 22 nt, Human
uuuucauguuccuuguuaagug

SEQ ID NO: 730690 - RNA, 22 nt, Human
uugacuuuucuuggucacauga

SEQ ID NO: 730691 - RNA, 22 nt, Human
aaucuaacuucauagcugauuu

SEQ ID NO: 730692 - RNA, 22 nt, Human
ccaggagcaggagcuggacaga

SEQ ID NO: 730693 - RNA, 22 nt, Human
guuauuguccagcacaguuggg

SEQ ID NO: 730694 - RNA, 22 nt, Human
gcauucuugagguguggacuca

SEQ ID NO: 730695 - RNA, 22 nt, Human
agagcugcucagaugucacugc

SEQ ID NO: 730696 - RNA, 22 nt, Human
gcaugcagaaaaugaacaacga

SEQ ID NO: 730697 - RNA, 22 nt, Human
cuacaggucaguaagaccuaga

SEQ ID NO: 730698 - RNA, 22 nt, Human
ggcugagaagacaguggggugg

SEQ ID NO: 730699 - RNA, 23 nt, Human
cagcagcugccugguuuuuuggu

SEQ ID NO: 730700 - RNA, 22 nt, Human
accaggagucuagccuagucaa

SEQ ID NO: 730701 - RNA, 22 nt, Human
aauuggcuuugugguuucugca

SEQ ID NO: 730702 - RNA, 22 nt, Human
ccacccuggacaggccucugag

SEQ ID NO: 730703 - RNA, 22 nt, Human
gcaggcaguuugcuuuucccuc

SEQ ID NO: 730704 - RNA, 22 nt, Human
gcccagagggaagaggugucau

SEQ ID NO: 730705 - RNA, 22 nt, Human
auuugucugcuugcugccuucc

SEQ ID NO: 730706 - RNA, 22 nt, Human
cuguuucaaaacuaguacaaca

SEQ ID NO: 730707 - RNA, 22 nt, Human
aaagucaucagaaccuuccaga

SEQ ID NO: 730708 - RNA, 22 nt, Human
acagauuugacugguaccuggc

SEQ ID NO: 730709 - RNA, 22 nt, Human
ggcuaggccucaggccugccug

SEQ ID NO: 730710 - RNA, 22 nt, Human
ccacccuuggguucggaggccg

SEQ ID NO: 730711 - RNA, 19 nt, Human
ccagccucucuuccacccc

SEQ ID NO: 730712 - RNA, 22 nt, Human
agagcccuugcccucagucacc

SEQ ID NO: 730713 - RNA, 21 nt, Human
uacgugugugcauguuuauau

SEQ ID NO: 730714 - RNA, 22 nt, Human
agucucugcaugccugcugugc

SEQ ID NO: 730715 - RNA, 22 nt, Human
auccuucaaggggcugacagcu

SEQ ID NO: 730716 - RNA, 22 nt, Human
uuguauuugauugucauaucgu

SEQ ID NO: 730717 - RNA, 22 nt, Human
gagauggaaaacugcugguagu

SEQ ID NO: 730718 - RNA, 22 nt, Human
cagggacccuacuagcucacac

SEQ ID NO: 730719 - RNA, 22 nt, Human
ugcuuucaugaagucuauagag

SEQ ID NO: 730720 - RNA, 22 nt, Human
aggucugacucuuugccacaua

SEQ ID NO: 730721 - RNA, 17 nt, Human
cagggcugucugccuag

SEQ ID NO: 730722 - RNA, 22 nt, Human
acaggcaacuucaaaucucacu

SEQ ID NO: 730723 - RNA, 22 nt, Human
ucucugccacagcuucugccuu

SEQ ID NO: 730724 - RNA, 22 nt, Human
guucaaauugagaugguauaaa

SEQ ID NO: 730725 - RNA, 22 nt, Human
cuuauggaagaaaccucagaga

SEQ ID NO: 730726 - RNA, 22 nt, Human
auguuacugugaucaugauacu

SEQ ID NO: 730727 - RNA, 22 nt, Human
cucuguccacagguuugucccu

SEQ ID NO: 730728 - RNA, 21 nt, Human
uugaagcaaggguggcucuga

SEQ ID NO: 730729 - RNA, 22 nt, Human
ugucuuccucuuggcuugagcu

SEQ ID NO: 730730 - RNA, 22 nt, Human
cagggcacaguuauggaggugg

SEQ ID NO: 730731 - RNA, 22 nt, Human
uuugauaagagcugcugaaacu

SEQ ID NO: 730732 - RNA, 22 nt, Human
ucugagaagcgugucucuguuu

SEQ ID NO: 730733 - RNA, 22 nt, Human
ucacagaagaugcuggauguug

SEQ ID NO: 730734 - RNA, 22 nt, Human
aaguacaugcuguaaugauugg

SEQ ID NO: 730735 - RNA, 15 nt, Human
uguggcuggcuccug

SEQ ID NO: 730736 - RNA, 22 nt, Human
cuucccuuuagcauauaguagu

SEQ ID NO: 730737 - RNA, 22 nt, Human
uucuggccaaggcugccagauu

SEQ ID NO: 730738 - RNA, 22 nt, Human
ugucuuuagccacuugccucuu

SEQ ID NO: 730739 - RNA, 22 nt, Human
ggccugcuggggccucagacac

SEQ ID NO: 730740 - RNA, 22 nt, Human
ccagggcagggaccacgugucu

SEQ ID NO: 730741 - RNA, 22 nt, Human
uucauugagcuguacacuuagg

SEQ ID NO: 730742 - RNA, 22 nt, Human
acagugcacauccugagugauu

SEQ ID NO: 730743 - RNA, 22 nt, Human
gcugcugugccuggcguccugu

SEQ ID NO: 730744 - RNA, 22 nt, Human
cucacagguaccagcacccucc

SEQ ID NO: 730745 - RNA, 22 nt, Human
uccugcagugugucuccugcac

SEQ ID NO: 730746 - RNA, 22 nt, Human
cuggagaguaaucucuguguua

SEQ ID NO: 730747 - RNA, 18 nt, Human
acauacauucugucugca

SEQ ID NO: 730748 - RNA, 22 nt, Human
caguggcugugaccagggaccu

SEQ ID NO: 730749 - RNA, 19 nt, Human
uuuacucuccaaggugagu

SEQ ID NO: 730750 - RNA, 22 nt, Human
augcacugggugaggaaggaga

SEQ ID NO: 730751 - RNA, 22 nt, Human
agaucuggaacugagguuuauu

SEQ ID NO: 730752 - RNA, 22 nt, Human
agcccaggagccuuuggagggu

SEQ ID NO: 730753 - RNA, 22 nt, Human
ugcauguuugugucugagaacu

SEQ ID NO: 730754 - RNA, 20 nt, Human
ucaaagcaaagggagaugau

SEQ ID NO: 730755 - RNA, 22 nt, Human
uuuccaagacuccaguucuccc

SEQ ID NO: 730756 - RNA, 22 nt, Human
uggcaaaggggaccauguugaa

SEQ ID NO: 730757 - RNA, 22 nt, Human
uuggaaggcugaauggccucuc

SEQ ID NO: 730758 - RNA, 22 nt, Human
uccuguggcguuaucaugugau

SEQ ID NO: 730759 - RNA, 22 nt, Human
ucugggccaacccuuccauggg

SEQ ID NO: 730760 - RNA, 22 nt, Human
aguuucauguagccauauuuac

SEQ ID NO: 730761 - RNA, 22 nt, Human
cggcagugggcgccaggucucc

SEQ ID NO: 730762 - RNA, 22 nt, Human
acaauugcuaaugcuucuguug

SEQ ID NO: 730763 - RNA, 22 nt, Human
gcggggcccccggccgagcucu

SEQ ID NO: 730764 - RNA, 22 nt, Human
ucugggcaguaccccucuccua

SEQ ID NO: 730765 - RNA, 22 nt, Human
uaagacacauuggaguagauga

SEQ ID NO: 730766 - RNA, 22 nt, Human
ccuuggcaagacaguggagggu

SEQ ID NO: 730767 - RNA, 22 nt, Human
gugucccaauguucaggacggc

SEQ ID NO: 730768 - RNA, 22 nt, Human
agugucugaucaguugacuaga

SEQ ID NO: 730769 - RNA, 22 nt, Human
aagggcugcaauccaaaacacu

SEQ ID NO: 730770 - RNA, 22 nt, Human
cagcacagugcagaugcugacu

SEQ ID NO: 730771 - RNA, 23 nt, Human
gugagcagcaccaugaggcuaga

SEQ ID NO: 730772 - RNA, 22 nt, Human
aagagagaguuccuaggcaaaa

SEQ ID NO: 730773 - RNA, 22 nt, Human
uuccaagaguaaauucaaauug

SEQ ID NO: 730774 - RNA, 22 nt, Human
uaggaaggaagagccucagauu

SEQ ID NO: 730775 - RNA, 22 nt, Human
uucuuuguggcagugagcuggg

SEQ ID NO: 730776 - RNA, 22 nt, Human
auaguacaaucaguuaauuagu

SEQ ID NO: 730777 - RNA, 22 nt, Human
aucuggagcuuguuagauguuu

SEQ ID NO: 730778 - RNA, 22 nt, Human
ggggccagguccagcuuccaaa

SEQ ID NO: 730779 - RNA, 19 nt, Human
cauuuucccaucauccuuu

SEQ ID NO: 730780 - RNA, 18 nt, Human
agcucucccccacaugcc

SEQ ID NO: 730781 - RNA, 22 nt, Human
uuaaacacuggggguuaaugca

SEQ ID NO: 730782 - RNA, 22 nt, Human
uccucagaauggauggcagggg

SEQ ID NO: 730783 - RNA, 22 nt, Human
cugggcuuuugagucacaaggg

SEQ ID NO: 730784 - RNA, 22 nt, Human
agaguauugugaccauuuguca

SEQ ID NO: 730785 - RNA, 22 nt, Human
agcaacaggaccauggagccca

SEQ ID NO: 730786 - RNA, 22 nt, Human
cuaauaauagagguggcauuug

SEQ ID NO: 730787 - RNA, 19 nt, Human
uucucaguucaggagaaga

SEQ ID NO: 730788 - RNA, 22 nt, Human
aagugauuuguacaaaaugucg

SEQ ID NO: 730789 - RNA, 22 nt, Human
uaggaaauuugaaauauguggg

SEQ ID NO: 730790 - RNA, 22 nt, Human
uugcuuuaagguaucuggagaa

SEQ ID NO: 730791 - RNA, 22 nt, Human
ucucccacugcaagcccaggcu

SEQ ID NO: 730792 - RNA, 22 nt, Human
acaugauucuugauaggcauug

SEQ ID NO: 730793 - RNA, 23 nt, Human
ugcgugugugcugaggggcgucc

SEQ ID NO: 730794 - RNA, 22 nt, Human
gcagcuuuagaaacaagggcug

SEQ ID NO: 730795 - RNA, 22 nt, Human
uccagcauucuuagaccucuau

SEQ ID NO: 730796 - RNA, 22 nt, Human
auguggcuuucaugauuaagca

SEQ ID NO: 730797 - RNA, 22 nt, Human
ccacagucuagcuagaaggcau

SEQ ID NO: 730798 - RNA, 22 nt, Human
gauguucagugguugaccauaa

SEQ ID NO: 730799 - RNA, 22 nt, Human
gauuucaguggcugucucaaau

SEQ ID NO: 730800 - RNA, 22 nt, Human
augaaaaguucgaucuagaagg

SEQ ID NO: 730801 - RNA, 23 nt, Human
ggauuggccccaggaguaugggu

SEQ ID NO: 730802 - RNA, 22 nt, Human
gcaguaguucugauuggaacuu

SEQ ID NO: 730803 - RNA, 22 nt, Human
cuggcuuuuccuaaacugggaa

SEQ ID NO: 730804 - RNA, 22 nt, Human
agaggccauggggcauuuuuca

SEQ ID NO: 730805 - RNA, 22 nt, Human
aguaaucaauuuuucgguggau

SEQ ID NO: 730806 - RNA, 22 nt, Human
aagugguagacaaagauaauug

SEQ ID NO: 730807 - RNA, 22 nt, Human
aaugaacauauaaagagaucuu

SEQ ID NO: 730808 - RNA, 22 nt, Human
gaagagcauaugaagagcauau

SEQ ID NO: 730809 - RNA, 21 nt, Human
uuugaacuagagguaaauucc

SEQ ID NO: 730810 - RNA, 22 nt, Human
acuuucaacuuggugggagagc

SEQ ID NO: 730811 - RNA, 22 nt, Human
ugcagcugcaggagggugggag

SEQ ID NO: 730812 - RNA, 22 nt, Human
gaguggggcccacugcugggug

SEQ ID NO: 730813 - RNA, 22 nt, Human
uaacagaagagcaggcagcccu

SEQ ID NO: 730814 - RNA, 22 nt, Human
cuguguguccucggacgaguuu

SEQ ID NO: 730815 - RNA, 22 nt, Human
ucccacccauccugcaucucuu

SEQ ID NO: 730816 - RNA, 22 nt, Human
ucuuuagauguuuagaggaaga

SEQ ID NO: 730817 - RNA, 22 nt, Human
gcaaaggccacuggggcgaugg

SEQ ID NO: 730818 - RNA, 20 nt, Human
ugguccugucccacccacuc

SEQ ID NO: 730819 - RNA, 22 nt, Human
auguuuaaaggguugagaaaua

SEQ ID NO: 730820 - RNA, 22 nt, Human
gggcaugagcgagcugcuuuga

SEQ ID NO: 730821 - RNA, 22 nt, Human
agugugaguaauugagucuguc

SEQ ID NO: 730822 - RNA, 22 nt, Human
uaggcuguaagagagggcagag

SEQ ID NO: 730823 - RNA, 22 nt, Human
acacugugacggaaauaaagaa

SEQ ID NO: 730824 - RNA, 21 nt, Human
ugcuaggccauauugguugcu

SEQ ID NO: 730825 - RNA, 22 nt, Human
aguaaaguaccaaagugugagu

SEQ ID NO: 730826 - RNA, 22 nt, Human
uucugagcugcaacacuaacau

SEQ ID NO: 730827 - RNA, 22 nt, Human
uuucaggccauagcacagggaa

SEQ ID NO: 730828 - RNA, 22 nt, Human
ccagaggcagacuuacacucca

SEQ ID NO: 730829 - RNA, 22 nt, Human
uacaauauguggccuuuuguga

SEQ ID NO: 730830 - RNA, 22 nt, Human
ucugaggaaaagaggagguagc

SEQ ID NO: 730831 - RNA, 20 nt, Human
cacccuacggccucaccucc

SEQ ID NO: 730832 - RNA, 22 nt, Human
auguuuaugcaaacaugugagu

SEQ ID NO: 730833 - RNA, 22 nt, Human
ggcuucucuaaagaucaugcgu

SEQ ID NO: 730834 - RNA, 22 nt, Human
cacaggaaaaauggguccuuua

SEQ ID NO: 730835 - RNA, 22 nt, Human
uuugaaaggguuaugagacuga

SEQ ID NO: 730836 - RNA, 22 nt, Human
uagggcagagcuuguacacgau

SEQ ID NO: 730837 - RNA, 22 nt, Human
gaggcucaguuaugucaucagg

SEQ ID NO: 730838 - RNA, 22 nt, Human
auguagaagcugacagugcugu

SEQ ID NO: 730839 - RNA, 22 nt, Human
aggcacugugcugaugucuuau

SEQ ID NO: 730840 - RNA, 22 nt, Human
cacuuagucucaccaguucagu

SEQ ID NO: 730841 - RNA, 22 nt, Human
agcuggagaucaugcugauacu

SEQ ID NO: 730842 - RNA, 20 nt, Human
agaagcaucauucugauguc

SEQ ID NO: 730843 - RNA, 22 nt, Human
cagugcccuuccaggacugcag

SEQ ID NO: 730844 - RNA, 22 nt, Human
gccacccugcaaaugcccagga

SEQ ID NO: 730845 - RNA, 22 nt, Human
auucuuguuuaauuugcauccc

SEQ ID NO: 730846 - RNA, 22 nt, Human
acuauacauaaaacauuugggu

SEQ ID NO: 730847 - RNA, 22 nt, Human
uauucucuccccaaucuugcuu

SEQ ID NO: 730848 - RNA, 22 nt, Human
acugcucucuuugcaggggcua

SEQ ID NO: 730849 - RNA, 22 nt, Human
aggcugugggaauggcugcuug

SEQ ID NO: 730850 - RNA, 22 nt, Human
uuucucaaguucagauauuuga

SEQ ID NO: 730851 - RNA, 22 nt, Human
agggaauggaugauggcagguu

SEQ ID NO: 730852 - RNA, 20 nt, Human
ccugccuguguuugugauga

SEQ ID NO: 730853 - RNA, 22 nt, Human
cagucagaaggaagaugcuuaa

SEQ ID NO: 730854 - RNA, 22 nt, Human
auggccuuucucaguggugcuu

SEQ ID NO: 730855 - RNA, 22 nt, Human
ugcuuaaaauuuuccaaggauu

SEQ ID NO: 730856 - RNA, 22 nt, Human
aaguaaaauucaaucuucacug

SEQ ID NO: 730857 - RNA, 20 nt, Human
acaguccugcacugguguuu

SEQ ID NO: 730858 - RNA, 22 nt, Human
accugggaggcggagguugcag

SEQ ID NO: 730859 - RNA, 22 nt, Human
gggcgggguggcucaugccugu

SEQ ID NO: 730860 - RNA, 22 nt, Human
uucagcucugcuagcucugugc

SEQ ID NO: 730861 - RNA, 22 nt, Human
cugcaguaacgaucauggugcc

SEQ ID NO: 730862 - RNA, 22 nt, Human
aaguguguuuccgugauugagg

SEQ ID NO: 730863 - RNA, 18 nt, Human
ccagugccaagaguggca

SEQ ID NO: 730864 - RNA, 22 nt, Human
gccaggcugccuuaucucuagc

SEQ ID NO: 730865 - RNA, 22 nt, Human
cauguaaaaaauuaggucaucu

SEQ ID NO: 730866 - RNA, 22 nt, Human
uggauugcagcagcuccugugg

SEQ ID NO: 730867 - RNA, 22 nt, Human
cugggcacuuuggggagccuac

SEQ ID NO: 730868 - RNA, 22 nt, Human
aaucccagcuacucaggaaguu

SEQ ID NO: 730869 - RNA, 22 nt, Human
uagcaucuguacugacauaauc

SEQ ID NO: 730870 - RNA, 22 nt, Human
gugaaguugauuguuaucguca

SEQ ID NO: 730871 - RNA, 22 nt, Human
ugccuucuucucccuggcucag

SEQ ID NO: 730872 - RNA, 22 nt, Human
uuuguucuaacuucugcagaca

SEQ ID NO: 730873 - RNA, 22 nt, Human
gcaagcagcccagaacagcucu

SEQ ID NO: 730874 - RNA, 22 nt, Human
uucacaguggcugugccauuug

SEQ ID NO: 730875 - RNA, 22 nt, Human
ggccugggcccacugucaagag

SEQ ID NO: 730876 - RNA, 22 nt, Human
gaacacugagaaagucagcuuu

SEQ ID NO: 730877 - RNA, 22 nt, Human
ccuuccaguauguuaagauggu

SEQ ID NO: 730878 - RNA, 22 nt, Human
augauggaggccgugauggacg

SEQ ID NO: 730879 - RNA, 22 nt, Human
gaaggaaaaauacucuguaagg

SEQ ID NO: 730880 - RNA, 22 nt, Human
uggaucaugugaugucaggagu

SEQ ID NO: 730881 - RNA, 22 nt, Human
acugcuuacaaaaggaaagaau

SEQ ID NO: 730882 - RNA, 22 nt, Human
ugucauuuaucuuauaguaauc

SEQ ID NO: 730883 - RNA, 22 nt, Human
aacgcccgugguugccaaggua

SEQ ID NO: 730884 - RNA, 22 nt, Human
gagcugagcuuaacuccuugaa

SEQ ID NO: 730885 - RNA, 22 nt, Human
aaagggagcauggcugcaggga

SEQ ID NO: 730886 - RNA, 22 nt, Human
gcccuccaccuggucucucugg

SEQ ID NO: 730887 - RNA, 22 nt, Human
ugauucugccacguacuggcug

SEQ ID NO: 730888 - RNA, 22 nt, Human
ccagcagacacacaggcguggg

SEQ ID NO: 730889 - RNA, 21 nt, Human
uguaugcacgcacaugcacac

SEQ ID NO: 730890 - RNA, 22 nt, Human
uuuggagagaugaaguucugug

SEQ ID NO: 730891 - RNA, 22 nt, Human
ugucccaggccucauguugcca

SEQ ID NO: 730892 - RNA, 22 nt, Human
cagcaucuggauuuccuccacu

SEQ ID NO: 730893 - RNA, 22 nt, Human
aaccaugaauggguucuggugu

SEQ ID NO: 730894 - RNA, 22 nt, Human
auggcaagcaagcugaagagau

SEQ ID NO: 730895 - RNA, 23 nt, Human
uuacaugugugcacacauucugg

SEQ ID NO: 730896 - RNA, 21 nt, Human
ucacuuauaauguauuugcug

SEQ ID NO: 730897 - RNA, 22 nt, Human
uaucaaaggcuaugugauuuuu

SEQ ID NO: 730898 - RNA, 22 nt, Human
uacuuuuaugugaugaaaucug

SEQ ID NO: 730899 - RNA, 22 nt, Human
uggaaagacauucagccgcugg

SEQ ID NO: 730900 - RNA, 22 nt, Human
aaguccagaacuccugugauag

SEQ ID NO: 730901 - RNA, 22 nt, Human
gaaguucaggugggaauugagc

SEQ ID NO: 730902 - RNA, 22 nt, Human
uguguccaucugacaggagagg

SEQ ID NO: 730903 - RNA, 22 nt, Human
cagcuugggaguuugguuuuau

SEQ ID NO: 730904 - RNA, 22 nt, Human
caucauugccuguuucccuugg

SEQ ID NO: 730905 - RNA, 18 nt, Human
cuccuuucccuacaccuc

SEQ ID NO: 730906 - RNA, 22 nt, Human
acaguguccccagcucugugag

SEQ ID NO: 730907 - RNA, 22 nt, Human
cucugugagggucuguacagaa

SEQ ID NO: 730908 - RNA, 22 nt, Human
acaggcagggaccuuggcuaag

SEQ ID NO: 730909 - RNA, 22 nt, Human
aaaggcauggauagugaauuca

SEQ ID NO: 730910 - RNA, 20 nt, Human
ugugaggagcauggccgcug

SEQ ID NO: 730911 - RNA, 17 nt, Human
ugcagcaguucccaucu

SEQ ID NO: 730912 - RNA, 22 nt, Human
uguucucucuccuuuugaagug

SEQ ID NO: 730913 - RNA, 22 nt, Human
cucuuggccagacacagaggca

SEQ ID NO: 730914 - RNA, 22 nt, Human
ugugagaggagaaaugcauuaa

SEQ ID NO: 730915 - RNA, 22 nt, Human
acaggacauguaccaggugguc

SEQ ID NO: 730916 - RNA, 23 nt, Human
uccugagaugagacagugcugcc

SEQ ID NO: 730917 - RNA, 22 nt, Human
ugucauggggaaaauaacagac

SEQ ID NO: 730918 - RNA, 22 nt, Human
agcugggcgcaguggcugguga

SEQ ID NO: 730919 - RNA, 22 nt, Human
ugcuucugauucaugguuauug

SEQ ID NO: 730920 - RNA, 17 nt, Human
gcacugagccacaguuu

SEQ ID NO: 730921 - RNA, 23 nt, Human
aguguguauugcugagggcagcu

SEQ ID NO: 730922 - RNA, 22 nt, Human
agagccugguucaaauuuuacc

SEQ ID NO: 730923 - RNA, 22 nt, Human
ccccagccagcaggaccucuga

SEQ ID NO: 730924 - RNA, 22 nt, Human
aucacaguguagaccuuuuaaa

SEQ ID NO: 730925 - RNA, 22 nt, Human
uggcccucagucuugcuccugc

SEQ ID NO: 730926 - RNA, 20 nt, Human
gcugggggugugcugaguga

SEQ ID NO: 730927 - RNA, 22 nt, Human
ugagacaaccuaauuaaacacc

SEQ ID NO: 730928 - RNA, 22 nt, Human
acuguggggugaggcccaagaa

SEQ ID NO: 730929 - RNA, 22 nt, Human
uagauuaagaugccaguuuuga

SEQ ID NO: 730930 - RNA, 22 nt, Human
uaugugcaaauuaauugcuaga

SEQ ID NO: 730931 - RNA, 22 nt, Human
cccacccugggaagcuaggcag

SEQ ID NO: 730932 - RNA, 22 nt, Human
ucaguguuuauugcggugugua

SEQ ID NO: 730933 - RNA, 22 nt, Human
gcagugaagauuugggcucugg

SEQ ID NO: 730934 - RNA, 22 nt, Human
gauggaggagauggcagggugc

SEQ ID NO: 730935 - RNA, 22 nt, Human
uuaauacacuauaugaucacau

SEQ ID NO: 730936 - RNA, 22 nt, Human
uguuaaaaauucagcucuagau

SEQ ID NO: 730937 - RNA, 22 nt, Human
uuaguucacugcuauaucauca

SEQ ID NO: 730938 - RNA, 22 nt, Human
acaggcuguacuucuaaucauc

SEQ ID NO: 730939 - RNA, 17 nt, Human
acaggccugcuugcacu

SEQ ID NO: 730940 - RNA, 22 nt, Human
cucuucuuggaaugcugacugu

SEQ ID NO: 730941 - RNA, 22 nt, Human
uaaaugaagcucaugggccaca

SEQ ID NO: 730942 - RNA, 23 nt, Human
cccagcagauuguaaagugucca

SEQ ID NO: 730943 - RNA, 22 nt, Human
gcaucuaauccaguccagcauc

SEQ ID NO: 730944 - RNA, 22 nt, Human
aguggcuuuuuaguggcagaug

SEQ ID NO: 730945 - RNA, 22 nt, Human
cuucugggcagaaguuuugaga

SEQ ID NO: 730946 - RNA, 22 nt, Human
cagugguuccuguucuucuggg

SEQ ID NO: 730947 - RNA, 23 nt, Human
ucacuugaagcuagaaucugccc

SEQ ID NO: 730948 - RNA, 22 nt, Human
uucugacaugugagauuuuguu

SEQ ID NO: 730949 - RNA, 22 nt, Human
uauuucauucuuuaucaggagc

SEQ ID NO: 730950 - RNA, 22 nt, Human
uucuucaaaauccagcaugauu

SEQ ID NO: 730951 - RNA, 19 nt, Human
aggauggagcaggcgguga

SEQ ID NO: 730952 - RNA, 22 nt, Human
cuccaggauguuagacguccag

SEQ ID NO: 730953 - RNA, 22 nt, Human
cuagcccaggaaugccguggcc

SEQ ID NO: 730954 - RNA, 22 nt, Human
uauccguuguuaccagauaaga

SEQ ID NO: 730955 - RNA, 22 nt, Human
cauucauacaaguuuguuucau

SEQ ID NO: 730956 - RNA, 22 nt, Human
caggcucugcugcuacagcugu

SEQ ID NO: 730957 - RNA, 22 nt, Human
ggccaggagauggacaccacau

SEQ ID NO: 730958 - RNA, 22 nt, Human
gccggggcuggggagagacaug

SEQ ID NO: 730959 - RNA, 22 nt, Human
uucagagacauguucuagauca

SEQ ID NO: 730960 - RNA, 22 nt, Human
cugugcugcagacgcaguagcu

SEQ ID NO: 730961 - RNA, 22 nt, Human
uaccaccucaaccucaucugac

SEQ ID NO: 730962 - RNA, 22 nt, Human
gcaguaguucgucuguguuccc

SEQ ID NO: 730963 - RNA, 22 nt, Human
uccaagucuuccuucccaaacc

SEQ ID NO: 730964 - RNA, 22 nt, Human
cagagcugguaagugguagagg

SEQ ID NO: 730965 - RNA, 22 nt, Human
uaaggcaggcuuucauccagag

SEQ ID NO: 730966 - RNA, 21 nt, Human
gaaucuuugauuuacauggga

SEQ ID NO: 730967 - RNA, 22 nt, Human
aggaaacugggccucagguuag

SEQ ID NO: 730968 - RNA, 22 nt, Human
ugcucuggcuggagcaaugacu

SEQ ID NO: 730969 - RNA, 19 nt, Human
aggcaggugcagagguccc

SEQ ID NO: 730970 - RNA, 22 nt, Human
auucugucuuuuuaaaauaaua

SEQ ID NO: 730971 - RNA, 22 nt, Human
auuuuguugaugguggaguagc

SEQ ID NO: 730972 - RNA, 22 nt, Human
ugaaggaggaauguggccucca

SEQ ID NO: 730973 - RNA, 22 nt, Human
aauauuguuucaagaucacaga

SEQ ID NO: 730974 - RNA, 21 nt, Human
agccuggcccagggggaggcu

SEQ ID NO: 730975 - RNA, 22 nt, Human
agggggagacauguguguguuu

SEQ ID NO: 730976 - RNA, 18 nt, Human
acuucccagaugagggga

SEQ ID NO: 730977 - RNA, 22 nt, Human
aaaguguugggauuacaggugu

SEQ ID NO: 730978 - RNA, 22 nt, Human
agcuucucucaggguaucuuuc

SEQ ID NO: 730979 - RNA, 22 nt, Human
cagcuggucaacugaaugaaca

SEQ ID NO: 730980 - RNA, 22 nt, Human
agagugguacuucuuuuucuuc

SEQ ID NO: 730981 - RNA, 22 nt, Human
gaugugagugguagcugggauu

SEQ ID NO: 730982 - RNA, 22 nt, Human
uccaggcuggccucgcgugaca

SEQ ID NO: 730983 - RNA, 22 nt, Human
auguggcuaguccucugcggca

SEQ ID NO: 730984 - RNA, 22 nt, Human
agcuacagucggaaggacagac

SEQ ID NO: 730985 - RNA, 22 nt, Human
gagcuggcacagaaggaucuua

SEQ ID NO: 730986 - RNA, 22 nt, Human
uugaggucaaagaagugagugg

SEQ ID NO: 730987 - RNA, 22 nt, Human
aaucucuuuggcucaaggaucc

SEQ ID NO: 730988 - RNA, 22 nt, Human
ccaggcuccgcauagaccccac

SEQ ID NO: 730989 - RNA, 22 nt, Human
guuugcauuuauuagucuucug

SEQ ID NO: 730990 - RNA, 22 nt, Human
auuaacaugcagccagacacac

SEQ ID NO: 730991 - RNA, 22 nt, Human
uggcagcacggcauccacucuc

SEQ ID NO: 730992 - RNA, 22 nt, Human
agggcccucuggcaggccaggc

SEQ ID NO: 730993 - RNA, 22 nt, Human
ugugcagaguaaggcagcuguu

SEQ ID NO: 730994 - RNA, 23 nt, Human
uauuagggccaggacuggcaaau

SEQ ID NO: 730995 - RNA, 22 nt, Human
uuuacuuugugucaagucaaga

SEQ ID NO: 730996 - RNA, 22 nt, Human
aagaaagggcuauuguucucca

SEQ ID NO: 730997 - RNA, 22 nt, Human
ucagugcagacuguaaguugga

SEQ ID NO: 730998 - RNA, 22 nt, Human
uagcucugugcucuggaucugu

SEQ ID NO: 730999 - RNA, 22 nt, Human
uggcaccagcaccuagaugggg

SEQ ID NO: 731000 - RNA, 22 nt, Human
acacacuguugcucauccaggc

SEQ ID NO: 731001 - RNA, 23 nt, Human
ggccacugaauuuucugcaucuu

SEQ ID NO: 731002 - RNA, 23 nt, Human
cugcugugaaacaugguuuuggu

SEQ ID NO: 731003 - RNA, 22 nt, Human
aucuggcuuucuuaaugacuua

SEQ ID NO: 731004 - RNA, 22 nt, Human
ucacuaaugagcuaaggaaaag

SEQ ID NO: 731005 - RNA, 22 nt, Human
cugcccauucaaccagcuacag

SEQ ID NO: 731006 - RNA, 22 nt, Human
ucagaacagaagaaggaacacg

SEQ ID NO: 731007 - RNA, 22 nt, Human
acauaugugucugcacaugccc

SEQ ID NO: 731008 - RNA, 22 nt, Human
ucaauucugguccucaggaacu

SEQ ID NO: 731009 - RNA, 22 nt, Human
ucugagaagcgggagccuguga

SEQ ID NO: 731010 - RNA, 22 nt, Human
ccaaaccauccaucuccaggcu

SEQ ID NO: 731011 - RNA, 22 nt, Human
aaugaucccauuuagaaacaga

SEQ ID NO: 731012 - RNA, 22 nt, Human
uggguccuggcuuugucagggu

SEQ ID NO: 731013 - RNA, 19 nt, Human
aaaaacuuaguccagaaag

SEQ ID NO: 731014 - RNA, 22 nt, Human
ucccuggguuaccuuucaaggu

SEQ ID NO: 731015 - RNA, 22 nt, Human
cugccacuuuggagugcucaga

SEQ ID NO: 731016 - RNA, 22 nt, Human
ccacugagguuuugugguuaug

SEQ ID NO: 731017 - RNA, 22 nt, Human
gggacuguccggcagaagguac

SEQ ID NO: 731018 - RNA, 22 nt, Human
gagaggaaagauauauacuucu

SEQ ID NO: 731019 - RNA, 22 nt, Human
uaguuacagugcauagcaagau

SEQ ID NO: 731020 - RNA, 22 nt, Human
ugaguucaaguccaaguugcug

SEQ ID NO: 731021 - RNA, 22 nt, Human
uccugggugaaagaacaggcag

SEQ ID NO: 731022 - RNA, 22 nt, Human
ccaucccuucaccacagcagua

SEQ ID NO: 731023 - RNA, 22 nt, Human
aaauacagauuccagggucuua

SEQ ID NO: 731024 - RNA, 23 nt, Human
ucagagaaguuguaggcugggga

SEQ ID NO: 731025 - RNA, 22 nt, Human
gaccugcccacucugaggacau

SEQ ID NO: 731026 - RNA, 22 nt, Human
gcaggaguguauuugcauguaa

SEQ ID NO: 731027 - RNA, 22 nt, Human
ggcucuucacacagugauguca

SEQ ID NO: 731028 - RNA, 22 nt, Human
aggaugagaagauuggaaucuu

SEQ ID NO: 731029 - RNA, 22 nt, Human
uccacuuuagcaaugauugaau

SEQ ID NO: 731030 - RNA, 22 nt, Human
uguguucauguauguauacaua

SEQ ID NO: 731031 - RNA, 22 nt, Human
gcugccugaaugaaccuuguuc

SEQ ID NO: 731032 - RNA, 20 nt, Human
caccuggcugacugucucca

SEQ ID NO: 731033 - RNA, 21 nt, Human
gccuggcucucacuggccugg

SEQ ID NO: 731034 - RNA, 22 nt, Human
aggccagaaauuuggaguaugu

SEQ ID NO: 731035 - RNA, 22 nt, Human
acauuugacuguagauacuugc

SEQ ID NO: 731036 - RNA, 17 nt, Human
ggagacagggucuuuaa

SEQ ID NO: 731037 - RNA, 22 nt, Human
ggcccacuugaaauggagcuca

SEQ ID NO: 731038 - RNA, 22 nt, Human
auucaaacaggccaauugaccu

SEQ ID NO: 731039 - RNA, 22 nt, Human
gggcucucgauuagacccuggg

SEQ ID NO: 731040 - RNA, 22 nt, Human
guuucuuagacagacauuaucu

SEQ ID NO: 731041 - RNA, 22 nt, Human
uucacacuuuggaauuccaccu

SEQ ID NO: 731042 - RNA, 22 nt, Human
uacuuugaauuaaauauuucag

SEQ ID NO: 731043 - RNA, 22 nt, Human
uugggagcuuggccgagaugua

SEQ ID NO: 731044 - RNA, 22 nt, Human
cagggaugucucuggaagggag

SEQ ID NO: 731045 - RNA, 22 nt, Human
uaugaauauaccacaauuuagg

SEQ ID NO: 731046 - RNA, 22 nt, Human
uuuguguuguuuuaagccacua

SEQ ID NO: 731047 - RNA, 22 nt, Human
guuugugucaaugacuucugca

SEQ ID NO: 731048 - RNA, 22 nt, Human
acuuuaaaacugaucaucagag

SEQ ID NO: 731049 - RNA, 22 nt, Human
acuguguccuauuuccuugaca

SEQ ID NO: 731050 - RNA, 22 nt, Human
ucugggaaaugcuguuccuugu

SEQ ID NO: 731051 - RNA, 22 nt, Human
cagugguuuaggucaaggggag

SEQ ID NO: 731052 - RNA, 22 nt, Human
ucccacucccaggcaggccucu

SEQ ID NO: 731053 - RNA, 22 nt, Human
uagcugccaaaagggugggcua

SEQ ID NO: 731054 - RNA, 22 nt, Human
uccacagaauguaagauccaca

SEQ ID NO: 731055 - RNA, 22 nt, Human
acagagcauaaugucuagcaca

SEQ ID NO: 731056 - RNA, 22 nt, Human
uucugugaaucuuuuuucccac

SEQ ID NO: 731057 - RNA, 22 nt, Human
gggcguggauggucagugcagg

SEQ ID NO: 731058 - RNA, 22 nt, Human
ggcucugcccgcggcugcccac

SEQ ID NO: 731059 - RNA, 22 nt, Human
cagucagggacaccagcuagga

SEQ ID NO: 731060 - RNA, 22 nt, Human
ggcuuuauuugcagccauuguu

SEQ ID NO: 731061 - RNA, 22 nt, Human
caaagguuucacaguagcccau

SEQ ID NO: 731062 - RNA, 22 nt, Human
gcucuagguuccuagccaaguc

SEQ ID NO: 731063 - RNA, 22 nt, Human
ugaguaauucacaaaacagaug

SEQ ID NO: 731064 - RNA, 22 nt, Human
aggcuggucuauacggagacga

SEQ ID NO: 731065 - RNA, 23 nt, Human
gauaggcugguuaguguaucugu

SEQ ID NO: 731066 - RNA, 23 nt, Human
ggagcccugagcuguccccaugc

SEQ ID NO: 731067 - RNA, 19 nt, Human
uuuucacauacuggauccu

SEQ ID NO: 731068 - RNA, 22 nt, Human
agccaaggcagcuagagcucug

SEQ ID NO: 731069 - RNA, 21 nt, Human
uacacaaagcgugguccagag

SEQ ID NO: 731070 - RNA, 22 nt, Human
aaagucaagguuuagacuagag

SEQ ID NO: 731071 - RNA, 19 nt, Human
ucucugugucucuguuuau

SEQ ID NO: 731072 - RNA, 22 nt, Human
aggagggcuaggaaaaccagga

SEQ ID NO: 731073 - RNA, 22 nt, Human
gucugcuggcacgucacagaua

SEQ ID NO: 731074 - RNA, 22 nt, Human
uuuggggagacauggccagcug

SEQ ID NO: 731075 - RNA, 22 nt, Human
cugaaguucuacaagccucagg

SEQ ID NO: 731076 - RNA, 22 nt, Human
uugcaaaucagaaguauagauu

SEQ ID NO: 731077 - RNA, 22 nt, Human
accagagcagacuacuggaggu

SEQ ID NO: 731078 - RNA, 20 nt, Human
guuuuaaggcacaggccuuu

SEQ ID NO: 731079 - RNA, 22 nt, Human
aggauuuggggaagaaaacacu

SEQ ID NO: 731080 - RNA, 22 nt, Human
cuaguuguuuaauauugauuga

SEQ ID NO: 731081 - RNA, 22 nt, Human
ucugauaacaaccaugucuggc

SEQ ID NO: 731082 - RNA, 22 nt, Human
ccugcagagcaggagaggcauc

SEQ ID NO: 731083 - RNA, 23 nt, Human
cagaaaucugaaaucuagaaaug

SEQ ID NO: 731084 - RNA, 22 nt, Human
uuggccuuugucaucaagauca

SEQ ID NO: 731085 - RNA, 22 nt, Human
agagccagcaagugaauaguga

SEQ ID NO: 731086 - RNA, 22 nt, Human
uucuuuuagucauucagggaag

SEQ ID NO: 731087 - RNA, 22 nt, Human
auguuauuaaaguacagauucu

SEQ ID NO: 731088 - RNA, 22 nt, Human
ucaguugcuaaaugguguagug

SEQ ID NO: 731089 - RNA, 22 nt, Human
uccuggagcuuccuucauggua

SEQ ID NO: 731090 - RNA, 22 nt, Human
gagcugaauugaagcaaggagc

SEQ ID NO: 731091 - RNA, 22 nt, Human
cuuucauuugauaagaaugcca

SEQ ID NO: 731092 - RNA, 22 nt, Human
augggaggaucacuugaggcca

SEQ ID NO: 731093 - RNA, 22 nt, Human
agggcuggcuccguuaccuuga

SEQ ID NO: 731094 - RNA, 22 nt, Human
uagaucaucagugggcucuuau

SEQ ID NO: 731095 - RNA, 22 nt, Human
ucaaauuaguggaauaauaaug

SEQ ID NO: 731096 - RNA, 22 nt, Human
ggucccuggaaggccaagcuug

SEQ ID NO: 731097 - RNA, 22 nt, Human
agaaaguuugagaacuguagau

SEQ ID NO: 731098 - RNA, 18 nt, Human
uucuuuucaugugaucuc

SEQ ID NO: 731099 - RNA, 22 nt, Human
guccaagucuuccuucccaaac

SEQ ID NO: 731100 - RNA, 22 nt, Human
cggcagcaaaggaagccagguc

SEQ ID NO: 731101 - RNA, 22 nt, Human
ggagugggaacaaugacauggu

SEQ ID NO: 731102 - RNA, 22 nt, Human
ggcagaggaaggaugaauucac

SEQ ID NO: 731103 - RNA, 22 nt, Human
uccuguguucuagguauggucu

SEQ ID NO: 731104 - RNA, 22 nt, Human
uuggcagggccaggcucucucu

SEQ ID NO: 731105 - RNA, 22 nt, Human
caggcagagguaccaagauuga

SEQ ID NO: 731106 - RNA, 22 nt, Human
gaucaguaagugaauaaugagu

SEQ ID NO: 731107 - RNA, 18 nt, Human
ugaucuuugaguauaaug

SEQ ID NO: 731108 - RNA, 22 nt, Human
cagagccauccaggugccuguu

SEQ ID NO: 731109 - RNA, 20 nt, Human
aacugagaguucaggaggag

SEQ ID NO: 731110 - RNA, 22 nt, Human
aacaaaguagcugcuguucuua

SEQ ID NO: 731111 - RNA, 22 nt, Human
cugagcuggucuauggacuugg

SEQ ID NO: 731112 - RNA, 22 nt, Human
uaaagccaacacuuuacugcuc

SEQ ID NO: 731113 - RNA, 22 nt, Human
ucacaugccacagaugaggcaa

SEQ ID NO: 731114 - RNA, 22 nt, Human
auuucacaucuaucucagauuu

SEQ ID NO: 731115 - RNA, 22 nt, Human
ggcagacaccuuuaugucuaau

SEQ ID NO: 731116 - RNA, 22 nt, Human
acuuuccuuauggauggggaaa

SEQ ID NO: 731117 - RNA, 23 nt, Human
gugugccuuuaucuucuguacuc

SEQ ID NO: 731118 - RNA, 22 nt, Human
cugaggcagagaaugaguuugu

SEQ ID NO: 731119 - RNA, 22 nt, Human
caggagucuguuccucauuugu

SEQ ID NO: 731120 - RNA, 22 nt, Human
ucugcuuuagaauccaguagcu

SEQ ID NO: 731121 - RNA, 22 nt, Human
caguaugacuacaaacagcuuu

SEQ ID NO: 731122 - RNA, 22 nt, Human
ucgauagaaaagagcugcaggg

SEQ ID NO: 731123 - RNA, 22 nt, Human
uuuuggaaucauuuacagagca

SEQ ID NO: 731124 - RNA, 22 nt, Human
cucuguagaaacagggcagaag

SEQ ID NO: 731125 - RNA, 22 nt, Human
gucucuucuuugccgguccugc

SEQ ID NO: 731126 - RNA, 22 nt, Human
uuaugcuguuaggaaaaucaaa

SEQ ID NO: 731127 - RNA, 22 nt, Human
agccacuccuucagcgucugcu

SEQ ID NO: 731128 - RNA, 22 nt, Human
cuaguggaaacuaacuggaauu

SEQ ID NO: 731129 - RNA, 22 nt, Human
uggcucuguggauguucugacc

SEQ ID NO: 731130 - RNA, 20 nt, Human
ucagacuugauucuaugcua

SEQ ID NO: 731131 - RNA, 22 nt, Human
agugccucuugucuacgguuuu

SEQ ID NO: 731132 - RNA, 22 nt, Human
ugagagcacacagaaauauuuu

SEQ ID NO: 731133 - RNA, 22 nt, Human
auuuucugugugcagauaaaua

SEQ ID NO: 731134 - RNA, 22 nt, Human
gccaccagguucuggguuaagc

SEQ ID NO: 731135 - RNA, 22 nt, Human
ugccaggcccagcuccagagcu

SEQ ID NO: 731136 - RNA, 22 nt, Human
uacauugaauuuuuuagcaugu

SEQ ID NO: 731137 - RNA, 22 nt, Human
cugaagccacgauagcuuccua

SEQ ID NO: 731138 - RNA, 22 nt, Human
aauguguguucggggcccagag

SEQ ID NO: 731139 - RNA, 22 nt, Human
aggcaggcccucuggaaaggua

SEQ ID NO: 731140 - RNA, 22 nt, Human
caucacaugccuaucaugagcu

SEQ ID NO: 731141 - RNA, 22 nt, Human
acuggcaguagagggagcgcau

SEQ ID NO: 731142 - RNA, 22 nt, Human
aaacagcagcuguuuaauuugc

SEQ ID NO: 731143 - RNA, 22 nt, Human
gugucaaugagguuuauuuuug

SEQ ID NO: 731144 - RNA, 17 nt, Human
caggcacaugaagccag

SEQ ID NO: 731145 - RNA, 22 nt, Human
uaaggguucagaaugcaguggu

SEQ ID NO: 731146 - RNA, 22 nt, Human
aggccaggcgagacacccggcu

SEQ ID NO: 731147 - RNA, 22 nt, Human
uuaagagacaggagaaugaugu

SEQ ID NO: 731148 - RNA, 22 nt, Human
uugcuauuuugagagucauagu

SEQ ID NO: 731149 - RNA, 22 nt, Human
agggucccgaaggagacagcaa

SEQ ID NO: 731150 - RNA, 22 nt, Human
acaggucaacgagagcaggcaa

SEQ ID NO: 731151 - RNA, 20 nt, Human
gccugcagagaaggucagag

SEQ ID NO: 731152 - RNA, 19 nt, Human
ggacauuugaguuguuuau

SEQ ID NO: 731153 - RNA, 22 nt, Human
aaggcaucuggauggaggagga

SEQ ID NO: 731154 - RNA, 22 nt, Human
aaagaauagccuuuguccaaau

SEQ ID NO: 731155 - RNA, 22 nt, Human
acauuacauaagauuguaaccu

SEQ ID NO: 731156 - RNA, 22 nt, Human
ugauucaagccaccacauacug

SEQ ID NO: 731157 - RNA, 22 nt, Human
acaguguucaaaccacuaggcu

SEQ ID NO: 731158 - RNA, 21 nt, Human
auccauccaucuuggccuaac

SEQ ID NO: 731159 - RNA, 22 nt, Human
uggaaagagguagaggaucugg

SEQ ID NO: 731160 - RNA, 22 nt, Human
auauagacagaugacagggaua

SEQ ID NO: 731161 - RNA, 22 nt, Human
aauuacaaauguagacucucau

SEQ ID NO: 731162 - RNA, 18 nt, Human
uucucagacuuuggaagu

SEQ ID NO: 731163 - RNA, 22 nt, Human
ugggagagcuucaugccuucag

SEQ ID NO: 731164 - RNA, 22 nt, Human
agcuuugguugaggggagugug

SEQ ID NO: 731165 - RNA, 17 nt, Human
aagaacacucaauagca

SEQ ID NO: 731166 - RNA, 21 nt, Human
gugcagaggaauguagggggc

SEQ ID NO: 731167 - RNA, 22 nt, Human
uauggcuuuaaacaacuuaggu

SEQ ID NO: 731168 - RNA, 22 nt, Human
uuucugccaaccauuuaaacuc

SEQ ID NO: 731169 - RNA, 22 nt, Human
caccccugggcugggcacacag

SEQ ID NO: 731170 - RNA, 22 nt, Human
gacaguaguaaagcuaggacca

SEQ ID NO: 731171 - RNA, 22 nt, Human
cagccacugaacuccuggcuau

SEQ ID NO: 731172 - RNA, 22 nt, Human
caguauagaaaguuuuaaauug

SEQ ID NO: 731173 - RNA, 22 nt, Human
cuccaggagcugugucuuucuu

SEQ ID NO: 731174 - RNA, 20 nt, Human
uucccuggaaggagaagcag

SEQ ID NO: 731175 - RNA, 22 nt, Human
uccuccucacgcuguugcuugu

SEQ ID NO: 731176 - RNA, 22 nt, Human
gacagggccgcagauggagacu

SEQ ID NO: 731177 - RNA, 22 nt, Human
uucuguucuuuauuuaccauau

SEQ ID NO: 731178 - RNA, 22 nt, Human
uugcuguuuaaugaugucuuau

SEQ ID NO: 731179 - RNA, 22 nt, Human
agggacucgguugagugccccu

SEQ ID NO: 731180 - RNA, 22 nt, Human
acugugcauuccccaaccugug

SEQ ID NO: 731181 - RNA, 22 nt, Human
gucucuguuauuuccaggguca

SEQ ID NO: 731182 - RNA, 22 nt, Human
aucugaauaaauuucuuuuagu

SEQ ID NO: 731183 - RNA, 22 nt, Human
auugcuuacagcuauuucugua

SEQ ID NO: 731184 - RNA, 22 nt, Human
cagcucuuccucccaccggaca

SEQ ID NO: 731185 - RNA, 19 nt, Human
gcaggauaggcugagacua

SEQ ID NO: 731186 - RNA, 22 nt, Human
cuggcuuugguccccugugccu

SEQ ID NO: 731187 - RNA, 22 nt, Human
cuaaagcaacugagacacauag

SEQ ID NO: 731188 - RNA, 23 nt, Human
uugaggacaauuuacaugguguu

SEQ ID NO: 731189 - RNA, 22 nt, Human
gggcagcaguugcccuaaucaa

SEQ ID NO: 731190 - RNA, 22 nt, Human
acagugucugacacauuguagc

SEQ ID NO: 731191 - RNA, 22 nt, Human
acagccuguguaccagcuggga

SEQ ID NO: 731192 - RNA, 22 nt, Human
cuggcucucugagauauugagu

SEQ ID NO: 731193 - RNA, 22 nt, Human
auuucuguaguccacauucuuu

SEQ ID NO: 731194 - RNA, 22 nt, Human
auucuggaagcaagcuuuuaaa

SEQ ID NO: 731195 - RNA, 18 nt, Human
guuuccugaggugaaggg

SEQ ID NO: 731196 - RNA, 22 nt, Human
cuuccagagauagggccucaag

SEQ ID NO: 731197 - RNA, 22 nt, Human
aaccugcauguuucuaaaagca

SEQ ID NO: 731198 - RNA, 22 nt, Human
ugguggcagucuccuggcugug

SEQ ID NO: 731199 - RNA, 22 nt, Human
ucaggagcaacaucuuugaauc

SEQ ID NO: 731200 - RNA, 22 nt, Human
ggaaccacagcccccagcaggc

SEQ ID NO: 731201 - RNA, 18 nt, Human
uucaagaguuucucuagg

SEQ ID NO: 731202 - RNA, 22 nt, Human
aaaucuguuucagguauauuug

SEQ ID NO: 731203 - RNA, 22 nt, Human
aaaguuuuagcuguccaguucc

SEQ ID NO: 731204 - RNA, 22 nt, Human
uagugaaauuuaugcacagcua

SEQ ID NO: 731205 - RNA, 22 nt, Human
caagagccuuugggcagaagga

SEQ ID NO: 731206 - RNA, 21 nt, Human
cagcccagcccauugacagug

SEQ ID NO: 731207 - RNA, 22 nt, Human
cuaaccugcauggcagcuagaa

SEQ ID NO: 731208 - RNA, 23 nt, Human
uggcagcuguguaagagaaagca

SEQ ID NO: 731209 - RNA, 22 nt, Human
agcagggcucugccaugggccc

SEQ ID NO: 731210 - RNA, 22 nt, Human
acuauuuacucaaaugagguug

SEQ ID NO: 731211 - RNA, 22 nt, Human
ucugccugugguggaggaaguu

SEQ ID NO: 731212 - RNA, 22 nt, Human
ucucugagcuuaagguguuuca

SEQ ID NO: 731213 - RNA, 22 nt, Human
acaggccuuaggagagaugggg

SEQ ID NO: 731214 - RNA, 22 nt, Human
cgcuguguuuacaucauugcug

SEQ ID NO: 731215 - RNA, 22 nt, Human
gucacauucaugcagaaucaaa

SEQ ID NO: 731216 - RNA, 19 nt, Human
ccaccagugugaucuaaga

SEQ ID NO: 731217 - RNA, 22 nt, Human
ugucgcagcugaaaaucucaau

SEQ ID NO: 731218 - RNA, 22 nt, Human
aggguauaaagagcaagcagaa

SEQ ID NO: 731219 - RNA, 21 nt, Human
cugcaucugagucauuaugcc

SEQ ID NO: 731220 - RNA, 22 nt, Human
agauaauuaugucaauuucuug

SEQ ID NO: 731221 - RNA, 22 nt, Human
cacuaaaacuacauuggaaaca

SEQ ID NO: 731222 - RNA, 22 nt, Human
cugcaugguucaaaugagcuaa

SEQ ID NO: 731223 - RNA, 22 nt, Human
uucugugaggacuucucaagga

SEQ ID NO: 731224 - RNA, 22 nt, Human
ugaagcaucuggucugagaauu

SEQ ID NO: 731225 - RNA, 22 nt, Human
uuucaaagcaacugaaaaggaa

SEQ ID NO: 731226 - RNA, 22 nt, Human
auauuuagcucauuuccagugc

SEQ ID NO: 731227 - RNA, 22 nt, Human
uaguucucaggacgucaagguu

SEQ ID NO: 731228 - RNA, 22 nt, Human
uucuggaaagcauuugaggccc

SEQ ID NO: 731229 - RNA, 22 nt, Human
uguagggagaagagaggcaccu

SEQ ID NO: 731230 - RNA, 22 nt, Human
caggucugagucacauguucau

SEQ ID NO: 731231 - RNA, 22 nt, Human
caguaaaugagaagcuaguaau

SEQ ID NO: 731232 - RNA, 22 nt, Human
uuucugcaucucuacaguuguu

SEQ ID NO: 731233 - RNA, 22 nt, Human
ucuuauaugcacauacauuggg

SEQ ID NO: 731234 - RNA, 22 nt, Human
uccugggcccaggcugccaggg

SEQ ID NO: 731235 - RNA, 22 nt, Human
ucagcagggcugugguguggcu

SEQ ID NO: 731236 - RNA, 20 nt, Human
caggaggcaaggucaagguc

SEQ ID NO: 731237 - RNA, 22 nt, Human
cuuaggaaauauauacuaaacu

SEQ ID NO: 731238 - RNA, 22 nt, Human
uuauagaugccuugaguaaaug

SEQ ID NO: 731239 - RNA, 22 nt, Human
gaaaaugugccuuuggguauug

SEQ ID NO: 731240 - RNA, 22 nt, Human
uggaagaaaauucaaucgaguu

SEQ ID NO: 731241 - RNA, 22 nt, Human
aggguggcaguuacuggagcaa

SEQ ID NO: 731242 - RNA, 22 nt, Human
gaggagcuugaggcuaggagcc

SEQ ID NO: 731243 - RNA, 23 nt, Human
ugccucaguggaaugugagggug

SEQ ID NO: 731244 - RNA, 19 nt, Human
ugaaauggcaguugcuaaa

SEQ ID NO: 731245 - RNA, 22 nt, Human
gcaaggccugaggugggugcuc

SEQ ID NO: 731246 - RNA, 23 nt, Human
ggcugggagcuccgggugcacgu

SEQ ID NO: 731247 - RNA, 22 nt, Human
ucauagaaauaucacgucuuuu

SEQ ID NO: 731248 - RNA, 22 nt, Human
ucugugcucauucagucauuca

SEQ ID NO: 731249 - RNA, 22 nt, Human
aucugaaagcuaggaguucuca

SEQ ID NO: 731250 - RNA, 22 nt, Human
ggaggccaccauggagucacuu

SEQ ID NO: 731251 - RNA, 17 nt, Human
gaggccaaggcaggcgg

SEQ ID NO: 731252 - RNA, 22 nt, Human
uaagacacauugagaaacacaa

SEQ ID NO: 731253 - RNA, 22 nt, Human
uccuggaggagauccaaucuga

SEQ ID NO: 731254 - RNA, 22 nt, Human
gacccucauugucaccgugagc

SEQ ID NO: 731255 - RNA, 22 nt, Human
gcauuuagcuuuaaaauauuuc

SEQ ID NO: 731256 - RNA, 21 nt, Human
gccucuccaaauccugccuuc

SEQ ID NO: 731257 - RNA, 22 nt, Human
ugcuccugaacacagcccuaug

SEQ ID NO: 731258 - RNA, 17 nt, Human
uaucagaauguguuuac

SEQ ID NO: 731259 - RNA, 22 nt, Human
agcagcaaagccaggggauggg

SEQ ID NO: 731260 - RNA, 22 nt, Human
ugcagcucugaacagucaugaa

SEQ ID NO: 731261 - RNA, 22 nt, Human
ucauuauaaacauaugcuaaag

SEQ ID NO: 731262 - RNA, 22 nt, Human
acagccaggaggaacucaguga

SEQ ID NO: 731263 - RNA, 22 nt, Human
guggcucacgucugucaucuca

SEQ ID NO: 731264 - RNA, 22 nt, Human
gcaaaugcuaaaguguagagac

SEQ ID NO: 731265 - RNA, 22 nt, Human
ccaagggaaaccgagaggcugg

SEQ ID NO: 731266 - RNA, 22 nt, Human
ugugggaggaauuagaauggga

SEQ ID NO: 731267 - RNA, 22 nt, Human
gcagcagugcuuuggaauccug

SEQ ID NO: 731268 - RNA, 22 nt, Human
uucacguuguugaagaaaauac

SEQ ID NO: 731269 - RNA, 22 nt, Human
ugggcaggcaagugaauaccuu

SEQ ID NO: 731270 - RNA, 22 nt, Human
uaacaggcaaggucacaccuug

SEQ ID NO: 731271 - RNA, 22 nt, Human
acauuuuuuagagucccacauu

SEQ ID NO: 731272 - RNA, 19 nt, Human
agggccugcagcucaagcu

SEQ ID NO: 731273 - RNA, 22 nt, Human
ggugccacauaaauggagagag

SEQ ID NO: 731274 - RNA, 22 nt, Human
uacaguaguaagaaugccuuau

SEQ ID NO: 731275 - RNA, 22 nt, Human
acagagagggagugauaaaucc

SEQ ID NO: 731276 - RNA, 22 nt, Human
cugggucucuuuagggugccgu

SEQ ID NO: 731277 - RNA, 23 nt, Human
aggauguaggauguauggcagag

SEQ ID NO: 731278 - RNA, 19 nt, Human
agugcauuuuauguuucaa

SEQ ID NO: 731279 - RNA, 22 nt, Human
ugucaaugaagauaugaauaau

SEQ ID NO: 731280 - RNA, 22 nt, Human
cagccagaggggccagagucgg

SEQ ID NO: 731281 - RNA, 19 nt, Human
gagguuucugaagugggcu

SEQ ID NO: 731282 - RNA, 22 nt, Human
cauguaaaccauugugagcauc

SEQ ID NO: 731283 - RNA, 23 nt, Human
uggcuaaaggcucuaguccugcu

SEQ ID NO: 731284 - RNA, 22 nt, Human
guuauucugcgaugcaauccug

SEQ ID NO: 731285 - RNA, 22 nt, Human
aaugagcugcugcuguuccacc

SEQ ID NO: 731286 - RNA, 22 nt, Human
ucucauggcuuguaggagguga

SEQ ID NO: 731287 - RNA, 20 nt, Human
aacacacugguggcaucagg

SEQ ID NO: 731288 - RNA, 22 nt, Human
agugcaaauuauuuaccugauu

SEQ ID NO: 731289 - RNA, 22 nt, Human
acacacuuuaaauuaaaccucu

SEQ ID NO: 731290 - RNA, 22 nt, Human
uauuuggaaauagggcuuugua

SEQ ID NO: 731291 - RNA, 22 nt, Human
ucugagagccucuagccuaagu

SEQ ID NO: 731292 - RNA, 22 nt, Human
gaaggccaagaggcuccaagau

SEQ ID NO: 731293 - RNA, 22 nt, Human
caguacaauguugaaaaggagu

SEQ ID NO: 731294 - RNA, 22 nt, Human
ugcaugaugacuaaggugguga

SEQ ID NO: 731295 - RNA, 22 nt, Human
ccccuccuggccacacugucag

SEQ ID NO: 731296 - RNA, 22 nt, Human
uugcaaaucuuugccagaaggc

SEQ ID NO: 731297 - RNA, 22 nt, Human
cugcauuagucaugcuuugcag

SEQ ID NO: 731298 - RNA, 22 nt, Human
caccccuugucuuuggggucgu

SEQ ID NO: 731299 - RNA, 22 nt, Human
ccuggcacauaauaguggcuca

SEQ ID NO: 731300 - RNA, 22 nt, Human
ucugggcuuuuccaugccugug

SEQ ID NO: 731301 - RNA, 21 nt, Human
ugcaguucaagucaaucuacu

SEQ ID NO: 731302 - RNA, 22 nt, Human
ugugccucauguaucuggauga

SEQ ID NO: 731303 - RNA, 22 nt, Human
aauguuugaacuuugcauauuu

SEQ ID NO: 731304 - RNA, 22 nt, Human
aucuacacuauaacagaaugcu

SEQ ID NO: 731305 - RNA, 22 nt, Human
ggggccagauaucacuaagguu

SEQ ID NO: 731306 - RNA, 19 nt, Human
agcucaggcccaucguccc

SEQ ID NO: 731307 - RNA, 22 nt, Human
ucugugcugcccaacuucucaa

SEQ ID NO: 731308 - RNA, 22 nt, Human
ccuggcucagaguaugucaucg

SEQ ID NO: 731309 - RNA, 22 nt, Human
cugccugcaucccacagugggg

SEQ ID NO: 731310 - RNA, 18 nt, Human
cugaggcuggcaggagcc

SEQ ID NO: 731311 - RNA, 22 nt, Human
gggcuugcuuaaggucacccgg

SEQ ID NO: 731312 - RNA, 22 nt, Human
ugggcaggggcccugcuuccgu

SEQ ID NO: 731313 - RNA, 22 nt, Human
acagucuacuugagcuuguaua

SEQ ID NO: 731314 - RNA, 22 nt, Human
gcagaggagcaagcuggacacc

SEQ ID NO: 731315 - RNA, 21 nt, Human
uucuagaaaaguaugggacug

SEQ ID NO: 731316 - RNA, 19 nt, Human
agaauuguuuuaugucuuc

SEQ ID NO: 731317 - RNA, 21 nt, Human
cccaacccauuuccaguucau

SEQ ID NO: 731318 - RNA, 22 nt, Human
cugaggugagcuucccugggcu

SEQ ID NO: 731319 - RNA, 22 nt, Human
gacuugggagucuucugagaug

SEQ ID NO: 731320 - RNA, 22 nt, Human
uuccugaucccccaggacaaag

SEQ ID NO: 731321 - RNA, 22 nt, Human
uguauuugggucacaagauggg

SEQ ID NO: 731322 - RNA, 22 nt, Human
ugaaucauggauaaauagcuua

SEQ ID NO: 731323 - RNA, 22 nt, Human
ugagauaacucugauuuauguu

SEQ ID NO: 731324 - RNA, 22 nt, Human
uugucugagaaagugaguugcu

SEQ ID NO: 731325 - RNA, 22 nt, Human
gagaaguuucugguuugcauag

SEQ ID NO: 731326 - RNA, 22 nt, Human
uguguacauauacacaaauaca

SEQ ID NO: 731327 - RNA, 22 nt, Human
agucccuucucaaagugugcgg

SEQ ID NO: 731328 - RNA, 22 nt, Human
aagucucagaaaacuagugugg

SEQ ID NO: 731329 - RNA, 22 nt, Human
ccacagaaucgcuaguggagca

SEQ ID NO: 731330 - RNA, 20 nt, Human
uuaaaaagagucacaggaga

SEQ ID NO: 731331 - RNA, 22 nt, Human
uggccacccccaaugucaguag

SEQ ID NO: 731332 - RNA, 22 nt, Human
agcccugggaggccagcuugua

SEQ ID NO: 731333 - RNA, 22 nt, Human
cugaaugucgaucagcuugggu

SEQ ID NO: 731334 - RNA, 22 nt, Human
aggagcugucauuugauucaca

SEQ ID NO: 731335 - RNA, 22 nt, Human
aggagucagauaugggaaaguu

SEQ ID NO: 731336 - RNA, 22 nt, Human
guaugucaugagccuugugcgu

SEQ ID NO: 731337 - RNA, 22 nt, Human
gccagccauaggccagcacugg

SEQ ID NO: 731338 - RNA, 22 nt, Human
uucuccucuguuggccuucccu

SEQ ID NO: 731339 - RNA, 22 nt, Human
agccuuggccguaagguaugcu

SEQ ID NO: 731340 - RNA, 22 nt, Human
cuggucaccuccuucccagcua

SEQ ID NO: 731341 - RNA, 22 nt, Human
uuuaaauuauaguuaaugucug

SEQ ID NO: 731342 - RNA, 22 nt, Human
acaauuugugucuuuugcuuau

SEQ ID NO: 731343 - RNA, 22 nt, Human
uuuggagaaaaguugagaccau

SEQ ID NO: 731344 - RNA, 20 nt, Human
guggccuguccuguuguggg

SEQ ID NO: 731345 - RNA, 22 nt, Human
cuuuuauuuugaauuaagggcu

SEQ ID NO: 731346 - RNA, 22 nt, Human
ugugccaagaucaaacuuuucu

SEQ ID NO: 731347 - RNA, 22 nt, Human
cuccagaaauucaacagcaaau

SEQ ID NO: 731348 - RNA, 22 nt, Human
gacaggaauguguggaugcgga

SEQ ID NO: 731349 - RNA, 22 nt, Human
agagaaaguccugaucucucua

SEQ ID NO: 731350 - RNA, 19 nt, Human
acagccuguugguggggcu

SEQ ID NO: 731351 - RNA, 22 nt, Human
uauauuuaauuaguugcuggau

SEQ ID NO: 731352 - RNA, 22 nt, Human
ugucuauagccugauuuguugg

SEQ ID NO: 731353 - RNA, 22 nt, Human
caggcagcugcuggguucagcc

SEQ ID NO: 731354 - RNA, 22 nt, Human
agcacagagauuauuuacaaga

SEQ ID NO: 731355 - RNA, 22 nt, Human
cuuuccugaggaguauggcugu

SEQ ID NO: 731356 - RNA, 22 nt, Human
ucuaauugcaauucucagagau

SEQ ID NO: 731357 - RNA, 22 nt, Human
uggcagguggcucuggcauucu

SEQ ID NO: 731358 - RNA, 22 nt, Human
cugcuuuacucauaggguuuca

SEQ ID NO: 731359 - RNA, 22 nt, Human
agcaguuugaaucaauggccag

SEQ ID NO: 731360 - RNA, 22 nt, Human
agcccuggcucccagcagcgcu

SEQ ID NO: 731361 - RNA, 22 nt, Human
uccuuacaugcuuccuuauaca

SEQ ID NO: 731362 - RNA, 22 nt, Human
gcccucuggcagccuuggcugg

SEQ ID NO: 731363 - RNA, 22 nt, Human
uuagccauuaauguccugugca

SEQ ID NO: 731364 - RNA, 19 nt, Human
ucuuuucacgcauuuugaa

SEQ ID NO: 731365 - RNA, 22 nt, Human
uggaagacauuuuggaccuugg

SEQ ID NO: 731366 - RNA, 17 nt, Human
gggacucaagauggggu

SEQ ID NO: 731367 - RNA, 22 nt, Human
cuuccuuugcuguucggagguu

SEQ ID NO: 731368 - RNA, 22 nt, Human
ugcuugucucucugugcccacu

SEQ ID NO: 731369 - RNA, 22 nt, Human
cauggcuuuuuuauucugaaug

SEQ ID NO: 731370 - RNA, 22 nt, Human
auugaaaaauucacaauucugg

SEQ ID NO: 731371 - RNA, 22 nt, Human
acacauuaugagcaguugucuu

SEQ ID NO: 731372 - RNA, 22 nt, Human
uuucagaaggggagaaagguca

SEQ ID NO: 731373 - RNA, 22 nt, Human
cagcuuauucaguaagcacaua

SEQ ID NO: 731374 - RNA, 22 nt, Human
gguggccucucaugcaagguag

SEQ ID NO: 731375 - RNA, 22 nt, Human
gaacacagcagggauaaccacu

SEQ ID NO: 731376 - RNA, 22 nt, Human
ugucuaaacuuguuuuaucuca

SEQ ID NO: 731377 - RNA, 22 nt, Human
aacauuucuucugaaacugagu

SEQ ID NO: 731378 - RNA, 22 nt, Human
cucagccagacaugacccaguc

SEQ ID NO: 731379 - RNA, 22 nt, Human
ugcuuauauuuauugggcuuag

SEQ ID NO: 731380 - RNA, 22 nt, Human
acugggccuugccauggcagcc

SEQ ID NO: 731381 - RNA, 21 nt, Human
ccuguggucuggagggagcac

SEQ ID NO: 731382 - RNA, 22 nt, Human
gccuggcuuuugccucauguuc

SEQ ID NO: 731383 - RNA, 20 nt, Human
gacaacagaguaccaggaag

SEQ ID NO: 731384 - RNA, 22 nt, Human
gaacagcugcuagagaucugug

SEQ ID NO: 731385 - RNA, 22 nt, Human
gggcagcauucugugggcaggu

SEQ ID NO: 731386 - RNA, 22 nt, Human
aaaggucaaaaucgugacauug

SEQ ID NO: 731387 - RNA, 22 nt, Human
uaccauuucaguaaaaacuuag

SEQ ID NO: 731388 - RNA, 22 nt, Human
uuuccuuuuggcuaggugugaa

SEQ ID NO: 731389 - RNA, 22 nt, Human
agcagcaguguguggucauguu

SEQ ID NO: 731390 - RNA, 22 nt, Human
ccagccagcugguuggacgccu

SEQ ID NO: 731391 - RNA, 22 nt, Human
aguucacauuccgagguacugg

SEQ ID NO: 731392 - RNA, 23 nt, Human
cuggacucaggggaugugaagga

SEQ ID NO: 731393 - RNA, 22 nt, Human
uucuuauguucacauaauucca

SEQ ID NO: 731394 - RNA, 22 nt, Human
cagcccagcugggaucacacuc

SEQ ID NO: 731395 - RNA, 20 nt, Human
uccccagggcaucaggagca

SEQ ID NO: 731396 - RNA, 22 nt, Human
ccaaggcuccucagcuggucuu

SEQ ID NO: 731397 - RNA, 22 nt, Human
uuuaauugauucacagucugua

SEQ ID NO: 731398 - RNA, 22 nt, Human
caguccuuaaggaaacauuugu

SEQ ID NO: 731399 - RNA, 22 nt, Human
acaguuugaauaauuuagauag

SEQ ID NO: 731400 - RNA, 22 nt, Human
ugcuauuucucugcuguaaaau

SEQ ID NO: 731401 - RNA, 22 nt, Human
cucagaguccauaguuuacagu

SEQ ID NO: 731402 - RNA, 22 nt, Human
agguuccaucaccugcagugga

SEQ ID NO: 731403 - RNA, 22 nt, Human
uugccugcuacggucuucacug

SEQ ID NO: 731404 - RNA, 22 nt, Human
gccaagggaacugagccggagg

SEQ ID NO: 731405 - RNA, 22 nt, Human
auggcccugcugguuugaucgu

SEQ ID NO: 731406 - RNA, 22 nt, Human
cuuaauuuaagccuagaaugca

SEQ ID NO: 731407 - RNA, 20 nt, Human
agaaccuaaguuaaaacaca

SEQ ID NO: 731408 - RNA, 22 nt, Human
ugcuuccugaggccgucuucuc

SEQ ID NO: 731409 - RNA, 22 nt, Human
ugcaccauuuugucaggcuacu

SEQ ID NO: 731410 - RNA, 22 nt, Human
auggaguaauauuaacauguua

SEQ ID NO: 731411 - RNA, 22 nt, Human
uccugcaguuacaucccagcca

SEQ ID NO: 731412 - RNA, 22 nt, Human
ugggagcaggugugcuagggaa

SEQ ID NO: 731413 - RNA, 22 nt, Human
ugugugauugcaggagaugugg

SEQ ID NO: 731414 - RNA, 22 nt, Human
uuauggcauauuccucauugua

SEQ ID NO: 731415 - RNA, 22 nt, Human
cauuucuauggcaaugggaaaa

SEQ ID NO: 731416 - RNA, 22 nt, Human
cuucuuggugauggcuuaccug

SEQ ID NO: 731417 - RNA, 22 nt, Human
agccccugcuggguguagcuca

SEQ ID NO: 731418 - RNA, 22 nt, Human
uucugugugcugucuuggcuuu

SEQ ID NO: 731419 - RNA, 22 nt, Human
ucccagccuuucuuuucugcug

SEQ ID NO: 731420 - RNA, 22 nt, Human
acuuaaaaacagauccagcagg

SEQ ID NO: 731421 - RNA, 22 nt, Human
aguggcaaagucuucagaaguu

SEQ ID NO: 731422 - RNA, 22 nt, Human
aauuauccaccuuugcaugauu

SEQ ID NO: 731423 - RNA, 22 nt, Human
ggugcagugguguggcaaaggg

SEQ ID NO: 731424 - RNA, 22 nt, Human
auuccucauuauuuacugagga

SEQ ID NO: 731425 - RNA, 22 nt, Human
auacagguucucuagggaacag

SEQ ID NO: 731426 - RNA, 22 nt, Human
uugcuucauauuuguggcuugc

SEQ ID NO: 731427 - RNA, 23 nt, Human
gguccacccgagccugcagcuuc

SEQ ID NO: 731428 - RNA, 22 nt, Human
ugucaugccaccguuucccaga

SEQ ID NO: 731429 - RNA, 22 nt, Human
uuuccaggcagaggaguuguga

SEQ ID NO: 731430 - RNA, 22 nt, Human
cacagauaccuagugaaacaua

SEQ ID NO: 731431 - RNA, 22 nt, Human
ccaggguuuagcaagccuacaa

SEQ ID NO: 731432 - RNA, 22 nt, Human
caaaauuagaaaugcagcuguu

SEQ ID NO: 731433 - RNA, 22 nt, Human
ugcaacagacuuuauuaacucu

SEQ ID NO: 731434 - RNA, 22 nt, Human
acuccugccacacagaugcugu

SEQ ID NO: 731435 - RNA, 22 nt, Human
ccugucugcaugaucccugcca

SEQ ID NO: 731436 - RNA, 22 nt, Human
gcucagagaaauuauaggaauu

SEQ ID NO: 731437 - RNA, 22 nt, Human
cugcaggacugaaagaugaggu

SEQ ID NO: 731438 - RNA, 22 nt, Human
uuuuccuuugauucccagaugu

SEQ ID NO: 731439 - RNA, 22 nt, Human
caggcuccagcuuccugcucag

SEQ ID NO: 731440 - RNA, 22 nt, Human
agucuucuggguguuuccagag

SEQ ID NO: 731441 - RNA, 22 nt, Human
acucugcuuauugcugcaggca

SEQ ID NO: 731442 - RNA, 22 nt, Human
acagccaaggaauuaggaaggg

SEQ ID NO: 731443 - RNA, 22 nt, Human
acucuggcgggcgggcgagcca

SEQ ID NO: 731444 - RNA, 22 nt, Human
aucuaagagagagagcaugucu

SEQ ID NO: 731445 - RNA, 22 nt, Human
gggcugugugcccacuucccau

SEQ ID NO: 731446 - RNA, 22 nt, Human
caggaaaauggaaucaccugua

SEQ ID NO: 731447 - RNA, 22 nt, Human
ggaggcggacacagguaguguu

SEQ ID NO: 731448 - RNA, 20 nt, Human
uguggcaggaugagggcgga

SEQ ID NO: 731449 - RNA, 22 nt, Human
uugugucuaaauaaggagaccu

SEQ ID NO: 731450 - RNA, 21 nt, Human
aauuuugaaggaagauuaagg

SEQ ID NO: 731451 - RNA, 22 nt, Human
caggguggugaauagcuauagu

SEQ ID NO: 731452 - RNA, 22 nt, Human
ggcuggacauagacauagccau

SEQ ID NO: 731453 - RNA, 22 nt, Human
caaugcuucucauuagccaaug

SEQ ID NO: 731454 - RNA, 22 nt, Human
aaaacacugccugcuugacuga

SEQ ID NO: 731455 - RNA, 23 nt, Human
ccagggcuacgggcaccguccug

SEQ ID NO: 731456 - RNA, 22 nt, Human
uguugauuugugggcugcaaaa

SEQ ID NO: 731457 - RNA, 17 nt, Human
cugggccucugcccuuu

SEQ ID NO: 731458 - RNA, 20 nt, Human
gaauuuuaugaacacuacca

SEQ ID NO: 731459 - RNA, 22 nt, Human
aaugggaagucacuacuguuac

SEQ ID NO: 731460 - RNA, 20 nt, Human
gcuggcagaugucuugagau

SEQ ID NO: 731461 - RNA, 21 nt, Human
gugcuuuuccuuaauguucuu

SEQ ID NO: 731462 - RNA, 18 nt, Human
cauuguuuccagaagacc

SEQ ID NO: 731463 - RNA, 22 nt, Human
caauugucguugacauccuuca

SEQ ID NO: 731464 - RNA, 22 nt, Human
acacauacauggggaagaugag

SEQ ID NO: 731465 - RNA, 22 nt, Human
cugggccaucagaggggcugga

SEQ ID NO: 731466 - RNA, 22 nt, Human
gcugcagaucccacccauuccc

SEQ ID NO: 731467 - RNA, 22 nt, Human
ugaaacaaaaguauguagcuug

SEQ ID NO: 731468 - RNA, 22 nt, Human
caggcaugaucauaggaguuua

SEQ ID NO: 731469 - RNA, 22 nt, Human
aggaagcugcuaagaaacaaug

SEQ ID NO: 731470 - RNA, 22 nt, Human
aaucuggcauuugagaguagga

SEQ ID NO: 731471 - RNA, 22 nt, Human
agcugcccuuaauaggcauuca

SEQ ID NO: 731472 - RNA, 22 nt, Human
gagacaguguccauccaggggc

SEQ ID NO: 731473 - RNA, 22 nt, Human
ccuggcagaauauuaaagugca

SEQ ID NO: 731474 - RNA, 22 nt, Human
guucauuuuacuguaaauagca

SEQ ID NO: 731475 - RNA, 22 nt, Human
augucaugaaaugcuacuaacu

SEQ ID NO: 731476 - RNA, 22 nt, Human
augcuugggacucccuguagca

SEQ ID NO: 731477 - RNA, 22 nt, Human
auagaaacagggaagcaaagca

SEQ ID NO: 731478 - RNA, 22 nt, Human
ugcuuuauaucucucuucuuag

SEQ ID NO: 731479 - RNA, 21 nt, Human
ccaggucuugguccuuggacu

SEQ ID NO: 731480 - RNA, 22 nt, Human
cuguacaucuuaaauggaaaaa

SEQ ID NO: 731481 - RNA, 22 nt, Human
gagcaacuucaauaguacuauu

SEQ ID NO: 731482 - RNA, 22 nt, Human
uaaaugcaguuaguacuugcca

SEQ ID NO: 731483 - RNA, 22 nt, Human
agugugugcaugcauucgugca

SEQ ID NO: 731484 - RNA, 19 nt, Human
ugggagaggcaacagagua

SEQ ID NO: 731485 - RNA, 22 nt, Human
ugaaacuucuaauaugaauagu

SEQ ID NO: 731486 - RNA, 22 nt, Human
aggcugcguuagccucacuccc

SEQ ID NO: 731487 - RNA, 22 nt, Human
augauucuggcaaauuuauuau

SEQ ID NO: 731488 - RNA, 22 nt, Human
ggcaggcuggcuuuguuccagg

SEQ ID NO: 731489 - RNA, 22 nt, Human
aagcgacugcagguuaaaacaa

SEQ ID NO: 731490 - RNA, 22 nt, Human
ucccagaguauuagcaauugcu

SEQ ID NO: 731491 - RNA, 22 nt, Human
aucaacagguauggaugagauu

SEQ ID NO: 731492 - RNA, 22 nt, Human
cccaugagguggagguugcagu

SEQ ID NO: 731493 - RNA, 22 nt, Human
guggcaggagacuggaagaugg

SEQ ID NO: 731494 - RNA, 22 nt, Human
uggcuucugagcauugaaacgu

SEQ ID NO: 731495 - RNA, 22 nt, Human
uuugaauguaaaugcugcagcu

SEQ ID NO: 731496 - RNA, 22 nt, Human
cucagagucccuucccucgugg

SEQ ID NO: 731497 - RNA, 19 nt, Human
acugccugcagguguuggg

SEQ ID NO: 731498 - RNA, 22 nt, Human
auuuucagagacaucuggacuu

SEQ ID NO: 731499 - RNA, 22 nt, Human
uacaguagacaauguuaguaug

SEQ ID NO: 731500 - RNA, 22 nt, Human
uugcuuccucgaggccagcgug

SEQ ID NO: 731501 - RNA, 22 nt, Human
ggaguggcuauuugugcugguu

SEQ ID NO: 731502 - RNA, 22 nt, Human
aaagcuggccucucaggcuuua

SEQ ID NO: 731503 - RNA, 22 nt, Human
uguaacaaguaauccaugggag

SEQ ID NO: 731504 - RNA, 22 nt, Human
cuagaauugcauucuaugaaua

SEQ ID NO: 731505 - RNA, 22 nt, Human
auuucuccuuguugcaaugcag

SEQ ID NO: 731506 - RNA, 22 nt, Human
gugcuuccccaagccacagccu

SEQ ID NO: 731507 - RNA, 22 nt, Human
uuggaagaaauaucaauagugu

SEQ ID NO: 731508 - RNA, 22 nt, Human
uguaugaagguuuaccugcugu

SEQ ID NO: 731509 - RNA, 22 nt, Human
caguccuuccuugccccuuggg

SEQ ID NO: 731510 - RNA, 22 nt, Human
agaagauguugcaguugaugcg

SEQ ID NO: 731511 - RNA, 21 nt, Human
uccaagccuucaacacauuca

SEQ ID NO: 731512 - RNA, 22 nt, Human
aauuaaauugguuuagagagga

SEQ ID NO: 731513 - RNA, 22 nt, Human
caggaacaggguguccuggcag

SEQ ID NO: 731514 - RNA, 22 nt, Human
ggacaaaaaucagccaucucua

SEQ ID NO: 731515 - RNA, 22 nt, Human
acacugagcaucucuagaggca

SEQ ID NO: 731516 - RNA, 22 nt, Human
gcagcagguccgcaucaucauc

SEQ ID NO: 731517 - RNA, 22 nt, Human
cagaacagggcccaaggggucg

SEQ ID NO: 731518 - RNA, 19 nt, Human
ugggaacuuguuagacaug

SEQ ID NO: 731519 - RNA, 22 nt, Human
uuagacauguuugcuaaaauga

SEQ ID NO: 731520 - RNA, 22 nt, Human
ucucucugugacagcuuugcug

SEQ ID NO: 731521 - RNA, 22 nt, Human
ugccagccuggccugagucuuu

SEQ ID NO: 731522 - RNA, 22 nt, Human
ccacaucauggauacaguuaug

SEQ ID NO: 731523 - RNA, 22 nt, Human
gccaggcugcuccagggaggcc

SEQ ID NO: 731524 - RNA, 22 nt, Human
ucuucagagugaaagucuguga

SEQ ID NO: 731525 - RNA, 20 nt, Human
cccagagguugcggcaggag

SEQ ID NO: 731526 - RNA, 22 nt, Human
aagcauuguaagcagaagaugc

SEQ ID NO: 731527 - RNA, 23 nt, Human
agcagccauagggaagcaauaca

SEQ ID NO: 731528 - RNA, 22 nt, Human
ucccacugagcauaugcagaug

SEQ ID NO: 731529 - RNA, 22 nt, Human
ugaaugauguauaauauugaga

SEQ ID NO: 731530 - RNA, 22 nt, Human
acaggagcaacagacuaagaca

SEQ ID NO: 731531 - RNA, 21 nt, Human
caggcucugcuagaggagccu

SEQ ID NO: 731532 - RNA, 22 nt, Human
aaaugucuacuucccaucugua

SEQ ID NO: 731533 - RNA, 21 nt, Human
cagagcuguccaaacccugac

SEQ ID NO: 731534 - RNA, 22 nt, Human
ccagcugccuaagcaauccaua

SEQ ID NO: 731535 - RNA, 22 nt, Human
aggcuuaaaugcucauaucagu

SEQ ID NO: 731536 - RNA, 22 nt, Human
aacagcuuacucaauggugauu

SEQ ID NO: 731537 - RNA, 22 nt, Human
uucuaaaauaaguuuaucuggu

SEQ ID NO: 731538 - RNA, 22 nt, Human
acaugaaguggucagaucaaac

SEQ ID NO: 731539 - RNA, 22 nt, Human
ugggaguggggcauagaaggua

SEQ ID NO: 731540 - RNA, 22 nt, Human
auguguaaaguuagaugucuga

SEQ ID NO: 731541 - RNA, 22 nt, Human
ucacacuggcagugcugaaggc

SEQ ID NO: 731542 - RNA, 22 nt, Human
gggguggauuucaggcgguguc

SEQ ID NO: 731543 - RNA, 22 nt, Human
acugucuuguguuaaagaacca

SEQ ID NO: 731544 - RNA, 22 nt, Human
uggcagcauguuauguaaggaa

SEQ ID NO: 731545 - RNA, 21 nt, Human
uccagggaacuucucaggaau

SEQ ID NO: 731546 - RNA, 22 nt, Human
gaaaaugagccucagcuacauu

SEQ ID NO: 731547 - RNA, 22 nt, Human
ggucucuucaggagcuugagcg

SEQ ID NO: 731548 - RNA, 22 nt, Human
ugauucaguugguuuuguucag

SEQ ID NO: 731549 - RNA, 22 nt, Human
ggcagcacgacaggaguggaag

SEQ ID NO: 731550 - RNA, 17 nt, Human
aucugcuucacccagca

SEQ ID NO: 731551 - RNA, 22 nt, Human
auggcuguuuugugacuucuca

SEQ ID NO: 731552 - RNA, 22 nt, Human
cugugaaugcuaguaagagugc

SEQ ID NO: 731553 - RNA, 22 nt, Human
acaguaguccuuuauuuugguu

SEQ ID NO: 731554 - RNA, 22 nt, Human
acccucaguaaucgugcaguuu

SEQ ID NO: 731555 - RNA, 23 nt, Human
uggcugagguccagguaguuuca

SEQ ID NO: 731556 - RNA, 22 nt, Human
gcucuggcuacuguggcuaccg

SEQ ID NO: 731557 - RNA, 22 nt, Human
auggccagcuuauaggggcuca

SEQ ID NO: 731558 - RNA, 22 nt, Human
gggaugcagucagagccccugu

SEQ ID NO: 731559 - RNA, 22 nt, Human
uacuguauacuacugcuguucu

SEQ ID NO: 731560 - RNA, 22 nt, Human
uucccaguuagucauuuuuaca

SEQ ID NO: 731561 - RNA, 22 nt, Human
gcacacaugcaugugugcaucc

SEQ ID NO: 731562 - RNA, 22 nt, Human
ugguugugguccuccacaucgc

SEQ ID NO: 731563 - RNA, 20 nt, Human
ggaagccagcauccuugagg

SEQ ID NO: 731564 - RNA, 22 nt, Human
gaggggcucuugggcaugaagg

SEQ ID NO: 731565 - RNA, 22 nt, Human
uuuugguuucccuucuuauggu

SEQ ID NO: 731566 - RNA, 22 nt, Human
ccacaggcggaguggcgggcag

SEQ ID NO: 731567 - RNA, 22 nt, Human
cacucucacaugcccugucagu

SEQ ID NO: 731568 - RNA, 22 nt, Human
caaguuugcugauccuuguuuu

SEQ ID NO: 731569 - RNA, 22 nt, Human
aaacagucaugguugcuguuca

SEQ ID NO: 731570 - RNA, 22 nt, Human
aauuagaagcuguuagcaaaau

SEQ ID NO: 731571 - RNA, 22 nt, Human
agaaugcaguuugaaauaaggu

SEQ ID NO: 731572 - RNA, 22 nt, Human
cuuccugcauggagucugaaug

SEQ ID NO: 731573 - RNA, 22 nt, Human
ugagugccuacggcacaggcgc

SEQ ID NO: 731574 - RNA, 22 nt, Human
acuuggagggagcuggguggaa

SEQ ID NO: 731575 - RNA, 22 nt, Human
guacacauauauuaaaaauugu

SEQ ID NO: 731576 - RNA, 21 nt, Human
ccacugcucuucccuagggcc

SEQ ID NO: 731577 - RNA, 22 nt, Human
uuauucuggaggaagcaaaugg

SEQ ID NO: 731578 - RNA, 22 nt, Human
ucuguguuuaaaagauaugucc

SEQ ID NO: 731579 - RNA, 22 nt, Human
aucaaagguaucuaugcugucu

SEQ ID NO: 731580 - RNA, 22 nt, Human
uucuguaggcauggaacaggga

SEQ ID NO: 731581 - RNA, 22 nt, Human
aggcccugcccagugccacaag

SEQ ID NO: 731582 - RNA, 22 nt, Human
guaaagcaaaauguagagauug

SEQ ID NO: 731583 - RNA, 22 nt, Human
uuggcagaugagaccagggguu

SEQ ID NO: 731584 - RNA, 22 nt, Human
accugggauggggccagguuua

SEQ ID NO: 731585 - RNA, 17 nt, Human
caggucugaggccaggc

SEQ ID NO: 731586 - RNA, 22 nt, Human
agcuccuccugagugucuggga

SEQ ID NO: 731587 - RNA, 20 nt, Human
gagggcacauuguuccgugc

SEQ ID NO: 731588 - RNA, 22 nt, Human
aaggaacugaugcucaaagaau

SEQ ID NO: 731589 - RNA, 22 nt, Human
gccacagccucugggaaaacuc

SEQ ID NO: 731590 - RNA, 22 nt, Human
ccugagagcauuccacacugaa

SEQ ID NO: 731591 - RNA, 23 nt, Human
cuggccaccaucuuucuggcuuc

SEQ ID NO: 731592 - RNA, 20 nt, Human
gccuggcacccggggcuggc

SEQ ID NO: 731593 - RNA, 21 nt, Human
ugaaggggccaucacaaaggc

SEQ ID NO: 731594 - RNA, 22 nt, Human
agcagccagaaauccagaggug

SEQ ID NO: 731595 - RNA, 22 nt, Human
cucucugagugagggacaagcu

SEQ ID NO: 731596 - RNA, 19 nt, Human
cugcuuuaggccuuaaaag

SEQ ID NO: 731597 - RNA, 20 nt, Human
ugggcaccagaugggaugcc

SEQ ID NO: 731598 - RNA, 22 nt, Human
ugagucagugacaugaacuugu

SEQ ID NO: 731599 - RNA, 20 nt, Human
aucagacuugcauuucagga

SEQ ID NO: 731600 - RNA, 22 nt, Human
ugucccagacauaaguggacau

SEQ ID NO: 731601 - RNA, 22 nt, Human
cccuggcacuagcgacggccau

SEQ ID NO: 731602 - RNA, 22 nt, Human
cucugcuuuguaaguugugagg

SEQ ID NO: 731603 - RNA, 22 nt, Human
acuguacaaccucugccccugu

SEQ ID NO: 731604 - RNA, 20 nt, Human
aaagucuguuuaucucugga

SEQ ID NO: 731605 - RNA, 22 nt, Human
ccauuuuuaaagagcuuaagua

SEQ ID NO: 731606 - RNA, 22 nt, Human
ugacagaguucggauugaguuu

SEQ ID NO: 731607 - RNA, 22 nt, Human
aguacauacuucaaauguacuu

SEQ ID NO: 731608 - RNA, 22 nt, Human
uagaaaguagggaagguaggau

SEQ ID NO: 731609 - RNA, 22 nt, Human
cugggucugucacuagauaaau

SEQ ID NO: 731610 - RNA, 22 nt, Human
caggcuccacaggggaauccgg

SEQ ID NO: 731611 - RNA, 22 nt, Human
agcccucucuauggcccucuug

SEQ ID NO: 731612 - RNA, 22 nt, Human
uaaauuguccucccccugguau

SEQ ID NO: 731613 - RNA, 22 nt, Human
aaaauggcuguggucuggcaag

SEQ ID NO: 731614 - RNA, 22 nt, Human
uacaaaugaccauagccacuua

SEQ ID NO: 731615 - RNA, 22 nt, Human
cuguuaaaugagaaagcagacu

SEQ ID NO: 731616 - RNA, 22 nt, Human
aguggcagggcuggcugcugca

SEQ ID NO: 731617 - RNA, 21 nt, Human
ugugugcauaugcauguacau

SEQ ID NO: 731618 - RNA, 22 nt, Human
aguacaaacuguuucaaaguag

SEQ ID NO: 731619 - RNA, 22 nt, Human
gggcugagggguaucucauggg

SEQ ID NO: 731620 - RNA, 22 nt, Human
acacagauggguagaaaacaga

SEQ ID NO: 731621 - RNA, 22 nt, Human
aguuuuauaaaggcaccucagu

SEQ ID NO: 731622 - RNA, 22 nt, Human
acuugcagcagcagcuauuggc

SEQ ID NO: 731623 - RNA, 22 nt, Human
uucuggagacccagcaacaggg

SEQ ID NO: 731624 - RNA, 22 nt, Human
gcucugggauuaccagccuuag

SEQ ID NO: 731625 - RNA, 22 nt, Human
cuuuuuguuguccacacuagga

SEQ ID NO: 731626 - RNA, 22 nt, Human
uuacucagucucccauacauug

SEQ ID NO: 731627 - RNA, 22 nt, Human
gccagcaguccaguccuuagug

SEQ ID NO: 731628 - RNA, 21 nt, Human
uaggacagccccccugcccuc

SEQ ID NO: 731629 - RNA, 22 nt, Human
uccuguaguugcuaaguuuguu

SEQ ID NO: 731630 - RNA, 18 nt, Human
gcgggcggugcagugggc

SEQ ID NO: 731631 - RNA, 22 nt, Human
ccagcugggucccugcuggggc

SEQ ID NO: 731632 - RNA, 22 nt, Human
ugcuuuauuuuaaauaugccau

SEQ ID NO: 731633 - RNA, 22 nt, Human
caaacuuugcaaaacuuacagu

SEQ ID NO: 731634 - RNA, 21 nt, Human
uccuugcuauuuuccucagcu

SEQ ID NO: 731635 - RNA, 22 nt, Human
aggaggcagaugcuuggcugua

SEQ ID NO: 731636 - RNA, 22 nt, Human
gucagcucagcaggugggagug

SEQ ID NO: 731637 - RNA, 22 nt, Human
gaaauugccagaucuaguagau

SEQ ID NO: 731638 - RNA, 22 nt, Human
augugggagauuucaggaggug

SEQ ID NO: 731639 - RNA, 22 nt, Human
cauucauucagcaacuguuauu

SEQ ID NO: 731640 - RNA, 22 nt, Human
cugccuugucuuguuuucaggg

SEQ ID NO: 731641 - RNA, 21 nt, Human
uaggagcugauggggaaguag

SEQ ID NO: 731642 - RNA, 22 nt, Human
cugauuaggcuaagcaagaggg

SEQ ID NO: 731643 - RNA, 22 nt, Human
cagacuggccacaucugcacug

SEQ ID NO: 731644 - RNA, 22 nt, Human
cuaaggaauuggagcauguguu

SEQ ID NO: 731645 - RNA, 22 nt, Human
aguccuucaagaaaucuggaaa

SEQ ID NO: 731646 - RNA, 23 nt, Human
acacaaggguaacugccagccau

SEQ ID NO: 731647 - RNA, 22 nt, Human
accuccccauuaggucacccac

SEQ ID NO: 731648 - RNA, 22 nt, Human
cuagagaggugguguugggugg

SEQ ID NO: 731649 - RNA, 22 nt, Human
gcuggcagccaagugaagaggg

SEQ ID NO: 731650 - RNA, 22 nt, Human
ggcucugcagugacuugagggg

SEQ ID NO: 731651 - RNA, 22 nt, Human
ccugcuguucuguuuagugaac

SEQ ID NO: 731652 - RNA, 22 nt, Human
uguccccagcacucacucucca

SEQ ID NO: 731653 - RNA, 22 nt, Human
agggcagcuaaggugcugacug

SEQ ID NO: 731654 - RNA, 22 nt, Human
gacagggcaagacucugucuaa

SEQ ID NO: 731655 - RNA, 22 nt, Human
uacuaucucuucuaacuucaga

SEQ ID NO: 731656 - RNA, 22 nt, Human
aggcuuggagguucuguagcca

SEQ ID NO: 731657 - RNA, 22 nt, Human
gcagagcuucuguccuucagga

SEQ ID NO: 731658 - RNA, 23 nt, Human
ucagcaucaccugggaacuuacu

SEQ ID NO: 731659 - RNA, 22 nt, Human
gacuugggggcuuuggauaggc

SEQ ID NO: 731660 - RNA, 22 nt, Human
cuggguggcuguccagccagcc

SEQ ID NO: 731661 - RNA, 22 nt, Human
uuuacugaccuccaaucccacu

SEQ ID NO: 731662 - RNA, 20 nt, Human
ggacacuguagauuucaaac

SEQ ID NO: 731663 - RNA, 22 nt, Human
aggagggauagaaaaauacuug

SEQ ID NO: 731664 - RNA, 22 nt, Human
ucugagaaugaguguuuucuua

SEQ ID NO: 731665 - RNA, 22 nt, Human
uggccagauucaugcauguauc

SEQ ID NO: 731666 - RNA, 22 nt, Human
gcuggggaccagcugucucuga

SEQ ID NO: 731667 - RNA, 22 nt, Human
ccagucacucugugagagcuac

SEQ ID NO: 731668 - RNA, 22 nt, Human
caccagggacaaugcuaggggu

SEQ ID NO: 731669 - RNA, 20 nt, Human
auaggaaagggaggggcuuu

SEQ ID NO: 731670 - RNA, 22 nt, Human
gaguagaacugguuaucuaaua

SEQ ID NO: 731671 - RNA, 22 nt, Human
gagcccugacacugagggaguu

SEQ ID NO: 731672 - RNA, 22 nt, Human
acagcagcuaaaggugucuccu

SEQ ID NO: 731673 - RNA, 22 nt, Human
ucucauuugugugcaauucaga

SEQ ID NO: 731674 - RNA, 22 nt, Human
guauuucuuuaucuggucagaa

SEQ ID NO: 731675 - RNA, 22 nt, Human
uggcuggcaguuaucuuuggau

SEQ ID NO: 731676 - RNA, 22 nt, Human
ggaaaugacuuggugcuucguu

SEQ ID NO: 731677 - RNA, 22 nt, Human
auggcagucagagacaggcaga

SEQ ID NO: 731678 - RNA, 22 nt, Human
uacuuucuuguuccuuucauaa

SEQ ID NO: 731679 - RNA, 20 nt, Human
ugcagggcucugcuucucuc

SEQ ID NO: 731680 - RNA, 22 nt, Human
ugaaaugagauaauuuaagugc

SEQ ID NO: 731681 - RNA, 22 nt, Human
agcagcuagacuucagaaucug

SEQ ID NO: 731682 - RNA, 22 nt, Human
cucuucagauauacaguacucu

SEQ ID NO: 731683 - RNA, 22 nt, Human
aagaguaugcaugcauguuugu

SEQ ID NO: 731684 - RNA, 22 nt, Human
ggggaaggaaaguuauuagcag

SEQ ID NO: 731685 - RNA, 22 nt, Human
uauuuauucauucagcaagcau

SEQ ID NO: 731686 - RNA, 22 nt, Human
ugcucugugguccaagauggcu

SEQ ID NO: 731687 - RNA, 22 nt, Human
aggacagguguagugggcucug

SEQ ID NO: 731688 - RNA, 20 nt, Human
uacugggcaagcccacagac

SEQ ID NO: 731689 - RNA, 22 nt, Human
cagcgccuccuggaccuccucu

SEQ ID NO: 731690 - RNA, 22 nt, Human
uccaggccucuagccccuaucu

SEQ ID NO: 731691 - RNA, 22 nt, Human
ugaagguggaagggugguucug

SEQ ID NO: 731692 - RNA, 22 nt, Human
uauuuagaacagacaauagaaa

SEQ ID NO: 731693 - RNA, 22 nt, Human
guggguggaggcgucgagggca

SEQ ID NO: 731694 - RNA, 22 nt, Human
ucuacaaugagaaaugaucagu

SEQ ID NO: 731695 - RNA, 22 nt, Human
caucuuuaauuugugacaacua

SEQ ID NO: 731696 - RNA, 22 nt, Human
uugcagagaucagcagguuuga

SEQ ID NO: 731697 - RNA, 22 nt, Human
cagaguguauucugcaguugca

SEQ ID NO: 731698 - RNA, 22 nt, Human
ggcuuaguguuucugcucagcc

SEQ ID NO: 731699 - RNA, 22 nt, Human
uacagaauuagauuauuagaga

SEQ ID NO: 731700 - RNA, 22 nt, Human
ccucuggcaacuucacagccca

SEQ ID NO: 731701 - RNA, 22 nt, Human
gaggcagagguuguugcaguga

SEQ ID NO: 731702 - RNA, 22 nt, Human
uucucauguaaaugccaucauc

SEQ ID NO: 731703 - RNA, 21 nt, Human
ugaaugagcaucuggacuuuu

SEQ ID NO: 731704 - RNA, 23 nt, Human
uaaccugagauugcaagggagcu

SEQ ID NO: 731705 - RNA, 22 nt, Human
auaugcuagugugcuuauacuu

SEQ ID NO: 731706 - RNA, 22 nt, Human
cugcucugaguauuaacggagg

SEQ ID NO: 731707 - RNA, 22 nt, Human
agcuccagggaaagaguggauc

SEQ ID NO: 731708 - RNA, 20 nt, Human
cucaguguauucugggugcu

SEQ ID NO: 731709 - RNA, 22 nt, Human
gauuucaaggaguuuucacagu

SEQ ID NO: 731710 - RNA, 22 nt, Human
uaggccauucuuggagcuuacu

SEQ ID NO: 731711 - RNA, 22 nt, Human
cucugcaucaggcauuauggau

SEQ ID NO: 731712 - RNA, 22 nt, Human
caaaucaccacuuaauggguua

SEQ ID NO: 731713 - RNA, 22 nt, Human
uguguacacacagauauauaca

SEQ ID NO: 731714 - RNA, 18 nt, Human
ucugaauauuaugcagug

SEQ ID NO: 731715 - RNA, 22 nt, Human
agcuggcagucauccuagugag

SEQ ID NO: 731716 - RNA, 19 nt, Human
ggucacaaggaguugugaa

SEQ ID NO: 731717 - RNA, 22 nt, Human
gcuccuggccagcacagggccc

SEQ ID NO: 731718 - RNA, 22 nt, Human
ccugagauggccagugcuggga

SEQ ID NO: 731719 - RNA, 22 nt, Human
auuucagcccaguaugagcccc

SEQ ID NO: 731720 - RNA, 22 nt, Human
uggaggccauaccuccugacau

SEQ ID NO: 731721 - RNA, 19 nt, Human
cagcugcaccgugaccauc

SEQ ID NO: 731722 - RNA, 22 nt, Human
ucaccucucuggccgucuaccu

SEQ ID NO: 731723 - RNA, 22 nt, Human
gacuguggucuguucuccaggu

SEQ ID NO: 731724 - RNA, 20 nt, Human
uccuucagacgacaagcaag

SEQ ID NO: 731725 - RNA, 22 nt, Human
caguucccuaauguguagaaga

SEQ ID NO: 731726 - RNA, 22 nt, Human
uuuccaaaggcuaaacucaguu

SEQ ID NO: 731727 - RNA, 22 nt, Human
uccuugaagcaacgugcagaca

SEQ ID NO: 731728 - RNA, 22 nt, Human
cagaggcugcucuggguggcau

SEQ ID NO: 731729 - RNA, 22 nt, Human
ggugccauauuauauacaguuu

SEQ ID NO: 731730 - RNA, 22 nt, Human
aaugcagaguaaauauuuaauu

SEQ ID NO: 731731 - RNA, 22 nt, Human
uuaaagagaacucaaugaauga

SEQ ID NO: 731732 - RNA, 22 nt, Human
ucugugccuucucccagacuua

SEQ ID NO: 731733 - RNA, 22 nt, Human
uuaaagcauccugucagucugu

SEQ ID NO: 731734 - RNA, 22 nt, Human
acugcugauauaagaaaagauu

SEQ ID NO: 731735 - RNA, 22 nt, Human
agagagcauggcacagaggggu

SEQ ID NO: 731736 - RNA, 19 nt, Human
uauucaggaugauggcaca

SEQ ID NO: 731737 - RNA, 22 nt, Human
cucaggucacggaucugagcug

SEQ ID NO: 731738 - RNA, 22 nt, Human
uggcagggaauacagauguuua

SEQ ID NO: 731739 - RNA, 22 nt, Human
gcccaggaaagauagggccuca

SEQ ID NO: 731740 - RNA, 22 nt, Human
agcccugccauucucuggagcu

SEQ ID NO: 731741 - RNA, 22 nt, Human
agggaccugcucacugccuggc

SEQ ID NO: 731742 - RNA, 22 nt, Human
ugcagggcccuugggguugaac

SEQ ID NO: 731743 - RNA, 22 nt, Human
gaacuuuaggauuuucacaggu

SEQ ID NO: 731744 - RNA, 19 nt, Human
uccagaagucccugagcgg

SEQ ID NO: 731745 - RNA, 22 nt, Human
cacgagggcacacgugggaggg

SEQ ID NO: 731746 - RNA, 22 nt, Human
auugucacuuaaaagugcaugu

SEQ ID NO: 731747 - RNA, 21 nt, Human
agaagccuggguggagguggg

SEQ ID NO: 731748 - RNA, 22 nt, Human
acccugagaaagucacaugcau

SEQ ID NO: 731749 - RNA, 22 nt, Human
ugcuccacugugcguggccaua

SEQ ID NO: 731750 - RNA, 22 nt, Human
gucugauaucagaaaaaguaaa

SEQ ID NO: 731751 - RNA, 22 nt, Human
ggcugccuggaccuccucuuuc

SEQ ID NO: 731752 - RNA, 22 nt, Human
agauacacagcccugccaucac

SEQ ID NO: 731753 - RNA, 22 nt, Human
aggaaagaaaggaggugcauuu

SEQ ID NO: 731754 - RNA, 22 nt, Human
aaaauucuaacaugcagccaag

SEQ ID NO: 731755 - RNA, 22 nt, Human
gagaggcuggcagugccagguu

SEQ ID NO: 731756 - RNA, 22 nt, Human
uccgggggugguagauuuccuu

SEQ ID NO: 731757 - RNA, 22 nt, Human
ucuguccucuuugaagcugcuc

SEQ ID NO: 731758 - RNA, 22 nt, Human
augugucugaccacuguauugg

SEQ ID NO: 731759 - RNA, 19 nt, Human
agcuacagcauggcgaggu

SEQ ID NO: 731760 - RNA, 19 nt, Human
cucagagaggggcagugcc

SEQ ID NO: 731761 - RNA, 22 nt, Human
guucauguggaaauuuaaaaca

SEQ ID NO: 731762 - RNA, 22 nt, Human
auaugcaagcacauagaauacu

SEQ ID NO: 731763 - RNA, 22 nt, Human
cuugcuuuugcugaugauuaag

SEQ ID NO: 731764 - RNA, 22 nt, Human
cugagagaaacaugacucagga

SEQ ID NO: 731765 - RNA, 19 nt, Human
gaaugcagaagagagugga

SEQ ID NO: 731766 - RNA, 22 nt, Human
ccaugagcuucaacugacacag

SEQ ID NO: 731767 - RNA, 22 nt, Human
ccaggauggggagcagauagaa

SEQ ID NO: 731768 - RNA, 22 nt, Human
cccagcuguggcagaggccggg

SEQ ID NO: 731769 - RNA, 22 nt, Human
aggugccagcucucaggcagga

SEQ ID NO: 731770 - RNA, 22 nt, Human
cggcagagacggcgcuuugaac

SEQ ID NO: 731771 - RNA, 22 nt, Human
aauuucagaugucauaaauaua

SEQ ID NO: 731772 - RNA, 22 nt, Human
ucccugccugacagcacccacc

SEQ ID NO: 731773 - RNA, 22 nt, Human
agcuaacacauuccagcuauuu

SEQ ID NO: 731774 - RNA, 22 nt, Human
uuugcaguuucauugcugaaau

SEQ ID NO: 731775 - RNA, 22 nt, Human
ucuuucuacauuuuauaugcuu

SEQ ID NO: 731776 - RNA, 22 nt, Human
auuaguguggacccuaauuuaa

SEQ ID NO: 731777 - RNA, 22 nt, Human
cacauguguauaugugaggggg

SEQ ID NO: 731778 - RNA, 22 nt, Human
gagaggggaccugugugucuag

SEQ ID NO: 731779 - RNA, 20 nt, Human
cuaagagguccuuccacauc

SEQ ID NO: 731780 - RNA, 22 nt, Human
uuaaacauuuauggaggcagca

SEQ ID NO: 731781 - RNA, 22 nt, Human
uccaucugucuuucccauccac

SEQ ID NO: 731782 - RNA, 22 nt, Human
guguacauagaauugugcuuug

SEQ ID NO: 731783 - RNA, 22 nt, Human
cagucccaggguugguucagcu

SEQ ID NO: 731784 - RNA, 22 nt, Human
ggaaagggcagaggccuuggag

SEQ ID NO: 731785 - RNA, 22 nt, Human
aaugauggucauggcaacuuuu

SEQ ID NO: 731786 - RNA, 22 nt, Human
ucugcauuuggaucuugagcug

SEQ ID NO: 731787 - RNA, 22 nt, Human
ggacauggagcuccauggaggc

SEQ ID NO: 731788 - RNA, 22 nt, Human
aggagcagaacuguuguggagg

SEQ ID NO: 731789 - RNA, 22 nt, Human
augugucauuauccagaauaac

SEQ ID NO: 731790 - RNA, 22 nt, Human
guggaggagaggcgccuugcgg

SEQ ID NO: 731791 - RNA, 22 nt, Human
aacaaauguguggcaguguggg

SEQ ID NO: 731792 - RNA, 22 nt, Human
uuggcaguccaggauuaauaua

SEQ ID NO: 731793 - RNA, 21 nt, Human
uguguucuucuaggucagcua

SEQ ID NO: 731794 - RNA, 19 nt, Human
cccucuugcacaaagcaaa

SEQ ID NO: 731795 - RNA, 22 nt, Human
ggagcgugcagcaugagcucau

SEQ ID NO: 731796 - RNA, 22 nt, Human
ugcucauuggcgaucugaggga

SEQ ID NO: 731797 - RNA, 22 nt, Human
cgcaacagagcagguuugauga

SEQ ID NO: 731798 - RNA, 22 nt, Human
cuuucagucaguuaacucagaa

SEQ ID NO: 731799 - RNA, 22 nt, Human
augugcacacagugucaugcaa

SEQ ID NO: 731800 - RNA, 22 nt, Human
uugcuuuuaaucuuuguacauc

SEQ ID NO: 731801 - RNA, 22 nt, Human
uccuggaggcacucgcuggggc

SEQ ID NO: 731802 - RNA, 22 nt, Human
ucagugcaucacagaacuuugu

SEQ ID NO: 731803 - RNA, 22 nt, Human
uaugaagauauaucugaucucu

SEQ ID NO: 731804 - RNA, 22 nt, Human
uuuuuaagagucuggaaauagu

SEQ ID NO: 731805 - RNA, 22 nt, Human
aaugacaauaaucauuaacuuu

SEQ ID NO: 731806 - RNA, 22 nt, Human
aagcaggcaggguggagaguuu

SEQ ID NO: 731807 - RNA, 22 nt, Human
gcugccuccaaucugugccccg

SEQ ID NO: 731808 - RNA, 17 nt, Human
ggcagccucaggcguuu

SEQ ID NO: 731809 - RNA, 22 nt, Human
gugagggcaaauuagaaucaaa

SEQ ID NO: 731810 - RNA, 22 nt, Human
ccuccccacgggcagccggcgc

SEQ ID NO: 731811 - RNA, 22 nt, Human
ccagcagggcagugcccuggac

SEQ ID NO: 731812 - RNA, 23 nt, Human
cccaggaguuucacugcaaaggu

SEQ ID NO: 731813 - RNA, 23 nt, Human
caaaaugcuaugugcccaaugca

SEQ ID NO: 731814 - RNA, 22 nt, Human
auguagcagauauuugugcaca

SEQ ID NO: 731815 - RNA, 19 nt, Human
gauagcugaugaccaucau

SEQ ID NO: 731816 - RNA, 22 nt, Human
caacaguguugcaaucugaaaa

SEQ ID NO: 731817 - RNA, 22 nt, Human
caggaagugugaggguggugua

SEQ ID NO: 731818 - RNA, 22 nt, Human
uugauucugaugaaaguccauu

SEQ ID NO: 731819 - RNA, 22 nt, Human
gggcuggaguugggaagacaaa

SEQ ID NO: 731820 - RNA, 22 nt, Human
cagcaguggcugcaggcagcug

SEQ ID NO: 731821 - RNA, 22 nt, Human
uuccucagaaaauacuguccaa

SEQ ID NO: 731822 - RNA, 22 nt, Human
uuacaugacucaauagaagggc

SEQ ID NO: 731823 - RNA, 22 nt, Human
caucuugacugggauaagggau

SEQ ID NO: 731824 - RNA, 22 nt, Human
ugcaaauuucuuuaguacauaa

SEQ ID NO: 731825 - RNA, 22 nt, Human
ggccugugagaaucaaggaaaa

SEQ ID NO: 731826 - RNA, 22 nt, Human
agcugcugcgccucacccuggc

SEQ ID NO: 731827 - RNA, 22 nt, Human
uuucuaaggugauccuuucuua

SEQ ID NO: 731828 - RNA, 22 nt, Human
cugggccugguagggcuugaaa

SEQ ID NO: 731829 - RNA, 22 nt, Human
uguauacauguguucaugcaug

SEQ ID NO: 731830 - RNA, 22 nt, Human
agugagacaguggacucugcau

SEQ ID NO: 731831 - RNA, 22 nt, Human
ucugagcuggagcccaucaccu

SEQ ID NO: 731832 - RNA, 21 nt, Human
agaggccaagucaucauuucc

SEQ ID NO: 731833 - RNA, 22 nt, Human
cagaggauauaugguuuguaug

SEQ ID NO: 731834 - RNA, 22 nt, Human
uggggcagaguaggauuuuggc

SEQ ID NO: 731835 - RNA, 22 nt, Human
cuggaggggcuggcaugguagc

SEQ ID NO: 731836 - RNA, 22 nt, Human
accagugcuuccugcuggagcu

SEQ ID NO: 731837 - RNA, 20 nt, Human
gagauuuccaaucaugccca

SEQ ID NO: 731838 - RNA, 22 nt, Human
agccaagaaucaugagcuaaua

SEQ ID NO: 731839 - RNA, 22 nt, Human
ucagauauucucuaagaacaau

SEQ ID NO: 731840 - RNA, 21 nt, Human
ccucuggcuugugcugugccc

SEQ ID NO: 731841 - RNA, 22 nt, Human
gcuuggggucaugaggcugcug

SEQ ID NO: 731842 - RNA, 20 nt, Human
gccaaggaggagaaacaggc

SEQ ID NO: 731843 - RNA, 22 nt, Human
cagagagaaucuuggcagcuga

SEQ ID NO: 731844 - RNA, 21 nt, Human
agcagaggcagaauguaugca

SEQ ID NO: 731845 - RNA, 22 nt, Human
agaguauaauuagugucuucua

SEQ ID NO: 731846 - RNA, 22 nt, Human
caggugagcucuaucuagggag

SEQ ID NO: 731847 - RNA, 22 nt, Human
ugucugaaggccugaccuacau

SEQ ID NO: 731848 - RNA, 22 nt, Human
cccugugccuaguuggccuaaa

SEQ ID NO: 731849 - RNA, 22 nt, Human
ucuuucaaugugaaaccaugua

SEQ ID NO: 731850 - RNA, 22 nt, Human
ucagaggaaaggucagauggcu

SEQ ID NO: 731851 - RNA, 22 nt, Human
gaacaaugaaagacauaaacuc

SEQ ID NO: 731852 - RNA, 22 nt, Human
cugaggccuggugaggugguga

SEQ ID NO: 731853 - RNA, 21 nt, Human
gccuuugguuucuuguccugc

SEQ ID NO: 731854 - RNA, 22 nt, Human
ugggccacuugaaaguggaugu

SEQ ID NO: 731855 - RNA, 20 nt, Human
ggccugagcauggcuggcag

SEQ ID NO: 731856 - RNA, 22 nt, Human
auuuuuccaugauacuuaucug

SEQ ID NO: 731857 - RNA, 22 nt, Human
cugugacuguguuggaugcaca

SEQ ID NO: 731858 - RNA, 22 nt, Human
caaaccugagaacaugugcugu

SEQ ID NO: 731859 - RNA, 22 nt, Human
gguuucaacuaaaucaagaagg

SEQ ID NO: 731860 - RNA, 22 nt, Human
auuugccuuuuaaacucacaau

SEQ ID NO: 731861 - RNA, 20 nt, Human
aggaggcaauguagauaagc

SEQ ID NO: 731862 - RNA, 22 nt, Human
uccuagaauagugugucuggag

SEQ ID NO: 731863 - RNA, 22 nt, Human
cacaugaauucacauguauuuu

SEQ ID NO: 731864 - RNA, 22 nt, Human
uaagcaaauaaugcaucaaggg

SEQ ID NO: 731865 - RNA, 22 nt, Human
ucacaugcccuaccuaaucuua

SEQ ID NO: 731866 - RNA, 22 nt, Human
cuucauuggcuuccauagaugc

SEQ ID NO: 731867 - RNA, 22 nt, Human
cucaguuuccccggccugggcg

SEQ ID NO: 731868 - RNA, 22 nt, Human
cagagacacuuaacaggaaugg

SEQ ID NO: 731869 - RNA, 22 nt, Human
gcuuacaggugaggcagcaaga

SEQ ID NO: 731870 - RNA, 22 nt, Human
ccuguacaagagccaucuggau

SEQ ID NO: 731871 - RNA, 22 nt, Human
uugucugcuuguucagauggaa

SEQ ID NO: 731872 - RNA, 22 nt, Human
guuccccuuguguuguugccca

SEQ ID NO: 731873 - RNA, 21 nt, Human
ucuggggaagacaucuaggau

SEQ ID NO: 731874 - RNA, 22 nt, Human
auuauauaaaauucuggaagcu

SEQ ID NO: 731875 - RNA, 22 nt, Human
cauuucuagagucccaagaggu

SEQ ID NO: 731876 - RNA, 22 nt, Human
aaauugcugacacuugaccauu

SEQ ID NO: 731877 - RNA, 23 nt, Human
cagaagacagucucaagacaagg

SEQ ID NO: 731878 - RNA, 22 nt, Human
gccagcuguaucuuuggccagc

SEQ ID NO: 731879 - RNA, 22 nt, Human
aaggggugcaaguuaaucagca

SEQ ID NO: 731880 - RNA, 22 nt, Human
aaaguaagaccaagugaucauu

SEQ ID NO: 731881 - RNA, 22 nt, Human
gggggccuuauucaucugccag

SEQ ID NO: 731882 - RNA, 22 nt, Human
acagguggaggcuuuaggaggu

SEQ ID NO: 731883 - RNA, 22 nt, Human
agaagcauuauuuaauuuuacu

SEQ ID NO: 731884 - RNA, 22 nt, Human
gcugaggcggaaggauugcuag

SEQ ID NO: 731885 - RNA, 22 nt, Human
ucagguguuagaagaaauuuca

SEQ ID NO: 731886 - RNA, 22 nt, Human
gugcagccugucgccaguggau

SEQ ID NO: 731887 - RNA, 22 nt, Human
agccagggaaggauaacaagaa

SEQ ID NO: 731888 - RNA, 22 nt, Human
aucucuggguccauagaagaga

SEQ ID NO: 731889 - RNA, 22 nt, Human
uccuggagccaaugugcugcug

SEQ ID NO: 731890 - RNA, 22 nt, Human
uguacaccugucuuuacacaua

SEQ ID NO: 731891 - RNA, 22 nt, Human
ugaauaaaucaaagacugcccu

SEQ ID NO: 731892 - RNA, 20 nt, Human
ugugagaggguggcuugccc

SEQ ID NO: 731893 - RNA, 22 nt, Human
cuuuguaucuaaauaucuugaa

SEQ ID NO: 731894 - RNA, 22 nt, Human
gcugcagagggucuuagagagg

SEQ ID NO: 731895 - RNA, 21 nt, Human
ucucuggaauuagaccauguu

SEQ ID NO: 731896 - RNA, 22 nt, Human
gaggagccaggaggucucccug

SEQ ID NO: 731897 - RNA, 22 nt, Human
agcaaggccuacagagaggggc

SEQ ID NO: 731898 - RNA, 22 nt, Human
ucuggcucuaacuaggcaucag

SEQ ID NO: 731899 - RNA, 22 nt, Human
gaggaagaaagcauaggugggg

SEQ ID NO: 731900 - RNA, 22 nt, Human
gugcagauccugauugcaguuc

SEQ ID NO: 731901 - RNA, 22 nt, Human
ucagccauggugagagugagag

SEQ ID NO: 731902 - RNA, 22 nt, Human
gcccugagacugagcauggguu

SEQ ID NO: 731903 - RNA, 22 nt, Human
gccacagguggaauuaagaaau

SEQ ID NO: 731904 - RNA, 22 nt, Human
gggcuggauguuugaugacgaa

SEQ ID NO: 731905 - RNA, 22 nt, Human
ggcugccucccaggagaaucug

SEQ ID NO: 731906 - RNA, 22 nt, Human
agcuccuggaggugcgcacucg

SEQ ID NO: 731907 - RNA, 22 nt, Human
cagggccaagccccuuuggcug

SEQ ID NO: 731908 - RNA, 22 nt, Human
agcauccaacaggagggaaggg

SEQ ID NO: 731909 - RNA, 22 nt, Human
cuccagugagcgcggggcaugg

SEQ ID NO: 731910 - RNA, 21 nt, Human
ugcagaggcacaaacaagccc

SEQ ID NO: 731911 - RNA, 22 nt, Human
ucagagauucacgucaguccca

SEQ ID NO: 731912 - RNA, 22 nt, Human
uccauccaggccagcaguaauc

SEQ ID NO: 731913 - RNA, 22 nt, Human
ggagggcugccagguggagcgg

SEQ ID NO: 731914 - RNA, 22 nt, Human
ucagcaccaguuauccucaggg

SEQ ID NO: 731915 - RNA, 22 nt, Human
agaagcaccugucagcuacaug

SEQ ID NO: 731916 - RNA, 22 nt, Human
aguaacuuaggagauacauggg

SEQ ID NO: 731917 - RNA, 22 nt, Human
agcuucagcuugcagcugugau

SEQ ID NO: 731918 - RNA, 22 nt, Human
aacaugcuuugauaaauaaaag

SEQ ID NO: 731919 - RNA, 22 nt, Human
uguguguaauguuucucucuuc

SEQ ID NO: 731920 - RNA, 22 nt, Human
agggggcucagcauggauggag

SEQ ID NO: 731921 - RNA, 22 nt, Human
cuucuuauuaauccuucucugu

SEQ ID NO: 731922 - RNA, 22 nt, Human
uuaccaaaugaaauagagauuu

SEQ ID NO: 731923 - RNA, 22 nt, Human
aguacaaugucugacacaguag

SEQ ID NO: 731924 - RNA, 22 nt, Human
agcggcugcuccgcaggcuggc

SEQ ID NO: 731925 - RNA, 21 nt, Human
ugccagcugcugcaucugucu

SEQ ID NO: 731926 - RNA, 22 nt, Human
gcagaugaaguuuacaggaaac

SEQ ID NO: 731927 - RNA, 22 nt, Human
uaggugaguuuggggaagauag

SEQ ID NO: 731928 - RNA, 23 nt, Human
cuguuauauucuagggagcugca

SEQ ID NO: 731929 - RNA, 22 nt, Human
ugggauggccuuugaaagccag

SEQ ID NO: 731930 - RNA, 22 nt, Human
ggucaaagggugagauggcagg

SEQ ID NO: 731931 - RNA, 22 nt, Human
acuguacuguguauuguagaau

SEQ ID NO: 731932 - RNA, 22 nt, Human
uauaaucugguuuuauuaagag

SEQ ID NO: 731933 - RNA, 22 nt, Human
caggcccaagacugaugagucu

SEQ ID NO: 731934 - RNA, 22 nt, Human
ccaaaaauuagauacacauaua

SEQ ID NO: 731935 - RNA, 22 nt, Human
aaauaaagguccacuuuagggc

SEQ ID NO: 731936 - RNA, 22 nt, Human
acugugagagagguucuuggua

SEQ ID NO: 731937 - RNA, 23 nt, Human
ccagcccuccaccagcucuaggc

SEQ ID NO: 731938 - RNA, 22 nt, Human
guucacauggcauuuucacauc

SEQ ID NO: 731939 - RNA, 22 nt, Human
uaaagacaauaggaaaguuguu

SEQ ID NO: 731940 - RNA, 23 nt, Human
caggaagcagaugggguagaaga

SEQ ID NO: 731941 - RNA, 22 nt, Human
accauggaccauaguuccuauu

SEQ ID NO: 731942 - RNA, 22 nt, Human
gcugagaguccaggaaaacauc

SEQ ID NO: 731943 - RNA, 22 nt, Human
auuuauuaugggauuuggcaca

SEQ ID NO: 731944 - RNA, 20 nt, Human
ucacaggggaccaggagcag

SEQ ID NO: 731945 - RNA, 22 nt, Human
acuguaaaaugagauauguaua

SEQ ID NO: 731946 - RNA, 22 nt, Human
gggacacagagaaacuggagaa

SEQ ID NO: 731947 - RNA, 22 nt, Human
gagguuucuuaucaagaaagcu

SEQ ID NO: 731948 - RNA, 22 nt, Human
gaagggugcauggagggaaguc

SEQ ID NO: 731949 - RNA, 22 nt, Human
caugcacuuaccugaaauucaa

SEQ ID NO: 731950 - RNA, 17 nt, Human
acagcagggaaguguug

SEQ ID NO: 731951 - RNA, 22 nt, Human
gagacauggcaaaagcacuggu

SEQ ID NO: 731952 - RNA, 22 nt, Human
augaaugugaugauucuguuac

SEQ ID NO: 731953 - RNA, 22 nt, Human
ccaggcagccaagugugugugu

SEQ ID NO: 731954 - RNA, 22 nt, Human
gugaaaucugaggcccaugaug

SEQ ID NO: 731955 - RNA, 22 nt, Human
aggcaccuugagagcaggagcu

SEQ ID NO: 731956 - RNA, 19 nt, Human
aggccugggguuuugcacu

SEQ ID NO: 731957 - RNA, 22 nt, Human
aguuuucugaccccugcucuau

SEQ ID NO: 731958 - RNA, 22 nt, Human
ugagcccugugacugcuuugag

SEQ ID NO: 731959 - RNA, 22 nt, Human
gcagggccuuagcagcggcugc

SEQ ID NO: 731960 - RNA, 22 nt, Human
agccaaggacucagugguaggc

SEQ ID NO: 731961 - RNA, 21 nt, Human
ugaauaaagcugcugucgaua

SEQ ID NO: 731962 - RNA, 22 nt, Human
cuuauuagaaagaaaagacaug

SEQ ID NO: 731963 - RNA, 22 nt, Human
ucccucagcaggaacuggccug

SEQ ID NO: 731964 - RNA, 22 nt, Human
ccugggcucaagugaugguccc

SEQ ID NO: 731965 - RNA, 22 nt, Human
aagcuuaaucagucugguugca

SEQ ID NO: 731966 - RNA, 16 nt, Human
ugaggccagccauuuc

SEQ ID NO: 731967 - RNA, 22 nt, Human
ccauuggagccaagaguuuuac

SEQ ID NO: 731968 - RNA, 22 nt, Human
aggcacugaaggaagcuugcgc

SEQ ID NO: 731969 - RNA, 22 nt, Human
gagcuggccgcagagagggcag

SEQ ID NO: 731970 - RNA, 22 nt, Human
uggacaugucuucuccaagaaa

SEQ ID NO: 731971 - RNA, 22 nt, Human
gcaagcaguuacccaggauucg

SEQ ID NO: 731972 - RNA, 22 nt, Human
uggcaccaaaagcagacguauu

SEQ ID NO: 731973 - RNA, 22 nt, Human
cugcagggcccgccugagcccu

SEQ ID NO: 731974 - RNA, 22 nt, Human
ugucagcaggacauuaaaagcu

SEQ ID NO: 731975 - RNA, 22 nt, Human
caugaagcacagcucucuuuuu

SEQ ID NO: 731976 - RNA, 22 nt, Human
uggauucaaauuucagcucugu

SEQ ID NO: 731977 - RNA, 22 nt, Human
gcuuccucgcugggcagaggca

SEQ ID NO: 731978 - RNA, 22 nt, Human
augcugugccuucucugugcca

SEQ ID NO: 731979 - RNA, 22 nt, Human
accaggccaacagcuaaguuaa

SEQ ID NO: 731980 - RNA, 22 nt, Human
aggaaacauugauauugggaaa

SEQ ID NO: 731981 - RNA, 22 nt, Human
cacacagcuagugacaggagaa

SEQ ID NO: 731982 - RNA, 22 nt, Human
gucacaguggggucacagugug

SEQ ID NO: 731983 - RNA, 22 nt, Human
aaucuguuuuugaaacuuugua

SEQ ID NO: 731984 - RNA, 22 nt, Human
uacuaaaugauuaagcaggaau

SEQ ID NO: 731985 - RNA, 22 nt, Human
aaggcuguuuauuagaaaaagu

SEQ ID NO: 731986 - RNA, 22 nt, Human
auguuucaugacugagcaaaau

SEQ ID NO: 731987 - RNA, 22 nt, Human
uuauuuggguuugaguguggca

SEQ ID NO: 731988 - RNA, 20 nt, Human
cagugcccguggaaaagaug

SEQ ID NO: 731989 - RNA, 22 nt, Human
gccaagaaagaacagcagggaa

SEQ ID NO: 731990 - RNA, 22 nt, Human
cucuccugggcugaccguccga

SEQ ID NO: 731991 - RNA, 22 nt, Human
uauggcuuuuaaggagaucuga

SEQ ID NO: 731992 - RNA, 22 nt, Human
ccccaugaaguagggucucuga

SEQ ID NO: 731993 - RNA, 22 nt, Human
ucugccucuuucaggccuggca

SEQ ID NO: 731994 - RNA, 21 nt, Human
gaacauuuggguuguuucuac

SEQ ID NO: 731995 - RNA, 22 nt, Human
augcacaagaggcuagaaaaga

SEQ ID NO: 731996 - RNA, 22 nt, Human
uucagacuuaaaagaucccagc

SEQ ID NO: 731997 - RNA, 22 nt, Human
uaugacaagaaauacagaggua

SEQ ID NO: 731998 - RNA, 16 nt, Human
ucuuccuuuugauuuu

SEQ ID NO: 731999 - RNA, 22 nt, Human
ccugggaaguuguggcugcagu

SEQ ID NO: 732000 - RNA, 22 nt, Human
agucacaugggauuagaaccca

SEQ ID NO: 732001 - RNA, 22 nt, Human
acauuucuggaguuucucaaca

SEQ ID NO: 732002 - RNA, 22 nt, Human
agcaaggauuauccugggaagg

SEQ ID NO: 732003 - RNA, 22 nt, Human
cugaggucagaguuuagucugg

SEQ ID NO: 732004 - RNA, 21 nt, Human
ggcugcugucaccgcugucac

SEQ ID NO: 732005 - RNA, 22 nt, Human
uuauuuacaacucuucucuucc

SEQ ID NO: 732006 - RNA, 22 nt, Human
agccacagcaacaagugcaauu

SEQ ID NO: 732007 - RNA, 22 nt, Human
cagagcucuauguucauggagg

SEQ ID NO: 732008 - RNA, 22 nt, Human
acacugugauuucuggguucca

SEQ ID NO: 732009 - RNA, 22 nt, Human
ugagcaagacccggccucugcc

SEQ ID NO: 732010 - RNA, 22 nt, Human
gagcaaacaaaacugaugugac

SEQ ID NO: 732011 - RNA, 22 nt, Human
gauauauuuuccauggucugca

SEQ ID NO: 732012 - RNA, 22 nt, Human
uucaugugauaaaugugugacu

SEQ ID NO: 732013 - RNA, 22 nt, Human
uagggcucagcucuagcuccug

SEQ ID NO: 732014 - RNA, 22 nt, Human
cucagggccaaggaugcuguug

SEQ ID NO: 732015 - RNA, 21 nt, Human
gugcugggacacagccaggcu

SEQ ID NO: 732016 - RNA, 22 nt, Human
gcugagcacaccuaggguagag

SEQ ID NO: 732017 - RNA, 20 nt, Human
ucuggugccccuuccugaga

SEQ ID NO: 732018 - RNA, 22 nt, Human
ucccagagccaagcuauggaug

SEQ ID NO: 732019 - RNA, 21 nt, Human
augcauauuuuaaguuguguc

SEQ ID NO: 732020 - RNA, 22 nt, Human
aaaggccaugguuggaguguuu

SEQ ID NO: 732021 - RNA, 22 nt, Human
gggguggcuggcaccuccuggu

SEQ ID NO: 732022 - RNA, 22 nt, Human
gucuuuaugguaugaaaacuga

SEQ ID NO: 732023 - RNA, 22 nt, Human
uugaaaacagcguagauucaca

SEQ ID NO: 732024 - RNA, 22 nt, Human
gcaaggaagagcagguggugcu

SEQ ID NO: 732025 - RNA, 17 nt, Human
uggcagcugaaagcucu

SEQ ID NO: 732026 - RNA, 19 nt, Human
uagacuuuuccagcaggca

SEQ ID NO: 732027 - RNA, 22 nt, Human
uggaccugaagaauaggaagua

SEQ ID NO: 732028 - RNA, 23 nt, Human
uucagcaugaagagugaaggcug

SEQ ID NO: 732029 - RNA, 22 nt, Human
cucuuuuacaccaaaaggccua

SEQ ID NO: 732030 - RNA, 22 nt, Human
gucaggauuuacaaacuucagu

SEQ ID NO: 732031 - RNA, 22 nt, Human
ccacccuuccauucuuccucuu

SEQ ID NO: 732032 - RNA, 22 nt, Human
uccaggccaauguagcaggccc

SEQ ID NO: 732033 - RNA, 22 nt, Human
uaaacauggcuguuucaguuau

SEQ ID NO: 732034 - RNA, 22 nt, Human
auuguccuaucucagugccaug

SEQ ID NO: 732035 - RNA, 22 nt, Human
agucauaucugaggaggaaucc

SEQ ID NO: 732036 - RNA, 22 nt, Human
gucuggaggaaaagguuaaaug

SEQ ID NO: 732037 - RNA, 22 nt, Human
gugaacucagucucucuugcua

SEQ ID NO: 732038 - RNA, 22 nt, Human
uaugcuuuaacauuaaacaaca

SEQ ID NO: 732039 - RNA, 22 nt, Human
cucaagugugaguuuuaaaguc

SEQ ID NO: 732040 - RNA, 22 nt, Human
uugaucuuacaguguucuucca

SEQ ID NO: 732041 - RNA, 22 nt, Human
aggucccaguguuagggugaca

SEQ ID NO: 732042 - RNA, 22 nt, Human
agauacauuaguaguuacuugu

SEQ ID NO: 732043 - RNA, 22 nt, Human
ggaguggugucacugagaggaa

SEQ ID NO: 732044 - RNA, 22 nt, Human
cugcagagagugccgggcagcc

SEQ ID NO: 732045 - RNA, 22 nt, Human
gugagacacccaagagucagau

SEQ ID NO: 732046 - RNA, 22 nt, Human
ugucugagugugccugggcauu

SEQ ID NO: 732047 - RNA, 22 nt, Human
gagucugagagccuaaugaccu

SEQ ID NO: 732048 - RNA, 22 nt, Human
uaaaccugcaacuauagccacc

SEQ ID NO: 732049 - RNA, 20 nt, Human
ucucugcuguccacauuugc

SEQ ID NO: 732050 - RNA, 22 nt, Human
ccugaagcacccggagcuggca

SEQ ID NO: 732051 - RNA, 22 nt, Human
agaacauuugucaaaaagccaa

SEQ ID NO: 732052 - RNA, 22 nt, Human
gcagacagggcuacagagguac

SEQ ID NO: 732053 - RNA, 22 nt, Human
ccucuaggauguggcuggagga

SEQ ID NO: 732054 - RNA, 22 nt, Human
gggcccagcacuggcugggauc

SEQ ID NO: 732055 - RNA, 22 nt, Human
uagugaauuccuaauaggaaga

SEQ ID NO: 732056 - RNA, 22 nt, Human
aggcacuugaauugaugauguu

SEQ ID NO: 732057 - RNA, 22 nt, Human
agacagugagaaugaguugaaa

SEQ ID NO: 732058 - RNA, 22 nt, Human
ugccucuguggaaauggugguc

SEQ ID NO: 732059 - RNA, 21 nt, Human
uccaggccaugguggggaggc

SEQ ID NO: 732060 - RNA, 18 nt, Human
gcagccccucuuccuucc

SEQ ID NO: 732061 - RNA, 21 nt, Human
ugcaggaaguauggugccuau

SEQ ID NO: 732062 - RNA, 22 nt, Human
ucugggaacucugucauuuccc

SEQ ID NO: 732063 - RNA, 22 nt, Human
uggcacagccaucuucuccugc

SEQ ID NO: 732064 - RNA, 22 nt, Human
uaugaacuguacuguacuaagc

SEQ ID NO: 732065 - RNA, 22 nt, Human
cagugggaaugaaguggaggcc

SEQ ID NO: 732066 - RNA, 22 nt, Human
caggagacaauggcuguggggc

SEQ ID NO: 732067 - RNA, 22 nt, Human
uuaaaugugauuucauuuaugu

SEQ ID NO: 732068 - RNA, 23 nt, Human
acagggcuguccagggcuagguc

SEQ ID NO: 732069 - RNA, 22 nt, Human
uuucugcagcagacucagugug

SEQ ID NO: 732070 - RNA, 19 nt, Human
acccucuccccacuggguc

SEQ ID NO: 732071 - RNA, 22 nt, Human
ccauagugccaagucuucagca

SEQ ID NO: 732072 - RNA, 22 nt, Human
acugugggagcgcaguggcagc

SEQ ID NO: 732073 - RNA, 22 nt, Human
uaaaauugcggugaauauuucc

SEQ ID NO: 732074 - RNA, 22 nt, Human
agaaaauaaauugaugguggaa

SEQ ID NO: 732075 - RNA, 18 nt, Human
ggccugaggauuucagca

SEQ ID NO: 732076 - RNA, 22 nt, Human
gcagacagcauguugggcuauu

SEQ ID NO: 732077 - RNA, 22 nt, Human
augacacauaaaacaaggacug

SEQ ID NO: 732078 - RNA, 22 nt, Human
ucagagcccugcuccuccccaa

SEQ ID NO: 732079 - RNA, 22 nt, Human
agcuggguggagggcccacggu

SEQ ID NO: 732080 - RNA, 22 nt, Human
gugcauauaugcacauaugugu

SEQ ID NO: 732081 - RNA, 22 nt, Human
gagcccagggcaggcaaggcag

SEQ ID NO: 732082 - RNA, 22 nt, Human
aggucuggugagagcaggugcu

SEQ ID NO: 732083 - RNA, 22 nt, Human
aucuggcugcugugcuuaagcu

SEQ ID NO: 732084 - RNA, 22 nt, Human
gacacugaggcaugcagagccg

SEQ ID NO: 732085 - RNA, 22 nt, Human
gcaccaggaggcccuucucauc

SEQ ID NO: 732086 - RNA, 22 nt, Human
auccaugauugcccagaggugu

SEQ ID NO: 732087 - RNA, 22 nt, Human
ccugugguuuacaugacaguua

SEQ ID NO: 732088 - RNA, 22 nt, Human
uaggagugcauaaaacuauauu

SEQ ID NO: 732089 - RNA, 22 nt, Human
ggucucugacuuagagauggau

SEQ ID NO: 732090 - RNA, 22 nt, Human
gguuugcaugugauguugggca

SEQ ID NO: 732091 - RNA, 22 nt, Human
agcaaagaaggguucuucauua

SEQ ID NO: 732092 - RNA, 22 nt, Human
agugguggagagaugaggacac

SEQ ID NO: 732093 - RNA, 22 nt, Human
gcuaggugcagcagacagcuua

SEQ ID NO: 732094 - RNA, 22 nt, Human
aaugcaccuaccuugauucugc

SEQ ID NO: 732095 - RNA, 22 nt, Human
acagagcuuaggaugacuccca

SEQ ID NO: 732096 - RNA, 22 nt, Human
ucagugcaaucaagguauguuu

SEQ ID NO: 732097 - RNA, 22 nt, Human
auuucagagcuuugcagcuaau

SEQ ID NO: 732098 - RNA, 22 nt, Human
uggcuggagagggucccaugag

SEQ ID NO: 732099 - RNA, 22 nt, Human
ccacagaaaguugucuagagua

SEQ ID NO: 732100 - RNA, 23 nt, Human
gcagaaauucucacacugaggcc

SEQ ID NO: 732101 - RNA, 22 nt, Human
guucgcaucuugaucauggacu

SEQ ID NO: 732102 - RNA, 22 nt, Human
aggcauccaugguggucgcuga

SEQ ID NO: 732103 - RNA, 22 nt, Human
cugcagaugguauuguucuggu

SEQ ID NO: 732104 - RNA, 22 nt, Human
cugggacuugcagagcaggagg

SEQ ID NO: 732105 - RNA, 22 nt, Human
caauaacuaguaauuauuccgg

SEQ ID NO: 732106 - RNA, 22 nt, Human
uuacacaauauaugguacuugg

SEQ ID NO: 732107 - RNA, 22 nt, Human
agucacugucaaagccacacac

SEQ ID NO: 732108 - RNA, 22 nt, Human
uauuugcuuugguccuccaagc

SEQ ID NO: 732109 - RNA, 20 nt, Human
ucuggggaugaggucuagga

SEQ ID NO: 732110 - RNA, 22 nt, Human
gugccugggcaugagcuuguug

SEQ ID NO: 732111 - RNA, 22 nt, Human
ccugccagugccucccacuggu

SEQ ID NO: 732112 - RNA, 22 nt, Human
uggaacaacaugcuggaaaauu

SEQ ID NO: 732113 - RNA, 22 nt, Human
cacugaguucccugacauuuca

SEQ ID NO: 732114 - RNA, 22 nt, Human
acuguaacacaaugguaucugu

SEQ ID NO: 732115 - RNA, 23 nt, Human
ggucacaugugagauuaaacuug

SEQ ID NO: 732116 - RNA, 22 nt, Human
cuggcagcgugagcagcaucca

SEQ ID NO: 732117 - RNA, 22 nt, Human
uuuccuacccuuccaggcagag

SEQ ID NO: 732118 - RNA, 22 nt, Human
auaaugaaugcagaguuauuuu

SEQ ID NO: 732119 - RNA, 22 nt, Human
cccaggguugccugccucugcu

SEQ ID NO: 732120 - RNA, 22 nt, Human
guggggcuaaaaacugugcagu

SEQ ID NO: 732121 - RNA, 22 nt, Human
ugaguccauugauggauaguga

SEQ ID NO: 732122 - RNA, 22 nt, Human
uccugggaccaggcaccuacug

SEQ ID NO: 732123 - RNA, 22 nt, Human
caccagcuucucauugcggguc

SEQ ID NO: 732124 - RNA, 22 nt, Human
uuaaucacagauauuaaacaug

SEQ ID NO: 732125 - RNA, 22 nt, Human
caaaauucugcauuucuaauaa

SEQ ID NO: 732126 - RNA, 22 nt, Human
cugcagcuuaaaggaguucaau

SEQ ID NO: 732127 - RNA, 22 nt, Human
ucucagaguaauucuuuaaggu

SEQ ID NO: 732128 - RNA, 22 nt, Human
gcacacaguauaugcucauuaa

SEQ ID NO: 732129 - RNA, 22 nt, Human
aacaugagugauaaaauuaccu

SEQ ID NO: 732130 - RNA, 22 nt, Human
aauugcuuguuuucggucauaa

SEQ ID NO: 732131 - RNA, 22 nt, Human
gaaggggaaaguugagcaaaua

SEQ ID NO: 732132 - RNA, 22 nt, Human
ucauccugaagaaccugcuucc

SEQ ID NO: 732133 - RNA, 22 nt, Human
gugguaggcacagagaacaaga

SEQ ID NO: 732134 - RNA, 20 nt, Human
aguuugugugucuaugcgcu

SEQ ID NO: 732135 - RNA, 22 nt, Human
aacucugguuucagacucacuu

SEQ ID NO: 732136 - RNA, 22 nt, Human
gaaauacaaaugccuagauccu

SEQ ID NO: 732137 - RNA, 22 nt, Human
agggcaugugggagaggagccu

SEQ ID NO: 732138 - RNA, 22 nt, Human
ugcugggcuggggccucagacc

SEQ ID NO: 732139 - RNA, 22 nt, Human
caggucuguuuccaucagugcu

SEQ ID NO: 732140 - RNA, 22 nt, Human
acaugucuuguggcuuugaucu

SEQ ID NO: 732141 - RNA, 22 nt, Human
ucuuuuguggaugaagaaaugg

SEQ ID NO: 732142 - RNA, 22 nt, Human
gagacacaagaagacaugcaca

SEQ ID NO: 732143 - RNA, 22 nt, Human
uggcacugggacagaugcucuc

SEQ ID NO: 732144 - RNA, 22 nt, Human
aaggagacauuugcagagcacc

SEQ ID NO: 732145 - RNA, 22 nt, Human
uuccagaauuuuguucugcuug

SEQ ID NO: 732146 - RNA, 22 nt, Human
ugcugggcuagaagcugaggcc

SEQ ID NO: 732147 - RNA, 22 nt, Human
caacaugccagacauuaguuug

SEQ ID NO: 732148 - RNA, 22 nt, Human
gagcuccuauggucgguggcuc

SEQ ID NO: 732149 - RNA, 22 nt, Human
agaugugggugucaggcaguga

SEQ ID NO: 732150 - RNA, 22 nt, Human
gaggcuuucacaagguuaguuc

SEQ ID NO: 732151 - RNA, 22 nt, Human
ggccuuuaagcaauugaaaaga

SEQ ID NO: 732152 - RNA, 22 nt, Human
ucucuauuaauugacaauggcu

SEQ ID NO: 732153 - RNA, 22 nt, Human
ucuugaaaauugagguugaagg

SEQ ID NO: 732154 - RNA, 22 nt, Human
uaauacugaaaggaguaucagc

SEQ ID NO: 732155 - RNA, 22 nt, Human
ccaaaguccauaguuuacauaa

SEQ ID NO: 732156 - RNA, 22 nt, Human
gcuuccuuccuuacauuggugg

SEQ ID NO: 732157 - RNA, 22 nt, Human
ucaagcaaagauacaaauggaa

SEQ ID NO: 732158 - RNA, 22 nt, Human
cuugugaaaugccagauaaucu

SEQ ID NO: 732159 - RNA, 22 nt, Human
ucaggucugggcacaugguaca

SEQ ID NO: 732160 - RNA, 22 nt, Human
aggacacuugagaguccaguca

SEQ ID NO: 732161 - RNA, 22 nt, Human
agucagagcaaacuggacagac

SEQ ID NO: 732162 - RNA, 22 nt, Human
ggcugccugaggcagugagaga

SEQ ID NO: 732163 - RNA, 22 nt, Human
gauggguagccuuucaauagca

SEQ ID NO: 732164 - RNA, 22 nt, Human
aaaguccagggaaagagcgucu

SEQ ID NO: 732165 - RNA, 22 nt, Human
guggucauguuaauuaugaucc

SEQ ID NO: 732166 - RNA, 22 nt, Human
auuauggacguuaauuuuggaa

SEQ ID NO: 732167 - RNA, 22 nt, Human
acagugucuccugguacccagu

SEQ ID NO: 732168 - RNA, 22 nt, Human
gcuggaagaaugagugccucgu

SEQ ID NO: 732169 - RNA, 22 nt, Human
ccaggguuggucucucugaggu

SEQ ID NO: 732170 - RNA, 22 nt, Human
uccugcagcugaagcucaugug

SEQ ID NO: 732171 - RNA, 22 nt, Human
uuggcccagggucagcggcgcu

SEQ ID NO: 732172 - RNA, 22 nt, Human
acacccagcugggccaccucca

SEQ ID NO: 732173 - RNA, 20 nt, Human
aggacagcagcugccacuug

SEQ ID NO: 732174 - RNA, 23 nt, Human
cucuccaccuucccacccaggga

SEQ ID NO: 732175 - RNA, 22 nt, Human
gcauccaucagcagauugacug

SEQ ID NO: 732176 - RNA, 23 nt, Human
uacaaugcaaacuuggcccaugg

SEQ ID NO: 732177 - RNA, 22 nt, Human
ucucugggauaaacugggccag

SEQ ID NO: 732178 - RNA, 22 nt, Human
ggcuggucaggaaacuaggcuc

SEQ ID NO: 732179 - RNA, 22 nt, Human
gagggugggcuccuaucugggu

SEQ ID NO: 732180 - RNA, 22 nt, Human
cuccagagaguccagcucuggg

SEQ ID NO: 732181 - RNA, 22 nt, Human
agagcuggacgucugagcccua

SEQ ID NO: 732182 - RNA, 22 nt, Human
uaugaagcugauaaucacugau

SEQ ID NO: 732183 - RNA, 22 nt, Human
uaaauuauggcuggcagagcag

SEQ ID NO: 732184 - RNA, 17 nt, Human
cugccuggagucccauc

SEQ ID NO: 732185 - RNA, 22 nt, Human
uccucagucucucaaaugaggc

SEQ ID NO: 732186 - RNA, 22 nt, Human
uucugaaggcuccucaggaaag

SEQ ID NO: 732187 - RNA, 22 nt, Human
gugcaaaagcaguugugguuuu

SEQ ID NO: 732188 - RNA, 22 nt, Human
uaggggaacuggcacagggcag

SEQ ID NO: 732189 - RNA, 22 nt, Human
caacuccuggcuguuaggcaca

SEQ ID NO: 732190 - RNA, 18 nt, Human
gcuuucugugcagcggag

SEQ ID NO: 732191 - RNA, 22 nt, Human
gcuggcuggaugguugguucgc

SEQ ID NO: 732192 - RNA, 22 nt, Human
cugguucccagcaggaguguag

SEQ ID NO: 732193 - RNA, 22 nt, Human
cagggggcagcguagaaaauga

SEQ ID NO: 732194 - RNA, 22 nt, Human
guuagaccauagaaagagcauc

SEQ ID NO: 732195 - RNA, 22 nt, Human
caugacacccaggcauagcacc

SEQ ID NO: 732196 - RNA, 23 nt, Human
uguaaauuuuguagucacauuuu

SEQ ID NO: 732197 - RNA, 22 nt, Human
cacuggcugggccagcacuccu

SEQ ID NO: 732198 - RNA, 22 nt, Human
ggucccagaauugguuagcaca

SEQ ID NO: 732199 - RNA, 22 nt, Human
cucugcccgcggaugccacguc

SEQ ID NO: 732200 - RNA, 22 nt, Human
acacuuuguuguggcauauacg

SEQ ID NO: 732201 - RNA, 21 nt, Human
uggaaugaggcugagcagugc

SEQ ID NO: 732202 - RNA, 21 nt, Human
cagcacaguacugggucuugc

SEQ ID NO: 732203 - RNA, 22 nt, Human
auccccaggggcauucaagcuu

SEQ ID NO: 732204 - RNA, 22 nt, Human
uacaacaguucaugaaaugaaa

SEQ ID NO: 732205 - RNA, 22 nt, Human
ucucuuaaaggucuucagcuga

SEQ ID NO: 732206 - RNA, 22 nt, Human
ugcuucuguauugaaauuguua

SEQ ID NO: 732207 - RNA, 22 nt, Human
cugaggugagaggaggccaugu

SEQ ID NO: 732208 - RNA, 22 nt, Human
ccagugugcaaucucuggcuua

SEQ ID NO: 732209 - RNA, 22 nt, Human
gcucagagcacucagacucagc

SEQ ID NO: 732210 - RNA, 22 nt, Human
cuggggcaucugacagauaaau

SEQ ID NO: 732211 - RNA, 22 nt, Human
agucucagcuacuugggaggcu

SEQ ID NO: 732212 - RNA, 22 nt, Human
cuggaguucuaugugcuuguga

SEQ ID NO: 732213 - RNA, 22 nt, Human
uacugucuggaguugccaaagg

SEQ ID NO: 732214 - RNA, 22 nt, Human
aacaaugauauagggauuggca

SEQ ID NO: 732215 - RNA, 22 nt, Human
ugaaauguugguaauuuuauau

SEQ ID NO: 732216 - RNA, 22 nt, Human
uuaugucaaaaugguugagauu

SEQ ID NO: 732217 - RNA, 22 nt, Human
ugugacaucgcugugucuguuu

SEQ ID NO: 732218 - RNA, 22 nt, Human
agacaauauauaauuuuaguug

SEQ ID NO: 732219 - RNA, 22 nt, Human
aacauucuuuggaggauuauuc

SEQ ID NO: 732220 - RNA, 22 nt, Human
cuuucacuuuaaucugacaccu

SEQ ID NO: 732221 - RNA, 22 nt, Human
gaguauauuucucucucuuaag

SEQ ID NO: 732222 - RNA, 22 nt, Human
gagucagaaaguagugugccua

SEQ ID NO: 732223 - RNA, 22 nt, Human
uucaauuucauaauaucuagcu

SEQ ID NO: 732224 - RNA, 22 nt, Human
aggaaauaagggacaagacaaa

SEQ ID NO: 732225 - RNA, 22 nt, Human
cacauuuaugggcugggaggca

SEQ ID NO: 732226 - RNA, 22 nt, Human
uuaaagauucugaggcugauua

SEQ ID NO: 732227 - RNA, 21 nt, Human
ggcauggcaccucugggcagg

SEQ ID NO: 732228 - RNA, 22 nt, Human
cuagagaaaaugauagcaggaa

SEQ ID NO: 732229 - RNA, 23 nt, Human
gagguacagcaccagugaauagg

SEQ ID NO: 732230 - RNA, 22 nt, Human
agagaaaugauuccugggcaga

SEQ ID NO: 732231 - RNA, 22 nt, Human
ggccucucauguccugggcuuc

SEQ ID NO: 732232 - RNA, 22 nt, Human
ucuccuacucacucaaggcuug

SEQ ID NO: 732233 - RNA, 22 nt, Human
cauuugauuacuaaagauaauu

SEQ ID NO: 732234 - RNA, 17 nt, Human
gcugagaaggggaagag

SEQ ID NO: 732235 - RNA, 22 nt, Human
agcugggagcagagccacagcc

SEQ ID NO: 732236 - RNA, 22 nt, Human
ccaggauacugcucucugcugc

SEQ ID NO: 732237 - RNA, 18 nt, Human
ucacagaauauugagugg

SEQ ID NO: 732238 - RNA, 22 nt, Human
ccugccagcgcuuaucucucgg

SEQ ID NO: 732239 - RNA, 22 nt, Human
gcuggcuugacagaggccuggg

SEQ ID NO: 732240 - RNA, 22 nt, Human
gggcaccuggcuagugacagug

SEQ ID NO: 732241 - RNA, 22 nt, Human
accaagcacaaagaugaguaaa

SEQ ID NO: 732242 - RNA, 22 nt, Human
aggacagugguguucuggagug

SEQ ID NO: 732243 - RNA, 22 nt, Human
ggcuucugaaaucucugugcgu

SEQ ID NO: 732244 - RNA, 22 nt, Human
ucaugaguuuaagguuuaggcu

SEQ ID NO: 732245 - RNA, 22 nt, Human
auggguagacugacaaagucaa

SEQ ID NO: 732246 - RNA, 22 nt, Human
agcugacucuggccucuggucc

SEQ ID NO: 732247 - RNA, 22 nt, Human
gcagcucccaucagggcacaga

SEQ ID NO: 732248 - RNA, 22 nt, Human
cucuggcuaucuguuucuaugu

SEQ ID NO: 732249 - RNA, 22 nt, Human
agcugcagugaacuguuuuguc

SEQ ID NO: 732250 - RNA, 22 nt, Human
ggaggccucaguaccuugcuuu

SEQ ID NO: 732251 - RNA, 22 nt, Human
aggccucugcuggaaagaguug

SEQ ID NO: 732252 - RNA, 22 nt, Human
gacaggcacgaaauugggcugg

SEQ ID NO: 732253 - RNA, 22 nt, Human
ccaagugauacacccgccucgg

SEQ ID NO: 732254 - RNA, 22 nt, Human
gggauagguuuggaagaggugg

SEQ ID NO: 732255 - RNA, 22 nt, Human
cuguggcacucaagaagccucc

SEQ ID NO: 732256 - RNA, 19 nt, Human
ugugugcccucaccacaua

SEQ ID NO: 732257 - RNA, 20 nt, Human
uucaugggagcaaagaggcc

SEQ ID NO: 732258 - RNA, 20 nt, Human
uucaaguugggucucuggcu

SEQ ID NO: 732259 - RNA, 22 nt, Human
ucauuuaugucuuugccaucca

SEQ ID NO: 732260 - RNA, 19 nt, Human
ccugaguguuucagagaca

SEQ ID NO: 732261 - RNA, 22 nt, Human
ggacacagccacuuaggguacc

SEQ ID NO: 732262 - RNA, 22 nt, Human
caggccugaguguggaagucuu

SEQ ID NO: 732263 - RNA, 21 nt, Human
gacaggugauucagagcaggg

SEQ ID NO: 732264 - RNA, 22 nt, Human
cgcugcagaugggagcugguug

SEQ ID NO: 732265 - RNA, 22 nt, Human
uguguagcucauauuaguguua

SEQ ID NO: 732266 - RNA, 22 nt, Human
augaggcaaggaucagguaagg

SEQ ID NO: 732267 - RNA, 22 nt, Human
aacuagaacgagaaagcugaac

SEQ ID NO: 732268 - RNA, 22 nt, Human
gaggcaggcagauugcuugagg

SEQ ID NO: 732269 - RNA, 22 nt, Human
uguacaaggccaucuacaugcu

SEQ ID NO: 732270 - RNA, 22 nt, Human
uccuagaauaaucuuugacugc

SEQ ID NO: 732271 - RNA, 22 nt, Human
auuccagaugcuuguauuuaaa

SEQ ID NO: 732272 - RNA, 22 nt, Human
uucaucugcuucuuccuauucc

SEQ ID NO: 732273 - RNA, 22 nt, Human
uuaaugcagaaaucaaacugac

SEQ ID NO: 732274 - RNA, 22 nt, Human
aaucaguucuacaucuuaucca

SEQ ID NO: 732275 - RNA, 22 nt, Human
uguccagguggccucugcugcu

SEQ ID NO: 732276 - RNA, 23 nt, Human
uucucuuuagauuuacauuacuc

SEQ ID NO: 732277 - RNA, 18 nt, Human
caauuuuacccagucccu

SEQ ID NO: 732278 - RNA, 22 nt, Human
acacacaugcaugcuugccauu

SEQ ID NO: 732279 - RNA, 22 nt, Human
gaauuagguaauagaacuagua

SEQ ID NO: 732280 - RNA, 20 nt, Human
uauauuuucucuuuggccuu

SEQ ID NO: 732281 - RNA, 22 nt, Human
gcuggggagaauuggguuaucu

SEQ ID NO: 732282 - RNA, 22 nt, Human
cagagcaguaaaucuggggcac

SEQ ID NO: 732283 - RNA, 22 nt, Human
ggcagccacccugggaggcaga

SEQ ID NO: 732284 - RNA, 22 nt, Human
ucuuuaguauugaguuauggua

SEQ ID NO: 732285 - RNA, 22 nt, Human
caccugcucccucaguuccagc

SEQ ID NO: 732286 - RNA, 22 nt, Human
acagcaugagagaugaacauuc

SEQ ID NO: 732287 - RNA, 22 nt, Human
cugacagcuguugcagugaaug

SEQ ID NO: 732288 - RNA, 22 nt, Human
uuacaggaggugcuagguguuu

SEQ ID NO: 732289 - RNA, 22 nt, Human
ggcugggcugcugggucagagc

SEQ ID NO: 732290 - RNA, 22 nt, Human
ggcucccugggugcuccugcuc

SEQ ID NO: 732291 - RNA, 22 nt, Human
aggcuucugauaccaugagaga

SEQ ID NO: 732292 - RNA, 22 nt, Human
cuagaagcaacuagaucuguuu

SEQ ID NO: 732293 - RNA, 22 nt, Human
aaauauaauuucugccucaaua

SEQ ID NO: 732294 - RNA, 22 nt, Human
acuuggagagauaaucccauau

SEQ ID NO: 732295 - RNA, 22 nt, Human
uaaggcaggaacuggcuguuuu

SEQ ID NO: 732296 - RNA, 22 nt, Human
aaacaugcauucaagaaaaucu

SEQ ID NO: 732297 - RNA, 22 nt, Human
auuuaauuuucucaacagugcu

SEQ ID NO: 732298 - RNA, 22 nt, Human
cagcucuggcagagcccaaccc

SEQ ID NO: 732299 - RNA, 22 nt, Human
uuugcauugccucugacuuaug

SEQ ID NO: 732300 - RNA, 22 nt, Human
caaaguauauuucauagucuca

SEQ ID NO: 732301 - RNA, 22 nt, Human
uuacauauuauccaaaacugcu

SEQ ID NO: 732302 - RNA, 22 nt, Human
aguuuucucuguguucugcuua

SEQ ID NO: 732303 - RNA, 22 nt, Human
uuuauuccaugugucuaugacc

SEQ ID NO: 732304 - RNA, 22 nt, Human
uuuguguauguaugcuuguaca

SEQ ID NO: 732305 - RNA, 22 nt, Human
aauugcauguuaaugacuaagu

SEQ ID NO: 732306 - RNA, 22 nt, Human
ugagcgugcaguaguguuggua

SEQ ID NO: 732307 - RNA, 22 nt, Human
ucccaggcaaaggcagcucauu

SEQ ID NO: 732308 - RNA, 20 nt, Human
augaagacaaauccgacuug

SEQ ID NO: 732309 - RNA, 17 nt, Human
aaaucacugucaguuca

SEQ ID NO: 732310 - RNA, 22 nt, Human
agacagcuaauaaaugagugug

SEQ ID NO: 732311 - RNA, 22 nt, Human
aagucccuuuaaucagugccuu

SEQ ID NO: 732312 - RNA, 22 nt, Human
caugcaugccgggcugacagag

SEQ ID NO: 732313 - RNA, 22 nt, Human
gugguccccagagcuguguaca

SEQ ID NO: 732314 - RNA, 22 nt, Human
uuuuagaaguucaugugggauu

SEQ ID NO: 732315 - RNA, 18 nt, Human
auccuugaugagaggucu

SEQ ID NO: 732316 - RNA, 22 nt, Human
cugggucagucugucccuaggg

SEQ ID NO: 732317 - RNA, 22 nt, Human
gagcccaggcugggguucagag

SEQ ID NO: 732318 - RNA, 22 nt, Human
aguggggacaaugagagcaggu

SEQ ID NO: 732319 - RNA, 22 nt, Human
agcagacaauugccuggaugga

SEQ ID NO: 732320 - RNA, 22 nt, Human
aacuagaaaacaagaugcugau

SEQ ID NO: 732321 - RNA, 22 nt, Human
acacauguuuguguagucaguu

SEQ ID NO: 732322 - RNA, 22 nt, Human
cauauuaaggucuguaaggggu

SEQ ID NO: 732323 - RNA, 22 nt, Human
uuauugacuuguuuguccuggu

SEQ ID NO: 732324 - RNA, 21 nt, Human
aagagcugucaggaaggcugc

SEQ ID NO: 732325 - RNA, 22 nt, Human
uuuuccuuucaucaggacaaag

SEQ ID NO: 732326 - RNA, 22 nt, Human
agggacgccgugcgggaccgug

SEQ ID NO: 732327 - RNA, 22 nt, Human
gggagcuauuuauagaggcuga

SEQ ID NO: 732328 - RNA, 22 nt, Human
acccacuguagccacucugggu

SEQ ID NO: 732329 - RNA, 22 nt, Human
caacaggcuuuauguuuaaagu

SEQ ID NO: 732330 - RNA, 23 nt, Human
ccugcagcugccacgcccugcuc

SEQ ID NO: 732331 - RNA, 22 nt, Human
ucucuucuaacacuagaaauuc

SEQ ID NO: 732332 - RNA, 22 nt, Human
ggaugggcugaaagguagcccc

SEQ ID NO: 732333 - RNA, 22 nt, Human
ggcugcugcuguguaggccugu

SEQ ID NO: 732334 - RNA, 17 nt, Human
aucaguagcauaucaga

SEQ ID NO: 732335 - RNA, 22 nt, Human
caagggcucacggucugcuggg

SEQ ID NO: 732336 - RNA, 22 nt, Human
aaggcagccuuuugaguugauu

SEQ ID NO: 732337 - RNA, 22 nt, Human
aaugaacacauguggucaguuu

SEQ ID NO: 732338 - RNA, 22 nt, Human
agagcugaaaaagcugacccgg

SEQ ID NO: 732339 - RNA, 22 nt, Human
cagguagggauaugauggugau

SEQ ID NO: 732340 - RNA, 22 nt, Human
cagugccaugaugcagagcaau

SEQ ID NO: 732341 - RNA, 22 nt, Human
acaugucuaaguacucaacaaa

SEQ ID NO: 732342 - RNA, 22 nt, Human
ugaggguaaccuggagcugcug

SEQ ID NO: 732343 - RNA, 22 nt, Human
ucgugaggcucugcaucgcaca

SEQ ID NO: 732344 - RNA, 22 nt, Human
ucagaagccuugauuaucuaga

SEQ ID NO: 732345 - RNA, 21 nt, Human
gaagacaaaugggaauagcug

SEQ ID NO: 732346 - RNA, 22 nt, Human
cagggcuucuauaccaauucau

SEQ ID NO: 732347 - RNA, 22 nt, Human
ucuuuggcuuugccacacccaa

SEQ ID NO: 732348 - RNA, 22 nt, Human
aggccugggucucgugccuacc

SEQ ID NO: 732349 - RNA, 22 nt, Human
aacaucuagguucucaucgaua

SEQ ID NO: 732350 - RNA, 22 nt, Human
agcagcaugaugacagagucuc

SEQ ID NO: 732351 - RNA, 22 nt, Human
uuuguguaccuuguacauuugu

SEQ ID NO: 732352 - RNA, 22 nt, Human
ugccagcuuuugacuaucuuag

SEQ ID NO: 732353 - RNA, 22 nt, Human
uggcaaaggcgcucacaugccu

SEQ ID NO: 732354 - RNA, 22 nt, Human
cacuggaauguugaggagacaa

SEQ ID NO: 732355 - RNA, 20 nt, Human
guauaagauuucacacauua

SEQ ID NO: 732356 - RNA, 22 nt, Human
gagacagagagguacucaacau

SEQ ID NO: 732357 - RNA, 23 nt, Human
ucagaagugggauacaaagcuga

SEQ ID NO: 732358 - RNA, 22 nt, Human
ggcucugggcauagaaggaagc

SEQ ID NO: 732359 - RNA, 23 nt, Human
acagacuguauucaaaguaggac

SEQ ID NO: 732360 - RNA, 22 nt, Human
cuguccugcaguugggggcagg

SEQ ID NO: 732361 - RNA, 16 nt, Human
uaaacagcagacaguu

SEQ ID NO: 732362 - RNA, 22 nt, Human
cuggcuuucauuucaagcacgu

SEQ ID NO: 732363 - RNA, 19 nt, Human
cagugcuguucauucagug

SEQ ID NO: 732364 - RNA, 22 nt, Human
gcaaggaagcagaguugcuauc

SEQ ID NO: 732365 - RNA, 19 nt, Human
uaauauacagacccaucug

SEQ ID NO: 732366 - RNA, 22 nt, Human
uccagcacagaauuuccuagcu

SEQ ID NO: 732367 - RNA, 22 nt, Human
ucacagcauugaguguacuaga

SEQ ID NO: 732368 - RNA, 22 nt, Human
acugaauaaggugaaugcucug

SEQ ID NO: 732369 - RNA, 22 nt, Human
acagcuggagcccuauggcugg

SEQ ID NO: 732370 - RNA, 22 nt, Human
aguagggaauacauugggguaa

SEQ ID NO: 732371 - RNA, 22 nt, Human
auccugagguacugcagggccg

SEQ ID NO: 732372 - RNA, 22 nt, Human
ggaaucagaauuaggauuugaa

SEQ ID NO: 732373 - RNA, 22 nt, Human
gugccaggcccagggagcgggg

SEQ ID NO: 732374 - RNA, 22 nt, Human
cugauguguuuuaguuugguaa

SEQ ID NO: 732375 - RNA, 19 nt, Human
gccaugggcuggcagcaga

SEQ ID NO: 732376 - RNA, 22 nt, Human
cagcacuggggggauucggagc

SEQ ID NO: 732377 - RNA, 22 nt, Human
agcaucuggccugguuacuuuu

SEQ ID NO: 732378 - RNA, 17 nt, Human
ucauuuguugugacuag

SEQ ID NO: 732379 - RNA, 22 nt, Human
caucacuacaaauuuaagaaau

SEQ ID NO: 732380 - RNA, 22 nt, Human
cccagagagcauuuggacaaag

SEQ ID NO: 732381 - RNA, 22 nt, Human
ggaugcugacuuuggagcaugg

SEQ ID NO: 732382 - RNA, 22 nt, Human
auuuacacugguucucagagcu

SEQ ID NO: 732383 - RNA, 22 nt, Human
ugcagccuugccuccucccagc

SEQ ID NO: 732384 - RNA, 22 nt, Human
agcuucuccugguacagaacug

SEQ ID NO: 732385 - RNA, 22 nt, Human
caacagagggaauggaucucau

SEQ ID NO: 732386 - RNA, 22 nt, Human
gcaaugggcacagcccagccca

SEQ ID NO: 732387 - RNA, 20 nt, Human
ucagaacaguagaggagcua

SEQ ID NO: 732388 - RNA, 19 nt, Human
cacauuuugagucugagau

SEQ ID NO: 732389 - RNA, 22 nt, Human
gagguauuugauccucugcagu

SEQ ID NO: 732390 - RNA, 22 nt, Human
auggacagugugaagcagauag

SEQ ID NO: 732391 - RNA, 22 nt, Human
aguaagcaccgggauggucaag

SEQ ID NO: 732392 - RNA, 22 nt, Human
uacagcuugaugagagcgcgag

SEQ ID NO: 732393 - RNA, 22 nt, Human
guucuucaguucaggcuguuca

SEQ ID NO: 732394 - RNA, 22 nt, Human
ggcggggguccaggagccugca

SEQ ID NO: 732395 - RNA, 22 nt, Human
aggccaggggugagcacuucug

SEQ ID NO: 732396 - RNA, 19 nt, Human
uaacucuuuccuuuucccc

SEQ ID NO: 732397 - RNA, 22 nt, Human
cacaugcuccauacagaauggg

SEQ ID NO: 732398 - RNA, 22 nt, Human
agagggaaaaacucaugucauu

SEQ ID NO: 732399 - RNA, 22 nt, Human
aaguugguguaugagacagaag

SEQ ID NO: 732400 - RNA, 22 nt, Human
ugcuuuugcacaggugaguucc

SEQ ID NO: 732401 - RNA, 22 nt, Human
gugggccagcauuuugaagagu

SEQ ID NO: 732402 - RNA, 22 nt, Human
agaauacaauuguucaguaaua

SEQ ID NO: 732403 - RNA, 22 nt, Human
ucagugcauuguucauuguagg

SEQ ID NO: 732404 - RNA, 22 nt, Human
agccacagcccacaggacucuu

SEQ ID NO: 732405 - RNA, 22 nt, Human
aaucagaauuuauugaaucuuu

SEQ ID NO: 732406 - RNA, 18 nt, Human
ugucucuccuuucugugu

SEQ ID NO: 732407 - RNA, 18 nt, Human
augagaggugucagaaga

SEQ ID NO: 732408 - RNA, 22 nt, Human
auaaaggccaaaauuugcauuu

SEQ ID NO: 732409 - RNA, 22 nt, Human
aaacuuuucuuggggaccugcc

SEQ ID NO: 732410 - RNA, 22 nt, Human
acuuuguaaauuguugugacuc

SEQ ID NO: 732411 - RNA, 22 nt, Human
uuuugucuaagaacuuugcaaa

SEQ ID NO: 732412 - RNA, 22 nt, Human
caguguggguuugggaggagua

SEQ ID NO: 732413 - RNA, 22 nt, Human
uuuuagcacacuuucuuuagcg

SEQ ID NO: 732414 - RNA, 22 nt, Human
gucagcucauccaucccggugg

SEQ ID NO: 732415 - RNA, 22 nt, Human
ggcagaggagcuggaaacaugg

SEQ ID NO: 732416 - RNA, 22 nt, Human
cagaccugggucccuggccugu

SEQ ID NO: 732417 - RNA, 22 nt, Human
aaucacauuaagcccuguucag

SEQ ID NO: 732418 - RNA, 22 nt, Human
gcauguguuauuuuauguauga

SEQ ID NO: 732419 - RNA, 22 nt, Human
cuuuuccacugagccucacaaa

SEQ ID NO: 732420 - RNA, 22 nt, Human
uucugauaacaaacaccaauuu

SEQ ID NO: 732421 - RNA, 22 nt, Human
acugaaguccacacauguagga

SEQ ID NO: 732422 - RNA, 22 nt, Human
auucaagaggaacaaugaagau

SEQ ID NO: 732423 - RNA, 22 nt, Human
cuguucuggagacacugaugaa

SEQ ID NO: 732424 - RNA, 22 nt, Human
agaaguauaacuauuugcuuuc

SEQ ID NO: 732425 - RNA, 22 nt, Human
agugagcauucguuuggaaccc

SEQ ID NO: 732426 - RNA, 22 nt, Human
acauucuagaagagcuucacuu

SEQ ID NO: 732427 - RNA, 22 nt, Human
aagagauguggaaucauuuaca

SEQ ID NO: 732428 - RNA, 22 nt, Human
aggggccauuguucugcccgcu

SEQ ID NO: 732429 - RNA, 22 nt, Human
ugcagcaguguuccuuggcuug

SEQ ID NO: 732430 - RNA, 22 nt, Human
uaagaacaagauguuccuguuu

SEQ ID NO: 732431 - RNA, 22 nt, Human
agcugaaauucuuuguccucag

SEQ ID NO: 732432 - RNA, 22 nt, Human
guuuccacuuauaugguaccua

SEQ ID NO: 732433 - RNA, 22 nt, Human
guacacagaugcuugagaaucu

SEQ ID NO: 732434 - RNA, 22 nt, Human
cacccaggcauggguugagaug

SEQ ID NO: 732435 - RNA, 22 nt, Human
ugccugugugaccacgggcaag

SEQ ID NO: 732436 - RNA, 22 nt, Human
cacaagauggucacauaagugc

SEQ ID NO: 732437 - RNA, 22 nt, Human
uggcccugugacugaguucuag

SEQ ID NO: 732438 - RNA, 22 nt, Human
uuguagaaaauucucuuggaua

SEQ ID NO: 732439 - RNA, 22 nt, Human
augucucugcugugguuagcuu

SEQ ID NO: 732440 - RNA, 22 nt, Human
ccaagcauuucuagccagucac

SEQ ID NO: 732441 - RNA, 22 nt, Human
caucucauagugcagugcugua

SEQ ID NO: 732442 - RNA, 22 nt, Human
gagguccacugaggcaacaggg

SEQ ID NO: 732443 - RNA, 22 nt, Human
gagagcuguuuaucuucuucaa

SEQ ID NO: 732444 - RNA, 22 nt, Human
auggggagcucaccaccuguuu

SEQ ID NO: 732445 - RNA, 22 nt, Human
acagauauaaacuauaguagug

SEQ ID NO: 732446 - RNA, 22 nt, Human
aaucauggcguguuuagcuuaa

SEQ ID NO: 732447 - RNA, 22 nt, Human
gagguggcugucagcuucacuu

SEQ ID NO: 732448 - RNA, 22 nt, Human
uuuccagugagcaaauguagaa

SEQ ID NO: 732449 - RNA, 22 nt, Human
aucaguauauuccuuggucuuu

SEQ ID NO: 732450 - RNA, 22 nt, Human
uuuuauuaucuuugaaugggac

SEQ ID NO: 732451 - RNA, 22 nt, Human
augagcuguaagguggcuuccu

SEQ ID NO: 732452 - RNA, 20 nt, Human
uccaggccuuguucucagau

SEQ ID NO: 732453 - RNA, 22 nt, Human
agggcagcuagcuguagaaaga

SEQ ID NO: 732454 - RNA, 23 nt, Human
gggggagcuggacuccuagaucc

SEQ ID NO: 732455 - RNA, 22 nt, Human
ccccaccaccaaggcucaguuu

SEQ ID NO: 732456 - RNA, 22 nt, Human
auuucaaggcuacagaaaccuu

SEQ ID NO: 732457 - RNA, 22 nt, Human
uugcaauugcuauggagagcgu

SEQ ID NO: 732458 - RNA, 22 nt, Human
ugagaaaacucaaagacagauc

SEQ ID NO: 732459 - RNA, 22 nt, Human
acuuuacuccccaacauaaaug

SEQ ID NO: 732460 - RNA, 22 nt, Human
aguccugguucugauucugaca

SEQ ID NO: 732461 - RNA, 22 nt, Human
cagagcugcgcuuuuuccuggu

SEQ ID NO: 732462 - RNA, 22 nt, Human
auugaagauuaaaugcuuccuu

SEQ ID NO: 732463 - RNA, 22 nt, Human
gaagcacugccauaauucagac

SEQ ID NO: 732464 - RNA, 22 nt, Human
ggcgcucaguguugccccagag

SEQ ID NO: 732465 - RNA, 22 nt, Human
uuuagcaagguagguccaugga

SEQ ID NO: 732466 - RNA, 22 nt, Human
caacauuucaaggucuuuagga

SEQ ID NO: 732467 - RNA, 22 nt, Human
uaagagcagagguugaauaaau

SEQ ID NO: 732468 - RNA, 22 nt, Human
gcaggcagagguggaggagaca

SEQ ID NO: 732469 - RNA, 22 nt, Human
cagggcuuuuuauuagcugccu

SEQ ID NO: 732470 - RNA, 22 nt, Human
cuauuucuaaaccuauaaguga

SEQ ID NO: 732471 - RNA, 22 nt, Human
aagauguuuagguaaaaaguuu

SEQ ID NO: 732472 - RNA, 18 nt, Human
cugcuugggagacgucag

SEQ ID NO: 732473 - RNA, 22 nt, Human
gcugucuccauagcuguguguc

SEQ ID NO: 732474 - RNA, 22 nt, Human
acacagggucuagaguuaggcc

SEQ ID NO: 732475 - RNA, 22 nt, Human
ggugaguugggguucacagguc

SEQ ID NO: 732476 - RNA, 22 nt, Human
gauuuggcuuggaugauuaaac

SEQ ID NO: 732477 - RNA, 22 nt, Human
augagguuuagguuccuccucu

SEQ ID NO: 732478 - RNA, 22 nt, Human
uuuuagaagugccuauccuaug

SEQ ID NO: 732479 - RNA, 22 nt, Human
uccagagugcugacgcagaccc

SEQ ID NO: 732480 - RNA, 22 nt, Human
ucuuaauugagaacaguguagg

SEQ ID NO: 732481 - RNA, 22 nt, Human
cucugggcaaagaugccucauc

SEQ ID NO: 732482 - RNA, 22 nt, Human
augaucagggcagaagcagaag

SEQ ID NO: 732483 - RNA, 22 nt, Human
uggaggaaguggcuggccagaa

SEQ ID NO: 732484 - RNA, 22 nt, Human
ucccagcagucagagcuaugug

SEQ ID NO: 732485 - RNA, 22 nt, Human
cccugggauggauuggcaggaa

SEQ ID NO: 732486 - RNA, 22 nt, Human
uuucuacauucaaaaacuacca

SEQ ID NO: 732487 - RNA, 22 nt, Human
accucacaagucucugucagcu

SEQ ID NO: 732488 - RNA, 22 nt, Human
aaaauccucuaauucuagaaua

SEQ ID NO: 732489 - RNA, 22 nt, Human
aggcccagggcugcucucugaa

SEQ ID NO: 732490 - RNA, 17 nt, Human
ugaaggccaugaccacg

SEQ ID NO: 732491 - RNA, 22 nt, Human
gaccuggacugaguuagauggc

SEQ ID NO: 732492 - RNA, 19 nt, Human
aaaguguuuucuuuucugu

SEQ ID NO: 732493 - RNA, 22 nt, Human
ucacacuuaucccacucaguca

SEQ ID NO: 732494 - RNA, 22 nt, Human
cagugucuccagaugcuccaau

SEQ ID NO: 732495 - RNA, 22 nt, Human
cacagaaauuauuaggaugcuu

SEQ ID NO: 732496 - RNA, 22 nt, Human
ugcugcuggguuugacagucac

SEQ ID NO: 732497 - RNA, 22 nt, Human
augggcagcugcagcaguggug

SEQ ID NO: 732498 - RNA, 22 nt, Human
auauucuuccaaaacaucauuu

SEQ ID NO: 732499 - RNA, 22 nt, Human
caucugaagugaauugcuuuuu

SEQ ID NO: 732500 - RNA, 22 nt, Human
ccuugguccaacccugcacagc

SEQ ID NO: 732501 - RNA, 22 nt, Human
uacuguaugaauuauguuauuu

SEQ ID NO: 732502 - RNA, 22 nt, Human
aaaaguauuuuggaucucagau

SEQ ID NO: 732503 - RNA, 17 nt, Human
cagugcagagcccuuuc

SEQ ID NO: 732504 - RNA, 22 nt, Human
cuucacauuaguuuggaucaaa

SEQ ID NO: 732505 - RNA, 22 nt, Human
uccuuggagcccaggaguagca

SEQ ID NO: 732506 - RNA, 22 nt, Human
uccucacacuauagaugaggau

SEQ ID NO: 732507 - RNA, 22 nt, Human
gcugggcaggccucgugagggc

SEQ ID NO: 732508 - RNA, 22 nt, Human
aucuaacuuauguuuuaccaaa

SEQ ID NO: 732509 - RNA, 22 nt, Human
aaaagcaauugcaguucuugcc

SEQ ID NO: 732510 - RNA, 22 nt, Human
uauucuuacucucgacugcauu

SEQ ID NO: 732511 - RNA, 23 nt, Human
cugcauauggagguuagcaacuc

SEQ ID NO: 732512 - RNA, 22 nt, Human
accccuucuccuggcuguucca

SEQ ID NO: 732513 - RNA, 22 nt, Human
auggaauuaaaagucaaguaau

SEQ ID NO: 732514 - RNA, 22 nt, Human
gcuuccaggggcugugggcuga

SEQ ID NO: 732515 - RNA, 22 nt, Human
aagagguaaugacugcuugagu

SEQ ID NO: 732516 - RNA, 22 nt, Human
gagggaggcaucaugaauccag

SEQ ID NO: 732517 - RNA, 22 nt, Human
ugaacaacagauguccauuguu

SEQ ID NO: 732518 - RNA, 22 nt, Human
guacauguugguuguuuccagu

SEQ ID NO: 732519 - RNA, 22 nt, Human
cugcugcugcuaucuacccagg

SEQ ID NO: 732520 - RNA, 22 nt, Human
uaggagcuuuuggaguccugug

SEQ ID NO: 732521 - RNA, 22 nt, Human
caggccugucugcacaugaggc

SEQ ID NO: 732522 - RNA, 22 nt, Human
aauccaucucuccgagaaguuu

SEQ ID NO: 732523 - RNA, 22 nt, Human
ucuggagagcagaugccucugg

SEQ ID NO: 732524 - RNA, 22 nt, Human
uccuccuguuucucaggccugg

SEQ ID NO: 732525 - RNA, 22 nt, Human
uuuaucugcuaucugcugugcu

SEQ ID NO: 732526 - RNA, 22 nt, Human
ucuucaugauacccuaagccac

SEQ ID NO: 732527 - RNA, 22 nt, Human
uaaguucagaguucucauuugu

SEQ ID NO: 732528 - RNA, 22 nt, Human
guggcaguuuugacaucacaaa

SEQ ID NO: 732529 - RNA, 22 nt, Human
uagcaguggaaucuuuugucca

SEQ ID NO: 732530 - RNA, 22 nt, Human
guuauucuuuguaugguacauc

SEQ ID NO: 732531 - RNA, 22 nt, Human
ucaaaucccagcucagccucuc

SEQ ID NO: 732532 - RNA, 23 nt, Human
ugagugugaaaauccuggagaug

SEQ ID NO: 732533 - RNA, 22 nt, Human
ugggguagggaaaagaagucga

SEQ ID NO: 732534 - RNA, 22 nt, Human
aagaaagccaaaguucauaccu

SEQ ID NO: 732535 - RNA, 22 nt, Human
auugggcuggauuaggacuguu

SEQ ID NO: 732536 - RNA, 22 nt, Human
gauuaacaaauuucauauccaa

SEQ ID NO: 732537 - RNA, 22 nt, Human
cagcccugagaaggaggaucuc

SEQ ID NO: 732538 - RNA, 20 nt, Human
gcuuccagaggaggccccgu

SEQ ID NO: 732539 - RNA, 22 nt, Human
ggguuaaaacaggaagaucagc

SEQ ID NO: 732540 - RNA, 22 nt, Human
aagauuuuuuuccacagacuca

SEQ ID NO: 732541 - RNA, 20 nt, Human
ucagagaaggagcuuuccug

SEQ ID NO: 732542 - RNA, 22 nt, Human
aguuccagcugugaccagaaaa

SEQ ID NO: 732543 - RNA, 22 nt, Human
uaauacuugcuuuggauguaug

SEQ ID NO: 732544 - RNA, 22 nt, Human
cucaggaugucggugacuauug

SEQ ID NO: 732545 - RNA, 22 nt, Human
uuuaaccucuaauuuaguucuc

SEQ ID NO: 732546 - RNA, 22 nt, Human
cagcugaguuacucugaggucu

SEQ ID NO: 732547 - RNA, 22 nt, Human
cucucaguccugcgcgccucug

SEQ ID NO: 732548 - RNA, 22 nt, Human
cggcagagugugugcgugcaug

SEQ ID NO: 732549 - RNA, 23 nt, Human
uggcaggaaaugagaauguuccu

SEQ ID NO: 732550 - RNA, 22 nt, Human
aaauagaaaccaacaaggucag

SEQ ID NO: 732551 - RNA, 22 nt, Human
agacaauguuuggucuacacuu

SEQ ID NO: 732552 - RNA, 22 nt, Human
caugcugugcaucuugaugacc

SEQ ID NO: 732553 - RNA, 22 nt, Human
uacacagggaaaggucucagag

SEQ ID NO: 732554 - RNA, 22 nt, Human
aaaagaguguuucaacuuuggc

SEQ ID NO: 732555 - RNA, 18 nt, Human
ucauucaaagucuacuga

SEQ ID NO: 732556 - RNA, 22 nt, Human
ccagcccugccagagagagcug

SEQ ID NO: 732557 - RNA, 22 nt, Human
cuccacagccccuccaguggca

SEQ ID NO: 732558 - RNA, 22 nt, Human
uuucugaagggcagcagacucu

SEQ ID NO: 732559 - RNA, 22 nt, Human
cugguucauccccuuccaggaa

SEQ ID NO: 732560 - RNA, 22 nt, Human
acacauccugaccaaguucagg

SEQ ID NO: 732561 - RNA, 22 nt, Human
acagcuguggucuccuuagugu

SEQ ID NO: 732562 - RNA, 22 nt, Human
gagagucacugucugcauuucc

SEQ ID NO: 732563 - RNA, 22 nt, Human
uaaagugcagauugugauucag

SEQ ID NO: 732564 - RNA, 22 nt, Human
augcuggucucauuggguuagg

SEQ ID NO: 732565 - RNA, 22 nt, Human
gaggcacagagcccuaggagcu

SEQ ID NO: 732566 - RNA, 22 nt, Human
aggagccacuuaggugagauaa

SEQ ID NO: 732567 - RNA, 22 nt, Human
aagguuaguaauauuucuauau

SEQ ID NO: 732568 - RNA, 22 nt, Human
auacaacuuuaucuguaaugag

SEQ ID NO: 732569 - RNA, 22 nt, Human
agucagaauucgaucccagguc

SEQ ID NO: 732570 - RNA, 22 nt, Human
uccaggaggacugagggggcug

SEQ ID NO: 732571 - RNA, 22 nt, Human
gaaguuuuuguagagacagggu

SEQ ID NO: 732572 - RNA, 22 nt, Human
ccuggcagcgugccgagcugcg

SEQ ID NO: 732573 - RNA, 22 nt, Human
uguggggaggcugcagugcugc

SEQ ID NO: 732574 - RNA, 22 nt, Human
ucauauauuuaguugugcaaca

SEQ ID NO: 732575 - RNA, 22 nt, Human
uuucagucauggauucacugag

SEQ ID NO: 732576 - RNA, 22 nt, Human
uguuuacaaaaccgugguacug

SEQ ID NO: 732577 - RNA, 22 nt, Human
aaggauaaaaaccacuucuaau

SEQ ID NO: 732578 - RNA, 17 nt, Human
gccuuuauacaugcugc

SEQ ID NO: 732579 - RNA, 22 nt, Human
acaggacaggcugggcuagacu

SEQ ID NO: 732580 - RNA, 22 nt, Human
aaaagguuuugaguacaaauau

SEQ ID NO: 732581 - RNA, 20 nt, Human
cauauauaccuagaagugga

SEQ ID NO: 732582 - RNA, 22 nt, Human
ugcaguucuaaguagacaaguc

SEQ ID NO: 732583 - RNA, 22 nt, Human
ucagauuuugcacgagguuuug

SEQ ID NO: 732584 - RNA, 22 nt, Human
guggaggucccgggcaggagca

SEQ ID NO: 732585 - RNA, 22 nt, Human
ugagcccagagaucugagcuau

SEQ ID NO: 732586 - RNA, 22 nt, Human
gcagaagaccaugguggaaaga

SEQ ID NO: 732587 - RNA, 22 nt, Human
gcccuuggggugucuguaauaa

SEQ ID NO: 732588 - RNA, 22 nt, Human
aucugaguguuggauuuauugu

SEQ ID NO: 732589 - RNA, 18 nt, Human
gcagcugcaguuguagcu

SEQ ID NO: 732590 - RNA, 21 nt, Human
acaguuuauuagaguaagugc

SEQ ID NO: 732591 - RNA, 22 nt, Human
cauuuagaagucuuagaacuau

SEQ ID NO: 732592 - RNA, 22 nt, Human
ugaaucuuuuuggaaauaaaga

SEQ ID NO: 732593 - RNA, 22 nt, Human
caugcuaaaauaucugaagauu

SEQ ID NO: 732594 - RNA, 22 nt, Human
ucaugaaaauagaucagaaauu

SEQ ID NO: 732595 - RNA, 22 nt, Human
ggcaggcaguguggugugaaac

SEQ ID NO: 732596 - RNA, 22 nt, Human
ugauucugaucaucaucauggu

SEQ ID NO: 732597 - RNA, 21 nt, Human
agggagcuauuuauaguaagc

SEQ ID NO: 732598 - RNA, 22 nt, Human
cuggcaggaagaggaaagguca

SEQ ID NO: 732599 - RNA, 17 nt, Human
aggaagcgagcuggccu

SEQ ID NO: 732600 - RNA, 22 nt, Human
uauuagaggaaccaagguggag

SEQ ID NO: 732601 - RNA, 22 nt, Human
ugagacagcagucagggaaaua

SEQ ID NO: 732602 - RNA, 22 nt, Human
acagaguaggugcugucgacug

SEQ ID NO: 732603 - RNA, 22 nt, Human
gccaaaucacagggccaaaagc

SEQ ID NO: 732604 - RNA, 22 nt, Human
gccugagauucccggagccgug

SEQ ID NO: 732605 - RNA, 22 nt, Human
guggaacauguccauauacauu

SEQ ID NO: 732606 - RNA, 22 nt, Human
uggggacagggcucagcaauuu

SEQ ID NO: 732607 - RNA, 22 nt, Human
ccucugcugcuguugagcaccg

SEQ ID NO: 732608 - RNA, 22 nt, Human
agauuucccucuuguauuugca

SEQ ID NO: 732609 - RNA, 22 nt, Human
uauugcagacaaaaugagcuac

SEQ ID NO: 732610 - RNA, 22 nt, Human
ccugagucccauaauguugcca

SEQ ID NO: 732611 - RNA, 22 nt, Human
ccugccuggcuuccagaagaga

SEQ ID NO: 732612 - RNA, 22 nt, Human
ucauggcauuguuaaggguuuu

SEQ ID NO: 732613 - RNA, 22 nt, Human
gcagcacaaaguccccagggac

SEQ ID NO: 732614 - RNA, 22 nt, Human
caggccagcggcccgcgcguuc

SEQ ID NO: 732615 - RNA, 22 nt, Human
uauagcaaaauaguuuccacac

SEQ ID NO: 732616 - RNA, 22 nt, Human
agcuguuggaguaaagcacuua

SEQ ID NO: 732617 - RNA, 22 nt, Human
ugaugaggacccaucaccuggu

SEQ ID NO: 732618 - RNA, 22 nt, Human
cccacgucgaacuugcuccaga

SEQ ID NO: 732619 - RNA, 22 nt, Human
ccuggcuccugccucugcaggg

SEQ ID NO: 732620 - RNA, 22 nt, Human
aaauugcacaauauagacauga

SEQ ID NO: 732621 - RNA, 21 nt, Human
uugcauuuuaaguuuacugcu

SEQ ID NO: 732622 - RNA, 22 nt, Human
cacauugaaccauauauuagug

SEQ ID NO: 732623 - RNA, 22 nt, Human
acaguagucucaggaauaggca

SEQ ID NO: 732624 - RNA, 20 nt, Human
uaacacuugcuuuuugacuu

SEQ ID NO: 732625 - RNA, 22 nt, Human
gacagguaaagaugguggcagg

SEQ ID NO: 732626 - RNA, 22 nt, Human
ggccuggagcagagacuaggga

SEQ ID NO: 732627 - RNA, 22 nt, Human
ccagaggugggagugaucuggu

SEQ ID NO: 732628 - RNA, 21 nt, Human
ucacugaagccuaagauguuu

SEQ ID NO: 732629 - RNA, 22 nt, Human
ggggugcuagaguggggccacu

SEQ ID NO: 732630 - RNA, 22 nt, Human
gcaaacaugcugagaaauaaga

SEQ ID NO: 732631 - RNA, 20 nt, Human
auauagagucaaaauggcuu

SEQ ID NO: 732632 - RNA, 22 nt, Human
uuugcagaagaaaacaugaaca

SEQ ID NO: 732633 - RNA, 22 nt, Human
uugaaacauauacaaaguggug

SEQ ID NO: 732634 - RNA, 22 nt, Human
cagggcauuacuucagguccuu

SEQ ID NO: 732635 - RNA, 22 nt, Human
cuuaagaauauugaaguugugg

SEQ ID NO: 732636 - RNA, 22 nt, Human
aggcccuggacacucaagccgg

SEQ ID NO: 732637 - RNA, 22 nt, Human
cuuucagaagaggaccuuucca

SEQ ID NO: 732638 - RNA, 19 nt, Human
aaugguuugaugaaguaua

SEQ ID NO: 732639 - RNA, 22 nt, Human
ucagugauugguggacugccua

SEQ ID NO: 732640 - RNA, 22 nt, Human
auugaaaggcaaaguaggaagc

SEQ ID NO: 732641 - RNA, 22 nt, Human
ucuggcuuggguagguaguuca

SEQ ID NO: 732642 - RNA, 22 nt, Human
aaugucugugccuuaaaacuuc

SEQ ID NO: 732643 - RNA, 22 nt, Human
ccacucuugaaucaagagcuca

SEQ ID NO: 732644 - RNA, 22 nt, Human
acccugagggguauagcagaag

SEQ ID NO: 732645 - RNA, 22 nt, Human
gagaggcuaugagguucugugu

SEQ ID NO: 732646 - RNA, 22 nt, Human
ggccuuggugccauggccaguu

SEQ ID NO: 732647 - RNA, 22 nt, Human
agcagggacuacgugaaaguga

SEQ ID NO: 732648 - RNA, 22 nt, Human
gaaugcaugugaagcaaagaau

SEQ ID NO: 732649 - RNA, 22 nt, Human
agucccagacuccaguuuucug

SEQ ID NO: 732650 - RNA, 22 nt, Human
agaaauguuguggguuuuguua

SEQ ID NO: 732651 - RNA, 22 nt, Human
gucuucuuguuuugaaggaaau

SEQ ID NO: 732652 - RNA, 22 nt, Human
gagaaauuuugaguggcuuucu

SEQ ID NO: 732653 - RNA, 22 nt, Human
ucccauucugccaaggacauug

SEQ ID NO: 732654 - RNA, 22 nt, Human
aggagccaagauggggcaagua

SEQ ID NO: 732655 - RNA, 22 nt, Human
aacuuuucauaagggcaaauuu

SEQ ID NO: 732656 - RNA, 22 nt, Human
uaggagagcugaacuauugucu

SEQ ID NO: 732657 - RNA, 22 nt, Human
caaugggagcagaaauuguuug

SEQ ID NO: 732658 - RNA, 22 nt, Human
gugcagggcagccgaaugggcu

SEQ ID NO: 732659 - RNA, 22 nt, Human
uucugaaaauugggucauacuu

SEQ ID NO: 732660 - RNA, 22 nt, Human
ccagggcugcugggggaguuga

SEQ ID NO: 732661 - RNA, 22 nt, Human
aggauuuguauagcuuucuuuu

SEQ ID NO: 732662 - RNA, 18 nt, Human
gacaaaaguacagacaga

SEQ ID NO: 732663 - RNA, 23 nt, Human
ccuggcucaccccuuauguccag

SEQ ID NO: 732664 - RNA, 22 nt, Human
uuagaaccagcauuuguccugg

SEQ ID NO: 732665 - RNA, 22 nt, Human
auuaugcugguuuacacauuuu

SEQ ID NO: 732666 - RNA, 22 nt, Human
aggaccagaggccagagucagc

SEQ ID NO: 732667 - RNA, 22 nt, Human
uggcaguguccuacugguuggu

SEQ ID NO: 732668 - RNA, 22 nt, Human
ugauucagaccugucagacuuc

SEQ ID NO: 732669 - RNA, 22 nt, Human
gcuucaugaaaaucacugguca

SEQ ID NO: 732670 - RNA, 22 nt, Human
agacauuuuggaaaguauuacu

SEQ ID NO: 732671 - RNA, 22 nt, Human
augcauaaagaaagcuaucugg

SEQ ID NO: 732672 - RNA, 22 nt, Human
uccuggggcucaugggauuugu

SEQ ID NO: 732673 - RNA, 21 nt, Human
ggccacaguuagggcucagga

SEQ ID NO: 732674 - RNA, 22 nt, Human
aaugcacaugucuuggccucac

SEQ ID NO: 732675 - RNA, 22 nt, Human
gcugcugugaauuuuuuaaaug

SEQ ID NO: 732676 - RNA, 22 nt, Human
caccaucagcagcaggugucaa

SEQ ID NO: 732677 - RNA, 22 nt, Human
agauggaguuguagcagugacu

SEQ ID NO: 732678 - RNA, 22 nt, Human
acauuaccuggcauuugaucuu

SEQ ID NO: 732679 - RNA, 22 nt, Human
ucugagaacaugcuuugaucau

SEQ ID NO: 732680 - RNA, 22 nt, Human
cauuuuauguuuauggagugcu

SEQ ID NO: 732681 - RNA, 22 nt, Human
aagauuuaccacuuuauucaag

SEQ ID NO: 732682 - RNA, 22 nt, Human
uuauuccauugucuuuugacuu

SEQ ID NO: 732683 - RNA, 22 nt, Human
ccagaugagaccacacugcugg

SEQ ID NO: 732684 - RNA, 22 nt, Human
cucaggcucuguacucccuuug

SEQ ID NO: 732685 - RNA, 22 nt, Human
gaaaucugcccagugcacuggu

SEQ ID NO: 732686 - RNA, 22 nt, Human
gaacugucauuggggacaucag

SEQ ID NO: 732687 - RNA, 22 nt, Human
aacugcaaucacuuuugcacca

SEQ ID NO: 732688 - RNA, 19 nt, Human
uggcagugugggguaugaa

SEQ ID NO: 732689 - RNA, 22 nt, Human
uagcagcauuaauuccauuugc

SEQ ID NO: 732690 - RNA, 22 nt, Human
uuagaaacccagacucuuaggu

SEQ ID NO: 732691 - RNA, 22 nt, Human
uuugaaugcaggacauacagaa

SEQ ID NO: 732692 - RNA, 19 nt, Human
uggcuccugccugccuucu

SEQ ID NO: 732693 - RNA, 22 nt, Human
cugcaccuacagccacauuuac

SEQ ID NO: 732694 - RNA, 22 nt, Human
ucugcagaacuuuaugagcaaa

SEQ ID NO: 732695 - RNA, 22 nt, Human
ugagaaguacuacaagagaggg

SEQ ID NO: 732696 - RNA, 22 nt, Human
ucuucaguuguaaaaguguugg

SEQ ID NO: 732697 - RNA, 22 nt, Human
ggccucucugagagcagacguu

SEQ ID NO: 732698 - RNA, 22 nt, Human
aggccuccagcugaguuuugcu

SEQ ID NO: 732699 - RNA, 18 nt, Human
cugcccagagcacuugug

SEQ ID NO: 732700 - RNA, 22 nt, Human
cagggccagcgcccaggcccag

SEQ ID NO: 732701 - RNA, 22 nt, Human
agaauaaauguuggacuuagga

SEQ ID NO: 732702 - RNA, 22 nt, Human
gggccggagcugggucccgcgc

SEQ ID NO: 732703 - RNA, 22 nt, Human
gccuguccuauacaggcggcug

SEQ ID NO: 732704 - RNA, 21 nt, Human
cucaggaucuuauauauuagu

SEQ ID NO: 732705 - RNA, 18 nt, Human
gcauuuuaaucugaggca

SEQ ID NO: 732706 - RNA, 19 nt, Human
cuggccaggccaggggccc

SEQ ID NO: 732707 - RNA, 22 nt, Human
uaugcacaccuggguccuuguc

SEQ ID NO: 732708 - RNA, 22 nt, Human
cgggcucaggaggaaacaggag

SEQ ID NO: 732709 - RNA, 22 nt, Human
agcugaggccugauuucgccgu

SEQ ID NO: 732710 - RNA, 22 nt, Human
ucuuggcuucuguauuuccugu

SEQ ID NO: 732711 - RNA, 22 nt, Human
aggcagcagagguugaggaaag

SEQ ID NO: 732712 - RNA, 17 nt, Human
cuggagcuguguaaccu

SEQ ID NO: 732713 - RNA, 22 nt, Human
ucagggcucagcaucuggcauu

SEQ ID NO: 732714 - RNA, 23 nt, Human
aggcccaacucugugagggcugc

SEQ ID NO: 732715 - RNA, 21 nt, Human
ccugcugugaucuuagugagu

SEQ ID NO: 732716 - RNA, 21 nt, Human
augucuguucuuucuggcagg

SEQ ID NO: 732717 - RNA, 22 nt, Human
gaaaugaacugauuaucauugc

SEQ ID NO: 732718 - RNA, 22 nt, Human
caaagaauagugagaagaugua

SEQ ID NO: 732719 - RNA, 22 nt, Human
gcaggguaggugacagguaguc

SEQ ID NO: 732720 - RNA, 22 nt, Human
uuuacuguuuuauauuguccag

SEQ ID NO: 732721 - RNA, 22 nt, Human
ucauuuguggaagugauugugg

SEQ ID NO: 732722 - RNA, 22 nt, Human
guuaucuucuauuucucauacu

SEQ ID NO: 732723 - RNA, 22 nt, Human
guuuguuuauacaaaagauccu

SEQ ID NO: 732724 - RNA, 18 nt, Human
cuguccaguagacucugc

SEQ ID NO: 732725 - RNA, 22 nt, Human
cugucuuuuuagagaguaggau

SEQ ID NO: 732726 - RNA, 22 nt, Human
uucacagcuaagagcuaaguaa

SEQ ID NO: 732727 - RNA, 22 nt, Human
gugucccaaagauuagaaauca

SEQ ID NO: 732728 - RNA, 22 nt, Human
cccaccucucagagagccuugc

SEQ ID NO: 732729 - RNA, 22 nt, Human
ggugggacagguaggaguggcu

SEQ ID NO: 732730 - RNA, 22 nt, Human
cucaagucagaaauaaaagcau

SEQ ID NO: 732731 - RNA, 22 nt, Human
aauguguauacuggcaauuaag

SEQ ID NO: 732732 - RNA, 22 nt, Human
uauuugaugaagguaaagucuu

SEQ ID NO: 732733 - RNA, 22 nt, Human
gaggaaaagagacagguuauug

SEQ ID NO: 732734 - RNA, 22 nt, Human
cugggaagcauggugaugguau

SEQ ID NO: 732735 - RNA, 22 nt, Human
acugggcuguaaagagaggcaa

SEQ ID NO: 732736 - RNA, 22 nt, Human
agcucuggaacucccggcugcu

SEQ ID NO: 732737 - RNA, 22 nt, Human
uugacacaaacagugauguagu

SEQ ID NO: 732738 - RNA, 22 nt, Human
ugcucagaaacgaggugcagcc

SEQ ID NO: 732739 - RNA, 23 nt, Human
cagggcugguagggaagagcgug

SEQ ID NO: 732740 - RNA, 22 nt, Human
aggaggagguaagaaaagcaua

SEQ ID NO: 732741 - RNA, 22 nt, Human
uggggccacacugaucucccag

SEQ ID NO: 732742 - RNA, 22 nt, Human
cucgggcuugaggcuguuuacc

SEQ ID NO: 732743 - RNA, 22 nt, Human
cacagugugacugaccuucagc

SEQ ID NO: 732744 - RNA, 22 nt, Human
cacuggcaaauggagagaaugu

SEQ ID NO: 732745 - RNA, 23 nt, Human
aggagccaugaguuggauauguu

SEQ ID NO: 732746 - RNA, 22 nt, Human
uuccuucuuccagaggcugccc

SEQ ID NO: 732747 - RNA, 20 nt, Human
uaugaaguguucuucuggua

SEQ ID NO: 732748 - RNA, 23 nt, Human
aagcaaugcugagccaguucuga

SEQ ID NO: 732749 - RNA, 22 nt, Human
cuauuugaaaccaagaaugccg

SEQ ID NO: 732750 - RNA, 22 nt, Human
gaccugggguggaaggaaggca

SEQ ID NO: 732751 - RNA, 22 nt, Human
caucuggacaaaacucugaagg

SEQ ID NO: 732752 - RNA, 22 nt, Human
guugaaaguagaugcuauuugg

SEQ ID NO: 732753 - RNA, 22 nt, Human
ggcuuugcuucuccagaugcuu

SEQ ID NO: 732754 - RNA, 22 nt, Human
uguccugcaacugaaggagaag

SEQ ID NO: 732755 - RNA, 22 nt, Human
guagugcuuucaucuggagugu

SEQ ID NO: 732756 - RNA, 22 nt, Human
uauuuucaccauguaucccugu

SEQ ID NO: 732757 - RNA, 17 nt, Human
cccagggaccacugcuu

SEQ ID NO: 732758 - RNA, 22 nt, Human
uggaggccggacugagaggcau

SEQ ID NO: 732759 - RNA, 22 nt, Human
cauucacaaagcugauugaugg

SEQ ID NO: 732760 - RNA, 22 nt, Human
agugcucccuagaguugugcaa

SEQ ID NO: 732761 - RNA, 20 nt, Human
gagcugaguguggucauggg

SEQ ID NO: 732762 - RNA, 19 nt, Human
uugagcagugcuuagcacc

SEQ ID NO: 732763 - RNA, 22 nt, Human
gucuccagggacacacuagccg

SEQ ID NO: 732764 - RNA, 22 nt, Human
uucauucaaagaggcauccaag

SEQ ID NO: 732765 - RNA, 22 nt, Human
aggcgcacaggguguugaugug

SEQ ID NO: 732766 - RNA, 22 nt, Human
caggcacaugggagcucaucau

SEQ ID NO: 732767 - RNA, 22 nt, Human
ucucucccuuuccuuaucaguu

SEQ ID NO: 732768 - RNA, 22 nt, Human
aaaugcaaguucauauuuuguu

SEQ ID NO: 732769 - RNA, 21 nt, Human
guguaaacggacucaugcagu

SEQ ID NO: 732770 - RNA, 22 nt, Human
ggauucugccuuguugcuucaa

SEQ ID NO: 732771 - RNA, 22 nt, Human
cagcugaggucaaagaagcagg

SEQ ID NO: 732772 - RNA, 22 nt, Human
guuccucaugaguaccccuuaa

SEQ ID NO: 732773 - RNA, 22 nt, Human
ucucaggcacugggugccaacu

SEQ ID NO: 732774 - RNA, 22 nt, Human
ccccaugcugggaucugacacc

SEQ ID NO: 732775 - RNA, 22 nt, Human
cuucucagcaugguuacuguga

SEQ ID NO: 732776 - RNA, 22 nt, Human
gugaggacuaguggguuugugc

SEQ ID NO: 732777 - RNA, 22 nt, Human
guaguuaguuaagaugaguuua

SEQ ID NO: 732778 - RNA, 22 nt, Human
ggagagagaccuccaugcccag

SEQ ID NO: 732779 - RNA, 22 nt, Human
aaacugaaguagauucugaaau

SEQ ID NO: 732780 - RNA, 21 nt, Human
ggaagggcucugaggacggcu

SEQ ID NO: 732781 - RNA, 22 nt, Human
acacacugagugccauaggacc

SEQ ID NO: 732782 - RNA, 22 nt, Human
gaggccugcagcguggucccug

SEQ ID NO: 732783 - RNA, 22 nt, Human
uacuguacugcaguucugcaaa

SEQ ID NO: 732784 - RNA, 22 nt, Human
uucugaaagucuuuuuaaguua

SEQ ID NO: 732785 - RNA, 22 nt, Human
cugggguggagauuggcaaucu

SEQ ID NO: 732786 - RNA, 22 nt, Human
ugagguaugcugaacucuguuu

SEQ ID NO: 732787 - RNA, 22 nt, Human
uucuggaaggcagggagaaccc

SEQ ID NO: 732788 - RNA, 22 nt, Human
gcccugaggauuugcauuuccu

SEQ ID NO: 732789 - RNA, 22 nt, Human
ucacacauacucaugugugagu

SEQ ID NO: 732790 - RNA, 22 nt, Human
cccacuccuggagcuagggcuc

SEQ ID NO: 732791 - RNA, 22 nt, Human
caagcagccccaacaugaggau

SEQ ID NO: 732792 - RNA, 22 nt, Human
gaaugacauugaaaagacauug

SEQ ID NO: 732793 - RNA, 22 nt, Human
gcauucaucuaguaucacucug

SEQ ID NO: 732794 - RNA, 19 nt, Human
gcugucugaugcugagguc

SEQ ID NO: 732795 - RNA, 23 nt, Human
gagcagagcgggcggggguccug

SEQ ID NO: 732796 - RNA, 22 nt, Human
aggcuuuguaccuggggucuua

SEQ ID NO: 732797 - RNA, 22 nt, Human
caggaagauuguggaggugguu

SEQ ID NO: 732798 - RNA, 23 nt, Human
ugaggaccucucaggggccaggc

SEQ ID NO: 732799 - RNA, 22 nt, Human
cacagguucaccucagguaggu

SEQ ID NO: 732800 - RNA, 22 nt, Human
uucaacauuuuugaguuuaggu

SEQ ID NO: 732801 - RNA, 22 nt, Human
ucugggcugcuaugaggcagag

SEQ ID NO: 732802 - RNA, 22 nt, Human
accaggaguaacagugaguggu

SEQ ID NO: 732803 - RNA, 22 nt, Human
caggcaaguucauuuccaggca

SEQ ID NO: 732804 - RNA, 22 nt, Human
ccucaggcuucuaguucaguga

SEQ ID NO: 732805 - RNA, 22 nt, Human
caugucugaguagagugugauu

SEQ ID NO: 732806 - RNA, 22 nt, Human
gaauuaguguugaaaucagggc

SEQ ID NO: 732807 - RNA, 22 nt, Human
uaugguagaaaaacugaguccc

SEQ ID NO: 732808 - RNA, 17 nt, Human
uugcagacuuuuuauua

SEQ ID NO: 732809 - RNA, 22 nt, Human
cagcugccugucuggaggcaau

SEQ ID NO: 732810 - RNA, 22 nt, Human
ccacccacaaccagcuggcugu

SEQ ID NO: 732811 - RNA, 22 nt, Human
agagucaaaauuuaccagaaug

SEQ ID NO: 732812 - RNA, 17 nt, Human
gacaagacagaauucau

SEQ ID NO: 732813 - RNA, 22 nt, Human
ucaggcuguauaucuugcacuc

SEQ ID NO: 732814 - RNA, 22 nt, Human
gccaccagccccaugcgcugug

SEQ ID NO: 732815 - RNA, 22 nt, Human
cacacucauuagucauuucucu

SEQ ID NO: 732816 - RNA, 22 nt, Human
aaggcccuuccaccaguccucg

SEQ ID NO: 732817 - RNA, 22 nt, Human
ugcugcauagcagcuccugaaa

SEQ ID NO: 732818 - RNA, 17 nt, Human
gccuuccagcauguggg

SEQ ID NO: 732819 - RNA, 22 nt, Human
caggcacuggggaugcugggau

SEQ ID NO: 732820 - RNA, 22 nt, Human
gcacccaggcacuuuccuuucu

SEQ ID NO: 732821 - RNA, 22 nt, Human
ucuguuuugugucucucuggug

SEQ ID NO: 732822 - RNA, 22 nt, Human
augggccagcaccauguuaagc

SEQ ID NO: 732823 - RNA, 22 nt, Human
uggcccugcuguaucaucugcu

SEQ ID NO: 732824 - RNA, 22 nt, Human
aaguacauaaaggaauuagcca

SEQ ID NO: 732825 - RNA, 22 nt, Human
auagacagcgcauuaaaaaugu

SEQ ID NO: 732826 - RNA, 23 nt, Human
uugaauuucucuugcaauauuua

SEQ ID NO: 732827 - RNA, 23 nt, Human
aguccccuacauaguuccugggg

SEQ ID NO: 732828 - RNA, 22 nt, Human
uggcccugggcagaggcaacau

SEQ ID NO: 732829 - RNA, 22 nt, Human
auuccacacaguaauacucaau

SEQ ID NO: 732830 - RNA, 22 nt, Human
augcaaagcaccacacuaagau

SEQ ID NO: 732831 - RNA, 22 nt, Human
uuucaucuauuugcuuugugaa

SEQ ID NO: 732832 - RNA, 22 nt, Human
ggcugccauaacugauaccaua

SEQ ID NO: 732833 - RNA, 22 nt, Human
uauugcugccucguccaggcug

SEQ ID NO: 732834 - RNA, 22 nt, Human
auauacaguuuuacaggguuuc

SEQ ID NO: 732835 - RNA, 22 nt, Human
cucugcuuguaucacauuugcu

SEQ ID NO: 732836 - RNA, 22 nt, Human
guucacaucacuucacugaacc

SEQ ID NO: 732837 - RNA, 22 nt, Human
aaaagucuugucaagguuccca

SEQ ID NO: 732838 - RNA, 22 nt, Human
ugaguccauguggaggggaggu

SEQ ID NO: 732839 - RNA, 22 nt, Human
uuuugauaucaugaugaacaga

SEQ ID NO: 732840 - RNA, 22 nt, Human
gggacaucuuucuagucagggu

SEQ ID NO: 732841 - RNA, 22 nt, Human
gcuuccuccagggaggggccug

SEQ ID NO: 732842 - RNA, 22 nt, Human
cccaggcugauguucagcgggu

SEQ ID NO: 732843 - RNA, 22 nt, Human
cagggccagccauccugcuggg

SEQ ID NO: 732844 - RNA, 22 nt, Human
cugugacugggugacaguccuc

SEQ ID NO: 732845 - RNA, 22 nt, Human
uaguuuuaugaauugguauaau

SEQ ID NO: 732846 - RNA, 22 nt, Human
auaucuuucaaagccaaaagua

SEQ ID NO: 732847 - RNA, 22 nt, Human
uagauucaaguauucaguuugg

SEQ ID NO: 732848 - RNA, 22 nt, Human
agucccuuuagucuggagagcu

SEQ ID NO: 732849 - RNA, 22 nt, Human
cucagacauuuguagaaagugc

SEQ ID NO: 732850 - RNA, 22 nt, Human
uucugugaaacuaaagagagga

SEQ ID NO: 732851 - RNA, 22 nt, Human
augggcugacccagucguggca

SEQ ID NO: 732852 - RNA, 22 nt, Human
ugccugggagugaccaagacuc

SEQ ID NO: 732853 - RNA, 19 nt, Human
gccugcagaaaaggcaggg

SEQ ID NO: 732854 - RNA, 22 nt, Human
uugcagacuuacuucgagaaau

SEQ ID NO: 732855 - RNA, 22 nt, Human
gcagcuuuaaucugaauaagua

SEQ ID NO: 732856 - RNA, 22 nt, Human
acccaggguagaaccucagagc

SEQ ID NO: 732857 - RNA, 22 nt, Human
gcaaagucucaagacccaagug

SEQ ID NO: 732858 - RNA, 22 nt, Human
ugcaggcuuggaucacaucucc

SEQ ID NO: 732859 - RNA, 22 nt, Human
guguuuauguuuguguagggga

SEQ ID NO: 732860 - RNA, 22 nt, Human
ccuggcugccgagugugcagcg

SEQ ID NO: 732861 - RNA, 22 nt, Human
acagggcccuugccagcacaag

SEQ ID NO: 732862 - RNA, 22 nt, Human
acccugggucauauacagugug

SEQ ID NO: 732863 - RNA, 22 nt, Human
ucaggaaggcuucacacgagug

SEQ ID NO: 732864 - RNA, 22 nt, Human
caugagagauccuucaugagag

SEQ ID NO: 732865 - RNA, 22 nt, Human
auuucacagcugcuguucaggu

SEQ ID NO: 732866 - RNA, 22 nt, Human
caggugggaccaugauagggca

SEQ ID NO: 732867 - RNA, 22 nt, Human
gaggugaaaguuauucauuuau

SEQ ID NO: 732868 - RNA, 22 nt, Human
cccuggagaggacucaccccug

SEQ ID NO: 732869 - RNA, 22 nt, Human
acaggcaggcuucggccagagc

SEQ ID NO: 732870 - RNA, 22 nt, Human
uucaaugaggauagaacuggau

SEQ ID NO: 732871 - RNA, 22 nt, Human
gauccguuugugugggaguauu

SEQ ID NO: 732872 - RNA, 22 nt, Human
ucuauaaagggccagauaguag

SEQ ID NO: 732873 - RNA, 22 nt, Human
gucaccagucccagcuccugaa

SEQ ID NO: 732874 - RNA, 20 nt, Human
cagagcuguuauggaugaug

SEQ ID NO: 732875 - RNA, 22 nt, Human
uugggccacuuuaguuuccuua

SEQ ID NO: 732876 - RNA, 22 nt, Human
acaggagggacaccuuccugcu

SEQ ID NO: 732877 - RNA, 22 nt, Human
acagaauuaacauuugaugaau

SEQ ID NO: 732878 - RNA, 22 nt, Human
agggcugagugggagagaguug

SEQ ID NO: 732879 - RNA, 22 nt, Human
cagggugcuuccguggagcugu

SEQ ID NO: 732880 - RNA, 22 nt, Human
uggucugaggaacaccagcacu

SEQ ID NO: 732881 - RNA, 22 nt, Human
cccaugccuucugacucacagg

SEQ ID NO: 732882 - RNA, 22 nt, Human
ggcagccuucucucauagguga

SEQ ID NO: 732883 - RNA, 20 nt, Human
gcucagggccugggucugga

SEQ ID NO: 732884 - RNA, 22 nt, Human
ggugaggcccagugaucugugu

SEQ ID NO: 732885 - RNA, 22 nt, Human
ugucagcauugcgucacugagc

SEQ ID NO: 732886 - RNA, 22 nt, Human
aggcccaguagucgacggcgcu

SEQ ID NO: 732887 - RNA, 20 nt, Human
auucuacaagaauaagcaug

SEQ ID NO: 732888 - RNA, 22 nt, Human
cuuuccagcauuuccuugugaa

SEQ ID NO: 732889 - RNA, 22 nt, Human
ugauuuccaugaagcugaaggc

SEQ ID NO: 732890 - RNA, 22 nt, Human
ccacuguuuuucaguuaacuuu

SEQ ID NO: 732891 - RNA, 22 nt, Human
ugauuuccaaaaggcuucuaag

SEQ ID NO: 732892 - RNA, 22 nt, Human
ucugcuuucuugcgcagaugug

SEQ ID NO: 732893 - RNA, 22 nt, Human
aucugggagacccuugcgggaa

SEQ ID NO: 732894 - RNA, 22 nt, Human
gacaugucggauagaaugaguu

SEQ ID NO: 732895 - RNA, 22 nt, Human
ucacauguuaggucgggcaagg

SEQ ID NO: 732896 - RNA, 22 nt, Human
aauuucucaauuguuacaggug

SEQ ID NO: 732897 - RNA, 22 nt, Human
aagcaaagugaauuuugccaag

SEQ ID NO: 732898 - RNA, 22 nt, Human
cuugccuacuugucaaccagca

SEQ ID NO: 732899 - RNA, 22 nt, Human
agcacaggcuuuggugugaggg

SEQ ID NO: 732900 - RNA, 22 nt, Human
cuggcuccaggucaugcacuca

SEQ ID NO: 732901 - RNA, 22 nt, Human
aggcuggucccagggagggaau

SEQ ID NO: 732902 - RNA, 22 nt, Human
agggcugagcccaggcauguag

SEQ ID NO: 732903 - RNA, 22 nt, Human
agggcugcaccggggcuucgcg

SEQ ID NO: 732904 - RNA, 22 nt, Human
gacugugggcucuguuugucuu

SEQ ID NO: 732905 - RNA, 22 nt, Human
uacaugcaugucacagaaugaa

SEQ ID NO: 732906 - RNA, 22 nt, Human
gaaguuuagaagugacagguuu

SEQ ID NO: 732907 - RNA, 16 nt, Human
ccuggaggucacuuca

SEQ ID NO: 732908 - RNA, 22 nt, Human
uggugggcugagucucaucgga

SEQ ID NO: 732909 - RNA, 22 nt, Human
uccaugaggaccaaauucguag

SEQ ID NO: 732910 - RNA, 22 nt, Human
gcuucauuucucucuguagacc

SEQ ID NO: 732911 - RNA, 22 nt, Human
cugacaguuuuugcuguauugu

SEQ ID NO: 732912 - RNA, 21 nt, Human
ccaugucagaugugggcugug

SEQ ID NO: 732913 - RNA, 22 nt, Human
caguacugcuugugggagcaga

SEQ ID NO: 732914 - RNA, 22 nt, Human
cuacagagugaaugcagaaaau

SEQ ID NO: 732915 - RNA, 22 nt, Human
guggcagcugguaugcagacag

SEQ ID NO: 732916 - RNA, 21 nt, Human
uuacauucagaggaguggaag

SEQ ID NO: 732917 - RNA, 21 nt, Human
ugcuguccuagaaccagggcc

SEQ ID NO: 732918 - RNA, 19 nt, Human
agcaggccaggcagguggc

SEQ ID NO: 732919 - RNA, 22 nt, Human
uuuccucuuccgagggggaggc

SEQ ID NO: 732920 - RNA, 22 nt, Human
uuucagacaggacuucauaugu

SEQ ID NO: 732921 - RNA, 22 nt, Human
cugaaggauucaaaauggcagg

SEQ ID NO: 732922 - RNA, 22 nt, Human
cauuucaguguuauucuaauuu

SEQ ID NO: 732923 - RNA, 22 nt, Human
ugccacuggggcuaggacuguu

SEQ ID NO: 732924 - RNA, 22 nt, Human
cuuuuacauuuguugaagagua

SEQ ID NO: 732925 - RNA, 22 nt, Human
aggcagcuggaggcagagacua

SEQ ID NO: 732926 - RNA, 22 nt, Human
ccaaggagaaugacaccaugga

SEQ ID NO: 732927 - RNA, 22 nt, Human
uggcuuccccuaccuuccaauu

SEQ ID NO: 732928 - RNA, 22 nt, Human
agccuuuaacacuucacauuga

SEQ ID NO: 732929 - RNA, 22 nt, Human
aggaaaggccuuugcauuuggu

SEQ ID NO: 732930 - RNA, 22 nt, Human
acauguuagaaaugcagaaucu

SEQ ID NO: 732931 - RNA, 22 nt, Human
cuguccuccagacgacaguccc

SEQ ID NO: 732932 - RNA, 22 nt, Human
ggucccugcugaagccuuggug

SEQ ID NO: 732933 - RNA, 22 nt, Human
aacuccagcucacacagugacc

SEQ ID NO: 732934 - RNA, 22 nt, Human
uucuccaggcuugggccagguc

SEQ ID NO: 732935 - RNA, 22 nt, Human
ucugggcuuuugcacuggccau

SEQ ID NO: 732936 - RNA, 22 nt, Human
caggcuuuacuuucucucugaa

SEQ ID NO: 732937 - RNA, 22 nt, Human
ugacauaaaucuaaaggaaagg

SEQ ID NO: 732938 - RNA, 22 nt, Human
uccaggugagugcaggugcaga

SEQ ID NO: 732939 - RNA, 22 nt, Human
gcuguggcuccaauggugagcc

SEQ ID NO: 732940 - RNA, 21 nt, Human
uuuagggaggauauuuaacuu

SEQ ID NO: 732941 - RNA, 22 nt, Human
cugcuguguuggcauuggauag

SEQ ID NO: 732942 - RNA, 22 nt, Human
cugugcugagugaugugacuua

SEQ ID NO: 732943 - RNA, 22 nt, Human
caaaaugaugugauuuuauugu

SEQ ID NO: 732944 - RNA, 22 nt, Human
aagcaggagagccugggugagc

SEQ ID NO: 732945 - RNA, 22 nt, Human
ugcaggagcuuggcucuguccc

SEQ ID NO: 732946 - RNA, 22 nt, Human
uacagcuuauccagcuugauag

SEQ ID NO: 732947 - RNA, 22 nt, Human
aucuucccaggcuggggagagg

SEQ ID NO: 732948 - RNA, 22 nt, Human
uugggccaaggcagaucuccaa

SEQ ID NO: 732949 - RNA, 22 nt, Human
agucacccuccaacucuccacu

SEQ ID NO: 732950 - RNA, 22 nt, Human
agcugccucugaacuuuaauuc

SEQ ID NO: 732951 - RNA, 22 nt, Human
agguucagacgcauaauaggca

SEQ ID NO: 732952 - RNA, 15 nt, Human
auacacaugagggag

SEQ ID NO: 732953 - RNA, 17 nt, Human
agccugccccaugcugc

SEQ ID NO: 732954 - RNA, 22 nt, Human
aaaguggccauccucugcaucg

SEQ ID NO: 732955 - RNA, 22 nt, Human
gggaagccaugcucagagguac

SEQ ID NO: 732956 - RNA, 22 nt, Human
ugagcugggaagagcagccaga

SEQ ID NO: 732957 - RNA, 22 nt, Human
cgcuggaaauugccguuggcuu

SEQ ID NO: 732958 - RNA, 22 nt, Human
gaggccugguagccgagcccca

SEQ ID NO: 732959 - RNA, 22 nt, Human
uuccagaggcuucagggaagaa

SEQ ID NO: 732960 - RNA, 22 nt, Human
uacuuauaaggaggcacacaaa

SEQ ID NO: 732961 - RNA, 22 nt, Human
ccagcaggagagaacauuuccc

SEQ ID NO: 732962 - RNA, 22 nt, Human
aacacugaaacauugauugaca

SEQ ID NO: 732963 - RNA, 22 nt, Human
gaaaucugcggugaggccugag

SEQ ID NO: 732964 - RNA, 22 nt, Human
cugacagauuagaugugcauau

SEQ ID NO: 732965 - RNA, 22 nt, Human
gcagccagggcuaagcugggga

SEQ ID NO: 732966 - RNA, 19 nt, Human
cccugcccuggugacuggg

SEQ ID NO: 732967 - RNA, 22 nt, Human
cacucuaaccuccaucuuccau

SEQ ID NO: 732968 - RNA, 22 nt, Human
agcugugcugccaaguugcuga

SEQ ID NO: 732969 - RNA, 22 nt, Human
gagcucagcacuaaaaucaugu

SEQ ID NO: 732970 - RNA, 22 nt, Human
aaggcagcaggauuuggugacu

SEQ ID NO: 732971 - RNA, 22 nt, Human
cgacccuacagacagugcugag

SEQ ID NO: 732972 - RNA, 22 nt, Human
uccagagcugggucugugcuca

SEQ ID NO: 732973 - RNA, 22 nt, Human
gaugacaaaagaguaaguaaug

SEQ ID NO: 732974 - RNA, 22 nt, Human
gugucugcucagcuugcuagaa

SEQ ID NO: 732975 - RNA, 22 nt, Human
agaagcauuauaacaugcaagg

SEQ ID NO: 732976 - RNA, 22 nt, Human
uggagaguaaauggcagaauca

SEQ ID NO: 732977 - RNA, 22 nt, Human
aguucacagaauggccagaacu

SEQ ID NO: 732978 - RNA, 22 nt, Human
uuggagagcaguaaaccacacu

SEQ ID NO: 732979 - RNA, 22 nt, Human
ggagcgugcacuccaggcccuu

SEQ ID NO: 732980 - RNA, 22 nt, Human
cuccugggcucauaucauucag

SEQ ID NO: 732981 - RNA, 22 nt, Human
uucucaguuucacugauaacag

SEQ ID NO: 732982 - RNA, 22 nt, Human
agaagaugacuuuggaguugga

SEQ ID NO: 732983 - RNA, 22 nt, Human
guuauaaaggugauaaugguca

SEQ ID NO: 732984 - RNA, 22 nt, Human
ucgugcaaaccugacacagcca

SEQ ID NO: 732985 - RNA, 22 nt, Human
agcugguucaguuucugggccu

SEQ ID NO: 732986 - RNA, 22 nt, Human
accaggaagugugggccaacgu

SEQ ID NO: 732987 - RNA, 22 nt, Human
ucucaugcaugcauaagucuag

SEQ ID NO: 732988 - RNA, 22 nt, Human
gaacaaggauucccaaagaaga

SEQ ID NO: 732989 - RNA, 22 nt, Human
uggcagcugucuguggggucuc

SEQ ID NO: 732990 - RNA, 22 nt, Human
uccagagaacgaugaaagcugg

SEQ ID NO: 732991 - RNA, 22 nt, Human
cugugugugaacacagcccagc

SEQ ID NO: 732992 - RNA, 22 nt, Human
cagauguacaugaagggcaaug

SEQ ID NO: 732993 - RNA, 22 nt, Human
gcucuggacuggggccugagaa

SEQ ID NO: 732994 - RNA, 22 nt, Human
caguuucuuagugacacaaauc

SEQ ID NO: 732995 - RNA, 22 nt, Human
guccaaauuccacagauuucuc

SEQ ID NO: 732996 - RNA, 22 nt, Human
ccaggaaggaucguuugggagu

SEQ ID NO: 732997 - RNA, 22 nt, Human
aguggcaguggaaagcacacgg

SEQ ID NO: 732998 - RNA, 22 nt, Human
uuuagggaugucagaacaggga

SEQ ID NO: 732999 - RNA, 22 nt, Human
ggcuagaaacucaggcaagaaa

SEQ ID NO: 733000 - RNA, 20 nt, Human
uuucuugucggcuguugcug

SEQ ID NO: 733001 - RNA, 22 nt, Human
ucagggugaaccaggcaggaau

SEQ ID NO: 733002 - RNA, 22 nt, Human
ggcucagaaacuaaaggcgcug

SEQ ID NO: 733003 - RNA, 22 nt, Human
aggcugagugcuccccuagaug

SEQ ID NO: 733004 - RNA, 22 nt, Human
auuuugcugcuaugccuugcaa

SEQ ID NO: 733005 - RNA, 22 nt, Human
augcugugauuguagaaauauu

SEQ ID NO: 733006 - RNA, 22 nt, Human
agagaauacaaagaagauaugu

SEQ ID NO: 733007 - RNA, 22 nt, Human
ugugugacacauugauaugugc

SEQ ID NO: 733008 - RNA, 20 nt, Human
agccaccucauuucccuacc

SEQ ID NO: 733009 - RNA, 19 nt, Human
augagcuggcauuucaggu

SEQ ID NO: 733010 - RNA, 22 nt, Human
gcugugugcucuggucuuucuu

SEQ ID NO: 733011 - RNA, 22 nt, Human
agaaagggaacuggcaaagcca

SEQ ID NO: 733012 - RNA, 22 nt, Human
gcugaggcaaauaguuuuaagu

SEQ ID NO: 733013 - RNA, 22 nt, Human
cugaggucaggaguucaagcug

SEQ ID NO: 733014 - RNA, 22 nt, Human
cacccaggagguugggaagggc

SEQ ID NO: 733015 - RNA, 22 nt, Human
ugucugagcaccugugcugaac

SEQ ID NO: 733016 - RNA, 22 nt, Human
cucuguguuaaauuggguuuuu

SEQ ID NO: 733017 - RNA, 22 nt, Human
aggagaggguggcauuaaguuu

SEQ ID NO: 733018 - RNA, 22 nt, Human
ugggcaggaugcguugauucuu

SEQ ID NO: 733019 - RNA, 22 nt, Human
uccugguggcucuuugggaagg

SEQ ID NO: 733020 - RNA, 22 nt, Human
auucagaaaggguugccugguu

SEQ ID NO: 733021 - RNA, 22 nt, Human
agagaacagacagaugcaauga

SEQ ID NO: 733022 - RNA, 20 nt, Human
ugcugcaguuucaugggacu

SEQ ID NO: 733023 - RNA, 22 nt, Human
uuucuagggcucuugucuucug

SEQ ID NO: 733024 - RNA, 22 nt, Human
agugcccugcuggggcaggaga

SEQ ID NO: 733025 - RNA, 22 nt, Human
aaauuuuagaccaggcaaaacu

SEQ ID NO: 733026 - RNA, 22 nt, Human
acagcugugacuuagagaaguu

SEQ ID NO: 733027 - RNA, 22 nt, Human
agauggcugggcucguccgcag

SEQ ID NO: 733028 - RNA, 22 nt, Human
uagcagggccaggcugggaacc

SEQ ID NO: 733029 - RNA, 22 nt, Human
acaaaggcagccaaucaucugc

SEQ ID NO: 733030 - RNA, 22 nt, Human
uuuaugacuucuaaucugaagc

SEQ ID NO: 733031 - RNA, 22 nt, Human
ccuuagugugaggggauacccc

SEQ ID NO: 733032 - RNA, 22 nt, Human
augcaguacugauacaugccac

SEQ ID NO: 733033 - RNA, 22 nt, Human
gcucccuuaguccuugccggga

SEQ ID NO: 733034 - RNA, 22 nt, Human
cuugacacugucacucaggcca

SEQ ID NO: 733035 - RNA, 22 nt, Human
ucagaguuccucauagauccag

SEQ ID NO: 733036 - RNA, 22 nt, Human
uguccuggaguuauaaugccug

SEQ ID NO: 733037 - RNA, 19 nt, Human
acugucacauaaaggaagg

SEQ ID NO: 733038 - RNA, 22 nt, Human
aggucugagagccgcuuucccc

SEQ ID NO: 733039 - RNA, 22 nt, Human
cucaguccgucccgcuaggugc

SEQ ID NO: 733040 - RNA, 22 nt, Human
cucuugggugggcagugggccu

SEQ ID NO: 733041 - RNA, 22 nt, Human
ucauaaagcauuucagcuuuug

SEQ ID NO: 733042 - RNA, 22 nt, Human
cccugggcagucugcacuucag

SEQ ID NO: 733043 - RNA, 22 nt, Human
uccccucccuuccaacagagcu

SEQ ID NO: 733044 - RNA, 22 nt, Human
auacauuagaaucugguacuca

SEQ ID NO: 733045 - RNA, 22 nt, Human
aauguucauuguuuuccauaug

SEQ ID NO: 733046 - RNA, 22 nt, Human
gcugccaauccagcugugggag

SEQ ID NO: 733047 - RNA, 23 nt, Human
cugcagccgcguggggacgugga

SEQ ID NO: 733048 - RNA, 22 nt, Human
acaaagucacaauaauuaaccu

SEQ ID NO: 733049 - RNA, 22 nt, Human
uuuauuuauccuucuggauugc

SEQ ID NO: 733050 - RNA, 22 nt, Human
ccuuggggaacuggacgugcug

SEQ ID NO: 733051 - RNA, 22 nt, Human
ggcuucugagugcucugcuguu

SEQ ID NO: 733052 - RNA, 18 nt, Human
uauuccugauucaucuuu

SEQ ID NO: 733053 - RNA, 22 nt, Human
cagcaguucaauccagugcacg

SEQ ID NO: 733054 - RNA, 22 nt, Human
cccaggccagaacuugguugcu

SEQ ID NO: 733055 - RNA, 21 nt, Human
cuacacagcuuucuauaggaa

SEQ ID NO: 733056 - RNA, 22 nt, Human
aauuaguaaccuaauuccaucu

SEQ ID NO: 733057 - RNA, 19 nt, Human
ugucucugaaagaugagcu

SEQ ID NO: 733058 - RNA, 22 nt, Human
uccaggcuccccugcgugcucc

SEQ ID NO: 733059 - RNA, 22 nt, Human
acuauacugucucuuauagaua

SEQ ID NO: 733060 - RNA, 22 nt, Human
ggcugcagcagagggacucacg

SEQ ID NO: 733061 - RNA, 22 nt, Human
uaguucuguguagcucaagagu

SEQ ID NO: 733062 - RNA, 22 nt, Human
cugcaggggccucgagcacagg

SEQ ID NO: 733063 - RNA, 22 nt, Human
gaggauggaggcaguuagggcc

SEQ ID NO: 733064 - RNA, 22 nt, Human
cugggcaggagaggugguugga

SEQ ID NO: 733065 - RNA, 22 nt, Human
uucaagugaggcugucuuuaga

SEQ ID NO: 733066 - RNA, 22 nt, Human
ugggaccaagucauuucuuuag

SEQ ID NO: 733067 - RNA, 22 nt, Human
uggacauguccggccagacaau

SEQ ID NO: 733068 - RNA, 21 nt, Human
gcaaauguucaggaaaaaaga

SEQ ID NO: 733069 - RNA, 20 nt, Human
agcaggccuuggggagagga

SEQ ID NO: 733070 - RNA, 22 nt, Human
ccagaggagaugccuccucugu

SEQ ID NO: 733071 - RNA, 22 nt, Human
aaaccugguggaacggugaaua

SEQ ID NO: 733072 - RNA, 22 nt, Human
ugcugcuguuuccuacaucuca

SEQ ID NO: 733073 - RNA, 22 nt, Human
cuggagggcugcagcgaggcug

SEQ ID NO: 733074 - RNA, 23 nt, Human
gccaauuuuugacugucaguagg

SEQ ID NO: 733075 - RNA, 22 nt, Human
uuaauuuucucaucugugaaau

SEQ ID NO: 733076 - RNA, 22 nt, Human
gaaaucuuuauggaaauaacaa

SEQ ID NO: 733077 - RNA, 22 nt, Human
acacagugucuuagguaguguc

SEQ ID NO: 733078 - RNA, 20 nt, Human
ccugucugcaauggagguca

SEQ ID NO: 733079 - RNA, 22 nt, Human
uuguaacaggcacucugugcca

SEQ ID NO: 733080 - RNA, 22 nt, Human
uugaacaguccuaagagacccu

SEQ ID NO: 733081 - RNA, 21 nt, Human
gugcugcuagcgggacgggag

SEQ ID NO: 733082 - RNA, 22 nt, Human
aggccagguuccucaaucuuga

SEQ ID NO: 733083 - RNA, 22 nt, Human
aagacccuauacucagugaccc

SEQ ID NO: 733084 - RNA, 22 nt, Human
acaaugaauuuaauaccuuauu

SEQ ID NO: 733085 - RNA, 22 nt, Human
uccucaugccgggucucacgcu

SEQ ID NO: 733086 - RNA, 22 nt, Human
ugaccaaaggugguuuauuugg

SEQ ID NO: 733087 - RNA, 20 nt, Human
gcuuccaccugaagcgcacc

SEQ ID NO: 733088 - RNA, 22 nt, Human
caguaugugaugcaacggaaua

SEQ ID NO: 733089 - RNA, 22 nt, Human
uuaucuugguguuuuaguaauu

SEQ ID NO: 733090 - RNA, 22 nt, Human
cagagcugcucaugguggccag

SEQ ID NO: 733091 - RNA, 22 nt, Human
ugaguucucaugaaaucuaguu

SEQ ID NO: 733092 - RNA, 22 nt, Human
uccaggcucagcacuugcuacu

SEQ ID NO: 733093 - RNA, 22 nt, Human
cuucuggauuuauucauuccuu

SEQ ID NO: 733094 - RNA, 22 nt, Human
cuuaaacaggaaagagccaggu

SEQ ID NO: 733095 - RNA, 22 nt, Human
cagugguuucugaacagugugc

SEQ ID NO: 733096 - RNA, 17 nt, Human
ugaacuuuagguggagc

SEQ ID NO: 733097 - RNA, 22 nt, Human
ccugcagaagaguccagcucau

SEQ ID NO: 733098 - RNA, 22 nt, Human
aauagcugggaccugaauuagc

SEQ ID NO: 733099 - RNA, 22 nt, Human
gcucugagucucagcuaccaca

SEQ ID NO: 733100 - RNA, 22 nt, Human
auuccaguuggguucuaauaca

SEQ ID NO: 733101 - RNA, 22 nt, Human
aagcccugggguugcacaaggc

SEQ ID NO: 733102 - RNA, 22 nt, Human
aagcagugaugcauacagcugu

SEQ ID NO: 733103 - RNA, 22 nt, Human
uauauuaacuugugauccugga

SEQ ID NO: 733104 - RNA, 22 nt, Human
agcugucucucugguguccaua

SEQ ID NO: 733105 - RNA, 22 nt, Human
caguccugggagacuuacccag

SEQ ID NO: 733106 - RNA, 22 nt, Human
aaauugcuaguugcuuuuuuca

SEQ ID NO: 733107 - RNA, 22 nt, Human
auugguuaccacuuuaaaucuu

SEQ ID NO: 733108 - RNA, 22 nt, Human
ucugaaagcccuaguuuguaau

SEQ ID NO: 733109 - RNA, 22 nt, Human
ucccugcauuugggagaguguc

SEQ ID NO: 733110 - RNA, 22 nt, Human
uucauacuaaaguguaagaugu

SEQ ID NO: 733111 - RNA, 22 nt, Human
ccugggucccagccaggcuuug

SEQ ID NO: 733112 - RNA, 21 nt, Human
uggcauggagguagcagugug

SEQ ID NO: 733113 - RNA, 22 nt, Human
uggcucaggcuugaaaauagau

SEQ ID NO: 733114 - RNA, 22 nt, Human
cucccaggcacagggaggagcc

SEQ ID NO: 733115 - RNA, 22 nt, Human
acagugcugucuaucucacuaa

SEQ ID NO: 733116 - RNA, 22 nt, Human
ggcagagugcucugggcagggg

SEQ ID NO: 733117 - RNA, 22 nt, Human
ugucaagugauuagccauaaug

SEQ ID NO: 733118 - RNA, 22 nt, Human
uuucucuggccucaguuuaaca

SEQ ID NO: 733119 - RNA, 22 nt, Human
ucaggccagcaccaucccuauc

SEQ ID NO: 733120 - RNA, 22 nt, Human
guagugcgcauggccuguuugu

SEQ ID NO: 733121 - RNA, 22 nt, Human
augugugcaaugcuauuuuggc

SEQ ID NO: 733122 - RNA, 22 nt, Human
gucacuggaauuacaggcaugc

SEQ ID NO: 733123 - RNA, 22 nt, Human
gccagggcucgcggucccucgu

SEQ ID NO: 733124 - RNA, 22 nt, Human
uacacaggguauggcuugagga

SEQ ID NO: 733125 - RNA, 22 nt, Human
gcagagccccauugcuggcggg

SEQ ID NO: 733126 - RNA, 22 nt, Human
ugcugggcccccagugaccuuc

SEQ ID NO: 733127 - RNA, 22 nt, Human
acaucucaugaaugauaaauca

SEQ ID NO: 733128 - RNA, 22 nt, Human
uuguauuuuuuccuggcggugg

SEQ ID NO: 733129 - RNA, 22 nt, Human
auuggaaguauuucaucaaaag

SEQ ID NO: 733130 - RNA, 21 nt, Human
aucugaaagguuaguguugag

SEQ ID NO: 733131 - RNA, 19 nt, Human
gcagggcucucccagaugc

SEQ ID NO: 733132 - RNA, 22 nt, Human
ggcuucacucauaauuagguuc

SEQ ID NO: 733133 - RNA, 22 nt, Human
ucuggcuccacuuucuucauuu

SEQ ID NO: 733134 - RNA, 20 nt, Human
aguuagugaguaauugagcu

SEQ ID NO: 733135 - RNA, 21 nt, Human
acaugcauagagagauuucug

SEQ ID NO: 733136 - RNA, 22 nt, Human
ugcaugcaugcuacugggaggu

SEQ ID NO: 733137 - RNA, 22 nt, Human
ggcugagcacuuuaggcaggag

SEQ ID NO: 733138 - RNA, 22 nt, Human
uguuucaggaccuaucuuuuag

SEQ ID NO: 733139 - RNA, 22 nt, Human
cccaggccccagggcuugucag

SEQ ID NO: 733140 - RNA, 22 nt, Human
gcaggauggugcccuuucugcc

SEQ ID NO: 733141 - RNA, 22 nt, Human
caaaugcuaugauuuugaguuu

SEQ ID NO: 733142 - RNA, 22 nt, Human
ugaugaauaaacuugagaguca

SEQ ID NO: 733143 - RNA, 22 nt, Human
gaggcagcuuggggcugugggu

SEQ ID NO: 733144 - RNA, 20 nt, Human
accuucaggaacuuaucagc

SEQ ID NO: 733145 - RNA, 22 nt, Human
agugugucugaucacuugugag

SEQ ID NO: 733146 - RNA, 22 nt, Human
ugggccucaccuucuuggcagc

SEQ ID NO: 733147 - RNA, 23 nt, Human
uagcaaaguuguuugggaaauuu

SEQ ID NO: 733148 - RNA, 22 nt, Human
acacauuucuaaauuuuuaccg

SEQ ID NO: 733149 - RNA, 22 nt, Human
ggaucaggcgccaugggaagug

SEQ ID NO: 733150 - RNA, 22 nt, Human
acagcuugcaauggcuuucaac

SEQ ID NO: 733151 - RNA, 22 nt, Human
uccaggcauaagccuugagugu

SEQ ID NO: 733152 - RNA, 22 nt, Human
cugggcuccacucccacagugu

SEQ ID NO: 733153 - RNA, 20 nt, Human
auugucagccuucagaggag

SEQ ID NO: 733154 - RNA, 22 nt, Human
augcaguaaaauaggagguaau

SEQ ID NO: 733155 - RNA, 22 nt, Human
uuugaauaaacgguuaauguuc

SEQ ID NO: 733156 - RNA, 22 nt, Human
gcugcugcaagagccagcucuu

SEQ ID NO: 733157 - RNA, 22 nt, Human
gccagcuguuucagagcccagu

SEQ ID NO: 733158 - RNA, 22 nt, Human
caggagugaaaugaggcccagg

SEQ ID NO: 733159 - RNA, 22 nt, Human
ggcugggcaggucugcacaggg

SEQ ID NO: 733160 - RNA, 22 nt, Human
uauucacauguacauaugcuca

SEQ ID NO: 733161 - RNA, 22 nt, Human
ccagggcugagacuguauuggg

SEQ ID NO: 733162 - RNA, 22 nt, Human
ccaguguucaguaugcauuaag

SEQ ID NO: 733163 - RNA, 22 nt, Human
uuacucugaauguuucuacuga

SEQ ID NO: 733164 - RNA, 22 nt, Human
ugaggcuuagauuugguaacuc

SEQ ID NO: 733165 - RNA, 22 nt, Human
cucuggcugucccgaugagcag

SEQ ID NO: 733166 - RNA, 23 nt, Human
gccagccuugcucuccugcagcc

SEQ ID NO: 733167 - RNA, 22 nt, Human
agccagcacggauuucccagga

SEQ ID NO: 733168 - RNA, 22 nt, Human
aauucagagacaugaagugaca

SEQ ID NO: 733169 - RNA, 23 nt, Human
augaagacccgugguguccccac

SEQ ID NO: 733170 - RNA, 22 nt, Human
cugagcccaggcgggagcugag

SEQ ID NO: 733171 - RNA, 22 nt, Human
cacaugcauaccuauguguaua

SEQ ID NO: 733172 - RNA, 22 nt, Human
gagcugagauuugaagcaaguu

SEQ ID NO: 733173 - RNA, 22 nt, Human
gacacagcuuucugaagagcau

SEQ ID NO: 733174 - RNA, 22 nt, Human
uuugguauugcacacugucuuc

SEQ ID NO: 733175 - RNA, 20 nt, Human
ugccugggaaggcguggagg

SEQ ID NO: 733176 - RNA, 20 nt, Human
ucuccuggucugguccgugc

SEQ ID NO: 733177 - RNA, 22 nt, Human
ggcaugcauacguagugauuuu

SEQ ID NO: 733178 - RNA, 22 nt, Human
uagaaagucaugaauuacacca

SEQ ID NO: 733179 - RNA, 22 nt, Human
gggugagagucaggcagagauu

SEQ ID NO: 733180 - RNA, 22 nt, Human
agaacacugcuaguauaaucac

SEQ ID NO: 733181 - RNA, 22 nt, Human
auggaaaagggucuuucauuuc

SEQ ID NO: 733182 - RNA, 22 nt, Human
agcaggcaagcgugaguucucu

SEQ ID NO: 733183 - RNA, 22 nt, Human
ugcagcauuaguacaagucuca

SEQ ID NO: 733184 - RNA, 21 nt, Human
gcaguuuauguaauaugcacu

SEQ ID NO: 733185 - RNA, 22 nt, Human
cacuggcauuagucacgaggca

SEQ ID NO: 733186 - RNA, 22 nt, Human
cacagaggcggaaaauucugaa

SEQ ID NO: 733187 - RNA, 21 nt, Human
uggcacagaaaggaaaguuca

SEQ ID NO: 733188 - RNA, 22 nt, Human
gggcacugcuggaggcucccug

SEQ ID NO: 733189 - RNA, 22 nt, Human
guccuucaucuggagccugguc

SEQ ID NO: 733190 - RNA, 22 nt, Human
agaggcugucucauauuuugua

SEQ ID NO: 733191 - RNA, 17 nt, Human
uuucaacaucacucagc

SEQ ID NO: 733192 - RNA, 20 nt, Human
gccugcagguuggaugggau

SEQ ID NO: 733193 - RNA, 22 nt, Human
uagcaucuggagaaacaagucc

SEQ ID NO: 733194 - RNA, 22 nt, Human
ggcaggugugagaucgaggcca

SEQ ID NO: 733195 - RNA, 22 nt, Human
ucucagcaaggaaagaggcagg

SEQ ID NO: 733196 - RNA, 22 nt, Human
ugguuucacacugcauggugua

SEQ ID NO: 733197 - RNA, 22 nt, Human
uauuggaguauggggcuggagu

SEQ ID NO: 733198 - RNA, 22 nt, Human
gauccguuuuaacaaugggagu

SEQ ID NO: 733199 - RNA, 22 nt, Human
auacuguaucacuugugaguga

SEQ ID NO: 733200 - RNA, 22 nt, Human
ggccuuggaguccuccacugga

SEQ ID NO: 733201 - RNA, 22 nt, Human
aauuggcauagcauacaauuca

SEQ ID NO: 733202 - RNA, 22 nt, Human
cauagccaucuuuagcuuccag

SEQ ID NO: 733203 - RNA, 22 nt, Human
gugcuucccauuagaacuguga

SEQ ID NO: 733204 - RNA, 21 nt, Human
ugcugacaucaggucugcuau

SEQ ID NO: 733205 - RNA, 22 nt, Human
aaagguucuacuuuuaaagaau

SEQ ID NO: 733206 - RNA, 22 nt, Human
cagugggggugaggccgaggua

SEQ ID NO: 733207 - RNA, 20 nt, Human
ucagaagugcagcugccccu

SEQ ID NO: 733208 - RNA, 22 nt, Human
agaacuuuuggagacuuuuagu

SEQ ID NO: 733209 - RNA, 22 nt, Human
aaagccuuggucaucugguucc

SEQ ID NO: 733210 - RNA, 21 nt, Human
acagacagggccagugucccc

SEQ ID NO: 733211 - RNA, 18 nt, Human
uggaggcagaguucuggc

SEQ ID NO: 733212 - RNA, 22 nt, Human
cucuuaaagaauguuccagcug

SEQ ID NO: 733213 - RNA, 22 nt, Human
uaacaguauagccuaacauuuc

SEQ ID NO: 733214 - RNA, 22 nt, Human
uagcuguuauuuugcuacccau

SEQ ID NO: 733215 - RNA, 22 nt, Human
acacuucucccaucuccuguug

SEQ ID NO: 733216 - RNA, 22 nt, Human
acaugcuacacagagcuccucg

SEQ ID NO: 733217 - RNA, 22 nt, Human
ccaguccugcucccugaccacc

SEQ ID NO: 733218 - RNA, 22 nt, Human
aagugaaacauguaucucuuua

SEQ ID NO: 733219 - RNA, 22 nt, Human
aaagucucaggcaaaccaggac

SEQ ID NO: 733220 - RNA, 22 nt, Human
uuuguagaacuauacuuacauu

SEQ ID NO: 733221 - RNA, 22 nt, Human
acugucugugccagaugcuggg

SEQ ID NO: 733222 - RNA, 22 nt, Human
uggcugccuucccugcuggagg

SEQ ID NO: 733223 - RNA, 22 nt, Human
uauauuuaaauccagguugaaa

SEQ ID NO: 733224 - RNA, 22 nt, Human
cugaggcacugucagcugaggc

SEQ ID NO: 733225 - RNA, 22 nt, Human
ugagauaacaaaauuaucuuca

SEQ ID NO: 733226 - RNA, 22 nt, Human
uccaagggcagccauagaacuu

SEQ ID NO: 733227 - RNA, 22 nt, Human
uagggcuggcgugcucagggaa

SEQ ID NO: 733228 - RNA, 22 nt, Human
gagguggccagagucaagagcc

SEQ ID NO: 733229 - RNA, 22 nt, Human
cacugcauggaugauggcugua

SEQ ID NO: 733230 - RNA, 22 nt, Human
ugccagcacaaguuaagagauc

SEQ ID NO: 733231 - RNA, 22 nt, Human
cuagucacuguaauaaucugcu

SEQ ID NO: 733232 - RNA, 21 nt, Human
ggacagcugcgcgcagggcuc

SEQ ID NO: 733233 - RNA, 22 nt, Human
accuugggcaaccugcuccugc

SEQ ID NO: 733234 - RNA, 17 nt, Human
gggagaugaagggauau

SEQ ID NO: 733235 - RNA, 22 nt, Human
ggaagaaaugcucuucuaugcg

SEQ ID NO: 733236 - RNA, 22 nt, Human
auggugaagcuucauggguguu

SEQ ID NO: 733237 - RNA, 22 nt, Human
acaguagauugguaugauguca

SEQ ID NO: 733238 - RNA, 22 nt, Human
uguccucuuccagugcuccuuc

SEQ ID NO: 733239 - RNA, 22 nt, Human
aggucuggaaacagcagggaga

SEQ ID NO: 733240 - RNA, 22 nt, Human
ugccugugguuccaguuuuuuc

SEQ ID NO: 733241 - RNA, 22 nt, Human
agugacauuugcaccagcugcu

SEQ ID NO: 733242 - RNA, 21 nt, Human
agcuggaaucuggcugugcuu

SEQ ID NO: 733243 - RNA, 22 nt, Human
cucugcucaccagccaugugau

SEQ ID NO: 733244 - RNA, 22 nt, Human
gggcaguagcuucguaggcauc

SEQ ID NO: 733245 - RNA, 22 nt, Human
aggagccaggccccauggggcu

SEQ ID NO: 733246 - RNA, 22 nt, Human
caguauuuccucuucuuaacuu

SEQ ID NO: 733247 - RNA, 22 nt, Human
guggccagaaucuugaggccuu

SEQ ID NO: 733248 - RNA, 22 nt, Human
cacacaugaaucccuaguaccu

SEQ ID NO: 733249 - RNA, 22 nt, Human
aagggaggaggauuuauuguac

SEQ ID NO: 733250 - RNA, 22 nt, Human
ugucaccuugaugauggccuag

SEQ ID NO: 733251 - RNA, 22 nt, Human
aagaggcugaaugagaaaguac

SEQ ID NO: 733252 - RNA, 22 nt, Human
augccuccucaaaucugccaca

SEQ ID NO: 733253 - RNA, 22 nt, Human
cccucacucugccuccuggggu

SEQ ID NO: 733254 - RNA, 22 nt, Human
ugugagacaggaccuguugacu

SEQ ID NO: 733255 - RNA, 22 nt, Human
ucaggaaaauacugcuuaucca

SEQ ID NO: 733256 - RNA, 23 nt, Human
ucugcagacgcuguucuauuguc

SEQ ID NO: 733257 - RNA, 22 nt, Human
gccgcggcauggcgagcaggac

SEQ ID NO: 733258 - RNA, 22 nt, Human
uccucuucaaaaggauuuccuu

SEQ ID NO: 733259 - RNA, 22 nt, Human
uuccaagaagucaacagguagu

SEQ ID NO: 733260 - RNA, 22 nt, Human
ucauucagguugggcaaguguc

SEQ ID NO: 733261 - RNA, 22 nt, Human
accuucugaccaguuaucuuga

SEQ ID NO: 733262 - RNA, 22 nt, Human
aggaugagauuccagggucaau

SEQ ID NO: 733263 - RNA, 22 nt, Human
cugacuguuugcugaaaggucu

SEQ ID NO: 733264 - RNA, 22 nt, Human
cugagacccagacaccugagga

SEQ ID NO: 733265 - RNA, 22 nt, Human
ugucugucugcaagccagaaag

SEQ ID NO: 733266 - RNA, 22 nt, Human
guucucucaaacuuuguguuug

SEQ ID NO: 733267 - RNA, 22 nt, Human
uagcagcuuccagagagggcag

SEQ ID NO: 733268 - RNA, 22 nt, Human
uagguaguuacacagcaaugua

SEQ ID NO: 733269 - RNA, 22 nt, Human
auaugucgcuacaucauuagau

SEQ ID NO: 733270 - RNA, 22 nt, Human
gcagcaggacugccguuaaagu

SEQ ID NO: 733271 - RNA, 22 nt, Human
ggguguugauuuuacacuaaaa

SEQ ID NO: 733272 - RNA, 22 nt, Human
auuauucuuaugucaucauggc

SEQ ID NO: 733273 - RNA, 22 nt, Human
ccccaggaagccucagauuugc

SEQ ID NO: 733274 - RNA, 22 nt, Human
uaaauucagugaguaauuucug

SEQ ID NO: 733275 - RNA, 22 nt, Human
ucaggcucaggaauguguuuau

SEQ ID NO: 733276 - RNA, 22 nt, Human
ugggcucugguuuccuggcugg

SEQ ID NO: 733277 - RNA, 22 nt, Human
agaggguggugaggccugguuc

SEQ ID NO: 733278 - RNA, 22 nt, Human
uauacacauaucuucuaggccu

SEQ ID NO: 733279 - RNA, 22 nt, Human
ugggaauagaacaagauagaga

SEQ ID NO: 733280 - RNA, 22 nt, Human
guggcagagcaggagacaggac

SEQ ID NO: 733281 - RNA, 22 nt, Human
agaacagaggccuuauguuuca

SEQ ID NO: 733282 - RNA, 22 nt, Human
uauugaguuacagaaaauacuu

SEQ ID NO: 733283 - RNA, 22 nt, Human
aaacugaagagcuuuuugacac

SEQ ID NO: 733284 - RNA, 22 nt, Human
cuucuuaaagauuacacaauga

SEQ ID NO: 733285 - RNA, 22 nt, Human
uaaggaaaguacauguuuugac

SEQ ID NO: 733286 - RNA, 22 nt, Human
cucccauugcuucaaagauccu

SEQ ID NO: 733287 - RNA, 23 nt, Human
cuggcccuggcucugugaucaug

SEQ ID NO: 733288 - RNA, 22 nt, Human
cucccaggugucccuucugcca

SEQ ID NO: 733289 - RNA, 22 nt, Human
agucaggaagcuggagcugggg

SEQ ID NO: 733290 - RNA, 21 nt, Human
uuucccagcugaaaauaaaug

SEQ ID NO: 733291 - RNA, 22 nt, Human
ccaggagagcauugcacagagg

SEQ ID NO: 733292 - RNA, 22 nt, Human
agagcacaggcucuggagucua

SEQ ID NO: 733293 - RNA, 22 nt, Human
ucacauuuggagaaagccugcc

SEQ ID NO: 733294 - RNA, 19 nt, Human
aucuuuggguccugaaggg

SEQ ID NO: 733295 - RNA, 22 nt, Human
gccaggcaguucaaguacacca

SEQ ID NO: 733296 - RNA, 22 nt, Human
gcuuuauguaaguccaaaggca

SEQ ID NO: 733297 - RNA, 22 nt, Human
uacuuuaaaaacugauaauuca

SEQ ID NO: 733298 - RNA, 22 nt, Human
uacauacaugguggaaugguua

SEQ ID NO: 733299 - RNA, 22 nt, Human
acugcuuccugagaaaucaaca

SEQ ID NO: 733300 - RNA, 22 nt, Human
ugcuucucaaagaagcauaaug

SEQ ID NO: 733301 - RNA, 19 nt, Human
uugugugucagucagaguu

SEQ ID NO: 733302 - RNA, 22 nt, Human
agucucuuuaaucacagugucu

SEQ ID NO: 733303 - RNA, 22 nt, Human
agccacagucuguagccagcuu

SEQ ID NO: 733304 - RNA, 22 nt, Human
uggucugggcaaauccuucuga

SEQ ID NO: 733305 - RNA, 22 nt, Human
aggaggggcauagaaauguaau

SEQ ID NO: 733306 - RNA, 22 nt, Human
cucugcuuucucaaacccugug

SEQ ID NO: 733307 - RNA, 17 nt, Human
uagcuguguuucagcua

SEQ ID NO: 733308 - RNA, 19 nt, Human
uuuuccuucuccucuuaau

SEQ ID NO: 733309 - RNA, 20 nt, Human
cuguuccugucccaugaagc

SEQ ID NO: 733310 - RNA, 22 nt, Human
ucagcagggccuccuugugcag

SEQ ID NO: 733311 - RNA, 22 nt, Human
gaccaggcuguuccagucuaac

SEQ ID NO: 733312 - RNA, 22 nt, Human
ucagauggguuuugaaggaugu

SEQ ID NO: 733313 - RNA, 23 nt, Human
caggacaugggaggaaguauggc

SEQ ID NO: 733314 - RNA, 22 nt, Human
ugaaugaugguguguucuugcc

SEQ ID NO: 733315 - RNA, 22 nt, Human
uuccauugaguaccuggagaca

SEQ ID NO: 733316 - RNA, 22 nt, Human
cugucaccuguucacugcagca

SEQ ID NO: 733317 - RNA, 22 nt, Human
uucagaaaucccucuucuaccc

SEQ ID NO: 733318 - RNA, 19 nt, Human
aaugacugaguacauuguc

SEQ ID NO: 733319 - RNA, 22 nt, Human
uuuagcauuacuaaaaugaaaa

SEQ ID NO: 733320 - RNA, 22 nt, Human
agaauacaucuagugcugcaug

SEQ ID NO: 733321 - RNA, 22 nt, Human
ucagaggucagcagcuugccca

SEQ ID NO: 733322 - RNA, 22 nt, Human
gaugauuguuggcucucuugau

SEQ ID NO: 733323 - RNA, 22 nt, Human
aggcuguguaaagugcuuuccc

SEQ ID NO: 733324 - RNA, 22 nt, Human
uucuuacaaacaagaucauuga

SEQ ID NO: 733325 - RNA, 22 nt, Human
gugacaauauuagcucaggggc

SEQ ID NO: 733326 - RNA, 22 nt, Human
uacauguacaugcauagguaga

SEQ ID NO: 733327 - RNA, 22 nt, Human
aggacagcagugcuggcacuug

SEQ ID NO: 733328 - RNA, 22 nt, Human
agagcugagcaccaagcauggu

SEQ ID NO: 733329 - RNA, 22 nt, Human
caggcugccuggaagaggacug

SEQ ID NO: 733330 - RNA, 22 nt, Human
uggcuggacagugggcagugga

SEQ ID NO: 733331 - RNA, 22 nt, Human
cugccuggaccggcagcccucc

SEQ ID NO: 733332 - RNA, 22 nt, Human
uacccaguuccacacacugaug

SEQ ID NO: 733333 - RNA, 22 nt, Human
auggaaauguuccauauauuga

SEQ ID NO: 733334 - RNA, 22 nt, Human
agggccaguggguugaaaggca

SEQ ID NO: 733335 - RNA, 22 nt, Human
uuucaagcugugguaacugaga

SEQ ID NO: 733336 - RNA, 22 nt, Human
acccagggcuuaaggcggugca

SEQ ID NO: 733337 - RNA, 22 nt, Human
uauuccuaauuugcagggcaug

SEQ ID NO: 733338 - RNA, 22 nt, Human
gcuggcagaauuucuucuugcu

SEQ ID NO: 733339 - RNA, 22 nt, Human
uuauucuguuguucaggguugg

SEQ ID NO: 733340 - RNA, 22 nt, Human
ugacaguuaagguauacauuca

SEQ ID NO: 733341 - RNA, 22 nt, Human
uucacaguggcccucucugagu

SEQ ID NO: 733342 - RNA, 22 nt, Human
augccuuugccacagauuagga

SEQ ID NO: 733343 - RNA, 22 nt, Human
gcugcaggagauuuugagaguc

SEQ ID NO: 733344 - RNA, 22 nt, Human
ucacuucuucagcuuuccuuga

SEQ ID NO: 733345 - RNA, 22 nt, Human
auacaucuugucagauucaugu

SEQ ID NO: 733346 - RNA, 22 nt, Human
aauagcaucuucccugguaacc

SEQ ID NO: 733347 - RNA, 22 nt, Human
auguucauuuucuuaaugugcc

SEQ ID NO: 733348 - RNA, 23 nt, Human
acugagccagggccugggucagc

SEQ ID NO: 733349 - RNA, 22 nt, Human
agaauuguaauaauaauagcau

SEQ ID NO: 733350 - RNA, 22 nt, Human
uaccaggaauuauuuuacauuu

SEQ ID NO: 733351 - RNA, 22 nt, Human
agaccaugggcucugaagagca

SEQ ID NO: 733352 - RNA, 22 nt, Human
gggugguguauuagagcugcag

SEQ ID NO: 733353 - RNA, 22 nt, Human
uguguacaggccuugcuagacu

SEQ ID NO: 733354 - RNA, 22 nt, Human
uguguugugacauucuuggaug

SEQ ID NO: 733355 - RNA, 22 nt, Human
cuucagcagccucuugcauaaa

SEQ ID NO: 733356 - RNA, 22 nt, Human
gauuuacaaagcucucuagugu

SEQ ID NO: 733357 - RNA, 22 nt, Human
ucacucuuuaucuuuuaugucu

SEQ ID NO: 733358 - RNA, 22 nt, Human
gcaggccacaguggagucucug

SEQ ID NO: 733359 - RNA, 22 nt, Human
cacugccuccccaggcuccaca

SEQ ID NO: 733360 - RNA, 22 nt, Human
cugugaauuuaaagcacacauc

SEQ ID NO: 733361 - RNA, 22 nt, Human
uggcagugcugcagugcccuua

SEQ ID NO: 733362 - RNA, 22 nt, Human
ucucucugagcccugcuuuuuc

SEQ ID NO: 733363 - RNA, 22 nt, Human
gugcugaggauacagcugugaa

SEQ ID NO: 733364 - RNA, 22 nt, Human
uggcuucaggagcaccuggcuu

SEQ ID NO: 733365 - RNA, 22 nt, Human
cuucuagagcuggagcaaaugu

SEQ ID NO: 733366 - RNA, 22 nt, Human
ugggcagaucuuugguggcuag

SEQ ID NO: 733367 - RNA, 22 nt, Human
aaauuuuccugguaaagaugga

SEQ ID NO: 733368 - RNA, 22 nt, Human
ggacauggaaguauggagugga

SEQ ID NO: 733369 - RNA, 22 nt, Human
uuauuuucagcuaggaaagcca

SEQ ID NO: 733370 - RNA, 22 nt, Human
caacauaugauuuuguauauaa

SEQ ID NO: 733371 - RNA, 22 nt, Human
guggcugcagcggcuguggaga

SEQ ID NO: 733372 - RNA, 22 nt, Human
cagcuguucggggcuggcaugu

SEQ ID NO: 733373 - RNA, 22 nt, Human
uuaaguacaggguuagugacgg

SEQ ID NO: 733374 - RNA, 22 nt, Human
ccuggagcacagcccaguccca

SEQ ID NO: 733375 - RNA, 22 nt, Human
gucugcuguggguccccaggag

SEQ ID NO: 733376 - RNA, 22 nt, Human
agaggccagcuagcgggccauc

SEQ ID NO: 733377 - RNA, 22 nt, Human
uuuuuccuuagggguuacucac

SEQ ID NO: 733378 - RNA, 23 nt, Human
cucugggcgggcaggucagccuc

SEQ ID NO: 733379 - RNA, 22 nt, Human
acucugcuugggccauaucugg

SEQ ID NO: 733380 - RNA, 22 nt, Human
agaaaugucaggaaagaagucc

SEQ ID NO: 733381 - RNA, 22 nt, Human
ugggacuucaaugcaaugaggu

SEQ ID NO: 733382 - RNA, 20 nt, Human
agcuggcccacagguguggg

SEQ ID NO: 733383 - RNA, 22 nt, Human
aaaugucuguaugagaaagaga

SEQ ID NO: 733384 - RNA, 22 nt, Human
ugcugggcuaggguggagcucu

SEQ ID NO: 733385 - RNA, 22 nt, Human
cuguggaguccuggggaaugga

SEQ ID NO: 733386 - RNA, 22 nt, Human
ugcugggcauuuaugcagaugg

SEQ ID NO: 733387 - RNA, 22 nt, Human
aggcuguguucugcccucuccc

SEQ ID NO: 733388 - RNA, 22 nt, Human
gaaacagugagaacuuuuccug

SEQ ID NO: 733389 - RNA, 18 nt, Human
gguggcuggggacggaca

SEQ ID NO: 733390 - RNA, 22 nt, Human
auuuucucacaaugcagaagga

SEQ ID NO: 733391 - RNA, 22 nt, Human
accacagaggaauuugaagagg

SEQ ID NO: 733392 - RNA, 22 nt, Human
uggugaucagucaacugucuuc

SEQ ID NO: 733393 - RNA, 22 nt, Human
acuaagaugcaggaaaugcuag

SEQ ID NO: 733394 - RNA, 22 nt, Human
ucccaggacuuccaguuggagg

SEQ ID NO: 733395 - RNA, 21 nt, Human
ucccugaguucucugagcauc

SEQ ID NO: 733396 - RNA, 22 nt, Human
uuugugaauagguuggcuucca

SEQ ID NO: 733397 - RNA, 22 nt, Human
uuuaaugugacaucuuuuagag

SEQ ID NO: 733398 - RNA, 22 nt, Human
ccucugggccagccuggacccu

SEQ ID NO: 733399 - RNA, 22 nt, Human
ggucugaguagagggcuggcga

SEQ ID NO: 733400 - RNA, 22 nt, Human
uaaagugcagacucccggaaac

SEQ ID NO: 733401 - RNA, 22 nt, Human
aaaauaugacugugcuccuuaa

SEQ ID NO: 733402 - RNA, 22 nt, Human
gccagcugacaccuugauuuug

SEQ ID NO: 733403 - RNA, 23 nt, Human
aaacuguugcuucaauguauccu

SEQ ID NO: 733404 - RNA, 22 nt, Human
cuggcugugcugcaggcuuugg

SEQ ID NO: 733405 - RNA, 22 nt, Human
uuucauaauauccagagauuuu

SEQ ID NO: 733406 - RNA, 22 nt, Human
uauucagugacaggguauuaug

SEQ ID NO: 733407 - RNA, 22 nt, Human
ugggcucagucugcuugguccu

SEQ ID NO: 733408 - RNA, 22 nt, Human
gauccccaggacuagggggugg

SEQ ID NO: 733409 - RNA, 22 nt, Human
ugcugcuucaccuguuguacag

SEQ ID NO: 733410 - RNA, 23 nt, Human
gacagagugagaccuugucuuac

SEQ ID NO: 733411 - RNA, 21 nt, Human
augggccagggauacagagag

SEQ ID NO: 733412 - RNA, 22 nt, Human
ccugugggcgcagcuggaguca

SEQ ID NO: 733413 - RNA, 22 nt, Human
ccugccagauccccugagcuga

SEQ ID NO: 733414 - RNA, 22 nt, Human
agagcuguauccccuuaccagu

SEQ ID NO: 733415 - RNA, 22 nt, Human
ugccuggcaccccagucugcac

SEQ ID NO: 733416 - RNA, 22 nt, Human
agugcacagcgugauguauugg

SEQ ID NO: 733417 - RNA, 22 nt, Human
auaacuugauguuauuugucca

SEQ ID NO: 733418 - RNA, 22 nt, Human
gcaaggcugagcacauuugcau

SEQ ID NO: 733419 - RNA, 22 nt, Human
acuggggagagucaugccagca

SEQ ID NO: 733420 - RNA, 22 nt, Human
aaugugagccaaugcccguggg

SEQ ID NO: 733421 - RNA, 22 nt, Human
ucagaugagugcuuucagcugc

SEQ ID NO: 733422 - RNA, 22 nt, Human
ugggggagagaggcauucuuuc

SEQ ID NO: 733423 - RNA, 22 nt, Human
ugcauugagauuuuaaaauuca

SEQ ID NO: 733424 - RNA, 22 nt, Human
guuccgcuucauauuuggaguc

SEQ ID NO: 733425 - RNA, 22 nt, Human
uaggaauugaaaaguggucuga

SEQ ID NO: 733426 - RNA, 22 nt, Human
gcugccugcaguguuuucccag

SEQ ID NO: 733427 - RNA, 22 nt, Human
auucuacaggacuggcaauccc

SEQ ID NO: 733428 - RNA, 19 nt, Human
uccuuccccccagcacaga

SEQ ID NO: 733429 - RNA, 22 nt, Human
ucccagccuuucuuucuccagc

SEQ ID NO: 733430 - RNA, 22 nt, Human
ugggagcaggcugaugauaggu

SEQ ID NO: 733431 - RNA, 22 nt, Human
ugcaggugcuccgggggugccc

SEQ ID NO: 733432 - RNA, 22 nt, Human
cuucaaggccuuccagguugaa

SEQ ID NO: 733433 - RNA, 22 nt, Human
ugcagggaaagggcacugggcu

SEQ ID NO: 733434 - RNA, 22 nt, Human
ggagggagggcuagaccaaaga

SEQ ID NO: 733435 - RNA, 18 nt, Human
ggcugcucgcucuccccg

SEQ ID NO: 733436 - RNA, 22 nt, Human
auuauuguugcggcuguuaccg

SEQ ID NO: 733437 - RNA, 22 nt, Human
auugaaaucccuaccucagagg

SEQ ID NO: 733438 - RNA, 22 nt, Human
cugugagauaugcauaugcucu

SEQ ID NO: 733439 - RNA, 22 nt, Human
gugauaagacaguaggcacaag

SEQ ID NO: 733440 - RNA, 22 nt, Human
uccugcagaccucagucagguc

SEQ ID NO: 733441 - RNA, 22 nt, Human
aaggcagccucugccagccggg

SEQ ID NO: 733442 - RNA, 22 nt, Human
aagcacagaaaaggagcaugga

SEQ ID NO: 733443 - RNA, 22 nt, Human
agucagaagggcccuuccuucc

SEQ ID NO: 733444 - RNA, 22 nt, Human
gaugcuuaagauguugguggca

SEQ ID NO: 733445 - RNA, 18 nt, Human
auacaagcagcagagauu

SEQ ID NO: 733446 - RNA, 22 nt, Human
uauugcuucagcuuccugggcu

SEQ ID NO: 733447 - RNA, 22 nt, Human
agagaagggggaaagaucucac

SEQ ID NO: 733448 - RNA, 22 nt, Human
aagcacaggagacgcacagcca

SEQ ID NO: 733449 - RNA, 22 nt, Human
cagcuggcuuguuuguucuuga

SEQ ID NO: 733450 - RNA, 22 nt, Human
agaccuggguucgaguccuaac

SEQ ID NO: 733451 - RNA, 22 nt, Human
agauuuacaaaggauuugcuuu

SEQ ID NO: 733452 - RNA, 22 nt, Human
gccacagcuuuuaaccucgggg

SEQ ID NO: 733453 - RNA, 22 nt, Human
agguaagguuuggaggcagugg

SEQ ID NO: 733454 - RNA, 22 nt, Human
guugaaaauacagauuccuagg

SEQ ID NO: 733455 - RNA, 22 nt, Human
gccuguuggugacuuucuguug

SEQ ID NO: 733456 - RNA, 22 nt, Human
ggggaguguuuucaugggcuug

SEQ ID NO: 733457 - RNA, 22 nt, Human
aaaucaguuaagaugaggccau

SEQ ID NO: 733458 - RNA, 22 nt, Human
aucagaagcaggaggaaugaag

SEQ ID NO: 733459 - RNA, 22 nt, Human
cuggagcuuauugggagcagaa

SEQ ID NO: 733460 - RNA, 22 nt, Human
cuuauuuaugucugucucuaau

SEQ ID NO: 733461 - RNA, 18 nt, Human
uccagcucacagaugggc

SEQ ID NO: 733462 - RNA, 22 nt, Human
aagcacuuuagugagaauaagg

SEQ ID NO: 733463 - RNA, 22 nt, Human
caugcaaaugguggcuaaaugg

SEQ ID NO: 733464 - RNA, 22 nt, Human
aguggcuguucauuuuacacaa

SEQ ID NO: 733465 - RNA, 22 nt, Human
uggagccaaggccaguucucag

SEQ ID NO: 733466 - RNA, 22 nt, Human
aaauguuccauuauuguguaau

SEQ ID NO: 733467 - RNA, 22 nt, Human
aauggcuuuggcaggaauuuca

SEQ ID NO: 733468 - RNA, 22 nt, Human
auggaauuugcaauaacaggau

SEQ ID NO: 733469 - RNA, 21 nt, Human
uguguguaugcacacacaugc

SEQ ID NO: 733470 - RNA, 22 nt, Human
uggcaagggauuguggagaacu

SEQ ID NO: 733471 - RNA, 22 nt, Human
ucucugagcuggauuuguucuu

SEQ ID NO: 733472 - RNA, 22 nt, Human
gugggccucuugaggguggcua

SEQ ID NO: 733473 - RNA, 22 nt, Human
caacauuugugaugagcaaacu

SEQ ID NO: 733474 - RNA, 22 nt, Human
agagugagggggcacugagacg

SEQ ID NO: 733475 - RNA, 22 nt, Human
uacacaugaucauuuaguagca

SEQ ID NO: 733476 - RNA, 22 nt, Human
aucaguuugauaauaaggcuug

SEQ ID NO: 733477 - RNA, 22 nt, Human
ucacaagauacaguuagaagca

SEQ ID NO: 733478 - RNA, 22 nt, Human
gugaacucugacucucaugccu

SEQ ID NO: 733479 - RNA, 22 nt, Human
agagcugccgagcuggggccau

SEQ ID NO: 733480 - RNA, 22 nt, Human
uacaggauaucacuucauuucu

SEQ ID NO: 733481 - RNA, 22 nt, Human
ugauuacacuauuugggaauag

SEQ ID NO: 733482 - RNA, 22 nt, Human
ugugagugaaugggucugaagu

SEQ ID NO: 733483 - RNA, 22 nt, Human
gagaggauccacaaaccaggaa

SEQ ID NO: 733484 - RNA, 22 nt, Human
ucuggauggucagcucuuccug

SEQ ID NO: 733485 - RNA, 22 nt, Human
gcugaggccccagggugauggg

SEQ ID NO: 733486 - RNA, 22 nt, Human
uuaauugauauaaagaacuuca

SEQ ID NO: 733487 - RNA, 22 nt, Human
cuggcccucgucaguuucacug

SEQ ID NO: 733488 - RNA, 22 nt, Human
aggcucugaucagguggcugug

SEQ ID NO: 733489 - RNA, 22 nt, Human
gaaagaagcuuuagauggcuau

SEQ ID NO: 733490 - RNA, 22 nt, Human
augcuuuuuaaacuuaauugga

SEQ ID NO: 733491 - RNA, 22 nt, Human
agaagccaaucagcucucugcu

SEQ ID NO: 733492 - RNA, 22 nt, Human
ggcuucugccacgagagggaag

SEQ ID NO: 733493 - RNA, 22 nt, Human
uuuaaggcagugaaacuauucu

SEQ ID NO: 733494 - RNA, 18 nt, Human
gcucagguauagacaggg

SEQ ID NO: 733495 - RNA, 18 nt, Human
uagcaaagauguggauug

SEQ ID NO: 733496 - RNA, 19 nt, Human
agacagagacugaaauaga

SEQ ID NO: 733497 - RNA, 22 nt, Human
ggccagagagcagccaggauuc

SEQ ID NO: 733498 - RNA, 22 nt, Human
aacagcagaaacugcaagcuac

SEQ ID NO: 733499 - RNA, 22 nt, Human
gaggcugaguagcuuugugcuc

SEQ ID NO: 733500 - RNA, 22 nt, Human
aaugaacuccgaacauuuacau

SEQ ID NO: 733501 - RNA, 22 nt, Human
uuauaugauugaagugcauaag

SEQ ID NO: 733502 - RNA, 22 nt, Human
ugucaaccagguauuuuggucu

SEQ ID NO: 733503 - RNA, 22 nt, Human
cugccuguuuccucuugcuccc

SEQ ID NO: 733504 - RNA, 21 nt, Human
acacuucaguuuuuaaaggga

SEQ ID NO: 733505 - RNA, 22 nt, Human
cuggccucacagaggcuaagcc

SEQ ID NO: 733506 - RNA, 22 nt, Human
cuaaggaagugacagugggauu

SEQ ID NO: 733507 - RNA, 22 nt, Human
auggcuuucuguguuuccguag

SEQ ID NO: 733508 - RNA, 22 nt, Human
cagcgcugugggaacagggcua

SEQ ID NO: 733509 - RNA, 15 nt, Human
uguuuaagccacauu

SEQ ID NO: 733510 - RNA, 22 nt, Human
acuaaaguguuggagaaugagg

SEQ ID NO: 733511 - RNA, 21 nt, Human
caucuuaauugaaagcagaga

SEQ ID NO: 733512 - RNA, 22 nt, Human
cucauggagggagugcucuucc

SEQ ID NO: 733513 - RNA, 20 nt, Human
aaagucccuuagugggagca

SEQ ID NO: 733514 - RNA, 22 nt, Human
gacagucugggcacacaugaaa

SEQ ID NO: 733515 - RNA, 21 nt, Human
ggacuuggaugguggcaguag

SEQ ID NO: 733516 - RNA, 22 nt, Human
ugcagaaggaggaggaaaucca

SEQ ID NO: 733517 - RNA, 22 nt, Human
agcaguccuucuuuagagagcc

SEQ ID NO: 733518 - RNA, 22 nt, Human
aggcuggccagugcugcagugg

SEQ ID NO: 733519 - RNA, 22 nt, Human
aaggcacauuccugaaaacaau

SEQ ID NO: 733520 - RNA, 22 nt, Human
gccuuuuuuguugcucugucac

SEQ ID NO: 733521 - RNA, 22 nt, Human
ucuguauugagaaagccggaca

SEQ ID NO: 733522 - RNA, 22 nt, Human
acaggcaggagcuccccauucc

SEQ ID NO: 733523 - RNA, 19 nt, Human
uuucccagcccuugcugug

SEQ ID NO: 733524 - RNA, 20 nt, Human
aggaggaaaaaaugacgagc

SEQ ID NO: 733525 - RNA, 22 nt, Human
uucuggaaagaaggcuaagguc

SEQ ID NO: 733526 - RNA, 22 nt, Human
uaaucacugggcguuugguacu

SEQ ID NO: 733527 - RNA, 22 nt, Human
ucacaugaaaugcuguaaagaa

SEQ ID NO: 733528 - RNA, 22 nt, Human
gccauuaaugagaucaagaauc

SEQ ID NO: 733529 - RNA, 22 nt, Human
uggugggacaucugaggagagg

SEQ ID NO: 733530 - RNA, 20 nt, Human
gucagugucuucaguaguga

SEQ ID NO: 733531 - RNA, 22 nt, Human
ugacacugccgaaacuguagag

SEQ ID NO: 733532 - RNA, 22 nt, Human
uccacuguggucccuugcugcc

SEQ ID NO: 733533 - RNA, 22 nt, Human
gccuggagggcucuagagaggc

SEQ ID NO: 733534 - RNA, 22 nt, Human
gaggcuggggucugccuuucug

SEQ ID NO: 733535 - RNA, 22 nt, Human
guggccuggauagacuccaucu

SEQ ID NO: 733536 - RNA, 22 nt, Human
guggcugagcagcagagagcug

SEQ ID NO: 733537 - RNA, 22 nt, Human
gauucaagaccuagcucagcca

SEQ ID NO: 733538 - RNA, 22 nt, Human
aucaggugaugcucugguuccc

SEQ ID NO: 733539 - RNA, 22 nt, Human
ccucacugucaucaguaguuau

SEQ ID NO: 733540 - RNA, 22 nt, Human
ugcauuuguucagugaaauguu

SEQ ID NO: 733541 - RNA, 22 nt, Human
caauguacuacaaagauuguca

SEQ ID NO: 733542 - RNA, 22 nt, Human
uagauucuguaaauaaucaagg

SEQ ID NO: 733543 - RNA, 19 nt, Human
uguggccaugguucagcug

SEQ ID NO: 733544 - RNA, 22 nt, Human
cccuguggaggaggagagcagu

SEQ ID NO: 733545 - RNA, 20 nt, Human
guguuucaugugauacaaug

SEQ ID NO: 733546 - RNA, 20 nt, Human
ggcauuagauuuuaaauguc

SEQ ID NO: 733547 - RNA, 22 nt, Human
gaaauguagaguaucugaggau

SEQ ID NO: 733548 - RNA, 22 nt, Human
uuaauaacauuguguaucaccc

SEQ ID NO: 733549 - RNA, 22 nt, Human
gcagccucugaugauggccgua

SEQ ID NO: 733550 - RNA, 22 nt, Human
cagacacuuauugagcaaguac

SEQ ID NO: 733551 - RNA, 22 nt, Human
uacaagugcuagcagauauugu

SEQ ID NO: 733552 - RNA, 22 nt, Human
agggcccacaguuccuauggcc

SEQ ID NO: 733553 - RNA, 22 nt, Human
gcccaggaaauaaaagugggcu

SEQ ID NO: 733554 - RNA, 22 nt, Human
ggagcacccugcucagccaagc

SEQ ID NO: 733555 - RNA, 19 nt, Human
cagugcccgacgcaggucu

SEQ ID NO: 733556 - RNA, 22 nt, Human
aacuugaaguugcagaaaguac

SEQ ID NO: 733557 - RNA, 22 nt, Human
uuauuauuccccaagucauuau

SEQ ID NO: 733558 - RNA, 22 nt, Human
ucuccuccuuuuuucaacauag

SEQ ID NO: 733559 - RNA, 20 nt, Human
caccagcagcagcugccacc

SEQ ID NO: 733560 - RNA, 23 nt, Human
cacaaagguuccauucucucacc

SEQ ID NO: 733561 - RNA, 22 nt, Human
ugggccacucuucccugggucu

SEQ ID NO: 733562 - RNA, 22 nt, Human
ucacugcucugaaaguacaggg

SEQ ID NO: 733563 - RNA, 22 nt, Human
gcacauacugcaaagauuacua

SEQ ID NO: 733564 - RNA, 22 nt, Human
cauucugugauucuaaaucccu

SEQ ID NO: 733565 - RNA, 22 nt, Human
ggucugaauauagaacuuaagu

SEQ ID NO: 733566 - RNA, 22 nt, Human
cagggcugaggacacaaguaaa

SEQ ID NO: 733567 - RNA, 22 nt, Human
agacauagggaggcauauaaau

SEQ ID NO: 733568 - RNA, 22 nt, Human
accagcacuuccagaggucagg

SEQ ID NO: 733569 - RNA, 22 nt, Human
caaaaguaaucguggcuuuugc

SEQ ID NO: 733570 - RNA, 20 nt, Human
gucuacacgggcaguguaga

SEQ ID NO: 733571 - RNA, 20 nt, Human
cagagaccugucuucacaga

SEQ ID NO: 733572 - RNA, 20 nt, Human
acagucagggaauagaaaaa

SEQ ID NO: 733573 - RNA, 22 nt, Human
gccaggaauggagagguggccu

SEQ ID NO: 733574 - RNA, 22 nt, Human
uccuuaaaugugaucuagauuu

SEQ ID NO: 733575 - RNA, 22 nt, Human
cugugcaagcccaagauaaaac

SEQ ID NO: 733576 - RNA, 22 nt, Human
uagaaacugauagucuugugcu

SEQ ID NO: 733577 - RNA, 22 nt, Human
gcugggcucuuaucaccuguac

SEQ ID NO: 733578 - RNA, 22 nt, Human
cugcccccaggcugcauggcug

SEQ ID NO: 733579 - RNA, 22 nt, Human
ugaaggccagcucuuuaucagc

SEQ ID NO: 733580 - RNA, 22 nt, Human
ccuggucagagcagucaggauc

SEQ ID NO: 733581 - RNA, 18 nt, Human
gggcucacacaggucauc

SEQ ID NO: 733582 - RNA, 23 nt, Human
cagaggcaucggauucaacauca

SEQ ID NO: 733583 - RNA, 22 nt, Human
agcaaacuaauugcaguucugg

SEQ ID NO: 733584 - RNA, 22 nt, Human
agcgauucacacacugggcugu

SEQ ID NO: 733585 - RNA, 22 nt, Human
aucaguuucugugaagaacaca

SEQ ID NO: 733586 - RNA, 22 nt, Human
gggagccacaguuuauagugau

SEQ ID NO: 733587 - RNA, 22 nt, Human
gaggggcucuuuaauaguaaca

SEQ ID NO: 733588 - RNA, 22 nt, Human
gcuucugugagugcagaugcug

SEQ ID NO: 733589 - RNA, 22 nt, Human
cagugcuuuuuuaccuuccaac

SEQ ID NO: 733590 - RNA, 17 nt, Human
uggcucugaggcugaau

SEQ ID NO: 733591 - RNA, 22 nt, Human
cauaacaguggcuucagcaagu

SEQ ID NO: 733592 - RNA, 22 nt, Human
guggggguuucauuaagacaau

SEQ ID NO: 733593 - RNA, 21 nt, Human
uccaggggccagcacccaagc

SEQ ID NO: 733594 - RNA, 22 nt, Human
aaguucaaguguaaucuuuauu

SEQ ID NO: 733595 - RNA, 22 nt, Human
caggcaggucagugaagaagga

SEQ ID NO: 733596 - RNA, 22 nt, Human
cagcaugaaacaauugagccca

SEQ ID NO: 733597 - RNA, 22 nt, Human
augcauauugucauuuaguccu

SEQ ID NO: 733598 - RNA, 22 nt, Human
augucuuucucauacaagccca

SEQ ID NO: 733599 - RNA, 22 nt, Human
uucaccccaaauucccagugga

SEQ ID NO: 733600 - RNA, 22 nt, Human
accuucaaguaugugggcugaa

SEQ ID NO: 733601 - RNA, 22 nt, Human
ugugccugucccgcauucuggu

SEQ ID NO: 733602 - RNA, 21 nt, Human
agaagccauuuguuaggacuu

SEQ ID NO: 733603 - RNA, 22 nt, Human
ucaacauacauacauggucagg

SEQ ID NO: 733604 - RNA, 20 nt, Human
ucuccuggugacaguaccca

SEQ ID NO: 733605 - RNA, 22 nt, Human
uggcccagggaguucauggugu

SEQ ID NO: 733606 - RNA, 22 nt, Human
agugcuuaaaacccugcacuag

SEQ ID NO: 733607 - RNA, 22 nt, Human
cucaguuucugacauuaaaauc

SEQ ID NO: 733608 - RNA, 22 nt, Human
aguccagaucaugcagcaaacc

SEQ ID NO: 733609 - RNA, 22 nt, Human
cucuggcuuugcucaugcaucc

SEQ ID NO: 733610 - RNA, 22 nt, Human
ugcagggcacggugcgcguggg

SEQ ID NO: 733611 - RNA, 22 nt, Human
acaguccuaagauaauugucuc

SEQ ID NO: 733612 - RNA, 22 nt, Human
guccaaguacauguguguacau

SEQ ID NO: 733613 - RNA, 22 nt, Human
uggugggaguccgcugugcugc

SEQ ID NO: 733614 - RNA, 22 nt, Human
gugcagacccacguccagggcc

SEQ ID NO: 733615 - RNA, 22 nt, Human
uuugcuauugugaauagugcca

SEQ ID NO: 733616 - RNA, 22 nt, Human
agccagggugggugaaugcuau

SEQ ID NO: 733617 - RNA, 22 nt, Human
gcacaggcaucaggcuuuuucu

SEQ ID NO: 733618 - RNA, 19 nt, Human
aaugccucaaauugggaga

SEQ ID NO: 733619 - RNA, 22 nt, Human
acaaaaagcuccauuacugucc

SEQ ID NO: 733620 - RNA, 22 nt, Human
gcuuuacaacaaauugaauaug

SEQ ID NO: 733621 - RNA, 22 nt, Human
ugggugaggaugaugaggcagc

SEQ ID NO: 733622 - RNA, 22 nt, Human
uguggcucucaugcacucccag

SEQ ID NO: 733623 - RNA, 22 nt, Human
ggguggaggagaacaggcccca

SEQ ID NO: 733624 - RNA, 22 nt, Human
cacuugaagugaauugcucacc

SEQ ID NO: 733625 - RNA, 22 nt, Human
gcagaggacucaaucaagguau

SEQ ID NO: 733626 - RNA, 22 nt, Human
gauaaagcaaggaugacugaag

SEQ ID NO: 733627 - RNA, 22 nt, Human
ggagagauggaaaaccucccag

SEQ ID NO: 733628 - RNA, 22 nt, Human
cuuguacaucacuggcagaugg

SEQ ID NO: 733629 - RNA, 22 nt, Human
ggacacaaaagugaauaaaaua

SEQ ID NO: 733630 - RNA, 22 nt, Human
ucuggagaacuugcaagaggau

SEQ ID NO: 733631 - RNA, 22 nt, Human
augaaaugcugagaggugcuuc

SEQ ID NO: 733632 - RNA, 22 nt, Human
ugcuuuaguucaacaugccaaa

SEQ ID NO: 733633 - RNA, 22 nt, Human
ucugauaggugguagaaggagg

SEQ ID NO: 733634 - RNA, 22 nt, Human
aacagaaucuuggguucuuuuc

SEQ ID NO: 733635 - RNA, 22 nt, Human
augaacaucucugauccaagca

SEQ ID NO: 733636 - RNA, 22 nt, Human
ucaguguuuguggcaaauguua

SEQ ID NO: 733637 - RNA, 19 nt, Human
guggccucggagcgcgcgg

SEQ ID NO: 733638 - RNA, 22 nt, Human
uucuuuucggccugugagaagg

SEQ ID NO: 733639 - RNA, 22 nt, Human
guagaaaauuaggaugaggcuu

SEQ ID NO: 733640 - RNA, 22 nt, Human
aagccagaguuuuugagaacuu

SEQ ID NO: 733641 - RNA, 22 nt, Human
uaggaaggaggccaucuuggcg

SEQ ID NO: 733642 - RNA, 22 nt, Human
ggacaguugguugggcucuugu

SEQ ID NO: 733643 - RNA, 22 nt, Human
cagcuauugguccacagguaug

SEQ ID NO: 733644 - RNA, 22 nt, Human
uguaacauauagcauguucuug

SEQ ID NO: 733645 - RNA, 21 nt, Human
gggacaccaacuccagggcuu

SEQ ID NO: 733646 - RNA, 22 nt, Human
uuuccucacucaugucaucagu

SEQ ID NO: 733647 - RNA, 22 nt, Human
acaaaguguuuucugaaggccu

SEQ ID NO: 733648 - RNA, 22 nt, Human
ugugcuauuuuugcauaugugu

SEQ ID NO: 733649 - RNA, 22 nt, Human
uaaaauagaggaugucaugcua

SEQ ID NO: 733650 - RNA, 22 nt, Human
auguggcuugucgauauuagca

SEQ ID NO: 733651 - RNA, 22 nt, Human
gucugagggucaugggucucac

SEQ ID NO: 733652 - RNA, 19 nt, Human
ucuuuguacaagucucugc

SEQ ID NO: 733653 - RNA, 22 nt, Human
gacagaggcaagaccagaagcc

SEQ ID NO: 733654 - RNA, 22 nt, Human
uucaacuuuaugcauauguauu

SEQ ID NO: 733655 - RNA, 22 nt, Human
agcagccaaccuuacauucauc

SEQ ID NO: 733656 - RNA, 22 nt, Human
gugaagaugccucaggugaccc

SEQ ID NO: 733657 - RNA, 22 nt, Human
ucauaaauugauuaugugcuuu

SEQ ID NO: 733658 - RNA, 22 nt, Human
auagacauauggcuuuguuucu

SEQ ID NO: 733659 - RNA, 22 nt, Human
uagacauuucugguuauugaca

SEQ ID NO: 733660 - RNA, 18 nt, Human
guucaucuuuuucuaaag

SEQ ID NO: 733661 - RNA, 22 nt, Human
agcugugugaccuagggcaagc

SEQ ID NO: 733662 - RNA, 22 nt, Human
acuuucuuaggcuguauaaaug

SEQ ID NO: 733663 - RNA, 22 nt, Human
gagauguuuugcugagaauggg

SEQ ID NO: 733664 - RNA, 22 nt, Human
aaugucaaaggcuauacauuca

SEQ ID NO: 733665 - RNA, 22 nt, Human
gaggcuucuguaacccuguccu

SEQ ID NO: 733666 - RNA, 22 nt, Human
gugagcaguuguauaaagacuu

SEQ ID NO: 733667 - RNA, 21 nt, Human
uguguuuuaaugauauucugu

SEQ ID NO: 733668 - RNA, 22 nt, Human
ucucagagggaaaggccaauuu

SEQ ID NO: 733669 - RNA, 22 nt, Human
uuuaacuggucuccugcugcuu

SEQ ID NO: 733670 - RNA, 22 nt, Human
aacaucucuguauuuuauagac

SEQ ID NO: 733671 - RNA, 22 nt, Human
aucuuccuuugccaugggauag

SEQ ID NO: 733672 - RNA, 22 nt, Human
acauucucauuuggugaucauu

SEQ ID NO: 733673 - RNA, 21 nt, Human
ggcugcucaccuaggucccaa

SEQ ID NO: 733674 - RNA, 22 nt, Human
ugggcagguuguuauuugacau

SEQ ID NO: 733675 - RNA, 22 nt, Human
agagugucugguagcugcucug

SEQ ID NO: 733676 - RNA, 22 nt, Human
aucaugacagagucugccaucc

SEQ ID NO: 733677 - RNA, 22 nt, Human
aaagcuguuaaaugcauaaugc

SEQ ID NO: 733678 - RNA, 22 nt, Human
gccuucccaagacgccugaguu

SEQ ID NO: 733679 - RNA, 22 nt, Human
uugcucaggcuuagagcuacua

SEQ ID NO: 733680 - RNA, 22 nt, Human
ggcuuccuaucccaucugagug

SEQ ID NO: 733681 - RNA, 21 nt, Human
agaugcagugacccacugggg

SEQ ID NO: 733682 - RNA, 22 nt, Human
agcagccauagauagcaugcaa

SEQ ID NO: 733683 - RNA, 22 nt, Human
agaaauguugaauacaucagga

SEQ ID NO: 733684 - RNA, 22 nt, Human
gaaaugucuuugacaagagagg

SEQ ID NO: 733685 - RNA, 22 nt, Human
agacccugucaguguuaggaaa

SEQ ID NO: 733686 - RNA, 22 nt, Human
ucacagcaacacuggggcagac

SEQ ID NO: 733687 - RNA, 22 nt, Human
gugggcugcuuccuccuuccac

SEQ ID NO: 733688 - RNA, 22 nt, Human
accuccugaugagaguaaagga

SEQ ID NO: 733689 - RNA, 22 nt, Human
ggaggggaacuaaucccgugac

SEQ ID NO: 733690 - RNA, 22 nt, Human
uaaagcauguuucaguaagguu

SEQ ID NO: 733691 - RNA, 22 nt, Human
agcaucagagagaaguuaacua

SEQ ID NO: 733692 - RNA, 22 nt, Human
uuccaaguguugagauuagagg

SEQ ID NO: 733693 - RNA, 22 nt, Human
cagaguaucccuuuagaauuaa

SEQ ID NO: 733694 - RNA, 22 nt, Human
uucugggacaucuggacaguuu

SEQ ID NO: 733695 - RNA, 22 nt, Human
cucagcaccccgacaggacauu

SEQ ID NO: 733696 - RNA, 22 nt, Human
uggacagcaaacauggagagaa

SEQ ID NO: 733697 - RNA, 22 nt, Human
acagcugugggcucugcauaua

SEQ ID NO: 733698 - RNA, 22 nt, Human
ucauuuguugcuguuaccugag

SEQ ID NO: 733699 - RNA, 19 nt, Human
uacuuuuucaggacagagu

SEQ ID NO: 733700 - RNA, 22 nt, Human
gucauauugaagaagacuggca

SEQ ID NO: 733701 - RNA, 22 nt, Human
uauauauaugcacacacaccua

SEQ ID NO: 733702 - RNA, 22 nt, Human
ugaaauuagugaaguuacaguu

SEQ ID NO: 733703 - RNA, 21 nt, Human
auuucagagcacacaaguaaa

SEQ ID NO: 733704 - RNA, 22 nt, Human
acauagaacuucccagugagca

SEQ ID NO: 733705 - RNA, 22 nt, Human
cagcccuggaacagcugacuca

SEQ ID NO: 733706 - RNA, 23 nt, Human
gagaacagccacagagagcugug

SEQ ID NO: 733707 - RNA, 21 nt, Human
gcucaggcucagguucagguu

SEQ ID NO: 733708 - RNA, 21 nt, Human
uagcuuccagcucaagcugag

SEQ ID NO: 733709 - RNA, 22 nt, Human
agugaggggcagcugagugggc

SEQ ID NO: 733710 - RNA, 22 nt, Human
gccucugcccauccaccaucag

SEQ ID NO: 733711 - RNA, 22 nt, Human
augcuuccucccuuccacucaa

SEQ ID NO: 733712 - RNA, 22 nt, Human
cagcaggaggcauggcuucccu

SEQ ID NO: 733713 - RNA, 22 nt, Human
caaccugaugugcaugccacgg

SEQ ID NO: 733714 - RNA, 22 nt, Human
gaaacagccccugugugaagca

SEQ ID NO: 733715 - RNA, 22 nt, Human
augaaaauacugugguugauag

SEQ ID NO: 733716 - RNA, 22 nt, Human
ucuuagaaguuuauggcacgga

SEQ ID NO: 733717 - RNA, 22 nt, Human
aaaaggcauggagguugauagu

SEQ ID NO: 733718 - RNA, 22 nt, Human
ccaagcuucuuuccuacuacag

SEQ ID NO: 733719 - RNA, 22 nt, Human
agcaagauuuuucagguuagua

SEQ ID NO: 733720 - RNA, 22 nt, Human
ugagagggcccagagcacacca

SEQ ID NO: 733721 - RNA, 22 nt, Human
accagcaggccaggggcacugc

SEQ ID NO: 733722 - RNA, 20 nt, Human
gggagucuggaugaaagaug

SEQ ID NO: 733723 - RNA, 22 nt, Human
acaguguucugaaaguugaggg

SEQ ID NO: 733724 - RNA, 22 nt, Human
cuguuuaugaagcugugguuua

SEQ ID NO: 733725 - RNA, 22 nt, Human
aggcagggucuugcuauguugc

SEQ ID NO: 733726 - RNA, 22 nt, Human
guggccaagaaaauagaugcau

SEQ ID NO: 733727 - RNA, 22 nt, Human
uuugugaacuuaggcaauuagg

SEQ ID NO: 733728 - RNA, 22 nt, Human
augcaaauugccauaaaguggg

SEQ ID NO: 733729 - RNA, 22 nt, Human
gagagcacggucuugggcaugg

SEQ ID NO: 733730 - RNA, 22 nt, Human
aagaugauguuguguuuucacu

SEQ ID NO: 733731 - RNA, 22 nt, Human
agggcuuugauguccaugagga

SEQ ID NO: 733732 - RNA, 22 nt, Human
augcaaaaguaguugcaguuuu

SEQ ID NO: 733733 - RNA, 22 nt, Human
agugucugccuauuuuucaagc

SEQ ID NO: 733734 - RNA, 20 nt, Human
ggaacaugaaugugaguggc

SEQ ID NO: 733735 - RNA, 22 nt, Human
uuuacccauauuagcaucaagu

SEQ ID NO: 733736 - RNA, 22 nt, Human
cagauucugaagucuagcugcu

SEQ ID NO: 733737 - RNA, 22 nt, Human
ucuaaacuaggguuaaaggaaa

SEQ ID NO: 733738 - RNA, 22 nt, Human
uccagucugguaugaauccuag

SEQ ID NO: 733739 - RNA, 22 nt, Human
uaaucauauggguaauccaaug

SEQ ID NO: 733740 - RNA, 19 nt, Human
uucauucuuucuacuuacc

SEQ ID NO: 733741 - RNA, 19 nt, Human
ugagaaggcaguggggagc

SEQ ID NO: 733742 - RNA, 22 nt, Human
ccugagcuagggaaggaagacc

SEQ ID NO: 733743 - RNA, 22 nt, Human
acauuucagaaucacacagcuu

SEQ ID NO: 733744 - RNA, 22 nt, Human
auauucuucuuguucagacuau

SEQ ID NO: 733745 - RNA, 19 nt, Human
uggcuguggggaaaugcuu

SEQ ID NO: 733746 - RNA, 19 nt, Human
auucucccuagaauuuuga

SEQ ID NO: 733747 - RNA, 21 nt, Human
agaugcaguuugcaggugggu

SEQ ID NO: 733748 - RNA, 22 nt, Human
ucugggaaugaggcuugggcaa

SEQ ID NO: 733749 - RNA, 22 nt, Human
uuauguguguacaugcauaugu

SEQ ID NO: 733750 - RNA, 22 nt, Human
acagaugagguguuuggagagc

SEQ ID NO: 733751 - RNA, 22 nt, Human
ccagcugcuugggaaaaugucu

SEQ ID NO: 733752 - RNA, 21 nt, Human
ugugagaagaguacugagguc

SEQ ID NO: 733753 - RNA, 22 nt, Human
accuccccugacucgaaaccca

SEQ ID NO: 733754 - RNA, 22 nt, Human
acuucccaggugguguggaguu

SEQ ID NO: 733755 - RNA, 22 nt, Human
ugauaaacauuuuaggaacuaa

SEQ ID NO: 733756 - RNA, 22 nt, Human
uagcugcccaucuuuccuuuag

SEQ ID NO: 733757 - RNA, 23 nt, Human
uccuccagaggcccuccuuggcc

SEQ ID NO: 733758 - RNA, 22 nt, Human
cucuggagguggagguugcagu

SEQ ID NO: 733759 - RNA, 22 nt, Human
uuuaccaagauagcaucugguu

SEQ ID NO: 733760 - RNA, 22 nt, Human
uuugaaugagggaaccacaguu

SEQ ID NO: 733761 - RNA, 22 nt, Human
auugacaaucuacuauguucug

SEQ ID NO: 733762 - RNA, 22 nt, Human
agucauauguggcauuuucuaa

SEQ ID NO: 733763 - RNA, 22 nt, Human
uuaauggaugcggcugcgugac

SEQ ID NO: 733764 - RNA, 22 nt, Human
cagaagaaaguggggagacaag

SEQ ID NO: 733765 - RNA, 22 nt, Human
ggagcugcucagagccaguccc

SEQ ID NO: 733766 - RNA, 21 nt, Human
ggcugagauggcagaaucacc

SEQ ID NO: 733767 - RNA, 22 nt, Human
augaagcugaccuugucuugcu

SEQ ID NO: 733768 - RNA, 22 nt, Human
guauucuugguuaucaaaauac

SEQ ID NO: 733769 - RNA, 22 nt, Human
uaugcaacaucugguagaaauc

SEQ ID NO: 733770 - RNA, 22 nt, Human
ccccacaguccgugaggagcca

SEQ ID NO: 733771 - RNA, 21 nt, Human
uccaggccucaggaagggaug

SEQ ID NO: 733772 - RNA, 22 nt, Human
gugccaccuucaaaucacauug

SEQ ID NO: 733773 - RNA, 22 nt, Human
ucucuuaaaagauuuuaaugac

SEQ ID NO: 733774 - RNA, 22 nt, Human
aggaccuguaccucagcaucua

SEQ ID NO: 733775 - RNA, 22 nt, Human
gggcacaugcuuagggaggaaa

SEQ ID NO: 733776 - RNA, 22 nt, Human
ucaucacaauuuuaugacccuc

SEQ ID NO: 733777 - RNA, 22 nt, Human
gcaguguuaaugcgaguguuca

SEQ ID NO: 733778 - RNA, 22 nt, Human
acacuugauaggucaaaucagu

SEQ ID NO: 733779 - RNA, 22 nt, Human
agcaggcugagcacccaggggg

SEQ ID NO: 733780 - RNA, 22 nt, Human
acacaugcacaacaguucuuuc

SEQ ID NO: 733781 - RNA, 17 nt, Human
cuggggaugugggacuc

SEQ ID NO: 733782 - RNA, 22 nt, Human
agccacugcccuuagccauuug

SEQ ID NO: 733783 - RNA, 22 nt, Human
cagugcaauuagaacuuauuua

SEQ ID NO: 733784 - RNA, 22 nt, Human
caaagaccauguggccugaaaa

SEQ ID NO: 733785 - RNA, 22 nt, Human
uggguaaauauccuuugugaaa

SEQ ID NO: 733786 - RNA, 22 nt, Human
acagggcuauauuccucagagu

SEQ ID NO: 733787 - RNA, 21 nt, Human
ucucuacacuuucacuaggcu

SEQ ID NO: 733788 - RNA, 22 nt, Human
aaauauagugacacuuauaguc

SEQ ID NO: 733789 - RNA, 22 nt, Human
uccaggagugauaaggccacug

SEQ ID NO: 733790 - RNA, 22 nt, Human
aguguuucacagcacuuuuucu

SEQ ID NO: 733791 - RNA, 22 nt, Human
uucugcauggagaaacugaguc

SEQ ID NO: 733792 - RNA, 22 nt, Human
auaucauucugauguauaucuu

SEQ ID NO: 733793 - RNA, 22 nt, Human
cuguuacacggaccuucaaauc

SEQ ID NO: 733794 - RNA, 22 nt, Human
cagcauugaucccaggcugugg

SEQ ID NO: 733795 - RNA, 22 nt, Human
guguguguguaaaaauccagag

SEQ ID NO: 733796 - RNA, 22 nt, Human
cacugggaguacaaagaauggg

SEQ ID NO: 733797 - RNA, 22 nt, Human
ggugucccaggccagcugugug

SEQ ID NO: 733798 - RNA, 22 nt, Human
ucuaaugaaagauguaggaacu

SEQ ID NO: 733799 - RNA, 18 nt, Human
acccuuuccaaacugcag

SEQ ID NO: 733800 - RNA, 22 nt, Human
acaggaacagcuugauggcauc

SEQ ID NO: 733801 - RNA, 22 nt, Human
ugacagagagaugggaaagggc

SEQ ID NO: 733802 - RNA, 22 nt, Human
cagccaucccagccugugguuc

SEQ ID NO: 733803 - RNA, 22 nt, Human
uucuguuuauuccuaggagcuc

SEQ ID NO: 733804 - RNA, 22 nt, Human
ucuuuuaucuguuguguaacaa

SEQ ID NO: 733805 - RNA, 22 nt, Human
aggcuauuuccacucuucucau

SEQ ID NO: 733806 - RNA, 21 nt, Human
acaguucaugauaacuccauc

SEQ ID NO: 733807 - RNA, 22 nt, Human
ggugucuaugauucaguuuaug

SEQ ID NO: 733808 - RNA, 22 nt, Human
agaaguuuugggaaauacugau

SEQ ID NO: 733809 - RNA, 22 nt, Human
uuucagagcugagaugccacag

SEQ ID NO: 733810 - RNA, 22 nt, Human
ucuuaaagagcgcaauuugagg

SEQ ID NO: 733811 - RNA, 20 nt, Human
ucccugccuuuuacugcugg

SEQ ID NO: 733812 - RNA, 22 nt, Human
cacccauguuucccucugucuu

SEQ ID NO: 733813 - RNA, 21 nt, Human
cugcuguggcccccgacaugc

SEQ ID NO: 733814 - RNA, 22 nt, Human
gcugcuggggccuucccucggg

SEQ ID NO: 733815 - RNA, 22 nt, Human
uucaaaaguaaucaguauuaga

SEQ ID NO: 733816 - RNA, 22 nt, Human
ucauuuucacacauaaauagca

SEQ ID NO: 733817 - RNA, 22 nt, Human
uagaguauauaggccuuugugu

SEQ ID NO: 733818 - RNA, 18 nt, Human
uauaaccucuguuacuca

SEQ ID NO: 733819 - RNA, 22 nt, Human
gugagguccaguaacuugucca

SEQ ID NO: 733820 - RNA, 20 nt, Human
ggagcugcccugggcuggag

SEQ ID NO: 733821 - RNA, 22 nt, Human
augcaacacauuugaugagcga

SEQ ID NO: 733822 - RNA, 22 nt, Human
gggcuguguuaggugcgguuac

SEQ ID NO: 733823 - RNA, 22 nt, Human
aguuuagacaaagucuugcauu

SEQ ID NO: 733824 - RNA, 22 nt, Human
cuuugccauguugccugcagaa

SEQ ID NO: 733825 - RNA, 22 nt, Human
caaagacacgggaaacaacguu

SEQ ID NO: 733826 - RNA, 22 nt, Human
uuuuagacuuguauguaaagcc

SEQ ID NO: 733827 - RNA, 23 nt, Human
gcccugcugggaccuccugcuac

SEQ ID NO: 733828 - RNA, 22 nt, Human
uuugcauuuauaaguuggugga

SEQ ID NO: 733829 - RNA, 22 nt, Human
gugcuggcugccaggaggcugc

SEQ ID NO: 733830 - RNA, 19 nt, Human
ggcagcaagcucugaaggc

SEQ ID NO: 733831 - RNA, 22 nt, Human
gcuccuucuggcucccuuuugg

SEQ ID NO: 733832 - RNA, 22 nt, Human
ucaccgccuugcccggccgggc

SEQ ID NO: 733833 - RNA, 22 nt, Human
gugggggcagugggcuucgagc

SEQ ID NO: 733834 - RNA, 22 nt, Human
ucacuuauugcucaucucaugc

SEQ ID NO: 733835 - RNA, 22 nt, Human
uacagaauguguaucauuacca

SEQ ID NO: 733836 - RNA, 22 nt, Human
aggacuucaucaccuguauaaa

SEQ ID NO: 733837 - RNA, 22 nt, Human
uucagcaaccagaaaggcuggg

SEQ ID NO: 733838 - RNA, 22 nt, Human
caguuccuaugggcaaaacaca

SEQ ID NO: 733839 - RNA, 19 nt, Human
gcuggggaauggauauuga

SEQ ID NO: 733840 - RNA, 22 nt, Human
aaaaguauuggccaccauuucu

SEQ ID NO: 733841 - RNA, 18 nt, Human
ucuuggaguaaugaucaa

SEQ ID NO: 733842 - RNA, 22 nt, Human
ggcacagcuacuugcucacucu

SEQ ID NO: 733843 - RNA, 22 nt, Human
cuugggggccauuaaggggccu

SEQ ID NO: 733844 - RNA, 22 nt, Human
aguggcuguuuauaggugggua

SEQ ID NO: 733845 - RNA, 22 nt, Human
accacccccuuggguguggaag

SEQ ID NO: 733846 - RNA, 22 nt, Human
gagaagggcuugggagucaaca

SEQ ID NO: 733847 - RNA, 22 nt, Human
ggucccaguugcccaggucagg

SEQ ID NO: 733848 - RNA, 19 nt, Human
ccagcccacagugacuuuc

SEQ ID NO: 733849 - RNA, 22 nt, Human
uggguggcacuucuggggucca

SEQ ID NO: 733850 - RNA, 22 nt, Human
ugccuggcacagagcagguggc

SEQ ID NO: 733851 - RNA, 22 nt, Human
ggcccuuggagccuccacagug

SEQ ID NO: 733852 - RNA, 22 nt, Human
ugggguggaacccuucugcugg

SEQ ID NO: 733853 - RNA, 22 nt, Human
ucagacagagaaguacaaugag

SEQ ID NO: 733854 - RNA, 22 nt, Human
guuacagugcauguggcuucug

SEQ ID NO: 733855 - RNA, 22 nt, Human
cccagaaggucgaggcugcagu

SEQ ID NO: 733856 - RNA, 22 nt, Human
aaugaccagcgccugcagaggg

SEQ ID NO: 733857 - RNA, 22 nt, Human
agaggcagccguauuucaaagg

SEQ ID NO: 733858 - RNA, 22 nt, Human
uguacaugugucuguauaucuu

SEQ ID NO: 733859 - RNA, 22 nt, Human
cccaggaggucgaagcugcagu

SEQ ID NO: 733860 - RNA, 22 nt, Human
aagagagggguugcauggaaau

SEQ ID NO: 733861 - RNA, 22 nt, Human
aggcagagcugauguucuguga

SEQ ID NO: 733862 - RNA, 22 nt, Human
aagcccuggauagagagaacug

SEQ ID NO: 733863 - RNA, 22 nt, Human
agccuucagcaguucaggugcc

SEQ ID NO: 733864 - RNA, 22 nt, Human
guggcagugugaggauccugcu

SEQ ID NO: 733865 - RNA, 15 nt, Human
agucaaaucuguuuu

SEQ ID NO: 733866 - RNA, 22 nt, Human
acaauguuucucuuuagucauu

SEQ ID NO: 733867 - RNA, 22 nt, Human
ucuguccagaacguacaucuug

SEQ ID NO: 733868 - RNA, 22 nt, Human
gcagggcagcuuagucccuguc

SEQ ID NO: 733869 - RNA, 22 nt, Human
aacuguuacauaguuauagauc

SEQ ID NO: 733870 - RNA, 22 nt, Human
augaaauaucuugaagaaauuc

SEQ ID NO: 733871 - RNA, 22 nt, Human
uugugaaauguuucaaaauagu

SEQ ID NO: 733872 - RNA, 20 nt, Human
acuggcacugguaggugugg

SEQ ID NO: 733873 - RNA, 22 nt, Human
augcauugucugguuucauuuu

SEQ ID NO: 733874 - RNA, 22 nt, Human
uugagcuguaaggugggaugug

SEQ ID NO: 733875 - RNA, 22 nt, Human
uaugagugguugaaugguaaac

SEQ ID NO: 733876 - RNA, 22 nt, Human
gcaugcugcaccagagccucuc

SEQ ID NO: 733877 - RNA, 22 nt, Human
aauguucagugccuuuaaacau

SEQ ID NO: 733878 - RNA, 18 nt, Human
gcuggcugcacuucugcu

SEQ ID NO: 733879 - RNA, 22 nt, Human
aaaagcagagacucuggagcua

SEQ ID NO: 733880 - RNA, 22 nt, Human
uagaugaauuagcaauuaucuu

SEQ ID NO: 733881 - RNA, 22 nt, Human
gaggccagaagucugagaucag

SEQ ID NO: 733882 - RNA, 22 nt, Human
ugggugaaaauuuugguggcac

SEQ ID NO: 733883 - RNA, 21 nt, Human
ucaguucucugccugugcuug

SEQ ID NO: 733884 - RNA, 22 nt, Human
gagggugcaggcaagagcaaaa

SEQ ID NO: 733885 - RNA, 21 nt, Human
agugaaauugcaucagaggga

SEQ ID NO: 733886 - RNA, 22 nt, Human
acagcaggauuuggcgauguug

SEQ ID NO: 733887 - RNA, 22 nt, Human
uguaaagagaaugguauaugga

SEQ ID NO: 733888 - RNA, 22 nt, Human
ggcaguguggcauaacauguag

SEQ ID NO: 733889 - RNA, 22 nt, Human
cccugagcuaccuauguaagca

SEQ ID NO: 733890 - RNA, 22 nt, Human
uacuuguuaucaucuuuuccuu

SEQ ID NO: 733891 - RNA, 22 nt, Human
gcagagaggaaugaagccaucc

SEQ ID NO: 733892 - RNA, 22 nt, Human
auucucauuuuuauagaugaga

SEQ ID NO: 733893 - RNA, 22 nt, Human
uuacaauugagucuauuguaug

SEQ ID NO: 733894 - RNA, 22 nt, Human
agacaaaccuuguuuuaugaug

SEQ ID NO: 733895 - RNA, 22 nt, Human
guuauugagguggagucucacu

SEQ ID NO: 733896 - RNA, 22 nt, Human
aggauggggucugcagccuggu

SEQ ID NO: 733897 - RNA, 22 nt, Human
ucuaauugaaucuaagcauguu

SEQ ID NO: 733898 - RNA, 22 nt, Human
gagugacucuagaaaguuucuu

SEQ ID NO: 733899 - RNA, 22 nt, Human
gcuuuaaaccucuacucugucc

SEQ ID NO: 733900 - RNA, 22 nt, Human
cagagccaaaaccguaacagcc

SEQ ID NO: 733901 - RNA, 22 nt, Human
aucagcagugucuaccucggug

SEQ ID NO: 733902 - RNA, 22 nt, Human
uucugggcucacagagcagcag

SEQ ID NO: 733903 - RNA, 22 nt, Human
uucauauuaugauuugaaaugc

SEQ ID NO: 733904 - RNA, 22 nt, Human
cucugcaggggaggcaugcacu

SEQ ID NO: 733905 - RNA, 22 nt, Human
agagcacagcagaucucugaug

SEQ ID NO: 733906 - RNA, 18 nt, Human
auacaagcucuguuacuu

SEQ ID NO: 733907 - RNA, 22 nt, Human
auguuuaugaccuccauaagga

SEQ ID NO: 733908 - RNA, 22 nt, Human
acauugaaccaguagacacaaa

SEQ ID NO: 733909 - RNA, 22 nt, Human
ucugauguugugacaucacuuc

SEQ ID NO: 733910 - RNA, 22 nt, Human
cugcaauaguuuagaauaauug

SEQ ID NO: 733911 - RNA, 22 nt, Human
ucggagaguuggaaguagcaga

SEQ ID NO: 733912 - RNA, 22 nt, Human
cccuuccucaaggagcuguguu

SEQ ID NO: 733913 - RNA, 22 nt, Human
aucuguguguuauuguuuauca

SEQ ID NO: 733914 - RNA, 22 nt, Human
auucugcauugcucacaaagau

SEQ ID NO: 733915 - RNA, 20 nt, Human
ggggcagguuuuuauggcua

SEQ ID NO: 733916 - RNA, 21 nt, Human
ucuuuucucugcaggauuccu

SEQ ID NO: 733917 - RNA, 22 nt, Human
uuauuugccagaauuucucuug

SEQ ID NO: 733918 - RNA, 22 nt, Human
augggaugaacuugaucugcuu

SEQ ID NO: 733919 - RNA, 22 nt, Human
agcuucucucuuugcacucaca

SEQ ID NO: 733920 - RNA, 22 nt, Human
agaggaagauuuuauuaaccag

SEQ ID NO: 733921 - RNA, 22 nt, Human
uggcugggccgggccuugugcc

SEQ ID NO: 733922 - RNA, 22 nt, Human
cacauuuacuuuuaucccuugg

SEQ ID NO: 733923 - RNA, 22 nt, Human
aucaucuuaagguaucucaagc

SEQ ID NO: 733924 - RNA, 22 nt, Human
uugucugagagauggcagaggu

SEQ ID NO: 733925 - RNA, 22 nt, Human
aagacagugaucucugagagau

SEQ ID NO: 733926 - RNA, 18 nt, Human
gccaggcaggguggggaa

SEQ ID NO: 733927 - RNA, 22 nt, Human
aucaaugacaguugaauucuac

SEQ ID NO: 733928 - RNA, 22 nt, Human
uccagaguuguaaguguugaca

SEQ ID NO: 733929 - RNA, 22 nt, Human
uaauccugcuucuucucccuuu

SEQ ID NO: 733930 - RNA, 22 nt, Human
aucaguguuccuugagacugcc

SEQ ID NO: 733931 - RNA, 22 nt, Human
guauuuucaagagcaguaguau

SEQ ID NO: 733932 - RNA, 22 nt, Human
uaagcacacaauaucuggagag

SEQ ID NO: 733933 - RNA, 22 nt, Human
uuucuucugagaucagggagaa

SEQ ID NO: 733934 - RNA, 22 nt, Human
uagugauuuucauauuacauua

SEQ ID NO: 733935 - RNA, 22 nt, Human
gcccauggcuucccuaggcaca

SEQ ID NO: 733936 - RNA, 22 nt, Human
caggugagaggcgguccugcau

SEQ ID NO: 733937 - RNA, 18 nt, Human
acaggccucaguccugca

SEQ ID NO: 733938 - RNA, 22 nt, Human
uggaagggguuacgcagcagga

SEQ ID NO: 733939 - RNA, 22 nt, Human
agccacagcauguguguaugua

SEQ ID NO: 733940 - RNA, 22 nt, Human
cagguggccaguacucaaggau

SEQ ID NO: 733941 - RNA, 21 nt, Human
gcuggcugucucuuacacggu

SEQ ID NO: 733942 - RNA, 22 nt, Human
gcuuaugauguuuacauaaaag

SEQ ID NO: 733943 - RNA, 22 nt, Human
gcugccuuuugcuccucccacc

SEQ ID NO: 733944 - RNA, 22 nt, Human
uauggguauaaacagguccuaa

SEQ ID NO: 733945 - RNA, 19 nt, Human
uccuucuccggccaccccg

SEQ ID NO: 733946 - RNA, 22 nt, Human
aguggaauguagaaaaaagaug

SEQ ID NO: 733947 - RNA, 19 nt, Human
aucaggaacaaggcugauc

SEQ ID NO: 733948 - RNA, 22 nt, Human
uccuuccucggggacccagauc

SEQ ID NO: 733949 - RNA, 22 nt, Human
guguguauguagaacuauguau

SEQ ID NO: 733950 - RNA, 22 nt, Human
acuguccaagcaugccuggcuu

SEQ ID NO: 733951 - RNA, 22 nt, Human
ucccagcauuaaugccugucag

SEQ ID NO: 733952 - RNA, 22 nt, Human
uuccagaaaguucuggaacugg

SEQ ID NO: 733953 - RNA, 22 nt, Human
aggcagcaaaugucuggaacag

SEQ ID NO: 733954 - RNA, 22 nt, Human
cgaggccaccgugguuuccgag

SEQ ID NO: 733955 - RNA, 22 nt, Human
acuagacaucgagcuacagagu

SEQ ID NO: 733956 - RNA, 22 nt, Human
auuaaggauuauacucuccuuu

SEQ ID NO: 733957 - RNA, 22 nt, Human
aagcagaugcguuggagcaguu

SEQ ID NO: 733958 - RNA, 22 nt, Human
agggccagaguacaucagggcu

SEQ ID NO: 733959 - RNA, 22 nt, Human
uuauuugguuauuguaauuggg

SEQ ID NO: 733960 - RNA, 20 nt, Human
ucuauuuguaaagggcugug

SEQ ID NO: 733961 - RNA, 22 nt, Human
gccacaggaaagcacccuggag

SEQ ID NO: 733962 - RNA, 19 nt, Human
agcuccugggcucugggcc

SEQ ID NO: 733963 - RNA, 22 nt, Human
agaccacuuggauaagaaacag

SEQ ID NO: 733964 - RNA, 22 nt, Human
ugagagguaggaaaugaacaag

SEQ ID NO: 733965 - RNA, 22 nt, Human
cagcugagaguagaaauggagg

SEQ ID NO: 733966 - RNA, 22 nt, Human
gccaggcuccaggcccuccuga

SEQ ID NO: 733967 - RNA, 22 nt, Human
cacuucuguugccuugugcaau

SEQ ID NO: 733968 - RNA, 22 nt, Human
uguccuugugacauucuggcuu

SEQ ID NO: 733969 - RNA, 22 nt, Human
ggccucucuggcauggcugccc

SEQ ID NO: 733970 - RNA, 22 nt, Human
augaagucuauuuaccuaagcu

SEQ ID NO: 733971 - RNA, 22 nt, Human
ucugacuuauuuguccuuggug

SEQ ID NO: 733972 - RNA, 22 nt, Human
agggcucaauggugggcaugua

SEQ ID NO: 733973 - RNA, 22 nt, Human
auggcccuggaaagagcuugag

SEQ ID NO: 733974 - RNA, 22 nt, Human
auuuacagguagaauuuuaagu

SEQ ID NO: 733975 - RNA, 22 nt, Human
gcaguauauggauuuuaaacau

SEQ ID NO: 733976 - RNA, 22 nt, Human
gcaguguuuguguucucacaug

SEQ ID NO: 733977 - RNA, 22 nt, Human
cugugugcuguuagggagcugc

SEQ ID NO: 733978 - RNA, 22 nt, Human
aagaauuaucugaaagcugugu

SEQ ID NO: 733979 - RNA, 22 nt, Human
cagcucugugcaggccugggga

SEQ ID NO: 733980 - RNA, 22 nt, Human
cauauacuuuucuauagcuuuc

SEQ ID NO: 733981 - RNA, 22 nt, Human
auguguaaugugguauuuuaau

SEQ ID NO: 733982 - RNA, 22 nt, Human
gcucaggucuuacccaugccug

SEQ ID NO: 733983 - RNA, 22 nt, Human
cagcagcugccucagcugggga

SEQ ID NO: 733984 - RNA, 22 nt, Human
uguuuauugagugccuacuaua

SEQ ID NO: 733985 - RNA, 21 nt, Human
gggugggguuccagccuuuuc

SEQ ID NO: 733986 - RNA, 22 nt, Human
uccagcucacagauagcguggg

SEQ ID NO: 733987 - RNA, 22 nt, Human
ucaggcaugcauucugcagguu

SEQ ID NO: 733988 - RNA, 22 nt, Human
gagagagaaaaugacuccggac

SEQ ID NO: 733989 - RNA, 22 nt, Human
acaucuguccucugcagagcuc

SEQ ID NO: 733990 - RNA, 22 nt, Human
uccuggcuccacugagcaggcc

SEQ ID NO: 733991 - RNA, 22 nt, Human
uagcaggaaaccuguguugagg

SEQ ID NO: 733992 - RNA, 22 nt, Human
gucugaggcgaggccugagaac

SEQ ID NO: 733993 - RNA, 22 nt, Human
caccccuguggagcaugguggc

SEQ ID NO: 733994 - RNA, 22 nt, Human
aaaugguggcucuuuuaaauug

SEQ ID NO: 733995 - RNA, 19 nt, Human
agucucugaggccuaaguu

SEQ ID NO: 733996 - RNA, 22 nt, Human
gccacugcacuccagcccaggc

SEQ ID NO: 733997 - RNA, 18 nt, Human
gcagugcaggaagaagag

SEQ ID NO: 733998 - RNA, 22 nt, Human
caagaaggcuauaugggccagg

SEQ ID NO: 733999 - RNA, 22 nt, Human
acacuugagguuuuuaggugcg

SEQ ID NO: 734000 - RNA, 22 nt, Human
guuugaaaguggcaaguccuug

SEQ ID NO: 734001 - RNA, 22 nt, Human
aguccaggccuccucuuuuccu

SEQ ID NO: 734002 - RNA, 22 nt, Human
caaagaagagauuuacagagcu

SEQ ID NO: 734003 - RNA, 22 nt, Human
aguuuucauuaccaugcugcaa

SEQ ID NO: 734004 - RNA, 22 nt, Human
uuuucagagagcuuuuaugucc

SEQ ID NO: 734005 - RNA, 22 nt, Human
cgcuuuaacgugagaagaaggg

SEQ ID NO: 734006 - RNA, 22 nt, Human
cagcuugcuaauuuugacuuca

SEQ ID NO: 734007 - RNA, 22 nt, Human
ugcaacucuggaucuucuggua

SEQ ID NO: 734008 - RNA, 21 nt, Human
gaggcccaugggacaggggcu

SEQ ID NO: 734009 - RNA, 22 nt, Human
gguggcugugagcauuauguga

SEQ ID NO: 734010 - RNA, 22 nt, Human
cugugaauugaauaugacuaug

SEQ ID NO: 734011 - RNA, 18 nt, Human
gccuuuggacugcuccca

SEQ ID NO: 734012 - RNA, 22 nt, Human
agagggcuaacugggaagcagg

SEQ ID NO: 734013 - RNA, 22 nt, Human
aucuccaguccugguuuccugg

SEQ ID NO: 734014 - RNA, 22 nt, Human
aaagauuagauaagauagauuu

SEQ ID NO: 734015 - RNA, 22 nt, Human
guccucuccaggaggcucugau

SEQ ID NO: 734016 - RNA, 22 nt, Human
gugcagcaaaguuugagauaua

SEQ ID NO: 734017 - RNA, 22 nt, Human
ccaggcuuuuagcugcauggca

SEQ ID NO: 734018 - RNA, 22 nt, Human
cagcugugauaugccugccuga

SEQ ID NO: 734019 - RNA, 22 nt, Human
auacuguaauaccuaaaugaac

SEQ ID NO: 734020 - RNA, 23 nt, Human
aaagcaaggaauuggcaacagag

SEQ ID NO: 734021 - RNA, 22 nt, Human
cugggccauggaagucucugcc

SEQ ID NO: 734022 - RNA, 22 nt, Human
uccugggaugacuuuugaaaug

SEQ ID NO: 734023 - RNA, 22 nt, Human
aucaguaggccaagcagcuggc

SEQ ID NO: 734024 - RNA, 23 nt, Human
agcucugcucgggcaugcccugc

SEQ ID NO: 734025 - RNA, 23 nt, Human
augaaugaauaaggcaggaaagc

SEQ ID NO: 734026 - RNA, 22 nt, Human
ggcugagccacugcgccuggcu

SEQ ID NO: 734027 - RNA, 22 nt, Human
guuuaugaaauuucaggcauuu

SEQ ID NO: 734028 - RNA, 22 nt, Human
aaggcugagagucacaguccua

SEQ ID NO: 734029 - RNA, 22 nt, Human
cagcaggggugucauuguaguu

SEQ ID NO: 734030 - RNA, 22 nt, Human
uugauucaucuucuaauaccca

SEQ ID NO: 734031 - RNA, 22 nt, Human
auaaggcagaaaugauucuagu

SEQ ID NO: 734032 - RNA, 22 nt, Human
uggcuggauaauauucuguugu

SEQ ID NO: 734033 - RNA, 22 nt, Human
uaucaagagucucuacauuaau

SEQ ID NO: 734034 - RNA, 22 nt, Human
uuaagagcaacauauggugaca

SEQ ID NO: 734035 - RNA, 22 nt, Human
ugucuccauuuucaaguagcag

SEQ ID NO: 734036 - RNA, 22 nt, Human
cuagcaucagaugagaagcugu

SEQ ID NO: 734037 - RNA, 19 nt, Human
cuuugucagaacaugcuuc

SEQ ID NO: 734038 - RNA, 22 nt, Human
uuugacuuugggcucuaacuca

SEQ ID NO: 734039 - RNA, 22 nt, Human
guccucuguguaggcugcagac

SEQ ID NO: 734040 - RNA, 22 nt, Human
ugagcccagucugucugacaug

SEQ ID NO: 734041 - RNA, 22 nt, Human
uuucaaacugggagugagggga

SEQ ID NO: 734042 - RNA, 22 nt, Human
caggacccaaccucccugcucu

SEQ ID NO: 734043 - RNA, 22 nt, Human
cuuagcuagugcucagcuguca

SEQ ID NO: 734044 - RNA, 22 nt, Human
ccagucacagguguguuuauau

SEQ ID NO: 734045 - RNA, 22 nt, Human
auguggcuggugacugccguac

SEQ ID NO: 734046 - RNA, 22 nt, Human
ccaguguuccauggagugauua

SEQ ID NO: 734047 - RNA, 22 nt, Human
acccuggcagccuucuguccug

SEQ ID NO: 734048 - RNA, 20 nt, Human
gcuuucaagcuugucauugu

SEQ ID NO: 734049 - RNA, 22 nt, Human
guggagagcaaauaauuggaau

SEQ ID NO: 734050 - RNA, 22 nt, Human
cucagcaucaugguaucugggg

SEQ ID NO: 734051 - RNA, 22 nt, Human
gagugucuauguuuagucuuuc

SEQ ID NO: 734052 - RNA, 22 nt, Human
ucauggagacuuugagccuguu

SEQ ID NO: 734053 - RNA, 22 nt, Human
gcccccagcucucaagcucaaa

SEQ ID NO: 734054 - RNA, 22 nt, Human
acauugauacugagauacaaag

SEQ ID NO: 734055 - RNA, 22 nt, Human
ugggggcacuucgaggucgccu

SEQ ID NO: 734056 - RNA, 22 nt, Human
aauucuuaaucccauaaaguga

SEQ ID NO: 734057 - RNA, 22 nt, Human
aggugauguccacagcuugcag

SEQ ID NO: 734058 - RNA, 20 nt, Human
ugagacaaggcuggagagac

SEQ ID NO: 734059 - RNA, 19 nt, Human
gcuuuuauugcucaggugc

SEQ ID NO: 734060 - RNA, 22 nt, Human
ucccaggguauccuguaguaaa

SEQ ID NO: 734061 - RNA, 20 nt, Human
cccucccagaugcuucccaa

SEQ ID NO: 734062 - RNA, 22 nt, Human
guacaguagagccagguucagu

SEQ ID NO: 734063 - RNA, 22 nt, Human
uucuaacuaauuggaaauggaa

SEQ ID NO: 734064 - RNA, 22 nt, Human
ugagcccucggcuggggcagag

SEQ ID NO: 734065 - RNA, 20 nt, Human
gacaugucuuucucacacaa

SEQ ID NO: 734066 - RNA, 22 nt, Human
uuucaacucaugcuaaaggaag

SEQ ID NO: 734067 - RNA, 22 nt, Human
accuguuuucagaaaaugcaga

SEQ ID NO: 734068 - RNA, 22 nt, Human
cccaggacucuucacugcagcc

SEQ ID NO: 734069 - RNA, 22 nt, Human
uucugugucuucuuguucugug

SEQ ID NO: 734070 - RNA, 22 nt, Human
gacagucuggccuaaaggguua

SEQ ID NO: 734071 - RNA, 22 nt, Human
augcccugcucucgggaaggga

SEQ ID NO: 734072 - RNA, 22 nt, Human
cucuggaaaaccacuagcagga

SEQ ID NO: 734073 - RNA, 22 nt, Human
ugucccaguuuaucugggacug

SEQ ID NO: 734074 - RNA, 20 nt, Human
uacagccccugcuucuguug

SEQ ID NO: 734075 - RNA, 22 nt, Human
auucuacagaugaaagcggcug

SEQ ID NO: 734076 - RNA, 22 nt, Human
auguccuuaaucugaauguuag

SEQ ID NO: 734077 - RNA, 22 nt, Human
uccuucaacuuuuuacuugccc

SEQ ID NO: 734078 - RNA, 22 nt, Human
uucaugugaucacagauuguaa

SEQ ID NO: 734079 - RNA, 22 nt, Human
agugugagcuaauagcagagcc

SEQ ID NO: 734080 - RNA, 22 nt, Human
ugggcagcagaaccaggccgac

SEQ ID NO: 734081 - RNA, 22 nt, Human
ucagguccuuuugguguauauu

SEQ ID NO: 734082 - RNA, 22 nt, Human
ugagacagucaccaggcaggcc

SEQ ID NO: 734083 - RNA, 22 nt, Human
gagggcagugaauuuugaagcu

SEQ ID NO: 734084 - RNA, 22 nt, Human
ccuggacaaugagaugucaggg

SEQ ID NO: 734085 - RNA, 22 nt, Human
augggcugcuuggcuuccaccc

SEQ ID NO: 734086 - RNA, 22 nt, Human
cuggaagugggguuggcuugaa

SEQ ID NO: 734087 - RNA, 22 nt, Human
agcuugguggcccuccuggcug

SEQ ID NO: 734088 - RNA, 22 nt, Human
aguuuuauuaaauccacagaag

SEQ ID NO: 734089 - RNA, 22 nt, Human
ggguggcacugauaaugagacg

SEQ ID NO: 734090 - RNA, 19 nt, Human
caggaaacaccuacugcua

SEQ ID NO: 734091 - RNA, 22 nt, Human
auguuugacugaguuuggcaga

SEQ ID NO: 734092 - RNA, 22 nt, Human
gacaucauguucugcuaauagu

SEQ ID NO: 734093 - RNA, 22 nt, Human
aauaacuuaagaaauuucccca

SEQ ID NO: 734094 - RNA, 22 nt, Human
uaaguucucaauacauuguagc

SEQ ID NO: 734095 - RNA, 22 nt, Human
ugggcugaacuucaucugauga

SEQ ID NO: 734096 - RNA, 22 nt, Human
gaggccagaagugccucgggcu

SEQ ID NO: 734097 - RNA, 22 nt, Human
gccugcagacguguuuuccuca

SEQ ID NO: 734098 - RNA, 22 nt, Human
agcauuaagccuggcucagagg

SEQ ID NO: 734099 - RNA, 22 nt, Human
gguggccauaggaccagccugg

SEQ ID NO: 734100 - RNA, 20 nt, Human
gaguuccccauuucuccugg

SEQ ID NO: 734101 - RNA, 22 nt, Human
uuccucuuucucugugcuaugu

SEQ ID NO: 734102 - RNA, 23 nt, Human
ucugagguccaccaguuugcaga

SEQ ID NO: 734103 - RNA, 22 nt, Human
auaaaagaucccuucugagcuc

SEQ ID NO: 734104 - RNA, 22 nt, Human
agcuuuauauguuguuucucca

SEQ ID NO: 734105 - RNA, 22 nt, Human
uauuccuggucccuaccacaga

SEQ ID NO: 734106 - RNA, 22 nt, Human
auugcauucauugacauaugag

SEQ ID NO: 734107 - RNA, 22 nt, Human
uucacaucuauaacuuagauaa

SEQ ID NO: 734108 - RNA, 22 nt, Human
agcccagcacugggggcccagc

SEQ ID NO: 734109 - RNA, 22 nt, Human
caaguucacguugcuuuuugag

SEQ ID NO: 734110 - RNA, 22 nt, Human
acauguauacaauguguaauga

SEQ ID NO: 734111 - RNA, 22 nt, Human
ugugcaaaguguacaaauuaau

SEQ ID NO: 734112 - RNA, 22 nt, Human
gcagggaccagggccagaucca

SEQ ID NO: 734113 - RNA, 21 nt, Human
acugcaucugaagucccagga

SEQ ID NO: 734114 - RNA, 19 nt, Human
gcucucccucucaguugag

SEQ ID NO: 734115 - RNA, 17 nt, Human
uacaaugugauucaauc

SEQ ID NO: 734116 - RNA, 22 nt, Human
cacaagagagugcgcguugcaa

SEQ ID NO: 734117 - RNA, 22 nt, Human
cugccccagccuggggccuucu

SEQ ID NO: 734118 - RNA, 22 nt, Human
gcagagccaggcuggggcaggu

SEQ ID NO: 734119 - RNA, 22 nt, Human
gccucugcaucuucgccgcacu

SEQ ID NO: 734120 - RNA, 22 nt, Human
cugcugccugacaauuuagguu

SEQ ID NO: 734121 - RNA, 22 nt, Human
augagacaugacuucaggccuu

SEQ ID NO: 734122 - RNA, 22 nt, Human
uugagggacagaggugcugucu

SEQ ID NO: 734123 - RNA, 22 nt, Human
ucaggugggaccugcuaggaca

SEQ ID NO: 734124 - RNA, 22 nt, Human
uucugaauucaugagauuuggg

SEQ ID NO: 734125 - RNA, 22 nt, Human
cagaggaacguuuggauugauu

SEQ ID NO: 734126 - RNA, 22 nt, Human
caugaagcccucaucagucuga

SEQ ID NO: 734127 - RNA, 22 nt, Human
gcguggugcugcccugcacaca

SEQ ID NO: 734128 - RNA, 22 nt, Human
cauuaugcaaagaacacuugag

SEQ ID NO: 734129 - RNA, 22 nt, Human
ucagccaggcccuaagagauug

SEQ ID NO: 734130 - RNA, 22 nt, Human
ugucagcaucauuuguugaagg

SEQ ID NO: 734131 - RNA, 22 nt, Human
caguccuucauuccuccuuuga

SEQ ID NO: 734132 - RNA, 22 nt, Human
ggucuggagcuaaucuuguugg

SEQ ID NO: 734133 - RNA, 22 nt, Human
uggcagggagccaccggucaug

SEQ ID NO: 734134 - RNA, 22 nt, Human
caggguggccagguagauaaua

SEQ ID NO: 734135 - RNA, 22 nt, Human
uauacauguuuuacauaaguga

SEQ ID NO: 734136 - RNA, 22 nt, Human
uuacacaaaguuagcucuugca

SEQ ID NO: 734137 - RNA, 22 nt, Human
ugucuggacauugacaaucaug

SEQ ID NO: 734138 - RNA, 22 nt, Human
aggcccugcauuguacugaggg

SEQ ID NO: 734139 - RNA, 22 nt, Human
agggagcuuccgaacuacagcu

SEQ ID NO: 734140 - RNA, 22 nt, Human
uaagagcagaacagcaacauau

SEQ ID NO: 734141 - RNA, 22 nt, Human
ugucaauaguuuugaguucucu

SEQ ID NO: 734142 - RNA, 19 nt, Human
aucaccugguguuuccuug

SEQ ID NO: 734143 - RNA, 22 nt, Human
gaguggggaaagccaggacaga

SEQ ID NO: 734144 - RNA, 22 nt, Human
aguggaaggucaggggacagug

SEQ ID NO: 734145 - RNA, 22 nt, Human
aaaauagauucuaggaugucuu

SEQ ID NO: 734146 - RNA, 22 nt, Human
aucauuuuauggcugagaggac

SEQ ID NO: 734147 - RNA, 22 nt, Human
agcagagguguuuauuauggga

SEQ ID NO: 734148 - RNA, 21 nt, Human
aggucaaaggcauccaugagg

SEQ ID NO: 734149 - RNA, 22 nt, Human
ugcucagacaagcugaacagua

SEQ ID NO: 734150 - RNA, 22 nt, Human
uaaaaguuuuaguuguacauaa

SEQ ID NO: 734151 - RNA, 22 nt, Human
ggaggcucugccaucugucaca

SEQ ID NO: 734152 - RNA, 21 nt, Human
aucugcuuagguuuguucaga

SEQ ID NO: 734153 - RNA, 22 nt, Human
cagagaggauggauuccauagc

SEQ ID NO: 734154 - RNA, 22 nt, Human
gaguuagaagacagaauguaaa

SEQ ID NO: 734155 - RNA, 22 nt, Human
gcugggagugggcaagaugaga

SEQ ID NO: 734156 - RNA, 22 nt, Human
ucuaagcagaacugaagcucug

SEQ ID NO: 734157 - RNA, 22 nt, Human
uguucuuugccagugauuuaau

SEQ ID NO: 734158 - RNA, 22 nt, Human
uugauacauuuuuaggauaaac

SEQ ID NO: 734159 - RNA, 22 nt, Human
agccugccaggcgcugccugga

SEQ ID NO: 734160 - RNA, 22 nt, Human
uauacuuaugcuaaaaaauguu

SEQ ID NO: 734161 - RNA, 22 nt, Human
auccccagacuuuagauuucuc

SEQ ID NO: 734162 - RNA, 22 nt, Human
uucagagcuggugucuacagcu

SEQ ID NO: 734163 - RNA, 22 nt, Human
gugcuguacuucuguguugaag

SEQ ID NO: 734164 - RNA, 22 nt, Human
cuguacaucucugaggacagua

SEQ ID NO: 734165 - RNA, 22 nt, Human
gcacugugacccagagcaggug

SEQ ID NO: 734166 - RNA, 22 nt, Human
ugcugaggcauuuggacagagu

SEQ ID NO: 734167 - RNA, 22 nt, Human
ggggauggaauguaguagugau

SEQ ID NO: 734168 - RNA, 20 nt, Human
aguaggggaaugcaagagca

SEQ ID NO: 734169 - RNA, 22 nt, Human
aaguuacuuuaccucuuuagcu

SEQ ID NO: 734170 - RNA, 22 nt, Human
ucaggcagugguaaaugaguua

SEQ ID NO: 734171 - RNA, 22 nt, Human
gacacauugaugugaguacaua

SEQ ID NO: 734172 - RNA, 22 nt, Human
aagacaauuuugaguaugcaca

SEQ ID NO: 734173 - RNA, 22 nt, Human
gagagugaggcaucaggggcag

SEQ ID NO: 734174 - RNA, 22 nt, Human
uuuacauugcauuagguauuau

SEQ ID NO: 734175 - RNA, 22 nt, Human
gccaagaagguggggacaugca

SEQ ID NO: 734176 - RNA, 22 nt, Human
cagggcuggcuguggcaaucuc

SEQ ID NO: 734177 - RNA, 22 nt, Human
gccaauuuccugagguaaagcu

SEQ ID NO: 734178 - RNA, 22 nt, Human
aaggcgacacaggcagcaggcc

SEQ ID NO: 734179 - RNA, 21 nt, Human
uccucugcagugagguggccu

SEQ ID NO: 734180 - RNA, 22 nt, Human
agagcuggcugugggugacuuu

SEQ ID NO: 734181 - RNA, 22 nt, Human
aucccucagccaccuuugagga

SEQ ID NO: 734182 - RNA, 22 nt, Human
ugcugagggagcaucaaagaaa

SEQ ID NO: 734183 - RNA, 22 nt, Human
ucgcuuuaauggucuucacagc

SEQ ID NO: 734184 - RNA, 22 nt, Human
aagagauugguuauaagagauu

SEQ ID NO: 734185 - RNA, 22 nt, Human
augaaugcauacauuugucaag

SEQ ID NO: 734186 - RNA, 21 nt, Human
auucacagguauccucucccu

SEQ ID NO: 734187 - RNA, 22 nt, Human
uuaaaugcucacauaaagguag

SEQ ID NO: 734188 - RNA, 22 nt, Human
ucuauaaaacucaagagcaauu

SEQ ID NO: 734189 - RNA, 22 nt, Human
ugucugaaacuugguccuaugc

SEQ ID NO: 734190 - RNA, 22 nt, Human
uggugcaguucccagggccggg

SEQ ID NO: 734191 - RNA, 22 nt, Human
ugugugucauuuaggguggagc

SEQ ID NO: 734192 - RNA, 22 nt, Human
uccaggaguccugggagugauu

SEQ ID NO: 734193 - RNA, 22 nt, Human
cucuggagucaggcagcccugg

SEQ ID NO: 734194 - RNA, 20 nt, Human
aaaguguaaggcaaaguugu

SEQ ID NO: 734195 - RNA, 22 nt, Human
ucaauucaauugaacaguuacu

SEQ ID NO: 734196 - RNA, 18 nt, Human
uggagcaggaagccuggc

SEQ ID NO: 734197 - RNA, 22 nt, Human
auucauuagccacuaacuagca

SEQ ID NO: 734198 - RNA, 22 nt, Human
acucauuuaaacauuuacugaa

SEQ ID NO: 734199 - RNA, 22 nt, Human
ccagggaaucucugaguguguu

SEQ ID NO: 734200 - RNA, 22 nt, Human
aggaccagugagucuggcaagu

SEQ ID NO: 734201 - RNA, 22 nt, Human
aauguaaacagcaagagaaggg

SEQ ID NO: 734202 - RNA, 22 nt, Human
gaagguuuucaggagccuaguc

SEQ ID NO: 734203 - RNA, 22 nt, Human
gugggcaguuggugauucucgu

SEQ ID NO: 734204 - RNA, 22 nt, Human
cacagaggaaugcaucagcaga

SEQ ID NO: 734205 - RNA, 22 nt, Human
auugagaagaaaaucuaauaua

SEQ ID NO: 734206 - RNA, 22 nt, Human
ggccuuccagggaagacagggc

SEQ ID NO: 734207 - RNA, 22 nt, Human
ucugggguugagucugggucag

SEQ ID NO: 734208 - RNA, 22 nt, Human
cuucuugugcacucucuaugua

SEQ ID NO: 734209 - RNA, 23 nt, Human
uagagcauugcugaggccucccu

SEQ ID NO: 734210 - RNA, 18 nt, Human
agugugugcccuuucagg

SEQ ID NO: 734211 - RNA, 22 nt, Human
aucuucaaggaaaaaauacagu

SEQ ID NO: 734212 - RNA, 22 nt, Human
aggcuccauaccaucuccggag

SEQ ID NO: 734213 - RNA, 22 nt, Human
caagaaguugacagccagguga

SEQ ID NO: 734214 - RNA, 22 nt, Human
gcuuccauuugcuaggggauuu

SEQ ID NO: 734215 - RNA, 22 nt, Human
uagcaauagaaacauauaaagu

SEQ ID NO: 734216 - RNA, 22 nt, Human
auguguuuguaccuuuaaauau

SEQ ID NO: 734217 - RNA, 22 nt, Human
uauauucauauuguugucucuc

SEQ ID NO: 734218 - RNA, 22 nt, Human
ucaguuucacagucugugcaga

SEQ ID NO: 734219 - RNA, 22 nt, Human
ggaagggcaaaagagaugaacu

SEQ ID NO: 734220 - RNA, 22 nt, Human
ugagguguguccccagggaggu

SEQ ID NO: 734221 - RNA, 21 nt, Human
ugcaggcuguuuaagaggcaa

SEQ ID NO: 734222 - RNA, 22 nt, Human
aaauguguuugauaggaauauu

SEQ ID NO: 734223 - RNA, 22 nt, Human
cuggcaggaaguuagaugguaa

SEQ ID NO: 734224 - RNA, 22 nt, Human
ccuggggccccgagccagaagc

SEQ ID NO: 734225 - RNA, 22 nt, Human
cuguggcuaggauuauuccuga

SEQ ID NO: 734226 - RNA, 22 nt, Human
aucacaaucuucaaaucgauuc

SEQ ID NO: 734227 - RNA, 22 nt, Human
cucuguguuccggguugcugcu

SEQ ID NO: 734228 - RNA, 22 nt, Human
agccaaucuccuguugaugcca

SEQ ID NO: 734229 - RNA, 22 nt, Human
gccuacaguuggcugagggccu

SEQ ID NO: 734230 - RNA, 22 nt, Human
ggaaaguggugguggaaagagg

SEQ ID NO: 734231 - RNA, 22 nt, Human
uggaugaggcuggguuaggcag

SEQ ID NO: 734232 - RNA, 22 nt, Human
uguacagaaggcacuaagguca

SEQ ID NO: 734233 - RNA, 22 nt, Human
cuggagucuucagcuugcugcc

SEQ ID NO: 734234 - RNA, 22 nt, Human
ccagagaguaaacauuuuccgg

SEQ ID NO: 734235 - RNA, 22 nt, Human
ggaaagaauagagacuuuauca

SEQ ID NO: 734236 - RNA, 22 nt, Human
auuucugauaaacguaagcugc

SEQ ID NO: 734237 - RNA, 22 nt, Human
accaggcuuaauccuuugcuau

SEQ ID NO: 734238 - RNA, 22 nt, Human
cgggagcacgggaggcggagcu

SEQ ID NO: 734239 - RNA, 22 nt, Human
ggcaggagcucuccaguuugcc

SEQ ID NO: 734240 - RNA, 17 nt, Human
agugacuuggaaagagc

SEQ ID NO: 734241 - RNA, 22 nt, Human
uguuuaauuucacaaaguugac

SEQ ID NO: 734242 - RNA, 22 nt, Human
cagggcauccgugcuccaugcu

SEQ ID NO: 734243 - RNA, 22 nt, Human
ugccuuuaacaagaucuccaga

SEQ ID NO: 734244 - RNA, 19 nt, Human
aaaaggaauauucuuuggg

SEQ ID NO: 734245 - RNA, 22 nt, Human
cauuacauuucaaaauguuucc

SEQ ID NO: 734246 - RNA, 22 nt, Human
agcuuuaugcuuccuacaagcu

SEQ ID NO: 734247 - RNA, 19 nt, Human
agguuuauggggaggguga

SEQ ID NO: 734248 - RNA, 16 nt, Human
uagggcugggaaggag

SEQ ID NO: 734249 - RNA, 22 nt, Human
uuuuccuguccaggcaauuauu

SEQ ID NO: 734250 - RNA, 22 nt, Human
auguauuugaaauuugagacau

SEQ ID NO: 734251 - RNA, 22 nt, Human
gucaagaugagaauucuuuuua

SEQ ID NO: 734252 - RNA, 22 nt, Human
ucccaggauuuuaggcucucag

SEQ ID NO: 734253 - RNA, 22 nt, Human
aaauccgucauuggccugguug

SEQ ID NO: 734254 - RNA, 22 nt, Human
uggcagaguuggagguggaaga

SEQ ID NO: 734255 - RNA, 22 nt, Human
agaguccugaguggaaaaaugg

SEQ ID NO: 734256 - RNA, 22 nt, Human
uugugaauggugccgcaauaaa

SEQ ID NO: 734257 - RNA, 22 nt, Human
uaaugcuuuuccuucaaauaag

SEQ ID NO: 734258 - RNA, 19 nt, Human
ucuguggcaccugggaggg

SEQ ID NO: 734259 - RNA, 22 nt, Human
ugggguggauagaaagugaugu

SEQ ID NO: 734260 - RNA, 21 nt, Human
cugaggcagcacagcuaguca

SEQ ID NO: 734261 - RNA, 22 nt, Human
agaggcaguauacaauccgagc

SEQ ID NO: 734262 - RNA, 22 nt, Human
ucuaauuccauuaaauugaugu

SEQ ID NO: 734263 - RNA, 22 nt, Human
uuuuuaagagauucuccagucu

SEQ ID NO: 734264 - RNA, 21 nt, Human
uucugcauuaagguggagaua

SEQ ID NO: 734265 - RNA, 22 nt, Human
aagcacagacucccucugagug

SEQ ID NO: 734266 - RNA, 22 nt, Human
gaagguggcgagcggauugcug

SEQ ID NO: 734267 - RNA, 22 nt, Human
uccucaggauguggaguagaau

SEQ ID NO: 734268 - RNA, 22 nt, Human
uggagguggcaucugacagcug

SEQ ID NO: 734269 - RNA, 22 nt, Human
acaucucuuauaaacucucuga

SEQ ID NO: 734270 - RNA, 23 nt, Human
uugcacaguguauacacauauuu

SEQ ID NO: 734271 - RNA, 22 nt, Human
aauuuuauuagaaggcaagggg

SEQ ID NO: 734272 - RNA, 22 nt, Human
uugaagauuauucuauuaaaag

SEQ ID NO: 734273 - RNA, 22 nt, Human
cuccccaagccuuggcuucucc

SEQ ID NO: 734274 - RNA, 22 nt, Human
aagcagcauaugacagcaucca

SEQ ID NO: 734275 - RNA, 22 nt, Human
uacagaagcuuuugaaaagaug

SEQ ID NO: 734276 - RNA, 22 nt, Human
gaugucuuugaggcucacugcu

SEQ ID NO: 734277 - RNA, 22 nt, Human
augaaaagggagugauauuugu

SEQ ID NO: 734278 - RNA, 20 nt, Human
uccagggcaacuagagugug

SEQ ID NO: 734279 - RNA, 22 nt, Human
aaagcuuagcauuuucaaaaug

SEQ ID NO: 734280 - RNA, 20 nt, Human
ugauuucucuucuauuccuu

SEQ ID NO: 734281 - RNA, 22 nt, Human
aaaugcagguaguauuuauuuu

SEQ ID NO: 734282 - RNA, 22 nt, Human
aaagcuauuuguuaugagagaa

SEQ ID NO: 734283 - RNA, 22 nt, Human
aacaaauguguuuuguaauuaa

SEQ ID NO: 734284 - RNA, 22 nt, Human
uucaaaguaccguacuuaaugg

SEQ ID NO: 734285 - RNA, 22 nt, Human
gccuuggagaucacugcucaug

SEQ ID NO: 734286 - RNA, 22 nt, Human
agccuguccagaggacagggcu

SEQ ID NO: 734287 - RNA, 22 nt, Human
caggucuggcaucagcugugug

SEQ ID NO: 734288 - RNA, 22 nt, Human
uaguuucuaaagcuuccuaggu

SEQ ID NO: 734289 - RNA, 22 nt, Human
cuggaucugucuuuuggauccc

SEQ ID NO: 734290 - RNA, 22 nt, Human
ccuccuggccugugcagagccc

SEQ ID NO: 734291 - RNA, 22 nt, Human
ggaagugguagagccaugagug

SEQ ID NO: 734292 - RNA, 22 nt, Human
aaauugauguucccaguugaaa

SEQ ID NO: 734293 - RNA, 22 nt, Human
cagugggugaugaguccugggg

SEQ ID NO: 734294 - RNA, 22 nt, Human
aauucugugcaggcagagcuau

SEQ ID NO: 734295 - RNA, 22 nt, Human
ugaaagcagugccaugauuaug

SEQ ID NO: 734296 - RNA, 22 nt, Human
caggaaagguagucacaaugua

SEQ ID NO: 734297 - RNA, 22 nt, Human
ugacauuugagcauacauguaa

SEQ ID NO: 734298 - RNA, 22 nt, Human
aggaaacugauguuuuuuacaa

SEQ ID NO: 734299 - RNA, 22 nt, Human
cuucuucaucuguaaaacuugg

SEQ ID NO: 734300 - RNA, 22 nt, Human
aauggcuugcaaauggguccau

SEQ ID NO: 734301 - RNA, 23 nt, Human
gggaaguggggauuugaagucau

SEQ ID NO: 734302 - RNA, 22 nt, Human
ucuggcucuguguccccaccca

SEQ ID NO: 734303 - RNA, 20 nt, Human
acaaauuggcagaaugacaa

SEQ ID NO: 734304 - RNA, 22 nt, Human
agcuuuaucuucaccugggaau

SEQ ID NO: 734305 - RNA, 17 nt, Human
agacacugagccaagua

SEQ ID NO: 734306 - RNA, 22 nt, Human
agaggcugaaugaugucaucau

SEQ ID NO: 734307 - RNA, 22 nt, Human
uucuacagguacugaaguacau

SEQ ID NO: 734308 - RNA, 22 nt, Human
auuucccaacacauuagaaaau

SEQ ID NO: 734309 - RNA, 22 nt, Human
aagcaguuacuauuuacuauua

SEQ ID NO: 734310 - RNA, 19 nt, Human
aauguuuaagagaaaaagg

SEQ ID NO: 734311 - RNA, 22 nt, Human
uuucuaucugagaagauaucua

SEQ ID NO: 734312 - RNA, 18 nt, Human
cauguguucuacaucagu

SEQ ID NO: 734313 - RNA, 22 nt, Human
uggcacuuccacuguggcugcu

SEQ ID NO: 734314 - RNA, 22 nt, Human
uuuagcaaguucucugagagaa

SEQ ID NO: 734315 - RNA, 22 nt, Human
uagaggugagacuucagugaca

SEQ ID NO: 734316 - RNA, 22 nt, Human
uacacauauguccauuaaucag

SEQ ID NO: 734317 - RNA, 22 nt, Human
ccucugugugaugcgcaaagua

SEQ ID NO: 734318 - RNA, 22 nt, Human
gccagaggaacgcugcgcgccc

SEQ ID NO: 734319 - RNA, 22 nt, Human
acaguaguacacaucuaugucc

SEQ ID NO: 734320 - RNA, 22 nt, Human
ucaauguuuguucaugaaaaua

SEQ ID NO: 734321 - RNA, 22 nt, Human
uggcacagacugggccaaggaa

SEQ ID NO: 734322 - RNA, 22 nt, Human
auggcagaaagaauagaggcua

SEQ ID NO: 734323 - RNA, 22 nt, Human
cucuuagcugcuguucuuugag

SEQ ID NO: 734324 - RNA, 19 nt, Human
gccagcagaaugaugaggc

SEQ ID NO: 734325 - RNA, 21 nt, Human
ucuggcccucacagucacacc

SEQ ID NO: 734326 - RNA, 22 nt, Human
uucccaguauuaccuucaggaa

SEQ ID NO: 734327 - RNA, 22 nt, Human
acuuucuuauccaugaucucac

SEQ ID NO: 734328 - RNA, 22 nt, Human
agagaaaagccaucccagccaa

SEQ ID NO: 734329 - RNA, 22 nt, Human
ucacagcuauucucauguauuu

SEQ ID NO: 734330 - RNA, 22 nt, Human
agacagacuugaaaauguucuu

SEQ ID NO: 734331 - RNA, 22 nt, Human
cauuuauucucagauccuuguc

SEQ ID NO: 734332 - RNA, 19 nt, Human
uuuggcacucugaaguguu

SEQ ID NO: 734333 - RNA, 22 nt, Human
ggguuaguugguaguuaauuga

SEQ ID NO: 734334 - RNA, 22 nt, Human
uuagaguguagcaggaagaggc

SEQ ID NO: 734335 - RNA, 22 nt, Human
aauuucucauggauucaguuau

SEQ ID NO: 734336 - RNA, 19 nt, Human
guuaucaaggggcuacuuu

SEQ ID NO: 734337 - RNA, 22 nt, Human
ccugcugaggucagccacccaa

SEQ ID NO: 734338 - RNA, 22 nt, Human
gucauuuuucacugcauauaga

SEQ ID NO: 734339 - RNA, 22 nt, Human
agcuggagaaaccugggagggu

SEQ ID NO: 734340 - RNA, 22 nt, Human
uccaagaagucaucuaaacugu

SEQ ID NO: 734341 - RNA, 22 nt, Human
aaagaacuaccuguaugauauu

SEQ ID NO: 734342 - RNA, 22 nt, Human
auagcuuucuuaaauauauaaa

SEQ ID NO: 734343 - RNA, 22 nt, Human
cagauccuuaggacaaccaucc

SEQ ID NO: 734344 - RNA, 22 nt, Human
uuuguaagagcauauguaaagg

SEQ ID NO: 734345 - RNA, 22 nt, Human
aggagcugagggagcgcccuug

SEQ ID NO: 734346 - RNA, 22 nt, Human
uauguagauuucucuguuuuuc

SEQ ID NO: 734347 - RNA, 22 nt, Human
cacaguccagacuccuggaguu

SEQ ID NO: 734348 - RNA, 22 nt, Human
uuuucacaaggguccaacuagu

SEQ ID NO: 734349 - RNA, 22 nt, Human
gcaguguuacuuggaguacuaa

SEQ ID NO: 734350 - RNA, 22 nt, Human
ugccucugggugaccaaggagc

SEQ ID NO: 734351 - RNA, 22 nt, Human
cccaggcagaauuaguguuuca

SEQ ID NO: 734352 - RNA, 22 nt, Human
gugcccaguaaaugaaagcuuu

SEQ ID NO: 734353 - RNA, 22 nt, Human
gaguuauagauggacuauuauu

SEQ ID NO: 734354 - RNA, 23 nt, Human
ggcucugugcugggccugcagga

SEQ ID NO: 734355 - RNA, 22 nt, Human
gcugagaauguuccuacuggua

SEQ ID NO: 734356 - RNA, 22 nt, Human
caugaguaugauuauacccagu

SEQ ID NO: 734357 - RNA, 22 nt, Human
aguuuacaacaguagcuaugga

SEQ ID NO: 734358 - RNA, 22 nt, Human
cuaggcacucacguggcuuuag

SEQ ID NO: 734359 - RNA, 19 nt, Human
gguccucagcagagcaugc

SEQ ID NO: 734360 - RNA, 22 nt, Human
gcagacacagggaaggcaagga

SEQ ID NO: 734361 - RNA, 20 nt, Human
aggaaggagaaucugagcaa

SEQ ID NO: 734362 - RNA, 19 nt, Human
uccuggggauguggucacc

SEQ ID NO: 734363 - RNA, 22 nt, Human
ucaggguaaaccuucacuguga

SEQ ID NO: 734364 - RNA, 22 nt, Human
auaaagacaugcuuacuugccc

SEQ ID NO: 734365 - RNA, 22 nt, Human
cucagaguucuccugggaggug

SEQ ID NO: 734366 - RNA, 22 nt, Human
uuuaugagccucaaaucugagu

SEQ ID NO: 734367 - RNA, 22 nt, Human
uacagaauaaagcgugaagcuu

SEQ ID NO: 734368 - RNA, 22 nt, Human
agcugcuccuuuccugcaggcg

SEQ ID NO: 734369 - RNA, 22 nt, Human
ugcccaggcuggaaugcagugg

SEQ ID NO: 734370 - RNA, 22 nt, Human
ucuggcuccugaguccaugcuc

SEQ ID NO: 734371 - RNA, 22 nt, Human
ucuuuggacuuuccaauuuguu

SEQ ID NO: 734372 - RNA, 17 nt, Human
ggugaguguccaggugg

SEQ ID NO: 734373 - RNA, 22 nt, Human
gugggcuuugcuggauccuucc

SEQ ID NO: 734374 - RNA, 22 nt, Human
ugugguagagggcagaugggca

SEQ ID NO: 734375 - RNA, 18 nt, Human
aggaaagacgaagagggc

SEQ ID NO: 734376 - RNA, 22 nt, Human
ucccuucaagauuuggggaaau

SEQ ID NO: 734377 - RNA, 22 nt, Human
acaguauuugcgauacugauga

SEQ ID NO: 734378 - RNA, 22 nt, Human
aucauucugauggucaaugcua

SEQ ID NO: 734379 - RNA, 22 nt, Human
agcucugagaaaguuagaaagu

SEQ ID NO: 734380 - RNA, 22 nt, Human
cagggccuggagcugggccugc

SEQ ID NO: 734381 - RNA, 22 nt, Human
gcugagcagguuugaugcuuuu

SEQ ID NO: 734382 - RNA, 22 nt, Human
uagcaggaauaaaaauguaccc

SEQ ID NO: 734383 - RNA, 20 nt, Human
uacaauacacaugcauauga

SEQ ID NO: 734384 - RNA, 22 nt, Human
ggucuccaaagcugcauugaug

SEQ ID NO: 734385 - RNA, 22 nt, Human
uccuccagaaacugaggcagaa

SEQ ID NO: 734386 - RNA, 22 nt, Human
gaagaagggagugacaaaugca

SEQ ID NO: 734387 - RNA, 22 nt, Human
agccucugguccucccucagcu

SEQ ID NO: 734388 - RNA, 22 nt, Human
gcugcagagggaggggcucgca

SEQ ID NO: 734389 - RNA, 22 nt, Human
uauguggccuuuuaugucugac

SEQ ID NO: 734390 - RNA, 22 nt, Human
cacaguuugguuuugcuguaau

SEQ ID NO: 734391 - RNA, 21 nt, Human
ggucagcucuauccacgccuu

SEQ ID NO: 734392 - RNA, 22 nt, Human
aaagcucuuuuccaaguauuga

SEQ ID NO: 734393 - RNA, 22 nt, Human
aauguucauugauuaaaugaau

SEQ ID NO: 734394 - RNA, 22 nt, Human
augagaaggacauaaauuauag

SEQ ID NO: 734395 - RNA, 21 nt, Human
uuucacaaaaguaugugacaa

SEQ ID NO: 734396 - RNA, 22 nt, Human
acaguguacuagguacauguuc

SEQ ID NO: 734397 - RNA, 22 nt, Human
ccagggcucgggugcuuaguca

SEQ ID NO: 734398 - RNA, 22 nt, Human
agugaggauaccaauguguaga

SEQ ID NO: 734399 - RNA, 22 nt, Human
ccugugcuucagcuggaggagg

SEQ ID NO: 734400 - RNA, 22 nt, Human
auggaaauguaacuucugauuc

SEQ ID NO: 734401 - RNA, 22 nt, Human
auguuucaucaguaagguuuug

SEQ ID NO: 734402 - RNA, 22 nt, Human
cuccucagaacagccuuggcug

SEQ ID NO: 734403 - RNA, 22 nt, Human
gauaauaagcacagcaggaugu

SEQ ID NO: 734404 - RNA, 22 nt, Human
ucugagguggggcuggagcauu

SEQ ID NO: 734405 - RNA, 22 nt, Human
cagucagagucacaguaauuug

SEQ ID NO: 734406 - RNA, 20 nt, Human
auucucugcucaaguggcac

SEQ ID NO: 734407 - RNA, 22 nt, Human
cuuccuggaugagcaggcugau

SEQ ID NO: 734408 - RNA, 23 nt, Human
uaguguauaucaacauuuguccc

SEQ ID NO: 734409 - RNA, 22 nt, Human
acuucucucauucagacauagc

SEQ ID NO: 734410 - RNA, 22 nt, Human
augcuacauuuugguuuauaaa

SEQ ID NO: 734411 - RNA, 22 nt, Human
uccugcagcucugagaagcauc

SEQ ID NO: 734412 - RNA, 22 nt, Human
ccuggcaccuucacagacuacu

SEQ ID NO: 734413 - RNA, 22 nt, Human
ggcuuauguuugucaagcaauc

SEQ ID NO: 734414 - RNA, 18 nt, Human
ccacagcagaguucuuac

SEQ ID NO: 734415 - RNA, 22 nt, Human
cuacaguaugaaaccuuuacuc

SEQ ID NO: 734416 - RNA, 22 nt, Human
agcagaaaugaugguaugggac

SEQ ID NO: 734417 - RNA, 22 nt, Human
cucuccaucugugugaccuccc

SEQ ID NO: 734418 - RNA, 22 nt, Human
ucacaggcuaaauuuaugcagg

SEQ ID NO: 734419 - RNA, 22 nt, Human
uguaugaauauguuggggaggu

SEQ ID NO: 734420 - RNA, 20 nt, Human
uuggaugugcauggccgugc

SEQ ID NO: 734421 - RNA, 22 nt, Human
ggagaggacauggcucccacag

SEQ ID NO: 734422 - RNA, 22 nt, Human
gugagacaagauuuguaggcag

SEQ ID NO: 734423 - RNA, 22 nt, Human
gucccucugugucccugcaguc

SEQ ID NO: 734424 - RNA, 21 nt, Human
ucugauguguuuaaugguggg

SEQ ID NO: 734425 - RNA, 22 nt, Human
gauuucagggugucuuccagcu

SEQ ID NO: 734426 - RNA, 22 nt, Human
ucccagaaguccagccaugggc

SEQ ID NO: 734427 - RNA, 19 nt, Human
uucacauuuugcucugagg

SEQ ID NO: 734428 - RNA, 22 nt, Human
agguagguuaaauuucuuuauc

SEQ ID NO: 734429 - RNA, 22 nt, Human
aggaaaaucaaugucuuuuuaa

SEQ ID NO: 734430 - RNA, 22 nt, Human
gggagugguugauggugaaaau

SEQ ID NO: 734431 - RNA, 22 nt, Human
ugcuggggguagcucugcguag

SEQ ID NO: 734432 - RNA, 22 nt, Human
aaaguguagagacuuuggaacc

SEQ ID NO: 734433 - RNA, 22 nt, Human
gccucaguuuauacaccuguaa

SEQ ID NO: 734434 - RNA, 22 nt, Human
ucccuccuggugagcaggggcu

SEQ ID NO: 734435 - RNA, 22 nt, Human
ggagaggugcaggucaguggca

SEQ ID NO: 734436 - RNA, 22 nt, Human
acaggccucaagacacccaggu

SEQ ID NO: 734437 - RNA, 21 nt, Human
guggcccugccgcagugucca

SEQ ID NO: 734438 - RNA, 22 nt, Human
gcaggaugggagcuucacuuug

SEQ ID NO: 734439 - RNA, 22 nt, Human
uagaaucugaauauucuuauuu

SEQ ID NO: 734440 - RNA, 22 nt, Human
cagcagccuacaaugcacagaa

SEQ ID NO: 734441 - RNA, 19 nt, Human
ggugggugaccuccccacc

SEQ ID NO: 734442 - RNA, 19 nt, Human
uucccagagccaugaguga

SEQ ID NO: 734443 - RNA, 22 nt, Human
ucagucucuggggcuucuguuu

SEQ ID NO: 734444 - RNA, 17 nt, Human
ucccaggaacagggaau

SEQ ID NO: 734445 - RNA, 22 nt, Human
uacagaaguugguuuuaguuua

SEQ ID NO: 734446 - RNA, 19 nt, Human
agaggccucagcagcuggc

SEQ ID NO: 734447 - RNA, 22 nt, Human
aacucuugaauucccuugaaga

SEQ ID NO: 734448 - RNA, 22 nt, Human
gcagugguggagcuuacauauc

SEQ ID NO: 734449 - RNA, 22 nt, Human
uccagagcugagggucaguaga

SEQ ID NO: 734450 - RNA, 22 nt, Human
gcugguuuccuuaucuauaaag

SEQ ID NO: 734451 - RNA, 22 nt, Human
ccugucuggccaccagggcgau

SEQ ID NO: 734452 - RNA, 22 nt, Human
gcucaggaaaacagucuaguaa

SEQ ID NO: 734453 - RNA, 22 nt, Human
uaaugucuucuuuuaauuuggc

SEQ ID NO: 734454 - RNA, 22 nt, Human
ucugagugagggugugagauau

SEQ ID NO: 734455 - RNA, 23 nt, Human
ugcaggugugcagagggcucuug

SEQ ID NO: 734456 - RNA, 22 nt, Human
aaugaaguguuauuuaguuuca

SEQ ID NO: 734457 - RNA, 22 nt, Human
ucagauuuggacacaggaacuu

SEQ ID NO: 734458 - RNA, 22 nt, Human
auguacaaucuaucacaagaag

SEQ ID NO: 734459 - RNA, 22 nt, Human
augggaagugaagucagggagg

SEQ ID NO: 734460 - RNA, 22 nt, Human
uuccagugacuaagcuucugcu

SEQ ID NO: 734461 - RNA, 22 nt, Human
gagggugguggcuuaaggugcu

SEQ ID NO: 734462 - RNA, 21 nt, Human
uaggccacauggguuggagau

SEQ ID NO: 734463 - RNA, 22 nt, Human
agaagcugcguuuauuuaaauc

SEQ ID NO: 734464 - RNA, 22 nt, Human
uguguguguuuacaguuucuca

SEQ ID NO: 734465 - RNA, 22 nt, Human
aaagcugcugccaaucaggcuu

SEQ ID NO: 734466 - RNA, 22 nt, Human
aaggccagauucucucuagggg

SEQ ID NO: 734467 - RNA, 22 nt, Human
aaagauaugucuccaaagagau

SEQ ID NO: 734468 - RNA, 22 nt, Human
cagcugaguggacccuagaggc

SEQ ID NO: 734469 - RNA, 22 nt, Human
ugucucuucccacucagacccc

SEQ ID NO: 734470 - RNA, 21 nt, Human
aggagccagccugucagucua

SEQ ID NO: 734471 - RNA, 22 nt, Human
cauguuaacuaagauuaacuau

SEQ ID NO: 734472 - RNA, 22 nt, Human
acacuagagagcaggcauuccc

SEQ ID NO: 734473 - RNA, 22 nt, Human
agcugaagggaggauauguaca

SEQ ID NO: 734474 - RNA, 22 nt, Human
uucuggaagcuggaaaaggcaa

SEQ ID NO: 734475 - RNA, 22 nt, Human
ucagagagaaauaguuuuugac

SEQ ID NO: 734476 - RNA, 22 nt, Human
uccuggggaggucgaggcugag

SEQ ID NO: 734477 - RNA, 22 nt, Human
augcuucucagcucaaggcaaa

SEQ ID NO: 734478 - RNA, 22 nt, Human
acaggucuggucugggugggac

SEQ ID NO: 734479 - RNA, 22 nt, Human
cacagcuucccaaaguggaccu

SEQ ID NO: 734480 - RNA, 22 nt, Human
cagcugaguguuggcauguuca

SEQ ID NO: 734481 - RNA, 22 nt, Human
acccucaagauggaagcaguuu

SEQ ID NO: 734482 - RNA, 22 nt, Human
gggggcuaccgucucuggagcu

SEQ ID NO: 734483 - RNA, 23 nt, Human
augacacuccugugcgcacccug

SEQ ID NO: 734484 - RNA, 22 nt, Human
auauucaaauuacauuuacuaa

SEQ ID NO: 734485 - RNA, 22 nt, Human
agaugcauguuuaugucuuucc

SEQ ID NO: 734486 - RNA, 19 nt, Human
aagcguuucccacuugcuu

SEQ ID NO: 734487 - RNA, 22 nt, Human
ccagccaggcuggcuguggagg

SEQ ID NO: 734488 - RNA, 18 nt, Human
ggcaggcucucuggguca

SEQ ID NO: 734489 - RNA, 22 nt, Human
gcugcagagugaugaagugggg

SEQ ID NO: 734490 - RNA, 21 nt, Human
ucucccaaggagguccugagg

SEQ ID NO: 734491 - RNA, 22 nt, Human
accagcugcugauugcuaaaug

SEQ ID NO: 734492 - RNA, 22 nt, Human
uuucaauguaugucuuucugag

SEQ ID NO: 734493 - RNA, 22 nt, Human
caggugacccucaguguggacu

SEQ ID NO: 734494 - RNA, 22 nt, Human
aucucugauuuacagcaucucu

SEQ ID NO: 734495 - RNA, 22 nt, Human
ccugugugguagccagcggugc

SEQ ID NO: 734496 - RNA, 22 nt, Human
accagcagggcugggccaaugg

SEQ ID NO: 734497 - RNA, 22 nt, Human
ucugcugagucagaccucuggg

SEQ ID NO: 734498 - RNA, 20 nt, Human
acacaugcauagagagagag

SEQ ID NO: 734499 - RNA, 22 nt, Human
guccucugucccuggggcacgg

SEQ ID NO: 734500 - RNA, 22 nt, Human
acagggaccugugagcuccaua

SEQ ID NO: 734501 - RNA, 23 nt, Human
gagcucugcacuaggcccuggga

SEQ ID NO: 734502 - RNA, 22 nt, Human
ucugaggcauaaccuguucugc

SEQ ID NO: 734503 - RNA, 21 nt, Human
gcuggcuuccugagggcugag

SEQ ID NO: 734504 - RNA, 22 nt, Human
aagccaugguagaaaacucagu

SEQ ID NO: 734505 - RNA, 22 nt, Human
ucacaguacugugacuauugac

SEQ ID NO: 734506 - RNA, 22 nt, Human
agcugcccuggcggagcugcuc

SEQ ID NO: 734507 - RNA, 22 nt, Human
auguuacaugaaacggccuacu

SEQ ID NO: 734508 - RNA, 22 nt, Human
gggacaggcugagacuugagcu

SEQ ID NO: 734509 - RNA, 22 nt, Human
ugucauuuuagugcaucacuca

SEQ ID NO: 734510 - RNA, 22 nt, Human
agugcauucaguauucauaggc

SEQ ID NO: 734511 - RNA, 22 nt, Human
aaacuccugggcucaagcaguu

SEQ ID NO: 734512 - RNA, 20 nt, Human
ucuuuaguuccuggcccuuu

SEQ ID NO: 734513 - RNA, 22 nt, Human
uucaaugucuauguacauuuua

SEQ ID NO: 734514 - RNA, 22 nt, Human
aggugcagcugguggagucugg

SEQ ID NO: 734515 - RNA, 22 nt, Human
ugggggcagccaggcugucaag

SEQ ID NO: 734516 - RNA, 22 nt, Human
agcuggccauugugaguggccu

SEQ ID NO: 734517 - RNA, 20 nt, Human
cagcaucuagugagauuugc

SEQ ID NO: 734518 - RNA, 22 nt, Human
acaggagaauuaucuggaacaa

SEQ ID NO: 734519 - RNA, 22 nt, Human
guauuuggugaugccuccaaac

SEQ ID NO: 734520 - RNA, 22 nt, Human
guuccuuguaauuuguuaagga

SEQ ID NO: 734521 - RNA, 22 nt, Human
gcuuagcagugugugcuuuuga

SEQ ID NO: 734522 - RNA, 22 nt, Human
cagcuugggggcgcuggccuca

SEQ ID NO: 734523 - RNA, 22 nt, Human
guggcgaggggagguccuggcg

SEQ ID NO: 734524 - RNA, 22 nt, Human
agcccagauaaaguacaaccau

SEQ ID NO: 734525 - RNA, 19 nt, Human
uuacaugacauaugaagga

SEQ ID NO: 734526 - RNA, 22 nt, Human
cucuccaggacuuuggcccaau

SEQ ID NO: 734527 - RNA, 21 nt, Human
uggccagcuggagucuccaca

SEQ ID NO: 734528 - RNA, 22 nt, Human
acaugcacaccuauauacaugu

SEQ ID NO: 734529 - RNA, 22 nt, Human
ggaagacaagcaguggcugagc

SEQ ID NO: 734530 - RNA, 22 nt, Human
aggcuguguuuccccuggagcu

SEQ ID NO: 734531 - RNA, 22 nt, Human
gauucuugggccuucugaaguu

SEQ ID NO: 734532 - RNA, 22 nt, Human
gcugcccuaauaucacauguua

SEQ ID NO: 734533 - RNA, 22 nt, Human
cauuugaugacucaacucauaa

SEQ ID NO: 734534 - RNA, 22 nt, Human
cugcacaggggaugagggcagu

SEQ ID NO: 734535 - RNA, 23 nt, Human
acagugaaacacgcaguaagagu

SEQ ID NO: 734536 - RNA, 22 nt, Human
uguggguuuaagaggcagcaug

SEQ ID NO: 734537 - RNA, 22 nt, Human
ugcuccaggccgccuggggcug

SEQ ID NO: 734538 - RNA, 21 nt, Human
ugcauuuaacagaaacaggaa

SEQ ID NO: 734539 - RNA, 20 nt, Human
gagcaucugucugcugugca

SEQ ID NO: 734540 - RNA, 22 nt, Human
caugugucaaaugauguagcug

SEQ ID NO: 734541 - RNA, 22 nt, Human
gugaggccgcacgccccggagu

SEQ ID NO: 734542 - RNA, 23 nt, Human
ccugccuguucuaacuccauuuc

SEQ ID NO: 734543 - RNA, 22 nt, Human
ucuccagguggggucaccuuuu

SEQ ID NO: 734544 - RNA, 23 nt, Human
uuccaagugcuuuacuuaauccu

SEQ ID NO: 734545 - RNA, 22 nt, Human
uaguagugagucuuuauaaaua

SEQ ID NO: 734546 - RNA, 22 nt, Human
cuggguguucacccgaggcgcu

SEQ ID NO: 734547 - RNA, 22 nt, Human
caauguguguguuuuucucaac

SEQ ID NO: 734548 - RNA, 22 nt, Human
gggaucugacuugcuggugggu

SEQ ID NO: 734549 - RNA, 21 nt, Human
uuuuauugaugaauggccacu

SEQ ID NO: 734550 - RNA, 22 nt, Human
aaaugaguagcgaugcacauua

SEQ ID NO: 734551 - RNA, 22 nt, Human
uacccaggagaaacagcagggc

SEQ ID NO: 734552 - RNA, 22 nt, Human
caaggcuuagucagagggugcu

SEQ ID NO: 734553 - RNA, 22 nt, Human
uacacugaaagagaggauugaa

SEQ ID NO: 734554 - RNA, 22 nt, Human
aauuuuaaucaguggugcugag

SEQ ID NO: 734555 - RNA, 22 nt, Human
uuguguguuuguagaaaaucca

SEQ ID NO: 734556 - RNA, 17 nt, Human
ucaggcugggugcagug

SEQ ID NO: 734557 - RNA, 23 nt, Human
agcagcuguggaguuuugcauuu

SEQ ID NO: 734558 - RNA, 22 nt, Human
caaucacaaagagacaaguguc

SEQ ID NO: 734559 - RNA, 18 nt, Human
cccggcuaauuuuuggua

SEQ ID NO: 734560 - RNA, 22 nt, Human
ucagaguuucaggauacaaaua

SEQ ID NO: 734561 - RNA, 22 nt, Human
agccugugagggaugcugcagu

SEQ ID NO: 734562 - RNA, 22 nt, Human
cugagccuuauucaccagcccu

SEQ ID NO: 734563 - RNA, 22 nt, Human
ugagugcucuguaugugccaga

SEQ ID NO: 734564 - RNA, 22 nt, Human
acagaauagucagcuguaggcc

SEQ ID NO: 734565 - RNA, 22 nt, Human
cacacaggaugaagcagcagaa

SEQ ID NO: 734566 - RNA, 22 nt, Human
ccuuccagaguucagucugccc

SEQ ID NO: 734567 - RNA, 22 nt, Human
cuugggaggagaacaaagcucc

SEQ ID NO: 734568 - RNA, 22 nt, Human
uggcaaccgcauggccugcuuc

SEQ ID NO: 734569 - RNA, 22 nt, Human
uuaccaagcucugcauguuaag

SEQ ID NO: 734570 - RNA, 22 nt, Human
ggagucugucaccuguuucucu

SEQ ID NO: 734571 - RNA, 22 nt, Human
aggcuaugauauuauugagaca

SEQ ID NO: 734572 - RNA, 22 nt, Human
cagggucccaggagcugcuuuc

SEQ ID NO: 734573 - RNA, 22 nt, Human
acccuggggucacccuucucug

SEQ ID NO: 734574 - RNA, 21 nt, Human
aguuuuuacucuuaacugugg

SEQ ID NO: 734575 - RNA, 22 nt, Human
aucagcaaucaaauugcagagu

SEQ ID NO: 734576 - RNA, 21 nt, Human
ugcacagccauacccuccuug

SEQ ID NO: 734577 - RNA, 22 nt, Human
cagauaaauagacuuggucaga

SEQ ID NO: 734578 - RNA, 22 nt, Human
ucugugcacuaacauuccuggu

SEQ ID NO: 734579 - RNA, 22 nt, Human
ugagcugucaagguacagugaa

SEQ ID NO: 734580 - RNA, 22 nt, Human
caggggcugugggcggagccuc

SEQ ID NO: 734581 - RNA, 22 nt, Human
cagaggugacccauaguaccuc

SEQ ID NO: 734582 - RNA, 22 nt, Human
ccuucagaaugaaauucuaaug

SEQ ID NO: 734583 - RNA, 22 nt, Human
uacugcaaaccauuuacaguag

SEQ ID NO: 734584 - RNA, 22 nt, Human
ucaguuuuuguuugccagauag

SEQ ID NO: 734585 - RNA, 22 nt, Human
gugcuuuucugcaggguccuau

SEQ ID NO: 734586 - RNA, 22 nt, Human
agaucacaguucucuauucgua

SEQ ID NO: 734587 - RNA, 22 nt, Human
guuaguguauauugccuucaaa

SEQ ID NO: 734588 - RNA, 22 nt, Human
cuguauaauucaugcucuuauu

SEQ ID NO: 734589 - RNA, 20 nt, Human
gcugagguggaggaaggaga

SEQ ID NO: 734590 - RNA, 20 nt, Human
gugccuggagaagaggcugu

SEQ ID NO: 734591 - RNA, 22 nt, Human
acucaugucauguguucuuuac

SEQ ID NO: 734592 - RNA, 22 nt, Human
uauuugcuuuugugccacagau

SEQ ID NO: 734593 - RNA, 22 nt, Human
gcuggagccauuggcuuggccu

SEQ ID NO: 734594 - RNA, 22 nt, Human
guccucugcuucaugcccugau

SEQ ID NO: 734595 - RNA, 19 nt, Human
acacauuugcacaauccac

SEQ ID NO: 734596 - RNA, 22 nt, Human
acuauaaaaggauaaaccagaa

SEQ ID NO: 734597 - RNA, 22 nt, Human
gcaggcucuucuuucugcccag

SEQ ID NO: 734598 - RNA, 22 nt, Human
cauugcuuccuaugucccuucu

SEQ ID NO: 734599 - RNA, 19 nt, Human
uguuaugacuuugccuuuu

SEQ ID NO: 734600 - RNA, 20 nt, Human
auccucacccucaguccuag

SEQ ID NO: 734601 - RNA, 22 nt, Human
cacuucaaauauggcuucauga

SEQ ID NO: 734602 - RNA, 23 nt, Human
ucugagagaacaaugccuccuau

SEQ ID NO: 734603 - RNA, 22 nt, Human
uuugacaggacuaacauauggc

SEQ ID NO: 734604 - RNA, 22 nt, Human
cacauaauacauguuccacuua

SEQ ID NO: 734605 - RNA, 22 nt, Human
caguagucuuuuuccuccuaga

SEQ ID NO: 734606 - RNA, 23 nt, Human
ccaagcuugucccugccugcuuu

SEQ ID NO: 734607 - RNA, 22 nt, Human
uacaguuacgcugagaaacgaa

SEQ ID NO: 734608 - RNA, 22 nt, Human
uuauuauaaugagggauaaaaa

SEQ ID NO: 734609 - RNA, 22 nt, Human
aaagccuugagauccuauaguu

SEQ ID NO: 734610 - RNA, 22 nt, Human
gggaggagcugagugugugugc

SEQ ID NO: 734611 - RNA, 22 nt, Human
aacugcauuguacuaaacuugu

SEQ ID NO: 734612 - RNA, 22 nt, Human
ucucccucucagauuuauucac

SEQ ID NO: 734613 - RNA, 22 nt, Human
uaucuguugucuuuuacaugua

SEQ ID NO: 734614 - RNA, 22 nt, Human
acuguuauaguucacuuuuccc

SEQ ID NO: 734615 - RNA, 22 nt, Human
aaagagaacuuuuacccaagaa

SEQ ID NO: 734616 - RNA, 23 nt, Human
agcuugcuuuucccaguacugca

SEQ ID NO: 734617 - RNA, 22 nt, Human
ccugagucuuucccauugcgcu

SEQ ID NO: 734618 - RNA, 22 nt, Human
cuccccagguucaggagguggg

SEQ ID NO: 734619 - RNA, 21 nt, Human
gaaccugagugaagacuuggg

SEQ ID NO: 734620 - RNA, 19 nt, Human
aggacucuggaggcaugag

SEQ ID NO: 734621 - RNA, 22 nt, Human
uggcucuguucgccaucaggag

SEQ ID NO: 734622 - RNA, 22 nt, Human
ugguuuaugcuguugcagcucu

SEQ ID NO: 734623 - RNA, 22 nt, Human
ucugaggcagcuugccacucua

SEQ ID NO: 734624 - RNA, 22 nt, Human
cauccugagaaaauaaaggaga

SEQ ID NO: 734625 - RNA, 22 nt, Human
ugagggucauuuggaaguggaa

SEQ ID NO: 734626 - RNA, 20 nt, Human
acucauuuccagcaucugau

SEQ ID NO: 734627 - RNA, 22 nt, Human
cccaugcacccucuaagaagga

SEQ ID NO: 734628 - RNA, 22 nt, Human
uucaguuccuugugcgaauucc

SEQ ID NO: 734629 - RNA, 22 nt, Human
cuugggaguagaggcaggagca

SEQ ID NO: 734630 - RNA, 22 nt, Human
ucugggaacacacgucacuuca

SEQ ID NO: 734631 - RNA, 22 nt, Human
augcaguacagauaauucuaca

SEQ ID NO: 734632 - RNA, 20 nt, Human
ccucuguguccugugucaua

SEQ ID NO: 734633 - RNA, 22 nt, Human
uccaggccuugacaggucaguu

SEQ ID NO: 734634 - RNA, 22 nt, Human
aaguggcagccuuagaaggaga

SEQ ID NO: 734635 - RNA, 22 nt, Human
uggcccugcuuaugucucucuu

SEQ ID NO: 734636 - RNA, 22 nt, Human
aguauaucugcuucuggguccc

SEQ ID NO: 734637 - RNA, 22 nt, Human
gaguuaaaggaaaauaacuuua

SEQ ID NO: 734638 - RNA, 20 nt, Human
cgugcugugaccuugagcau

SEQ ID NO: 734639 - RNA, 22 nt, Human
ucaggcugcaguggcaaaagac

SEQ ID NO: 734640 - RNA, 22 nt, Human
gagggguggcguuggcauuuag

SEQ ID NO: 734641 - RNA, 20 nt, Human
ucacaucuggcagcugauga

SEQ ID NO: 734642 - RNA, 22 nt, Human
uccaggcuuuuucaugcugucu

SEQ ID NO: 734643 - RNA, 22 nt, Human
cagugcaggaagugagaugccu

SEQ ID NO: 734644 - RNA, 21 nt, Human
cuuuagugaaaaggggcuaac

SEQ ID NO: 734645 - RNA, 22 nt, Human
uccuggagagugggcgagcaca

SEQ ID NO: 734646 - RNA, 23 nt, Human
uagagcaguagaucaccauggga

SEQ ID NO: 734647 - RNA, 22 nt, Human
caggagugucgggucacuaggu

SEQ ID NO: 734648 - RNA, 22 nt, Human
ugaaugcuuggagucauaaaau

SEQ ID NO: 734649 - RNA, 22 nt, Human
uugaaguuguaguucagugaag

SEQ ID NO: 734650 - RNA, 22 nt, Human
ucuuuaagccaagauauauuua

SEQ ID NO: 734651 - RNA, 19 nt, Human
gauaaguuuccagguaacu

SEQ ID NO: 734652 - RNA, 22 nt, Human
uagggcugcuuuguauucugcu

SEQ ID NO: 734653 - RNA, 22 nt, Human
gcugugcugauucauucccugc

SEQ ID NO: 734654 - RNA, 22 nt, Human
uaugugcauuaucuaguucauu

SEQ ID NO: 734655 - RNA, 22 nt, Human
gaggucucacuauguugcccag

SEQ ID NO: 734656 - RNA, 22 nt, Human
acagaauuaggagauccucuug

SEQ ID NO: 734657 - RNA, 22 nt, Human
gaaauguacuuuaaagccaucc

SEQ ID NO: 734658 - RNA, 22 nt, Human
gacuggagcccccaaggacacc

SEQ ID NO: 734659 - RNA, 22 nt, Human
augucugcuuuccuuuuaauca

SEQ ID NO: 734660 - RNA, 22 nt, Human
agggugccugcugcagguucag

SEQ ID NO: 734661 - RNA, 22 nt, Human
gaaauuuacaacuuucucaugg

SEQ ID NO: 734662 - RNA, 20 nt, Human
gcucagggaauucaggaagc

SEQ ID NO: 734663 - RNA, 22 nt, Human
aagggcugagcacagugagcca

SEQ ID NO: 734664 - RNA, 22 nt, Human
gaaggaggcuccccaaagucug

SEQ ID NO: 734665 - RNA, 22 nt, Human
gaaguauuauagcauauuagcc

SEQ ID NO: 734666 - RNA, 22 nt, Human
ucaggggcagccggggaagcca

SEQ ID NO: 734667 - RNA, 22 nt, Human
uucacaugaaaguaggaaagga

SEQ ID NO: 734668 - RNA, 22 nt, Human
cccaggagaccugugaaaggac

SEQ ID NO: 734669 - RNA, 22 nt, Human
gggcuggaggccugccugguua

SEQ ID NO: 734670 - RNA, 22 nt, Human
cugcccugagucaugccagaug

SEQ ID NO: 734671 - RNA, 22 nt, Human
cugauggagugauggagaaauu

SEQ ID NO: 734672 - RNA, 22 nt, Human
uacaugaaauaggauucuggag

SEQ ID NO: 734673 - RNA, 22 nt, Human
ccugagguugaaguauaaauug

SEQ ID NO: 734674 - RNA, 22 nt, Human
ucuggccccggucuucacagcu

SEQ ID NO: 734675 - RNA, 22 nt, Human
cuuucagagguuacucaggaaa

SEQ ID NO: 734676 - RNA, 22 nt, Human
uauauucacuuguguccaacca

SEQ ID NO: 734677 - RNA, 18 nt, Human
uguaaacacuuucauucu

SEQ ID NO: 734678 - RNA, 22 nt, Human
uuuguacuaugguuuuucacua

SEQ ID NO: 734679 - RNA, 22 nt, Human
uggcugaguuacgaacagagca

SEQ ID NO: 734680 - RNA, 22 nt, Human
acuuaaaaagaaucuuuucacg

SEQ ID NO: 734681 - RNA, 22 nt, Human
ggcuuuauaggguagaggauca

SEQ ID NO: 734682 - RNA, 22 nt, Human
gagguuggugaggggacacggu

SEQ ID NO: 734683 - RNA, 22 nt, Human
gccugagagucugcauuucuaa

SEQ ID NO: 734684 - RNA, 22 nt, Human
uccugagauucugcauuucuaa

SEQ ID NO: 734685 - RNA, 22 nt, Human
auggcugucacgccacugugag

SEQ ID NO: 734686 - RNA, 22 nt, Human
uggcugcagaucugugggacac

SEQ ID NO: 734687 - RNA, 22 nt, Human
uaguccagguuaaucccugccu

SEQ ID NO: 734688 - RNA, 22 nt, Human
ugguggcaauucaaagacagca

SEQ ID NO: 734689 - RNA, 22 nt, Human
aagaugcuuccacugcaguggc

SEQ ID NO: 734690 - RNA, 22 nt, Human
ugagauugugugcuucagaaau

SEQ ID NO: 734691 - RNA, 22 nt, Human
acauuucugcauguaggguaau

SEQ ID NO: 734692 - RNA, 22 nt, Human
auauuauuuucccuggaguugu

SEQ ID NO: 734693 - RNA, 22 nt, Human
uuaaacaguguuucaugugggg

SEQ ID NO: 734694 - RNA, 22 nt, Human
acaagauaaggugucagugugu

SEQ ID NO: 734695 - RNA, 22 nt, Human
aaucacuuagaacccaggaagu

SEQ ID NO: 734696 - RNA, 22 nt, Human
ucaggaagaaauucuguaucuu

SEQ ID NO: 734697 - RNA, 22 nt, Human
gggcagcagcaggaggucucug

SEQ ID NO: 734698 - RNA, 22 nt, Human
aggauauaaaaagacuauuugg

SEQ ID NO: 734699 - RNA, 22 nt, Human
caaaucuauauguugauauucu

SEQ ID NO: 734700 - RNA, 22 nt, Human
ccagccuggacugggucuugug

SEQ ID NO: 734701 - RNA, 22 nt, Human
gcagaagcugggcagcgaggug

SEQ ID NO: 734702 - RNA, 22 nt, Human
aacagaauaucaaaagauuaug

SEQ ID NO: 734703 - RNA, 22 nt, Human
aaagauuauggcauugaaauac

SEQ ID NO: 734704 - RNA, 22 nt, Human
cagugcuggaggggugcuugca

SEQ ID NO: 734705 - RNA, 22 nt, Human
ccuggcucaggcacgcauggcu

SEQ ID NO: 734706 - RNA, 22 nt, Human
aaauucucaagugauccuguug

SEQ ID NO: 734707 - RNA, 22 nt, Human
cgagagauggguuggcaggggc

SEQ ID NO: 734708 - RNA, 19 nt, Human
gguagaagggaaguguuuu

SEQ ID NO: 734709 - RNA, 22 nt, Human
cagagcugagaauguugaugcu

SEQ ID NO: 734710 - RNA, 22 nt, Human
cuagcacuuagggauuguuaug

SEQ ID NO: 734711 - RNA, 22 nt, Human
auuguuaugaaaauaagauguu

SEQ ID NO: 734712 - RNA, 22 nt, Human
ucaggccucaagcugcuuuaag

SEQ ID NO: 734713 - RNA, 22 nt, Human
aagacauuuuagagauagggaa

SEQ ID NO: 734714 - RNA, 22 nt, Human
aguugaauaauuagacauaucu

SEQ ID NO: 734715 - RNA, 22 nt, Human
uuggcauuuuuccucagcugga

SEQ ID NO: 734716 - RNA, 22 nt, Human
guccuucaagaguccccuacug

SEQ ID NO: 734717 - RNA, 22 nt, Human
uguuaaacucguagguuaggcu

SEQ ID NO: 734718 - RNA, 22 nt, Human
agugucugaguaaauuucucau

SEQ ID NO: 734719 - RNA, 22 nt, Human
ccagucaguucugauuaugugg

SEQ ID NO: 734720 - RNA, 22 nt, Human
uagaaagcaguugugggggcuc

SEQ ID NO: 734721 - RNA, 22 nt, Human
ccagcuuuaucaagucugagcu

SEQ ID NO: 734722 - RNA, 22 nt, Human
acaugcacugcucaggguuccg

SEQ ID NO: 734723 - RNA, 22 nt, Human
gcuggcugaggucuagcucuuu

SEQ ID NO: 734724 - RNA, 22 nt, Human
gcucccagggcagcgcagaaga

SEQ ID NO: 734725 - RNA, 22 nt, Human
ugguaaugguucucuugcuaua

SEQ ID NO: 734726 - RNA, 22 nt, Human
aggagacucagagaccuggccg

SEQ ID NO: 734727 - RNA, 22 nt, Human
aucuggggucagacagcccugg

SEQ ID NO: 734728 - RNA, 21 nt, Human
uccugcagggcagcagagugg

SEQ ID NO: 734729 - RNA, 22 nt, Human
ucacuggggagcacugacaugu

SEQ ID NO: 734730 - RNA, 22 nt, Human
agccuggacagcuacggagaac

SEQ ID NO: 734731 - RNA, 22 nt, Human
agucuucuuuguguucucucau

SEQ ID NO: 734732 - RNA, 22 nt, Human
uuucuaaggcuaggucuuaagg

SEQ ID NO: 734733 - RNA, 22 nt, Human
gggcuucaauagcagaggcgug

SEQ ID NO: 734734 - RNA, 22 nt, Human
guggcugggcuccgagcggcuu

SEQ ID NO: 734735 - RNA, 22 nt, Human
uuggacucugggauucuggauu

SEQ ID NO: 734736 - RNA, 22 nt, Human
uuucacaggaugcuguuuuaua

SEQ ID NO: 734737 - RNA, 22 nt, Human
gcuggccauggccugcgccauc

SEQ ID NO: 734738 - RNA, 22 nt, Human
aaggcacugcuuugcugcgccc

SEQ ID NO: 734739 - RNA, 22 nt, Human
cuaagcuuuucaaaaacauguu

SEQ ID NO: 734740 - RNA, 22 nt, Human
cagcauuuagaauuugaagugu

SEQ ID NO: 734741 - RNA, 22 nt, Human
ccacugagcaguagcugcgucg

SEQ ID NO: 734742 - RNA, 22 nt, Human
ggucugaagcccacgugguacc

SEQ ID NO: 734743 - RNA, 22 nt, Human
aaacuuuaggaaggaauuuaca

SEQ ID NO: 734744 - RNA, 22 nt, Human
uaaaucacuguucauuccacac

SEQ ID NO: 734745 - RNA, 22 nt, Human
gcugggaguuacugucuccuuu

SEQ ID NO: 734746 - RNA, 22 nt, Human
acauucuagaagucuuugcaau

SEQ ID NO: 734747 - RNA, 22 nt, Human
auauuuugaaguuaauaaugug

SEQ ID NO: 734748 - RNA, 19 nt, Human
ucagaaggcaggagaggcc

SEQ ID NO: 734749 - RNA, 22 nt, Human
cgcagcuguccauguguggggg

SEQ ID NO: 734750 - RNA, 22 nt, Human
ccuucccuaaagcgucgcuuag

SEQ ID NO: 734751 - RNA, 22 nt, Human
gugccugggacacagcagauac

SEQ ID NO: 734752 - RNA, 22 nt, Human
gcagagguccuagccaggaguc

SEQ ID NO: 734753 - RNA, 22 nt, Human
ugcuccaggcugcugaagaucu

SEQ ID NO: 734754 - RNA, 22 nt, Human
uggcuucagagucugaguucuu

SEQ ID NO: 734755 - RNA, 22 nt, Human
aggucacaggguugaaguacuu

SEQ ID NO: 734756 - RNA, 22 nt, Human
uuuaucuguauaucucaagugu

SEQ ID NO: 734757 - RNA, 22 nt, Human
ucccuucacagaugcgauguuu

SEQ ID NO: 734758 - RNA, 22 nt, Human
aaggaagaagacucuuuacucc

SEQ ID NO: 734759 - RNA, 22 nt, Human
caaugcaugauggaauugccuu

SEQ ID NO: 734760 - RNA, 22 nt, Human
ucucucagaggccaggguccug

SEQ ID NO: 734761 - RNA, 22 nt, Human
gccccacuguggaaccuaaguc

SEQ ID NO: 734762 - RNA, 22 nt, Human
uggagcaggaagucuauggcug

SEQ ID NO: 734763 - RNA, 22 nt, Human
ucaccaguuaaaauaacaguaa

SEQ ID NO: 734764 - RNA, 22 nt, Human
agaacacuuuuaaauggcuugu

SEQ ID NO: 734765 - RNA, 22 nt, Human
gggcugcugccaaucacagccu

SEQ ID NO: 734766 - RNA, 22 nt, Human
agcaggugccagguguacccgc

SEQ ID NO: 734767 - RNA, 22 nt, Human
cuauuaaauacucuucaaauug

SEQ ID NO: 734768 - RNA, 22 nt, Human
auuugguuucaggauucucagg

SEQ ID NO: 734769 - RNA, 22 nt, Human
gguaacugcaccuuuggccuga

SEQ ID NO: 734770 - RNA, 22 nt, Human
uggagaugaauauguguaccug

SEQ ID NO: 734771 - RNA, 22 nt, Human
agcugccuccauggucaaagau

SEQ ID NO: 734772 - RNA, 22 nt, Human
aaguccagcucuaaauaucuga

SEQ ID NO: 734773 - RNA, 22 nt, Human
uucagaacaaccaugguuagau

SEQ ID NO: 734774 - RNA, 22 nt, Human
ucugaggucuaugacuuugcuu

SEQ ID NO: 734775 - RNA, 22 nt, Human
gccugagaaggauaggaagcga

SEQ ID NO: 734776 - RNA, 22 nt, Human
cuuuuuacaaagccugucuucu

SEQ ID NO: 734777 - RNA, 22 nt, Human
auacuagacuguucuguuauca

SEQ ID NO: 734778 - RNA, 22 nt, Human
gagcauuugguuauaguaauuu

SEQ ID NO: 734779 - RNA, 22 nt, Human
aacaaugaggaucuguucugag

SEQ ID NO: 734780 - RNA, 20 nt, Human
aggggcaccugcgacggggc

SEQ ID NO: 734781 - RNA, 22 nt, Human
ccagggcaacgcugucucagag

SEQ ID NO: 734782 - RNA, 22 nt, Human
cuccacggcccauugggcagga

SEQ ID NO: 734783 - RNA, 22 nt, Human
caacauauauaaggauuuacua

SEQ ID NO: 734784 - RNA, 22 nt, Human
uccaggaccucccaggcuagag

SEQ ID NO: 734785 - RNA, 22 nt, Human
aggcagcaaagaaaugaugcug

SEQ ID NO: 734786 - RNA, 22 nt, Human
agcacuuaacugacaguacuau

SEQ ID NO: 734787 - RNA, 19 nt, Human
acuguguggaagugugauu

SEQ ID NO: 734788 - RNA, 22 nt, Human
guucuucagcauuagaagucau

SEQ ID NO: 734789 - RNA, 22 nt, Human
aaacacagguacugcagaagug

SEQ ID NO: 734790 - RNA, 22 nt, Human
cagcagccuagaagcucuacca

SEQ ID NO: 734791 - RNA, 23 nt, Human
ggagaucagagacuagggcaguu

SEQ ID NO: 734792 - RNA, 22 nt, Human
acauguaacauauauguagcau

SEQ ID NO: 734793 - RNA, 22 nt, Human
ucugaggaaagagagugggaug

SEQ ID NO: 734794 - RNA, 22 nt, Human
agagcuggguggacuuguaguu

SEQ ID NO: 734795 - RNA, 22 nt, Human
ggguccaggcacuaugcuaagu

SEQ ID NO: 734796 - RNA, 22 nt, Human
ugacaggcuugcuaagacauag

SEQ ID NO: 734797 - RNA, 22 nt, Human
cugagaguguggcuuccaggcc

SEQ ID NO: 734798 - RNA, 22 nt, Human
caggaaauuuauguucuacuua

SEQ ID NO: 734799 - RNA, 20 nt, Human
agucccuuuggucagguauu

SEQ ID NO: 734800 - RNA, 21 nt, Human
uguuucaugcuauuuucuugu

SEQ ID NO: 734801 - RNA, 22 nt, Human
uccauggggcccaggaugagag

SEQ ID NO: 734802 - RNA, 18 nt, Human
agcaaauauuaagugcau

SEQ ID NO: 734803 - RNA, 19 nt, Human
agccuggagggcuggucac

SEQ ID NO: 734804 - RNA, 22 nt, Human
agcuggcuccagaaggagucgu

SEQ ID NO: 734805 - RNA, 22 nt, Human
cuuucucugugugguaaagggc

SEQ ID NO: 734806 - RNA, 22 nt, Human
uucauuaaguauaaaauguggu

SEQ ID NO: 734807 - RNA, 20 nt, Human
ggggcaguggcucaugccug

SEQ ID NO: 734808 - RNA, 22 nt, Human
uugauucuacuuaaaacauaug

SEQ ID NO: 734809 - RNA, 22 nt, Human
gauuuccucacuaacauccauc

SEQ ID NO: 734810 - RNA, 22 nt, Human
acucucugguguagaaagaccu

SEQ ID NO: 734811 - RNA, 22 nt, Human
gaugcuggccuggccaucuggg

SEQ ID NO: 734812 - RNA, 22 nt, Human
aguggggacuuaugccagcauu

SEQ ID NO: 734813 - RNA, 22 nt, Human
uuucaugauccauuuacaaaau

SEQ ID NO: 734814 - RNA, 22 nt, Human
ucaggagagaguuggguaggcu

SEQ ID NO: 734815 - RNA, 22 nt, Human
caagauuuauauuuucacacaa

SEQ ID NO: 734816 - RNA, 22 nt, Human
agaucggcuuugcagaccucau

SEQ ID NO: 734817 - RNA, 22 nt, Human
uguuacagaaugaauuuccgga

SEQ ID NO: 734818 - RNA, 22 nt, Human
aaggucuguucuaggugagggu

SEQ ID NO: 734819 - RNA, 22 nt, Human
aggaacauucucauuuccugcc

SEQ ID NO: 734820 - RNA, 22 nt, Human
agaaggccaauagggugcacug

SEQ ID NO: 734821 - RNA, 22 nt, Human
gagcugaggugauguggucguu

SEQ ID NO: 734822 - RNA, 22 nt, Human
uccccagguccugucggcuccu

SEQ ID NO: 734823 - RNA, 22 nt, Human
gucucagauucagacaucuaca

SEQ ID NO: 734824 - RNA, 22 nt, Human
cagaaacuucuggugucaaaua

SEQ ID NO: 734825 - RNA, 22 nt, Human
ucagagucugugcauucugcua

SEQ ID NO: 734826 - RNA, 22 nt, Human
aggaagguaaugaacugaggag

SEQ ID NO: 734827 - RNA, 22 nt, Human
agccacugugagaggaccaggg

SEQ ID NO: 734828 - RNA, 22 nt, Human
aggcaagauuaggaccagaaga

SEQ ID NO: 734829 - RNA, 22 nt, Human
gagccuucaucgcagccuuguu

SEQ ID NO: 734830 - RNA, 22 nt, Human
aucugcuugaguuugaagucag

SEQ ID NO: 734831 - RNA, 22 nt, Human
uugccugugaggauucugguug

SEQ ID NO: 734832 - RNA, 22 nt, Human
cuuguauacaguguacacauug

SEQ ID NO: 734833 - RNA, 22 nt, Human
caaaggcuucaucucagagcag

SEQ ID NO: 734834 - RNA, 22 nt, Human
cauaucauaggucuuggauaau

SEQ ID NO: 734835 - RNA, 22 nt, Human
cuggcugugugucuucauucag

SEQ ID NO: 734836 - RNA, 22 nt, Human
caagauaagaucauuuacacua

SEQ ID NO: 734837 - RNA, 20 nt, Human
cuucuucagccuaugcuuca

SEQ ID NO: 734838 - RNA, 22 nt, Human
acaaagauaagucagaaaguca

SEQ ID NO: 734839 - RNA, 22 nt, Human
gggaccagugucugugagaaaa

SEQ ID NO: 734840 - RNA, 22 nt, Human
uuauacacugcagaaccagcau

SEQ ID NO: 734841 - RNA, 22 nt, Human
aaagguuuuauucugagcucug

SEQ ID NO: 734842 - RNA, 22 nt, Human
agcagugugcuucguuucauga

SEQ ID NO: 734843 - RNA, 22 nt, Human
acaucaguaacuguaaaacagg

SEQ ID NO: 734844 - RNA, 23 nt, Human
aagaacugcgaauggagaaagua

SEQ ID NO: 734845 - RNA, 22 nt, Human
ucugcuugugucuguccagccu

SEQ ID NO: 734846 - RNA, 22 nt, Human
ugcaauaaagugcuauaaaucc

SEQ ID NO: 734847 - RNA, 22 nt, Human
accaguccgcggagcuccgggg

SEQ ID NO: 734848 - RNA, 22 nt, Human
ucagaacagcucucagauaucc

SEQ ID NO: 734849 - RNA, 22 nt, Human
uauuuuacuuuaaagcgagaga

SEQ ID NO: 734850 - RNA, 22 nt, Human
cugggcucaaauccuggcccug

SEQ ID NO: 734851 - RNA, 22 nt, Human
uugcuuuccgucaugugcuaau

SEQ ID NO: 734852 - RNA, 22 nt, Human
agcagcaguguucuggaauucu

SEQ ID NO: 734853 - RNA, 22 nt, Human
aucugucaagauagacucugca

SEQ ID NO: 734854 - RNA, 21 nt, Human
gacuuuaauuugagagcaaaa

SEQ ID NO: 734855 - RNA, 22 nt, Human
acuuauuuauucauucagcuca

SEQ ID NO: 734856 - RNA, 22 nt, Human
uaaaucagccuuugcuauuuua

SEQ ID NO: 734857 - RNA, 23 nt, Human
aguucaaaaucaaccaggacacu

SEQ ID NO: 734858 - RNA, 22 nt, Human
ucagugcacccaauucucucca

SEQ ID NO: 734859 - RNA, 20 nt, Human
uggaguuguucugcuagguc

SEQ ID NO: 734860 - RNA, 22 nt, Human
agcaaugugaccccugacagca

SEQ ID NO: 734861 - RNA, 22 nt, Human
ccucaggauccgcaggugcagu

SEQ ID NO: 734862 - RNA, 22 nt, Human
caugagaagguuuuggcauaua

SEQ ID NO: 734863 - RNA, 22 nt, Human
uugucacuagugaagaaucagg

SEQ ID NO: 734864 - RNA, 22 nt, Human
ugaagcuauauaaguuacagca

SEQ ID NO: 734865 - RNA, 22 nt, Human
uacaguauggaaaauguauagu

SEQ ID NO: 734866 - RNA, 22 nt, Human
cugaauccacacaaggugaugg

SEQ ID NO: 734867 - RNA, 22 nt, Human
caucaaagggccuguggugcag

SEQ ID NO: 734868 - RNA, 22 nt, Human
agcuucuucuuggucuuuccca

SEQ ID NO: 734869 - RNA, 19 nt, Human
caguggccuggaggucucu

SEQ ID NO: 734870 - RNA, 22 nt, Human
uggcacugacagggugcucaag

SEQ ID NO: 734871 - RNA, 19 nt, Human
ccuggccagacuucugccc

SEQ ID NO: 734872 - RNA, 20 nt, Human
ugagccagucaagcuacauu

SEQ ID NO: 734873 - RNA, 22 nt, Human
gcacaugacuuugaggaaacca

SEQ ID NO: 734874 - RNA, 22 nt, Human
gaggagcuggcugucgggaggc

SEQ ID NO: 734875 - RNA, 22 nt, Human
cacagagacagaagcacuuaug

SEQ ID NO: 734876 - RNA, 22 nt, Human
ucuuauuuagagaggacuagag

SEQ ID NO: 734877 - RNA, 22 nt, Human
ucacuggaaaugcacagcugua

SEQ ID NO: 734878 - RNA, 23 nt, Human
gggaccagcuagggcugugaccu

SEQ ID NO: 734879 - RNA, 22 nt, Human
cucaacagcucugccauacucc

SEQ ID NO: 734880 - RNA, 22 nt, Human
accuccccucaccaaucugguu

SEQ ID NO: 734881 - RNA, 22 nt, Human
agaaaguucacugguauauuuu

SEQ ID NO: 734882 - RNA, 22 nt, Human
agcacuuuccuggcaaaugugg

SEQ ID NO: 734883 - RNA, 22 nt, Human
ugcuugcuggaggcagacagaa

SEQ ID NO: 734884 - RNA, 21 nt, Human
cacagaggcgcuguauggcug

SEQ ID NO: 734885 - RNA, 22 nt, Human
gcagcccacaccacucugcuca

SEQ ID NO: 734886 - RNA, 22 nt, Human
aggcuagcugauugccuuagaa

SEQ ID NO: 734887 - RNA, 22 nt, Human
ucagagaauuguuuaauggaau

SEQ ID NO: 734888 - RNA, 23 nt, Human
ggggacaguucccacuggggucu

SEQ ID NO: 734889 - RNA, 21 nt, Human
uguuuauggaaaagagacaaa

SEQ ID NO: 734890 - RNA, 21 nt, Human
cagcccagagcaguggggcca

SEQ ID NO: 734891 - RNA, 23 nt, Human
cuucuggcucuauaucagaauuc

SEQ ID NO: 734892 - RNA, 22 nt, Human
uccugcaggccuguucccagua

SEQ ID NO: 734893 - RNA, 22 nt, Human
agccacccauucccgagcccua

SEQ ID NO: 734894 - RNA, 21 nt, Human
gcuuucagaagucucauaguu

SEQ ID NO: 734895 - RNA, 22 nt, Human
acauucuacaguuaaccauuag

SEQ ID NO: 734896 - RNA, 22 nt, Human
aucagagucagaggcuagagcu

SEQ ID NO: 734897 - RNA, 23 nt, Human
augauguuuuugguagucaaaug

SEQ ID NO: 734898 - RNA, 22 nt, Human
gcugaggaaaggcuggaaggga

SEQ ID NO: 734899 - RNA, 22 nt, Human
gcacagagcuuguuuacauuug

SEQ ID NO: 734900 - RNA, 22 nt, Human
agggcagagcugucuaaauggc

SEQ ID NO: 734901 - RNA, 22 nt, Human
ugucacaaacauacauuauaga

SEQ ID NO: 734902 - RNA, 22 nt, Human
gaauauauuauucagcuuuuca

SEQ ID NO: 734903 - RNA, 22 nt, Human
cagagacccuaggcaggugaca

SEQ ID NO: 734904 - RNA, 21 nt, Human
agcacagcauauccaauguca

SEQ ID NO: 734905 - RNA, 20 nt, Human
auuccucagccccagccuca

SEQ ID NO: 734906 - RNA, 22 nt, Human
cuccuggaguccuuuccuauuc

SEQ ID NO: 734907 - RNA, 22 nt, Human
aguuacuuucugaucagugugu

SEQ ID NO: 734908 - RNA, 22 nt, Human
aagugcugagacuacaggcaug

SEQ ID NO: 734909 - RNA, 22 nt, Human
gggacgugagugaagaaggucu

SEQ ID NO: 734910 - RNA, 22 nt, Human
guaaacaagucuaccauuagaa

SEQ ID NO: 734911 - RNA, 22 nt, Human
aggcuggagacccgccaagaaa

SEQ ID NO: 734912 - RNA, 22 nt, Human
cagggcuucuuggcauuugcug

SEQ ID NO: 734913 - RNA, 22 nt, Human
auugcacaaagagggaaacuga

SEQ ID NO: 734914 - RNA, 22 nt, Human
cuucuggguguggagugaggac

SEQ ID NO: 734915 - RNA, 20 nt, Human
gccuggaggcagagauaaag

SEQ ID NO: 734916 - RNA, 22 nt, Human
uuccaggaagacaucucaggaa

SEQ ID NO: 734917 - RNA, 22 nt, Human
ugucacaugaagccaacauagc

SEQ ID NO: 734918 - RNA, 22 nt, Human
aagucacuugauuguugacaga

SEQ ID NO: 734919 - RNA, 22 nt, Human
ccuggcacacgguggcauucaa

SEQ ID NO: 734920 - RNA, 19 nt, Human
acugggcuuguccucgugg

SEQ ID NO: 734921 - RNA, 22 nt, Human
uaacacugguauuucauuuagu

SEQ ID NO: 734922 - RNA, 22 nt, Human
ucuggcaggucaaucauucuuu

SEQ ID NO: 734923 - RNA, 22 nt, Human
aguggccacugacuuggaaauc

SEQ ID NO: 734924 - RNA, 22 nt, Human
ugcagggaaucuguggcuggac

SEQ ID NO: 734925 - RNA, 22 nt, Human
aaguuuggggagaauuucauuu

SEQ ID NO: 734926 - RNA, 22 nt, Human
uuccaacuuugaaaauguuaug

SEQ ID NO: 734927 - RNA, 22 nt, Human
aagcaauauacugauaugauua

SEQ ID NO: 734928 - RNA, 22 nt, Human
uccagcagguguuugccaacuu

SEQ ID NO: 734929 - RNA, 22 nt, Human
uugcagcaaggucaugaaaugu

SEQ ID NO: 734930 - RNA, 22 nt, Human
caucagagguacuuaaugaaug

SEQ ID NO: 734931 - RNA, 20 nt, Human
uggcaggagccacuggaagc

SEQ ID NO: 734932 - RNA, 22 nt, Human
ggcaagucaggaaguugacauu

SEQ ID NO: 734933 - RNA, 22 nt, Human
uuuauuucuuaguuugccacag

SEQ ID NO: 734934 - RNA, 22 nt, Human
cuaggcugugcauugcaugaca

SEQ ID NO: 734935 - RNA, 22 nt, Human
uaaaaccaggucuugggauuua

SEQ ID NO: 734936 - RNA, 22 nt, Human
acagugcagggugggaagaagg

SEQ ID NO: 734937 - RNA, 22 nt, Human
agcaugaagacuucagagcuag

SEQ ID NO: 734938 - RNA, 22 nt, Human
ugcacguauggcaguggagccc

SEQ ID NO: 734939 - RNA, 22 nt, Human
ugcaaaugcccauuuauuuucu

SEQ ID NO: 734940 - RNA, 22 nt, Human
ccaaucuuguuuucuacaucca

SEQ ID NO: 734941 - RNA, 22 nt, Human
ccugcagguccccggaugcgca

SEQ ID NO: 734942 - RNA, 22 nt, Human
gucuccagcccacucuagauau

SEQ ID NO: 734943 - RNA, 22 nt, Human
auugaaaaaugacuauugcuua

SEQ ID NO: 734944 - RNA, 22 nt, Human
ugagccaggcacugcuccugga

SEQ ID NO: 734945 - RNA, 22 nt, Human
ugcuucuggaguaacaggguga

SEQ ID NO: 734946 - RNA, 22 nt, Human
auguguauuacccuuucauucc

SEQ ID NO: 734947 - RNA, 22 nt, Human
ucaggagcugugaauacaaagg

SEQ ID NO: 734948 - RNA, 22 nt, Human
agaguuaucacuccaugcagcu

SEQ ID NO: 734949 - RNA, 21 nt, Human
agcagacacuugugaccuucc

SEQ ID NO: 734950 - RNA, 22 nt, Human
ucccagggacaccaagcuguuu

SEQ ID NO: 734951 - RNA, 22 nt, Human
agaauaauacugaaaugcugaa

SEQ ID NO: 734952 - RNA, 22 nt, Human
ccaggaggaucauccuguuuuc

SEQ ID NO: 734953 - RNA, 22 nt, Human
uuugaaaucuaaucaaggaaca

SEQ ID NO: 734954 - RNA, 19 nt, Human
ggacaucacucuaagccuu

SEQ ID NO: 734955 - RNA, 22 nt, Human
ugcacagaugggcuuguucaua

SEQ ID NO: 734956 - RNA, 21 nt, Human
ccagcucugccuccaguuggu

SEQ ID NO: 734957 - RNA, 22 nt, Human
gaauauuaguaucaguuauacc

SEQ ID NO: 734958 - RNA, 22 nt, Human
agcuguguccugaagacacugc

SEQ ID NO: 734959 - RNA, 22 nt, Human
agaaauuccuaagguacacaag

SEQ ID NO: 734960 - RNA, 22 nt, Human
ggguccagagccucagcccaga

SEQ ID NO: 734961 - RNA, 22 nt, Human
agucaagguggaccagaaaaau

SEQ ID NO: 734962 - RNA, 22 nt, Human
caggacagugcagguccauccu

SEQ ID NO: 734963 - RNA, 22 nt, Human
ggacagagcccugguggccuaa

SEQ ID NO: 734964 - RNA, 22 nt, Human
gcauggccuugcuguaguggua

SEQ ID NO: 734965 - RNA, 22 nt, Human
gagcacagaacuaaaugcuggu

SEQ ID NO: 734966 - RNA, 22 nt, Human
ggcccugagcacagcuccucuc

SEQ ID NO: 734967 - RNA, 22 nt, Human
ggaagccaggcccagagaugcu

SEQ ID NO: 734968 - RNA, 22 nt, Human
ugccaaguuucucucagggacu

SEQ ID NO: 734969 - RNA, 17 nt, Human
ucuccaggacgagcuca

SEQ ID NO: 734970 - RNA, 22 nt, Human
uguguauagaaaguaggaaagg

SEQ ID NO: 734971 - RNA, 22 nt, Human
uggcagcaauuugugauguuga

SEQ ID NO: 734972 - RNA, 18 nt, Human
ugaucuuucaugauucca

SEQ ID NO: 734973 - RNA, 22 nt, Human
uacaguuuguuacauuguuagu

SEQ ID NO: 734974 - RNA, 22 nt, Human
agccaagguaucaugagaggca

SEQ ID NO: 734975 - RNA, 22 nt, Human
aagaauuuuccagcaugucagu

SEQ ID NO: 734976 - RNA, 22 nt, Human
uccacgugagcuucgugugcag

SEQ ID NO: 734977 - RNA, 22 nt, Human
cucuuuggucgcaucauccauu

SEQ ID NO: 734978 - RNA, 22 nt, Human
uucuggagucauuggggcugau

SEQ ID NO: 734979 - RNA, 22 nt, Human
aaucagcaggcuucuaaauuuu

SEQ ID NO: 734980 - RNA, 22 nt, Human
agcccugggcagccaaggaagc

SEQ ID NO: 734981 - RNA, 22 nt, Human
gggacaggccccucgcuagcuu

SEQ ID NO: 734982 - RNA, 22 nt, Human
aaaagcaaggcagucugucuga

SEQ ID NO: 734983 - RNA, 22 nt, Human
agcaccuguugcacuucauaau

SEQ ID NO: 734984 - RNA, 22 nt, Human
cuccagggggcauccacacagc

SEQ ID NO: 734985 - RNA, 20 nt, Human
cagcacagagcuuggcucua

SEQ ID NO: 734986 - RNA, 22 nt, Human
aaaagggaaagcagaaugacuu

SEQ ID NO: 734987 - RNA, 22 nt, Human
acuccagggaggugagugugcg

SEQ ID NO: 734988 - RNA, 22 nt, Human
caagggugguauugggagcaua

SEQ ID NO: 734989 - RNA, 19 nt, Human
ggaggccuggguauuugcc

SEQ ID NO: 734990 - RNA, 22 nt, Human
ugggcagagaucuggaucaaac

SEQ ID NO: 734991 - RNA, 22 nt, Human
agggcaguguggugggacugac

SEQ ID NO: 734992 - RNA, 22 nt, Human
ucuucaaaaaauauccaucagu

SEQ ID NO: 734993 - RNA, 22 nt, Human
uugccagauaggcaugaaaagu

SEQ ID NO: 734994 - RNA, 22 nt, Human
aguaucuuuacuuaaauaguca

SEQ ID NO: 734995 - RNA, 22 nt, Human
gcccugugcgcugaguucaggg

SEQ ID NO: 734996 - RNA, 22 nt, Human
acaggugucuaaggcagacagc

SEQ ID NO: 734997 - RNA, 22 nt, Human
agcaccaucagaugcaauaucu

SEQ ID NO: 734998 - RNA, 22 nt, Human
aauuaacaaauguagcugugau

SEQ ID NO: 734999 - RNA, 22 nt, Human
ucagcugcucuguugagcugaa

SEQ ID NO: 735000 - RNA, 22 nt, Human
gaggcuccuugaaagggggacu

SEQ ID NO: 735001 - RNA, 22 nt, Human
uccaagaaucagucucuuuugg

SEQ ID NO: 735002 - RNA, 22 nt, Human
aagagcuggaagugaagauaac

SEQ ID NO: 735003 - RNA, 22 nt, Human
ccaggagugcagggaugguauc

SEQ ID NO: 735004 - RNA, 22 nt, Human
auggcugggauuuccuuugcgu

SEQ ID NO: 735005 - RNA, 19 nt, Human
cuugaaaugagacugaagg

SEQ ID NO: 735006 - RNA, 22 nt, Human
uugcuuuugugugcucucugga

SEQ ID NO: 735007 - RNA, 22 nt, Human
agucccagccuaggcugugcug

SEQ ID NO: 735008 - RNA, 22 nt, Human
aaagagcauggaaaguucagga

SEQ ID NO: 735009 - RNA, 22 nt, Human
ugucugcugcccuggagccugg

SEQ ID NO: 735010 - RNA, 22 nt, Human
ucaggagguaggacauacuggu

SEQ ID NO: 735011 - RNA, 22 nt, Human
ucuaaguuuggugauuaccaau

SEQ ID NO: 735012 - RNA, 22 nt, Human
cugccaaaaggugcaccugcug

SEQ ID NO: 735013 - RNA, 22 nt, Human
agcaaagccgagacagccagug

SEQ ID NO: 735014 - RNA, 22 nt, Human
ggagagggggcucccugcuugg

SEQ ID NO: 735015 - RNA, 22 nt, Human
cugccugccuggagacagaugg

SEQ ID NO: 735016 - RNA, 22 nt, Human
aggcugaggcagguggaucauu

SEQ ID NO: 735017 - RNA, 22 nt, Human
uuacacaaaaauaagauauggc

SEQ ID NO: 735018 - RNA, 22 nt, Human
cugcagcaaauguuaagugacu

SEQ ID NO: 735019 - RNA, 17 nt, Human
gggcagggacuccuggg

SEQ ID NO: 735020 - RNA, 22 nt, Human
uauuuugcaaaccugaguuuga

SEQ ID NO: 735021 - RNA, 22 nt, Human
auggcucugcugggcaaagcaa

SEQ ID NO: 735022 - RNA, 22 nt, Human
uugugaucuguguugauggccu

SEQ ID NO: 735023 - RNA, 22 nt, Human
caguagcagggauuauuuuagg

SEQ ID NO: 735024 - RNA, 22 nt, Human
acauucaaaauuagguuaguug

SEQ ID NO: 735025 - RNA, 22 nt, Human
ucuuaaugaaagugaaauauca

SEQ ID NO: 735026 - RNA, 22 nt, Human
agugaaccaggcugcgucccug

SEQ ID NO: 735027 - RNA, 18 nt, Human
ccuggaggucuucggggu

SEQ ID NO: 735028 - RNA, 22 nt, Human
gugagagaauuugaguuaaauu

SEQ ID NO: 735029 - RNA, 20 nt, Human
gaagugucuuguuucuggau

SEQ ID NO: 735030 - RNA, 22 nt, Human
gcugccugccuaguuccacagu

SEQ ID NO: 735031 - RNA, 18 nt, Human
aaaaagugcucaggccua

SEQ ID NO: 735032 - RNA, 22 nt, Human
ugcuucugaugugagcagcccc

SEQ ID NO: 735033 - RNA, 22 nt, Human
uggagccacucacuaucugagu

SEQ ID NO: 735034 - RNA, 22 nt, Human
aaaugugauacuguucuuuuua

SEQ ID NO: 735035 - RNA, 22 nt, Human
gcauguggccuucaggcuggaa

SEQ ID NO: 735036 - RNA, 22 nt, Human
ugaggacaugagugggacagag

SEQ ID NO: 735037 - RNA, 22 nt, Human
aauaaugagacagcuuauuuaa

SEQ ID NO: 735038 - RNA, 22 nt, Human
uuagcuuucaugaaccuggucg

SEQ ID NO: 735039 - RNA, 22 nt, Human
ugcuggaggggaugccuucacu

SEQ ID NO: 735040 - RNA, 22 nt, Human
uagauucugugagagucaaagu

SEQ ID NO: 735041 - RNA, 22 nt, Human
ccacuccccacgugcugucaga

SEQ ID NO: 735042 - RNA, 22 nt, Human
aagcauuuugccacuugaaguu

SEQ ID NO: 735043 - RNA, 22 nt, Human
ucagcuaugagguggugguucu

SEQ ID NO: 735044 - RNA, 22 nt, Human
accaggcacuccugaggucuga

SEQ ID NO: 735045 - RNA, 22 nt, Human
caggcagcauuuacucugauga

SEQ ID NO: 735046 - RNA, 22 nt, Human
cuaaucaucuuucucuuaaagc

SEQ ID NO: 735047 - RNA, 22 nt, Human
uacuuccuguuuccaugucugu

SEQ ID NO: 735048 - RNA, 22 nt, Human
uacuuuacaguauuagauaauu

SEQ ID NO: 735049 - RNA, 18 nt, Human
gagcucugccucccaguc

SEQ ID NO: 735050 - RNA, 22 nt, Human
ucuggaguguuucuaauuacug

SEQ ID NO: 735051 - RNA, 22 nt, Human
ggcuucucuccaguaugcauuc

SEQ ID NO: 735052 - RNA, 22 nt, Human
uuauggaauuugcaaaagguua

SEQ ID NO: 735053 - RNA, 22 nt, Human
ccucuuccacugggccccaucc

SEQ ID NO: 735054 - RNA, 21 nt, Human
agaggaagugauuggucuggc

SEQ ID NO: 735055 - RNA, 20 nt, Human
cugcugcccugucagccucu

SEQ ID NO: 735056 - RNA, 22 nt, Human
cucuacucuuaacacagcuagg

SEQ ID NO: 735057 - RNA, 22 nt, Human
uuuaauuuuccugguaggccug

SEQ ID NO: 735058 - RNA, 22 nt, Human
uuuuugcuaauccccagccacu

SEQ ID NO: 735059 - RNA, 21 nt, Human
auggcugaugauauugaacau

SEQ ID NO: 735060 - RNA, 22 nt, Human
guaagcauucauugucuguaua

SEQ ID NO: 735061 - RNA, 22 nt, Human
gcaguguugagugguggcugaa

SEQ ID NO: 735062 - RNA, 22 nt, Human
cuguggaccugcucuuagagac

SEQ ID NO: 735063 - RNA, 22 nt, Human
uuucauauuguccagucagcgc

SEQ ID NO: 735064 - RNA, 22 nt, Human
ccucaagucaauucugucucgc

SEQ ID NO: 735065 - RNA, 22 nt, Human
ugcagaguccucuggagggacu

SEQ ID NO: 735066 - RNA, 22 nt, Human
ucaaaauuucagcacuagcccu

SEQ ID NO: 735067 - RNA, 22 nt, Human
aaacuguaaauacuaguaagug

SEQ ID NO: 735068 - RNA, 22 nt, Human
auaaggcauauagucacuuuuu

SEQ ID NO: 735069 - RNA, 22 nt, Human
ggaggcucccacgcagcucaca

SEQ ID NO: 735070 - RNA, 22 nt, Human
uuggcuaacacgcguuuuguuc

SEQ ID NO: 735071 - RNA, 22 nt, Human
uguuuguucccucucuuuccug

SEQ ID NO: 735072 - RNA, 22 nt, Human
acuuccagaauuagaauuuaag

SEQ ID NO: 735073 - RNA, 22 nt, Human
cugaacaaagaaauagucaugg

SEQ ID NO: 735074 - RNA, 20 nt, Human
ugagacccgcugacaaguuc

SEQ ID NO: 735075 - RNA, 22 nt, Human
uuccugagcuuuuaaccuaguc

SEQ ID NO: 735076 - RNA, 22 nt, Human
caugggagguuggcuuggcaug

SEQ ID NO: 735077 - RNA, 22 nt, Human
gaacagaguugaaacaaggcug

SEQ ID NO: 735078 - RNA, 22 nt, Human
caaugcuugcugacucccuguc

SEQ ID NO: 735079 - RNA, 22 nt, Human
gcauagucaguaggauucucaa

SEQ ID NO: 735080 - RNA, 22 nt, Human
ucuggccauggcaagccgagug

SEQ ID NO: 735081 - RNA, 22 nt, Human
gcuucagauuccucuucuguaa

SEQ ID NO: 735082 - RNA, 22 nt, Human
agacauaaacuuacugaaauac

SEQ ID NO: 735083 - RNA, 22 nt, Human
ucaaacuugguaagagaaauac

SEQ ID NO: 735084 - RNA, 22 nt, Human
cagaugagaguggccaggguuc

SEQ ID NO: 735085 - RNA, 22 nt, Human
acugggaaaaacugcuuugagg

SEQ ID NO: 735086 - RNA, 22 nt, Human
aaacaaauagugcaugggaauu

SEQ ID NO: 735087 - RNA, 19 nt, Human
acucuguuguacuugaggg

SEQ ID NO: 735088 - RNA, 22 nt, Human
aaaugcuauuugggaacaacau

SEQ ID NO: 735089 - RNA, 22 nt, Human
auacagaacaagccucaccucc

SEQ ID NO: 735090 - RNA, 17 nt, Human
ggaggcaacagacaggg

SEQ ID NO: 735091 - RNA, 22 nt, Human
cuuugaaagcucccaggacuua

SEQ ID NO: 735092 - RNA, 22 nt, Human
ggugggugagcccugggagcug

SEQ ID NO: 735093 - RNA, 22 nt, Human
gggagaaggaggacugugcugu

SEQ ID NO: 735094 - RNA, 22 nt, Human
uguaggcugaagaugaagugga

SEQ ID NO: 735095 - RNA, 22 nt, Human
aggaccauccuaagguaggcaa

SEQ ID NO: 735096 - RNA, 22 nt, Human
auaugaguuucccacuucugga

SEQ ID NO: 735097 - RNA, 21 nt, Human
gugguucuagagaaacagaau

SEQ ID NO: 735098 - RNA, 22 nt, Human
gaggccagaguuccccgaguca

SEQ ID NO: 735099 - RNA, 22 nt, Human
agagggaacggaucccagcgcg

SEQ ID NO: 735100 - RNA, 21 nt, Human
gcagagccugagguucuugag

SEQ ID NO: 735101 - RNA, 22 nt, Human
auggaaauccaagucaccguag

SEQ ID NO: 735102 - RNA, 22 nt, Human
ggccaagguggagaaggcacug

SEQ ID NO: 735103 - RNA, 21 nt, Human
gcucuguuauuuucuaugcag

SEQ ID NO: 735104 - RNA, 22 nt, Human
agacaaugucaaggugaucauc

SEQ ID NO: 735105 - RNA, 22 nt, Human
aguguuuacauugaagcuugua

SEQ ID NO: 735106 - RNA, 22 nt, Human
acaacuguuggaggaacacagg

SEQ ID NO: 735107 - RNA, 22 nt, Human
agguaguguagcugagugggau

SEQ ID NO: 735108 - RNA, 22 nt, Human
guggcagugggaugcuaucagg

SEQ ID NO: 735109 - RNA, 22 nt, Human
guugaaaguggagaaccugguu

SEQ ID NO: 735110 - RNA, 22 nt, Human
agaccuguuggguucauuggcu

SEQ ID NO: 735111 - RNA, 22 nt, Human
cuguccucaucugccccaaggg

SEQ ID NO: 735112 - RNA, 22 nt, Human
aucugcuugcaggcuggcccuu

SEQ ID NO: 735113 - RNA, 22 nt, Human
gguggaaggccuggaaggaggc

SEQ ID NO: 735114 - RNA, 22 nt, Human
aagucagugcuagcuaauggcu

SEQ ID NO: 735115 - RNA, 23 nt, Human
gaggucaaggcugcagugauugc

SEQ ID NO: 735116 - RNA, 22 nt, Human
uuugguccaaguuuuacucuuu

SEQ ID NO: 735117 - RNA, 21 nt, Human
agcagagugcuuugacuuugu

SEQ ID NO: 735118 - RNA, 22 nt, Human
aagaauugaugugaauugcagc

SEQ ID NO: 735119 - RNA, 22 nt, Human
ucagugugacugauggcuuuau

SEQ ID NO: 735120 - RNA, 22 nt, Human
aagcuucaucugaugccgaacu

SEQ ID NO: 735121 - RNA, 22 nt, Human
cugaaguuauuguacaaauuug

SEQ ID NO: 735122 - RNA, 22 nt, Human
ugaaaucuucacuaagucucuu

SEQ ID NO: 735123 - RNA, 22 nt, Human
accuuuuuguucuguucucagc

SEQ ID NO: 735124 - RNA, 17 nt, Human
aacaguaagcccuguuu

SEQ ID NO: 735125 - RNA, 22 nt, Human
cugguugggagguuggcuuuca

SEQ ID NO: 735126 - RNA, 22 nt, Human
auaugaagaauuccaauuugga

SEQ ID NO: 735127 - RNA, 22 nt, Human
ucuggaaucaguggcuuacccu

SEQ ID NO: 735128 - RNA, 22 nt, Human
aggcuaggggaacacuagaauc

SEQ ID NO: 735129 - RNA, 22 nt, Human
caauuauucagugacuuaagag

SEQ ID NO: 735130 - RNA, 22 nt, Human
aaagaauaguuaaguuuagggc

SEQ ID NO: 735131 - RNA, 22 nt, Human
aaggccagacaggaccacaucu

SEQ ID NO: 735132 - RNA, 22 nt, Human
aauguugcagagugauugucca

SEQ ID NO: 735133 - RNA, 22 nt, Human
cugggcugaaaguguuccuuga

SEQ ID NO: 735134 - RNA, 22 nt, Human
ccauccagaaacuuccaucccc

SEQ ID NO: 735135 - RNA, 17 nt, Human
ugcauguccuuuguucc

SEQ ID NO: 735136 - RNA, 19 nt, Human
uggcagaggacaaggacuu

SEQ ID NO: 735137 - RNA, 22 nt, Human
ugagcuggucuugaguguagcu

SEQ ID NO: 735138 - RNA, 22 nt, Human
gggucagggaggccccaccaug

SEQ ID NO: 735139 - RNA, 22 nt, Human
ucaagaugcauggguggcauaa

SEQ ID NO: 735140 - RNA, 22 nt, Human
cagcuguuaugagguguacaug

SEQ ID NO: 735141 - RNA, 22 nt, Human
gccuggagaagauggaacuagc

SEQ ID NO: 735142 - RNA, 22 nt, Human
cucaaauccccguuccucauuc

SEQ ID NO: 735143 - RNA, 22 nt, Human
ggcuguguccccaccugagcag

SEQ ID NO: 735144 - RNA, 22 nt, Human
acagacacaggcguggagucgc

SEQ ID NO: 735145 - RNA, 22 nt, Human
gagcugaaauaugaagccaauu

SEQ ID NO: 735146 - RNA, 22 nt, Human
aggugcagugaaggaaaaggaa

SEQ ID NO: 735147 - RNA, 22 nt, Human
aggagccaugagcaggaggcaa

SEQ ID NO: 735148 - RNA, 22 nt, Human
aaauggcaguagaaaagaaucc

SEQ ID NO: 735149 - RNA, 22 nt, Human
uaaaguguggauaugauuagua

SEQ ID NO: 735150 - RNA, 22 nt, Human
agcuuugggccacuggcuggau

SEQ ID NO: 735151 - RNA, 22 nt, Human
uuucagagccuuuaucucucua

SEQ ID NO: 735152 - RNA, 22 nt, Human
cauugcugugggcauuugcugc

SEQ ID NO: 735153 - RNA, 22 nt, Human
gucuugcacuuaccuaagaacu

SEQ ID NO: 735154 - RNA, 22 nt, Human
ugccaaauugcccuauaaauga

SEQ ID NO: 735155 - RNA, 22 nt, Human
ugcgccucuaaucucgggcguc

SEQ ID NO: 735156 - RNA, 18 nt, Human
acaaauguagugucuuaa

SEQ ID NO: 735157 - RNA, 22 nt, Human
aucauugaguaaaaugaauaca

SEQ ID NO: 735158 - RNA, 22 nt, Human
ucugcugaauggagccaaccuc

SEQ ID NO: 735159 - RNA, 22 nt, Human
caaugucuaguuucccaaaucc

SEQ ID NO: 735160 - RNA, 22 nt, Human
ugauucugugaauuaguugggu

SEQ ID NO: 735161 - RNA, 22 nt, Human
cagguucuggagaugcagagau

SEQ ID NO: 735162 - RNA, 22 nt, Human
augaagauuucccagagacaug

SEQ ID NO: 735163 - RNA, 22 nt, Human
cuuugcaaacugucacacuuuc

SEQ ID NO: 735164 - RNA, 22 nt, Human
cuguugcugggaacgcauguca

SEQ ID NO: 735165 - RNA, 22 nt, Human
uuggucagucagagaauggagu

SEQ ID NO: 735166 - RNA, 22 nt, Human
gcucccugcauuucccacccuu

SEQ ID NO: 735167 - RNA, 22 nt, Human
ugaauagauggugacaguauga

SEQ ID NO: 735168 - RNA, 22 nt, Human
uuuauugcccuguaguacagga

SEQ ID NO: 735169 - RNA, 22 nt, Human
ucccuguccugggcaaucccag

SEQ ID NO: 735170 - RNA, 22 nt, Human
cucaggcacuuuugucacagac

SEQ ID NO: 735171 - RNA, 22 nt, Human
aaucuuucauucauucauacau

SEQ ID NO: 735172 - RNA, 22 nt, Human
agggagcugagcugugagcagc

SEQ ID NO: 735173 - RNA, 22 nt, Human
uagcccaggcuguagugcagug

SEQ ID NO: 735174 - RNA, 22 nt, Human
gagcugaauuacggugagucau

SEQ ID NO: 735175 - RNA, 22 nt, Human
guauuaggaggaacacaggccu

SEQ ID NO: 735176 - RNA, 23 nt, Human
ugcuuaauuccucugcuucaccu

SEQ ID NO: 735177 - RNA, 22 nt, Human
ugauuuaugaccaaguuagaau

SEQ ID NO: 735178 - RNA, 22 nt, Human
gcaugagacuagcucaugagca

SEQ ID NO: 735179 - RNA, 23 nt, Human
gaguggggagaaauugguuaaac

SEQ ID NO: 735180 - RNA, 22 nt, Human
cugcuuuaaucccugccuggaa

SEQ ID NO: 735181 - RNA, 22 nt, Human
ugcuuuaaaauggacuguuuug

SEQ ID NO: 735182 - RNA, 22 nt, Human
ggccaggcugcugggaccccgc

SEQ ID NO: 735183 - RNA, 22 nt, Human
ugucugcugguugggagcuuaa

SEQ ID NO: 735184 - RNA, 22 nt, Human
gaacaucagucauaauuuaacg

SEQ ID NO: 735185 - RNA, 22 nt, Human
ccuggccagccagggcuggggu

SEQ ID NO: 735186 - RNA, 22 nt, Human
ucaagcaggguagcaagcuggu

SEQ ID NO: 735187 - RNA, 22 nt, Human
agagcccuguggacugucaagu

SEQ ID NO: 735188 - RNA, 22 nt, Human
uuugaagacauuugaauacuuu

SEQ ID NO: 735189 - RNA, 22 nt, Human
gggagaaggagcuaguucuuga

SEQ ID NO: 735190 - RNA, 20 nt, Human
gcugaggucccugugguuuu

SEQ ID NO: 735191 - RNA, 22 nt, Human
guucuucagauuccauuucagu

SEQ ID NO: 735192 - RNA, 22 nt, Human
aaaugacacuaggcuuuuugca

SEQ ID NO: 735193 - RNA, 22 nt, Human
uggagaguucuguagauaucua

SEQ ID NO: 735194 - RNA, 22 nt, Human
guuugccuuuuagauaggaaug

SEQ ID NO: 735195 - RNA, 22 nt, Human
ugggcucucuggcaggaaggcu

SEQ ID NO: 735196 - RNA, 22 nt, Human
guuuuaugagaccucaggaaua

SEQ ID NO: 735197 - RNA, 22 nt, Human
gaggacagcuuagggcuuccug

SEQ ID NO: 735198 - RNA, 22 nt, Human
guuuaugaauugcauucccuuu

SEQ ID NO: 735199 - RNA, 22 nt, Human
caagugacugugcuggcaacau

SEQ ID NO: 735200 - RNA, 22 nt, Human
acagccagaggugguccugggu

SEQ ID NO: 735201 - RNA, 22 nt, Human
uugaucagguugcuguggugua

SEQ ID NO: 735202 - RNA, 22 nt, Human
ucauaaaaugcuccugauauug

SEQ ID NO: 735203 - RNA, 22 nt, Human
guuugcugcccucuccuguccg

SEQ ID NO: 735204 - RNA, 22 nt, Human
ggcugccuacuuucccagaguu

SEQ ID NO: 735205 - RNA, 22 nt, Human
uaugaguucaguuaucuuaagu

SEQ ID NO: 735206 - RNA, 22 nt, Human
uuccuccuacgcuuaucacuuu

SEQ ID NO: 735207 - RNA, 22 nt, Human
uuuggaagggaaccaaaacaug

SEQ ID NO: 735208 - RNA, 22 nt, Human
ggucugggcuugaguccuuuug

SEQ ID NO: 735209 - RNA, 21 nt, Human
ucugggggugagccuagaaau

SEQ ID NO: 735210 - RNA, 20 nt, Human
cucugggucgagacagacuu

SEQ ID NO: 735211 - RNA, 22 nt, Human
aggcagauauuucaguucacau

SEQ ID NO: 735212 - RNA, 22 nt, Human
aaagcaugacucaagaauuacu

SEQ ID NO: 735213 - RNA, 22 nt, Human
cucuguuuuucaauaguucuug

SEQ ID NO: 735214 - RNA, 22 nt, Human
uguuuuaucaagauggcauguc

SEQ ID NO: 735215 - RNA, 22 nt, Human
aggcaagcagucagucuaugag

SEQ ID NO: 735216 - RNA, 22 nt, Human
ucugaagggcugaguggaggag

SEQ ID NO: 735217 - RNA, 22 nt, Human
cagguggcagugccugcauucu

SEQ ID NO: 735218 - RNA, 22 nt, Human
ggugcugauaguaacaauaaua

SEQ ID NO: 735219 - RNA, 22 nt, Human
ugccuauucaauauaugcauuu

SEQ ID NO: 735220 - RNA, 22 nt, Human
cagacaggguccuguccgucac

SEQ ID NO: 735221 - RNA, 22 nt, Human
ucucuuuaaagacucagagauu

SEQ ID NO: 735222 - RNA, 22 nt, Human
uuagcauucucauuugcauaaa

SEQ ID NO: 735223 - RNA, 22 nt, Human
cuuggaacuuaguaauaugaca

SEQ ID NO: 735224 - RNA, 22 nt, Human
aagagguuauuguucccagcuu

SEQ ID NO: 735225 - RNA, 22 nt, Human
uuuauauugggagucguuuuga

SEQ ID NO: 735226 - RNA, 22 nt, Human
uguccugcaagcccuaaugaau

SEQ ID NO: 735227 - RNA, 22 nt, Human
ggggugaguuagcgucggcuug

SEQ ID NO: 735228 - RNA, 22 nt, Human
auguauaugaagcuaguauuuu

SEQ ID NO: 735229 - RNA, 22 nt, Human
uacacacuuacuggagaugaag

SEQ ID NO: 735230 - RNA, 22 nt, Human
uaaaugugucuauggacccgcc

SEQ ID NO: 735231 - RNA, 22 nt, Human
aggauuuacaaugauucuaggu

SEQ ID NO: 735232 - RNA, 22 nt, Human
uacaacauuguguugcuucaua

SEQ ID NO: 735233 - RNA, 22 nt, Human
gcugaaggucucuggagagguc

SEQ ID NO: 735234 - RNA, 22 nt, Human
auuauguaacugugguucagca

SEQ ID NO: 735235 - RNA, 22 nt, Human
cuggcuuuuuucccauuaugca

SEQ ID NO: 735236 - RNA, 20 nt, Human
ugaugguucuuuccggguug

SEQ ID NO: 735237 - RNA, 22 nt, Human
uuccuuuucuuaaacauaugug

SEQ ID NO: 735238 - RNA, 22 nt, Human
acagagucugacagguaggcgc

SEQ ID NO: 735239 - RNA, 22 nt, Human
agugggcuuacugagggagugu

SEQ ID NO: 735240 - RNA, 22 nt, Human
gaugcugagagguggagggaac

SEQ ID NO: 735241 - RNA, 22 nt, Human
guuuaugaggaaaaguuaugau

SEQ ID NO: 735242 - RNA, 22 nt, Human
aguggcugucuuccaaaaucug

SEQ ID NO: 735243 - RNA, 22 nt, Human
uuggcagaggggccaccugccc

SEQ ID NO: 735244 - RNA, 22 nt, Human
cacagggcuuugauggcugagu

SEQ ID NO: 735245 - RNA, 22 nt, Human
guacccuguggccagccagcca

SEQ ID NO: 735246 - RNA, 22 nt, Human
cacacacuguuaauguaggagu

SEQ ID NO: 735247 - RNA, 22 nt, Human
gagucagauugcagacagggcu

SEQ ID NO: 735248 - RNA, 22 nt, Human
cagaaggcuuuguggaguagac

SEQ ID NO: 735249 - RNA, 17 nt, Human
ugacaaugacaagcacu

SEQ ID NO: 735250 - RNA, 21 nt, Human
ggccugaaaaagugaaugcuu

SEQ ID NO: 735251 - RNA, 22 nt, Human
cuggagcagcagguggccaggg

SEQ ID NO: 735252 - RNA, 22 nt, Human
cauuuuauccucugggaagcua

SEQ ID NO: 735253 - RNA, 22 nt, Human
uggcaguggugucugcacaggc

SEQ ID NO: 735254 - RNA, 22 nt, Human
ugcugaguauuuguuugaauaa

SEQ ID NO: 735255 - RNA, 22 nt, Human
cgccccucagcgacccaccagc

SEQ ID NO: 735256 - RNA, 22 nt, Human
gagcagagaauccagcuaagug

SEQ ID NO: 735257 - RNA, 22 nt, Human
gugcaaaaguaauugugguuuu

SEQ ID NO: 735258 - RNA, 22 nt, Human
ggauguucugggguucucuugu

SEQ ID NO: 735259 - RNA, 22 nt, Human
uugcauuucccauugaguaaug

SEQ ID NO: 735260 - RNA, 22 nt, Human
ccaggcccguucccuucuccag

SEQ ID NO: 735261 - RNA, 22 nt, Human
ucuagggaacaugggucaagcu

SEQ ID NO: 735262 - RNA, 22 nt, Human
agugggggcuggcucugucugu

SEQ ID NO: 735263 - RNA, 22 nt, Human
ugcugccuguuguggggccacg

SEQ ID NO: 735264 - RNA, 22 nt, Human
gaugcagggaacuuagugggcu

SEQ ID NO: 735265 - RNA, 22 nt, Human
ggaacuuuaggauccuggcuca

SEQ ID NO: 735266 - RNA, 22 nt, Human
accagcauugcuuuggguuaua

SEQ ID NO: 735267 - RNA, 22 nt, Human
uacaaaguuugagaaugcuuuc

SEQ ID NO: 735268 - RNA, 21 nt, Human
uaacuuuugugccuaucuugu

SEQ ID NO: 735269 - RNA, 22 nt, Human
ugagaagauugggcagagugga

SEQ ID NO: 735270 - RNA, 22 nt, Human
agcuccagauuaauuguaggag

SEQ ID NO: 735271 - RNA, 20 nt, Human
uccugggguaagccaugguc

SEQ ID NO: 735272 - RNA, 22 nt, Human
ccaguccauauuuauacugccg

SEQ ID NO: 735273 - RNA, 22 nt, Human
uccaucaccauuucugcgagcu

SEQ ID NO: 735274 - RNA, 22 nt, Human
uuugucauguccuuaacugucu

SEQ ID NO: 735275 - RNA, 22 nt, Human
agaauuguugggguaauaaaag

SEQ ID NO: 735276 - RNA, 22 nt, Human
gaccuggaaugaagggucccuc

SEQ ID NO: 735277 - RNA, 22 nt, Human
cagugcaaacucccugaggugg

SEQ ID NO: 735278 - RNA, 20 nt, Human
gccucagccaacccaugggg

SEQ ID NO: 735279 - RNA, 22 nt, Human
uucacagaagaggucacauuuc

SEQ ID NO: 735280 - RNA, 22 nt, Human
cccagggguauccauggagaag

SEQ ID NO: 735281 - RNA, 21 nt, Human
ggugggcacaggagagcagag

SEQ ID NO: 735282 - RNA, 20 nt, Human
uuccacaucuuugcacaugc

SEQ ID NO: 735283 - RNA, 22 nt, Human
acacaacagaagagcaauugca

SEQ ID NO: 735284 - RNA, 22 nt, Human
uccacaugacuucuaauaacug

SEQ ID NO: 735285 - RNA, 22 nt, Human
aauuccaaaucaacuagucuag

SEQ ID NO: 735286 - RNA, 22 nt, Human
acuuccuuuucaaccauacagc

SEQ ID NO: 735287 - RNA, 18 nt, Human
cuccaaggucucuggcuu

SEQ ID NO: 735288 - RNA, 22 nt, Human
ccagagggcccuggucucagcu

SEQ ID NO: 735289 - RNA, 22 nt, Human
gugcagagaaggagcaguaguu

SEQ ID NO: 735290 - RNA, 22 nt, Human
uggcuucaaaaucuaguggucu

SEQ ID NO: 735291 - RNA, 19 nt, Human
ggcagcuggacgcuguuca

SEQ ID NO: 735292 - RNA, 19 nt, Human
ggccagcacagggcucugu

SEQ ID NO: 735293 - RNA, 22 nt, Human
ugagcugugaggguacagauau

SEQ ID NO: 735294 - RNA, 21 nt, Human
ucugccugagacuuugcuggu

SEQ ID NO: 735295 - RNA, 22 nt, Human
aagggcagaauagagaagaugg

SEQ ID NO: 735296 - RNA, 22 nt, Human
aucuaagauuuugcuaagauca

SEQ ID NO: 735297 - RNA, 22 nt, Human
agaggcaccgucugcagcgugc

SEQ ID NO: 735298 - RNA, 22 nt, Human
auccuguguugcuacuggagga

SEQ ID NO: 735299 - RNA, 22 nt, Human
gcauguguggaggagaugugcu

SEQ ID NO: 735300 - RNA, 22 nt, Human
guggcagcggcccaggccgucu

SEQ ID NO: 735301 - RNA, 22 nt, Human
acagcaguuacugaaauaaagu

SEQ ID NO: 735302 - RNA, 19 nt, Human
augugcuugggccaugcua

SEQ ID NO: 735303 - RNA, 22 nt, Human
ugucaccacuggcugaaacacc

SEQ ID NO: 735304 - RNA, 22 nt, Human
guggaauguccuugaucauaag

SEQ ID NO: 735305 - RNA, 22 nt, Human
uagauucuugaaccagugccuc

SEQ ID NO: 735306 - RNA, 22 nt, Human
gaucuauuuacucuuuuccuag

SEQ ID NO: 735307 - RNA, 22 nt, Human
ugucugaacugcauuugcuccu

SEQ ID NO: 735308 - RNA, 22 nt, Human
agcagggcuuugucucugugaa

SEQ ID NO: 735309 - RNA, 23 nt, Human
cacugggcccaggguguggaggc

SEQ ID NO: 735310 - RNA, 22 nt, Human
aaacaaguuuagaauaaugaau

SEQ ID NO: 735311 - RNA, 22 nt, Human
aagcccugaccugagaguccgu

SEQ ID NO: 735312 - RNA, 22 nt, Human
guucauucaucaaauauuuacu

SEQ ID NO: 735313 - RNA, 22 nt, Human
ugccugccucaggccgagugcu

SEQ ID NO: 735314 - RNA, 22 nt, Human
uuaaagccaucuagauuuugag

SEQ ID NO: 735315 - RNA, 22 nt, Human
gugggcuuguuuugaugagauc

SEQ ID NO: 735316 - RNA, 22 nt, Human
cugaaggacacgugaggagcca

SEQ ID NO: 735317 - RNA, 22 nt, Human
ucccagccuuaucuccccuggc

SEQ ID NO: 735318 - RNA, 22 nt, Human
cuccuccagcuuccaguggcuc

SEQ ID NO: 735319 - RNA, 22 nt, Human
guuugcauuucuugaacuauau

SEQ ID NO: 735320 - RNA, 22 nt, Human
agaguguuucagucuuccuaga

SEQ ID NO: 735321 - RNA, 22 nt, Human
uuuugccugugaauacuaucuu

SEQ ID NO: 735322 - RNA, 22 nt, Human
uacauuccacaagcauugcuuu

SEQ ID NO: 735323 - RNA, 22 nt, Human
auuucagauucagaaauguagg

SEQ ID NO: 735324 - RNA, 18 nt, Human
augcauauuuuaaguugu

SEQ ID NO: 735325 - RNA, 22 nt, Human
uggagucacuuucucuuccagu

SEQ ID NO: 735326 - RNA, 22 nt, Human
cacccugcucugcugugcggcc

SEQ ID NO: 735327 - RNA, 22 nt, Human
ggagguggagcuggaaguucca

SEQ ID NO: 735328 - RNA, 22 nt, Human
ucucuuccuugaccuauuguaa

SEQ ID NO: 735329 - RNA, 22 nt, Human
gaaugcacuuccaacaucuauu

SEQ ID NO: 735330 - RNA, 22 nt, Human
augcuaaauggccaguaccaaa

SEQ ID NO: 735331 - RNA, 19 nt, Human
uuuggacagaguguccagg

SEQ ID NO: 735332 - RNA, 22 nt, Human
uuuuaguaccaaccagaagaug

SEQ ID NO: 735333 - RNA, 22 nt, Human
gcuguauuuauaugaaggcaug

SEQ ID NO: 735334 - RNA, 22 nt, Human
uauggcuucuauaaggaagcuu

SEQ ID NO: 735335 - RNA, 22 nt, Human
ggcagcaugagccuggugaauu

SEQ ID NO: 735336 - RNA, 22 nt, Human
caauuucauggauaaaagaugu

SEQ ID NO: 735337 - RNA, 22 nt, Human
cagcccugggaucuuagugccu

SEQ ID NO: 735338 - RNA, 18 nt, Human
uuucacagauucaugacu

SEQ ID NO: 735339 - RNA, 22 nt, Human
uacaaucaggcucuagcuucuc

SEQ ID NO: 735340 - RNA, 21 nt, Human
uggggaggggaccugauuaug

SEQ ID NO: 735341 - RNA, 21 nt, Human
uacuguauagauguguucuug

SEQ ID NO: 735342 - RNA, 22 nt, Human
uuucagagggcagaucuggggc

SEQ ID NO: 735343 - RNA, 22 nt, Human
uagcagcacaaauggacuauga

SEQ ID NO: 735344 - RNA, 22 nt, Human
uauuuuguauuuaugcaagaaa

SEQ ID NO: 735345 - RNA, 22 nt, Human
agaagucauuuauguuagauga

SEQ ID NO: 735346 - RNA, 22 nt, Human
ccagugggugcugggcucugcc

SEQ ID NO: 735347 - RNA, 19 nt, Human
uguuuacauguuucuucag

SEQ ID NO: 735348 - RNA, 22 nt, Human
uuucuuuauccuccuuugcaca

SEQ ID NO: 735349 - RNA, 20 nt, Human
uuuuucugggcuuccauagc

SEQ ID NO: 735350 - RNA, 22 nt, Human
auggaagggacagaagggcaag

SEQ ID NO: 735351 - RNA, 22 nt, Human
gguuuaaugggugaaggcauga

SEQ ID NO: 735352 - RNA, 22 nt, Human
uauuucagcaagaagaaugugg

SEQ ID NO: 735353 - RNA, 22 nt, Human
ugaagaugucagcagggguggu

SEQ ID NO: 735354 - RNA, 22 nt, Human
uucaaacaggggucagggagau

SEQ ID NO: 735355 - RNA, 22 nt, Human
gccaccuguaagccauuaggcc

SEQ ID NO: 735356 - RNA, 20 nt, Human
cugggcugcccagcuauggg

SEQ ID NO: 735357 - RNA, 23 nt, Human
augcaagaguuucucaaacugga

SEQ ID NO: 735358 - RNA, 22 nt, Human
gaaagcaguaaaugggucccau

SEQ ID NO: 735359 - RNA, 22 nt, Human
gaugcagggcuggcaggagcuu

SEQ ID NO: 735360 - RNA, 22 nt, Human
gaguggggcuuuaaaggcucag

SEQ ID NO: 735361 - RNA, 22 nt, Human
gcucugcuaauauuguaguacc

SEQ ID NO: 735362 - RNA, 22 nt, Human
uguagaacugacauuuuggacu

SEQ ID NO: 735363 - RNA, 22 nt, Human
gaauaguucuauggcugcaggg

SEQ ID NO: 735364 - RNA, 22 nt, Human
ucacuguagugagcagaauaua

SEQ ID NO: 735365 - RNA, 22 nt, Human
ugcauuaugcuacccagaagcu

SEQ ID NO: 735366 - RNA, 22 nt, Human
uuuggagagcagcuaggcccuu

SEQ ID NO: 735367 - RNA, 22 nt, Human
ucaggcagaauuaucaaaagau

SEQ ID NO: 735368 - RNA, 22 nt, Human
ggccagcauauagagugaagua

SEQ ID NO: 735369 - RNA, 21 nt, Human
ccuuggcuggcaucuagcacc

SEQ ID NO: 735370 - RNA, 22 nt, Human
cagggauggagagacuacuggc

SEQ ID NO: 735371 - RNA, 22 nt, Human
uauugcauccccauugugcccc

SEQ ID NO: 735372 - RNA, 22 nt, Human
ucaauguccgggccccauucca

SEQ ID NO: 735373 - RNA, 22 nt, Human
gagauucuguagucaggcaucu

SEQ ID NO: 735374 - RNA, 22 nt, Human
ucugugagaaccagugccaggg

SEQ ID NO: 735375 - RNA, 22 nt, Human
uaagagcauaggcuugaaaaua

SEQ ID NO: 735376 - RNA, 22 nt, Human
uuuagguuaaucaacaaacauu

SEQ ID NO: 735377 - RNA, 22 nt, Human
ugggccuggggcagcccaaauc

SEQ ID NO: 735378 - RNA, 22 nt, Human
ggcaaggaagaagccaugaugu

SEQ ID NO: 735379 - RNA, 22 nt, Human
gaccugaaagagauuaaaugac

SEQ ID NO: 735380 - RNA, 22 nt, Human
ucugacagucacaguggaggau

SEQ ID NO: 735381 - RNA, 22 nt, Human
ugugugugugcgcgcacgcaua

SEQ ID NO: 735382 - RNA, 22 nt, Human
ucagccugcgucauggugacac

SEQ ID NO: 735383 - RNA, 22 nt, Human
uaucuguuugcucacagguguu

SEQ ID NO: 735384 - RNA, 20 nt, Human
uccuucaggcagggccuagu

SEQ ID NO: 735385 - RNA, 22 nt, Human
uugcagagcaguaggaauauag

SEQ ID NO: 735386 - RNA, 22 nt, Human
uuugacaacugugcaguuugua

SEQ ID NO: 735387 - RNA, 22 nt, Human
gcagagauuaugccauggaaag

SEQ ID NO: 735388 - RNA, 22 nt, Human
ugauucuguaaacaugucuuua

SEQ ID NO: 735389 - RNA, 22 nt, Human
gauggcagucaaccaggugagg

SEQ ID NO: 735390 - RNA, 22 nt, Human
aaguagugugcuccagcgguga

SEQ ID NO: 735391 - RNA, 22 nt, Human
ggcuggaaugcaacuguguguu

SEQ ID NO: 735392 - RNA, 22 nt, Human
uucaaagcugcagacuccuggg

SEQ ID NO: 735393 - RNA, 22 nt, Human
cccaggcaguagaaagaagagg

SEQ ID NO: 735394 - RNA, 22 nt, Human
augugcuugaagccucagagaa

SEQ ID NO: 735395 - RNA, 18 nt, Human
gagcccugagucugcaca

SEQ ID NO: 735396 - RNA, 22 nt, Human
uauuucaugugcaccauaauuc

SEQ ID NO: 735397 - RNA, 21 nt, Human
auacuuugaauuacagccuug

SEQ ID NO: 735398 - RNA, 22 nt, Human
ugcaaauagccuauauuuauag

SEQ ID NO: 735399 - RNA, 22 nt, Human
ccuccagguguuacauaugacu

SEQ ID NO: 735400 - RNA, 22 nt, Human
cucucccuagguuagcggucag

SEQ ID NO: 735401 - RNA, 22 nt, Human
cauacagagaaggauaauaaag

SEQ ID NO: 735402 - RNA, 22 nt, Human
cucaggaaaggccaugcaaggg

SEQ ID NO: 735403 - RNA, 22 nt, Human
agacugugccacacaugggagu

SEQ ID NO: 735404 - RNA, 22 nt, Human
guguaucaaagcacagacuuca

SEQ ID NO: 735405 - RNA, 22 nt, Human
uuaggaaauuaugguuucagau

SEQ ID NO: 735406 - RNA, 23 nt, Human
gucucccauagcgcucccaggcu

SEQ ID NO: 735407 - RNA, 22 nt, Human
gaguccagcagaaugagccaag

SEQ ID NO: 735408 - RNA, 22 nt, Human
agauggagucucacucuuguug

SEQ ID NO: 735409 - RNA, 22 nt, Human
ugugggaggaacacagccagaa

SEQ ID NO: 735410 - RNA, 22 nt, Human
ugagccguggucucugagggug

SEQ ID NO: 735411 - RNA, 22 nt, Human
aggcaccuugcgguccagugaa

SEQ ID NO: 735412 - RNA, 22 nt, Human
agcaggcagccauuuggaaggc

SEQ ID NO: 735413 - RNA, 22 nt, Human
ggcaauaguuguggguucuuua

SEQ ID NO: 735414 - RNA, 22 nt, Human
gaugucuuugccaugcaugugu

SEQ ID NO: 735415 - RNA, 22 nt, Human
auauaaagaaguggaaaaugag

SEQ ID NO: 735416 - RNA, 22 nt, Human
auguuucugaguguauauacau

SEQ ID NO: 735417 - RNA, 22 nt, Human
ggugggcacauucagucucugu

SEQ ID NO: 735418 - RNA, 19 nt, Human
gcugugugaccuugggcaa

SEQ ID NO: 735419 - RNA, 20 nt, Human
aggcugggguguuuugccca

SEQ ID NO: 735420 - RNA, 22 nt, Human
agaaaacuggagccugggguug

SEQ ID NO: 735421 - RNA, 22 nt, Human
gaacacagucaagggcugcugu

SEQ ID NO: 735422 - RNA, 22 nt, Human
gcucagagguuguucuuggguu

SEQ ID NO: 735423 - RNA, 22 nt, Human
aaauugcuguugggugacucuu

SEQ ID NO: 735424 - RNA, 22 nt, Human
ucacucuguguuugaacucaag

SEQ ID NO: 735425 - RNA, 22 nt, Human
cuggaagaccccccaggacuca

SEQ ID NO: 735426 - RNA, 22 nt, Human
ugugcauguauugauuuguacc

SEQ ID NO: 735427 - RNA, 22 nt, Human
guagcagagcugagaguggaac

SEQ ID NO: 735428 - RNA, 22 nt, Human
agcugcuuauaagauuugggag

SEQ ID NO: 735429 - RNA, 21 nt, Human
uaucagaagagaaagaaugau

SEQ ID NO: 735430 - RNA, 22 nt, Human
aagggagacccaccguccugga

SEQ ID NO: 735431 - RNA, 22 nt, Human
caguagcaggcacucagcacgu

SEQ ID NO: 735432 - RNA, 22 nt, Human
uguaucaaaccaaauuaauucu

SEQ ID NO: 735433 - RNA, 22 nt, Human
uuucucugugggcuuuaugcau

SEQ ID NO: 735434 - RNA, 22 nt, Human
uugcugauuuguuucuauucca

SEQ ID NO: 735435 - RNA, 22 nt, Human
gcuggguauuuuaagaaaggaa

SEQ ID NO: 735436 - RNA, 22 nt, Human
uuaacauuucuuuuccacucau

SEQ ID NO: 735437 - RNA, 22 nt, Human
cuaggccaguuaggaagagaag

SEQ ID NO: 735438 - RNA, 22 nt, Human
uggauugauaaaaugggauguu

SEQ ID NO: 735439 - RNA, 22 nt, Human
aaugagggggaugggaaagugu

SEQ ID NO: 735440 - RNA, 22 nt, Human
gggcuggggcucaauaauuugu

SEQ ID NO: 735441 - RNA, 22 nt, Human
cagaggcucaccagccuuucac

SEQ ID NO: 735442 - RNA, 22 nt, Human
acaaugcaccuauuuuaaaacu

SEQ ID NO: 735443 - RNA, 22 nt, Human
uaggugugggcucaggaaugug

SEQ ID NO: 735444 - RNA, 22 nt, Human
guccucuguuuccaucugacuu

SEQ ID NO: 735445 - RNA, 22 nt, Human
gggcuucucuuuagugagcuga

SEQ ID NO: 735446 - RNA, 19 nt, Human
gaucuuugccaauuuaagc

SEQ ID NO: 735447 - RNA, 22 nt, Human
guggcugcaguaguguaggguc

SEQ ID NO: 735448 - RNA, 22 nt, Human
cagugcaguggcugagcuggag

SEQ ID NO: 735449 - RNA, 22 nt, Human
uagaaucauugagaauaacagg

SEQ ID NO: 735450 - RNA, 22 nt, Human
ugcucuguauucuauggcaguu

SEQ ID NO: 735451 - RNA, 22 nt, Human
ccagugcacagccaggcaggug

SEQ ID NO: 735452 - RNA, 22 nt, Human
cccauggcaauaaggucacagg

SEQ ID NO: 735453 - RNA, 22 nt, Human
uuucuuggaugugaaacuaggg

SEQ ID NO: 735454 - RNA, 20 nt, Human
uucacauuucuguagugauu

SEQ ID NO: 735455 - RNA, 22 nt, Human
cugaaugccugcagagccagag

SEQ ID NO: 735456 - RNA, 22 nt, Human
gacauuuaauaguauuguggga

SEQ ID NO: 735457 - RNA, 22 nt, Human
ucuuccuugcuccuugucacuu

SEQ ID NO: 735458 - RNA, 22 nt, Human
gaaccaaguaggauacaaggag

SEQ ID NO: 735459 - RNA, 22 nt, Human
ugaagaauguugcagugagcau

SEQ ID NO: 735460 - RNA, 22 nt, Human
acaacugggggcauuacuggca

SEQ ID NO: 735461 - RNA, 22 nt, Human
cccacugcugcucuccauggca

SEQ ID NO: 735462 - RNA, 22 nt, Human
aagucagacagcugagcugccu

SEQ ID NO: 735463 - RNA, 22 nt, Human
ccuuuggcauuuugaggaugcg

SEQ ID NO: 735464 - RNA, 22 nt, Human
agacugggauucucccugauca

SEQ ID NO: 735465 - RNA, 22 nt, Human
uggucaaaagcuacuaugaaug

SEQ ID NO: 735466 - RNA, 22 nt, Human
ugucccaguuuugcagguuaga

SEQ ID NO: 735467 - RNA, 22 nt, Human
gcuccagcucuguucuggggaa

SEQ ID NO: 735468 - RNA, 22 nt, Human
auccauuuguaaauguuagagu

SEQ ID NO: 735469 - RNA, 22 nt, Human
cuugcuuguuuaguucacagau

SEQ ID NO: 735470 - RNA, 22 nt, Human
gaugugugugcccugggccugc

SEQ ID NO: 735471 - RNA, 22 nt, Human
ucaguuuucucaucugugaaau

SEQ ID NO: 735472 - RNA, 22 nt, Human
cauucacaauaguugaaaggug

SEQ ID NO: 735473 - RNA, 22 nt, Human
acaagucuuuuucaugucuucu

SEQ ID NO: 735474 - RNA, 22 nt, Human
ucauuguuauguuuugcugucu

SEQ ID NO: 735475 - RNA, 22 nt, Human
cccaggagguggaguucacagu

SEQ ID NO: 735476 - RNA, 22 nt, Human
gagaguuccaguaaguggauuc

SEQ ID NO: 735477 - RNA, 21 nt, Human
agcagacugaauacauucuua

SEQ ID NO: 735478 - RNA, 22 nt, Human
ggugccagugggucucaggaua

SEQ ID NO: 735479 - RNA, 19 nt, Human
cacauacagaaaagaguaa

SEQ ID NO: 735480 - RNA, 20 nt, Human
cccugagacaaaggaggggc

SEQ ID NO: 735481 - RNA, 22 nt, Human
uccaggcucucaggugucagca

SEQ ID NO: 735482 - RNA, 22 nt, Human
gaggucugccuucaggagaguu

SEQ ID NO: 735483 - RNA, 22 nt, Human
aggucugaguagagaaaaggca

SEQ ID NO: 735484 - RNA, 22 nt, Human
agcagcacauggggcuggcaac

SEQ ID NO: 735485 - RNA, 22 nt, Human
guguggcaaggugagaaguggg

SEQ ID NO: 735486 - RNA, 22 nt, Human
uggcagcacuagguacugagcu

SEQ ID NO: 735487 - RNA, 22 nt, Human
agccucugucaagcuuuucaaa

SEQ ID NO: 735488 - RNA, 22 nt, Human
aguguuuagggaaucaaggggu

SEQ ID NO: 735489 - RNA, 22 nt, Human
uuucucucuauuuagacaggua

SEQ ID NO: 735490 - RNA, 22 nt, Human
gcucauucagccagggcccggu

SEQ ID NO: 735491 - RNA, 22 nt, Human
accagcugaacugcagcccagg

SEQ ID NO: 735492 - RNA, 22 nt, Human
gucugaaugaugagugggacuc

SEQ ID NO: 735493 - RNA, 22 nt, Human
gucccagaggcuuuggccacag

SEQ ID NO: 735494 - RNA, 22 nt, Human
agcaggcauagaguagcacuca

SEQ ID NO: 735495 - RNA, 22 nt, Human
uuggaaggauuuagagaugucu

SEQ ID NO: 735496 - RNA, 22 nt, Human
uucauugauuccaggcucuucu

SEQ ID NO: 735497 - RNA, 23 nt, Human
cccagcugcagacaagggagggu

SEQ ID NO: 735498 - RNA, 22 nt, Human
aguuccaccauuuaggaucugu

SEQ ID NO: 735499 - RNA, 22 nt, Human
ugugugcauucacaugcaugcc

SEQ ID NO: 735500 - RNA, 22 nt, Human
aaagauguuuuacauagcaccu

SEQ ID NO: 735501 - RNA, 22 nt, Human
auguaaacuacugacuacacua

SEQ ID NO: 735502 - RNA, 22 nt, Human
uaaaccauucagacugaaccac

SEQ ID NO: 735503 - RNA, 22 nt, Human
acacaauacagggcucaaaaua

SEQ ID NO: 735504 - RNA, 22 nt, Human
uuucacauuggcuucuauuucu

SEQ ID NO: 735505 - RNA, 22 nt, Human
auuugucuaaugaguguguacu

SEQ ID NO: 735506 - RNA, 22 nt, Human
guuuccaggcuuugguaugguu

SEQ ID NO: 735507 - RNA, 22 nt, Human
gaagcugaugaggaccagauug

SEQ ID NO: 735508 - RNA, 22 nt, Human
gggagguguucugccaacgcgg

SEQ ID NO: 735509 - RNA, 22 nt, Human
accagaaggaccagaggcaagg

SEQ ID NO: 735510 - RNA, 22 nt, Human
ugcuuuuauuuaauaucuugca

SEQ ID NO: 735511 - RNA, 22 nt, Human
uucucuuuauguauuuaguggg

SEQ ID NO: 735512 - RNA, 22 nt, Human
uggcucagugacauuccuccca

SEQ ID NO: 735513 - RNA, 22 nt, Human
gggcuguguaaugugcucuuuu

SEQ ID NO: 735514 - RNA, 22 nt, Human
cagcaccagcauauuccagggc

SEQ ID NO: 735515 - RNA, 22 nt, Human
uucuggaaaugcacaacuaauu

SEQ ID NO: 735516 - RNA, 22 nt, Human
auggcaggauacccaguccggc

SEQ ID NO: 735517 - RNA, 22 nt, Human
ccugagcauuagacauccauca

SEQ ID NO: 735518 - RNA, 22 nt, Human
cuauauucuggaauguccauuu

SEQ ID NO: 735519 - RNA, 22 nt, Human
ucaacacuggcuacaguuaugc

SEQ ID NO: 735520 - RNA, 22 nt, Human
ugcccugccaagacucaguggu

SEQ ID NO: 735521 - RNA, 22 nt, Human
aaauuguaggaucacaugaccu

SEQ ID NO: 735522 - RNA, 22 nt, Human
gcaaagacggacucaggagugc

SEQ ID NO: 735523 - RNA, 22 nt, Human
uccagucucuacucugagauaa

SEQ ID NO: 735524 - RNA, 22 nt, Human
ugagcugcagugagcugagaug

SEQ ID NO: 735525 - RNA, 22 nt, Human
cagcaggugggcuuugcggaug

SEQ ID NO: 735526 - RNA, 22 nt, Human
auugucaucgauguuagccagu

SEQ ID NO: 735527 - RNA, 22 nt, Human
agcagggcccacuaggggagau

SEQ ID NO: 735528 - RNA, 22 nt, Human
gauggguggguucugugagagg

SEQ ID NO: 735529 - RNA, 21 nt, Human
gcaaggccuaucauggcagcu

SEQ ID NO: 735530 - RNA, 22 nt, Human
uuauuuguggcauaugagacga

SEQ ID NO: 735531 - RNA, 22 nt, Human
ugggaaugugagcauucauuca

SEQ ID NO: 735532 - RNA, 22 nt, Human
cuauuugucaguuuggcuuuaa

SEQ ID NO: 735533 - RNA, 22 nt, Human
aggcucugcagugcuggaggac

SEQ ID NO: 735534 - RNA, 22 nt, Human
uucagcagucguccaggaaaag

SEQ ID NO: 735535 - RNA, 16 nt, Human
ccucuggcaauuagau

SEQ ID NO: 735536 - RNA, 22 nt, Human
ggcugccacgucgaggguccaa

SEQ ID NO: 735537 - RNA, 22 nt, Human
uauguacaagcacacaugugac

SEQ ID NO: 735538 - RNA, 22 nt, Human
cuccguuuuugaccggcacuga

SEQ ID NO: 735539 - RNA, 22 nt, Human
agcaggaaggcuuuggggguuc

SEQ ID NO: 735540 - RNA, 22 nt, Human
auugaagagaagcuaaauagag

SEQ ID NO: 735541 - RNA, 22 nt, Human
auaugugugcacauauguauuu

SEQ ID NO: 735542 - RNA, 22 nt, Human
cagggacagagacugcaccuug

SEQ ID NO: 735543 - RNA, 22 nt, Human
ggggagcaggcugggcugucug

SEQ ID NO: 735544 - RNA, 21 nt, Human
uucaguuucuuccucaucuau

SEQ ID NO: 735545 - RNA, 22 nt, Human
aagcacuuagaagagugccugc

SEQ ID NO: 735546 - RNA, 22 nt, Human
cuucauaucucuguagaguuuu

SEQ ID NO: 735547 - RNA, 22 nt, Human
gcaccacuagaguagagauggu

SEQ ID NO: 735548 - RNA, 23 nt, Human
guggagccacaucacaggcuccu

SEQ ID NO: 735549 - RNA, 22 nt, Human
ugcacuccaggcugggugacag

SEQ ID NO: 735550 - RNA, 22 nt, Human
ugcacaccucuccaccacucuc

SEQ ID NO: 735551 - RNA, 22 nt, Human
gcuggcucaagugugcuuccca

SEQ ID NO: 735552 - RNA, 22 nt, Human
uggaagccucaguuugccuucu

SEQ ID NO: 735553 - RNA, 22 nt, Human
aggaaucugugguuuuaacagg

SEQ ID NO: 735554 - RNA, 22 nt, Human
acuugccccagaauugcugcug

SEQ ID NO: 735555 - RNA, 22 nt, Human
uuuucauugagcaccugaguaa

SEQ ID NO: 735556 - RNA, 22 nt, Human
aguaauaauuuauauuagggag

SEQ ID NO: 735557 - RNA, 22 nt, Human
aguuucuuuagauagaaaguuc

SEQ ID NO: 735558 - RNA, 22 nt, Human
gaaggcugagcagacaggccaa

SEQ ID NO: 735559 - RNA, 22 nt, Human
agagacuguguccaucgugccu

SEQ ID NO: 735560 - RNA, 22 nt, Human
caguuaccagaucgcaggaggu

SEQ ID NO: 735561 - RNA, 22 nt, Human
cuguuuaaugagguguaacaac

SEQ ID NO: 735562 - RNA, 22 nt, Human
agaggcucuaauccccuccaca

SEQ ID NO: 735563 - RNA, 22 nt, Human
aaaugcauuaagucagaacaau

SEQ ID NO: 735564 - RNA, 22 nt, Human
auuucuauaggaggacaguauu

SEQ ID NO: 735565 - RNA, 22 nt, Human
ucaggaaauggaauucuugugu

SEQ ID NO: 735566 - RNA, 22 nt, Human
aggaaagugaauguuauuuugc

SEQ ID NO: 735567 - RNA, 22 nt, Human
uuguguuaaggugcaucuagug

SEQ ID NO: 735568 - RNA, 22 nt, Human
guaggccagugugaaaccuggu

SEQ ID NO: 735569 - RNA, 22 nt, Human
cagaggggauaacagguguaga

SEQ ID NO: 735570 - RNA, 22 nt, Human
cuaaacauguagcuuuuguggu

SEQ ID NO: 735571 - RNA, 22 nt, Human
ugucgauucagcucuucagaga

SEQ ID NO: 735572 - RNA, 22 nt, Human
gacugagggauagaggugcuuc

SEQ ID NO: 735573 - RNA, 22 nt, Human
aaacugaggaacaaggaaggau

SEQ ID NO: 735574 - RNA, 22 nt, Human
ucaggcuguuccuguccaaaau

SEQ ID NO: 735575 - RNA, 19 nt, Human
uuuagaaguugaaacucug

SEQ ID NO: 735576 - RNA, 22 nt, Human
uggaggcaggggauacagguca

SEQ ID NO: 735577 - RNA, 22 nt, Human
ucugagaguccaucuccaagcc

SEQ ID NO: 735578 - RNA, 22 nt, Human
agggcucagaaaugucuacggg

SEQ ID NO: 735579 - RNA, 22 nt, Human
aaagucaggcuguguaccuaac

SEQ ID NO: 735580 - RNA, 22 nt, Human
ugagcugguucuugaggcauga

SEQ ID NO: 735581 - RNA, 22 nt, Human
ucccugaggaagggguguggug

SEQ ID NO: 735582 - RNA, 22 nt, Human
gccacagggcagaugcgcagag

SEQ ID NO: 735583 - RNA, 22 nt, Human
cagacacacacccuggccuagc

SEQ ID NO: 735584 - RNA, 23 nt, Human
ggcugagaagucccaugauaggu

SEQ ID NO: 735585 - RNA, 22 nt, Human
aacaugugucuugcauuucuug

SEQ ID NO: 735586 - RNA, 22 nt, Human
uggccucaaccguccuaagcac

SEQ ID NO: 735587 - RNA, 22 nt, Human
cagagggcacucggagugacau

SEQ ID NO: 735588 - RNA, 20 nt, Human
auuuguuucuacucucugac

SEQ ID NO: 735589 - RNA, 22 nt, Human
uauacaauggcugaaucaucca

SEQ ID NO: 735590 - RNA, 22 nt, Human
uuuuucucuaugccaggggccu

SEQ ID NO: 735591 - RNA, 22 nt, Human
uuuaagcuguggcauuaauucu

SEQ ID NO: 735592 - RNA, 22 nt, Human
agggggaggcugugcugcgucu

SEQ ID NO: 735593 - RNA, 22 nt, Human
gaguuauauccugagucauauu

SEQ ID NO: 735594 - RNA, 19 nt, Human
agugaaauggaguauucaa

SEQ ID NO: 735595 - RNA, 22 nt, Human
aaacuacaucucauggaugagg

SEQ ID NO: 735596 - RNA, 22 nt, Human
uugcaauuaacauaugucaacu

SEQ ID NO: 735597 - RNA, 22 nt, Human
aucuuguuauaagagauaaugg

SEQ ID NO: 735598 - RNA, 22 nt, Human
cccagugugaugagguugcuaa

SEQ ID NO: 735599 - RNA, 22 nt, Human
agaccacuggccuccugcagac

SEQ ID NO: 735600 - RNA, 22 nt, Human
aauuagggagagguagcuaggu

SEQ ID NO: 735601 - RNA, 22 nt, Human
guuaaugucuuccuauucuaca

SEQ ID NO: 735602 - RNA, 22 nt, Human
agggccugucuguagaacugaa

SEQ ID NO: 735603 - RNA, 21 nt, Human
gaugguagccucauagaagua

SEQ ID NO: 735604 - RNA, 22 nt, Human
acucugccccgaguucugggaa

SEQ ID NO: 735605 - RNA, 22 nt, Human
uauucucagcaacacacaugga

SEQ ID NO: 735606 - RNA, 22 nt, Human
aagaggcuucagauccuucaga

SEQ ID NO: 735607 - RNA, 22 nt, Human
uuccuuacauucauauggcuuc

SEQ ID NO: 735608 - RNA, 22 nt, Human
caagaugggcaccccagcaccu

SEQ ID NO: 735609 - RNA, 22 nt, Human
ugcacagcgggugucugucagg

SEQ ID NO: 735610 - RNA, 22 nt, Human
uagagaugaauucugcagucuu

SEQ ID NO: 735611 - RNA, 22 nt, Human
uuacaguuguucuaucagcaug

SEQ ID NO: 735612 - RNA, 22 nt, Human
gcugucaggccaugugggccuu

SEQ ID NO: 735613 - RNA, 22 nt, Human
cagacaggguggguuucugggc

SEQ ID NO: 735614 - RNA, 22 nt, Human
gggaagggagggccuccaguca

SEQ ID NO: 735615 - RNA, 22 nt, Human
uugauuacaaaguagauacauu

SEQ ID NO: 735616 - RNA, 22 nt, Human
caguccugcccaggcugacaga

SEQ ID NO: 735617 - RNA, 22 nt, Human
uaagugaauccuugagaagaaa

SEQ ID NO: 735618 - RNA, 17 nt, Human
acagagcacaucaagau

SEQ ID NO: 735619 - RNA, 22 nt, Human
ggcuccaguuuccccuuggggc

SEQ ID NO: 735620 - RNA, 22 nt, Human
uucugacacauuacuacaugga

SEQ ID NO: 735621 - RNA, 22 nt, Human
uggcccucagcacugagaccuu

SEQ ID NO: 735622 - RNA, 22 nt, Human
acugggaaaagcuauggcaaau

SEQ ID NO: 735623 - RNA, 22 nt, Human
gcuggucacucugggagcugcu

SEQ ID NO: 735624 - RNA, 22 nt, Human
cuguacaaguccuucaucaggg

SEQ ID NO: 735625 - RNA, 22 nt, Human
ucaaaaccuaggcucucugcuu

SEQ ID NO: 735626 - RNA, 22 nt, Human
agcuuuagagagccaagacuca

SEQ ID NO: 735627 - RNA, 22 nt, Human
uugucugauguucccucaugau

SEQ ID NO: 735628 - RNA, 22 nt, Human
cgucugccuaaggacugccuuc

SEQ ID NO: 735629 - RNA, 22 nt, Human
uguacaguauauuucaaagcca

SEQ ID NO: 735630 - RNA, 22 nt, Human
gccugagcccaggugugcagag

SEQ ID NO: 735631 - RNA, 20 nt, Human
ucccaagggcugagaggauc

SEQ ID NO: 735632 - RNA, 21 nt, Human
uacagcaccgaguaggcccuc

SEQ ID NO: 735633 - RNA, 22 nt, Human
gggcauggggcggaccugguuc

SEQ ID NO: 735634 - RNA, 22 nt, Human
ucuggcaucacucgcaagagca

SEQ ID NO: 735635 - RNA, 22 nt, Human
uagcaacauaagaaacauuuug

SEQ ID NO: 735636 - RNA, 22 nt, Human
uuuagucagguaagaugcaggg

SEQ ID NO: 735637 - RNA, 22 nt, Human
cccccugcgcccggcacgucau

SEQ ID NO: 735638 - RNA, 22 nt, Human
cagagugauaaauauagaaauu

SEQ ID NO: 735639 - RNA, 22 nt, Human
cagcagcucagucucucaguag

SEQ ID NO: 735640 - RNA, 22 nt, Human
gucccugggucuaaggcaguaa

SEQ ID NO: 735641 - RNA, 18 nt, Human
uugagaaauaagcacuaa

SEQ ID NO: 735642 - RNA, 22 nt, Human
gugcuuaauacaugucaauaac

SEQ ID NO: 735643 - RNA, 22 nt, Human
ugauucagucucuucaggagaa

SEQ ID NO: 735644 - RNA, 22 nt, Human
cuuuuacacucaucugggaggg

SEQ ID NO: 735645 - RNA, 22 nt, Human
uaauacagacaacuugccaaau

SEQ ID NO: 735646 - RNA, 22 nt, Human
ggacaggcccggggagccugga

SEQ ID NO: 735647 - RNA, 22 nt, Human
gcucugugcaguucagggacac

SEQ ID NO: 735648 - RNA, 22 nt, Human
ggcugguccuuucucuguccua

SEQ ID NO: 735649 - RNA, 22 nt, Human
uggcucugguaacauuggguag

SEQ ID NO: 735650 - RNA, 22 nt, Human
acucccuuuucccguaaucuau

SEQ ID NO: 735651 - RNA, 22 nt, Human
agucacugucuugcaaagguca

SEQ ID NO: 735652 - RNA, 22 nt, Human
cuggagcugggcuaggguagga

SEQ ID NO: 735653 - RNA, 22 nt, Human
ggagccugcgggagcucccauu

SEQ ID NO: 735654 - RNA, 22 nt, Human
gagcagcuugcgcugucuucac

SEQ ID NO: 735655 - RNA, 22 nt, Human
acuuggcugggagaguugaaga

SEQ ID NO: 735656 - RNA, 18 nt, Human
gaauaucuagcacauagu

SEQ ID NO: 735657 - RNA, 20 nt, Human
uccugagccuccaccauguc

SEQ ID NO: 735658 - RNA, 22 nt, Human
gugggccacugggaggcaaggg

SEQ ID NO: 735659 - RNA, 22 nt, Human
cagggcuggcucaugaaaaguu

SEQ ID NO: 735660 - RNA, 22 nt, Human
ucaguguucagggaccaggucc

SEQ ID NO: 735661 - RNA, 22 nt, Human
agcaaaucuaugaauguauauu

SEQ ID NO: 735662 - RNA, 22 nt, Human
cuggaaggugacugucuugaau

SEQ ID NO: 735663 - RNA, 22 nt, Human
uuucauggcuaggacuagagug

SEQ ID NO: 735664 - RNA, 22 nt, Human
acugagaagcucgcagugaugc

SEQ ID NO: 735665 - RNA, 22 nt, Human
auguccuguuuuggcuugcucu

SEQ ID NO: 735666 - RNA, 22 nt, Human
ucagggcuggcuuuugcagagc

SEQ ID NO: 735667 - RNA, 22 nt, Human
cuccugugguacucccagggcc

SEQ ID NO: 735668 - RNA, 22 nt, Human
cacuguccaauagauacauaau

SEQ ID NO: 735669 - RNA, 22 nt, Human
ucacaaaugaggaaaucgagca

SEQ ID NO: 735670 - RNA, 23 nt, Human
caucagagguugccacucccugg

SEQ ID NO: 735671 - RNA, 22 nt, Human
gaguccucaacggggagaggcg

SEQ ID NO: 735672 - RNA, 22 nt, Human
ucagccagggcucuggccucag

SEQ ID NO: 735673 - RNA, 22 nt, Human
ucaaguucacagucuggucgcu

SEQ ID NO: 735674 - RNA, 22 nt, Human
aggcccuggucaggucuggcug

SEQ ID NO: 735675 - RNA, 22 nt, Human
ggcugcugaguuggccaggaga

SEQ ID NO: 735676 - RNA, 22 nt, Human
cugcugguaccaguggccguca

SEQ ID NO: 735677 - RNA, 22 nt, Human
gagggccuacuggacaugucag

SEQ ID NO: 735678 - RNA, 22 nt, Human
auguagugcccuuugucaucua

SEQ ID NO: 735679 - RNA, 19 nt, Human
auggaaaauuguacucaau

SEQ ID NO: 735680 - RNA, 22 nt, Human
gggagcacugagaggcagguag

SEQ ID NO: 735681 - RNA, 22 nt, Human
uuuccacaucaccaugagguga

SEQ ID NO: 735682 - RNA, 22 nt, Human
cagaccucaaagcugcagugcu

SEQ ID NO: 735683 - RNA, 22 nt, Human
ucuagcugccccgaggcagggu

SEQ ID NO: 735684 - RNA, 22 nt, Human
ggcuccacugcugaccacucca

SEQ ID NO: 735685 - RNA, 22 nt, Human
gggcucugugcaccccagcacc

SEQ ID NO: 735686 - RNA, 22 nt, Human
cugcaguucucaauuucuauug

SEQ ID NO: 735687 - RNA, 22 nt, Human
agcugccugcuuaugagcucca

SEQ ID NO: 735688 - RNA, 22 nt, Human
aggcuagauagagggucaucuu

SEQ ID NO: 735689 - RNA, 22 nt, Human
gcugaguggagcagucagcgcu

SEQ ID NO: 735690 - RNA, 20 nt, Human
ugcauuaaguggcauugagc

SEQ ID NO: 735691 - RNA, 22 nt, Human
agugaaaugauucugagcaaga

SEQ ID NO: 735692 - RNA, 23 nt, Human
ugacacauuuccuuuccacugca

SEQ ID NO: 735693 - RNA, 22 nt, Human
uagcugggacuacuggcccugc

SEQ ID NO: 735694 - RNA, 22 nt, Human
cacuggaaguucauucucagaa

SEQ ID NO: 735695 - RNA, 22 nt, Human
agggaugaucaggguagaggcu

SEQ ID NO: 735696 - RNA, 22 nt, Human
ggaggacaggggcugcagcaca

SEQ ID NO: 735697 - RNA, 19 nt, Human
uaugaagaauguggcaaag

SEQ ID NO: 735698 - RNA, 21 nt, Human
accuucaguguucucagcugc

SEQ ID NO: 735699 - RNA, 22 nt, Human
aucauucagucucugggacagu

SEQ ID NO: 735700 - RNA, 22 nt, Human
cacaauacuauuuuuaggucuu

SEQ ID NO: 735701 - RNA, 22 nt, Human
acauuaaaauggagaauuuuga

SEQ ID NO: 735702 - RNA, 22 nt, Human
cgggcagcggcguggccauggu

SEQ ID NO: 735703 - RNA, 22 nt, Human
aagauuucuuacuuauugaugc

SEQ ID NO: 735704 - RNA, 22 nt, Human
auuuagagaauaagacauaaau

SEQ ID NO: 735705 - RNA, 22 nt, Human
aaccaguacuuuacacagcucu

SEQ ID NO: 735706 - RNA, 21 nt, Human
uuccacaguccugaggauuca

SEQ ID NO: 735707 - RNA, 22 nt, Human
ugggaaggggagcuggaaagga

SEQ ID NO: 735708 - RNA, 22 nt, Human
uauguaaaguagauggcaggua

SEQ ID NO: 735709 - RNA, 22 nt, Human
ucuuugauuugacaauaucuug

SEQ ID NO: 735710 - RNA, 22 nt, Human
gagcaacaggugauggggcugu

SEQ ID NO: 735711 - RNA, 22 nt, Human
aaacugcaauuacuuuugcacc

SEQ ID NO: 735712 - RNA, 22 nt, Human
ggcuuggaccagucacaguggu

SEQ ID NO: 735713 - RNA, 22 nt, Human
acuuuggaucugauguaaucag

SEQ ID NO: 735714 - RNA, 23 nt, Human
uuacuuuugcaccaaccuaauau

SEQ ID NO: 735715 - RNA, 22 nt, Human
uucucaguaugugacgaggacc

SEQ ID NO: 735716 - RNA, 22 nt, Human
uccguugagucagcuucggacc

SEQ ID NO: 735717 - RNA, 22 nt, Human
aaucaagaggcgauggauggaa

SEQ ID NO: 735718 - RNA, 22 nt, Human
cugugccuccaaguggucucug

SEQ ID NO: 735719 - RNA, 22 nt, Human
aagguacagaaauuaacaagga

SEQ ID NO: 735720 - RNA, 22 nt, Human
gccagcugcuucuccagaauuu

SEQ ID NO: 735721 - RNA, 22 nt, Human
ucagaagguacugaagacaugg

SEQ ID NO: 735722 - RNA, 22 nt, Human
caucacagauguuguguggagu

SEQ ID NO: 735723 - RNA, 22 nt, Human
uuuuguuguaauauaccuaucc

SEQ ID NO: 735724 - RNA, 22 nt, Human
gugcuuuuccuuauuuggugcu

SEQ ID NO: 735725 - RNA, 22 nt, Human
caucugaauuugccuuaguuuc

SEQ ID NO: 735726 - RNA, 18 nt, Human
cacaggaaggggaauauc

SEQ ID NO: 735727 - RNA, 17 nt, Human
ucuguucaagugagagg

SEQ ID NO: 735728 - RNA, 22 nt, Human
uuucucuuugacaggaaucaga

SEQ ID NO: 735729 - RNA, 22 nt, Human
agaucauuaaccaccuguucug

SEQ ID NO: 735730 - RNA, 22 nt, Human
agggugucagccacggaauggg

SEQ ID NO: 735731 - RNA, 22 nt, Human
aagagacuguaaaggcgugagu

SEQ ID NO: 735732 - RNA, 22 nt, Human
uggauggcuggggaagagcagg

SEQ ID NO: 735733 - RNA, 20 nt, Human
ucaaagacaagcucucaucc

SEQ ID NO: 735734 - RNA, 22 nt, Human
ugggaggagcccucugggaagg

SEQ ID NO: 735735 - RNA, 22 nt, Human
aaguuugugguuauacuugauu

SEQ ID NO: 735736 - RNA, 20 nt, Human
gcugaagauucccaugcaag

SEQ ID NO: 735737 - RNA, 22 nt, Human
auugacaaaaacaggugguuga

SEQ ID NO: 735738 - RNA, 22 nt, Human
uggcuucucagaauacucugga

SEQ ID NO: 735739 - RNA, 22 nt, Human
agccacagagguugaugugguu

SEQ ID NO: 735740 - RNA, 22 nt, Human
gaauuuugcuuuuaugucaagu

SEQ ID NO: 735741 - RNA, 22 nt, Human
agggggcucagcaggcucugga

SEQ ID NO: 735742 - RNA, 22 nt, Human
cccagcucaucaggagccgccc

SEQ ID NO: 735743 - RNA, 23 nt, Human
ucugugcuacaaaucgcgucugu

SEQ ID NO: 735744 - RNA, 22 nt, Human
ucagaggccuugguuaugguau

SEQ ID NO: 735745 - RNA, 22 nt, Human
caggcucuuuugguggcaagga

SEQ ID NO: 735746 - RNA, 22 nt, Human
ugugugugcaggagagcaggug

SEQ ID NO: 735747 - RNA, 22 nt, Human
ccagcagggaaaaacccaccaa

SEQ ID NO: 735748 - RNA, 22 nt, Human
ugacagggacaguggagaugga

SEQ ID NO: 735749 - RNA, 22 nt, Human
cccagcucgccgccgaugugcg

SEQ ID NO: 735750 - RNA, 22 nt, Human
cagcagaaguccgacuccaguc

SEQ ID NO: 735751 - RNA, 22 nt, Human
aggaaaaagaguugcugccuuc

SEQ ID NO: 735752 - RNA, 22 nt, Human
uaggaagaugaguaucaacuug

SEQ ID NO: 735753 - RNA, 22 nt, Human
uuggcccugaggaggcagcugc

SEQ ID NO: 735754 - RNA, 22 nt, Human
cacugaggcugggggagaaggu

SEQ ID NO: 735755 - RNA, 20 nt, Human
ucagauuaaauguucugucu

SEQ ID NO: 735756 - RNA, 22 nt, Human
agaacagugcugauaaaucaua

SEQ ID NO: 735757 - RNA, 22 nt, Human
gcagcaggcauggccgcccugg

SEQ ID NO: 735758 - RNA, 22 nt, Human
ggcugugcccucacauggggca

SEQ ID NO: 735759 - RNA, 22 nt, Human
aaaaccugugaauaguuaacuc

SEQ ID NO: 735760 - RNA, 22 nt, Human
uauuauguagaguaaggguuaa

SEQ ID NO: 735761 - RNA, 22 nt, Human
aggcugugaggggcccgcaugc

SEQ ID NO: 735762 - RNA, 22 nt, Human
aaaauucauuccucagacugcc

SEQ ID NO: 735763 - RNA, 22 nt, Human
cagcagagcugggcuuugaauu

SEQ ID NO: 735764 - RNA, 22 nt, Human
gaaaagagaacaucugaggauc

SEQ ID NO: 735765 - RNA, 22 nt, Human
ccaguacaucgcauggugacca

SEQ ID NO: 735766 - RNA, 22 nt, Human
uggcagcugccauguccacgug

SEQ ID NO: 735767 - RNA, 22 nt, Human
cugggagugucccucugguaau

SEQ ID NO: 735768 - RNA, 22 nt, Human
gcagaaguggauucuacaauuu

SEQ ID NO: 735769 - RNA, 20 nt, Human
ucugagguaugauagggucu

SEQ ID NO: 735770 - RNA, 22 nt, Human
gaguuuguaaacuauucacuaa

SEQ ID NO: 735771 - RNA, 22 nt, Human
uaugauuuguagacauuugauu

SEQ ID NO: 735772 - RNA, 17 nt, Human
cccagagaugcugccuu

SEQ ID NO: 735773 - RNA, 22 nt, Human
ccagcuccagguagaugggcag

SEQ ID NO: 735774 - RNA, 22 nt, Human
cacucucucaggcuuuccuugu

SEQ ID NO: 735775 - RNA, 19 nt, Human
ugguggaggccccauguuc

SEQ ID NO: 735776 - RNA, 22 nt, Human
augaggccuuucuucacccuuu

SEQ ID NO: 735777 - RNA, 22 nt, Human
gcugcccagggcugaguguccu

SEQ ID NO: 735778 - RNA, 22 nt, Human
ggcugcagguugguuggcagcu

SEQ ID NO: 735779 - RNA, 22 nt, Human
ccaggucugucuucuuagcuca

SEQ ID NO: 735780 - RNA, 22 nt, Human
aagcccagaaucaagucuacug

SEQ ID NO: 735781 - RNA, 22 nt, Human
gccaaggccugcagcaccucau

SEQ ID NO: 735782 - RNA, 21 nt, Human
agcagccauuucacagagacu

SEQ ID NO: 735783 - RNA, 22 nt, Human
aauugcuagacuauacuguaau

SEQ ID NO: 735784 - RNA, 22 nt, Human
aauaaucucccuuuuuguaugu

SEQ ID NO: 735785 - RNA, 22 nt, Human
uucccacagagauuacauugaa

SEQ ID NO: 735786 - RNA, 22 nt, Human
cuuaaaguagaauacaagaccu

SEQ ID NO: 735787 - RNA, 22 nt, Human
cugucagguuucccaucugcaa

SEQ ID NO: 735788 - RNA, 22 nt, Human
uguguguguuucugcucauaca

SEQ ID NO: 735789 - RNA, 22 nt, Human
aaugcuuugacuauaucuauaa

SEQ ID NO: 735790 - RNA, 22 nt, Human
uucuccucacugcagccuuuca

SEQ ID NO: 735791 - RNA, 22 nt, Human
ugugccaugaggcucugauaug

SEQ ID NO: 735792 - RNA, 22 nt, Human
cugcuacaccggaauagugaca

SEQ ID NO: 735793 - RNA, 22 nt, Human
agcagggagaccaucucuuccu

SEQ ID NO: 735794 - RNA, 22 nt, Human
auauuguuaguaauauuucgaa

SEQ ID NO: 735795 - RNA, 22 nt, Human
uucccaugccuggccccuaucc

SEQ ID NO: 735796 - RNA, 19 nt, Human
aguauagaguauugaggag

SEQ ID NO: 735797 - RNA, 22 nt, Human
uuugaauggacugagaaucuug

SEQ ID NO: 735798 - RNA, 22 nt, Human
uguuuucaagucaaggccaaau

SEQ ID NO: 735799 - RNA, 22 nt, Human
aguguuuuggagugggaaggca

SEQ ID NO: 735800 - RNA, 22 nt, Human
aaacaauuuccaccucuccuga

SEQ ID NO: 735801 - RNA, 22 nt, Human
ucuuaaaaguaugccaauugga

SEQ ID NO: 735802 - RNA, 22 nt, Human
agaaagauuuucaacaggaggu

SEQ ID NO: 735803 - RNA, 22 nt, Human
aggcagcccugugcuggaugcu

SEQ ID NO: 735804 - RNA, 22 nt, Human
guggcagagguuccucagugug

SEQ ID NO: 735805 - RNA, 21 nt, Human
uccuugggcagugcccagcuu

SEQ ID NO: 735806 - RNA, 22 nt, Human
ugaaagguguccaauauuucuc

SEQ ID NO: 735807 - RNA, 22 nt, Human
uucaauaggaugcaugauauaa

SEQ ID NO: 735808 - RNA, 22 nt, Human
ugcagcugaaccuagagucugu

SEQ ID NO: 735809 - RNA, 22 nt, Human
aggggagccgaggggcaucugu

SEQ ID NO: 735810 - RNA, 22 nt, Human
cuucacugaugggacagcucaa

SEQ ID NO: 735811 - RNA, 22 nt, Human
gcuuuugagguccugcucagcc

SEQ ID NO: 735812 - RNA, 22 nt, Human
ugcuuccgcuaaaaauuaaucc

SEQ ID NO: 735813 - RNA, 22 nt, Human
ggccggggccuccccgcgucgc

SEQ ID NO: 735814 - RNA, 22 nt, Human
cucugagaggauccugcccggg

SEQ ID NO: 735815 - RNA, 22 nt, Human
cauuuguacauguugucuucuu

SEQ ID NO: 735816 - RNA, 22 nt, Human
cuuuauauccagauguuuggug

SEQ ID NO: 735817 - RNA, 22 nt, Human
guguccuuuccgggccuggagg

SEQ ID NO: 735818 - RNA, 19 nt, Human
cuggcugcaaugccagggu

SEQ ID NO: 735819 - RNA, 21 nt, Human
uguggcagauguugggaggca

SEQ ID NO: 735820 - RNA, 22 nt, Human
ucuuguuaaagugaagauacug

SEQ ID NO: 735821 - RNA, 22 nt, Human
gugcuggcuggacauggagcac

SEQ ID NO: 735822 - RNA, 22 nt, Human
agauacuauggaauuuuaugag

SEQ ID NO: 735823 - RNA, 22 nt, Human
ggaugggcccgggacggcgcug

SEQ ID NO: 735824 - RNA, 22 nt, Human
guggaugagauaacuguagaag

SEQ ID NO: 735825 - RNA, 22 nt, Human
cucuuccucucaugcggucaua

SEQ ID NO: 735826 - RNA, 22 nt, Human
aagaauguggguggauaugaug

SEQ ID NO: 735827 - RNA, 22 nt, Human
gucucugagcucugagcuggcu

SEQ ID NO: 735828 - RNA, 22 nt, Human
uggccagaguugaggggguuuc

SEQ ID NO: 735829 - RNA, 22 nt, Human
uaagaaacugucacaguacuau

SEQ ID NO: 735830 - RNA, 22 nt, Human
agugcucucuccccagugcuac

SEQ ID NO: 735831 - RNA, 22 nt, Human
agccagcaucuugcuucuugag

SEQ ID NO: 735832 - RNA, 22 nt, Human
ugcugguggagaaaguggaggu

SEQ ID NO: 735833 - RNA, 22 nt, Human
uguguggccuccauaggguacu

SEQ ID NO: 735834 - RNA, 22 nt, Human
ggcugcucuucuuggcgaccuc

SEQ ID NO: 735835 - RNA, 22 nt, Human
agacacuggcacuggggaagcc

SEQ ID NO: 735836 - RNA, 22 nt, Human
caugggagcuaucuccaucacu

SEQ ID NO: 735837 - RNA, 22 nt, Human
cagcccagaacucacgucucca

SEQ ID NO: 735838 - RNA, 22 nt, Human
acacaggaagucagcacugaug

SEQ ID NO: 735839 - RNA, 22 nt, Human
ucugaaaucuguaagcacuagc

SEQ ID NO: 735840 - RNA, 22 nt, Human
ugucccacugacuucacaucca

SEQ ID NO: 735841 - RNA, 22 nt, Human
gcagagcaggggcugaaccugg

SEQ ID NO: 735842 - RNA, 22 nt, Human
uccuguggagaggacuggaggu

SEQ ID NO: 735843 - RNA, 22 nt, Human
ggcugcugcccaccccugcaug

SEQ ID NO: 735844 - RNA, 22 nt, Human
ccagauguauguaugagugcau

SEQ ID NO: 735845 - RNA, 22 nt, Human
acugucaucuuguaagcaaugu

SEQ ID NO: 735846 - RNA, 20 nt, Human
ucucuucuggggagauaaaa

SEQ ID NO: 735847 - RNA, 19 nt, Human
ggcaggcuggauagagagg

SEQ ID NO: 735848 - RNA, 22 nt, Human
gagcuucagcugccaugacugu

SEQ ID NO: 735849 - RNA, 22 nt, Human
uuuauucagcagcagcaguggu

SEQ ID NO: 735850 - RNA, 22 nt, Human
augugucucuaccaaugcaauu

SEQ ID NO: 735851 - RNA, 22 nt, Human
cagaauugagagaggcuguucu

SEQ ID NO: 735852 - RNA, 22 nt, Human
uauuucagucacuucuucucug

SEQ ID NO: 735853 - RNA, 21 nt, Human
uguggcagagacaaugcuagu

SEQ ID NO: 735854 - RNA, 22 nt, Human
uauaggacugaucacauuuuca

SEQ ID NO: 735855 - RNA, 22 nt, Human
acucauuuuuacugcaauugag

SEQ ID NO: 735856 - RNA, 22 nt, Human
ugucauuucacaauaucacuca

SEQ ID NO: 735857 - RNA, 22 nt, Human
gagccaagcaauauacccaacc

SEQ ID NO: 735858 - RNA, 22 nt, Human
caccucucauuucuacagauuc

SEQ ID NO: 735859 - RNA, 22 nt, Human
agugcagauuuuuagucagcuu

SEQ ID NO: 735860 - RNA, 22 nt, Human
agggucugugcaagaacacgcc

SEQ ID NO: 735861 - RNA, 22 nt, Human
caucuuaauuucuaacaggcac

SEQ ID NO: 735862 - RNA, 22 nt, Human
gcuguggcuguacagagaccau

SEQ ID NO: 735863 - RNA, 22 nt, Human
ugcaaacuagcaucaacuagua

SEQ ID NO: 735864 - RNA, 18 nt, Human
uagaagugugcuauacaa

SEQ ID NO: 735865 - RNA, 22 nt, Human
agggcucauugacauggaaaag

SEQ ID NO: 735866 - RNA, 22 nt, Human
guaagcaaacagcaaaugauuu

SEQ ID NO: 735867 - RNA, 22 nt, Human
agcuccugcaccaggggccccu

SEQ ID NO: 735868 - RNA, 21 nt, Human
ucagcagaaggaccacuaggg

SEQ ID NO: 735869 - RNA, 22 nt, Human
agcaggugacccaagcaggcug

SEQ ID NO: 735870 - RNA, 22 nt, Human
guuuacaacaugccaacugggc

SEQ ID NO: 735871 - RNA, 22 nt, Human
augcuaaauaacugguuugacu

SEQ ID NO: 735872 - RNA, 23 nt, Human
uaauuuuagccuuacaggacccu

SEQ ID NO: 735873 - RNA, 22 nt, Human
uuuguaugggcagaaauuagau

SEQ ID NO: 735874 - RNA, 22 nt, Human
ggucacauucugagguauuagg

SEQ ID NO: 735875 - RNA, 22 nt, Human
guucugaguccuccuuugaagg

SEQ ID NO: 735876 - RNA, 22 nt, Human
uccuggagaacugauucgcggg

SEQ ID NO: 735877 - RNA, 22 nt, Human
cagaaagcuugguacaauaugc

SEQ ID NO: 735878 - RNA, 22 nt, Human
ugagcagcaacuguccauggca

SEQ ID NO: 735879 - RNA, 22 nt, Human
uacaugaccuagacuugcuaaa

SEQ ID NO: 735880 - RNA, 22 nt, Human
ugcaaaaacugcaauugcuuuu

SEQ ID NO: 735881 - RNA, 22 nt, Human
ucagagugcagggaguagcagc

SEQ ID NO: 735882 - RNA, 22 nt, Human
accaaggagccacauacaaccu

SEQ ID NO: 735883 - RNA, 22 nt, Human
aacauuuguuucguuaugugaa

SEQ ID NO: 735884 - RNA, 22 nt, Human
uuuucucaggugcuuaucuaag

SEQ ID NO: 735885 - RNA, 22 nt, Human
auccugagcuacaccugcuccu

SEQ ID NO: 735886 - RNA, 22 nt, Human
aacauuuccggccuuuuguucu

SEQ ID NO: 735887 - RNA, 22 nt, Human
aaugaccucagagcacccagaa

SEQ ID NO: 735888 - RNA, 23 nt, Human
aggcaaggguguaaaggaaauga

SEQ ID NO: 735889 - RNA, 22 nt, Human
agcagcucugagaggccagcac

SEQ ID NO: 735890 - RNA, 22 nt, Human
uacauguauguguuaauaucug

SEQ ID NO: 735891 - RNA, 22 nt, Human
ugcagcauuauucacaguagcc

SEQ ID NO: 735892 - RNA, 22 nt, Human
aaugauuggcacuagauacaca

SEQ ID NO: 735893 - RNA, 22 nt, Human
ggcuggugaguucagagaaccc

SEQ ID NO: 735894 - RNA, 22 nt, Human
ucaaauguucccuguacuggcc

SEQ ID NO: 735895 - RNA, 20 nt, Human
cugcuugggacacugccaga

SEQ ID NO: 735896 - RNA, 22 nt, Human
gggggcaggucuggaacuuuga

SEQ ID NO: 735897 - RNA, 22 nt, Human
aagcagauuggggauuuccaug

SEQ ID NO: 735898 - RNA, 22 nt, Human
uuaaacagagucugaaauguaa

SEQ ID NO: 735899 - RNA, 16 nt, Human
cagaguguaaacagga

SEQ ID NO: 735900 - RNA, 22 nt, Human
caguauguacucuuaucaugua

SEQ ID NO: 735901 - RNA, 21 nt, Human
ccuacagauggauauauauuc

SEQ ID NO: 735902 - RNA, 22 nt, Human
cuauggucuggaccgagguccu

SEQ ID NO: 735903 - RNA, 19 nt, Human
ccacagagacuagaagaca

SEQ ID NO: 735904 - RNA, 22 nt, Human
cuguggcucauaucuguaaucu

SEQ ID NO: 735905 - RNA, 20 nt, Human
gggcucuuagguagcagggg

SEQ ID NO: 735906 - RNA, 22 nt, Human
ucuagacaucuuggcugcaauu

SEQ ID NO: 735907 - RNA, 22 nt, Human
gggacagcagaaagaaggcaag

SEQ ID NO: 735908 - RNA, 22 nt, Human
uacaagauaagaauuggcaagg

SEQ ID NO: 735909 - RNA, 22 nt, Human
uuuauugggccuggaggaucua

SEQ ID NO: 735910 - RNA, 22 nt, Human
ucaggcgaggcuuaauccaagg

SEQ ID NO: 735911 - RNA, 22 nt, Human
ucugccuugagguccucagcuc

SEQ ID NO: 735912 - RNA, 22 nt, Human
uggucagacaaaggagaauguu

SEQ ID NO: 735913 - RNA, 22 nt, Human
ucauggaugauagcuucauugc

SEQ ID NO: 735914 - RNA, 22 nt, Human
acugggcaccaucaugagauag

SEQ ID NO: 735915 - RNA, 22 nt, Human
gccugguguccagaggcgagug

SEQ ID NO: 735916 - RNA, 22 nt, Human
gucucaguaagaaaggcuccug

SEQ ID NO: 735917 - RNA, 22 nt, Human
aggccugcagcaggagcaaacc

SEQ ID NO: 735918 - RNA, 22 nt, Human
cuucacaaauggccuagaguuc

SEQ ID NO: 735919 - RNA, 22 nt, Human
agcaccuucacaggcucucagg

SEQ ID NO: 735920 - RNA, 22 nt, Human
ugucucuucugccuccagcugu

SEQ ID NO: 735921 - RNA, 22 nt, Human
cauuagggccaccauaacaaaa

SEQ ID NO: 735922 - RNA, 22 nt, Human
augguguagcugucagucauaa

SEQ ID NO: 735923 - RNA, 22 nt, Human
aaacugugcuucccaaaugccc

SEQ ID NO: 735924 - RNA, 22 nt, Human
aggagcuucagagagaaccugg

SEQ ID NO: 735925 - RNA, 19 nt, Human
cgccuggcaggcccugcgc

SEQ ID NO: 735926 - RNA, 22 nt, Human
uccacauucucuguuacagaua

SEQ ID NO: 735927 - RNA, 22 nt, Human
cacuuaucucauuuaaucacca

SEQ ID NO: 735928 - RNA, 23 nt, Human
acccaucucuccugucaugcaga

SEQ ID NO: 735929 - RNA, 22 nt, Human
gccagagagacugauacaugcu

SEQ ID NO: 735930 - RNA, 22 nt, Human
auuagcuguugugaaaggggug

SEQ ID NO: 735931 - RNA, 22 nt, Human
gcagcuguucagcuggccagau

SEQ ID NO: 735932 - RNA, 21 nt, Human
uggcuaaacccuaguaaauua

SEQ ID NO: 735933 - RNA, 23 nt, Human
ccacaggcacagaggcuugcauc

SEQ ID NO: 735934 - RNA, 22 nt, Human
ccccacaccugccgggcagcag

SEQ ID NO: 735935 - RNA, 22 nt, Human
accucccuggccuucugauucc

SEQ ID NO: 735936 - RNA, 22 nt, Human
ucacaggagaauguacuuacca

SEQ ID NO: 735937 - RNA, 22 nt, Human
ucagcaagaagcugugggcuuc

SEQ ID NO: 735938 - RNA, 22 nt, Human
aucagaaaguucaucauguuug

SEQ ID NO: 735939 - RNA, 22 nt, Human
gacuccccugggccccauccag

SEQ ID NO: 735940 - RNA, 22 nt, Human
ugauuaacugucuauuaaucau

SEQ ID NO: 735941 - RNA, 22 nt, Human
ggagacagcaggaagaaauauc

SEQ ID NO: 735942 - RNA, 22 nt, Human
aaggccugcucagcugucugug

SEQ ID NO: 735943 - RNA, 22 nt, Human
gcaaggcugcugccacccaucu

SEQ ID NO: 735944 - RNA, 22 nt, Human
uucacaggugacuggggauaac

SEQ ID NO: 735945 - RNA, 22 nt, Human
ggcauggccuguaagacggaga

SEQ ID NO: 735946 - RNA, 22 nt, Human
gggauggcuuuguggcugacuc

SEQ ID NO: 735947 - RNA, 22 nt, Human
uugaggucaucugaaguacuag

SEQ ID NO: 735948 - RNA, 18 nt, Human
gggagcugggaagcuggu

SEQ ID NO: 735949 - RNA, 22 nt, Human
aaaugcagauuuugaugcagca

SEQ ID NO: 735950 - RNA, 22 nt, Human
ugcuccagugagcuggccaucc

SEQ ID NO: 735951 - RNA, 22 nt, Human
agcugucuuuggagagggagag

SEQ ID NO: 735952 - RNA, 22 nt, Human
ugucacaucagggguguugaca

SEQ ID NO: 735953 - RNA, 17 nt, Human
agcuucugcccuuucuu

SEQ ID NO: 735954 - RNA, 22 nt, Human
acaagauuuuaugacucuuuuu

SEQ ID NO: 735955 - RNA, 22 nt, Human
gggacaugaggccauagugauu

SEQ ID NO: 735956 - RNA, 22 nt, Human
uuguauuuccuauaaccuuucu

SEQ ID NO: 735957 - RNA, 19 nt, Human
auuucaagagguuuauugg

SEQ ID NO: 735958 - RNA, 22 nt, Human
cauagaauaugugugauuguua

SEQ ID NO: 735959 - RNA, 22 nt, Human
acuaguguccuuauauaagagg

SEQ ID NO: 735960 - RNA, 23 nt, Human
gcauugucuccccacuucugggc

SEQ ID NO: 735961 - RNA, 20 nt, Human
uguguauaaauauauguuuc

SEQ ID NO: 735962 - RNA, 22 nt, Human
aggcuccaggcaaaauuucgga

SEQ ID NO: 735963 - RNA, 22 nt, Human
uguaaacaguaggacuaaagag

SEQ ID NO: 735964 - RNA, 22 nt, Human
ugcagaaaggaggggugggaau

SEQ ID NO: 735965 - RNA, 22 nt, Human
uucauugauaguuuuauguaug

SEQ ID NO: 735966 - RNA, 22 nt, Human
ugucugccugcgggccggcaca

SEQ ID NO: 735967 - RNA, 22 nt, Human
ccugagcuggcagugaccugga

SEQ ID NO: 735968 - RNA, 22 nt, Human
guaaagaaguuuuugaaugcau

SEQ ID NO: 735969 - RNA, 22 nt, Human
caaaaccaagaacauucauuuc

SEQ ID NO: 735970 - RNA, 22 nt, Human
ucaaaggguagcccagggaaga

SEQ ID NO: 735971 - RNA, 22 nt, Human
caggaaacauaugugcuugagg

SEQ ID NO: 735972 - RNA, 22 nt, Human
ccagagucuuuauauuccugaa

SEQ ID NO: 735973 - RNA, 22 nt, Human
uuggaauuugagaccaagaaaa

SEQ ID NO: 735974 - RNA, 22 nt, Human
ucuucacaguccuggucagugg

SEQ ID NO: 735975 - RNA, 22 nt, Human
agggaagugaaugacagauauc

SEQ ID NO: 735976 - RNA, 22 nt, Human
gggcagcucuggcugugggaag

SEQ ID NO: 735977 - RNA, 22 nt, Human
ccuggagcuuuuccauccugga

SEQ ID NO: 735978 - RNA, 22 nt, Human
auagauccagaaaauuuauuau

SEQ ID NO: 735979 - RNA, 19 nt, Human
gcuugcuuuaugaaggggg

SEQ ID NO: 735980 - RNA, 22 nt, Human
ucacuugagauguaccacaaac

SEQ ID NO: 735981 - RNA, 22 nt, Human
gggaaagaagaagagccauuuu

SEQ ID NO: 735982 - RNA, 23 nt, Human
auucagaauuguguguuuguaua

SEQ ID NO: 735983 - RNA, 22 nt, Human
agagggcuuugauucucaguuc

SEQ ID NO: 735984 - RNA, 22 nt, Human
uacugacacaaagccaaucccu

SEQ ID NO: 735985 - RNA, 22 nt, Human
uuuacaaggaucaagggaucuc

SEQ ID NO: 735986 - RNA, 22 nt, Human
aaaugacuaaugauccugggca

SEQ ID NO: 735987 - RNA, 22 nt, Human
agaagcaguuauuuuuugcaca

SEQ ID NO: 735988 - RNA, 18 nt, Human
cuagagaagguuacuaug

SEQ ID NO: 735989 - RNA, 22 nt, Human
uguauuuaagcuuuaccuaaaa

SEQ ID NO: 735990 - RNA, 22 nt, Human
cuccagugcgucuuaguaaacc

SEQ ID NO: 735991 - RNA, 22 nt, Human
guucugcagacuuggaaggugg

SEQ ID NO: 735992 - RNA, 23 nt, Human
ucaguccuguaggggcuccaggu

SEQ ID NO: 735993 - RNA, 22 nt, Human
acacauguucaagaauguucag

SEQ ID NO: 735994 - RNA, 22 nt, Human
cccacuguguugcagucuagug

SEQ ID NO: 735995 - RNA, 22 nt, Human
gaaugucccugcaguugcugcc

SEQ ID NO: 735996 - RNA, 22 nt, Human
cagcagcaaggugaggguggag

SEQ ID NO: 735997 - RNA, 22 nt, Human
gcugcccuguccggcucuccug

SEQ ID NO: 735998 - RNA, 19 nt, Human
cagaccuguccagccugug

SEQ ID NO: 735999 - RNA, 22 nt, Human
acucugggccccagguggagcu

SEQ ID NO: 736000 - RNA, 22 nt, Human
gccaguggucacugaggaagaa

SEQ ID NO: 736001 - RNA, 22 nt, Human
uuuucaagggcagggaaaucau

SEQ ID NO: 736002 - RNA, 22 nt, Human
cagcugcucugguggucucucc

SEQ ID NO: 736003 - RNA, 22 nt, Human
gucuccacuaaaaacuuucacg

SEQ ID NO: 736004 - RNA, 18 nt, Human
aggcuucuuggcucaguc

SEQ ID NO: 736005 - RNA, 22 nt, Human
acaaaccagcuuaagcaagaug

SEQ ID NO: 736006 - RNA, 22 nt, Human
ugcauuguuuagaacucuuugg

SEQ ID NO: 736007 - RNA, 22 nt, Human
uguaacuguggucuagggacug

SEQ ID NO: 736008 - RNA, 22 nt, Human
ccagggcugcugugggacucca

SEQ ID NO: 736009 - RNA, 22 nt, Human
cucuggcuucuaccuugcaguu

SEQ ID NO: 736010 - RNA, 22 nt, Human
agcccugcgugccaggggacug

SEQ ID NO: 736011 - RNA, 22 nt, Human
cugcuuuguggaaucacacugg

SEQ ID NO: 736012 - RNA, 22 nt, Human
ugcagggcagcuagggagcuuu

SEQ ID NO: 736013 - RNA, 22 nt, Human
ugugaggauaaaaaggaaggag

SEQ ID NO: 736014 - RNA, 22 nt, Human
uagagcauuaugacaaccccau

SEQ ID NO: 736015 - RNA, 22 nt, Human
aucucugcaucccucaagguug

SEQ ID NO: 736016 - RNA, 22 nt, Human
ucagguucagacuagucccagu

SEQ ID NO: 736017 - RNA, 22 nt, Human
cuacugccauugucucugccau

SEQ ID NO: 736018 - RNA, 22 nt, Human
caaggucacauaacuugucaaa

SEQ ID NO: 736019 - RNA, 21 nt, Human
uaagaacauuaucuucuuccu

SEQ ID NO: 736020 - RNA, 22 nt, Human
ugguauuuaagacuucacuccu

SEQ ID NO: 736021 - RNA, 22 nt, Human
aauaaacaaaucuuuccugugg

SEQ ID NO: 736022 - RNA, 22 nt, Human
uaaggcaguagugucuguaggg

SEQ ID NO: 736023 - RNA, 22 nt, Human
cugcugcucgaccagucccagg

SEQ ID NO: 736024 - RNA, 22 nt, Human
auggccagggccaaaagagaug

SEQ ID NO: 736025 - RNA, 22 nt, Human
aagcuggagaguuucacagaug

SEQ ID NO: 736026 - RNA, 22 nt, Human
uaaaguguguggguucuaaauu

SEQ ID NO: 736027 - RNA, 22 nt, Human
auggcccugcuaccacuuuucu

SEQ ID NO: 736028 - RNA, 22 nt, Human
aguugaagguuggcugauccau

SEQ ID NO: 736029 - RNA, 20 nt, Human
aggcugucauuucuggcagg

SEQ ID NO: 736030 - RNA, 22 nt, Human
uuucuucauucaccuucacccc

SEQ ID NO: 736031 - RNA, 22 nt, Human
uucucauagagacaugauuaua

SEQ ID NO: 736032 - RNA, 20 nt, Human
uucugaaagcagcagaggga

SEQ ID NO: 736033 - RNA, 22 nt, Human
uacaaugaccauauuauguaag

SEQ ID NO: 736034 - RNA, 20 nt, Human
gauuacaaaaugaaaugcau

SEQ ID NO: 736035 - RNA, 22 nt, Human
cccugagaugugaauuucagag

SEQ ID NO: 736036 - RNA, 22 nt, Human
auacaugacucacacauucugc

SEQ ID NO: 736037 - RNA, 22 nt, Human
aaggcucaauuaacuaagaagu

SEQ ID NO: 736038 - RNA, 22 nt, Human
uuaacuuuuauuucugcucgcc

SEQ ID NO: 736039 - RNA, 22 nt, Human
gcucugggaaguccuuuaccau

SEQ ID NO: 736040 - RNA, 22 nt, Human
cugucaaauucauaacacuuau

SEQ ID NO: 736041 - RNA, 22 nt, Human
ucugggcacugcugagccugua

SEQ ID NO: 736042 - RNA, 22 nt, Human
ucugggauagggccagaacaug

SEQ ID NO: 736043 - RNA, 22 nt, Human
uggcagagcuggcugcggauga

SEQ ID NO: 736044 - RNA, 22 nt, Human
ggcugaauguuggacacuuacg

SEQ ID NO: 736045 - RNA, 21 nt, Human
ugucacuuuaagcuagcucua

SEQ ID NO: 736046 - RNA, 22 nt, Human
uccugaaaaauuacauguucag

SEQ ID NO: 736047 - RNA, 22 nt, Human
uccagcucuaaggcugauagcc

SEQ ID NO: 736048 - RNA, 22 nt, Human
gcuuuacacagaugaauauuuc

SEQ ID NO: 736049 - RNA, 22 nt, Human
acaucuucacugguuucuggaa

SEQ ID NO: 736050 - RNA, 22 nt, Human
gccuagguaccagcagagagcc

SEQ ID NO: 736051 - RNA, 22 nt, Human
gaauggcauugucagccuuuau

SEQ ID NO: 736052 - RNA, 22 nt, Human
uccucugccaaagggaguugcc

SEQ ID NO: 736053 - RNA, 22 nt, Human
aaauagcuuuucauaauucuca

SEQ ID NO: 736054 - RNA, 22 nt, Human
ugcagggcacacgcacgggugu

SEQ ID NO: 736055 - RNA, 22 nt, Human
ucugagccaauuucugugucca

SEQ ID NO: 736056 - RNA, 22 nt, Human
gcagggcuagauauuugcaagu

SEQ ID NO: 736057 - RNA, 23 nt, Human
gaggaaagaauauagaugcaauc

SEQ ID NO: 736058 - RNA, 22 nt, Human
uuagugcaauucagagaacaau

SEQ ID NO: 736059 - RNA, 22 nt, Human
caaagccucugauuucacuugu

SEQ ID NO: 736060 - RNA, 22 nt, Human
cuuguggcccauggcuuccugc

SEQ ID NO: 736061 - RNA, 22 nt, Human
aagacuaaauguguucuaaagu

SEQ ID NO: 736062 - RNA, 22 nt, Human
aaaauuacuauuguuccugggc

SEQ ID NO: 736063 - RNA, 18 nt, Human
gaaagaugaacuuuuuuc

SEQ ID NO: 736064 - RNA, 22 nt, Human
cuucacuggaaucuguaauagu

SEQ ID NO: 736065 - RNA, 22 nt, Human
uuccaugacaccgagggaaguc

SEQ ID NO: 736066 - RNA, 22 nt, Human
aaguaaucuggaauuugguuuu

SEQ ID NO: 736067 - RNA, 22 nt, Human
cuucuucuuuuaauaaaugucu

SEQ ID NO: 736068 - RNA, 22 nt, Human
aauaauacaugagauuaauguu

SEQ ID NO: 736069 - RNA, 22 nt, Human
cugcagaaaccuuuccugauuu

SEQ ID NO: 736070 - RNA, 22 nt, Human
uaaccaugcaugucucuaguuu

SEQ ID NO: 736071 - RNA, 23 nt, Human
acuuuauccuauaucuuuguucu

SEQ ID NO: 736072 - RNA, 22 nt, Human
acuggcagaauugaauaguugu

SEQ ID NO: 736073 - RNA, 22 nt, Human
uucugucucuguguuuacauua

SEQ ID NO: 736074 - RNA, 22 nt, Human
uuguacacacaggaacaaacgu

SEQ ID NO: 736075 - RNA, 22 nt, Human
cugcagaugucucaauuuuauu

SEQ ID NO: 736076 - RNA, 22 nt, Human
uggucuuuaagguagcugucau

SEQ ID NO: 736077 - RNA, 22 nt, Human
cucccucagaggagcaccuguu

SEQ ID NO: 736078 - RNA, 22 nt, Human
augccugguaugaagcaaggaa

SEQ ID NO: 736079 - RNA, 22 nt, Human
ugaaacaaaccaguaauuuugu

SEQ ID NO: 736080 - RNA, 22 nt, Human
auugacaagcaguaugucuuag

SEQ ID NO: 736081 - RNA, 22 nt, Human
uauuucagguauggugugaaau

SEQ ID NO: 736082 - RNA, 22 nt, Human
cagagcaucgcgcagagagccu

SEQ ID NO: 736083 - RNA, 22 nt, Human
cucaugugucugguaggagcuu

SEQ ID NO: 736084 - RNA, 22 nt, Human
ggugaggggagagugaaagaaa

SEQ ID NO: 736085 - RNA, 22 nt, Human
agagcacaugguuccugugucc

SEQ ID NO: 736086 - RNA, 18 nt, Human
uucuuuaauucaguuuga

SEQ ID NO: 736087 - RNA, 22 nt, Human
gaguguucccacaccccaguug

SEQ ID NO: 736088 - RNA, 22 nt, Human
uagcuguucauguggcuuuaug

SEQ ID NO: 736089 - RNA, 22 nt, Human
caggcuggcaaugcgucaagca

SEQ ID NO: 736090 - RNA, 22 nt, Human
agggccugggguagcuuacugc

SEQ ID NO: 736091 - RNA, 22 nt, Human
gcagccaguauccucugagauu

SEQ ID NO: 736092 - RNA, 22 nt, Human
uccaggcuagaagucacaggcc

SEQ ID NO: 736093 - RNA, 22 nt, Human
guugggcucauuacagccugcu

SEQ ID NO: 736094 - RNA, 22 nt, Human
ccugugugcugaugacgacaga

SEQ ID NO: 736095 - RNA, 22 nt, Human
ugauugaaguguucuguuccag

SEQ ID NO: 736096 - RNA, 22 nt, Human
uggagucagcuagaccuguguu

SEQ ID NO: 736097 - RNA, 22 nt, Human
cccuugcaucccauguguggcc

SEQ ID NO: 736098 - RNA, 22 nt, Human
ucaaaggcugcuugucuucugg

SEQ ID NO: 736099 - RNA, 22 nt, Human
uucucaaagaaagcugucauua

SEQ ID NO: 736100 - RNA, 19 nt, Human
gcaggcccagucgggcugg

SEQ ID NO: 736101 - RNA, 22 nt, Human
uuuucacaugcuuggggacuua

SEQ ID NO: 736102 - RNA, 22 nt, Human
acaaacagcuaacauauguuaa

SEQ ID NO: 736103 - RNA, 22 nt, Human
ugucaaacaccaacauuucucc

SEQ ID NO: 736104 - RNA, 22 nt, Human
aaccuguucccugguccuugac

SEQ ID NO: 736105 - RNA, 22 nt, Human
ucugaaauucacaguugaguca

SEQ ID NO: 736106 - RNA, 22 nt, Human
gggaaauuaaugacugguugga

SEQ ID NO: 736107 - RNA, 22 nt, Human
acucagacgaaaacaugaacau

SEQ ID NO: 736108 - RNA, 22 nt, Human
ggcccucugcucacuuccuauu

SEQ ID NO: 736109 - RNA, 22 nt, Human
agcaacaggaauauuauggcaa

SEQ ID NO: 736110 - RNA, 22 nt, Human
ucugaaauaaaugcacuguuag

SEQ ID NO: 736111 - RNA, 22 nt, Human
uaguacuuaucucugucauugu

SEQ ID NO: 736112 - RNA, 22 nt, Human
aguuucacagucugucauuguu

SEQ ID NO: 736113 - RNA, 22 nt, Human
uaugaacuguaacccucaccgc

SEQ ID NO: 736114 - RNA, 22 nt, Human
uacacuuuuuacuacagauucu

SEQ ID NO: 736115 - RNA, 22 nt, Human
cagcagcuguuuacggaacacc

SEQ ID NO: 736116 - RNA, 22 nt, Human
agcaacagaagauagagugaau

SEQ ID NO: 736117 - RNA, 22 nt, Human
ucaaucaaugguuuccaaauuu

SEQ ID NO: 736118 - RNA, 22 nt, Human
ucccagggauuaggacauggau

SEQ ID NO: 736119 - RNA, 20 nt, Human
uggagccacagucagguucc

SEQ ID NO: 736120 - RNA, 22 nt, Human
cuggcuuccaugcuguaguggc

SEQ ID NO: 736121 - RNA, 17 nt, Human
ccagugccuguggcaac

SEQ ID NO: 736122 - RNA, 22 nt, Human
ucaaccagaguuuuucuuaaua

SEQ ID NO: 736123 - RNA, 22 nt, Human
auguagaagugggcauuauaga

SEQ ID NO: 736124 - RNA, 22 nt, Human
augucaacaggccuuuaaacau

SEQ ID NO: 736125 - RNA, 22 nt, Human
ugcuggccugguuagaaagggg

SEQ ID NO: 736126 - RNA, 22 nt, Human
acaaagcuuagaccuaagagau

SEQ ID NO: 736127 - RNA, 22 nt, Human
uugcugaaaacaguggguauug

SEQ ID NO: 736128 - RNA, 22 nt, Human
uaugcccagcuuaaaguacaca

SEQ ID NO: 736129 - RNA, 22 nt, Human
uuucuaaguaagauuaacuucu

SEQ ID NO: 736130 - RNA, 22 nt, Human
uucugaaaggcagguuguuugc

SEQ ID NO: 736131 - RNA, 22 nt, Human
auaugcacauacauacauaggu

SEQ ID NO: 736132 - RNA, 22 nt, Human
gcacacaugcguguauaugggu

SEQ ID NO: 736133 - RNA, 22 nt, Human
ccucuggggcaucagacaaagg

SEQ ID NO: 736134 - RNA, 22 nt, Human
gggagaugacucagugaccucg

SEQ ID NO: 736135 - RNA, 22 nt, Human
aacacugagaacaauacagagu

SEQ ID NO: 736136 - RNA, 22 nt, Human
ccuggcucccggaacagggucu

SEQ ID NO: 736137 - RNA, 22 nt, Human
uggcagggaguucguucacaac

SEQ ID NO: 736138 - RNA, 22 nt, Human
agaaaacugggaggagagcuuc

SEQ ID NO: 736139 - RNA, 22 nt, Human
gaggcaguuccugagugacaag

SEQ ID NO: 736140 - RNA, 22 nt, Human
uuacugcacgugggacauauau

SEQ ID NO: 736141 - RNA, 22 nt, Human
aaaggauuaaauaaaugugcug

SEQ ID NO: 736142 - RNA, 22 nt, Human
acaguuuacagggauuugagcu

SEQ ID NO: 736143 - RNA, 18 nt, Human
auuugcaggcaugcaggc

SEQ ID NO: 736144 - RNA, 22 nt, Human
ggacagaaaccauaugagugua

SEQ ID NO: 736145 - RNA, 22 nt, Human
uccaggaguuugagacugcagu

SEQ ID NO: 736146 - RNA, 22 nt, Human
aagggagaggagggucuuguug

SEQ ID NO: 736147 - RNA, 22 nt, Human
ggcagcagaacuggcccuguau

SEQ ID NO: 736148 - RNA, 22 nt, Human
caguggguaguggggauuagca

SEQ ID NO: 736149 - RNA, 22 nt, Human
uuguccuguuacuuguuuggau

SEQ ID NO: 736150 - RNA, 22 nt, Human
caacauuugaguaaagaaaugg

SEQ ID NO: 736151 - RNA, 22 nt, Human
acacuguagacuguugaaguac

SEQ ID NO: 736152 - RNA, 22 nt, Human
uaaaucuucuacaucaucauaa

SEQ ID NO: 736153 - RNA, 22 nt, Human
aacagaauugcugcugccaaug

SEQ ID NO: 736154 - RNA, 22 nt, Human
ggucugcccuggguggaggcgc

SEQ ID NO: 736155 - RNA, 22 nt, Human
agcaggugcauggcgagcgcgg

SEQ ID NO: 736156 - RNA, 22 nt, Human
agugugcugcuuaaacaguugu

SEQ ID NO: 736157 - RNA, 22 nt, Human
guucuucaaagugacaacuaaa

SEQ ID NO: 736158 - RNA, 22 nt, Human
aaacuagaugaaacgaguaaag

SEQ ID NO: 736159 - RNA, 19 nt, Human
gggcucuggccucaguggg

SEQ ID NO: 736160 - RNA, 22 nt, Human
gccaggccacucccggguccug

SEQ ID NO: 736161 - RNA, 22 nt, Human
cuggguguucaggagcugggcu

SEQ ID NO: 736162 - RNA, 22 nt, Human
aaauggauggaauugacauuua

SEQ ID NO: 736163 - RNA, 22 nt, Human
uccucaggcugccuggaagacu

SEQ ID NO: 736164 - RNA, 22 nt, Human
ucagcuuucucucgccaucagg

SEQ ID NO: 736165 - RNA, 22 nt, Human
ucuugaagucuuaugguuuaaa

SEQ ID NO: 736166 - RNA, 18 nt, Human
uccugguggagaaguggu

SEQ ID NO: 736167 - RNA, 22 nt, Human
uucauugaaauacagucuugac

SEQ ID NO: 736168 - RNA, 22 nt, Human
ccucccucuguuagagcugucu

SEQ ID NO: 736169 - RNA, 21 nt, Human
aucuggaaauucugccagaga

SEQ ID NO: 736170 - RNA, 22 nt, Human
ucugcugcagagcugcgggugc

SEQ ID NO: 736171 - RNA, 22 nt, Human
ggcccagucuggggcccuguga

SEQ ID NO: 736172 - RNA, 22 nt, Human
gacacagaauuuacucccgaua

SEQ ID NO: 736173 - RNA, 22 nt, Human
ccuggggcucaagauggcgccg

SEQ ID NO: 736174 - RNA, 22 nt, Human
gucucagaguccuacuuauucc

SEQ ID NO: 736175 - RNA, 19 nt, Human
ugcauauaucuaugaaaga

SEQ ID NO: 736176 - RNA, 22 nt, Human
caguucuaucauuuuagagaug

SEQ ID NO: 736177 - RNA, 22 nt, Human
agugauguugauuuuaccacuu

SEQ ID NO: 736178 - RNA, 22 nt, Human
uguaucuguaaucccagaucaa

SEQ ID NO: 736179 - RNA, 22 nt, Human
ucagagcuuaucucuugcugga

SEQ ID NO: 736180 - RNA, 22 nt, Human
gaugaaaaaagacgagcauaua

SEQ ID NO: 736181 - RNA, 22 nt, Human
guuucaaaaugaugcuguaacu

SEQ ID NO: 736182 - RNA, 22 nt, Human
caggcagagacccucuccuaaa

SEQ ID NO: 736183 - RNA, 22 nt, Human
uagagauggggucuugcuauga

SEQ ID NO: 736184 - RNA, 22 nt, Human
uuuuacaguuccaugcaaagcg

SEQ ID NO: 736185 - RNA, 22 nt, Human
caggccugacccugagcuucac

SEQ ID NO: 736186 - RNA, 20 nt, Human
ucucagcauaagaacccuuc

SEQ ID NO: 736187 - RNA, 22 nt, Human
uuugaauaaucacugggcauua

SEQ ID NO: 736188 - RNA, 22 nt, Human
cuuccucugccucccgugcuca

SEQ ID NO: 736189 - RNA, 22 nt, Human
cagaggccaccuguggccacug

SEQ ID NO: 736190 - RNA, 22 nt, Human
agaguucugaaauuaucuuuac

SEQ ID NO: 736191 - RNA, 22 nt, Human
uuuuacaggugaaaaaugaaga

SEQ ID NO: 736192 - RNA, 22 nt, Human
cuacagaagaaacuaucacuau

SEQ ID NO: 736193 - RNA, 22 nt, Human
gagacacacacaggagguggca

SEQ ID NO: 736194 - RNA, 22 nt, Human
gcuggagucuggaggugugcca

SEQ ID NO: 736195 - RNA, 22 nt, Human
agcuccugauucucagagauag

SEQ ID NO: 736196 - RNA, 22 nt, Human
cauuccaaggccaagucuaaga

SEQ ID NO: 736197 - RNA, 22 nt, Human
aagauaauauucauuaacuaga

SEQ ID NO: 736198 - RNA, 22 nt, Human
aaaugcauggcuguuuuaaagc

SEQ ID NO: 736199 - RNA, 22 nt, Human
gagcugccuguugcauagcaac

SEQ ID NO: 736200 - RNA, 22 nt, Human
auacacugguuuaugauauugu

SEQ ID NO: 736201 - RNA, 22 nt, Human
ggaggccaguccuggccgggcu

SEQ ID NO: 736202 - RNA, 22 nt, Human
aagguuaguaaguaucuuaugu

SEQ ID NO: 736203 - RNA, 22 nt, Human
ugcagcugccuagggcuggcuu

SEQ ID NO: 736204 - RNA, 19 nt, Human
ccucugcgcuguccugcuc

SEQ ID NO: 736205 - RNA, 22 nt, Human
gccucuggaagugggaaggggu

SEQ ID NO: 736206 - RNA, 22 nt, Human
gacacauaugcguauaguuuag

SEQ ID NO: 736207 - RNA, 22 nt, Human
cagagccaggucuaggagucuc

SEQ ID NO: 736208 - RNA, 23 nt, Human
aguaugaauucauuguuuuaguu

SEQ ID NO: 736209 - RNA, 22 nt, Human
uaauaucuggcauucaaacaug

SEQ ID NO: 736210 - RNA, 22 nt, Human
cauucuaaaguguuuuauaccu

SEQ ID NO: 736211 - RNA, 22 nt, Human
aaagucauguaaugauaugauu

SEQ ID NO: 736212 - RNA, 19 nt, Human
acauggcaucccaggaggu

SEQ ID NO: 736213 - RNA, 22 nt, Human
gauggcuucucucuagcuuggu

SEQ ID NO: 736214 - RNA, 22 nt, Human
aaacaauguacacaugaauguu

SEQ ID NO: 736215 - RNA, 22 nt, Human
uuucaucuuccuuggcauaggu

SEQ ID NO: 736216 - RNA, 23 nt, Human
cuucacaaucaaaaucaguucug

SEQ ID NO: 736217 - RNA, 22 nt, Human
gaagagcuuaguuguccuagaa

SEQ ID NO: 736218 - RNA, 22 nt, Human
gccaggcucucagugacugccc

SEQ ID NO: 736219 - RNA, 22 nt, Human
uuuaucuguccuuugccaguga

SEQ ID NO: 736220 - RNA, 22 nt, Human
gagagaaaggcuugcaggcugu

SEQ ID NO: 736221 - RNA, 20 nt, Human
uuucagugguuugugccuag

SEQ ID NO: 736222 - RNA, 22 nt, Human
gauuucaaaaguagauccauca

SEQ ID NO: 736223 - RNA, 22 nt, Human
ugauuacauugguaauguuuau

SEQ ID NO: 736224 - RNA, 22 nt, Human
uccugggccuguacuccauccg

SEQ ID NO: 736225 - RNA, 22 nt, Human
ucuggccuccuccaccagggaa

SEQ ID NO: 736226 - RNA, 18 nt, Human
ccucuggguuuuguuccc

SEQ ID NO: 736227 - RNA, 22 nt, Human
ucugcacauagguaggcuggaa

SEQ ID NO: 736228 - RNA, 22 nt, Human
ccuuggaguucuguuuggcuua

SEQ ID NO: 736229 - RNA, 22 nt, Human
aggcuccugauccuggggucug

SEQ ID NO: 736230 - RNA, 22 nt, Human
acaguuuacuggccuugccguu

SEQ ID NO: 736231 - RNA, 22 nt, Human
guagggacuguucucaccugag

SEQ ID NO: 736232 - RNA, 22 nt, Human
ccaggugggcgugucuucaccu

SEQ ID NO: 736233 - RNA, 22 nt, Human
ucagaaaagagaaaaucuuaua

SEQ ID NO: 736234 - RNA, 22 nt, Human
cuucuugucagugauuucuucc

SEQ ID NO: 736235 - RNA, 22 nt, Human
agugaaaugacugaaucagaua

SEQ ID NO: 736236 - RNA, 22 nt, Human
uaggcugggagccugaggcuag

SEQ ID NO: 736237 - RNA, 22 nt, Human
uagauaacuugcaccuacagga

SEQ ID NO: 736238 - RNA, 22 nt, Human
gccaggcagauaugugagcuua

SEQ ID NO: 736239 - RNA, 23 nt, Human
gugauuucagggaacagaaucag

SEQ ID NO: 736240 - RNA, 22 nt, Human
ccaugcagugcuggagcugauu

SEQ ID NO: 736241 - RNA, 22 nt, Human
auguacauuauucgagugaugg

SEQ ID NO: 736242 - RNA, 20 nt, Human
agucugccugcuccuucucc

SEQ ID NO: 736243 - RNA, 22 nt, Human
aaauuauuacaagcuaguuggc

SEQ ID NO: 736244 - RNA, 21 nt, Human
cacacagugaucuauccacau

SEQ ID NO: 736245 - RNA, 22 nt, Human
uguccuggaucaugccucugaa

SEQ ID NO: 736246 - RNA, 22 nt, Human
cagacacuaugcuaagguacua

SEQ ID NO: 736247 - RNA, 22 nt, Human
cagaaaugacaaaguaagagga

SEQ ID NO: 736248 - RNA, 22 nt, Human
uggcccuguggaggucagugag

SEQ ID NO: 736249 - RNA, 22 nt, Human
aacucucucuggcucccagcaa

SEQ ID NO: 736250 - RNA, 17 nt, Human
gcugcagcgguaggcag

SEQ ID NO: 736251 - RNA, 22 nt, Human
uuaguugauguucuggagguag

SEQ ID NO: 736252 - RNA, 22 nt, Human
gagcugugugccuggauggucu

SEQ ID NO: 736253 - RNA, 22 nt, Human
ucuccagggcccccgagcguug

SEQ ID NO: 736254 - RNA, 22 nt, Human
uguauguaaaggucuucauguu

SEQ ID NO: 736255 - RNA, 19 nt, Human
cuccuggcucugucauuuu

SEQ ID NO: 736256 - RNA, 22 nt, Human
uuuauagcugugagaccuuggg

SEQ ID NO: 736257 - RNA, 22 nt, Human
aggagucauugagagggguccu

SEQ ID NO: 736258 - RNA, 22 nt, Human
cuuaggaaaguuggcugauuuc

SEQ ID NO: 736259 - RNA, 22 nt, Human
ucuuucuucuuucauaguguga

SEQ ID NO: 736260 - RNA, 22 nt, Human
acuucucuuuaguacuaaaugu

SEQ ID NO: 736261 - RNA, 22 nt, Human
cagcauuuggaggagaggcuuu

SEQ ID NO: 736262 - RNA, 22 nt, Human
ucucagugcuauccauauucca

SEQ ID NO: 736263 - RNA, 22 nt, Human
aaauuuuguauucuaguucuag

SEQ ID NO: 736264 - RNA, 22 nt, Human
aguguggcaggaaugacuagaa

SEQ ID NO: 736265 - RNA, 22 nt, Human
aacagaaaagguagguggcuuu

SEQ ID NO: 736266 - RNA, 22 nt, Human
gcucaaaugucauggggagccu

SEQ ID NO: 736267 - RNA, 17 nt, Human
uccuucagugccucugc

SEQ ID NO: 736268 - RNA, 22 nt, Human
gggcuccaaggaggccagccug

SEQ ID NO: 736269 - RNA, 22 nt, Human
cagcugguuaucagagaggccu

SEQ ID NO: 736270 - RNA, 22 nt, Human
gcccccucuuuggagccagcca

SEQ ID NO: 736271 - RNA, 22 nt, Human
aaaauugagaguuauagauggu

SEQ ID NO: 736272 - RNA, 22 nt, Human
accauugauauaacucagucuc

SEQ ID NO: 736273 - RNA, 22 nt, Human
gggggagaagauucugcugcuu

SEQ ID NO: 736274 - RNA, 22 nt, Human
aacuuguuucuuccauucaaca

SEQ ID NO: 736275 - RNA, 22 nt, Human
aggagaggcaucaagaaaaucg

SEQ ID NO: 736276 - RNA, 22 nt, Human
ggagcacagccuugccaguacc

SEQ ID NO: 736277 - RNA, 22 nt, Human
gcccacacagcagauccuuugg

SEQ ID NO: 736278 - RNA, 22 nt, Human
gagagugauucccucccauaga

SEQ ID NO: 736279 - RNA, 22 nt, Human
uuguuaaaaugaggucauucug

SEQ ID NO: 736280 - RNA, 17 nt, Human
gagugcugguggagcuc

SEQ ID NO: 736281 - RNA, 22 nt, Human
gggcauggccaggugagggguc

SEQ ID NO: 736282 - RNA, 22 nt, Human
acagaaguuggaauuagauacu

SEQ ID NO: 736283 - RNA, 22 nt, Human
agauuuagacugccuuaaucau

SEQ ID NO: 736284 - RNA, 21 nt, Human
gcccagcaaggugagaaggcc

SEQ ID NO: 736285 - RNA, 22 nt, Human
auccacucuaagaucuguggug

SEQ ID NO: 736286 - RNA, 22 nt, Human
ugcugcugcuucuguacagccu

SEQ ID NO: 736287 - RNA, 22 nt, Human
ucuguuccuggucucuggagcu

SEQ ID NO: 736288 - RNA, 22 nt, Human
gcagacaauuuauuagcagauu

SEQ ID NO: 736289 - RNA, 22 nt, Human
aacaaauguaaaaugcagaugc

SEQ ID NO: 736290 - RNA, 22 nt, Human
caaagaugcugauguuggauca

SEQ ID NO: 736291 - RNA, 22 nt, Human
aggaggcacucacucucagggu

SEQ ID NO: 736292 - RNA, 19 nt, Human
gcuggcuggaggagggaca

SEQ ID NO: 736293 - RNA, 22 nt, Human
ugcagcugacccacuccagucc

SEQ ID NO: 736294 - RNA, 22 nt, Human
ugcacacaccgugcuucacuga

SEQ ID NO: 736295 - RNA, 22 nt, Human
cacaauuuccaagucauguuau

SEQ ID NO: 736296 - RNA, 22 nt, Human
caggaugggugucggccagcac

SEQ ID NO: 736297 - RNA, 22 nt, Human
ccagucgugacaaccaaaaaua

SEQ ID NO: 736298 - RNA, 22 nt, Human
ucagugcuuccuggaggaagcc

SEQ ID NO: 736299 - RNA, 22 nt, Human
acuguuuuccuaaugagcaaga

SEQ ID NO: 736300 - RNA, 22 nt, Human
acuaaaguccuguuguagcaua

SEQ ID NO: 736301 - RNA, 22 nt, Human
cauggcuuucccucaagagcaa

SEQ ID NO: 736302 - RNA, 22 nt, Human
ggaggggugcucagcugucacg

SEQ ID NO: 736303 - RNA, 22 nt, Human
agacauuuauucacacauuuau

SEQ ID NO: 736304 - RNA, 17 nt, Human
uggucuggaagaacuga

SEQ ID NO: 736305 - RNA, 21 nt, Human
gaggaaaugcucugguguuca

SEQ ID NO: 736306 - RNA, 22 nt, Human
uccaggagagguagaggguucc

SEQ ID NO: 736307 - RNA, 22 nt, Human
gcccagcaaggaccaagggccg

SEQ ID NO: 736308 - RNA, 21 nt, Human
acuuggccaggcccccaccug

SEQ ID NO: 736309 - RNA, 22 nt, Human
acaccaugguucccaaacugug

SEQ ID NO: 736310 - RNA, 22 nt, Human
ucucaaguuuucucauaaucuc

SEQ ID NO: 736311 - RNA, 22 nt, Human
gaccagcugauaaggcauauaa

SEQ ID NO: 736312 - RNA, 21 nt, Human
uagccauguuccuuaugguuc

SEQ ID NO: 736313 - RNA, 22 nt, Human
ucugagguuaauccugcugcau

SEQ ID NO: 736314 - RNA, 22 nt, Human
ugccuaacuccaccaggcaggu

SEQ ID NO: 736315 - RNA, 20 nt, Human
gugucugcauauagcaggug

SEQ ID NO: 736316 - RNA, 22 nt, Human
gaggcccaaggacucugucccg

SEQ ID NO: 736317 - RNA, 19 nt, Human
ugaagguguaugugcuggg

SEQ ID NO: 736318 - RNA, 22 nt, Human
aguuuggaagaauuuggucugu

SEQ ID NO: 736319 - RNA, 23 nt, Human
uuucaguuccagaaaaggggagc

SEQ ID NO: 736320 - RNA, 21 nt, Human
ugccaggccugagcugggguc

SEQ ID NO: 736321 - RNA, 19 nt, Human
cgcaggagccgaggugacc

SEQ ID NO: 736322 - RNA, 22 nt, Human
gcuccccagcuuagcccuggcu

SEQ ID NO: 736323 - RNA, 22 nt, Human
aauugacagaaaguuuacgagg

SEQ ID NO: 736324 - RNA, 22 nt, Human
accugcccacuucccaugacau

SEQ ID NO: 736325 - RNA, 22 nt, Human
cugcacagagcagggcagacac

SEQ ID NO: 736326 - RNA, 22 nt, Human
uucagauaaacuacaaauaauu

SEQ ID NO: 736327 - RNA, 22 nt, Human
aaagaaggggucuacauccaau

SEQ ID NO: 736328 - RNA, 22 nt, Human
uugaggucuugaguacugggga

SEQ ID NO: 736329 - RNA, 22 nt, Human
ucaaggcuauuaauucugugag

SEQ ID NO: 736330 - RNA, 22 nt, Human
agugucaucgugaaaacauagc

SEQ ID NO: 736331 - RNA, 22 nt, Human
ugcauguggaccccuggugccu

SEQ ID NO: 736332 - RNA, 22 nt, Human
ucagcagugugcuuggaaugga

SEQ ID NO: 736333 - RNA, 22 nt, Human
aucuggggagguaucuguaguc

SEQ ID NO: 736334 - RNA, 22 nt, Human
uuggaaggagucaaccagcuga

SEQ ID NO: 736335 - RNA, 22 nt, Human
ugguuccuucugcauuuucagc

SEQ ID NO: 736336 - RNA, 22 nt, Human
ccugguggagaggggcggagcg

SEQ ID NO: 736337 - RNA, 22 nt, Human
uucacagacauugcagacugaa

SEQ ID NO: 736338 - RNA, 22 nt, Human
aggucucuaaaauagucaaacu

SEQ ID NO: 736339 - RNA, 22 nt, Human
gagauaaagcuaccauguugau

SEQ ID NO: 736340 - RNA, 22 nt, Human
agauggagaaugacaauuaagg

SEQ ID NO: 736341 - RNA, 22 nt, Human
uacaguaauaaaaugagcuaca

SEQ ID NO: 736342 - RNA, 22 nt, Human
ccagcuuguuugaagcucguca

SEQ ID NO: 736343 - RNA, 22 nt, Human
cagcucugcuuccuuguacagg

SEQ ID NO: 736344 - RNA, 22 nt, Human
ggagacugaucugagugauaac

SEQ ID NO: 736345 - RNA, 22 nt, Human
ucuggccucuugggaugcuccc

SEQ ID NO: 736346 - RNA, 22 nt, Human
auuuccaaucucugcauauggg

SEQ ID NO: 736347 - RNA, 23 nt, Human
gugcugugagccccuuggccucc

SEQ ID NO: 736348 - RNA, 22 nt, Human
agccaggggagucagcugcugg

SEQ ID NO: 736349 - RNA, 22 nt, Human
aggcuacagccucaagagugca

SEQ ID NO: 736350 - RNA, 22 nt, Human
acuguguggaccacucugaggc

SEQ ID NO: 736351 - RNA, 21 nt, Human
cauuagggcagaagcaggaag

SEQ ID NO: 736352 - RNA, 22 nt, Human
uuucugcuuucuauccuuguca

SEQ ID NO: 736353 - RNA, 23 nt, Human
aucugggcaucuggagugguccu

SEQ ID NO: 736354 - RNA, 22 nt, Human
guauuagaagaaauuauaggua

SEQ ID NO: 736355 - RNA, 22 nt, Human
ccucucccagggagagccugag

SEQ ID NO: 736356 - RNA, 22 nt, Human
ucaguguuauuagaugagguuu

SEQ ID NO: 736357 - RNA, 22 nt, Human
aaguguguauuuuucuucagug

SEQ ID NO: 736358 - RNA, 22 nt, Human
gagccugccccuccaccaggau

SEQ ID NO: 736359 - RNA, 22 nt, Human
ccacugcuaacuugcugcagcu

SEQ ID NO: 736360 - RNA, 22 nt, Human
aacaggacacugggauggcuac

SEQ ID NO: 736361 - RNA, 22 nt, Human
caaguuuucuggguucagagca

SEQ ID NO: 736362 - RNA, 22 nt, Human
aaugcauacguguuuguggcaa

SEQ ID NO: 736363 - RNA, 22 nt, Human
caucacaucagugugaacaguu

SEQ ID NO: 736364 - RNA, 22 nt, Human
gugggacucuucuuuggcagug

SEQ ID NO: 736365 - RNA, 22 nt, Human
ucagggaagaaaugggacuuua

SEQ ID NO: 736366 - RNA, 20 nt, Human
gugggcagaugugugcaugg

SEQ ID NO: 736367 - RNA, 22 nt, Human
gccagccugugcuuggccaggc

SEQ ID NO: 736368 - RNA, 22 nt, Human
cugcagagcuugucuggaugug

SEQ ID NO: 736369 - RNA, 22 nt, Human
aaauagcaaugugaaaagagga

SEQ ID NO: 736370 - RNA, 21 nt, Human
cuuuuacauucagucaugaug

SEQ ID NO: 736371 - RNA, 22 nt, Human
cauuugcaaaccaacaagauga

SEQ ID NO: 736372 - RNA, 21 nt, Human
ugggccucaggcagcugugac

SEQ ID NO: 736373 - RNA, 22 nt, Human
cuggcagcucugagucccuucu

SEQ ID NO: 736374 - RNA, 22 nt, Human
ugaagcuuuaggauggguucau

SEQ ID NO: 736375 - RNA, 22 nt, Human
cuugggccagcccagggggcau

SEQ ID NO: 736376 - RNA, 22 nt, Human
aagugucuaacugguuacuucu

SEQ ID NO: 736377 - RNA, 19 nt, Human
ucagggggcugauaggagg

SEQ ID NO: 736378 - RNA, 22 nt, Human
gcacucugccaggucuccugau

SEQ ID NO: 736379 - RNA, 22 nt, Human
ugucaccagcugcuccucagga

SEQ ID NO: 736380 - RNA, 22 nt, Human
ugucugugggcaacgccuccca

SEQ ID NO: 736381 - RNA, 21 nt, Human
ugaucacaugaaaaccaugca

SEQ ID NO: 736382 - RNA, 22 nt, Human
uuuugccugagagugaaaauaa

SEQ ID NO: 736383 - RNA, 22 nt, Human
gccuuggacuaccacucccaca

SEQ ID NO: 736384 - RNA, 23 nt, Human
gcaguggaaugucucuguuugga

SEQ ID NO: 736385 - RNA, 22 nt, Human
uagaagcacagguuaaaggcau

SEQ ID NO: 736386 - RNA, 22 nt, Human
agguaacacuacuuaguauacu

SEQ ID NO: 736387 - RNA, 22 nt, Human
guggcaggggcgggcuguuccg

SEQ ID NO: 736388 - RNA, 22 nt, Human
aggcagcagggccacuggcuga

SEQ ID NO: 736389 - RNA, 22 nt, Human
uuggacugguuuacauuucaag

SEQ ID NO: 736390 - RNA, 22 nt, Human
gggcacugugcugggugcuuua

SEQ ID NO: 736391 - RNA, 22 nt, Human
ucucaucuucauugucucccau

SEQ ID NO: 736392 - RNA, 22 nt, Human
gagcggaggcuuggaggccagc

SEQ ID NO: 736393 - RNA, 22 nt, Human
uacugugugauuccauuuacgu

SEQ ID NO: 736394 - RNA, 22 nt, Human
accauuuuggguauuuucagag

SEQ ID NO: 736395 - RNA, 22 nt, Human
ggaagggguuaggggucccuga

SEQ ID NO: 736396 - RNA, 22 nt, Human
cagucucuuuauccaccaagcc

SEQ ID NO: 736397 - RNA, 22 nt, Human
auggcccugaccuugaugaccu

SEQ ID NO: 736398 - RNA, 22 nt, Human
gacaggugagaugaggaacacc

SEQ ID NO: 736399 - RNA, 22 nt, Human
agaucacauaauuuccugugac

SEQ ID NO: 736400 - RNA, 22 nt, Human
caaauugcuugucuguagugga

SEQ ID NO: 736401 - RNA, 22 nt, Human
cucuucuuauggccguggcuga

SEQ ID NO: 736402 - RNA, 22 nt, Human
aguguauggaauuagcucccuu

SEQ ID NO: 736403 - RNA, 22 nt, Human
uugaaauauuugggaguguuug

SEQ ID NO: 736404 - RNA, 22 nt, Human
cuuccaaagcacuuuauggacc

SEQ ID NO: 736405 - RNA, 22 nt, Human
ccuccugggagagcacggaggg

SEQ ID NO: 736406 - RNA, 22 nt, Human
aagcccugagcacugcagagaa

SEQ ID NO: 736407 - RNA, 23 nt, Human
uggcucugugucacauacaggau

SEQ ID NO: 736408 - RNA, 22 nt, Human
ugccagugcuugugucugagca

SEQ ID NO: 736409 - RNA, 22 nt, Human
uguacauacauagauauacaca

SEQ ID NO: 736410 - RNA, 22 nt, Human
aacaugauguauuuucuugucu

SEQ ID NO: 736411 - RNA, 22 nt, Human
gaagcagcagcuggggacaguu

SEQ ID NO: 736412 - RNA, 22 nt, Human
ccagucagagaaaauguccacu

SEQ ID NO: 736413 - RNA, 22 nt, Human
ugcaaacuauugguagagaugg

SEQ ID NO: 736414 - RNA, 22 nt, Human
ugaucagacaguuaugugcaug

SEQ ID NO: 736415 - RNA, 22 nt, Human
uuauuuaggagaaggaacccug

SEQ ID NO: 736416 - RNA, 22 nt, Human
gucccucaguagugcacagugg

SEQ ID NO: 736417 - RNA, 22 nt, Human
ucuucagugcaccugaugucuu

SEQ ID NO: 736418 - RNA, 22 nt, Human
aagugguguguuggaagaaauc

SEQ ID NO: 736419 - RNA, 22 nt, Human
ucagagcauucgggugacaaau

SEQ ID NO: 736420 - RNA, 22 nt, Human
gaggcugcugccaucauuaggu

SEQ ID NO: 736421 - RNA, 22 nt, Human
uuacauguaaucuaaaauaauu

SEQ ID NO: 736422 - RNA, 20 nt, Human
gaacauggcagguggagggg

SEQ ID NO: 736423 - RNA, 22 nt, Human
uuugaacuucuccauucugaug

SEQ ID NO: 736424 - RNA, 21 nt, Human
uacaagaccggauucgggccc

SEQ ID NO: 736425 - RNA, 22 nt, Human
cugggucacccaaaagggccag

SEQ ID NO: 736426 - RNA, 22 nt, Human
uuuaggcauacuuuugggagaa

SEQ ID NO: 736427 - RNA, 22 nt, Human
acagaaauauagaagguaggaa

SEQ ID NO: 736428 - RNA, 22 nt, Human
uggcuucauggcaagucuuagu

SEQ ID NO: 736429 - RNA, 22 nt, Human
uucacaaaacacuauuuucugg

SEQ ID NO: 736430 - RNA, 22 nt, Human
cuggcugugcuggaguugagga

SEQ ID NO: 736431 - RNA, 22 nt, Human
gaggugaguggggucuccaggg

SEQ ID NO: 736432 - RNA, 22 nt, Human
guuauugcaguauagaggucua

SEQ ID NO: 736433 - RNA, 22 nt, Human
auucugagaggcacaaugugga

SEQ ID NO: 736434 - RNA, 22 nt, Human
uagacauuuggcaugguuuuca

SEQ ID NO: 736435 - RNA, 22 nt, Human
aaucaaaaccuacagagguaau

SEQ ID NO: 736436 - RNA, 22 nt, Human
accaggcugugaagugagacua

SEQ ID NO: 736437 - RNA, 22 nt, Human
ggcauuugacucagugacuggg

SEQ ID NO: 736438 - RNA, 22 nt, Human
ugugugcaggcacugugccaga

SEQ ID NO: 736439 - RNA, 22 nt, Human
gcuggugauugccucaggaggc

SEQ ID NO: 736440 - RNA, 22 nt, Human
ccagugcaccaagaggccuaga

SEQ ID NO: 736441 - RNA, 22 nt, Human
gcuuguuucuauuuaucaagua

SEQ ID NO: 736442 - RNA, 22 nt, Human
auuugcugugugcuuuagagac

SEQ ID NO: 736443 - RNA, 18 nt, Human
gccagagggaagcaggug

SEQ ID NO: 736444 - RNA, 22 nt, Human
aaguaaauaucuguagucuuua

SEQ ID NO: 736445 - RNA, 21 nt, Human
ugacugaggcuucuucacaca

SEQ ID NO: 736446 - RNA, 22 nt, Human
cagaaaaggaagagcuauguaa

SEQ ID NO: 736447 - RNA, 22 nt, Human
gauccuggcacagguugguccc

SEQ ID NO: 736448 - RNA, 22 nt, Human
ugugacuuagggcaggugagau

SEQ ID NO: 736449 - RNA, 22 nt, Human
guggccguguaacuugaguaca

SEQ ID NO: 736450 - RNA, 22 nt, Human
ugcuacagagccaggaagagug

SEQ ID NO: 736451 - RNA, 22 nt, Human
augcuauuccagaauguaaauu

SEQ ID NO: 736452 - RNA, 22 nt, Human
ugucuguaagguguuuauguua

SEQ ID NO: 736453 - RNA, 22 nt, Human
uccagaauacucugaaaucauu

SEQ ID NO: 736454 - RNA, 22 nt, Human
agaggcaggagguugacuugag

SEQ ID NO: 736455 - RNA, 22 nt, Human
uggaaauguuucuugagcucag

SEQ ID NO: 736456 - RNA, 16 nt, Human
uccaggcauaucugag

SEQ ID NO: 736457 - RNA, 22 nt, Human
acacagcaacuugcaguaugga

SEQ ID NO: 736458 - RNA, 22 nt, Human
uaugcacugguacuauucgugu

SEQ ID NO: 736459 - RNA, 22 nt, Human
ccagagggaacugggccucauu

SEQ ID NO: 736460 - RNA, 22 nt, Human
ucaggaguaaggguaacccaga

SEQ ID NO: 736461 - RNA, 22 nt, Human
aagaaaucagaaaagcauucgu

SEQ ID NO: 736462 - RNA, 22 nt, Human
cacauuaaaauccuaacuucca

SEQ ID NO: 736463 - RNA, 19 nt, Human
guccacuccacucggucuc

SEQ ID NO: 736464 - RNA, 22 nt, Human
gauauuuaacucucacaggucc

SEQ ID NO: 736465 - RNA, 22 nt, Human
uagcaauguaagauguuaacac

SEQ ID NO: 736466 - RNA, 22 nt, Human
uucagggacuuugauguaucag

SEQ ID NO: 736467 - RNA, 22 nt, Human
uaugagaacgggggcguguggg

SEQ ID NO: 736468 - RNA, 22 nt, Human
uaugauauucuaaauugacacc

SEQ ID NO: 736469 - RNA, 22 nt, Human
gcucagggaguuucacagugua

SEQ ID NO: 736470 - RNA, 22 nt, Human
agccucugcacgggcacgggug

SEQ ID NO: 736471 - RNA, 22 nt, Human
ugugugauugcacuuauaugag

SEQ ID NO: 736472 - RNA, 22 nt, Human
gaauugcuugcugagauuaaag

SEQ ID NO: 736473 - RNA, 23 nt, Human
gugagcagcccacuaggaaugcc

SEQ ID NO: 736474 - RNA, 22 nt, Human
acaggacaaaaaucuggauggc

SEQ ID NO: 736475 - RNA, 22 nt, Human
cacagcaggugcuuaaugauua

SEQ ID NO: 736476 - RNA, 22 nt, Human
ugcagccuuuagaaguucagau

SEQ ID NO: 736477 - RNA, 22 nt, Human
augcuuuauuauuuugcaggga

SEQ ID NO: 736478 - RNA, 22 nt, Human
cugcaguuugaccuuguuuucu

SEQ ID NO: 736479 - RNA, 22 nt, Human
cuaaggcagguccauuccagga

SEQ ID NO: 736480 - RNA, 22 nt, Human
gugugccaccacugacaggauu

SEQ ID NO: 736481 - RNA, 22 nt, Human
ccucuggguaucuguggaagua

SEQ ID NO: 736482 - RNA, 22 nt, Human
cagggcuugccuugccccggcg

SEQ ID NO: 736483 - RNA, 22 nt, Human
aguccaagaccaaggugucacc

SEQ ID NO: 736484 - RNA, 22 nt, Human
acaguguuguauuuaguuugau

SEQ ID NO: 736485 - RNA, 22 nt, Human
cugaaucaugccauuuugcuua

SEQ ID NO: 736486 - RNA, 22 nt, Human
guccagagggcugcaggaugcu

SEQ ID NO: 736487 - RNA, 22 nt, Human
ucucugaauucugaugcaagug

SEQ ID NO: 736488 - RNA, 22 nt, Human
uuucaugaggggcaaaaucuca

SEQ ID NO: 736489 - RNA, 22 nt, Human
gccuggagugguccugcugccc

SEQ ID NO: 736490 - RNA, 22 nt, Human
gaaugaacaaaugugguggaga

SEQ ID NO: 736491 - RNA, 22 nt, Human
gggcagcugccccucucugggc

SEQ ID NO: 736492 - RNA, 21 nt, Human
uccagcucuuauguucaugaa

SEQ ID NO: 736493 - RNA, 22 nt, Human
gaauguaauagucaguagaaca

SEQ ID NO: 736494 - RNA, 22 nt, Human
gaggaucauuugagccuaggag

SEQ ID NO: 736495 - RNA, 22 nt, Human
uaauaagcguagaagguauauc

SEQ ID NO: 736496 - RNA, 22 nt, Human
agccucugauggcucccaagga

SEQ ID NO: 736497 - RNA, 22 nt, Human
ucacaguacaugauucaguggu

SEQ ID NO: 736498 - RNA, 22 nt, Human
aacagcuaguggucuagacuuu

SEQ ID NO: 736499 - RNA, 22 nt, Human
uuauuugacuucuugcuaugcu

SEQ ID NO: 736500 - RNA, 22 nt, Human
auaugggucaugugauguucaa

SEQ ID NO: 736501 - RNA, 18 nt, Human
caggucagccuggccuca

SEQ ID NO: 736502 - RNA, 22 nt, Human
aggcuacagauacagaggcuac

SEQ ID NO: 736503 - RNA, 22 nt, Human
uuccuggcacauaguuagugcu

SEQ ID NO: 736504 - RNA, 22 nt, Human
ucagcaggcucugguugaccau

SEQ ID NO: 736505 - RNA, 22 nt, Human
auccugcuuguuacuuauagag

SEQ ID NO: 736506 - RNA, 22 nt, Human
acugaacagccuuucaaacuua

SEQ ID NO: 736507 - RNA, 22 nt, Human
aauuuauuuccugccaguacac

SEQ ID NO: 736508 - RNA, 22 nt, Human
uaaugucuccaggguugaccua

SEQ ID NO: 736509 - RNA, 22 nt, Human
gcugccaguuccuucuuacucc

SEQ ID NO: 736510 - RNA, 22 nt, Human
ugaaugugaugcuaaacauaug

SEQ ID NO: 736511 - RNA, 22 nt, Human
ccagggaaacuuuggaguggag

SEQ ID NO: 736512 - RNA, 23 nt, Human
agggagcuaaaaggcuggagcag

SEQ ID NO: 736513 - RNA, 22 nt, Human
gcuggcuuaauagggaugggcu

SEQ ID NO: 736514 - RNA, 22 nt, Human
acgcagaagggccuggcgugcc

SEQ ID NO: 736515 - RNA, 22 nt, Human
cugcacauguucaucaugacaa

SEQ ID NO: 736516 - RNA, 22 nt, Human
aaggcaguggcuggaaaaccug

SEQ ID NO: 736517 - RNA, 22 nt, Human
cuuuuucuaaucauaauugucu

SEQ ID NO: 736518 - RNA, 22 nt, Human
cauguaauccuggggagaugaa

SEQ ID NO: 736519 - RNA, 22 nt, Human
ugaagacaaagucaggcccaga

SEQ ID NO: 736520 - RNA, 22 nt, Human
uuuguguguauauccuuccaga

SEQ ID NO: 736521 - RNA, 22 nt, Human
uggguucuuucacuucucaguu

SEQ ID NO: 736522 - RNA, 22 nt, Human
uugugaaaucguguuuggaagc

SEQ ID NO: 736523 - RNA, 22 nt, Human
acagcauaaucacuucuuucuu

SEQ ID NO: 736524 - RNA, 22 nt, Human
gcagggcaucccugagcgggug

SEQ ID NO: 736525 - RNA, 18 nt, Human
cagggcuguggggucacu

SEQ ID NO: 736526 - RNA, 21 nt, Human
cugagcuggggugaagguugc

SEQ ID NO: 736527 - RNA, 22 nt, Human
agucuuuccugcuugacuguuc

SEQ ID NO: 736528 - RNA, 22 nt, Human
aagcugcuggugacugggcuga

SEQ ID NO: 736529 - RNA, 22 nt, Human
caugucacaauucuuaauggga

SEQ ID NO: 736530 - RNA, 22 nt, Human
uagaagauucauuuccucugaa

SEQ ID NO: 736531 - RNA, 22 nt, Human
uuucccacacaguccacugcag

SEQ ID NO: 736532 - RNA, 23 nt, Human
aucuaauuucuccaaaucucuac

SEQ ID NO: 736533 - RNA, 22 nt, Human
uuacgaguuugcaauuuuaaau

SEQ ID NO: 736534 - RNA, 22 nt, Human
ugguggcagcaggagggccccu

SEQ ID NO: 736535 - RNA, 22 nt, Human
agagccagccuucucagcuuac

SEQ ID NO: 736536 - RNA, 18 nt, Human
acauugauggcuuuaagc

SEQ ID NO: 736537 - RNA, 22 nt, Human
cuggccagugacugcucacccg

SEQ ID NO: 736538 - RNA, 22 nt, Human
cagcaagggauaaagaguuacu

SEQ ID NO: 736539 - RNA, 22 nt, Human
auuucuucaggucagaaauaga

SEQ ID NO: 736540 - RNA, 22 nt, Human
ccacugccaugggcuaggcaug

SEQ ID NO: 736541 - RNA, 22 nt, Human
gaggcuggacgugcauuucuac

SEQ ID NO: 736542 - RNA, 22 nt, Human
cacauaauaaauguuccugaug

SEQ ID NO: 736543 - RNA, 22 nt, Human
auguaucagauaaagcaugugg

SEQ ID NO: 736544 - RNA, 22 nt, Human
cugugcauggccaucagugccc

SEQ ID NO: 736545 - RNA, 22 nt, Human
ccuucagaccuagacaggaauc

SEQ ID NO: 736546 - RNA, 22 nt, Human
caggcagaaauuuuguuucauu

SEQ ID NO: 736547 - RNA, 22 nt, Human
acaaggacaugcaauuuggauu

SEQ ID NO: 736548 - RNA, 19 nt, Human
ucccuuccugucgggcucc

SEQ ID NO: 736549 - RNA, 22 nt, Human
aucacgugcugagaguguuauu

SEQ ID NO: 736550 - RNA, 22 nt, Human
aaacaguuuauaacaugauacu

SEQ ID NO: 736551 - RNA, 22 nt, Human
ucucuucccggauaaaguaagu

SEQ ID NO: 736552 - RNA, 22 nt, Human
ucagcaguuuuauaugcagcuu

SEQ ID NO: 736553 - RNA, 22 nt, Human
ugagacaguuggugaaaucuaa

SEQ ID NO: 736554 - RNA, 22 nt, Human
ucuucucuacaccagcagcccc

SEQ ID NO: 736555 - RNA, 22 nt, Human
agaaguuucacaauggguuuua

SEQ ID NO: 736556 - RNA, 22 nt, Human
aagccaggccauucucugguuc

SEQ ID NO: 736557 - RNA, 22 nt, Human
cugggccuagaggaagcugaca

SEQ ID NO: 736558 - RNA, 22 nt, Human
aguggcagaacuaccuuuuuau

SEQ ID NO: 736559 - RNA, 23 nt, Human
cucagagguguuuuucacuuacu

SEQ ID NO: 736560 - RNA, 22 nt, Human
auguguuugguuauaugguauu

SEQ ID NO: 736561 - RNA, 22 nt, Human
uggcuucugagucuccugacau

SEQ ID NO: 736562 - RNA, 22 nt, Human
uucaaaggaaaggcagugucaa

SEQ ID NO: 736563 - RNA, 22 nt, Human
caggcagcucaaccuugggagc

SEQ ID NO: 736564 - RNA, 22 nt, Human
auccaugaucaauuuauuacua

SEQ ID NO: 736565 - RNA, 22 nt, Human
gccacccccaaguagguggucu

SEQ ID NO: 736566 - RNA, 19 nt, Human
ugagugggccccugcagac

SEQ ID NO: 736567 - RNA, 23 nt, Human
cccuggaguaaauucuuggaagg

SEQ ID NO: 736568 - RNA, 22 nt, Human
gucaagucaugacucaaaggaa

SEQ ID NO: 736569 - RNA, 22 nt, Human
gccagcugagaaaucauugaua

SEQ ID NO: 736570 - RNA, 22 nt, Human
uccugcugagcgucugucauuu

SEQ ID NO: 736571 - RNA, 22 nt, Human
uauuucucagcauuuuacaucc

SEQ ID NO: 736572 - RNA, 22 nt, Human
gccagcugcccucugcuggucc

SEQ ID NO: 736573 - RNA, 22 nt, Human
gagcaggcaaagaugaaaggag

SEQ ID NO: 736574 - RNA, 22 nt, Human
aggcaggcaaguucauaugagg

SEQ ID NO: 736575 - RNA, 22 nt, Human
gacggggcagccagcugguggc

SEQ ID NO: 736576 - RNA, 19 nt, Human
uccugggcugcgucuugcc

SEQ ID NO: 736577 - RNA, 21 nt, Human
ccagcuuucccaagucccuuu

SEQ ID NO: 736578 - RNA, 23 nt, Human
uuuuagugacuccuuuaucugcc

SEQ ID NO: 736579 - RNA, 22 nt, Human
ucugucauaagugcugaaguau

SEQ ID NO: 736580 - RNA, 21 nt, Human
uguguauguccaaugcccuac

SEQ ID NO: 736581 - RNA, 22 nt, Human
cccucugaccuccugccacagu

SEQ ID NO: 736582 - RNA, 22 nt, Human
cccaaccccaacuuccuauguu

SEQ ID NO: 736583 - RNA, 22 nt, Human
gcagggcggcccagagcaggcc

SEQ ID NO: 736584 - RNA, 22 nt, Human
aaggggugggcauuagagcagu

SEQ ID NO: 736585 - RNA, 22 nt, Human
aucagaccauccagcguggaug

SEQ ID NO: 736586 - RNA, 22 nt, Human
uaucuauuauguucuauguguc

SEQ ID NO: 736587 - RNA, 22 nt, Human
uucuccucuguuaccuugcaaa

SEQ ID NO: 736588 - RNA, 22 nt, Human
agucuccacacuggcagaugcc

SEQ ID NO: 736589 - RNA, 22 nt, Human
uuccugugugaccgagacagug

SEQ ID NO: 736590 - RNA, 22 nt, Human
ccugagagcgaguggccucaug

SEQ ID NO: 736591 - RNA, 22 nt, Human
agcaagcacacuucaugugaac

SEQ ID NO: 736592 - RNA, 22 nt, Human
ucacaacucacagccaccggug

SEQ ID NO: 736593 - RNA, 22 nt, Human
ccuggcagaaagaguuacaccu

SEQ ID NO: 736594 - RNA, 22 nt, Human
uaaacucuucuguagaaucaga

SEQ ID NO: 736595 - RNA, 22 nt, Human
uugccguccuuacuccagcgga

SEQ ID NO: 736596 - RNA, 22 nt, Human
gaauuguacgcuuuacauaggu

SEQ ID NO: 736597 - RNA, 22 nt, Human
agggcuguguuugcacccucug

SEQ ID NO: 736598 - RNA, 22 nt, Human
uuccaugacugaagcaggggcg

SEQ ID NO: 736599 - RNA, 22 nt, Human
cagaggcugggaccucaggcau

SEQ ID NO: 736600 - RNA, 22 nt, Human
uagaggugagaggaacuuugga

SEQ ID NO: 736601 - RNA, 22 nt, Human
ugccugccccacaagggguugc

SEQ ID NO: 736602 - RNA, 22 nt, Human
cugggacuugaugaaaugacug

SEQ ID NO: 736603 - RNA, 22 nt, Human
aggcacugugcagucccaagca

SEQ ID NO: 736604 - RNA, 22 nt, Human
cuauucaguugugggcaacaau

SEQ ID NO: 736605 - RNA, 22 nt, Human
ccaggugcuagcaaucacuguc

SEQ ID NO: 736606 - RNA, 22 nt, Human
gaggaaggagggaaagcgcgcg

SEQ ID NO: 736607 - RNA, 22 nt, Human
agaggaauaugggugcacuaga

SEQ ID NO: 736608 - RNA, 22 nt, Human
gcucugcucccucaaaugacau

SEQ ID NO: 736609 - RNA, 22 nt, Human
ucagugcugaguagcgugcacc

SEQ ID NO: 736610 - RNA, 22 nt, Human
uggcuggcuggaccacaccugc

SEQ ID NO: 736611 - RNA, 22 nt, Human
ucagcuggcagguucugggaag

SEQ ID NO: 736612 - RNA, 22 nt, Human
ugcaggcagggccagcgugagg

SEQ ID NO: 736613 - RNA, 22 nt, Human
agaagccaaaggggccagauau

SEQ ID NO: 736614 - RNA, 22 nt, Human
cacacagcaacaagaauagcca

SEQ ID NO: 736615 - RNA, 22 nt, Human
acagcuaucugacuuugacuca

SEQ ID NO: 736616 - RNA, 22 nt, Human
uagagaauggccuugaaguagu

SEQ ID NO: 736617 - RNA, 22 nt, Human
gucuccugcuagcaagcaccac

SEQ ID NO: 736618 - RNA, 23 nt, Human
uuguauuuuuaguagagacaggg

SEQ ID NO: 736619 - RNA, 22 nt, Human
cagggaugagcagauggagcaa

SEQ ID NO: 736620 - RNA, 22 nt, Human
cuuuggcuuuuagauauccauu

SEQ ID NO: 736621 - RNA, 22 nt, Human
augaugaaaacugaagguuagg

SEQ ID NO: 736622 - RNA, 22 nt, Human
uuauucugucuuuggucucaau

SEQ ID NO: 736623 - RNA, 22 nt, Human
aagaggcuuauagucuuccugu

SEQ ID NO: 736624 - RNA, 22 nt, Human
cuguggcucauucuugguggca

SEQ ID NO: 736625 - RNA, 22 nt, Human
ugggacacaaaccagaccagga

SEQ ID NO: 736626 - RNA, 22 nt, Human
ccagaagcuucaaggagauucu

SEQ ID NO: 736627 - RNA, 22 nt, Human
ugauaaacuuagaaagaauguu

SEQ ID NO: 736628 - RNA, 22 nt, Human
uaguuuguaaugaggagaagua

SEQ ID NO: 736629 - RNA, 22 nt, Human
uccaagcauguggucaggagcc

SEQ ID NO: 736630 - RNA, 22 nt, Human
caggugcccagcuccugcugug

SEQ ID NO: 736631 - RNA, 22 nt, Human
auuauuaggacuacugggguug

SEQ ID NO: 736632 - RNA, 22 nt, Human
aaauugcgcacauuucuccguu

SEQ ID NO: 736633 - RNA, 22 nt, Human
ggcccugugguuuugcaaaguc

SEQ ID NO: 736634 - RNA, 22 nt, Human
cuuuggcacagucucauuugau

SEQ ID NO: 736635 - RNA, 22 nt, Human
ucuggggaugagguccagugau

SEQ ID NO: 736636 - RNA, 22 nt, Human
uggggucgaggguucucuggca

SEQ ID NO: 736637 - RNA, 20 nt, Human
caaauggcuuuuauuuccuu

SEQ ID NO: 736638 - RNA, 22 nt, Human
ggcagcugcugcauuacguugu

SEQ ID NO: 736639 - RNA, 22 nt, Human
aagagcuggagcugcuacagga

SEQ ID NO: 736640 - RNA, 22 nt, Human
gggcucuguguucuagcucucg

SEQ ID NO: 736641 - RNA, 22 nt, Human
ccaguguuuucauccucccuug

SEQ ID NO: 736642 - RNA, 22 nt, Human
ugagggaauauugauagauccg

SEQ ID NO: 736643 - RNA, 22 nt, Human
auuaauacauuauagggauugu

SEQ ID NO: 736644 - RNA, 22 nt, Human
uuuuagauaguuuaacugcacu

SEQ ID NO: 736645 - RNA, 22 nt, Human
gggcugagcacauacugacagc

SEQ ID NO: 736646 - RNA, 22 nt, Human
ugcacccucaucagucaaaugg

SEQ ID NO: 736647 - RNA, 22 nt, Human
ggucaaagugaggagucagguu

SEQ ID NO: 736648 - RNA, 22 nt, Human
ugcacaggaggcuguggagaag

SEQ ID NO: 736649 - RNA, 22 nt, Human
ccugggcuugguuguugagaac

SEQ ID NO: 736650 - RNA, 22 nt, Human
aacagugucugugguuaaaggu

SEQ ID NO: 736651 - RNA, 22 nt, Human
ugagaccugccucugcacuagg

SEQ ID NO: 736652 - RNA, 22 nt, Human
auuagggaaggauuuggccuga

SEQ ID NO: 736653 - RNA, 22 nt, Human
ggcaagcauaaccuguacagcc

SEQ ID NO: 736654 - RNA, 22 nt, Human
ccacugcucugccaggagcugg

SEQ ID NO: 736655 - RNA, 22 nt, Human
gaagaaggugccagaggcuuac

SEQ ID NO: 736656 - RNA, 22 nt, Human
cuggguguuggguacugaccgu

SEQ ID NO: 736657 - RNA, 17 nt, Human
uauggcuguguuugugc

SEQ ID NO: 736658 - RNA, 22 nt, Human
uggcagugguaccggcucucag

SEQ ID NO: 736659 - RNA, 22 nt, Human
cuuuggcugacagguuucuggu

SEQ ID NO: 736660 - RNA, 22 nt, Human
acauuuauauuuaguggggaau

SEQ ID NO: 736661 - RNA, 22 nt, Human
gcaggcaccgcggcggcagguu

SEQ ID NO: 736662 - RNA, 22 nt, Human
ugcugaggucauuuccaaguga

SEQ ID NO: 736663 - RNA, 22 nt, Human
ugggagcaccuugagggcagaa

SEQ ID NO: 736664 - RNA, 22 nt, Human
guguuuauaggagugaaugcug

SEQ ID NO: 736665 - RNA, 22 nt, Human
auaguuugaaggcuguucuacu

SEQ ID NO: 736666 - RNA, 22 nt, Human
caggaugagaggcccagggaag

SEQ ID NO: 736667 - RNA, 23 nt, Human
ggaaaaacacugugucuuggcag

SEQ ID NO: 736668 - RNA, 22 nt, Human
gccugggaagacuaagugggag

SEQ ID NO: 736669 - RNA, 23 nt, Human
uagcagcauuuuuagccucuguc

SEQ ID NO: 736670 - RNA, 22 nt, Human
gaauccuugguuuuaagcaaua

SEQ ID NO: 736671 - RNA, 22 nt, Human
uguguacacaugacaggcaccc

SEQ ID NO: 736672 - RNA, 21 nt, Human
aguucacaggaacaagcaggg

SEQ ID NO: 736673 - RNA, 22 nt, Human
auccugaguucucagagucucc

SEQ ID NO: 736674 - RNA, 20 nt, Human
cucugcuuuccaccuuucag

SEQ ID NO: 736675 - RNA, 22 nt, Human
gacuugggcugagggccagcag

SEQ ID NO: 736676 - RNA, 21 nt, Human
agcagacagaugcacgcacac

SEQ ID NO: 736677 - RNA, 22 nt, Human
uuuaaaugcagacguugauuca

SEQ ID NO: 736678 - RNA, 22 nt, Human
ggacugggauucuggaucugcu

SEQ ID NO: 736679 - RNA, 22 nt, Human
uauuugaagggagaaagugcca

SEQ ID NO: 736680 - RNA, 21 nt, Human
aaguugucucuuuugguuccu

SEQ ID NO: 736681 - RNA, 22 nt, Human
auuaagaucauuguagaagauu

SEQ ID NO: 736682 - RNA, 20 nt, Human
cacaagagaauacacacugg

SEQ ID NO: 736683 - RNA, 22 nt, Human
aacuuucugaaaagcuugauca

SEQ ID NO: 736684 - RNA, 22 nt, Human
uaccaugauguuugaguuacua

SEQ ID NO: 736685 - RNA, 18 nt, Human
acagaaauagcugugccu

SEQ ID NO: 736686 - RNA, 21 nt, Human
gcuggcucucugacgugcuuu

SEQ ID NO: 736687 - RNA, 22 nt, Human
aagaugcagcuuccacuuuugc

SEQ ID NO: 736688 - RNA, 22 nt, Human
augauuuaaagucauugugaac

SEQ ID NO: 736689 - RNA, 22 nt, Human
cccaggaggugugcccaacucg

SEQ ID NO: 736690 - RNA, 22 nt, Human
acugcacagauuaaguuagauu

SEQ ID NO: 736691 - RNA, 23 nt, Human
ugagcugguauuguccaucucca

SEQ ID NO: 736692 - RNA, 22 nt, Human
uguacaaagaguauagcuuuga

SEQ ID NO: 736693 - RNA, 22 nt, Human
uccuggccucugagucaagaac

SEQ ID NO: 736694 - RNA, 22 nt, Human
agggaagccaagccuuagagaa

SEQ ID NO: 736695 - RNA, 22 nt, Human
gugaagaaggcaauacaaagaa

SEQ ID NO: 736696 - RNA, 22 nt, Human
auuucucaguaaucucagcaau

SEQ ID NO: 736697 - RNA, 23 nt, Human
augagguaaagaucagcuuuaaa

SEQ ID NO: 736698 - RNA, 22 nt, Human
ucucucagucagaugcuaaaga

SEQ ID NO: 736699 - RNA, 22 nt, Human
ggcacacagcggaauuugcucu

SEQ ID NO: 736700 - RNA, 22 nt, Human
uuucugcacauuucuaaaguug

SEQ ID NO: 736701 - RNA, 22 nt, Human
agccccuguccucucugaugac

SEQ ID NO: 736702 - RNA, 22 nt, Human
caacaguuuauaguguuaucuu

SEQ ID NO: 736703 - RNA, 19 nt, Human
ugugugcaugcgcacgugu

SEQ ID NO: 736704 - RNA, 22 nt, Human
aagucucuuuaccucuccaggc

SEQ ID NO: 736705 - RNA, 22 nt, Human
cuggcagauagccacgccuguc

SEQ ID NO: 736706 - RNA, 23 nt, Human
uggcugagcccacuaucuuggcc

SEQ ID NO: 736707 - RNA, 22 nt, Human
ugagaccauuugacauacagug

SEQ ID NO: 736708 - RNA, 22 nt, Human
ugugggaggucuggaaggcucc

SEQ ID NO: 736709 - RNA, 22 nt, Human
gaccugggguaagcuuggcaac

SEQ ID NO: 736710 - RNA, 22 nt, Human
ugggccaguccagccccaggga

SEQ ID NO: 736711 - RNA, 22 nt, Human
cucugagauaguuucuaucaau

SEQ ID NO: 736712 - RNA, 21 nt, Human
auauuguagguaaagugcagg

SEQ ID NO: 736713 - RNA, 23 nt, Human
uggaggcaggaugcuaaggaguc

SEQ ID NO: 736714 - RNA, 22 nt, Human
cuggacucagggugcuccagcg

SEQ ID NO: 736715 - RNA, 22 nt, Human
gugaaggaggggccacagauau

SEQ ID NO: 736716 - RNA, 22 nt, Human
ugcuggaaagaauuuucuguua

SEQ ID NO: 736717 - RNA, 22 nt, Human
cacauucacauuuuucccucua

SEQ ID NO: 736718 - RNA, 22 nt, Human
ugaaacaaauuuggaaaaucua

SEQ ID NO: 736719 - RNA, 22 nt, Human
ccucugcaccauagccuucagc

SEQ ID NO: 736720 - RNA, 22 nt, Human
ugugugaaggagccacuguuca

SEQ ID NO: 736721 - RNA, 22 nt, Human
agcagggcuuugcagacuuggg

SEQ ID NO: 736722 - RNA, 22 nt, Human
uguguucaaugacuucaucuuu

SEQ ID NO: 736723 - RNA, 22 nt, Human
uagagacaccaguaccauucug

SEQ ID NO: 736724 - RNA, 22 nt, Human
gcagcuuucuaagcuuuauugc

SEQ ID NO: 736725 - RNA, 22 nt, Human
caaagagguuuugagggcagcu

SEQ ID NO: 736726 - RNA, 22 nt, Human
cugcuccacaccuccauuuccu

SEQ ID NO: 736727 - RNA, 22 nt, Human
ucauauuaacaaugaaacucag

SEQ ID NO: 736728 - RNA, 22 nt, Human
aucacaaaggguuuucucugag

SEQ ID NO: 736729 - RNA, 22 nt, Human
gguccuggaaguguaaguggca

SEQ ID NO: 736730 - RNA, 21 nt, Human
aguguaggucauuagcuguug

SEQ ID NO: 736731 - RNA, 22 nt, Human
gauugaaaggaaaaccagagug

SEQ ID NO: 736732 - RNA, 20 nt, Human
agagcagcaguuggugaggu

SEQ ID NO: 736733 - RNA, 22 nt, Human
agguauauguucauguaugugu

SEQ ID NO: 736734 - RNA, 21 nt, Human
ugaguuaaaaugucagugcca

SEQ ID NO: 736735 - RNA, 22 nt, Human
uggcccugcccucuucaucuuu

SEQ ID NO: 736736 - RNA, 22 nt, Human
caaagguauaaguuaauauaca

SEQ ID NO: 736737 - RNA, 22 nt, Human
ggcagccaugugggcagcgagu

SEQ ID NO: 736738 - RNA, 20 nt, Human
cugcauguuggagguguacc

SEQ ID NO: 736739 - RNA, 22 nt, Human
agcccccaaaagugcuuaugau

SEQ ID NO: 736740 - RNA, 22 nt, Human
aggccacauagcuugcauguag

SEQ ID NO: 736741 - RNA, 22 nt, Human
uucuccaacacaagcaugaugu

SEQ ID NO: 736742 - RNA, 22 nt, Human
gcaugcaggaaguuuuuuggga

SEQ ID NO: 736743 - RNA, 22 nt, Human
uuaguaauguguuaauaugaau

SEQ ID NO: 736744 - RNA, 22 nt, Human
gucaacauuuacugcccuggcc

SEQ ID NO: 736745 - RNA, 17 nt, Human
guccuacccauggucua

SEQ ID NO: 736746 - RNA, 22 nt, Human
aauaguauuuauuuggaaaaag

SEQ ID NO: 736747 - RNA, 22 nt, Human
agggacaugaggaugaucuaga

SEQ ID NO: 736748 - RNA, 22 nt, Human
ugagcccugaggaucuguucgg

SEQ ID NO: 736749 - RNA, 22 nt, Human
aaucuucacucuuaacugugca

SEQ ID NO: 736750 - RNA, 22 nt, Human
aauauuuauauuucucuucccu

SEQ ID NO: 736751 - RNA, 20 nt, Human
ccauggccacaucugugcug

SEQ ID NO: 736752 - RNA, 17 nt, Human
cuggccaguguacuugg

SEQ ID NO: 736753 - RNA, 22 nt, Human
ugugucuguguauacacggcau

SEQ ID NO: 736754 - RNA, 22 nt, Human
ggaaaucucuacuuugucauuu

SEQ ID NO: 736755 - RNA, 22 nt, Human
aacaggcaacaguugacucuga

SEQ ID NO: 736756 - RNA, 22 nt, Human
augcuuccaauauucucccuuu

SEQ ID NO: 736757 - RNA, 22 nt, Human
cgauggagagguccugauaguu

SEQ ID NO: 736758 - RNA, 22 nt, Human
agaaacugaacacaagagucgg

SEQ ID NO: 736759 - RNA, 22 nt, Human
ucaaggaaggucuguugcucca

SEQ ID NO: 736760 - RNA, 22 nt, Human
aauguucaaacagaucacuuag

SEQ ID NO: 736761 - RNA, 22 nt, Human
uccuucagcuacucaguuucca

SEQ ID NO: 736762 - RNA, 22 nt, Human
uggggaugaaacccaggcaucu

SEQ ID NO: 736763 - RNA, 22 nt, Human
aauauguuccacuuaaagcugg

SEQ ID NO: 736764 - RNA, 22 nt, Human
agaguacugccucaguuaugaa

SEQ ID NO: 736765 - RNA, 22 nt, Human
ucuguucaguugauuagacaga

SEQ ID NO: 736766 - RNA, 22 nt, Human
uguuugugcugccuggugggca

SEQ ID NO: 736767 - RNA, 22 nt, Human
cccguuuaauuacucgagcugu

SEQ ID NO: 736768 - RNA, 22 nt, Human
guucacauguggucaugcuguc

SEQ ID NO: 736769 - RNA, 22 nt, Human
acaggaagugcuggcacuuaca

SEQ ID NO: 736770 - RNA, 22 nt, Human
cagcaagauggugaaugagacg

SEQ ID NO: 736771 - RNA, 17 nt, Human
accaccucucaccagca

SEQ ID NO: 736772 - RNA, 22 nt, Human
gcaaggaacaaaugcucugcuu

SEQ ID NO: 736773 - RNA, 22 nt, Human
ucagugcugcuuuaugacaguu

SEQ ID NO: 736774 - RNA, 22 nt, Human
cagggaugggauggagucaguu

SEQ ID NO: 736775 - RNA, 22 nt, Human
caucuaauaccucauuuaaucu

SEQ ID NO: 736776 - RNA, 20 nt, Human
gcugaccccugcugucaugc

SEQ ID NO: 736777 - RNA, 22 nt, Human
gaagcacauuagaugugucuuc

SEQ ID NO: 736778 - RNA, 22 nt, Human
ucagaggaauaaugcugcauuu

SEQ ID NO: 736779 - RNA, 22 nt, Human
uuucaugauuaacuuagugaau

SEQ ID NO: 736780 - RNA, 22 nt, Human
uuccuccuuguccuaguuacug

SEQ ID NO: 736781 - RNA, 22 nt, Human
aauguuuucauuauccuaacug

SEQ ID NO: 736782 - RNA, 22 nt, Human
gguguagaaaagggaaggguuu

SEQ ID NO: 736783 - RNA, 22 nt, Human
guccaucuguaggagggacaca

SEQ ID NO: 736784 - RNA, 22 nt, Human
uggcgcaguuucucugcugccu

SEQ ID NO: 736785 - RNA, 22 nt, Human
aacaucucauggacuacauucu

SEQ ID NO: 736786 - RNA, 22 nt, Human
ccagcugugcuguuggcuuguc

SEQ ID NO: 736787 - RNA, 22 nt, Human
ucuggcuucuccuagagcaaug

SEQ ID NO: 736788 - RNA, 22 nt, Human
cagugucaggaucaguauauuu

SEQ ID NO: 736789 - RNA, 22 nt, Human
gagcaggacagcagcuuccugg

SEQ ID NO: 736790 - RNA, 22 nt, Human
agaaggccagauggacggggcu

SEQ ID NO: 736791 - RNA, 22 nt, Human
uggcuguggacucagauggcuc

SEQ ID NO: 736792 - RNA, 22 nt, Human
cauggcuuuccaguccuccacu

SEQ ID NO: 736793 - RNA, 22 nt, Human
cagacuuucugacucccuugcc

SEQ ID NO: 736794 - RNA, 22 nt, Human
uuggcuguuuuaucuccuggug

SEQ ID NO: 736795 - RNA, 19 nt, Human
aacuguaaagaucuguagc

SEQ ID NO: 736796 - RNA, 22 nt, Human
gaagcggcaucaggaggcugcc

SEQ ID NO: 736797 - RNA, 22 nt, Human
uggcuaccugauuucuuuucag

SEQ ID NO: 736798 - RNA, 22 nt, Human
cccagcucaagcagagagcuaa

SEQ ID NO: 736799 - RNA, 22 nt, Human
uggagggauacaaagaugaaaa

SEQ ID NO: 736800 - RNA, 22 nt, Human
aagaugccuguagcaggaagau

SEQ ID NO: 736801 - RNA, 22 nt, Human
cuuccagguaggccuaaggcag

SEQ ID NO: 736802 - RNA, 22 nt, Human
uuucucauggaacaucguuuag

SEQ ID NO: 736803 - RNA, 20 nt, Human
auuuuguuuauguuccucuc

SEQ ID NO: 736804 - RNA, 22 nt, Human
auguaucaauuaucugucugca

SEQ ID NO: 736805 - RNA, 22 nt, Human
gugguaauagagcuccaaacua

SEQ ID NO: 736806 - RNA, 22 nt, Human
auuuaugcaucccagcauguga

SEQ ID NO: 736807 - RNA, 22 nt, Human
agauccaguuaauagcuucauu

SEQ ID NO: 736808 - RNA, 22 nt, Human
agugggaauuucagugcuaaaa

SEQ ID NO: 736809 - RNA, 22 nt, Human
uuugacaugugcuuauaacuuu

SEQ ID NO: 736810 - RNA, 22 nt, Human
guggagggugauugccggcugu

SEQ ID NO: 736811 - RNA, 22 nt, Human
agucuggaaaaugcauguuuca

SEQ ID NO: 736812 - RNA, 22 nt, Human
uagaaauggagaacagauuaau

SEQ ID NO: 736813 - RNA, 22 nt, Human
cccuuucccuucuggcucaggg

SEQ ID NO: 736814 - RNA, 22 nt, Human
caucacauuuaauuaaaauguc

SEQ ID NO: 736815 - RNA, 22 nt, Human
uagucuuuugagaaguauaucu

SEQ ID NO: 736816 - RNA, 22 nt, Human
gagaggaagccuucuguacuug

SEQ ID NO: 736817 - RNA, 22 nt, Human
caggggcaggugugagaucauc

SEQ ID NO: 736818 - RNA, 22 nt, Human
agcagauggagaauggagucag

SEQ ID NO: 736819 - RNA, 22 nt, Human
ggcagaaggccucccagcuccu

SEQ ID NO: 736820 - RNA, 22 nt, Human
cugggccacaaaaaacuccugu

SEQ ID NO: 736821 - RNA, 22 nt, Human
uauugcuugggguacaagguau

SEQ ID NO: 736822 - RNA, 22 nt, Human
uaaaugcaguacaaauuguucu

SEQ ID NO: 736823 - RNA, 22 nt, Human
ggcacagcaggagcuaugugaa

SEQ ID NO: 736824 - RNA, 22 nt, Human
ccuggcucugaaguccacauca

SEQ ID NO: 736825 - RNA, 22 nt, Human
augagaaaguuaaucaucauga

SEQ ID NO: 736826 - RNA, 22 nt, Human
gcaagcagacugggccccugug

SEQ ID NO: 736827 - RNA, 23 nt, Human
aaauuauugcucuucaauugccu

SEQ ID NO: 736828 - RNA, 22 nt, Human
gccugcagaacugugaggcaau

SEQ ID NO: 736829 - RNA, 22 nt, Human
aggcaccagguugugguuuguc

SEQ ID NO: 736830 - RNA, 22 nt, Human
cagcaucuugaaggguaaacca

SEQ ID NO: 736831 - RNA, 22 nt, Human
guaucuuuuacaccaggaaauu

SEQ ID NO: 736832 - RNA, 22 nt, Human
uaggauuuaauaaaagaauaga

SEQ ID NO: 736833 - RNA, 22 nt, Human
uaggggcagaagcggcggucca

SEQ ID NO: 736834 - RNA, 22 nt, Human
uucuuaaguuuagcaacuugug

SEQ ID NO: 736835 - RNA, 20 nt, Human
gcucagguuugggcuuugug

SEQ ID NO: 736836 - RNA, 22 nt, Human
auuuagacuucccagcacugug

SEQ ID NO: 736837 - RNA, 22 nt, Human
acuccagguuuuuucacugaag

SEQ ID NO: 736838 - RNA, 22 nt, Human
ucugugugguaguuucagugaa

SEQ ID NO: 736839 - RNA, 22 nt, Human
ucugccuguugcuagaauguca

SEQ ID NO: 736840 - RNA, 22 nt, Human
ccugccugguguaagucuaagg

SEQ ID NO: 736841 - RNA, 22 nt, Human
acaguacaagcaaugcauuuuu

SEQ ID NO: 736842 - RNA, 22 nt, Human
uaacacauaucuacaacaugug

SEQ ID NO: 736843 - RNA, 22 nt, Human
acaucacacgccuuccaggagg

SEQ ID NO: 736844 - RNA, 22 nt, Human
acagcagaucuggcuacagguu

SEQ ID NO: 736845 - RNA, 22 nt, Human
cacaucugcucugggcagcacu

SEQ ID NO: 736846 - RNA, 22 nt, Human
ggguguccugugccaagcuggg

SEQ ID NO: 736847 - RNA, 22 nt, Human
cuguuuccaccuucauggcuaa

SEQ ID NO: 736848 - RNA, 22 nt, Human
acaggugcaugcuaccaugucu

SEQ ID NO: 736849 - RNA, 22 nt, Human
ccaucagcuccaguaucuucug

SEQ ID NO: 736850 - RNA, 22 nt, Human
gaguccugcuuucaauucuuuu

SEQ ID NO: 736851 - RNA, 22 nt, Human
uucuuucucuccacaaggcuug

SEQ ID NO: 736852 - RNA, 22 nt, Human
uccuggccugucuggaguagcu

SEQ ID NO: 736853 - RNA, 22 nt, Human
cuugucugugucggauaaaacu

SEQ ID NO: 736854 - RNA, 22 nt, Human
ucccagauucuucugugugggc

SEQ ID NO: 736855 - RNA, 22 nt, Human
gcagcagcucccuauccaggcu

SEQ ID NO: 736856 - RNA, 22 nt, Human
agcccuccuuuguucaugcugc

SEQ ID NO: 736857 - RNA, 22 nt, Human
agugcuuucccugaaaccuucc

SEQ ID NO: 736858 - RNA, 22 nt, Human
ggcucuggagcacagacgucug

SEQ ID NO: 736859 - RNA, 22 nt, Human
uggccacagccucugccaguuc

SEQ ID NO: 736860 - RNA, 20 nt, Human
caacacugcccauuguuugc

SEQ ID NO: 736861 - RNA, 23 nt, Human
cugagguaaaauauucugaagga

SEQ ID NO: 736862 - RNA, 22 nt, Human
gcacaguuaaagggucauguga

SEQ ID NO: 736863 - RNA, 22 nt, Human
ggacugaaggacaaucugguuc

SEQ ID NO: 736864 - RNA, 22 nt, Human
acaagcuccuuauucagcuggg

SEQ ID NO: 736865 - RNA, 20 nt, Human
gaugacauacucacuuaggg

SEQ ID NO: 736866 - RNA, 22 nt, Human
gauguagagggaagauuuuaaa

SEQ ID NO: 736867 - RNA, 22 nt, Human
ccuaggaguucgaagcugcagu

SEQ ID NO: 736868 - RNA, 22 nt, Human
acgggcagacagagcuacucgc

SEQ ID NO: 736869 - RNA, 22 nt, Human
acaacauucuuaaauacacuga

SEQ ID NO: 736870 - RNA, 22 nt, Human
uguguaaauggcaucucucagc

SEQ ID NO: 736871 - RNA, 22 nt, Human
aguggcuagaucaugagugagc

SEQ ID NO: 736872 - RNA, 22 nt, Human
uucugccuuggcaggguggucc

SEQ ID NO: 736873 - RNA, 22 nt, Human
uagaagcagcaggaguaaaggc

SEQ ID NO: 736874 - RNA, 22 nt, Human
uacuucauuauucuaguuuuga

SEQ ID NO: 736875 - RNA, 22 nt, Human
aagcauguacaaugagugucuc

SEQ ID NO: 736876 - RNA, 22 nt, Human
ccaagggaaggauguauaugau

SEQ ID NO: 736877 - RNA, 22 nt, Human
cacuucaacaguuauuucuuag

SEQ ID NO: 736878 - RNA, 22 nt, Human
cuccguuuugugggacacggau

SEQ ID NO: 736879 - RNA, 22 nt, Human
agcaucuggcagaaagucagaa

SEQ ID NO: 736880 - RNA, 22 nt, Human
gcucagggcgcgagggacgugg

SEQ ID NO: 736881 - RNA, 22 nt, Human
ucuguuauucugucuauugcca

SEQ ID NO: 736882 - RNA, 23 nt, Human
aagauacagguguggaaugguuu

SEQ ID NO: 736883 - RNA, 22 nt, Human
uggucuggaacuccuggcuuca

SEQ ID NO: 736884 - RNA, 20 nt, Human
aggcagcugggaaaugaggg

SEQ ID NO: 736885 - RNA, 22 nt, Human
gguuugcauucugaaaggcuca

SEQ ID NO: 736886 - RNA, 22 nt, Human
aaauggaauguguuuauaauuc

SEQ ID NO: 736887 - RNA, 22 nt, Human
ggucuuccgagaggccugugcu

SEQ ID NO: 736888 - RNA, 21 nt, Human
ugcauauauaagugcauacac

SEQ ID NO: 736889 - RNA, 22 nt, Human
uacaggaacugggcaggacauu

SEQ ID NO: 736890 - RNA, 22 nt, Human
gggcagugguuacacagcugag

SEQ ID NO: 736891 - RNA, 22 nt, Human
gggaggugauuaggaccaugua

SEQ ID NO: 736892 - RNA, 22 nt, Human
aguaacacuauuuucauaugua

SEQ ID NO: 736893 - RNA, 22 nt, Human
uuggcuucccagagcuuacgcu

SEQ ID NO: 736894 - RNA, 22 nt, Human
auaaagaccaguaucuuauguu

SEQ ID NO: 736895 - RNA, 22 nt, Human
gggcugcacguauucugcucac

SEQ ID NO: 736896 - RNA, 19 nt, Human
ucccucagucugccaggcc

SEQ ID NO: 736897 - RNA, 22 nt, Human
ugcuagaauuagguuaaacaaa

SEQ ID NO: 736898 - RNA, 22 nt, Human
uaaaguuauaaauuaccuguca

SEQ ID NO: 736899 - RNA, 22 nt, Human
ugucagacacagccagagacug

SEQ ID NO: 736900 - RNA, 22 nt, Human
cugcaucauuuucagacaaugg

SEQ ID NO: 736901 - RNA, 22 nt, Human
ucucaggcuuccuggugcugug

SEQ ID NO: 736902 - RNA, 22 nt, Human
cuugugcauuucauuccucagg

SEQ ID NO: 736903 - RNA, 21 nt, Human
acacacuacacauuccuaguu

SEQ ID NO: 736904 - RNA, 22 nt, Human
ucagcagggaggcucugugccc

SEQ ID NO: 736905 - RNA, 22 nt, Human
uuuguucaugccuauauucuca

SEQ ID NO: 736906 - RNA, 22 nt, Human
agugucugugcuuugcagcaaa

SEQ ID NO: 736907 - RNA, 22 nt, Human
ucuucaauuagauuuaccaauu

SEQ ID NO: 736908 - RNA, 22 nt, Human
ugugaaagucaaauuaauugaa

SEQ ID NO: 736909 - RNA, 22 nt, Human
uccuucagggcugaccacaggc

SEQ ID NO: 736910 - RNA, 22 nt, Human
uauacaguuaaguuucuucagu

SEQ ID NO: 736911 - RNA, 22 nt, Human
aaaagucugcucucauuucaga

SEQ ID NO: 736912 - RNA, 22 nt, Human
cagagcauuuggaagccacgug

SEQ ID NO: 736913 - RNA, 22 nt, Human
auucugcuucuuauuucacgug

SEQ ID NO: 736914 - RNA, 22 nt, Human
uggaacacuguggaugagaaga

SEQ ID NO: 736915 - RNA, 22 nt, Human
gcugccuucccaggccuuugcu

SEQ ID NO: 736916 - RNA, 22 nt, Human
cagcuccagccugacaccaaga

SEQ ID NO: 736917 - RNA, 22 nt, Human
aagccuucaguccguugcagag

SEQ ID NO: 736918 - RNA, 22 nt, Human
uccuucagccaugggcucucca

SEQ ID NO: 736919 - RNA, 22 nt, Human
guuaaugugguagugcauaucu

SEQ ID NO: 736920 - RNA, 22 nt, Human
uuucuuguaaaagcugugggaa

SEQ ID NO: 736921 - RNA, 22 nt, Human
uaccuggauguuuagauuggca

SEQ ID NO: 736922 - RNA, 22 nt, Human
aaucuuacuuaugauuuuucgg

SEQ ID NO: 736923 - RNA, 22 nt, Human
ugaaaugaaugugauucgauag

SEQ ID NO: 736924 - RNA, 22 nt, Human
aagcuuuaagugucagucagcc

SEQ ID NO: 736925 - RNA, 22 nt, Human
ccuggcuccugcacagaucuuu

SEQ ID NO: 736926 - RNA, 22 nt, Human
gccauguuuugguaaauaccau

SEQ ID NO: 736927 - RNA, 22 nt, Human
gaagacaucguguggacuaaca

SEQ ID NO: 736928 - RNA, 22 nt, Human
gggagggcuuggacccagaugu

SEQ ID NO: 736929 - RNA, 22 nt, Human
uuccaggaccaggaagagggga

SEQ ID NO: 736930 - RNA, 22 nt, Human
caacuacauccacacuuuguua

SEQ ID NO: 736931 - RNA, 22 nt, Human
ugacuuuuggaccucacugucc

SEQ ID NO: 736932 - RNA, 20 nt, Human
ccacuccaggugauucugau

SEQ ID NO: 736933 - RNA, 22 nt, Human
aucccucucugcaugacugugu

SEQ ID NO: 736934 - RNA, 22 nt, Human
aagaaaagaaaccugaggcuuu

SEQ ID NO: 736935 - RNA, 22 nt, Human
guuuugcagagugcaauaaauc

SEQ ID NO: 736936 - RNA, 22 nt, Human
gcaguguucuuguugcuuuuau

SEQ ID NO: 736937 - RNA, 22 nt, Human
uugagaaaggggucaauaucuc

SEQ ID NO: 736938 - RNA, 22 nt, Human
gcagauguuguugcugggaguu

SEQ ID NO: 736939 - RNA, 22 nt, Human
ucagggauugcaaaauucaucc

SEQ ID NO: 736940 - RNA, 22 nt, Human
auuuagcaccuccaucucaaca

SEQ ID NO: 736941 - RNA, 22 nt, Human
uugaaacugcuuauugaauuug

SEQ ID NO: 736942 - RNA, 22 nt, Human
ccccuucuguguccugucagcc

SEQ ID NO: 736943 - RNA, 22 nt, Human
cucaggaaccgcggcagcagcc

SEQ ID NO: 736944 - RNA, 22 nt, Human
aauuaggaaauucagccauuuu

SEQ ID NO: 736945 - RNA, 22 nt, Human
ucaguugcuaugagaaauaaau

SEQ ID NO: 736946 - RNA, 20 nt, Human
acacuguucuucacacauuu

SEQ ID NO: 736947 - RNA, 22 nt, Human
cagggagaucuuggcuccuggu

SEQ ID NO: 736948 - RNA, 22 nt, Human
cuucagaggggacucaaaguca

SEQ ID NO: 736949 - RNA, 22 nt, Human
uagauacacacacagucaugug

SEQ ID NO: 736950 - RNA, 22 nt, Human
gggguccucggagccugggucu

SEQ ID NO: 736951 - RNA, 22 nt, Human
acauuuaaauaccuauguuucu

SEQ ID NO: 736952 - RNA, 19 nt, Human
agggcgugguggcacaugu

SEQ ID NO: 736953 - RNA, 22 nt, Human
ucauaguuauggagauuaagga

SEQ ID NO: 736954 - RNA, 22 nt, Human
agcagcacgaguccacaaaucc

SEQ ID NO: 736955 - RNA, 22 nt, Human
cuggacucauccauagagguga

SEQ ID NO: 736956 - RNA, 22 nt, Human
ugcucuccggcuuccguggccu

SEQ ID NO: 736957 - RNA, 22 nt, Human
agcaaggcugggucuaaugggg

SEQ ID NO: 736958 - RNA, 22 nt, Human
uuucauuacguguuugacuugu

SEQ ID NO: 736959 - RNA, 22 nt, Human
ggcccagguccagcgaguaccu

SEQ ID NO: 736960 - RNA, 22 nt, Human
ccaaagugcugggguuacaggc

SEQ ID NO: 736961 - RNA, 22 nt, Human
aaaaaccauugucuucagucuc

SEQ ID NO: 736962 - RNA, 18 nt, Human
cugugacuccuagaucuc

SEQ ID NO: 736963 - RNA, 22 nt, Human
cuggcacacagcaggcucucag

SEQ ID NO: 736964 - RNA, 18 nt, Human
uaaaccagaugacaguug

SEQ ID NO: 736965 - RNA, 22 nt, Human
agcaaaguagcugcuguucuua

SEQ ID NO: 736966 - RNA, 22 nt, Human
acaggccagccugggguaaggu

SEQ ID NO: 736967 - RNA, 22 nt, Human
augcauugaggaugacaugagu

SEQ ID NO: 736968 - RNA, 22 nt, Human
ugcauucugacuuaguuaauau

SEQ ID NO: 736969 - RNA, 22 nt, Human
gaggacacaugacuccagcagg

SEQ ID NO: 736970 - RNA, 22 nt, Human
gaagagagccgcgggacaucag

SEQ ID NO: 736971 - RNA, 22 nt, Human
gggagcuguaguccagauaccg

SEQ ID NO: 736972 - RNA, 19 nt, Human
ccuggcccugcugcgcggg

SEQ ID NO: 736973 - RNA, 22 nt, Human
ugaguuauggagaauaaaguca

SEQ ID NO: 736974 - RNA, 22 nt, Human
ucauaaaaauagacucuaaagu

SEQ ID NO: 736975 - RNA, 22 nt, Human
auuuugaagggaauugaaguuc

SEQ ID NO: 736976 - RNA, 22 nt, Human
aaccuuugaggggagcucuuuc

SEQ ID NO: 736977 - RNA, 22 nt, Human
agcuucauaauuccuugacuca

SEQ ID NO: 736978 - RNA, 22 nt, Human
aucaggaucugggagccugaaa

SEQ ID NO: 736979 - RNA, 22 nt, Human
acaggucugcaguaacugggaa

SEQ ID NO: 736980 - RNA, 22 nt, Human
accugcccggggacauuccuuu

SEQ ID NO: 736981 - RNA, 22 nt, Human
uucaaaccuaucuaagaaauag

SEQ ID NO: 736982 - RNA, 22 nt, Human
ugcuugucuucaggauuauggu

SEQ ID NO: 736983 - RNA, 21 nt, Human
guguuuccuguuuauggcuug

SEQ ID NO: 736984 - RNA, 21 nt, Human
auuauuauuucuguguccagc

SEQ ID NO: 736985 - RNA, 22 nt, Human
gcaugcagucaaccaguaaggg

SEQ ID NO: 736986 - RNA, 21 nt, Human
ugaguuaaaauggagagucuu

SEQ ID NO: 736987 - RNA, 22 nt, Human
agggccagaguggcaaaagccu

SEQ ID NO: 736988 - RNA, 22 nt, Human
aggcuaaaagagaaucauuuag

SEQ ID NO: 736989 - RNA, 22 nt, Human
gugagggagguagauuucauca

SEQ ID NO: 736990 - RNA, 22 nt, Human
agugucuucaugauguggcagc

SEQ ID NO: 736991 - RNA, 22 nt, Human
ugccgccugguuucuccgcccc

SEQ ID NO: 736992 - RNA, 22 nt, Human
aaugcuuugagggaagaugaaa

SEQ ID NO: 736993 - RNA, 22 nt, Human
acagccaggagccaugggcagg

SEQ ID NO: 736994 - RNA, 22 nt, Human
uguauaagccuagugaaauuuc

SEQ ID NO: 736995 - RNA, 22 nt, Human
uuugauaacagugaauaucaug

SEQ ID NO: 736996 - RNA, 22 nt, Human
ucuuugaaaagauauuccuccu

SEQ ID NO: 736997 - RNA, 20 nt, Human
agccccacccuuguccuggc

SEQ ID NO: 736998 - RNA, 22 nt, Human
aaaugcaguuuccugagaccca

SEQ ID NO: 736999 - RNA, 22 nt, Human
cuugccuguggcuaguuggcuc

SEQ ID NO: 737000 - RNA, 22 nt, Human
ucuugauuuguaaaagaaggau

SEQ ID NO: 737001 - RNA, 22 nt, Human
cugugccuuuguagcugugccu

SEQ ID NO: 737002 - RNA, 20 nt, Human
uuuuccugugguuugauaug

SEQ ID NO: 737003 - RNA, 22 nt, Human
ccucagaagaaguggaauugau

SEQ ID NO: 737004 - RNA, 22 nt, Human
uccugaggucugaaaaaggagc

SEQ ID NO: 737005 - RNA, 22 nt, Human
uuaauuaugagaaagggaaaag

SEQ ID NO: 737006 - RNA, 22 nt, Human
acagguguggggcugugguacu

SEQ ID NO: 737007 - RNA, 22 nt, Human
agguuacagucaucucagaauc

SEQ ID NO: 737008 - RNA, 22 nt, Human
uaggcagaguuuaaugguuaag

SEQ ID NO: 737009 - RNA, 22 nt, Human
uggggcuggggaucuugagccu

SEQ ID NO: 737010 - RNA, 22 nt, Human
uuucacagcugucuuccgucuc

SEQ ID NO: 737011 - RNA, 22 nt, Human
cccagagggcugaggauaugaa

SEQ ID NO: 737012 - RNA, 22 nt, Human
uucacauuccgcggcuauuuuc

SEQ ID NO: 737013 - RNA, 22 nt, Human
aucugucaggagcaaggacuac

SEQ ID NO: 737014 - RNA, 22 nt, Human
guacaaauugauacagauuuga

SEQ ID NO: 737015 - RNA, 22 nt, Human
ggagcucaguggggggacugug

SEQ ID NO: 737016 - RNA, 22 nt, Human
auuacaguuaauuuaccuucuu

SEQ ID NO: 737017 - RNA, 22 nt, Human
agauaaaaugguucaaaggcua

SEQ ID NO: 737018 - RNA, 22 nt, Human
aacagcuuugugcucagauuug

SEQ ID NO: 737019 - RNA, 22 nt, Human
cugccuuccaaccccagacucc

SEQ ID NO: 737020 - RNA, 22 nt, Human
uucuccuugaaaagcugcaucu

SEQ ID NO: 737021 - RNA, 22 nt, Human
cagagacagggcagggagugug

SEQ ID NO: 737022 - RNA, 22 nt, Human
gaggggagaggcuuauggauca

SEQ ID NO: 737023 - RNA, 22 nt, Human
ccacugaggcaggcaguaucua

SEQ ID NO: 737024 - RNA, 22 nt, Human
ucaauauucuucuuuaguagga

SEQ ID NO: 737025 - RNA, 22 nt, Human
uguccaggaauugacccugcaa

SEQ ID NO: 737026 - RNA, 21 nt, Human
uagugucuuaagagccuugca

SEQ ID NO: 737027 - RNA, 22 nt, Human
cucuagggaagaaugagagccc

SEQ ID NO: 737028 - RNA, 19 nt, Human
auaaauaaaaagugggaga

SEQ ID NO: 737029 - RNA, 22 nt, Human
agucuucucauuucacaugcuu

SEQ ID NO: 737030 - RNA, 22 nt, Human
augggcugugggacccuggacc

SEQ ID NO: 737031 - RNA, 22 nt, Human
uuuccuuuuauaaggcuugagg

SEQ ID NO: 737032 - RNA, 22 nt, Human
acacauuauaggcaaucaaaag

SEQ ID NO: 737033 - RNA, 22 nt, Human
aggccucuugucuuccucacau

SEQ ID NO: 737034 - RNA, 23 nt, Human
ugagcagcuaaaggugaugcggg

SEQ ID NO: 737035 - RNA, 22 nt, Human
gauuauggauggacaguggagc

SEQ ID NO: 737036 - RNA, 22 nt, Human
aaaaugaugcuguaauuuggca

SEQ ID NO: 737037 - RNA, 22 nt, Human
uggggcacuuaugaugugccac

SEQ ID NO: 737038 - RNA, 20 nt, Human
uugagcaaucaguaaaggau

SEQ ID NO: 737039 - RNA, 22 nt, Human
acucugggaauccucaccuucc

SEQ ID NO: 737040 - RNA, 22 nt, Human
cagugcaguugguggcaggggu

SEQ ID NO: 737041 - RNA, 17 nt, Human
aauugucagcaguagcu

SEQ ID NO: 737042 - RNA, 22 nt, Human
gagcucagagccuauaguuggu

SEQ ID NO: 737043 - RNA, 22 nt, Human
uagaggcuuucagcgguagguc

SEQ ID NO: 737044 - RNA, 22 nt, Human
cucagggaauugaaucuccuug

SEQ ID NO: 737045 - RNA, 22 nt, Human
ucauucaucaguugguagagau

SEQ ID NO: 737046 - RNA, 22 nt, Human
aggcuucauuacagugguucaa

SEQ ID NO: 737047 - RNA, 22 nt, Human
ucuugaaggggggcaguguuga

SEQ ID NO: 737048 - RNA, 22 nt, Human
ucacugcagguuuuucaggagg

SEQ ID NO: 737049 - RNA, 21 nt, Human
gcugcugugggccagggaggc

SEQ ID NO: 737050 - RNA, 22 nt, Human
gcuacaggugacagccucugca

SEQ ID NO: 737051 - RNA, 22 nt, Human
aaguccaugaucaagauguggc

SEQ ID NO: 737052 - RNA, 22 nt, Human
uccuggcugcaccagugacccu

SEQ ID NO: 737053 - RNA, 22 nt, Human
ucucuuccaguggcuuugauuu

SEQ ID NO: 737054 - RNA, 22 nt, Human
cauguacaguuuuucuguccug

SEQ ID NO: 737055 - RNA, 22 nt, Human
augcuucuccugaacaucccug

SEQ ID NO: 737056 - RNA, 22 nt, Human
auagaauuugcacuaaaucugc

SEQ ID NO: 737057 - RNA, 22 nt, Human
cagggacaaagugagaaaggaa

SEQ ID NO: 737058 - RNA, 22 nt, Human
gcagcuguggguuccaagucua

SEQ ID NO: 737059 - RNA, 22 nt, Human
ugagccaagcagcuucccaggg

SEQ ID NO: 737060 - RNA, 22 nt, Human
uaggaagguccaugucuuaucu

SEQ ID NO: 737061 - RNA, 22 nt, Human
cuuuguaaucauucccuugguu

SEQ ID NO: 737062 - RNA, 22 nt, Human
guggccugccagcagauggcgc

SEQ ID NO: 737063 - RNA, 22 nt, Human
guguaugcuuagccagagauuu

SEQ ID NO: 737064 - RNA, 22 nt, Human
uuguagaacaugcagcacaaug

SEQ ID NO: 737065 - RNA, 22 nt, Human
uuauuagggugguuuauguucu

SEQ ID NO: 737066 - RNA, 22 nt, Human
ccucuggguuaguuuagggagc

SEQ ID NO: 737067 - RNA, 22 nt, Human
uguggcaggcauucugaggcug

SEQ ID NO: 737068 - RNA, 22 nt, Human
ccugagcacaagggagcuuuga

SEQ ID NO: 737069 - RNA, 22 nt, Human
ccugcugcuuaggccauauuuc

SEQ ID NO: 737070 - RNA, 22 nt, Human
agcuacaguggacaagugaacu

SEQ ID NO: 737071 - RNA, 22 nt, Human
gcagggaaacaggugcuaagga

SEQ ID NO: 737072 - RNA, 19 nt, Human
gacuuuggaaaugcuguuu

SEQ ID NO: 737073 - RNA, 22 nt, Human
gaccugaaagugugggcgaccu

SEQ ID NO: 737074 - RNA, 22 nt, Human
uaggcaugcaaauaaaugugca

SEQ ID NO: 737075 - RNA, 22 nt, Human
cauguuaaaauauacauucuga

SEQ ID NO: 737076 - RNA, 22 nt, Human
uuuugguagaaucaacaaugua

SEQ ID NO: 737077 - RNA, 22 nt, Human
uggagaaggccggccaggagug

SEQ ID NO: 737078 - RNA, 22 nt, Human
gagugcagaugaacagaagauu

SEQ ID NO: 737079 - RNA, 20 nt, Human
ggccucaguguccuuguuug

SEQ ID NO: 737080 - RNA, 22 nt, Human
aaaucacuguuauugaucuuaa

SEQ ID NO: 737081 - RNA, 17 nt, Human
auguuaauuucacauuu

SEQ ID NO: 737082 - RNA, 22 nt, Human
ugcuccaugcgcucggccggcg

SEQ ID NO: 737083 - RNA, 22 nt, Human
uccaggaauagaucagagauuu

SEQ ID NO: 737084 - RNA, 22 nt, Human
uccaggcuggcucuucaaaauu

SEQ ID NO: 737085 - RNA, 22 nt, Human
cugcuuuagacaacugcuggga

SEQ ID NO: 737086 - RNA, 22 nt, Human
agcauuauguccaugcuaaauu

SEQ ID NO: 737087 - RNA, 22 nt, Human
gcagccucagggcacucagaug

SEQ ID NO: 737088 - RNA, 22 nt, Human
gcaggcagguggcaucuuguga

SEQ ID NO: 737089 - RNA, 22 nt, Human
uugggugcugucauggggcacg

SEQ ID NO: 737090 - RNA, 22 nt, Human
ggccagaggaccucucauagcc

SEQ ID NO: 737091 - RNA, 22 nt, Human
uaugaggcacuucauuagcugg

SEQ ID NO: 737092 - RNA, 22 nt, Human
cauaauuuuuuuaagucagaac

SEQ ID NO: 737093 - RNA, 22 nt, Human
augaggcagcugcuggagaacg

SEQ ID NO: 737094 - RNA, 22 nt, Human
ggaaggcagugaaggggcugau

SEQ ID NO: 737095 - RNA, 22 nt, Human
aggcaggccuacacaaugggag

SEQ ID NO: 737096 - RNA, 22 nt, Human
uuuccaaaggaggaaccaguuu

SEQ ID NO: 737097 - RNA, 17 nt, Human
auaaaggcaaguauuau

SEQ ID NO: 737098 - RNA, 22 nt, Human
gcucugcugcuuacuagauggu

SEQ ID NO: 737099 - RNA, 22 nt, Human
gacuauuuauuuacagaaagcu

SEQ ID NO: 737100 - RNA, 22 nt, Human
ccaguugguuucaaugggacag

SEQ ID NO: 737101 - RNA, 22 nt, Human
cauagaggcuaaaauuauuugg

SEQ ID NO: 737102 - RNA, 22 nt, Human
uccauacauacagauaugcauu

SEQ ID NO: 737103 - RNA, 22 nt, Human
cuuuagacauacagaauuucca

SEQ ID NO: 737104 - RNA, 22 nt, Human
uugauucacaauuaccaagacu

SEQ ID NO: 737105 - RNA, 22 nt, Human
ugauuucccucaucauaacaga

SEQ ID NO: 737106 - RNA, 22 nt, Human
gacuguuagaauguaaaauaua

SEQ ID NO: 737107 - RNA, 22 nt, Human
cacaggccugucucuuucuaac

SEQ ID NO: 737108 - RNA, 22 nt, Human
ucccuuaaaacucauguguugu

SEQ ID NO: 737109 - RNA, 22 nt, Human
auggauucauuaaugacuucuc

SEQ ID NO: 737110 - RNA, 22 nt, Human
cagugaggaguccagggcagag

SEQ ID NO: 737111 - RNA, 22 nt, Human
ccaaagugugggagaagaggua

SEQ ID NO: 737112 - RNA, 22 nt, Human
cuguugcucugaacaggucuug

SEQ ID NO: 737113 - RNA, 22 nt, Human
uagcacacuaaagauauuaaca

SEQ ID NO: 737114 - RNA, 22 nt, Human
ggacugaggacaugugaggcau

SEQ ID NO: 737115 - RNA, 22 nt, Human
agaagggaacucagagaugauu

SEQ ID NO: 737116 - RNA, 22 nt, Human
ucugggccucaccugcugcuca

SEQ ID NO: 737117 - RNA, 22 nt, Human
gaaaagcuaggccaguucagcu

SEQ ID NO: 737118 - RNA, 22 nt, Human
uguaugcaccauuguauuaccu

SEQ ID NO: 737119 - RNA, 22 nt, Human
gaaauuaaccaccuuuggcuuu

SEQ ID NO: 737120 - RNA, 22 nt, Human
aaggcucuuggagugaaugcag

SEQ ID NO: 737121 - RNA, 22 nt, Human
uggcagauucugguugauacuu

SEQ ID NO: 737122 - RNA, 22 nt, Human
gcugggcacugucccauaggcu

SEQ ID NO: 737123 - RNA, 22 nt, Human
ugcugccuaauaagucgagggu

SEQ ID NO: 737124 - RNA, 22 nt, Human
ucuccugguacccuuccuagca

SEQ ID NO: 737125 - RNA, 22 nt, Human
auuaaacugagcaaauuaacau

SEQ ID NO: 737126 - RNA, 17 nt, Human
gcucugccccagccucu

SEQ ID NO: 737127 - RNA, 22 nt, Human
cauuuguuggucagauuguagu

SEQ ID NO: 737128 - RNA, 22 nt, Human
cugccuagaaaaccaggcuccu

SEQ ID NO: 737129 - RNA, 21 nt, Human
aucagcaaaugccugucuccc

SEQ ID NO: 737130 - RNA, 22 nt, Human
gaaagaggaaggagauguauua

SEQ ID NO: 737131 - RNA, 22 nt, Human
gugggagcugcggaggccuggg

SEQ ID NO: 737132 - RNA, 22 nt, Human
acagaaguguguguguaggaau

SEQ ID NO: 737133 - RNA, 22 nt, Human
cagggggugguccaggcugcgc

SEQ ID NO: 737134 - RNA, 22 nt, Human
ggacuggacucucaggcucaca

SEQ ID NO: 737135 - RNA, 22 nt, Human
cuauggcuguguucaugcuaca

SEQ ID NO: 737136 - RNA, 23 nt, Human
ucucagugccgauugcauacaca

SEQ ID NO: 737137 - RNA, 22 nt, Human
uuucuuagcgaugcuugauaaa

SEQ ID NO: 737138 - RNA, 22 nt, Human
ucagugugcacucugugaccca

SEQ ID NO: 737139 - RNA, 22 nt, Human
ugggccaccugcuuuuuugcau

SEQ ID NO: 737140 - RNA, 22 nt, Human
gaauagcuuccuuuuuuccaaa

SEQ ID NO: 737141 - RNA, 22 nt, Human
acugggaaagugcugccugcag

SEQ ID NO: 737142 - RNA, 22 nt, Human
gccugagccgccugagcggcgg

SEQ ID NO: 737143 - RNA, 22 nt, Human
aagagcacuaacagagcugaua

SEQ ID NO: 737144 - RNA, 22 nt, Human
ucaguaucuacuaucuugauga

SEQ ID NO: 737145 - RNA, 22 nt, Human
gagucugaggggagagcugggu

SEQ ID NO: 737146 - RNA, 22 nt, Human
cugcucugacccuuucaccuuc

SEQ ID NO: 737147 - RNA, 22 nt, Human
gaaguagauucguugcaucuug

SEQ ID NO: 737148 - RNA, 22 nt, Human
ucacugaauuucaagcuagugg

SEQ ID NO: 737149 - RNA, 22 nt, Human
ggagauccaggcaaggccgcag

SEQ ID NO: 737150 - RNA, 22 nt, Human
agcagcauggaugggccucagc

SEQ ID NO: 737151 - RNA, 23 nt, Human
cauuucugggagauuuauaaaau

SEQ ID NO: 737152 - RNA, 22 nt, Human
ggcuuugcaaacucauuccaca

SEQ ID NO: 737153 - RNA, 22 nt, Human
cuguaugauauccaaauugaua

SEQ ID NO: 737154 - RNA, 22 nt, Human
cuggcucccggggaucgagcac

SEQ ID NO: 737155 - RNA, 22 nt, Human
gcaguaguuuauggcuaaaccu

SEQ ID NO: 737156 - RNA, 22 nt, Human
uggagagcacaguuccugcuuc

SEQ ID NO: 737157 - RNA, 22 nt, Human
cuguccugaaguuuucaugaga

SEQ ID NO: 737158 - RNA, 22 nt, Human
aggaaagauggaaggaggauaa

SEQ ID NO: 737159 - RNA, 22 nt, Human
ccaagcuggauuuagcugcaca

SEQ ID NO: 737160 - RNA, 22 nt, Human
uugcagcuucgagucuaucugu

SEQ ID NO: 737161 - RNA, 22 nt, Human
aguugcuucccuauucuuagca

SEQ ID NO: 737162 - RNA, 22 nt, Human
uacagugugacauuucuacaaa

SEQ ID NO: 737163 - RNA, 22 nt, Human
aggcagcagucaugaggaaaga

SEQ ID NO: 737164 - RNA, 22 nt, Human
uugaucuuggacuuuccagccu

SEQ ID NO: 737165 - RNA, 22 nt, Human
cugaggccucucuccugggcuu

SEQ ID NO: 737166 - RNA, 22 nt, Human
cuuucuugguccugaagauggc

SEQ ID NO: 737167 - RNA, 22 nt, Human
cagcccugagagaaccaucuau

SEQ ID NO: 737168 - RNA, 22 nt, Human
uggagcaggugcucaggguaau

SEQ ID NO: 737169 - RNA, 22 nt, Human
uggagggcaucuguggucaggc

SEQ ID NO: 737170 - RNA, 22 nt, Human
cucuuuggauagaauuacaaag

SEQ ID NO: 737171 - RNA, 22 nt, Human
ucugaaauuuuaguuauagaaa

SEQ ID NO: 737172 - RNA, 22 nt, Human
uauggaaagggaguuuaauuug

SEQ ID NO: 737173 - RNA, 22 nt, Human
gcugagagcaaggacaaagcau

SEQ ID NO: 737174 - RNA, 22 nt, Human
cugcccugugcacaggaaacug

SEQ ID NO: 737175 - RNA, 23 nt, Human
aagaaugcuucugaagagcugcc

SEQ ID NO: 737176 - RNA, 22 nt, Human
agguggggccaaaugcuacagu

SEQ ID NO: 737177 - RNA, 22 nt, Human
uauauucaacaggcuaauguca

SEQ ID NO: 737178 - RNA, 22 nt, Human
gauccugggacugaaugggugc

SEQ ID NO: 737179 - RNA, 22 nt, Human
ggagacauauuccagagcuggg

SEQ ID NO: 737180 - RNA, 22 nt, Human
uuccagggcuaauuccugugga

SEQ ID NO: 737181 - RNA, 22 nt, Human
gcguuuguuuugcuggcgccag

SEQ ID NO: 737182 - RNA, 22 nt, Human
uucaugagguaccugugaucau

SEQ ID NO: 737183 - RNA, 22 nt, Human
ggcagcuguuuguccuccuguu

SEQ ID NO: 737184 - RNA, 22 nt, Human
agcuuccuugaauucuguagaa

SEQ ID NO: 737185 - RNA, 22 nt, Human
auuuacauuuauuugagaaggu

SEQ ID NO: 737186 - RNA, 22 nt, Human
aaauggcaauuuaguuuauuua

SEQ ID NO: 737187 - RNA, 22 nt, Human
gacagccaggucugaugaccca

SEQ ID NO: 737188 - RNA, 22 nt, Human
uuucaugcacaaaugagcaagg

SEQ ID NO: 737189 - RNA, 22 nt, Human
uacagcauugcauuuuccuuug

SEQ ID NO: 737190 - RNA, 22 nt, Human
aagcugugaagagcaagugagg

SEQ ID NO: 737191 - RNA, 22 nt, Human
ggcaccagccaccuauuucuag

SEQ ID NO: 737192 - RNA, 22 nt, Human
agccccaguccgcugcgggcgg

SEQ ID NO: 737193 - RNA, 22 nt, Human
uuacaacaccaggcaguauccu

SEQ ID NO: 737194 - RNA, 22 nt, Human
acauuuugaaagggaaauuguu

SEQ ID NO: 737195 - RNA, 22 nt, Human
uucaggaaucaaccaagucauu

SEQ ID NO: 737196 - RNA, 22 nt, Human
acagaaaaaugagggagcugga

SEQ ID NO: 737197 - RNA, 22 nt, Human
uuuauugcugagaaggauucca

SEQ ID NO: 737198 - RNA, 22 nt, Human
accaccaggggauuuucagaac

SEQ ID NO: 737199 - RNA, 22 nt, Human
uuucacaggccuuuuguagccc

SEQ ID NO: 737200 - RNA, 22 nt, Human
cuugacaacuggcagauauaua

SEQ ID NO: 737201 - RNA, 22 nt, Human
uccuggguuaauuaugauucac

SEQ ID NO: 737202 - RNA, 22 nt, Human
aaacaugaauagauauuaaaca

SEQ ID NO: 737203 - RNA, 22 nt, Human
aaaugcuguagaucagugaguu

SEQ ID NO: 737204 - RNA, 22 nt, Human
uauucacagcugccgcacucag

SEQ ID NO: 737205 - RNA, 22 nt, Human
ucuggcuucgcagcucccagcc

SEQ ID NO: 737206 - RNA, 22 nt, Human
auugagaaugcaaucuacuaug

SEQ ID NO: 737207 - RNA, 22 nt, Human
ggaaggaaagcagcuuggcccu

SEQ ID NO: 737208 - RNA, 22 nt, Human
uagauucagauauuuaggacaa

SEQ ID NO: 737209 - RNA, 22 nt, Human
cacuguaaagcgucacagggac

SEQ ID NO: 737210 - RNA, 22 nt, Human
aguaacaugaguuuuucuaaug

SEQ ID NO: 737211 - RNA, 22 nt, Human
gccagagcaugcacugccugca

SEQ ID NO: 737212 - RNA, 22 nt, Human
guauauaugugugaacauguau

SEQ ID NO: 737213 - RNA, 22 nt, Human
ugcugcugacauuuggggcuug

SEQ ID NO: 737214 - RNA, 18 nt, Human
ggccagagggaggguccc

SEQ ID NO: 737215 - RNA, 22 nt, Human
guucucaguggggagcaggguu

SEQ ID NO: 737216 - RNA, 22 nt, Human
guccuucaaaggcacgcaguua

SEQ ID NO: 737217 - RNA, 22 nt, Human
gugaggagggcuggucccaggc

SEQ ID NO: 737218 - RNA, 22 nt, Human
guuugauucaagaacaaagagu

SEQ ID NO: 737219 - RNA, 22 nt, Human
gccguggccagagcccagucuc

SEQ ID NO: 737220 - RNA, 22 nt, Human
agaacagaagggaggaaggccu

SEQ ID NO: 737221 - RNA, 22 nt, Human
acagauggaauguguuauggga

SEQ ID NO: 737222 - RNA, 22 nt, Human
auagauuauuugcucauuacuu

SEQ ID NO: 737223 - RNA, 22 nt, Human
ggcaaggguugaagauaaggua

SEQ ID NO: 737224 - RNA, 22 nt, Human
cacauuuauuugaggcuaauug

SEQ ID NO: 737225 - RNA, 22 nt, Human
aggcuccaugguucucccucag

SEQ ID NO: 737226 - RNA, 22 nt, Human
uuuuaagaacuguucugugcuu

SEQ ID NO: 737227 - RNA, 22 nt, Human
cacagucccgugcuuaccaugu

SEQ ID NO: 737228 - RNA, 22 nt, Human
agacuuugagcucuuagagaag

SEQ ID NO: 737229 - RNA, 23 nt, Human
cugugucuaugcagccauaucca

SEQ ID NO: 737230 - RNA, 22 nt, Human
ucuacaggguaaggggcuugcc

SEQ ID NO: 737231 - RNA, 22 nt, Human
cuccuaggacgccgcugcuccu

SEQ ID NO: 737232 - RNA, 22 nt, Human
aaguuuauguugguaagauauc

SEQ ID NO: 737233 - RNA, 22 nt, Human
aacaacugcuaagguguguccu

SEQ ID NO: 737234 - RNA, 22 nt, Human
uguggcacauacacaggagggc

SEQ ID NO: 737235 - RNA, 21 nt, Human
cagcagaagcaucuauggaag

SEQ ID NO: 737236 - RNA, 22 nt, Human
uaggccacagaugagacauaag

SEQ ID NO: 737237 - RNA, 22 nt, Human
acagugauaaaauuucacaugu

SEQ ID NO: 737238 - RNA, 22 nt, Human
gucucaguuugaagugaugcca

SEQ ID NO: 737239 - RNA, 22 nt, Human
cuugaaaugacaggagcacauc

SEQ ID NO: 737240 - RNA, 22 nt, Human
aagucacuucuuaggaaaggag

SEQ ID NO: 737241 - RNA, 22 nt, Human
aggcacagugccuggaaucaaa

SEQ ID NO: 737242 - RNA, 22 nt, Human
ccucugggggcuuccuuacccu

SEQ ID NO: 737243 - RNA, 18 nt, Human
cugagggcaacagaggcu

SEQ ID NO: 737244 - RNA, 22 nt, Human
aaagaaugucugaacagcuggc

SEQ ID NO: 737245 - RNA, 22 nt, Human
uaucacacgccuugcuucauuu

SEQ ID NO: 737246 - RNA, 22 nt, Human
aaauucuucagguaauuuugau

SEQ ID NO: 737247 - RNA, 22 nt, Human
aaacacacagaaaugaaugagg

SEQ ID NO: 737248 - RNA, 22 nt, Human
uuaaggaaggugaauuucuugg

SEQ ID NO: 737249 - RNA, 21 nt, Human
aaugcauuaacauaaagcuga

SEQ ID NO: 737250 - RNA, 22 nt, Human
acagaacugggaaaugcacaua

SEQ ID NO: 737251 - RNA, 23 nt, Human
ucagcccacaucuagucauuagc

SEQ ID NO: 737252 - RNA, 22 nt, Human
agucucaggcagaggaaggcua

SEQ ID NO: 737253 - RNA, 18 nt, Human
aagaggaggagcagguug

SEQ ID NO: 737254 - RNA, 22 nt, Human
gcuuuacaugagaugaggacaa

SEQ ID NO: 737255 - RNA, 22 nt, Human
auuuuguugagguaauugucaa

SEQ ID NO: 737256 - RNA, 22 nt, Human
gcaaaucaccaccuagcuggau

SEQ ID NO: 737257 - RNA, 22 nt, Human
caggagccagcugucccaacca

SEQ ID NO: 737258 - RNA, 20 nt, Human
uacagucagggcacaggcag

SEQ ID NO: 737259 - RNA, 22 nt, Human
ugcccagcacugugccagucac

SEQ ID NO: 737260 - RNA, 22 nt, Human
acagagaugcaaguguguauuu

SEQ ID NO: 737261 - RNA, 22 nt, Human
acagagacaggcagacagucuu

SEQ ID NO: 737262 - RNA, 22 nt, Human
gcugggagcaaagccaugcaua

SEQ ID NO: 737263 - RNA, 22 nt, Human
gcacacugugaauuugcauaug

SEQ ID NO: 737264 - RNA, 22 nt, Human
ucacuuugaugacauuguagcu

SEQ ID NO: 737265 - RNA, 22 nt, Human
uggguaggaccagaaaugcacu

SEQ ID NO: 737266 - RNA, 22 nt, Human
cuguuuuccuggguuccaugag

SEQ ID NO: 737267 - RNA, 22 nt, Human
caagaacauugugaucacuuca

SEQ ID NO: 737268 - RNA, 22 nt, Human
cccaguguuccuugaggggcug

SEQ ID NO: 737269 - RNA, 22 nt, Human
aaacacaccuuuggaacuguga

SEQ ID NO: 737270 - RNA, 22 nt, Human
ccuuaaagaauaagucuuaucu

SEQ ID NO: 737271 - RNA, 22 nt, Human
gaguccuggcguccaauuuccu

SEQ ID NO: 737272 - RNA, 22 nt, Human
uuuagagacccucugcuauuuu

SEQ ID NO: 737273 - RNA, 22 nt, Human
gauuuccuagacauggggcaga

SEQ ID NO: 737274 - RNA, 22 nt, Human
acuauucacagauucaguguuc

SEQ ID NO: 737275 - RNA, 18 nt, Human
caaagcaggugacagugu

SEQ ID NO: 737276 - RNA, 22 nt, Human
ccaggaguuugaggcugcagug

SEQ ID NO: 737277 - RNA, 22 nt, Human
ggggcugauggaacucaggccu

SEQ ID NO: 737278 - RNA, 22 nt, Human
uguaugaggcauacaucaggca

SEQ ID NO: 737279 - RNA, 22 nt, Human
gcuccuguuuguuuguuccuga

SEQ ID NO: 737280 - RNA, 20 nt, Human
uuucaagucagcaauucuca

SEQ ID NO: 737281 - RNA, 22 nt, Human
ugaggcccagccgcccugagag

SEQ ID NO: 737282 - RNA, 22 nt, Human
agcaaguguaagaaugcagaau

SEQ ID NO: 737283 - RNA, 22 nt, Human
agcaggcaggaggcuacuaagg

SEQ ID NO: 737284 - RNA, 22 nt, Human
aggcagaugggagcuggaaguu

SEQ ID NO: 737285 - RNA, 22 nt, Human
aacugcaacuuguuugauucuu

SEQ ID NO: 737286 - RNA, 22 nt, Human
gacagcaguuuuucucuagggu

SEQ ID NO: 737287 - RNA, 22 nt, Human
uacagguaaaauuaucagaaac

SEQ ID NO: 737288 - RNA, 22 nt, Human
cauucucucuacuuguuuucaa

SEQ ID NO: 737289 - RNA, 22 nt, Human
caguccuguguuaaacaagagc

SEQ ID NO: 737290 - RNA, 21 nt, Human
ugagaaguaugucuucagcca

SEQ ID NO: 737291 - RNA, 22 nt, Human
aagccuuccugagugcaaggcc

SEQ ID NO: 737292 - RNA, 23 nt, Human
ucuccagugucucuucauugagu

SEQ ID NO: 737293 - RNA, 22 nt, Human
ggagugugggauggagcucagg

SEQ ID NO: 737294 - RNA, 22 nt, Human
uggccuuggcagugagaagagu

SEQ ID NO: 737295 - RNA, 21 nt, Human
uuucagaccuaucuuugaagg

SEQ ID NO: 737296 - RNA, 22 nt, Human
auauaaaguguuuagaaagcug

SEQ ID NO: 737297 - RNA, 23 nt, Human
augaaacaucacaaugguaccau

SEQ ID NO: 737298 - RNA, 22 nt, Human
ugugccuguugguguagacaua

SEQ ID NO: 737299 - RNA, 22 nt, Human
cuauggaaaccuaaucaggaga

SEQ ID NO: 737300 - RNA, 22 nt, Human
gcugccuggagaggcagggaug

SEQ ID NO: 737301 - RNA, 22 nt, Human
ugccugcugauuggaguugaau

SEQ ID NO: 737302 - RNA, 22 nt, Human
ugcugcugaggcuaaaguauag

SEQ ID NO: 737303 - RNA, 22 nt, Human
aaagcugguuauucugaggcag

SEQ ID NO: 737304 - RNA, 22 nt, Human
caagaauuaagaauuuugaugu

SEQ ID NO: 737305 - RNA, 22 nt, Human
cauacauaugcauguguguaua

SEQ ID NO: 737306 - RNA, 22 nt, Human
cagggccagccgcagcauccac

SEQ ID NO: 737307 - RNA, 22 nt, Human
gcaguguuaaacaacugcugcu

SEQ ID NO: 737308 - RNA, 22 nt, Human
acugcaucugaacugugaaugg

SEQ ID NO: 737309 - RNA, 22 nt, Human
acaaggagaagaaauuggucau

SEQ ID NO: 737310 - RNA, 22 nt, Human
uagaagagacauagccuguggu

SEQ ID NO: 737311 - RNA, 22 nt, Human
uggcucaguagcagugugguca

SEQ ID NO: 737312 - RNA, 22 nt, Human
auucacugucagcuugcauggg

SEQ ID NO: 737313 - RNA, 22 nt, Human
cccagcaguaaccaguggaaau

SEQ ID NO: 737314 - RNA, 22 nt, Human
uucaguuucuaaaugcuccucu

SEQ ID NO: 737315 - RNA, 22 nt, Human
agucuguggggucccuggggca

SEQ ID NO: 737316 - RNA, 22 nt, Human
ccugugguuuacucuguggcua

SEQ ID NO: 737317 - RNA, 22 nt, Human
ugacuuuacagauauguuuccu

SEQ ID NO: 737318 - RNA, 22 nt, Human
ucuggcuuucugacucuacaac

SEQ ID NO: 737319 - RNA, 22 nt, Human
cugagcacagaaauaagauauu

SEQ ID NO: 737320 - RNA, 22 nt, Human
acaaucuuauuaguaguauaga

SEQ ID NO: 737321 - RNA, 22 nt, Human
aggcuccugcaggugaggugcu

SEQ ID NO: 737322 - RNA, 22 nt, Human
aagccacagaucguucugucac

SEQ ID NO: 737323 - RNA, 22 nt, Human
acugagaugaauagauggcaag

SEQ ID NO: 737324 - RNA, 19 nt, Human
cugggccagaaucagcuca

SEQ ID NO: 737325 - RNA, 22 nt, Human
acauagaguaucauacuggaug

SEQ ID NO: 737326 - RNA, 22 nt, Human
gagcuuccugcaggucacugug

SEQ ID NO: 737327 - RNA, 22 nt, Human
uuacaaaguguuaugauaaaca

SEQ ID NO: 737328 - RNA, 22 nt, Human
acaguauagggcuuauauugua

SEQ ID NO: 737329 - RNA, 22 nt, Human
aauguacaaggguuccaguuuu

SEQ ID NO: 737330 - RNA, 22 nt, Human
uauaagucuggcauauguaugc

SEQ ID NO: 737331 - RNA, 22 nt, Human
ucagaggccuaugucuacaacu

SEQ ID NO: 737332 - RNA, 22 nt, Human
gcagccagggagagaaccaggg

SEQ ID NO: 737333 - RNA, 22 nt, Human
gauuucuucaggagcagaggag

SEQ ID NO: 737334 - RNA, 23 nt, Human
uccagccucuugcucucacaugc

SEQ ID NO: 737335 - RNA, 22 nt, Human
aaacugucaccuaauguauuuu

SEQ ID NO: 737336 - RNA, 22 nt, Human
uagcacuguucuagcauguuuu

SEQ ID NO: 737337 - RNA, 22 nt, Human
ucagcagguggugggcagguga

SEQ ID NO: 737338 - RNA, 22 nt, Human
gugggugugagugacggcgucc

SEQ ID NO: 737339 - RNA, 22 nt, Human
cuuuucucuuacauuccacugg

SEQ ID NO: 737340 - RNA, 16 nt, Human
gaaggagauucagaaa

SEQ ID NO: 737341 - RNA, 22 nt, Human
uuaggaauauuuucugaguagu

SEQ ID NO: 737342 - RNA, 22 nt, Human
ucacucaauaucccaguggggc

SEQ ID NO: 737343 - RNA, 22 nt, Human
gauggcuucugaaucagggccu

SEQ ID NO: 737344 - RNA, 22 nt, Human
uuugacaaauccuucagcaaug

SEQ ID NO: 737345 - RNA, 22 nt, Human
agcugacugaugaagaggccuu

SEQ ID NO: 737346 - RNA, 22 nt, Human
ugggcugcuucucaaaugucuc

SEQ ID NO: 737347 - RNA, 22 nt, Human
acuaaggaauaugacaaacuca

SEQ ID NO: 737348 - RNA, 21 nt, Human
gauuuauaagccuuaagccua

SEQ ID NO: 737349 - RNA, 22 nt, Human
ccacagcugaccgcaggugagc

SEQ ID NO: 737350 - RNA, 22 nt, Human
uggcccagaucucugaccuuga

SEQ ID NO: 737351 - RNA, 22 nt, Human
aagaguggagcuggaaaguggg

SEQ ID NO: 737352 - RNA, 22 nt, Human
ggguagcaugugucagaguuug

SEQ ID NO: 737353 - RNA, 22 nt, Human
cccaggcuccuagaggcccaga

SEQ ID NO: 737354 - RNA, 22 nt, Human
ccccuggguccaggcuucucug

SEQ ID NO: 737355 - RNA, 22 nt, Human
ggacuuggcuucuuucagagac

SEQ ID NO: 737356 - RNA, 22 nt, Human
uuaagacauuuuuggagauuau

SEQ ID NO: 737357 - RNA, 22 nt, Human
augaaugggucauuauuugauc

SEQ ID NO: 737358 - RNA, 22 nt, Human
caggaaggcgcggcugugccug

SEQ ID NO: 737359 - RNA, 22 nt, Human
ggggaggcaagaugaagugagg

SEQ ID NO: 737360 - RNA, 22 nt, Human
aucuguggcgcaaacaaaggcu

SEQ ID NO: 737361 - RNA, 22 nt, Human
auugcuuaucuaucuuuaaguc

SEQ ID NO: 737362 - RNA, 22 nt, Human
agaguucugcucuucucaguga

SEQ ID NO: 737363 - RNA, 22 nt, Human
aacagcuucaucacauggcaua

SEQ ID NO: 737364 - RNA, 22 nt, Human
cagcuggcgggcagagccgcca

SEQ ID NO: 737365 - RNA, 22 nt, Human
ugcaggagagcuggucuggccc

SEQ ID NO: 737366 - RNA, 22 nt, Human
caacuuggcucucuggcuaucc

SEQ ID NO: 737367 - RNA, 22 nt, Human
aauaguccugauuuaaucuggg

SEQ ID NO: 737368 - RNA, 22 nt, Human
gaagaagagauaauggggagca

SEQ ID NO: 737369 - RNA, 22 nt, Human
gcaaaugaagguggugcuacag

SEQ ID NO: 737370 - RNA, 21 nt, Human
uuggauguauuuauguuuuag

SEQ ID NO: 737371 - RNA, 22 nt, Human
uauauuaaccauaggguucuag

SEQ ID NO: 737372 - RNA, 21 nt, Human
uaagagcuauuauugcaaacc

SEQ ID NO: 737373 - RNA, 22 nt, Human
cccagaggugaaggagguggga

SEQ ID NO: 737374 - RNA, 22 nt, Human
ugagacaauaaggcugagaagc

SEQ ID NO: 737375 - RNA, 22 nt, Human
gcuggcuucccuaccugcaccu

SEQ ID NO: 737376 - RNA, 22 nt, Human
auuauuauauagggaaaguccc

SEQ ID NO: 737377 - RNA, 20 nt, Human
cugcuguguuauuguagaac

SEQ ID NO: 737378 - RNA, 22 nt, Human
uccuucuuugacaaguggcaga

SEQ ID NO: 737379 - RNA, 22 nt, Human
ucagcacugucuuuuauuugaa

SEQ ID NO: 737380 - RNA, 22 nt, Human
uauuucacagcagcucauuuaa

SEQ ID NO: 737381 - RNA, 22 nt, Human
ggccagcuccuuggcagugccu

SEQ ID NO: 737382 - RNA, 22 nt, Human
uccuggacaagcccuucacccu

SEQ ID NO: 737383 - RNA, 19 nt, Human
gcucaacagcucggguccu

SEQ ID NO: 737384 - RNA, 22 nt, Human
uuaguugaugcuaagggauccc

SEQ ID NO: 737385 - RNA, 22 nt, Human
caggugcucugcugcagguaag

SEQ ID NO: 737386 - RNA, 22 nt, Human
cagaguucaaagccugcuggga

SEQ ID NO: 737387 - RNA, 22 nt, Human
agcauuuaauuacaguuuaauu

SEQ ID NO: 737388 - RNA, 21 nt, Human
uuuuacagaugaggggaaggg

SEQ ID NO: 737389 - RNA, 22 nt, Human
aggggccauguaaguguaucac

SEQ ID NO: 737390 - RNA, 22 nt, Human
ggcuagaauaauugacuucauu

SEQ ID NO: 737391 - RNA, 22 nt, Human
cacucugagaaguacaagcucc

SEQ ID NO: 737392 - RNA, 22 nt, Human
gaguagaacuagaauucuucaa

SEQ ID NO: 737393 - RNA, 22 nt, Human
aagcaugguuucugacgucaug

SEQ ID NO: 737394 - RNA, 22 nt, Human
auuaaauuagcaaacugugaaa

SEQ ID NO: 737395 - RNA, 22 nt, Human
cucaguuugagggguagguguu

SEQ ID NO: 737396 - RNA, 23 nt, Human
cuguuauuccaggcugaugggug

SEQ ID NO: 737397 - RNA, 22 nt, Human
cuuauuugagagaaaagaaacu

SEQ ID NO: 737398 - RNA, 22 nt, Human
ucccacaggggcucuguggguu

SEQ ID NO: 737399 - RNA, 22 nt, Human
gccucugggugacgaaagguga

SEQ ID NO: 737400 - RNA, 23 nt, Human
uguacaaguacgaccucucccuc

SEQ ID NO: 737401 - RNA, 18 nt, Human
aaggccuagucccucucu

SEQ ID NO: 737402 - RNA, 22 nt, Human
aagaaaacguuuugaggaguuu

SEQ ID NO: 737403 - RNA, 22 nt, Human
cauuuauucaugaucuguagcu

SEQ ID NO: 737404 - RNA, 22 nt, Human
augccaaagggagcacuuuggg

SEQ ID NO: 737405 - RNA, 22 nt, Human
ccagggcagccaacccagaugc

SEQ ID NO: 737406 - RNA, 22 nt, Human
gccuggaguguugguauuucuc

SEQ ID NO: 737407 - RNA, 22 nt, Human
uucauugugaacacauucugcc

SEQ ID NO: 737408 - RNA, 22 nt, Human
acaaauucuacaaucauaugau

SEQ ID NO: 737409 - RNA, 22 nt, Human
uaguuuagccauuuaggaauug

SEQ ID NO: 737410 - RNA, 22 nt, Human
gggcugaggcuaccacuggucu

SEQ ID NO: 737411 - RNA, 22 nt, Human
agaagugccgaaaggaagacag

SEQ ID NO: 737412 - RNA, 22 nt, Human
ugacauuuacuauuccugguua

SEQ ID NO: 737413 - RNA, 22 nt, Human
cugccuuuucaucugagcugga

SEQ ID NO: 737414 - RNA, 22 nt, Human
aggaauuuuacaucucagagag

SEQ ID NO: 737415 - RNA, 21 nt, Human
aaaugaaugugguagugcaag

SEQ ID NO: 737416 - RNA, 22 nt, Human
ugagcuguaaggcugucacuga

SEQ ID NO: 737417 - RNA, 22 nt, Human
uggaguuagauaaaccugggua

SEQ ID NO: 737418 - RNA, 22 nt, Human
uucacacacagcuuccuauugu

SEQ ID NO: 737419 - RNA, 22 nt, Human
uguucaaaaauaucuucugcaa

SEQ ID NO: 737420 - RNA, 22 nt, Human
auggacaggaacucccuuggca

SEQ ID NO: 737421 - RNA, 22 nt, Human
uggcucuggggacaguaagucc

SEQ ID NO: 737422 - RNA, 22 nt, Human
ucucaggggcagugauccuaag

SEQ ID NO: 737423 - RNA, 22 nt, Human
uuuuagaaggaaugcuauggug

SEQ ID NO: 737424 - RNA, 22 nt, Human
agcaacaggaaauagcugauua

SEQ ID NO: 737425 - RNA, 22 nt, Human
aucaucuuaucugacucauuuu

SEQ ID NO: 737426 - RNA, 22 nt, Human
gcaauuguacuagaaaacaaua

SEQ ID NO: 737427 - RNA, 19 nt, Human
caauucugcaacacugucc

SEQ ID NO: 737428 - RNA, 22 nt, Human
gcuuuuuugggaugccugccuu

SEQ ID NO: 737429 - RNA, 22 nt, Human
gggucagcgauuucaggggcag

SEQ ID NO: 737430 - RNA, 19 nt, Human
gguaaaagugagcuucagg

SEQ ID NO: 737431 - RNA, 19 nt, Human
gagggcuugauggacccga

SEQ ID NO: 737432 - RNA, 22 nt, Human
ggcagggucuggacugaaagcu

SEQ ID NO: 737433 - RNA, 22 nt, Human
uucuuguacuggagauacauga

SEQ ID NO: 737434 - RNA, 18 nt, Human
augugucuuucuuguuug

SEQ ID NO: 737435 - RNA, 22 nt, Human
cuccccagcauucugacuuccu

SEQ ID NO: 737436 - RNA, 22 nt, Human
guuagaaacacauucuuauuga

SEQ ID NO: 737437 - RNA, 22 nt, Human
uugaggucaauucuguuuccug

SEQ ID NO: 737438 - RNA, 22 nt, Human
cuuugucauuuugucucucagu

SEQ ID NO: 737439 - RNA, 22 nt, Human
ucuuuuagaaaaguugaaugua

SEQ ID NO: 737440 - RNA, 22 nt, Human
uuagugugcauggaucugugga

SEQ ID NO: 737441 - RNA, 22 nt, Human
auauaacauacauacagaaaag

SEQ ID NO: 737442 - RNA, 22 nt, Human
ucuuggcuacuuuccugucugc

SEQ ID NO: 737443 - RNA, 22 nt, Human
aaauguguuucuuugugaaugg

SEQ ID NO: 737444 - RNA, 22 nt, Human
cucugguguccuuuagaauuua

SEQ ID NO: 737445 - RNA, 22 nt, Human
caucugcuguaauuaacaagcc

SEQ ID NO: 737446 - RNA, 22 nt, Human
acccagcucuuugauggucuug

SEQ ID NO: 737447 - RNA, 22 nt, Human
cuggcuccacucccugccugac

SEQ ID NO: 737448 - RNA, 22 nt, Human
gggacuggcacagggcugggag

SEQ ID NO: 737449 - RNA, 21 nt, Human
ugauucugcauuucuaacagg

SEQ ID NO: 737450 - RNA, 22 nt, Human
uuaauuuauacauaaucacagg

SEQ ID NO: 737451 - RNA, 22 nt, Human
agcugucuggaaguuccucaug

SEQ ID NO: 737452 - RNA, 23 nt, Human
ggauacaaagauuaauaguagag

SEQ ID NO: 737453 - RNA, 22 nt, Human
aguuaucaucccuuacacuuug

SEQ ID NO: 737454 - RNA, 23 nt, Human
aggauccugguacaggagcagag

SEQ ID NO: 737455 - RNA, 18 nt, Human
uaagcaaugacauugcaa

SEQ ID NO: 737456 - RNA, 22 nt, Human
ggcuggcacccuuggggauagg

SEQ ID NO: 737457 - RNA, 22 nt, Human
gugucuguuauacagaggagac

SEQ ID NO: 737458 - RNA, 23 nt, Human
ugauucugcuuugagaaucaugg

SEQ ID NO: 737459 - RNA, 22 nt, Human
cccugcuaguccuuccuuggcu

SEQ ID NO: 737460 - RNA, 22 nt, Human
acaguuauauacauguagcugu

SEQ ID NO: 737461 - RNA, 22 nt, Human
ugucauuuucuaaucuguuguc

SEQ ID NO: 737462 - RNA, 22 nt, Human
uugcagcuucuugcaucagaaa

SEQ ID NO: 737463 - RNA, 22 nt, Human
uacagcugcaaggguuucuggg

SEQ ID NO: 737464 - RNA, 22 nt, Human
gcugugugacugagagccuggc

SEQ ID NO: 737465 - RNA, 22 nt, Human
uaacauguucagacuaccugug

SEQ ID NO: 737466 - RNA, 22 nt, Human
aggauacaagucucagaaugcu

SEQ ID NO: 737467 - RNA, 22 nt, Human
uuggagggacugagcuucaguc

SEQ ID NO: 737468 - RNA, 22 nt, Human
uggaaugugcuagggcuguggc

SEQ ID NO: 737469 - RNA, 22 nt, Human
uuuggagauggagagagggcau

SEQ ID NO: 737470 - RNA, 22 nt, Human
gagguucaguccugcucuguca

SEQ ID NO: 737471 - RNA, 22 nt, Human
auaaacuuuagcggaaggagga

SEQ ID NO: 737472 - RNA, 22 nt, Human
aaacuuuuuauucuaaugucua

SEQ ID NO: 737473 - RNA, 22 nt, Human
gcuggggcugggcugaggaaga

SEQ ID NO: 737474 - RNA, 22 nt, Human
uaaaagauaucuuagggauuug

SEQ ID NO: 737475 - RNA, 22 nt, Human
ggcugcugacaaacaugaucau

SEQ ID NO: 737476 - RNA, 22 nt, Human
gcucugaggcugggagcacucu

SEQ ID NO: 737477 - RNA, 22 nt, Human
aguucacaccaaaguuagguag

SEQ ID NO: 737478 - RNA, 22 nt, Human
caugcugagcacauucuguauu

SEQ ID NO: 737479 - RNA, 22 nt, Human
acacacuguaaggacuaucacu

SEQ ID NO: 737480 - RNA, 23 nt, Human
ucauggaacugggcaaucuugaa

SEQ ID NO: 737481 - RNA, 22 nt, Human
cagaggcacaagaaagcaaggc

SEQ ID NO: 737482 - RNA, 18 nt, Human
ugcuuucuagcuucagau

SEQ ID NO: 737483 - RNA, 22 nt, Human
ucaguguuuuccagggucuacu

SEQ ID NO: 737484 - RNA, 22 nt, Human
gaggcaccagacauggccucau

SEQ ID NO: 737485 - RNA, 22 nt, Human
acauaugucuauuucauguaaa

SEQ ID NO: 737486 - RNA, 22 nt, Human
aacagcaucaccccauaacauu

SEQ ID NO: 737487 - RNA, 20 nt, Human
uggaaggucccagaggaauu

SEQ ID NO: 737488 - RNA, 22 nt, Human
uaggaacauaugcagugcuuuu

SEQ ID NO: 737489 - RNA, 22 nt, Human
gcuggacaggccacauggagga

SEQ ID NO: 737490 - RNA, 22 nt, Human
aggaaacaugaaucugccuuga

SEQ ID NO: 737491 - RNA, 22 nt, Human
gggcaguugauggaggucugga

SEQ ID NO: 737492 - RNA, 22 nt, Human
ugaguaucaauuacauaguugu

SEQ ID NO: 737493 - RNA, 22 nt, Human
ugauggaaacuuggguaaguca

SEQ ID NO: 737494 - RNA, 22 nt, Human
cuucucuuccuuugucaacuga

SEQ ID NO: 737495 - RNA, 22 nt, Human
caguaucuccacauguaaagug

SEQ ID NO: 737496 - RNA, 22 nt, Human
ucccagagugagccaggggcag

SEQ ID NO: 737497 - RNA, 22 nt, Human
aaauccuaaugacaaguuuagu

SEQ ID NO: 737498 - RNA, 22 nt, Human
gcugccugugcacuuucucgua

SEQ ID NO: 737499 - RNA, 23 nt, Human
auuugagaaaguauuuuuaagac

SEQ ID NO: 737500 - RNA, 22 nt, Human
uuccaacuuugucauauauuau

SEQ ID NO: 737501 - RNA, 22 nt, Human
caagcauacucauuccagacuc

SEQ ID NO: 737502 - RNA, 21 nt, Human
gggccacaccuucugcagacc

SEQ ID NO: 737503 - RNA, 22 nt, Human
gcucaguguuucugguagaaaa

SEQ ID NO: 737504 - RNA, 22 nt, Human
cucagaaagcaaucuggugagg

SEQ ID NO: 737505 - RNA, 22 nt, Human
auggaaaugauggaacauuaaa

SEQ ID NO: 737506 - RNA, 22 nt, Human
gugcugagaacaaaaguggaca

SEQ ID NO: 737507 - RNA, 22 nt, Human
cacugcccaggaccugccaccc

SEQ ID NO: 737508 - RNA, 22 nt, Human
cugaggagcccccucucagcau

SEQ ID NO: 737509 - RNA, 22 nt, Human
ugccaggccacguagcuucaag

SEQ ID NO: 737510 - RNA, 22 nt, Human
ugaggcuccuuguagagagugg

SEQ ID NO: 737511 - RNA, 22 nt, Human
uccagggcaccagcgucccccu

SEQ ID NO: 737512 - RNA, 18 nt, Human
gcaguaggcgcgcaggac

SEQ ID NO: 737513 - RNA, 22 nt, Human
cuggagcaaaagugacuccucu

SEQ ID NO: 737514 - RNA, 22 nt, Human
guggcagagccaggcuuugaac

SEQ ID NO: 737515 - RNA, 17 nt, Human
ccaggugggaggugggg

SEQ ID NO: 737516 - RNA, 22 nt, Human
cauuuuacgacauagggcaggc

SEQ ID NO: 737517 - RNA, 22 nt, Human
gcuucacagaaucaauaguugg

SEQ ID NO: 737518 - RNA, 22 nt, Human
uuugaauguuggauugacuuag

SEQ ID NO: 737519 - RNA, 21 nt, Human
ugggcaaguuuggggguccuc

SEQ ID NO: 737520 - RNA, 22 nt, Human
uuguauuaauugaaaugaaugc

SEQ ID NO: 737521 - RNA, 22 nt, Human
cagaagaaaucauuaucuggac

SEQ ID NO: 737522 - RNA, 22 nt, Human
uuacuuuguucucaagauaugu

SEQ ID NO: 737523 - RNA, 22 nt, Human
cugagcacugggcacauagcug

SEQ ID NO: 737524 - RNA, 22 nt, Human
ucucagcucauggcagccuuga

SEQ ID NO: 737525 - RNA, 22 nt, Human
caggccagcuuccugacauccu

SEQ ID NO: 737526 - RNA, 22 nt, Human
uuuucuuacugucugugauccu

SEQ ID NO: 737527 - RNA, 21 nt, Human
ucacaugcuuauuccuggaau

SEQ ID NO: 737528 - RNA, 22 nt, Human
caucuuuaaaggggagacaccc

SEQ ID NO: 737529 - RNA, 22 nt, Human
uccaucuguuuacuauaaagau

SEQ ID NO: 737530 - RNA, 22 nt, Human
aaugacaugcuuuuuaauuaua

SEQ ID NO: 737531 - RNA, 22 nt, Human
agguucuuuuggccaaccucau

SEQ ID NO: 737532 - RNA, 22 nt, Human
aaaggccacacugcucuuucuc

SEQ ID NO: 737533 - RNA, 22 nt, Human
cucuggcuuuaaggaugccaca

SEQ ID NO: 737534 - RNA, 22 nt, Human
uccacagguauuucuccuugcu

SEQ ID NO: 737535 - RNA, 20 nt, Human
ggagucacauucuuuacugc

SEQ ID NO: 737536 - RNA, 22 nt, Human
gagccuggccuccugccucagc

SEQ ID NO: 737537 - RNA, 22 nt, Human
cugagcugcucccgcugcagcg

SEQ ID NO: 737538 - RNA, 22 nt, Human
agugcaggccccaggccaggcc

SEQ ID NO: 737539 - RNA, 22 nt, Human
uucuucuuuccaauuacauggu

SEQ ID NO: 737540 - RNA, 22 nt, Human
auccacagagaggaagaauagu

SEQ ID NO: 737541 - RNA, 22 nt, Human
gagagcaggcucucgggggcca

SEQ ID NO: 737542 - RNA, 22 nt, Human
ucaaacauguuagcagucugug

SEQ ID NO: 737543 - RNA, 22 nt, Human
cuguauaaccccaugcgacugu

SEQ ID NO: 737544 - RNA, 21 nt, Human
uacagaaugcgcuucagucug

SEQ ID NO: 737545 - RNA, 18 nt, Human
ggcaccucucuugccuua

SEQ ID NO: 737546 - RNA, 22 nt, Human
aggagaucagccucccugcaac

SEQ ID NO: 737547 - RNA, 22 nt, Human
ucuguggcgcauaguugucucu

SEQ ID NO: 737548 - RNA, 22 nt, Human
caaacauuuuaaauaagggaua

SEQ ID NO: 737549 - RNA, 22 nt, Human
gcuuccuggaacaacuguugcu

SEQ ID NO: 737550 - RNA, 22 nt, Human
cuggccuucagacucggacuga

SEQ ID NO: 737551 - RNA, 22 nt, Human
aaguacauuauaugagcagaau

SEQ ID NO: 737552 - RNA, 22 nt, Human
ugucccagcacuuugggagucu

SEQ ID NO: 737553 - RNA, 22 nt, Human
guuacaaaggucauaaaagugu

SEQ ID NO: 737554 - RNA, 18 nt, Human
caguggcauaguugagua

SEQ ID NO: 737555 - RNA, 22 nt, Human
ucuaaagauuuggauucauuug

SEQ ID NO: 737556 - RNA, 22 nt, Human
guuuagauuucaugaagacacu

SEQ ID NO: 737557 - RNA, 22 nt, Human
ccugugucugaccaugcacaug

SEQ ID NO: 737558 - RNA, 22 nt, Human
uucugcauccuaugaucgcaua

SEQ ID NO: 737559 - RNA, 22 nt, Human
guguccagagaaacucacagcu

SEQ ID NO: 737560 - RNA, 22 nt, Human
uuucaaaugcaugucuuuccuc

SEQ ID NO: 737561 - RNA, 22 nt, Human
agguaaauauaaaucuuacucu

SEQ ID NO: 737562 - RNA, 22 nt, Human
ccugggaaagugaggucauuau

SEQ ID NO: 737563 - RNA, 22 nt, Human
uuguuuuuagagaagcccugaa

SEQ ID NO: 737564 - RNA, 22 nt, Human
aagagagaacucccuucgccag

SEQ ID NO: 737565 - RNA, 22 nt, Human
caacuccuccccagcaugccaa

SEQ ID NO: 737566 - RNA, 22 nt, Human
auacuuaugauaaauaauugcu

SEQ ID NO: 737567 - RNA, 22 nt, Human
cccagagaagugaagugacuug

SEQ ID NO: 737568 - RNA, 22 nt, Human
gcaccugcuggaaucagucugu

SEQ ID NO: 737569 - RNA, 22 nt, Human
gugcaugucggggugcauguca

SEQ ID NO: 737570 - RNA, 22 nt, Human
uauaaaucuuuguuccuagaau

SEQ ID NO: 737571 - RNA, 22 nt, Human
uguagcacguuaguguuagagc

SEQ ID NO: 737572 - RNA, 22 nt, Human
uaaauguaccuucugccuuacu

SEQ ID NO: 737573 - RNA, 22 nt, Human
gauuccacggcucagccucaac

SEQ ID NO: 737574 - RNA, 22 nt, Human
aaccagcuccucaccccauugu

SEQ ID NO: 737575 - RNA, 22 nt, Human
ucugugccaagcuuauaucugu

SEQ ID NO: 737576 - RNA, 22 nt, Human
acagaugaauuuuaauuguguu

SEQ ID NO: 737577 - RNA, 22 nt, Human
ugagggguugugagaaauguag

SEQ ID NO: 737578 - RNA, 22 nt, Human
ugaugaccgccaacguuuaggu

SEQ ID NO: 737579 - RNA, 22 nt, Human
ggagaugcuuuccaguggggau

SEQ ID NO: 737580 - RNA, 22 nt, Human
cuuuggcucaugguuuuaucca

SEQ ID NO: 737581 - RNA, 22 nt, Human
ugcuucucuuuauuuguagguu

SEQ ID NO: 737582 - RNA, 22 nt, Human
acucugggagaggacaaacaaa

SEQ ID NO: 737583 - RNA, 22 nt, Human
cugggagucccuggaauagcuc

SEQ ID NO: 737584 - RNA, 22 nt, Human
gccaguggcccucuggagaagg

SEQ ID NO: 737585 - RNA, 22 nt, Human
uugauacaggccuucuagauga

SEQ ID NO: 737586 - RNA, 22 nt, Human
ucggccacgggguuuccuccaa

SEQ ID NO: 737587 - RNA, 22 nt, Human
gaggcugcccaacuggagugga

SEQ ID NO: 737588 - RNA, 22 nt, Human
acucuucaguacaauaauaucu

SEQ ID NO: 737589 - RNA, 22 nt, Human
agcauagauacauugagccaca

SEQ ID NO: 737590 - RNA, 22 nt, Human
ucccugugggaugaggacucug

SEQ ID NO: 737591 - RNA, 22 nt, Human
ugggagaaucuugcucugcuac

SEQ ID NO: 737592 - RNA, 17 nt, Human
ugggccaguagaaggga

SEQ ID NO: 737593 - RNA, 21 nt, Human
ucugggugcuaguguuugcuu

SEQ ID NO: 737594 - RNA, 22 nt, Human
cuuaucagauuaucugggcugu

SEQ ID NO: 737595 - RNA, 22 nt, Human
gcuguuuccccuucacaguggc

SEQ ID NO: 737596 - RNA, 22 nt, Human
ccaggaagcucugcuccacggg

SEQ ID NO: 737597 - RNA, 22 nt, Human
cugccuagggucugguaccaca

SEQ ID NO: 737598 - RNA, 22 nt, Human
ugaggcugccuugggaagaggg

SEQ ID NO: 737599 - RNA, 22 nt, Human
uaggggagcucgggugcaaucg

SEQ ID NO: 737600 - RNA, 22 nt, Human
aauuuggagcuuuguuucuaga

SEQ ID NO: 737601 - RNA, 22 nt, Human
uacaaagccugguagauaucug

SEQ ID NO: 737602 - RNA, 22 nt, Human
gugaacaguucauuuuaucaug

SEQ ID NO: 737603 - RNA, 22 nt, Human
ccuggagcccaaggcagugaga

SEQ ID NO: 737604 - RNA, 22 nt, Human
uacauugaggcaguagcuggag

SEQ ID NO: 737605 - RNA, 22 nt, Human
auccugggcaaaguaugcuguc

SEQ ID NO: 737606 - RNA, 22 nt, Human
cuccaggcuggggugcagguug

SEQ ID NO: 737607 - RNA, 22 nt, Human
acugucacugugauguuagaga

SEQ ID NO: 737608 - RNA, 22 nt, Human
ucccuccugcaugaggcucggc

SEQ ID NO: 737609 - RNA, 22 nt, Human
guuucuuagguaaauucuuuga

SEQ ID NO: 737610 - RNA, 22 nt, Human
uggcugaggcuuuucuuaaaga

SEQ ID NO: 737611 - RNA, 22 nt, Human
ucacaguuacuccuucagauga

SEQ ID NO: 737612 - RNA, 22 nt, Human
caugauacuugacauuugcgau

SEQ ID NO: 737613 - RNA, 22 nt, Human
ggcugcaggcagaggcugucug

SEQ ID NO: 737614 - RNA, 22 nt, Human
cccagggcccuggacagcuaca

SEQ ID NO: 737615 - RNA, 22 nt, Human
uguucauucgcuauugucuaug

SEQ ID NO: 737616 - RNA, 22 nt, Human
cgacagcagaagaagcaagcca

SEQ ID NO: 737617 - RNA, 22 nt, Human
ucaucugaccacuuuaucucuc

SEQ ID NO: 737618 - RNA, 22 nt, Human
uaaagccauacugaaagccacu

SEQ ID NO: 737619 - RNA, 22 nt, Human
ggacagggcucuuggcacuccu

SEQ ID NO: 737620 - RNA, 22 nt, Human
uggggccacacaucucuuucua

SEQ ID NO: 737621 - RNA, 22 nt, Human
ggccagaaguuggaaaagagcc

SEQ ID NO: 737622 - RNA, 22 nt, Human
aucacagagcucccuuccacug

SEQ ID NO: 737623 - RNA, 22 nt, Human
cauaagaaauuuaacagaacuu

SEQ ID NO: 737624 - RNA, 22 nt, Human
gguccugaguaccuauguuuau

SEQ ID NO: 737625 - RNA, 22 nt, Human
ucaggcagaaaaaucacuaauu

SEQ ID NO: 737626 - RNA, 22 nt, Human
aggcaggcuggucugaagagug

SEQ ID NO: 737627 - RNA, 22 nt, Human
acugcagagguggggugcagag

SEQ ID NO: 737628 - RNA, 22 nt, Human
ggcaggagaaaggucucuucuu

SEQ ID NO: 737629 - RNA, 22 nt, Human
aauugcuuacuguuuuucaccu

SEQ ID NO: 737630 - RNA, 20 nt, Human
ccacaguggagacuggagac

SEQ ID NO: 737631 - RNA, 22 nt, Human
ucccuugguaauucuguuccuu

SEQ ID NO: 737632 - RNA, 22 nt, Human
acacauaugcagaucccccaca

SEQ ID NO: 737633 - RNA, 22 nt, Human
uuaaguauauccauuugacugg

SEQ ID NO: 737634 - RNA, 22 nt, Human
cucugaaagcaaaacuagagaa

SEQ ID NO: 737635 - RNA, 22 nt, Human
gcuguggaaaugccuaacauga

SEQ ID NO: 737636 - RNA, 22 nt, Human
auggcccuaucaccuuugcuuc

SEQ ID NO: 737637 - RNA, 22 nt, Human
uguuugcuaggguugguauuua

SEQ ID NO: 737638 - RNA, 19 nt, Human
cuggagauagggccuuuaa

SEQ ID NO: 737639 - RNA, 17 nt, Human
acacaguacuuuuuugc

SEQ ID NO: 737640 - RNA, 22 nt, Human
augcaguuuucaaagacuauuc

SEQ ID NO: 737641 - RNA, 22 nt, Human
cggagcugcgccgggacacggg

SEQ ID NO: 737642 - RNA, 22 nt, Human
uugaaggaggcgaaaauugguc

SEQ ID NO: 737643 - RNA, 22 nt, Human
ccaaggcuggagugcaguggcg

SEQ ID NO: 737644 - RNA, 22 nt, Human
gcucaaggcaggcagacaugag

SEQ ID NO: 737645 - RNA, 22 nt, Human
gccaggggacgcggagcgacga

SEQ ID NO: 737646 - RNA, 22 nt, Human
agaaacaacuuguuucucuugc

SEQ ID NO: 737647 - RNA, 22 nt, Human
cuggaugauaacagcaauauuu

SEQ ID NO: 737648 - RNA, 22 nt, Human
auaacagacugauuuuuaaaug

SEQ ID NO: 737649 - RNA, 22 nt, Human
ucugcaaacccccaucuaucau

SEQ ID NO: 737650 - RNA, 22 nt, Human
ugcugcugauggcaccuaggca

SEQ ID NO: 737651 - RNA, 22 nt, Human
cugucacugaugggcucaccag

SEQ ID NO: 737652 - RNA, 22 nt, Human
uacaaagaguuuggucucuaga

SEQ ID NO: 737653 - RNA, 22 nt, Human
uaccuuggguugaguucauucu

SEQ ID NO: 737654 - RNA, 22 nt, Human
auaguguguaaagugcagugau

SEQ ID NO: 737655 - RNA, 22 nt, Human
cccuccaggccugucauguucc

SEQ ID NO: 737656 - RNA, 22 nt, Human
gaagaugugggcccacuccaga

SEQ ID NO: 737657 - RNA, 22 nt, Human
ucccaggacccaggcauucaca

SEQ ID NO: 737658 - RNA, 22 nt, Human
gacauuuguaucuuaggggaaa

SEQ ID NO: 737659 - RNA, 22 nt, Human
agggaacagugaaaggcaucag

SEQ ID NO: 737660 - RNA, 22 nt, Human
gaagaggcuuuccuagggcaag

SEQ ID NO: 737661 - RNA, 22 nt, Human
cauuacaugguccaggauauau

SEQ ID NO: 737662 - RNA, 22 nt, Human
ggcuucacauagcaaugugagc

SEQ ID NO: 737663 - RNA, 22 nt, Human
aguucacagggaagguuauugu

SEQ ID NO: 737664 - RNA, 22 nt, Human
agucaggauaugccuugugggc

SEQ ID NO: 737665 - RNA, 18 nt, Human
cugcugugucgucugggc

SEQ ID NO: 737666 - RNA, 22 nt, Human
aagaauaagaggauuuagaaca

SEQ ID NO: 737667 - RNA, 22 nt, Human
ucucuggcccuguuuucuaucu

SEQ ID NO: 737668 - RNA, 22 nt, Human
uccagccccuccugagccaagc

SEQ ID NO: 737669 - RNA, 22 nt, Human
uugcagggaaaucagugaggau

SEQ ID NO: 737670 - RNA, 22 nt, Human
uacacaugcauguacuccagga

SEQ ID NO: 737671 - RNA, 22 nt, Human
ccaggcccugccugugguuccu

SEQ ID NO: 737672 - RNA, 22 nt, Human
ugaucaaagugcuggaauuaca

SEQ ID NO: 737673 - RNA, 22 nt, Human
uggcucaggggucuggcucugu

SEQ ID NO: 737674 - RNA, 20 nt, Human
uguccccuagaucccagcuc

SEQ ID NO: 737675 - RNA, 22 nt, Human
ucccagaggcuccagucucuau

SEQ ID NO: 737676 - RNA, 22 nt, Human
acuaggaauucaaguagacaga

SEQ ID NO: 737677 - RNA, 22 nt, Human
uguacaguauugguguuaguag

SEQ ID NO: 737678 - RNA, 22 nt, Human
ugggcagaggcucugaagucca

SEQ ID NO: 737679 - RNA, 23 nt, Human
caugucugcuuucaugcuacaac

SEQ ID NO: 737680 - RNA, 18 nt, Human
aguccuggcucuaccacc

SEQ ID NO: 737681 - RNA, 22 nt, Human
acccagagucauguuuauuccc

SEQ ID NO: 737682 - RNA, 22 nt, Human
aaaugcagaaugauuucaucua

SEQ ID NO: 737683 - RNA, 22 nt, Human
ccacuuucugagggaacagcag

SEQ ID NO: 737684 - RNA, 22 nt, Human
uuccucaggcuucccuuugucc

SEQ ID NO: 737685 - RNA, 22 nt, Human
agugcagccgagaucaggugcu

SEQ ID NO: 737686 - RNA, 22 nt, Human
aucuuucuauuucuaaaaacua

SEQ ID NO: 737687 - RNA, 22 nt, Human
caggcagacuuugagaaugaug

SEQ ID NO: 737688 - RNA, 22 nt, Human
aaggcagcagugcacgacugau

SEQ ID NO: 737689 - RNA, 20 nt, Human
cuguuugcuaucaugagcug

SEQ ID NO: 737690 - RNA, 22 nt, Human
uauggcuuguggagaguuguag

SEQ ID NO: 737691 - RNA, 22 nt, Human
aggcaggaggaucauggaugca

SEQ ID NO: 737692 - RNA, 22 nt, Human
cuguuuaucauguacauuucca

SEQ ID NO: 737693 - RNA, 22 nt, Human
cucagggcggcgggcagcccag

SEQ ID NO: 737694 - RNA, 22 nt, Human
gauuuaguggcccuugguacac

SEQ ID NO: 737695 - RNA, 22 nt, Human
uccugguggugccagcugcagg

SEQ ID NO: 737696 - RNA, 22 nt, Human
gcccagcagcuccacuuggcuu

SEQ ID NO: 737697 - RNA, 22 nt, Human
ggaagcuguuccuguguggcca

SEQ ID NO: 737698 - RNA, 18 nt, Human
ggcuguggacaagauuag

SEQ ID NO: 737699 - RNA, 22 nt, Human
uugaauaggacucagcagugau

SEQ ID NO: 737700 - RNA, 22 nt, Human
gccuaacuuggcuuuguucacc

SEQ ID NO: 737701 - RNA, 22 nt, Human
ucuuuauuuuaugcuugugcaa

SEQ ID NO: 737702 - RNA, 22 nt, Human
cuggaaagugcauguaaugagg

SEQ ID NO: 737703 - RNA, 21 nt, Human
ucucuacaaauuauguuaggu

SEQ ID NO: 737704 - RNA, 22 nt, Human
ccaggcaggcuagaauguaaau

SEQ ID NO: 737705 - RNA, 22 nt, Human
aggucacacaacugucagaggc

SEQ ID NO: 737706 - RNA, 22 nt, Human
agugccauggaggaacagaugc

SEQ ID NO: 737707 - RNA, 22 nt, Human
gggauggggucgggacccugcu

SEQ ID NO: 737708 - RNA, 22 nt, Human
caucagcuuuggcgcugagcau

SEQ ID NO: 737709 - RNA, 22 nt, Human
auucugcucaugagcucccggg

SEQ ID NO: 737710 - RNA, 22 nt, Human
uggaggcugugugcaugagacc

SEQ ID NO: 737711 - RNA, 22 nt, Human
uagccucuggaauccuuucucu

SEQ ID NO: 737712 - RNA, 22 nt, Human
aggugggcccagugggcuccag

SEQ ID NO: 737713 - RNA, 22 nt, Human
gccuuggaaagcuggagcaguu

SEQ ID NO: 737714 - RNA, 22 nt, Human
ucucagaaggguggugcuggag

SEQ ID NO: 737715 - RNA, 22 nt, Human
auauuuuguaacuuggaauagg

SEQ ID NO: 737716 - RNA, 22 nt, Human
ucagagaagcugccaggcgagc

SEQ ID NO: 737717 - RNA, 22 nt, Human
gcccaggaguugguggcugcag

SEQ ID NO: 737718 - RNA, 22 nt, Human
uagaaacccaggauuuguauuu

SEQ ID NO: 737719 - RNA, 22 nt, Human
uguuaugaguccucauauacua

SEQ ID NO: 737720 - RNA, 22 nt, Human
agcugagguuaguauaaaugug

SEQ ID NO: 737721 - RNA, 22 nt, Human
acagcagagccuagcuuaaucu

SEQ ID NO: 737722 - RNA, 22 nt, Human
ugggagcaggaagcaggaagua

SEQ ID NO: 737723 - RNA, 22 nt, Human
uccagccugaacuuuguccaga

SEQ ID NO: 737724 - RNA, 22 nt, Human
ccauucugagucuuaugucuuu

SEQ ID NO: 737725 - RNA, 22 nt, Human
gggaacagcauaucugaagggu

SEQ ID NO: 737726 - RNA, 22 nt, Human
uccucccuugacuccugcuuuu

SEQ ID NO: 737727 - RNA, 22 nt, Human
uauuuccauguuagaacuaagu

SEQ ID NO: 737728 - RNA, 22 nt, Human
aacugauuguuggaugauagug

SEQ ID NO: 737729 - RNA, 22 nt, Human
aaugucauuuuuaaaugugaga

SEQ ID NO: 737730 - RNA, 18 nt, Human
aagugacuggcaggccaa

SEQ ID NO: 737731 - RNA, 22 nt, Human
cuuuaguuguuauuucuucaca

SEQ ID NO: 737732 - RNA, 22 nt, Human
aacaggcucuucauuuccagag

SEQ ID NO: 737733 - RNA, 22 nt, Human
auuaggauuugguauggucaua

SEQ ID NO: 737734 - RNA, 22 nt, Human
gagcacaggcuuugguggacac

SEQ ID NO: 737735 - RNA, 22 nt, Human
augcaugaugaacuugcuuuca

SEQ ID NO: 737736 - RNA, 21 nt, Human
aagagacauuucucaucagca

SEQ ID NO: 737737 - RNA, 21 nt, Human
gggcuggacaugguggcucau

SEQ ID NO: 737738 - RNA, 23 nt, Human
uggcaaggaaugggauggagacu

SEQ ID NO: 737739 - RNA, 22 nt, Human
cuugaaagaagggucuuuuaau

SEQ ID NO: 737740 - RNA, 22 nt, Human
aggcucagccugggccuagagc

SEQ ID NO: 737741 - RNA, 22 nt, Human
ccagagcugaggagaugggcuu

SEQ ID NO: 737742 - RNA, 22 nt, Human
aaaggcuuugagaaguccugca

SEQ ID NO: 737743 - RNA, 22 nt, Human
ugggcagaguugugaugaacug

SEQ ID NO: 737744 - RNA, 22 nt, Human
aaacaugaugucauauaugcca

SEQ ID NO: 737745 - RNA, 22 nt, Human
ucuacuuucacucauacuuauu

SEQ ID NO: 737746 - RNA, 22 nt, Human
cuccuuccccuacucagcaucc

SEQ ID NO: 737747 - RNA, 22 nt, Human
acacaguaggauaguuugagga

SEQ ID NO: 737748 - RNA, 22 nt, Human
ugcuguauuacuuuuacaaacu

SEQ ID NO: 737749 - RNA, 22 nt, Human
uucacaggaauguaggggucuu

SEQ ID NO: 737750 - RNA, 22 nt, Human
ucuguuucuauaaagacaagag

SEQ ID NO: 737751 - RNA, 22 nt, Human
ucgaacucauagucguagcugu

SEQ ID NO: 737752 - RNA, 22 nt, Human
uuacaaagaguguucuuuucca

SEQ ID NO: 737753 - RNA, 22 nt, Human
uugaagacacagacauauagag

SEQ ID NO: 737754 - RNA, 22 nt, Human
cccaggaguuggaggcuacggu

SEQ ID NO: 737755 - RNA, 22 nt, Human
uuacaguuuaagaggaaacaaa

SEQ ID NO: 737756 - RNA, 22 nt, Human
ugaggcagaguaagauacauga

SEQ ID NO: 737757 - RNA, 22 nt, Human
cugugagggucacagccaugcc

SEQ ID NO: 737758 - RNA, 22 nt, Human
aguacacuaugguaacuggagu

SEQ ID NO: 737759 - RNA, 22 nt, Human
acaggcagcaaaaucagccuca

SEQ ID NO: 737760 - RNA, 22 nt, Human
cugguuggugccacaugguggc

SEQ ID NO: 737761 - RNA, 22 nt, Human
guuaguagcauuucaugacaug

SEQ ID NO: 737762 - RNA, 22 nt, Human
gggagcugucaucaguguuguc

SEQ ID NO: 737763 - RNA, 22 nt, Human
gaaaccagcuagaggcagaggg

SEQ ID NO: 737764 - RNA, 22 nt, Human
caaaacauucucugcagcaggg

SEQ ID NO: 737765 - RNA, 22 nt, Human
gaucuggaaucugaaggcugag

SEQ ID NO: 737766 - RNA, 22 nt, Human
gguggccuuuuaugagcagggu

SEQ ID NO: 737767 - RNA, 22 nt, Human
augugcaguugguggccaggag

SEQ ID NO: 737768 - RNA, 22 nt, Human
gagaggccugagaggcugcgga

SEQ ID NO: 737769 - RNA, 22 nt, Human
uaauuucaccguugcuagaaau

SEQ ID NO: 737770 - RNA, 22 nt, Human
ccaggagggaccgcggcauccc

SEQ ID NO: 737771 - RNA, 22 nt, Human
aguggcaggcggagauguagga

SEQ ID NO: 737772 - RNA, 20 nt, Human
auacaaagagauugauguau

SEQ ID NO: 737773 - RNA, 22 nt, Human
agagccaggugcugcuguuuga

SEQ ID NO: 737774 - RNA, 18 nt, Human
cuuguucuucucuuggcg

SEQ ID NO: 737775 - RNA, 22 nt, Human
ucugcugcugagcacacuccua

SEQ ID NO: 737776 - RNA, 22 nt, Human
gucugggcaagggagauggcgc

SEQ ID NO: 737777 - RNA, 22 nt, Human
ggaucaggcugaagcuaggacu

SEQ ID NO: 737778 - RNA, 22 nt, Human
ugcaucaugcggaacuggcuuu

SEQ ID NO: 737779 - RNA, 22 nt, Human
ucucuggguucucacucagcac

SEQ ID NO: 737780 - RNA, 22 nt, Human
acagagcaauucuuggguguuu

SEQ ID NO: 737781 - RNA, 22 nt, Human
ggucuccaaagcuuaggacuac

SEQ ID NO: 737782 - RNA, 22 nt, Human
cuucuaacauccuacaaugcaa

SEQ ID NO: 737783 - RNA, 22 nt, Human
cccagcuccaagggacagcgaa

SEQ ID NO: 737784 - RNA, 22 nt, Human
acuguaacgccagcuuuaaaug

SEQ ID NO: 737785 - RNA, 22 nt, Human
uucauuccuucccuaagcaacu

SEQ ID NO: 737786 - RNA, 22 nt, Human
caggagcaguuagaagcccacu

SEQ ID NO: 737787 - RNA, 22 nt, Human
ggcaugaguggcagugggcagu

SEQ ID NO: 737788 - RNA, 19 nt, Human
cuggcucuuggguggagga

SEQ ID NO: 737789 - RNA, 22 nt, Human
gaaggagcuaccaagacugaau

SEQ ID NO: 737790 - RNA, 22 nt, Human
agcaggaacucagggaguucuc

SEQ ID NO: 737791 - RNA, 22 nt, Human
cacagagcugaaccugggucau

SEQ ID NO: 737792 - RNA, 22 nt, Human
gcacaugaggcugucuuugucu

SEQ ID NO: 737793 - RNA, 22 nt, Human
gcacagagccugguaccgagaa

SEQ ID NO: 737794 - RNA, 22 nt, Human
uaaagacaugcaaagucuaauu

SEQ ID NO: 737795 - RNA, 22 nt, Human
uaacagcuggcguuauaggaau

SEQ ID NO: 737796 - RNA, 22 nt, Human
cagggccaccguguuugcugcu

SEQ ID NO: 737797 - RNA, 22 nt, Human
ccauauuugcuucuugcugaua

SEQ ID NO: 737798 - RNA, 22 nt, Human
cccagccucagcuuuacuucca

SEQ ID NO: 737799 - RNA, 22 nt, Human
gcccugcagugcggagguggca

SEQ ID NO: 737800 - RNA, 20 nt, Human
ugggcucugcuuccuggagu

SEQ ID NO: 737801 - RNA, 22 nt, Human
uccacaugaccauugugcuccu

SEQ ID NO: 737802 - RNA, 22 nt, Human
uaguuuagcuuagccuucuggu

SEQ ID NO: 737803 - RNA, 22 nt, Human
acauugcaauaauaauucucuu

SEQ ID NO: 737804 - RNA, 22 nt, Human
ccuccucugugcagcugugggu

SEQ ID NO: 737805 - RNA, 22 nt, Human
aacuuuacacugcuuuacauga

SEQ ID NO: 737806 - RNA, 22 nt, Human
uuuuccucuguaugcgugagau

SEQ ID NO: 737807 - RNA, 22 nt, Human
guugggguaccuugaggcuggg

SEQ ID NO: 737808 - RNA, 22 nt, Human
cuccuguggucaagggugggac

SEQ ID NO: 737809 - RNA, 19 nt, Human
acccagagcccuuugcagg

SEQ ID NO: 737810 - RNA, 21 nt, Human
ucauggauuuucucugcuuuu

SEQ ID NO: 737811 - RNA, 22 nt, Human
ccccucuuggcauugagugcca

SEQ ID NO: 737812 - RNA, 22 nt, Human
uuugaaaacuuaauuuggucgu

SEQ ID NO: 737813 - RNA, 22 nt, Human
gggaucagacucugggauguag

SEQ ID NO: 737814 - RNA, 22 nt, Human
gccucugggguuaauagaguuu

SEQ ID NO: 737815 - RNA, 19 nt, Human
aagcuguccuguuggcccu

SEQ ID NO: 737816 - RNA, 22 nt, Human
ucccgauaggcagggcucuggc

SEQ ID NO: 737817 - RNA, 22 nt, Human
uuggaagguucuggucaugguu

SEQ ID NO: 737818 - RNA, 22 nt, Human
acacaucuaucucuacacaagg

SEQ ID NO: 737819 - RNA, 22 nt, Human
ucuuugaaagcuguucuagagu

SEQ ID NO: 737820 - RNA, 22 nt, Human
gagccaggagauaccuaagggg

SEQ ID NO: 737821 - RNA, 22 nt, Human
agcuuucuaguuuagccaucuu

SEQ ID NO: 737822 - RNA, 22 nt, Human
cuggcucuuuccuagcuaggcu

SEQ ID NO: 737823 - RNA, 22 nt, Human
gugugagaagggaauguaaagc

SEQ ID NO: 737824 - RNA, 22 nt, Human
ugcagcaccuauggacacuugu

SEQ ID NO: 737825 - RNA, 22 nt, Human
uucuggaaccagccugccuggg

SEQ ID NO: 737826 - RNA, 22 nt, Human
ugcuggcaggcaccuccugggg

SEQ ID NO: 737827 - RNA, 22 nt, Human
ggcugcuguuucagagacuguu

SEQ ID NO: 737828 - RNA, 22 nt, Human
aacuguugcuuguaauaugugc

SEQ ID NO: 737829 - RNA, 22 nt, Human
aggaguguugcuucagggaagc

SEQ ID NO: 737830 - RNA, 22 nt, Human
uuugcaaacuuuccucuggacc

SEQ ID NO: 737831 - RNA, 22 nt, Human
aucuaaagugucauaaguagcu

SEQ ID NO: 737832 - RNA, 22 nt, Human
gggcuggaucuccugcaggcag

SEQ ID NO: 737833 - RNA, 22 nt, Human
gagagucugguagagcagcaag

SEQ ID NO: 737834 - RNA, 22 nt, Human
aaagugcuuuaggauauuugga

SEQ ID NO: 737835 - RNA, 22 nt, Human
ucucagagugguggucccucug

SEQ ID NO: 737836 - RNA, 22 nt, Human
ggcuguccuuggccaaggcacu

SEQ ID NO: 737837 - RNA, 22 nt, Human
cugaugccucucuucuuggcuu

SEQ ID NO: 737838 - RNA, 22 nt, Human
auuugccuuucgaaucaacagg

SEQ ID NO: 737839 - RNA, 22 nt, Human
gagcuuccugaugccgaccagu

SEQ ID NO: 737840 - RNA, 22 nt, Human
caaggccuaugcacaccuagga

SEQ ID NO: 737841 - RNA, 22 nt, Human
agcagcaguugcugacguucua

SEQ ID NO: 737842 - RNA, 19 nt, Human
uccuuugaauaucaguuga

SEQ ID NO: 737843 - RNA, 20 nt, Human
cccaggagugagcagcuuua

SEQ ID NO: 737844 - RNA, 22 nt, Human
uucuccaagguucauauuuauc

SEQ ID NO: 737845 - RNA, 22 nt, Human
cucaguuuccucuucuguugaa

SEQ ID NO: 737846 - RNA, 22 nt, Human
agcacaguaaagcagugucaca

SEQ ID NO: 737847 - RNA, 22 nt, Human
ccugagaguaggugucucuuua

SEQ ID NO: 737848 - RNA, 22 nt, Human
acccaggcuggagugcaguagc

SEQ ID NO: 737849 - RNA, 22 nt, Human
aguaaauuucugcauguguacu

SEQ ID NO: 737850 - RNA, 22 nt, Human
agccagacauggcuccugcucc

SEQ ID NO: 737851 - RNA, 22 nt, Human
uaaggccaaacuauuauaguuc

SEQ ID NO: 737852 - RNA, 22 nt, Human
caggagguuguaagagcaggcc

SEQ ID NO: 737853 - RNA, 22 nt, Human
gacuguggcguagaugcuggga

SEQ ID NO: 737854 - RNA, 22 nt, Human
gcccagggugcuuagaacccau

SEQ ID NO: 737855 - RNA, 23 nt, Human
agcugaggugcagauccaaagaa

SEQ ID NO: 737856 - RNA, 22 nt, Human
ugaacaacugcaaaaaucucca

SEQ ID NO: 737857 - RNA, 22 nt, Human
acaaaaauuagcugggcauggu

SEQ ID NO: 737858 - RNA, 22 nt, Human
uuuuacagucagucaaacucag

SEQ ID NO: 737859 - RNA, 22 nt, Human
gaauuguaugcaguuacuugga

SEQ ID NO: 737860 - RNA, 22 nt, Human
ggggucccugcaccagcauguc

SEQ ID NO: 737861 - RNA, 22 nt, Human
ucuguuggcuuuuuaaaguugu

SEQ ID NO: 737862 - RNA, 22 nt, Human
ucaggggacuuaggagagaagu

SEQ ID NO: 737863 - RNA, 22 nt, Human
ucucugggaauucacaagcccu

SEQ ID NO: 737864 - RNA, 22 nt, Human
auguguauuaguuaguuuaaug

SEQ ID NO: 737865 - RNA, 22 nt, Human
aaugcauaaugguuugugacaa

SEQ ID NO: 737866 - RNA, 22 nt, Human
cagcucaggcucuccaugcucc

SEQ ID NO: 737867 - RNA, 22 nt, Human
gcugggaagugcaagaucaagg

SEQ ID NO: 737868 - RNA, 22 nt, Human
uuuuucugagaauaugagagga

SEQ ID NO: 737869 - RNA, 22 nt, Human
cuugaaugggccauaagacggu

SEQ ID NO: 737870 - RNA, 22 nt, Human
ucuuacaagaaggaaaagggag

SEQ ID NO: 737871 - RNA, 22 nt, Human
acagcagggucacauucccucu

SEQ ID NO: 737872 - RNA, 22 nt, Human
cacuccuauaauuaaagaugca

SEQ ID NO: 737873 - RNA, 22 nt, Human
auauggaacuauucuguguaga

SEQ ID NO: 737874 - RNA, 22 nt, Human
gaggccucaugaggugagcauu

SEQ ID NO: 737875 - RNA, 22 nt, Human
ugauuacagucugacagauguu

SEQ ID NO: 737876 - RNA, 22 nt, Human
gggccugcuccccaucgcugcu

SEQ ID NO: 737877 - RNA, 22 nt, Human
acagcucugggugcaggaggug

SEQ ID NO: 737878 - RNA, 22 nt, Human
cugagccacugcuuguucagug

SEQ ID NO: 737879 - RNA, 22 nt, Human
auguacaugugaauuuaggcaa

SEQ ID NO: 737880 - RNA, 22 nt, Human
uuccaaagugcuggaauuacau

SEQ ID NO: 737881 - RNA, 22 nt, Human
gcagcuuuaaaggaggcucuga

SEQ ID NO: 737882 - RNA, 22 nt, Human
acucugggaugagaaaaggguu

SEQ ID NO: 737883 - RNA, 22 nt, Human
caaaggaagcuccuugauggcg

SEQ ID NO: 737884 - RNA, 22 nt, Human
ggccaauuccaggagccggcgg

SEQ ID NO: 737885 - RNA, 22 nt, Human
ucccauugccauagauaggaca

SEQ ID NO: 737886 - RNA, 22 nt, Human
aggagcucugggcagggccucc

SEQ ID NO: 737887 - RNA, 22 nt, Human
cuuuucucugcgggucuuucau

SEQ ID NO: 737888 - RNA, 22 nt, Human
gcacuagaaucccuucaagaag

SEQ ID NO: 737889 - RNA, 22 nt, Human
ggcucauguaugaaagggugug

SEQ ID NO: 737890 - RNA, 20 nt, Human
ugguccucacagguccuccc

SEQ ID NO: 737891 - RNA, 22 nt, Human
aagccaaugagagaggccucag

SEQ ID NO: 737892 - RNA, 22 nt, Human
aguuagugagcucuugggaccu

SEQ ID NO: 737893 - RNA, 22 nt, Human
caccagggccccaggcugugcc

SEQ ID NO: 737894 - RNA, 22 nt, Human
aaagugcugugauuacaggcau

SEQ ID NO: 737895 - RNA, 22 nt, Human
ugcugcagaaauucugugagga

SEQ ID NO: 737896 - RNA, 22 nt, Human
gcugggcuccacccucaacugu

SEQ ID NO: 737897 - RNA, 20 nt, Human
auaugcugagugaaggcaga

SEQ ID NO: 737898 - RNA, 22 nt, Human
guggccaggacauugccaggca

SEQ ID NO: 737899 - RNA, 22 nt, Human
agcugucuuuaagugagcuuug

SEQ ID NO: 737900 - RNA, 22 nt, Human
aacacauaggcagagcaugaca

SEQ ID NO: 737901 - RNA, 22 nt, Human
gugcugacaggagccuggcggu

SEQ ID NO: 737902 - RNA, 22 nt, Human
uugggguaaguuugucaagcug

SEQ ID NO: 737903 - RNA, 22 nt, Human
auacaaucaucauuauauuccc

SEQ ID NO: 737904 - RNA, 22 nt, Human
aggcugccgcagccaaugguug

SEQ ID NO: 737905 - RNA, 22 nt, Human
gcaggggaguggaugauggauu

SEQ ID NO: 737906 - RNA, 22 nt, Human
auacagauguuaaagcaauuuc

SEQ ID NO: 737907 - RNA, 19 nt, Human
agccagcaggccucugagc

SEQ ID NO: 737908 - RNA, 22 nt, Human
gaaguagaaagccucguaaaua

SEQ ID NO: 737909 - RNA, 23 nt, Human
agcaaaguuguugcuaaccucau

SEQ ID NO: 737910 - RNA, 16 nt, Human
uacuguggagcaaggc

SEQ ID NO: 737911 - RNA, 22 nt, Human
ucccucuguucuguuccaagug

SEQ ID NO: 737912 - RNA, 22 nt, Human
ugaguuuuuucaacauaugaag

SEQ ID NO: 737913 - RNA, 22 nt, Human
ugucaguuuaguugaagaaaga

SEQ ID NO: 737914 - RNA, 22 nt, Human
aaggggccucacagaugggcuu

SEQ ID NO: 737915 - RNA, 22 nt, Human
uauuuguuccagagauaaaaau

SEQ ID NO: 737916 - RNA, 20 nt, Human
uaguauuugcauaaggauag

SEQ ID NO: 737917 - RNA, 22 nt, Human
gugggcagugguuugcgcgguc

SEQ ID NO: 737918 - RNA, 17 nt, Human
agccagguacaagucca

SEQ ID NO: 737919 - RNA, 22 nt, Human
uucucaggguuugugcaggcuu

SEQ ID NO: 737920 - RNA, 22 nt, Human
uaaggcaauggcauucuugaca

SEQ ID NO: 737921 - RNA, 22 nt, Human
gagggcucaacuacuacuaggc

SEQ ID NO: 737922 - RNA, 22 nt, Human
uguccuuauaagaaaaggaaau

SEQ ID NO: 737923 - RNA, 22 nt, Human
uaugagaacaagaacaaucucc

SEQ ID NO: 737924 - RNA, 22 nt, Human
gugaggaagucugagagccaca

SEQ ID NO: 737925 - RNA, 22 nt, Human
uguggcaggaagagcuucugag

SEQ ID NO: 737926 - RNA, 21 nt, Human
ugagcaggugcagggaagugg

SEQ ID NO: 737927 - RNA, 22 nt, Human
ugcugaggaaaaaugugacucu

SEQ ID NO: 737928 - RNA, 22 nt, Human
uuagaaaacauaagugguaaag

SEQ ID NO: 737929 - RNA, 22 nt, Human
augaagcagcguuguagaguga

SEQ ID NO: 737930 - RNA, 20 nt, Human
agcaggugacggggccugcu

SEQ ID NO: 737931 - RNA, 22 nt, Human
guuggccugaauggucaagagg

SEQ ID NO: 737932 - RNA, 22 nt, Human
gcuguagguaaggauggcaaag

SEQ ID NO: 737933 - RNA, 22 nt, Human
cuaggccacagggcaaaaagga

SEQ ID NO: 737934 - RNA, 19 nt, Human
gcccugaccuuggcugcuc

SEQ ID NO: 737935 - RNA, 22 nt, Human
cuagcagcaucacaggaagacu

SEQ ID NO: 737936 - RNA, 22 nt, Human
aagccaaucgugugaacuuagu

SEQ ID NO: 737937 - RNA, 22 nt, Human
cucugggcuuccuuuguggguu

SEQ ID NO: 737938 - RNA, 22 nt, Human
ccagagcuaaacacacaggcug

SEQ ID NO: 737939 - RNA, 22 nt, Human
cagcagcagccccaggaagguu

SEQ ID NO: 737940 - RNA, 22 nt, Human
uggcccuuuugugaaguggcca

SEQ ID NO: 737941 - RNA, 22 nt, Human
agcagcccgaggaucauguguc

SEQ ID NO: 737942 - RNA, 20 nt, Human
aggcucugcauuucugagug

SEQ ID NO: 737943 - RNA, 20 nt, Human
agcauuugaaauaugacuau

SEQ ID NO: 737944 - RNA, 22 nt, Human
auacauauccacaggagauaaa

SEQ ID NO: 737945 - RNA, 22 nt, Human
gugaacuaaggauucaaacuuc

SEQ ID NO: 737946 - RNA, 22 nt, Human
agauacauauagaaaacaucaa

SEQ ID NO: 737947 - RNA, 17 nt, Human
uuccuccucaccauguu

SEQ ID NO: 737948 - RNA, 22 nt, Human
ggaggugggagccuccaguggu

SEQ ID NO: 737949 - RNA, 22 nt, Human
ccaguguucaauacauauuugu

SEQ ID NO: 737950 - RNA, 22 nt, Human
gugguccuuuagaggauguaau

SEQ ID NO: 737951 - RNA, 22 nt, Human
gcuuacaagaucgugcuccagu

SEQ ID NO: 737952 - RNA, 22 nt, Human
caacauauuuuccaagagugaa

SEQ ID NO: 737953 - RNA, 22 nt, Human
gaggcagcauucgcauagacag

SEQ ID NO: 737954 - RNA, 22 nt, Human
ugcagcugcugguggcugaaag

SEQ ID NO: 737955 - RNA, 22 nt, Human
cacuuuuaacaggagaauuccc

SEQ ID NO: 737956 - RNA, 18 nt, Human
uccuguggcccagaguuu

SEQ ID NO: 737957 - RNA, 22 nt, Human
acaaacagaguugaaaaauagg

SEQ ID NO: 737958 - RNA, 23 nt, Human
gcacagagcaguuaggggaagau

SEQ ID NO: 737959 - RNA, 22 nt, Human
augaaauugaucuugaacuuuu

SEQ ID NO: 737960 - RNA, 22 nt, Human
uuacagaucaucaagguauaau

SEQ ID NO: 737961 - RNA, 22 nt, Human
acuaaauggaaugauuacuaua

SEQ ID NO: 737962 - RNA, 22 nt, Human
acagggcagguggcuacugguc

SEQ ID NO: 737963 - RNA, 22 nt, Human
accugcccacauauauauguau

SEQ ID NO: 737964 - RNA, 18 nt, Human
ccugcagcccaggaggcc

SEQ ID NO: 737965 - RNA, 22 nt, Human
aggagcacugagccagcauggg

SEQ ID NO: 737966 - RNA, 22 nt, Human
gaggaggcuaucagcaaucagg

SEQ ID NO: 737967 - RNA, 22 nt, Human
ggccaggugcgguggcucacac

SEQ ID NO: 737968 - RNA, 22 nt, Human
gggcugcuugcuggagacagac

SEQ ID NO: 737969 - RNA, 22 nt, Human
accugcccacacuuccuuccca

SEQ ID NO: 737970 - RNA, 22 nt, Human
guuuccuggaaacauuaggaga

SEQ ID NO: 737971 - RNA, 22 nt, Human
aaugguuuucuagaacaugaaa

SEQ ID NO: 737972 - RNA, 22 nt, Human
ggagcaggcagggccgugucug

SEQ ID NO: 737973 - RNA, 22 nt, Human
cuggaagguggauggcgaggcc

SEQ ID NO: 737974 - RNA, 22 nt, Human
gucuucuguaagaugagguccc

SEQ ID NO: 737975 - RNA, 22 nt, Human
ucaguugcuagaagggggaacc

SEQ ID NO: 737976 - RNA, 22 nt, Human
aggauaauaauaaucucguuua

SEQ ID NO: 737977 - RNA, 22 nt, Human
agagaguucuuucuaguugaag

SEQ ID NO: 737978 - RNA, 19 nt, Human
ucugaauuauuuauguacc

SEQ ID NO: 737979 - RNA, 22 nt, Human
ucagaggagggacucagaccca

SEQ ID NO: 737980 - RNA, 22 nt, Human
acaaccaugucaguucaaacca

SEQ ID NO: 737981 - RNA, 22 nt, Human
gggcaggucugggucagccuga

SEQ ID NO: 737982 - RNA, 22 nt, Human
auucugcuccacacugauucau

SEQ ID NO: 737983 - RNA, 22 nt, Human
agaucuggaaaaucacaggugc

SEQ ID NO: 737984 - RNA, 22 nt, Human
gaugacagcagcuguggcucac

SEQ ID NO: 737985 - RNA, 22 nt, Human
gugcauuaguuuccuauugcug

SEQ ID NO: 737986 - RNA, 22 nt, Human
cuguuauuccccuugcuguggu

SEQ ID NO: 737987 - RNA, 22 nt, Human
auuauucaaucauauuaaaagu

SEQ ID NO: 737988 - RNA, 22 nt, Human
ccagcagagcauggggaggaag

SEQ ID NO: 737989 - RNA, 21 nt, Human
uucaggacaggaaaaacaggg

SEQ ID NO: 737990 - RNA, 21 nt, Human
uucuucaaagaagaaggcaca

SEQ ID NO: 737991 - RNA, 21 nt, Human
ggcagcugugguuaauugaac

SEQ ID NO: 737992 - RNA, 20 nt, Human
caggacagcgcaaucggagg

SEQ ID NO: 737993 - RNA, 22 nt, Human
aauuugcaugaugagaacaaua

SEQ ID NO: 737994 - RNA, 23 nt, Human
acacagaagaagacccaaggaag

SEQ ID NO: 737995 - RNA, 22 nt, Human
uuguuucauggggauguuuauu

SEQ ID NO: 737996 - RNA, 22 nt, Human
cccaggcaucccauuaaggagc

SEQ ID NO: 737997 - RNA, 22 nt, Human
aaauuuuagacuccugggucua

SEQ ID NO: 737998 - RNA, 20 nt, Human
agagaugggguaucaccgua

SEQ ID NO: 737999 - RNA, 22 nt, Human
ugcaaaaagagcgaggagcccu

SEQ ID NO: 738000 - RNA, 22 nt, Human
ugcugucuuuuucccuuccuaa

SEQ ID NO: 738001 - RNA, 22 nt, Human
uuguuuaaaauguagcaagaaa

SEQ ID NO: 738002 - RNA, 19 nt, Human
ucuucccuggcugucaguc

SEQ ID NO: 738003 - RNA, 22 nt, Human
auacagauugcuauacuuacaa

SEQ ID NO: 738004 - RNA, 22 nt, Human
gagguuagaggucagugcaguc

SEQ ID NO: 738005 - RNA, 22 nt, Human
uggaaugcagugggagcuuacc

SEQ ID NO: 738006 - RNA, 22 nt, Human
gaaagccauagcccagcuuuac

SEQ ID NO: 738007 - RNA, 22 nt, Human
ggagaggcuuggcccagccugg

SEQ ID NO: 738008 - RNA, 22 nt, Human
caacuucaccaggguuccuaga

SEQ ID NO: 738009 - RNA, 22 nt, Human
uugcacuagucucagaggcaaa

SEQ ID NO: 738010 - RNA, 20 nt, Human
acuugcugggcuuuguuacc

SEQ ID NO: 738011 - RNA, 22 nt, Human
agaaggcugagacugggaugaa

SEQ ID NO: 738012 - RNA, 22 nt, Human
uggaguccgcuccaaguucucu

SEQ ID NO: 738013 - RNA, 22 nt, Human
acuguauuuccaacagacaaau

SEQ ID NO: 738014 - RNA, 22 nt, Human
aggagcucccgugaggagacca

SEQ ID NO: 738015 - RNA, 20 nt, Human
agacccuguguccuguggcc

SEQ ID NO: 738016 - RNA, 22 nt, Human
uauuccaacuucacuauugucu

SEQ ID NO: 738017 - RNA, 22 nt, Human
ggacacuguauaaguuagagua

SEQ ID NO: 738018 - RNA, 22 nt, Human
caggauguugcucccauguccc

SEQ ID NO: 738019 - RNA, 22 nt, Human
ggugcggagacuccaugaggcc

SEQ ID NO: 738020 - RNA, 20 nt, Human
ggacuacaauuugcagugug

SEQ ID NO: 738021 - RNA, 21 nt, Human
cucaggcuggcagcaggcuag

SEQ ID NO: 738022 - RNA, 20 nt, Human
gccuguccugagugucaugg

SEQ ID NO: 738023 - RNA, 22 nt, Human
cagcccagguggcggagguugc

SEQ ID NO: 738024 - RNA, 22 nt, Human
gaggagggagcuggaagcucuu

SEQ ID NO: 738025 - RNA, 22 nt, Human
cacagaaauauugugucccuug

SEQ ID NO: 738026 - RNA, 22 nt, Human
guuauuguuuauccugcacccc

SEQ ID NO: 738027 - RNA, 22 nt, Human
uaucauuuagaguauuucuuca

SEQ ID NO: 738028 - RNA, 22 nt, Human
cugacaaacuuaauuuucugaa

SEQ ID NO: 738029 - RNA, 22 nt, Human
ccaggcucugagaggaauguga

SEQ ID NO: 738030 - RNA, 22 nt, Human
aggcagaucacuugaggccagg

SEQ ID NO: 738031 - RNA, 22 nt, Human
acugaaggcuuucccaagguca

SEQ ID NO: 738032 - RNA, 22 nt, Human
uauucaaagugcgaggucaggg

SEQ ID NO: 738033 - RNA, 22 nt, Human
caguaacaugucuguuaagaaa

SEQ ID NO: 738034 - RNA, 22 nt, Human
gccucaguggcuuuaggaguuc

SEQ ID NO: 738035 - RNA, 22 nt, Human
uuuuuucagccugucugugcca

SEQ ID NO: 738036 - RNA, 22 nt, Human
aauguugaggauaucagaaaau

SEQ ID NO: 738037 - RNA, 22 nt, Human
ugcccagcugucaaaguagaua

SEQ ID NO: 738038 - RNA, 18 nt, Human
ggagggcuuuggggacug

SEQ ID NO: 738039 - RNA, 22 nt, Human
uggaaucccgcaauggaggauu

SEQ ID NO: 738040 - RNA, 22 nt, Human
ugucugucagauauuaaguuuc

SEQ ID NO: 738041 - RNA, 22 nt, Human
cauggccagcccugagguucag

SEQ ID NO: 738042 - RNA, 23 nt, Human
aggugcccagggcagguuuacug

SEQ ID NO: 738043 - RNA, 22 nt, Human
uuugaaaagaaccaucgccuua

SEQ ID NO: 738044 - RNA, 22 nt, Human
uacuuauuguugaacugaauca

SEQ ID NO: 738045 - RNA, 22 nt, Human
auuuagucaucacucauguguu

SEQ ID NO: 738046 - RNA, 19 nt, Human
uccaauuuguauguuuuca

SEQ ID NO: 738047 - RNA, 22 nt, Human
aaauguguuccuuugcuacaga

SEQ ID NO: 738048 - RNA, 22 nt, Human
agggcuguuuuuggcaccuggg

SEQ ID NO: 738049 - RNA, 22 nt, Human
gagcuuggcuggaccucacgga

SEQ ID NO: 738050 - RNA, 19 nt, Human
acagcagguguggggauaa

SEQ ID NO: 738051 - RNA, 22 nt, Human
uaacagaaauaguaggugaggg

SEQ ID NO: 738052 - RNA, 22 nt, Human
ucuggguaaucagggcugggag

SEQ ID NO: 738053 - RNA, 22 nt, Human
aaggaaaggaugagcaugcauu

SEQ ID NO: 738054 - RNA, 22 nt, Human
uccaauaaccacaaucagauag

SEQ ID NO: 738055 - RNA, 22 nt, Human
cacuuacacuucugaaagccua

SEQ ID NO: 738056 - RNA, 18 nt, Human
agucuucugauccauuuu

SEQ ID NO: 738057 - RNA, 22 nt, Human
aggaaacuuucuuuugcuucau

SEQ ID NO: 738058 - RNA, 22 nt, Human
gcccaaagccagugugcucucc

SEQ ID NO: 738059 - RNA, 22 nt, Human
agauuuaaagcaguauucgcaa

SEQ ID NO: 738060 - RNA, 22 nt, Human
gcugccuguccugaggaguccg

SEQ ID NO: 738061 - RNA, 23 nt, Human
augcaaagugcugucauguagac

SEQ ID NO: 738062 - RNA, 22 nt, Human
ucugucuuuagaggccugugcu

SEQ ID NO: 738063 - RNA, 20 nt, Human
auugaaauuuuucugagauu

SEQ ID NO: 738064 - RNA, 22 nt, Human
cuccagagucacacugccuggg

SEQ ID NO: 738065 - RNA, 19 nt, Human
caucucugcaaggagcugc

SEQ ID NO: 738066 - RNA, 22 nt, Human
gagagagacauguaaacgcggu

SEQ ID NO: 738067 - RNA, 22 nt, Human
cugggaaguggugagggccuga

SEQ ID NO: 738068 - RNA, 23 nt, Human
agucacaucuuagcagccagguc

SEQ ID NO: 738069 - RNA, 22 nt, Human
aacaccuaaaaaucauuguuga

SEQ ID NO: 738070 - RNA, 22 nt, Human
cccacagaaugccaaugagacc

SEQ ID NO: 738071 - RNA, 22 nt, Human
gauuucuaguaagucaugaagg

SEQ ID NO: 738072 - RNA, 22 nt, Human
cauuuccugucuggaggucaaa

SEQ ID NO: 738073 - RNA, 22 nt, Human
gaaaugcagaaccugagaccau

SEQ ID NO: 738074 - RNA, 22 nt, Human
ucccagggcacucacccucccu

SEQ ID NO: 738075 - RNA, 22 nt, Human
cagagcugggcauggugaaagg

SEQ ID NO: 738076 - RNA, 22 nt, Human
ggcugcuggcagauguaguuua

SEQ ID NO: 738077 - RNA, 22 nt, Human
ugucuuuucuacuguaagcaua

SEQ ID NO: 738078 - RNA, 22 nt, Human
uuuggaaaguugucacuuuaga

SEQ ID NO: 738079 - RNA, 22 nt, Human
ucacaagacagaaaacauuuag

SEQ ID NO: 738080 - RNA, 22 nt, Human
cacacuaauuuuucaagaguuu

SEQ ID NO: 738081 - RNA, 22 nt, Human
aauacaagauuuauaguuguuu

SEQ ID NO: 738082 - RNA, 22 nt, Human
ggcagaugacagaccaguaugu

SEQ ID NO: 738083 - RNA, 22 nt, Human
ugacacaaacaagauauuugcc

SEQ ID NO: 738084 - RNA, 22 nt, Human
uggcuggcuagugggcaggauu

SEQ ID NO: 738085 - RNA, 22 nt, Human
ggccugagaaccauggggccaa

SEQ ID NO: 738086 - RNA, 22 nt, Human
gguucacucucaagucugccua

SEQ ID NO: 738087 - RNA, 22 nt, Human
aagcuggaacaucuugaggaag

SEQ ID NO: 738088 - RNA, 22 nt, Human
uuuugucagugagaacagaguu

SEQ ID NO: 738089 - RNA, 22 nt, Human
acauuaacacuggugcuggugu

SEQ ID NO: 738090 - RNA, 22 nt, Human
ccaggcccaggguacugaccaa

SEQ ID NO: 738091 - RNA, 22 nt, Human
uguggaaagucaaguuccagga

SEQ ID NO: 738092 - RNA, 22 nt, Human
caaaugaugcauggcuagugag

SEQ ID NO: 738093 - RNA, 22 nt, Human
ucugucuuagcaucuuugcuca

SEQ ID NO: 738094 - RNA, 22 nt, Human
ccugacgaaaggcgugcuggag

SEQ ID NO: 738095 - RNA, 22 nt, Human
aggaaacuccccuacaucucaa

SEQ ID NO: 738096 - RNA, 22 nt, Human
agugggagccagcagcuugggg

SEQ ID NO: 738097 - RNA, 22 nt, Human
uaacauguuuguacacugaaac

SEQ ID NO: 738098 - RNA, 22 nt, Human
gccagcugaaauuucaguucug

SEQ ID NO: 738099 - RNA, 22 nt, Human
uggcuuccuguguaaugaggug

SEQ ID NO: 738100 - RNA, 22 nt, Human
uuucuagacucaaagaggauau

SEQ ID NO: 738101 - RNA, 22 nt, Human
ggccacuccgcugcuacuggaa

SEQ ID NO: 738102 - RNA, 22 nt, Human
ccugugugcacacgaggccaug

SEQ ID NO: 738103 - RNA, 23 nt, Human
auccccugccuugggugaguccc

SEQ ID NO: 738104 - RNA, 22 nt, Human
ucugcuguacuuuuggucuguu

SEQ ID NO: 738105 - RNA, 22 nt, Human
ugauacagucagcucacaauug

SEQ ID NO: 738106 - RNA, 22 nt, Human
gccagcugcuggaacagcgcga

SEQ ID NO: 738107 - RNA, 22 nt, Human
ugaaaucaauaauuggugauug

SEQ ID NO: 738108 - RNA, 22 nt, Human
cagcccaggacugcagguguuu

SEQ ID NO: 738109 - RNA, 22 nt, Human
aaggccacagagccucagagag

SEQ ID NO: 738110 - RNA, 22 nt, Human
ccugaggcccuggcugugcuga

SEQ ID NO: 738111 - RNA, 22 nt, Human
aaggcaaggccaagccaucagu

SEQ ID NO: 738112 - RNA, 20 nt, Human
accuuucaaaugauucagca

SEQ ID NO: 738113 - RNA, 18 nt, Human
gggaagaggaucuggccc

SEQ ID NO: 738114 - RNA, 22 nt, Human
caggaagccuuccuugucugcu

SEQ ID NO: 738115 - RNA, 22 nt, Human
ccccucagguacccgugcagca

SEQ ID NO: 738116 - RNA, 22 nt, Human
gccaggcuggccagcaccuucu

SEQ ID NO: 738117 - RNA, 22 nt, Human
uggcaaagaugguucucaccau

SEQ ID NO: 738118 - RNA, 22 nt, Human
gugccuuugagaaguuucucug

SEQ ID NO: 738119 - RNA, 22 nt, Human
agucaguggcuccgagccuggu

SEQ ID NO: 738120 - RNA, 22 nt, Human
ugcauuaucgucuugauccucu

SEQ ID NO: 738121 - RNA, 22 nt, Human
ugccucugugggccuuccuggc

SEQ ID NO: 738122 - RNA, 22 nt, Human
agccucugacugucagcaaggu

SEQ ID NO: 738123 - RNA, 22 nt, Human
aaauagaauuaacuagcuacug

SEQ ID NO: 738124 - RNA, 22 nt, Human
acuguaaaacugcuuuggaaac

SEQ ID NO: 738125 - RNA, 20 nt, Human
aggagaaauucgggacaccu

SEQ ID NO: 738126 - RNA, 22 nt, Human
gaggcaugcagagcuggagcag

SEQ ID NO: 738127 - RNA, 22 nt, Human
ugucuuauguagauacugagaa

SEQ ID NO: 738128 - RNA, 22 nt, Human
cauuugaaaauacucuuuucca

SEQ ID NO: 738129 - RNA, 17 nt, Human
uucugcaugugaagaug

SEQ ID NO: 738130 - RNA, 22 nt, Human
caguaucuugcuuauagacaca

SEQ ID NO: 738131 - RNA, 22 nt, Human
auaguuaugcucuagacaagaa

SEQ ID NO: 738132 - RNA, 22 nt, Human
gucccuggaucugggacagcug

SEQ ID NO: 738133 - RNA, 22 nt, Human
agugaccaacaaugcugagaag

SEQ ID NO: 738134 - RNA, 20 nt, Human
cacccucccagcaccuaugc

SEQ ID NO: 738135 - RNA, 22 nt, Human
uauuacacuuucuucuucaagc

SEQ ID NO: 738136 - RNA, 22 nt, Human
cagaagcauugacuccuugcuc

SEQ ID NO: 738137 - RNA, 22 nt, Human
ccucugccuuuagugaaaguug

SEQ ID NO: 738138 - RNA, 22 nt, Human
uuuggaaaauauugaacugguu

SEQ ID NO: 738139 - RNA, 22 nt, Human
ggcuucaccgcgggguugcagg

SEQ ID NO: 738140 - RNA, 22 nt, Human
uucugcauugacuuuuauuucc

SEQ ID NO: 738141 - RNA, 22 nt, Human
gugaggggucuggacgcacagu

SEQ ID NO: 738142 - RNA, 22 nt, Human
ccuuagcauuagaagcuguggg

SEQ ID NO: 738143 - RNA, 22 nt, Human
gcuuccagagagccccgccugg

SEQ ID NO: 738144 - RNA, 22 nt, Human
cccuggagaaggggacgcggag

SEQ ID NO: 738145 - RNA, 22 nt, Human
ugaggcuguucuaccagggcca

SEQ ID NO: 738146 - RNA, 22 nt, Human
cugggccugggaggccaggucu

SEQ ID NO: 738147 - RNA, 18 nt, Human
uggaucuuuaugaggcug

SEQ ID NO: 738148 - RNA, 22 nt, Human
gaggcugggggcugccuuccuc

SEQ ID NO: 738149 - RNA, 22 nt, Human
ucuccugccacugcuucccauu

SEQ ID NO: 738150 - RNA, 19 nt, Human
acccagcccaggaguggca

SEQ ID NO: 738151 - RNA, 22 nt, Human
cagcuuuauuaaugauugucuu

SEQ ID NO: 738152 - RNA, 22 nt, Human
ccugcuggacguggaggagggg

SEQ ID NO: 738153 - RNA, 22 nt, Human
uuucucccuccacuacaggcuc

SEQ ID NO: 738154 - RNA, 22 nt, Human
aaaaugcugggaaaguuggaau

SEQ ID NO: 738155 - RNA, 22 nt, Human
ugcucugggcucaauggcagcu

SEQ ID NO: 738156 - RNA, 22 nt, Human
gcucuggagagccauaggcccu

SEQ ID NO: 738157 - RNA, 22 nt, Human
ugugggagaaggaagcaagcug

SEQ ID NO: 738158 - RNA, 22 nt, Human
uccaucaggcucgugggcucuc

SEQ ID NO: 738159 - RNA, 22 nt, Human
gagauggggucagcugggacau

SEQ ID NO: 738160 - RNA, 22 nt, Human
aggcuucuuuuagaggggaugg

SEQ ID NO: 738161 - RNA, 22 nt, Human
uuccacagauguaugaaguggu

SEQ ID NO: 738162 - RNA, 22 nt, Human
agggaguuccgaucugugcacc

SEQ ID NO: 738163 - RNA, 21 nt, Human
uguguaaaguugaaauccugu

SEQ ID NO: 738164 - RNA, 22 nt, Human
gcagaggagcaaguugcuacag

SEQ ID NO: 738165 - RNA, 22 nt, Human
ggcacacauagaucugcacugg

SEQ ID NO: 738166 - RNA, 22 nt, Human
uagacaggagucaggcuagaau

SEQ ID NO: 738167 - RNA, 22 nt, Human
gccuugccaaggggcagcagag

SEQ ID NO: 738168 - RNA, 17 nt, Human
ugacuuaacagcaaggc

SEQ ID NO: 738169 - RNA, 22 nt, Human
uucuacaugagaaaauguauuu

SEQ ID NO: 738170 - RNA, 22 nt, Human
ccucaggccucugccucauugg

SEQ ID NO: 738171 - RNA, 22 nt, Human
uuucuacacuucgugguguuuu

SEQ ID NO: 738172 - RNA, 20 nt, Human
aggcugccaggucucacauc

SEQ ID NO: 738173 - RNA, 22 nt, Human
uccagcuggggcaguggcuggg

SEQ ID NO: 738174 - RNA, 22 nt, Human
ccuggcagcccagagcgccgcu

SEQ ID NO: 738175 - RNA, 20 nt, Human
agcaaggcuaaaucaugauu

SEQ ID NO: 738176 - RNA, 22 nt, Human
uuuaacuccuaguguguauuag

SEQ ID NO: 738177 - RNA, 22 nt, Human
agucauuuugccagucuucagg

SEQ ID NO: 738178 - RNA, 22 nt, Human
gauugcuuauacacaagaugaa

SEQ ID NO: 738179 - RNA, 20 nt, Human
aaagugcacagauacagcuc

SEQ ID NO: 738180 - RNA, 22 nt, Human
agagcuggaaucagaccucagg

SEQ ID NO: 738181 - RNA, 22 nt, Human
gcauacagagaggauguggcau

SEQ ID NO: 738182 - RNA, 22 nt, Human
uauuuggaggccacuguugagu

SEQ ID NO: 738183 - RNA, 22 nt, Human
acccuguuaugguguaacauuu

SEQ ID NO: 738184 - RNA, 22 nt, Human
caaggcugcaaaacuacauggg

SEQ ID NO: 738185 - RNA, 22 nt, Human
acaguuacauuaaacaaaagga

SEQ ID NO: 738186 - RNA, 22 nt, Human
ucaaggaaugacuauaugagga

SEQ ID NO: 738187 - RNA, 22 nt, Human
aggcuucaguagggagcauguc

SEQ ID NO: 738188 - RNA, 22 nt, Human
ucagcagucacauguuguccca

SEQ ID NO: 738189 - RNA, 22 nt, Human
ccagcugcugugcagggaggcu

SEQ ID NO: 738190 - RNA, 22 nt, Human
acaaagucuuuuacaacaguca

SEQ ID NO: 738191 - RNA, 22 nt, Human
aggugacaugaaaaauguugag

SEQ ID NO: 738192 - RNA, 22 nt, Human
acaaggcugugggagaaccucu

SEQ ID NO: 738193 - RNA, 20 nt, Human
guauuaggagguaaauguaa

SEQ ID NO: 738194 - RNA, 22 nt, Human
auggcuuccaaggcccuccgug

SEQ ID NO: 738195 - RNA, 19 nt, Human
cccuggcaggcaagccugg

SEQ ID NO: 738196 - RNA, 22 nt, Human
ugaauuaucuuguaauuuugaa

SEQ ID NO: 738197 - RNA, 22 nt, Human
uucaaguacuguagauuucagg

SEQ ID NO: 738198 - RNA, 22 nt, Human
aaacaguuucauuuucaugacc

SEQ ID NO: 738199 - RNA, 22 nt, Human
uguccagaucaaugcccacaug

SEQ ID NO: 738200 - RNA, 22 nt, Human
auugcuuuuaagcaccaccuaa

SEQ ID NO: 738201 - RNA, 22 nt, Human
acaggcuucucacagaaaaggg

SEQ ID NO: 738202 - RNA, 22 nt, Human
gcaguguuuacauauuagaaac

SEQ ID NO: 738203 - RNA, 22 nt, Human
aauaaagaauggaugagaucgu

SEQ ID NO: 738204 - RNA, 22 nt, Human
cuucugugcaauuguggaggag

SEQ ID NO: 738205 - RNA, 22 nt, Human
uguuaucugagcaacgucgacg

SEQ ID NO: 738206 - RNA, 22 nt, Human
ucuuccuggcauugaugcugca

SEQ ID NO: 738207 - RNA, 22 nt, Human
gcuuggcugugagcuuugcugu

SEQ ID NO: 738208 - RNA, 22 nt, Human
uugaaacagacaaguaaauguc

SEQ ID NO: 738209 - RNA, 22 nt, Human
uuagcacuggauuucaucagaa

SEQ ID NO: 738210 - RNA, 20 nt, Human
uccuggccuucucgggcagu

SEQ ID NO: 738211 - RNA, 22 nt, Human
caugcauuuggaguuuucaagu

SEQ ID NO: 738212 - RNA, 22 nt, Human
acagagccaaaaggacauagua

SEQ ID NO: 738213 - RNA, 22 nt, Human
uaaagauggagaugaccuagga

SEQ ID NO: 738214 - RNA, 22 nt, Human
gugaggucauauagcgaacucc

SEQ ID NO: 738215 - RNA, 22 nt, Human
agcagugaaacagcugcauaug

SEQ ID NO: 738216 - RNA, 22 nt, Human
gucagaaaacuucccuuugagu

SEQ ID NO: 738217 - RNA, 22 nt, Human
uacaaugcauucauuuuugagg

SEQ ID NO: 738218 - RNA, 22 nt, Human
uagauuucucauucauagauug

SEQ ID NO: 738219 - RNA, 22 nt, Human
gucuaaagcccuuagaauagua

SEQ ID NO: 738220 - RNA, 23 nt, Human
aucuguguguggguagggaugau

SEQ ID NO: 738221 - RNA, 22 nt, Human
cucucuguauguguauauuuau

SEQ ID NO: 738222 - RNA, 22 nt, Human
aucagagaaauggagggcgcuu

SEQ ID NO: 738223 - RNA, 22 nt, Human
guguggccucaacgggaugcaa

SEQ ID NO: 738224 - RNA, 22 nt, Human
cucucaaaguaagguguauaca

SEQ ID NO: 738225 - RNA, 18 nt, Human
cucugggagaggcauaca

SEQ ID NO: 738226 - RNA, 22 nt, Human
uucacauuaagccuccuccuac

SEQ ID NO: 738227 - RNA, 22 nt, Human
gcucccuuaggccuugccggga

SEQ ID NO: 738228 - RNA, 22 nt, Human
cauuucugauuacagaauacua

SEQ ID NO: 738229 - RNA, 22 nt, Human
gaaggccacaagagaaguuaag

SEQ ID NO: 738230 - RNA, 22 nt, Human
auaggucugaaaguguauccug

SEQ ID NO: 738231 - RNA, 21 nt, Human
ucccacucuaaauggacugaa

SEQ ID NO: 738232 - RNA, 22 nt, Human
agcaaucaccaccucuauauuu

SEQ ID NO: 738233 - RNA, 22 nt, Human
cauccugacuggguaaagcuua

SEQ ID NO: 738234 - RNA, 22 nt, Human
acagcagcugccuucaggcucu

SEQ ID NO: 738235 - RNA, 22 nt, Human
uauuugaaaguguacaaaaacu

SEQ ID NO: 738236 - RNA, 22 nt, Human
uugaaugaccaugaugcaaggg

SEQ ID NO: 738237 - RNA, 22 nt, Human
ucuggaauaacccugcuuccaa

SEQ ID NO: 738238 - RNA, 22 nt, Human
gcaguccucucauuggccuccu

SEQ ID NO: 738239 - RNA, 22 nt, Human
gagcaauggaagauagauaaca

SEQ ID NO: 738240 - RNA, 22 nt, Human
uugauguaaagugauucauggg

SEQ ID NO: 738241 - RNA, 22 nt, Human
gaauuauaggcaaagcagucau

SEQ ID NO: 738242 - RNA, 22 nt, Human
ugcccacaccugggggaggcug

SEQ ID NO: 738243 - RNA, 22 nt, Human
ucugaacauccagcaaugcaca

SEQ ID NO: 738244 - RNA, 22 nt, Human
uucucuugugccaaguuguugc

SEQ ID NO: 738245 - RNA, 22 nt, Human
uugaaugaagucccuuuuuacu

SEQ ID NO: 738246 - RNA, 21 nt, Human
cucuugugucagagccagagg

SEQ ID NO: 738247 - RNA, 22 nt, Human
aacagcauaccaauguacauau

SEQ ID NO: 738248 - RNA, 22 nt, Human
auacagcuuacaguucuaaugc

SEQ ID NO: 738249 - RNA, 22 nt, Human
augaauuguaaauuccuugaaa

SEQ ID NO: 738250 - RNA, 22 nt, Human
uuuaauuguuguggguacauag

SEQ ID NO: 738251 - RNA, 20 nt, Human
ucaaggaaugucauuuuguu

SEQ ID NO: 738252 - RNA, 22 nt, Human
uuaccugcaacucccaugguga

SEQ ID NO: 738253 - RNA, 17 nt, Human
acacagggagagggagc

SEQ ID NO: 738254 - RNA, 22 nt, Human
gaggaggucuccuccgcagggg

SEQ ID NO: 738255 - RNA, 22 nt, Human
ugagagugaaaugucacauguc

SEQ ID NO: 738256 - RNA, 22 nt, Human
uggcucuuaaggucccugugcu

SEQ ID NO: 738257 - RNA, 22 nt, Human
agggaggucuuugaggggcuua

SEQ ID NO: 738258 - RNA, 23 nt, Human
agagggugcaacauggggaucua

SEQ ID NO: 738259 - RNA, 22 nt, Human
aggcccuggguuagggcccacu

SEQ ID NO: 738260 - RNA, 22 nt, Human
ugggccacagagugagaaaugu

SEQ ID NO: 738261 - RNA, 22 nt, Human
uucuugcucaaugucuguuuaa

SEQ ID NO: 738262 - RNA, 22 nt, Human
uuaauaaaguaugaauuggaaa

SEQ ID NO: 738263 - RNA, 21 nt, Human
gcuuugaugcugccuugcucc

SEQ ID NO: 738264 - RNA, 22 nt, Human
ugcacuuugcaggcauggaaac

SEQ ID NO: 738265 - RNA, 22 nt, Human
accaugaugcauccuuaaggaa

SEQ ID NO: 738266 - RNA, 23 nt, Human
cccagcugagacuuccugaacuc

SEQ ID NO: 738267 - RNA, 22 nt, Human
uuugacaauucaugacauuuau

SEQ ID NO: 738268 - RNA, 22 nt, Human
cuuucccugcuuagaaggauuu

SEQ ID NO: 738269 - RNA, 22 nt, Human
gacuggcuuauuucacuuagca

SEQ ID NO: 738270 - RNA, 21 nt, Human
gcuaugaauguagaaaauuau

SEQ ID NO: 738271 - RNA, 22 nt, Human
uacaguuuguauggucaggaau

SEQ ID NO: 738272 - RNA, 22 nt, Human
cagcugucugcugaaggaagcu

SEQ ID NO: 738273 - RNA, 21 nt, Human
ggcugggucaugcagcuggcc

SEQ ID NO: 738274 - RNA, 22 nt, Human
cuguggagcuuguggcaguggg

SEQ ID NO: 738275 - RNA, 22 nt, Human
cagagauuuuuaugcacaccaa

SEQ ID NO: 738276 - RNA, 23 nt, Human
cuugccuggccucucugcccaga

SEQ ID NO: 738277 - RNA, 22 nt, Human
aggcuucugugagcucauacaa

SEQ ID NO: 738278 - RNA, 22 nt, Human
augcuccagugugaugcuucau

SEQ ID NO: 738279 - RNA, 22 nt, Human
uuauggagcagacagcugguca

SEQ ID NO: 738280 - RNA, 22 nt, Human
cacagcuggaaugggguaccug

SEQ ID NO: 738281 - RNA, 22 nt, Human
gugcuuuccauccucccugcug

SEQ ID NO: 738282 - RNA, 22 nt, Human
acagcaagaccccuagcauggu

SEQ ID NO: 738283 - RNA, 22 nt, Human
ucaguguagcagacuuguagcc

SEQ ID NO: 738284 - RNA, 22 nt, Human
acaacuguuagacacuucuaag

SEQ ID NO: 738285 - RNA, 22 nt, Human
auggcagggcagccucucagag

SEQ ID NO: 738286 - RNA, 22 nt, Human
cucuggcucuguugagauuugu

SEQ ID NO: 738287 - RNA, 22 nt, Human
auggaucuucccucauuucuga

SEQ ID NO: 738288 - RNA, 22 nt, Human
uguguacacaaguauauauaca

SEQ ID NO: 738289 - RNA, 22 nt, Human
ugcaugcauaaauguacacaca

SEQ ID NO: 738290 - RNA, 22 nt, Human
gcccagcacagcuggaagaguc

SEQ ID NO: 738291 - RNA, 22 nt, Human
aaguuuugaaauacugaagugu

SEQ ID NO: 738292 - RNA, 22 nt, Human
acuucuuucacaauguuucuag

SEQ ID NO: 738293 - RNA, 22 nt, Human
ucugggaaggcucugcagauau

SEQ ID NO: 738294 - RNA, 22 nt, Human
cugagggcccugaagcuuggca

SEQ ID NO: 738295 - RNA, 22 nt, Human
gcaccaggcuuagagccccagg

SEQ ID NO: 738296 - RNA, 22 nt, Human
cagaguuucgguaagcauagaa

SEQ ID NO: 738297 - RNA, 22 nt, Human
gacagggaggaaagagacugcu

SEQ ID NO: 738298 - RNA, 22 nt, Human
cugaggccgucugggucugcag

SEQ ID NO: 738299 - RNA, 22 nt, Human
uuccaguugguagaauguaagg

SEQ ID NO: 738300 - RNA, 22 nt, Human
cuuuauguucaguacaaugcuu

SEQ ID NO: 738301 - RNA, 16 nt, Human
uggcugagagaggguu

SEQ ID NO: 738302 - RNA, 22 nt, Human
ccuggggagaagagcuuccccc

SEQ ID NO: 738303 - RNA, 20 nt, Human
aacacugagggcuacucuuc

SEQ ID NO: 738304 - RNA, 22 nt, Human
ucagccagugugcaccuggagu

SEQ ID NO: 738305 - RNA, 22 nt, Human
gagcacagcuggagguagcauu

SEQ ID NO: 738306 - RNA, 23 nt, Human
aguguugguugggaagccaagca

SEQ ID NO: 738307 - RNA, 18 nt, Human
gggcagcacagcagccuc

SEQ ID NO: 738308 - RNA, 22 nt, Human
ucccuucuggcagcagugugag

SEQ ID NO: 738309 - RNA, 22 nt, Human
aaaauugucgaacaguaguaac

SEQ ID NO: 738310 - RNA, 22 nt, Human
ccuggggcucugcacagagcag

SEQ ID NO: 738311 - RNA, 22 nt, Human
ugcugaaggcaggggagguggc

SEQ ID NO: 738312 - RNA, 22 nt, Human
uucagaacugucuguccuuuuc

SEQ ID NO: 738313 - RNA, 22 nt, Human
uuaacagauguuuauggagcau

SEQ ID NO: 738314 - RNA, 22 nt, Human
gacuggggaaggacccgagacc

SEQ ID NO: 738315 - RNA, 22 nt, Human
cugggagaggaaccucgagggu

SEQ ID NO: 738316 - RNA, 22 nt, Human
ucuggagaaaguugaguuugug

SEQ ID NO: 738317 - RNA, 22 nt, Human
cuuguuuuggcuaguaugaugu

SEQ ID NO: 738318 - RNA, 22 nt, Human
ucagaacagcgagaauauucac

SEQ ID NO: 738319 - RNA, 22 nt, Human
aguaaaaaguucagaaugguug

SEQ ID NO: 738320 - RNA, 21 nt, Human
acacugugucauaaugcuuaa

SEQ ID NO: 738321 - RNA, 22 nt, Human
augugaagcuugugcuaacaua

SEQ ID NO: 738322 - RNA, 22 nt, Human
uugucugaaucuggagcucucu

SEQ ID NO: 738323 - RNA, 22 nt, Human
acugagcaggguuccgcaugga

SEQ ID NO: 738324 - RNA, 22 nt, Human
auguuaccucuauuagaauauu

SEQ ID NO: 738325 - RNA, 22 nt, Human
uaauugcugaacuacuaucccu

SEQ ID NO: 738326 - RNA, 23 nt, Human
agcagcaggagguauugauaagg

SEQ ID NO: 738327 - RNA, 22 nt, Human
acaguugagaugcaacuuuggg

SEQ ID NO: 738328 - RNA, 22 nt, Human
agcuggggguuggauaagggua

SEQ ID NO: 738329 - RNA, 22 nt, Human
agaaaugcucuuccugaccaga

SEQ ID NO: 738330 - RNA, 22 nt, Human
cuccuggcccugagcucccagg

SEQ ID NO: 738331 - RNA, 22 nt, Human
ucaguuuugauuccugguucuc

SEQ ID NO: 738332 - RNA, 22 nt, Human
uucagccagucaucagucuugu

SEQ ID NO: 738333 - RNA, 19 nt, Human
caggaugaucccaugacac

SEQ ID NO: 738334 - RNA, 22 nt, Human
aguugaacaguauuugcuucug

SEQ ID NO: 738335 - RNA, 22 nt, Human
cagguccuuuaguguccagaac

SEQ ID NO: 738336 - RNA, 22 nt, Human
ugaccaauacuguggaugccag

SEQ ID NO: 738337 - RNA, 22 nt, Human
cagaacugggcagggagcagag

SEQ ID NO: 738338 - RNA, 22 nt, Human
ugcugugcaucauaguguuugg

SEQ ID NO: 738339 - RNA, 22 nt, Human
cuuucagcaucccugggauuac

SEQ ID NO: 738340 - RNA, 22 nt, Human
uacuuaaugccacugaauugua

SEQ ID NO: 738341 - RNA, 22 nt, Human
cuuuucagagcugagaucaccg

SEQ ID NO: 738342 - RNA, 20 nt, Human
ugggguccuggaggggaucc

SEQ ID NO: 738343 - RNA, 22 nt, Human
ggaaagcuuuguacuugaaaac

SEQ ID NO: 738344 - RNA, 22 nt, Human
uacauucugguggagaaaguaa

SEQ ID NO: 738345 - RNA, 22 nt, Human
ggucucagguagggccuaggaa

SEQ ID NO: 738346 - RNA, 22 nt, Human
uuauggcuaaauuucaauauua

SEQ ID NO: 738347 - RNA, 18 nt, Human
ugacccuuucucccugug

SEQ ID NO: 738348 - RNA, 22 nt, Human
gagguggguguaucacagguca

SEQ ID NO: 738349 - RNA, 20 nt, Human
gccagaggccggcaggggcu

SEQ ID NO: 738350 - RNA, 22 nt, Human
aauguuuucugacugcuaacuu

SEQ ID NO: 738351 - RNA, 22 nt, Human
gaagagcuguagccugcucuuu

SEQ ID NO: 738352 - RNA, 22 nt, Human
agggugguauuuaacaacugga

SEQ ID NO: 738353 - RNA, 22 nt, Human
ucuggaggcucugagggugagu

SEQ ID NO: 738354 - RNA, 17 nt, Human
aggcaggagauuggaga

SEQ ID NO: 738355 - RNA, 19 nt, Human
acagaugcuuuugcugccc

SEQ ID NO: 738356 - RNA, 22 nt, Human
cuggcuggaacgccgaggcggc

SEQ ID NO: 738357 - RNA, 22 nt, Human
uuucaaagucaagaaggauacu

SEQ ID NO: 738358 - RNA, 20 nt, Human
ugaagcagccuugauucugu

SEQ ID NO: 738359 - RNA, 22 nt, Human
uuccugguuugccuggaaucca

SEQ ID NO: 738360 - RNA, 22 nt, Human
uacaacagacaggaauaagauu

SEQ ID NO: 738361 - RNA, 22 nt, Human
ucacauuuuuuacuggacuuaa

SEQ ID NO: 738362 - RNA, 22 nt, Human
ucucuucuauuugagacuauuu

SEQ ID NO: 738363 - RNA, 22 nt, Human
aaugguuuugucucaucaaugu

SEQ ID NO: 738364 - RNA, 22 nt, Human
aagcagaauuuaauagaaaggu

SEQ ID NO: 738365 - RNA, 22 nt, Human
ggccagagcucaaacagucgca

SEQ ID NO: 738366 - RNA, 22 nt, Human
auugcagggacucaauaagaau

SEQ ID NO: 738367 - RNA, 22 nt, Human
aaucuuggcaaauguagcuucc

SEQ ID NO: 738368 - RNA, 22 nt, Human
cagucaaacuuauaggcacauu

SEQ ID NO: 738369 - RNA, 22 nt, Human
gccacuggacccagaaagggaa

SEQ ID NO: 738370 - RNA, 22 nt, Human
ccugguucagucuuucuaugcu

SEQ ID NO: 738371 - RNA, 21 nt, Human
uucaaagagugggcauuguca

SEQ ID NO: 738372 - RNA, 17 nt, Human
agugugugaaauggugg

SEQ ID NO: 738373 - RNA, 22 nt, Human
guuucacagaugguguucauau

SEQ ID NO: 738374 - RNA, 22 nt, Human
uaggcagaauucauugugcugc

SEQ ID NO: 738375 - RNA, 22 nt, Human
caucuguugcuuccuaacaagu

SEQ ID NO: 738376 - RNA, 19 nt, Human
uucucugugcuagacucug

SEQ ID NO: 738377 - RNA, 22 nt, Human
aagacuguacauuuuccagucu

SEQ ID NO: 738378 - RNA, 22 nt, Human
ggcagcaacucauuauuccugu

SEQ ID NO: 738379 - RNA, 22 nt, Human
ucaggcaccccuugaguagggg

SEQ ID NO: 738380 - RNA, 22 nt, Human
acugaaauauuuagaagugaag

SEQ ID NO: 738381 - RNA, 22 nt, Human
ucuuuguacuuucuggcugucc

SEQ ID NO: 738382 - RNA, 22 nt, Human
cucuggagagguucccauggga

SEQ ID NO: 738383 - RNA, 22 nt, Human
gagccuggagcuggaacgaagc

SEQ ID NO: 738384 - RNA, 22 nt, Human
uccagguaauuuggaugcuagu

SEQ ID NO: 738385 - RNA, 22 nt, Human
cuucuugagcauggguaguacu

SEQ ID NO: 738386 - RNA, 18 nt, Human
guguggcugagaugaggc

SEQ ID NO: 738387 - RNA, 22 nt, Human
uagaaaugugauaauagcuuaa

SEQ ID NO: 738388 - RNA, 22 nt, Human
aaggcagguauugaugccacag

SEQ ID NO: 738389 - RNA, 22 nt, Human
gaggccagaaugagcugaaugc

SEQ ID NO: 738390 - RNA, 22 nt, Human
cccacauuuuugagucuucauc

SEQ ID NO: 738391 - RNA, 22 nt, Human
cuucucccuggcuucugcacac

SEQ ID NO: 738392 - RNA, 22 nt, Human
cacagcauuaacugggacagcu

SEQ ID NO: 738393 - RNA, 22 nt, Human
uuguacuuuggggaaauguuga

SEQ ID NO: 738394 - RNA, 21 nt, Human
ugguggagugugcugagcaug

SEQ ID NO: 738395 - RNA, 22 nt, Human
aaccuaggacuauagauaucau

SEQ ID NO: 738396 - RNA, 22 nt, Human
uuucauuaaagucaaaucuggu

SEQ ID NO: 738397 - RNA, 22 nt, Human
gcagugugcauggcuuuuggcc

SEQ ID NO: 738398 - RNA, 22 nt, Human
caacuauauagaaauugauugu

SEQ ID NO: 738399 - RNA, 22 nt, Human
aagguauuauugucuauguacu

SEQ ID NO: 738400 - RNA, 22 nt, Human
cuggcccucagacucaugggca

SEQ ID NO: 738401 - RNA, 22 nt, Human
aggggcgucuguaggcaguggg

SEQ ID NO: 738402 - RNA, 22 nt, Human
agccacaggccaugagauacca

SEQ ID NO: 738403 - RNA, 22 nt, Human
ugugaaggcagcagcucugucc

SEQ ID NO: 738404 - RNA, 20 nt, Human
cacagcuugccuuuuaugac

SEQ ID NO: 738405 - RNA, 22 nt, Human
gcugaagauaagugaagaggcu

SEQ ID NO: 738406 - RNA, 22 nt, Human
ccugggagagccaucuguggcc

SEQ ID NO: 738407 - RNA, 23 nt, Human
uucuggcuguggguggcgucucu

SEQ ID NO: 738408 - RNA, 22 nt, Human
cuugccugggacugaggcauuu

SEQ ID NO: 738409 - RNA, 22 nt, Human
agcuagggcaaauaugagauac

SEQ ID NO: 738410 - RNA, 22 nt, Human
aggcuccaggcccuucaccagc

SEQ ID NO: 738411 - RNA, 22 nt, Human
aauaacaggguugauuugcaau

SEQ ID NO: 738412 - RNA, 22 nt, Human
ccucucuccaagggaaauccua

SEQ ID NO: 738413 - RNA, 22 nt, Human
aauuucucacucucuugaucac

SEQ ID NO: 738414 - RNA, 22 nt, Human
uuaagacaguguauuuguuuuc

SEQ ID NO: 738415 - RNA, 22 nt, Human
gccagagccuguggauuuaacc

SEQ ID NO: 738416 - RNA, 22 nt, Human
ccagagccggcucccucagcuu

SEQ ID NO: 738417 - RNA, 22 nt, Human
aguacacacaguagaauagagu

SEQ ID NO: 738418 - RNA, 22 nt, Human
accagcucuggacaggcauuuc

SEQ ID NO: 738419 - RNA, 22 nt, Human
uugcuuccuggaugugacuuug

SEQ ID NO: 738420 - RNA, 22 nt, Human
uggccucuccuggcagcaucca

SEQ ID NO: 738421 - RNA, 22 nt, Human
cuagucugugugggaccagggc

SEQ ID NO: 738422 - RNA, 22 nt, Human
aggaaaugcugaugcuccugga

SEQ ID NO: 738423 - RNA, 22 nt, Human
cccagggaagggcuaccugagg

SEQ ID NO: 738424 - RNA, 22 nt, Human
gaucugaagauaugaaauauuu

SEQ ID NO: 738425 - RNA, 22 nt, Human
ugaauagauuuuuaacauauaa

SEQ ID NO: 738426 - RNA, 22 nt, Human
gaagggugugauuugccugaga

SEQ ID NO: 738427 - RNA, 22 nt, Human
uccuuugacuucuugcagucca

SEQ ID NO: 738428 - RNA, 19 nt, Human
uaaggccaaaaguaagugu

SEQ ID NO: 738429 - RNA, 22 nt, Human
ggaaugcucaguucuuggugcu

SEQ ID NO: 738430 - RNA, 22 nt, Human
aagcugccuuccaugugaggaa

SEQ ID NO: 738431 - RNA, 22 nt, Human
cuuuccaggcugaguuugcuug

SEQ ID NO: 738432 - RNA, 22 nt, Human
aaauagauugcugaggcauuac

SEQ ID NO: 738433 - RNA, 22 nt, Human
uggcacuggaaucguagccuug

SEQ ID NO: 738434 - RNA, 22 nt, Human
acuuccugcuaugagcuucugu

SEQ ID NO: 738435 - RNA, 22 nt, Human
ccuuuggcccugagagaugauu

SEQ ID NO: 738436 - RNA, 22 nt, Human
aucaaauuaugugcuacaagaa

SEQ ID NO: 738437 - RNA, 22 nt, Human
aaaaacacugggcugggaguca

SEQ ID NO: 738438 - RNA, 22 nt, Human
uaaaucaguuucucuuauuggu

SEQ ID NO: 738439 - RNA, 22 nt, Human
uuauucuucuucucuugccagg

SEQ ID NO: 738440 - RNA, 22 nt, Human
gaaauagaagcugccaauuucu

SEQ ID NO: 738441 - RNA, 22 nt, Human
agaugucuguaauucuaagcau

SEQ ID NO: 738442 - RNA, 20 nt, Human
ugucaugcauuagaugaaga

SEQ ID NO: 738443 - RNA, 20 nt, Human
cuguacaucaccaaggugac

SEQ ID NO: 738444 - RNA, 22 nt, Human
aaauggcauagaggugaaggua

SEQ ID NO: 738445 - RNA, 22 nt, Human
uggcugagugaacauguccauu

SEQ ID NO: 738446 - RNA, 22 nt, Human
ggaggccuagaaaagugguucu

SEQ ID NO: 738447 - RNA, 23 nt, Human
accaugaugggagugcaaauaag

SEQ ID NO: 738448 - RNA, 19 nt, Human
cccaggcuacauggagagg

SEQ ID NO: 738449 - RNA, 20 nt, Human
ugcugucguguuuucugcuu

SEQ ID NO: 738450 - RNA, 22 nt, Human
uuuguccuauaauccucuuaca

SEQ ID NO: 738451 - RNA, 22 nt, Human
cucggcagguggagguuguagu

SEQ ID NO: 738452 - RNA, 22 nt, Human
caggugaaucacuugaguccag

SEQ ID NO: 738453 - RNA, 22 nt, Human
cuucucagucaccugugagucu

SEQ ID NO: 738454 - RNA, 22 nt, Human
gggaccuggacaugugugugcu

SEQ ID NO: 738455 - RNA, 22 nt, Human
cugucaguucuuccagauagag

SEQ ID NO: 738456 - RNA, 22 nt, Human
agggagaguuugauguuuccuc

SEQ ID NO: 738457 - RNA, 23 nt, Human
ggagagcuccucgugacucacug

SEQ ID NO: 738458 - RNA, 22 nt, Human
agcuuuaucccuugcccaucga

SEQ ID NO: 738459 - RNA, 22 nt, Human
agguggcaugagacuguaccag

SEQ ID NO: 738460 - RNA, 22 nt, Human
augugugcucuugagccuucac

SEQ ID NO: 738461 - RNA, 22 nt, Human
ggccagcucugcacagcagcug

SEQ ID NO: 738462 - RNA, 22 nt, Human
gagugagugcugggcugaggcu

SEQ ID NO: 738463 - RNA, 20 nt, Human
uguggaaaaacagaagcaga

SEQ ID NO: 738464 - RNA, 22 nt, Human
gcccucuggcacagagaugcag

SEQ ID NO: 738465 - RNA, 22 nt, Human
acuaauugagugcaugaucuuu

SEQ ID NO: 738466 - RNA, 22 nt, Human
gcucccaccuccagccugaguu

SEQ ID NO: 738467 - RNA, 22 nt, Human
acugucuuuauuagaaucuuau

SEQ ID NO: 738468 - RNA, 22 nt, Human
cagcaacauauaugaaacugug

SEQ ID NO: 738469 - RNA, 21 nt, Human
ucucuccucaagcucgacccc

SEQ ID NO: 738470 - RNA, 22 nt, Human
aaguaaaacacacaguccaccg

SEQ ID NO: 738471 - RNA, 20 nt, Human
ccaaggacacuggcuccugg

SEQ ID NO: 738472 - RNA, 22 nt, Human
gggcagcugcagggauggugac

SEQ ID NO: 738473 - RNA, 22 nt, Human
uaggggugaggccaggcaucag

SEQ ID NO: 738474 - RNA, 22 nt, Human
cuuucucuucacugucaugauc

SEQ ID NO: 738475 - RNA, 22 nt, Human
ggaaggggagcuggaaagggua

SEQ ID NO: 738476 - RNA, 20 nt, Human
gcagcagacagacaggggac

SEQ ID NO: 738477 - RNA, 22 nt, Human
acacagagcuucucaacuggga

SEQ ID NO: 738478 - RNA, 22 nt, Human
cuaacugucaugcacauguguu

SEQ ID NO: 738479 - RNA, 22 nt, Human
ggccagcuuugagcugcaggaa

SEQ ID NO: 738480 - RNA, 22 nt, Human
uugaagcugccguuuuucucca

SEQ ID NO: 738481 - RNA, 22 nt, Human
uucuguacccaacauuuuuacu

SEQ ID NO: 738482 - RNA, 17 nt, Human
gaauuucuuggucaaaa

SEQ ID NO: 738483 - RNA, 22 nt, Human
ccagcugggauuaagggaaaau

SEQ ID NO: 738484 - RNA, 22 nt, Human
gugccugguauguagguagcgg

SEQ ID NO: 738485 - RNA, 22 nt, Human
ccugagcaucagcgccuccuua

SEQ ID NO: 738486 - RNA, 23 nt, Human
gguuggcuguacccaggcucccu

SEQ ID NO: 738487 - RNA, 22 nt, Human
uagaaucagaagauuugacugu

SEQ ID NO: 738488 - RNA, 22 nt, Human
ugcaauaacccaguaucuguga

SEQ ID NO: 738489 - RNA, 22 nt, Human
uucagggcguuguggcugacug

SEQ ID NO: 738490 - RNA, 22 nt, Human
cuucaaaucccccugaguuuga

SEQ ID NO: 738491 - RNA, 22 nt, Human
auggcuggucucccauggaaaa

SEQ ID NO: 738492 - RNA, 22 nt, Human
cagcccaggccgacaguuccuc

SEQ ID NO: 738493 - RNA, 22 nt, Human
gcugucuucacuuccugguuuc

SEQ ID NO: 738494 - RNA, 22 nt, Human
cugaggagcagcuggcccgcua

SEQ ID NO: 738495 - RNA, 22 nt, Human
ugaaacagaguggauacaguga

SEQ ID NO: 738496 - RNA, 16 nt, Human
uggagcaggcaggaug

SEQ ID NO: 738497 - RNA, 22 nt, Human
ucagcuucccuaucugaccaua

SEQ ID NO: 738498 - RNA, 22 nt, Human
auuugcuucauagaucugugga

SEQ ID NO: 738499 - RNA, 22 nt, Human
ugggcugcacccucagccucug

SEQ ID NO: 738500 - RNA, 22 nt, Human
agucugaagacucaugucugaa

SEQ ID NO: 738501 - RNA, 22 nt, Human
ggcuuugggauucagcaugaga

SEQ ID NO: 738502 - RNA, 22 nt, Human
cagccagcuucagauccaagcc

SEQ ID NO: 738503 - RNA, 22 nt, Human
aauugcauaaaauucaacucug

SEQ ID NO: 738504 - RNA, 22 nt, Human
uugaaggaggcuccuuuuuaaa

SEQ ID NO: 738505 - RNA, 22 nt, Human
aagugaccucaugguuucuccu

SEQ ID NO: 738506 - RNA, 22 nt, Human
gacacagcuugaugagggcuuu

SEQ ID NO: 738507 - RNA, 19 nt, Human
caguuuguccagaggggac

SEQ ID NO: 738508 - RNA, 22 nt, Human
gccuugggcacaggcagggccc

SEQ ID NO: 738509 - RNA, 22 nt, Human
cacucugcagcugaagggcugg

SEQ ID NO: 738510 - RNA, 22 nt, Human
cagcagcaaaucuagaagagga

SEQ ID NO: 738511 - RNA, 22 nt, Human
acaggugaccugcucauaugaa

SEQ ID NO: 738512 - RNA, 22 nt, Human
ccugcacuucucacagcugcug

SEQ ID NO: 738513 - RNA, 22 nt, Human
ucagaaucuaaauaggcuccag

SEQ ID NO: 738514 - RNA, 22 nt, Human
acagaauacuacagacugguua

SEQ ID NO: 738515 - RNA, 22 nt, Human
agauggcugggagcucuguuug

SEQ ID NO: 738516 - RNA, 21 nt, Human
ugaggcucuguugugccugca

SEQ ID NO: 738517 - RNA, 22 nt, Human
ggugugugaggagucacuuagu

SEQ ID NO: 738518 - RNA, 21 nt, Human
gcucaggcucuugacagagca

SEQ ID NO: 738519 - RNA, 22 nt, Human
acccuggcccauugcugugccu

SEQ ID NO: 738520 - RNA, 22 nt, Human
cagcuuuggcccagucgggagg

SEQ ID NO: 738521 - RNA, 22 nt, Human
caggaggugcccucuaguggca

SEQ ID NO: 738522 - RNA, 20 nt, Human
gaaaugugaccucuucugug

SEQ ID NO: 738523 - RNA, 17 nt, Human
ucagcaggggccaagcu

SEQ ID NO: 738524 - RNA, 22 nt, Human
aagaauucacugguagagucaa

SEQ ID NO: 738525 - RNA, 19 nt, Human
aguccaugaauggaggaug

SEQ ID NO: 738526 - RNA, 22 nt, Human
gacauacagcccucucccuggu

SEQ ID NO: 738527 - RNA, 22 nt, Human
cccugagcacaccuggcagaca

SEQ ID NO: 738528 - RNA, 20 nt, Human
ggggcccaagcccucuugcc

SEQ ID NO: 738529 - RNA, 22 nt, Human
cuucaagauauuucuagaauca

SEQ ID NO: 738530 - RNA, 21 nt, Human
ggacagaggagaaggcacccu

SEQ ID NO: 738531 - RNA, 22 nt, Human
gccugcuuccuuuucauagaug

SEQ ID NO: 738532 - RNA, 22 nt, Human
aggcuucuugggcuucauucug

SEQ ID NO: 738533 - RNA, 22 nt, Human
cccuggaguccggagcucaccu

SEQ ID NO: 738534 - RNA, 22 nt, Human
agugucugcgggcagaggagcg

SEQ ID NO: 738535 - RNA, 22 nt, Human
aaggaccuauauugucagagga

SEQ ID NO: 738536 - RNA, 22 nt, Human
aacaggagaguaaauauaugau

SEQ ID NO: 738537 - RNA, 21 nt, Human
ggaggaaaaaggaaugacuug

SEQ ID NO: 738538 - RNA, 22 nt, Human
agcaggcuuuccacagaaggag

SEQ ID NO: 738539 - RNA, 22 nt, Human
caaugucugggagaccugugau

SEQ ID NO: 738540 - RNA, 22 nt, Human
agggaugauggaaagaagcagg

SEQ ID NO: 738541 - RNA, 22 nt, Human
gguggccucagcaaggcuggca

SEQ ID NO: 738542 - RNA, 22 nt, Human
uuccuucuccagaacuucuagg

SEQ ID NO: 738543 - RNA, 22 nt, Human
gaaggcuggaaggcaaguagga

SEQ ID NO: 738544 - RNA, 22 nt, Human
cucccagguuacaucugagccu

SEQ ID NO: 738545 - RNA, 22 nt, Human
uuguauuucuccacuuucuguu

SEQ ID NO: 738546 - RNA, 22 nt, Human
gcuuuuggaccucugauguuuc

SEQ ID NO: 738547 - RNA, 22 nt, Human
accagguaauguaaagcagggu

SEQ ID NO: 738548 - RNA, 22 nt, Human
cuuaaucucaccugcaaagucc

SEQ ID NO: 738549 - RNA, 22 nt, Human
ugaggcagugauguuuaagcac

SEQ ID NO: 738550 - RNA, 22 nt, Human
gcagugggaagguuggcacaug

SEQ ID NO: 738551 - RNA, 22 nt, Human
uccacgcugugugaccuugggc

SEQ ID NO: 738552 - RNA, 22 nt, Human
cccuucaagcucucuggguuuu

SEQ ID NO: 738553 - RNA, 22 nt, Human
aguggcucuugggucacugggc

SEQ ID NO: 738554 - RNA, 22 nt, Human
ucaggaagaaagaagggagugu

SEQ ID NO: 738555 - RNA, 22 nt, Human
ucagggcaaagggcagaguuug

SEQ ID NO: 738556 - RNA, 22 nt, Human
gcagccauugagcgaaaaaauc

SEQ ID NO: 738557 - RNA, 22 nt, Human
accuggacuugaauccugacuu

SEQ ID NO: 738558 - RNA, 23 nt, Human
aacugcaagguugcugggaagua

SEQ ID NO: 738559 - RNA, 17 nt, Human
cucugcagugcauggcu

SEQ ID NO: 738560 - RNA, 22 nt, Human
aaaguuguucaguaagaaacuc

SEQ ID NO: 738561 - RNA, 20 nt, Human
cagggcacacugcagccucg

SEQ ID NO: 738562 - RNA, 22 nt, Human
ccuguucacccuccaugcacag

SEQ ID NO: 738563 - RNA, 22 nt, Human
ugcauauuauguguaucugucu

SEQ ID NO: 738564 - RNA, 22 nt, Human
aacugcucauuugagaguaugc

SEQ ID NO: 738565 - RNA, 22 nt, Human
caccagcuaauuaaaacagcag

SEQ ID NO: 738566 - RNA, 22 nt, Human
uuaaagcaucacacuauuaauu

SEQ ID NO: 738567 - RNA, 22 nt, Human
aucauguuggcucugacaaaaa

SEQ ID NO: 738568 - RNA, 22 nt, Human
uuguaaauaguaguaagaugcc

SEQ ID NO: 738569 - RNA, 22 nt, Human
gagaacaggcucuggagucaga

SEQ ID NO: 738570 - RNA, 22 nt, Human
ugcuucugaaguggaugggugc

SEQ ID NO: 738571 - RNA, 22 nt, Human
ugcuuuauucgacaucugguag

SEQ ID NO: 738572 - RNA, 22 nt, Human
ccucugggcugccugcacgggu

SEQ ID NO: 738573 - RNA, 22 nt, Human
gcucagagaaucagcagacacc

SEQ ID NO: 738574 - RNA, 22 nt, Human
cugggacuggaccucugccugg

SEQ ID NO: 738575 - RNA, 22 nt, Human
uccaggagugugugcuaauggg

SEQ ID NO: 738576 - RNA, 22 nt, Human
uguauuuaguccagucucucau

SEQ ID NO: 738577 - RNA, 22 nt, Human
ucuguucauaguaguguauaug

SEQ ID NO: 738578 - RNA, 22 nt, Human
uucugaggcauagaggaugaga

SEQ ID NO: 738579 - RNA, 22 nt, Human
ucugggcugucuacagguuggc

SEQ ID NO: 738580 - RNA, 22 nt, Human
agcuccagagucugaacuauuc

SEQ ID NO: 738581 - RNA, 22 nt, Human
gagcaacaguggcagugguggg

SEQ ID NO: 738582 - RNA, 22 nt, Human
agguaggcccugagugcuguug

SEQ ID NO: 738583 - RNA, 22 nt, Human
uguaagauaugaguacauguaa

SEQ ID NO: 738584 - RNA, 22 nt, Human
cacagaaucauauugucaguuu

SEQ ID NO: 738585 - RNA, 19 nt, Human
gcugggugaggucguugga

SEQ ID NO: 738586 - RNA, 22 nt, Human
gugacauuuuuacugaugagag

SEQ ID NO: 738587 - RNA, 22 nt, Human
ugcauuaaaaugugccucucuu

SEQ ID NO: 738588 - RNA, 22 nt, Human
ucacaggagggagagacaccca

SEQ ID NO: 738589 - RNA, 22 nt, Human
ugugguggggucugguauucca

SEQ ID NO: 738590 - RNA, 22 nt, Human
aauuaugauuggucuaaaccag

SEQ ID NO: 738591 - RNA, 22 nt, Human
gagguccucucggaaccccuuu

SEQ ID NO: 738592 - RNA, 22 nt, Human
aucaggaugcugucaguuacca

SEQ ID NO: 738593 - RNA, 22 nt, Human
aagucugacuagaaucucuccc

SEQ ID NO: 738594 - RNA, 22 nt, Human
uguuggcagauugucuaggguu

SEQ ID NO: 738595 - RNA, 22 nt, Human
gcuucauagcauucauugccug

SEQ ID NO: 738596 - RNA, 22 nt, Human
guuccuaaccagcagagaaaca

SEQ ID NO: 738597 - RNA, 22 nt, Human
ugcuuaaacauacuauuuauau

SEQ ID NO: 738598 - RNA, 22 nt, Human
aggaaguuaguaaauuaugugc

SEQ ID NO: 738599 - RNA, 22 nt, Human
augguggauuugugauucagcu

SEQ ID NO: 738600 - RNA, 22 nt, Human
aggacugggugcagagggcauc

SEQ ID NO: 738601 - RNA, 20 nt, Human
cugggucacuuggcugcucu

SEQ ID NO: 738602 - RNA, 22 nt, Human
ugagcaauaugugaauuuucuu

SEQ ID NO: 738603 - RNA, 22 nt, Human
cugugcccaggcuggagugcag

SEQ ID NO: 738604 - RNA, 22 nt, Human
acacauaugguugguaggaguu

SEQ ID NO: 738605 - RNA, 22 nt, Human
aagagcaaguggguagugaagc

SEQ ID NO: 738606 - RNA, 22 nt, Human
uauuguauuaaggauucaagua

SEQ ID NO: 738607 - RNA, 22 nt, Human
uggcuggcugucaguaggcugu

SEQ ID NO: 738608 - RNA, 22 nt, Human
uagcagcaggggaaacagcugu

SEQ ID NO: 738609 - RNA, 22 nt, Human
aagucagaccuuguugauagcu

SEQ ID NO: 738610 - RNA, 22 nt, Human
uccuucagucuucugagccaua

SEQ ID NO: 738611 - RNA, 22 nt, Human
agugaauucuccacccaguagg

SEQ ID NO: 738612 - RNA, 22 nt, Human
aggcccaguagugcugccuuua

SEQ ID NO: 738613 - RNA, 22 nt, Human
acacaguucuuucacuguuggu

SEQ ID NO: 738614 - RNA, 23 nt, Human
accuagaaauacguuuuacaugg

SEQ ID NO: 738615 - RNA, 22 nt, Human
agugucugcucagacagcuaca

SEQ ID NO: 738616 - RNA, 20 nt, Human
augugaaguaggaagggugu

SEQ ID NO: 738617 - RNA, 22 nt, Human
auacauuccuacugacuagcua

SEQ ID NO: 738618 - RNA, 22 nt, Human
ccagaagucaaugcagauguga

SEQ ID NO: 738619 - RNA, 22 nt, Human
agucaaagaugaccgaguuccu

SEQ ID NO: 738620 - RNA, 22 nt, Human
guggucuggggucaggccugag

SEQ ID NO: 738621 - RNA, 22 nt, Human
aaggaagggaaauagugauguc

SEQ ID NO: 738622 - RNA, 22 nt, Human
gcuucuuuggcaacccugacau

SEQ ID NO: 738623 - RNA, 22 nt, Human
ccacagauuauuucuaaacagg

SEQ ID NO: 738624 - RNA, 23 nt, Human
gggagccauggguggucauggag

SEQ ID NO: 738625 - RNA, 17 nt, Human
uuucaucugggaccacc

SEQ ID NO: 738626 - RNA, 22 nt, Human
gaagagcuaaaggcacaggcuu

SEQ ID NO: 738627 - RNA, 19 nt, Human
cuggaccuggaggcccgga

SEQ ID NO: 738628 - RNA, 22 nt, Human
aaaugcacucugcuucugugac

SEQ ID NO: 738629 - RNA, 22 nt, Human
uggcauguauacuugaguagga

SEQ ID NO: 738630 - RNA, 22 nt, Human
gugcugcucaagggacaggaca

SEQ ID NO: 738631 - RNA, 22 nt, Human
cuaaauuaucaugagaauuaug

SEQ ID NO: 738632 - RNA, 22 nt, Human
agugugagccuacaggccaaag

SEQ ID NO: 738633 - RNA, 22 nt, Human
auacacacgugcacgugggaaa

SEQ ID NO: 738634 - RNA, 20 nt, Human
uugcuuuaucagacaugaua

SEQ ID NO: 738635 - RNA, 22 nt, Human
ucucuucacauuccuggcaaac

SEQ ID NO: 738636 - RNA, 22 nt, Human
uccuagaauaaguaacaggaca

SEQ ID NO: 738637 - RNA, 22 nt, Human
agaaggcagaugggacggagca

SEQ ID NO: 738638 - RNA, 20 nt, Human
accucccucuguggguggga

SEQ ID NO: 738639 - RNA, 22 nt, Human
gagaggcaggcgcugcaauggu

SEQ ID NO: 738640 - RNA, 22 nt, Human
aggcaguggaugucaggaaugg

SEQ ID NO: 738641 - RNA, 22 nt, Human
cauucauuugcccaguaaguca

SEQ ID NO: 738642 - RNA, 22 nt, Human
ccauuaaaauugugacauagga

SEQ ID NO: 738643 - RNA, 21 nt, Human
ugggccugauucccaggguca

SEQ ID NO: 738644 - RNA, 22 nt, Human
uugggaaagaaugagaagguga

SEQ ID NO: 738645 - RNA, 22 nt, Human
aucacaaaggcugcuucaugau

SEQ ID NO: 738646 - RNA, 22 nt, Human
ccugaagcaaggguaggcaggu

SEQ ID NO: 738647 - RNA, 23 nt, Human
ugggagcucaagggaggcugccc

SEQ ID NO: 738648 - RNA, 22 nt, Human
uucagaaaaaacuucaauaagu

SEQ ID NO: 738649 - RNA, 21 nt, Human
uuacaaagcaagugcuguguc

SEQ ID NO: 738650 - RNA, 22 nt, Human
agcagcugaucaaagcacuuau

SEQ ID NO: 738651 - RNA, 22 nt, Human
ucaaaggcaccaaggucacugc

SEQ ID NO: 738652 - RNA, 19 nt, Human
augcacacauugaagagga

SEQ ID NO: 738653 - RNA, 22 nt, Human
cagaagcagaacacuagauuua

SEQ ID NO: 738654 - RNA, 22 nt, Human
ugggaccugcucuuggaaugag

SEQ ID NO: 738655 - RNA, 22 nt, Human
gaggaggggcacuugucuccua

SEQ ID NO: 738656 - RNA, 22 nt, Human
ggacccugggcuugcuccuggg

SEQ ID NO: 738657 - RNA, 22 nt, Human
gagccaggguuugaaacuagac

SEQ ID NO: 738658 - RNA, 22 nt, Human
ccuggcuuccauauggcacaua

SEQ ID NO: 738659 - RNA, 22 nt, Human
cugauuccugauucaugcucuu

SEQ ID NO: 738660 - RNA, 22 nt, Human
agguggcugaagagugggugag

SEQ ID NO: 738661 - RNA, 22 nt, Human
uggcaguggcucagagugcaga

SEQ ID NO: 738662 - RNA, 16 nt, Human
cuuuuucuccccucuu

SEQ ID NO: 738663 - RNA, 22 nt, Human
uagaaaugauugagcuguaaua

SEQ ID NO: 738664 - RNA, 19 nt, Human
cucugcuugguccauaugc

SEQ ID NO: 738665 - RNA, 22 nt, Human
ucccaagugucuuggaccaggg

SEQ ID NO: 738666 - RNA, 22 nt, Human
ggcaguggaggacccugugucu

SEQ ID NO: 738667 - RNA, 22 nt, Human
cuggcuggucaugucaugagcc

SEQ ID NO: 738668 - RNA, 22 nt, Human
cucuucuugucucugguuagaa

SEQ ID NO: 738669 - RNA, 22 nt, Human
gaacauucuuggaggaaauaac

SEQ ID NO: 738670 - RNA, 22 nt, Human
acuguuauguuauuacccaugu

SEQ ID NO: 738671 - RNA, 22 nt, Human
agcagccuugugacuccggggu

SEQ ID NO: 738672 - RNA, 22 nt, Human
cauuguaagcuguugaauccuc

SEQ ID NO: 738673 - RNA, 22 nt, Human
ugacacagggaaagcggaucca

SEQ ID NO: 738674 - RNA, 22 nt, Human
uuugcauuauauuuauagaaga

SEQ ID NO: 738675 - RNA, 22 nt, Human
gaagauaauuccuacuuauaac

SEQ ID NO: 738676 - RNA, 22 nt, Human
uaugcauauauuuucccaucuu

SEQ ID NO: 738677 - RNA, 22 nt, Human
uuuagacagcggcucugaacca

SEQ ID NO: 738678 - RNA, 20 nt, Human
cagcaacuuuggacugaguu

SEQ ID NO: 738679 - RNA, 22 nt, Human
ucucuccucuagucaggguggu

SEQ ID NO: 738680 - RNA, 22 nt, Human
agcuguguggugucugacagcu

SEQ ID NO: 738681 - RNA, 22 nt, Human
cugcugucgccgagcugcaugc

SEQ ID NO: 738682 - RNA, 22 nt, Human
gccugagcaggcguggaccaug

SEQ ID NO: 738683 - RNA, 22 nt, Human
caauguuucuuguaaccaguga

SEQ ID NO: 738684 - RNA, 22 nt, Human
caggcagauauguucgcuuuaa

SEQ ID NO: 738685 - RNA, 22 nt, Human
agaggaggcuggguccagauaa

SEQ ID NO: 738686 - RNA, 22 nt, Human
cuggcuuucugcaaaucuccau

SEQ ID NO: 738687 - RNA, 22 nt, Human
auucccagguaaaaguagagcu

SEQ ID NO: 738688 - RNA, 22 nt, Human
gagaggcuccaugaccccggca

SEQ ID NO: 738689 - RNA, 23 nt, Human
ugccuccaccgagggccaggcau

SEQ ID NO: 738690 - RNA, 22 nt, Human
gacaucauggagaggauaaaua

SEQ ID NO: 738691 - RNA, 22 nt, Human
gucucuaucauagcugaacccu

SEQ ID NO: 738692 - RNA, 22 nt, Human
aguuaacuaaacugugaguaaa

SEQ ID NO: 738693 - RNA, 22 nt, Human
gcuuuccuggcccugucccugc

SEQ ID NO: 738694 - RNA, 22 nt, Human
cacugcccaccaaguggcuggu

SEQ ID NO: 738695 - RNA, 22 nt, Human
aucaggaaagaguggaacucug

SEQ ID NO: 738696 - RNA, 22 nt, Human
acagggccucagcugauucugg

SEQ ID NO: 738697 - RNA, 22 nt, Human
uccagucauuuccauuguuccc

SEQ ID NO: 738698 - RNA, 19 nt, Human
aggagaagacucucucccc

SEQ ID NO: 738699 - RNA, 22 nt, Human
acagaauucuaguauguggcuu

SEQ ID NO: 738700 - RNA, 22 nt, Human
gcuuuuuugcuauugaaguggu

SEQ ID NO: 738701 - RNA, 22 nt, Human
gaggaggcuuccgggaggcacg

SEQ ID NO: 738702 - RNA, 22 nt, Human
ucucaggcuaguaaaagauggg

SEQ ID NO: 738703 - RNA, 22 nt, Human
ugagccaggcccagugggguca

SEQ ID NO: 738704 - RNA, 22 nt, Human
ccuggcagcuccguggccuucc

SEQ ID NO: 738705 - RNA, 22 nt, Human
ugcauuggaaaacuauggcuca

SEQ ID NO: 738706 - RNA, 22 nt, Human
cugggagcuggaaugggagaag

SEQ ID NO: 738707 - RNA, 22 nt, Human
cggucugagagcaggagaaggg

SEQ ID NO: 738708 - RNA, 22 nt, Human
acaacuuuucuaucauguggaa

SEQ ID NO: 738709 - RNA, 22 nt, Human
auggcuguugugaggaucaaau

SEQ ID NO: 738710 - RNA, 22 nt, Human
gcacagugcaccacuuugaaaa

SEQ ID NO: 738711 - RNA, 22 nt, Human
cagggaguguacaccaugugua

SEQ ID NO: 738712 - RNA, 22 nt, Human
ugacaucuuugaucucauuuag

SEQ ID NO: 738713 - RNA, 22 nt, Human
ugaaaauucaucucauagcaga

SEQ ID NO: 738714 - RNA, 22 nt, Human
cauggcuggcacacagcaacca

SEQ ID NO: 738715 - RNA, 22 nt, Human
uggagaaagcugcauauggaaa

SEQ ID NO: 738716 - RNA, 22 nt, Human
acaguccuguacaggccauauc

SEQ ID NO: 738717 - RNA, 22 nt, Human
uggcagguagaguucugagaug

SEQ ID NO: 738718 - RNA, 22 nt, Human
agcugaggcauggacaggcugc

SEQ ID NO: 738719 - RNA, 22 nt, Human
uuccaggcugaugggccacagg

SEQ ID NO: 738720 - RNA, 22 nt, Human
acaccagggccuagccagggcg

SEQ ID NO: 738721 - RNA, 22 nt, Human
gaagcaauuuagaaucagaagc

SEQ ID NO: 738722 - RNA, 22 nt, Human
agcacaggaacauggagauggg

SEQ ID NO: 738723 - RNA, 22 nt, Human
aaauaugagggugaugcccaga

SEQ ID NO: 738724 - RNA, 22 nt, Human
gcucucugccuuucucaaugac

SEQ ID NO: 738725 - RNA, 22 nt, Human
ugccucaggcaccuggcagguu

SEQ ID NO: 738726 - RNA, 20 nt, Human
ucucaggccccaguuuucuu

SEQ ID NO: 738727 - RNA, 22 nt, Human
ucacagcaggguaacaggaaga

SEQ ID NO: 738728 - RNA, 22 nt, Human
ccaggcaauucugaaagcauuu

SEQ ID NO: 738729 - RNA, 22 nt, Human
acaacaguaggaaaacaugucu

SEQ ID NO: 738730 - RNA, 22 nt, Human
ucaaggcuaaacuuucagagua

SEQ ID NO: 738731 - RNA, 22 nt, Human
ugugccuggaucucugugacaa

SEQ ID NO: 738732 - RNA, 22 nt, Human
cucugagaagccuugaugggga

SEQ ID NO: 738733 - RNA, 22 nt, Human
acuguaauaugguucuuuugau

SEQ ID NO: 738734 - RNA, 22 nt, Human
ucuaaccuuugaaacugcuuuc

SEQ ID NO: 738735 - RNA, 22 nt, Human
gucccuuggcucacaaacagcu

SEQ ID NO: 738736 - RNA, 22 nt, Human
uuauguuuuaaguguguaucuu

SEQ ID NO: 738737 - RNA, 22 nt, Human
gccaggcauuuauugauugaau

SEQ ID NO: 738738 - RNA, 22 nt, Human
ucuguuuucauuugucuugaga

SEQ ID NO: 738739 - RNA, 22 nt, Human
ucugcugcagggaaagacuuuc

SEQ ID NO: 738740 - RNA, 22 nt, Human
gggagcuggagcuggaagacuc

SEQ ID NO: 738741 - RNA, 22 nt, Human
uuucauaaccucaagcuacagu

SEQ ID NO: 738742 - RNA, 22 nt, Human
cuuaaggaaaagucucuuuuaa

SEQ ID NO: 738743 - RNA, 20 nt, Human
ugcagcagaagcccaugcuc

SEQ ID NO: 738744 - RNA, 22 nt, Human
acagagcugggaucugaaccca

SEQ ID NO: 738745 - RNA, 22 nt, Human
uucuuggagauaaauucuuaca

SEQ ID NO: 738746 - RNA, 22 nt, Human
uuauugccauccuggaaccuag

SEQ ID NO: 738747 - RNA, 22 nt, Human
gugccuccaucagugccuccaa

SEQ ID NO: 738748 - RNA, 22 nt, Human
ucugccuuucccaggcuacugu

SEQ ID NO: 738749 - RNA, 22 nt, Human
uuaggaauuuaucacagacugg

SEQ ID NO: 738750 - RNA, 22 nt, Human
ggagcugugcugggugaucagg

SEQ ID NO: 738751 - RNA, 22 nt, Human
ucucuagagcaugugcugggca

SEQ ID NO: 738752 - RNA, 22 nt, Human
uuuuaauuuuagcccuucuggu

SEQ ID NO: 738753 - RNA, 20 nt, Human
ggggggcuucagggccugug

SEQ ID NO: 738754 - RNA, 22 nt, Human
gcaaaaaccacaauuacuuuug

SEQ ID NO: 738755 - RNA, 20 nt, Human
gcaugaggaaucauugcagc

SEQ ID NO: 738756 - RNA, 22 nt, Human
aucugccaaugccaugagaaga

SEQ ID NO: 738757 - RNA, 22 nt, Human
uaugcaaacaguucaggugaca

SEQ ID NO: 738758 - RNA, 22 nt, Human
ucauuuauagaagugggcagua

SEQ ID NO: 738759 - RNA, 22 nt, Human
gaaaucauuagcaaagauaugu

SEQ ID NO: 738760 - RNA, 17 nt, Human
ggcagagcugacagggc

SEQ ID NO: 738761 - RNA, 18 nt, Human
uuuguuggguugccuuua

SEQ ID NO: 738762 - RNA, 22 nt, Human
gcucuaaagaacccagaggagu

SEQ ID NO: 738763 - RNA, 22 nt, Human
cagaguguaucuguguaagcau

SEQ ID NO: 738764 - RNA, 22 nt, Human
gaaagguuguaacaagacucuu

SEQ ID NO: 738765 - RNA, 22 nt, Human
acaggcagagucagguuggguu

SEQ ID NO: 738766 - RNA, 22 nt, Human
cuucacaucucccuaaaacagc

SEQ ID NO: 738767 - RNA, 22 nt, Human
aggcagguuucccggcugucaa

SEQ ID NO: 738768 - RNA, 22 nt, Human
uuuucucccgcuggcugcucuu

SEQ ID NO: 738769 - RNA, 22 nt, Human
cuccaaggcucuggugcugagg

SEQ ID NO: 738770 - RNA, 22 nt, Human
guucugcuguaauaucucugcu

SEQ ID NO: 738771 - RNA, 22 nt, Human
gccugcuuuaagucuguugccu

SEQ ID NO: 738772 - RNA, 22 nt, Human
cauaugaagaugucuuuuugua

SEQ ID NO: 738773 - RNA, 22 nt, Human
uccagcuguuccaucagcucuu

SEQ ID NO: 738774 - RNA, 22 nt, Human
agcugauacauuucuuguagcc

SEQ ID NO: 738775 - RNA, 22 nt, Human
ucucuggggguagaacucaggc

SEQ ID NO: 738776 - RNA, 22 nt, Human
ccugggucuccuccugcuggcu

SEQ ID NO: 738777 - RNA, 22 nt, Human
ucucugggugauggcagggcac

SEQ ID NO: 738778 - RNA, 20 nt, Human
agguuccagccacaaccagc

SEQ ID NO: 738779 - RNA, 20 nt, Human
uccagcccagguccugccug

SEQ ID NO: 738780 - RNA, 22 nt, Human
ccccuucucugcaagccugcuc

SEQ ID NO: 738781 - RNA, 22 nt, Human
cugggguggaggagcuccccug

SEQ ID NO: 738782 - RNA, 22 nt, Human
gaaaaggauugguaaaauaucu

SEQ ID NO: 738783 - RNA, 22 nt, Human
ugugcagggaagggcaugcuau

SEQ ID NO: 738784 - RNA, 22 nt, Human
cauugcuuugugcauauuuaaa

SEQ ID NO: 738785 - RNA, 22 nt, Human
cuguggcuuucucugccuccuu

SEQ ID NO: 738786 - RNA, 22 nt, Human
gggcugcaucagcaggacccgg

SEQ ID NO: 738787 - RNA, 22 nt, Human
cugugacuggaaucuggcucuu

SEQ ID NO: 738788 - RNA, 22 nt, Human
guuucccauaucuagggagagg

SEQ ID NO: 738789 - RNA, 22 nt, Human
auaggcaaauuaauaagucaua

SEQ ID NO: 738790 - RNA, 21 nt, Human
cagcuuugucugucuucgggg

SEQ ID NO: 738791 - RNA, 22 nt, Human
uaccacugcucccugccuguga

SEQ ID NO: 738792 - RNA, 22 nt, Human
cuuacaaaggagaggagauagg

SEQ ID NO: 738793 - RNA, 22 nt, Human
uccugagggacugguuccucgc

SEQ ID NO: 738794 - RNA, 22 nt, Human
acaggaggagcagcugugugcc

SEQ ID NO: 738795 - RNA, 22 nt, Human
aaggcaguacuuuauguccaua

SEQ ID NO: 738796 - RNA, 19 nt, Human
agucuuguauuuuucaagc

SEQ ID NO: 738797 - RNA, 22 nt, Human
acacagggcugcgccugacccc

SEQ ID NO: 738798 - RNA, 19 nt, Human
uguugccagguaucauguu

SEQ ID NO: 738799 - RNA, 22 nt, Human
ugagagcuguccaccuguggga

SEQ ID NO: 738800 - RNA, 22 nt, Human
ucccuguacacuaacuugagac

SEQ ID NO: 738801 - RNA, 21 nt, Human
uccagcucucauaguguucca

SEQ ID NO: 738802 - RNA, 22 nt, Human
ucauuucuccuaagugaaauau

SEQ ID NO: 738803 - RNA, 22 nt, Human
ggcgccccauauaguucuuaau

SEQ ID NO: 738804 - RNA, 23 nt, Human
gcucagccucagcaggcccagga

SEQ ID NO: 738805 - RNA, 22 nt, Human
acauuaagaaacgagagagcaa

SEQ ID NO: 738806 - RNA, 20 nt, Human
aaaggcacagcaacagagcu

SEQ ID NO: 738807 - RNA, 22 nt, Human
aaaugaacucuuccugcauccc

SEQ ID NO: 738808 - RNA, 18 nt, Human
auaugcuugagcuaagga

SEQ ID NO: 738809 - RNA, 22 nt, Human
cagcaugaugagugcaguuugg

SEQ ID NO: 738810 - RNA, 22 nt, Human
acaauuccacauggcaugcagg

SEQ ID NO: 738811 - RNA, 19 nt, Human
aagcaucuuugaaacuggg

SEQ ID NO: 738812 - RNA, 22 nt, Human
uucuuguuuauuaagauauaaa

SEQ ID NO: 738813 - RNA, 22 nt, Human
uucauucaucucuaaaaugccu

SEQ ID NO: 738814 - RNA, 22 nt, Human
acuuucuguuagaugaauggau

SEQ ID NO: 738815 - RNA, 22 nt, Human
aggggucuuuaggaacgucggg

SEQ ID NO: 738816 - RNA, 22 nt, Human
acauccauuuuguucaaaagca

SEQ ID NO: 738817 - RNA, 22 nt, Human
accaguggaugaaugcuggacc

SEQ ID NO: 738818 - RNA, 22 nt, Human
ggagacaauggaggccaaaaga

SEQ ID NO: 738819 - RNA, 22 nt, Human
ugacaacauugaguuaugugca

SEQ ID NO: 738820 - RNA, 22 nt, Human
aggaugagccgcgcaagcugac

SEQ ID NO: 738821 - RNA, 23 nt, Human
gcuaggugcuuccacacgugcug

SEQ ID NO: 738822 - RNA, 22 nt, Human
guucaagguuuuacagagugua

SEQ ID NO: 738823 - RNA, 21 nt, Human
uugagggguauugcuuuucuc

SEQ ID NO: 738824 - RNA, 22 nt, Human
guaagagcacugucuccugcug

SEQ ID NO: 738825 - RNA, 22 nt, Human
acgugugugacauugggaacgu

SEQ ID NO: 738826 - RNA, 22 nt, Human
agggcugacaguggcguggcgu

SEQ ID NO: 738827 - RNA, 22 nt, Human
accuuuggagcaugcauuuucu

SEQ ID NO: 738828 - RNA, 22 nt, Human
aucagacucagaaaugacgugg

SEQ ID NO: 738829 - RNA, 22 nt, Human
ccaggcuucccugagaggcugc

SEQ ID NO: 738830 - RNA, 22 nt, Human
ggaagcacugaggcagagaggg

SEQ ID NO: 738831 - RNA, 22 nt, Human
gacuucuucaugucuuuuccac

SEQ ID NO: 738832 - RNA, 22 nt, Human
aacaugcaaugucugaaaaucc

SEQ ID NO: 738833 - RNA, 22 nt, Human
agggagcuguggucagcucagu

SEQ ID NO: 738834 - RNA, 22 nt, Human
cugggacaguucagguagggca

SEQ ID NO: 738835 - RNA, 22 nt, Human
uuccuggucugugccauucaga

SEQ ID NO: 738836 - RNA, 22 nt, Human
uaacacaugaaagcaccuucuu

SEQ ID NO: 738837 - RNA, 18 nt, Human
cugccauguccuacuguc

SEQ ID NO: 738838 - RNA, 22 nt, Human
aagugaauggggcagacuucag

SEQ ID NO: 738839 - RNA, 22 nt, Human
aauacaaucaaauucacuagca

SEQ ID NO: 738840 - RNA, 22 nt, Human
aggaggguugaggaggauacuu

SEQ ID NO: 738841 - RNA, 22 nt, Human
uuugugaucuccucccucuaga

SEQ ID NO: 738842 - RNA, 22 nt, Human
augcaguauaaaucauuucugg

SEQ ID NO: 738843 - RNA, 22 nt, Human
uguauuuuuagaccuuuagacc

SEQ ID NO: 738844 - RNA, 22 nt, Human
acagggccaggugagaggugcu

SEQ ID NO: 738845 - RNA, 22 nt, Human
auuguacuuuuauuacauguag

SEQ ID NO: 738846 - RNA, 20 nt, Human
agcauucuacuagacuuuuc

SEQ ID NO: 738847 - RNA, 22 nt, Human
gagcacagauccuggagccaca

SEQ ID NO: 738848 - RNA, 22 nt, Human
agacauuuuagacauaaaagau

SEQ ID NO: 738849 - RNA, 22 nt, Human
uucagaaaugucagccaucaga

SEQ ID NO: 738850 - RNA, 22 nt, Human
uuccuccagccuggagcacuuc

SEQ ID NO: 738851 - RNA, 22 nt, Human
uguuucaugaagucuggauauc

SEQ ID NO: 738852 - RNA, 19 nt, Human
cccaggagucuggcugguu

SEQ ID NO: 738853 - RNA, 22 nt, Human
ucucagcaacgauccggaguaa

SEQ ID NO: 738854 - RNA, 22 nt, Human
gcuggccacacugcugauggag

SEQ ID NO: 738855 - RNA, 22 nt, Human
auggccagcccuucccgcagcu

SEQ ID NO: 738856 - RNA, 22 nt, Human
gaguggagaucgugccacugca

SEQ ID NO: 738857 - RNA, 22 nt, Human
uuagaacacugagaaagugaug

SEQ ID NO: 738858 - RNA, 22 nt, Human
gccagcaaagcaaguugucagc

SEQ ID NO: 738859 - RNA, 22 nt, Human
uaggcuccugaguccacagcac

SEQ ID NO: 738860 - RNA, 22 nt, Human
gaggugauuuucaaaagaacuu

SEQ ID NO: 738861 - RNA, 22 nt, Human
ggaaggagggcggcaaugauga

SEQ ID NO: 738862 - RNA, 22 nt, Human
cuucauuucaggcugaagaaua

SEQ ID NO: 738863 - RNA, 22 nt, Human
gucuuuauuugagauugucauu

SEQ ID NO: 738864 - RNA, 22 nt, Human
aauguacaaaccuucuuuguag

SEQ ID NO: 738865 - RNA, 22 nt, Human
aggcuucaguauucaccgcaug

SEQ ID NO: 738866 - RNA, 22 nt, Human
acugcuuuuagaaaucuauaga

SEQ ID NO: 738867 - RNA, 22 nt, Human
cuguuguaaagcuauucauuug

SEQ ID NO: 738868 - RNA, 22 nt, Human
gaaugaaucuguaagugacaag

SEQ ID NO: 738869 - RNA, 22 nt, Human
guuucacagggccauggaggaa

SEQ ID NO: 738870 - RNA, 22 nt, Human
uauuagcaguuguaugugucug

SEQ ID NO: 738871 - RNA, 22 nt, Human
ucacagggauggaauagaaaua

SEQ ID NO: 738872 - RNA, 22 nt, Human
guucucucagcgauagugaugg

SEQ ID NO: 738873 - RNA, 22 nt, Human
uagaaucauaccucuaggaaca

SEQ ID NO: 738874 - RNA, 22 nt, Human
aaggaaagcugugguucugaga

SEQ ID NO: 738875 - RNA, 18 nt, Human
ggcugccuguuccugaag

SEQ ID NO: 738876 - RNA, 23 nt, Human
aguuuuucugcaugguucuguau

SEQ ID NO: 738877 - RNA, 22 nt, Human
auucaagguuuauucaguuuag

SEQ ID NO: 738878 - RNA, 22 nt, Human
ggugcugagugagcuagaggcu

SEQ ID NO: 738879 - RNA, 22 nt, Human
ucaggcugugucuuuaaacaau

SEQ ID NO: 738880 - RNA, 22 nt, Human
agacaaggcccccuugggcucu

SEQ ID NO: 738881 - RNA, 22 nt, Human
aaauauguauggaguucaugaa

SEQ ID NO: 738882 - RNA, 19 nt, Human
agugugaguaauuggaguu

SEQ ID NO: 738883 - RNA, 22 nt, Human
uauagcaucuaggaugauugca

SEQ ID NO: 738884 - RNA, 22 nt, Human
ccuccacucuggccucucaggu

SEQ ID NO: 738885 - RNA, 22 nt, Human
uucucaaagugugcucccugga

SEQ ID NO: 738886 - RNA, 22 nt, Human
uaggccaacguggaagggucca

SEQ ID NO: 738887 - RNA, 22 nt, Human
uucucuaagaguuauaugaauu

SEQ ID NO: 738888 - RNA, 22 nt, Human
cguguaugauaaauguuaauaa

SEQ ID NO: 738889 - RNA, 22 nt, Human
cacugcccuuacaugcccugca

SEQ ID NO: 738890 - RNA, 20 nt, Human
auuccauaguuggcacuuuu

SEQ ID NO: 738891 - RNA, 22 nt, Human
ccaggcucugcaaaaucaggcu

SEQ ID NO: 738892 - RNA, 22 nt, Human
uuucuauuuacagugcuaggua

SEQ ID NO: 738893 - RNA, 22 nt, Human
auacaaugauugguucucaccc

SEQ ID NO: 738894 - RNA, 22 nt, Human
accauuaagaaucugguuuccu

SEQ ID NO: 738895 - RNA, 22 nt, Human
ugugaugucagugguaucaaag

SEQ ID NO: 738896 - RNA, 22 nt, Human
ugggauguggccaugguucucu

SEQ ID NO: 738897 - RNA, 22 nt, Human
uggcugcuuaaaauugcugcaa

SEQ ID NO: 738898 - RNA, 22 nt, Human
ucaaggacuauugcaugacucc

SEQ ID NO: 738899 - RNA, 21 nt, Human
ccugccaggaaacugaguguc

SEQ ID NO: 738900 - RNA, 22 nt, Human
cagcaucuccauggcuuuggag

SEQ ID NO: 738901 - RNA, 22 nt, Human
uaaaguauauuuuuucucaaua

SEQ ID NO: 738902 - RNA, 22 nt, Human
ucugcaugaugaacaaaugagc

SEQ ID NO: 738903 - RNA, 20 nt, Human
aacagggcagaagcggagac

SEQ ID NO: 738904 - RNA, 22 nt, Human
gagcucccuggagguucagaua

SEQ ID NO: 738905 - RNA, 22 nt, Human
acaguaagcgggguuggagggc

SEQ ID NO: 738906 - RNA, 22 nt, Human
ucuggcuuuccuggagcaagaa

SEQ ID NO: 738907 - RNA, 22 nt, Human
auacaugucaucauauguuugu

SEQ ID NO: 738908 - RNA, 22 nt, Human
ucaguguuuacaugcauccuug

SEQ ID NO: 738909 - RNA, 22 nt, Human
auuuucagaacauucauucacu

SEQ ID NO: 738910 - RNA, 22 nt, Human
uggacucaccuugaguuagcca

SEQ ID NO: 738911 - RNA, 22 nt, Human
gggcugggauugcuugcuguga

SEQ ID NO: 738912 - RNA, 22 nt, Human
guggcagcugugggacacuggu

SEQ ID NO: 738913 - RNA, 22 nt, Human
uggcuucaucugcagcacugcc

SEQ ID NO: 738914 - RNA, 22 nt, Human
acagaauuugcuugggcaaugg

SEQ ID NO: 738915 - RNA, 22 nt, Human
ccuggcuuagagguugccuuuc

SEQ ID NO: 738916 - RNA, 22 nt, Human
cucggaauggaacaacagcggu

SEQ ID NO: 738917 - RNA, 22 nt, Human
gacauuucaaucucauuauggg

SEQ ID NO: 738918 - RNA, 18 nt, Human
ggcuccagucuucagugg

SEQ ID NO: 738919 - RNA, 22 nt, Human
ccaggcuuucccagccucucca

SEQ ID NO: 738920 - RNA, 22 nt, Human
augcaucauggaaaacucaguu

SEQ ID NO: 738921 - RNA, 22 nt, Human
acagggcaugugcaagagacau

SEQ ID NO: 738922 - RNA, 22 nt, Human
acaggcugaggaugauugcauc

SEQ ID NO: 738923 - RNA, 22 nt, Human
gacacagagggcaccagauaug

SEQ ID NO: 738924 - RNA, 22 nt, Human
ucagggaauaaguagaugagug

SEQ ID NO: 738925 - RNA, 22 nt, Human
acagcaguggauuagaggaugg

SEQ ID NO: 738926 - RNA, 18 nt, Human
cucaggccuuucccugug

SEQ ID NO: 738927 - RNA, 22 nt, Human
gaaucaaaucaaguucuuuuga

SEQ ID NO: 738928 - RNA, 22 nt, Human
gaaagcaauuuguguaaucugu

SEQ ID NO: 738929 - RNA, 22 nt, Human
cuucugaggacucuaaagagga

SEQ ID NO: 738930 - RNA, 23 nt, Human
acauuacacgcaguaauugcccc

SEQ ID NO: 738931 - RNA, 22 nt, Human
agcaggaggagagccuggcggu

SEQ ID NO: 738932 - RNA, 23 nt, Human
ccaggcaguagcuauugaaguga

SEQ ID NO: 738933 - RNA, 19 nt, Human
uuccccuccccagggauag

SEQ ID NO: 738934 - RNA, 22 nt, Human
aucaguuuaacugucaagagcc

SEQ ID NO: 738935 - RNA, 22 nt, Human
ugggagcagcugggaacacagc

SEQ ID NO: 738936 - RNA, 19 nt, Human
ugugaaagcuaguguucuu

SEQ ID NO: 738937 - RNA, 22 nt, Human
cagagcccugugugccauguga

SEQ ID NO: 738938 - RNA, 22 nt, Human
caguggccugagccaggcuucc

SEQ ID NO: 738939 - RNA, 22 nt, Human
cugccugugccaaugcuccuuu

SEQ ID NO: 738940 - RNA, 18 nt, Human
gagggaguagcugagguu

SEQ ID NO: 738941 - RNA, 19 nt, Human
ucagacugaaaguuuagau

SEQ ID NO: 738942 - RNA, 22 nt, Human
gggguggccaaggacucugacc

SEQ ID NO: 738943 - RNA, 21 nt, Human
aaaaugugagcgugaugcuua

SEQ ID NO: 738944 - RNA, 22 nt, Human
uauuucaagaacuucuauccau

SEQ ID NO: 738945 - RNA, 20 nt, Human
ggcugaaaguagaaaguauu

SEQ ID NO: 738946 - RNA, 22 nt, Human
cucagagagggcaccagggcca

SEQ ID NO: 738947 - RNA, 22 nt, Human
aagaugcacaauguggcaauua

SEQ ID NO: 738948 - RNA, 22 nt, Human
ucucacaccgucccuaaaccau

SEQ ID NO: 738949 - RNA, 22 nt, Human
uuugggcaauucagugggaccu

SEQ ID NO: 738950 - RNA, 22 nt, Human
ucucugaaggcuguguugaugg

SEQ ID NO: 738951 - RNA, 18 nt, Human
aggcacuggaauuaaggg

SEQ ID NO: 738952 - RNA, 22 nt, Human
gcuaggagauugagcucugaag

SEQ ID NO: 738953 - RNA, 21 nt, Human
agagagaaggccauauggucc

SEQ ID NO: 738954 - RNA, 22 nt, Human
ugggggagcgacagacauaauu

SEQ ID NO: 738955 - RNA, 22 nt, Human
aggcagugagugugacuucaca

SEQ ID NO: 738956 - RNA, 22 nt, Human
aagucuguuugagugucacacu

SEQ ID NO: 738957 - RNA, 22 nt, Human
aaagcucaucauuaggaggcua

SEQ ID NO: 738958 - RNA, 22 nt, Human
uugcugaugcccuuguccaggc

SEQ ID NO: 738959 - RNA, 22 nt, Human
ucuggcuuggcgcugcccucug

SEQ ID NO: 738960 - RNA, 22 nt, Human
guggcagagggugagcuggacu

SEQ ID NO: 738961 - RNA, 22 nt, Human
uaaggcacacaguugcugcaug

SEQ ID NO: 738962 - RNA, 22 nt, Human
uaaagucaucuuuacaucuuug

SEQ ID NO: 738963 - RNA, 22 nt, Human
cugagcugggagccuggcacca

SEQ ID NO: 738964 - RNA, 22 nt, Human
uaggaaacaaaguaaugcaacu

SEQ ID NO: 738965 - RNA, 22 nt, Human
ccugcccacagagagggugcau

SEQ ID NO: 738966 - RNA, 22 nt, Human
agcuucauuccagccacuguga

SEQ ID NO: 738967 - RNA, 22 nt, Human
ucugaggucucaugacuugcau

SEQ ID NO: 738968 - RNA, 22 nt, Human
ccugccaggccagugagcuucc

SEQ ID NO: 738969 - RNA, 20 nt, Human
cuggcaggagcgagucuacc

SEQ ID NO: 738970 - RNA, 22 nt, Human
ggacuuuagcagcuggagagga

SEQ ID NO: 738971 - RNA, 22 nt, Human
ucuuccagcccuucuaauggua

SEQ ID NO: 738972 - RNA, 22 nt, Human
ugucacauaggcaaaauguuuu

SEQ ID NO: 738973 - RNA, 22 nt, Human
uugaaucuauaauuucaguauu

SEQ ID NO: 738974 - RNA, 22 nt, Human
ccugccucaggacucugcauau

SEQ ID NO: 738975 - RNA, 22 nt, Human
uuuguguuuaugaaguuauucu

SEQ ID NO: 738976 - RNA, 22 nt, Human
agcacuagcuuuaagcauucug

SEQ ID NO: 738977 - RNA, 20 nt, Human
guuaaaagaguaauuugagg

SEQ ID NO: 738978 - RNA, 22 nt, Human
uucugugaauggccaugacaag

SEQ ID NO: 738979 - RNA, 22 nt, Human
uucugcaucugaauuuaaguac

SEQ ID NO: 738980 - RNA, 23 nt, Human
aaguucaagucacagccugucuu

SEQ ID NO: 738981 - RNA, 22 nt, Human
caggaaggaaaggguguggaga

SEQ ID NO: 738982 - RNA, 22 nt, Human
ugccacaggguccucaggccag

SEQ ID NO: 738983 - RNA, 22 nt, Human
acagugucaugucguguucccc

SEQ ID NO: 738984 - RNA, 22 nt, Human
uucuuugaguuaguacagucca

SEQ ID NO: 738985 - RNA, 22 nt, Human
uggccuuggacagagcgcuccu

SEQ ID NO: 738986 - RNA, 23 nt, Human
cuuugccacccagagccugacag

SEQ ID NO: 738987 - RNA, 22 nt, Human
cugccucuuaaguggauggagu

SEQ ID NO: 738988 - RNA, 22 nt, Human
caguuaauguccuauacaauag

SEQ ID NO: 738989 - RNA, 22 nt, Human
agcagcucggccagucaccagg

SEQ ID NO: 738990 - RNA, 22 nt, Human
uggcuggcccugggagugcaga

SEQ ID NO: 738991 - RNA, 22 nt, Human
agggagcagcagccacaggaug

SEQ ID NO: 738992 - RNA, 22 nt, Human
ggagcagagcugggcuuggcug

SEQ ID NO: 738993 - RNA, 22 nt, Human
ucacaggccuggggcagagggc

SEQ ID NO: 738994 - RNA, 22 nt, Human
gauuuacagguuagguccugua

SEQ ID NO: 738995 - RNA, 22 nt, Human
gggugaggagcugccagucaug

SEQ ID NO: 738996 - RNA, 22 nt, Human
acagagcuguacuacuuacuga

SEQ ID NO: 738997 - RNA, 22 nt, Human
gcacccugucaaaauggaccaa

SEQ ID NO: 738998 - RNA, 20 nt, Human
aggcacuguugucuguaucc

SEQ ID NO: 738999 - RNA, 22 nt, Human
agaugguugucgcaaaugaaug

SEQ ID NO: 739000 - RNA, 22 nt, Human
agugucugccagcugccaggug

SEQ ID NO: 739001 - RNA, 22 nt, Human
gagcaguuuuauuucaugagac

SEQ ID NO: 739002 - RNA, 22 nt, Human
ccucagagacugcaucuucccu

SEQ ID NO: 739003 - RNA, 22 nt, Human
ugucugaagcagccagugcugu

SEQ ID NO: 739004 - RNA, 22 nt, Human
aggucagguaucagcagguauu

SEQ ID NO: 739005 - RNA, 22 nt, Human
aucuuugucacucuacugucua

SEQ ID NO: 739006 - RNA, 22 nt, Human
acauuacagcaaguuuacguua

SEQ ID NO: 739007 - RNA, 22 nt, Human
aaggaggaaaauauuguugcug

SEQ ID NO: 739008 - RNA, 22 nt, Human
gggccaggaguggagauauggg

SEQ ID NO: 739009 - RNA, 22 nt, Human
ccacugucuuuuccaggcugaa

SEQ ID NO: 739010 - RNA, 22 nt, Human
aaucaguuaaauauugaguaca

SEQ ID NO: 739011 - RNA, 22 nt, Human
ggccaugcaggucagagguggg

SEQ ID NO: 739012 - RNA, 22 nt, Human
cccccaccguguuccugcucgg

SEQ ID NO: 739013 - RNA, 22 nt, Human
gucuuuggagaggugccauuuc

SEQ ID NO: 739014 - RNA, 21 nt, Human
uccagccaguaaaugcucagc

SEQ ID NO: 739015 - RNA, 22 nt, Human
cuuggggcuuuguguguaggau

SEQ ID NO: 739016 - RNA, 22 nt, Human
aaccucucugugcccugacuuu

SEQ ID NO: 739017 - RNA, 22 nt, Human
ugaucaaaacauuacuccacca

SEQ ID NO: 739018 - RNA, 22 nt, Human
cagaauaaagguacaauugagu

SEQ ID NO: 739019 - RNA, 22 nt, Human
ggcuccagaaacuucaguccau

SEQ ID NO: 739020 - RNA, 23 nt, Human
ugggucagcugccuccaggacaa

SEQ ID NO: 739021 - RNA, 22 nt, Human
uggcaguccagacccuggacuc

SEQ ID NO: 739022 - RNA, 22 nt, Human
gaggccacagugucugggggcc

SEQ ID NO: 739023 - RNA, 22 nt, Human
ucuuggcugcugccaauuuacu

SEQ ID NO: 739024 - RNA, 22 nt, Human
ucuggcauuucaggcaucuaua

SEQ ID NO: 739025 - RNA, 19 nt, Human
ugcuauuuagaacgccugg

SEQ ID NO: 739026 - RNA, 22 nt, Human
agcugccuucccucucauuagg

SEQ ID NO: 739027 - RNA, 22 nt, Human
agcauacuugacacuucucuau

SEQ ID NO: 739028 - RNA, 22 nt, Human
uauuugcugugcuuauuccauu

SEQ ID NO: 739029 - RNA, 22 nt, Human
agcauagaaaagauucccagag

SEQ ID NO: 739030 - RNA, 22 nt, Human
acccugcuuuaugccguccucu

SEQ ID NO: 739031 - RNA, 22 nt, Human
acaugggggcugcugccagcga

SEQ ID NO: 739032 - RNA, 23 nt, Human
auggacaggguuucagggucaca

SEQ ID NO: 739033 - RNA, 22 nt, Human
gaagcccagcaaacugugauca

SEQ ID NO: 739034 - RNA, 22 nt, Human
uggaggagaacucccuggcuac

SEQ ID NO: 739035 - RNA, 22 nt, Human
ccagaugugagcagagccuuga

SEQ ID NO: 739036 - RNA, 22 nt, Human
acacacuugcagagaggaggga

SEQ ID NO: 739037 - RNA, 22 nt, Human
cacagagacagaucuauuuugc

SEQ ID NO: 739038 - RNA, 22 nt, Human
auuucuuaaaacuucagggaga

SEQ ID NO: 739039 - RNA, 22 nt, Human
gaacacuguuucuucgugaaca

SEQ ID NO: 739040 - RNA, 22 nt, Human
cuucaaauacaaguagauuaug

SEQ ID NO: 739041 - RNA, 22 nt, Human
aggucaaaagcaaggccagguu

SEQ ID NO: 739042 - RNA, 22 nt, Human
gcccagugguaaaagcaggccu

SEQ ID NO: 739043 - RNA, 22 nt, Human
ccugggcuuuggaacaguacuu

SEQ ID NO: 739044 - RNA, 22 nt, Human
agccaggccagacucacacccu

SEQ ID NO: 739045 - RNA, 22 nt, Human
agcugugugguuugggcaaauu

SEQ ID NO: 739046 - RNA, 22 nt, Human
cagaguaaggagcugucaaacg

SEQ ID NO: 739047 - RNA, 22 nt, Human
ccuguuccauucauauccuauu

SEQ ID NO: 739048 - RNA, 22 nt, Human
ugucucuggcccaugagcagag

SEQ ID NO: 739049 - RNA, 22 nt, Human
agggaaaucuuucaacacuuca

SEQ ID NO: 739050 - RNA, 22 nt, Human
ggccccaguucacuccuggccg

SEQ ID NO: 739051 - RNA, 22 nt, Human
auuuguaacacgugacagguug

SEQ ID NO: 739052 - RNA, 22 nt, Human
auagcauauaaguuauaaaacu

SEQ ID NO: 739053 - RNA, 22 nt, Human
gagguggucgaggagggguacc

SEQ ID NO: 739054 - RNA, 22 nt, Human
aaaauacuacugucuucuuccc

SEQ ID NO: 739055 - RNA, 22 nt, Human
uccaauuuguuugaugauggaa

SEQ ID NO: 739056 - RNA, 22 nt, Human
aacuagucagugauucucagaa

SEQ ID NO: 739057 - RNA, 22 nt, Human
ggaggcauuauggggaagacuu

SEQ ID NO: 739058 - RNA, 20 nt, Human
accugggaaaaccuuuuccu

SEQ ID NO: 739059 - RNA, 22 nt, Human
uagaaaguaaacacgaagucuc

SEQ ID NO: 739060 - RNA, 22 nt, Human
ucucacugggucacagcagagg

SEQ ID NO: 739061 - RNA, 22 nt, Human
cccagcagccuggauguucuuu

SEQ ID NO: 739062 - RNA, 22 nt, Human
cugcuccaggauuucaggccag

SEQ ID NO: 739063 - RNA, 22 nt, Human
ugcguuauugugucuggcuaug

SEQ ID NO: 739064 - RNA, 22 nt, Human
uugauuucuuacucuuccaagg

SEQ ID NO: 739065 - RNA, 22 nt, Human
ucuaccacuaagugugcuuuga

SEQ ID NO: 739066 - RNA, 22 nt, Human
augcacagcagugaguucagug

SEQ ID NO: 739067 - RNA, 21 nt, Human
uuggaauuugggagcuaugug

SEQ ID NO: 739068 - RNA, 22 nt, Human
agagccugugauugucaucacc

SEQ ID NO: 739069 - RNA, 22 nt, Human
caaagagcuguucagugucgcu

SEQ ID NO: 739070 - RNA, 22 nt, Human
uggcuccaugauaguucuuaca

SEQ ID NO: 739071 - RNA, 22 nt, Human
cagggcccauggcucagguagg

SEQ ID NO: 739072 - RNA, 22 nt, Human
uauguacaguccuuaacuuaaa

SEQ ID NO: 739073 - RNA, 22 nt, Human
uagcuaucuguguccagaucca

SEQ ID NO: 739074 - RNA, 22 nt, Human
uccucuccaugucucacgccac

SEQ ID NO: 739075 - RNA, 22 nt, Human
auggaaugugaacaugauggca

SEQ ID NO: 739076 - RNA, 22 nt, Human
aaacaguuuugccaaaaggaca

SEQ ID NO: 739077 - RNA, 22 nt, Human
cccagcaugcacgcugacacuc

SEQ ID NO: 739078 - RNA, 22 nt, Human
ugcugggggcuuucuggauacc

SEQ ID NO: 739079 - RNA, 22 nt, Human
ucagagugugacuuggucauga

SEQ ID NO: 739080 - RNA, 22 nt, Human
cagggcuggguuaaaagcaggg

SEQ ID NO: 739081 - RNA, 22 nt, Human
uaggguaguaccaugcugccag

SEQ ID NO: 739082 - RNA, 19 nt, Human
uccaauuucuauucauguu

SEQ ID NO: 739083 - RNA, 22 nt, Human
agcugggcaccccgcugcgucu

SEQ ID NO: 739084 - RNA, 22 nt, Human
gcuuacaaucauuucaguuuag

SEQ ID NO: 739085 - RNA, 20 nt, Human
ccucugccuuucuagucuga

SEQ ID NO: 739086 - RNA, 22 nt, Human
ccagagacaaggagcuggaguc

SEQ ID NO: 739087 - RNA, 22 nt, Human
uguccugugucuaggggucuuc

SEQ ID NO: 739088 - RNA, 22 nt, Human
aaacaagagcuuacauggcugc

SEQ ID NO: 739089 - RNA, 22 nt, Human
uaacacaugguucugucaggaa

SEQ ID NO: 739090 - RNA, 22 nt, Human
ggucagaacaagcaaauaauag

SEQ ID NO: 739091 - RNA, 22 nt, Human
uccaggaggaggaaggcugcca

SEQ ID NO: 739092 - RNA, 22 nt, Human
ucauaaugacaaacauacucag

SEQ ID NO: 739093 - RNA, 22 nt, Human
gccacccuugcgucacugacau

SEQ ID NO: 739094 - RNA, 22 nt, Human
acucuuuuaugcauuccuucag

SEQ ID NO: 739095 - RNA, 22 nt, Human
uauguggccauucuguuugugu

SEQ ID NO: 739096 - RNA, 22 nt, Human
uacauucagcaaaagaaugguu

SEQ ID NO: 739097 - RNA, 22 nt, Human
uggaggaggaacuucuuaucuc

SEQ ID NO: 739098 - RNA, 22 nt, Human
uuauaagacuguagugaguauu

SEQ ID NO: 739099 - RNA, 22 nt, Human
ucaguuuccucaucuacaaaag

SEQ ID NO: 739100 - RNA, 22 nt, Human
cuggccaguugccuuccugggu

SEQ ID NO: 739101 - RNA, 22 nt, Human
auagaacagggcacugucauga

SEQ ID NO: 739102 - RNA, 22 nt, Human
aagugcuugaucauaguucuca

SEQ ID NO: 739103 - RNA, 22 nt, Human
agaagccauguuuaguaggaug

SEQ ID NO: 739104 - RNA, 22 nt, Human
uucauuacugcgguagucacac

SEQ ID NO: 739105 - RNA, 22 nt, Human
aagggcuccauccuuauaaaug

SEQ ID NO: 739106 - RNA, 22 nt, Human
cccugcagaccaaugccauaga

SEQ ID NO: 739107 - RNA, 22 nt, Human
caguuucccugcuugaaaacgu

SEQ ID NO: 739108 - RNA, 22 nt, Human
agaauuacauaaauacaugaau

SEQ ID NO: 739109 - RNA, 22 nt, Human
agguccugugguuuggguaaaa

SEQ ID NO: 739110 - RNA, 22 nt, Human
cccaggguccggauaacccugg

SEQ ID NO: 739111 - RNA, 22 nt, Human
uugccuagaguugcacaucugg

SEQ ID NO: 739112 - RNA, 21 nt, Human
cagcucugagauuucuacuag

SEQ ID NO: 739113 - RNA, 22 nt, Human
ccuccugggccuugcucuguga

SEQ ID NO: 739114 - RNA, 22 nt, Human
ucuccaggugacucugauguau

SEQ ID NO: 739115 - RNA, 22 nt, Human
ucugugcggucuguguuaugaa

SEQ ID NO: 739116 - RNA, 17 nt, Human
cucagcugaaccccaga

SEQ ID NO: 739117 - RNA, 22 nt, Human
acuggcccuugauugcaucagc

SEQ ID NO: 739118 - RNA, 22 nt, Human
uaucugucaccuguaggguagg

SEQ ID NO: 739119 - RNA, 22 nt, Human
agcccuggagcaaaggugucuu

SEQ ID NO: 739120 - RNA, 22 nt, Human
uuggaagaguagaguugaauaa

SEQ ID NO: 739121 - RNA, 22 nt, Human
uuugcaaaguuauuuagacuca

SEQ ID NO: 739122 - RNA, 22 nt, Human
ugcugggcacugucuagguacu

SEQ ID NO: 739123 - RNA, 22 nt, Human
caaaccuugcagaacugggcag

SEQ ID NO: 739124 - RNA, 23 nt, Human
acuucauggcacugucuuagagg

SEQ ID NO: 739125 - RNA, 22 nt, Human
cugugucuucugcuuacagucu

SEQ ID NO: 739126 - RNA, 23 nt, Human
uucuaaccuuaaagcccuuugga

SEQ ID NO: 739127 - RNA, 22 nt, Human
gcugcaccagcuccaccagggc

SEQ ID NO: 739128 - RNA, 22 nt, Human
caggaaccaggagagucccuga

SEQ ID NO: 739129 - RNA, 22 nt, Human
cuagggaaugagagacuggauc

SEQ ID NO: 739130 - RNA, 22 nt, Human
uggggacaggagacuuacagcu

SEQ ID NO: 739131 - RNA, 22 nt, Human
uggaaacaucucugccuuuauu

SEQ ID NO: 739132 - RNA, 21 nt, Human
uuucuggguggcugcauagug

SEQ ID NO: 739133 - RNA, 22 nt, Human
accagcuccaggccccugcuga

SEQ ID NO: 739134 - RNA, 22 nt, Human
aguucuuuguaaaaggucucua

SEQ ID NO: 739135 - RNA, 22 nt, Human
uuagcuuucuuuggcagacgug

SEQ ID NO: 739136 - RNA, 22 nt, Human
ucuuugaccaaauuauccuguu

SEQ ID NO: 739137 - RNA, 22 nt, Human
aacaguaaugugguguuggguu

SEQ ID NO: 739138 - RNA, 22 nt, Human
gcacauccaaugauuguuuuga

SEQ ID NO: 739139 - RNA, 23 nt, Human
gcugccucuguuggucuucaguu

SEQ ID NO: 739140 - RNA, 22 nt, Human
cagugaguugugcugaggacca

SEQ ID NO: 739141 - RNA, 22 nt, Human
gagaaaccgauucugcauguca

SEQ ID NO: 739142 - RNA, 22 nt, Human
cuaaacuuuguuuauacucuga

SEQ ID NO: 739143 - RNA, 22 nt, Human
ggaaggggucaccuccugauga

SEQ ID NO: 739144 - RNA, 22 nt, Human
aguguaagugaucauugauagu

SEQ ID NO: 739145 - RNA, 15 nt, Human
uucaggauaugacuc

SEQ ID NO: 739146 - RNA, 22 nt, Human
uguuuaaugaagaugguuuuuc

SEQ ID NO: 739147 - RNA, 22 nt, Human
aagauuuccuucaguagagcua

SEQ ID NO: 739148 - RNA, 22 nt, Human
uaauuguacucccugugggaaa

SEQ ID NO: 739149 - RNA, 22 nt, Human
cugcuuuagcuagugcucuuag

SEQ ID NO: 739150 - RNA, 22 nt, Human
uauggcuuuaaacuuuucauuu

SEQ ID NO: 739151 - RNA, 22 nt, Human
uuccacucuacacacugcuggc

SEQ ID NO: 739152 - RNA, 17 nt, Human
cagugaggccuuuccuc

SEQ ID NO: 739153 - RNA, 19 nt, Human
ccaggccaucccaguuccc

SEQ ID NO: 739154 - RNA, 22 nt, Human
gaaagccagagagaaagggcuc

SEQ ID NO: 739155 - RNA, 22 nt, Human
guuuccaggcgauaucagcugc

SEQ ID NO: 739156 - RNA, 22 nt, Human
ggacauuuagaacagaguauuu

SEQ ID NO: 739157 - RNA, 22 nt, Human
uauguagguaaacacagacaua

SEQ ID NO: 739158 - RNA, 21 nt, Human
uagaaaucagcuggugccucu

SEQ ID NO: 739159 - RNA, 22 nt, Human
ucucuaaagccuggaagaggag

SEQ ID NO: 739160 - RNA, 22 nt, Human
aaagaucuccccuucaaagagu

SEQ ID NO: 739161 - RNA, 22 nt, Human
gucuauauauugcuugaauaau

SEQ ID NO: 739162 - RNA, 22 nt, Human
aacuacaguaguuugcccuucu

SEQ ID NO: 739163 - RNA, 22 nt, Human
aauacugucuuucacagauauu

SEQ ID NO: 739164 - RNA, 22 nt, Human
gcugcccaggagagguggggcu

SEQ ID NO: 739165 - RNA, 22 nt, Human
ugcauugggagucagugcugaa

SEQ ID NO: 739166 - RNA, 22 nt, Human
acagaggcagugugagauacug

SEQ ID NO: 739167 - RNA, 22 nt, Human
augaaggauagggcaaaauuuu

SEQ ID NO: 739168 - RNA, 22 nt, Human
agccacagcuccuugguggaga

SEQ ID NO: 739169 - RNA, 22 nt, Human
agagcacugcugauuuacaguc

SEQ ID NO: 739170 - RNA, 22 nt, Human
aaacuuuuauaaagcugcagau

SEQ ID NO: 739171 - RNA, 22 nt, Human
aacccuggagaaggcuuuggau

SEQ ID NO: 739172 - RNA, 22 nt, Human
ugaacccugaccucuggaagga

SEQ ID NO: 739173 - RNA, 22 nt, Human
gaaacauucagucaacaguguu

SEQ ID NO: 739174 - RNA, 23 nt, Human
cagugcugguucugccugugggg

SEQ ID NO: 739175 - RNA, 22 nt, Human
cagaaacuguggauucauuaaa

SEQ ID NO: 739176 - RNA, 22 nt, Human
cacuuaaauguuccuacagcag

SEQ ID NO: 739177 - RNA, 22 nt, Human
ucuuuguaagaaauucuuccgu

SEQ ID NO: 739178 - RNA, 22 nt, Human
uauguucugacucuacauggga

SEQ ID NO: 739179 - RNA, 22 nt, Human
guguaacuugcuggaaaaacua

SEQ ID NO: 739180 - RNA, 22 nt, Human
cuguagcugggccucggcagug

SEQ ID NO: 739181 - RNA, 22 nt, Human
ucucccaggcugcccuguggac

SEQ ID NO: 739182 - RNA, 22 nt, Human
ucucugggcccagaccuuccuu

SEQ ID NO: 739183 - RNA, 22 nt, Human
uaccugagaagaaacccguguu

SEQ ID NO: 739184 - RNA, 22 nt, Human
uuggagagauuuaggucucagu

SEQ ID NO: 739185 - RNA, 22 nt, Human
aguugcagccuucaggagaccc

SEQ ID NO: 739186 - RNA, 22 nt, Human
caggcucuagguuaguaggaga

SEQ ID NO: 739187 - RNA, 22 nt, Human
cuggccacugcaccucuuccuu

SEQ ID NO: 739188 - RNA, 22 nt, Human
ggcugaguucucuugcugaauc

SEQ ID NO: 739189 - RNA, 22 nt, Human
agcaagcugucaagagagcuga

SEQ ID NO: 739190 - RNA, 20 nt, Human
auguagcagugugcugggaa

SEQ ID NO: 739191 - RNA, 22 nt, Human
uucauucuuuuacaugugaaua

SEQ ID NO: 739192 - RNA, 22 nt, Human
cugagcugguggaagcaugcag

SEQ ID NO: 739193 - RNA, 21 nt, Human
ggccccagcccauggguucuc

SEQ ID NO: 739194 - RNA, 22 nt, Human
aaauuaucaugauuauugugua

SEQ ID NO: 739195 - RNA, 22 nt, Human
uaacucuuccaacacuccuucc

SEQ ID NO: 739196 - RNA, 22 nt, Human
ugcagggaacuuggacagcuag

SEQ ID NO: 739197 - RNA, 22 nt, Human
aggcaaaauaagccucuccugu

SEQ ID NO: 739198 - RNA, 22 nt, Human
gccaugggcaaaugcagagcug

SEQ ID NO: 739199 - RNA, 20 nt, Human
agaagaggauacaaccaggc

SEQ ID NO: 739200 - RNA, 22 nt, Human
uggguccuugcuggcuucaaag

SEQ ID NO: 739201 - RNA, 22 nt, Human
aacacugaguaucagaguuggg

SEQ ID NO: 739202 - RNA, 22 nt, Human
uccacagcuguccuguaacagg

SEQ ID NO: 739203 - RNA, 22 nt, Human
cuguggcugcgccaucgaaaac

SEQ ID NO: 739204 - RNA, 22 nt, Human
aggccagcuaugacucugcucc

SEQ ID NO: 739205 - RNA, 22 nt, Human
ggagggcucaauugacuccuga

SEQ ID NO: 739206 - RNA, 22 nt, Human
uuucuagacauuucuauguaca

SEQ ID NO: 739207 - RNA, 22 nt, Human
augccagccucuaagcacuuua

SEQ ID NO: 739208 - RNA, 22 nt, Human
uauguguuugacacccugcaag

SEQ ID NO: 739209 - RNA, 22 nt, Human
ccugaaauccauaguuuacacu

SEQ ID NO: 739210 - RNA, 22 nt, Human
aaaauuauggaguaucccaaag

SEQ ID NO: 739211 - RNA, 22 nt, Human
uuauccuggauuauauauguga

SEQ ID NO: 739212 - RNA, 22 nt, Human
gaggagagggcugcgggcccac

SEQ ID NO: 739213 - RNA, 22 nt, Human
uacacauucuagggcacaguua

SEQ ID NO: 739214 - RNA, 22 nt, Human
gcuggcagguccaagauagagc

SEQ ID NO: 739215 - RNA, 22 nt, Human
cugaggcaguuuaauuuuugaa

SEQ ID NO: 739216 - RNA, 22 nt, Human
uuuauuguguugaaacugaauu

SEQ ID NO: 739217 - RNA, 22 nt, Human
uucucugguuugcuguuucuga

SEQ ID NO: 739218 - RNA, 22 nt, Human
uggcaggagccugcggggaggu

SEQ ID NO: 739219 - RNA, 22 nt, Human
auauguguauuugguuagccua

SEQ ID NO: 739220 - RNA, 20 nt, Human
aggguggcaaguuagugaca

SEQ ID NO: 739221 - RNA, 22 nt, Human
agcuuugggauucaggcaggaa

SEQ ID NO: 739222 - RNA, 22 nt, Human
uuuacagugucuuguugacugu

SEQ ID NO: 739223 - RNA, 22 nt, Human
cuaacuuuagcuuagauuauca

SEQ ID NO: 739224 - RNA, 22 nt, Human
cucuggggaagcagccagcugg

SEQ ID NO: 739225 - RNA, 22 nt, Human
gaggcccacagggaguaccaag

SEQ ID NO: 739226 - RNA, 22 nt, Human
gcagauggcucagacacugggg

SEQ ID NO: 739227 - RNA, 22 nt, Human
ucuccaggcacuaccuggguaa

SEQ ID NO: 739228 - RNA, 22 nt, Human
agucucuuacccaagcagaaug

SEQ ID NO: 739229 - RNA, 22 nt, Human
uaugcauacaaugagauauucc

SEQ ID NO: 739230 - RNA, 22 nt, Human
uagaaauguaggcuuccugaca

SEQ ID NO: 739231 - RNA, 22 nt, Human
gcuggauuggagcaauagaguc

SEQ ID NO: 739232 - RNA, 22 nt, Human
ucuggguuggguuccuggaauu

SEQ ID NO: 739233 - RNA, 22 nt, Human
uaguggaguagaaaccaaagaa

SEQ ID NO: 739234 - RNA, 16 nt, Human
auuuccagauuaugca

SEQ ID NO: 739235 - RNA, 19 nt, Human
gccacaggaugaaguuugg

SEQ ID NO: 739236 - RNA, 22 nt, Human
ucccagcccagauuugugugac

SEQ ID NO: 739237 - RNA, 22 nt, Human
cuaggugauccacugcucucuu

SEQ ID NO: 739238 - RNA, 22 nt, Human
cacaugugugcugaggacugug

SEQ ID NO: 739239 - RNA, 22 nt, Human
gcaggccacugucuccucuggg

SEQ ID NO: 739240 - RNA, 22 nt, Human
cagcuuccccccgggcuugaga

SEQ ID NO: 739241 - RNA, 22 nt, Human
ucccaggaaugucugaaaguga

SEQ ID NO: 739242 - RNA, 22 nt, Human
gaguggguaaaggugcuuggcu

SEQ ID NO: 739243 - RNA, 22 nt, Human
uaugacagugaaaaaaaucaga

SEQ ID NO: 739244 - RNA, 22 nt, Human
gauuucuucauuuguggugaau

SEQ ID NO: 739245 - RNA, 19 nt, Human
uuugucucugaauaauauu

SEQ ID NO: 739246 - RNA, 22 nt, Human
ucacugcaaccucugccuuccg

SEQ ID NO: 739247 - RNA, 22 nt, Human
cugguggagaugccuggccccu

SEQ ID NO: 739248 - RNA, 22 nt, Human
acacugugcagauucccuguga

SEQ ID NO: 739249 - RNA, 22 nt, Human
agcugucuaccugcagaguccu

SEQ ID NO: 739250 - RNA, 22 nt, Human
gccagagaggcaaauccuagca

SEQ ID NO: 739251 - RNA, 22 nt, Human
uacacuuuucugguuacucuug

SEQ ID NO: 739252 - RNA, 22 nt, Human
caagaauuguacaaacugggug

SEQ ID NO: 739253 - RNA, 22 nt, Human
ccugccagcccccauagagaca

SEQ ID NO: 739254 - RNA, 22 nt, Human
aaaauaguuaacguucagagua

SEQ ID NO: 739255 - RNA, 22 nt, Human
agcugccaaguuucucaguuua

SEQ ID NO: 739256 - RNA, 22 nt, Human
gccaggcuggcaaaaggaaacc

SEQ ID NO: 739257 - RNA, 22 nt, Human
ugacacaguagaaagaugauga

SEQ ID NO: 739258 - RNA, 22 nt, Human
uuccucuggggccaggccaaca

SEQ ID NO: 739259 - RNA, 22 nt, Human
ugugaagauagcuguuacaucu

SEQ ID NO: 739260 - RNA, 22 nt, Human
aaauugaauuugggaaacauug

SEQ ID NO: 739261 - RNA, 22 nt, Human
gccugcuuugugccugaucuuu

SEQ ID NO: 739262 - RNA, 22 nt, Human
agcaggcuaagggaccuguuua

SEQ ID NO: 739263 - RNA, 22 nt, Human
ucaggcugcuggccagcaggcu

SEQ ID NO: 739264 - RNA, 22 nt, Human
uuucugauaauuuugugaaauc

SEQ ID NO: 739265 - RNA, 22 nt, Human
gcucuggcagcugauauuagga

SEQ ID NO: 739266 - RNA, 22 nt, Human
gcugggcagccuggccgcugcc

SEQ ID NO: 739267 - RNA, 22 nt, Human
ucaggagacaaagggugcggag

SEQ ID NO: 739268 - RNA, 22 nt, Human
acuucacauuagcuaaaaggga

SEQ ID NO: 739269 - RNA, 22 nt, Human
auagacaaugguuugccaagaa

SEQ ID NO: 739270 - RNA, 18 nt, Human
gagcccugggagaucucu

SEQ ID NO: 739271 - RNA, 22 nt, Human
uuggaaaagugaaacuagaugc

SEQ ID NO: 739272 - RNA, 22 nt, Human
aggcagguuggugagaagacug

SEQ ID NO: 739273 - RNA, 22 nt, Human
gacacugucccacagaauucga

SEQ ID NO: 739274 - RNA, 22 nt, Human
gcucagagaguuucacaaguuu

SEQ ID NO: 739275 - RNA, 22 nt, Human
cuuaaaguauugguuuaaccaa

SEQ ID NO: 739276 - RNA, 22 nt, Human
uuccugguuuauaccuguauca

SEQ ID NO: 739277 - RNA, 22 nt, Human
agaaacuauccugaguagcaaa

SEQ ID NO: 739278 - RNA, 22 nt, Human
aaauuagauaugugugagacuc

SEQ ID NO: 739279 - RNA, 22 nt, Human
cccucagcucaagccccugugc

SEQ ID NO: 739280 - RNA, 22 nt, Human
ucagccaugucaggggaaugac

SEQ ID NO: 739281 - RNA, 22 nt, Human
agcugcaggagucgccuaggau

SEQ ID NO: 739282 - RNA, 22 nt, Human
auuuagacaccagcuuguaagg

SEQ ID NO: 739283 - RNA, 22 nt, Human
ucaugggguuuggcuggauguc

SEQ ID NO: 739284 - RNA, 22 nt, Human
caugcauuguaauuuuuagucu

SEQ ID NO: 739285 - RNA, 22 nt, Human
gagauucugagaaguuaagucc

SEQ ID NO: 739286 - RNA, 22 nt, Human
gcuuuagaucugacuuucugug

SEQ ID NO: 739287 - RNA, 22 nt, Human
cacauuuaauccuuuauaagua

SEQ ID NO: 739288 - RNA, 22 nt, Human
caucagcucuucauucuugauu

SEQ ID NO: 739289 - RNA, 22 nt, Human
cucaggagaugacagaagguau

SEQ ID NO: 739290 - RNA, 17 nt, Human
gcuccagaauucuaguc

SEQ ID NO: 739291 - RNA, 22 nt, Human
uccuggugcugacacccauagc

SEQ ID NO: 739292 - RNA, 22 nt, Human
aagcauuuggcaugaaacucuu

SEQ ID NO: 739293 - RNA, 22 nt, Human
ggaggccagggacccagucagc

SEQ ID NO: 739294 - RNA, 20 nt, Human
ucuggcucuuugcuccuccc

SEQ ID NO: 739295 - RNA, 22 nt, Human
ucaggcagucugacuccggagg

SEQ ID NO: 739296 - RNA, 22 nt, Human
uaaccuuuguucaauguaagau

SEQ ID NO: 739297 - RNA, 22 nt, Human
ugcaccuuuaaauucagcagua

SEQ ID NO: 739298 - RNA, 22 nt, Human
cugcccugccuggccagugugg

SEQ ID NO: 739299 - RNA, 22 nt, Human
agucacagggggccccugcaac

SEQ ID NO: 739300 - RNA, 22 nt, Human
cuccagguugacuucagucaau

SEQ ID NO: 739301 - RNA, 23 nt, Human
uguaacaauuucauauacaugca

SEQ ID NO: 739302 - RNA, 18 nt, Human
ucacauuauaauguaaca

SEQ ID NO: 739303 - RNA, 22 nt, Human
uagaacuucuuacagcuaaguu

SEQ ID NO: 739304 - RNA, 19 nt, Human
ugaagcagcaaacucucag

SEQ ID NO: 739305 - RNA, 22 nt, Human
acagcugugagggucacuugua

SEQ ID NO: 739306 - RNA, 22 nt, Human
uguggccagggggccauguccc

SEQ ID NO: 739307 - RNA, 22 nt, Human
gccaggcacaguucuaggugcu

SEQ ID NO: 739308 - RNA, 22 nt, Human
uucuagcacaagauaugaaagu

SEQ ID NO: 739309 - RNA, 23 nt, Human
aggcacugaaugugucagugagu

SEQ ID NO: 739310 - RNA, 22 nt, Human
uccagcacccaauguggcuaag

SEQ ID NO: 739311 - RNA, 22 nt, Human
uguacauuuucucagaguuuau

SEQ ID NO: 739312 - RNA, 18 nt, Human
guggaggguucucagaau

SEQ ID NO: 739313 - RNA, 22 nt, Human
uuauuuauggcccucaccugau

SEQ ID NO: 739314 - RNA, 22 nt, Human
uauuacagaaucaggcauaacu

SEQ ID NO: 739315 - RNA, 22 nt, Human
agaccaugggcuccugggacau

SEQ ID NO: 739316 - RNA, 22 nt, Human
ucuguagagacgaauguguuau

SEQ ID NO: 739317 - RNA, 22 nt, Human
ugauuacacagcaguaauuuca

SEQ ID NO: 739318 - RNA, 22 nt, Human
acauuccucagugccaguugag

SEQ ID NO: 739319 - RNA, 18 nt, Human
ggccugcagugaagcaag

SEQ ID NO: 739320 - RNA, 22 nt, Human
ccuuuuucccuggagggacagc

SEQ ID NO: 739321 - RNA, 22 nt, Human
gagggcacuggguuucaauguc

SEQ ID NO: 739322 - RNA, 22 nt, Human
uauaucugggaaccaaaggggg

SEQ ID NO: 739323 - RNA, 22 nt, Human
cagguccucacgccucacccuu

SEQ ID NO: 739324 - RNA, 22 nt, Human
auguacauucuucucaccgaag

SEQ ID NO: 739325 - RNA, 22 nt, Human
cauucccuuggggaguucaugc

SEQ ID NO: 739326 - RNA, 22 nt, Human
cuuuauuagauguagacuuucu

SEQ ID NO: 739327 - RNA, 17 nt, Human
cagacaggcugucaccc

SEQ ID NO: 739328 - RNA, 22 nt, Human
cacuugaaguuugggggacucu

SEQ ID NO: 739329 - RNA, 22 nt, Human
cugccaucugagccaaaagugc

SEQ ID NO: 739330 - RNA, 22 nt, Human
aaacacugugggacaucuuacu

SEQ ID NO: 739331 - RNA, 22 nt, Human
aucagcaaggcaaucacugcag

SEQ ID NO: 739332 - RNA, 22 nt, Human
aggucugagaacuaccuauagg

SEQ ID NO: 739333 - RNA, 22 nt, Human
ugagaacaguuggaagcaguca

SEQ ID NO: 739334 - RNA, 22 nt, Human
uuccauaauaggcuuaagugaa

SEQ ID NO: 739335 - RNA, 22 nt, Human
uuguccuggagguuaauagagu

SEQ ID NO: 739336 - RNA, 20 nt, Human
caugauacuuggaagggcuu

SEQ ID NO: 739337 - RNA, 22 nt, Human
agagacugauggagcucacucu

SEQ ID NO: 739338 - RNA, 22 nt, Human
aguggacccggaacagaggccc

SEQ ID NO: 739339 - RNA, 22 nt, Human
cagcuucauugccugaugucuu

SEQ ID NO: 739340 - RNA, 22 nt, Human
acaauguucugucugacuuguc

SEQ ID NO: 739341 - RNA, 22 nt, Human
gcuggcucugcacccaggccuc

SEQ ID NO: 739342 - RNA, 22 nt, Human
agugggccaaauggaggcaagu

SEQ ID NO: 739343 - RNA, 22 nt, Human
gugugccaggaacuggcugcug

SEQ ID NO: 739344 - RNA, 22 nt, Human
agggcagugggaaagccugcuc

SEQ ID NO: 739345 - RNA, 22 nt, Human
aaugcuuauaacguuagaaugu

SEQ ID NO: 739346 - RNA, 22 nt, Human
gcgagugccgagagggcagggc

SEQ ID NO: 739347 - RNA, 22 nt, Human
cucaaggaaagucuggagaaga

SEQ ID NO: 739348 - RNA, 22 nt, Human
ccacaggaaguuaugaguacua

SEQ ID NO: 739349 - RNA, 22 nt, Human
ucaggaggccgugugcucagug

SEQ ID NO: 739350 - RNA, 22 nt, Human
ccuuuucuggccaccaagcgcu

SEQ ID NO: 739351 - RNA, 22 nt, Human
cccaggaugucgaggcugcagu

SEQ ID NO: 739352 - RNA, 22 nt, Human
acauggagaccagauggaagua

SEQ ID NO: 739353 - RNA, 22 nt, Human
aaguucaagucuccugaguaua

SEQ ID NO: 739354 - RNA, 22 nt, Human
agggcagaggcggacacggaag

SEQ ID NO: 739355 - RNA, 22 nt, Human
augaaugagaaacaggugagau

SEQ ID NO: 739356 - RNA, 22 nt, Human
ugcaaauauuccaugcuguuca

SEQ ID NO: 739357 - RNA, 22 nt, Human
cucaagacugaucgcaguggaa

SEQ ID NO: 739358 - RNA, 22 nt, Human
uuauuucauugauuucuaagac

SEQ ID NO: 739359 - RNA, 22 nt, Human
uuucagaaagcaucaucaaagu

SEQ ID NO: 739360 - RNA, 22 nt, Human
aacaauugacacuucauuguga

SEQ ID NO: 739361 - RNA, 22 nt, Human
caaauagacucuagaauuuauu

SEQ ID NO: 739362 - RNA, 23 nt, Human
uuugacagcgugguuucuguggg

SEQ ID NO: 739363 - RNA, 20 nt, Human
agagagagguaaauugagca

SEQ ID NO: 739364 - RNA, 22 nt, Human
cugcccaguuugggagccuuuc

SEQ ID NO: 739365 - RNA, 23 nt, Human
ucacaguaucucuggagccauag

SEQ ID NO: 739366 - RNA, 22 nt, Human
uggccccugaggagcgucagcc

SEQ ID NO: 739367 - RNA, 22 nt, Human
agggagcaugggugaagcaggc

SEQ ID NO: 739368 - RNA, 22 nt, Human
acuuucauguuggugaaggguu

SEQ ID NO: 739369 - RNA, 22 nt, Human
agaaacaucgcuuaguccucau

SEQ ID NO: 739370 - RNA, 22 nt, Human
aauuuagaauucgcuagcuaau

SEQ ID NO: 739371 - RNA, 22 nt, Human
cccugcugucccucaguccugc

SEQ ID NO: 739372 - RNA, 22 nt, Human
caauuucuaacauuccauggau

SEQ ID NO: 739373 - RNA, 22 nt, Human
aagaugugcugucuugccacuc

SEQ ID NO: 739374 - RNA, 22 nt, Human
ccacaagaugcaaacucuaaca

SEQ ID NO: 739375 - RNA, 22 nt, Human
agucaggauuuuggauuauucg

SEQ ID NO: 739376 - RNA, 17 nt, Human
ccagguggaaucgugga

SEQ ID NO: 739377 - RNA, 22 nt, Human
gagaggucaucucccaucagca

SEQ ID NO: 739378 - RNA, 22 nt, Human
gugcagugacccuggagagcug

SEQ ID NO: 739379 - RNA, 22 nt, Human
uaggacuuggugacucucaaug

SEQ ID NO: 739380 - RNA, 19 nt, Human
uccugggcugggccagguc

SEQ ID NO: 739381 - RNA, 22 nt, Human
cagcauccuuugcugguuuccc

SEQ ID NO: 739382 - RNA, 22 nt, Human
agagcugcaauuucauguggug

SEQ ID NO: 739383 - RNA, 22 nt, Human
acugggagggucuugaagaggg

SEQ ID NO: 739384 - RNA, 23 nt, Human
cugaagcaguucccucucugccc

SEQ ID NO: 739385 - RNA, 22 nt, Human
ccuuuggugguuuucagagauc

SEQ ID NO: 739386 - RNA, 17 nt, Human
gcuucuggagcuucugu

SEQ ID NO: 739387 - RNA, 22 nt, Human
gagaaagauuguccuucagggg

SEQ ID NO: 739388 - RNA, 21 nt, Human
caaauacuuagaaacuuaaga

SEQ ID NO: 739389 - RNA, 22 nt, Human
gcagggagguuugcugaccugg

SEQ ID NO: 739390 - RNA, 22 nt, Human
ucuuauucagugggcucugcca

SEQ ID NO: 739391 - RNA, 22 nt, Human
ggcugcuccuuuacccuggcag

SEQ ID NO: 739392 - RNA, 22 nt, Human
aauggcugccagggcaggaggu

SEQ ID NO: 739393 - RNA, 22 nt, Human
cagagccaucccagccuguggu

SEQ ID NO: 739394 - RNA, 22 nt, Human
gcccagggcgauggucggggcc

SEQ ID NO: 739395 - RNA, 22 nt, Human
ucaccagggagcuuguccucug

SEQ ID NO: 739396 - RNA, 20 nt, Human
agagguucagucuggagaag

SEQ ID NO: 739397 - RNA, 22 nt, Human
ugcaaauaaauuucuguucauu

SEQ ID NO: 739398 - RNA, 22 nt, Human
ccuuccagggagcaggcagugu

SEQ ID NO: 739399 - RNA, 22 nt, Human
auacaaaggaacacaggcaugu

SEQ ID NO: 739400 - RNA, 22 nt, Human
gagacacucaacaaagauauga

SEQ ID NO: 739401 - RNA, 22 nt, Human
ucauggaagauguagggucagg

SEQ ID NO: 739402 - RNA, 22 nt, Human
ccccacagccgccagcagggag

SEQ ID NO: 739403 - RNA, 22 nt, Human
ccagcucccugaagccuggucu

SEQ ID NO: 739404 - RNA, 21 nt, Human
cuuugguuucugacuugcaua

SEQ ID NO: 739405 - RNA, 22 nt, Human
guaucuuuugguggaaaaauaa

SEQ ID NO: 739406 - RNA, 22 nt, Human
cagcucccagaacugaccaugu

SEQ ID NO: 739407 - RNA, 22 nt, Human
aaaguguggagauugaacuaaa

SEQ ID NO: 739408 - RNA, 22 nt, Human
gcucuggcucaaaccaccggcu

SEQ ID NO: 739409 - RNA, 22 nt, Human
gugggccaggacccgcuguccg

SEQ ID NO: 739410 - RNA, 22 nt, Human
aagucacuaagugaaccacugg

SEQ ID NO: 739411 - RNA, 22 nt, Human
gccaaaucuugcacacucuugu

SEQ ID NO: 739412 - RNA, 22 nt, Human
accaucagucauugucaguggg

SEQ ID NO: 739413 - RNA, 22 nt, Human
cagcagcagagauacugguuuc

SEQ ID NO: 739414 - RNA, 22 nt, Human
agagcuggggcucuggguuuaa

SEQ ID NO: 739415 - RNA, 22 nt, Human
cacagagcuggaaaggcugggc

SEQ ID NO: 739416 - RNA, 22 nt, Human
gauauuuacauuaagcacauug

SEQ ID NO: 739417 - RNA, 22 nt, Human
uugggaaggcguggaagcagaa

SEQ ID NO: 739418 - RNA, 22 nt, Human
uuacaacucugucaguauagcu

SEQ ID NO: 739419 - RNA, 22 nt, Human
uggaaggcuaggugcuaggccc

SEQ ID NO: 739420 - RNA, 22 nt, Human
uguuuaaccaccauucuauucu

SEQ ID NO: 739421 - RNA, 17 nt, Human
gagcagggaugcgguuc

SEQ ID NO: 739422 - RNA, 22 nt, Human
cagcuucaugacaaacaguuuu

SEQ ID NO: 739423 - RNA, 22 nt, Human
cuguaagaugggauaagacuuu

SEQ ID NO: 739424 - RNA, 22 nt, Human
uucaggauucuuucagacuggg

SEQ ID NO: 739425 - RNA, 21 nt, Human
gccuccagccagauggccucc

SEQ ID NO: 739426 - RNA, 22 nt, Human
accuuuaucgccaucauugugc

SEQ ID NO: 739427 - RNA, 22 nt, Human
cugccuggguucaaguccuguu

SEQ ID NO: 739428 - RNA, 22 nt, Human
ccagucccgcaugguccagaau

SEQ ID NO: 739429 - RNA, 17 nt, Human
uucucuuccuggauagu

SEQ ID NO: 739430 - RNA, 22 nt, Human
gaagcugacccaggagcgugug

SEQ ID NO: 739431 - RNA, 20 nt, Human
cccuaggaacgcagcaggag

SEQ ID NO: 739432 - RNA, 22 nt, Human
aaugucuuuugauacaaguuac

SEQ ID NO: 739433 - RNA, 22 nt, Human
aagauccuucucacugcagugu

SEQ ID NO: 739434 - RNA, 22 nt, Human
uuaacugugacaguuucucaga

SEQ ID NO: 739435 - RNA, 22 nt, Human
gccugugucauguaguagcuuc

SEQ ID NO: 739436 - RNA, 22 nt, Human
cacagguauauguguauauacu

SEQ ID NO: 739437 - RNA, 22 nt, Human
ggcaaaaaccauaauuacuuuu

SEQ ID NO: 739438 - RNA, 22 nt, Human
acacugcagcaucagcuacgga

SEQ ID NO: 739439 - RNA, 22 nt, Human
cagauagcaaauggguaagcua

SEQ ID NO: 739440 - RNA, 22 nt, Human
gcucucuuuuuccagugguggu

SEQ ID NO: 739441 - RNA, 22 nt, Human
ugcagcauugcaaagcagucuu

SEQ ID NO: 739442 - RNA, 22 nt, Human
aaacaguaaguucuaguauuau

SEQ ID NO: 739443 - RNA, 22 nt, Human
ucuccucuauuucuguauguau

SEQ ID NO: 739444 - RNA, 22 nt, Human
cugagcugguguuucaggguca

SEQ ID NO: 739445 - RNA, 22 nt, Human
uaaucuguguaccuucaucgga

SEQ ID NO: 739446 - RNA, 22 nt, Human
agcaggugucggcgagggucuu

SEQ ID NO: 739447 - RNA, 22 nt, Human
agaagcacuacgauaggugguc

SEQ ID NO: 739448 - RNA, 22 nt, Human
aagccagauagaagaacucauu

SEQ ID NO: 739449 - RNA, 23 nt, Human
cugcuuccuugcuucauugcugg

SEQ ID NO: 739450 - RNA, 22 nt, Human
ugcauugguaaaauacauacac

SEQ ID NO: 739451 - RNA, 22 nt, Human
uaugcacauauaaccugcacug

SEQ ID NO: 739452 - RNA, 22 nt, Human
uccauaaaccagaaaaucaaga

SEQ ID NO: 739453 - RNA, 22 nt, Human
agggaugggucuaacccagaac

SEQ ID NO: 739454 - RNA, 22 nt, Human
gugggggcaggcagugcuagga

SEQ ID NO: 739455 - RNA, 22 nt, Human
gaagcaugcuaaggauucucag

SEQ ID NO: 739456 - RNA, 22 nt, Human
cuacauuuacacaguuaggcuu

SEQ ID NO: 739457 - RNA, 22 nt, Human
cugcagagcagccaguccccca

SEQ ID NO: 739458 - RNA, 22 nt, Human
aaguguagauuauggagugucu

SEQ ID NO: 739459 - RNA, 22 nt, Human
uggggagaagcaauagacucua

SEQ ID NO: 739460 - RNA, 23 nt, Human
agaugagccaacaccuccaugcc

SEQ ID NO: 739461 - RNA, 22 nt, Human
aggcagcugugaggacuggauu

SEQ ID NO: 739462 - RNA, 22 nt, Human
guuuuuauuguguaaauguggg

SEQ ID NO: 739463 - RNA, 22 nt, Human
gucagcauugcagauauauggc

SEQ ID NO: 739464 - RNA, 22 nt, Human
agucccagcuucccccaugcag

SEQ ID NO: 739465 - RNA, 22 nt, Human
uuccucugaaauggcuuggaaa

SEQ ID NO: 739466 - RNA, 22 nt, Human
uuauuagcugggcuucagggug

SEQ ID NO: 739467 - RNA, 23 nt, Human
aggcuuuaugguagaaaguuugc

SEQ ID NO: 739468 - RNA, 22 nt, Human
uagauacaggcucucugagccu

SEQ ID NO: 739469 - RNA, 22 nt, Human
ggcugcugguggaaugguaggc

SEQ ID NO: 739470 - RNA, 22 nt, Human
aauucacagcauuugcccaucu

SEQ ID NO: 739471 - RNA, 22 nt, Human
auugcuucaacuguucaauggg

SEQ ID NO: 739472 - RNA, 22 nt, Human
auucaguucuggcugccuuccu

SEQ ID NO: 739473 - RNA, 22 nt, Human
aaauaguuagcccugcauauau

SEQ ID NO: 739474 - RNA, 22 nt, Human
uggaugagucugagauugggca

SEQ ID NO: 739475 - RNA, 22 nt, Human
gagccaccuucaacucaggaau

SEQ ID NO: 739476 - RNA, 20 nt, Human
cuagaagcagaauugcugau

SEQ ID NO: 739477 - RNA, 22 nt, Human
aaggacugucuaaggccuccaa

SEQ ID NO: 739478 - RNA, 22 nt, Human
uagcagaaccagcagucaauuu

SEQ ID NO: 739479 - RNA, 22 nt, Human
gggagacaguucagauaguuuc

SEQ ID NO: 739480 - RNA, 20 nt, Human
acaguggaaauugaugucug

SEQ ID NO: 739481 - RNA, 22 nt, Human
uccaccauguaacaagcucugu

SEQ ID NO: 739482 - RNA, 22 nt, Human
gaaugcauucucuuagcaucua

SEQ ID NO: 739483 - RNA, 23 nt, Human
gggagccaggaccucgcgcccca

SEQ ID NO: 739484 - RNA, 22 nt, Human
aaaggcuggggacugaggaagg

SEQ ID NO: 739485 - RNA, 22 nt, Human
cuucuucaguugcauguauugg

SEQ ID NO: 739486 - RNA, 22 nt, Human
aacauguaaauaucauuguacu

SEQ ID NO: 739487 - RNA, 22 nt, Human
ugcagcucuguaugcugauuau

SEQ ID NO: 739488 - RNA, 22 nt, Human
aggccuguuccaggccccuuuu

SEQ ID NO: 739489 - RNA, 22 nt, Human
auguggcugaucgcagagcucu

SEQ ID NO: 739490 - RNA, 22 nt, Human
uucucugaagguuguggaacua

SEQ ID NO: 739491 - RNA, 22 nt, Human
ggagccaggggaccuucacaga

SEQ ID NO: 739492 - RNA, 22 nt, Human
acugcaaucuggauccuagaag

SEQ ID NO: 739493 - RNA, 22 nt, Human
accaggaaauuuggcaacaaag

SEQ ID NO: 739494 - RNA, 22 nt, Human
acuuagcaaaucuuuuggauuc

SEQ ID NO: 739495 - RNA, 22 nt, Human
cuccagggagcuguggagguuu

SEQ ID NO: 739496 - RNA, 22 nt, Human
ugucacaugacacaaauaucua

SEQ ID NO: 739497 - RNA, 22 nt, Human
uuucaauuccaccaaagcgccc

SEQ ID NO: 739498 - RNA, 22 nt, Human
uugggggaagaggauagacagu

SEQ ID NO: 739499 - RNA, 22 nt, Human
ugcagcugguaucccauggauu

SEQ ID NO: 739500 - RNA, 22 nt, Human
cgggcuggcugcagcugcugga

SEQ ID NO: 739501 - RNA, 22 nt, Human
gaggcgagaagcuggagauggu

SEQ ID NO: 739502 - RNA, 22 nt, Human
ucucaggacuccucuggccaua

SEQ ID NO: 739503 - RNA, 17 nt, Human
uggccagagcaggcccc

SEQ ID NO: 739504 - RNA, 22 nt, Human
aggaauuuagacagggcauaaa

SEQ ID NO: 739505 - RNA, 22 nt, Human
gcuccucccugugcagacccag

SEQ ID NO: 739506 - RNA, 22 nt, Human
aggaaagguucagugauugaaa

SEQ ID NO: 739507 - RNA, 22 nt, Human
cuggugagacgguugacaggag

SEQ ID NO: 739508 - RNA, 22 nt, Human
acaggucuacuggcaagcagug

SEQ ID NO: 739509 - RNA, 22 nt, Human
ugagccuguggggugacaacca

SEQ ID NO: 739510 - RNA, 19 nt, Human
cacaugagggcugagggac

SEQ ID NO: 739511 - RNA, 22 nt, Human
gcuggggugugguggauaagcu

SEQ ID NO: 739512 - RNA, 22 nt, Human
caguguacuuggaauguaacag

SEQ ID NO: 739513 - RNA, 22 nt, Human
gcagugcuuuagucuguccuuu

SEQ ID NO: 739514 - RNA, 22 nt, Human
gaaagcugggaaauaaauauua

SEQ ID NO: 739515 - RNA, 22 nt, Human
aaggcagcaccgccuccugaaa

SEQ ID NO: 739516 - RNA, 22 nt, Human
gugugcaggugucagugcagcu

SEQ ID NO: 739517 - RNA, 22 nt, Human
gcaggaguucaauugcccauga

SEQ ID NO: 739518 - RNA, 22 nt, Human
cugaggcugaagagggccuacg

SEQ ID NO: 739519 - RNA, 22 nt, Human
gcaggcaauuuuggaaggucag

SEQ ID NO: 739520 - RNA, 22 nt, Human
ucagcccagaccaccucauugc

SEQ ID NO: 739521 - RNA, 22 nt, Human
cuuaguuugcaugauuauggag

SEQ ID NO: 739522 - RNA, 22 nt, Human
uagguagauacauguguuggcu

SEQ ID NO: 739523 - RNA, 22 nt, Human
auaaagauuucuuuuucucuac

SEQ ID NO: 739524 - RNA, 22 nt, Human
gaucugguuucaucauggacuu

SEQ ID NO: 739525 - RNA, 22 nt, Human
aaggagaagucuguugagauug

SEQ ID NO: 739526 - RNA, 22 nt, Human
uagaggcuccuguguguagguu

SEQ ID NO: 739527 - RNA, 22 nt, Human
uauauugagauuugagcauugu

SEQ ID NO: 739528 - RNA, 22 nt, Human
aggagggcaggcuggcugccua

SEQ ID NO: 739529 - RNA, 22 nt, Human
cuguggcuaggaagcuguggga

SEQ ID NO: 739530 - RNA, 22 nt, Human
gcugagacuuccacugccaucu

SEQ ID NO: 739531 - RNA, 22 nt, Human
uugagguccagucuccacccac

SEQ ID NO: 739532 - RNA, 22 nt, Human
guggcccacuuacgucaugugu

SEQ ID NO: 739533 - RNA, 22 nt, Human
uagcuggcuuauauaaaagggc

SEQ ID NO: 739534 - RNA, 22 nt, Human
ccuggcucuucugugucagccc

SEQ ID NO: 739535 - RNA, 20 nt, Human
agcauuuuaugguaggaaac

SEQ ID NO: 739536 - RNA, 22 nt, Human
cccacucccuacgacacgcucc

SEQ ID NO: 739537 - RNA, 22 nt, Human
acagggcucgucgggcccucgg

SEQ ID NO: 739538 - RNA, 22 nt, Human
ugaucccaaucuuuccugcucc

SEQ ID NO: 739539 - RNA, 22 nt, Human
auaagugauauuuagcuauaga

SEQ ID NO: 739540 - RNA, 22 nt, Human
agaagucaauaguuguuugaug

SEQ ID NO: 739541 - RNA, 22 nt, Human
aggcuucaaggaccugagggaa

SEQ ID NO: 739542 - RNA, 22 nt, Human
aaaucaguuggaacacaagcag

SEQ ID NO: 739543 - RNA, 22 nt, Human
uauuaaagagagaaucaucauc

SEQ ID NO: 739544 - RNA, 22 nt, Human
guuccacagagucucacuauga

SEQ ID NO: 739545 - RNA, 22 nt, Human
auguuucaggaaaucagcuaga

SEQ ID NO: 739546 - RNA, 22 nt, Human
agcagggaauagcggaaagaau

SEQ ID NO: 739547 - RNA, 22 nt, Human
cuucuuaaugcauaaacugugu

SEQ ID NO: 739548 - RNA, 22 nt, Human
ucaggaauuuuguucuguaucc

SEQ ID NO: 739549 - RNA, 22 nt, Human
ccugggcagggagaccaggcuc

SEQ ID NO: 739550 - RNA, 22 nt, Human
ccucccuuuguugcaagggaaa

SEQ ID NO: 739551 - RNA, 22 nt, Human
uuuuccuacugauaaacaguua

SEQ ID NO: 739552 - RNA, 22 nt, Human
ucuaccagggucacagaggccc

SEQ ID NO: 739553 - RNA, 22 nt, Human
agaaagagcucgggauuaacag

SEQ ID NO: 739554 - RNA, 22 nt, Human
aauuaaaggucauguuaaaggg

SEQ ID NO: 739555 - RNA, 22 nt, Human
gcuuucuugguucugcaggggc

SEQ ID NO: 739556 - RNA, 21 nt, Human
ggaagcaguggcggcaacucc

SEQ ID NO: 739557 - RNA, 20 nt, Human
aaaugcuguaauguuuggga

SEQ ID NO: 739558 - RNA, 22 nt, Human
auauguuucaguauucaaguca

SEQ ID NO: 739559 - RNA, 22 nt, Human
gagaggcuuaagggcugugaag

SEQ ID NO: 739560 - RNA, 22 nt, Human
ugucuucaggaguaaauaucau

SEQ ID NO: 739561 - RNA, 22 nt, Human
uuguggcagaccaugagucuaa

SEQ ID NO: 739562 - RNA, 22 nt, Human
uccaucagauucccuccugaga

SEQ ID NO: 739563 - RNA, 22 nt, Human
ugcauugagucauuucaguaug

SEQ ID NO: 739564 - RNA, 22 nt, Human
cagcugaagagaggugcugagu

SEQ ID NO: 739565 - RNA, 22 nt, Human
uuagccauauagaaaaagagcu

SEQ ID NO: 739566 - RNA, 22 nt, Human
gcccucagcuugauguuguucu

SEQ ID NO: 739567 - RNA, 22 nt, Human
gaggcuggagauauuccaaucu

SEQ ID NO: 739568 - RNA, 22 nt, Human
ugaaauuaugcauuguuguacc

SEQ ID NO: 739569 - RNA, 22 nt, Human
ucagggcugcauacaggagaua

SEQ ID NO: 739570 - RNA, 22 nt, Human
ucagggagagugacccauccac

SEQ ID NO: 739571 - RNA, 22 nt, Human
uaagaugucauccacauagagu

SEQ ID NO: 739572 - RNA, 22 nt, Human
uuugacaagagggcaucuucag

SEQ ID NO: 739573 - RNA, 22 nt, Human
agggcuuugagaauaguggaac

SEQ ID NO: 739574 - RNA, 22 nt, Human
gcacccagauagcaaggauuag

SEQ ID NO: 739575 - RNA, 22 nt, Human
gagaguccuuaguuugcaggua

SEQ ID NO: 739576 - RNA, 22 nt, Human
ccagugauggugaucagauguu

SEQ ID NO: 739577 - RNA, 22 nt, Human
gcugauggcuugcuggcugaca

SEQ ID NO: 739578 - RNA, 22 nt, Human
gaagcgcggcgucggcgugggu

SEQ ID NO: 739579 - RNA, 16 nt, Human
agaggccacagacaga

SEQ ID NO: 739580 - RNA, 22 nt, Human
aaggaaaucuuuguaacaucuu

SEQ ID NO: 739581 - RNA, 22 nt, Human
agaggauguucuaggcacucau

SEQ ID NO: 739582 - RNA, 22 nt, Human
uccuggagggcucacaggcggc

SEQ ID NO: 739583 - RNA, 22 nt, Human
gacucagagaucccuggagguc

SEQ ID NO: 739584 - RNA, 22 nt, Human
uggaggcauugugacugcugaa

SEQ ID NO: 739585 - RNA, 22 nt, Human
gcaggagcugcucuccugacga

SEQ ID NO: 739586 - RNA, 22 nt, Human
gaaauguauuugacaguccuug

SEQ ID NO: 739587 - RNA, 22 nt, Human
gccgaggcucugcccagcugcu

SEQ ID NO: 739588 - RNA, 22 nt, Human
cucuggcugccucucaggccug

SEQ ID NO: 739589 - RNA, 23 nt, Human
ugcagacuucgaggagggggaua

SEQ ID NO: 739590 - RNA, 23 nt, Human
uguaacuugauggaaugagcuau

SEQ ID NO: 739591 - RNA, 22 nt, Human
aguaccaugcuuccugacuggu

SEQ ID NO: 739592 - RNA, 22 nt, Human
ugagaacauugggaaagcuaug

SEQ ID NO: 739593 - RNA, 22 nt, Human
gugccagagcaaucaggcucug

SEQ ID NO: 739594 - RNA, 22 nt, Human
gcuggugucuaaccuggcucuu

SEQ ID NO: 739595 - RNA, 22 nt, Human
ccugggucuugguucaugcucu

SEQ ID NO: 739596 - RNA, 22 nt, Human
auucuguauggaaaagcacuau

SEQ ID NO: 739597 - RNA, 22 nt, Human
ggggagcagaagcagcaacaac

SEQ ID NO: 739598 - RNA, 22 nt, Human
uuugaaagcuacuuucggguca

SEQ ID NO: 739599 - RNA, 22 nt, Human
ugugugccugagccgugccugg

SEQ ID NO: 739600 - RNA, 22 nt, Human
uuacaacugaagcuaaugugcu

SEQ ID NO: 739601 - RNA, 18 nt, Human
aggcacagagcauacaua

SEQ ID NO: 739602 - RNA, 22 nt, Human
aaggcaagguucaccgugcuau

SEQ ID NO: 739603 - RNA, 21 nt, Human
ugacagcauagagcagggagg

SEQ ID NO: 739604 - RNA, 22 nt, Human
ucugagcuuuagcugggauuuu

SEQ ID NO: 739605 - RNA, 22 nt, Human
gccccuccauccaucaccgggg

SEQ ID NO: 739606 - RNA, 22 nt, Human
ggaaacaaaccacucauggugg

SEQ ID NO: 739607 - RNA, 22 nt, Human
ugguggcagagcaagagcugga

SEQ ID NO: 739608 - RNA, 21 nt, Human
aaguaaaucagagaaauaacc

SEQ ID NO: 739609 - RNA, 22 nt, Human
uuaaagcaguuuguauacaugg

SEQ ID NO: 739610 - RNA, 22 nt, Human
agcuguuguuaauuaacucauu

SEQ ID NO: 739611 - RNA, 22 nt, Human
agaaagcagucccuuccgaccg

SEQ ID NO: 739612 - RNA, 20 nt, Human
ucagcaugcuccucagacau

SEQ ID NO: 739613 - RNA, 18 nt, Human
ucucuucuuggcagucaa

SEQ ID NO: 739614 - RNA, 22 nt, Human
agcauuuagucuuuauugcagc

SEQ ID NO: 739615 - RNA, 22 nt, Human
guuucagagguguucauuuuca

SEQ ID NO: 739616 - RNA, 18 nt, Human
accaggaagcuucuuguc

SEQ ID NO: 739617 - RNA, 22 nt, Human
uaugacagcaaauauccaugag

SEQ ID NO: 739618 - RNA, 22 nt, Human
uaaugaauaaacuugagaguca

SEQ ID NO: 739619 - RNA, 22 nt, Human
acacuguguuuacauagagaau

SEQ ID NO: 739620 - RNA, 22 nt, Human
agauuucaaugugagcauuagu

SEQ ID NO: 739621 - RNA, 16 nt, Human
ccccaggacuuggcac

SEQ ID NO: 739622 - RNA, 22 nt, Human
gccucugucauagcucauguga

SEQ ID NO: 739623 - RNA, 22 nt, Human
uugcaaauaauagccugaaacu

SEQ ID NO: 739624 - RNA, 22 nt, Human
accucgaguucuuucaauucac

SEQ ID NO: 739625 - RNA, 23 nt, Human
aggcauggcauggaugguggcuc

SEQ ID NO: 739626 - RNA, 22 nt, Human
ucccugggcaaguuuacucuuc

SEQ ID NO: 739627 - RNA, 22 nt, Human
acauuucucuugaugucucuau

SEQ ID NO: 739628 - RNA, 22 nt, Human
agcugggugaaggcagauggcu

SEQ ID NO: 739629 - RNA, 22 nt, Human
ugaguccaauaggggccuggaa

SEQ ID NO: 739630 - RNA, 22 nt, Human
uugaaugauuaaagucaucuga

SEQ ID NO: 739631 - RNA, 22 nt, Human
aaguaacaugggaacaucugaa

SEQ ID NO: 739632 - RNA, 22 nt, Human
ugccugggugcuggcuggucac

SEQ ID NO: 739633 - RNA, 22 nt, Human
ugaaggaagaauaggcaguguu

SEQ ID NO: 739634 - RNA, 22 nt, Human
ggcagauguuauaugaucugag

SEQ ID NO: 739635 - RNA, 22 nt, Human
aauaucuguggccauacaauuu

SEQ ID NO: 739636 - RNA, 22 nt, Human
agaaaggaggaagaaugaccuc

SEQ ID NO: 739637 - RNA, 23 nt, Human
aaugcauuaauuugggagaguac

SEQ ID NO: 739638 - RNA, 22 nt, Human
ccagcaucgacuuccugccuga

SEQ ID NO: 739639 - RNA, 22 nt, Human
gucaggcugccagucuuuauug

SEQ ID NO: 739640 - RNA, 22 nt, Human
gggccagcucugugauguaggg

SEQ ID NO: 739641 - RNA, 22 nt, Human
uuuauucuagcucagaauaguu

SEQ ID NO: 739642 - RNA, 22 nt, Human
gccaggcuggucuugaacuccu

SEQ ID NO: 739643 - RNA, 22 nt, Human
ggagagcugaagcauggacagg

SEQ ID NO: 739644 - RNA, 22 nt, Human
ugagggugugcggcccagacag

SEQ ID NO: 739645 - RNA, 22 nt, Human
uccagggcucauucccucugca

SEQ ID NO: 739646 - RNA, 22 nt, Human
gggcagcaugaggacccucauc

SEQ ID NO: 739647 - RNA, 22 nt, Human
uuugguuugaaugagcauaaga

SEQ ID NO: 739648 - RNA, 23 nt, Human
ggccucuguguucugcccacaug

SEQ ID NO: 739649 - RNA, 23 nt, Human
aguaacaugcaaauaacagucug

SEQ ID NO: 739650 - RNA, 22 nt, Human
gagaaggagcucaaauauggcu

SEQ ID NO: 739651 - RNA, 22 nt, Human
cauuauggaagacaguguggug

SEQ ID NO: 739652 - RNA, 22 nt, Human
caguugcuggaugugcagcucu

SEQ ID NO: 739653 - RNA, 22 nt, Human
uaaaugcuccauacauacacca

SEQ ID NO: 739654 - RNA, 23 nt, Human
ucaucaaaggaaguacgugucac

SEQ ID NO: 739655 - RNA, 22 nt, Human
acagggaccuuggaagcuggaa

SEQ ID NO: 739656 - RNA, 22 nt, Human
caggcagagugagaagcccuug

SEQ ID NO: 739657 - RNA, 22 nt, Human
uuccaagugggggaagcugagu

SEQ ID NO: 739658 - RNA, 22 nt, Human
guaugugagguugguuuccagg

SEQ ID NO: 739659 - RNA, 22 nt, Human
gacaugcaguucucaaggguag

SEQ ID NO: 739660 - RNA, 22 nt, Human
cuguuucccuccagggggugga

SEQ ID NO: 739661 - RNA, 22 nt, Human
ucuggcuguguaagguagcacc

SEQ ID NO: 739662 - RNA, 22 nt, Human
ucagaacaucccagauaguaga

SEQ ID NO: 739663 - RNA, 22 nt, Human
uggguaaaaugaguuaggagaa

SEQ ID NO: 739664 - RNA, 21 nt, Human
agcuggcucucucuggagaga

SEQ ID NO: 739665 - RNA, 22 nt, Human
aguggcagcugucaugcccuag

SEQ ID NO: 739666 - RNA, 19 nt, Human
ggcagugagaagacuccug

SEQ ID NO: 739667 - RNA, 18 nt, Human
auguucauauuuuuaggg

SEQ ID NO: 739668 - RNA, 22 nt, Human
cacaauuagcagcucuuuauuu

SEQ ID NO: 739669 - RNA, 22 nt, Human
cucucugggguuccagacgugg

SEQ ID NO: 739670 - RNA, 22 nt, Human
cugagugaggggagcuugaugg

SEQ ID NO: 739671 - RNA, 22 nt, Human
agagaaacaggucagcugggag

SEQ ID NO: 739672 - RNA, 22 nt, Human
gaacagcucugaagcaguaaau

SEQ ID NO: 739673 - RNA, 22 nt, Human
gcaugcaucuagauaugcagac

SEQ ID NO: 739674 - RNA, 22 nt, Human
aagccucuggggccucaucugu

SEQ ID NO: 739675 - RNA, 22 nt, Human
cagcagaaacccagcaaagcca

SEQ ID NO: 739676 - RNA, 22 nt, Human
cucucagaaguagcacgugggc

SEQ ID NO: 739677 - RNA, 22 nt, Human
uguguuaauuuauugccucaga

SEQ ID NO: 739678 - RNA, 23 nt, Human
ccacagagcugccaauuccugug

SEQ ID NO: 739679 - RNA, 22 nt, Human
aggggaagagcccuuuacaugg

SEQ ID NO: 739680 - RNA, 16 nt, Human
ccagguggggcuguga

SEQ ID NO: 739681 - RNA, 22 nt, Human
agucugccuuuccaaucccgug

SEQ ID NO: 739682 - RNA, 22 nt, Human
aggaggguggggucugccuguc

SEQ ID NO: 739683 - RNA, 22 nt, Human
auggcagggacuguggcccuug

SEQ ID NO: 739684 - RNA, 22 nt, Human
auucuacauuuggagugauguc

SEQ ID NO: 739685 - RNA, 22 nt, Human
gcagggcaguaagagcuagagu

SEQ ID NO: 739686 - RNA, 22 nt, Human
aggaagugcuaagagaacauca

SEQ ID NO: 739687 - RNA, 22 nt, Human
cuggacagaaaccaguccuggg

SEQ ID NO: 739688 - RNA, 20 nt, Human
ucagaggcugccagcugggg

SEQ ID NO: 739689 - RNA, 16 nt, Human
cgccucccucccucgc

SEQ ID NO: 739690 - RNA, 23 nt, Human
cauauucaaaacuggaccacucu

SEQ ID NO: 739691 - RNA, 22 nt, Human
gugauugcccagcaccauuguu

SEQ ID NO: 739692 - RNA, 22 nt, Human
uuuauugcauacacaaauguca

SEQ ID NO: 739693 - RNA, 22 nt, Human
uagcuucuggaguguuugaaaa

SEQ ID NO: 739694 - RNA, 22 nt, Human
uucugcuuuucucugucugagu

SEQ ID NO: 739695 - RNA, 22 nt, Human
gccucccuguagaggccagccu

SEQ ID NO: 739696 - RNA, 22 nt, Human
uacauacacaaaugcugaaugg

SEQ ID NO: 739697 - RNA, 22 nt, Human
ggagcagccacgucucagggca

SEQ ID NO: 739698 - RNA, 22 nt, Human
aaccacaacacuaaaugcuggu

SEQ ID NO: 739699 - RNA, 21 nt, Human
uuaauuuauucaugauagcua

SEQ ID NO: 739700 - RNA, 22 nt, Human
uggugcagaugcaggucacugg

SEQ ID NO: 739701 - RNA, 22 nt, Human
aaccuggaggacugcaauccau

SEQ ID NO: 739702 - RNA, 22 nt, Human
ucuggguguagggccuggcaac

SEQ ID NO: 739703 - RNA, 22 nt, Human
ugugugaacucucugauguaca

SEQ ID NO: 739704 - RNA, 21 nt, Human
cccugguuccacugucaccgc

SEQ ID NO: 739705 - RNA, 22 nt, Human
cugcuuucugcaccccaggucg

SEQ ID NO: 739706 - RNA, 22 nt, Human
ugcuccagccuaugcucuccgg

SEQ ID NO: 739707 - RNA, 22 nt, Human
gaagcacugugcugcuaaguug

SEQ ID NO: 739708 - RNA, 22 nt, Human
acuccaguuaccuuggcugagg

SEQ ID NO: 739709 - RNA, 20 nt, Human
ggaagcagagaacuguuuuc

SEQ ID NO: 739710 - RNA, 22 nt, Human
ugcugagauaagcuaugaccag

SEQ ID NO: 739711 - RNA, 22 nt, Human
uucacaaacuucaugauggcac

SEQ ID NO: 739712 - RNA, 22 nt, Human
acacagaaccucauagccucuc

SEQ ID NO: 739713 - RNA, 22 nt, Human
auuuacacauucauaagauuuc

SEQ ID NO: 739714 - RNA, 22 nt, Human
aggacacacagaauacaaaucc

SEQ ID NO: 739715 - RNA, 22 nt, Human
ccuaaguaaguugacuuucaga

SEQ ID NO: 739716 - RNA, 22 nt, Human
gccagagccacuuuugggugau

SEQ ID NO: 739717 - RNA, 22 nt, Human
ugcugccuucuaggcgugcccu

SEQ ID NO: 739718 - RNA, 22 nt, Human
aaacucaaguuucuuaauguca

SEQ ID NO: 739719 - RNA, 22 nt, Human
ggguuagguucuagaggcacaa

SEQ ID NO: 739720 - RNA, 22 nt, Human
acaaugaaagguauucugaacu

SEQ ID NO: 739721 - RNA, 20 nt, Human
ucuguguuucagcugcuuga

SEQ ID NO: 739722 - RNA, 22 nt, Human
caggaucccuggccuccgccca

SEQ ID NO: 739723 - RNA, 22 nt, Human
ugugucagaaggcaauggggau

SEQ ID NO: 739724 - RNA, 22 nt, Human
uucaugaaacuuaacuguuggg

SEQ ID NO: 739725 - RNA, 22 nt, Human
caggagccagaggcggauggag

SEQ ID NO: 739726 - RNA, 22 nt, Human
aguugcucaauguggcugugga

SEQ ID NO: 739727 - RNA, 22 nt, Human
auacaaagacaaaucucaaucu

SEQ ID NO: 739728 - RNA, 22 nt, Human
aacaauuaucauauacauugca

SEQ ID NO: 739729 - RNA, 23 nt, Human
cccuaacuaauucuagggccuaa

SEQ ID NO: 739730 - RNA, 22 nt, Human
aguguccugugucccagacugu

SEQ ID NO: 739731 - RNA, 22 nt, Human
auucuaaauguaauuuagaauu

SEQ ID NO: 739732 - RNA, 22 nt, Human
ucucucauaagaugaguacuua

SEQ ID NO: 739733 - RNA, 18 nt, Human
uuugcugaugagcaucau

SEQ ID NO: 739734 - RNA, 22 nt, Human
ggugggagugggcacaguuacg

SEQ ID NO: 739735 - RNA, 22 nt, Human
agcccagcagaaaguccagccu

SEQ ID NO: 739736 - RNA, 22 nt, Human
gguggcggccacuucagcccug

SEQ ID NO: 739737 - RNA, 22 nt, Human
agggugccuggaagccacucac

SEQ ID NO: 739738 - RNA, 22 nt, Human
ucaauguucuugguauauccuu

SEQ ID NO: 739739 - RNA, 22 nt, Human
uuugcacuagcauuuguccaug

SEQ ID NO: 739740 - RNA, 22 nt, Human
cagcugagcucccaggccauca

SEQ ID NO: 739741 - RNA, 22 nt, Human
uaaaguucuggugagagguaag

SEQ ID NO: 739742 - RNA, 22 nt, Human
agugucuguugaguuucaaaag

SEQ ID NO: 739743 - RNA, 22 nt, Human
cauggcagagaaggggaacugg

SEQ ID NO: 739744 - RNA, 22 nt, Human
agugucuuugacacauucaaag

SEQ ID NO: 739745 - RNA, 22 nt, Human
gaaccuggaauguggcgcccaa

SEQ ID NO: 739746 - RNA, 22 nt, Human
uaauacagggcacuuugaguga

SEQ ID NO: 739747 - RNA, 22 nt, Human
ucuggagcugggggcuuaguau

SEQ ID NO: 739748 - RNA, 22 nt, Human
cugggggccuuacggaacucca

SEQ ID NO: 739749 - RNA, 22 nt, Human
aaaugcaucagcucauaagaga

SEQ ID NO: 739750 - RNA, 22 nt, Human
acaguuauucuuuaugcaacca

SEQ ID NO: 739751 - RNA, 22 nt, Human
gcaaagcaucaguagaaauguu

SEQ ID NO: 739752 - RNA, 22 nt, Human
ugaaaauuaagcagaugaauga

SEQ ID NO: 739753 - RNA, 22 nt, Human
augacagaggagugcaggugau

SEQ ID NO: 739754 - RNA, 22 nt, Human
gcagcagaaguagaaguacagg

SEQ ID NO: 739755 - RNA, 22 nt, Human
gugcuuuacuggcagugaugua

SEQ ID NO: 739756 - RNA, 20 nt, Human
aaucugaaucccaguccuag

SEQ ID NO: 739757 - RNA, 22 nt, Human
ucauuuacacuucacaaaugga

SEQ ID NO: 739758 - RNA, 22 nt, Human
ucccugggguuccuccagccac

SEQ ID NO: 739759 - RNA, 22 nt, Human
uucaguuucuucccugugaaau

SEQ ID NO: 739760 - RNA, 22 nt, Human
aggccccaucaggaaggaggcc

SEQ ID NO: 739761 - RNA, 19 nt, Human
ggcaccuuggucuuggacu

SEQ ID NO: 739762 - RNA, 22 nt, Human
aaggcaguaggaucuuccacag

SEQ ID NO: 739763 - RNA, 22 nt, Human
ucugccuuuucacugccacuaa

SEQ ID NO: 739764 - RNA, 22 nt, Human
aagggugggcaccgccagguca

SEQ ID NO: 739765 - RNA, 22 nt, Human
gcugggcugagcuagacuuggc

SEQ ID NO: 739766 - RNA, 22 nt, Human
augacagaaggccucccugaca

SEQ ID NO: 739767 - RNA, 22 nt, Human
aaccugagauacuggucuuuau

SEQ ID NO: 739768 - RNA, 22 nt, Human
cuugcuugauuaugaucauaaa

SEQ ID NO: 739769 - RNA, 21 nt, Human
gcuggagagccaggcaggggc

SEQ ID NO: 739770 - RNA, 22 nt, Human
uacacaacugacaaccauucug

SEQ ID NO: 739771 - RNA, 22 nt, Human
uuuaaugauagucuuacgaaaa

SEQ ID NO: 739772 - RNA, 22 nt, Human
uuggaaggcagcauuuguccau

SEQ ID NO: 739773 - RNA, 21 nt, Human
ggcagaaguagcauggacggg

SEQ ID NO: 739774 - RNA, 20 nt, Human
agugcaagaaagcacagcug

SEQ ID NO: 739775 - RNA, 22 nt, Human
cagcagcucaggcuccuuccca

SEQ ID NO: 739776 - RNA, 22 nt, Human
acacuacaaucucagaacuaua

SEQ ID NO: 739777 - RNA, 22 nt, Human
uaaggcauuagagugaaagcaa

SEQ ID NO: 739778 - RNA, 22 nt, Human
cauuugucaucacugagcugcc

SEQ ID NO: 739779 - RNA, 18 nt, Human
gccagugcccuggcucac

SEQ ID NO: 739780 - RNA, 22 nt, Human
uugcauuucacuuucaguaggc

SEQ ID NO: 739781 - RNA, 22 nt, Human
uaccuuggaggccaagcaguuu

SEQ ID NO: 739782 - RNA, 22 nt, Human
cucugagaauauaagacuauuu

SEQ ID NO: 739783 - RNA, 22 nt, Human
aucuuugaaucaaugaaucagu

SEQ ID NO: 739784 - RNA, 22 nt, Human
ucugagaguagagcugccucuu

SEQ ID NO: 739785 - RNA, 22 nt, Human
ucuccuugacaggcaggcagac

SEQ ID NO: 739786 - RNA, 22 nt, Human
ccagcuuucucagaggcuucua

SEQ ID NO: 739787 - RNA, 22 nt, Human
gggcugagaaguugaucccaag

SEQ ID NO: 739788 - RNA, 21 nt, Human
aggagcugugugcuuccuuuc

SEQ ID NO: 739789 - RNA, 22 nt, Human
agagccugcuguguaagucaca

SEQ ID NO: 739790 - RNA, 22 nt, Human
uauauggauagugaucauaaga

SEQ ID NO: 739791 - RNA, 22 nt, Human
acaguaaggguaaauaagaaca

SEQ ID NO: 739792 - RNA, 23 nt, Human
auucuucauuaucuucuagaaaa

SEQ ID NO: 739793 - RNA, 22 nt, Human
ccacagagcauuagauuucaga

SEQ ID NO: 739794 - RNA, 20 nt, Human
cagagccaagagcagcaucu

SEQ ID NO: 739795 - RNA, 22 nt, Human
agcaaagcugauuaagagcaca

SEQ ID NO: 739796 - RNA, 22 nt, Human
ucacuagucaucaacuuccauu

SEQ ID NO: 739797 - RNA, 22 nt, Human
aaguuuagucuugucuuaguaa

SEQ ID NO: 739798 - RNA, 22 nt, Human
cuucucuggcagaugugugucc

SEQ ID NO: 739799 - RNA, 22 nt, Human
aacacuucuguugauaauaagc

SEQ ID NO: 739800 - RNA, 22 nt, Human
auucuuauuuaaauagagucug

SEQ ID NO: 739801 - RNA, 17 nt, Human
gcacauguguucuuuua

SEQ ID NO: 739802 - RNA, 22 nt, Human
ccauggcauuuuaugugucuua

SEQ ID NO: 739803 - RNA, 22 nt, Human
aggaggguacaauggguggaaa

SEQ ID NO: 739804 - RNA, 22 nt, Human
uuaugagacuguuuuacacacu

SEQ ID NO: 739805 - RNA, 22 nt, Human
ggggcagcuaccggaaguaggg

SEQ ID NO: 739806 - RNA, 22 nt, Human
acauguguacauauauaugugc

SEQ ID NO: 739807 - RNA, 22 nt, Human
acugcuuuucuaagauucugug

SEQ ID NO: 739808 - RNA, 22 nt, Human
gggcccuggggauguggacgcg

SEQ ID NO: 739809 - RNA, 22 nt, Human
gaacauucacagacucaccauu

SEQ ID NO: 739810 - RNA, 22 nt, Human
ccugcccugucacuggcuaggg

SEQ ID NO: 739811 - RNA, 21 nt, Human
gcacccagccgguucucccag

SEQ ID NO: 739812 - RNA, 22 nt, Human
cauuggaaaaugcaugcuuuuu

SEQ ID NO: 739813 - RNA, 22 nt, Human
uucacagcuuaauaaggcucag

SEQ ID NO: 739814 - RNA, 22 nt, Human
ucacaauauuuaucuuccaauu

SEQ ID NO: 739815 - RNA, 22 nt, Human
uuuuaugaagauaauuuucuga

SEQ ID NO: 739816 - RNA, 22 nt, Human
ucaaagcaugguuuugaaagac

SEQ ID NO: 739817 - RNA, 22 nt, Human
caucagagucagagcucuuucu

SEQ ID NO: 739818 - RNA, 22 nt, Human
caaugauggcuaggcagcugcu

SEQ ID NO: 739819 - RNA, 22 nt, Human
uuacacagugaauuuacucaag

SEQ ID NO: 739820 - RNA, 22 nt, Human
uggguuuaaacucaacucuaaa

SEQ ID NO: 739821 - RNA, 22 nt, Human
agcuucucuggucuucugccaa

SEQ ID NO: 739822 - RNA, 22 nt, Human
cccugccuuguuggagccuaug

SEQ ID NO: 739823 - RNA, 22 nt, Human
agcucuuacauuuaggucuaug

SEQ ID NO: 739824 - RNA, 22 nt, Human
cggcuucaguaauuccaugucc

SEQ ID NO: 739825 - RNA, 22 nt, Human
ucaccugggagggcugugguag

SEQ ID NO: 739826 - RNA, 22 nt, Human
ggcuagggagacagagggcaug

SEQ ID NO: 739827 - RNA, 22 nt, Human
auauaaguguguggcuguuagu

SEQ ID NO: 739828 - RNA, 22 nt, Human
caagguuucuaugcucaaagga

SEQ ID NO: 739829 - RNA, 22 nt, Human
uuguacaacguuuuaaauuuga

SEQ ID NO: 739830 - RNA, 22 nt, Human
ugugucucaagucagagcauca

SEQ ID NO: 739831 - RNA, 22 nt, Human
aguguauucugcaugggagacu

SEQ ID NO: 739832 - RNA, 23 nt, Human
uccuccuuuugcuugugcuuccc

SEQ ID NO: 739833 - RNA, 22 nt, Human
uucaggaaauuggaguccuucu

SEQ ID NO: 739834 - RNA, 22 nt, Human
ccagcugguguuccuuaggacc

SEQ ID NO: 739835 - RNA, 22 nt, Human
ccuucaaaguacacaucuuuau

SEQ ID NO: 739836 - RNA, 23 nt, Human
uucugggcuguggaagccucggg

SEQ ID NO: 739837 - RNA, 18 nt, Human
gaggaacauucaccuccu

SEQ ID NO: 739838 - RNA, 22 nt, Human
ugccuucaaucaggauggucuc

SEQ ID NO: 739839 - RNA, 22 nt, Human
aacccagccguguagcugccgc

SEQ ID NO: 739840 - RNA, 20 nt, Human
uucaugcuggaggggcuggc

SEQ ID NO: 739841 - RNA, 22 nt, Human
aagcuguguaaguugcuugguu

SEQ ID NO: 739842 - RNA, 22 nt, Human
acaaacaucuugaccucagauu

SEQ ID NO: 739843 - RNA, 19 nt, Human
agcuuuuacuaacagcaga

SEQ ID NO: 739844 - RNA, 22 nt, Human
ccauuguaaagaguauacuuug

SEQ ID NO: 739845 - RNA, 22 nt, Human
cuuacauuuaaucaugugucau

SEQ ID NO: 739846 - RNA, 22 nt, Human
cccagcaggaggagguugcagu

SEQ ID NO: 739847 - RNA, 22 nt, Human
uauggcuuuucuuuccuagugu

SEQ ID NO: 739848 - RNA, 22 nt, Human
uguggagacuauagccauaaca

SEQ ID NO: 739849 - RNA, 22 nt, Human
gagcucagccugaggccuggcu

SEQ ID NO: 739850 - RNA, 22 nt, Human
ggaggccuagccagcuccaguu

SEQ ID NO: 739851 - RNA, 22 nt, Human
uuuagggaaauugaggguuaag

SEQ ID NO: 739852 - RNA, 22 nt, Human
cauaacauguacauauaaaugc

SEQ ID NO: 739853 - RNA, 22 nt, Human
acacauguaaaacacuuagcaa

SEQ ID NO: 739854 - RNA, 22 nt, Human
gacuguacgucauugaaggcca

SEQ ID NO: 739855 - RNA, 17 nt, Human
augcucuauagucagug

SEQ ID NO: 739856 - RNA, 22 nt, Human
agcaucugcuuaauggcuuaac

SEQ ID NO: 739857 - RNA, 22 nt, Human
gugaagacuuggagaaguuaag

SEQ ID NO: 739858 - RNA, 22 nt, Human
ugauugaagaggugaggaaguu

SEQ ID NO: 739859 - RNA, 22 nt, Human
ucuucugaugccaguaaccaug

SEQ ID NO: 739860 - RNA, 23 nt, Human
gccuggccaccccagggcugcuu

SEQ ID NO: 739861 - RNA, 22 nt, Human
cacuucaaucucugccuccauc

SEQ ID NO: 739862 - RNA, 22 nt, Human
agcagguguaucggucaccuac

SEQ ID NO: 739863 - RNA, 22 nt, Human
ccagcauggcaccugagaugag

SEQ ID NO: 739864 - RNA, 22 nt, Human
agggugcagaaggagccuagga

SEQ ID NO: 739865 - RNA, 22 nt, Human
auauagaucaaaugaugcuaau

SEQ ID NO: 739866 - RNA, 22 nt, Human
cuuauuagugucugucugaguu

SEQ ID NO: 739867 - RNA, 20 nt, Human
uacuggaaauuucuccaccu

SEQ ID NO: 739868 - RNA, 22 nt, Human
ugggguucuuuguuuccugccu

SEQ ID NO: 739869 - RNA, 22 nt, Human
ugccaucucuuccucgugcugc

SEQ ID NO: 739870 - RNA, 21 nt, Human
ucgugcagcagcugaggcuug

SEQ ID NO: 739871 - RNA, 22 nt, Human
cccagcuccuuguuugcaucuc

SEQ ID NO: 739872 - RNA, 22 nt, Human
agagagcucugaugggagguga

SEQ ID NO: 739873 - RNA, 22 nt, Human
cugaaggauguguggugggagu

SEQ ID NO: 739874 - RNA, 22 nt, Human
ugcugccugguuucuucuugcu

SEQ ID NO: 739875 - RNA, 22 nt, Human
cugaggccucguuggcuggaac

SEQ ID NO: 739876 - RNA, 22 nt, Human
ucaggauccauagacucccaaa

SEQ ID NO: 739877 - RNA, 22 nt, Human
ugacaacaucauuuuugugugg

SEQ ID NO: 739878 - RNA, 22 nt, Human
cuauuucugccuaaugaccugu

SEQ ID NO: 739879 - RNA, 19 nt, Human
ugagaggcuuaaggcagcu

SEQ ID NO: 739880 - RNA, 22 nt, Human
ucuauuuuauacucaaaucuuc

SEQ ID NO: 739881 - RNA, 22 nt, Human
aagauucuguauuucuaacaau

SEQ ID NO: 739882 - RNA, 22 nt, Human
uagucaaaccucagaauacccc

SEQ ID NO: 739883 - RNA, 22 nt, Human
ugucuacuugggcucuacagca

SEQ ID NO: 739884 - RNA, 18 nt, Human
cuuggagaacuaaugaua

SEQ ID NO: 739885 - RNA, 22 nt, Human
ccagggcuuuaucugccuuuga

SEQ ID NO: 739886 - RNA, 21 nt, Human
ugccagcauguaggcuaguug

SEQ ID NO: 739887 - RNA, 20 nt, Human
cagugaggaggugcuggggg

SEQ ID NO: 739888 - RNA, 22 nt, Human
ucacugcaaggaggcuucucaa

SEQ ID NO: 739889 - RNA, 22 nt, Human
accaaggaagaaucuauuugag

SEQ ID NO: 739890 - RNA, 22 nt, Human
ucagagaaauaauugcugaguu

SEQ ID NO: 739891 - RNA, 22 nt, Human
cuccaggccaagauuaaguaau

SEQ ID NO: 739892 - RNA, 22 nt, Human
ugaaagcagugauuucuccuuc

SEQ ID NO: 739893 - RNA, 22 nt, Human
aggagguguugauagaagguuu

SEQ ID NO: 739894 - RNA, 22 nt, Human
ucuuuaaucauaaccaagaugg

SEQ ID NO: 739895 - RNA, 22 nt, Human
agcgggucugcaagccuucccu

SEQ ID NO: 739896 - RNA, 22 nt, Human
auggcccuuuauuccuucuucc

SEQ ID NO: 739897 - RNA, 22 nt, Human
cuccuaggugcucacugggguc

SEQ ID NO: 739898 - RNA, 22 nt, Human
agauacauuguucuaagcauug

SEQ ID NO: 739899 - RNA, 22 nt, Human
uggucugacuacaauaggaaga

SEQ ID NO: 739900 - RNA, 22 nt, Human
uccagggaugccagccauguug

SEQ ID NO: 739901 - RNA, 22 nt, Human
augcauauguacuugcauaugu

SEQ ID NO: 739902 - RNA, 22 nt, Human
ugauuguaugauugaaauauuu

SEQ ID NO: 739903 - RNA, 22 nt, Human
gcugccuuaugucuauuaguau

SEQ ID NO: 739904 - RNA, 22 nt, Human
cugucuggaugugagucaccua

SEQ ID NO: 739905 - RNA, 22 nt, Human
ccaggcuggaaucaauauucug

SEQ ID NO: 739906 - RNA, 22 nt, Human
agauguggaacacuagacugcu

SEQ ID NO: 739907 - RNA, 22 nt, Human
accucccuccaucuggacacua

SEQ ID NO: 739908 - RNA, 21 nt, Human
agacuucuagaagugagauag

SEQ ID NO: 739909 - RNA, 22 nt, Human
caagcuuuccauuacacacauu

SEQ ID NO: 739910 - RNA, 22 nt, Human
ugccuuuaggggccucucccuc

SEQ ID NO: 739911 - RNA, 22 nt, Human
uuuauaguuauauacagauguu

SEQ ID NO: 739912 - RNA, 22 nt, Human
uacaacuuccagcuuucagccc

SEQ ID NO: 739913 - RNA, 22 nt, Human
ucugggaaacacugcaucccca

SEQ ID NO: 739914 - RNA, 20 nt, Human
ugggccucuggugccucugg

SEQ ID NO: 739915 - RNA, 22 nt, Human
ccagggcuggguuugucggugu

SEQ ID NO: 739916 - RNA, 22 nt, Human
guguccugccacccugggcuuu

SEQ ID NO: 739917 - RNA, 22 nt, Human
aggagcugaagucucugcacuc

SEQ ID NO: 739918 - RNA, 22 nt, Human
agcagcauccccggccuccacc

SEQ ID NO: 739919 - RNA, 22 nt, Human
ggccucagggucacucuguaga

SEQ ID NO: 739920 - RNA, 22 nt, Human
aaccuguuuucuucucaucuag

SEQ ID NO: 739921 - RNA, 22 nt, Human
gcaagcugcuuaagcucauugu

SEQ ID NO: 739922 - RNA, 22 nt, Human
guggagcccugccuugcucaug

SEQ ID NO: 739923 - RNA, 22 nt, Human
cugaggaguuggugaauaagcc

SEQ ID NO: 739924 - RNA, 22 nt, Human
acaguggcucaugccugucauc

SEQ ID NO: 739925 - RNA, 22 nt, Human
gccuccugcccagaugagugau

SEQ ID NO: 739926 - RNA, 22 nt, Human
aacugcaguuacuuuugcacca

SEQ ID NO: 739927 - RNA, 22 nt, Human
cugcuuccauggucuggagacu

SEQ ID NO: 739928 - RNA, 22 nt, Human
ggaagcugguaauuguugggac

SEQ ID NO: 739929 - RNA, 22 nt, Human
caugugugugagggaaacaugu

SEQ ID NO: 739930 - RNA, 22 nt, Human
gaggccagacugccuuuuauga

SEQ ID NO: 739931 - RNA, 22 nt, Human
uaacuacaagggcggucucugu

SEQ ID NO: 739932 - RNA, 22 nt, Human
cagcucugcugguggugccagg

SEQ ID NO: 739933 - RNA, 22 nt, Human
uaaguguuauuauucucacuuu

SEQ ID NO: 739934 - RNA, 22 nt, Human
ugaggcucuaugugguagauua

SEQ ID NO: 739935 - RNA, 22 nt, Human
acaguaaacaaugcagcaaauu

SEQ ID NO: 739936 - RNA, 22 nt, Human
ucaggcuguagggccccuggag

SEQ ID NO: 739937 - RNA, 22 nt, Human
ccaguccuagaagaggagucga

SEQ ID NO: 739938 - RNA, 22 nt, Human
auaaaugaacauucacagagcu

SEQ ID NO: 739939 - RNA, 22 nt, Human
caggaggcaggugcauuuugag

SEQ ID NO: 739940 - RNA, 22 nt, Human
uucugguggccagaagucugaa

SEQ ID NO: 739941 - RNA, 22 nt, Human
aggaugaggcuggcaggucuug

SEQ ID NO: 739942 - RNA, 22 nt, Human
gcccagaaagacugccuaacag

SEQ ID NO: 739943 - RNA, 22 nt, Human
caggugucaaaauacuaagugg

SEQ ID NO: 739944 - RNA, 22 nt, Human
caggaaggaccguccagaucag

SEQ ID NO: 739945 - RNA, 22 nt, Human
gcagauaggguauuaggaguaa

SEQ ID NO: 739946 - RNA, 22 nt, Human
ucugcucagccgaucugcuccg

SEQ ID NO: 739947 - RNA, 22 nt, Human
augcaaucauauggcauacagc

SEQ ID NO: 739948 - RNA, 22 nt, Human
acaugcauaggagaagucuuua

SEQ ID NO: 739949 - RNA, 22 nt, Human
gaggcugaauggccagaagcca

SEQ ID NO: 739950 - RNA, 21 nt, Human
cucccagggugacuguucaac

SEQ ID NO: 739951 - RNA, 22 nt, Human
cucugccugcccaccgacccau

SEQ ID NO: 739952 - RNA, 22 nt, Human
gggagcuggccuacuauuagau

SEQ ID NO: 739953 - RNA, 22 nt, Human
agaagcagaaaagggcacuuuu

SEQ ID NO: 739954 - RNA, 22 nt, Human
uccuuucuucuucugcccaugg

SEQ ID NO: 739955 - RNA, 22 nt, Human
ucauaagcuagcugcaccauau

SEQ ID NO: 739956 - RNA, 22 nt, Human
cugcaggcaucuaacugugggc

SEQ ID NO: 739957 - RNA, 22 nt, Human
uccauucuaugcuuacauuuau

SEQ ID NO: 739958 - RNA, 22 nt, Human
auccagaacaccuguaucacca

SEQ ID NO: 739959 - RNA, 21 nt, Human
ggccugaguauaggacaggcc

SEQ ID NO: 739960 - RNA, 22 nt, Human
gagccugaauuugaccugcuua

SEQ ID NO: 739961 - RNA, 22 nt, Human
aauguguuuucacugaagauuc

SEQ ID NO: 739962 - RNA, 22 nt, Human
augcuaaauguuaauguuaccu

SEQ ID NO: 739963 - RNA, 22 nt, Human
caggcugccgugggguccaggc

SEQ ID NO: 739964 - RNA, 22 nt, Human
uccagcuugccuggucuuuugg

SEQ ID NO: 739965 - RNA, 22 nt, Human
aggagcugcagauucugccuug

SEQ ID NO: 739966 - RNA, 22 nt, Human
uuuucucagcugcacuguauua

SEQ ID NO: 739967 - RNA, 22 nt, Human
cucuggguguuaaugucagugu

SEQ ID NO: 739968 - RNA, 22 nt, Human
uucuaaguccuaccugaaagca

SEQ ID NO: 739969 - RNA, 22 nt, Human
ucugaaagcuagaaaaugcucu

SEQ ID NO: 739970 - RNA, 22 nt, Human
ccugggagugucagacuugcuu

SEQ ID NO: 739971 - RNA, 22 nt, Human
agaagccacaggaaagcagcuu

SEQ ID NO: 739972 - RNA, 22 nt, Human
uggaaugcauggcucugugacg

SEQ ID NO: 739973 - RNA, 19 nt, Human
ggagcuugguggcuguggc

SEQ ID NO: 739974 - RNA, 19 nt, Human
ugagcugcugcugcccauc

SEQ ID NO: 739975 - RNA, 21 nt, Human
aagagcuggaucaaggauaag

SEQ ID NO: 739976 - RNA, 20 nt, Human
gaaggaagggggcaagguga

SEQ ID NO: 739977 - RNA, 22 nt, Human
gccugagauuggacauuauuua

SEQ ID NO: 739978 - RNA, 20 nt, Human
caugcaugacacuggaaagg

SEQ ID NO: 739979 - RNA, 22 nt, Human
aaaggaaaauaaguaguuccau

SEQ ID NO: 739980 - RNA, 22 nt, Human
cuggggacgucgggcaguguuc

SEQ ID NO: 739981 - RNA, 22 nt, Human
agacucaagcagauaggaauua

SEQ ID NO: 739982 - RNA, 23 nt, Human
ugugaauugaggacaucaaaagc

SEQ ID NO: 739983 - RNA, 22 nt, Human
ugggugguccaggcucagcaga

SEQ ID NO: 739984 - RNA, 22 nt, Human
agcccaagcauaggagggaggc

SEQ ID NO: 739985 - RNA, 22 nt, Human
gcuucaaggccaagacaccuua

SEQ ID NO: 739986 - RNA, 22 nt, Human
uuggccagagaccagagcaggg

SEQ ID NO: 739987 - RNA, 22 nt, Human
caggguggaaaagcuaguugga

SEQ ID NO: 739988 - RNA, 22 nt, Human
uucuagucuauggcuagauagu

SEQ ID NO: 739989 - RNA, 23 nt, Human
ucuggcuuugcuggaaguuuuga

SEQ ID NO: 739990 - RNA, 22 nt, Human
accacccauucagaaacacuga

SEQ ID NO: 739991 - RNA, 22 nt, Human
gaagaacugugacagaagcagu

SEQ ID NO: 739992 - RNA, 22 nt, Human
ccucucucagcuugcugcaacu

SEQ ID NO: 739993 - RNA, 20 nt, Human
aaucucaguauccuaugcaa

SEQ ID NO: 739994 - RNA, 22 nt, Human
gugccugcagcaauccauggca

SEQ ID NO: 739995 - RNA, 22 nt, Human
uggagagcaagucgcagacaug

SEQ ID NO: 739996 - RNA, 22 nt, Human
gugaauaauauuguuuauaaaa

SEQ ID NO: 739997 - RNA, 21 nt, Human
uggagagcccuugccugaguc

SEQ ID NO: 739998 - RNA, 22 nt, Human
ugucuacaaacguguacacauu

SEQ ID NO: 739999 - RNA, 22 nt, Human
uaaaggauaacuuucaagaauu

SEQ ID NO: 740000 - RNA, 19 nt, Human
agaaucaggucaggugaca

SEQ ID NO: 740001 - RNA, 22 nt, Human
gacagggacacagccagugagg

SEQ ID NO: 740002 - RNA, 22 nt, Human
agggggugcccagaugaaggau

SEQ ID NO: 740003 - RNA, 22 nt, Human
ugucuucacucaagucucuugg

SEQ ID NO: 740004 - RNA, 22 nt, Human
cuuucaugaacagacaaggaac

SEQ ID NO: 740005 - RNA, 22 nt, Human
auguaauuuauguuauccauaa

SEQ ID NO: 740006 - RNA, 22 nt, Human
cugaaacuuuaguucugcaaca

SEQ ID NO: 740007 - RNA, 22 nt, Human
gccacagguacuaugggagaga

SEQ ID NO: 740008 - RNA, 22 nt, Human
guugcuuuucuccaucacaugg

SEQ ID NO: 740009 - RNA, 22 nt, Human
cuuauuucuccauccagaguca

SEQ ID NO: 740010 - RNA, 22 nt, Human
cacuugcagacuuugccugguu

SEQ ID NO: 740011 - RNA, 22 nt, Human
ugaauaugcuuugcaauccuaa

SEQ ID NO: 740012 - RNA, 22 nt, Human
gaaaaguucaucauauauucag

SEQ ID NO: 740013 - RNA, 22 nt, Human
acaguauacauugauuaggacc

SEQ ID NO: 740014 - RNA, 22 nt, Human
agaggggcaaguaaagagucuu

SEQ ID NO: 740015 - RNA, 22 nt, Human
ucacaggcaaagaagauuggug

SEQ ID NO: 740016 - RNA, 22 nt, Human
uaucuuuugaguucucaagaug

SEQ ID NO: 740017 - RNA, 22 nt, Human
auggcccuggcccagaccccac

SEQ ID NO: 740018 - RNA, 22 nt, Human
augggcugacaagacaugcaua

SEQ ID NO: 740019 - RNA, 22 nt, Human
caggggaagaugccaagggaga

SEQ ID NO: 740020 - RNA, 19 nt, Human
gcccaggggcccgaugcug

SEQ ID NO: 740021 - RNA, 22 nt, Human
acagagguuuccauugagguuu

SEQ ID NO: 740022 - RNA, 22 nt, Human
uguuuuguuuaugagagcacag

SEQ ID NO: 740023 - RNA, 22 nt, Human
ucagugcauuaauaauaucagu

SEQ ID NO: 740024 - RNA, 22 nt, Human
uauuaagauacguaguuguaaa

SEQ ID NO: 740025 - RNA, 22 nt, Human
acugagcucuagguuuugaacc

SEQ ID NO: 740026 - RNA, 22 nt, Human
gcauugucaaaagugguaugac

SEQ ID NO: 740027 - RNA, 22 nt, Human
ccagggcugcucauuggcuggu

SEQ ID NO: 740028 - RNA, 22 nt, Human
gcccugagugguaccugugggu

SEQ ID NO: 740029 - RNA, 22 nt, Human
agcuaaugaugagauacagaua

SEQ ID NO: 740030 - RNA, 22 nt, Human
cagaucaaacaaaauggguuag

SEQ ID NO: 740031 - RNA, 22 nt, Human
ugcaggagcugugcggugaggg

SEQ ID NO: 740032 - RNA, 22 nt, Human
caguacuuaacuuauaggagag

SEQ ID NO: 740033 - RNA, 22 nt, Human
gcugcaggcucugcaggaauug

SEQ ID NO: 740034 - RNA, 22 nt, Human
guuacaauguucuucaguucug

SEQ ID NO: 740035 - RNA, 20 nt, Human
gggcuggcucaacuggaucc

SEQ ID NO: 740036 - RNA, 22 nt, Human
gagggcugaagauuguggcccc

SEQ ID NO: 740037 - RNA, 22 nt, Human
gagugugguaugcucugaggcu

SEQ ID NO: 740038 - RNA, 22 nt, Human
caaugacacucugcacagugcu

SEQ ID NO: 740039 - RNA, 22 nt, Human
augugagguagauaggaugcag

SEQ ID NO: 740040 - RNA, 22 nt, Human
cauuucugcagaauugcucuuc

SEQ ID NO: 740041 - RNA, 22 nt, Human
cagauguaauuacucaagucaa

SEQ ID NO: 740042 - RNA, 22 nt, Human
auacagggacauccaguuuuuc

SEQ ID NO: 740043 - RNA, 22 nt, Human
aaucacaugugggucuuguagc

SEQ ID NO: 740044 - RNA, 22 nt, Human
ugucaguguauacauacaguau

SEQ ID NO: 740045 - RNA, 22 nt, Human
guccacauaggaacccagcuuc

SEQ ID NO: 740046 - RNA, 22 nt, Human
ugaaacagucuccagacuugga

SEQ ID NO: 740047 - RNA, 22 nt, Human
aggaaauguaguccucaucucc

SEQ ID NO: 740048 - RNA, 22 nt, Human
uacacuguacgcucugcuucaa

SEQ ID NO: 740049 - RNA, 22 nt, Human
cagggcucccuugcaaggaggg

SEQ ID NO: 740050 - RNA, 22 nt, Human
cuugccugaggaacagagggua

SEQ ID NO: 740051 - RNA, 22 nt, Human
cacuggggaaaacaggcuucuu

SEQ ID NO: 740052 - RNA, 22 nt, Human
uggcuucauucagcaugacagu

SEQ ID NO: 740053 - RNA, 22 nt, Human
cuccugagggaugcuuaggcuu

SEQ ID NO: 740054 - RNA, 22 nt, Human
acaugaaaugcagccuguaacc

SEQ ID NO: 740055 - RNA, 22 nt, Human
ugucuuuguguacaggaucgcc

SEQ ID NO: 740056 - RNA, 22 nt, Human
aauuucaaguggcaucuuugau

SEQ ID NO: 740057 - RNA, 22 nt, Human
ucacauuuuauaucucugguuu

SEQ ID NO: 740058 - RNA, 22 nt, Human
ugcuuuauuggaaccucauccu

SEQ ID NO: 740059 - RNA, 22 nt, Human
accugcagcugagaaaaugacu

SEQ ID NO: 740060 - RNA, 22 nt, Human
acauuuagaguucuuuacucca

SEQ ID NO: 740061 - RNA, 18 nt, Human
cccugagaugaugcugug

SEQ ID NO: 740062 - RNA, 22 nt, Human
acagcagacacaggcacgcugu

SEQ ID NO: 740063 - RNA, 22 nt, Human
gugccugugccaggggugugcu

SEQ ID NO: 740064 - RNA, 22 nt, Human
auggacaggcuuauaacagcaa

SEQ ID NO: 740065 - RNA, 22 nt, Human
guaugaaagcaucauuccugcu

SEQ ID NO: 740066 - RNA, 19 nt, Human
uuucagacucaucuccagc

SEQ ID NO: 740067 - RNA, 22 nt, Human
cuaggaauagcaaaguaggaca

SEQ ID NO: 740068 - RNA, 22 nt, Human
aggucaggguauucacgucugu

SEQ ID NO: 740069 - RNA, 22 nt, Human
agaaauaaucagcuuaggggca

SEQ ID NO: 740070 - RNA, 22 nt, Human
cagccaccauacagcagaagcu

SEQ ID NO: 740071 - RNA, 22 nt, Human
uccuucaguucaauuaguccgu

SEQ ID NO: 740072 - RNA, 19 nt, Human
cagaguuugcaggcagagg

SEQ ID NO: 740073 - RNA, 22 nt, Human
gaggaaugggugucucgugauu

SEQ ID NO: 740074 - RNA, 22 nt, Human
ucugaguucauaccaggcuacc

SEQ ID NO: 740075 - RNA, 22 nt, Human
ucucugaguauccugaacugcc

SEQ ID NO: 740076 - RNA, 22 nt, Human
cagagggcugcccugaguucgu

SEQ ID NO: 740077 - RNA, 22 nt, Human
uugaggaggccuuucagggcuu

SEQ ID NO: 740078 - RNA, 22 nt, Human
aagaugugcaguucauggcagg

SEQ ID NO: 740079 - RNA, 22 nt, Human
auauuucucucagacauggaag

SEQ ID NO: 740080 - RNA, 22 nt, Human
ugaggcauuaaagggaggucaa

SEQ ID NO: 740081 - RNA, 20 nt, Human
cugagcgucuaagaggugag

SEQ ID NO: 740082 - RNA, 22 nt, Human
augaaauguaugagucuggguu

SEQ ID NO: 740083 - RNA, 22 nt, Human
caaugucugaccguuuugccca

SEQ ID NO: 740084 - RNA, 22 nt, Human
ugauuuuuggaucugagcugca

SEQ ID NO: 740085 - RNA, 22 nt, Human
aaucgcuugguaauuuuaaaag

SEQ ID NO: 740086 - RNA, 22 nt, Human
aaagguuuccgagcuuuaauuu

SEQ ID NO: 740087 - RNA, 22 nt, Human
acacuuugaagauggaaacuug

SEQ ID NO: 740088 - RNA, 20 nt, Human
ccuccaggcacacccaugug

SEQ ID NO: 740089 - RNA, 22 nt, Human
uuccucuggaggcucuaggaga

SEQ ID NO: 740090 - RNA, 22 nt, Human
ugcaccugagaggucucugagg

SEQ ID NO: 740091 - RNA, 22 nt, Human
gcuuugcugaggucugaggauu

SEQ ID NO: 740092 - RNA, 22 nt, Human
ugcuucugcauucaauguugga

SEQ ID NO: 740093 - RNA, 22 nt, Human
uucauguauuuaucauguaaau

SEQ ID NO: 740094 - RNA, 22 nt, Human
cccaggagacugagcuguaacc

SEQ ID NO: 740095 - RNA, 22 nt, Human
ucagaggacagcagcuaaauaa

SEQ ID NO: 740096 - RNA, 22 nt, Human
cuggauucuuucauaaaaguca

SEQ ID NO: 740097 - RNA, 22 nt, Human
uguuuucugaugguuaaugagu

SEQ ID NO: 740098 - RNA, 17 nt, Human
auuccacagggaaucug

SEQ ID NO: 740099 - RNA, 19 nt, Human
uuuuccugccucauuguuu

SEQ ID NO: 740100 - RNA, 22 nt, Human
agauuuccaucuuuuucaugug

SEQ ID NO: 740101 - RNA, 22 nt, Human
ugccucagagugggcuugcuau

SEQ ID NO: 740102 - RNA, 22 nt, Human
uuuuuaugccuacgcugaaaag

SEQ ID NO: 740103 - RNA, 22 nt, Human
cucuuucaguucugauagucuc

SEQ ID NO: 740104 - RNA, 22 nt, Human
aagagacuaagaaagggcaaua

SEQ ID NO: 740105 - RNA, 21 nt, Human
ucucuguguacagucucaccc

SEQ ID NO: 740106 - RNA, 22 nt, Human
auguucuuucagccagugcauc

SEQ ID NO: 740107 - RNA, 22 nt, Human
gggaaaauauuaagcaggacuu

SEQ ID NO: 740108 - RNA, 22 nt, Human
ucagugcauggacagauuuaga

SEQ ID NO: 740109 - RNA, 22 nt, Human
ccagaaagaaugaacugaaccc

SEQ ID NO: 740110 - RNA, 22 nt, Human
uuauugccugauugaggucauu

SEQ ID NO: 740111 - RNA, 19 nt, Human
acauuuagaauguacuugc

SEQ ID NO: 740112 - RNA, 22 nt, Human
ucccugucucccuugagacuag

SEQ ID NO: 740113 - RNA, 20 nt, Human
ucagauuuugggucacugau

SEQ ID NO: 740114 - RNA, 22 nt, Human
uccugggaagcgccggccugcg

SEQ ID NO: 740115 - RNA, 22 nt, Human
gagcuaaggcacaggcaggcuu

SEQ ID NO: 740116 - RNA, 22 nt, Human
acacaauuuccuguccauaugu

SEQ ID NO: 740117 - RNA, 22 nt, Human
accaggaguugggggugggacc

SEQ ID NO: 740118 - RNA, 19 nt, Human
caggcccuggacccaucug

SEQ ID NO: 740119 - RNA, 21 nt, Human
guucuacaguuuuagaauucc

SEQ ID NO: 740120 - RNA, 22 nt, Human
cagggccugcuuccuucuuguu

SEQ ID NO: 740121 - RNA, 23 nt, Human
uacagcugcagaaucaggcuaag

SEQ ID NO: 740122 - RNA, 22 nt, Human
ccucauuaacacaaugucauuu

SEQ ID NO: 740123 - RNA, 22 nt, Human
aggaucauauaagcuccagcua

SEQ ID NO: 740124 - RNA, 22 nt, Human
uucauagugcuuaauuugauaa

SEQ ID NO: 740125 - RNA, 22 nt, Human
uggguccugucuccuuguucug

SEQ ID NO: 740126 - RNA, 18 nt, Human
agacuuugaguuagaggg

SEQ ID NO: 740127 - RNA, 22 nt, Human
uggcuggagggacccacucaga

SEQ ID NO: 740128 - RNA, 22 nt, Human
ucucaaauggcaaauguggguc

SEQ ID NO: 740129 - RNA, 22 nt, Human
cauugcacaucugagaagagau

SEQ ID NO: 740130 - RNA, 22 nt, Human
guuaguggguuacucucagccc

SEQ ID NO: 740131 - RNA, 22 nt, Human
uacagccucgaacuccugcauu

SEQ ID NO: 740132 - RNA, 22 nt, Human
uuugguuuagggucauuuaaca

SEQ ID NO: 740133 - RNA, 22 nt, Human
guccagcugcagcugggcagaa

SEQ ID NO: 740134 - RNA, 20 nt, Human
gucugaggagcagugggaaa

SEQ ID NO: 740135 - RNA, 22 nt, Human
ucagagcacuggugcuaccuug

SEQ ID NO: 740136 - RNA, 22 nt, Human
uggcucucugggagguccuggc

SEQ ID NO: 740137 - RNA, 22 nt, Human
guuaaacaguuacaugugcugg

SEQ ID NO: 740138 - RNA, 23 nt, Human
ggcacugaagcuacaauggugag

SEQ ID NO: 740139 - RNA, 22 nt, Human
cccuggagugugacgaggcauu

SEQ ID NO: 740140 - RNA, 22 nt, Human
uagcuucucuuuucaacaucuu

SEQ ID NO: 740141 - RNA, 22 nt, Human
ucccugcccugccuucaugguu

SEQ ID NO: 740142 - RNA, 22 nt, Human
ccagagcagggcagcagggcuc

SEQ ID NO: 740143 - RNA, 22 nt, Human
aagcaaggccggaaggaaacuc

SEQ ID NO: 740144 - RNA, 22 nt, Human
cuccucuagaagcugaccugga

SEQ ID NO: 740145 - RNA, 22 nt, Human
aaaauagcauauugcuuucuuu

SEQ ID NO: 740146 - RNA, 23 nt, Human
cugcagucgccggccugggugcc

SEQ ID NO: 740147 - RNA, 22 nt, Human
cagcauggacccaucgcugagu

SEQ ID NO: 740148 - RNA, 22 nt, Human
aauauggcuccauuccuuuagg

SEQ ID NO: 740149 - RNA, 22 nt, Human
cuccuggaagcccgcccugcug

SEQ ID NO: 740150 - RNA, 22 nt, Human
gcugugugcuaggauauguuuu

SEQ ID NO: 740151 - RNA, 22 nt, Human
ugcuccagggcugccagacccu

SEQ ID NO: 740152 - RNA, 22 nt, Human
cuggacuuggggaggcuagauu

SEQ ID NO: 740153 - RNA, 22 nt, Human
uguguuugggggagaugcauuu

SEQ ID NO: 740154 - RNA, 22 nt, Human
gaggacacaaaguggcugagau

SEQ ID NO: 740155 - RNA, 22 nt, Human
cuguccauuuugaauuuucagu

SEQ ID NO: 740156 - RNA, 22 nt, Human
agcuggcaucugaagucagggc

SEQ ID NO: 740157 - RNA, 22 nt, Human
aagggcuggagacugggucuuc

SEQ ID NO: 740158 - RNA, 22 nt, Human
aauaggaaaauauuuaacaaga

SEQ ID NO: 740159 - RNA, 22 nt, Human
ucacaugucaaaaacuacauaa

SEQ ID NO: 740160 - RNA, 22 nt, Human
gccugucugcagggcugucauu

SEQ ID NO: 740161 - RNA, 22 nt, Human
uuucacaggggcaaccuccaug

SEQ ID NO: 740162 - RNA, 22 nt, Human
uggcccugaaggccuugagcau

SEQ ID NO: 740163 - RNA, 22 nt, Human
cugcugaaaacaauaaugauga

SEQ ID NO: 740164 - RNA, 20 nt, Human
ggcagccaaucagcgugccg

SEQ ID NO: 740165 - RNA, 22 nt, Human
aaugucuuaaagucguguuaca

SEQ ID NO: 740166 - RNA, 21 nt, Human
uucuucaguuuaauauaaaau

SEQ ID NO: 740167 - RNA, 22 nt, Human
ugcugcagcggcauggucuuug

SEQ ID NO: 740168 - RNA, 22 nt, Human
gaaguggaagccaucggcaguc

SEQ ID NO: 740169 - RNA, 22 nt, Human
gaaggaggugucaguuggacug

SEQ ID NO: 740170 - RNA, 22 nt, Human
aagagcauuuuguaaaauccuu

SEQ ID NO: 740171 - RNA, 22 nt, Human
uucauuugccaucaguguaaug

SEQ ID NO: 740172 - RNA, 22 nt, Human
caaugcuucaggcuccuuauag

SEQ ID NO: 740173 - RNA, 22 nt, Human
uuuaaaaccaaagaaagccucu

SEQ ID NO: 740174 - RNA, 22 nt, Human
ugcagaauguggacaguggguu

SEQ ID NO: 740175 - RNA, 20 nt, Human
uggggaguugagcacgagca

SEQ ID NO: 740176 - RNA, 22 nt, Human
aaaauacacauacuaggggaaa

SEQ ID NO: 740177 - RNA, 22 nt, Human
ucaaagucauggcuaguaauga

SEQ ID NO: 740178 - RNA, 22 nt, Human
uucuuuaccacuacucuuccaa

SEQ ID NO: 740179 - RNA, 23 nt, Human
aggaggccugaaacugaggcuga

SEQ ID NO: 740180 - RNA, 22 nt, Human
aaauauugguaggaugcuuguu

SEQ ID NO: 740181 - RNA, 22 nt, Human
uguggccagcagguggcugugu

SEQ ID NO: 740182 - RNA, 22 nt, Human
agggcagagauuaauuaagaca

SEQ ID NO: 740183 - RNA, 22 nt, Human
uacacccuucuccugagugugu

SEQ ID NO: 740184 - RNA, 18 nt, Human
ccuggcagccaugcgcgc

SEQ ID NO: 740185 - RNA, 22 nt, Human
guaacauucuagaaacuuaaca

SEQ ID NO: 740186 - RNA, 22 nt, Human
gcccugcuccaggagaauaccc

SEQ ID NO: 740187 - RNA, 22 nt, Human
ggcuccuguuauuuaaugagga

SEQ ID NO: 740188 - RNA, 22 nt, Human
gggcucagucugcggcgcgcgg

SEQ ID NO: 740189 - RNA, 22 nt, Human
ucaaagaagugcaaaccucauc

SEQ ID NO: 740190 - RNA, 20 nt, Human
uccuggagcugcuugaauuc

SEQ ID NO: 740191 - RNA, 22 nt, Human
cauagaaacugagacaaggauu

SEQ ID NO: 740192 - RNA, 20 nt, Human
agauggugaaggccagggag

SEQ ID NO: 740193 - RNA, 22 nt, Human
ggucagaggaggaauaggacau

SEQ ID NO: 740194 - RNA, 22 nt, Human
ugggaaauguguuucuggacca

SEQ ID NO: 740195 - RNA, 22 nt, Human
uggagagcccgagacauccugu

SEQ ID NO: 740196 - RNA, 22 nt, Human
uuucuucagccuucacaaccug

SEQ ID NO: 740197 - RNA, 22 nt, Human
cuggcuguaacauuuugccaua

SEQ ID NO: 740198 - RNA, 22 nt, Human
aagcacauacauaauaaagucc

SEQ ID NO: 740199 - RNA, 22 nt, Human
caaucuuagagagauucuuuua

SEQ ID NO: 740200 - RNA, 22 nt, Human
gccagcucuugaugggugggua

SEQ ID NO: 740201 - RNA, 22 nt, Human
ugucuuuagccagcagucuucu

SEQ ID NO: 740202 - RNA, 22 nt, Human
caggugaggcugaacagaugaa

SEQ ID NO: 740203 - RNA, 22 nt, Human
guauuugauagauuucaaagga

SEQ ID NO: 740204 - RNA, 22 nt, Human
acuggcaucccacugguacagg

SEQ ID NO: 740205 - RNA, 22 nt, Human
cacagcauaaugaaauauacuu

SEQ ID NO: 740206 - RNA, 22 nt, Human
uaucaauacauguuaucagugu

SEQ ID NO: 740207 - RNA, 22 nt, Human
agcugaaauucacaaggaucca

SEQ ID NO: 740208 - RNA, 22 nt, Human
aacuguucuucauuuucaguau

SEQ ID NO: 740209 - RNA, 22 nt, Human
guaaaacauguuuuaacuagga

SEQ ID NO: 740210 - RNA, 20 nt, Human
accagagacuggggacaagu

SEQ ID NO: 740211 - RNA, 22 nt, Human
uauauuaaaugaccaguuuuaa

SEQ ID NO: 740212 - RNA, 21 nt, Human
agcauucugcuucuuuccugg

SEQ ID NO: 740213 - RNA, 22 nt, Human
uaaggaaugcuugaauguuccu

SEQ ID NO: 740214 - RNA, 22 nt, Human
cagagcuggcggugagaagaca

SEQ ID NO: 740215 - RNA, 22 nt, Human
gucuggggugaggcccgggauu

SEQ ID NO: 740216 - RNA, 22 nt, Human
agauguuccagccaaugggaau

SEQ ID NO: 740217 - RNA, 22 nt, Human
uggaaacuaacaacagagcaga

SEQ ID NO: 740218 - RNA, 20 nt, Human
accuggcucucaggagcaac

SEQ ID NO: 740219 - RNA, 22 nt, Human
ggcuucuguccucuggaucugu

SEQ ID NO: 740220 - RNA, 22 nt, Human
aggcccagagagccaguuagug

SEQ ID NO: 740221 - RNA, 22 nt, Human
acaacugaugggucauguggga

SEQ ID NO: 740222 - RNA, 22 nt, Human
ccacuugacauuuucauuaaga

SEQ ID NO: 740223 - RNA, 22 nt, Human
gagucuguaugucuuccaugca

SEQ ID NO: 740224 - RNA, 22 nt, Human
ugauacagagaaagcaucuuuu

SEQ ID NO: 740225 - RNA, 22 nt, Human
gccuggguccacugaucaugcu

SEQ ID NO: 740226 - RNA, 16 nt, Human
aaggcugauuuucccu

SEQ ID NO: 740227 - RNA, 22 nt, Human
uuagaaaggaaucuucauuuca

SEQ ID NO: 740228 - RNA, 22 nt, Human
auucucuguucaaggaugguga

SEQ ID NO: 740229 - RNA, 22 nt, Human
agagauguaugcauuugucaca

SEQ ID NO: 740230 - RNA, 22 nt, Human
cucagggagguccugugcugaa

SEQ ID NO: 740231 - RNA, 22 nt, Human
cugaggagaaagaugguccaag

SEQ ID NO: 740232 - RNA, 22 nt, Human
acuggcaguggcagcagaaaga

SEQ ID NO: 740233 - RNA, 22 nt, Human
cuggugguucaggagaauggcu

SEQ ID NO: 740234 - RNA, 18 nt, Human
auaucagcuacuucaugg

SEQ ID NO: 740235 - RNA, 22 nt, Human
gcucugcugggugggcaguuau

SEQ ID NO: 740236 - RNA, 22 nt, Human
ugcuccagaaccugaccaugcu

SEQ ID NO: 740237 - RNA, 22 nt, Human
uccagcucaggguuggcucaag

SEQ ID NO: 740238 - RNA, 22 nt, Human
gcaguguguguccccacacugg

SEQ ID NO: 740239 - RNA, 22 nt, Human
auggcuuugaaguucagcuuuu

SEQ ID NO: 740240 - RNA, 22 nt, Human
cacccagugaaggagcaagagg

SEQ ID NO: 740241 - RNA, 22 nt, Human
ggagauccaggcugagucuuuc

SEQ ID NO: 740242 - RNA, 22 nt, Human
gggcugcuuuuaagggucucag

SEQ ID NO: 740243 - RNA, 22 nt, Human
uugaaagauauguuaaucuuuc

SEQ ID NO: 740244 - RNA, 22 nt, Human
uuuuaauccucuugguaucuua

SEQ ID NO: 740245 - RNA, 21 nt, Human
ucaggagagcccaucuacaaa

SEQ ID NO: 740246 - RNA, 22 nt, Human
ucugagugucuuaauaggcucu

SEQ ID NO: 740247 - RNA, 22 nt, Human
uguguguauccauuagaggcca

SEQ ID NO: 740248 - RNA, 23 nt, Human
gccugccugaccugugcaaaguc

SEQ ID NO: 740249 - RNA, 22 nt, Human
gcuuuacagggcacaaagggag

SEQ ID NO: 740250 - RNA, 22 nt, Human
gggacccugggaggcuggcgca

SEQ ID NO: 740251 - RNA, 22 nt, Human
cuuugcagauuuguuuagugcu

SEQ ID NO: 740252 - RNA, 23 nt, Human
acaacaggaaaucagaccugaac

SEQ ID NO: 740253 - RNA, 22 nt, Human
uggguccucugagagggcagcg

SEQ ID NO: 740254 - RNA, 22 nt, Human
acaaaggugcgucccuucagcu

SEQ ID NO: 740255 - RNA, 22 nt, Human
uguguacaggacagaaaggagg

SEQ ID NO: 740256 - RNA, 22 nt, Human
cuucuauucacuggucacaguu

SEQ ID NO: 740257 - RNA, 22 nt, Human
cuguggcaaaugauaccuccca

SEQ ID NO: 740258 - RNA, 22 nt, Human
gcaggaugaaggcagaggcuga

SEQ ID NO: 740259 - RNA, 22 nt, Human
cugggaggugcagcaaaaauca

SEQ ID NO: 740260 - RNA, 22 nt, Human
uccaggacagcggcaggcagau

SEQ ID NO: 740261 - RNA, 21 nt, Human
ucuuccuccacagcgugccac

SEQ ID NO: 740262 - RNA, 22 nt, Human
ccuuuauucaauuaguccuaau

SEQ ID NO: 740263 - RNA, 22 nt, Human
cucuggagugcagccugguggc

SEQ ID NO: 740264 - RNA, 22 nt, Human
uucuuguucugguucuguuagc

SEQ ID NO: 740265 - RNA, 20 nt, Human
aaagucuuaugguuaauuuu

SEQ ID NO: 740266 - RNA, 22 nt, Human
gagcccugagaguugugaggcc

SEQ ID NO: 740267 - RNA, 22 nt, Human
gcacacagggauuuuugaaugg

SEQ ID NO: 740268 - RNA, 22 nt, Human
uucaauucugcucugaucuuag

SEQ ID NO: 740269 - RNA, 22 nt, Human
cugcagccucaaccuccugagc

SEQ ID NO: 740270 - RNA, 22 nt, Human
uacaaaggaguagagaaggcuu

SEQ ID NO: 740271 - RNA, 22 nt, Human
ugaacugcaggaaucucagugg

SEQ ID NO: 740272 - RNA, 22 nt, Human
uaacagcaggguuacaggcauu

SEQ ID NO: 740273 - RNA, 22 nt, Human
aagaggcuuucagugaacuugu

SEQ ID NO: 740274 - RNA, 22 nt, Human
aaaaauagcuucucuugucccu

SEQ ID NO: 740275 - RNA, 22 nt, Human
auuuaaugucgagcuauuguag

SEQ ID NO: 740276 - RNA, 22 nt, Human
uuucuuaugggguaguccuuua

SEQ ID NO: 740277 - RNA, 22 nt, Human
augcauuuauguguguacauug

SEQ ID NO: 740278 - RNA, 22 nt, Human
gccuccaccccuggggagugga

SEQ ID NO: 740279 - RNA, 22 nt, Human
ucauuucucccggccaaaaacu

SEQ ID NO: 740280 - RNA, 20 nt, Human
ugaggcaggagaauggcaug

SEQ ID NO: 740281 - RNA, 22 nt, Human
gucugagacugggcacauaccu

SEQ ID NO: 740282 - RNA, 22 nt, Human
gcucagagaaaacuggggcuug

SEQ ID NO: 740283 - RNA, 22 nt, Human
uuagguaaggauggugacagua

SEQ ID NO: 740284 - RNA, 22 nt, Human
uagcagcuccauuucucuggca

SEQ ID NO: 740285 - RNA, 22 nt, Human
ucuaugaaccucugcaaugaca

SEQ ID NO: 740286 - RNA, 22 nt, Human
cuucacauguuggaguccuuug

SEQ ID NO: 740287 - RNA, 22 nt, Human
uaggagggggaacaaggcauac

SEQ ID NO: 740288 - RNA, 22 nt, Human
auucuggacaaggcaagcuccu

SEQ ID NO: 740289 - RNA, 22 nt, Human
ccagaccacccuggccaugcac

SEQ ID NO: 740290 - RNA, 22 nt, Human
aggcugucugaccccagagccc

SEQ ID NO: 740291 - RNA, 21 nt, Human
cauuucaugauuauagaaaug

SEQ ID NO: 740292 - RNA, 22 nt, Human
aaauugucagaauucagaaagu

SEQ ID NO: 740293 - RNA, 22 nt, Human
uggcaacaccuggaagacaugg

SEQ ID NO: 740294 - RNA, 18 nt, Human
ucauuauuguuucuggag

SEQ ID NO: 740295 - RNA, 22 nt, Human
cacagaacugguuaauagcaga

SEQ ID NO: 740296 - RNA, 22 nt, Human
uccuggggccaggcaccucugg

SEQ ID NO: 740297 - RNA, 20 nt, Human
ugcacagcugugaauaggau

SEQ ID NO: 740298 - RNA, 22 nt, Human
gcagccugaggcccuuucuggc

SEQ ID NO: 740299 - RNA, 22 nt, Human
cacaaaaucuuucucgauuauu

SEQ ID NO: 740300 - RNA, 22 nt, Human
uccccugcagaugagggcagug

SEQ ID NO: 740301 - RNA, 22 nt, Human
guccuggggaauacagaagccg

SEQ ID NO: 740302 - RNA, 22 nt, Human
cgaggccaugcaugcugaggac

SEQ ID NO: 740303 - RNA, 22 nt, Human
uacaguucacaguaucauaaau

SEQ ID NO: 740304 - RNA, 22 nt, Human
cacaauuuguuuuaucaguauu

SEQ ID NO: 740305 - RNA, 22 nt, Human
caugcaggccuauggagcagug

SEQ ID NO: 740306 - RNA, 22 nt, Human
ucuucccaaugcaaaguaggac

SEQ ID NO: 740307 - RNA, 22 nt, Human
auauaugaagaagucuugauua

SEQ ID NO: 740308 - RNA, 22 nt, Human
ucaaugacauuguaucagaguu

SEQ ID NO: 740309 - RNA, 22 nt, Human
augauucagcccaauuuuucua

SEQ ID NO: 740310 - RNA, 23 nt, Human
aaguuguuuuuggccagggaaag

SEQ ID NO: 740311 - RNA, 22 nt, Human
ucaaaugcggucauggcuuuua

SEQ ID NO: 740312 - RNA, 22 nt, Human
guauaaacauggagugcauucu

SEQ ID NO: 740313 - RNA, 22 nt, Human
acacuauaagacagauacagca

SEQ ID NO: 740314 - RNA, 22 nt, Human
gccuggcugggcaccaggggag

SEQ ID NO: 740315 - RNA, 19 nt, Human
gggagcugaggucuuuggu

SEQ ID NO: 740316 - RNA, 20 nt, Human
ggcaggcuuuauauggaggg

SEQ ID NO: 740317 - RNA, 23 nt, Human
ugagucaccacaguuacagucac

SEQ ID NO: 740318 - RNA, 22 nt, Human
acuuagcaccuauggcauuuuu

SEQ ID NO: 740319 - RNA, 22 nt, Human
agugcuuuaccuagauaauguu

SEQ ID NO: 740320 - RNA, 22 nt, Human
uucuuucucaacaugaauguuu

SEQ ID NO: 740321 - RNA, 19 nt, Human
acagugcaugggaccuggu

SEQ ID NO: 740322 - RNA, 22 nt, Human
uagccggguguugugucaugca

SEQ ID NO: 740323 - RNA, 22 nt, Human
uuuuucauauuccccucucugg

SEQ ID NO: 740324 - RNA, 22 nt, Human
gcagagcauuggagggacccug

SEQ ID NO: 740325 - RNA, 22 nt, Human
ugacuggagaccucaguagggu

SEQ ID NO: 740326 - RNA, 22 nt, Human
ccaguccuuugagccaguucug

SEQ ID NO: 740327 - RNA, 22 nt, Human
auuaaagacagcagauggaugg

SEQ ID NO: 740328 - RNA, 22 nt, Human
ggagugagcaaauagagauuug

SEQ ID NO: 740329 - RNA, 22 nt, Human
uaguacaguacugggcucuagu

SEQ ID NO: 740330 - RNA, 22 nt, Human
ugguuuuaaaagauguuugaga

SEQ ID NO: 740331 - RNA, 22 nt, Human
uggcagugaaccaaggcuccaa

SEQ ID NO: 740332 - RNA, 22 nt, Human
ggccuuggugcucuguguugca

SEQ ID NO: 740333 - RNA, 22 nt, Human
gugcagaccuuccagaaagaac

SEQ ID NO: 740334 - RNA, 22 nt, Human
ucaggaugaccacgagccucua

SEQ ID NO: 740335 - RNA, 22 nt, Human
uaggaauuuuuguaaugguacu

SEQ ID NO: 740336 - RNA, 22 nt, Human
uaaacuguggaauguucucuuu

SEQ ID NO: 740337 - RNA, 16 nt, Human
uccuaacuggcaguuc

SEQ ID NO: 740338 - RNA, 22 nt, Human
aagaagagaaaugugcugcugg

SEQ ID NO: 740339 - RNA, 22 nt, Human
gcuucuggcagugcagccacca

SEQ ID NO: 740340 - RNA, 22 nt, Human
cccuggaggucagaggccuggg

SEQ ID NO: 740341 - RNA, 22 nt, Human
aguauggggcugugugugcaca

SEQ ID NO: 740342 - RNA, 22 nt, Human
augugaaacgcaaugggaucau

SEQ ID NO: 740343 - RNA, 22 nt, Human
gguggguaaaacugcuggcacu

SEQ ID NO: 740344 - RNA, 19 nt, Human
uaagauggcaagugucucu

SEQ ID NO: 740345 - RNA, 19 nt, Human
ucucagaauuaagagugcu

SEQ ID NO: 740346 - RNA, 22 nt, Human
ucugagcuaauccuguugccga

SEQ ID NO: 740347 - RNA, 20 nt, Human
ggcacugcaccaguuaguag

SEQ ID NO: 740348 - RNA, 22 nt, Human
ugcaggcuccacguuguugucc

SEQ ID NO: 740349 - RNA, 18 nt, Human
ggagcccacggcguccca

SEQ ID NO: 740350 - RNA, 19 nt, Human
aguuucccuggagacauca

SEQ ID NO: 740351 - RNA, 22 nt, Human
uacaaagauaaaaucucaccau

SEQ ID NO: 740352 - RNA, 22 nt, Human
augcugucaguauuaugugcag

SEQ ID NO: 740353 - RNA, 22 nt, Human
uacagugucugcaacugcacac

SEQ ID NO: 740354 - RNA, 22 nt, Human
gucaccagcaccaaugccacau

SEQ ID NO: 740355 - RNA, 22 nt, Human
gauaaaauaacuauggaauacu

SEQ ID NO: 740356 - RNA, 22 nt, Human
ugucacuucaguuuugaaacaa

SEQ ID NO: 740357 - RNA, 22 nt, Human
cugugcguaaguagccaaaaua

SEQ ID NO: 740358 - RNA, 22 nt, Human
agaaugggggcuacaggccaca

SEQ ID NO: 740359 - RNA, 22 nt, Human
ugucacucaaguuccaauuuac

SEQ ID NO: 740360 - RNA, 22 nt, Human
uuuagacaagauccuucugaau

SEQ ID NO: 740361 - RNA, 22 nt, Human
gucauuccuauccauuugauac

SEQ ID NO: 740362 - RNA, 22 nt, Human
caggcagcaggagcccugcucg

SEQ ID NO: 740363 - RNA, 22 nt, Human
gcacuugacccccagagcuggu

SEQ ID NO: 740364 - RNA, 22 nt, Human
agaggcaagauuaucagggcau

SEQ ID NO: 740365 - RNA, 22 nt, Human
ggaggagagagguugcaaacac

SEQ ID NO: 740366 - RNA, 22 nt, Human
auguuuauguugggcuauauuu

SEQ ID NO: 740367 - RNA, 22 nt, Human
ucuguuugcuggugcauggguu

SEQ ID NO: 740368 - RNA, 22 nt, Human
uugaccauaccuccaggcaguu

SEQ ID NO: 740369 - RNA, 22 nt, Human
gagagucuagugcaccuaguuu

SEQ ID NO: 740370 - RNA, 22 nt, Human
ugugugucagagucuccauggu

SEQ ID NO: 740371 - RNA, 22 nt, Human
aaagucauccaaauuuuuaugu

SEQ ID NO: 740372 - RNA, 22 nt, Human
acuauauacacauuaucuuguu

SEQ ID NO: 740373 - RNA, 22 nt, Human
gucccucugccugugguucucu

SEQ ID NO: 740374 - RNA, 22 nt, Human
ugcuccugagguuggagaucca

SEQ ID NO: 740375 - RNA, 18 nt, Human
ccaggacaggcaaaaggu

SEQ ID NO: 740376 - RNA, 22 nt, Human
ccuccagcauuacuggcccaug

SEQ ID NO: 740377 - RNA, 22 nt, Human
cagggugacugcccuggccacu

SEQ ID NO: 740378 - RNA, 22 nt, Human
gacuguggcuaaugguguuagg

SEQ ID NO: 740379 - RNA, 22 nt, Human
acugucucucuagcaguucagg

SEQ ID NO: 740380 - RNA, 20 nt, Human
aaguuacauuguauuguacc

SEQ ID NO: 740381 - RNA, 22 nt, Human
cacuggaauggauagagcagag

SEQ ID NO: 740382 - RNA, 22 nt, Human
ugaaaagugaucauggauuagg

SEQ ID NO: 740383 - RNA, 22 nt, Human
uuauucugccaggagcgucagu

SEQ ID NO: 740384 - RNA, 22 nt, Human
aguggcuguuccaggugaggac

SEQ ID NO: 740385 - RNA, 19 nt, Human
uaugugugcauuugugcau

SEQ ID NO: 740386 - RNA, 22 nt, Human
ugggggcagaggauucaggaau

SEQ ID NO: 740387 - RNA, 22 nt, Human
uugcauuuugguuguaaauaug

SEQ ID NO: 740388 - RNA, 22 nt, Human
ccacugcuguuacuuacgcaaa

SEQ ID NO: 740389 - RNA, 22 nt, Human
gcuugcucaacccccgucucuc

SEQ ID NO: 740390 - RNA, 22 nt, Human
aagauucucagagugaaagaau

SEQ ID NO: 740391 - RNA, 22 nt, Human
cuucaagguggcuaaauggggc

SEQ ID NO: 740392 - RNA, 22 nt, Human
uggcugccaauggcuuggaaag

SEQ ID NO: 740393 - RNA, 22 nt, Human
uuaaaugacuuuuauuauucuc

SEQ ID NO: 740394 - RNA, 22 nt, Human
agggugcguucuaugagaaucu

SEQ ID NO: 740395 - RNA, 22 nt, Human
uuacaaugacagguguaucauu

SEQ ID NO: 740396 - RNA, 22 nt, Human
aaugucauuuaggauuauguuu

SEQ ID NO: 740397 - RNA, 20 nt, Human
cagucccaauccagggccag

SEQ ID NO: 740398 - RNA, 22 nt, Human
cuggaagacucaauggccugcc

SEQ ID NO: 740399 - RNA, 22 nt, Human
gguucucuaacuuugacuggag

SEQ ID NO: 740400 - RNA, 22 nt, Human
uuuucuuuaaucugguggggug

SEQ ID NO: 740401 - RNA, 22 nt, Human
gggcaguguugugguucucuau

SEQ ID NO: 740402 - RNA, 22 nt, Human
augcauugcuugaggguaggaa

SEQ ID NO: 740403 - RNA, 22 nt, Human
uggaggagugugauugucugcc

SEQ ID NO: 740404 - RNA, 22 nt, Human
uaaggacauuagaaaugaugcu

SEQ ID NO: 740405 - RNA, 22 nt, Human
gcugccuucaguucugauucau

SEQ ID NO: 740406 - RNA, 22 nt, Human
auauaauaguuucauaaaggcu

SEQ ID NO: 740407 - RNA, 22 nt, Human
uugaagagugccuuccagacau

SEQ ID NO: 740408 - RNA, 19 nt, Human
agcagagcaaaguggcuga

SEQ ID NO: 740409 - RNA, 19 nt, Human
cacaaaugaugaggaccug

SEQ ID NO: 740410 - RNA, 22 nt, Human
guguuuccuaguuuaaugaaug

SEQ ID NO: 740411 - RNA, 23 nt, Human
agcaguaacuucagaaacaucag

SEQ ID NO: 740412 - RNA, 19 nt, Human
ccaguccucuuugggccug

SEQ ID NO: 740413 - RNA, 22 nt, Human
ccugccagcccgcguucaugcc

SEQ ID NO: 740414 - RNA, 22 nt, Human
caggugcuguccugcacauguc

SEQ ID NO: 740415 - RNA, 22 nt, Human
agguagcuaaaacaggcuuuug

SEQ ID NO: 740416 - RNA, 22 nt, Human
ccaggaagguguuuaacuagag

SEQ ID NO: 740417 - RNA, 23 nt, Human
ccucucucccuguuuggcaaaua

SEQ ID NO: 740418 - RNA, 22 nt, Human
uuaacacugauuguagagacac

SEQ ID NO: 740419 - RNA, 22 nt, Human
ugcuggaggcaguggaggugcc

SEQ ID NO: 740420 - RNA, 22 nt, Human
auguucuguuuuguaauucaua

SEQ ID NO: 740421 - RNA, 22 nt, Human
aaggaagaugaggugcugcuua

SEQ ID NO: 740422 - RNA, 22 nt, Human
uagucucugcuuugcccuuggc

SEQ ID NO: 740423 - RNA, 22 nt, Human
uuaguaaauaaagucuacuuuc

SEQ ID NO: 740424 - RNA, 22 nt, Human
ccacaguccgggcuggcaggac

SEQ ID NO: 740425 - RNA, 22 nt, Human
gaaggaggcguuagcccuagga

SEQ ID NO: 740426 - RNA, 22 nt, Human
cuugauguauaaguugauaugu

SEQ ID NO: 740427 - RNA, 22 nt, Human
aaaaugacauuccagugauauu

SEQ ID NO: 740428 - RNA, 22 nt, Human
cugcuguucugaagcaacaagc

SEQ ID NO: 740429 - RNA, 22 nt, Human
agcuuuuacauaaugaucuuga

SEQ ID NO: 740430 - RNA, 22 nt, Human
uuauaugaacuggacuuuagga

SEQ ID NO: 740431 - RNA, 22 nt, Human
acauuugugcacaugugcaugg

SEQ ID NO: 740432 - RNA, 22 nt, Human
cuggguaaaggcugcuuuucua

SEQ ID NO: 740433 - RNA, 20 nt, Human
gccucagucacauggccuac

SEQ ID NO: 740434 - RNA, 20 nt, Human
gccugccucagcuagcugag

SEQ ID NO: 740435 - RNA, 22 nt, Human
ccaggcuccccaggaggcccuu

SEQ ID NO: 740436 - RNA, 22 nt, Human
ucccagccugacagugcaucaa

SEQ ID NO: 740437 - RNA, 22 nt, Human
ugguacaaucacagcucacugu

SEQ ID NO: 740438 - RNA, 22 nt, Human
ccaguaaaccaaguguuuacua

SEQ ID NO: 740439 - RNA, 22 nt, Human
cugggcugcaggaguggggcaa

SEQ ID NO: 740440 - RNA, 22 nt, Human
aauuuuacaaaauaccuccgau

SEQ ID NO: 740441 - RNA, 20 nt, Human
uccagggcuagggagcucau

SEQ ID NO: 740442 - RNA, 22 nt, Human
gccacucaugggaggugugcaa

SEQ ID NO: 740443 - RNA, 22 nt, Human
uaaagcuuguauugcaauauuu

SEQ ID NO: 740444 - RNA, 22 nt, Human
ucagaggaggcauuuaaacaga

SEQ ID NO: 740445 - RNA, 22 nt, Human
uccugggagaguuugauucauu

SEQ ID NO: 740446 - RNA, 22 nt, Human
guccugaggcaggauggguuuc

SEQ ID NO: 740447 - RNA, 20 nt, Human
cagcccuuuauccuccuaug

SEQ ID NO: 740448 - RNA, 22 nt, Human
caggaugaagggcaaaggcaag

SEQ ID NO: 740449 - RNA, 22 nt, Human
caugcaguugaagcacagagag

SEQ ID NO: 740450 - RNA, 22 nt, Human
aagaucaccuugacaugaaaag

SEQ ID NO: 740451 - RNA, 22 nt, Human
guuacaaaggacugggggccac

SEQ ID NO: 740452 - RNA, 22 nt, Human
uauuagcacaaagcaagguauu

SEQ ID NO: 740453 - RNA, 22 nt, Human
aggccuggccccaguugcuagg

SEQ ID NO: 740454 - RNA, 22 nt, Human
gauacauuccauuucuacuuaa

SEQ ID NO: 740455 - RNA, 21 nt, Human
acugaccacuucugccugucu

SEQ ID NO: 740456 - RNA, 22 nt, Human
uuaaaugaggcugauguagauu

SEQ ID NO: 740457 - RNA, 22 nt, Human
cagagguagggagcuauguuau

SEQ ID NO: 740458 - RNA, 20 nt, Human
auuaggauuuuaggucauca

SEQ ID NO: 740459 - RNA, 22 nt, Human
acagauaauuagcauaaaugcu

SEQ ID NO: 740460 - RNA, 22 nt, Human
aggucugaguuuguuguuggcu

SEQ ID NO: 740461 - RNA, 22 nt, Human
guguccuuuugaggguccacag

SEQ ID NO: 740462 - RNA, 22 nt, Human
uaagcaaugcuguaguucaguc

SEQ ID NO: 740463 - RNA, 22 nt, Human
uauuuggaaaggacauguaagu

SEQ ID NO: 740464 - RNA, 22 nt, Human
uuaucuguuuucugugcguuuc

SEQ ID NO: 740465 - RNA, 22 nt, Human
cagaaccugagagcacaauccu

SEQ ID NO: 740466 - RNA, 22 nt, Human
ugggccucccaugucuuaggga

SEQ ID NO: 740467 - RNA, 22 nt, Human
uggcaggugaaguuguuaggga

SEQ ID NO: 740468 - RNA, 22 nt, Human
uagcccagaugauugaaccaug

SEQ ID NO: 740469 - RNA, 22 nt, Human
cugcugcccagugugcauuggg

SEQ ID NO: 740470 - RNA, 22 nt, Human
ucauugcaguagggagagaccc

SEQ ID NO: 740471 - RNA, 22 nt, Human
uuuaucaaacaaauuauccagc

SEQ ID NO: 740472 - RNA, 23 nt, Human
acaagcagcccagugcucugccu

SEQ ID NO: 740473 - RNA, 22 nt, Human
ucaccccuacauuucccuugcu

SEQ ID NO: 740474 - RNA, 22 nt, Human
ggugagcaaagcuucaucugua

SEQ ID NO: 740475 - RNA, 22 nt, Human
aggcuucagacaaauguuaugg

SEQ ID NO: 740476 - RNA, 21 nt, Human
auuuucucuggaugaugguca

SEQ ID NO: 740477 - RNA, 22 nt, Human
uugauuucuauucagauguaga

SEQ ID NO: 740478 - RNA, 22 nt, Human
ggaagggaaaauucauucggcu

SEQ ID NO: 740479 - RNA, 22 nt, Human
acuuuucaaaugggaaacucag

SEQ ID NO: 740480 - RNA, 22 nt, Human
acccaggaugauaauguucaca

SEQ ID NO: 740481 - RNA, 22 nt, Human
cugcucuguauaugagcaggaa

SEQ ID NO: 740482 - RNA, 22 nt, Human
uuugauucuggccucugagaag

SEQ ID NO: 740483 - RNA, 22 nt, Human
gcugcucagugggccugagccu

SEQ ID NO: 740484 - RNA, 22 nt, Human
ugccucugugggcagagcugcc

SEQ ID NO: 740485 - RNA, 22 nt, Human
ucccuuuggauccaagcuuaug

SEQ ID NO: 740486 - RNA, 20 nt, Human
agggcugagaagggacuagc

SEQ ID NO: 740487 - RNA, 22 nt, Human
cagagccucaucauccacucca

SEQ ID NO: 740488 - RNA, 22 nt, Human
uucucaguuucauagcugagca

SEQ ID NO: 740489 - RNA, 22 nt, Human
cucaggauugugccuagggaga

SEQ ID NO: 740490 - RNA, 22 nt, Human
agccccagccccucucucacaa

SEQ ID NO: 740491 - RNA, 20 nt, Human
auuugcaucugaauaacuua

SEQ ID NO: 740492 - RNA, 22 nt, Human
acaguguagugugaugucaaaa

SEQ ID NO: 740493 - RNA, 22 nt, Human
ucacagaaaaguggagagccua

SEQ ID NO: 740494 - RNA, 22 nt, Human
cugccugcguugccucgugccu

SEQ ID NO: 740495 - RNA, 22 nt, Human
ccaaagugcugagauuacaggu

SEQ ID NO: 740496 - RNA, 22 nt, Human
ggcacagagcccagcuuccuag

SEQ ID NO: 740497 - RNA, 22 nt, Human
gcagaggucaaauaccucauuu

SEQ ID NO: 740498 - RNA, 22 nt, Human
cagaggugcauacaggucauua

SEQ ID NO: 740499 - RNA, 22 nt, Human
uauguguggcagcugggagugu

SEQ ID NO: 740500 - RNA, 22 nt, Human
aggcacuuuccuugaggaguuu

SEQ ID NO: 740501 - RNA, 22 nt, Human
ccuggacagagggcagcggcca

SEQ ID NO: 740502 - RNA, 22 nt, Human
uuaucuuguagagauauuuucg

SEQ ID NO: 740503 - RNA, 19 nt, Human
ucuacaaaguggcaucagg

SEQ ID NO: 740504 - RNA, 22 nt, Human
aacagguagggacucuaacuug

SEQ ID NO: 740505 - RNA, 22 nt, Human
ucacuggugugagaggagcaaa

SEQ ID NO: 740506 - RNA, 22 nt, Human
gucuggaggagggcucugcggc

SEQ ID NO: 740507 - RNA, 22 nt, Human
ugcauucaguuggucagcuuuu

SEQ ID NO: 740508 - RNA, 22 nt, Human
agcugaggaggaaugaugggua

SEQ ID NO: 740509 - RNA, 22 nt, Human
cccaaggcugcagugagcauga

SEQ ID NO: 740510 - RNA, 22 nt, Human
ugccaggccaaugaaggcaggg

SEQ ID NO: 740511 - RNA, 22 nt, Human
aucgagggugaguacagcggac

SEQ ID NO: 740512 - RNA, 22 nt, Human
agagagagaaaugaaaugugcu

SEQ ID NO: 740513 - RNA, 22 nt, Human
caaagaaggaacuauaauccca

SEQ ID NO: 740514 - RNA, 22 nt, Human
ccagcuuuggaguguuguugcu

SEQ ID NO: 740515 - RNA, 18 nt, Human
ucugggcaaucucaguau

SEQ ID NO: 740516 - RNA, 23 nt, Human
uguaggcuaagucccauaaauca

SEQ ID NO: 740517 - RNA, 22 nt, Human
agguggaacguucaggugcuag

SEQ ID NO: 740518 - RNA, 18 nt, Human
gcucuggcucaccuccag

SEQ ID NO: 740519 - RNA, 22 nt, Human
ugagagucuguuccucuugcag

SEQ ID NO: 740520 - RNA, 22 nt, Human
gucugcagagggaaggcuucag

SEQ ID NO: 740521 - RNA, 22 nt, Human
cuguuuauaaaccaccaguuua

SEQ ID NO: 740522 - RNA, 22 nt, Human
gcucaggaccgaggggugggaa

SEQ ID NO: 740523 - RNA, 22 nt, Human
aagcuccccgaaacccaccucu

SEQ ID NO: 740524 - RNA, 22 nt, Human
uuuguuuacucauucauugaug

SEQ ID NO: 740525 - RNA, 22 nt, Human
aaugauaccaaacauguagaua

SEQ ID NO: 740526 - RNA, 22 nt, Human
uauucauaguaaacaaaagugg

SEQ ID NO: 740527 - RNA, 22 nt, Human
gggcccuggccgaaucccucug

SEQ ID NO: 740528 - RNA, 22 nt, Human
guaggaaaguaaaugaaauaca

SEQ ID NO: 740529 - RNA, 22 nt, Human
uugcuuuacauguucugguaaa

SEQ ID NO: 740530 - RNA, 22 nt, Human
ugaaaucaucugccaauaaguu

SEQ ID NO: 740531 - RNA, 22 nt, Human
uccaguaucaaaguccuagucc

SEQ ID NO: 740532 - RNA, 22 nt, Human
auguggaggaaaugaguguaca

SEQ ID NO: 740533 - RNA, 22 nt, Human
ccaggcucaccuggagccccug

SEQ ID NO: 740534 - RNA, 22 nt, Human
accagugggaaguggaaaauga

SEQ ID NO: 740535 - RNA, 18 nt, Human
aauggaaggggugcuguu

SEQ ID NO: 740536 - RNA, 22 nt, Human
aacagcagggaugacauggcca

SEQ ID NO: 740537 - RNA, 22 nt, Human
ugagauucuguucagaaaaaug

SEQ ID NO: 740538 - RNA, 19 nt, Human
ggcuucgaggcuggggaag

SEQ ID NO: 740539 - RNA, 22 nt, Human
aguaacaaauauucauuggauu

SEQ ID NO: 740540 - RNA, 22 nt, Human
cugcucugcaaggcacagugau

SEQ ID NO: 740541 - RNA, 22 nt, Human
aaggucauuguugcauguucuc

SEQ ID NO: 740542 - RNA, 22 nt, Human
uucucaggccuuugggauggga

SEQ ID NO: 740543 - RNA, 22 nt, Human
uucacaauaggagcaugcaaau

SEQ ID NO: 740544 - RNA, 22 nt, Human
uuaucguacgcuucagaaauuu

SEQ ID NO: 740545 - RNA, 22 nt, Human
ccugaagaugagggacagcuaa

SEQ ID NO: 740546 - RNA, 22 nt, Human
ccuccucugggaagauucagag

SEQ ID NO: 740547 - RNA, 22 nt, Human
gaguaauuuucuuaaaacauca

SEQ ID NO: 740548 - RNA, 22 nt, Human
uucucugccucacaggucuaag

SEQ ID NO: 740549 - RNA, 22 nt, Human
uacuagaaccucacaacaaucc

SEQ ID NO: 740550 - RNA, 22 nt, Human
uacacaguauaugggaucacag

SEQ ID NO: 740551 - RNA, 22 nt, Human
aucaaaguccaucagaagguag

SEQ ID NO: 740552 - RNA, 22 nt, Human
caggaggcagcgcucucaggac

SEQ ID NO: 740553 - RNA, 22 nt, Human
uuauucagcucucuagaggcac

SEQ ID NO: 740554 - RNA, 23 nt, Human
auugaugacuugauuacacuuuu

SEQ ID NO: 740555 - RNA, 22 nt, Human
cugggccugucagggcuuuuug

SEQ ID NO: 740556 - RNA, 22 nt, Human
gaccuucaagcaccauauuuau

SEQ ID NO: 740557 - RNA, 22 nt, Human
ugagcagaagcccuccuggacu

SEQ ID NO: 740558 - RNA, 22 nt, Human
ucaaauauuggcuauuucacau

SEQ ID NO: 740559 - RNA, 22 nt, Human
aaacaguagaaguguauuuuau

SEQ ID NO: 740560 - RNA, 22 nt, Human
ucccugccaaugauuggagcaa

SEQ ID NO: 740561 - RNA, 22 nt, Human
uaaggcuuaugaucagaagguu

SEQ ID NO: 740562 - RNA, 23 nt, Human
aguucucaaaaccagcuugacaa

SEQ ID NO: 740563 - RNA, 22 nt, Human
cagcagcucccauccgcugagc

SEQ ID NO: 740564 - RNA, 22 nt, Human
ugauauaagaaguaguauggau

SEQ ID NO: 740565 - RNA, 22 nt, Human
cuucuuaaucccuuauauauuu

SEQ ID NO: 740566 - RNA, 22 nt, Human
caugcauagcuuuggagcuagg

SEQ ID NO: 740567 - RNA, 22 nt, Human
ucugugaaaucacccagguuua

SEQ ID NO: 740568 - RNA, 22 nt, Human
gagcugcagacuugauacagga

SEQ ID NO: 740569 - RNA, 22 nt, Human
uuuuucugucucuuacauugca

SEQ ID NO: 740570 - RNA, 22 nt, Human
cgcuuuggagucccugcuuuac

SEQ ID NO: 740571 - RNA, 18 nt, Human
uuaucugcugcaaagggu

SEQ ID NO: 740572 - RNA, 22 nt, Human
gagaggaaugagguuaaggacu

SEQ ID NO: 740573 - RNA, 22 nt, Human
agaugagggguagaaaggacuu

SEQ ID NO: 740574 - RNA, 22 nt, Human
ccccuuccacagugcuuccuaa

SEQ ID NO: 740575 - RNA, 22 nt, Human
ugcugcuguugacggcugucca

SEQ ID NO: 740576 - RNA, 22 nt, Human
gguggcagaauaauugaagguc

SEQ ID NO: 740577 - RNA, 22 nt, Human
aguguuuaacuucguccugaag

SEQ ID NO: 740578 - RNA, 22 nt, Human
ugcuccagugccugccccacag

SEQ ID NO: 740579 - RNA, 22 nt, Human
acagcugauuggaucaaggaca

SEQ ID NO: 740580 - RNA, 22 nt, Human
ccagcaccuugaucuuggaguu

SEQ ID NO: 740581 - RNA, 22 nt, Human
agcaauuuuugauuuucagugu

SEQ ID NO: 740582 - RNA, 22 nt, Human
gggcugcaaugcuucaguuguu

SEQ ID NO: 740583 - RNA, 22 nt, Human
ugguccucagguucucugugcg

SEQ ID NO: 740584 - RNA, 22 nt, Human
agugagcuaugaucauguuacu

SEQ ID NO: 740585 - RNA, 22 nt, Human
aggcccucacagucuauuguga

SEQ ID NO: 740586 - RNA, 22 nt, Human
uguggcugcuccugggugguca

SEQ ID NO: 740587 - RNA, 22 nt, Human
acccugggucucaaucauccua

SEQ ID NO: 740588 - RNA, 22 nt, Human
ggcagaagauaggacagggaau

SEQ ID NO: 740589 - RNA, 17 nt, Human
aggggagagugggaaga

SEQ ID NO: 740590 - RNA, 22 nt, Human
ugcugaggcagaugucugugac

SEQ ID NO: 740591 - RNA, 22 nt, Human
ugugugggagcacgggcuguug

SEQ ID NO: 740592 - RNA, 22 nt, Human
uugucugugaaauggaaauagu

SEQ ID NO: 740593 - RNA, 22 nt, Human
gggcacaggagaaggaucuggc

SEQ ID NO: 740594 - RNA, 22 nt, Human
caggaauguccuugucauuuca

SEQ ID NO: 740595 - RNA, 22 nt, Human
gcuggggucugugaggagggcu

SEQ ID NO: 740596 - RNA, 22 nt, Human
ugugucugaacaugcuuuguaa

SEQ ID NO: 740597 - RNA, 22 nt, Human
augagaaagaguuguaucuaga

SEQ ID NO: 740598 - RNA, 22 nt, Human
guuuaaccaagagcauugugca

SEQ ID NO: 740599 - RNA, 22 nt, Human
uuucaaacuccagcucaccaau

SEQ ID NO: 740600 - RNA, 22 nt, Human
gauuucaagcccccagagauuc

SEQ ID NO: 740601 - RNA, 22 nt, Human
ugucauuauuugccuacugacu

SEQ ID NO: 740602 - RNA, 22 nt, Human
uugucaagauugagagaugacu

SEQ ID NO: 740603 - RNA, 18 nt, Human
uccugcagcuucuaugua

SEQ ID NO: 740604 - RNA, 22 nt, Human
cccagcuccagagccagaaaca

SEQ ID NO: 740605 - RNA, 22 nt, Human
cacaguggcuuugcuggucucg

SEQ ID NO: 740606 - RNA, 22 nt, Human
ggaagagagaucccauagaugu

SEQ ID NO: 740607 - RNA, 22 nt, Human
acagaggggucacagccugaag

SEQ ID NO: 740608 - RNA, 22 nt, Human
auuuuacuacuccaauuaauga

SEQ ID NO: 740609 - RNA, 22 nt, Human
gccagguggucuggcuccagag

SEQ ID NO: 740610 - RNA, 19 nt, Human
agccuggcuuugcucugcu

SEQ ID NO: 740611 - RNA, 22 nt, Human
auaauugugggcagugugauau

SEQ ID NO: 740612 - RNA, 22 nt, Human
uguauagaguuggaagaugacu

SEQ ID NO: 740613 - RNA, 22 nt, Human
aaggcugaggcagugaggcaga

SEQ ID NO: 740614 - RNA, 22 nt, Human
agagauguucauucagcauguu

SEQ ID NO: 740615 - RNA, 22 nt, Human
gggagaacuggguggagcaucu

SEQ ID NO: 740616 - RNA, 22 nt, Human
ucuggaauuuuauugaucaaaa

SEQ ID NO: 740617 - RNA, 22 nt, Human
gucccaggcagagucaggaggg

SEQ ID NO: 740618 - RNA, 20 nt, Human
aucuugggacagggcacaug

SEQ ID NO: 740619 - RNA, 22 nt, Human
gaauugauugauauguacugua

SEQ ID NO: 740620 - RNA, 22 nt, Human
aaugucauugguaaagauuagg

SEQ ID NO: 740621 - RNA, 22 nt, Human
agaaaaagucaaggaauuggac

SEQ ID NO: 740622 - RNA, 22 nt, Human
cccaggcuucccaaucagaagg

SEQ ID NO: 740623 - RNA, 22 nt, Human
ugaagcagagaauuugacaguc

SEQ ID NO: 740624 - RNA, 22 nt, Human
aauagaaaggaggggcucuugu

SEQ ID NO: 740625 - RNA, 22 nt, Human
agaaaguuagcagacucuuggc

SEQ ID NO: 740626 - RNA, 22 nt, Human
auuccuaaggaaggcuggcaag

SEQ ID NO: 740627 - RNA, 22 nt, Human
acaggcaagaggaaagcaagua

SEQ ID NO: 740628 - RNA, 22 nt, Human
gcugucuguucgagcguguguu

SEQ ID NO: 740629 - RNA, 22 nt, Human
auccuuaauuuacuugcaucuu

SEQ ID NO: 740630 - RNA, 22 nt, Human
acucacagacugcagguuuauu

SEQ ID NO: 740631 - RNA, 22 nt, Human
cccuggcuuggcacucuccacu

SEQ ID NO: 740632 - RNA, 22 nt, Human
ccuuccuuucagggcuaugccu

SEQ ID NO: 740633 - RNA, 22 nt, Human
ucagcccaccuucaggggaguu

SEQ ID NO: 740634 - RNA, 22 nt, Human
auacaugugucccugauuuauu

SEQ ID NO: 740635 - RNA, 22 nt, Human
ggcacaggagcuagucaaagcc

SEQ ID NO: 740636 - RNA, 23 nt, Human
ccagugugguagguccacaggug

SEQ ID NO: 740637 - RNA, 22 nt, Human
uuccuacauuuguacaauaaga

SEQ ID NO: 740638 - RNA, 22 nt, Human
auucagugggugcucagcacaa

SEQ ID NO: 740639 - RNA, 22 nt, Human
gcaaauguggcuuccuuucuag

SEQ ID NO: 740640 - RNA, 22 nt, Human
aucugggcguauaggugcaagu

SEQ ID NO: 740641 - RNA, 22 nt, Human
cauccaaagcaaauaucuuaaa

SEQ ID NO: 740642 - RNA, 22 nt, Human
uuugguaaguaugaaugcagua

SEQ ID NO: 740643 - RNA, 22 nt, Human
auggguggaggagaaaggcauc

SEQ ID NO: 740644 - RNA, 22 nt, Human
aacaaauuaguugcaagacugg

SEQ ID NO: 740645 - RNA, 22 nt, Human
guggguggauuccagcaacgcu

SEQ ID NO: 740646 - RNA, 22 nt, Human
uagcacaggucuuguugccauu

SEQ ID NO: 740647 - RNA, 19 nt, Human
aaugucucuaucuguucuc

SEQ ID NO: 740648 - RNA, 22 nt, Human
agcaagcuaacauaggagauug

SEQ ID NO: 740649 - RNA, 21 nt, Human
uagaagcacauagguucaaag

SEQ ID NO: 740650 - RNA, 22 nt, Human
agcaggcuugguccccagccuc

SEQ ID NO: 740651 - RNA, 22 nt, Human
uggggugccgacagggagggca

SEQ ID NO: 740652 - RNA, 22 nt, Human
uccagaguacggaagagucauc

SEQ ID NO: 740653 - RNA, 22 nt, Human
gcaguguuuuacagaccagcau

SEQ ID NO: 740654 - RNA, 22 nt, Human
ccaggcugugcuuuucauaaau

SEQ ID NO: 740655 - RNA, 22 nt, Human
uguggcagggcgugacauuugg

SEQ ID NO: 740656 - RNA, 22 nt, Human
ucuacaagucaagucuaucaag

SEQ ID NO: 740657 - RNA, 22 nt, Human
gcacaggcuccggaggagagcu

SEQ ID NO: 740658 - RNA, 22 nt, Human
acagucaaaugucuaucuucuu

SEQ ID NO: 740659 - RNA, 22 nt, Human
cagggauucagcugaaggaggc

SEQ ID NO: 740660 - RNA, 22 nt, Human
auaaguuugucuuuguaaagau

SEQ ID NO: 740661 - RNA, 22 nt, Human
agccacagcgaaccucucuucc

SEQ ID NO: 740662 - RNA, 22 nt, Human
ucacuugacuuuccagucuugg

SEQ ID NO: 740663 - RNA, 20 nt, Human
guuuagcauggcagugaaag

SEQ ID NO: 740664 - RNA, 22 nt, Human
ccagugcaggugagcaccaggu

SEQ ID NO: 740665 - RNA, 22 nt, Human
guggcugcagagggcacagcau

SEQ ID NO: 740666 - RNA, 22 nt, Human
auuauuguacuuucaauaaggu

SEQ ID NO: 740667 - RNA, 22 nt, Human
uuuuguguugccauguuaagca

SEQ ID NO: 740668 - RNA, 22 nt, Human
aauggcuuuggucuggguccca

SEQ ID NO: 740669 - RNA, 22 nt, Human
cagucuccgccagcuccucaca

SEQ ID NO: 740670 - RNA, 22 nt, Human
uagcuuuaauaagcugcugaau

SEQ ID NO: 740671 - RNA, 22 nt, Human
ucaaagagcuauucaguugugg

SEQ ID NO: 740672 - RNA, 21 nt, Human
ggaagcuguguccaugcuccu

SEQ ID NO: 740673 - RNA, 22 nt, Human
gacccugauaggaguagaagaa

SEQ ID NO: 740674 - RNA, 20 nt, Human
ccagcugagccaaggggaga

SEQ ID NO: 740675 - RNA, 17 nt, Human
ccagagaguaguuagga

SEQ ID NO: 740676 - RNA, 22 nt, Human
ccaugggagaugauggggagug

SEQ ID NO: 740677 - RNA, 22 nt, Human
gcaacugugauuuguuaucuug

SEQ ID NO: 740678 - RNA, 22 nt, Human
uaccauuuacuugaaaauaaaa

SEQ ID NO: 740679 - RNA, 22 nt, Human
gccagcagcucuugggcgggca

SEQ ID NO: 740680 - RNA, 22 nt, Human
aguucucagcuuaguaugcugu

SEQ ID NO: 740681 - RNA, 22 nt, Human
gcuguggccuccagcacucccc

SEQ ID NO: 740682 - RNA, 22 nt, Human
gugagcuuugugguaaugaagu

SEQ ID NO: 740683 - RNA, 22 nt, Human
cuuugccuccuagagcacguuc

SEQ ID NO: 740684 - RNA, 22 nt, Human
aaguuuagcgcucucucaagga

SEQ ID NO: 740685 - RNA, 22 nt, Human
aggagccauuuuccaagggcga

SEQ ID NO: 740686 - RNA, 22 nt, Human
gcugccugccugcauuuaaucc

SEQ ID NO: 740687 - RNA, 22 nt, Human
caugcauuccuccucugccuua

SEQ ID NO: 740688 - RNA, 22 nt, Human
cccaggcucacuguccgcuucc

SEQ ID NO: 740689 - RNA, 22 nt, Human
guuuauuauacaacaaaagcua

SEQ ID NO: 740690 - RNA, 22 nt, Human
acaauagucaaugcacgucauu

SEQ ID NO: 740691 - RNA, 21 nt, Human
agguccaguucugucuuggac

SEQ ID NO: 740692 - RNA, 22 nt, Human
acauuaacaccauaaguguguu

SEQ ID NO: 740693 - RNA, 22 nt, Human
uuuaucagaaguuagagaaaga

SEQ ID NO: 740694 - RNA, 22 nt, Human
guccagccacucaccuuccagc

SEQ ID NO: 740695 - RNA, 22 nt, Human
uauggcuucugcuuucuugacu

SEQ ID NO: 740696 - RNA, 22 nt, Human
cagcuauugauaaauguugggg

SEQ ID NO: 740697 - RNA, 18 nt, Human
ugucugaagccacuuuuu

SEQ ID NO: 740698 - RNA, 22 nt, Human
gcaccugguuuauauaaucaua

SEQ ID NO: 740699 - RNA, 22 nt, Human
auguggcuuuuccuggguuccu

SEQ ID NO: 740700 - RNA, 22 nt, Human
agacugaaguaagaaugcagcu

SEQ ID NO: 740701 - RNA, 22 nt, Human
agagcaauuagcuuagguaaaa

SEQ ID NO: 740702 - RNA, 22 nt, Human
agcuggcacagaccaggagauc

SEQ ID NO: 740703 - RNA, 20 nt, Human
uaaaugcaucuguucaacug

SEQ ID NO: 740704 - RNA, 22 nt, Human
ucuaauccuugcuaccugggug

SEQ ID NO: 740705 - RNA, 20 nt, Human
ugcuugucaugcacucaggc

SEQ ID NO: 740706 - RNA, 22 nt, Human
cuuuacauaaggauaaaccugg

SEQ ID NO: 740707 - RNA, 22 nt, Human
cugguccucuccagcaggcauu

SEQ ID NO: 740708 - RNA, 22 nt, Human
uagguucaaguucaggcucuau

SEQ ID NO: 740709 - RNA, 22 nt, Human
aggcuaauauggcacaugaaca

SEQ ID NO: 740710 - RNA, 22 nt, Human
gggcucaguucugcuucaugcu

SEQ ID NO: 740711 - RNA, 22 nt, Human
ucuggcagugauuucugugauc

SEQ ID NO: 740712 - RNA, 22 nt, Human
uucuuacaucuauaaaguuggg

SEQ ID NO: 740713 - RNA, 22 nt, Human
ugggagagauaggcuucuggac

SEQ ID NO: 740714 - RNA, 21 nt, Human
agccugcaauguagguaccgg

SEQ ID NO: 740715 - RNA, 22 nt, Human
aauauaugacuccacugcauga

SEQ ID NO: 740716 - RNA, 22 nt, Human
ccaggaucuggguccaugggac

SEQ ID NO: 740717 - RNA, 22 nt, Human
uauauguguggauucuuguaga

SEQ ID NO: 740718 - RNA, 22 nt, Human
uguggggaucuucuagcuuuuc

SEQ ID NO: 740719 - RNA, 22 nt, Human
ccauuguaaauucuguggaagu

SEQ ID NO: 740720 - RNA, 22 nt, Human
cccucgggucgcggacugcgcu

SEQ ID NO: 740721 - RNA, 22 nt, Human
agaaguaggcagggcuguauca

SEQ ID NO: 740722 - RNA, 22 nt, Human
gcacacaguacuauaugcuaca

SEQ ID NO: 740723 - RNA, 22 nt, Human
gacauuaaaugucuuaguugcc

SEQ ID NO: 740724 - RNA, 22 nt, Human
gagugggcaccgugggcacacu

SEQ ID NO: 740725 - RNA, 22 nt, Human
cugccugccacguucagcugua

SEQ ID NO: 740726 - RNA, 22 nt, Human
uuccacucuacucuggccaguc

SEQ ID NO: 740727 - RNA, 22 nt, Human
cagggcucccucuggcucccag

SEQ ID NO: 740728 - RNA, 22 nt, Human
ccugccucaucaacuugucgug

SEQ ID NO: 740729 - RNA, 22 nt, Human
gaaaauguuuguccggagcuga

SEQ ID NO: 740730 - RNA, 22 nt, Human
acauauguguuguacaugcaug

SEQ ID NO: 740731 - RNA, 22 nt, Human
uacacaguagaguauaaugcgu

SEQ ID NO: 740732 - RNA, 22 nt, Human
uccagcuguacuuuguccuggc

SEQ ID NO: 740733 - RNA, 19 nt, Human
uuuucucgugcuugucugc

SEQ ID NO: 740734 - RNA, 22 nt, Human
ugcuggggguucagaugaguaa

SEQ ID NO: 740735 - RNA, 22 nt, Human
uuugcaaauuagccacccuguu

SEQ ID NO: 740736 - RNA, 22 nt, Human
gaggaaaaugcaacaggaaugc

SEQ ID NO: 740737 - RNA, 22 nt, Human
aagaugcagcuuuacaauaagg

SEQ ID NO: 740738 - RNA, 22 nt, Human
auuucagaugaccaaauggaaa

SEQ ID NO: 740739 - RNA, 22 nt, Human
guaugucaccucuccuaagcac

SEQ ID NO: 740740 - RNA, 22 nt, Human
uccccacaucucugcaucaggc

SEQ ID NO: 740741 - RNA, 23 nt, Human
cugcaacucagucuggagcaguu

SEQ ID NO: 740742 - RNA, 22 nt, Human
uuaggucauucccugagcagau

SEQ ID NO: 740743 - RNA, 22 nt, Human
ucacagaguuaaaaguuucuuu

SEQ ID NO: 740744 - RNA, 22 nt, Human
uggagagcgugcuuagcacucu

SEQ ID NO: 740745 - RNA, 22 nt, Human
gauuuauaguaugugcuuucag

SEQ ID NO: 740746 - RNA, 22 nt, Human
uccucaucuguaccuuggggua

SEQ ID NO: 740747 - RNA, 22 nt, Human
cuggguugcaaagcgcuggcug

SEQ ID NO: 740748 - RNA, 22 nt, Human
aaguccaguuucauuugagguc

SEQ ID NO: 740749 - RNA, 22 nt, Human
uuuccuuccagguuccuaaggc

SEQ ID NO: 740750 - RNA, 22 nt, Human
agccaggggauucaucagggac

SEQ ID NO: 740751 - RNA, 22 nt, Human
uugcccugaagaacgucccaga

SEQ ID NO: 740752 - RNA, 22 nt, Human
uguccaaugcccuuuccacaug

SEQ ID NO: 740753 - RNA, 22 nt, Human
caaggacagcgucaggugcaac

SEQ ID NO: 740754 - RNA, 22 nt, Human
ucagcucacucugcuuccuggg

SEQ ID NO: 740755 - RNA, 22 nt, Human
uugaaugaaugguccauauaga

SEQ ID NO: 740756 - RNA, 22 nt, Human
cagggccuuuuagcaucuucuc

SEQ ID NO: 740757 - RNA, 22 nt, Human
uccugaauuucccagcaugaac

SEQ ID NO: 740758 - RNA, 22 nt, Human
guguacaggaugacuguacuua

SEQ ID NO: 740759 - RNA, 22 nt, Human
uccauacccagcuuucucacac

SEQ ID NO: 740760 - RNA, 22 nt, Human
cagaaguggccucagagggagu

SEQ ID NO: 740761 - RNA, 22 nt, Human
uaauacuuugaaugagagcuaa

SEQ ID NO: 740762 - RNA, 20 nt, Human
gcagcugaaaguaugacacc

SEQ ID NO: 740763 - RNA, 22 nt, Human
cacaauuucaguugcaugcaac

SEQ ID NO: 740764 - RNA, 22 nt, Human
uagcacaucuucuuggccugca

SEQ ID NO: 740765 - RNA, 22 nt, Human
gcaggaguuaggcgucguggau

SEQ ID NO: 740766 - RNA, 22 nt, Human
uccagggcuccccaacauccag

SEQ ID NO: 740767 - RNA, 21 nt, Human
auuuucauuuccaggggagga

SEQ ID NO: 740768 - RNA, 22 nt, Human
agagugcucagaugcaugucuu

SEQ ID NO: 740769 - RNA, 22 nt, Human
ugccauggccuagaccugugau

SEQ ID NO: 740770 - RNA, 22 nt, Human
ccaggaagaaacagucuuuaua

SEQ ID NO: 740771 - RNA, 22 nt, Human
uaagacauuugaaaugugaucc

SEQ ID NO: 740772 - RNA, 23 nt, Human
gaauacaaagcagaugguccagc

SEQ ID NO: 740773 - RNA, 22 nt, Human
acugggcuguggacacccagcg

SEQ ID NO: 740774 - RNA, 20 nt, Human
ucugucucugagcuagacuu

SEQ ID NO: 740775 - RNA, 22 nt, Human
cagcagaagcaacauucaggcu

SEQ ID NO: 740776 - RNA, 22 nt, Human
cacagggcagguacucucagag

SEQ ID NO: 740777 - RNA, 22 nt, Human
ucaacugauuuagucugugcca

SEQ ID NO: 740778 - RNA, 22 nt, Human
aaacauuccauuucuauguaag

SEQ ID NO: 740779 - RNA, 17 nt, Human
ccuguguuugcuccuuc

SEQ ID NO: 740780 - RNA, 22 nt, Human
acaugaaaagacuaucugauua

SEQ ID NO: 740781 - RNA, 22 nt, Human
agacaauuuuugguuuugcaag

SEQ ID NO: 740782 - RNA, 22 nt, Human
guuaauguuaucugaagacagu

SEQ ID NO: 740783 - RNA, 22 nt, Human
ucggggucuuugacacgcucug

SEQ ID NO: 740784 - RNA, 22 nt, Human
aagugugggaaguagguggcga

SEQ ID NO: 740785 - RNA, 22 nt, Human
ugucacaguuuguacuuuauag

SEQ ID NO: 740786 - RNA, 22 nt, Human
ggagcugugggacgcuguccca

SEQ ID NO: 740787 - RNA, 22 nt, Human
guggagagagauaagccugguc

SEQ ID NO: 740788 - RNA, 22 nt, Human
cugagaaacauauuuccaucua

SEQ ID NO: 740789 - RNA, 22 nt, Human
augugcuuucuuuguuucauaa

SEQ ID NO: 740790 - RNA, 22 nt, Human
uccugggcuguggccccgggca

SEQ ID NO: 740791 - RNA, 22 nt, Human
gaaagcauaacuaauauuuauu

SEQ ID NO: 740792 - RNA, 22 nt, Human
aggcugugaugagccucaugga

SEQ ID NO: 740793 - RNA, 21 nt, Human
ugcaggcuacuucugacucua

SEQ ID NO: 740794 - RNA, 22 nt, Human
gccugugguuugauuaagcauu

SEQ ID NO: 740795 - RNA, 22 nt, Human
aacacugugagguaaugaccua

SEQ ID NO: 740796 - RNA, 22 nt, Human
cuggcagauaguaagugaucaa

SEQ ID NO: 740797 - RNA, 22 nt, Human
uagcccuguccuuggccugugc

SEQ ID NO: 740798 - RNA, 19 nt, Human
ggccucugcaggccgcccc

SEQ ID NO: 740799 - RNA, 22 nt, Human
ugcacagagggaggcauaaaau

SEQ ID NO: 740800 - RNA, 22 nt, Human
aacuugaacugaugaguguuag

SEQ ID NO: 740801 - RNA, 22 nt, Human
ggccugcacagagguggcucua

SEQ ID NO: 740802 - RNA, 22 nt, Human
uucauaaggguggccauauaaa

SEQ ID NO: 740803 - RNA, 22 nt, Human
ugaaaugcuuuuacaggauauu

SEQ ID NO: 740804 - RNA, 22 nt, Human
auggggcuguucucugcccugc

SEQ ID NO: 740805 - RNA, 22 nt, Human
cuugaaagcacuccuuugacug

SEQ ID NO: 740806 - RNA, 21 nt, Human
gugaagacuuugccuuuaaga

SEQ ID NO: 740807 - RNA, 22 nt, Human
uggcucaggagggaucuuugcu

SEQ ID NO: 740808 - RNA, 22 nt, Human
cugggugacagagugagauggu

SEQ ID NO: 740809 - RNA, 22 nt, Human
cgggguggcacucuaaauagaa

SEQ ID NO: 740810 - RNA, 22 nt, Human
guauuuaauuccauuaaguuag

SEQ ID NO: 740811 - RNA, 22 nt, Human
uccuggaguaggccuuagccau

SEQ ID NO: 740812 - RNA, 22 nt, Human
uuacaacuuuccugugucaaau

SEQ ID NO: 740813 - RNA, 22 nt, Human
cacaaaggagaaugucagcaua

SEQ ID NO: 740814 - RNA, 22 nt, Human
acaugcauacacguacauaccu

SEQ ID NO: 740815 - RNA, 22 nt, Human
uuuuguauagucaaagacaaga

SEQ ID NO: 740816 - RNA, 22 nt, Human
gcucaggccucacuccauuugg

SEQ ID NO: 740817 - RNA, 22 nt, Human
cgcccagcugaaaucuccaggc

SEQ ID NO: 740818 - RNA, 18 nt, Human
acagacacuuaguaugag

SEQ ID NO: 740819 - RNA, 22 nt, Human
agcaacuguuacaagaacaaca

SEQ ID NO: 740820 - RNA, 22 nt, Human
uauguagacaggcugcuuuucc

SEQ ID NO: 740821 - RNA, 22 nt, Human
cucugugugguaugauugucau

SEQ ID NO: 740822 - RNA, 22 nt, Human
gccuggguuccaugaucuccag

SEQ ID NO: 740823 - RNA, 22 nt, Human
aaauaaacugaagcacagagag

SEQ ID NO: 740824 - RNA, 22 nt, Human
augcuccuuggcuucaaagcca

SEQ ID NO: 740825 - RNA, 22 nt, Human
agggcagccaugagccuucagg

SEQ ID NO: 740826 - RNA, 22 nt, Human
ucuucugaagguaggaagcauu

SEQ ID NO: 740827 - RNA, 22 nt, Human
aguuaaggggguucaucuguaa

SEQ ID NO: 740828 - RNA, 22 nt, Human
auggcugugugcuucuccccau

SEQ ID NO: 740829 - RNA, 22 nt, Human
ucagagaacugcagcccuuccu

SEQ ID NO: 740830 - RNA, 22 nt, Human
ugccugucuccucugcagggug

SEQ ID NO: 740831 - RNA, 22 nt, Human
ugacauuugagagagauauaca

SEQ ID NO: 740832 - RNA, 19 nt, Human
uuuucccacccuuuagaau

SEQ ID NO: 740833 - RNA, 19 nt, Human
agugucaucagcuacucag

SEQ ID NO: 740834 - RNA, 22 nt, Human
acacugaaugcuguuuagaaau

SEQ ID NO: 740835 - RNA, 22 nt, Human
aggggcucugagugggccagga

SEQ ID NO: 740836 - RNA, 22 nt, Human
gagagugucuggaggaagcuaa

SEQ ID NO: 740837 - RNA, 22 nt, Human
cugccugcugccuguggagggu

SEQ ID NO: 740838 - RNA, 22 nt, Human
guucaaauucuaugaaauaugu

SEQ ID NO: 740839 - RNA, 22 nt, Human
aagcugcagacccccugucuca

SEQ ID NO: 740840 - RNA, 22 nt, Human
auucacaaugauacauaagcga

SEQ ID NO: 740841 - RNA, 22 nt, Human
gacaucaggccugcagucuggg

SEQ ID NO: 740842 - RNA, 22 nt, Human
agucagauuuagauguagcaag

SEQ ID NO: 740843 - RNA, 22 nt, Human
gcauggcuuacagaggcugcag

SEQ ID NO: 740844 - RNA, 22 nt, Human
uuauuuguaaagguccauagua

SEQ ID NO: 740845 - RNA, 22 nt, Human
uuugaacuaccucuccuuagca

SEQ ID NO: 740846 - RNA, 22 nt, Human
gagacagcagggccagggccug

SEQ ID NO: 740847 - RNA, 22 nt, Human
uuuaauuugaaaugaguaaccc

SEQ ID NO: 740848 - RNA, 22 nt, Human
acaggccucccauccggagccc

SEQ ID NO: 740849 - RNA, 22 nt, Human
aguuugaaauguuggcaauauu

SEQ ID NO: 740850 - RNA, 22 nt, Human
auccaguucucagugcuuacag

SEQ ID NO: 740851 - RNA, 22 nt, Human
aauccuggcaugugccuuggga

SEQ ID NO: 740852 - RNA, 22 nt, Human
cuaaauguuuuaucuuccuggc

SEQ ID NO: 740853 - RNA, 22 nt, Human
uuuaucaucuuguuuuuaaagc

SEQ ID NO: 740854 - RNA, 22 nt, Human
uuuccagggaggaauguggggu

SEQ ID NO: 740855 - RNA, 22 nt, Human
cagauggagucccguggaguuc

SEQ ID NO: 740856 - RNA, 22 nt, Human
uggguccugcacugcaagcacc

SEQ ID NO: 740857 - RNA, 22 nt, Human
auaaaccagaaguaaaagcuac

SEQ ID NO: 740858 - RNA, 22 nt, Human
cuuagaugaagucacagaaccc

SEQ ID NO: 740859 - RNA, 23 nt, Human
cuguuaaauuccuuaagagcagg

SEQ ID NO: 740860 - RNA, 22 nt, Human
ugcuuaaaggauaguuuaaacu

SEQ ID NO: 740861 - RNA, 22 nt, Human
acaguacauaauccugagucug

SEQ ID NO: 740862 - RNA, 22 nt, Human
ccaguguuuacaguugaacaaa

SEQ ID NO: 740863 - RNA, 22 nt, Human
acagcuuuguguuaaugggaag

SEQ ID NO: 740864 - RNA, 22 nt, Human
cuuuguuuuacucagaggcaug

SEQ ID NO: 740865 - RNA, 22 nt, Human
aagaaagagaucacuccuccau

SEQ ID NO: 740866 - RNA, 22 nt, Human
ugucugaggaagucagcccuuu

SEQ ID NO: 740867 - RNA, 22 nt, Human
acaaagguggaccauguggcuu

SEQ ID NO: 740868 - RNA, 22 nt, Human
agagccuucagagauuauuuua

SEQ ID NO: 740869 - RNA, 22 nt, Human
ugccuugcuucaaucaaaccgu

SEQ ID NO: 740870 - RNA, 22 nt, Human
acagggcuuaguggaaauuuuu

SEQ ID NO: 740871 - RNA, 22 nt, Human
agcagcaggcuuaaggaaaagu

SEQ ID NO: 740872 - RNA, 22 nt, Human
uuucagauggagguuuaggaca

SEQ ID NO: 740873 - RNA, 22 nt, Human
gcugagguggagauugcaguga

SEQ ID NO: 740874 - RNA, 22 nt, Human
uuuuauugucucccaguucugg

SEQ ID NO: 740875 - RNA, 22 nt, Human
ucuuuggaguguuaucaguaau

SEQ ID NO: 740876 - RNA, 22 nt, Human
acucaggaaaugaagacugguu

SEQ ID NO: 740877 - RNA, 22 nt, Human
gaaggccauuuuuagguagaau

SEQ ID NO: 740878 - RNA, 22 nt, Human
agauaaugucaaauucugucug

SEQ ID NO: 740879 - RNA, 22 nt, Human
cagcaagauuaagggcagaaaa

SEQ ID NO: 740880 - RNA, 22 nt, Human
agugacucacuagcucucagug

SEQ ID NO: 740881 - RNA, 20 nt, Human
uccaggcagacagcuauggg

SEQ ID NO: 740882 - RNA, 17 nt, Human
auggcuuugucacacag

SEQ ID NO: 740883 - RNA, 22 nt, Human
auacaaucuagucugucagcaa

SEQ ID NO: 740884 - RNA, 22 nt, Human
acuguggaugccaaaggggagg

SEQ ID NO: 740885 - RNA, 22 nt, Human
auguuggagucguaaggcaugg

SEQ ID NO: 740886 - RNA, 22 nt, Human
aagucuuuugcuaagaguaaug

SEQ ID NO: 740887 - RNA, 20 nt, Human
gcugggcuaccacuggcccu

SEQ ID NO: 740888 - RNA, 22 nt, Human
uuuucuaagggaaacguccucc

SEQ ID NO: 740889 - RNA, 22 nt, Human
ugggccuggacaaggccacuag

SEQ ID NO: 740890 - RNA, 22 nt, Human
agucaacagaguggccgcagcg

SEQ ID NO: 740891 - RNA, 22 nt, Human
uguauuaucaaguaaauacaug

SEQ ID NO: 740892 - RNA, 22 nt, Human
gggcuucaguaccaaaguuuga

SEQ ID NO: 740893 - RNA, 22 nt, Human
caggggcuguuugccucaggcc

SEQ ID NO: 740894 - RNA, 22 nt, Human
agggagguccaucccugcagag

SEQ ID NO: 740895 - RNA, 20 nt, Human
gggcuagaccagggcagagg

SEQ ID NO: 740896 - RNA, 22 nt, Human
augggaugaucaccugagcuca

SEQ ID NO: 740897 - RNA, 22 nt, Human
gcauuccugagaaugcagagug

SEQ ID NO: 740898 - RNA, 22 nt, Human
gucaacuuuaagaugaucuuuu

SEQ ID NO: 740899 - RNA, 22 nt, Human
gccucagccggcggacgccagg

SEQ ID NO: 740900 - RNA, 22 nt, Human
accuuuggucauuuacuuuuca

SEQ ID NO: 740901 - RNA, 22 nt, Human
uuucuuaaauauuugcaggaca

SEQ ID NO: 740902 - RNA, 22 nt, Human
auccucagaccucagcaaagcc

SEQ ID NO: 740903 - RNA, 22 nt, Human
uuacuguuugaaaaaugaaugu

SEQ ID NO: 740904 - RNA, 22 nt, Human
ccaggagcaccaggccugugcc

SEQ ID NO: 740905 - RNA, 20 nt, Human
gggagaagggcugaugagag

SEQ ID NO: 740906 - RNA, 22 nt, Human
cuacccaggcuuagagggcugg

SEQ ID NO: 740907 - RNA, 22 nt, Human
gaggcugagacucugaauuuuu

SEQ ID NO: 740908 - RNA, 22 nt, Human
cagcacuuugagggcucuuaau

SEQ ID NO: 740909 - RNA, 22 nt, Human
ugugaagagaguaauaaaguca

SEQ ID NO: 740910 - RNA, 22 nt, Human
uuuaugucaaaacuacaguugg

SEQ ID NO: 740911 - RNA, 22 nt, Human
ggugcagaggagccagcugggg

SEQ ID NO: 740912 - RNA, 22 nt, Human
uggagugggcaauguaggcaag

SEQ ID NO: 740913 - RNA, 22 nt, Human
ugguugcauuaacugagagggg

SEQ ID NO: 740914 - RNA, 22 nt, Human
uccugagcuacaguaguaugau

SEQ ID NO: 740915 - RNA, 22 nt, Human
gaaguucugguguaugugauaa

SEQ ID NO: 740916 - RNA, 22 nt, Human
ucucacacuauuuauucugcuu

SEQ ID NO: 740917 - RNA, 22 nt, Human
uuguagcaucaaucaguacuuu

SEQ ID NO: 740918 - RNA, 22 nt, Human
uacuguauaugcuuguaucuga

SEQ ID NO: 740919 - RNA, 22 nt, Human
gaaucacgguauucugcacggg

SEQ ID NO: 740920 - RNA, 22 nt, Human
aaaaguucccugguuagaaaag

SEQ ID NO: 740921 - RNA, 22 nt, Human
cacauuuaagugcuuguucaga

SEQ ID NO: 740922 - RNA, 22 nt, Human
gcagagaguugggcugcgccag

SEQ ID NO: 740923 - RNA, 22 nt, Human
aggagcuggaaugguccuuuug

SEQ ID NO: 740924 - RNA, 22 nt, Human
cuuauucauaagucagacacac

SEQ ID NO: 740925 - RNA, 22 nt, Human
gaaaggcaguacagcugagccu

SEQ ID NO: 740926 - RNA, 22 nt, Human
uuucuuuaauucucacagcaau

SEQ ID NO: 740927 - RNA, 22 nt, Human
ggagcuguucaggacugcuuca

SEQ ID NO: 740928 - RNA, 22 nt, Human
gacaguauccagguggugaaga

SEQ ID NO: 740929 - RNA, 22 nt, Human
cgccccagaugcaagacaaaga

SEQ ID NO: 740930 - RNA, 22 nt, Human
uuucugccagguuucuggauga

SEQ ID NO: 740931 - RNA, 22 nt, Human
agacaguugauauacuauaaaa

SEQ ID NO: 740932 - RNA, 23 nt, Human
aaucagcaugcucuguggcuggc

SEQ ID NO: 740933 - RNA, 22 nt, Human
ggauggagguucucagaugcuc

SEQ ID NO: 740934 - RNA, 22 nt, Human
uuucaguuuaaguaacugcuau

SEQ ID NO: 740935 - RNA, 22 nt, Human
aacaguaucuacgggaacuauu

SEQ ID NO: 740936 - RNA, 22 nt, Human
cauuugaaauucuuagaacaaa

SEQ ID NO: 740937 - RNA, 22 nt, Human
cagcuauuuguaggaaaacugu

SEQ ID NO: 740938 - RNA, 22 nt, Human
augcauucauucauucuuucua

SEQ ID NO: 740939 - RNA, 23 nt, Human
aacuugcuguaaaguucuaggca

SEQ ID NO: 740940 - RNA, 22 nt, Human
cacugcccaggcacccaucuug

SEQ ID NO: 740941 - RNA, 22 nt, Human
ugggcucuccuggaggacaaca

SEQ ID NO: 740942 - RNA, 23 nt, Human
uaaauugaugguauggguuaagc

SEQ ID NO: 740943 - RNA, 22 nt, Human
cagucaccaccagguggcagua

SEQ ID NO: 740944 - RNA, 22 nt, Human
acaugaaugcagccauaacacu

SEQ ID NO: 740945 - RNA, 22 nt, Human
caaccucuggaaaguauggaca

SEQ ID NO: 740946 - RNA, 23 nt, Human
gggcuccagucucugcucaguug

SEQ ID NO: 740947 - RNA, 22 nt, Human
ccaagagguugaggcugcagug

SEQ ID NO: 740948 - RNA, 22 nt, Human
uacagguagcaaaaccuuuccu

SEQ ID NO: 740949 - RNA, 20 nt, Human
uguaaacaauaguguucuug

SEQ ID NO: 740950 - RNA, 22 nt, Human
agacagugauggacaggcagac

SEQ ID NO: 740951 - RNA, 22 nt, Human
cugcaggauucucccaguugga

SEQ ID NO: 740952 - RNA, 22 nt, Human
ccacugggggcugcaggcacuc

SEQ ID NO: 740953 - RNA, 21 nt, Human
gcugucuccuccuugcaccag

SEQ ID NO: 740954 - RNA, 22 nt, Human
gaucuuuagccaagacacacca

SEQ ID NO: 740955 - RNA, 22 nt, Human
ucuauuguaggcauguagcuug

SEQ ID NO: 740956 - RNA, 22 nt, Human
uaaaucccuacaucuguguuuu

SEQ ID NO: 740957 - RNA, 22 nt, Human
uacugaaauggcagauauauaa

SEQ ID NO: 740958 - RNA, 22 nt, Human
ccuuuacacguaaggcuguuga

SEQ ID NO: 740959 - RNA, 21 nt, Human
ucacaugcccauuacuggagc

SEQ ID NO: 740960 - RNA, 22 nt, Human
uuguaacaguagcugucagcuc

SEQ ID NO: 740961 - RNA, 22 nt, Human
uuuuccucaccuaacucaaggu

SEQ ID NO: 740962 - RNA, 22 nt, Human
caagcccuguuaggggucucua

SEQ ID NO: 740963 - RNA, 22 nt, Human
ccuggagacccacuucugccaa

SEQ ID NO: 740964 - RNA, 22 nt, Human
acugauuucagggaugagaaga

SEQ ID NO: 740965 - RNA, 22 nt, Human
gcagcagaggcccuacucuuug

SEQ ID NO: 740966 - RNA, 23 nt, Human
cuguaugauguuaaguggaaagc

SEQ ID NO: 740967 - RNA, 22 nt, Human
ucuuuucuggacucugcaugga

SEQ ID NO: 740968 - RNA, 22 nt, Human
agacauuuuaacaucuggguuu

SEQ ID NO: 740969 - RNA, 22 nt, Human
aggcuggaaagggaccagagug

SEQ ID NO: 740970 - RNA, 19 nt, Human
gcuguacaguaaggagaca

SEQ ID NO: 740971 - RNA, 22 nt, Human
ucugaauauguuuaucaucucu

SEQ ID NO: 740972 - RNA, 22 nt, Human
uugaucucauuguucuccucag

SEQ ID NO: 740973 - RNA, 22 nt, Human
cugguacaaaaugcugauauca

SEQ ID NO: 740974 - RNA, 22 nt, Human
ugcgauggcguagacaaauccc

SEQ ID NO: 740975 - RNA, 22 nt, Human
aggagccaaauuacuagcucug

SEQ ID NO: 740976 - RNA, 22 nt, Human
cacuguugaagauacuuccucu

SEQ ID NO: 740977 - RNA, 22 nt, Human
auuucucagcacuuccuaucuc

SEQ ID NO: 740978 - RNA, 22 nt, Human
agggaagcagcagccgccuguc

SEQ ID NO: 740979 - RNA, 22 nt, Human
uuuggaguuuaacaacuugaag

SEQ ID NO: 740980 - RNA, 22 nt, Human
cucacccauaucuccaugacuc

SEQ ID NO: 740981 - RNA, 22 nt, Human
uucaugugccagagcugaaaau

SEQ ID NO: 740982 - RNA, 22 nt, Human
gcgguagcucaagcuuguaauc

SEQ ID NO: 740983 - RNA, 22 nt, Human
auaaagcuauuccucucuuuuu

SEQ ID NO: 740984 - RNA, 22 nt, Human
uggcucugcugaaccuagugca

SEQ ID NO: 740985 - RNA, 22 nt, Human
gcuggugagcaaaggagaagga

SEQ ID NO: 740986 - RNA, 22 nt, Human
aagguaaugaaacagcagcuaa

SEQ ID NO: 740987 - RNA, 22 nt, Human
ugugugcuaauguaugcucuaa

SEQ ID NO: 740988 - RNA, 22 nt, Human
gaaagaccagcaugaggcuuua

SEQ ID NO: 740989 - RNA, 22 nt, Human
gcacagagagggaagguaacuu

SEQ ID NO: 740990 - RNA, 23 nt, Human
uggcagugaucaaaagcuuacau

SEQ ID NO: 740991 - RNA, 22 nt, Human
ugcauucaaauccugauccugc

SEQ ID NO: 740992 - RNA, 23 nt, Human
ccccucugguggcucagcuccug

SEQ ID NO: 740993 - RNA, 22 nt, Human
aaagauggcccaugaucucuug

SEQ ID NO: 740994 - RNA, 22 nt, Human
cuggggcccgagccuugggcca

SEQ ID NO: 740995 - RNA, 22 nt, Human
agcugaagcagucaguucagcu

SEQ ID NO: 740996 - RNA, 22 nt, Human
uggccaguggacuaaguucuga

SEQ ID NO: 740997 - RNA, 22 nt, Human
ggcuuuauuaagcaggguaagu

SEQ ID NO: 740998 - RNA, 21 nt, Human
auuccaguauaagccucuuug

SEQ ID NO: 740999 - RNA, 22 nt, Human
uuuucacacaaggugauaaguu

SEQ ID NO: 741000 - RNA, 20 nt, Human
caaaagcaaugaaguuauga

SEQ ID NO: 741001 - RNA, 22 nt, Human
cugccacuuucacccagugcuc

SEQ ID NO: 741002 - RNA, 22 nt, Human
cugcagggugacguugcccacc

SEQ ID NO: 741003 - RNA, 22 nt, Human
uauguacacauacacuuguaau

SEQ ID NO: 741004 - RNA, 22 nt, Human
aggccucuguagggcccugaag

SEQ ID NO: 741005 - RNA, 22 nt, Human
cagagucagcuagucuugggau

SEQ ID NO: 741006 - RNA, 22 nt, Human
cuguacauauacauuuuuuucc

SEQ ID NO: 741007 - RNA, 22 nt, Human
aguggcugaagcaucaaaggca

SEQ ID NO: 741008 - RNA, 19 nt, Human
cagugauuaauucaucuua

SEQ ID NO: 741009 - RNA, 22 nt, Human
aagauguuaggaaaguuagggu

SEQ ID NO: 741010 - RNA, 22 nt, Human
uucugugugucucagcaagcug

SEQ ID NO: 741011 - RNA, 22 nt, Human
acccaggggcagccuugcugug

SEQ ID NO: 741012 - RNA, 22 nt, Human
cauucaaaugugccacuguccu

SEQ ID NO: 741013 - RNA, 18 nt, Human
uacaggaaaaguguuaca

SEQ ID NO: 741014 - RNA, 22 nt, Human
ugcuguguucaccaauaugugu

SEQ ID NO: 741015 - RNA, 22 nt, Human
uuaguaguaagagucauaugua

SEQ ID NO: 741016 - RNA, 22 nt, Human
auuucacaaagaacagaugcag

SEQ ID NO: 741017 - RNA, 22 nt, Human
cagcacuuuagcggaggcauca

SEQ ID NO: 741018 - RNA, 22 nt, Human
cuggcacagccacugcaggcag

SEQ ID NO: 741019 - RNA, 22 nt, Human
gggagcugaugauguaaguccc

SEQ ID NO: 741020 - RNA, 22 nt, Human
uuacuaggccaguuuucacuuu

SEQ ID NO: 741021 - RNA, 22 nt, Human
guaugcugccuacgaacaugca

SEQ ID NO: 741022 - RNA, 22 nt, Human
uuaggaaacgcugcuauugacu

SEQ ID NO: 741023 - RNA, 22 nt, Human
ucagcugaaguggagaagcaga

SEQ ID NO: 741024 - RNA, 18 nt, Human
gucuuuggaguggaggua

SEQ ID NO: 741025 - RNA, 22 nt, Human
ugcuccaggagcaaccuuugag

SEQ ID NO: 741026 - RNA, 22 nt, Human
ugugcuucuugcagcuccugua

SEQ ID NO: 741027 - RNA, 22 nt, Human
ggggaaaggccauggcaagaac

SEQ ID NO: 741028 - RNA, 19 nt, Human
agucacagggaagaggaac

SEQ ID NO: 741029 - RNA, 22 nt, Human
agccuccacagaugcaaagggc

SEQ ID NO: 741030 - RNA, 22 nt, Human
ugagucuguauguccagauuua

SEQ ID NO: 741031 - RNA, 22 nt, Human
ggagcuggcagcgcaacccaga

SEQ ID NO: 741032 - RNA, 22 nt, Human
aaaugcaggaaauuaugcuuuu

SEQ ID NO: 741033 - RNA, 22 nt, Human
acccaggggcgaagcuggccac

SEQ ID NO: 741034 - RNA, 22 nt, Human
aauacagaugagcuucugccuc

SEQ ID NO: 741035 - RNA, 22 nt, Human
acacauguacagauuaguauuu

SEQ ID NO: 741036 - RNA, 22 nt, Human
uggcagaaguacacaagcaugc

SEQ ID NO: 741037 - RNA, 22 nt, Human
uccugcagguggaugauucucu

SEQ ID NO: 741038 - RNA, 19 nt, Human
uuaugaaggcuggggggag

SEQ ID NO: 741039 - RNA, 22 nt, Human
aucacauggaaugauuuuagac

SEQ ID NO: 741040 - RNA, 22 nt, Human
augugugguuuaagaauugaau

SEQ ID NO: 741041 - RNA, 22 nt, Human
acuuguguaacacagaaagaac

SEQ ID NO: 741042 - RNA, 22 nt, Human
gcucagaggagcaucauaagga

SEQ ID NO: 741043 - RNA, 22 nt, Human
agcuuucucuucuuuagaaagu

SEQ ID NO: 741044 - RNA, 22 nt, Human
caagugaucagacacugaaguc

SEQ ID NO: 741045 - RNA, 22 nt, Human
agagugcagaggucaaagaaca

SEQ ID NO: 741046 - RNA, 17 nt, Human
uuacagagguaauuaag

SEQ ID NO: 741047 - RNA, 22 nt, Human
gaagccaagugcaaaugccuua

SEQ ID NO: 741048 - RNA, 22 nt, Human
ugaggccugcauugaacuagaa

SEQ ID NO: 741049 - RNA, 22 nt, Human
aaagaggcucaaggugggccag

SEQ ID NO: 741050 - RNA, 22 nt, Human
agcagcagcauugagcgcuugu

SEQ ID NO: 741051 - RNA, 20 nt, Human
ggggcugcaugcagagaaga

SEQ ID NO: 741052 - RNA, 22 nt, Human
ucacaaauagcuauauuaagga

SEQ ID NO: 741053 - RNA, 22 nt, Human
cuuggcagauccaaaaaugaca

SEQ ID NO: 741054 - RNA, 19 nt, Human
gacaggacgaagggaaguu

SEQ ID NO: 741055 - RNA, 22 nt, Human
ugcuuaaaguaguggauuguua

SEQ ID NO: 741056 - RNA, 22 nt, Human
gauuuauuggucuuucauuggu

SEQ ID NO: 741057 - RNA, 22 nt, Human
ugcaggaaaaauaaauaguguu

SEQ ID NO: 741058 - RNA, 22 nt, Human
ucagcugccccgggcacugccc

SEQ ID NO: 741059 - RNA, 22 nt, Human
aguguggcugcguagggcucuc

SEQ ID NO: 741060 - RNA, 20 nt, Human
ucaaggacucccugggaaga

SEQ ID NO: 741061 - RNA, 22 nt, Human
cacaggaguuaacauaauuaag

SEQ ID NO: 741062 - RNA, 22 nt, Human
aucaggauuauuaaaucuggau

SEQ ID NO: 741063 - RNA, 22 nt, Human
auaaaugccucagaaucauccc

SEQ ID NO: 741064 - RNA, 22 nt, Human
ucucaucucaaauuguaauccc

SEQ ID NO: 741065 - RNA, 22 nt, Human
auucuucacauggauaggaucu

SEQ ID NO: 741066 - RNA, 23 nt, Human
cccuggagcuagucugagcagag

SEQ ID NO: 741067 - RNA, 22 nt, Human
uaguuaaagcccuaaauugaua

SEQ ID NO: 741068 - RNA, 22 nt, Human
gggagauggcucagaggccgcg

SEQ ID NO: 741069 - RNA, 22 nt, Human
cucugaaacuccagccccaggu

SEQ ID NO: 741070 - RNA, 22 nt, Human
uggaguuaaaaacaggaugcac

SEQ ID NO: 741071 - RNA, 19 nt, Human
ggcagagcuccugcuuucu

SEQ ID NO: 741072 - RNA, 22 nt, Human
aaaauuaagugucugggaagcc

SEQ ID NO: 741073 - RNA, 22 nt, Human
ucugaacauggcuuccucuuca

SEQ ID NO: 741074 - RNA, 22 nt, Human
cugcaguugggugacccaauau

SEQ ID NO: 741075 - RNA, 22 nt, Human
caggugcugcguggcggagcug

SEQ ID NO: 741076 - RNA, 22 nt, Human
aaagcagauucugaugcaguag

SEQ ID NO: 741077 - RNA, 22 nt, Human
cagccuguagaauacaguaaau

SEQ ID NO: 741078 - RNA, 22 nt, Human
ccagagggcuugguuugggcca

SEQ ID NO: 741079 - RNA, 22 nt, Human
uacagaggggacauggaagaca

SEQ ID NO: 741080 - RNA, 22 nt, Human
aaguacagaaggagcgaacaau

SEQ ID NO: 741081 - RNA, 22 nt, Human
ucuuagaaguucauguuccagc

SEQ ID NO: 741082 - RNA, 22 nt, Human
ucucagugagcuuuucuauguu

SEQ ID NO: 741083 - RNA, 18 nt, Human
uccuggccacacuaccuu

SEQ ID NO: 741084 - RNA, 17 nt, Human
agccugggaaggaguga

SEQ ID NO: 741085 - RNA, 22 nt, Human
ucuccuggguaaaaggguugau

SEQ ID NO: 741086 - RNA, 22 nt, Human
acauuuuacaccaagacuucuu

SEQ ID NO: 741087 - RNA, 22 nt, Human
ugugaggcgaggccagugagcu

SEQ ID NO: 741088 - RNA, 22 nt, Human
cuagaggaacaguuucagguuu

SEQ ID NO: 741089 - RNA, 22 nt, Human
uggggauggaugaaucuuugcu

SEQ ID NO: 741090 - RNA, 22 nt, Human
ucuaacuaacuacaguaagagg

SEQ ID NO: 741091 - RNA, 22 nt, Human
uucuuauugggagaccuuuucu

SEQ ID NO: 741092 - RNA, 22 nt, Human
agcacugugauuuauaacauuu

SEQ ID NO: 741093 - RNA, 22 nt, Human
uguguguccuugaccucagugg

SEQ ID NO: 741094 - RNA, 22 nt, Human
acauguucaugcaugcacaggu

SEQ ID NO: 741095 - RNA, 21 nt, Human
cucagaccacagcucacaccc

SEQ ID NO: 741096 - RNA, 22 nt, Human
uuuagacacuagggaugcagug

SEQ ID NO: 741097 - RNA, 23 nt, Human
cagcuccagugcacucagguagc

SEQ ID NO: 741098 - RNA, 22 nt, Human
aagccacuauggugauucucaa

SEQ ID NO: 741099 - RNA, 22 nt, Human
gcagauuucuaauaagcaaugu

SEQ ID NO: 741100 - RNA, 22 nt, Human
ucauugaagcauuuuguguauu

SEQ ID NO: 741101 - RNA, 22 nt, Human
cagccaggauggagaacuguug

SEQ ID NO: 741102 - RNA, 22 nt, Human
ugggacaggaugaccagaaggu

SEQ ID NO: 741103 - RNA, 22 nt, Human
ugcaguggaacaauuucaacag

SEQ ID NO: 741104 - RNA, 22 nt, Human
ucucaucuuguucaucuacccu

SEQ ID NO: 741105 - RNA, 22 nt, Human
agacagugugguuggugguucc

SEQ ID NO: 741106 - RNA, 19 nt, Human
agcuuugccaaaaacuuag

SEQ ID NO: 741107 - RNA, 19 nt, Human
cuugccuguuccuacagcu

SEQ ID NO: 741108 - RNA, 22 nt, Human
gaccugaaaugggggccugucc

SEQ ID NO: 741109 - RNA, 22 nt, Human
uguuuacuccugauauauuuuu

SEQ ID NO: 741110 - RNA, 22 nt, Human
ucagagaguuacacaaauuguu

SEQ ID NO: 741111 - RNA, 22 nt, Human
uucaaugagcccaagaacguga

SEQ ID NO: 741112 - RNA, 20 nt, Human
acugggagcuaacggagauu

SEQ ID NO: 741113 - RNA, 22 nt, Human
cuuacaagaccaaagaaaggau

SEQ ID NO: 741114 - RNA, 22 nt, Human
agacaaggaauguagcuuacuc

SEQ ID NO: 741115 - RNA, 22 nt, Human
uagcuuuaggcacguuugaauu

SEQ ID NO: 741116 - RNA, 22 nt, Human
auggcuucuagcauugucacaa

SEQ ID NO: 741117 - RNA, 22 nt, Human
uguggcugucuguucuccuagg

SEQ ID NO: 741118 - RNA, 22 nt, Human
uucggucuuguguaaacacugu

SEQ ID NO: 741119 - RNA, 22 nt, Human
ucaccacuaggaauuguguagu

SEQ ID NO: 741120 - RNA, 22 nt, Human
uggaacaacucccucggagccu

SEQ ID NO: 741121 - RNA, 22 nt, Human
uuuccaagauaauacacagaaa

SEQ ID NO: 741122 - RNA, 20 nt, Human
ccugggaaggcagccccagc

SEQ ID NO: 741123 - RNA, 22 nt, Human
gaaaugcauggaucuuggcaga

SEQ ID NO: 741124 - RNA, 20 nt, Human
guuuccuauuuaccuccuca

SEQ ID NO: 741125 - RNA, 22 nt, Human
acaaauauuuacugaauccacu

SEQ ID NO: 741126 - RNA, 22 nt, Human
uagguacagcuaaaaauuaucu

SEQ ID NO: 741127 - RNA, 22 nt, Human
ugcauuuaguuaugagaaaaac

SEQ ID NO: 741128 - RNA, 18 nt, Human
cugccugcucuccagcuu

SEQ ID NO: 741129 - RNA, 22 nt, Human
cagggcuagugacaccccaguc

SEQ ID NO: 741130 - RNA, 22 nt, Human
auggaauuaauaggggaauacu

SEQ ID NO: 741131 - RNA, 22 nt, Human
cugccagaagguuccugcugca

SEQ ID NO: 741132 - RNA, 22 nt, Human
aggaaaugcaggcaaauacucu

SEQ ID NO: 741133 - RNA, 22 nt, Human
ugacuucaaaggcucuacuccu

SEQ ID NO: 741134 - RNA, 22 nt, Human
gugaggcagaaguucccuuuua

SEQ ID NO: 741135 - RNA, 22 nt, Human
auuauuuacagugugcucgaag

SEQ ID NO: 741136 - RNA, 22 nt, Human
uuugaauagcauaggauuacau

SEQ ID NO: 741137 - RNA, 23 nt, Human
uggcccugaaucuguccuggagg

SEQ ID NO: 741138 - RNA, 22 nt, Human
cauuucuccgccgagaucacug

SEQ ID NO: 741139 - RNA, 22 nt, Human
aaguuaguggauaaacagcaaa

SEQ ID NO: 741140 - RNA, 22 nt, Human
cacugaaacagguauugcuggu

SEQ ID NO: 741141 - RNA, 22 nt, Human
uguggcagaacugggacucaaa

SEQ ID NO: 741142 - RNA, 22 nt, Human
acagucuugcuguauggucagg

SEQ ID NO: 741143 - RNA, 22 nt, Human
cacaggagagcugggaggugcc

SEQ ID NO: 741144 - RNA, 22 nt, Human
ugguuugagagugugagcuuuu

SEQ ID NO: 741145 - RNA, 22 nt, Human
gagaggaacucccagugccugg

SEQ ID NO: 741146 - RNA, 22 nt, Human
uagggcuggguacacucuugcc

SEQ ID NO: 741147 - RNA, 22 nt, Human
gggugcaacuaagaagagguga

SEQ ID NO: 741148 - RNA, 22 nt, Human
caaccugacaagacuaugagua

SEQ ID NO: 741149 - RNA, 22 nt, Human
uaacagaaauauuuccagguga

SEQ ID NO: 741150 - RNA, 20 nt, Human
cucucuggaaggugggagcc

SEQ ID NO: 741151 - RNA, 22 nt, Human
guuuccagcuuucugaugcuug

SEQ ID NO: 741152 - RNA, 22 nt, Human
uuuggccuuaguccagaagaag

SEQ ID NO: 741153 - RNA, 22 nt, Human
ucugcccugccauucacuggaa

SEQ ID NO: 741154 - RNA, 22 nt, Human
cacacaugugugcagcuuagaa

SEQ ID NO: 741155 - RNA, 22 nt, Human
uggaugagggcugagcacuggg

SEQ ID NO: 741156 - RNA, 22 nt, Human
gcugcuucucugauggagucca

SEQ ID NO: 741157 - RNA, 22 nt, Human
ucaaaugcucuuugcagagagg

SEQ ID NO: 741158 - RNA, 22 nt, Human
ugaagcaggcauugacugauga

SEQ ID NO: 741159 - RNA, 22 nt, Human
uacaguauagaauguguauuaa

SEQ ID NO: 741160 - RNA, 22 nt, Human
ucugcugaggugguuuuagaga

SEQ ID NO: 741161 - RNA, 22 nt, Human
gggaaggagccugcuugcuaga

SEQ ID NO: 741162 - RNA, 19 nt, Human
gcucagagucccccugcgg

SEQ ID NO: 741163 - RNA, 22 nt, Human
gaaaguuucuucauuaagaugu

SEQ ID NO: 741164 - RNA, 22 nt, Human
gcuguggcaauguuuauaauua

SEQ ID NO: 741165 - RNA, 22 nt, Human
gagggguggcccuggcguguac

SEQ ID NO: 741166 - RNA, 22 nt, Human
aggguguguucuccuaugagaa

SEQ ID NO: 741167 - RNA, 22 nt, Human
ucuguccuccacacuguaaguu

SEQ ID NO: 741168 - RNA, 22 nt, Human
cagugggaagaaugcagccucc

SEQ ID NO: 741169 - RNA, 22 nt, Human
ugccagcuccugcagcuccugu

SEQ ID NO: 741170 - RNA, 21 nt, Human
cucugcugaguccuaggauuc

SEQ ID NO: 741171 - RNA, 20 nt, Human
cagagccaggguuuuguuuu

SEQ ID NO: 741172 - RNA, 22 nt, Human
guguaugagccuccagcugggc

SEQ ID NO: 741173 - RNA, 21 nt, Human
uccuucagucuagaugauugu

SEQ ID NO: 741174 - RNA, 19 nt, Human
uaccauguugacuuuccug

SEQ ID NO: 741175 - RNA, 22 nt, Human
cuuuauguccuugaagaguugu

SEQ ID NO: 741176 - RNA, 22 nt, Human
cgcaugugcguugauugcagug

SEQ ID NO: 741177 - RNA, 21 nt, Human
gcaggaugcaucuuggugucu

SEQ ID NO: 741178 - RNA, 21 nt, Human
gaaaggucuuaacuuacagag

SEQ ID NO: 741179 - RNA, 22 nt, Human
uauuuacuuuuaaauugagaac

SEQ ID NO: 741180 - RNA, 22 nt, Human
ccucucagcgauuccucuugga

SEQ ID NO: 741181 - RNA, 22 nt, Human
acuuuuaaaugaguuucaguug

SEQ ID NO: 741182 - RNA, 22 nt, Human
cugugcuucgcaacuccaaggu

SEQ ID NO: 741183 - RNA, 22 nt, Human
cuggcuggaggugagucacuga

SEQ ID NO: 741184 - RNA, 22 nt, Human
acaguguuuucuuaaggagaaa

SEQ ID NO: 741185 - RNA, 22 nt, Human
aggugucuuugcggcccgccgc

SEQ ID NO: 741186 - RNA, 22 nt, Human
uaaaauguguuucuguaugguu

SEQ ID NO: 741187 - RNA, 22 nt, Human
ucaggaagggugguccacaggg

SEQ ID NO: 741188 - RNA, 22 nt, Human
cuggccgguauuugccucuggg

SEQ ID NO: 741189 - RNA, 22 nt, Human
ucugaagauuaccagcuaaaug

SEQ ID NO: 741190 - RNA, 22 nt, Human
agcugccuguguagaaccaucu

SEQ ID NO: 741191 - RNA, 22 nt, Human
uuagccauuaaauuacaaggug

SEQ ID NO: 741192 - RNA, 23 nt, Human
gaguguucauagcaggcucuugc

SEQ ID NO: 741193 - RNA, 23 nt, Human
agcagcagcaauuaaguggauau

SEQ ID NO: 741194 - RNA, 22 nt, Human
agaguccaaaugugcaguuaug

SEQ ID NO: 741195 - RNA, 23 nt, Human
cauguacacacagcuguacagug

SEQ ID NO: 741196 - RNA, 22 nt, Human
aagugugagccagcccuuugca

SEQ ID NO: 741197 - RNA, 22 nt, Human
ggcuccuggcaucuggugggua

SEQ ID NO: 741198 - RNA, 22 nt, Human
cugucagguuggucucagagcu

SEQ ID NO: 741199 - RNA, 23 nt, Human
cugagggcuggucugaagucugc

SEQ ID NO: 741200 - RNA, 22 nt, Human
uccugagaauagaguugcaugu

SEQ ID NO: 741201 - RNA, 22 nt, Human
uaguauauuaauucucacgguu

SEQ ID NO: 741202 - RNA, 22 nt, Human
uagcccaggagaauugucuuuc

SEQ ID NO: 741203 - RNA, 22 nt, Human
auuucucaaccaggucaaaaag

SEQ ID NO: 741204 - RNA, 22 nt, Human
gggacuguccuacauggagagg

SEQ ID NO: 741205 - RNA, 22 nt, Human
auacaacugccuuagaaggaaa

SEQ ID NO: 741206 - RNA, 22 nt, Human
gccuggaguugaaacuauuauu

SEQ ID NO: 741207 - RNA, 20 nt, Human
ucccaggcuccacccuagac

SEQ ID NO: 741208 - RNA, 22 nt, Human
ugcaggugcguuuucaagccuc

SEQ ID NO: 741209 - RNA, 22 nt, Human
cugcagaggguuugagcauccu

SEQ ID NO: 741210 - RNA, 21 nt, Human
ccaggacuccauggggucucu

SEQ ID NO: 741211 - RNA, 22 nt, Human
gggcaugguggcaggcaccugu

SEQ ID NO: 741212 - RNA, 22 nt, Human
cuggcugucuucugggagcugu

SEQ ID NO: 741213 - RNA, 22 nt, Human
ugcuguguaaaaggugauugaa

SEQ ID NO: 741214 - RNA, 22 nt, Human
cuagggacagaaagaggguaga

SEQ ID NO: 741215 - RNA, 22 nt, Human
gagaggcugacuggcuguccug

SEQ ID NO: 741216 - RNA, 22 nt, Human
aggacuggugugugaucagcau

SEQ ID NO: 741217 - RNA, 22 nt, Human
ggcugugcagggcagagucuca

SEQ ID NO: 741218 - RNA, 22 nt, Human
uccagcucugcugugcgccggu

SEQ ID NO: 741219 - RNA, 22 nt, Human
cuccuuccugccccagugauaa

SEQ ID NO: 741220 - RNA, 22 nt, Human
auuucagcaaaguuuugauugg

SEQ ID NO: 741221 - RNA, 16 nt, Human
agggccagaagcauca

SEQ ID NO: 741222 - RNA, 22 nt, Human
cuugaaagucacaugcagcccu

SEQ ID NO: 741223 - RNA, 22 nt, Human
gccugcagccagggaguucucu

SEQ ID NO: 741224 - RNA, 22 nt, Human
uggagcaggugggaugucguga

SEQ ID NO: 741225 - RNA, 18 nt, Human
aggucuguggucaccagg

SEQ ID NO: 741226 - RNA, 22 nt, Human
aggagccaagcagaacuaagga

SEQ ID NO: 741227 - RNA, 22 nt, Human
ccucaaauugucaaauaagaau

SEQ ID NO: 741228 - RNA, 22 nt, Human
uugcagcuucaagcagguugac

SEQ ID NO: 741229 - RNA, 22 nt, Human
auuucacagcugucaguguuac

SEQ ID NO: 741230 - RNA, 20 nt, Human
acaauagauuugagcaaagu

SEQ ID NO: 741231 - RNA, 23 nt, Human
acagugugguggacaaggagcag

SEQ ID NO: 741232 - RNA, 22 nt, Human
uccugggguuuagagggaagug

SEQ ID NO: 741233 - RNA, 22 nt, Human
acccuggacuggggcugaggcu

SEQ ID NO: 741234 - RNA, 22 nt, Human
auucccacuagcucuuuauaga

SEQ ID NO: 741235 - RNA, 22 nt, Human
cccugcagagaccacugaccuu

SEQ ID NO: 741236 - RNA, 22 nt, Human
gcagcucccuugaacuucuccu

SEQ ID NO: 741237 - RNA, 20 nt, Human
uggcuccuggcuccucccuc

SEQ ID NO: 741238 - RNA, 22 nt, Human
auugcuaaugugcgaaugugua

SEQ ID NO: 741239 - RNA, 22 nt, Human
aggcuggcuggcaggggacaca

SEQ ID NO: 741240 - RNA, 22 nt, Human
aacauggaggcagacagacgug

SEQ ID NO: 741241 - RNA, 22 nt, Human
gggcuggcgggaaaggcaauuc

SEQ ID NO: 741242 - RNA, 22 nt, Human
aaucuguuuccauguuuuauug

SEQ ID NO: 741243 - RNA, 22 nt, Human
auccuugacacacuccaguacu

SEQ ID NO: 741244 - RNA, 22 nt, Human
guggcagaaacuggcagaggag

SEQ ID NO: 741245 - RNA, 22 nt, Human
agaaugauaaugccaugaugga

SEQ ID NO: 741246 - RNA, 19 nt, Human
cacuguuguccuaguacuu

SEQ ID NO: 741247 - RNA, 22 nt, Human
gcagagccaggagcccaggauc

SEQ ID NO: 741248 - RNA, 22 nt, Human
aggcuggaugugccucaccgag

SEQ ID NO: 741249 - RNA, 22 nt, Human
uggucaggcugcucugcggcgu

SEQ ID NO: 741250 - RNA, 22 nt, Human
auggaauugaagacagcauagg

SEQ ID NO: 741251 - RNA, 22 nt, Human
gcacacagagaggugguauguc

SEQ ID NO: 741252 - RNA, 22 nt, Human
cccaggcugcguauccacaaua

SEQ ID NO: 741253 - RNA, 22 nt, Human
uaagcuaacguccauggaaaug

SEQ ID NO: 741254 - RNA, 20 nt, Human
agaguuuggggucauuuugg

SEQ ID NO: 741255 - RNA, 22 nt, Human
acauuggucacugaagaaugag

SEQ ID NO: 741256 - RNA, 22 nt, Human
aauucugaaagauuccuuauuc

SEQ ID NO: 741257 - RNA, 22 nt, Human
uugggagcuggaagcaaggccu

SEQ ID NO: 741258 - RNA, 22 nt, Human
agaguucagcuacugcaaaugu

SEQ ID NO: 741259 - RNA, 22 nt, Human
uaagaaacuauugucucugaac

SEQ ID NO: 741260 - RNA, 22 nt, Human
ucaccaggcuggaaugcagugg

SEQ ID NO: 741261 - RNA, 22 nt, Human
ucucagagaucuuucugcaugu

SEQ ID NO: 741262 - RNA, 22 nt, Human
aguggagaagaggauggucucc

SEQ ID NO: 741263 - RNA, 19 nt, Human
ccugugagaggacaggugu

SEQ ID NO: 741264 - RNA, 22 nt, Human
aaagcugaugucuacuagagaa

SEQ ID NO: 741265 - RNA, 22 nt, Human
caguuuuauugguugaaaucug

SEQ ID NO: 741266 - RNA, 22 nt, Human
uucauacaaugggauauuauga

SEQ ID NO: 741267 - RNA, 16 nt, Human
aaccucucuacugugg

SEQ ID NO: 741268 - RNA, 20 nt, Human
gcucuaaaccacaaagccca

SEQ ID NO: 741269 - RNA, 22 nt, Human
cccaagaucuuucgugcacuaa

SEQ ID NO: 741270 - RNA, 20 nt, Human
ucugauaacugguugugauu

SEQ ID NO: 741271 - RNA, 22 nt, Human
ugucuccaaaacaaucucagau

SEQ ID NO: 741272 - RNA, 21 nt, Human
gggcuuuuuauuuagcacugu

SEQ ID NO: 741273 - RNA, 22 nt, Human
cacacugucuuuaugagcugua

SEQ ID NO: 741274 - RNA, 22 nt, Human
gagucucugaccagggugccaa

SEQ ID NO: 741275 - RNA, 22 nt, Human
caaugcuuuauuuccuccccuu

SEQ ID NO: 741276 - RNA, 22 nt, Human
ccucacucugcacccugcagca

SEQ ID NO: 741277 - RNA, 18 nt, Human
cuaagaggucguuucuca

SEQ ID NO: 741278 - RNA, 22 nt, Human
uugagcaaagcagccauucauu

SEQ ID NO: 741279 - RNA, 22 nt, Human
ccugcccuaauccagagacuag

SEQ ID NO: 741280 - RNA, 22 nt, Human
cuccugaguaguagcauuguca

SEQ ID NO: 741281 - RNA, 17 nt, Human
uuagcaaaauagcacuu

SEQ ID NO: 741282 - RNA, 22 nt, Human
ucacaggacagccuuccacccg

SEQ ID NO: 741283 - RNA, 19 nt, Human
acaaacugaguacacuugu

SEQ ID NO: 741284 - RNA, 22 nt, Human
agaagcagaaacugggcuugug

SEQ ID NO: 741285 - RNA, 22 nt, Human
ugagggucuggaaucugggcuu

SEQ ID NO: 741286 - RNA, 22 nt, Human
gggauuugugggauggccagug

SEQ ID NO: 741287 - RNA, 22 nt, Human
gaagagguucaacguggucauc

SEQ ID NO: 741288 - RNA, 22 nt, Human
cugagggaugggcugggccgcc

SEQ ID NO: 741289 - RNA, 17 nt, Human
agcagcuggguugaucu

SEQ ID NO: 741290 - RNA, 22 nt, Human
cacacuuucagguccucuuugc

SEQ ID NO: 741291 - RNA, 22 nt, Human
ugcugcuccccagcacacagca

SEQ ID NO: 741292 - RNA, 22 nt, Human
ucauuguauucagaacugaaga

SEQ ID NO: 741293 - RNA, 22 nt, Human
acaggagcucuagggacagcac

SEQ ID NO: 741294 - RNA, 22 nt, Human
acuucuguaaagggaagacagu

SEQ ID NO: 741295 - RNA, 22 nt, Human
aucugccugagucuagguuuuc

SEQ ID NO: 741296 - RNA, 22 nt, Human
cuuuguauucaguugggcugug

SEQ ID NO: 741297 - RNA, 21 nt, Human
aggaaaggccagcacguaggg

SEQ ID NO: 741298 - RNA, 22 nt, Human
cagcucccgccaucgggaggca

SEQ ID NO: 741299 - RNA, 22 nt, Human
caaggccacugcucagguuucc

SEQ ID NO: 741300 - RNA, 22 nt, Human
acaaggcaauuccuggugaauu

SEQ ID NO: 741301 - RNA, 22 nt, Human
ggcugcaguuugucuuuugcuu

SEQ ID NO: 741302 - RNA, 22 nt, Human
aguguuagugaaagguguuuau

SEQ ID NO: 741303 - RNA, 22 nt, Human
ucagcagauggguuguguuggc

SEQ ID NO: 741304 - RNA, 22 nt, Human
ccacugccuauuugcagggccc

SEQ ID NO: 741305 - RNA, 22 nt, Human
ugaacacgcuucauacagaggg

SEQ ID NO: 741306 - RNA, 22 nt, Human
gaaggaaguuuauuuuagaaga

SEQ ID NO: 741307 - RNA, 22 nt, Human
uucaaaguccugucagguagcc

SEQ ID NO: 741308 - RNA, 19 nt, Human
agccaggguccagacaugu

SEQ ID NO: 741309 - RNA, 21 nt, Human
ggcacugagccagauggacuc

SEQ ID NO: 741310 - RNA, 23 nt, Human
augaaaguucuuaaaaugucaug

SEQ ID NO: 741311 - RNA, 22 nt, Human
uauguguaaucauaucugauac

SEQ ID NO: 741312 - RNA, 19 nt, Human
agaguauugaauuugcccu

SEQ ID NO: 741313 - RNA, 22 nt, Human
ugagugaaauucugguaaagga

SEQ ID NO: 741314 - RNA, 22 nt, Human
guguggccguguauccauggcu

SEQ ID NO: 741315 - RNA, 21 nt, Human
gcagugcagcuuggaggguag

SEQ ID NO: 741316 - RNA, 21 nt, Human
ccacaggggcuccccugucag

SEQ ID NO: 741317 - RNA, 20 nt, Human
ggucccugcccucugucauc

SEQ ID NO: 741318 - RNA, 22 nt, Human
uucagcaaacacgaugcuuguu

SEQ ID NO: 741319 - RNA, 22 nt, Human
uuucacaucaugggauggaagc

SEQ ID NO: 741320 - RNA, 22 nt, Human
uguacaauguguuuguuggcuu

SEQ ID NO: 741321 - RNA, 22 nt, Human
ucagagaauucgauuaaaugca

SEQ ID NO: 741322 - RNA, 22 nt, Human
cgaaaauagaucuguuucccag

SEQ ID NO: 741323 - RNA, 22 nt, Human
cugccccauggucccugguggg

SEQ ID NO: 741324 - RNA, 22 nt, Human
auugcaaauaacuguacugaau

SEQ ID NO: 741325 - RNA, 22 nt, Human
gucugagauuagggaagauuuu

SEQ ID NO: 741326 - RNA, 22 nt, Human
ccagagagggcgccaccuggag

SEQ ID NO: 741327 - RNA, 22 nt, Human
uggucucuguaggcuaccccau

SEQ ID NO: 741328 - RNA, 22 nt, Human
gggucaaaugauaauugcuucu

SEQ ID NO: 741329 - RNA, 22 nt, Human
ucacagacuguguugcuacuca

SEQ ID NO: 741330 - RNA, 22 nt, Human
agugucugugaggggaauuccu

SEQ ID NO: 741331 - RNA, 22 nt, Human
uuuauaccucauucuuagcaaa

SEQ ID NO: 741332 - RNA, 19 nt, Human
gcaggccucuugggaauua

SEQ ID NO: 741333 - RNA, 22 nt, Human
uucaguguuaaucuugggagaa

SEQ ID NO: 741334 - RNA, 22 nt, Human
ccaggcauggggagagccagau

SEQ ID NO: 741335 - RNA, 22 nt, Human
gaccuucuugcuguguccuaac

SEQ ID NO: 741336 - RNA, 22 nt, Human
aggucauuuuugccuucuauuu

SEQ ID NO: 741337 - RNA, 19 nt, Human
ugucaggggugugcugugc

SEQ ID NO: 741338 - RNA, 22 nt, Human
agcagggguggaagguagcuuu

SEQ ID NO: 741339 - RNA, 22 nt, Human
cacacagaugguaagggaggga

SEQ ID NO: 741340 - RNA, 22 nt, Human
acagaacuuccagggaacauac

SEQ ID NO: 741341 - RNA, 22 nt, Human
guucacaagaguuacagacaga

SEQ ID NO: 741342 - RNA, 22 nt, Human
agccaguggaauucccaggggu

SEQ ID NO: 741343 - RNA, 22 nt, Human
ucagaaagaacacaggcaguag

SEQ ID NO: 741344 - RNA, 22 nt, Human
aaaugucauauuuaaguaggaa

SEQ ID NO: 741345 - RNA, 23 nt, Human
ucagaacaaugccuuaggggcau

SEQ ID NO: 741346 - RNA, 22 nt, Human
acagaggguuucuaaggauuug

SEQ ID NO: 741347 - RNA, 22 nt, Human
uaaccugacugcucuuuagaau

SEQ ID NO: 741348 - RNA, 22 nt, Human
caguaacagugaucaccugugg

SEQ ID NO: 741349 - RNA, 22 nt, Human
ugucagcagaaguggugcacuc

SEQ ID NO: 741350 - RNA, 22 nt, Human
cccaggaguuugaguucagcau

SEQ ID NO: 741351 - RNA, 22 nt, Human
guacacauagguuacugauuaa

SEQ ID NO: 741352 - RNA, 22 nt, Human
uccuggaacauggauaaagaau

SEQ ID NO: 741353 - RNA, 22 nt, Human
caggagauguaccuguuuuuga

SEQ ID NO: 741354 - RNA, 22 nt, Human
ugaaagcucugucaucauuccu

SEQ ID NO: 741355 - RNA, 22 nt, Human
gagagacuggaaugggcugugg

SEQ ID NO: 741356 - RNA, 22 nt, Human
cacugagaggucucauuuccaa

SEQ ID NO: 741357 - RNA, 22 nt, Human
uucugagccagagucaguuaug

SEQ ID NO: 741358 - RNA, 21 nt, Human
ugguaauguucaguauccacu

SEQ ID NO: 741359 - RNA, 22 nt, Human
cagcaggguauacagggaauuu

SEQ ID NO: 741360 - RNA, 22 nt, Human
ugggccaggauuucaagacccu

SEQ ID NO: 741361 - RNA, 22 nt, Human
acaugauuuuaguaucauaaua

SEQ ID NO: 741362 - RNA, 22 nt, Human
guggcucuaggugagcauggag

SEQ ID NO: 741363 - RNA, 22 nt, Human
ugaauaaucuuggguauuaaua

SEQ ID NO: 741364 - RNA, 21 nt, Human
agacaaugcuguaaaauucag

SEQ ID NO: 741365 - RNA, 18 nt, Human
uuggggugaggccaggaa

SEQ ID NO: 741366 - RNA, 21 nt, Human
gagugggacaugggagugguu

SEQ ID NO: 741367 - RNA, 22 nt, Human
ucuagaaacagguuucuagaaa

SEQ ID NO: 741368 - RNA, 22 nt, Human
caagauggaguccgggaaugug

SEQ ID NO: 741369 - RNA, 22 nt, Human
ucacaguuaauuguuggaaugu

SEQ ID NO: 741370 - RNA, 22 nt, Human
aguguuuaaugccuuuuccagc

SEQ ID NO: 741371 - RNA, 22 nt, Human
ucugcagagccucaggagaaca

SEQ ID NO: 741372 - RNA, 22 nt, Human
acuggaaaaccacugaaaugag

SEQ ID NO: 741373 - RNA, 22 nt, Human
aaucaucacgaacacaacagcg

SEQ ID NO: 741374 - RNA, 22 nt, Human
cagcuggccugaucccuguggc

SEQ ID NO: 741375 - RNA, 22 nt, Human
aggaggguuucaaugggaugag

SEQ ID NO: 741376 - RNA, 22 nt, Human
cugccccacaggcuugguaggg

SEQ ID NO: 741377 - RNA, 22 nt, Human
ucagcuuccucugugguuccag

SEQ ID NO: 741378 - RNA, 22 nt, Human
gguggagcugugaguagaaucu

SEQ ID NO: 741379 - RNA, 22 nt, Human
uuaugcuucccugaggaucuua

SEQ ID NO: 741380 - RNA, 17 nt, Human
ucacugggccugcuccc

SEQ ID NO: 741381 - RNA, 22 nt, Human
uagaauguggagguaacagacu

SEQ ID NO: 741382 - RNA, 22 nt, Human
aaugacaauauuaauuuggagg

SEQ ID NO: 741383 - RNA, 22 nt, Human
cugggagcugucaggagcgugu

SEQ ID NO: 741384 - RNA, 22 nt, Human
ccugaugguauauuguugggag

SEQ ID NO: 741385 - RNA, 22 nt, Human
ucagggagauuuggggacucaa

SEQ ID NO: 741386 - RNA, 22 nt, Human
gccacagacagagagucuagug

SEQ ID NO: 741387 - RNA, 22 nt, Human
ucuggagaucauguggggugga

SEQ ID NO: 741388 - RNA, 21 nt, Human
agcaaggcagccucucagccu

SEQ ID NO: 741389 - RNA, 22 nt, Human
gaagcugaggucaggugggugg

SEQ ID NO: 741390 - RNA, 22 nt, Human
uagugucuuccaggacauggua

SEQ ID NO: 741391 - RNA, 22 nt, Human
cugggcuuugguacugugauua

SEQ ID NO: 741392 - RNA, 22 nt, Human
gcuuugugugaaguccauggcg

SEQ ID NO: 741393 - RNA, 22 nt, Human
guagcugauauuagcaaugagu

SEQ ID NO: 741394 - RNA, 22 nt, Human
auaugaagaaucuaggauaggc

SEQ ID NO: 741395 - RNA, 23 nt, Human
cuguccuuggucuuggcugagug

SEQ ID NO: 741396 - RNA, 22 nt, Human
agaagcacgguuuugucuagca

SEQ ID NO: 741397 - RNA, 22 nt, Human
cgaggcagaggcugaaacggcu

SEQ ID NO: 741398 - RNA, 21 nt, Human
gcagccaggacuuugggcugg

SEQ ID NO: 741399 - RNA, 22 nt, Human
ggcaggcagaggcugagacagg

SEQ ID NO: 741400 - RNA, 22 nt, Human
gaggcuggucagcccuaagauc

SEQ ID NO: 741401 - RNA, 17 nt, Human
ucugagaaugcuggagg

SEQ ID NO: 741402 - RNA, 22 nt, Human
gagcugaguagaggcugcuccc

SEQ ID NO: 741403 - RNA, 22 nt, Human
agaugaaagauuuuuauagaga

SEQ ID NO: 741404 - RNA, 22 nt, Human
acagagaaacuaaggaguuugg

SEQ ID NO: 741405 - RNA, 20 nt, Human
cacugcccuccagccugagc

SEQ ID NO: 741406 - RNA, 22 nt, Human
cacacaugaaguugcugagcua

SEQ ID NO: 741407 - RNA, 22 nt, Human
augacauuuauacagugagcuu

SEQ ID NO: 741408 - RNA, 22 nt, Human
ggagagucugccgagccagccc

SEQ ID NO: 741409 - RNA, 22 nt, Human
auucaguucugcugguucugcu

SEQ ID NO: 741410 - RNA, 22 nt, Human
agacacagcugcaggagguggg

SEQ ID NO: 741411 - RNA, 22 nt, Human
uggcuaggcuccaagagcugga

SEQ ID NO: 741412 - RNA, 22 nt, Human
gucuccagggcugcuggcgccu

SEQ ID NO: 741413 - RNA, 22 nt, Human
guuccagguggucacagagcuc

SEQ ID NO: 741414 - RNA, 22 nt, Human
uuauuaauacaugcaccugcau

SEQ ID NO: 741415 - RNA, 20 nt, Human
cucuggcaaaggaugccuau

SEQ ID NO: 741416 - RNA, 22 nt, Human
uuuauugcuggccaccuguagc

SEQ ID NO: 741417 - RNA, 22 nt, Human
uuacauauugucuauuguucaa

SEQ ID NO: 741418 - RNA, 22 nt, Human
ccaggagcccugccacaauggu

SEQ ID NO: 741419 - RNA, 22 nt, Human
aagguaauauuuuucucucuaa

SEQ ID NO: 741420 - RNA, 22 nt, Human
ggugcaggacgaaguggggguu

SEQ ID NO: 741421 - RNA, 22 nt, Human
uuucucugugccauuuccauaa

SEQ ID NO: 741422 - RNA, 22 nt, Human
augcaggguucugggcuagaga

SEQ ID NO: 741423 - RNA, 22 nt, Human
gcugaggcaagauuugaaccca

SEQ ID NO: 741424 - RNA, 22 nt, Human
ggaaagaccugagauaggaaua

SEQ ID NO: 741425 - RNA, 21 nt, Human
ugguuugcggccaaaguuaaa

SEQ ID NO: 741426 - RNA, 20 nt, Human
cuggguggcaagcaaggggg

SEQ ID NO: 741427 - RNA, 22 nt, Human
acagguccucaagucagcuggg

SEQ ID NO: 741428 - RNA, 22 nt, Human
guggucagggagcagagccaug

SEQ ID NO: 741429 - RNA, 23 nt, Human
uuuauacaagaaaccgcuggccu

SEQ ID NO: 741430 - RNA, 22 nt, Human
uucucuggagaguaucuucuua

SEQ ID NO: 741431 - RNA, 22 nt, Human
gguuuuaaccauucacaaguga

SEQ ID NO: 741432 - RNA, 22 nt, Human
ccugugucagccccugccucca

SEQ ID NO: 741433 - RNA, 22 nt, Human
caggcaccagugagaagggccu

SEQ ID NO: 741434 - RNA, 19 nt, Human
cugagcagcggcagcacuu

SEQ ID NO: 741435 - RNA, 22 nt, Human
auguguaucuaagguguucuau

SEQ ID NO: 741436 - RNA, 22 nt, Human
ccugcccagcuucaccucaggc

SEQ ID NO: 741437 - RNA, 22 nt, Human
ugcuucugacuaagcugcauga

SEQ ID NO: 741438 - RNA, 22 nt, Human
ccacaugaaucuuggaagcagg

SEQ ID NO: 741439 - RNA, 22 nt, Human
aaauugcugaccaaguauauuc

SEQ ID NO: 741440 - RNA, 22 nt, Human
aggccgaaguggaugggcaucu

SEQ ID NO: 741441 - RNA, 22 nt, Human
ucccacaugugaauccucaggu

SEQ ID NO: 741442 - RNA, 22 nt, Human
uuaaaggcuauggcugccuggg

SEQ ID NO: 741443 - RNA, 22 nt, Human
ucuggcuucaguaggguucacu

SEQ ID NO: 741444 - RNA, 22 nt, Human
uacagaggagaccaaggcucag

SEQ ID NO: 741445 - RNA, 22 nt, Human
aauaacuuguaugguuauucca

SEQ ID NO: 741446 - RNA, 22 nt, Human
cuggacuucucuucaaagacag

SEQ ID NO: 741447 - RNA, 22 nt, Human
gcccaggacucagggugucgcg

SEQ ID NO: 741448 - RNA, 22 nt, Human
ugauggaauggaggacaugugg

SEQ ID NO: 741449 - RNA, 22 nt, Human
ugguggagcuguggccacgacc

SEQ ID NO: 741450 - RNA, 22 nt, Human
cugguccuccuugccuucagau

SEQ ID NO: 741451 - RNA, 22 nt, Human
gcacucuguuucuccugucagc

SEQ ID NO: 741452 - RNA, 22 nt, Human
agggacaguuacaucaucagac

SEQ ID NO: 741453 - RNA, 22 nt, Human
cacugugucuggagugagcugg

SEQ ID NO: 741454 - RNA, 22 nt, Human
gcccugcugucuucagaguaua

SEQ ID NO: 741455 - RNA, 22 nt, Human
agguccaguuuucugacaaggg

SEQ ID NO: 741456 - RNA, 20 nt, Human
gcugggcuuugacugacaca

SEQ ID NO: 741457 - RNA, 17 nt, Human
cccugcacccuacucuc

SEQ ID NO: 741458 - RNA, 22 nt, Human
cucuggaauguuuacaugcccu

SEQ ID NO: 741459 - RNA, 20 nt, Human
gggugugugcagggccuggu

SEQ ID NO: 741460 - RNA, 22 nt, Human
ugaaaugauaucugauaacaaa

SEQ ID NO: 741461 - RNA, 21 nt, Human
cccuugccugcacuccucggc

SEQ ID NO: 741462 - RNA, 22 nt, Human
ccugaaauuugaagaccugaau

SEQ ID NO: 741463 - RNA, 22 nt, Human
caaagcaguuuuaaucaaguag

SEQ ID NO: 741464 - RNA, 22 nt, Human
cagauauaguggcuugccuggg

SEQ ID NO: 741465 - RNA, 22 nt, Human
uggcucagcgcggccuggucuu

SEQ ID NO: 741466 - RNA, 22 nt, Human
aagaccauaauguaagaugaau

SEQ ID NO: 741467 - RNA, 22 nt, Human
uuagaaaaaggcuguggucuua

SEQ ID NO: 741468 - RNA, 22 nt, Human
cauuuccacuucugaaaacugg

SEQ ID NO: 741469 - RNA, 20 nt, Human
cagggcucugggccuggccu

SEQ ID NO: 741470 - RNA, 20 nt, Human
ugaggcccagcagagucggg

SEQ ID NO: 741471 - RNA, 22 nt, Human
ucacugucccuguccucuuauc

SEQ ID NO: 741472 - RNA, 22 nt, Human
gauuucaaggauguuagaggug

SEQ ID NO: 741473 - RNA, 23 nt, Human
aaucacacguuuggccaggaugc

SEQ ID NO: 741474 - RNA, 23 nt, Human
agaaaccacugaagagauccagu

SEQ ID NO: 741475 - RNA, 21 nt, Human
uaaggccaagucuauuucugu

SEQ ID NO: 741476 - RNA, 22 nt, Human
acagagagguaaaauauauagu

SEQ ID NO: 741477 - RNA, 22 nt, Human
guagggagcccagagcccagug

SEQ ID NO: 741478 - RNA, 22 nt, Human
uaugagaaucugcaguaugcuu

SEQ ID NO: 741479 - RNA, 22 nt, Human
gagcaucuggcuagaggaguga

SEQ ID NO: 741480 - RNA, 18 nt, Human
uggcuggcagugggcagc

SEQ ID NO: 741481 - RNA, 22 nt, Human
uggcuccuuccgcagcaugccu

SEQ ID NO: 741482 - RNA, 22 nt, Human
uuccuguauuuugcgaauuuuc

SEQ ID NO: 741483 - RNA, 22 nt, Human
uuuugagauggugucucgcucc

SEQ ID NO: 741484 - RNA, 22 nt, Human
ggcuccuguggcaagacagcuu

SEQ ID NO: 741485 - RNA, 19 nt, Human
auguuuacacucaggggcu

SEQ ID NO: 741486 - RNA, 22 nt, Human
aggguggcugaguagauggaag

SEQ ID NO: 741487 - RNA, 22 nt, Human
cgcaggcuuuagaaucugcuac

SEQ ID NO: 741488 - RNA, 22 nt, Human
ugcaucagaguuugcugcugcu

SEQ ID NO: 741489 - RNA, 22 nt, Human
uugugcucuguguuauuuaagg

SEQ ID NO: 741490 - RNA, 20 nt, Human
ugcagguguguccaagcacu

SEQ ID NO: 741491 - RNA, 22 nt, Human
agacauuaugcugagugaaaga

SEQ ID NO: 741492 - RNA, 22 nt, Human
caauguguuugcauauuaaaau

SEQ ID NO: 741493 - RNA, 22 nt, Human
agaguggcccguuggccugaac

SEQ ID NO: 741494 - RNA, 23 nt, Human
uaucuuaccucccuucuuuccug

SEQ ID NO: 741495 - RNA, 23 nt, Human
ucagcuucauugucuucuauggc

SEQ ID NO: 741496 - RNA, 22 nt, Human
caccuaggguuucgccuuucuu

SEQ ID NO: 741497 - RNA, 22 nt, Human
ggcagugugcaucuguguggcc

SEQ ID NO: 741498 - RNA, 22 nt, Human
aggccucuucagggagcaugga

SEQ ID NO: 741499 - RNA, 22 nt, Human
uacaaaugaguuguaugaacca

SEQ ID NO: 741500 - RNA, 22 nt, Human
gcugaggccucagaaggcugag

SEQ ID NO: 741501 - RNA, 22 nt, Human
uggcugcagaaccuccucagga

SEQ ID NO: 741502 - RNA, 22 nt, Human
ugaugaaaguguuuacucaccu

SEQ ID NO: 741503 - RNA, 22 nt, Human
ugucucugguauuaggugaaaa

SEQ ID NO: 741504 - RNA, 22 nt, Human
uacuguuuucuauaauggcugu

SEQ ID NO: 741505 - RNA, 22 nt, Human
cugagagcagggacuugagcca

SEQ ID NO: 741506 - RNA, 22 nt, Human
auuuagaaauuccaaaaguauu

SEQ ID NO: 741507 - RNA, 22 nt, Human
cuguauuuucaugccuacguac

SEQ ID NO: 741508 - RNA, 22 nt, Human
uggucauuuuuauuucaguugc

SEQ ID NO: 741509 - RNA, 22 nt, Human
auuucugauacccggucacccu

SEQ ID NO: 741510 - RNA, 22 nt, Human
cugcuguggguuaagacacugu

SEQ ID NO: 741511 - RNA, 22 nt, Human
ugaagcacaggcauacacaacc

SEQ ID NO: 741512 - RNA, 22 nt, Human
gaggauuugauggcuuucuccc

SEQ ID NO: 741513 - RNA, 22 nt, Human
gggcugagugucccaggccgaa

SEQ ID NO: 741514 - RNA, 22 nt, Human
ggguuuuaugguucacuugcaa

SEQ ID NO: 741515 - RNA, 22 nt, Human
gucagugugaguugauuccaua

SEQ ID NO: 741516 - RNA, 22 nt, Human
ggcaggcugggugucauggagu

SEQ ID NO: 741517 - RNA, 22 nt, Human
cuguggcaggaagggacuagca

SEQ ID NO: 741518 - RNA, 22 nt, Human
uacaggcacugaaaugcuuauu

SEQ ID NO: 741519 - RNA, 22 nt, Human
agaauccgcuugacuuugaagu

SEQ ID NO: 741520 - RNA, 22 nt, Human
ccucugugugugcaugcaugcg

SEQ ID NO: 741521 - RNA, 22 nt, Human
uaaacaagcuggacugauaagu

SEQ ID NO: 741522 - RNA, 22 nt, Human
ucucuggguauucacugccuuc

SEQ ID NO: 741523 - RNA, 22 nt, Human
ugcugucuuuucccaauccugg

SEQ ID NO: 741524 - RNA, 22 nt, Human
uccucuuuaaaugcuuuuaucu

SEQ ID NO: 741525 - RNA, 22 nt, Human
gcugggcccugggugcccuagc

SEQ ID NO: 741526 - RNA, 22 nt, Human
auggauaaugucucuguuuccc

SEQ ID NO: 741527 - RNA, 22 nt, Human
cugcugccugauugcagaccuc

SEQ ID NO: 741528 - RNA, 22 nt, Human
gcucaggccuccagaggggcaa

SEQ ID NO: 741529 - RNA, 22 nt, Human
acaugaggugcuauaggucuac

SEQ ID NO: 741530 - RNA, 17 nt, Human
ggcaggugacagacacc

SEQ ID NO: 741531 - RNA, 22 nt, Human
ucucaggcauucccacauagaa

SEQ ID NO: 741532 - RNA, 21 nt, Human
uggaaacagcgccaucugccg

SEQ ID NO: 741533 - RNA, 22 nt, Human
aauaacuucaucuucaggauag

SEQ ID NO: 741534 - RNA, 22 nt, Human
guucuauuccccuuaucuguga

SEQ ID NO: 741535 - RNA, 21 nt, Human
aguccccuguccuuacuucua

SEQ ID NO: 741536 - RNA, 19 nt, Human
ggaaggugacaguggugaa

SEQ ID NO: 741537 - RNA, 22 nt, Human
ugauucuguucuccuugagaau

SEQ ID NO: 741538 - RNA, 22 nt, Human
uuauuuugccacaggugaccuu

SEQ ID NO: 741539 - RNA, 22 nt, Human
aagcacauugccuggcacauag

SEQ ID NO: 741540 - RNA, 22 nt, Human
gguuuuauuaacuuuaacauca

SEQ ID NO: 741541 - RNA, 21 nt, Human
accaggccaggaggcuggcac

SEQ ID NO: 741542 - RNA, 22 nt, Human
uaacacuaagaaucuaaauuua

SEQ ID NO: 741543 - RNA, 22 nt, Human
uuugacucuugucucuuguuag

SEQ ID NO: 741544 - RNA, 22 nt, Human
agcuguaauauaagcaaugaaa

SEQ ID NO: 741545 - RNA, 22 nt, Human
uaccuggaauuuauauagcuau

SEQ ID NO: 741546 - RNA, 22 nt, Human
gaauuucuggacccuuugagaa

SEQ ID NO: 741547 - RNA, 21 nt, Human
auacuacauuucucugacuuu

SEQ ID NO: 741548 - RNA, 22 nt, Human
cuuucuagacuguccagaugau

SEQ ID NO: 741549 - RNA, 22 nt, Human
gggaugacaaagugucuguccc

SEQ ID NO: 741550 - RNA, 22 nt, Human
ugaugagggagauuugagccca

SEQ ID NO: 741551 - RNA, 22 nt, Human
ucugggccugauggcuaaagcc

SEQ ID NO: 741552 - RNA, 21 nt, Human
aggagggcacaaggccaggaa

SEQ ID NO: 741553 - RNA, 22 nt, Human
ucuuuuauccuacauuuagcuc

SEQ ID NO: 741554 - RNA, 22 nt, Human
augugucuuucaagguauagaa

SEQ ID NO: 741555 - RNA, 22 nt, Human
aauuagaaucuuauuuggggaa

SEQ ID NO: 741556 - RNA, 21 nt, Human
ugcaagcagcagagauauggg

SEQ ID NO: 741557 - RNA, 22 nt, Human
caagaagcuuucccugcuugca

SEQ ID NO: 741558 - RNA, 22 nt, Human
cagcucaggcacuggcgcggga

SEQ ID NO: 741559 - RNA, 22 nt, Human
agguccacaguucagcugccca

SEQ ID NO: 741560 - RNA, 22 nt, Human
gugaccauaauagauuaugagu

SEQ ID NO: 741561 - RNA, 22 nt, Human
guggcuggaguaugaggaaagg

SEQ ID NO: 741562 - RNA, 22 nt, Human
agcuacaguugcccucagcagg

SEQ ID NO: 741563 - RNA, 22 nt, Human
uucagaaacagagugagugagu

SEQ ID NO: 741564 - RNA, 22 nt, Human
uuguguuucccuugcauauucc

SEQ ID NO: 741565 - RNA, 22 nt, Human
uccauaguagaaaaugggacag

SEQ ID NO: 741566 - RNA, 22 nt, Human
gcuacagagcucugugaagaga

SEQ ID NO: 741567 - RNA, 22 nt, Human
cucaggccugaguggcaguccc

SEQ ID NO: 741568 - RNA, 22 nt, Human
agccaggcugcaguuggcuggc

SEQ ID NO: 741569 - RNA, 22 nt, Human
aaagcucuuaaugagauuaucc

SEQ ID NO: 741570 - RNA, 22 nt, Human
gcuuccuccaucuggggcuugc

SEQ ID NO: 741571 - RNA, 19 nt, Human
gcuccuggaugaccugugg

SEQ ID NO: 741572 - RNA, 22 nt, Human
uccaggcccauggagcagagcu

SEQ ID NO: 741573 - RNA, 20 nt, Human
gcccaggaucucugaggcau

SEQ ID NO: 741574 - RNA, 22 nt, Human
agaaggaaggcugagugcugau

SEQ ID NO: 741575 - RNA, 22 nt, Human
gucccagagagcacuaguccau

SEQ ID NO: 741576 - RNA, 22 nt, Human
cagggccacuguagaugaggag

SEQ ID NO: 741577 - RNA, 22 nt, Human
auacaugaggaggcuggaaaca

SEQ ID NO: 741578 - RNA, 22 nt, Human
aagacaucagugaugacauuug

SEQ ID NO: 741579 - RNA, 22 nt, Human
cagggagccccaauuccaugcc

SEQ ID NO: 741580 - RNA, 22 nt, Human
gcaugcauuuguacuugauuuu

SEQ ID NO: 741581 - RNA, 22 nt, Human
aagaggaaaugauugacuauau

SEQ ID NO: 741582 - RNA, 22 nt, Human
augcaucuauucccaagggcag

SEQ ID NO: 741583 - RNA, 18 nt, Human
cuaucccuggagcuuggg

SEQ ID NO: 741584 - RNA, 18 nt, Human
caauagaaacaguaggaa

SEQ ID NO: 741585 - RNA, 22 nt, Human
agucucugugagcucccaaugg

SEQ ID NO: 741586 - RNA, 22 nt, Human
cagaggaggccaccgcauaggc

SEQ ID NO: 741587 - RNA, 22 nt, Human
ggcuggaaaggauauuuuaggu

SEQ ID NO: 741588 - RNA, 22 nt, Human
ggccuggacaccugaggucuua

SEQ ID NO: 741589 - RNA, 22 nt, Human
auuuuucucuccacuccauuaa

SEQ ID NO: 741590 - RNA, 22 nt, Human
ccuggaguaccguggccaucca

SEQ ID NO: 741591 - RNA, 22 nt, Human
ccugccugcaaaaugggacaag

SEQ ID NO: 741592 - RNA, 22 nt, Human
ucagaagucacuuaggaaaggg

SEQ ID NO: 741593 - RNA, 23 nt, Human
uacagaaggaguagucacuaaga

SEQ ID NO: 741594 - RNA, 22 nt, Human
gcagagguggaugcaauugggg

SEQ ID NO: 741595 - RNA, 22 nt, Human
ugaggcagcauucuucaagaca

SEQ ID NO: 741596 - RNA, 22 nt, Human
augaaaacagccuccugugaua

SEQ ID NO: 741597 - RNA, 22 nt, Human
cacaguaagaaaugaagaggua

SEQ ID NO: 741598 - RNA, 23 nt, Human
acucagagaccccgggaagugac

SEQ ID NO: 741599 - RNA, 21 nt, Human
aggcucccagaaaugggcauc

SEQ ID NO: 741600 - RNA, 22 nt, Human
ccaggguggcguagaugcuggg

SEQ ID NO: 741601 - RNA, 22 nt, Human
ucucaguguuaucuaucugccu

SEQ ID NO: 741602 - RNA, 22 nt, Human
augaaacaguguguauagcaaa

SEQ ID NO: 741603 - RNA, 22 nt, Human
ugcugugauaauucaaugagcu

SEQ ID NO: 741604 - RNA, 18 nt, Human
acaggcugugggaauggu

SEQ ID NO: 741605 - RNA, 22 nt, Human
caaggcagucccuacucccugc

SEQ ID NO: 741606 - RNA, 22 nt, Human
ugggagcccaagggagcugccg

SEQ ID NO: 741607 - RNA, 22 nt, Human
aggccuccagccacaugccagu

SEQ ID NO: 741608 - RNA, 22 nt, Human
ggccaccucugcccuaccgagu

SEQ ID NO: 741609 - RNA, 22 nt, Human
agacagcaugagccugcugaug

SEQ ID NO: 741610 - RNA, 22 nt, Human
cucaggcugcccugacagcccc

SEQ ID NO: 741611 - RNA, 22 nt, Human
guccucuggagguuuuuaggug

SEQ ID NO: 741612 - RNA, 23 nt, Human
acuuugcagagccccuugaaaca

SEQ ID NO: 741613 - RNA, 17 nt, Human
ugcuuucuuccugcccu

SEQ ID NO: 741614 - RNA, 22 nt, Human
ugagacaguaucgccccaaggc

SEQ ID NO: 741615 - RNA, 22 nt, Human
cuguggcucagcacggggucag

SEQ ID NO: 741616 - RNA, 22 nt, Human
ucugcaacagugcccuguaaau

SEQ ID NO: 741617 - RNA, 22 nt, Human
gcaaugauugcauuagaagaug

SEQ ID NO: 741618 - RNA, 22 nt, Human
ucugcugucuuuucugggugag

SEQ ID NO: 741619 - RNA, 22 nt, Human
ucuguggccuguguccaagugc

SEQ ID NO: 741620 - RNA, 21 nt, Human
agccaagccuugggagccagg

SEQ ID NO: 741621 - RNA, 22 nt, Human
guacugcuguaaauauucuuca

SEQ ID NO: 741622 - RNA, 23 nt, Human
uugcaaauuucaguuaguucaug

SEQ ID NO: 741623 - RNA, 22 nt, Human
agagccaggcucuaccuggguu

SEQ ID NO: 741624 - RNA, 22 nt, Human
gcuggcuuccaucagaggguga

SEQ ID NO: 741625 - RNA, 22 nt, Human
gucaggcagccuggagauucag

SEQ ID NO: 741626 - RNA, 23 nt, Human
ugcucugggaggcccuggagagc

SEQ ID NO: 741627 - RNA, 20 nt, Human
auguccagugacuggaccau

SEQ ID NO: 741628 - RNA, 22 nt, Human
gggcuccagcagaggcagccgg

SEQ ID NO: 741629 - RNA, 22 nt, Human
gaagagcugcaguuuccugggc

SEQ ID NO: 741630 - RNA, 22 nt, Human
caggacaguuugcuuugcccug

SEQ ID NO: 741631 - RNA, 17 nt, Human
gcuggcugacccaugcc

SEQ ID NO: 741632 - RNA, 22 nt, Human
ucccuguccaaagucuuccuau

SEQ ID NO: 741633 - RNA, 23 nt, Human
ucugggaauuggcuguccacagg

SEQ ID NO: 741634 - RNA, 17 nt, Human
uuauucuggcauaugug

SEQ ID NO: 741635 - RNA, 22 nt, Human
gugcauuucucauacacuaaau

SEQ ID NO: 741636 - RNA, 19 nt, Human
gugaggucuuuccuuuugu

SEQ ID NO: 741637 - RNA, 22 nt, Human
ucugcucuccauacuuccgcac

SEQ ID NO: 741638 - RNA, 22 nt, Human
caguaacauuucaagguagagg

SEQ ID NO: 741639 - RNA, 20 nt, Human
ugagggcuaaccagacucug

SEQ ID NO: 741640 - RNA, 22 nt, Human
ggguaauuggggccuugcagug

SEQ ID NO: 741641 - RNA, 17 nt, Human
ggucuggggccauuggc

SEQ ID NO: 741642 - RNA, 21 nt, Human
agcugccugcucuggaccugg

SEQ ID NO: 741643 - RNA, 22 nt, Human
gccuaggaguacagaaugguuu

SEQ ID NO: 741644 - RNA, 22 nt, Human
augcacaaacccacaauuaguc

SEQ ID NO: 741645 - RNA, 22 nt, Human
aggugacuacuauuuuaaaaua

SEQ ID NO: 741646 - RNA, 22 nt, Human
uuugaaaguguuuacuugggaa

SEQ ID NO: 741647 - RNA, 22 nt, Human
uaaaaguaggaaugaaacgcau

SEQ ID NO: 741648 - RNA, 22 nt, Human
ggcauacaagagaaauauaaga

SEQ ID NO: 741649 - RNA, 22 nt, Human
uuauuugcugauuucaguuuca

SEQ ID NO: 741650 - RNA, 22 nt, Human
aagccaggcugcacuugcuggg

SEQ ID NO: 741651 - RNA, 21 nt, Human
ugggcucagccccagcccugc

SEQ ID NO: 741652 - RNA, 22 nt, Human
ugcacagugaccacugagcaag

SEQ ID NO: 741653 - RNA, 22 nt, Human
ugagcuccggcauauggaauua

SEQ ID NO: 741654 - RNA, 22 nt, Human
agauguaguagugggucuuuua

SEQ ID NO: 741655 - RNA, 21 nt, Human
gcucccugcucagcuccuggg

SEQ ID NO: 741656 - RNA, 22 nt, Human
aggcucuaaggagggcugucua

SEQ ID NO: 741657 - RNA, 22 nt, Human
guguguauuauugcauacacau

SEQ ID NO: 741658 - RNA, 22 nt, Human
acuuucaauucacugagauaua

SEQ ID NO: 741659 - RNA, 22 nt, Human
uggcggggcagcucuggcuucu

SEQ ID NO: 741660 - RNA, 19 nt, Human
cuucugcagggugacagug

SEQ ID NO: 741661 - RNA, 22 nt, Human
ugagccagccuugcagcugugc

SEQ ID NO: 741662 - RNA, 22 nt, Human
uggcuccuaucaaggagugggu

SEQ ID NO: 741663 - RNA, 22 nt, Human
uguguauguaagcaugugcaua

SEQ ID NO: 741664 - RNA, 22 nt, Human
cuccuccagacuuacugaaucc

SEQ ID NO: 741665 - RNA, 22 nt, Human
uucuucaaacaaaaguggcaug

SEQ ID NO: 741666 - RNA, 22 nt, Human
ucucucagaaagcccaugucug

SEQ ID NO: 741667 - RNA, 22 nt, Human
guguggcugugggagauguuca

SEQ ID NO: 741668 - RNA, 22 nt, Human
cagugcagaacacauggaaaau

SEQ ID NO: 741669 - RNA, 22 nt, Human
aaugaugguauugaugagcuaa

SEQ ID NO: 741670 - RNA, 22 nt, Human
cuugcuguugugggagacuggg

SEQ ID NO: 741671 - RNA, 22 nt, Human
ggcuuggcagaggugggugcuu

SEQ ID NO: 741672 - RNA, 22 nt, Human
cacaguacuuaauucucuaaau

SEQ ID NO: 741673 - RNA, 22 nt, Human
uagagcauuuagaggggcagga

SEQ ID NO: 741674 - RNA, 21 nt, Human
uccagggcgggcgcacggaga

SEQ ID NO: 741675 - RNA, 22 nt, Human
uguagcagaguaucucuguuuu

SEQ ID NO: 741676 - RNA, 22 nt, Human
aucagcaagauugugucuugua

SEQ ID NO: 741677 - RNA, 22 nt, Human
acugagagucaagauagcaugg

SEQ ID NO: 741678 - RNA, 22 nt, Human
auguggcuaguggcuaugaucu

SEQ ID NO: 741679 - RNA, 22 nt, Human
ugcauuaaauauaaucuguuga

SEQ ID NO: 741680 - RNA, 22 nt, Human
ggaggugggauuaggaccuaaa

SEQ ID NO: 741681 - RNA, 22 nt, Human
cccucgccgcagcugcuucccg

SEQ ID NO: 741682 - RNA, 22 nt, Human
guguguggggccuucggguccu

SEQ ID NO: 741683 - RNA, 22 nt, Human
gcaggggcaggagaucucaggc

SEQ ID NO: 741684 - RNA, 22 nt, Human
aaacauuguaauuuuagcaugg

SEQ ID NO: 741685 - RNA, 22 nt, Human
uuugauucaauguuuauauaaa

SEQ ID NO: 741686 - RNA, 22 nt, Human
uccugggccaagggcugugagg

SEQ ID NO: 741687 - RNA, 22 nt, Human
uugacaguugcaauggugaucu

SEQ ID NO: 741688 - RNA, 22 nt, Human
ccagcucucagcgggagacuca

SEQ ID NO: 741689 - RNA, 22 nt, Human
augcaacagaaaauugccuggg

SEQ ID NO: 741690 - RNA, 22 nt, Human
ggugaaggucuacugugugcca

SEQ ID NO: 741691 - RNA, 22 nt, Human
agccccaguucccuggaagucu

SEQ ID NO: 741692 - RNA, 22 nt, Human
accuuccucuaagacauuuagc

SEQ ID NO: 741693 - RNA, 22 nt, Human
gggacccagguaauccugugcu

SEQ ID NO: 741694 - RNA, 22 nt, Human
aucuggacuagagcagaauggg

SEQ ID NO: 741695 - RNA, 22 nt, Human
uccacagcacaaagccagugug

SEQ ID NO: 741696 - RNA, 22 nt, Human
ucuaugaagugcgaagaggcac

SEQ ID NO: 741697 - RNA, 17 nt, Human
cccagcugcgucugagg

SEQ ID NO: 741698 - RNA, 22 nt, Human
caggcacagugggguccucucu

SEQ ID NO: 741699 - RNA, 22 nt, Human
aggucagcugugugugcaugag

SEQ ID NO: 741700 - RNA, 22 nt, Human
cagcaggagcagucagacuccu

SEQ ID NO: 741701 - RNA, 22 nt, Human
uuaggaaaggguuuucuaacag

SEQ ID NO: 741702 - RNA, 22 nt, Human
gcuccaguggacugggggaggc

SEQ ID NO: 741703 - RNA, 22 nt, Human
caggcucaauggccacuugggc

SEQ ID NO: 741704 - RNA, 22 nt, Human
cccaggagguuggggcuacagu

SEQ ID NO: 741705 - RNA, 22 nt, Human
gcucugaacuuccaccuuuuca

SEQ ID NO: 741706 - RNA, 23 nt, Human
gcagauggccccagagugcugcc

SEQ ID NO: 741707 - RNA, 22 nt, Human
cagacuugaaagagacucaguu

SEQ ID NO: 741708 - RNA, 21 nt, Human
cugggcuggcaggcauuaccu

SEQ ID NO: 741709 - RNA, 22 nt, Human
acauuucugcuagaauagguga

SEQ ID NO: 741710 - RNA, 22 nt, Human
ccucucuguguggccucuccau

SEQ ID NO: 741711 - RNA, 22 nt, Human
aucugacaaguuguguguauag

SEQ ID NO: 741712 - RNA, 22 nt, Human
auuuacagccuugccaucuaua

SEQ ID NO: 741713 - RNA, 22 nt, Human
cucagauguagaaagauuguga

SEQ ID NO: 741714 - RNA, 22 nt, Human
gcagugggcaacaagagcugga

SEQ ID NO: 741715 - RNA, 22 nt, Human
ggcugagcccccucugcguagg

SEQ ID NO: 741716 - RNA, 22 nt, Human
aagguacaggguauuagauuau

SEQ ID NO: 741717 - RNA, 22 nt, Human
ugugucauagagagcacaaauc

SEQ ID NO: 741718 - RNA, 22 nt, Human
auuugacagugaguuguggaug

SEQ ID NO: 741719 - RNA, 22 nt, Human
ugccuggggauugcucugggcc

SEQ ID NO: 741720 - RNA, 22 nt, Human
uggcuucaggguugucuucagc

SEQ ID NO: 741721 - RNA, 22 nt, Human
gcuuccgcgauguccuaggugg

SEQ ID NO: 741722 - RNA, 22 nt, Human
ccagagggagccaccagggugu

SEQ ID NO: 741723 - RNA, 22 nt, Human
acccccaaacaugaucauggug

SEQ ID NO: 741724 - RNA, 22 nt, Human
uccugugacggagcgccagagg

SEQ ID NO: 741725 - RNA, 22 nt, Human
cacuguuuucagucaguucuau

SEQ ID NO: 741726 - RNA, 22 nt, Human
uauggcuuaaaauuucagcaug

SEQ ID NO: 741727 - RNA, 22 nt, Human
gggcugcguguggaggauguaa

SEQ ID NO: 741728 - RNA, 22 nt, Human
cugcagcuaaggaaugugguug

SEQ ID NO: 741729 - RNA, 22 nt, Human
uccuaggguaaucagcauacau

SEQ ID NO: 741730 - RNA, 22 nt, Human
ccagcagagggucuuggccauu

SEQ ID NO: 741731 - RNA, 22 nt, Human
caggaggggguggaguuucgcc

SEQ ID NO: 741732 - RNA, 22 nt, Human
agcuagacuuucccuuuccaug

SEQ ID NO: 741733 - RNA, 22 nt, Human
gaugaucaucuguaaaguuaga

SEQ ID NO: 741734 - RNA, 20 nt, Human
acaguuuauuuuacuugguu

SEQ ID NO: 741735 - RNA, 22 nt, Human
ggcagcaguaggagcuaaucuu

SEQ ID NO: 741736 - RNA, 22 nt, Human
cagagagaauauguaguaugga

SEQ ID NO: 741737 - RNA, 22 nt, Human
cugucugucaaguucaucucca

SEQ ID NO: 741738 - RNA, 22 nt, Human
gccaccucccaggacgaggcug

SEQ ID NO: 741739 - RNA, 17 nt, Human
ugcauuguaggcuagcc

SEQ ID NO: 741740 - RNA, 23 nt, Human
cugggcugcuugagucccuggcu

SEQ ID NO: 741741 - RNA, 22 nt, Human
ucuuugcaggccaaauuguuaa

SEQ ID NO: 741742 - RNA, 22 nt, Human
ucagacaguuugcagugugccu

SEQ ID NO: 741743 - RNA, 22 nt, Human
ucauugagcgguucuuaaccca

SEQ ID NO: 741744 - RNA, 22 nt, Human
ugcuuugcucugucucuagcua

SEQ ID NO: 741745 - RNA, 22 nt, Human
ucaggucuauacuaugagaggc

SEQ ID NO: 741746 - RNA, 22 nt, Human
gccuuauuaccugcacuuugaa

SEQ ID NO: 741747 - RNA, 22 nt, Human
ugcagcugcuugauucaucuug

SEQ ID NO: 741748 - RNA, 22 nt, Human
gcuuuauagcccuauuacauga

SEQ ID NO: 741749 - RNA, 22 nt, Human
guccucagggagucccagucau

SEQ ID NO: 741750 - RNA, 22 nt, Human
cagcagagaaauuaaacuucug

SEQ ID NO: 741751 - RNA, 22 nt, Human
ugcaacaguggggcaugcugaa

SEQ ID NO: 741752 - RNA, 22 nt, Human
aaagugcagcuugugaucccua

SEQ ID NO: 741753 - RNA, 22 nt, Human
aauugugcccgugacauuucau

SEQ ID NO: 741754 - RNA, 22 nt, Human
augugagcagggagaugcugcc

SEQ ID NO: 741755 - RNA, 17 nt, Human
ucaggauguagcaguag

SEQ ID NO: 741756 - RNA, 20 nt, Human
agacagaaucagagauaaag

SEQ ID NO: 741757 - RNA, 22 nt, Human
ugaggcaguucuuacuuguauu

SEQ ID NO: 741758 - RNA, 18 nt, Human
cugaggcccagagagggc

SEQ ID NO: 741759 - RNA, 22 nt, Human
ucucccaggucauacacagaga

SEQ ID NO: 741760 - RNA, 22 nt, Human
cuccccacgccuggacuaagag

SEQ ID NO: 741761 - RNA, 22 nt, Human
agaaaguuuauuucuugaugga

SEQ ID NO: 741762 - RNA, 22 nt, Human
uauugacauuuuuauagcuuga

SEQ ID NO: 741763 - RNA, 17 nt, Human
cagcucugcaucuuccu

SEQ ID NO: 741764 - RNA, 20 nt, Human
uacugggucuggguccugga

SEQ ID NO: 741765 - RNA, 20 nt, Human
ccagucccugagcaccaggg

SEQ ID NO: 741766 - RNA, 22 nt, Human
uuagcaaauuuccaggugaugc

SEQ ID NO: 741767 - RNA, 22 nt, Human
uccugagcuuuacaguaaggac

SEQ ID NO: 741768 - RNA, 22 nt, Human
aauucauagcaacaaagaccca

SEQ ID NO: 741769 - RNA, 22 nt, Human
ugguucauagccucacaggaua

SEQ ID NO: 741770 - RNA, 22 nt, Human
aaacugaauucaaguauccagu

SEQ ID NO: 741771 - RNA, 22 nt, Human
cuggccuggcaggggaccucua

SEQ ID NO: 741772 - RNA, 22 nt, Human
ggcugaggcucaugccaucuug

SEQ ID NO: 741773 - RNA, 19 nt, Human
ucaaagcaagcauguucug

SEQ ID NO: 741774 - RNA, 22 nt, Human
ugggcagacuaaggucaaagcu

SEQ ID NO: 741775 - RNA, 22 nt, Human
ccuggguacgcagggcuccucu

SEQ ID NO: 741776 - RNA, 22 nt, Human
uaaugcaaggaauuccaaguag

SEQ ID NO: 741777 - RNA, 22 nt, Human
cacagcuagacuaauugcuggg

SEQ ID NO: 741778 - RNA, 23 nt, Human
uuucucugagaagcaguucucua

SEQ ID NO: 741779 - RNA, 22 nt, Human
agcccuggcccggcugugcuuu

SEQ ID NO: 741780 - RNA, 22 nt, Human
gccaggcugacucccccggccu

SEQ ID NO: 741781 - RNA, 21 nt, Human
ugucacauguggaugguauuu

SEQ ID NO: 741782 - RNA, 22 nt, Human
gccaugggucugcuggcucagc

SEQ ID NO: 741783 - RNA, 22 nt, Human
aaguuauuuuucaagauccuuu

SEQ ID NO: 741784 - RNA, 22 nt, Human
guggucauuugucugagcucca

SEQ ID NO: 741785 - RNA, 22 nt, Human
ugauucugagggagcauucugc

SEQ ID NO: 741786 - RNA, 16 nt, Human
gcaggcagaucacaug

SEQ ID NO: 741787 - RNA, 19 nt, Human
ccaccccuuugcugggccc

SEQ ID NO: 741788 - RNA, 22 nt, Human
aggaggcugcaacccugaggcc

SEQ ID NO: 741789 - RNA, 22 nt, Human
cccugcucuucugacucaagcu

SEQ ID NO: 741790 - RNA, 22 nt, Human
ucaauauuuuuaugagcauaga

SEQ ID NO: 741791 - RNA, 22 nt, Human
aguuuccucaucuguaaaauga

SEQ ID NO: 741792 - RNA, 22 nt, Human
cugaaauaguuucauagaacuu

SEQ ID NO: 741793 - RNA, 21 nt, Human
uccugcugcuccugucguguu

SEQ ID NO: 741794 - RNA, 22 nt, Human
cuuuuucacuguguccucacac

SEQ ID NO: 741795 - RNA, 22 nt, Human
aauuucacuggaaaagauaauu

SEQ ID NO: 741796 - RNA, 22 nt, Human
acggguggcugaggaggccucu

SEQ ID NO: 741797 - RNA, 22 nt, Human
ugcaggaaucagaggggaagcg

SEQ ID NO: 741798 - RNA, 19 nt, Human
ggcuccuggggcucagccc

SEQ ID NO: 741799 - RNA, 23 nt, Human
augcaguauaugucaguaguuua

SEQ ID NO: 741800 - RNA, 22 nt, Human
gcagcagcucucaaaguggucu

SEQ ID NO: 741801 - RNA, 22 nt, Human
uuacaaguuucuggcuucaucc

SEQ ID NO: 741802 - RNA, 22 nt, Human
ggcaggcaggagcucugucucc

SEQ ID NO: 741803 - RNA, 22 nt, Human
ucuguuaacaggagagaaugau

SEQ ID NO: 741804 - RNA, 22 nt, Human
uuggaacugauggccuucaucc

SEQ ID NO: 741805 - RNA, 19 nt, Human
ucucagugccgcugaccgc

SEQ ID NO: 741806 - RNA, 22 nt, Human
ucaggggacagccagcuggagg

SEQ ID NO: 741807 - RNA, 22 nt, Human
ggaguugauuuuggauauauua

SEQ ID NO: 741808 - RNA, 22 nt, Human
gguaacuuagcucauggcugug

SEQ ID NO: 741809 - RNA, 19 nt, Human
uugaauuguuuugaguagg

SEQ ID NO: 741810 - RNA, 22 nt, Human
uggcucugucaaacugcacaca

SEQ ID NO: 741811 - RNA, 22 nt, Human
uagaagcaccacucaucacgug

SEQ ID NO: 741812 - RNA, 22 nt, Human
aguuuauguuguuuauaagcca

SEQ ID NO: 741813 - RNA, 22 nt, Human
ugagguaauaaguguuuguuuu

SEQ ID NO: 741814 - RNA, 18 nt, Human
agucuuguucuguugccc

SEQ ID NO: 741815 - RNA, 22 nt, Human
aucuuggauuggagaaagaagu

SEQ ID NO: 741816 - RNA, 22 nt, Human
aagcauggcuguucuagcuaua

SEQ ID NO: 741817 - RNA, 22 nt, Human
caauaauugcuuuccagaguua

SEQ ID NO: 741818 - RNA, 22 nt, Human
ccuggaguugaaggaagguggg

SEQ ID NO: 741819 - RNA, 22 nt, Human
uccacugcagcuucugauggaa

SEQ ID NO: 741820 - RNA, 19 nt, Human
agacagagcucaguggguu

SEQ ID NO: 741821 - RNA, 22 nt, Human
gcagagcucaagguguucagcu

SEQ ID NO: 741822 - RNA, 22 nt, Human
uguaaagaaauagcauuuguag

SEQ ID NO: 741823 - RNA, 22 nt, Human
ccuccucuggugcugccaaccc

SEQ ID NO: 741824 - RNA, 22 nt, Human
ucagaggcucaucugccuugca

SEQ ID NO: 741825 - RNA, 22 nt, Human
ugggagaauauauuuaaaacuu

SEQ ID NO: 741826 - RNA, 22 nt, Human
uagcagaggcugucugacuuaa

SEQ ID NO: 741827 - RNA, 22 nt, Human
uuaagauagaacccaguagucu

SEQ ID NO: 741828 - RNA, 22 nt, Human
agaggcagaaguguucaaaccc

SEQ ID NO: 741829 - RNA, 21 nt, Human
ugaaaguuggagucaaaugua

SEQ ID NO: 741830 - RNA, 22 nt, Human
caguaagucaacaaacaugggg

SEQ ID NO: 741831 - RNA, 22 nt, Human
gggcuacauugugagagaaguu

SEQ ID NO: 741832 - RNA, 22 nt, Human
ggguggcauagggugauggcuu

SEQ ID NO: 741833 - RNA, 21 nt, Human
uaucugcuuuuuaaggcucac

SEQ ID NO: 741834 - RNA, 22 nt, Human
uacuaugugaaaauacuauagu

SEQ ID NO: 741835 - RNA, 22 nt, Human
uaugaagaaguucugugaaaug

SEQ ID NO: 741836 - RNA, 22 nt, Human
aaacccaggguuuugucuuccc

SEQ ID NO: 741837 - RNA, 22 nt, Human
aguaugaaccuggguucuggau

SEQ ID NO: 741838 - RNA, 22 nt, Human
gccucacauauucaugguuacu

SEQ ID NO: 741839 - RNA, 22 nt, Human
aaugcuucaaccucccacaugu

SEQ ID NO: 741840 - RNA, 22 nt, Human
agcuggcagagcauuuguggcc

SEQ ID NO: 741841 - RNA, 22 nt, Human
auucuuuggacaauaaguggug

SEQ ID NO: 741842 - RNA, 22 nt, Human
uuaacaggaguaacucuagaaa

SEQ ID NO: 741843 - RNA, 22 nt, Human
acaccagggauaugaggaagga

SEQ ID NO: 741844 - RNA, 22 nt, Human
gucugucuguuguugagaagca

SEQ ID NO: 741845 - RNA, 22 nt, Human
ccagugcacaauggaacaacuc

SEQ ID NO: 741846 - RNA, 22 nt, Human
ucugggagacguguguugucag

SEQ ID NO: 741847 - RNA, 22 nt, Human
aaaggcacuagaaguuaccuuu

SEQ ID NO: 741848 - RNA, 22 nt, Human
auaguuugugaaacacagcagu

SEQ ID NO: 741849 - RNA, 22 nt, Human
cagaggauuauuucagaaucua

SEQ ID NO: 741850 - RNA, 22 nt, Human
gaaguuguaagccugggaaggu

SEQ ID NO: 741851 - RNA, 22 nt, Human
uacuuuuagccuauuugauucu

SEQ ID NO: 741852 - RNA, 22 nt, Human
aauuagaaccagaagccauauu

SEQ ID NO: 741853 - RNA, 22 nt, Human
caaaugaagggagcugaagucu

SEQ ID NO: 741854 - RNA, 22 nt, Human
uuuuuguauaugcuucgaggau

SEQ ID NO: 741855 - RNA, 22 nt, Human
gccuuccuuuuaccaccagcca

SEQ ID NO: 741856 - RNA, 22 nt, Human
ugaucuuuacugcuguuuauaa

SEQ ID NO: 741857 - RNA, 22 nt, Human
acaucgauggucagccgaggag

SEQ ID NO: 741858 - RNA, 22 nt, Human
ucucacaagcucaaggauuagu

SEQ ID NO: 741859 - RNA, 22 nt, Human
ggugacggggcccagguuuccu

SEQ ID NO: 741860 - RNA, 22 nt, Human
gcucucucgugaacaggugguu

SEQ ID NO: 741861 - RNA, 22 nt, Human
cagcaucuuuauaaaaaguaaa

SEQ ID NO: 741862 - RNA, 22 nt, Human
ucaagacagugugauacuggcc

SEQ ID NO: 741863 - RNA, 22 nt, Human
aagucugagagaaacucucuca

SEQ ID NO: 741864 - RNA, 22 nt, Human
ugcucuguugugcaugugggau

SEQ ID NO: 741865 - RNA, 22 nt, Human
acagaauacucauaagaagggg

SEQ ID NO: 741866 - RNA, 22 nt, Human
gagcagcagcugggccagguuc

SEQ ID NO: 741867 - RNA, 22 nt, Human
agcuccagcccaucugcucgug

SEQ ID NO: 741868 - RNA, 22 nt, Human
auguggccuuaaugacagcagc

SEQ ID NO: 741869 - RNA, 22 nt, Human
ugccauuucuuucaauauucuu

SEQ ID NO: 741870 - RNA, 22 nt, Human
uggcuucucccucugccugauu

SEQ ID NO: 741871 - RNA, 22 nt, Human
uuaacauuuaguguaccccugu

SEQ ID NO: 741872 - RNA, 22 nt, Human
gggcuggagucuucugaaagcc

SEQ ID NO: 741873 - RNA, 20 nt, Human
uccagcuguugagaucugag

SEQ ID NO: 741874 - RNA, 22 nt, Human
cuggggacuuugguucuccaug

SEQ ID NO: 741875 - RNA, 22 nt, Human
gcuggcacugggaaggacugag

SEQ ID NO: 741876 - RNA, 20 nt, Human
uugcaaauaucuauugauug

SEQ ID NO: 741877 - RNA, 22 nt, Human
cuggauaaauguuugcuuuaga

SEQ ID NO: 741878 - RNA, 22 nt, Human
ucagcucucacagaucucaacc

SEQ ID NO: 741879 - RNA, 22 nt, Human
guggcaaggagcaugaaaaguc

SEQ ID NO: 741880 - RNA, 22 nt, Human
ccuuggagacagguuugcuuuc

SEQ ID NO: 741881 - RNA, 22 nt, Human
acaauagguguccaauuaacaa

SEQ ID NO: 741882 - RNA, 22 nt, Human
uuuacauuucccucugucaguu

SEQ ID NO: 741883 - RNA, 22 nt, Human
uuguuuugcuaaagggucauca

SEQ ID NO: 741884 - RNA, 22 nt, Human
cugcuuuaagaaugaguguaag

SEQ ID NO: 741885 - RNA, 22 nt, Human
uugcaaaaccauccuaaguaaa

SEQ ID NO: 741886 - RNA, 20 nt, Human
agcugggcaauuaugacuau

SEQ ID NO: 741887 - RNA, 22 nt, Human
cuggcagcugugugaagaacug

SEQ ID NO: 741888 - RNA, 22 nt, Human
uagacuuuccagccugcugcuu

SEQ ID NO: 741889 - RNA, 22 nt, Human
uucuaacuuaacacuccuguga

SEQ ID NO: 741890 - RNA, 22 nt, Human
ccucaaauugcucagcgucuag

SEQ ID NO: 741891 - RNA, 22 nt, Human
auguaucaugcaggguccauga

SEQ ID NO: 741892 - RNA, 21 nt, Human
ccagugcuacagcugccugac

SEQ ID NO: 741893 - RNA, 22 nt, Human
ucuguccauucagaauggcccu

SEQ ID NO: 741894 - RNA, 21 nt, Human
uucaguaugcgucaugcuguu

SEQ ID NO: 741895 - RNA, 22 nt, Human
cccuccagagccuggacauucu

SEQ ID NO: 741896 - RNA, 22 nt, Human
uuccuuaguugacugucuuagu

SEQ ID NO: 741897 - RNA, 22 nt, Human
accugccuauggagccacaugg

SEQ ID NO: 741898 - RNA, 22 nt, Human
ugagcagaguuguuucuccuga

SEQ ID NO: 741899 - RNA, 18 nt, Human
agcccagcggagugaauc

SEQ ID NO: 741900 - RNA, 22 nt, Human
gaaagcacccaagauuuccuuc

SEQ ID NO: 741901 - RNA, 22 nt, Human
cugggcuccacuacuugcuaac

SEQ ID NO: 741902 - RNA, 22 nt, Human
ggaguggcagagaggguauacu

SEQ ID NO: 741903 - RNA, 22 nt, Human
uuuagagucauuuuauauugac

SEQ ID NO: 741904 - RNA, 22 nt, Human
uuccugggugguccugguagag

SEQ ID NO: 741905 - RNA, 22 nt, Human
agaaacuaaagccaagggcucu

SEQ ID NO: 741906 - RNA, 22 nt, Human
auauuaggaguuaaauguauua

SEQ ID NO: 741907 - RNA, 22 nt, Human
uuacauuguccagaaauuauug

SEQ ID NO: 741908 - RNA, 22 nt, Human
ugcuucugcugauauuuuguga

SEQ ID NO: 741909 - RNA, 22 nt, Human
gcuggcucuucaguggagauag

SEQ ID NO: 741910 - RNA, 22 nt, Human
agaggcagcagucauacuacag

SEQ ID NO: 741911 - RNA, 23 nt, Human
auugauucccucuuggaagggau

SEQ ID NO: 741912 - RNA, 22 nt, Human
gggaucugaugcacugcugaaa

SEQ ID NO: 741913 - RNA, 22 nt, Human
agccugcuggaccaagcucaug

SEQ ID NO: 741914 - RNA, 22 nt, Human
uggagagucucugagccagggc

SEQ ID NO: 741915 - RNA, 22 nt, Human
cuugccucccucagcucacagc

SEQ ID NO: 741916 - RNA, 22 nt, Human
acauucccuuggcuugaagcag

SEQ ID NO: 741917 - RNA, 22 nt, Human
ccugggagguggagguugcagu

SEQ ID NO: 741918 - RNA, 22 nt, Human
accagugucuuauugaccaucu

SEQ ID NO: 741919 - RNA, 22 nt, Human
aaugucuuuucccuuacuuucc

SEQ ID NO: 741920 - RNA, 20 nt, Human
uaacagaaguagaagugggu

SEQ ID NO: 741921 - RNA, 22 nt, Human
cagugauggauauggagaaguc

SEQ ID NO: 741922 - RNA, 22 nt, Human
auccuuccuucauuugacaggu

SEQ ID NO: 741923 - RNA, 22 nt, Human
ucagagaauguccuucuucauu

SEQ ID NO: 741924 - RNA, 21 nt, Human
aggauggaaaggacuaggggu

SEQ ID NO: 741925 - RNA, 22 nt, Human
gaggagcuggcagcgucuccgc

SEQ ID NO: 741926 - RNA, 22 nt, Human
gggaggaaagagaaguggucca

SEQ ID NO: 741927 - RNA, 22 nt, Human
ccacuugaaauaucuuuguucu

SEQ ID NO: 741928 - RNA, 22 nt, Human
aagaugugcuaucaacuggaga

SEQ ID NO: 741929 - RNA, 22 nt, Human
ucuaaagacacuuuuuacaggg

SEQ ID NO: 741930 - RNA, 22 nt, Human
ucagaggauagaaauacuuauu

SEQ ID NO: 741931 - RNA, 22 nt, Human
uuuaagagcuaguaugucauuu

SEQ ID NO: 741932 - RNA, 22 nt, Human
uucucuggacuauuugcacucc

SEQ ID NO: 741933 - RNA, 22 nt, Human
cuugggaggggagcauuggccu

SEQ ID NO: 741934 - RNA, 22 nt, Human
auguaacuuccucagggauggu

SEQ ID NO: 741935 - RNA, 22 nt, Human
ugaaaucauguaguuauugcaa

SEQ ID NO: 741936 - RNA, 20 nt, Human
cugcaaaaugacauuaggaa

SEQ ID NO: 741937 - RNA, 20 nt, Human
agugggagagggcagacugc

SEQ ID NO: 741938 - RNA, 22 nt, Human
ucccuggggaagggcaagcaag

SEQ ID NO: 741939 - RNA, 22 nt, Human
uauugacuuuuaaagugauaua

SEQ ID NO: 741940 - RNA, 22 nt, Human
cuagccaugggcauuaaaggua

SEQ ID NO: 741941 - RNA, 22 nt, Human
auaacuuauuagauuggagcug

SEQ ID NO: 741942 - RNA, 22 nt, Human
guccugagucaagugugggcag

SEQ ID NO: 741943 - RNA, 19 nt, Human
ucauugaacauaauuacuu

SEQ ID NO: 741944 - RNA, 22 nt, Human
uggcaccauguuggcaaauguu

SEQ ID NO: 741945 - RNA, 22 nt, Human
cccuuggaagguagcuggcagu

SEQ ID NO: 741946 - RNA, 22 nt, Human
aaacugggauucuucacaaggu

SEQ ID NO: 741947 - RNA, 22 nt, Human
uuucuucuaggacuaauaagag

SEQ ID NO: 741948 - RNA, 22 nt, Human
cagaggcuggauggacuugccu

SEQ ID NO: 741949 - RNA, 21 nt, Human
gugcccuguucccacaugccc

SEQ ID NO: 741950 - RNA, 22 nt, Human
agcaggggcuccuccacagcca

SEQ ID NO: 741951 - RNA, 22 nt, Human
uaggacaggaucaugaugcugg

SEQ ID NO: 741952 - RNA, 22 nt, Human
caaucacugaccugcagaugca

SEQ ID NO: 741953 - RNA, 22 nt, Human
uggcuccagcucaaguauggca

SEQ ID NO: 741954 - RNA, 22 nt, Human
uuccuuaaugaaucaggccauu

SEQ ID NO: 741955 - RNA, 20 nt, Human
cagcuuuagaucuuugauua

SEQ ID NO: 741956 - RNA, 17 nt, Human
ggagcagauccaccauu

SEQ ID NO: 741957 - RNA, 22 nt, Human
acaguagaguaaaugguuagau

SEQ ID NO: 741958 - RNA, 22 nt, Human
uuuagcaaauuacucacagggu

SEQ ID NO: 741959 - RNA, 22 nt, Human
uguuccaugucuuuguaggacu

SEQ ID NO: 741960 - RNA, 22 nt, Human
ucaaugcaaccuccaccucccg

SEQ ID NO: 741961 - RNA, 23 nt, Human
aaagaccuaggaugagggagacg

SEQ ID NO: 741962 - RNA, 22 nt, Human
ccucugaggucauggacuuggc

SEQ ID NO: 741963 - RNA, 22 nt, Human
cacuugaaaguaaugguugugc

SEQ ID NO: 741964 - RNA, 22 nt, Human
ugauuaacguuuuaggcauacu

SEQ ID NO: 741965 - RNA, 21 nt, Human
ugggauagaaauauggcugcu

SEQ ID NO: 741966 - RNA, 23 nt, Human
cuguauuugacuugagcggaaau

SEQ ID NO: 741967 - RNA, 22 nt, Human
cacagauagaccuuaugagauu

SEQ ID NO: 741968 - RNA, 22 nt, Human
uuaaagaguuuauuacuuguaa

SEQ ID NO: 741969 - RNA, 21 nt, Human
uugagcagaaauguguaugcc

SEQ ID NO: 741970 - RNA, 22 nt, Human
uguccuggaaaaauggagaguu

SEQ ID NO: 741971 - RNA, 22 nt, Human
uuuaccaaauagauuaugucag

SEQ ID NO: 741972 - RNA, 22 nt, Human
ccaggcuccucaugaucuuguu

SEQ ID NO: 741973 - RNA, 22 nt, Human
ccucuggcaagugauuuaucau

SEQ ID NO: 741974 - RNA, 20 nt, Human
agcacauuaaacauacuccu

SEQ ID NO: 741975 - RNA, 22 nt, Human
uauaaaugccaggacuuuagau

SEQ ID NO: 741976 - RNA, 22 nt, Human
gcugucacacauggccccagcu

SEQ ID NO: 741977 - RNA, 22 nt, Human
gcccagccccuggguggacgug

SEQ ID NO: 741978 - RNA, 22 nt, Human
cugcguguuccugaagcgcgcu

SEQ ID NO: 741979 - RNA, 22 nt, Human
aaugcaauaccuuuuuaugcug

SEQ ID NO: 741980 - RNA, 22 nt, Human
gcugcagaauuuccuucucauu

SEQ ID NO: 741981 - RNA, 22 nt, Human
uaucuguuaaaacaagcuuuaa

SEQ ID NO: 741982 - RNA, 22 nt, Human
auacauucagcagugcucauga

SEQ ID NO: 741983 - RNA, 22 nt, Human
ugcagcagcagggaggaggcuc

SEQ ID NO: 741984 - RNA, 22 nt, Human
ucuggcuccguguccgcuccca

SEQ ID NO: 741985 - RNA, 23 nt, Human
ggagugcaauggcgccaucucgg

SEQ ID NO: 741986 - RNA, 22 nt, Human
uggaagacggaaaucuguagau

SEQ ID NO: 741987 - RNA, 19 nt, Human
ugcuggagguugacagggu

SEQ ID NO: 741988 - RNA, 22 nt, Human
gggcagggguagcauuccaagu

SEQ ID NO: 741989 - RNA, 22 nt, Human
cauauauucugguuuucacugg

SEQ ID NO: 741990 - RNA, 22 nt, Human
cugggagugaaaggagggcugc

SEQ ID NO: 741991 - RNA, 22 nt, Human
gggaagagugucgguugaagug

SEQ ID NO: 741992 - RNA, 22 nt, Human
cacaugcaucugucauguuugg

SEQ ID NO: 741993 - RNA, 22 nt, Human
gcaguauauccauuacuucaua

SEQ ID NO: 741994 - RNA, 22 nt, Human
caguccuuagucuggauggcuu

SEQ ID NO: 741995 - RNA, 22 nt, Human
uccuggggcucugagcgagaca

SEQ ID NO: 741996 - RNA, 22 nt, Human
cacaaggacauguauauuuaug

SEQ ID NO: 741997 - RNA, 22 nt, Human
ugcaggcuggcagugcugaaau

SEQ ID NO: 741998 - RNA, 22 nt, Human
cucuggacagcaggugcugugg

SEQ ID NO: 741999 - RNA, 22 nt, Human
ccucagacgcaggccuaugggc

SEQ ID NO: 742000 - RNA, 22 nt, Human
ucagacagggagucagaaaaua

SEQ ID NO: 742001 - RNA, 22 nt, Human
gaugaaaugcugagccugaguu

SEQ ID NO: 742002 - RNA, 22 nt, Human
cagauguaaucugacagcugga

SEQ ID NO: 742003 - RNA, 19 nt, Human
agugguagaugagcaggag

SEQ ID NO: 742004 - RNA, 22 nt, Human
agaggggcgggaacucaaccuc

SEQ ID NO: 742005 - RNA, 22 nt, Human
agagcccuuucuccaggcaccu

SEQ ID NO: 742006 - RNA, 22 nt, Human
cuguuguagcugcgcugcuuca

SEQ ID NO: 742007 - RNA, 22 nt, Human
uugcacagaguggauauucagu

SEQ ID NO: 742008 - RNA, 20 nt, Human
ucucaguuucuagagucagg

SEQ ID NO: 742009 - RNA, 22 nt, Human
gaggugguucagguagagccca

SEQ ID NO: 742010 - RNA, 22 nt, Human
ucucugcccaugagcaaucugc

SEQ ID NO: 742011 - RNA, 22 nt, Human
gccugccugcugucaucugccu

SEQ ID NO: 742012 - RNA, 22 nt, Human
ugucaaagacagaaggaaaugg

SEQ ID NO: 742013 - RNA, 22 nt, Human
uaugucuuuaguaucuuuugga

SEQ ID NO: 742014 - RNA, 22 nt, Human
ucagcaggcagaaaucugcaga

SEQ ID NO: 742015 - RNA, 22 nt, Human
cugcagccacgagucacagccc

SEQ ID NO: 742016 - RNA, 22 nt, Human
aggcucucagaucagccacauu

SEQ ID NO: 742017 - RNA, 22 nt, Human
uaacaaugauuagugacuacag

SEQ ID NO: 742018 - RNA, 22 nt, Human
ucuuuacacaagacaagaauaa

SEQ ID NO: 742019 - RNA, 21 nt, Human
uucucagagucuauuacaguu

SEQ ID NO: 742020 - RNA, 22 nt, Human
cagaauaagcuguguugucaag

SEQ ID NO: 742021 - RNA, 20 nt, Human
cauuugggaucaugagguuu

SEQ ID NO: 742022 - RNA, 22 nt, Human
aaagcuaccuuuguguucauag

SEQ ID NO: 742023 - RNA, 22 nt, Human
aucaucugcacagauccuauuu

SEQ ID NO: 742024 - RNA, 22 nt, Human
caugagcauaaaucagucacga

SEQ ID NO: 742025 - RNA, 22 nt, Human
uuucuagaugcggggcuugugc

SEQ ID NO: 742026 - RNA, 22 nt, Human
cacccuggaaagaaggucuggg

SEQ ID NO: 742027 - RNA, 22 nt, Human
cuacagucuggcaggaauguua

SEQ ID NO: 742028 - RNA, 22 nt, Human
uagcacaguauuucucaacugg

SEQ ID NO: 742029 - RNA, 22 nt, Human
cuuguacauagagaagaagccu

SEQ ID NO: 742030 - RNA, 21 nt, Human
uuccagagauuguuucaccug

SEQ ID NO: 742031 - RNA, 22 nt, Human
ggcucagacucccaggcccucu

SEQ ID NO: 742032 - RNA, 22 nt, Human
ugugacuucuuuuugaguucaa

SEQ ID NO: 742033 - RNA, 22 nt, Human
uucaagauggcugcaaauacuu

SEQ ID NO: 742034 - RNA, 22 nt, Human
aggucauuccuugucuucuugc

SEQ ID NO: 742035 - RNA, 22 nt, Human
uggaagagaaaggaguggaucu

SEQ ID NO: 742036 - RNA, 22 nt, Human
uuuuuccuagugcuuucuggua

SEQ ID NO: 742037 - RNA, 22 nt, Human
uggcccugccgccacgacgucu

SEQ ID NO: 742038 - RNA, 22 nt, Human
guuauugcuggauagauacauc

SEQ ID NO: 742039 - RNA, 22 nt, Human
uggcuccaggggacacgcagua

SEQ ID NO: 742040 - RNA, 22 nt, Human
gcugccuggcugaugaaaauuc

SEQ ID NO: 742041 - RNA, 22 nt, Human
aaugucuauuugcuacaaagcc

SEQ ID NO: 742042 - RNA, 22 nt, Human
uuuacagucaccaaacuuugcu

SEQ ID NO: 742043 - RNA, 22 nt, Human
auuaaggagguaaacuaugguu

SEQ ID NO: 742044 - RNA, 22 nt, Human
caucuggcuagcuaucauugug

SEQ ID NO: 742045 - RNA, 22 nt, Human
ggcucagguuuccuucccagcu

SEQ ID NO: 742046 - RNA, 23 nt, Human
gcccagagaggcucaccaggaau

SEQ ID NO: 742047 - RNA, 22 nt, Human
uguuagcagagcagcugacaga

SEQ ID NO: 742048 - RNA, 22 nt, Human
ccagauagaaaagaaggcagga

SEQ ID NO: 742049 - RNA, 22 nt, Human
ggaggggcagccauggaacucc

SEQ ID NO: 742050 - RNA, 22 nt, Human
cccucuccuggcugcauggagc

SEQ ID NO: 742051 - RNA, 22 nt, Human
ggccucucuccagucagugcag

SEQ ID NO: 742052 - RNA, 17 nt, Human
agucugggaccugcgug

SEQ ID NO: 742053 - RNA, 23 nt, Human
ccuccccaccagacucuaacaua

SEQ ID NO: 742054 - RNA, 22 nt, Human
uuggaaaaacacgauagugguu

SEQ ID NO: 742055 - RNA, 22 nt, Human
ugcuauuuuuaucuugaucaaa

SEQ ID NO: 742056 - RNA, 23 nt, Human
uggcuccaugaaaauuacgagga

SEQ ID NO: 742057 - RNA, 22 nt, Human
cccaggaucaccuggucaaggg

SEQ ID NO: 742058 - RNA, 22 nt, Human
cauuugaacuaauaacugugcu

SEQ ID NO: 742059 - RNA, 22 nt, Human
gcaccaggcagcugagcaggcc

SEQ ID NO: 742060 - RNA, 18 nt, Human
cuucagugacagucuggc

SEQ ID NO: 742061 - RNA, 22 nt, Human
acaaaguagucaaaguagauga

SEQ ID NO: 742062 - RNA, 22 nt, Human
uuuauugaguaucuacuaugug

SEQ ID NO: 742063 - RNA, 22 nt, Human
caugcaaaggucaagaucagga

SEQ ID NO: 742064 - RNA, 22 nt, Human
ccugggcaggaugggcccggug

SEQ ID NO: 742065 - RNA, 22 nt, Human
guagaugagcucacaugaccuu

SEQ ID NO: 742066 - RNA, 22 nt, Human
uaccuagacaugaacacagaug

SEQ ID NO: 742067 - RNA, 22 nt, Human
gcugagguggugaugguucauc

SEQ ID NO: 742068 - RNA, 22 nt, Human
ugucucugauaaguaguucagu

SEQ ID NO: 742069 - RNA, 22 nt, Human
aaguaaauguuggagcucaaau

SEQ ID NO: 742070 - RNA, 22 nt, Human
cacccauuaaccaaagagugaa

SEQ ID NO: 742071 - RNA, 22 nt, Human
gacaauugcuuuugccgaauaa

SEQ ID NO: 742072 - RNA, 22 nt, Human
uugggaguuccuacugcgguuu

SEQ ID NO: 742073 - RNA, 22 nt, Human
ggagagcagggaggcugcucug

SEQ ID NO: 742074 - RNA, 22 nt, Human
acaaggcacuuuaugaagagga

SEQ ID NO: 742075 - RNA, 22 nt, Human
uuacaggugggaaaacuaagcu

SEQ ID NO: 742076 - RNA, 22 nt, Human
cuuuccuuaauaagcagguaua

SEQ ID NO: 742077 - RNA, 22 nt, Human
caggcaccaauagggaucgugg

SEQ ID NO: 742078 - RNA, 22 nt, Human
accugggaaagccguggaaagg

SEQ ID NO: 742079 - RNA, 22 nt, Human
aagagcuggauggaaucuggga

SEQ ID NO: 742080 - RNA, 22 nt, Human
ggccugcucuguuuagaggggg

SEQ ID NO: 742081 - RNA, 22 nt, Human
uuggcagauggauucaacauua

SEQ ID NO: 742082 - RNA, 17 nt, Human
acagagcuacauauucu

SEQ ID NO: 742083 - RNA, 20 nt, Human
agucacauugagcuuuugga

SEQ ID NO: 742084 - RNA, 22 nt, Human
guccucugggcuuugagcaguc

SEQ ID NO: 742085 - RNA, 19 nt, Human
ucucccagcugagaagggc

SEQ ID NO: 742086 - RNA, 22 nt, Human
ccucccaggcauugccauuuuc

SEQ ID NO: 742087 - RNA, 22 nt, Human
uuucacaguuagcaugaggacu

SEQ ID NO: 742088 - RNA, 22 nt, Human
ugcugcuuuuaguuggauagaa

SEQ ID NO: 742089 - RNA, 22 nt, Human
ccaguguuuuccaguuugccca

SEQ ID NO: 742090 - RNA, 22 nt, Human
ugggcaguugcuccucagaccc

SEQ ID NO: 742091 - RNA, 22 nt, Human
uuguuuucagggugucauucac

SEQ ID NO: 742092 - RNA, 22 nt, Human
agacaacaucacuaaagcugag

SEQ ID NO: 742093 - RNA, 22 nt, Human
ucagaagaagagacuccacagc

SEQ ID NO: 742094 - RNA, 22 nt, Human
ccuuagugaaacagaggcaauu

SEQ ID NO: 742095 - RNA, 22 nt, Human
auuuuccuuguggguuagcgaa

SEQ ID NO: 742096 - RNA, 22 nt, Human
ucaccccuaccaaggagcacug

SEQ ID NO: 742097 - RNA, 22 nt, Human
uauacugagagcaaauacauuc

SEQ ID NO: 742098 - RNA, 22 nt, Human
agcugggccugauuugcagggg

SEQ ID NO: 742099 - RNA, 22 nt, Human
aauaaaaugaacugguagaguu

SEQ ID NO: 742100 - RNA, 22 nt, Human
guggcugcagcucugaacggac

SEQ ID NO: 742101 - RNA, 22 nt, Human
aagaacaugggugugggcauuc

SEQ ID NO: 742102 - RNA, 22 nt, Human
uaguagcaaaacucaucucuuu

SEQ ID NO: 742103 - RNA, 22 nt, Human
agcagcagaagggagacccagg

SEQ ID NO: 742104 - RNA, 22 nt, Human
auaaaaccaaagcagcaguguu

SEQ ID NO: 742105 - RNA, 22 nt, Human
aaguaaggcagugaaugagauu

SEQ ID NO: 742106 - RNA, 17 nt, Human
uucaaugauuaaugcau

SEQ ID NO: 742107 - RNA, 22 nt, Human
gcugauguuuaguugauguuac

SEQ ID NO: 742108 - RNA, 22 nt, Human
aggauccuccuuagaaaagacc

SEQ ID NO: 742109 - RNA, 18 nt, Human
gugccaggaggcgcagcc

SEQ ID NO: 742110 - RNA, 22 nt, Human
aauucccacuauaugccaagca

SEQ ID NO: 742111 - RNA, 22 nt, Human
gaccucagcuguggggaugcug

SEQ ID NO: 742112 - RNA, 22 nt, Human
aagcuguggcuuggaggaaaca

SEQ ID NO: 742113 - RNA, 22 nt, Human
gccagcagcccagaaggacuuu

SEQ ID NO: 742114 - RNA, 20 nt, Human
ugcguguguauuuauuuucu

SEQ ID NO: 742115 - RNA, 22 nt, Human
gggggagcuguuauuggcaggg

SEQ ID NO: 742116 - RNA, 22 nt, Human
ggaaccuguacguuguccuuga

SEQ ID NO: 742117 - RNA, 22 nt, Human
ucagcaguggcucucaugcagu

SEQ ID NO: 742118 - RNA, 22 nt, Human
cucugagagugcucagagggua

SEQ ID NO: 742119 - RNA, 22 nt, Human
gaguccugaauccuguggcaac

SEQ ID NO: 742120 - RNA, 22 nt, Human
auugauucucauaggaccaucu

SEQ ID NO: 742121 - RNA, 22 nt, Human
aaagcagccgguucccuggucu

SEQ ID NO: 742122 - RNA, 22 nt, Human
ugagacagcccuucugcacagg

SEQ ID NO: 742123 - RNA, 17 nt, Human
gagaguguauuggaugc

SEQ ID NO: 742124 - RNA, 22 nt, Human
ucugacuuggcgcucuugucuu

SEQ ID NO: 742125 - RNA, 21 nt, Human
agagcucaaggcaaaaauaau

SEQ ID NO: 742126 - RNA, 19 nt, Human
cugagccucaguuuccuag

SEQ ID NO: 742127 - RNA, 22 nt, Human
auugagaauccauuugagauga

SEQ ID NO: 742128 - RNA, 22 nt, Human
auugcugaacuuauaaaugaau

SEQ ID NO: 742129 - RNA, 23 nt, Human
uuucaaauuacucugcagaugac

SEQ ID NO: 742130 - RNA, 22 nt, Human
gugggccacaucccagggcucu

SEQ ID NO: 742131 - RNA, 22 nt, Human
ucucauguauugcccuggugug

SEQ ID NO: 742132 - RNA, 22 nt, Human
uuugcuuucuguugaacagagu

SEQ ID NO: 742133 - RNA, 22 nt, Human
agcagcucauggaguaggcacu

SEQ ID NO: 742134 - RNA, 22 nt, Human
uuaaacaccacagcagucccua

SEQ ID NO: 742135 - RNA, 22 nt, Human
aaguggaagagaaguuaucuua

SEQ ID NO: 742136 - RNA, 22 nt, Human
agaccgagaaguucuccaggcc

SEQ ID NO: 742137 - RNA, 22 nt, Human
ugcuccugauaucuaaugugua

SEQ ID NO: 742138 - RNA, 20 nt, Human
ucccucaggucauugggcug

SEQ ID NO: 742139 - RNA, 22 nt, Human
aaauccuugauaguuugcccua

SEQ ID NO: 742140 - RNA, 22 nt, Human
aagagaauaucgauagcacucu

SEQ ID NO: 742141 - RNA, 22 nt, Human
cuuccuggcaugggucucauga

SEQ ID NO: 742142 - RNA, 21 nt, Human
ugcccuggggcucuucccuca

SEQ ID NO: 742143 - RNA, 22 nt, Human
auaguauuuaauaguuagcuca

SEQ ID NO: 742144 - RNA, 22 nt, Human
aacugaaacuuaggaaguaauc

SEQ ID NO: 742145 - RNA, 22 nt, Human
gauacauuccgggagggcuacc

SEQ ID NO: 742146 - RNA, 22 nt, Human
ugcuggccaagcagaggucaau

SEQ ID NO: 742147 - RNA, 22 nt, Human
acugggaggcaucuggagcuga

SEQ ID NO: 742148 - RNA, 22 nt, Human
gaguccuuggcaucaucaguac

SEQ ID NO: 742149 - RNA, 22 nt, Human
gcucucaaguccuuuugcucag

SEQ ID NO: 742150 - RNA, 22 nt, Human
auggcagaagucaagaugaguu

SEQ ID NO: 742151 - RNA, 19 nt, Human
ccagaggacuguuaaugaa

SEQ ID NO: 742152 - RNA, 22 nt, Human
gaaauagaggacagcuggauca

SEQ ID NO: 742153 - RNA, 22 nt, Human
gaaggcuggggcaucagugaaa

SEQ ID NO: 742154 - RNA, 22 nt, Human
cagcagagcauuugguaggagg

SEQ ID NO: 742155 - RNA, 22 nt, Human
acaaugcaauuguaaggugugu

SEQ ID NO: 742156 - RNA, 22 nt, Human
aaaucaugugcagagaucagga

SEQ ID NO: 742157 - RNA, 22 nt, Human
gaagaaauugaauucaugagcu

SEQ ID NO: 742158 - RNA, 22 nt, Human
gccccucuccuugugcaccugc

SEQ ID NO: 742159 - RNA, 22 nt, Human
ccagggcaaaugagaucauagc

SEQ ID NO: 742160 - RNA, 22 nt, Human
uuucacaggaauacccggcuuu

SEQ ID NO: 742161 - RNA, 22 nt, Human
uuguagcauuuuaaaugagcau

SEQ ID NO: 742162 - RNA, 22 nt, Human
uggaggccaaggcaggcggauc

SEQ ID NO: 742163 - RNA, 22 nt, Human
ucacagaauaaauguacuggcc

SEQ ID NO: 742164 - RNA, 22 nt, Human
cucagcaacccacacacggucu

SEQ ID NO: 742165 - RNA, 22 nt, Human
aaggcugaguaaaacagagaac

SEQ ID NO: 742166 - RNA, 20 nt, Human
aacuuguucuaccuguuuca

SEQ ID NO: 742167 - RNA, 22 nt, Human
ccaggucuggaaccaccagggc

SEQ ID NO: 742168 - RNA, 20 nt, Human
auggagguggaugugacugc

SEQ ID NO: 742169 - RNA, 22 nt, Human
ucugggaugcaaacagaaucug

SEQ ID NO: 742170 - RNA, 22 nt, Human
gugcuuuaaaaauaggagauga

SEQ ID NO: 742171 - RNA, 22 nt, Human
uuucaggacaccuuuaaaaacg

SEQ ID NO: 742172 - RNA, 22 nt, Human
gaaagugcuuuugagugugugc

SEQ ID NO: 742173 - RNA, 22 nt, Human
agggucugacuccucuggcaag

SEQ ID NO: 742174 - RNA, 22 nt, Human
cugggcucugcggugucgcucu

SEQ ID NO: 742175 - RNA, 22 nt, Human
cuugcugucccuugguaugaac

SEQ ID NO: 742176 - RNA, 22 nt, Human
gguggcugcacccuggcuaacu

SEQ ID NO: 742177 - RNA, 22 nt, Human
uucugcaugauauuaaauguaa

SEQ ID NO: 742178 - RNA, 22 nt, Human
guccuucaaguaaccugggacc

SEQ ID NO: 742179 - RNA, 22 nt, Human
augagcaauuaggaagaaaaca

SEQ ID NO: 742180 - RNA, 22 nt, Human
aaaucccuugcucucucagacc

SEQ ID NO: 742181 - RNA, 22 nt, Human
aagaggaggaugcuuuacagcu

SEQ ID NO: 742182 - RNA, 22 nt, Human
agccugguguggggcugcagag

SEQ ID NO: 742183 - RNA, 22 nt, Human
ugggggacugcacuggcgucag

SEQ ID NO: 742184 - RNA, 22 nt, Human
acccuccccaagaggucgugcc

SEQ ID NO: 742185 - RNA, 22 nt, Human
ggcaagugguagaacaucugag

SEQ ID NO: 742186 - RNA, 22 nt, Human
aaugaaaucugcuggguaaaga

SEQ ID NO: 742187 - RNA, 22 nt, Human
ggcagagcuaguggcuucucuu

SEQ ID NO: 742188 - RNA, 22 nt, Human
gaagaauugaggauguuuaccu

SEQ ID NO: 742189 - RNA, 22 nt, Human
cauucuucucccuuaccuucca

SEQ ID NO: 742190 - RNA, 22 nt, Human
ugcauacugaaucugccaucac

SEQ ID NO: 742191 - RNA, 22 nt, Human
aagccaggggcugcuuaggaga

SEQ ID NO: 742192 - RNA, 23 nt, Human
ccucugacaaugaugucaccugc

SEQ ID NO: 742193 - RNA, 22 nt, Human
aggcugugugcuccuuaugaga

SEQ ID NO: 742194 - RNA, 22 nt, Human
cugggaagggacgccagugccu

SEQ ID NO: 742195 - RNA, 22 nt, Human
aucuaagaguuaacaucaagaa

SEQ ID NO: 742196 - RNA, 22 nt, Human
cugugggaacacugaggacuuc

SEQ ID NO: 742197 - RNA, 22 nt, Human
uggcaggggaggugcuugcuua

SEQ ID NO: 742198 - RNA, 22 nt, Human
ucaguagcagaaagcaaugagu

SEQ ID NO: 742199 - RNA, 22 nt, Human
gcuauguguguuuugcugcagc

SEQ ID NO: 742200 - RNA, 22 nt, Human
caguggaaaucagagugagagu

SEQ ID NO: 742201 - RNA, 22 nt, Human
auuugugggacuauaaugcagg

SEQ ID NO: 742202 - RNA, 22 nt, Human
aguuucuaccgguacauucagg

SEQ ID NO: 742203 - RNA, 22 nt, Human
ugggcgaggagaaugcugugaa

SEQ ID NO: 742204 - RNA, 22 nt, Human
gaggcagccagagguucucauu

SEQ ID NO: 742205 - RNA, 23 nt, Human
uauccuaaaggcaacaggaaguc

SEQ ID NO: 742206 - RNA, 22 nt, Human
acagaauugaaaguauaaucug

SEQ ID NO: 742207 - RNA, 22 nt, Human
uccaggcuggaaaugucaaacu

SEQ ID NO: 742208 - RNA, 22 nt, Human
uucacugugaacucauauucag

SEQ ID NO: 742209 - RNA, 22 nt, Human
caggagcccguugcuccggcgg

SEQ ID NO: 742210 - RNA, 22 nt, Human
guuuuuauauccuguggagugu

SEQ ID NO: 742211 - RNA, 22 nt, Human
agcagguggacagaggaagaaa

SEQ ID NO: 742212 - RNA, 22 nt, Human
aacacagucaguuccuggauca

SEQ ID NO: 742213 - RNA, 22 nt, Human
aggcuggagguuuguugcggcu

SEQ ID NO: 742214 - RNA, 22 nt, Human
auuucaacagaguuugaaggca

SEQ ID NO: 742215 - RNA, 22 nt, Human
cucuggccccaguggccccuug

SEQ ID NO: 742216 - RNA, 19 nt, Human
agggcuaggcacauagggc

SEQ ID NO: 742217 - RNA, 22 nt, Human
cagaggccccauuggcugugcg

SEQ ID NO: 742218 - RNA, 22 nt, Human
uugaaucucuugaaucucuguu

SEQ ID NO: 742219 - RNA, 22 nt, Human
uccuugaagagugggcggucga

SEQ ID NO: 742220 - RNA, 22 nt, Human
cugugucuucaauguacuggga

SEQ ID NO: 742221 - RNA, 22 nt, Human
uuggcauuggagaugcaagaac

SEQ ID NO: 742222 - RNA, 22 nt, Human
ucagcuucagaucagcuagaga

SEQ ID NO: 742223 - RNA, 22 nt, Human
aggcuggugccugcagugaauc

SEQ ID NO: 742224 - RNA, 22 nt, Human
cauuugaaauaguucauucuug

SEQ ID NO: 742225 - RNA, 22 nt, Human
gcugccuuccaaagaguuuuau

SEQ ID NO: 742226 - RNA, 22 nt, Human
aaaugucagaggaacauauuga

SEQ ID NO: 742227 - RNA, 22 nt, Human
cagcugagaaaggcaggcucac

SEQ ID NO: 742228 - RNA, 22 nt, Human
uuuccuuccuugcuagccugag

SEQ ID NO: 742229 - RNA, 22 nt, Human
auuauaaauauuuucuaggggu

SEQ ID NO: 742230 - RNA, 23 nt, Human
gggcugcuccaggccaaggcugg

SEQ ID NO: 742231 - RNA, 22 nt, Human
caagaucuuccucaauagaccu

SEQ ID NO: 742232 - RNA, 22 nt, Human
uagggguggagcuaagaguccc

SEQ ID NO: 742233 - RNA, 22 nt, Human
uuaaggcauucuccuacuaaua

SEQ ID NO: 742234 - RNA, 22 nt, Human
aucugccuggcuccaggugagc

SEQ ID NO: 742235 - RNA, 22 nt, Human
ugaagcagaggggucuugagcu

SEQ ID NO: 742236 - RNA, 22 nt, Human
cugaagccaguuugcugcccuu

SEQ ID NO: 742237 - RNA, 22 nt, Human
caggaagaaggguggugagucc

SEQ ID NO: 742238 - RNA, 22 nt, Human
aaguguauauaugacuuauaaa

SEQ ID NO: 742239 - RNA, 22 nt, Human
agcccuggguuagggugggagc

SEQ ID NO: 742240 - RNA, 22 nt, Human
caggcacacagcacauggccug

SEQ ID NO: 742241 - RNA, 22 nt, Human
ccuccaguacuccaguccagcg

SEQ ID NO: 742242 - RNA, 22 nt, Human
ucucugaagaaucgaugauucu

SEQ ID NO: 742243 - RNA, 22 nt, Human
caggaagcugccggugagcgag

SEQ ID NO: 742244 - RNA, 22 nt, Human
cuggcugggagcucgccugcgg

SEQ ID NO: 742245 - RNA, 21 nt, Human
ugaggauaaguaaagcugaag

SEQ ID NO: 742246 - RNA, 22 nt, Human
ucuccuggauggaccuucucuu

SEQ ID NO: 742247 - RNA, 22 nt, Human
auucacagggcuuuccgcaugg

SEQ ID NO: 742248 - RNA, 22 nt, Human
cuggcucugagcccaccuccag

SEQ ID NO: 742249 - RNA, 22 nt, Human
gagcuugguguuauuucugugg

SEQ ID NO: 742250 - RNA, 22 nt, Human
agggggagcuuggcuacuccug

SEQ ID NO: 742251 - RNA, 21 nt, Human
gcagcagaggcuugacagaca

SEQ ID NO: 742252 - RNA, 22 nt, Human
cugggugguuuugaugugaauu

SEQ ID NO: 742253 - RNA, 22 nt, Human
gaccccaucuggcugccccagg

SEQ ID NO: 742254 - RNA, 22 nt, Human
gaggcaguaauugugggcaaua

SEQ ID NO: 742255 - RNA, 22 nt, Human
gacaggggucccucugggcugu

SEQ ID NO: 742256 - RNA, 22 nt, Human
ucucagagaagugaugagcaau

SEQ ID NO: 742257 - RNA, 22 nt, Human
auguagaaauuaggaugauagu

SEQ ID NO: 742258 - RNA, 22 nt, Human
uucaucuggaaguucccaaggc

SEQ ID NO: 742259 - RNA, 22 nt, Human
cccaggaguucgaggcuguagu

SEQ ID NO: 742260 - RNA, 22 nt, Human
agaguucugucugccacacgaa

SEQ ID NO: 742261 - RNA, 22 nt, Human
uguguuucucugaggggucccu

SEQ ID NO: 742262 - RNA, 22 nt, Human
uccugggacuuucaaggcuagg

SEQ ID NO: 742263 - RNA, 22 nt, Human
ucccacugugaauccaaggccu

SEQ ID NO: 742264 - RNA, 22 nt, Human
gaggcucaacccacagggguug

SEQ ID NO: 742265 - RNA, 22 nt, Human
guggcuauauuugaggauacgu

SEQ ID NO: 742266 - RNA, 22 nt, Human
aggcucagcugguggugaucgc

SEQ ID NO: 742267 - RNA, 22 nt, Human
aggcagcugcccucuccuuccu

SEQ ID NO: 742268 - RNA, 22 nt, Human
gcauggccuucagggacagcug

SEQ ID NO: 742269 - RNA, 22 nt, Human
gaaugucuucuguucccagcug

SEQ ID NO: 742270 - RNA, 20 nt, Human
uauugaguaccuacuguaua

SEQ ID NO: 742271 - RNA, 22 nt, Human
gugcaauuuugcaucuguaugc

SEQ ID NO: 742272 - RNA, 19 nt, Human
ccaggccucuggggccugu

SEQ ID NO: 742273 - RNA, 22 nt, Human
cacauucagcucauuaaugguc

SEQ ID NO: 742274 - RNA, 22 nt, Human
cagggccaaguuggugccuuuu

SEQ ID NO: 742275 - RNA, 22 nt, Human
aaacaucaccauuuuaccuaau

SEQ ID NO: 742276 - RNA, 22 nt, Human
ccacagggugucaucagcuuga

SEQ ID NO: 742277 - RNA, 22 nt, Human
gcucaaauuucagacucaugaa

SEQ ID NO: 742278 - RNA, 22 nt, Human
uaaacugugaaaggcuuaacau

SEQ ID NO: 742279 - RNA, 22 nt, Human
uacagcuuaaaagaugcauuua

SEQ ID NO: 742280 - RNA, 22 nt, Human
gggagcugcugaacacaagggu

SEQ ID NO: 742281 - RNA, 23 nt, Human
agggcugaaugcagagaagcaga

SEQ ID NO: 742282 - RNA, 23 nt, Human
gggugcugccuguagucaugcug

SEQ ID NO: 742283 - RNA, 22 nt, Human
ggggucaagcucagaauccuag

SEQ ID NO: 742284 - RNA, 22 nt, Human
gagaagccgagucagcugagcc

SEQ ID NO: 742285 - RNA, 22 nt, Human
cuguuuauucucaucuaaaaug

SEQ ID NO: 742286 - RNA, 22 nt, Human
cagcaggcucugaguggcugcc

SEQ ID NO: 742287 - RNA, 22 nt, Human
agagacugauggaucaccaaau

SEQ ID NO: 742288 - RNA, 22 nt, Human
ggcaggguguggaguugggaca

SEQ ID NO: 742289 - RNA, 22 nt, Human
uacaagacgagggaaguucuuu

SEQ ID NO: 742290 - RNA, 22 nt, Human
aaugagauggaauucccgccua

SEQ ID NO: 742291 - RNA, 22 nt, Human
ugcuuccagccuucccaaugcu

SEQ ID NO: 742292 - RNA, 22 nt, Human
ucuguguugagaaggaucauga

SEQ ID NO: 742293 - RNA, 22 nt, Human
uauauguaagcuauguaagagu

SEQ ID NO: 742294 - RNA, 22 nt, Human
ucaaauaccagcaauuucaugu

SEQ ID NO: 742295 - RNA, 22 nt, Human
uagaacagaggguugcccagau

SEQ ID NO: 742296 - RNA, 22 nt, Human
agaaacagaagggaaagcuuuu

SEQ ID NO: 742297 - RNA, 22 nt, Human
uucugaggaggagcaaaaacuc

SEQ ID NO: 742298 - RNA, 22 nt, Human
uaacuguauuuuucugagauuc

SEQ ID NO: 742299 - RNA, 22 nt, Human
cagggcccaggccacuggguug

SEQ ID NO: 742300 - RNA, 22 nt, Human
gaugcacugcaguauauacugu

SEQ ID NO: 742301 - RNA, 20 nt, Human
agccagaagaaggcuggaga

SEQ ID NO: 742302 - RNA, 22 nt, Human
guguguccaggcgggagucaag

SEQ ID NO: 742303 - RNA, 22 nt, Human
agcuugaguuuuggaugaagug

SEQ ID NO: 742304 - RNA, 22 nt, Human
ggaauguugucauuuacauuau

SEQ ID NO: 742305 - RNA, 22 nt, Human
ccccagcugcauacuugccaag

SEQ ID NO: 742306 - RNA, 22 nt, Human
gaggagccaagguauguguguu

SEQ ID NO: 742307 - RNA, 22 nt, Human
gcacagagagcagugggggaca

SEQ ID NO: 742308 - RNA, 22 nt, Human
cugaccuggccuuggugggcca

SEQ ID NO: 742309 - RNA, 22 nt, Human
gcagagcagugcuugcccagcg

SEQ ID NO: 742310 - RNA, 22 nt, Human
gaguuauaaccuaguuuaacug

SEQ ID NO: 742311 - RNA, 22 nt, Human
gugcagcucaguugaaaugcag

SEQ ID NO: 742312 - RNA, 22 nt, Human
uccagucaggcugaauucaagg

SEQ ID NO: 742313 - RNA, 20 nt, Human
ugcccuguggaggggaaagg

SEQ ID NO: 742314 - RNA, 22 nt, Human
cuguauauggcuuacuuuauau

SEQ ID NO: 742315 - RNA, 22 nt, Human
auuacacaggcuggcucuuuga

SEQ ID NO: 742316 - RNA, 22 nt, Human
ucagauuucugaaagcccucuc

SEQ ID NO: 742317 - RNA, 22 nt, Human
uacccagcccaugccuaccuca

SEQ ID NO: 742318 - RNA, 22 nt, Human
auuuuaauaagauccauuuggu

SEQ ID NO: 742319 - RNA, 22 nt, Human
guggugcaugcaugcauaugua

SEQ ID NO: 742320 - RNA, 22 nt, Human
guuuccuauaacucaggcacca

SEQ ID NO: 742321 - RNA, 22 nt, Human
ucugcaggacugaggccuguuu

SEQ ID NO: 742322 - RNA, 22 nt, Human
aucuggagcucugcacaccugg

SEQ ID NO: 742323 - RNA, 22 nt, Human
uccugggcgauuuucugaauau

SEQ ID NO: 742324 - RNA, 22 nt, Human
cucacaggcgguaauucaggga

SEQ ID NO: 742325 - RNA, 22 nt, Human
aaucucuugggaggaaugaauu

SEQ ID NO: 742326 - RNA, 22 nt, Human
gugucugcuugcugagcauuua

SEQ ID NO: 742327 - RNA, 22 nt, Human
cagacugagggcaucacauacg

SEQ ID NO: 742328 - RNA, 16 nt, Human
cuggucuugcugccga

SEQ ID NO: 742329 - RNA, 22 nt, Human
uuuccucuuugugacacagcug

SEQ ID NO: 742330 - RNA, 22 nt, Human
auucucauaggagcgugaaccu

SEQ ID NO: 742331 - RNA, 22 nt, Human
ugucauuuucauccuaaggagc

SEQ ID NO: 742332 - RNA, 22 nt, Human
guggggugcagcaguacugugu

SEQ ID NO: 742333 - RNA, 22 nt, Human
auaauggcuucugaguauuagg

SEQ ID NO: 742334 - RNA, 22 nt, Human
aagaguuuuuggagugugaguu

SEQ ID NO: 742335 - RNA, 19 nt, Human
cuucagggaggggccaggc

SEQ ID NO: 742336 - RNA, 22 nt, Human
aggcaggcucaggcccaugcuu

SEQ ID NO: 742337 - RNA, 22 nt, Human
cuguguccugcgucaagccaau

SEQ ID NO: 742338 - RNA, 22 nt, Human
ggauuucuuccuuccucagaag

SEQ ID NO: 742339 - RNA, 22 nt, Human
acccuugguuuugcagagcugu

SEQ ID NO: 742340 - RNA, 22 nt, Human
auuugccuugugauuuguaagu

SEQ ID NO: 742341 - RNA, 22 nt, Human
uccaugaguuugaggaaaagag

SEQ ID NO: 742342 - RNA, 22 nt, Human
acuguaaccaguguggugagag

SEQ ID NO: 742343 - RNA, 22 nt, Human
aggcaagaaacuuucugggaga

SEQ ID NO: 742344 - RNA, 20 nt, Human
ugggcagcacugcuggcugg

SEQ ID NO: 742345 - RNA, 19 nt, Human
ucuuucauuucuagcucug

SEQ ID NO: 742346 - RNA, 22 nt, Human
cagaggccauauuucuucacuc

SEQ ID NO: 742347 - RNA, 22 nt, Human
ucacuaagugccgaguuuaguu

SEQ ID NO: 742348 - RNA, 22 nt, Human
gggacuccauaagcacauggau

SEQ ID NO: 742349 - RNA, 22 nt, Human
cuggaagguuccucccagcucc

SEQ ID NO: 742350 - RNA, 22 nt, Human
ggagaguggauuccagcuguau

SEQ ID NO: 742351 - RNA, 22 nt, Human
ugccugggacaugcuguggacu

SEQ ID NO: 742352 - RNA, 22 nt, Human
gagcucugacugcugggugaca

SEQ ID NO: 742353 - RNA, 22 nt, Human
uggaagaauguuugccuuauaa

SEQ ID NO: 742354 - RNA, 22 nt, Human
ucuuucagcucuucaggaccca

SEQ ID NO: 742355 - RNA, 22 nt, Human
ggacagaggguugacagaguau

SEQ ID NO: 742356 - RNA, 22 nt, Human
cugugucccccucagccaggug

SEQ ID NO: 742357 - RNA, 22 nt, Human
ggccccaggaccuccacggucc

SEQ ID NO: 742358 - RNA, 22 nt, Human
acucagagcuuggcuccuugcu

SEQ ID NO: 742359 - RNA, 18 nt, Human
uaugagaagauuagcaau

SEQ ID NO: 742360 - RNA, 22 nt, Human
uacagucaauacuaggaccaua

SEQ ID NO: 742361 - RNA, 22 nt, Human
uuacagagggcuucucugaacu

SEQ ID NO: 742362 - RNA, 22 nt, Human
gcuggguuuccagcaggcagga

SEQ ID NO: 742363 - RNA, 22 nt, Human
gaugcacagugacccugccagu

SEQ ID NO: 742364 - RNA, 22 nt, Human
uucuuuuggacucaaagagaac

SEQ ID NO: 742365 - RNA, 22 nt, Human
agagaucaguuaaaaucuuuuu

SEQ ID NO: 742366 - RNA, 22 nt, Human
auucuucuaauaugaucguguu

SEQ ID NO: 742367 - RNA, 22 nt, Human
aaaucuggccccuugccuauuu

SEQ ID NO: 742368 - RNA, 22 nt, Human
acagccagggucucaggaggcg

SEQ ID NO: 742369 - RNA, 22 nt, Human
guuuccuggaaacugcuccacu

SEQ ID NO: 742370 - RNA, 23 nt, Human
ucagagaacucgggcagaugacc

SEQ ID NO: 742371 - RNA, 23 nt, Human
acugucugauauguuuuccauca

SEQ ID NO: 742372 - RNA, 22 nt, Human
uguauuuaauuguaucaucaca

SEQ ID NO: 742373 - RNA, 22 nt, Human
uucaaacauucaaauaaaccgg

SEQ ID NO: 742374 - RNA, 22 nt, Human
ugcagccucucugcuucaggaa

SEQ ID NO: 742375 - RNA, 22 nt, Human
aggugcuguuggcagcgggcag

SEQ ID NO: 742376 - RNA, 22 nt, Human
aagacuuucaaguaugcaugca

SEQ ID NO: 742377 - RNA, 22 nt, Human
uccccaccccagaacuacuagg

SEQ ID NO: 742378 - RNA, 19 nt, Human
aauaagcuuggguaaaacu

SEQ ID NO: 742379 - RNA, 22 nt, Human
uuccacugaaggaucuagggaa

SEQ ID NO: 742380 - RNA, 22 nt, Human
gcucaggcaggagugcaguggc

SEQ ID NO: 742381 - RNA, 22 nt, Human
uauugaaauccauuacguucuu

SEQ ID NO: 742382 - RNA, 22 nt, Human
cagcacuaggauauacauuucc

SEQ ID NO: 742383 - RNA, 22 nt, Human
accacuggauaucagagaugua

SEQ ID NO: 742384 - RNA, 22 nt, Human
uuuuggcucugucuguaucuuu

SEQ ID NO: 742385 - RNA, 22 nt, Human
uuaauacagaagcaagacacug

SEQ ID NO: 742386 - RNA, 22 nt, Human
agcucccugagaugccacagca

SEQ ID NO: 742387 - RNA, 22 nt, Human
uuaaagcauguugcuuaacagg

SEQ ID NO: 742388 - RNA, 22 nt, Human
ugggccaggucugugucagcug

SEQ ID NO: 742389 - RNA, 22 nt, Human
uauuuaaccaguuaaauuucca

SEQ ID NO: 742390 - RNA, 22 nt, Human
cuccaggcuucaagggccggcc

SEQ ID NO: 742391 - RNA, 22 nt, Human
uuuauuggauauuuacaagaua

SEQ ID NO: 742392 - RNA, 22 nt, Human
agagcacagugcaggauccccg

SEQ ID NO: 742393 - RNA, 22 nt, Human
aucugggagucuuggcucugcu

SEQ ID NO: 742394 - RNA, 22 nt, Human
cauuagguauuuaagcacacag

SEQ ID NO: 742395 - RNA, 22 nt, Human
uggccucaagucugagggccuu

SEQ ID NO: 742396 - RNA, 22 nt, Human
uauguuuuuaagagaaugcauu

SEQ ID NO: 742397 - RNA, 22 nt, Human
gcuuuaugcaaaccugguacuu

SEQ ID NO: 742398 - RNA, 22 nt, Human
cagcauguaagccacugcccug

SEQ ID NO: 742399 - RNA, 22 nt, Human
augacagaugcuguggggaggu

SEQ ID NO: 742400 - RNA, 22 nt, Human
ugguuccuacgcacauugaauu

SEQ ID NO: 742401 - RNA, 21 nt, Human
gcucagcugcuugguuccugu

SEQ ID NO: 742402 - RNA, 22 nt, Human
ugcaugcagcuggugauaagaa

SEQ ID NO: 742403 - RNA, 19 nt, Human
gugggacagacauuacaua

SEQ ID NO: 742404 - RNA, 22 nt, Human
ccugcucagccccagcucaccc

SEQ ID NO: 742405 - RNA, 22 nt, Human
ccugcugugaccggggagcagg

SEQ ID NO: 742406 - RNA, 22 nt, Human
gaacacaucacauuuuacagug

SEQ ID NO: 742407 - RNA, 22 nt, Human
ugcagcucugggcaagugccuu

SEQ ID NO: 742408 - RNA, 22 nt, Human
uuuaucugaggaaagcagacaa

SEQ ID NO: 742409 - RNA, 22 nt, Human
uuucaagagaaaacuaaccuau

SEQ ID NO: 742410 - RNA, 22 nt, Human
gaagauuuggauuccaugucac

SEQ ID NO: 742411 - RNA, 22 nt, Human
augucccagcugagagacaacu

SEQ ID NO: 742412 - RNA, 22 nt, Human
uugcaucagaaaauaugggaag

SEQ ID NO: 742413 - RNA, 22 nt, Human
ccacagugggcacagcaggacu

SEQ ID NO: 742414 - RNA, 22 nt, Human
uccucuggggucagggcacuac

SEQ ID NO: 742415 - RNA, 22 nt, Human
cauaauuagagaauucauguua

SEQ ID NO: 742416 - RNA, 22 nt, Human
auguguuaguuugugauuauac

SEQ ID NO: 742417 - RNA, 22 nt, Human
ugcuuuaucugugagaaccuga

SEQ ID NO: 742418 - RNA, 23 nt, Human
agacaaaagccucagucuuaggc

SEQ ID NO: 742419 - RNA, 22 nt, Human
agccccucuguggcucugccuc

SEQ ID NO: 742420 - RNA, 22 nt, Human
uaacaucuugcaguagcagaac

SEQ ID NO: 742421 - RNA, 22 nt, Human
gcagugggccugaggaagggug

SEQ ID NO: 742422 - RNA, 22 nt, Human
gggagagaauuauugccagacc

SEQ ID NO: 742423 - RNA, 22 nt, Human
agacaaaugaacaaauauguga

SEQ ID NO: 742424 - RNA, 21 nt, Human
aaaugcuuuguauauaucugu

SEQ ID NO: 742425 - RNA, 18 nt, Human
caggugggucuccugccc

SEQ ID NO: 742426 - RNA, 22 nt, Human
augcuuuaaaacguauguguaa

SEQ ID NO: 742427 - RNA, 22 nt, Human
augcacuacuuggcuuuacuga

SEQ ID NO: 742428 - RNA, 22 nt, Human
ugcagcauauagcuuagugaug

SEQ ID NO: 742429 - RNA, 22 nt, Human
cugccguguuuuucauguuaaa

SEQ ID NO: 742430 - RNA, 22 nt, Human
ugcuugagacacauaugaauuu

SEQ ID NO: 742431 - RNA, 22 nt, Human
aggaaacagagugaagcuuggg

SEQ ID NO: 742432 - RNA, 22 nt, Human
agauuuauguggucacacucag

SEQ ID NO: 742433 - RNA, 22 nt, Human
gucuguggaguugcuugcugga

SEQ ID NO: 742434 - RNA, 22 nt, Human
aaguucaaguaguguuacaugg

SEQ ID NO: 742435 - RNA, 22 nt, Human
ugggauaguagcugagagacaa

SEQ ID NO: 742436 - RNA, 22 nt, Human
aaagccaguuugucucuuuaaa

SEQ ID NO: 742437 - RNA, 22 nt, Human
gugcuuuagguguuuggcugaa

SEQ ID NO: 742438 - RNA, 18 nt, Human
ugcaggcugggguuccuc

SEQ ID NO: 742439 - RNA, 22 nt, Human
aggcgguggccaaggagcggga

SEQ ID NO: 742440 - RNA, 22 nt, Human
gcagacagaugagggugcuggg

SEQ ID NO: 742441 - RNA, 22 nt, Human
aggaggaaaaaggccacagcaa

SEQ ID NO: 742442 - RNA, 22 nt, Human
auccaaaucaugucagaagaac

SEQ ID NO: 742443 - RNA, 22 nt, Human
uguacaauggcuauaauacccu

SEQ ID NO: 742444 - RNA, 22 nt, Human
ucuggaauagguccugaguauu

SEQ ID NO: 742445 - RNA, 20 nt, Human
ucuuugugucagauggacag

SEQ ID NO: 742446 - RNA, 22 nt, Human
aauuuucuaaggugaugaucug

SEQ ID NO: 742447 - RNA, 22 nt, Human
gaaggcaucucuggacuuauuu

SEQ ID NO: 742448 - RNA, 22 nt, Human
ccuuuacacauggaaugggucu

SEQ ID NO: 742449 - RNA, 22 nt, Human
gcccaggcuagcguagagugca

SEQ ID NO: 742450 - RNA, 22 nt, Human
uacacugugacaaucaugacag

SEQ ID NO: 742451 - RNA, 22 nt, Human
agugcugaggccauacuccaua

SEQ ID NO: 742452 - RNA, 22 nt, Human
auauuuaaacaggguaccaaua

SEQ ID NO: 742453 - RNA, 22 nt, Human
uuuguuugccacacaaaacagu

SEQ ID NO: 742454 - RNA, 20 nt, Human
acugugaaugcugaauuagc

SEQ ID NO: 742455 - RNA, 22 nt, Human
uggguaaacugggucuggagag

SEQ ID NO: 742456 - RNA, 22 nt, Human
auuauucuuugauaaauggcag

SEQ ID NO: 742457 - RNA, 22 nt, Human
uuuugccugcacuguauauaua

SEQ ID NO: 742458 - RNA, 22 nt, Human
ccugucugcaugagugagcaua

SEQ ID NO: 742459 - RNA, 22 nt, Human
cacaucagguagaccuacagag

SEQ ID NO: 742460 - RNA, 22 nt, Human
cagagcuugaauguccaugguu

SEQ ID NO: 742461 - RNA, 19 nt, Human
ucuguggagcucagaguag

SEQ ID NO: 742462 - RNA, 22 nt, Human
gaccucaguauuguucaggaug

SEQ ID NO: 742463 - RNA, 19 nt, Human
ugcucauggggacuucucc

SEQ ID NO: 742464 - RNA, 22 nt, Human
agggcagagaucugagugggca

SEQ ID NO: 742465 - RNA, 22 nt, Human
gcuacugauugaccuuggagag

SEQ ID NO: 742466 - RNA, 22 nt, Human
ugcagcaggagccaggccuggu

SEQ ID NO: 742467 - RNA, 22 nt, Human
ccagcugguuaaaauagagaaa

SEQ ID NO: 742468 - RNA, 18 nt, Human
agaguguucucagugaaa

SEQ ID NO: 742469 - RNA, 22 nt, Human
uaggcugggcugagcuggacgg

SEQ ID NO: 742470 - RNA, 22 nt, Human
ccuggcucuucagagguuccua

SEQ ID NO: 742471 - RNA, 22 nt, Human
uggagguggaguuggaaacuga

SEQ ID NO: 742472 - RNA, 21 nt, Human
cuuuucuguguuccucccugu

SEQ ID NO: 742473 - RNA, 22 nt, Human
gagaucucuagcacuuccugua

SEQ ID NO: 742474 - RNA, 22 nt, Human
uggaaggaagccaaggaagguu

SEQ ID NO: 742475 - RNA, 22 nt, Human
ucacaguauaaccucauauagg

SEQ ID NO: 742476 - RNA, 22 nt, Human
cucaguuugugugauauugucu

SEQ ID NO: 742477 - RNA, 22 nt, Human
uaaaguauaagcauuggaguau

SEQ ID NO: 742478 - RNA, 22 nt, Human
gugugccucccauuagggugua

SEQ ID NO: 742479 - RNA, 22 nt, Human
ucacaucuuauuagaguaucuc

SEQ ID NO: 742480 - RNA, 22 nt, Human
guuuauuccagcaaucugcuua

SEQ ID NO: 742481 - RNA, 22 nt, Human
ggcgagggagcagugcgguggg

SEQ ID NO: 742482 - RNA, 22 nt, Human
ucuguuuaggcaaaauagcuac

SEQ ID NO: 742483 - RNA, 23 nt, Human
guuaauaaugaacacuuucuccc

SEQ ID NO: 742484 - RNA, 22 nt, Human
ucaugcaaucucuuguucagga

SEQ ID NO: 742485 - RNA, 23 nt, Human
ucuggcucuaugugacagcucuc

SEQ ID NO: 742486 - RNA, 22 nt, Human
uuucucugggcuguuggcagcc

SEQ ID NO: 742487 - RNA, 22 nt, Human
acucaaauagcugccccuagug

SEQ ID NO: 742488 - RNA, 22 nt, Human
aaggcuccuuuguaguucuuuu

SEQ ID NO: 742489 - RNA, 22 nt, Human
ugcaaagcaauguaggucagcu

SEQ ID NO: 742490 - RNA, 22 nt, Human
ccagucagccaagcugcagcgg

SEQ ID NO: 742491 - RNA, 22 nt, Human
agcagcaaagaauaggcccucu

SEQ ID NO: 742492 - RNA, 22 nt, Human
caggcagagcaacugguccaga

SEQ ID NO: 742493 - RNA, 22 nt, Human
ugccugagugauguggcagcca

SEQ ID NO: 742494 - RNA, 22 nt, Human
cugagagucagcuucuccuccu

SEQ ID NO: 742495 - RNA, 22 nt, Human
auaaacagcuccauuuagugcc

SEQ ID NO: 742496 - RNA, 22 nt, Human
cagggagucaacaaacagauca

SEQ ID NO: 742497 - RNA, 22 nt, Human
agccacuguaaggggaauugcc

SEQ ID NO: 742498 - RNA, 22 nt, Human
gcugaggcaaaccaagaaugua

SEQ ID NO: 742499 - RNA, 22 nt, Human
gcacacagccagcugagggcua

SEQ ID NO: 742500 - RNA, 23 nt, Human
caguauaauguauggauggggca

SEQ ID NO: 742501 - RNA, 22 nt, Human
cacccucccgucagccccuggg

SEQ ID NO: 742502 - RNA, 22 nt, Human
uuuucuguaagaggacuuuaau

SEQ ID NO: 742503 - RNA, 22 nt, Human
ugagguggguggcuucuguuau

SEQ ID NO: 742504 - RNA, 22 nt, Human
uuaauuaacuagccaaccacua

SEQ ID NO: 742505 - RNA, 22 nt, Human
gagcccugcgugucugggggca

SEQ ID NO: 742506 - RNA, 22 nt, Human
uaggugcuggauaaagaauggu

SEQ ID NO: 742507 - RNA, 22 nt, Human
uuuuauguaauaaacuguacac

SEQ ID NO: 742508 - RNA, 22 nt, Human
ugggggugcccuaugaggaagc

SEQ ID NO: 742509 - RNA, 22 nt, Human
uuaaauauuuucagcaggguca

SEQ ID NO: 742510 - RNA, 21 nt, Human
gacagcaacuguaguccucuu

SEQ ID NO: 742511 - RNA, 22 nt, Human
uauaagcacauccuugacugau

SEQ ID NO: 742512 - RNA, 22 nt, Human
ggaugcaggaacacagcgaccu

SEQ ID NO: 742513 - RNA, 22 nt, Human
acaaucaguauuuagacccagg

SEQ ID NO: 742514 - RNA, 22 nt, Human
agaaacugacaggaaaugaauu

SEQ ID NO: 742515 - RNA, 22 nt, Human
uuuucuguggucagagcuugag

SEQ ID NO: 742516 - RNA, 22 nt, Human
aggucucccaagggccagggag

SEQ ID NO: 742517 - RNA, 20 nt, Human
cugcagggugagugggcgau

SEQ ID NO: 742518 - RNA, 22 nt, Human
gagaaggcugauccuuggaguu

SEQ ID NO: 742519 - RNA, 22 nt, Human
aagugugucuggcggcccagug

SEQ ID NO: 742520 - RNA, 22 nt, Human
auuuccuucaucagccuauccu

SEQ ID NO: 742521 - RNA, 22 nt, Human
cauuuguaucugggcugcugug

SEQ ID NO: 742522 - RNA, 22 nt, Human
caucucacuucccugcagcauc

SEQ ID NO: 742523 - RNA, 22 nt, Human
gcucagagcaucccagugaaug

SEQ ID NO: 742524 - RNA, 22 nt, Human
guuuuucugugagcgguaaagg

SEQ ID NO: 742525 - RNA, 22 nt, Human
uccucacagggcaggaaggagg

SEQ ID NO: 742526 - RNA, 22 nt, Human
guggagaggaacccagcucugu

SEQ ID NO: 742527 - RNA, 22 nt, Human
uggcacauagcagguacucagu

SEQ ID NO: 742528 - RNA, 22 nt, Human
cacaggaaaugauucugcagca

SEQ ID NO: 742529 - RNA, 22 nt, Human
uuuaagacuuagauuuauuggg

SEQ ID NO: 742530 - RNA, 22 nt, Human
ugcacauuaguguuugagaugc

SEQ ID NO: 742531 - RNA, 22 nt, Human
uucugaagcucccuuuuguagu

SEQ ID NO: 742532 - RNA, 21 nt, Human
ugcugggcugcaggggaugca

SEQ ID NO: 742533 - RNA, 22 nt, Human
uccccagaggaauaugagauug

SEQ ID NO: 742534 - RNA, 22 nt, Human
acccagggccacagcccgcagu

SEQ ID NO: 742535 - RNA, 22 nt, Human
ugagggcagagcacuggggagc

SEQ ID NO: 742536 - RNA, 22 nt, Human
gagggccaaagagcaagagccu

SEQ ID NO: 742537 - RNA, 22 nt, Human
uagacauuugucaagaaugacu

SEQ ID NO: 742538 - RNA, 22 nt, Human
aagaggacuugugaagauguac

SEQ ID NO: 742539 - RNA, 22 nt, Human
aaagucaaugauuucuccugga

SEQ ID NO: 742540 - RNA, 18 nt, Human
gcagggcuggacaaguca

SEQ ID NO: 742541 - RNA, 22 nt, Human
ucacuguauuuggaagggaugg

SEQ ID NO: 742542 - RNA, 19 nt, Human
cccuggagaauacccugga

SEQ ID NO: 742543 - RNA, 22 nt, Human
aaguuccugagcucauauagca

SEQ ID NO: 742544 - RNA, 22 nt, Human
gcagggcagggcaagaacuggg

SEQ ID NO: 742545 - RNA, 22 nt, Human
uccagcuggcccggccaugaau

SEQ ID NO: 742546 - RNA, 23 nt, Human
ucuguucuuuuagcugaucauuu

SEQ ID NO: 742547 - RNA, 22 nt, Human
auuuauuaugggauuuggcuca

SEQ ID NO: 742548 - RNA, 22 nt, Human
auuuguucauggguuguuaugc

SEQ ID NO: 742549 - RNA, 22 nt, Human
gacaguuuaagcaccuaauauu

SEQ ID NO: 742550 - RNA, 22 nt, Human
cgcugggcauggugccuuauuu

SEQ ID NO: 742551 - RNA, 22 nt, Human
uuugaaagacagaauauuuuug

SEQ ID NO: 742552 - RNA, 19 nt, Human
auaaggcaggaggaaauuu

SEQ ID NO: 742553 - RNA, 22 nt, Human
caucagucugaaagccagggag

SEQ ID NO: 742554 - RNA, 22 nt, Human
ugccagagaguggcuggguguc

SEQ ID NO: 742555 - RNA, 22 nt, Human
uggaacaauucuugaagggaau

SEQ ID NO: 742556 - RNA, 22 nt, Human
ggaaggaauuccaagacuaaag

SEQ ID NO: 742557 - RNA, 22 nt, Human
uucccucccccagccuggcagg

SEQ ID NO: 742558 - RNA, 22 nt, Human
aacuguuucagaaauauuguug

SEQ ID NO: 742559 - RNA, 22 nt, Human
agggugcaggggaagcugcccu

SEQ ID NO: 742560 - RNA, 22 nt, Human
uccugguuagagcucucugggg

SEQ ID NO: 742561 - RNA, 19 nt, Human
uguguaaagucugugguca

SEQ ID NO: 742562 - RNA, 18 nt, Human
ccucugccauagccagca

SEQ ID NO: 742563 - RNA, 22 nt, Human
aacuuauuccauaggcucacug

SEQ ID NO: 742564 - RNA, 20 nt, Human
uugggccacacugauucagc

SEQ ID NO: 742565 - RNA, 22 nt, Human
cagaggcugauggcuguagcca

SEQ ID NO: 742566 - RNA, 22 nt, Human
aagccgaggccacacagcagga

SEQ ID NO: 742567 - RNA, 22 nt, Human
aaacugcagagccaugguucaa

SEQ ID NO: 742568 - RNA, 22 nt, Human
ugguccagacauuucugaggua

SEQ ID NO: 742569 - RNA, 22 nt, Human
gggacuguaaauucauauggcc

SEQ ID NO: 742570 - RNA, 22 nt, Human
aaagcagguuaugaccauggcc

SEQ ID NO: 742571 - RNA, 22 nt, Human
ucucaaauuugcuggaccagua

SEQ ID NO: 742572 - RNA, 22 nt, Human
gagcacugaggaaagcugguua

SEQ ID NO: 742573 - RNA, 22 nt, Human
augcucugggcuuuugaagugg

SEQ ID NO: 742574 - RNA, 22 nt, Human
gccuccccaggggugucaugag

SEQ ID NO: 742575 - RNA, 22 nt, Human
gcuggcagagacaagaagacua

SEQ ID NO: 742576 - RNA, 22 nt, Human
cuccagagagaaaggaggccgc

SEQ ID NO: 742577 - RNA, 22 nt, Human
ucagacuuuaaaggcuaacagg

SEQ ID NO: 742578 - RNA, 22 nt, Human
cugcccugucuuuuucugauga

SEQ ID NO: 742579 - RNA, 22 nt, Human
ucagggcauucaagaggccugg

SEQ ID NO: 742580 - RNA, 22 nt, Human
auggcuccaagauggagagcca

SEQ ID NO: 742581 - RNA, 22 nt, Human
caggcugcaagaaaggcauuca

SEQ ID NO: 742582 - RNA, 22 nt, Human
aacagcagggacuugaauggaa

SEQ ID NO: 742583 - RNA, 19 nt, Human
cuccacagggauugugauu

SEQ ID NO: 742584 - RNA, 22 nt, Human
aaagguuuauugauucugcucu

SEQ ID NO: 742585 - RNA, 22 nt, Human
ugcaauuucaggcauauauugu

SEQ ID NO: 742586 - RNA, 22 nt, Human
gugguccugcacccgcuuggcc

SEQ ID NO: 742587 - RNA, 22 nt, Human
aacacuuuccguagguuuagua

SEQ ID NO: 742588 - RNA, 22 nt, Human
uugggcuggcagagguggucuu

SEQ ID NO: 742589 - RNA, 22 nt, Human
cugcaaaggugggggaggagcu

SEQ ID NO: 742590 - RNA, 22 nt, Human
ggcucugcccagguggacagca

SEQ ID NO: 742591 - RNA, 21 nt, Human
agcuccaggcuccugggguuc

SEQ ID NO: 742592 - RNA, 22 nt, Human
caaggcaggccaguuucaaggc

SEQ ID NO: 742593 - RNA, 22 nt, Human
gcauuugaaaugcaagaaagug

SEQ ID NO: 742594 - RNA, 22 nt, Human
ugggacagagugagcuuuggcc

SEQ ID NO: 742595 - RNA, 21 nt, Human
gucagcagauccagcacuugu

SEQ ID NO: 742596 - RNA, 22 nt, Human
gggucucucaugcaguugcugu

SEQ ID NO: 742597 - RNA, 20 nt, Human
agguccugguucucugggau

SEQ ID NO: 742598 - RNA, 22 nt, Human
cuucugugcuucacaguugcca

SEQ ID NO: 742599 - RNA, 22 nt, Human
gcuccugcaggacccaggagac

SEQ ID NO: 742600 - RNA, 22 nt, Human
cagcugccccgcuggcugacca

SEQ ID NO: 742601 - RNA, 22 nt, Human
gcagaggagugauuaugccgug

SEQ ID NO: 742602 - RNA, 22 nt, Human
cuuucuuugcagugagccagag

SEQ ID NO: 742603 - RNA, 22 nt, Human
gaauggaaacugggagauggcc

SEQ ID NO: 742604 - RNA, 22 nt, Human
cugguggggaguccuggucucc

SEQ ID NO: 742605 - RNA, 22 nt, Human
cagaaauguucuaaugauucag

SEQ ID NO: 742606 - RNA, 22 nt, Human
gagggcuguggggcaugaccag

SEQ ID NO: 742607 - RNA, 18 nt, Human
agaauugcugcuucuucu

SEQ ID NO: 742608 - RNA, 22 nt, Human
cgacgggcucgguccgcuuccu

SEQ ID NO: 742609 - RNA, 22 nt, Human
aggccagacuuuggccaaaucc

SEQ ID NO: 742610 - RNA, 22 nt, Human
ucugaaauagaagugucuuucu

SEQ ID NO: 742611 - RNA, 22 nt, Human
aucaguaaauauucauugugca

SEQ ID NO: 742612 - RNA, 22 nt, Human
caaauagacuucaaucucuuga

SEQ ID NO: 742613 - RNA, 22 nt, Human
gcgagaaacuaagugcccuuug

SEQ ID NO: 742614 - RNA, 22 nt, Human
acagcagggguggaauaaacgu

SEQ ID NO: 742615 - RNA, 22 nt, Human
accagcuccaggccccugcugg

SEQ ID NO: 742616 - RNA, 22 nt, Human
uucagcacaagacuagacaggu

SEQ ID NO: 742617 - RNA, 22 nt, Human
gcucucuugacagcuugcuguu

SEQ ID NO: 742618 - RNA, 22 nt, Human
cuggaauugcauaauauguccu

SEQ ID NO: 742619 - RNA, 18 nt, Human
uggagccagcucuaggau

SEQ ID NO: 742620 - RNA, 22 nt, Human
gcauggcagugaggauggugcu

SEQ ID NO: 742621 - RNA, 22 nt, Human
aacaaugcugaacugaggaaag

SEQ ID NO: 742622 - RNA, 22 nt, Human
cuccuggggcacuuagaagcaa

SEQ ID NO: 742623 - RNA, 22 nt, Human
gugaggauacuuaagagaacac

SEQ ID NO: 742624 - RNA, 22 nt, Human
gggaggagugaagauucaccug

SEQ ID NO: 742625 - RNA, 20 nt, Human
ugaaaggugggaauuguggg

SEQ ID NO: 742626 - RNA, 22 nt, Human
uuccagucuaguaccuggaugc

SEQ ID NO: 742627 - RNA, 22 nt, Human
agaaugugugauugaagcucuu

SEQ ID NO: 742628 - RNA, 22 nt, Human
uugaggaguguuuagggugagg

SEQ ID NO: 742629 - RNA, 22 nt, Human
ucugguaaccuuuaucccuccu

SEQ ID NO: 742630 - RNA, 22 nt, Human
aaacagcuacuucuguauaaug

SEQ ID NO: 742631 - RNA, 22 nt, Human
agaugcugugaggaagcuagga

SEQ ID NO: 742632 - RNA, 22 nt, Human
agagauuacagcaggguccagc

SEQ ID NO: 742633 - RNA, 22 nt, Human
aaacauugagcacuugcuauuu

SEQ ID NO: 742634 - RNA, 22 nt, Human
ccugagcuuacaauuuaagaac

SEQ ID NO: 742635 - RNA, 22 nt, Human
agaguccagaaaacagugugcu

SEQ ID NO: 742636 - RNA, 22 nt, Human
caugcuggguaaagguggugaa

SEQ ID NO: 742637 - RNA, 22 nt, Human
gcaccugggguacacagcuaca

SEQ ID NO: 742638 - RNA, 22 nt, Human
agcacacaguauuagccauugu

SEQ ID NO: 742639 - RNA, 22 nt, Human
gccuccuggguucaugccauuc

SEQ ID NO: 742640 - RNA, 22 nt, Human
ggcugagaggacgucgggcuca

SEQ ID NO: 742641 - RNA, 22 nt, Human
agaauauucaucuguauucuua

SEQ ID NO: 742642 - RNA, 22 nt, Human
uucaaacucugaguaguucugc

SEQ ID NO: 742643 - RNA, 22 nt, Human
ggacacuuugaguugaaggggu

SEQ ID NO: 742644 - RNA, 22 nt, Human
cucagaggaggcagggugugcc

SEQ ID NO: 742645 - RNA, 22 nt, Human
acauauguauauguacacaguc

SEQ ID NO: 742646 - RNA, 22 nt, Human
uugaaacugucagcuuuuacgc

SEQ ID NO: 742647 - RNA, 22 nt, Human
guauuucuagaaaaugcagauu

SEQ ID NO: 742648 - RNA, 22 nt, Human
ucuucugugagaauucaagcaa

SEQ ID NO: 742649 - RNA, 22 nt, Human
gguggccauucuaccgccuucu

SEQ ID NO: 742650 - RNA, 22 nt, Human
gcagcuggacccacacggcuua

SEQ ID NO: 742651 - RNA, 22 nt, Human
auucuaauuaguucuacauguu

SEQ ID NO: 742652 - RNA, 22 nt, Human
gggagccuugggagugccagcc

SEQ ID NO: 742653 - RNA, 18 nt, Human
uaacaucggcuaugcauc

SEQ ID NO: 742654 - RNA, 22 nt, Human
aaugauuuggcaaaggaaucca

SEQ ID NO: 742655 - RNA, 22 nt, Human
aaaaguauuuugagcacuuuau

SEQ ID NO: 742656 - RNA, 22 nt, Human
gccaccucucucuugacucgag

SEQ ID NO: 742657 - RNA, 22 nt, Human
ggaaaacuguauuugaauaacu

SEQ ID NO: 742658 - RNA, 22 nt, Human
uagugcacacgcauguagcagu

SEQ ID NO: 742659 - RNA, 22 nt, Human
uuucaucuuauuugucuacauc

SEQ ID NO: 742660 - RNA, 19 nt, Human
ugugggcaagggauggcag

SEQ ID NO: 742661 - RNA, 22 nt, Human
ucuggagcaacagagcaggaca

SEQ ID NO: 742662 - RNA, 21 nt, Human
uggccaaacuggagcauuuga

SEQ ID NO: 742663 - RNA, 22 nt, Human
uggccuggcugcccugucugga

SEQ ID NO: 742664 - RNA, 22 nt, Human
cuucugugauuugguuaggaua

SEQ ID NO: 742665 - RNA, 22 nt, Human
uaaaaucauucuggugucagua

SEQ ID NO: 742666 - RNA, 22 nt, Human
auucugaggacagagucuagca

SEQ ID NO: 742667 - RNA, 22 nt, Human
uguuuacuugagguggaaacaa

SEQ ID NO: 742668 - RNA, 18 nt, Human
aacaugcauuagaacugc

SEQ ID NO: 742669 - RNA, 17 nt, Human
gccugcaggcccgcaga

SEQ ID NO: 742670 - RNA, 22 nt, Human
aggugucuucagggugagacag

SEQ ID NO: 742671 - RNA, 22 nt, Human
gaagucagaaaagaauuaggga

SEQ ID NO: 742672 - RNA, 22 nt, Human
uauacagucuuuugcuauauuc

SEQ ID NO: 742673 - RNA, 22 nt, Human
ugccuguccugaggaugagggu

SEQ ID NO: 742674 - RNA, 22 nt, Human
gauuaguauccuuauuaagaga

SEQ ID NO: 742675 - RNA, 22 nt, Human
ugagucugcuccugguagcaga

SEQ ID NO: 742676 - RNA, 22 nt, Human
augcacuuucuagagauucuga

SEQ ID NO: 742677 - RNA, 20 nt, Human
cuggacuugcugcucaccug

SEQ ID NO: 742678 - RNA, 22 nt, Human
uucauaaugagguccuagaggc

SEQ ID NO: 742679 - RNA, 22 nt, Human
agcugggaugauaaccucaguc

SEQ ID NO: 742680 - RNA, 17 nt, Human
ucaauacacugcuuuua

SEQ ID NO: 742681 - RNA, 22 nt, Human
uggcuccacucuccaggaguuu

SEQ ID NO: 742682 - RNA, 22 nt, Human
augcacaggacagccucuacuc

SEQ ID NO: 742683 - RNA, 22 nt, Human
ugugcucuaccucagugucauu

SEQ ID NO: 742684 - RNA, 22 nt, Human
uagaagcacagccugauggaca

SEQ ID NO: 742685 - RNA, 23 nt, Human
uuuaaaaguuguaauguaggcuu

SEQ ID NO: 742686 - RNA, 22 nt, Human
gacaacacauguaugccacucu

SEQ ID NO: 742687 - RNA, 20 nt, Human
uggauucuggagcugcccuc

SEQ ID NO: 742688 - RNA, 22 nt, Human
uccugggugugauauucauaga

SEQ ID NO: 742689 - RNA, 22 nt, Human
uuuuaucugcuucauuaguuga

SEQ ID NO: 742690 - RNA, 21 nt, Human
aacugcaaaucuuagacugca

SEQ ID NO: 742691 - RNA, 22 nt, Human
gcaccugcaggaugagccaggg

SEQ ID NO: 742692 - RNA, 22 nt, Human
uucuggagucccacagccaggg

SEQ ID NO: 742693 - RNA, 22 nt, Human
guaacacagaaaugaaauucca

SEQ ID NO: 742694 - RNA, 22 nt, Human
ucagaucauggaucuauuacuu

SEQ ID NO: 742695 - RNA, 21 nt, Human
aaauuuucuuggcuguagugu

SEQ ID NO: 742696 - RNA, 22 nt, Human
gcucagagaugucugcugccuu

SEQ ID NO: 742697 - RNA, 22 nt, Human
agcuaagauuuauuaaaggccc

SEQ ID NO: 742698 - RNA, 19 nt, Human
ucaugcauuucuaagugca

SEQ ID NO: 742699 - RNA, 22 nt, Human
aaguacagccagcacccagacu

SEQ ID NO: 742700 - RNA, 22 nt, Human
cugagcaccuguuauagguuag

SEQ ID NO: 742701 - RNA, 22 nt, Human
accaggcccauguggauuacua

SEQ ID NO: 742702 - RNA, 22 nt, Human
ugccucugaggaagauuguguu

SEQ ID NO: 742703 - RNA, 22 nt, Human
ucaaacuguucagaacuccuuu

SEQ ID NO: 742704 - RNA, 22 nt, Human
ccaggaagccuuuuucuuugac

SEQ ID NO: 742705 - RNA, 18 nt, Human
aagaacugagguccuaga

SEQ ID NO: 742706 - RNA, 22 nt, Human
aggugcaugaugcagagugcag

SEQ ID NO: 742707 - RNA, 22 nt, Human
ugaagcaggaaacuucuuguuu

SEQ ID NO: 742708 - RNA, 22 nt, Human
guggccuuuccugaagaaauga

SEQ ID NO: 742709 - RNA, 22 nt, Human
uuugaaaguucuucugacacua

SEQ ID NO: 742710 - RNA, 22 nt, Human
gccagcaguccugcugugugcc

SEQ ID NO: 742711 - RNA, 22 nt, Human
uuguaugaguaugguguauagg

SEQ ID NO: 742712 - RNA, 22 nt, Human
cagacaaggccaucuuucauuu

SEQ ID NO: 742713 - RNA, 22 nt, Human
acuuuaucaggaaucacacagc

SEQ ID NO: 742714 - RNA, 22 nt, Human
agaacaggcaguugguuggauu

SEQ ID NO: 742715 - RNA, 20 nt, Human
cccucugcuacacugggagc

SEQ ID NO: 742716 - RNA, 22 nt, Human
ugccuggauacucauuaauuuc

SEQ ID NO: 742717 - RNA, 22 nt, Human
uuagaaaauggaggugggaggg

SEQ ID NO: 742718 - RNA, 22 nt, Human
gcuucugucuuagcuaccuccc

SEQ ID NO: 742719 - RNA, 22 nt, Human
caucucuugccaaaguuugacc

SEQ ID NO: 742720 - RNA, 22 nt, Human
uucagaguacacagagaucuuc

SEQ ID NO: 742721 - RNA, 21 nt, Human
aaucauacaaaacaugucagg

SEQ ID NO: 742722 - RNA, 22 nt, Human
aaaaguauccacagcucaggag

SEQ ID NO: 742723 - RNA, 23 nt, Human
uggccugcagaguuucugcuggg

SEQ ID NO: 742724 - RNA, 22 nt, Human
cauucaaaggcauguccuauuu

SEQ ID NO: 742725 - RNA, 22 nt, Human
uguggcaggcuaggcuuuuugg

SEQ ID NO: 742726 - RNA, 22 nt, Human
uaggaaauaaauacuuaugguu

SEQ ID NO: 742727 - RNA, 22 nt, Human
aauggguugaacaucaaggucu

SEQ ID NO: 742728 - RNA, 22 nt, Human
gauacaaauucaugucugaauu

SEQ ID NO: 742729 - RNA, 22 nt, Human
cuucuuuacuuucuagaaauaa

SEQ ID NO: 742730 - RNA, 22 nt, Human
gcccugugcgacucuagagguu

SEQ ID NO: 742731 - RNA, 22 nt, Human
ggugagagucuuguggucccag

SEQ ID NO: 742732 - RNA, 22 nt, Human
cuuggggacacagagcccaggg

SEQ ID NO: 742733 - RNA, 22 nt, Human
cuucugagggccuuugcuucca

SEQ ID NO: 742734 - RNA, 22 nt, Human
gguccuggaugagacagguagu

SEQ ID NO: 742735 - RNA, 22 nt, Human
guaggcagauaggagugcagcc

SEQ ID NO: 742736 - RNA, 22 nt, Human
cuuuguauucauccguaauaau

SEQ ID NO: 742737 - RNA, 22 nt, Human
acagcagcaauagcagugacau

SEQ ID NO: 742738 - RNA, 22 nt, Human
cuugcacaggaucugaaguggg

SEQ ID NO: 742739 - RNA, 22 nt, Human
agggagaguagauaucaggugu

SEQ ID NO: 742740 - RNA, 22 nt, Human
gagaacuaaucaugcauggagu

SEQ ID NO: 742741 - RNA, 22 nt, Human
cccccagaugcgagccauagcc

SEQ ID NO: 742742 - RNA, 22 nt, Human
uaucauuauacagacguauaca

SEQ ID NO: 742743 - RNA, 18 nt, Human
agcuugccucaagcuuuu

SEQ ID NO: 742744 - RNA, 22 nt, Human
uuacauggauguaaaaaaguua

SEQ ID NO: 742745 - RNA, 22 nt, Human
agcaguguucuaaucuggcuag

SEQ ID NO: 742746 - RNA, 22 nt, Human
ucucacccaacgugcaaugagu

SEQ ID NO: 742747 - RNA, 22 nt, Human
guggccagaggucccauguguc

SEQ ID NO: 742748 - RNA, 22 nt, Human
auguaacuucugugaaucugac

SEQ ID NO: 742749 - RNA, 22 nt, Human
cagcccuggugagguuggcuau

SEQ ID NO: 742750 - RNA, 22 nt, Human
ggaggaccccagcagcucccca

SEQ ID NO: 742751 - RNA, 22 nt, Human
ugugaccucaucuuaacuggaa

SEQ ID NO: 742752 - RNA, 22 nt, Human
acauauuggcuuagcucuguga

SEQ ID NO: 742753 - RNA, 22 nt, Human
gcagggacaucuucagaucacu

SEQ ID NO: 742754 - RNA, 22 nt, Human
cuccuccagcucucccuggggg

SEQ ID NO: 742755 - RNA, 22 nt, Human
ucucaugccuggaauuaucauu

SEQ ID NO: 742756 - RNA, 20 nt, Human
ugggccugagccugugggcu

SEQ ID NO: 742757 - RNA, 22 nt, Human
ggucaguguacacaugugcagg

SEQ ID NO: 742758 - RNA, 21 nt, Human
agcggcagacccugcauuuga

SEQ ID NO: 742759 - RNA, 22 nt, Human
cuccaggcccacggccgcggcc

SEQ ID NO: 742760 - RNA, 22 nt, Human
gggcuuuaaucuuguuaacuag

SEQ ID NO: 742761 - RNA, 22 nt, Human
acugggccuugugugucucauc

SEQ ID NO: 742762 - RNA, 22 nt, Human
gucagcuaugucuguuguugag

SEQ ID NO: 742763 - RNA, 22 nt, Human
ucaugucagcuguugaugugca

SEQ ID NO: 742764 - RNA, 22 nt, Human
ucacauuaggaaguaauguugu

SEQ ID NO: 742765 - RNA, 22 nt, Human
gcagagauaaguagacaggaug

SEQ ID NO: 742766 - RNA, 22 nt, Human
cgugucaucugagccuugggcg

SEQ ID NO: 742767 - RNA, 22 nt, Human
gccugggagauuaauuaggaag

SEQ ID NO: 742768 - RNA, 22 nt, Human
uuauuuggcaaugcuucaccau

SEQ ID NO: 742769 - RNA, 22 nt, Human
guacacauugucuguuuacuuc

SEQ ID NO: 742770 - RNA, 22 nt, Human
acccugagggaugagaguugca

SEQ ID NO: 742771 - RNA, 22 nt, Human
aggcucugugaugugccaggca

SEQ ID NO: 742772 - RNA, 22 nt, Human
gguggagcgcagggugcuggcg

SEQ ID NO: 742773 - RNA, 22 nt, Human
aacugaggucuccagugcagaa

SEQ ID NO: 742774 - RNA, 22 nt, Human
uuauucuguuugccgaccagua

SEQ ID NO: 742775 - RNA, 22 nt, Human
ccugggggccaggaagguguga

SEQ ID NO: 742776 - RNA, 22 nt, Human
agguggagugaaggaaaggcag

SEQ ID NO: 742777 - RNA, 19 nt, Human
cugagcaggcagguaggau

SEQ ID NO: 742778 - RNA, 22 nt, Human
cagcaggggaacugugggccag

SEQ ID NO: 742779 - RNA, 22 nt, Human
gcccuggagagggauauggcau

SEQ ID NO: 742780 - RNA, 22 nt, Human
cuucaugacccauaaaaauuua

SEQ ID NO: 742781 - RNA, 22 nt, Human
ugcuggcugggcugcuggagac

SEQ ID NO: 742782 - RNA, 22 nt, Human
ggggaugguggcauuuguaaaa

SEQ ID NO: 742783 - RNA, 22 nt, Human
gccugggugcccaaugaugaga

SEQ ID NO: 742784 - RNA, 22 nt, Human
cauguauugaagugugcaucug

SEQ ID NO: 742785 - RNA, 22 nt, Human
cauccaggcaccacaaccagcu

SEQ ID NO: 742786 - RNA, 21 nt, Human
ucucuuucuggaagcuucccu

SEQ ID NO: 742787 - RNA, 21 nt, Human
acuuucuguggguucaagcau

SEQ ID NO: 742788 - RNA, 22 nt, Human
ucuguuggcuugagauuuaauu

SEQ ID NO: 742789 - RNA, 23 nt, Human
gcaguguuugcuucaucuuaucc

SEQ ID NO: 742790 - RNA, 22 nt, Human
auguguauuaccucgauuguga

SEQ ID NO: 742791 - RNA, 22 nt, Human
auggaagacuaacagaaacaug

SEQ ID NO: 742792 - RNA, 22 nt, Human
aagcugauucuaaaauuuauua

SEQ ID NO: 742793 - RNA, 22 nt, Human
agcaguggcuggauggugugcu

SEQ ID NO: 742794 - RNA, 22 nt, Human
ucacauugccgucugugcacuu

SEQ ID NO: 742795 - RNA, 22 nt, Human
ccuggcuggauggagccccugg

SEQ ID NO: 742796 - RNA, 22 nt, Human
gcugcccucucuggccccacac

SEQ ID NO: 742797 - RNA, 22 nt, Human
uccuccagcaggacugaggccc

SEQ ID NO: 742798 - RNA, 22 nt, Human
aggaauuuucacaguuggguau

SEQ ID NO: 742799 - RNA, 22 nt, Human
gcugccagggaggugguggagg

SEQ ID NO: 742800 - RNA, 22 nt, Human
cuucaugaguguacaaccugug

SEQ ID NO: 742801 - RNA, 22 nt, Human
agcuggccuuagugagcaccug

SEQ ID NO: 742802 - RNA, 22 nt, Human
uguguguguuccuccucagcua

SEQ ID NO: 742803 - RNA, 22 nt, Human
gagccuggggacccuccugagu

SEQ ID NO: 742804 - RNA, 22 nt, Human
ucagaagcagauauuucaaaau

SEQ ID NO: 742805 - RNA, 21 nt, Human
ccugggagaucagcugccuuc

SEQ ID NO: 742806 - RNA, 22 nt, Human
cccagagcauaacguaucuuga

SEQ ID NO: 742807 - RNA, 22 nt, Human
aggcugagaaagugggaagaug

SEQ ID NO: 742808 - RNA, 22 nt, Human
cuggcugucuuggaggaaggag

SEQ ID NO: 742809 - RNA, 22 nt, Human
aaagcaauggcacaugauggua

SEQ ID NO: 742810 - RNA, 22 nt, Human
cagggagcuggcuggcugugcc

SEQ ID NO: 742811 - RNA, 20 nt, Human
uggccaccacuguauaucaa

SEQ ID NO: 742812 - RNA, 20 nt, Human
uuugcaggaaggaaauaggu

SEQ ID NO: 742813 - RNA, 22 nt, Human
aacagaacccgagugugaaucu

SEQ ID NO: 742814 - RNA, 22 nt, Human
uguugcgaugaagagcuucacg

SEQ ID NO: 742815 - RNA, 22 nt, Human
ugagcccaggaguuggaggcug

SEQ ID NO: 742816 - RNA, 22 nt, Human
gugaugucagcaagaauaggaa

SEQ ID NO: 742817 - RNA, 22 nt, Human
auuugcuuccuaauacucauau

SEQ ID NO: 742818 - RNA, 19 nt, Human
ugaaacaaacuuaaaagga

SEQ ID NO: 742819 - RNA, 22 nt, Human
guccagagaguaaaggggguaa

SEQ ID NO: 742820 - RNA, 22 nt, Human
uacauucagagaaaguuuccau

SEQ ID NO: 742821 - RNA, 19 nt, Human
cucugggcugcaucuuggu

SEQ ID NO: 742822 - RNA, 22 nt, Human
uggcagauguggcauagagcau

SEQ ID NO: 742823 - RNA, 22 nt, Human
acauuauaguugcuacagagua

SEQ ID NO: 742824 - RNA, 21 nt, Human
cagaggccuaucacagacucc

SEQ ID NO: 742825 - RNA, 22 nt, Human
gggccugcagguucugagaggc

SEQ ID NO: 742826 - RNA, 22 nt, Human
acucucugguauuggcaaguuu

SEQ ID NO: 742827 - RNA, 22 nt, Human
auuaggauguuccuaugcacau

SEQ ID NO: 742828 - RNA, 22 nt, Human
acaacuuuguagcaauuccacg

SEQ ID NO: 742829 - RNA, 22 nt, Human
uuucaaauagaaucuuuccaaa

SEQ ID NO: 742830 - RNA, 22 nt, Human
auauucuauaagcaguuggaag

SEQ ID NO: 742831 - RNA, 22 nt, Human
cugcuuccugcugggauacuga

SEQ ID NO: 742832 - RNA, 22 nt, Human
gccuggcaggccugggccagca

SEQ ID NO: 742833 - RNA, 22 nt, Human
uaacuuuuacuuaccaucugag

SEQ ID NO: 742834 - RNA, 22 nt, Human
aauuuguacaaaauguuuauaa

SEQ ID NO: 742835 - RNA, 22 nt, Human
gcuggaauuggacccagggcuc

SEQ ID NO: 742836 - RNA, 22 nt, Human
ugaggggcagagagguguccag

SEQ ID NO: 742837 - RNA, 22 nt, Human
auggacagugugucuguuucca

SEQ ID NO: 742838 - RNA, 22 nt, Human
aaguuucauuguucauguaaca

SEQ ID NO: 742839 - RNA, 22 nt, Human
ugggccaccugcucuguuucua

SEQ ID NO: 742840 - RNA, 22 nt, Human
agucucugucguagaucagcgu

SEQ ID NO: 742841 - RNA, 22 nt, Human
ccuggcacagagcgguggucac

SEQ ID NO: 742842 - RNA, 22 nt, Human
aguaaugugccugaaauacuug

SEQ ID NO: 742843 - RNA, 22 nt, Human
uucaguccucacaaccucacua

SEQ ID NO: 742844 - RNA, 22 nt, Human
gcuguugcaaucaaggccaugg

SEQ ID NO: 742845 - RNA, 19 nt, Human
agcagcuguagauagacac

SEQ ID NO: 742846 - RNA, 20 nt, Human
gcacaugcaacuuuuauuua

SEQ ID NO: 742847 - RNA, 22 nt, Human
guggaacagccugugcaaaccu

SEQ ID NO: 742848 - RNA, 22 nt, Human
uaguggaggguguagcugcugg

SEQ ID NO: 742849 - RNA, 22 nt, Human
auggaagacagauaaggcagaa

SEQ ID NO: 742850 - RNA, 22 nt, Human
cugcagauuuggugucugguga

SEQ ID NO: 742851 - RNA, 22 nt, Human
augcagaagaaaccauggcuuc

SEQ ID NO: 742852 - RNA, 22 nt, Human
aucugcuuuugagaauuuacuu

SEQ ID NO: 742853 - RNA, 20 nt, Human
uuucugugaggacuguacug

SEQ ID NO: 742854 - RNA, 22 nt, Human
uucacaguuugcugggacagga

SEQ ID NO: 742855 - RNA, 22 nt, Human
guuaaggaucuugagaugagga

SEQ ID NO: 742856 - RNA, 22 nt, Human
agccugccugugaggcuuugag

SEQ ID NO: 742857 - RNA, 22 nt, Human
aacaguuuggguagguauguag

SEQ ID NO: 742858 - RNA, 22 nt, Human
ggagucugcucccagacaugau

SEQ ID NO: 742859 - RNA, 22 nt, Human
aauuccacagcugcacagaggu

SEQ ID NO: 742860 - RNA, 23 nt, Human
ugcugcccgcuuggcacgcuccc

SEQ ID NO: 742861 - RNA, 22 nt, Human
uccagggauguccuguagcacu

SEQ ID NO: 742862 - RNA, 22 nt, Human
uccugaggaaaguucaugaaug

SEQ ID NO: 742863 - RNA, 21 nt, Human
acacauuaugagcauagacuc

SEQ ID NO: 742864 - RNA, 22 nt, Human
uucauugcauuccagccugggu

SEQ ID NO: 742865 - RNA, 22 nt, Human
uaaaggcaguaauuccugaguu

SEQ ID NO: 742866 - RNA, 22 nt, Human
gaaagacauaguugcaagaugg

SEQ ID NO: 742867 - RNA, 23 nt, Human
gcagagguuauguuuuuuaggcu

SEQ ID NO: 742868 - RNA, 22 nt, Human
gucuucugaucugguuagccau

SEQ ID NO: 742869 - RNA, 19 nt, Human
aggcuuggcuagauuuacu

SEQ ID NO: 742870 - RNA, 22 nt, Human
agagucaguuagcgaauacuua

SEQ ID NO: 742871 - RNA, 22 nt, Human
auuagacaucauaugauucagc

SEQ ID NO: 742872 - RNA, 22 nt, Human
agucaguguagaaagcccaggc

SEQ ID NO: 742873 - RNA, 22 nt, Human
caguggcgugaucucugcucac

SEQ ID NO: 742874 - RNA, 22 nt, Human
uagauacauuuuucuuuccugu

SEQ ID NO: 742875 - RNA, 22 nt, Human
aaagugcugagauuacaagcgu

SEQ ID NO: 742876 - RNA, 22 nt, Human
aaggcacagaggcagggcacuu

SEQ ID NO: 742877 - RNA, 22 nt, Human
uggagcagcuaagccucugaga

SEQ ID NO: 742878 - RNA, 22 nt, Human
cagggcuucgauggauggaugg

SEQ ID NO: 742879 - RNA, 22 nt, Human
accagggccgcgggcgacuagc

SEQ ID NO: 742880 - RNA, 22 nt, Human
aauauaguucuagaaauauuuu

SEQ ID NO: 742881 - RNA, 22 nt, Human
augaacaauaaaauagaucaca

SEQ ID NO: 742882 - RNA, 22 nt, Human
uauguacaucguugaauucaaa

SEQ ID NO: 742883 - RNA, 22 nt, Human
uaucucuguaaaagaaaucaca

SEQ ID NO: 742884 - RNA, 22 nt, Human
acagagcuaaauuucaauccca

SEQ ID NO: 742885 - RNA, 19 nt, Human
augucuggguaacagcugc

SEQ ID NO: 742886 - RNA, 22 nt, Human
uagaggggaaaaugcguauuaa

SEQ ID NO: 742887 - RNA, 22 nt, Human
aagacacaauguagcccagcac

SEQ ID NO: 742888 - RNA, 22 nt, Human
cacaggagugcugcuauuguug

SEQ ID NO: 742889 - RNA, 22 nt, Human
guguguguacucuguauauaaa

SEQ ID NO: 742890 - RNA, 22 nt, Human
gaagucugcugcucaggaguuu

SEQ ID NO: 742891 - RNA, 22 nt, Human
ugugugugggcggaacggcccc

SEQ ID NO: 742892 - RNA, 22 nt, Human
guucagcaaguacucaguccac

SEQ ID NO: 742893 - RNA, 22 nt, Human
augauguugguuuaauuugagu

SEQ ID NO: 742894 - RNA, 22 nt, Human
ccugacucuggccaggccagcu

SEQ ID NO: 742895 - RNA, 22 nt, Human
caaagcuggaaaaggaggcugg

SEQ ID NO: 742896 - RNA, 22 nt, Human
gaggggcagaaugugaucaggg

SEQ ID NO: 742897 - RNA, 22 nt, Human
gagaauuagggcguaauucaga

SEQ ID NO: 742898 - RNA, 22 nt, Human
ucucaguggguuaaaagagaag

SEQ ID NO: 742899 - RNA, 22 nt, Human
cuggagccugcaguuuucacuu

SEQ ID NO: 742900 - RNA, 22 nt, Human
uugcuuccucugugcaauccuc

SEQ ID NO: 742901 - RNA, 22 nt, Human
ggaagcuguugugagugcagca

SEQ ID NO: 742902 - RNA, 22 nt, Human
ccaggcucagcgcgcacgucug

SEQ ID NO: 742903 - RNA, 22 nt, Human
guuaaggcugagcaggacacug

SEQ ID NO: 742904 - RNA, 22 nt, Human
ugcaggagccuuggacuugaaa

SEQ ID NO: 742905 - RNA, 22 nt, Human
gcugaaaugaaaacacaggucg

SEQ ID NO: 742906 - RNA, 22 nt, Human
auuccucauuuguugagaacca

SEQ ID NO: 742907 - RNA, 22 nt, Human
guuuaugcacuugguuuguguc

SEQ ID NO: 742908 - RNA, 18 nt, Human
aaaauaacaaaguuggcu

SEQ ID NO: 742909 - RNA, 22 nt, Human
aauagauucaugguuaagagca

SEQ ID NO: 742910 - RNA, 22 nt, Human
gcuggccuugugucugaggaag

SEQ ID NO: 742911 - RNA, 22 nt, Human
aacauccccuucaugucaugau

SEQ ID NO: 742912 - RNA, 22 nt, Human
uucuucuguuggcagagcauac

SEQ ID NO: 742913 - RNA, 22 nt, Human
cugggguggugcaggccucaug

SEQ ID NO: 742914 - RNA, 22 nt, Human
agggaaggaggccauguguccc

SEQ ID NO: 742915 - RNA, 22 nt, Human
cuucucuaucuuuggcacauca

SEQ ID NO: 742916 - RNA, 22 nt, Human
uauguuuuucaagugcacacua

SEQ ID NO: 742917 - RNA, 22 nt, Human
uucagaaugugaccuuauuugg

SEQ ID NO: 742918 - RNA, 22 nt, Human
gaccuggaagaacugaggccuu

SEQ ID NO: 742919 - RNA, 22 nt, Human
aacauugaacuuggcacaccca

SEQ ID NO: 742920 - RNA, 22 nt, Human
auucaaguccagcuucucuaca

SEQ ID NO: 742921 - RNA, 22 nt, Human
acaggucagauaaaggcuggug

SEQ ID NO: 742922 - RNA, 22 nt, Human
ccuuggagcggucagcacuggu

SEQ ID NO: 742923 - RNA, 22 nt, Human
uagcacaagaaguacacauaga

SEQ ID NO: 742924 - RNA, 17 nt, Human
cugucugcgcaugaggu

SEQ ID NO: 742925 - RNA, 22 nt, Human
gcaauguuguguuggcauucua

SEQ ID NO: 742926 - RNA, 22 nt, Human
aauaauuauuugagagcagacc

SEQ ID NO: 742927 - RNA, 22 nt, Human
aaauagcuacaugaucucuagg

SEQ ID NO: 742928 - RNA, 22 nt, Human
cuuauauuugucaacuuuacaa

SEQ ID NO: 742929 - RNA, 22 nt, Human
auauguuacucuuucaagcaga

SEQ ID NO: 742930 - RNA, 22 nt, Human
ucuaacuugugaguauagauga

SEQ ID NO: 742931 - RNA, 22 nt, Human
aagggcuccaagagguagcugg

SEQ ID NO: 742932 - RNA, 22 nt, Human
ccaggaacaaagccccauccac

SEQ ID NO: 742933 - RNA, 22 nt, Human
uuugcuuuugugcucuaguggu

SEQ ID NO: 742934 - RNA, 22 nt, Human
ucugauguguuuaagaaagaag

SEQ ID NO: 742935 - RNA, 22 nt, Human
ggugggaugccucuggagaagu

SEQ ID NO: 742936 - RNA, 17 nt, Human
gcuguuucuccagaagu

SEQ ID NO: 742937 - RNA, 22 nt, Human
uagcugccuaugugauaagaga

SEQ ID NO: 742938 - RNA, 22 nt, Human
cacaugggcguaauguccaugg

SEQ ID NO: 742939 - RNA, 19 nt, Human
uggccaccucugcuguucu

SEQ ID NO: 742940 - RNA, 22 nt, Human
uagcacugaaucacaugcugcu

SEQ ID NO: 742941 - RNA, 22 nt, Human
uucacuaugcuuggaaacuucu

SEQ ID NO: 742942 - RNA, 22 nt, Human
uugcauugaucccagcuugggc

SEQ ID NO: 742943 - RNA, 22 nt, Human
auuggcaaugucccggcugcug

SEQ ID NO: 742944 - RNA, 22 nt, Human
ggagcggucagcuggccacacg

SEQ ID NO: 742945 - RNA, 22 nt, Human
uuauuuaaaagugguaagauuc

SEQ ID NO: 742946 - RNA, 22 nt, Human
uggacaggugagugacucaggg

SEQ ID NO: 742947 - RNA, 22 nt, Human
uucuaaauuuuggaagaugcag

SEQ ID NO: 742948 - RNA, 22 nt, Human
ggugagggaguggaacgaggug

SEQ ID NO: 742949 - RNA, 16 nt, Human
gggcuggagauacagu

SEQ ID NO: 742950 - RNA, 22 nt, Human
uccugaagucacaggcucugag

SEQ ID NO: 742951 - RNA, 22 nt, Human
gaaucauuuagcucugcaugga

SEQ ID NO: 742952 - RNA, 22 nt, Human
gauggucuuugucucugauaag

SEQ ID NO: 742953 - RNA, 22 nt, Human
auucaaaagaccaugcagacuc

SEQ ID NO: 742954 - RNA, 22 nt, Human
agcagcaaaguauugggcaaga

SEQ ID NO: 742955 - RNA, 22 nt, Human
aaguuuuaugggaagaugugca

SEQ ID NO: 742956 - RNA, 22 nt, Human
uaacacuguccaaagaauucca

SEQ ID NO: 742957 - RNA, 18 nt, Human
ucauuuugucugccuuug

SEQ ID NO: 742958 - RNA, 22 nt, Human
gcuucuggagucuucagaggaa

SEQ ID NO: 742959 - RNA, 22 nt, Human
agggcuggcaagggauugaaau

SEQ ID NO: 742960 - RNA, 20 nt, Human
uuucagagugucuuuccauu

SEQ ID NO: 742961 - RNA, 22 nt, Human
caaugcuaucaugucagagaua

SEQ ID NO: 742962 - RNA, 22 nt, Human
cuuauauuuuaggaacagacaa

SEQ ID NO: 742963 - RNA, 22 nt, Human
augaccaagaguccaggucaag

SEQ ID NO: 742964 - RNA, 22 nt, Human
ucccugcuuucuugugagggga

SEQ ID NO: 742965 - RNA, 22 nt, Human
aagccuucccuuuuugagcuca

SEQ ID NO: 742966 - RNA, 22 nt, Human
gcagggaccaaaagaggcagua

SEQ ID NO: 742967 - RNA, 22 nt, Human
gucugagcacccuggccuguca

SEQ ID NO: 742968 - RNA, 22 nt, Human
gcuccuggcaggcagugugugu

SEQ ID NO: 742969 - RNA, 22 nt, Human
cugaggccucuccuuggcuugu

SEQ ID NO: 742970 - RNA, 22 nt, Human
guuuccucugcugguuuucauu

SEQ ID NO: 742971 - RNA, 22 nt, Human
ccucuuuguucaggcugcuggc

SEQ ID NO: 742972 - RNA, 22 nt, Human
ucugccaugcuaacuucaguau

SEQ ID NO: 742973 - RNA, 22 nt, Human
cugggcacaguggcucacgccu

SEQ ID NO: 742974 - RNA, 22 nt, Human
uuucacuguuaggaguaugcua

SEQ ID NO: 742975 - RNA, 22 nt, Human
aaggcaccaugagaugcugguu

SEQ ID NO: 742976 - RNA, 22 nt, Human
aguucaguaguccuucauugua

SEQ ID NO: 742977 - RNA, 20 nt, Human
auguauauuacuggcuguga

SEQ ID NO: 742978 - RNA, 22 nt, Human
aagauucagccaaauuguucau

SEQ ID NO: 742979 - RNA, 22 nt, Human
cugcuuuaauuuagacaaggca

SEQ ID NO: 742980 - RNA, 21 nt, Human
agcucagccgggcacaguggc

SEQ ID NO: 742981 - RNA, 23 nt, Human
uuugaaaguaucaacucgccuga

SEQ ID NO: 742982 - RNA, 22 nt, Human
aguguuuauggaaucuuaguua

SEQ ID NO: 742983 - RNA, 22 nt, Human
ugaaggcacuugccuaggggca

SEQ ID NO: 742984 - RNA, 22 nt, Human
cucugcaugccacaugagugac

SEQ ID NO: 742985 - RNA, 22 nt, Human
gcugucuggguugagggcccug

SEQ ID NO: 742986 - RNA, 22 nt, Human
uugaggucuguguaggcagcaa

SEQ ID NO: 742987 - RNA, 22 nt, Human
uggaaggggccaggcgcggagu

SEQ ID NO: 742988 - RNA, 22 nt, Human
cagauagcaauuugggcagggg

SEQ ID NO: 742989 - RNA, 21 nt, Human
aggcagcaucugauuuauaug

SEQ ID NO: 742990 - RNA, 22 nt, Human
ucucagcucuuuuuucacagaa

SEQ ID NO: 742991 - RNA, 22 nt, Human
augcagggucuccgugugacga

SEQ ID NO: 742992 - RNA, 22 nt, Human
uugggcagugauuaguucauga

SEQ ID NO: 742993 - RNA, 22 nt, Human
ucucuuaauaaguaaauacuga

SEQ ID NO: 742994 - RNA, 22 nt, Human
gcagggacaucuuugucuagua

SEQ ID NO: 742995 - RNA, 22 nt, Human
aucagaaauugcuaccagugga

SEQ ID NO: 742996 - RNA, 22 nt, Human
uacucugcaaguugaagguggc

SEQ ID NO: 742997 - RNA, 22 nt, Human
aagcuguuuuggccuuaguuga

SEQ ID NO: 742998 - RNA, 23 nt, Human
agcugggaauuuucugaagcuuu

SEQ ID NO: 742999 - RNA, 22 nt, Human
uccugaagaggcuacacugcuu

SEQ ID NO: 743000 - RNA, 22 nt, Human
gcuuccugucccucagccauga

SEQ ID NO: 743001 - RNA, 23 nt, Human
ucuggcuccauccuuggggaucc

SEQ ID NO: 743002 - RNA, 21 nt, Human
cagaggucauccugaggacaa

SEQ ID NO: 743003 - RNA, 22 nt, Human
cuguauuagccaggugcacaag

SEQ ID NO: 743004 - RNA, 22 nt, Human
gagaucauggcuucugcugaua

SEQ ID NO: 743005 - RNA, 22 nt, Human
uggcagacacugucgaagccua

SEQ ID NO: 743006 - RNA, 22 nt, Human
auuccacuguuauaaaaugucc

SEQ ID NO: 743007 - RNA, 22 nt, Human
uggcccugacacgugguacugg

SEQ ID NO: 743008 - RNA, 22 nt, Human
gguugacagaagaaggaugaca

SEQ ID NO: 743009 - RNA, 22 nt, Human
agagucugauauuuguaccaga

SEQ ID NO: 743010 - RNA, 23 nt, Human
uaugaacugcauugcuggugugu

SEQ ID NO: 743011 - RNA, 22 nt, Human
cccagaggaggaucucggcccg

SEQ ID NO: 743012 - RNA, 22 nt, Human
ggagaugccagaauugcaaauu

SEQ ID NO: 743013 - RNA, 22 nt, Human
gcagauguaauggcuggagguc

SEQ ID NO: 743014 - RNA, 23 nt, Human
gccaggaguggguagacuaaugc

SEQ ID NO: 743015 - RNA, 22 nt, Human
aguauuucuucauaugauuacu

SEQ ID NO: 743016 - RNA, 19 nt, Human
auggaagcugggaucaaug

SEQ ID NO: 743017 - RNA, 22 nt, Human
uaacuuuaguguaugagguaag

SEQ ID NO: 743018 - RNA, 23 nt, Human
augcacaagccagcaggggacag

SEQ ID NO: 743019 - RNA, 22 nt, Human
gagaguucuaccucugaaggcg

SEQ ID NO: 743020 - RNA, 22 nt, Human
cacaguuucugaacacuuugca

SEQ ID NO: 743021 - RNA, 22 nt, Human
cuccagggagcuuggaaagacc

SEQ ID NO: 743022 - RNA, 22 nt, Human
guccugagaugucacaagguuu

SEQ ID NO: 743023 - RNA, 22 nt, Human
cuggcacagagugagcauucaa

SEQ ID NO: 743024 - RNA, 22 nt, Human
ucugggcagccucaggccaggg

SEQ ID NO: 743025 - RNA, 19 nt, Human
uggcaucuguaaaauggug

SEQ ID NO: 743026 - RNA, 22 nt, Human
acuuagcacgaacauuuacuuu

SEQ ID NO: 743027 - RNA, 22 nt, Human
ucugagugaguguaggccugac

SEQ ID NO: 743028 - RNA, 19 nt, Human
agcaccugugagagccugg

SEQ ID NO: 743029 - RNA, 23 nt, Human
ugaaggcccuggagccacgaggc

SEQ ID NO: 743030 - RNA, 22 nt, Human
caagaucaaucaauacuccuua

SEQ ID NO: 743031 - RNA, 22 nt, Human
aaaugcuuuggugcugguacag

SEQ ID NO: 743032 - RNA, 22 nt, Human
gacuacaacaauaagaacagcu

SEQ ID NO: 743033 - RNA, 22 nt, Human
agugacaaggccugaagcuccu

SEQ ID NO: 743034 - RNA, 20 nt, Human
caggccagagguuugauggc

SEQ ID NO: 743035 - RNA, 22 nt, Human
accccagggcugccagccuccu

SEQ ID NO: 743036 - RNA, 22 nt, Human
ugucaaugcuggucuugaauga

SEQ ID NO: 743037 - RNA, 22 nt, Human
uacacccacauugagcauggga

SEQ ID NO: 743038 - RNA, 22 nt, Human
aagcuuuucucuguauuaccug

SEQ ID NO: 743039 - RNA, 22 nt, Human
uccagcuggccuaacuucaggg

SEQ ID NO: 743040 - RNA, 21 nt, Human
agucccaggggugagugaugu

SEQ ID NO: 743041 - RNA, 22 nt, Human
ggauauaugcauguuaucauuu

SEQ ID NO: 743042 - RNA, 22 nt, Human
uuuauuucacucuccggauacu

SEQ ID NO: 743043 - RNA, 22 nt, Human
uauagcaauucagaauacaugu

SEQ ID NO: 743044 - RNA, 23 nt, Human
uguuacaagcaccacagguggcu

SEQ ID NO: 743045 - RNA, 22 nt, Human
cugagcagugcuuugcaguggg

SEQ ID NO: 743046 - RNA, 21 nt, Human
uuggaacaagcagcaguuugc

SEQ ID NO: 743047 - RNA, 22 nt, Human
gcccagcacuaaaagcuuugcu

SEQ ID NO: 743048 - RNA, 22 nt, Human
ucuaaacugcgagcaugccccc

SEQ ID NO: 743049 - RNA, 22 nt, Human
caugcuaaccagagacauaaag

SEQ ID NO: 743050 - RNA, 23 nt, Human
acauuacuuagccagagucucag

SEQ ID NO: 743051 - RNA, 22 nt, Human
gaggaggaaguucucuguaggc

SEQ ID NO: 743052 - RNA, 22 nt, Human
uuggugucuuuuuuauacaugu

SEQ ID NO: 743053 - RNA, 22 nt, Human
ucgcugugguuucuguacaugg

SEQ ID NO: 743054 - RNA, 22 nt, Human
ugcccugggaguuggagcugcu

SEQ ID NO: 743055 - RNA, 22 nt, Human
ugugugaauucugagcaguuua

SEQ ID NO: 743056 - RNA, 18 nt, Human
gagcugccauauuuaguu

SEQ ID NO: 743057 - RNA, 22 nt, Human
uuauuuauucauucugucuguc

SEQ ID NO: 743058 - RNA, 22 nt, Human
ucacaggcuggucuccgaggac

SEQ ID NO: 743059 - RNA, 22 nt, Human
gggcugggauggcuugaagauu

SEQ ID NO: 743060 - RNA, 22 nt, Human
aucuguguguucaggaaguccu

SEQ ID NO: 743061 - RNA, 21 nt, Human
acagaggcauacagcuuaagg

SEQ ID NO: 743062 - RNA, 22 nt, Human
acagccagaucugagagaucuu

SEQ ID NO: 743063 - RNA, 22 nt, Human
cagcugcaggaacaaaaaugug

SEQ ID NO: 743064 - RNA, 22 nt, Human
ccagauagcaggucagaagugc

SEQ ID NO: 743065 - RNA, 22 nt, Human
guggucaucuaacuaaauuuuc

SEQ ID NO: 743066 - RNA, 22 nt, Human
aagcaacucccuccucauuuuu

SEQ ID NO: 743067 - RNA, 22 nt, Human
uggagagcuccuauuugcuguc

SEQ ID NO: 743068 - RNA, 22 nt, Human
cagaggaagggugcugcgaaag

SEQ ID NO: 743069 - RNA, 22 nt, Human
aagcugcccucauucccagugc

SEQ ID NO: 743070 - RNA, 22 nt, Human
gggguugguuuaaaugcuugag

SEQ ID NO: 743071 - RNA, 22 nt, Human
agaugugguaguugaagggaag

SEQ ID NO: 743072 - RNA, 22 nt, Human
augaacaaugacuacauauuga

SEQ ID NO: 743073 - RNA, 22 nt, Human
ucugccuuccccauaaucugau

SEQ ID NO: 743074 - RNA, 22 nt, Human
ucuuuauuucugaaucccccau

SEQ ID NO: 743075 - RNA, 21 nt, Human
ggcuguguucagggcaugcgg

SEQ ID NO: 743076 - RNA, 22 nt, Human
aggcaagaacagacaugggagu

SEQ ID NO: 743077 - RNA, 22 nt, Human
ggcuuccuuucacuacccucag

SEQ ID NO: 743078 - RNA, 22 nt, Human
cuggaaauuggagaugauguuu

SEQ ID NO: 743079 - RNA, 22 nt, Human
uuuucucuauauugucugugaa

SEQ ID NO: 743080 - RNA, 19 nt, Human
uuacuuggcaaagucaguc

SEQ ID NO: 743081 - RNA, 22 nt, Human
aaucacuuugcacucuuauuug

SEQ ID NO: 743082 - RNA, 22 nt, Human
aggccucugggucuccucugac

SEQ ID NO: 743083 - RNA, 22 nt, Human
cagcccuggcgcccccagaucu

SEQ ID NO: 743084 - RNA, 23 nt, Human
aucccuucuccaguguggugagg

SEQ ID NO: 743085 - RNA, 22 nt, Human
gggcuucuauucuggcacaaga

SEQ ID NO: 743086 - RNA, 22 nt, Human
uggccacuuggcaugugugcca

SEQ ID NO: 743087 - RNA, 22 nt, Human
ugcaggugcagcgauacuguga

SEQ ID NO: 743088 - RNA, 22 nt, Human
cuagccagacucaagggccacc

SEQ ID NO: 743089 - RNA, 22 nt, Human
uucuuucugggguccuucggcu

SEQ ID NO: 743090 - RNA, 22 nt, Human
acccucugccuugagcagugcc

SEQ ID NO: 743091 - RNA, 22 nt, Human
ucuuccuaguuacauaugcaca

SEQ ID NO: 743092 - RNA, 22 nt, Human
acauccugaagucagucauuug

SEQ ID NO: 743093 - RNA, 22 nt, Human
cagacccucgggugaguuggcc

SEQ ID NO: 743094 - RNA, 23 nt, Human
caucauuguuaugggugcuacua

SEQ ID NO: 743095 - RNA, 22 nt, Human
cagucuggaggucagcuggcuu

SEQ ID NO: 743096 - RNA, 23 nt, Human
agggcccaagccuggacagcagg

SEQ ID NO: 743097 - RNA, 22 nt, Human
cagggcugguuugucgaagaaa

SEQ ID NO: 743098 - RNA, 21 nt, Human
uuuacugagcacuuacuaugu

SEQ ID NO: 743099 - RNA, 22 nt, Human
guugcuuuacagcuggugacag

SEQ ID NO: 743100 - RNA, 22 nt, Human
ucugacuuccuccacaucuguu

SEQ ID NO: 743101 - RNA, 22 nt, Human
ugauugaauucaaaugcaaucu

SEQ ID NO: 743102 - RNA, 22 nt, Human
cugccagcucaaagcgcagcua

SEQ ID NO: 743103 - RNA, 20 nt, Human
acaauacagguugugucuga

SEQ ID NO: 743104 - RNA, 22 nt, Human
cuggggcugugggagacaaggc

SEQ ID NO: 743105 - RNA, 22 nt, Human
gacaaugcauugugauugugac

SEQ ID NO: 743106 - RNA, 22 nt, Human
gcugagggauagcugcucacug

SEQ ID NO: 743107 - RNA, 22 nt, Human
auccagcacuuguucaugugaa

SEQ ID NO: 743108 - RNA, 22 nt, Human
uugaggcaaaaucaacgggaag

SEQ ID NO: 743109 - RNA, 21 nt, Human
cagcagugugucugagcuaga

SEQ ID NO: 743110 - RNA, 22 nt, Human
cguguaugugccugcauucaca

SEQ ID NO: 743111 - RNA, 22 nt, Human
aucuggcuauuucuggucgggg

SEQ ID NO: 743112 - RNA, 22 nt, Human
aagggcaggaaaagauggaugu

SEQ ID NO: 743113 - RNA, 22 nt, Human
caauguuuacuggggacccaga

SEQ ID NO: 743114 - RNA, 22 nt, Human
ggcuccugcaccugucccucug

SEQ ID NO: 743115 - RNA, 22 nt, Human
cagagcugucauuugccaguga

SEQ ID NO: 743116 - RNA, 22 nt, Human
aauuuggcagugucuugaagua

SEQ ID NO: 743117 - RNA, 22 nt, Human
agacagugcuaucccaucugug

SEQ ID NO: 743118 - RNA, 22 nt, Human
uagaaaucagguuuuuagaaag

SEQ ID NO: 743119 - RNA, 22 nt, Human
uccaggagaccagauguaggcc

SEQ ID NO: 743120 - RNA, 22 nt, Human
uagaagcaguaauagaaauagg

SEQ ID NO: 743121 - RNA, 22 nt, Human
ggcucccacccauagggcgagu

SEQ ID NO: 743122 - RNA, 22 nt, Human
gugggcagugugucaguaucuu

SEQ ID NO: 743123 - RNA, 22 nt, Human
ccaggaggcagaaguugcagug

SEQ ID NO: 743124 - RNA, 19 nt, Human
aguguuucaugugcuuuua

SEQ ID NO: 743125 - RNA, 22 nt, Human
agaaaucagaacccugaaguuc

SEQ ID NO: 743126 - RNA, 23 nt, Human
aauucaaauucagugugacuagg

SEQ ID NO: 743127 - RNA, 22 nt, Human
ccauuuuucacaagacucacuu

SEQ ID NO: 743128 - RNA, 22 nt, Human
cuaaaaauccacacuaggugaa

SEQ ID NO: 743129 - RNA, 22 nt, Human
agucagagucgccgacagucaa

SEQ ID NO: 743130 - RNA, 22 nt, Human
ugaguucuaguggcugcagauu

SEQ ID NO: 743131 - RNA, 22 nt, Human
uggggaggacgggcgccuuccu

SEQ ID NO: 743132 - RNA, 22 nt, Human
cagccaggagccucugcaacua

SEQ ID NO: 743133 - RNA, 20 nt, Human
ucuguaggcaaguuagcagg

SEQ ID NO: 743134 - RNA, 23 nt, Human
uugauacagaagaaucaguuugu

SEQ ID NO: 743135 - RNA, 22 nt, Human
uacauauuguccauaguugcuu

SEQ ID NO: 743136 - RNA, 22 nt, Human
cugcuuuaauggaaaguguuuu

SEQ ID NO: 743137 - RNA, 22 nt, Human
acacauuugcuaaaaugagcuc

SEQ ID NO: 743138 - RNA, 22 nt, Human
ggcuccucucuggccgcucccg

SEQ ID NO: 743139 - RNA, 22 nt, Human
auucauuuagguauucacuuac

SEQ ID NO: 743140 - RNA, 22 nt, Human
cugauggauggacagggguagu

SEQ ID NO: 743141 - RNA, 22 nt, Human
cacugggagucguaagacacgg

SEQ ID NO: 743142 - RNA, 22 nt, Human
gcaggcucccuugcagagcagg

SEQ ID NO: 743143 - RNA, 22 nt, Human
uuugguccuaagcugcucucua

SEQ ID NO: 743144 - RNA, 22 nt, Human
ucuauucauucaauuuagcucu

SEQ ID NO: 743145 - RNA, 22 nt, Human
uuaguguauuuucaaauguaga

SEQ ID NO: 743146 - RNA, 22 nt, Human
ccugugcucccauagcuucugu

SEQ ID NO: 743147 - RNA, 22 nt, Human
acugggccacauagaccugcug

SEQ ID NO: 743148 - RNA, 22 nt, Human
aguuuguacugaauucaauuua

SEQ ID NO: 743149 - RNA, 22 nt, Human
gaauauuuguaauuacuguuga

SEQ ID NO: 743150 - RNA, 22 nt, Human
cugucuccgcccucuugguagg

SEQ ID NO: 743151 - RNA, 22 nt, Human
cuggcccuuaggaaaacaaagu

SEQ ID NO: 743152 - RNA, 22 nt, Human
uacaaugcuguuuguuucuacu

SEQ ID NO: 743153 - RNA, 22 nt, Human
acaagagugagauuaucaugua

SEQ ID NO: 743154 - RNA, 22 nt, Human
aggcugccucuuuugagagggu

SEQ ID NO: 743155 - RNA, 22 nt, Human
cccuagggcuaagcaggacugc

SEQ ID NO: 743156 - RNA, 22 nt, Human
ugggcaucauggacagcagagg

SEQ ID NO: 743157 - RNA, 22 nt, Human
cacuguuauuacuacuauacau

SEQ ID NO: 743158 - RNA, 21 nt, Human
ugcugccaucaugcagagaug

SEQ ID NO: 743159 - RNA, 22 nt, Human
caagaugaucccugaaggcagc

SEQ ID NO: 743160 - RNA, 22 nt, Human
uaguauauuuuguugcaauuca

SEQ ID NO: 743161 - RNA, 22 nt, Human
aaacacuggcaauuucaugcac

SEQ ID NO: 743162 - RNA, 22 nt, Human
gagccaggaagaaggccuuacu

SEQ ID NO: 743163 - RNA, 22 nt, Human
agugaauuuaaaacacugagga

SEQ ID NO: 743164 - RNA, 20 nt, Human
ugcugcuuugccacuaguug

SEQ ID NO: 743165 - RNA, 22 nt, Human
cugagcagcacagggcgccagg

SEQ ID NO: 743166 - RNA, 22 nt, Human
guaaucucagcuacuugggagg

SEQ ID NO: 743167 - RNA, 22 nt, Human
cccugcagcauucucuaacugg

SEQ ID NO: 743168 - RNA, 17 nt, Human
accuggagaccaagucc

SEQ ID NO: 743169 - RNA, 22 nt, Human
gcauucaucaaaaauguuccuc

SEQ ID NO: 743170 - RNA, 23 nt, Human
agacacuguaaagaauugcaguu

SEQ ID NO: 743171 - RNA, 17 nt, Human
ugccuccagcaggguga

SEQ ID NO: 743172 - RNA, 22 nt, Human
acagcuccuaacaaaggcucuc

SEQ ID NO: 743173 - RNA, 22 nt, Human
ugagaaacauaugagagauuug

SEQ ID NO: 743174 - RNA, 22 nt, Human
uugacaaaggaauugaaucucu

SEQ ID NO: 743175 - RNA, 19 nt, Human
auacacauacguaaacuga

SEQ ID NO: 743176 - RNA, 20 nt, Human
gggaggcauuggucccucac

SEQ ID NO: 743177 - RNA, 20 nt, Human
uggcccagcacgacgaggac

SEQ ID NO: 743178 - RNA, 22 nt, Human
agaacuuaggaacaacagcuua

SEQ ID NO: 743179 - RNA, 22 nt, Human
acuuugaaacuaaaauucauua

SEQ ID NO: 743180 - RNA, 22 nt, Human
aaugacaagacauagucucuga

SEQ ID NO: 743181 - RNA, 22 nt, Human
uaauccugugcuguguaaguac

SEQ ID NO: 743182 - RNA, 22 nt, Human
ccucugugacaaacaguccugg

SEQ ID NO: 743183 - RNA, 22 nt, Human
agcuucuguucaucuuccaggc

SEQ ID NO: 743184 - RNA, 22 nt, Human
ccagcccaaacaagccgccuuc

SEQ ID NO: 743185 - RNA, 22 nt, Human
aaaauuggacguagcuacucca

SEQ ID NO: 743186 - RNA, 22 nt, Human
uuggcuucuucgcacagcagua

SEQ ID NO: 743187 - RNA, 22 nt, Human
uuugcuuguucaagauuucugu

SEQ ID NO: 743188 - RNA, 22 nt, Human
gggugggaaggcuaagggauug

SEQ ID NO: 743189 - RNA, 22 nt, Human
ugcccuggagucaguggcuauu

SEQ ID NO: 743190 - RNA, 22 nt, Human
acagauuuuauuauucagguau

SEQ ID NO: 743191 - RNA, 22 nt, Human
uguggguggagugauauuagcu

SEQ ID NO: 743192 - RNA, 22 nt, Human
aggcagcagcuugcugguugcc

SEQ ID NO: 743193 - RNA, 22 nt, Human
aagggcaggugggcauuucugg

SEQ ID NO: 743194 - RNA, 22 nt, Human
uggaaaaaacccagacucuaga

SEQ ID NO: 743195 - RNA, 22 nt, Human
ucucuggagcugcagauccagg

SEQ ID NO: 743196 - RNA, 20 nt, Human
uacaggaaucaagacugcau

SEQ ID NO: 743197 - RNA, 22 nt, Human
gcuguggccgggcccaggccgc

SEQ ID NO: 743198 - RNA, 22 nt, Human
guuuccugaugugggagaucuu

SEQ ID NO: 743199 - RNA, 22 nt, Human
aacacaaaaauucucaggggca

SEQ ID NO: 743200 - RNA, 22 nt, Human
ggccuugguucugucacagccg

SEQ ID NO: 743201 - RNA, 22 nt, Human
cuggcccuguaggaugugaguu

SEQ ID NO: 743202 - RNA, 22 nt, Human
ccuugcuguuagccuacauuau

SEQ ID NO: 743203 - RNA, 22 nt, Human
gugcaaaaguaaaugugguuuu

SEQ ID NO: 743204 - RNA, 22 nt, Human
uugggcucaggaguuugagacc

SEQ ID NO: 743205 - RNA, 22 nt, Human
ggcuggcacucuguccaguguc

SEQ ID NO: 743206 - RNA, 22 nt, Human
augcauuuuugaguaugaauga

SEQ ID NO: 743207 - RNA, 22 nt, Human
agucugugagugauguaccugc

SEQ ID NO: 743208 - RNA, 22 nt, Human
agauuguagaaacuguagcauu

SEQ ID NO: 743209 - RNA, 22 nt, Human
ugccugggcucgguagccaucg

SEQ ID NO: 743210 - RNA, 22 nt, Human
guuaagaagcuagagaugaaca

SEQ ID NO: 743211 - RNA, 22 nt, Human
uuuuuuauaucaacugaagucu

SEQ ID NO: 743212 - RNA, 22 nt, Human
ugcuggaaauauauuuguuuau

SEQ ID NO: 743213 - RNA, 22 nt, Human
gagcucccaggccccagcaagg

SEQ ID NO: 743214 - RNA, 22 nt, Human
aaggaggguucccagguccugg

SEQ ID NO: 743215 - RNA, 22 nt, Human
cugagguggcauccuagcucua

SEQ ID NO: 743216 - RNA, 22 nt, Human
ccagaagaggacacagugugga

SEQ ID NO: 743217 - RNA, 22 nt, Human
uauuuugcuuuagcugacuguu

SEQ ID NO: 743218 - RNA, 22 nt, Human
guaggaaagggagugaagggaa

SEQ ID NO: 743219 - RNA, 22 nt, Human
ugggagcagcagggagaugcgg

SEQ ID NO: 743220 - RNA, 22 nt, Human
gccagagcaucgcacccuccau

SEQ ID NO: 743221 - RNA, 21 nt, Human
gcagaugggaagagacgaggc

SEQ ID NO: 743222 - RNA, 22 nt, Human
cagcuguggagggaggaaaugc

SEQ ID NO: 743223 - RNA, 22 nt, Human
cacacugaccugaacuuagcau

SEQ ID NO: 743224 - RNA, 19 nt, Human
agcauagacuucucaggaa

SEQ ID NO: 743225 - RNA, 22 nt, Human
aggcauggauguagcagugacc

SEQ ID NO: 743226 - RNA, 22 nt, Human
ugcaggugucuccagggcaggu

SEQ ID NO: 743227 - RNA, 22 nt, Human
caggaggcagagguugcaguga

SEQ ID NO: 743228 - RNA, 22 nt, Human
cagcagguauguuuguucagca

SEQ ID NO: 743229 - RNA, 22 nt, Human
ucaccuguuggauguauacugu

SEQ ID NO: 743230 - RNA, 22 nt, Human
aagccaagaguuaacuauuugu

SEQ ID NO: 743231 - RNA, 22 nt, Human
ccuucugcucccuggccagggc

SEQ ID NO: 743232 - RNA, 22 nt, Human
acauguauugacauuauauucu

SEQ ID NO: 743233 - RNA, 22 nt, Human
gggccucucccuucucacgcau

SEQ ID NO: 743234 - RNA, 22 nt, Human
cacaggaagcaagccuggggcc

SEQ ID NO: 743235 - RNA, 22 nt, Human
cuucugugacguaugugaggac

SEQ ID NO: 743236 - RNA, 22 nt, Human
cacugagcugauagaauuccag

SEQ ID NO: 743237 - RNA, 22 nt, Human
ucacaugaagaucccucaauuu

SEQ ID NO: 743238 - RNA, 22 nt, Human
gagccuguguuuccuguagcca

SEQ ID NO: 743239 - RNA, 22 nt, Human
cacacaugcauguaagaccucu

SEQ ID NO: 743240 - RNA, 22 nt, Human
cccaaccagaaauugacagaga

SEQ ID NO: 743241 - RNA, 22 nt, Human
agugugucaguugaaagagauu

SEQ ID NO: 743242 - RNA, 22 nt, Human
ugaggaaagaaaggcaugcaug

SEQ ID NO: 743243 - RNA, 18 nt, Human
cagacacucugcucugca

SEQ ID NO: 743244 - RNA, 22 nt, Human
cuucagccucguuacuccugcg

SEQ ID NO: 743245 - RNA, 20 nt, Human
agacccucuggacugggccc

SEQ ID NO: 743246 - RNA, 22 nt, Human
agcauguaaagcucuuagcacc

SEQ ID NO: 743247 - RNA, 22 nt, Human
ucaauauauuccauguuuucuc

SEQ ID NO: 743248 - RNA, 17 nt, Human
ucugagaaaggagaauc

SEQ ID NO: 743249 - RNA, 22 nt, Human
auaagguuaggauuauaguguu

SEQ ID NO: 743250 - RNA, 22 nt, Human
agcaacaggguggucuucagaa

SEQ ID NO: 743251 - RNA, 22 nt, Human
uuaugcuaaaugaaucaaguca

SEQ ID NO: 743252 - RNA, 22 nt, Human
ucagcccagcccagcaagugca

SEQ ID NO: 743253 - RNA, 23 nt, Human
ugcaggguguuccugccuuugcu

SEQ ID NO: 743254 - RNA, 23 nt, Human
cugccugcuggggagacagaucu

SEQ ID NO: 743255 - RNA, 22 nt, Human
caggcccaugagggcagccaca

SEQ ID NO: 743256 - RNA, 22 nt, Human
aacuuuaaaaaauaugucuguu

SEQ ID NO: 743257 - RNA, 22 nt, Human
agcagcaucuucuguucuccgc

SEQ ID NO: 743258 - RNA, 22 nt, Human
ccuggcugcuuucacuauggag

SEQ ID NO: 743259 - RNA, 18 nt, Human
cucucuuuccacucuuug

SEQ ID NO: 743260 - RNA, 22 nt, Human
cagagcagagugauuguucugg

SEQ ID NO: 743261 - RNA, 22 nt, Human
ucacccagaaaagacagcagau

SEQ ID NO: 743262 - RNA, 22 nt, Human
uaucaaaaggaguugaaagggg

SEQ ID NO: 743263 - RNA, 22 nt, Human
uaauuacaaagcaagcacaggg

SEQ ID NO: 743264 - RNA, 22 nt, Human
agcugcuucaaaaugggcuccu

SEQ ID NO: 743265 - RNA, 22 nt, Human
cucucuguuaugcuuucaugaa

SEQ ID NO: 743266 - RNA, 22 nt, Human
aaaguccuguuaacuguuaaca

SEQ ID NO: 743267 - RNA, 22 nt, Human
uuuauaaaauagacugggucua

SEQ ID NO: 743268 - RNA, 20 nt, Human
gcaggcccucucucuagucu

SEQ ID NO: 743269 - RNA, 22 nt, Human
cagcuccagcucugggcgccuc

SEQ ID NO: 743270 - RNA, 22 nt, Human
ugugggacagggacagugauau

SEQ ID NO: 743271 - RNA, 22 nt, Human
cuggcccuaugagccuccugau

SEQ ID NO: 743272 - RNA, 22 nt, Human
uaucuauuccaaauaucagcgu

SEQ ID NO: 743273 - RNA, 22 nt, Human
uauucagaaaauaaauuggauu

SEQ ID NO: 743274 - RNA, 22 nt, Human
ggaaugggagcuauuaguggaa

SEQ ID NO: 743275 - RNA, 22 nt, Human
uaaugaaugagaauauaacaga

SEQ ID NO: 743276 - RNA, 22 nt, Human
accugaggaagggcgagaagcu

SEQ ID NO: 743277 - RNA, 21 nt, Human
ccaggcugggagggcaguucc

SEQ ID NO: 743278 - RNA, 22 nt, Human
gcaugcaugguuugugacugug

SEQ ID NO: 743279 - RNA, 22 nt, Human
cauuuguuaaugcugcuuuuaa

SEQ ID NO: 743280 - RNA, 22 nt, Human
uggcugaacuaaugugcuguuu

SEQ ID NO: 743281 - RNA, 22 nt, Human
uggaagagcaggcagacaaugc

SEQ ID NO: 743282 - RNA, 22 nt, Human
aauggcaacaugguauagugag

SEQ ID NO: 743283 - RNA, 22 nt, Human
gcagggcugggauuugagccca

SEQ ID NO: 743284 - RNA, 21 nt, Human
uaacacauuuugguacuuugg

SEQ ID NO: 743285 - RNA, 22 nt, Human
agugaggaaauccauuaucaag

SEQ ID NO: 743286 - RNA, 21 nt, Human
ugaguuaaggauccaauucug

SEQ ID NO: 743287 - RNA, 17 nt, Human
ucuguucaugcauaccu

SEQ ID NO: 743288 - RNA, 22 nt, Human
gagggagaauugcagccagcgu

SEQ ID NO: 743289 - RNA, 22 nt, Human
aguccugggugugcaaggcaga

SEQ ID NO: 743290 - RNA, 22 nt, Human
cagaaugcaaauuuuauaauau

SEQ ID NO: 743291 - RNA, 22 nt, Human
uuuagcaaguauuuacugacua

SEQ ID NO: 743292 - RNA, 22 nt, Human
aggugggcggauucaugagguc

SEQ ID NO: 743293 - RNA, 22 nt, Human
guccugugugagugcaccaccu

SEQ ID NO: 743294 - RNA, 22 nt, Human
aagucagagcaacugagacauu

SEQ ID NO: 743295 - RNA, 22 nt, Human
uccuucaccucaagcuuuugaa

SEQ ID NO: 743296 - RNA, 22 nt, Human
aggcuggcgacaucuggcgggc

SEQ ID NO: 743297 - RNA, 22 nt, Human
aacuguaagugguuggaagaag

SEQ ID NO: 743298 - RNA, 22 nt, Human
ugugugcauguuaaugagaaaa

SEQ ID NO: 743299 - RNA, 22 nt, Human
uagacagauuucuuguuagaca

SEQ ID NO: 743300 - RNA, 22 nt, Human
gugccucagcaccgccugcagc

SEQ ID NO: 743301 - RNA, 21 nt, Human
ugagcaggugcugcuuuuaug

SEQ ID NO: 743302 - RNA, 22 nt, Human
aaaugcuagaacauuuuaaagg

SEQ ID NO: 743303 - RNA, 22 nt, Human
aaaacucugcaguuaguuucua

SEQ ID NO: 743304 - RNA, 22 nt, Human
acaucugaaagggauugcagaa

SEQ ID NO: 743305 - RNA, 22 nt, Human
cugcccaccacaccugcuccug

SEQ ID NO: 743306 - RNA, 22 nt, Human
cugcccagauuuuaccaccugc

SEQ ID NO: 743307 - RNA, 22 nt, Human
uccaggugugcucugugcccug

SEQ ID NO: 743308 - RNA, 22 nt, Human
ccugaggcuggcccuuccaucc

SEQ ID NO: 743309 - RNA, 22 nt, Human
cuccagaggcgacuugcaucac

SEQ ID NO: 743310 - RNA, 22 nt, Human
gugcugugucuaucaggaauaa

SEQ ID NO: 743311 - RNA, 22 nt, Human
augggcugggaucugaguguca

SEQ ID NO: 743312 - RNA, 22 nt, Human
uuucucauagucaugccucuua

SEQ ID NO: 743313 - RNA, 22 nt, Human
agucagucaccauuuaagaaca

SEQ ID NO: 743314 - RNA, 22 nt, Human
uucucacaauucuuguauuugc

SEQ ID NO: 743315 - RNA, 22 nt, Human
cugugccacugcccugccacgc

SEQ ID NO: 743316 - RNA, 22 nt, Human
cuguugucccugggagcucagc

SEQ ID NO: 743317 - RNA, 22 nt, Human
aucuagaaguggcaugaauuac

SEQ ID NO: 743318 - RNA, 22 nt, Human
uuggcccacaguaccaugcugu

SEQ ID NO: 743319 - RNA, 22 nt, Human
uggcucugccacuaacuuggua

SEQ ID NO: 743320 - RNA, 22 nt, Human
ucagggcaaugucccucagaag

SEQ ID NO: 743321 - RNA, 22 nt, Human
guauuuggucuauuuggcaucc

SEQ ID NO: 743322 - RNA, 22 nt, Human
cccucugccugcgcccuggugu

SEQ ID NO: 743323 - RNA, 22 nt, Human
cugaggcucugagaaagccaaa

SEQ ID NO: 743324 - RNA, 22 nt, Human
ugucccugccugcccacucugu

SEQ ID NO: 743325 - RNA, 22 nt, Human
guggaggcagugacacaguagc

SEQ ID NO: 743326 - RNA, 22 nt, Human
uccaggagguugagugaguucc

SEQ ID NO: 743327 - RNA, 22 nt, Human
ugaaacauaaaguuaucuucag

SEQ ID NO: 743328 - RNA, 22 nt, Human
uagcuauuuugcuuggaaauac

SEQ ID NO: 743329 - RNA, 22 nt, Human
ugauucugaggacccugugacg

SEQ ID NO: 743330 - RNA, 22 nt, Human
caccacuguaucccuagcacuu

SEQ ID NO: 743331 - RNA, 22 nt, Human
cacugcagaucagaggcugaga

SEQ ID NO: 743332 - RNA, 22 nt, Human
gaaaauguuagcuucauaguca

SEQ ID NO: 743333 - RNA, 22 nt, Human
ucagggcaggcgagcagcugcu

SEQ ID NO: 743334 - RNA, 21 nt, Human
ccuggacuaaaaccaggccac

SEQ ID NO: 743335 - RNA, 22 nt, Human
ggccucucuccuuggcuugcag

SEQ ID NO: 743336 - RNA, 22 nt, Human
ugaaaugucaguguuuuauaag

SEQ ID NO: 743337 - RNA, 22 nt, Human
agugucuguuguucagaacucu

SEQ ID NO: 743338 - RNA, 22 nt, Human
uggcuucuugucuaauuuguua

SEQ ID NO: 743339 - RNA, 23 nt, Human
ugcuggcugaaacagccaaagga

SEQ ID NO: 743340 - RNA, 22 nt, Human
gugcauauguguguauacaaac

SEQ ID NO: 743341 - RNA, 22 nt, Human
ugggucuccaguucagggcagg

SEQ ID NO: 743342 - RNA, 22 nt, Human
cugcuuccauaaauaaugugcu

SEQ ID NO: 743343 - RNA, 22 nt, Human
aauguguacaugacagauagaa

SEQ ID NO: 743344 - RNA, 17 nt, Human
auacauuguuaaaguau

SEQ ID NO: 743345 - RNA, 22 nt, Human
gcccucagaugggaaaggaggg

SEQ ID NO: 743346 - RNA, 22 nt, Human
gaaacuguuucuggcuuuggug

SEQ ID NO: 743347 - RNA, 22 nt, Human
caggccggugauucuggaugua

SEQ ID NO: 743348 - RNA, 22 nt, Human
acacugaguuuuaccaggcaca

SEQ ID NO: 743349 - RNA, 22 nt, Human
gccuuucaguuccaucaaagga

SEQ ID NO: 743350 - RNA, 22 nt, Human
acucaugauaugccuauaagau

SEQ ID NO: 743351 - RNA, 22 nt, Human
ccuggccugcucggcucuuaag

SEQ ID NO: 743352 - RNA, 22 nt, Human
ucauguacauguaagucagaaa

SEQ ID NO: 743353 - RNA, 22 nt, Human
agcagaacagucuucuaguucu

SEQ ID NO: 743354 - RNA, 22 nt, Human
agugucuuuauagacugacaau

SEQ ID NO: 743355 - RNA, 22 nt, Human
augcguguuuguauacacacaa

SEQ ID NO: 743356 - RNA, 22 nt, Human
agggcucagaaagcagguuuuc

SEQ ID NO: 743357 - RNA, 22 nt, Human
aauggacaggagagcauaguca

SEQ ID NO: 743358 - RNA, 17 nt, Human
gagauuuucguccugaa

SEQ ID NO: 743359 - RNA, 22 nt, Human
uacaaauguauuuuauuuuggu

SEQ ID NO: 743360 - RNA, 22 nt, Human
gcaccucauuuugcagguagaa

SEQ ID NO: 743361 - RNA, 22 nt, Human
uaguaucuauuaguaacaagag

SEQ ID NO: 743362 - RNA, 22 nt, Human
auuguguaauuuucagcucaua

SEQ ID NO: 743363 - RNA, 22 nt, Human
ucucaggcuaccuugcacaagg

SEQ ID NO: 743364 - RNA, 22 nt, Human
uuucugcucauccuaguggagc

SEQ ID NO: 743365 - RNA, 22 nt, Human
caguuuaguccugccaccaugg

SEQ ID NO: 743366 - RNA, 22 nt, Human
uuuacacugccauucugaauac

SEQ ID NO: 743367 - RNA, 22 nt, Human
cacuacagggguccacagcuga

SEQ ID NO: 743368 - RNA, 20 nt, Human
aggaggccugcagauaguuc

SEQ ID NO: 743369 - RNA, 22 nt, Human
ccccuuccgucucuugaguguc

SEQ ID NO: 743370 - RNA, 22 nt, Human
gcaggagcccuggcauguucuu

SEQ ID NO: 743371 - RNA, 22 nt, Human
cugccaaguaaugccugggcuc

SEQ ID NO: 743372 - RNA, 22 nt, Human
aaaucucacuguagucaaagug

SEQ ID NO: 743373 - RNA, 22 nt, Human
gagggcugcuggaaaaaugcag

SEQ ID NO: 743374 - RNA, 22 nt, Human
gcagggcugagucaugugugcc

SEQ ID NO: 743375 - RNA, 22 nt, Human
uggcaggcauugaugcgaguuc

SEQ ID NO: 743376 - RNA, 22 nt, Human
gugugggggcagcucugauaug

SEQ ID NO: 743377 - RNA, 22 nt, Human
agagcuggccagggaucacucu

SEQ ID NO: 743378 - RNA, 22 nt, Human
auguuuucaaaguaaacuugua

SEQ ID NO: 743379 - RNA, 22 nt, Human
cuggagagggagcuguuggaag

SEQ ID NO: 743380 - RNA, 22 nt, Human
ucccaggcuggcaggcagcagu

SEQ ID NO: 743381 - RNA, 22 nt, Human
guaacaaacgguuccaagaugc

SEQ ID NO: 743382 - RNA, 19 nt, Human
uuucuguuagaaggauaca

SEQ ID NO: 743383 - RNA, 22 nt, Human
caaggccuucgucuccuagcuu

SEQ ID NO: 743384 - RNA, 23 nt, Human
agggccugauggcucccgcuggc

SEQ ID NO: 743385 - RNA, 19 nt, Human
uaccagccuccugccugau

SEQ ID NO: 743386 - RNA, 22 nt, Human
cugugagaaaggugauggaggu

SEQ ID NO: 743387 - RNA, 22 nt, Human
augccuggacugacaugcacug

SEQ ID NO: 743388 - RNA, 23 nt, Human
uaauugcuugaguuaguaauaca

SEQ ID NO: 743389 - RNA, 22 nt, Human
ugaaacaggcaaaacugcagau

SEQ ID NO: 743390 - RNA, 22 nt, Human
ucaggcugauuucuuuugaggg

SEQ ID NO: 743391 - RNA, 18 nt, Human
auuuugaacugggaauau

SEQ ID NO: 743392 - RNA, 22 nt, Human
cugagaucuuuauacgaggcac

SEQ ID NO: 743393 - RNA, 22 nt, Human
uauguauaugguagaaguaugu

SEQ ID NO: 743394 - RNA, 22 nt, Human
auucaaacuguguuaggcagca

SEQ ID NO: 743395 - RNA, 22 nt, Human
ccaggcaggcagcguucucagg

SEQ ID NO: 743396 - RNA, 22 nt, Human
ccuuggcuugugggcugcagcc

SEQ ID NO: 743397 - RNA, 21 nt, Human
gcaugccugcaucuuaguguu

SEQ ID NO: 743398 - RNA, 22 nt, Human
gcuuccucccugcugcucacua

SEQ ID NO: 743399 - RNA, 22 nt, Human
aaguccugaaacuucuuucuga

SEQ ID NO: 743400 - RNA, 22 nt, Human
aagguacaaaguuauacagcgu

SEQ ID NO: 743401 - RNA, 22 nt, Human
uauuagguagauuuuacugauu

SEQ ID NO: 743402 - RNA, 22 nt, Human
guggccaggcguccgcgcggcu

SEQ ID NO: 743403 - RNA, 22 nt, Human
acagauguggaguuugcaugau

SEQ ID NO: 743404 - RNA, 22 nt, Human
uggcaaagauuaccacaucuac

SEQ ID NO: 743405 - RNA, 22 nt, Human
aagcagaugggacuccaaggca

SEQ ID NO: 743406 - RNA, 22 nt, Human
acguggagccacagauggagca

SEQ ID NO: 743407 - RNA, 22 nt, Human
uuaauguaugggguugagauga

SEQ ID NO: 743408 - RNA, 23 nt, Human
ugguggcuugugguggccaccag

SEQ ID NO: 743409 - RNA, 22 nt, Human
aaagguuuuucagcagggagau

SEQ ID NO: 743410 - RNA, 22 nt, Human
uaagucauaagucaugauguua

SEQ ID NO: 743411 - RNA, 22 nt, Human
uaugcuuugaaaaugugcugaa

SEQ ID NO: 743412 - RNA, 22 nt, Human
ucagaaucugaaaagcgcuugg

SEQ ID NO: 743413 - RNA, 17 nt, Human
uccagcccugcccgacg

SEQ ID NO: 743414 - RNA, 21 nt, Human
ggccucugucauccugggaag

SEQ ID NO: 743415 - RNA, 22 nt, Human
auaguaacuggcauguuuauga

SEQ ID NO: 743416 - RNA, 22 nt, Human
ccccgcgcguugucccgcaggu

SEQ ID NO: 743417 - RNA, 22 nt, Human
acuuccuggauucccaagggcu

SEQ ID NO: 743418 - RNA, 22 nt, Human
ccaggaacucagcucugcacuu

SEQ ID NO: 743419 - RNA, 22 nt, Human
augcauaauguauguauugacu

SEQ ID NO: 743420 - RNA, 22 nt, Human
cugcagagguugguucuaagau

SEQ ID NO: 743421 - RNA, 22 nt, Human
ucaucugggagcuuguuagaaa

SEQ ID NO: 743422 - RNA, 22 nt, Human
cuucccagaacaauguaggcuu

SEQ ID NO: 743423 - RNA, 22 nt, Human
aaggacagagagccauuccaga

SEQ ID NO: 743424 - RNA, 22 nt, Human
uaucuguuggcuccuaguugua

SEQ ID NO: 743425 - RNA, 22 nt, Human
ccaggcagggagcuguuuggcc

SEQ ID NO: 743426 - RNA, 22 nt, Human
aucugugaucaagacagacagu

SEQ ID NO: 743427 - RNA, 22 nt, Human
cugugugcagggcacaauggaa

SEQ ID NO: 743428 - RNA, 22 nt, Human
uguucccauggauaucugcaua

SEQ ID NO: 743429 - RNA, 22 nt, Human
aaagugcacuagaauccagauu

SEQ ID NO: 743430 - RNA, 22 nt, Human
cuggaagggggacagccacaca

SEQ ID NO: 743431 - RNA, 22 nt, Human
uaccugaguuauauuaauaauu

SEQ ID NO: 743432 - RNA, 22 nt, Human
cagagcugugauaaauagauau

SEQ ID NO: 743433 - RNA, 22 nt, Human
gaaggcaguaaauggcuguuuu

SEQ ID NO: 743434 - RNA, 20 nt, Human
gcccuggagccuuguccugg

SEQ ID NO: 743435 - RNA, 22 nt, Human
caggcccugccuuggcaugugu

SEQ ID NO: 743436 - RNA, 22 nt, Human
ggcagguggcacugcugcuccc

SEQ ID NO: 743437 - RNA, 22 nt, Human
gugagcagaacagguggcuucu

SEQ ID NO: 743438 - RNA, 20 nt, Human
gcagcugcccccagucccug

SEQ ID NO: 743439 - RNA, 20 nt, Human
ggccaccugcuucagacccc

SEQ ID NO: 743440 - RNA, 22 nt, Human
gccagccagaguggcugugugu

SEQ ID NO: 743441 - RNA, 22 nt, Human
gaguggcaggcacugugacgga

SEQ ID NO: 743442 - RNA, 22 nt, Human
uacagacaguuuuucagauauu

SEQ ID NO: 743443 - RNA, 22 nt, Human
agaauagaauucucauagaauu

SEQ ID NO: 743444 - RNA, 23 nt, Human
cuguccaggauucuugagagaac

SEQ ID NO: 743445 - RNA, 22 nt, Human
uuuucuguguauccaggcuucc

SEQ ID NO: 743446 - RNA, 22 nt, Human
uccccugcagcgccugcuucua

SEQ ID NO: 743447 - RNA, 22 nt, Human
gggaaauugugugagaucuuug

SEQ ID NO: 743448 - RNA, 22 nt, Human
uagguuuuccuaaaauucuggu

SEQ ID NO: 743449 - RNA, 23 nt, Human
agcacagacuagaaaggucuuuc

SEQ ID NO: 743450 - RNA, 22 nt, Human
caaggaauauuuaagaacguca

SEQ ID NO: 743451 - RNA, 22 nt, Human
agugaaauaugcccauugcugu

SEQ ID NO: 743452 - RNA, 22 nt, Human
cagcuguuguguaucaggcaga

SEQ ID NO: 743453 - RNA, 22 nt, Human
ucucuugaagauugaagacaaa

SEQ ID NO: 743454 - RNA, 17 nt, Human
gguucaguucugcauuc

SEQ ID NO: 743455 - RNA, 22 nt, Human
auucauuggcuugaacuccacc

SEQ ID NO: 743456 - RNA, 22 nt, Human
auucagaucauauuuauagcuu

SEQ ID NO: 743457 - RNA, 22 nt, Human
ccuggcucauuaugugccccca

SEQ ID NO: 743458 - RNA, 22 nt, Human
ccugggagagucuguggucucc

SEQ ID NO: 743459 - RNA, 22 nt, Human
cugagagaucaagccacaggau

SEQ ID NO: 743460 - RNA, 19 nt, Human
gccaggccuggaccugcag

SEQ ID NO: 743461 - RNA, 22 nt, Human
aagauuuccauuucuagcucau

SEQ ID NO: 743462 - RNA, 22 nt, Human
aacauuucauuggaagcuaugu

SEQ ID NO: 743463 - RNA, 22 nt, Human
aguguccccuacagaggcauuc

SEQ ID NO: 743464 - RNA, 22 nt, Human
auuuccagugcacugaauagaa

SEQ ID NO: 743465 - RNA, 22 nt, Human
aggagaguucacacuggucaga

SEQ ID NO: 743466 - RNA, 22 nt, Human
uggagcugggauuugaacugca

SEQ ID NO: 743467 - RNA, 22 nt, Human
uagaaugugccuggaauacagu

SEQ ID NO: 743468 - RNA, 22 nt, Human
aggccacagccugggaggugac

SEQ ID NO: 743469 - RNA, 22 nt, Human
gggcagcacucauaccuauauu

SEQ ID NO: 743470 - RNA, 22 nt, Human
aaugucuuucucauaacagaua

SEQ ID NO: 743471 - RNA, 22 nt, Human
uguaacaguaagccugugagcu

SEQ ID NO: 743472 - RNA, 22 nt, Human
gggaagagauuuccacaucauu

SEQ ID NO: 743473 - RNA, 22 nt, Human
aggugggguguuggauguuuau

SEQ ID NO: 743474 - RNA, 22 nt, Human
auugaacugauauuugguguag

SEQ ID NO: 743475 - RNA, 22 nt, Human
cuuuucuagagccgcagcccua

SEQ ID NO: 743476 - RNA, 22 nt, Human
uucauuugcacuggauuacugg

SEQ ID NO: 743477 - RNA, 22 nt, Human
cccugaugacacgggcaucagg

SEQ ID NO: 743478 - RNA, 22 nt, Human
cucucucuuuagaagcgucugg

SEQ ID NO: 743479 - RNA, 22 nt, Human
uggggaaaagcguuaggaguuc

SEQ ID NO: 743480 - RNA, 22 nt, Human
ccaggcucaggugcgagagaca

SEQ ID NO: 743481 - RNA, 22 nt, Human
gugccagccgcaccccaggaga

SEQ ID NO: 743482 - RNA, 22 nt, Human
ggaggguccacugugaggcaga

SEQ ID NO: 743483 - RNA, 22 nt, Human
ugaaaaugcccucuaugucuca

SEQ ID NO: 743484 - RNA, 22 nt, Human
uccuggccucacaguccugggu

SEQ ID NO: 743485 - RNA, 22 nt, Human
cagaaauaugugccaugccuua

SEQ ID NO: 743486 - RNA, 22 nt, Human
gcaggccugucuugcucgcccu

SEQ ID NO: 743487 - RNA, 22 nt, Human
agcuuuggauuucuuauagccc

SEQ ID NO: 743488 - RNA, 22 nt, Human
uggcuaugguauugauggguuu

SEQ ID NO: 743489 - RNA, 22 nt, Human
gaguucauauucagagaucgcu

SEQ ID NO: 743490 - RNA, 22 nt, Human
ugugaccauaauuuguaaauaa

SEQ ID NO: 743491 - RNA, 22 nt, Human
guuaaaugcauuuuccaagcac

SEQ ID NO: 743492 - RNA, 22 nt, Human
caccugggucauugcugguguu

SEQ ID NO: 743493 - RNA, 22 nt, Human
ugccagcuccgaggagcugcag

SEQ ID NO: 743494 - RNA, 22 nt, Human
aucuacaggauaguuuaauauu

SEQ ID NO: 743495 - RNA, 22 nt, Human
gcuggcuuuaucgucagacucc

SEQ ID NO: 743496 - RNA, 22 nt, Human
aggcucccaugguguggcagga

SEQ ID NO: 743497 - RNA, 22 nt, Human
gcuucugcgccuagccucaggu

SEQ ID NO: 743498 - RNA, 22 nt, Human
gcucccuggaauguuggcugcc

SEQ ID NO: 743499 - RNA, 22 nt, Human
uguacaauagcuauuaucucca

SEQ ID NO: 743500 - RNA, 22 nt, Human
cucucugguacauagaguuugg

SEQ ID NO: 743501 - RNA, 22 nt, Human
agauggaguuaguaccagaguc

SEQ ID NO: 743502 - RNA, 22 nt, Human
ugccuagaacuuuauucuuuau

SEQ ID NO: 743503 - RNA, 22 nt, Human
acugcuuacccggccugacuuc

SEQ ID NO: 743504 - RNA, 21 nt, Human
cuuggaacggguagaacucac

SEQ ID NO: 743505 - RNA, 22 nt, Human
agugaguggacccugcaaggaa

SEQ ID NO: 743506 - RNA, 22 nt, Human
caaagcaagggcugaagacucc

SEQ ID NO: 743507 - RNA, 22 nt, Human
aggcaggagcaagcccuacaag

SEQ ID NO: 743508 - RNA, 18 nt, Human
agcaacagaaacauaugg

SEQ ID NO: 743509 - RNA, 22 nt, Human
ucucuccuaauuucaggugcuu

SEQ ID NO: 743510 - RNA, 21 nt, Human
uggccagcugcucgucuccuc

SEQ ID NO: 743511 - RNA, 22 nt, Human
agacuccaaaugaaagaggggg

SEQ ID NO: 743512 - RNA, 22 nt, Human
uggauaaaaugacauuaccuga

SEQ ID NO: 743513 - RNA, 22 nt, Human
ugggaggaucucuugaggccag

SEQ ID NO: 743514 - RNA, 22 nt, Human
cagagccccccuucugaucaca

SEQ ID NO: 743515 - RNA, 21 nt, Human
agacaacugugacuauucccu

SEQ ID NO: 743516 - RNA, 22 nt, Human
cagucucagaggugggaguggg

SEQ ID NO: 743517 - RNA, 22 nt, Human
augucccagacacuuuaucuua

SEQ ID NO: 743518 - RNA, 22 nt, Human
aguucacauaucuguuuuauuu

SEQ ID NO: 743519 - RNA, 22 nt, Human
gcagacuguaccuggaagaggg

SEQ ID NO: 743520 - RNA, 22 nt, Human
aguaaacauaauuuaccuguag

SEQ ID NO: 743521 - RNA, 22 nt, Human
agccagcuguguggucaggcaa

SEQ ID NO: 743522 - RNA, 22 nt, Human
gcugaggugucaccuugcuggg

SEQ ID NO: 743523 - RNA, 22 nt, Human
cucguugcugaagccaaaguca

SEQ ID NO: 743524 - RNA, 22 nt, Human
uuuacaucucaccagauucaua

SEQ ID NO: 743525 - RNA, 22 nt, Human
acccagcccagaaucuggggcc

SEQ ID NO: 743526 - RNA, 22 nt, Human
gagggcuccacacgggcccagc

SEQ ID NO: 743527 - RNA, 22 nt, Human
gggaucuggaauuuugguaugu

SEQ ID NO: 743528 - RNA, 20 nt, Human
uaggaaauauguuuuuaccc

SEQ ID NO: 743529 - RNA, 21 nt, Human
caggcucugcugggugcuggg

SEQ ID NO: 743530 - RNA, 22 nt, Human
ugaguuuugucuugcuagaagu

SEQ ID NO: 743531 - RNA, 22 nt, Human
uccuucuccuccuugagugaca

SEQ ID NO: 743532 - RNA, 22 nt, Human
aagcaucucuauguggagagug

SEQ ID NO: 743533 - RNA, 22 nt, Human
aguggucugccugccucagccu

SEQ ID NO: 743534 - RNA, 22 nt, Human
ggagcugagguaacagugagug

SEQ ID NO: 743535 - RNA, 22 nt, Human
uaccagcuuccuucaagaugug

SEQ ID NO: 743536 - RNA, 22 nt, Human
cucccaggggagucaucugcuu

SEQ ID NO: 743537 - RNA, 22 nt, Human
caguuaaaggcccaauaucugg

SEQ ID NO: 743538 - RNA, 22 nt, Human
gaguccaguucuuuccagcagu

SEQ ID NO: 743539 - RNA, 22 nt, Human
augcuguccacucuugguguuu

SEQ ID NO: 743540 - RNA, 23 nt, Human
ucucuggccuuugaucagguuga

SEQ ID NO: 743541 - RNA, 22 nt, Human
uguaugcagcaaaacaauuagu

SEQ ID NO: 743542 - RNA, 21 nt, Human
ugggaccuagcuuugcacagg

SEQ ID NO: 743543 - RNA, 23 nt, Human
uuucacaaugagcauuacagaau

SEQ ID NO: 743544 - RNA, 22 nt, Human
uuuguagcagcaugauuuauaa

SEQ ID NO: 743545 - RNA, 22 nt, Human
cugacuucagggauaaaaagua

SEQ ID NO: 743546 - RNA, 22 nt, Human
augcauugcugcuuucaaaaca

SEQ ID NO: 743547 - RNA, 22 nt, Human
gaggagggccuggugucccuuc

SEQ ID NO: 743548 - RNA, 22 nt, Human
cuccagauguauacuuuccaag

SEQ ID NO: 743549 - RNA, 22 nt, Human
cagcacagggacaauagcagau

SEQ ID NO: 743550 - RNA, 22 nt, Human
ucuuugcagaauuuaacuuugc

SEQ ID NO: 743551 - RNA, 16 nt, Human
gugcaaaagugaggag

SEQ ID NO: 743552 - RNA, 22 nt, Human
agugggcccuugucacacugau

SEQ ID NO: 743553 - RNA, 22 nt, Human
aagagacuuguccgaaguugua

SEQ ID NO: 743554 - RNA, 22 nt, Human
agacuggauagcuuuggacuug

SEQ ID NO: 743555 - RNA, 22 nt, Human
ucuuuggggcaucugggagauu

SEQ ID NO: 743556 - RNA, 23 nt, Human
uggagcugggcucagacccuggg

SEQ ID NO: 743557 - RNA, 22 nt, Human
auuaacuuuugaucaguguggu

SEQ ID NO: 743558 - RNA, 22 nt, Human
cauaauccuugauucaaauaau

SEQ ID NO: 743559 - RNA, 22 nt, Human
ugcuucaaguugaaauauucuu

SEQ ID NO: 743560 - RNA, 19 nt, Human
agaggcugucaccuguagc

SEQ ID NO: 743561 - RNA, 22 nt, Human
ugaaugauaugugaaaaggaac

SEQ ID NO: 743562 - RNA, 22 nt, Human
cucccaagcugugcugaacugu

SEQ ID NO: 743563 - RNA, 22 nt, Human
augccaaauucucagccucuuu

SEQ ID NO: 743564 - RNA, 22 nt, Human
gggcagagacucagaaacagaa

SEQ ID NO: 743565 - RNA, 22 nt, Human
guuucucugucuguuacauugg

SEQ ID NO: 743566 - RNA, 22 nt, Human
acacauuccugcagacaugaug

SEQ ID NO: 743567 - RNA, 22 nt, Human
uuauugugaggaauaagugaga

SEQ ID NO: 743568 - RNA, 22 nt, Human
guggcugcuacagagcuggagg

SEQ ID NO: 743569 - RNA, 22 nt, Human
uauucaucuucauagucacagu

SEQ ID NO: 743570 - RNA, 22 nt, Human
aagccagggucaggggccuccu

SEQ ID NO: 743571 - RNA, 22 nt, Human
aagugaaauugccauucuuaua

SEQ ID NO: 743572 - RNA, 19 nt, Human
accucugcagagauguuua

SEQ ID NO: 743573 - RNA, 22 nt, Human
auuuugaugcuaucuaaugaau

SEQ ID NO: 743574 - RNA, 22 nt, Human
ggauccuucuuugaccucacag

SEQ ID NO: 743575 - RNA, 22 nt, Human
ugauugaacugagcuucaagau

SEQ ID NO: 743576 - RNA, 22 nt, Human
acaaaggacugaaacuggcugu

SEQ ID NO: 743577 - RNA, 22 nt, Human
auggcugugaaggucacacccu

SEQ ID NO: 743578 - RNA, 22 nt, Human
aaucucacucaaagaauucucu

SEQ ID NO: 743579 - RNA, 22 nt, Human
uaugugcaguuugcucuuaaca

SEQ ID NO: 743580 - RNA, 22 nt, Human
aaagcacaggagaguucaguaa

SEQ ID NO: 743581 - RNA, 20 nt, Human
ggagaugcagcccaggugcc

SEQ ID NO: 743582 - RNA, 22 nt, Human
cugggagauugaggccauggug

SEQ ID NO: 743583 - RNA, 22 nt, Human
auggcuggauuugauccauggg

SEQ ID NO: 743584 - RNA, 22 nt, Human
aacaauguccugugagaugaua

SEQ ID NO: 743585 - RNA, 22 nt, Human
cccuguuuuaaguugauauuga

SEQ ID NO: 743586 - RNA, 22 nt, Human
gcauuucauguaagucagacca

SEQ ID NO: 743587 - RNA, 22 nt, Human
cugcuguguggauucaauggcu

SEQ ID NO: 743588 - RNA, 22 nt, Human
gagugaggcuggaaucauggcu

SEQ ID NO: 743589 - RNA, 22 nt, Human
ggcucugguggcaauugacugg

SEQ ID NO: 743590 - RNA, 22 nt, Human
auuuucaaaacaucugcugugu

SEQ ID NO: 743591 - RNA, 22 nt, Human
cuggccagguuuugaacaguug

SEQ ID NO: 743592 - RNA, 22 nt, Human
augaggcagucuggccugaggg

SEQ ID NO: 743593 - RNA, 22 nt, Human
uccaggccccccacgcuaaugg

SEQ ID NO: 743594 - RNA, 22 nt, Human
caguauguuuauuagaacugca

SEQ ID NO: 743595 - RNA, 22 nt, Human
uuuuauguuccucuuuaugcga

SEQ ID NO: 743596 - RNA, 22 nt, Human
gccagcuggcugcaggucccag

SEQ ID NO: 743597 - RNA, 22 nt, Human
ccuaggcuggcugucuucaggu

SEQ ID NO: 743598 - RNA, 22 nt, Human
uggauggagacugauaugggua

SEQ ID NO: 743599 - RNA, 22 nt, Human
uaaaucaagaauaucagcuugu

SEQ ID NO: 743600 - RNA, 22 nt, Human
augaguucaauuguuucaguca

SEQ ID NO: 743601 - RNA, 23 nt, Human
uggacaggguaacuggugguuuu

SEQ ID NO: 743602 - RNA, 20 nt, Human
uggccucuguagaggccaag

SEQ ID NO: 743603 - RNA, 21 nt, Human
cugugggaccaagcacuggga

SEQ ID NO: 743604 - RNA, 22 nt, Human
agacagaaauaggagaaaccag

SEQ ID NO: 743605 - RNA, 17 nt, Human
uaaagccagucaaguca

SEQ ID NO: 743606 - RNA, 22 nt, Human
gaggggaaagugugaggcugcg

SEQ ID NO: 743607 - RNA, 22 nt, Human
aucacauuauguagugaaaagg

SEQ ID NO: 743608 - RNA, 22 nt, Human
cuauuauuagcaaaagguggau

SEQ ID NO: 743609 - RNA, 22 nt, Human
ucugccuguucaagucuucuag

SEQ ID NO: 743610 - RNA, 21 nt, Human
ccugggcugugguuuggagac

SEQ ID NO: 743611 - RNA, 22 nt, Human
ggaagaaagacauuuauuuuga

SEQ ID NO: 743612 - RNA, 22 nt, Human
aguguugucaaacggcucagca

SEQ ID NO: 743613 - RNA, 22 nt, Human
uucagcacuuuguuuugcucau

SEQ ID NO: 743614 - RNA, 22 nt, Human
aaguuuaagguggaaguggugg

SEQ ID NO: 743615 - RNA, 22 nt, Human
ucaggcagcauuaaacuucagc

SEQ ID NO: 743616 - RNA, 22 nt, Human
agccuccaaaugucaggucccg

SEQ ID NO: 743617 - RNA, 22 nt, Human
agguuccaagaaaucaucagug

SEQ ID NO: 743618 - RNA, 22 nt, Human
auuuaauuuauagauguggaua

SEQ ID NO: 743619 - RNA, 22 nt, Human
gggagccaugcuggucuucuuu

SEQ ID NO: 743620 - RNA, 23 nt, Human
uggaggaaacacaucagaagacc

SEQ ID NO: 743621 - RNA, 22 nt, Human
ccugccugucuuuauccccugu

SEQ ID NO: 743622 - RNA, 22 nt, Human
ccagagaauccggagaguccau

SEQ ID NO: 743623 - RNA, 22 nt, Human
ggcuuuaugcagggauagaaau

SEQ ID NO: 743624 - RNA, 22 nt, Human
uccaggagguuuggaggaagca

SEQ ID NO: 743625 - RNA, 22 nt, Human
ccuggcugugugaccuuggcaa

SEQ ID NO: 743626 - RNA, 22 nt, Human
aagucucuuuucuuccuguauu

SEQ ID NO: 743627 - RNA, 22 nt, Human
acagugugcaagaaauggggga

SEQ ID NO: 743628 - RNA, 22 nt, Human
ggucaggauccaagucugugcu

SEQ ID NO: 743629 - RNA, 22 nt, Human
aggcuucaccugcaccugagcu

SEQ ID NO: 743630 - RNA, 22 nt, Human
augcaaaagacuauuuguugcu

SEQ ID NO: 743631 - RNA, 21 nt, Human
aaggaaaagcuuggucucuga

SEQ ID NO: 743632 - RNA, 22 nt, Human
ccugugagucaaccccuccuug

SEQ ID NO: 743633 - RNA, 22 nt, Human
agcagagacaugaaauaugcuu

SEQ ID NO: 743634 - RNA, 22 nt, Human
uucagacugcuggugcuucccu

SEQ ID NO: 743635 - RNA, 22 nt, Human
aagcugggacuuagcgcagaua

SEQ ID NO: 743636 - RNA, 22 nt, Human
ugcuuagacgucaaguacagcc

SEQ ID NO: 743637 - RNA, 22 nt, Human
cuguggcauugugaggacugca

SEQ ID NO: 743638 - RNA, 22 nt, Human
cugaggccccucucuugagcuu

SEQ ID NO: 743639 - RNA, 22 nt, Human
agcugucucugguauuauguga

SEQ ID NO: 743640 - RNA, 22 nt, Human
aaugaacacagcccucuacuuu

SEQ ID NO: 743641 - RNA, 22 nt, Human
cuuggucuagugagugagcaua

SEQ ID NO: 743642 - RNA, 19 nt, Human
uccaccccagccagcucug

SEQ ID NO: 743643 - RNA, 22 nt, Human
uuggaucacucugaagccuuac

SEQ ID NO: 743644 - RNA, 22 nt, Human
aaacuagaugauuaugaagcau

SEQ ID NO: 743645 - RNA, 22 nt, Human
uuaaagagucuacugcacaucc

SEQ ID NO: 743646 - RNA, 22 nt, Human
ugaugucugccaggguccuggg

SEQ ID NO: 743647 - RNA, 22 nt, Human
gcucuguggcauucaugggcag

SEQ ID NO: 743648 - RNA, 22 nt, Human
uggggccagagauggggcgcag

SEQ ID NO: 743649 - RNA, 22 nt, Human
ugcuccuguuucaucagcuaua

SEQ ID NO: 743650 - RNA, 22 nt, Human
gagaugagugggggaucucuca

SEQ ID NO: 743651 - RNA, 22 nt, Human
gcagccucugcaguucaggagg

SEQ ID NO: 743652 - RNA, 22 nt, Human
uucuuuuaauugugggggagug

SEQ ID NO: 743653 - RNA, 22 nt, Human
augcuuaacucuguacauaguu

SEQ ID NO: 743654 - RNA, 22 nt, Human
cauuuugugcacacguggaguu

SEQ ID NO: 743655 - RNA, 22 nt, Human
acucuggcugccuugugagcau

SEQ ID NO: 743656 - RNA, 22 nt, Human
gacccagugacucgucucugug

SEQ ID NO: 743657 - RNA, 22 nt, Human
cauuuacauaacaguaacgcug

SEQ ID NO: 743658 - RNA, 22 nt, Human
uuuaccaguguuaaacaccagc

SEQ ID NO: 743659 - RNA, 22 nt, Human
uggccagguguggguucucaga

SEQ ID NO: 743660 - RNA, 22 nt, Human
gaaaaaugagcugaugucaggg

SEQ ID NO: 743661 - RNA, 22 nt, Human
uaccauuucuacauaucuuguc

SEQ ID NO: 743662 - RNA, 22 nt, Human
acaaaugugauuguuucugaaa

SEQ ID NO: 743663 - RNA, 22 nt, Human
cagcagugaugugugaggguuc

SEQ ID NO: 743664 - RNA, 22 nt, Human
uggauuaguuaagaaauguuag

SEQ ID NO: 743665 - RNA, 23 nt, Human
ugguggggucuuggagacagcac

SEQ ID NO: 743666 - RNA, 22 nt, Human
aaaccuuugugugucugugccu

SEQ ID NO: 743667 - RNA, 22 nt, Human
ugcaugcacuuggcuggcacgu

SEQ ID NO: 743668 - RNA, 22 nt, Human
uggucugauggucccaccaccg

SEQ ID NO: 743669 - RNA, 21 nt, Human
ugcuuugcagguggauuuagu

SEQ ID NO: 743670 - RNA, 22 nt, Human
ggccagggccuggggacugucc

SEQ ID NO: 743671 - RNA, 18 nt, Human
ucaggaguuuguggaugg

SEQ ID NO: 743672 - RNA, 22 nt, Human
ggugccuguauuuggggcacag

SEQ ID NO: 743673 - RNA, 22 nt, Human
ucucugagcccagugucccccu

SEQ ID NO: 743674 - RNA, 22 nt, Human
ucaaaagucugcauucuucaca

SEQ ID NO: 743675 - RNA, 22 nt, Human
agagccuggaccugggcucuga

SEQ ID NO: 743676 - RNA, 22 nt, Human
cagcccagcgcaaacaacuggc

SEQ ID NO: 743677 - RNA, 19 nt, Human
cuccuucccugguuucugu

SEQ ID NO: 743678 - RNA, 22 nt, Human
ggggccgaccgcgguucaggcc

SEQ ID NO: 743679 - RNA, 22 nt, Human
gggagcugagaaacaacauucu

SEQ ID NO: 743680 - RNA, 22 nt, Human
auacauagcagagucaauuaau

SEQ ID NO: 743681 - RNA, 22 nt, Human
agucagagaauaaagaaugcau

SEQ ID NO: 743682 - RNA, 22 nt, Human
uaugaagcucucacuguguguc

SEQ ID NO: 743683 - RNA, 22 nt, Human
caguuucucucauacauauuug

SEQ ID NO: 743684 - RNA, 22 nt, Human
gcauccaugcaugcagggugug

SEQ ID NO: 743685 - RNA, 22 nt, Human
caugaguucaucugcuucucuu

SEQ ID NO: 743686 - RNA, 22 nt, Human
uccauacacauugaauuuuagu

SEQ ID NO: 743687 - RNA, 22 nt, Human
uucucuguaguugccuggugga

SEQ ID NO: 743688 - RNA, 22 nt, Human
cuuuggcaaugucauuuucaau

SEQ ID NO: 743689 - RNA, 22 nt, Human
aguguagacauaggucuggucu

SEQ ID NO: 743690 - RNA, 22 nt, Human
guuuuacaaaugacggcauuca

SEQ ID NO: 743691 - RNA, 20 nt, Human
guaaaauauggucuuugggu

SEQ ID NO: 743692 - RNA, 22 nt, Human
guggggcaugcacgcugcuccu

SEQ ID NO: 743693 - RNA, 22 nt, Human
cuggcuccuccaaggccuggag

SEQ ID NO: 743694 - RNA, 22 nt, Human
uuuauucacuucagugccaaag

SEQ ID NO: 743695 - RNA, 23 nt, Human
ugcugugccuuugucugccucca

SEQ ID NO: 743696 - RNA, 22 nt, Human
cuuauuuccugacauggaaaga

SEQ ID NO: 743697 - RNA, 19 nt, Human
uggcugagcuggacugagg

SEQ ID NO: 743698 - RNA, 19 nt, Human
gcucuaaaagauuuugaag

SEQ ID NO: 743699 - RNA, 22 nt, Human
cagacacagauaugcauauggc

SEQ ID NO: 743700 - RNA, 22 nt, Human
auuguuucugcuuuauuuaggg

SEQ ID NO: 743701 - RNA, 22 nt, Human
uggacaggauagugcaguacgc

SEQ ID NO: 743702 - RNA, 21 nt, Human
guccuucauuaucaagucaaa

SEQ ID NO: 743703 - RNA, 22 nt, Human
ccuguaaguaguuugccugagc

SEQ ID NO: 743704 - RNA, 20 nt, Human
uuuagcaaaagggacugcuc

SEQ ID NO: 743705 - RNA, 22 nt, Human
uucacauuagugguucuauaua

SEQ ID NO: 743706 - RNA, 22 nt, Human
guccuauuagcauauugaauac

SEQ ID NO: 743707 - RNA, 22 nt, Human
agauaagauaguccagcacaau

SEQ ID NO: 743708 - RNA, 22 nt, Human
gugcuucucuucacacccaacu

SEQ ID NO: 743709 - RNA, 22 nt, Human
gcugggcaugugaccaacagaa

SEQ ID NO: 743710 - RNA, 22 nt, Human
uggcaggcauccggcaccuucu

SEQ ID NO: 743711 - RNA, 20 nt, Human
uugagcuuuuaguacagaca

SEQ ID NO: 743712 - RNA, 18 nt, Human
cuugcugagggccucauu

SEQ ID NO: 743713 - RNA, 22 nt, Human
ucccaucacuagcaucugcacc

SEQ ID NO: 743714 - RNA, 23 nt, Human
gcauccagagcucaguccccuuu

SEQ ID NO: 743715 - RNA, 22 nt, Human
aucuuuguugcucucauuucug

SEQ ID NO: 743716 - RNA, 22 nt, Human
ggaggugggcuaaggacucucu

SEQ ID NO: 743717 - RNA, 18 nt, Human
ugaggcugaggguagagg

SEQ ID NO: 743718 - RNA, 22 nt, Human
agggauggaucuuggcccugga

SEQ ID NO: 743719 - RNA, 22 nt, Human
caccagcuuacagucucacccc

SEQ ID NO: 743720 - RNA, 22 nt, Human
gccucccuccaccacugcaggu

SEQ ID NO: 743721 - RNA, 22 nt, Human
auaugcuugacucuuucacauc

SEQ ID NO: 743722 - RNA, 20 nt, Human
uucuagcauacuuacaagga

SEQ ID NO: 743723 - RNA, 22 nt, Human
ggcagggguucauuuugucuua

SEQ ID NO: 743724 - RNA, 23 nt, Human
ugaggagcauagcugacugacag

SEQ ID NO: 743725 - RNA, 20 nt, Human
aucaccuguagguucuuugu

SEQ ID NO: 743726 - RNA, 20 nt, Human
auuauucauacaugugugac

SEQ ID NO: 743727 - RNA, 22 nt, Human
ggaagaaaguagaaaaccgugg

SEQ ID NO: 743728 - RNA, 22 nt, Human
ucuguuuauauuucaaaccuuc

SEQ ID NO: 743729 - RNA, 22 nt, Human
acuaaaacaguggcuaguagac

SEQ ID NO: 743730 - RNA, 23 nt, Human
aggcgagcucuucuccagcacgu

SEQ ID NO: 743731 - RNA, 22 nt, Human
uccucacaagcauccugucuca

SEQ ID NO: 743732 - RNA, 22 nt, Human
ggcaguggcuguagucucuugg

SEQ ID NO: 743733 - RNA, 22 nt, Human
ugacauucuguuaagucucaua

SEQ ID NO: 743734 - RNA, 22 nt, Human
cagaauuucagugauguuuucu

SEQ ID NO: 743735 - RNA, 22 nt, Human
gggaaaggaucagugggaggcu

SEQ ID NO: 743736 - RNA, 22 nt, Human
acuaacuugcugagugaccaug

SEQ ID NO: 743737 - RNA, 22 nt, Human
gguggcaucucaguucaugggc

SEQ ID NO: 743738 - RNA, 22 nt, Human
aaaugucuaucuggcauauucc

SEQ ID NO: 743739 - RNA, 22 nt, Human
caggaaguggcugggcuggguu

SEQ ID NO: 743740 - RNA, 22 nt, Human
acucaggaaaaauguagugaua

SEQ ID NO: 743741 - RNA, 23 nt, Human
agcagccagagauccucggcccu

SEQ ID NO: 743742 - RNA, 22 nt, Human
ucacacuucaaaggguuagauc

SEQ ID NO: 743743 - RNA, 22 nt, Human
agcagggcuggggcacgagcca

SEQ ID NO: 743744 - RNA, 22 nt, Human
gggcuucuagaccagcagugag

SEQ ID NO: 743745 - RNA, 22 nt, Human
gauuauggagaaauaauuagaa

SEQ ID NO: 743746 - RNA, 22 nt, Human
aaguggacuaauacaaggacua

SEQ ID NO: 743747 - RNA, 22 nt, Human
agagcugggugguggugacuca

SEQ ID NO: 743748 - RNA, 22 nt, Human
ccuuccagauguaagagcugau

SEQ ID NO: 743749 - RNA, 21 nt, Human
gagcccaggcaucucauuaau

SEQ ID NO: 743750 - RNA, 22 nt, Human
cugagccaaccacagcaggagc

SEQ ID NO: 743751 - RNA, 22 nt, Human
aggauucauggugcagacaaag

SEQ ID NO: 743752 - RNA, 22 nt, Human
cuauuuggccaagcugcccaca

SEQ ID NO: 743753 - RNA, 22 nt, Human
uguguuuuaaauggaaauuuga

SEQ ID NO: 743754 - RNA, 22 nt, Human
agcaacagcaacgacauuucuc

SEQ ID NO: 743755 - RNA, 22 nt, Human
uccagagccugggguuuguaac

SEQ ID NO: 743756 - RNA, 22 nt, Human
ucagcaucucaaccuucucuac

SEQ ID NO: 743757 - RNA, 22 nt, Human
ugcagggcuccuggcuccaauc

SEQ ID NO: 743758 - RNA, 21 nt, Human
cccucaggaaacagaaugcac

SEQ ID NO: 743759 - RNA, 22 nt, Human
aagcugaaucugaaauagaauu

SEQ ID NO: 743760 - RNA, 22 nt, Human
ccacuguguccaccaggaaugc

SEQ ID NO: 743761 - RNA, 22 nt, Human
gcugccccccggacucggcggg

SEQ ID NO: 743762 - RNA, 22 nt, Human
uggggucuggaguugcccauga

SEQ ID NO: 743763 - RNA, 22 nt, Human
ucauaaaucauacuccauuugc

SEQ ID NO: 743764 - RNA, 22 nt, Human
ggugacagcgggucaagaggag

SEQ ID NO: 743765 - RNA, 18 nt, Human
gucuuuucucccuuccuc

SEQ ID NO: 743766 - RNA, 22 nt, Human
uccuggcucugcugccuccuag

SEQ ID NO: 743767 - RNA, 22 nt, Human
caggacauugauccauuggcac

SEQ ID NO: 743768 - RNA, 23 nt, Human
ugaguguggggacagugguuugc

SEQ ID NO: 743769 - RNA, 22 nt, Human
cagacaucuguacccagccugu

SEQ ID NO: 743770 - RNA, 22 nt, Human
gagcagagacaguacaacuggc

SEQ ID NO: 743771 - RNA, 22 nt, Human
gccaguggguaguuggagcugg

SEQ ID NO: 743772 - RNA, 22 nt, Human
ucagauuucagcuaaagggaug

SEQ ID NO: 743773 - RNA, 22 nt, Human
gccucugcggggcccgagcccg

SEQ ID NO: 743774 - RNA, 20 nt, Human
cagagacccaggcuucagcu

SEQ ID NO: 743775 - RNA, 23 nt, Human
gcaugaagugcuacgucuacagc

SEQ ID NO: 743776 - RNA, 22 nt, Human
aagauucucccugagauauuua

SEQ ID NO: 743777 - RNA, 22 nt, Human
gcugucugacuccaaguuggag

SEQ ID NO: 743778 - RNA, 22 nt, Human
auacaugcgccauguuggugug

SEQ ID NO: 743779 - RNA, 22 nt, Human
guucaugcuacccuuuccuaau

SEQ ID NO: 743780 - RNA, 22 nt, Human
uccagggcuacaaggcaccaga

SEQ ID NO: 743781 - RNA, 22 nt, Human
cuucuuggaagucguccuucca

SEQ ID NO: 743782 - RNA, 22 nt, Human
uacagagaauaauaggacaggu

SEQ ID NO: 743783 - RNA, 22 nt, Human
cuuacaguguugagggaauuaa

SEQ ID NO: 743784 - RNA, 22 nt, Human
uucacaggauagcuauugcacg

SEQ ID NO: 743785 - RNA, 22 nt, Human
auugcuuuuagugaaauuauau

SEQ ID NO: 743786 - RNA, 22 nt, Human
cuuggcccaguugccaaggaaa

SEQ ID NO: 743787 - RNA, 22 nt, Human
aucaagagaaggggaagaugaa

SEQ ID NO: 743788 - RNA, 22 nt, Human
acaggcugauagaccauaaaua

SEQ ID NO: 743789 - RNA, 22 nt, Human
auucaagguuggcucaggaauu

SEQ ID NO: 743790 - RNA, 22 nt, Human
cuggcagccaagugggauacuc

SEQ ID NO: 743791 - RNA, 22 nt, Human
ucccucaggacccaacuuguaa

SEQ ID NO: 743792 - RNA, 22 nt, Human
ggaacacuggcucaauuauauc

SEQ ID NO: 743793 - RNA, 22 nt, Human
cuuuucuuguauuggaugcccc

SEQ ID NO: 743794 - RNA, 22 nt, Human
ugugucuuacauaauuacaugu

SEQ ID NO: 743795 - RNA, 22 nt, Human
gagguggauguugcagugagcu

SEQ ID NO: 743796 - RNA, 22 nt, Human
augccagcuauagacuuguuau

SEQ ID NO: 743797 - RNA, 22 nt, Human
cagggagcaggcucuguccauc

SEQ ID NO: 743798 - RNA, 22 nt, Human
cugggccacuuccucaggggaa

SEQ ID NO: 743799 - RNA, 22 nt, Human
aagaaaacaaugacuugccagc

SEQ ID NO: 743800 - RNA, 22 nt, Human
gcgaaaaauguguaaauauguu

SEQ ID NO: 743801 - RNA, 20 nt, Human
caaggcagaccagagugagu

SEQ ID NO: 743802 - RNA, 22 nt, Human
ugcuauaaguagacauucaaca

SEQ ID NO: 743803 - RNA, 22 nt, Human
agcaguugagugggaaucaggc

SEQ ID NO: 743804 - RNA, 22 nt, Human
aggcugugaucucaugauuugu

SEQ ID NO: 743805 - RNA, 19 nt, Human
agugaacuccauaucaggu

SEQ ID NO: 743806 - RNA, 22 nt, Human
ucagcucugccuguggaggcac

SEQ ID NO: 743807 - RNA, 22 nt, Human
aggaggaggcuggaguacaccc

SEQ ID NO: 743808 - RNA, 22 nt, Human
uggcauguggcuuugagucauc

SEQ ID NO: 743809 - RNA, 22 nt, Human
uauuacaaauuauaaugggaga

SEQ ID NO: 743810 - RNA, 22 nt, Human
acucuguguuuugguggcagca

SEQ ID NO: 743811 - RNA, 22 nt, Human
uuuagcuucaguucuagcuucu

SEQ ID NO: 743812 - RNA, 22 nt, Human
ugucugccaaagcuuccuccug

SEQ ID NO: 743813 - RNA, 22 nt, Human
cugcagguuaggagcacuccuu

SEQ ID NO: 743814 - RNA, 17 nt, Human
uguuaauuccaaugaua

SEQ ID NO: 743815 - RNA, 22 nt, Human
ucaguccugaugacaggcccaa

SEQ ID NO: 743816 - RNA, 22 nt, Human
cagucucuugcuucauuaguug

SEQ ID NO: 743817 - RNA, 22 nt, Human
acaucucaaauuccaggcucca

SEQ ID NO: 743818 - RNA, 22 nt, Human
ccaugugcuugcucuggcaccu

SEQ ID NO: 743819 - RNA, 22 nt, Human
ccugaguagcuggaauuaaagg

SEQ ID NO: 743820 - RNA, 22 nt, Human
ugagcccugaccuagccuggcc

SEQ ID NO: 743821 - RNA, 22 nt, Human
agccaaggacacggagccuccu

SEQ ID NO: 743822 - RNA, 22 nt, Human
ggcacagcgacuaccaucgaaa

SEQ ID NO: 743823 - RNA, 22 nt, Human
agccuggcacugaggcagggcg

SEQ ID NO: 743824 - RNA, 22 nt, Human
acacagaggcuccagagauaga

SEQ ID NO: 743825 - RNA, 22 nt, Human
ccccuuccaggaagcagaaucg

SEQ ID NO: 743826 - RNA, 22 nt, Human
uucuucucagggucccacaugg

SEQ ID NO: 743827 - RNA, 22 nt, Human
agcaccugcuuaaugugcagug

SEQ ID NO: 743828 - RNA, 22 nt, Human
ucuuacaagaaauaagccaaug

SEQ ID NO: 743829 - RNA, 22 nt, Human
aagucagaauaauguuucuuuu

SEQ ID NO: 743830 - RNA, 22 nt, Human
uagggggcuuugcugcuugaca

SEQ ID NO: 743831 - RNA, 22 nt, Human
guuacaaauguaaauucugggg

SEQ ID NO: 743832 - RNA, 22 nt, Human
uaagaguaagugauuaagaaga

SEQ ID NO: 743833 - RNA, 22 nt, Human
uccucuggcccagcugccucug

SEQ ID NO: 743834 - RNA, 22 nt, Human
ucacacacauggauaguauuuu

SEQ ID NO: 743835 - RNA, 22 nt, Human
agucacaguuccuacccaguaa

SEQ ID NO: 743836 - RNA, 21 nt, Human
ucucuguguucaaggugccag

SEQ ID NO: 743837 - RNA, 22 nt, Human
uccaggcaucuguauuuuuuaa

SEQ ID NO: 743838 - RNA, 22 nt, Human
gaaggagaggauugugaggcug

SEQ ID NO: 743839 - RNA, 22 nt, Human
guuucuuaauagcaggggccaa

SEQ ID NO: 743840 - RNA, 22 nt, Human
aaaucguuauaauguuaagccu

SEQ ID NO: 743841 - RNA, 22 nt, Human
uucuugaguaucugcacagugc

SEQ ID NO: 743842 - RNA, 22 nt, Human
ugccugccucuggcagcccugc

SEQ ID NO: 743843 - RNA, 22 nt, Human
cagcugccuaugaccuagccuc

SEQ ID NO: 743844 - RNA, 22 nt, Human
uuucagacauagccugauucug

SEQ ID NO: 743845 - RNA, 22 nt, Human
gucuuuuuauuauagaguggag

SEQ ID NO: 743846 - RNA, 22 nt, Human
ucacauaaauuauacaauuuca

SEQ ID NO: 743847 - RNA, 23 nt, Human
uuucacagcuuuuauucugcauc

SEQ ID NO: 743848 - RNA, 22 nt, Human
gagguucagcugcugccuggua

SEQ ID NO: 743849 - RNA, 22 nt, Human
cagaaaauaaaguuucuacgca

SEQ ID NO: 743850 - RNA, 22 nt, Human
agcaccuggucuccuggcgcug

SEQ ID NO: 743851 - RNA, 22 nt, Human
ugccaaguggagcucaggaauc

SEQ ID NO: 743852 - RNA, 22 nt, Human
gacuuuauuacuaacccuguga

SEQ ID NO: 743853 - RNA, 22 nt, Human
guguuuauuuagaguaggccau

SEQ ID NO: 743854 - RNA, 18 nt, Human
cccacccuggcucuuagu

SEQ ID NO: 743855 - RNA, 22 nt, Human
cccagguguuuguggcagaggu

SEQ ID NO: 743856 - RNA, 22 nt, Human
augcaacagucaguacauccgg

SEQ ID NO: 743857 - RNA, 22 nt, Human
gugcauuggugcgccacuucac

SEQ ID NO: 743858 - RNA, 22 nt, Human
gcagacagaagcuaaguagaca

SEQ ID NO: 743859 - RNA, 22 nt, Human
cugggccuucauugcucuccca

SEQ ID NO: 743860 - RNA, 22 nt, Human
gaacaggguugggugagagagg

SEQ ID NO: 743861 - RNA, 22 nt, Human
agcaggugacagggcuguggug

SEQ ID NO: 743862 - RNA, 22 nt, Human
cagugacguaaacugcaugugc

SEQ ID NO: 743863 - RNA, 22 nt, Human
uggcucagaagaaaagguaaac

SEQ ID NO: 743864 - RNA, 22 nt, Human
aauggcuuuuaaaaauagcauu

SEQ ID NO: 743865 - RNA, 22 nt, Human
ucacagcauucgcaauggacag

SEQ ID NO: 743866 - RNA, 20 nt, Human
gcacccagcuucuuguucua

SEQ ID NO: 743867 - RNA, 22 nt, Human
guuggcuaugagagcuuuagug

SEQ ID NO: 743868 - RNA, 22 nt, Human
ucuggcugaagcuuuugcagcu

SEQ ID NO: 743869 - RNA, 22 nt, Human
gcugucugucuucacaucucgc

SEQ ID NO: 743870 - RNA, 20 nt, Human
gccucuggagccaaggacca

SEQ ID NO: 743871 - RNA, 18 nt, Human
uguuaaaugaagauuugc

SEQ ID NO: 743872 - RNA, 22 nt, Human
ucaguggaacugucugggugag

SEQ ID NO: 743873 - RNA, 21 nt, Human
auuacaucccuggugauacau

SEQ ID NO: 743874 - RNA, 19 nt, Human
cugugggugugcaagggug

SEQ ID NO: 743875 - RNA, 20 nt, Human
uaauuugauaucuauaaguu

SEQ ID NO: 743876 - RNA, 22 nt, Human
uccugccacugcacauauacuu

SEQ ID NO: 743877 - RNA, 22 nt, Human
aguuuauucugcuuggcccucc

SEQ ID NO: 743878 - RNA, 22 nt, Human
uuucugauauacuguagaaucc

SEQ ID NO: 743879 - RNA, 23 nt, Human
agggaagaaacaugaagggcugu

SEQ ID NO: 743880 - RNA, 22 nt, Human
agaaguuguagguuugcauauu

SEQ ID NO: 743881 - RNA, 22 nt, Human
agaggcugggaaggguccccgg

SEQ ID NO: 743882 - RNA, 22 nt, Human
aggguccaguaacagaugccag

SEQ ID NO: 743883 - RNA, 22 nt, Human
uagaggcacccuggaggagacu

SEQ ID NO: 743884 - RNA, 22 nt, Human
ugacacaguaucaaacaugauu

SEQ ID NO: 743885 - RNA, 19 nt, Human
uaugacaaguacuaguucu

SEQ ID NO: 743886 - RNA, 22 nt, Human
cugaagauuuuugguaaucaug

SEQ ID NO: 743887 - RNA, 22 nt, Human
uccugaaauucugguugucacu

SEQ ID NO: 743888 - RNA, 22 nt, Human
agggaaauggagaguguaguuu

SEQ ID NO: 743889 - RNA, 22 nt, Human
auugucucugaauuuccagcug

SEQ ID NO: 743890 - RNA, 22 nt, Human
gacaagacugguuuauuuaagg

SEQ ID NO: 743891 - RNA, 22 nt, Human
aucugcuguucuucacagcuug

SEQ ID NO: 743892 - RNA, 22 nt, Human
uccaggcauuggagagauaaug

SEQ ID NO: 743893 - RNA, 22 nt, Human
gggcuguggagccgcgagggcu

SEQ ID NO: 743894 - RNA, 22 nt, Human
aaaguagucucuuucaucuuuu

SEQ ID NO: 743895 - RNA, 22 nt, Human
agcuuuaccugccuuggggcac

SEQ ID NO: 743896 - RNA, 22 nt, Human
uuagaacuuaagaauacugucu

SEQ ID NO: 743897 - RNA, 17 nt, Human
cguuagugauuccugcc

SEQ ID NO: 743898 - RNA, 22 nt, Human
uacuugcuggguguaauuuucu

SEQ ID NO: 743899 - RNA, 22 nt, Human
uagcuucugggaguguuuacua

SEQ ID NO: 743900 - RNA, 22 nt, Human
uggagguccugcaggauggcac

SEQ ID NO: 743901 - RNA, 22 nt, Human
cagugaaauaguggacaucaaa

SEQ ID NO: 743902 - RNA, 22 nt, Human
uucagaaggauuuuaacacaug

SEQ ID NO: 743903 - RNA, 22 nt, Human
ggcaugggccgaggugccuccu

SEQ ID NO: 743904 - RNA, 22 nt, Human
aagccaggaagagagccuucac

SEQ ID NO: 743905 - RNA, 22 nt, Human
ggcaggcauggggucugccauu

SEQ ID NO: 743906 - RNA, 22 nt, Human
ugugugaauggauuauucuauu

SEQ ID NO: 743907 - RNA, 22 nt, Human
gagggggcgugcaaggcuccgc

SEQ ID NO: 743908 - RNA, 21 nt, Human
gcaggcacucuagaggagcug

SEQ ID NO: 743909 - RNA, 22 nt, Human
acagagguuaggauggguugua

SEQ ID NO: 743910 - RNA, 22 nt, Human
ugcuucugcaacuugaauguac

SEQ ID NO: 743911 - RNA, 18 nt, Human
uccuucacagcaggaagg

SEQ ID NO: 743912 - RNA, 22 nt, Human
gacucugcuacaggccgagguu

SEQ ID NO: 743913 - RNA, 22 nt, Human
ggcuauauccucacaagaugga

SEQ ID NO: 743914 - RNA, 22 nt, Human
ugaagaacgugagauccagaaa

SEQ ID NO: 743915 - RNA, 22 nt, Human
uguguaaaaucugauuaauacu

SEQ ID NO: 743916 - RNA, 22 nt, Human
acagacauuuucuguauugccu

SEQ ID NO: 743917 - RNA, 22 nt, Human
ucaucauguuugauuuccacag

SEQ ID NO: 743918 - RNA, 22 nt, Human
ugcugguccccugcagccugug

SEQ ID NO: 743919 - RNA, 22 nt, Human
uggguccucuggagcagcagca

SEQ ID NO: 743920 - RNA, 22 nt, Human
cuagaaauauuuuacagucaag

SEQ ID NO: 743921 - RNA, 21 nt, Human
agccugggaggcggagguugc

SEQ ID NO: 743922 - RNA, 22 nt, Human
uggcuugguccuggcccuuccc

SEQ ID NO: 743923 - RNA, 22 nt, Human
agggcagcaauuugguuccugg

SEQ ID NO: 743924 - RNA, 22 nt, Human
guauacagauacuuagacgugc

SEQ ID NO: 743925 - RNA, 22 nt, Human
agaauaaaauagucugaagaug

SEQ ID NO: 743926 - RNA, 22 nt, Human
gcagccccaggagacgcccagg

SEQ ID NO: 743927 - RNA, 22 nt, Human
guggaaauaguuugguuauaga

SEQ ID NO: 743928 - RNA, 22 nt, Human
uggagcugaacuuugaggccag

SEQ ID NO: 743929 - RNA, 22 nt, Human
aggcacugacucaagggagcca

SEQ ID NO: 743930 - RNA, 22 nt, Human
aaggcaaugcuaagagguuugg

SEQ ID NO: 743931 - RNA, 22 nt, Human
gagcccuguagcaagucauguc

SEQ ID NO: 743932 - RNA, 22 nt, Human
gaagccugguucgcuggccacc

SEQ ID NO: 743933 - RNA, 22 nt, Human
cucuggaccucagcuacagacu

SEQ ID NO: 743934 - RNA, 22 nt, Human
cacaggaggaggugcccgggcc

SEQ ID NO: 743935 - RNA, 22 nt, Human
cugugcacuucucuuuauuugu

SEQ ID NO: 743936 - RNA, 22 nt, Human
uggaacacagugauugauagcg

SEQ ID NO: 743937 - RNA, 22 nt, Human
aucucuggccccugggguccga

SEQ ID NO: 743938 - RNA, 22 nt, Human
cugugccugccuuguucacuga

SEQ ID NO: 743939 - RNA, 22 nt, Human
guggcaacaaaagagccuagug

SEQ ID NO: 743940 - RNA, 22 nt, Human
ugcccugcggcuaucuagauga

SEQ ID NO: 743941 - RNA, 22 nt, Human
agaaugcaagauaaacuuuauu

SEQ ID NO: 743942 - RNA, 22 nt, Human
agcugagagcugugucaagaua

SEQ ID NO: 743943 - RNA, 22 nt, Human
gcugccucugcgacucugggcg

SEQ ID NO: 743944 - RNA, 22 nt, Human
gcauaggccacuagugccagga

SEQ ID NO: 743945 - RNA, 22 nt, Human
ggugcccagcgaaguggcugug

SEQ ID NO: 743946 - RNA, 22 nt, Human
cuggagcucuccagagccccgu

SEQ ID NO: 743947 - RNA, 22 nt, Human
cuguggcaagucugccugucac

SEQ ID NO: 743948 - RNA, 22 nt, Human
cuguguggccucaagccagccu

SEQ ID NO: 743949 - RNA, 22 nt, Human
caggaccugaagacaggcaggu

SEQ ID NO: 743950 - RNA, 22 nt, Human
ucucuguaagagaggcuuucau

SEQ ID NO: 743951 - RNA, 22 nt, Human
acauucaaggcagcacugagug

SEQ ID NO: 743952 - RNA, 22 nt, Human
accaggagccacaggaggagcc

SEQ ID NO: 743953 - RNA, 22 nt, Human
uugggcugaggagggcguggcc

SEQ ID NO: 743954 - RNA, 22 nt, Human
ucuggcuuuuauucaguuggca

SEQ ID NO: 743955 - RNA, 22 nt, Human
uggggacccggacuccuggguc

SEQ ID NO: 743956 - RNA, 22 nt, Human
auuccugcauuggucaacccau

SEQ ID NO: 743957 - RNA, 22 nt, Human
cuggugagacucagggaugcuu

SEQ ID NO: 743958 - RNA, 22 nt, Human
cugggagaggcugcuccgcucu

SEQ ID NO: 743959 - RNA, 22 nt, Human
uaagaugggggaaagaaauagu

SEQ ID NO: 743960 - RNA, 22 nt, Human
gagcugagaucauguacacuag

SEQ ID NO: 743961 - RNA, 22 nt, Human
auugcuuucuuuggggaacugu

SEQ ID NO: 743962 - RNA, 22 nt, Human
caaaucauggaauaacuagaga

SEQ ID NO: 743963 - RNA, 22 nt, Human
gggcagcagaggaucccuuaau

SEQ ID NO: 743964 - RNA, 22 nt, Human
ccucaggugugggccagcuguc

SEQ ID NO: 743965 - RNA, 22 nt, Human
gcugccuccacuggcucccagu

SEQ ID NO: 743966 - RNA, 22 nt, Human
uucccgucuuugcuaugccugc

SEQ ID NO: 743967 - RNA, 22 nt, Human
ccaggucuuuggccuuggcacu

SEQ ID NO: 743968 - RNA, 22 nt, Human
cuaguuuaaagcagcugaaagg

SEQ ID NO: 743969 - RNA, 22 nt, Human
caucuuaauaaaucuccucccu

SEQ ID NO: 743970 - RNA, 22 nt, Human
uacccuggagcaaguuuccuca

SEQ ID NO: 743971 - RNA, 19 nt, Human
agcagcagaagugugccuu

SEQ ID NO: 743972 - RNA, 23 nt, Human
uguaaagaucaagugacugauuu

SEQ ID NO: 743973 - RNA, 22 nt, Human
cugggccaggaccaggguugaa

SEQ ID NO: 743974 - RNA, 22 nt, Human
cauuguuugagcaucugggauc

SEQ ID NO: 743975 - RNA, 22 nt, Human
ggagauuuauagcacacuucag

SEQ ID NO: 743976 - RNA, 22 nt, Human
aaggggagaugucaugggcccu

SEQ ID NO: 743977 - RNA, 22 nt, Human
gaauucuuuucuuucugaaagu

SEQ ID NO: 743978 - RNA, 22 nt, Human
gagacacagagaggcuguguga

SEQ ID NO: 743979 - RNA, 22 nt, Human
ucucacuuuccagacuuuucaa

SEQ ID NO: 743980 - RNA, 22 nt, Human
ccagggugugggcgucggcacg

SEQ ID NO: 743981 - RNA, 22 nt, Human
cugugcuucagagucagugcug

SEQ ID NO: 743982 - RNA, 22 nt, Human
gcccugugauggagacuagagg

SEQ ID NO: 743983 - RNA, 22 nt, Human
cucuccaggagagcacuuugag

SEQ ID NO: 743984 - RNA, 19 nt, Human
acccagggguuuaugugug

SEQ ID NO: 743985 - RNA, 22 nt, Human
aggacuaaggaacagcugauuc

SEQ ID NO: 743986 - RNA, 22 nt, Human
uggaggcauaggccugggcccu

SEQ ID NO: 743987 - RNA, 22 nt, Human
auuucuguaacuuaugaaaguu

SEQ ID NO: 743988 - RNA, 22 nt, Human
ugcucaguuaagcagaggaaau

SEQ ID NO: 743989 - RNA, 22 nt, Human
agggccuggcgcguggccgccg

SEQ ID NO: 743990 - RNA, 22 nt, Human
ccuguguggaaggcaggaggcc

SEQ ID NO: 743991 - RNA, 22 nt, Human
gcugaauaauguguaaugucuc

SEQ ID NO: 743992 - RNA, 22 nt, Human
ugagucacagccuugccuuggu

SEQ ID NO: 743993 - RNA, 22 nt, Human
uaaggccagcaugaaugcagca

SEQ ID NO: 743994 - RNA, 22 nt, Human
uucaggaucauuuguuuuaucu

SEQ ID NO: 743995 - RNA, 22 nt, Human
gggauggacugacgguagcgcg

SEQ ID NO: 743996 - RNA, 22 nt, Human
ucugcguugcucacgcugggag

SEQ ID NO: 743997 - RNA, 22 nt, Human
acagugaaaagaauauuagaau

SEQ ID NO: 743998 - RNA, 22 nt, Human
ucagcccugggacccagggaug

SEQ ID NO: 743999 - RNA, 22 nt, Human
ggcugcugagucacgacaguga

SEQ ID NO: 744000 - RNA, 22 nt, Human
gucccagcuucccacuagcagc

SEQ ID NO: 744001 - RNA, 22 nt, Human
agagccugcagcugugaagaaa

SEQ ID NO: 744002 - RNA, 22 nt, Human
caggggacacuccugcuugggc

SEQ ID NO: 744003 - RNA, 22 nt, Human
ugggagaacacugcucuggaug

SEQ ID NO: 744004 - RNA, 22 nt, Human
uaaagguagcaugaaacugcaa

SEQ ID NO: 744005 - RNA, 20 nt, Human
uguuucauaagcuguccuau

SEQ ID NO: 744006 - RNA, 22 nt, Human
aaugcuuuugcugucauugcuu

SEQ ID NO: 744007 - RNA, 22 nt, Human
auaaaauuugcuacuguuaaau

SEQ ID NO: 744008 - RNA, 22 nt, Human
cucuggccagagccugcgggaa

SEQ ID NO: 744009 - RNA, 22 nt, Human
ggcucacgcaauuaucccggcc

SEQ ID NO: 744010 - RNA, 22 nt, Human
gacauuuauuagaaaacuauca

SEQ ID NO: 744011 - RNA, 22 nt, Human
uaauauauaccuuuguuaggaa

SEQ ID NO: 744012 - RNA, 22 nt, Human
ccagaggacuugggggcugaau

SEQ ID NO: 744013 - RNA, 18 nt, Human
aggugcucaaaugggaaa

SEQ ID NO: 744014 - RNA, 22 nt, Human
augcucaguagcuggcugaccc

SEQ ID NO: 744015 - RNA, 17 nt, Human
aaauaugaccucaaagu

SEQ ID NO: 744016 - RNA, 22 nt, Human
gaaacauauuaauccagugaaa

SEQ ID NO: 744017 - RNA, 22 nt, Human
ucaggauguuaauauagcauua

SEQ ID NO: 744018 - RNA, 22 nt, Human
aguccuggccccaaggaaggau

SEQ ID NO: 744019 - RNA, 22 nt, Human
gcugucagcgcccaaggagcuc

SEQ ID NO: 744020 - RNA, 22 nt, Human
aguccaggcauuccagccauuc

SEQ ID NO: 744021 - RNA, 22 nt, Human
ggggaggagccauguaacuagu

SEQ ID NO: 744022 - RNA, 22 nt, Human
ggucaucuguaauucuguuccu

SEQ ID NO: 744023 - RNA, 22 nt, Human
uccacugacaggugaauggaua

SEQ ID NO: 744024 - RNA, 22 nt, Human
uggcucagcauucacuggucuu

SEQ ID NO: 744025 - RNA, 22 nt, Human
gucugcuuucugggaacucuuu

SEQ ID NO: 744026 - RNA, 22 nt, Human
ccugccugggcucacuugccag

SEQ ID NO: 744027 - RNA, 22 nt, Human
gcuggcuggagugagcuacccu

SEQ ID NO: 744028 - RNA, 22 nt, Human
uggcuguagaacaguggauauu

SEQ ID NO: 744029 - RNA, 22 nt, Human
auaguuguguggggauucuggu

SEQ ID NO: 744030 - RNA, 23 nt, Human
gagauucuccuguugucaagucu

SEQ ID NO: 744031 - RNA, 22 nt, Human
cugggacacccaaggaaagagc

SEQ ID NO: 744032 - RNA, 22 nt, Human
uugucccaggacuugcauagau

SEQ ID NO: 744033 - RNA, 19 nt, Human
aagcaauguugugaaucua

SEQ ID NO: 744034 - RNA, 22 nt, Human
ucagcacugauguuucagaaga

SEQ ID NO: 744035 - RNA, 20 nt, Human
uuccuggcucuaggaccuug

SEQ ID NO: 744036 - RNA, 22 nt, Human
uccucugaaaucuagauuguga

SEQ ID NO: 744037 - RNA, 22 nt, Human
aguuacacaacuuaucacaucu

SEQ ID NO: 744038 - RNA, 21 nt, Human
acaaugucaaggucagacauu

SEQ ID NO: 744039 - RNA, 22 nt, Human
uuucagaaauuguuauuauucu

SEQ ID NO: 744040 - RNA, 22 nt, Human
cagggagcuuugucuucucauu

SEQ ID NO: 744041 - RNA, 22 nt, Human
uuggccaagggaucgagguugg

SEQ ID NO: 744042 - RNA, 22 nt, Human
agcuuccugacuggugcucuua

SEQ ID NO: 744043 - RNA, 22 nt, Human
ucuggaaugaaugagguucugu

SEQ ID NO: 744044 - RNA, 22 nt, Human
caggcagaagaaguggaaggac

SEQ ID NO: 744045 - RNA, 22 nt, Human
acacuucuauucccugcacaaa

SEQ ID NO: 744046 - RNA, 22 nt, Human
uaaaccaaguguccauauuagu

SEQ ID NO: 744047 - RNA, 22 nt, Human
gggaucugggacaacagguggu

SEQ ID NO: 744048 - RNA, 22 nt, Human
gagucaggcacugcugcugcuc

SEQ ID NO: 744049 - RNA, 22 nt, Human
aaggaagagcaaagaauuaugu

SEQ ID NO: 744050 - RNA, 22 nt, Human
uuacacauugcagaucaaaaug

SEQ ID NO: 744051 - RNA, 21 nt, Human
cccacggaaugaugaggcacu

SEQ ID NO: 744052 - RNA, 22 nt, Human
uguuccagauucggcgugggac

SEQ ID NO: 744053 - RNA, 22 nt, Human
cacauuuaucucucuccgguga

SEQ ID NO: 744054 - RNA, 22 nt, Human
gaacaaauuggagaaaucagga

SEQ ID NO: 744055 - RNA, 22 nt, Human
uggagucacuuccauaugggaa

SEQ ID NO: 744056 - RNA, 23 nt, Human
agucugugcugaagaaguuacaa

SEQ ID NO: 744057 - RNA, 22 nt, Human
ugagccugguugcagugucugg

SEQ ID NO: 744058 - RNA, 22 nt, Human
gagccccaggacagcucuaguu

SEQ ID NO: 744059 - RNA, 22 nt, Human
aagccagcauuuucccauuccu

SEQ ID NO: 744060 - RNA, 22 nt, Human
caguauaugcucuuucaucaaa

SEQ ID NO: 744061 - RNA, 22 nt, Human
agaggcuguuacacucccagau

SEQ ID NO: 744062 - RNA, 22 nt, Human
cagcuuggaggaggaucuaaga

SEQ ID NO: 744063 - RNA, 22 nt, Human
ucucagugacugcugggucccc

SEQ ID NO: 744064 - RNA, 22 nt, Human
cuggcuucagcugccaucaaug

SEQ ID NO: 744065 - RNA, 22 nt, Human
uaguuuagcacuaagaaaaaca

SEQ ID NO: 744066 - RNA, 22 nt, Human
caggaagagguaucaccgagca

SEQ ID NO: 744067 - RNA, 22 nt, Human
cacagggccuggggcagcugcu

SEQ ID NO: 744068 - RNA, 22 nt, Human
aaguuugagaagcuuauagaua

SEQ ID NO: 744069 - RNA, 22 nt, Human
uguguccuucugggagucccag

SEQ ID NO: 744070 - RNA, 22 nt, Human
uuuucugugugucccucgacag

SEQ ID NO: 744071 - RNA, 22 nt, Human
gaacaacuuugaaacaugaaga

SEQ ID NO: 744072 - RNA, 22 nt, Human
ugcuggccaacaaggcuccaag

SEQ ID NO: 744073 - RNA, 21 nt, Human
uuaagaccugcaucaucauua

SEQ ID NO: 744074 - RNA, 18 nt, Human
cuucaguggcugcucugc

SEQ ID NO: 744075 - RNA, 22 nt, Human
aaauggauguugaguuaaaugu

SEQ ID NO: 744076 - RNA, 22 nt, Human
ugcauuaagguaauuguauaau

SEQ ID NO: 744077 - RNA, 22 nt, Human
cgcugccaggucaccaggggua

SEQ ID NO: 744078 - RNA, 22 nt, Human
ucuucaaagcauaugcaggcau

SEQ ID NO: 744079 - RNA, 22 nt, Human
uauguguguaugacagacagag

SEQ ID NO: 744080 - RNA, 22 nt, Human
ucuuccucuucugcugagaagu

SEQ ID NO: 744081 - RNA, 22 nt, Human
augggcugugagguccggcagg

SEQ ID NO: 744082 - RNA, 22 nt, Human
cauugucacccaaagcucauag

SEQ ID NO: 744083 - RNA, 22 nt, Human
gauugcaaaucauuacaaagga

SEQ ID NO: 744084 - RNA, 22 nt, Human
uuuuuagccaagccauaggucu

SEQ ID NO: 744085 - RNA, 22 nt, Human
aaguacaacgcauacagagaaa

SEQ ID NO: 744086 - RNA, 22 nt, Human
acaugacuauaauuacuuaaau

SEQ ID NO: 744087 - RNA, 22 nt, Human
acccugggaacuggaaacugga

SEQ ID NO: 744088 - RNA, 22 nt, Human
uugaaaguuaggauuuagcugg

SEQ ID NO: 744089 - RNA, 20 nt, Human
uccucccccaccuuugcagc

SEQ ID NO: 744090 - RNA, 22 nt, Human
caaggcagaauucagacucagg

SEQ ID NO: 744091 - RNA, 22 nt, Human
ugaagcaguucucagaaguggg

SEQ ID NO: 744092 - RNA, 18 nt, Human
aggcaggauccuggccuc

SEQ ID NO: 744093 - RNA, 22 nt, Human
ccaggaaaccugcgccauccag

SEQ ID NO: 744094 - RNA, 22 nt, Human
ccugccugcggcccgcggggag

SEQ ID NO: 744095 - RNA, 22 nt, Human
aagucauagucgggaaagacau

SEQ ID NO: 744096 - RNA, 22 nt, Human
ugugaacauuucugguuauuug

SEQ ID NO: 744097 - RNA, 22 nt, Human
uuguuguuggagccaauaugca

SEQ ID NO: 744098 - RNA, 22 nt, Human
aggcaucaggaguauagccaga

SEQ ID NO: 744099 - RNA, 22 nt, Human
gggggcuggacuuucccacaca

SEQ ID NO: 744100 - RNA, 22 nt, Human
acagugugaugggccugccuga

SEQ ID NO: 744101 - RNA, 22 nt, Human
ucccagaggucucugcugguuc

SEQ ID NO: 744102 - RNA, 22 nt, Human
caggccacaaguuggguucaag

SEQ ID NO: 744103 - RNA, 22 nt, Human
aguguuuuauuagaacacagcc

SEQ ID NO: 744104 - RNA, 22 nt, Human
aauggagacccuaaggaagagg

SEQ ID NO: 744105 - RNA, 23 nt, Human
agaguaauguuuuuacuguauuc

SEQ ID NO: 744106 - RNA, 22 nt, Human
agcuccugaguagcuuuacuca

SEQ ID NO: 744107 - RNA, 22 nt, Human
uccaucaccacagaggacagag

SEQ ID NO: 744108 - RNA, 22 nt, Human
cgugucugggauagcagaagua

SEQ ID NO: 744109 - RNA, 20 nt, Human
ucccucccuccagcucuggg

SEQ ID NO: 744110 - RNA, 20 nt, Human
acauaugaaugauagagcca

SEQ ID NO: 744111 - RNA, 22 nt, Human
aagaaacuguugcgugacagcg

SEQ ID NO: 744112 - RNA, 22 nt, Human
cacagaggaugcccaagcgauc

SEQ ID NO: 744113 - RNA, 22 nt, Human
cugcagagaccuaggucagguu

SEQ ID NO: 744114 - RNA, 22 nt, Human
agucaacaaaaauguggagccu

SEQ ID NO: 744115 - RNA, 22 nt, Human
ucacugcuuuguuuacaacuau

SEQ ID NO: 744116 - RNA, 22 nt, Human
uugauucaguaaagcuaaauuu

SEQ ID NO: 744117 - RNA, 22 nt, Human
auugcaaaggucccauucaaga

SEQ ID NO: 744118 - RNA, 22 nt, Human
uccaagaagcuuacaaucuaau

SEQ ID NO: 744119 - RNA, 22 nt, Human
uagagagagcugugguggcucu

SEQ ID NO: 744120 - RNA, 22 nt, Human
gagaaccucuccacaagucugg

SEQ ID NO: 744121 - RNA, 22 nt, Human
uucuccauuuaacuuccuuaug

SEQ ID NO: 744122 - RNA, 23 nt, Human
ugaaggccuggaggacgcguugu

SEQ ID NO: 744123 - RNA, 19 nt, Human
agaagcugugaaaugaagg

SEQ ID NO: 744124 - RNA, 22 nt, Human
ucuagcuguggucgagugagga

SEQ ID NO: 744125 - RNA, 19 nt, Human
gugagacccugcauagggc

SEQ ID NO: 744126 - RNA, 22 nt, Human
cuguuuauacgacagguggagg

SEQ ID NO: 744127 - RNA, 20 nt, Human
uuggaaucaccuggagaggu

SEQ ID NO: 744128 - RNA, 23 nt, Human
uaacuuacaucauucugcacaag

SEQ ID NO: 744129 - RNA, 22 nt, Human
uugacaaagauauauucaugcu

SEQ ID NO: 744130 - RNA, 22 nt, Human
aaugaugagaacuggaguaauu

SEQ ID NO: 744131 - RNA, 20 nt, Human
ucugaggcugagcucuacuu

SEQ ID NO: 744132 - RNA, 22 nt, Human
uagugaaacaguuaucaaucug

SEQ ID NO: 744133 - RNA, 22 nt, Human
ugcagccauuugaaaagcaguu

SEQ ID NO: 744134 - RNA, 22 nt, Human
cucaggauccaucuccugcccu

SEQ ID NO: 744135 - RNA, 22 nt, Human
ggcuggucucagugcuggguuc

SEQ ID NO: 744136 - RNA, 22 nt, Human
uuugguuuuuaauacaaaguac

SEQ ID NO: 744137 - RNA, 22 nt, Human
uuucagagaauuagaagcugau

SEQ ID NO: 744138 - RNA, 22 nt, Human
gaaucaggauucaagaucagcu

SEQ ID NO: 744139 - RNA, 22 nt, Human
cagcaacugugccugacacaca

SEQ ID NO: 744140 - RNA, 22 nt, Human
uagcagcuaugccauuuugaca

SEQ ID NO: 744141 - RNA, 22 nt, Human
guggacagcuucuaggugccag

SEQ ID NO: 744142 - RNA, 22 nt, Human
agauauguuuguauauauuugu

SEQ ID NO: 744143 - RNA, 22 nt, Human
ugguuuugcuccaguauaaaua

SEQ ID NO: 744144 - RNA, 22 nt, Human
cucucugguuucagcgaagggg

SEQ ID NO: 744145 - RNA, 22 nt, Human
uccugggaagagaccugagcau

SEQ ID NO: 744146 - RNA, 22 nt, Human
uggcagcuguguccagguagaa

SEQ ID NO: 744147 - RNA, 22 nt, Human
uggggcagcagaccuuucuugg

SEQ ID NO: 744148 - RNA, 22 nt, Human
aaagaggcagguguuacuggaa

SEQ ID NO: 744149 - RNA, 22 nt, Human
accuggcauaagggcuugaguc

SEQ ID NO: 744150 - RNA, 22 nt, Human
agaggcuccucggugccucgug

SEQ ID NO: 744151 - RNA, 22 nt, Human
uccugagagcagaguccaggug

SEQ ID NO: 744152 - RNA, 17 nt, Human
uucagcaguguuucucc

SEQ ID NO: 744153 - RNA, 22 nt, Human
ggguucagacuaaagcuaugca

SEQ ID NO: 744154 - RNA, 22 nt, Human
uucagcacuggacagcgagucu

SEQ ID NO: 744155 - RNA, 22 nt, Human
ccaauguuuuauacagaaguac

SEQ ID NO: 744156 - RNA, 22 nt, Human
uggagcaggucggcaccauuug

SEQ ID NO: 744157 - RNA, 22 nt, Human
uccucaguggggcauucauuau

SEQ ID NO: 744158 - RNA, 22 nt, Human
ugauuuccaguugcugggugcu

SEQ ID NO: 744159 - RNA, 22 nt, Human
cagauucaaccuaagacaaucu

SEQ ID NO: 744160 - RNA, 22 nt, Human
aagggcuggccacauucugggu

SEQ ID NO: 744161 - RNA, 22 nt, Human
cccagggacagcuagguggggc

SEQ ID NO: 744162 - RNA, 22 nt, Human
cagagccccuggguugggagcu

SEQ ID NO: 744163 - RNA, 22 nt, Human
caaaaguucucacccagacaug

SEQ ID NO: 744164 - RNA, 22 nt, Human
ccacuuuugggaacagugagua

SEQ ID NO: 744165 - RNA, 22 nt, Human
auuguacucccucuccugcccg

SEQ ID NO: 744166 - RNA, 22 nt, Human
uauuuccugcauggugauguaa

SEQ ID NO: 744167 - RNA, 20 nt, Human
aguggaauuucagauacccc

SEQ ID NO: 744168 - RNA, 22 nt, Human
ucugccucgcuaacagcagcca

SEQ ID NO: 744169 - RNA, 22 nt, Human
cucugggaagggcugagcacug

SEQ ID NO: 744170 - RNA, 23 nt, Human
ugcugggcagagcuggugcugag

SEQ ID NO: 744171 - RNA, 22 nt, Human
ucauaaagagugcuguuguuuu

SEQ ID NO: 744172 - RNA, 22 nt, Human
acagcugacauuggcagcuauu

SEQ ID NO: 744173 - RNA, 22 nt, Human
ccugggaggcggagguugcagg

SEQ ID NO: 744174 - RNA, 22 nt, Human
ggcuucaggggcccagucagca

SEQ ID NO: 744175 - RNA, 22 nt, Human
aggcugguguguccugaagccu

SEQ ID NO: 744176 - RNA, 22 nt, Human
gcacagaaaugucuacacaugu

SEQ ID NO: 744177 - RNA, 22 nt, Human
acaggcucgugcgcgcacgugu

SEQ ID NO: 744178 - RNA, 23 nt, Human
ucucuuaccugagacauuuccua

SEQ ID NO: 744179 - RNA, 22 nt, Human
uugugcuagaaccaguacagaa

SEQ ID NO: 744180 - RNA, 22 nt, Human
agcugcaggcccaugcucaguc

SEQ ID NO: 744181 - RNA, 22 nt, Human
agcaaggaguagaacaagagug

SEQ ID NO: 744182 - RNA, 22 nt, Human
guggcagaaaugggacuuugag

SEQ ID NO: 744183 - RNA, 22 nt, Human
ccugcaccaggcccagcauggu

SEQ ID NO: 744184 - RNA, 22 nt, Human
agugggagggccauauggugaa

SEQ ID NO: 744185 - RNA, 22 nt, Human
agcaccuguggcucaugcucgu

SEQ ID NO: 744186 - RNA, 22 nt, Human
ugauucugcccuuucuucugac

SEQ ID NO: 744187 - RNA, 22 nt, Human
gcguuggggaccccgaagcugg

SEQ ID NO: 744188 - RNA, 22 nt, Human
aagagagacaauagguagcauu

SEQ ID NO: 744189 - RNA, 22 nt, Human
aaccauggauuucaguucaccu

SEQ ID NO: 744190 - RNA, 22 nt, Human
ggcugcuugcuguuucuuggau

SEQ ID NO: 744191 - RNA, 22 nt, Human
aauguaugagcgugaaagcacu

SEQ ID NO: 744192 - RNA, 22 nt, Human
ccuguguggccgcacugcuccc

SEQ ID NO: 744193 - RNA, 22 nt, Human
ucugggaagccuguaugcagaa

SEQ ID NO: 744194 - RNA, 22 nt, Human
ggacaaagcucugcugccuccc

SEQ ID NO: 744195 - RNA, 22 nt, Human
uggcucugggaaucuguugcuu

SEQ ID NO: 744196 - RNA, 22 nt, Human
uggggagguaacaauuucaggc

SEQ ID NO: 744197 - RNA, 22 nt, Human
ggagcuggucagccuugagcau

SEQ ID NO: 744198 - RNA, 22 nt, Human
gcagcaggcacggucucgacau

SEQ ID NO: 744199 - RNA, 22 nt, Human
ugcuccagcaugacccucaaug

SEQ ID NO: 744200 - RNA, 20 nt, Human
ucccaaggaugccugggugu

SEQ ID NO: 744201 - RNA, 22 nt, Human
ugggcacuggaagccugcugug

SEQ ID NO: 744202 - RNA, 18 nt, Human
ugcaggagugaccccggc

SEQ ID NO: 744203 - RNA, 22 nt, Human
gccugggaaaugguggggucag

SEQ ID NO: 744204 - RNA, 22 nt, Human
cugggcucuaggaaccauuccu

SEQ ID NO: 744205 - RNA, 19 nt, Human
uuuaaagugacugguauuu

SEQ ID NO: 744206 - RNA, 17 nt, Human
aagacagaagccaugag

SEQ ID NO: 744207 - RNA, 22 nt, Human
ugaggcuaaaggugaccagauu

SEQ ID NO: 744208 - RNA, 22 nt, Human
cuggaucuguccccuuuuuguu

SEQ ID NO: 744209 - RNA, 22 nt, Human
gacaaggaaauuacuagcugga

SEQ ID NO: 744210 - RNA, 22 nt, Human
aaagccaucaguaaaaugauuu

SEQ ID NO: 744211 - RNA, 22 nt, Human
caccugagacuccucaccauga

SEQ ID NO: 744212 - RNA, 22 nt, Human
uggugagauaacuuucggcaag

SEQ ID NO: 744213 - RNA, 22 nt, Human
ugcuccugacaguuuuaggcuc

SEQ ID NO: 744214 - RNA, 23 nt, Human
ucucaaaucuuugcguuguaucu

SEQ ID NO: 744215 - RNA, 22 nt, Human
ccucaggggucacugugaggag

SEQ ID NO: 744216 - RNA, 22 nt, Human
guguggaaagaguggccucuca

SEQ ID NO: 744217 - RNA, 22 nt, Human
agcagguguuuguaucauaagg

SEQ ID NO: 744218 - RNA, 22 nt, Human
acagugauugggguaucugcag

SEQ ID NO: 744219 - RNA, 22 nt, Human
aaacucucauuuuagugcacug

SEQ ID NO: 744220 - RNA, 22 nt, Human
aucaacaugucauaaagugaaa

SEQ ID NO: 744221 - RNA, 18 nt, Human
acagggagggcgcugggg

SEQ ID NO: 744222 - RNA, 22 nt, Human
caggccuggguucaaaucccuu

SEQ ID NO: 744223 - RNA, 22 nt, Human
gagguagggcagaggcugaaug

SEQ ID NO: 744224 - RNA, 17 nt, Human
cuggagaagccugugga

SEQ ID NO: 744225 - RNA, 22 nt, Human
cuuauuuuaagucaguuugggu

SEQ ID NO: 744226 - RNA, 22 nt, Human
ucugacaaugaacaaucuauag

SEQ ID NO: 744227 - RNA, 22 nt, Human
cagagacagccugggagggaca

SEQ ID NO: 744228 - RNA, 22 nt, Human
augcauuggucagggucuuagg

SEQ ID NO: 744229 - RNA, 22 nt, Human
gccaaugacagucucaguucug

SEQ ID NO: 744230 - RNA, 22 nt, Human
uguggagcccccaggagugggg

SEQ ID NO: 744231 - RNA, 19 nt, Human
uuuuccuucuauauguuuc

SEQ ID NO: 744232 - RNA, 22 nt, Human
aggcaggagugacccugacagg

SEQ ID NO: 744233 - RNA, 22 nt, Human
aagacacagcgaaauguuccug

SEQ ID NO: 744234 - RNA, 22 nt, Human
gugcacagauuuaauuuuauuc

SEQ ID NO: 744235 - RNA, 22 nt, Human
ggcagcagggucuagauugaug

SEQ ID NO: 744236 - RNA, 22 nt, Human
uccuauugguagacauuucugu

SEQ ID NO: 744237 - RNA, 22 nt, Human
aaagggaaguugcacauguucc

SEQ ID NO: 744238 - RNA, 22 nt, Human
aggaggccuggcuggggagauc

SEQ ID NO: 744239 - RNA, 22 nt, Human
ucacauuuucauauucucugag

SEQ ID NO: 744240 - RNA, 22 nt, Human
uggccugccuucgcugagcuga

SEQ ID NO: 744241 - RNA, 22 nt, Human
uuguucaucuggaacccagagc

SEQ ID NO: 744242 - RNA, 22 nt, Human
uccacccaguguuucuacaggu

SEQ ID NO: 744243 - RNA, 22 nt, Human
cugaauaauuuuauaguugcug

SEQ ID NO: 744244 - RNA, 22 nt, Human
uggaaaacuuugguggugaggg

SEQ ID NO: 744245 - RNA, 22 nt, Human
ggccaugguuggggaagacaug

SEQ ID NO: 744246 - RNA, 22 nt, Human
uaagacaugguugaucuagugu

SEQ ID NO: 744247 - RNA, 22 nt, Human
uaacacuugggggcauccuuag

SEQ ID NO: 744248 - RNA, 22 nt, Human
agggcccuggggugcacugaca

SEQ ID NO: 744249 - RNA, 22 nt, Human
uggaugcuguaggacacgcucu

SEQ ID NO: 744250 - RNA, 22 nt, Human
caugaauuuauauuauuaguga

SEQ ID NO: 744251 - RNA, 22 nt, Human
ucauuuauauuguauucuguag

SEQ ID NO: 744252 - RNA, 22 nt, Human
gacuuggggauuuaucucacag

SEQ ID NO: 744253 - RNA, 22 nt, Human
agagggagugaaauggaauaga

SEQ ID NO: 744254 - RNA, 22 nt, Human
cagcagaaaaugugggugauuu

SEQ ID NO: 744255 - RNA, 22 nt, Human
ugaggcaguauuuuagugacuu

SEQ ID NO: 744256 - RNA, 22 nt, Human
cagaccucaguccucaguagga

SEQ ID NO: 744257 - RNA, 21 nt, Human
gaugauggcaggcagcacugg

SEQ ID NO: 744258 - RNA, 22 nt, Human
aaggccauuguaauguaaauau

SEQ ID NO: 744259 - RNA, 22 nt, Human
ccuggcucgcugaccucagggg

SEQ ID NO: 744260 - RNA, 19 nt, Human
auuuacugccuaaaaucuc

SEQ ID NO: 744261 - RNA, 22 nt, Human
ugcuggagacucacucaggugc

SEQ ID NO: 744262 - RNA, 22 nt, Human
gcauggccuugugcuccuucuc

SEQ ID NO: 744263 - RNA, 22 nt, Human
uccagauggauuuaagaccuaa

SEQ ID NO: 744264 - RNA, 22 nt, Human
guuucauauaccaagcacuuga

SEQ ID NO: 744265 - RNA, 22 nt, Human
ucccaagcccuggaugccucag

SEQ ID NO: 744266 - RNA, 19 nt, Human
ccugaggugggguggaagg

SEQ ID NO: 744267 - RNA, 22 nt, Human
auggccaccauuuaaugaagcu

SEQ ID NO: 744268 - RNA, 22 nt, Human
augugcuuuauuaaguaaaaau

SEQ ID NO: 744269 - RNA, 22 nt, Human
cacauguccuggcgcugagccc

SEQ ID NO: 744270 - RNA, 22 nt, Human
ggcugcagggcagcuggugugg

SEQ ID NO: 744271 - RNA, 22 nt, Human
cugaggugcuauggaggauacg

SEQ ID NO: 744272 - RNA, 22 nt, Human
cugcagagcuuucugaaugaag

SEQ ID NO: 744273 - RNA, 22 nt, Human
ccucuucuaccauuuacauuuu

SEQ ID NO: 744274 - RNA, 22 nt, Human
gguccugaggggagcugaaggu

SEQ ID NO: 744275 - RNA, 22 nt, Human
uugagaaugaugagauucuucc

SEQ ID NO: 744276 - RNA, 22 nt, Human
ucccucagagggcaagcgcaga

SEQ ID NO: 744277 - RNA, 22 nt, Human
cgggggcacccacaaaugagga

SEQ ID NO: 744278 - RNA, 23 nt, Human
cuucucugagcuaggaaugcucu

SEQ ID NO: 744279 - RNA, 22 nt, Human
agggacuauuuacccaucucac

SEQ ID NO: 744280 - RNA, 22 nt, Human
aacuuccuucuaguucauaugu

SEQ ID NO: 744281 - RNA, 22 nt, Human
aggaaauaagggcacuucagau

SEQ ID NO: 744282 - RNA, 22 nt, Human
acaugcauguuguguagggggg

SEQ ID NO: 744283 - RNA, 22 nt, Human
uagggcucuggugggcucuguu

SEQ ID NO: 744284 - RNA, 22 nt, Human
cugcuguccaaccugcacucgc

SEQ ID NO: 744285 - RNA, 22 nt, Human
cccuguggcaggaggaggagca

SEQ ID NO: 744286 - RNA, 22 nt, Human
augcauuuguaaaauauaaucg

SEQ ID NO: 744287 - RNA, 22 nt, Human
ucccagccauuccuuuaggugu

SEQ ID NO: 744288 - RNA, 22 nt, Human
cccaggcuggggcuccuccagc

SEQ ID NO: 744289 - RNA, 19 nt, Human
aggguccagggagcggcuc

SEQ ID NO: 744290 - RNA, 22 nt, Human
ccucacuuuccuuucuccuggg

SEQ ID NO: 744291 - RNA, 22 nt, Human
aacaucacaauuucauuuaugc

SEQ ID NO: 744292 - RNA, 22 nt, Human
ucuccucaccaccagcagcaga

SEQ ID NO: 744293 - RNA, 22 nt, Human
guuucuuuuaaaauauguagac

SEQ ID NO: 744294 - RNA, 22 nt, Human
uauacacauuacaguuucagga

SEQ ID NO: 744295 - RNA, 22 nt, Human
uucuaacaaguggcuuguuagu

SEQ ID NO: 744296 - RNA, 22 nt, Human
ggcccugggcagaggagugggc

SEQ ID NO: 744297 - RNA, 22 nt, Human
ggccagggggcuucagacucca

SEQ ID NO: 744298 - RNA, 18 nt, Human
aggcaugguggugcgcac

SEQ ID NO: 744299 - RNA, 22 nt, Human
gcagagaccccgcagugaggcc

SEQ ID NO: 744300 - RNA, 22 nt, Human
ugggugcuucgucagcucugag

SEQ ID NO: 744301 - RNA, 22 nt, Human
uagugggugauuugaugaggaa

SEQ ID NO: 744302 - RNA, 22 nt, Human
ucauucauacucuuuucuauua

SEQ ID NO: 744303 - RNA, 22 nt, Human
aggggcacuagaaugggagacu

SEQ ID NO: 744304 - RNA, 22 nt, Human
gugcuuuuaaaggcaauuagua

SEQ ID NO: 744305 - RNA, 22 nt, Human
caguccuuucaauggugaccuu

SEQ ID NO: 744306 - RNA, 22 nt, Human
ggcuguggcauuaggugaggcc

SEQ ID NO: 744307 - RNA, 16 nt, Human
aucuaagaugugcauu

SEQ ID NO: 744308 - RNA, 22 nt, Human
acauuauagcuuugaguuugga

SEQ ID NO: 744309 - RNA, 22 nt, Human
aacauagaauuguuauauuuuc

SEQ ID NO: 744310 - RNA, 22 nt, Human
ucauugcaagcucauuuaucug

SEQ ID NO: 744311 - RNA, 22 nt, Human
ugggauauaccuauccuagaag

SEQ ID NO: 744312 - RNA, 22 nt, Human
cuuuuccuauugauucuguuac

SEQ ID NO: 744313 - RNA, 22 nt, Human
auggccuuggcugcagagacau

SEQ ID NO: 744314 - RNA, 22 nt, Human
ucauacaucuuguauaucuauc

SEQ ID NO: 744315 - RNA, 22 nt, Human
aguaaauaacagagaaaauggg

SEQ ID NO: 744316 - RNA, 22 nt, Human
ugcagaggugaaagacuagcaa

SEQ ID NO: 744317 - RNA, 22 nt, Human
gcucugugguggggcagaguuu

SEQ ID NO: 744318 - RNA, 22 nt, Human
cccagcccccgagugucuggaa

SEQ ID NO: 744319 - RNA, 22 nt, Human
uggcugagguaacuaugaauaa

SEQ ID NO: 744320 - RNA, 22 nt, Human
acaaguuuuggaagucuuaagg

SEQ ID NO: 744321 - RNA, 23 nt, Human
uccuccugacacagccugaguga

SEQ ID NO: 744322 - RNA, 22 nt, Human
uucuccugcccuuggacuucca

SEQ ID NO: 744323 - RNA, 22 nt, Human
aauucugcauaagguggcucug

SEQ ID NO: 744324 - RNA, 22 nt, Human
gagcagggagacaacucuggug

SEQ ID NO: 744325 - RNA, 19 nt, Human
uucuaugauuaacaugaga

SEQ ID NO: 744326 - RNA, 22 nt, Human
gacagccuggcuuaaucugucu

SEQ ID NO: 744327 - RNA, 21 nt, Human
uaggggcuggggcuccagcug

SEQ ID NO: 744328 - RNA, 22 nt, Human
cugaggcugagacaggugaaau

SEQ ID NO: 744329 - RNA, 23 nt, Human
ugggcucagcuuccaguggggag

SEQ ID NO: 744330 - RNA, 22 nt, Human
ccauccaugcgccagacagauu

SEQ ID NO: 744331 - RNA, 21 nt, Human
gagugcaggucugaugccauc

SEQ ID NO: 744332 - RNA, 22 nt, Human
uacaaucaggauaauaauagug

SEQ ID NO: 744333 - RNA, 22 nt, Human
ccagggcagaaaaagagggaau

SEQ ID NO: 744334 - RNA, 22 nt, Human
gaggcucacgacgggacgaacu

SEQ ID NO: 744335 - RNA, 22 nt, Human
cuguacaaaguagcugcuggga

SEQ ID NO: 744336 - RNA, 22 nt, Human
acagacaucaucaacaucuucc

SEQ ID NO: 744337 - RNA, 22 nt, Human
uuuuauuggagugauaccaagc

SEQ ID NO: 744338 - RNA, 22 nt, Human
agggccaccagggagucucagg

SEQ ID NO: 744339 - RNA, 20 nt, Human
uguuccaugacuauuuggau

SEQ ID NO: 744340 - RNA, 22 nt, Human
ugauuuccucuacuagcaauua

SEQ ID NO: 744341 - RNA, 22 nt, Human
gccuuggccaacaccuugcaaa

SEQ ID NO: 744342 - RNA, 22 nt, Human
gcuucauuugagaaccucugug

SEQ ID NO: 744343 - RNA, 22 nt, Human
agcaggguuuggggauuggcac

SEQ ID NO: 744344 - RNA, 22 nt, Human
uggggauguaaaugaggugaua

SEQ ID NO: 744345 - RNA, 21 nt, Human
gccaagaacaagacagacaug

SEQ ID NO: 744346 - RNA, 22 nt, Human
caguccuggggaccaggcugag

SEQ ID NO: 744347 - RNA, 22 nt, Human
acaguguggaaagucaacuuga

SEQ ID NO: 744348 - RNA, 22 nt, Human
uagaggugagauauuuuauuuu

SEQ ID NO: 744349 - RNA, 22 nt, Human
ggggacaguuaaagaccaagac

SEQ ID NO: 744350 - RNA, 22 nt, Human
uacacauaaaaugcucauggua

SEQ ID NO: 744351 - RNA, 22 nt, Human
uuagcaaacaaaugaaaugguu

SEQ ID NO: 744352 - RNA, 22 nt, Human
gggccagcaguaucggaggcau

SEQ ID NO: 744353 - RNA, 22 nt, Human
aggaccugacuggcuccugcuu

SEQ ID NO: 744354 - RNA, 22 nt, Human
ccucugggugacagacucuugg

SEQ ID NO: 744355 - RNA, 22 nt, Human
ccuggaccaaacacuggccugg

SEQ ID NO: 744356 - RNA, 22 nt, Human
uggcaagcucguuugggucaga

SEQ ID NO: 744357 - RNA, 22 nt, Human
gagagccagcucacuccagggc

SEQ ID NO: 744358 - RNA, 22 nt, Human
agagaaugcagggcuucggaca

SEQ ID NO: 744359 - RNA, 22 nt, Human
aaacugcugguugcuggccagc

SEQ ID NO: 744360 - RNA, 22 nt, Human
uacagaauauagaagcuggaag

SEQ ID NO: 744361 - RNA, 22 nt, Human
ugcucuagcucauaggacucau

SEQ ID NO: 744362 - RNA, 22 nt, Human
gggggcaguaaccucaaagugu

SEQ ID NO: 744363 - RNA, 22 nt, Human
ugucuguggcaauuguggguaa

SEQ ID NO: 744364 - RNA, 22 nt, Human
ugguaauuaauuugauagguuc

SEQ ID NO: 744365 - RNA, 22 nt, Human
uguggugccgagagucuggacg

SEQ ID NO: 744366 - RNA, 22 nt, Human
ucuuugcacacagcgauucuuc

SEQ ID NO: 744367 - RNA, 22 nt, Human
auguacaucuuuauaacaagcu

SEQ ID NO: 744368 - RNA, 22 nt, Human
uuauaguaugugcauaugugug

SEQ ID NO: 744369 - RNA, 22 nt, Human
uuucagaaaacuuaucaucagu

SEQ ID NO: 744370 - RNA, 20 nt, Human
ucugggcuucccccagcucc

SEQ ID NO: 744371 - RNA, 22 nt, Human
uggggacauucaugcagguugu

SEQ ID NO: 744372 - RNA, 22 nt, Human
uggccugccccgagauccuggc

SEQ ID NO: 744373 - RNA, 22 nt, Human
ucagcuggagauccuuguugug

SEQ ID NO: 744374 - RNA, 22 nt, Human
ccaggcucuguuccccgaggag

SEQ ID NO: 744375 - RNA, 22 nt, Human
augaaauuugcugcuaaguucc

SEQ ID NO: 744376 - RNA, 22 nt, Human
uuauucacaugggcucauucua

SEQ ID NO: 744377 - RNA, 22 nt, Human
agccagagaguguuggagaugu

SEQ ID NO: 744378 - RNA, 20 nt, Human
caguaucugaagccacacaa

SEQ ID NO: 744379 - RNA, 22 nt, Human
gggcagcugccagaggccaugg

SEQ ID NO: 744380 - RNA, 22 nt, Human
gcaaagaaaugucagugagagg

SEQ ID NO: 744381 - RNA, 22 nt, Human
ccaccagcuuuggcggugacag

SEQ ID NO: 744382 - RNA, 19 nt, Human
uugcauuucauguuugauu

SEQ ID NO: 744383 - RNA, 22 nt, Human
uggcuggcuuucuuguauuuac

SEQ ID NO: 744384 - RNA, 22 nt, Human
acaauagaguucucauaggaca

SEQ ID NO: 744385 - RNA, 22 nt, Human
aaguugaagcaugaaccaaggu

SEQ ID NO: 744386 - RNA, 22 nt, Human
guacaugugcacaacaugcaug

SEQ ID NO: 744387 - RNA, 22 nt, Human
cugggaaauggcuucgagcuca

SEQ ID NO: 744388 - RNA, 22 nt, Human
caguguguccucagaauauaua

SEQ ID NO: 744389 - RNA, 22 nt, Human
guuccuugggaacaacgcugaa

SEQ ID NO: 744390 - RNA, 22 nt, Human
ucccugugggcagaggcugccu

SEQ ID NO: 744391 - RNA, 22 nt, Human
acauuugucuucuuucagauua

SEQ ID NO: 744392 - RNA, 21 nt, Human
gcacagggacagaucaucaca

SEQ ID NO: 744393 - RNA, 22 nt, Human
cacccaggacaaaauauggaau

SEQ ID NO: 744394 - RNA, 19 nt, Human
uacccucagggccucauuu

SEQ ID NO: 744395 - RNA, 22 nt, Human
guuuauuauucaacuucauguu

SEQ ID NO: 744396 - RNA, 22 nt, Human
uguggcugugccgucacacgug

SEQ ID NO: 744397 - RNA, 20 nt, Human
cagcaguggaugagaguuuu

SEQ ID NO: 744398 - RNA, 22 nt, Human
cacccaggcuagagugcagugg

SEQ ID NO: 744399 - RNA, 22 nt, Human
ucccugggaaaugucaguuuca

SEQ ID NO: 744400 - RNA, 22 nt, Human
uaugaguguguguagaagguac

SEQ ID NO: 744401 - RNA, 22 nt, Human
agguccugaugaucucugagag

SEQ ID NO: 744402 - RNA, 22 nt, Human
ggcaccuggagguuuacuggau

SEQ ID NO: 744403 - RNA, 22 nt, Human
aggcuggcugagcugcagccug

SEQ ID NO: 744404 - RNA, 22 nt, Human
cacugucuuuugugaagacaau

SEQ ID NO: 744405 - RNA, 22 nt, Human
aaaauucucuugaucuugacag

SEQ ID NO: 744406 - RNA, 22 nt, Human
gcaguguuauguuuucuauaau

SEQ ID NO: 744407 - RNA, 22 nt, Human
cuugagaagcauuaagagguag

SEQ ID NO: 744408 - RNA, 22 nt, Human
ugucacauguguggcauuuuuc

SEQ ID NO: 744409 - RNA, 22 nt, Human
ugucugaacgaaguagguccac

SEQ ID NO: 744410 - RNA, 22 nt, Human
ucugugcuuaacuacucacccc

SEQ ID NO: 744411 - RNA, 22 nt, Human
augcaggagcccucuugagggc

SEQ ID NO: 744412 - RNA, 22 nt, Human
agacacauuuuacauuaacugu

SEQ ID NO: 744413 - RNA, 22 nt, Human
ggucccaagugcuuuuccugca

SEQ ID NO: 744414 - RNA, 22 nt, Human
uucuaccauugggaaaacagcc

SEQ ID NO: 744415 - RNA, 18 nt, Human
acagugguuugaugugcu

SEQ ID NO: 744416 - RNA, 22 nt, Human
agcaaccuggaucauggugaaa

SEQ ID NO: 744417 - RNA, 22 nt, Human
augacuuuccuggcaaaaguug

SEQ ID NO: 744418 - RNA, 22 nt, Human
accacugcccauggugaaaacu

SEQ ID NO: 744419 - RNA, 22 nt, Human
gugagcugggugaaugguaggg

SEQ ID NO: 744420 - RNA, 22 nt, Human
uagaaaggcaagcgugaaauau

SEQ ID NO: 744421 - RNA, 22 nt, Human
gcugcgccggaucccacguucc

SEQ ID NO: 744422 - RNA, 22 nt, Human
guguguguaucugccuaucaca

SEQ ID NO: 744423 - RNA, 22 nt, Human
cuuuacagauggauaauuguuu

SEQ ID NO: 744424 - RNA, 23 nt, Human
gguagagccgcgcccugggggaa

SEQ ID NO: 744425 - RNA, 20 nt, Human
uuuuccuucugaguauguug

SEQ ID NO: 744426 - RNA, 22 nt, Human
gagggccucugcugcuccacau

SEQ ID NO: 744427 - RNA, 22 nt, Human
acauucuagauauguuauauuu

SEQ ID NO: 744428 - RNA, 22 nt, Human
aaagccaguucuuuuauauugg

SEQ ID NO: 744429 - RNA, 22 nt, Human
uaaugcaauuuagcaaaguuuu

SEQ ID NO: 744430 - RNA, 22 nt, Human
augugcauuaaaugucaauguu

SEQ ID NO: 744431 - RNA, 22 nt, Human
agggcucugagugggaaagagg

SEQ ID NO: 744432 - RNA, 22 nt, Human
cagcuccucuguuagcccuggg

SEQ ID NO: 744433 - RNA, 22 nt, Human
acucugcccuaggccucugggg

SEQ ID NO: 744434 - RNA, 22 nt, Human
ucagagagcuggugggcagagg

SEQ ID NO: 744435 - RNA, 23 nt, Human
gccugugccuaugcccagcucug

SEQ ID NO: 744436 - RNA, 22 nt, Human
uuuugaaagccagguuuguaug

SEQ ID NO: 744437 - RNA, 22 nt, Human
aacuggaaugaaauuuacgaug

SEQ ID NO: 744438 - RNA, 22 nt, Human
aaaugcagcugggcaugagagg

SEQ ID NO: 744439 - RNA, 22 nt, Human
ugggaauacaaguuauucaccu

SEQ ID NO: 744440 - RNA, 18 nt, Human
ucacaugauuacccuggg

SEQ ID NO: 744441 - RNA, 22 nt, Human
agacuucuuugugagcauuuuc

SEQ ID NO: 744442 - RNA, 20 nt, Human
cugaggggucugacuuggac

SEQ ID NO: 744443 - RNA, 22 nt, Human
cugcacugcugaucccaggucu

SEQ ID NO: 744444 - RNA, 22 nt, Human
uuuuauugcaauaaagugugua

SEQ ID NO: 744445 - RNA, 22 nt, Human
acauucuuggacuccacucuag

SEQ ID NO: 744446 - RNA, 22 nt, Human
uuggggcaccuccccagcauuu

SEQ ID NO: 744447 - RNA, 22 nt, Human
aaguuccuguuacuccccagaa

SEQ ID NO: 744448 - RNA, 22 nt, Human
gacagcagaauccauucccagu

SEQ ID NO: 744449 - RNA, 17 nt, Human
cauucuguaaucuuucu

SEQ ID NO: 744450 - RNA, 21 nt, Human
uauggcuuuacuaagcugcac

SEQ ID NO: 744451 - RNA, 22 nt, Human
gaagcugugcugggggaucugu

SEQ ID NO: 744452 - RNA, 22 nt, Human
agacuauuaccuaaaagauaca

SEQ ID NO: 744453 - RNA, 18 nt, Human
uugccccugggugaggau

SEQ ID NO: 744454 - RNA, 20 nt, Human
gcugugccuccagcuggugg

SEQ ID NO: 744455 - RNA, 22 nt, Human
uucagugccuguccacagcuuc

SEQ ID NO: 744456 - RNA, 22 nt, Human
cugcugacagcccugcuucagg

SEQ ID NO: 744457 - RNA, 22 nt, Human
ucucagagaggggccgggccuu

SEQ ID NO: 744458 - RNA, 22 nt, Human
ugagcauuggaucaaaugacuu

SEQ ID NO: 744459 - RNA, 22 nt, Human
augaggcagcacaugggauugu

SEQ ID NO: 744460 - RNA, 22 nt, Human
ucacaaaucgaagccuuauaau

SEQ ID NO: 744461 - RNA, 22 nt, Human
cagaugcuuguuggcuggucuc

SEQ ID NO: 744462 - RNA, 22 nt, Human
agcagcaacugcuagaguggca

SEQ ID NO: 744463 - RNA, 22 nt, Human
cacuguggaauuagaauaaccu

SEQ ID NO: 744464 - RNA, 22 nt, Human
ugaguauuccuuaucugaaaug

SEQ ID NO: 744465 - RNA, 22 nt, Human
auaaggcagucccuuaacaagg

SEQ ID NO: 744466 - RNA, 22 nt, Human
uauacaaguaaugcugaaugau

SEQ ID NO: 744467 - RNA, 22 nt, Human
aaguuucaugauguaauuauug

SEQ ID NO: 744468 - RNA, 22 nt, Human
gucaucuuaaggacugcuauag

SEQ ID NO: 744469 - RNA, 22 nt, Human
gagcagcacugaguuagcagcu

SEQ ID NO: 744470 - RNA, 22 nt, Human
cucagugguugagagccugggc

SEQ ID NO: 744471 - RNA, 22 nt, Human
gcagggaccuugcccacccucc

SEQ ID NO: 744472 - RNA, 22 nt, Human
uuaaagcaaaaacuaggaugga

SEQ ID NO: 744473 - RNA, 22 nt, Human
cuccuccacagaguccuugcca

SEQ ID NO: 744474 - RNA, 22 nt, Human
gggugugucuuuugcuccugga

SEQ ID NO: 744475 - RNA, 22 nt, Human
cugcuccaagccagcccugcag

SEQ ID NO: 744476 - RNA, 22 nt, Human
ugcauguuaagaaaauauugag

SEQ ID NO: 744477 - RNA, 22 nt, Human
uuucaaagguuuugucaugucu

SEQ ID NO: 744478 - RNA, 22 nt, Human
uuauguaauuuguuugcucuuc

SEQ ID NO: 744479 - RNA, 22 nt, Human
gugggcaggagugagcaacagg

SEQ ID NO: 744480 - RNA, 22 nt, Human
acagcuggugaauguucucugu

SEQ ID NO: 744481 - RNA, 22 nt, Human
gaggagaaauuauccuuggugu

SEQ ID NO: 744482 - RNA, 22 nt, Human
cagagcacugcuuggaggauuu

SEQ ID NO: 744483 - RNA, 22 nt, Human
cuucuuaaaguugucacagcug

SEQ ID NO: 744484 - RNA, 22 nt, Human
caggacaucgucaucaugggga

SEQ ID NO: 744485 - RNA, 18 nt, Human
ggcaggagcaagaauagg

SEQ ID NO: 744486 - RNA, 22 nt, Human
aaacauucccuaauguguccgu

SEQ ID NO: 744487 - RNA, 22 nt, Human
accccccagauaaucccuugag

SEQ ID NO: 744488 - RNA, 22 nt, Human
ggcacacagcuuggcaggagau

SEQ ID NO: 744489 - RNA, 22 nt, Human
uuugugaauaagagaaugacag

SEQ ID NO: 744490 - RNA, 22 nt, Human
uggcccaggggcucuugguguu

SEQ ID NO: 744491 - RNA, 22 nt, Human
cagugcugagagccuggccagg

SEQ ID NO: 744492 - RNA, 22 nt, Human
aucaaugcuugccaaauggaag

SEQ ID NO: 744493 - RNA, 22 nt, Human
aaggucauugguucugaauucu

SEQ ID NO: 744494 - RNA, 22 nt, Human
cgaggcucagagagggugacuu

SEQ ID NO: 744495 - RNA, 22 nt, Human
uccaggaggugaggggaccaaa

SEQ ID NO: 744496 - RNA, 22 nt, Human
gccugguggugugcucaagugg

SEQ ID NO: 744497 - RNA, 22 nt, Human
gauagcagcucuggggucagac

SEQ ID NO: 744498 - RNA, 22 nt, Human
accauguguuuuacacauggua

SEQ ID NO: 744499 - RNA, 18 nt, Human
guuuacacauucuagaaa

SEQ ID NO: 744500 - RNA, 22 nt, Human
cccagcucccaaguugcuaugg

SEQ ID NO: 744501 - RNA, 16 nt, Human
ccaccugcagcucuca

SEQ ID NO: 744502 - RNA, 22 nt, Human
ggccuugggcgagucccucagu

SEQ ID NO: 744503 - RNA, 18 nt, Human
uacaguauuuucucgccu

SEQ ID NO: 744504 - RNA, 22 nt, Human
augcuuuacccacaccaggaug

SEQ ID NO: 744505 - RNA, 22 nt, Human
aggcuguccucucuugcucagu

SEQ ID NO: 744506 - RNA, 22 nt, Human
cacaauuguaucagaaaauagu

SEQ ID NO: 744507 - RNA, 22 nt, Human
auucacaauuagaaguagauaa

SEQ ID NO: 744508 - RNA, 22 nt, Human
guagaauuuuaauaauggagau

SEQ ID NO: 744509 - RNA, 22 nt, Human
ucaggaggccaccaggaccugu

SEQ ID NO: 744510 - RNA, 22 nt, Human
acaguuaucuuugaaauagaga

SEQ ID NO: 744511 - RNA, 22 nt, Human
ugcugccacugguagucucauu

SEQ ID NO: 744512 - RNA, 22 nt, Human
ucaugcaguuugaaguucaggg

SEQ ID NO: 744513 - RNA, 22 nt, Human
uaaauguguuagucaugguuuu

SEQ ID NO: 744514 - RNA, 22 nt, Human
acccagugacauccuuuaccug

SEQ ID NO: 744515 - RNA, 22 nt, Human
ucaguaaaugagcaaaaauuuc

SEQ ID NO: 744516 - RNA, 22 nt, Human
ggcaagugauccuggagcaccg

SEQ ID NO: 744517 - RNA, 22 nt, Human
caggaagggggauccuuggaag

SEQ ID NO: 744518 - RNA, 22 nt, Human
agugaaacagagcacagcaugc

SEQ ID NO: 744519 - RNA, 22 nt, Human
gacaggcaugcuuucaggacua

SEQ ID NO: 744520 - RNA, 19 nt, Human
cugugcccuaugacuugua

SEQ ID NO: 744521 - RNA, 22 nt, Human
ucagauuugaugugguuuucua

SEQ ID NO: 744522 - RNA, 22 nt, Human
aaacaacaugguggguguguag

SEQ ID NO: 744523 - RNA, 22 nt, Human
auuucccacucaggccgcggcg

SEQ ID NO: 744524 - RNA, 22 nt, Human
gcuccugcccucuugcaauucc

SEQ ID NO: 744525 - RNA, 19 nt, Human
aggacccuuauccuggcuu

SEQ ID NO: 744526 - RNA, 17 nt, Human
ucagcucagagcaccug

SEQ ID NO: 744527 - RNA, 22 nt, Human
agcagcuucagaggcgggcgca

SEQ ID NO: 744528 - RNA, 22 nt, Human
gcgccuggcacacagcaagggc

SEQ ID NO: 744529 - RNA, 22 nt, Human
ggagaagcaggugcuuuggguc

SEQ ID NO: 744530 - RNA, 22 nt, Human
ucacuacugacagagaugugua

SEQ ID NO: 744531 - RNA, 22 nt, Human
aaggcuggguaaccuguccacu

SEQ ID NO: 744532 - RNA, 22 nt, Human
aggagcagaccguaguccugca

SEQ ID NO: 744533 - RNA, 22 nt, Human
uggagccagcaggacucagagg

SEQ ID NO: 744534 - RNA, 22 nt, Human
ucuccugacaugucuggaggaa

SEQ ID NO: 744535 - RNA, 22 nt, Human
gagcugaacaucauggaaaggc

SEQ ID NO: 744536 - RNA, 22 nt, Human
auccaguucuuggaagcacagg

SEQ ID NO: 744537 - RNA, 22 nt, Human
ucacugucuuuuaaggugguua

SEQ ID NO: 744538 - RNA, 22 nt, Human
uugacaaaaauaacacagcaua

SEQ ID NO: 744539 - RNA, 22 nt, Human
ccucccacauccuagcucugcu

SEQ ID NO: 744540 - RNA, 22 nt, Human
cgggcacacacuugacagguuc

SEQ ID NO: 744541 - RNA, 22 nt, Human
cccaggcuuuuaaguuagacag

SEQ ID NO: 744542 - RNA, 22 nt, Human
auacagguaggggacauacauc

SEQ ID NO: 744543 - RNA, 22 nt, Human
acuggagcugagagcaugggua

SEQ ID NO: 744544 - RNA, 20 nt, Human
aggaacuuuguagaauacaa

SEQ ID NO: 744545 - RNA, 22 nt, Human
cagugggacaugggcacugggc

SEQ ID NO: 744546 - RNA, 22 nt, Human
gucacagguguggaggugcugg

SEQ ID NO: 744547 - RNA, 22 nt, Human
caauacuuuaguaaaauggccc

SEQ ID NO: 744548 - RNA, 17 nt, Human
agcugagcuggccaggg

SEQ ID NO: 744549 - RNA, 22 nt, Human
agauuauuuccagacuaaugaa

SEQ ID NO: 744550 - RNA, 17 nt, Human
agaugcuggccacaugu

SEQ ID NO: 744551 - RNA, 22 nt, Human
cuagaucagcuaacuuuccagu

SEQ ID NO: 744552 - RNA, 22 nt, Human
aggaaaacacaguauugaugga

SEQ ID NO: 744553 - RNA, 22 nt, Human
auauaucaugaguaaaacuuga

SEQ ID NO: 744554 - RNA, 22 nt, Human
aaggccauguaggaggcaugcg

SEQ ID NO: 744555 - RNA, 22 nt, Human
ccugucuuagggaaagacugga

SEQ ID NO: 744556 - RNA, 17 nt, Human
aagcauuuaauuugcua

SEQ ID NO: 744557 - RNA, 22 nt, Human
uauggguaucuguacugauugu

SEQ ID NO: 744558 - RNA, 22 nt, Human
gauaucaugggaagguguacuu

SEQ ID NO: 744559 - RNA, 22 nt, Human
uuauauuaguuagacuugcugu

SEQ ID NO: 744560 - RNA, 22 nt, Human
uccagggcagggugcgcauggg

SEQ ID NO: 744561 - RNA, 19 nt, Human
acagaaauuaguuauuuuc

SEQ ID NO: 744562 - RNA, 22 nt, Human
uuaugauuuagaaagauucacu

SEQ ID NO: 744563 - RNA, 22 nt, Human
ugaggccugaagccugaaguga

SEQ ID NO: 744564 - RNA, 22 nt, Human
aaucaauguuagucaugaauuu

SEQ ID NO: 744565 - RNA, 22 nt, Human
auggagcugugugaauauucau

SEQ ID NO: 744566 - RNA, 22 nt, Human
guaggcagaauaauuccuccuu

SEQ ID NO: 744567 - RNA, 22 nt, Human
auuuucugguugagguuuaaca

SEQ ID NO: 744568 - RNA, 22 nt, Human
cugcccaggggagugcugucgg

SEQ ID NO: 744569 - RNA, 22 nt, Human
cuuuagcaacgaugaugauauu

SEQ ID NO: 744570 - RNA, 20 nt, Human
auacacaugcagacagaugc

SEQ ID NO: 744571 - RNA, 22 nt, Human
ucaggcagguuggcugcagguc

SEQ ID NO: 744572 - RNA, 22 nt, Human
agguagggaagaaggcaugaaa

SEQ ID NO: 744573 - RNA, 18 nt, Human
agcagcugugccacacug

SEQ ID NO: 744574 - RNA, 22 nt, Human
uuguuuauguaauuggcacacu

SEQ ID NO: 744575 - RNA, 22 nt, Human
uccugggcccuccggaucaggu

SEQ ID NO: 744576 - RNA, 22 nt, Human
cucuccuauugugugguaagga

SEQ ID NO: 744577 - RNA, 22 nt, Human
ucuguuaaccuggucuuggcuu

SEQ ID NO: 744578 - RNA, 22 nt, Human
ucagaacauggcauguuccauc

SEQ ID NO: 744579 - RNA, 22 nt, Human
gcugccucuguagcuuuggacc

SEQ ID NO: 744580 - RNA, 22 nt, Human
aaacaccagucccaguauacac

SEQ ID NO: 744581 - RNA, 22 nt, Human
ugggccaguuucucauugaaau

SEQ ID NO: 744582 - RNA, 22 nt, Human
ugggaugggaucucgcuguguc

SEQ ID NO: 744583 - RNA, 22 nt, Human
gcuggccauagaagccaaagag

SEQ ID NO: 744584 - RNA, 22 nt, Human
ucaucacuguaucauugauaga

SEQ ID NO: 744585 - RNA, 22 nt, Human
agaguggcuucuuugacaugcu

SEQ ID NO: 744586 - RNA, 22 nt, Human
gggucaggcuagcccagacuuc

SEQ ID NO: 744587 - RNA, 23 nt, Human
gugcagcagugucugcagucaug

SEQ ID NO: 744588 - RNA, 22 nt, Human
aagaucauaauauuuaucucau

SEQ ID NO: 744589 - RNA, 22 nt, Human
uuugcaaagugacuauuauaug

SEQ ID NO: 744590 - RNA, 22 nt, Human
ucaaugauuagaguuuagugug

SEQ ID NO: 744591 - RNA, 22 nt, Human
gccuucaguaguauccucauga

SEQ ID NO: 744592 - RNA, 22 nt, Human
ggucaacagagguaaugguaac

SEQ ID NO: 744593 - RNA, 22 nt, Human
auauuacucugauuuaguaaau

SEQ ID NO: 744594 - RNA, 22 nt, Human
ugaggacauuggucaggacaug

SEQ ID NO: 744595 - RNA, 22 nt, Human
uggcucucaggccugcugcguu

SEQ ID NO: 744596 - RNA, 22 nt, Human
cuuccuucugaagcauagaagc

SEQ ID NO: 744597 - RNA, 22 nt, Human
ugcauuguugaccaguugugca

SEQ ID NO: 744598 - RNA, 22 nt, Human
ugucucugugcauuugugcuuc

SEQ ID NO: 744599 - RNA, 22 nt, Human
gagaagucauuugaccaccuag

SEQ ID NO: 744600 - RNA, 22 nt, Human
ccacaugagcuggcaaugcccu

SEQ ID NO: 744601 - RNA, 22 nt, Human
aagcccagaugggagcauuuca

SEQ ID NO: 744602 - RNA, 22 nt, Human
ucugugcaaguauuugacauuu

SEQ ID NO: 744603 - RNA, 22 nt, Human
cuggcccagguggucguugagg

SEQ ID NO: 744604 - RNA, 22 nt, Human
acacugaaggcuacaagguuga

SEQ ID NO: 744605 - RNA, 22 nt, Human
gggaggcucagugguguccucu

SEQ ID NO: 744606 - RNA, 22 nt, Human
cuguccuguacuuugaggcccu

SEQ ID NO: 744607 - RNA, 22 nt, Human
ugcauucaaaucuccaggcuca

SEQ ID NO: 744608 - RNA, 22 nt, Human
ccagacugagggucccugagcu

SEQ ID NO: 744609 - RNA, 22 nt, Human
agggcccucugggcacuguggc

SEQ ID NO: 744610 - RNA, 19 nt, Human
gaacaauuuguuagcucuc

SEQ ID NO: 744611 - RNA, 22 nt, Human
gggcuggaggagauccagaggc

SEQ ID NO: 744612 - RNA, 22 nt, Human
ucucaggcccacuguguugaaa

SEQ ID NO: 744613 - RNA, 22 nt, Human
uuuuguuggcuuaagaaauaca

SEQ ID NO: 744614 - RNA, 22 nt, Human
aaugaagcaguuuucaucaagu

SEQ ID NO: 744615 - RNA, 22 nt, Human
aaagccagggacagugugcaug

SEQ ID NO: 744616 - RNA, 22 nt, Human
ucacugugcucucuagauaggc

SEQ ID NO: 744617 - RNA, 22 nt, Human
aaauccuuuucuauacagcaua

SEQ ID NO: 744618 - RNA, 22 nt, Human
ccuuagcauggcugugcugugu

SEQ ID NO: 744619 - RNA, 21 nt, Human
aagaggaagcauuauggcaua

SEQ ID NO: 744620 - RNA, 22 nt, Human
aaaguucugggggagaagaacg

SEQ ID NO: 744621 - RNA, 22 nt, Human
uguagaaagaauauguuucaua

SEQ ID NO: 744622 - RNA, 22 nt, Human
uuaaacagguuuuugaauggcc

SEQ ID NO: 744623 - RNA, 22 nt, Human
aggcaggaaaaucgcuugaacc

SEQ ID NO: 744624 - RNA, 22 nt, Human
ucccguugaugacggugcaucc

SEQ ID NO: 744625 - RNA, 21 nt, Human
uucaugagauaaccagcugua

SEQ ID NO: 744626 - RNA, 22 nt, Human
uggagaguuuagccuacuggaa

SEQ ID NO: 744627 - RNA, 22 nt, Human
cuggaacccaggccuggaagcc

SEQ ID NO: 744628 - RNA, 22 nt, Human
uauuccuauuucuaaacauaug

SEQ ID NO: 744629 - RNA, 22 nt, Human
aauuagggaaaauuuacuugua

SEQ ID NO: 744630 - RNA, 22 nt, Human
caggguggcccuguggucucau

SEQ ID NO: 744631 - RNA, 22 nt, Human
aacacucaauuuacaaacucug

SEQ ID NO: 744632 - RNA, 22 nt, Human
auguuuucuagaguuuaaaauc

SEQ ID NO: 744633 - RNA, 22 nt, Human
cuuuauguccaccagacugcaa

SEQ ID NO: 744634 - RNA, 22 nt, Human
agcugccuguaaaaugugugau

SEQ ID NO: 744635 - RNA, 22 nt, Human
uuacaagaucuuugaaggcaag

SEQ ID NO: 744636 - RNA, 22 nt, Human
uucugaugauggcggcuggagc

SEQ ID NO: 744637 - RNA, 22 nt, Human
ggugggguuuuaggcugcugca

SEQ ID NO: 744638 - RNA, 22 nt, Human
ccaccagcuuugccacccugcu

SEQ ID NO: 744639 - RNA, 22 nt, Human
agauguggaaagaaguuagaag

SEQ ID NO: 744640 - RNA, 22 nt, Human
uuguaauuugcaaauguauugu

SEQ ID NO: 744641 - RNA, 22 nt, Human
ucauaaauucuggugcugugag

SEQ ID NO: 744642 - RNA, 22 nt, Human
uccucagacacccugcuggcuu

SEQ ID NO: 744643 - RNA, 22 nt, Human
gucucagugcccaaugccauaa

SEQ ID NO: 744644 - RNA, 22 nt, Human
gacuggucuuuugugauggaug

SEQ ID NO: 744645 - RNA, 22 nt, Human
uguaccaaacccaucauaacua

SEQ ID NO: 744646 - RNA, 22 nt, Human
ugaugcuguuccaguuauauug

SEQ ID NO: 744647 - RNA, 22 nt, Human
gagcuuccauggacgccaucug

SEQ ID NO: 744648 - RNA, 22 nt, Human
auguuauugaugccugaggcuu

SEQ ID NO: 744649 - RNA, 22 nt, Human
uugcauuuccuguacuguuuga

SEQ ID NO: 744650 - RNA, 22 nt, Human
guacuuuaagacuccaguagca

SEQ ID NO: 744651 - RNA, 20 nt, Human
auucuaaagcucugcucuuu

SEQ ID NO: 744652 - RNA, 22 nt, Human
acacagccaggguaguaaggcu

SEQ ID NO: 744653 - RNA, 22 nt, Human
gcagagccuugcgucaugugcc

SEQ ID NO: 744654 - RNA, 22 nt, Human
uuucaaacugcccagcacaccu

SEQ ID NO: 744655 - RNA, 22 nt, Human
ucagguuuuucucaaaucaggu

SEQ ID NO: 744656 - RNA, 22 nt, Human
uucuuucaauagcuggcauaug

SEQ ID NO: 744657 - RNA, 22 nt, Human
ccaggaagguaugggaagaaaa

SEQ ID NO: 744658 - RNA, 22 nt, Human
gaggcacucucgacaagggugg

SEQ ID NO: 744659 - RNA, 22 nt, Human
ugcccuggaaccaucuacaguc

SEQ ID NO: 744660 - RNA, 22 nt, Human
cacagcaaaggcuucggcugau

SEQ ID NO: 744661 - RNA, 22 nt, Human
uggcagggaguugcaggauuuc

SEQ ID NO: 744662 - RNA, 22 nt, Human
uucagugccgugcugggucgcu

SEQ ID NO: 744663 - RNA, 22 nt, Human
ccuggcacgaagggcugagguu

SEQ ID NO: 744664 - RNA, 22 nt, Human
aguccaagaucaaggugucaac

SEQ ID NO: 744665 - RNA, 22 nt, Human
ggcagcaacucggagagaagag

SEQ ID NO: 744666 - RNA, 22 nt, Human
acaaaugaaccugaaaucucag

SEQ ID NO: 744667 - RNA, 22 nt, Human
gcugggcucguucccacacgcg

SEQ ID NO: 744668 - RNA, 22 nt, Human
aaaugcuuauuagugucacaaa

SEQ ID NO: 744669 - RNA, 22 nt, Human
caaugaaaauuuaaguugcagc

SEQ ID NO: 744670 - RNA, 22 nt, Human
ugucaugcagguuuguuauaga

SEQ ID NO: 744671 - RNA, 22 nt, Human
gcugccuggcuuuaguccacuu

SEQ ID NO: 744672 - RNA, 22 nt, Human
uuaauacagucuccagaaguaa

SEQ ID NO: 744673 - RNA, 22 nt, Human
augucuguucauuauuaacugc

SEQ ID NO: 744674 - RNA, 22 nt, Human
gcugcuggaugcgcuugauggu

SEQ ID NO: 744675 - RNA, 22 nt, Human
ugggugugcccagauggugucc

SEQ ID NO: 744676 - RNA, 22 nt, Human
acugggcucauaaugucauaga

SEQ ID NO: 744677 - RNA, 22 nt, Human
gcgcagaguagcagagugcuga

SEQ ID NO: 744678 - RNA, 22 nt, Human
cuuuuuaucucuuaaugauguu

SEQ ID NO: 744679 - RNA, 22 nt, Human
agagagguuggcuaggauguuu

SEQ ID NO: 744680 - RNA, 22 nt, Human
aagggcagcuuaaauugguagc

SEQ ID NO: 744681 - RNA, 22 nt, Human
uuuuaauuuugcaaaucuggug

SEQ ID NO: 744682 - RNA, 22 nt, Human
ugagaguauuuuggcauuauca

SEQ ID NO: 744683 - RNA, 22 nt, Human
ucugcccacagccuccugucca

SEQ ID NO: 744684 - RNA, 22 nt, Human
uaacucugaauccucacagcag

SEQ ID NO: 744685 - RNA, 21 nt, Human
ggagcugcaggagccgaaggc

SEQ ID NO: 744686 - RNA, 22 nt, Human
uucugggccuccuaggacaggc

SEQ ID NO: 744687 - RNA, 22 nt, Human
agauuauuuaagacaggaacca

SEQ ID NO: 744688 - RNA, 22 nt, Human
uacacaauucuggaugcauguc

SEQ ID NO: 744689 - RNA, 22 nt, Human
guggggaggccuaagcaaguug

SEQ ID NO: 744690 - RNA, 22 nt, Human
uccuguuuccaauuuguugggu

SEQ ID NO: 744691 - RNA, 22 nt, Human
aagaacaacugcuuuaaaagca

SEQ ID NO: 744692 - RNA, 22 nt, Human
uuacagaggcuuccagggccca

SEQ ID NO: 744693 - RNA, 22 nt, Human
gccaggguucgaauccguaugg

SEQ ID NO: 744694 - RNA, 19 nt, Human
ugccagcauuaggcugaag

SEQ ID NO: 744695 - RNA, 22 nt, Human
aggcccugagaaaaucccugca

SEQ ID NO: 744696 - RNA, 22 nt, Human
cguucucucaugaucuucccga

SEQ ID NO: 744697 - RNA, 22 nt, Human
uuucuaagaauauugcucuuaa

SEQ ID NO: 744698 - RNA, 22 nt, Human
caagaauauaaauacuuucaaa

SEQ ID NO: 744699 - RNA, 22 nt, Human
aggcuucauguguccuggguga

SEQ ID NO: 744700 - RNA, 22 nt, Human
aucuauucucuacaguagacag

SEQ ID NO: 744701 - RNA, 23 nt, Human
uggacgccgacuuuggaggcgcu

SEQ ID NO: 744702 - RNA, 22 nt, Human
acacagauaaugcucauauagg

SEQ ID NO: 744703 - RNA, 22 nt, Human
uuucuucuugauuuaaacaggg

SEQ ID NO: 744704 - RNA, 22 nt, Human
agaugcugucacacacacuguu

SEQ ID NO: 744705 - RNA, 22 nt, Human
guggccuuuucaaguaggguau

SEQ ID NO: 744706 - RNA, 22 nt, Human
ucauggcacuuagcacaguccu

SEQ ID NO: 744707 - RNA, 22 nt, Human
ucagcugcagcaggcaccauuu

SEQ ID NO: 744708 - RNA, 22 nt, Human
cugcacguauaaucagucuguu

SEQ ID NO: 744709 - RNA, 19 nt, Human
uaguggagugacaaguucu

SEQ ID NO: 744710 - RNA, 22 nt, Human
gcacaauaauucuuguuuugcu

SEQ ID NO: 744711 - RNA, 22 nt, Human
cuguggggaaaggguccugcuc

SEQ ID NO: 744712 - RNA, 22 nt, Human
auggaagcugaaaaagacacgg

SEQ ID NO: 744713 - RNA, 22 nt, Human
aaguguuuuguaaacagaaaag

SEQ ID NO: 744714 - RNA, 22 nt, Human
uggaccaugagcugcagguguu

SEQ ID NO: 744715 - RNA, 19 nt, Human
ggcagacacaguugacaug

SEQ ID NO: 744716 - RNA, 22 nt, Human
aauuuuacuaaucugaguguga

SEQ ID NO: 744717 - RNA, 22 nt, Human
uuugauuuucagcaauaguggc

SEQ ID NO: 744718 - RNA, 22 nt, Human
gacccuggagccgucugaggca

SEQ ID NO: 744719 - RNA, 22 nt, Human
caggcugugggagucaggaccc

SEQ ID NO: 744720 - RNA, 22 nt, Human
gauggcuucacuuacauggcug

SEQ ID NO: 744721 - RNA, 23 nt, Human
ucacauaauccuucauccacagg

SEQ ID NO: 744722 - RNA, 22 nt, Human
accauagacuggaggaucuccu

SEQ ID NO: 744723 - RNA, 22 nt, Human
ugugccaucugauauaagagcc

SEQ ID NO: 744724 - RNA, 19 nt, Human
gucccuucacuccugcugg

SEQ ID NO: 744725 - RNA, 22 nt, Human
ugggaggcccaggccuggcagg

SEQ ID NO: 744726 - RNA, 18 nt, Human
aucuuuccauagcauguu

SEQ ID NO: 744727 - RNA, 22 nt, Human
caauagcagaccuagaaagcaa

SEQ ID NO: 744728 - RNA, 22 nt, Human
agguauauugaaugcuuacuua

SEQ ID NO: 744729 - RNA, 22 nt, Human
aaaaauagaaggauugacugag

SEQ ID NO: 744730 - RNA, 22 nt, Human
uguuacacagcagaauagcaag

SEQ ID NO: 744731 - RNA, 22 nt, Human
uggaugccugggccuccuucca

SEQ ID NO: 744732 - RNA, 23 nt, Human
cugcagagaacugagggacagcc

SEQ ID NO: 744733 - RNA, 22 nt, Human
aaagcccauguggaaguacagg

SEQ ID NO: 744734 - RNA, 22 nt, Human
ucuguaaaauuaguauaauugu

SEQ ID NO: 744735 - RNA, 22 nt, Human
auaagcaugauuaccgggagca

SEQ ID NO: 744736 - RNA, 22 nt, Human
ucaggugggcguuccggugcgg

SEQ ID NO: 744737 - RNA, 18 nt, Human
auggucucauacugggag

SEQ ID NO: 744738 - RNA, 22 nt, Human
guaaugcuuuugauacagggac

SEQ ID NO: 744739 - RNA, 21 nt, Human
uugcuuauggcacugcuuugc

SEQ ID NO: 744740 - RNA, 22 nt, Human
uuucaaggcuaauccacaguau

SEQ ID NO: 744741 - RNA, 22 nt, Human
cauguuaauaugcauugaguac

SEQ ID NO: 744742 - RNA, 22 nt, Human
cugaggaucuaauuauuggguc

SEQ ID NO: 744743 - RNA, 22 nt, Human
gaacauuugaugaugacauugg

SEQ ID NO: 744744 - RNA, 22 nt, Human
ccagguggaggugugagguccu

SEQ ID NO: 744745 - RNA, 22 nt, Human
uguuuucugauucucguguggu

SEQ ID NO: 744746 - RNA, 22 nt, Human
cacaaaaguaggaggcaggcgg

SEQ ID NO: 744747 - RNA, 22 nt, Human
ucccaagacgaugugcuuggcc

SEQ ID NO: 744748 - RNA, 22 nt, Human
ucucugugacauuucugagccu

SEQ ID NO: 744749 - RNA, 18 nt, Human
caggaauggaugggauuu

SEQ ID NO: 744750 - RNA, 22 nt, Human
cucugggugugacagcaccugg

SEQ ID NO: 744751 - RNA, 22 nt, Human
guucuacaguuccuauuacuua

SEQ ID NO: 744752 - RNA, 22 nt, Human
ugccugcuuguguaccugguga

SEQ ID NO: 744753 - RNA, 22 nt, Human
acugaagaacgcaucagugguu

SEQ ID NO: 744754 - RNA, 22 nt, Human
ccuggguccaauucuggcuugu

SEQ ID NO: 744755 - RNA, 22 nt, Human
uucaucuguagcaucuuccaau

SEQ ID NO: 744756 - RNA, 22 nt, Human
ucucugcuugguguaugugagu

SEQ ID NO: 744757 - RNA, 22 nt, Human
aaggaccugauuuugagcaucu

SEQ ID NO: 744758 - RNA, 22 nt, Human
gucauauacacugcauguaauc

SEQ ID NO: 744759 - RNA, 22 nt, Human
uccaggucugugagcuaaaugg

SEQ ID NO: 744760 - RNA, 22 nt, Human
gaagcagucagcagcaccuuug

SEQ ID NO: 744761 - RNA, 22 nt, Human
ucacuggggccuuuggucagga

SEQ ID NO: 744762 - RNA, 22 nt, Human
aaguggcacgcuuuuuggaguu

SEQ ID NO: 744763 - RNA, 22 nt, Human
ccuuuacaucugacuucuuuca

SEQ ID NO: 744764 - RNA, 22 nt, Human
ucccauguguuccucuagucua

SEQ ID NO: 744765 - RNA, 22 nt, Human
uacaugcauguguguaaauaua

SEQ ID NO: 744766 - RNA, 21 nt, Human
agauuacaggugugauccacc

SEQ ID NO: 744767 - RNA, 16 nt, Human
aaagaaacaggugucc

SEQ ID NO: 744768 - RNA, 22 nt, Human
ugugaggccuagacagccuggg

SEQ ID NO: 744769 - RNA, 18 nt, Human
gugcaugcaugcucugcc

SEQ ID NO: 744770 - RNA, 22 nt, Human
ggccagccuggggcucccagac

SEQ ID NO: 744771 - RNA, 22 nt, Human
ugcauauuauaaagagaauuag

SEQ ID NO: 744772 - RNA, 22 nt, Human
aucuuacacgauaacuguuagu

SEQ ID NO: 744773 - RNA, 22 nt, Human
uggcaggaaauacccugccuag

SEQ ID NO: 744774 - RNA, 22 nt, Human
cuugagaaucuugaugucuacc

SEQ ID NO: 744775 - RNA, 22 nt, Human
acugggccggugcagaguaguu

SEQ ID NO: 744776 - RNA, 22 nt, Human
ugcauaaacagauacuucaugu

SEQ ID NO: 744777 - RNA, 22 nt, Human
agcauuuauagccccuaucauc

SEQ ID NO: 744778 - RNA, 22 nt, Human
cugagaggcacaaggcauuucg

SEQ ID NO: 744779 - RNA, 22 nt, Human
ggcugaguggagguagcccugu

SEQ ID NO: 744780 - RNA, 18 nt, Human
cacccuccgcggcugccc

SEQ ID NO: 744781 - RNA, 22 nt, Human
gagcuaggcuagggggagucgc

SEQ ID NO: 744782 - RNA, 22 nt, Human
gucaggauuauaauccccaugg

SEQ ID NO: 744783 - RNA, 23 nt, Human
uggauaaagcugugcugcauagg

SEQ ID NO: 744784 - RNA, 22 nt, Human
auccuguuugucacuagaaaau

SEQ ID NO: 744785 - RNA, 22 nt, Human
uagggcuguuuaaaagugaggu

SEQ ID NO: 744786 - RNA, 21 nt, Human
gagagggcauuauaggaagug

SEQ ID NO: 744787 - RNA, 22 nt, Human
uugcuuuaucuaagcauggcca

SEQ ID NO: 744788 - RNA, 22 nt, Human
cauucaucuaucaaaugguacc

SEQ ID NO: 744789 - RNA, 22 nt, Human
cagugcagucaaggaagaacca

SEQ ID NO: 744790 - RNA, 22 nt, Human
augugucuucuaagccaagccu

SEQ ID NO: 744791 - RNA, 22 nt, Human
uucaggaucacuaaacccucca

SEQ ID NO: 744792 - RNA, 22 nt, Human
uuaggaaaggaacauugaaacg

SEQ ID NO: 744793 - RNA, 22 nt, Human
uguguucaaucaccaaagguau

SEQ ID NO: 744794 - RNA, 22 nt, Human
acaaugugauaauuuaaagaua

SEQ ID NO: 744795 - RNA, 22 nt, Human
aguaauaauagcuguaaagugc

SEQ ID NO: 744796 - RNA, 22 nt, Human
acuucuggugucauacugcauu

SEQ ID NO: 744797 - RNA, 22 nt, Human
aaugucaaaauggaaugagacu

SEQ ID NO: 744798 - RNA, 22 nt, Human
aaacagaaauuuccucaugcuc

SEQ ID NO: 744799 - RNA, 22 nt, Human
aaauuagaagugcucaggaaua

SEQ ID NO: 744800 - RNA, 22 nt, Human
gucccagaggacagggucacau

SEQ ID NO: 744801 - RNA, 22 nt, Human
gugcugagaguuuauuaugaua

SEQ ID NO: 744802 - RNA, 22 nt, Human
ugcugccauggucgcugguguc

SEQ ID NO: 744803 - RNA, 20 nt, Human
augugcugggcaauauguua

SEQ ID NO: 744804 - RNA, 20 nt, Human
cuguagggugcagcaggcuc

SEQ ID NO: 744805 - RNA, 23 nt, Human
cuggaagugcuuuuauagcuuug

SEQ ID NO: 744806 - RNA, 22 nt, Human
ugagguggaaggauccuuugaa

SEQ ID NO: 744807 - RNA, 22 nt, Human
agagccuggggauuggcaaggg

SEQ ID NO: 744808 - RNA, 19 nt, Human
ugaaggagggggauggcca

SEQ ID NO: 744809 - RNA, 22 nt, Human
aggucccaggcauagcuggucu

SEQ ID NO: 744810 - RNA, 22 nt, Human
ggcuugagacccgggagccaga

SEQ ID NO: 744811 - RNA, 22 nt, Human
ugcagggccuugggaugugucc

SEQ ID NO: 744812 - RNA, 22 nt, Human
aaauuauaggugccaccuugga

SEQ ID NO: 744813 - RNA, 21 nt, Human
cacaagacacauaggguguuu

SEQ ID NO: 744814 - RNA, 22 nt, Human
cccaguggcccagcauguggug

SEQ ID NO: 744815 - RNA, 22 nt, Human
aacuuuauuguuaggggcuaaa

SEQ ID NO: 744816 - RNA, 22 nt, Human
ugaggcacauccaggccagcuc

SEQ ID NO: 744817 - RNA, 22 nt, Human
cccaguuucaacuuuccagugg

SEQ ID NO: 744818 - RNA, 22 nt, Human
ugucuuuuuaccugugaugagu

SEQ ID NO: 744819 - RNA, 22 nt, Human
gggcagcagagcccugccgagu

SEQ ID NO: 744820 - RNA, 19 nt, Human
ugacagagagcaggguggu

SEQ ID NO: 744821 - RNA, 22 nt, Human
gcuucagacuggagcagaggaa

SEQ ID NO: 744822 - RNA, 22 nt, Human
aagcaggugugagccagugggc

SEQ ID NO: 744823 - RNA, 22 nt, Human
cucuggaguggguggccgggag

SEQ ID NO: 744824 - RNA, 22 nt, Human
ugaaauguagauuaggcauucu

SEQ ID NO: 744825 - RNA, 22 nt, Human
cuggcuugaaguuaugcaccag

SEQ ID NO: 744826 - RNA, 22 nt, Human
aguuuccuuggauucaauuugg

SEQ ID NO: 744827 - RNA, 22 nt, Human
aaggcagucaaagcagacuucu

SEQ ID NO: 744828 - RNA, 22 nt, Human
uucuauugacauucacuguaac

SEQ ID NO: 744829 - RNA, 22 nt, Human
agucucugcaugaugcagcaca

SEQ ID NO: 744830 - RNA, 22 nt, Human
augccacugacauggacaauuu

SEQ ID NO: 744831 - RNA, 22 nt, Human
augucacauggucaccucuagc

SEQ ID NO: 744832 - RNA, 22 nt, Human
uccaggcaaaaaccaacuacag

SEQ ID NO: 744833 - RNA, 22 nt, Human
gagcccgagcgcguacccggcg

SEQ ID NO: 744834 - RNA, 22 nt, Human
gaagcuuuauugcaagugaggc

SEQ ID NO: 744835 - RNA, 22 nt, Human
uggguuaaaaugauaccuugca

SEQ ID NO: 744836 - RNA, 22 nt, Human
uagcugggagugucugaugggu

SEQ ID NO: 744837 - RNA, 22 nt, Human
gaaugacauugagccauaacau

SEQ ID NO: 744838 - RNA, 22 nt, Human
ccuuccuugagaagcaauuccu

SEQ ID NO: 744839 - RNA, 22 nt, Human
agccugggcccugccucuucuc

SEQ ID NO: 744840 - RNA, 22 nt, Human
augcuaaagcuuugcuuucauu

SEQ ID NO: 744841 - RNA, 22 nt, Human
ucucccuucucuggauuccguu

SEQ ID NO: 744842 - RNA, 22 nt, Human
agugggcaugaucuggugucug

SEQ ID NO: 744843 - RNA, 22 nt, Human
cuuguagcugcuucuucugaag

SEQ ID NO: 744844 - RNA, 22 nt, Human
ccagagcagauguggccuuggu

SEQ ID NO: 744845 - RNA, 22 nt, Human
cauucauucacauuuugucuau

SEQ ID NO: 744846 - RNA, 22 nt, Human
gggcccugggauucagagcaag

SEQ ID NO: 744847 - RNA, 22 nt, Human
gaagcagagccuaaggcagaca

SEQ ID NO: 744848 - RNA, 22 nt, Human
gcuggugccuuguuguuguuac

SEQ ID NO: 744849 - RNA, 22 nt, Human
gaaugaagcaggucacacaguu

SEQ ID NO: 744850 - RNA, 22 nt, Human
uugggacaucuggcauacaguu

SEQ ID NO: 744851 - RNA, 22 nt, Human
gacccugccaugagugacaggg

SEQ ID NO: 744852 - RNA, 22 nt, Human
auggaagaguccccauggauga

SEQ ID NO: 744853 - RNA, 22 nt, Human
cugugcugaacaauucugcauu

SEQ ID NO: 744854 - RNA, 22 nt, Human
auauagcugagggguauuauaa

SEQ ID NO: 744855 - RNA, 22 nt, Human
aagggagcggggagacccuaug

SEQ ID NO: 744856 - RNA, 22 nt, Human
aacacuuuuuaguaaagauuga

SEQ ID NO: 744857 - RNA, 22 nt, Human
gcuccccuugguccuccuggga

SEQ ID NO: 744858 - RNA, 22 nt, Human
gauuucuaaggaggcugaacuu

SEQ ID NO: 744859 - RNA, 22 nt, Human
gccugcucuggaauccauguaa

SEQ ID NO: 744860 - RNA, 22 nt, Human
guuauuaguaagacucgcacau

SEQ ID NO: 744861 - RNA, 22 nt, Human
caggaacaggcugaugggcagg

SEQ ID NO: 744862 - RNA, 19 nt, Human
uucuguguuaauuccuuua

SEQ ID NO: 744863 - RNA, 22 nt, Human
uuguuuguaaggcucuuagaau

SEQ ID NO: 744864 - RNA, 16 nt, Human
uuuuauugugacagcc

SEQ ID NO: 744865 - RNA, 22 nt, Human
acacuguugcuggcacagacag

SEQ ID NO: 744866 - RNA, 22 nt, Human
aagcaaagugcuuugccuccag

SEQ ID NO: 744867 - RNA, 22 nt, Human
aaauuauuauaggcagagcuga

SEQ ID NO: 744868 - RNA, 20 nt, Human
uacaaguacauuauaguuau

SEQ ID NO: 744869 - RNA, 22 nt, Human
aaugaacuggagaacaaugacc

SEQ ID NO: 744870 - RNA, 20 nt, Human
cucuccuugccgacuuggca

SEQ ID NO: 744871 - RNA, 22 nt, Human
caaauguauucucacuucaggg

SEQ ID NO: 744872 - RNA, 22 nt, Human
auagaagcuuuuaaauaacagg

SEQ ID NO: 744873 - RNA, 22 nt, Human
gguauuuauaugucugaagcug

SEQ ID NO: 744874 - RNA, 22 nt, Human
aggauguguucauagcugacgc

SEQ ID NO: 744875 - RNA, 22 nt, Human
uuacauguuuaugugguacaug

SEQ ID NO: 744876 - RNA, 22 nt, Human
gcccacaguacgaggcucaggc

SEQ ID NO: 744877 - RNA, 22 nt, Human
aauguuacaguuuuaauucuga

SEQ ID NO: 744878 - RNA, 22 nt, Human
cacugacaguaucagagcuguu

SEQ ID NO: 744879 - RNA, 22 nt, Human
gccaggagugucccacucauuu

SEQ ID NO: 744880 - RNA, 22 nt, Human
uggcagagugcagaagaggcau

SEQ ID NO: 744881 - RNA, 22 nt, Human
uguuuguagagacagcugaugc

SEQ ID NO: 744882 - RNA, 22 nt, Human
aaggugugaagagaugggaaga

SEQ ID NO: 744883 - RNA, 22 nt, Human
caggcacaaauuucuagauaag

SEQ ID NO: 744884 - RNA, 22 nt, Human
caggaagaggacaggcuucccc

SEQ ID NO: 744885 - RNA, 22 nt, Human
gacaggcaggccagggcugugg

SEQ ID NO: 744886 - RNA, 23 nt, Human
aguggggaaucaacagauucuuu

SEQ ID NO: 744887 - RNA, 22 nt, Human
cagcucugggugacaggagggc

SEQ ID NO: 744888 - RNA, 22 nt, Human
uugcaaaugugguuagggcuuu

SEQ ID NO: 744889 - RNA, 19 nt, Human
gaggaggcuucagcuuucu

SEQ ID NO: 744890 - RNA, 22 nt, Human
ggcagcucugcuccacaugagu

SEQ ID NO: 744891 - RNA, 22 nt, Human
uaucuguuaggaucagagcugg

SEQ ID NO: 744892 - RNA, 22 nt, Human
auaugcacacucugcccacaga

SEQ ID NO: 744893 - RNA, 22 nt, Human
cauggccagggcagauggcagg

SEQ ID NO: 744894 - RNA, 18 nt, Human
uugcagguaccucuaucu

SEQ ID NO: 744895 - RNA, 22 nt, Human
gcagggccagugcagagaggaa

SEQ ID NO: 744896 - RNA, 22 nt, Human
ggcaguuucaucaggagaaaag

SEQ ID NO: 744897 - RNA, 22 nt, Human
aaagccuucaaguagauguaag

SEQ ID NO: 744898 - RNA, 20 nt, Human
aaauuuaggaaauuuuacgc

SEQ ID NO: 744899 - RNA, 22 nt, Human
ggaggucauagcugugcaggua

SEQ ID NO: 744900 - RNA, 22 nt, Human
cugcuggcaagcccaguuggag

SEQ ID NO: 744901 - RNA, 22 nt, Human
cucagcccagcccaggaccagg

SEQ ID NO: 744902 - RNA, 23 nt, Human
ugagaagccauuagagcaggugg

SEQ ID NO: 744903 - RNA, 22 nt, Human
ugaagcacauuucuugagauga

SEQ ID NO: 744904 - RNA, 22 nt, Human
cuugcacacauguacaugugua

SEQ ID NO: 744905 - RNA, 22 nt, Human
augugcuuuaaagaagccagcu

SEQ ID NO: 744906 - RNA, 22 nt, Human
ccuguguuuagauaugaugcug

SEQ ID NO: 744907 - RNA, 19 nt, Human
aaauuggcaugcugaccuc

SEQ ID NO: 744908 - RNA, 22 nt, Human
uuuguggcaggagcggagaccg

SEQ ID NO: 744909 - RNA, 22 nt, Human
gaacagugccagcacacaauaa

SEQ ID NO: 744910 - RNA, 22 nt, Human
acagucuugagcaucagccaga

SEQ ID NO: 744911 - RNA, 22 nt, Human
ggccucugguucguggugaccu

SEQ ID NO: 744912 - RNA, 22 nt, Human
agggccaguauuaagguaauua

SEQ ID NO: 744913 - RNA, 22 nt, Human
ucccaggauguuuauggcuggu

SEQ ID NO: 744914 - RNA, 22 nt, Human
gagggagggccaggucccaacc

SEQ ID NO: 744915 - RNA, 22 nt, Human
ggagaugcuauguaguuugguu

SEQ ID NO: 744916 - RNA, 22 nt, Human
acaauucaagaagagagaugaa

SEQ ID NO: 744917 - RNA, 22 nt, Human
ugugcuauuugacuguuugcua

SEQ ID NO: 744918 - RNA, 22 nt, Human
cuccugucaauaggcuccuggc

SEQ ID NO: 744919 - RNA, 22 nt, Human
cccucugguuugcccuugggug

SEQ ID NO: 744920 - RNA, 22 nt, Human
agugcauguaucuacagucaca

SEQ ID NO: 744921 - RNA, 22 nt, Human
ggaagccaggcugggggaucug

SEQ ID NO: 744922 - RNA, 23 nt, Human
uccuaacucaauucagggguguc

SEQ ID NO: 744923 - RNA, 22 nt, Human
ggagggugcuuaaguuguguuu

SEQ ID NO: 744924 - RNA, 22 nt, Human
aggagaaguaaggcuagaugau

SEQ ID NO: 744925 - RNA, 22 nt, Human
uguaggaagauauaaaauaucu

SEQ ID NO: 744926 - RNA, 22 nt, Human
ucaguccuccacacaggcaccc

SEQ ID NO: 744927 - RNA, 22 nt, Human
gugaaggaguuaucagugguua

SEQ ID NO: 744928 - RNA, 22 nt, Human
gugggcaggaggcccugcccug

SEQ ID NO: 744929 - RNA, 21 nt, Human
guccacagggguuuguccugg

SEQ ID NO: 744930 - RNA, 22 nt, Human
ucuguucuuaaagcauucuugc

SEQ ID NO: 744931 - RNA, 22 nt, Human
acauccagaggcguggaaggcu

SEQ ID NO: 744932 - RNA, 22 nt, Human
uuuaggucuucuuaagagucaa

SEQ ID NO: 744933 - RNA, 22 nt, Human
aguguacauguuuacagcaucu

SEQ ID NO: 744934 - RNA, 22 nt, Human
acaauguucucugaguugugug

SEQ ID NO: 744935 - RNA, 22 nt, Human
acagagcaguaagaacacagcu

SEQ ID NO: 744936 - RNA, 22 nt, Human
aaugaagaaauggacaucuuua

SEQ ID NO: 744937 - RNA, 22 nt, Human
agguccagcuguugcagccucc

SEQ ID NO: 744938 - RNA, 22 nt, Human
augcaauuuacuguacauaaau

SEQ ID NO: 744939 - RNA, 22 nt, Human
ggcugcccucugcugacugcaa

SEQ ID NO: 744940 - RNA, 22 nt, Human
ucugccacugugaugcaugaua

SEQ ID NO: 744941 - RNA, 22 nt, Human
aggccagcaccagagucaagaa

SEQ ID NO: 744942 - RNA, 22 nt, Human
uaacagaguaacagguauguaa

SEQ ID NO: 744943 - RNA, 22 nt, Human
ucaguucuuauuuucaugaaua

SEQ ID NO: 744944 - RNA, 20 nt, Human
cgaggccaaggggcugggcc

SEQ ID NO: 744945 - RNA, 22 nt, Human
cacaugagagcccccaagagca

SEQ ID NO: 744946 - RNA, 22 nt, Human
aaugcauguauucauuguggaa

SEQ ID NO: 744947 - RNA, 22 nt, Human
uguggcagcuggagguggagaa

SEQ ID NO: 744948 - RNA, 22 nt, Human
gacugggcuccaagagggagag

SEQ ID NO: 744949 - RNA, 22 nt, Human
gaugcugggaccacagaguguu

SEQ ID NO: 744950 - RNA, 22 nt, Human
ggucugagcucuaaaacuaacu

SEQ ID NO: 744951 - RNA, 23 nt, Human
uggucugacuuguagcugugaga

SEQ ID NO: 744952 - RNA, 22 nt, Human
ugaaugcagagacugugggaaa

SEQ ID NO: 744953 - RNA, 22 nt, Human
ugcugcuguauccuuaguguca

SEQ ID NO: 744954 - RNA, 22 nt, Human
cuggguaaguuccuaaggcuca

SEQ ID NO: 744955 - RNA, 22 nt, Human
caagcagagacuagauagcugu

SEQ ID NO: 744956 - RNA, 22 nt, Human
gaugaggucauguuuuacauau

SEQ ID NO: 744957 - RNA, 22 nt, Human
ucuggguuugaaguagagccca

SEQ ID NO: 744958 - RNA, 21 nt, Human
caugaacaugcuuauccucag

SEQ ID NO: 744959 - RNA, 22 nt, Human
cagguaagagacggauuggccc

SEQ ID NO: 744960 - RNA, 22 nt, Human
ucuuccuucuuugaugacaagg

SEQ ID NO: 744961 - RNA, 22 nt, Human
aggagccuccuucucaugugca

SEQ ID NO: 744962 - RNA, 22 nt, Human
cagccuggagccacagcccagg

SEQ ID NO: 744963 - RNA, 22 nt, Human
uuucacagcuggguggcagagu

SEQ ID NO: 744964 - RNA, 23 nt, Human
auccacauuacaguaucauacaa

SEQ ID NO: 744965 - RNA, 22 nt, Human
aacauuuacaaauccuucugca

SEQ ID NO: 744966 - RNA, 22 nt, Human
aauggccagcugggagaguuga

SEQ ID NO: 744967 - RNA, 22 nt, Human
agaaaaguuuaaaucuuggcac

SEQ ID NO: 744968 - RNA, 22 nt, Human
uuuugugagcugagaaauguau

SEQ ID NO: 744969 - RNA, 22 nt, Human
cuccaaguccgagggcucucaa

SEQ ID NO: 744970 - RNA, 15 nt, Human
ccaaugucagaugcu

SEQ ID NO: 744971 - RNA, 22 nt, Human
aaagguaacugggguuuugcca

SEQ ID NO: 744972 - RNA, 22 nt, Human
acagccugcagccccaggucgc

SEQ ID NO: 744973 - RNA, 22 nt, Human
cuggcaggcggagguugcagug

SEQ ID NO: 744974 - RNA, 22 nt, Human
ccugggcauucuuugaguucuc

SEQ ID NO: 744975 - RNA, 19 nt, Human
uagcccagagccuggcuac

SEQ ID NO: 744976 - RNA, 20 nt, Human
auaaccugcccagaggauga

SEQ ID NO: 744977 - RNA, 22 nt, Human
guguuaaaugcaaucacaugca

SEQ ID NO: 744978 - RNA, 22 nt, Human
ucacaucugugugauugucauu

SEQ ID NO: 744979 - RNA, 22 nt, Human
uggcuucaggcagaauuuagac

SEQ ID NO: 744980 - RNA, 22 nt, Human
accagagcgcucaagccuuccc

SEQ ID NO: 744981 - RNA, 22 nt, Human
cuggagcauccaugcccagggu

SEQ ID NO: 744982 - RNA, 22 nt, Human
gugaccaucagagaauaacaaa

SEQ ID NO: 744983 - RNA, 22 nt, Human
agagaacacgugcaucugcaau

SEQ ID NO: 744984 - RNA, 22 nt, Human
agcugguauuuguuagggaguu

SEQ ID NO: 744985 - RNA, 22 nt, Human
ugguaaagaaaugucagggcag

SEQ ID NO: 744986 - RNA, 22 nt, Human
aucacauugccagugauuaccc

SEQ ID NO: 744987 - RNA, 22 nt, Human
cagaaauguacugacaugcagu

SEQ ID NO: 744988 - RNA, 22 nt, Human
cuuggcaugcagcaggcacuca

SEQ ID NO: 744989 - RNA, 22 nt, Human
accuggaccugccaccuaugag

SEQ ID NO: 744990 - RNA, 22 nt, Human
cuccaugaauuugagcuuugug

SEQ ID NO: 744991 - RNA, 22 nt, Human
ucagaccucugaccuugccaaa

SEQ ID NO: 744992 - RNA, 22 nt, Human
aagucguggcaggcuugcacga

SEQ ID NO: 744993 - RNA, 22 nt, Human
aaugcuuugauugauuaaaaca

SEQ ID NO: 744994 - RNA, 22 nt, Human
aagaguuugucagaucugcacg

SEQ ID NO: 744995 - RNA, 22 nt, Human
gagcacagaaucuucccaugca

SEQ ID NO: 744996 - RNA, 23 nt, Human
aguguuccaguugguugagagug

SEQ ID NO: 744997 - RNA, 22 nt, Human
agucucuuccuucaaggcuggu

SEQ ID NO: 744998 - RNA, 22 nt, Human
aaagcugcuuuaaacaucuaug

SEQ ID NO: 744999 - RNA, 22 nt, Human
uuucaguguguaaauugaaaua

SEQ ID NO: 745000 - RNA, 22 nt, Human
auugacaauguauuuguaucug

SEQ ID NO: 745001 - RNA, 22 nt, Human
ggcaggcagauggcugcaccaa

SEQ ID NO: 745002 - RNA, 22 nt, Human
acacaagugaauauuuuaagga

SEQ ID NO: 745003 - RNA, 22 nt, Human
acagaugagaagcugcauucaa

SEQ ID NO: 745004 - RNA, 22 nt, Human
ccaggccaggagagcgagguuu

SEQ ID NO: 745005 - RNA, 22 nt, Human
acccaggagguggaggcugcag

SEQ ID NO: 745006 - RNA, 22 nt, Human
ucuuuaaggugauuucugcuac

SEQ ID NO: 745007 - RNA, 22 nt, Human
gccucaggccgcccugcugcuc

SEQ ID NO: 745008 - RNA, 22 nt, Human
aggugggacccguggggugcga

SEQ ID NO: 745009 - RNA, 22 nt, Human
ucgcugaggcugcacggcugcc

SEQ ID NO: 745010 - RNA, 22 nt, Human
cccuuccuugugacuggugggg

SEQ ID NO: 745011 - RNA, 22 nt, Human
ucuguuaugcauaagcaucagu

SEQ ID NO: 745012 - RNA, 20 nt, Human
ugacaacaugccuuuugcuu

SEQ ID NO: 745013 - RNA, 22 nt, Human
aagcagaauuucccacuaguug

SEQ ID NO: 745014 - RNA, 22 nt, Human
ggcugggacgaugaggauuagu

SEQ ID NO: 745015 - RNA, 22 nt, Human
cccguguggaugcgcuggugcu

SEQ ID NO: 745016 - RNA, 22 nt, Human
ucucuuggugauagucuuucuu

SEQ ID NO: 745017 - RNA, 22 nt, Human
uccguggagauuuugugcaggg

SEQ ID NO: 745018 - RNA, 22 nt, Human
cuucagcaacuuuggaauguuu

SEQ ID NO: 745019 - RNA, 17 nt, Human
aucugcugacauucugu

SEQ ID NO: 745020 - RNA, 22 nt, Human
ugggcagauguggcucuccuug

SEQ ID NO: 745021 - RNA, 22 nt, Human
ugccuggguugacucuuagcug

SEQ ID NO: 745022 - RNA, 22 nt, Human
cacacaugagucuccccauugg

SEQ ID NO: 745023 - RNA, 22 nt, Human
gccucuguaggagugagagcau

SEQ ID NO: 745024 - RNA, 22 nt, Human
gagcagugggaaggaacagggu

SEQ ID NO: 745025 - RNA, 22 nt, Human
ucucauuuggcuuuguuuuaaa

SEQ ID NO: 745026 - RNA, 19 nt, Human
ucucuucucccugguuuua

SEQ ID NO: 745027 - RNA, 22 nt, Human
gcccagaagugacucagcacug

SEQ ID NO: 745028 - RNA, 22 nt, Human
acuuuugguucuguaacuguga

SEQ ID NO: 745029 - RNA, 22 nt, Human
agcucugggauucucaggccac

SEQ ID NO: 745030 - RNA, 22 nt, Human
acacacaacucauuguguaaua

SEQ ID NO: 745031 - RNA, 22 nt, Human
agcuggguucagaggcacaugg

SEQ ID NO: 745032 - RNA, 22 nt, Human
gggaugagaguagggugugaaa

SEQ ID NO: 745033 - RNA, 22 nt, Human
ucagccaguuuguuuauuccgg

SEQ ID NO: 745034 - RNA, 22 nt, Human
uggugggcacagugcccaggcu

SEQ ID NO: 745035 - RNA, 21 nt, Human
cugugcuucuuccuaagccag

SEQ ID NO: 745036 - RNA, 22 nt, Human
uuaaauugucauuugagcaaug

SEQ ID NO: 745037 - RNA, 22 nt, Human
ugaaacauugcacuguaugaau

SEQ ID NO: 745038 - RNA, 23 nt, Human
aaggccagaauuucaauggugcc

SEQ ID NO: 745039 - RNA, 22 nt, Human
uagaaacagauguuuuugaaga

SEQ ID NO: 745040 - RNA, 22 nt, Human
ugcccuggcacacacacagcug

SEQ ID NO: 745041 - RNA, 22 nt, Human
ggguccagacacuccagaggaa

SEQ ID NO: 745042 - RNA, 22 nt, Human
acauacaucaaguaucacaaga

SEQ ID NO: 745043 - RNA, 22 nt, Human
ggcagcauugccaauccagaca

SEQ ID NO: 745044 - RNA, 22 nt, Human
ucacaucacaugagugcaagga

SEQ ID NO: 745045 - RNA, 22 nt, Human
uggggagaggaauuugaaugau

SEQ ID NO: 745046 - RNA, 22 nt, Human
ccugggucccugagagaugauu

SEQ ID NO: 745047 - RNA, 21 nt, Human
uggauaaaggcacuuuucauc

SEQ ID NO: 745048 - RNA, 22 nt, Human
uacacauuucucuuagagacac

SEQ ID NO: 745049 - RNA, 22 nt, Human
cccaggagcuucucucugccuc

SEQ ID NO: 745050 - RNA, 22 nt, Human
gggagacaaggagaaccaaaga

SEQ ID NO: 745051 - RNA, 22 nt, Human
ugagccuggagucguggagggg

SEQ ID NO: 745052 - RNA, 22 nt, Human
aaagguuuauuuaaucagggag

SEQ ID NO: 745053 - RNA, 22 nt, Human
cugggcuuucaggcccuaaggc

SEQ ID NO: 745054 - RNA, 22 nt, Human
ucagggcuuuggcuuuuacucu

SEQ ID NO: 745055 - RNA, 22 nt, Human
agucaggugguucugcuccacu

SEQ ID NO: 745056 - RNA, 22 nt, Human
ugaaaaggaguccuuguuuuca

SEQ ID NO: 745057 - RNA, 22 nt, Human
ggaacuggguuagggucucuuc

SEQ ID NO: 745058 - RNA, 22 nt, Human
agugcuggauuacaggcgugag

SEQ ID NO: 745059 - RNA, 22 nt, Human
agugucuuugucaaauuacagg

SEQ ID NO: 745060 - RNA, 22 nt, Human
ggagacaugcagacugagauac

SEQ ID NO: 745061 - RNA, 19 nt, Human
ucuaacagaagugucgucc

SEQ ID NO: 745062 - RNA, 22 nt, Human
aaagauuugaguucugcuuaua

SEQ ID NO: 745063 - RNA, 22 nt, Human
cacaggacucgacugcagacag

SEQ ID NO: 745064 - RNA, 22 nt, Human
ugauggauguggcucuggagcu

SEQ ID NO: 745065 - RNA, 22 nt, Human
aggcaggcagcugucaccacuc

SEQ ID NO: 745066 - RNA, 22 nt, Human
aagaagugguuggaagaagcau

SEQ ID NO: 745067 - RNA, 22 nt, Human
aauuagcuaauuaauuguagcc

SEQ ID NO: 745068 - RNA, 22 nt, Human
ggagcagccgcgucucagggca

SEQ ID NO: 745069 - RNA, 22 nt, Human
cccugcagaucuaggguccuuc

SEQ ID NO: 745070 - RNA, 22 nt, Human
ccagucugcugugguaggaaga

SEQ ID NO: 745071 - RNA, 22 nt, Human
cccugugcugucaugcugggcg

SEQ ID NO: 745072 - RNA, 22 nt, Human
aguaacaagugccaacguuaga

SEQ ID NO: 745073 - RNA, 22 nt, Human
ugcaauuuuuuagcacaaggag

SEQ ID NO: 745074 - RNA, 22 nt, Human
agcacugugagcaccagcacgc

SEQ ID NO: 745075 - RNA, 21 nt, Human
gcugccaggauuuugcaggaa

SEQ ID NO: 745076 - RNA, 22 nt, Human
agacuaagcgguucuuuucaau

SEQ ID NO: 745077 - RNA, 22 nt, Human
guggagcaggacuagcugagaa

SEQ ID NO: 745078 - RNA, 22 nt, Human
cuucacaguauaggucccugag

SEQ ID NO: 745079 - RNA, 21 nt, Human
agaaaaguagaguuuucagag

SEQ ID NO: 745080 - RNA, 22 nt, Human
cugaggcuaguauaaagagcau

SEQ ID NO: 745081 - RNA, 22 nt, Human
ugucaccaguuccaggaaauaa

SEQ ID NO: 745082 - RNA, 22 nt, Human
uuucacagguauccacgggucu

SEQ ID NO: 745083 - RNA, 22 nt, Human
gggcuccacagcagugagugga

SEQ ID NO: 745084 - RNA, 22 nt, Human
uuaaguaagaccuuaugucuug

SEQ ID NO: 745085 - RNA, 22 nt, Human
cagagcaguggagaguaggucu

SEQ ID NO: 745086 - RNA, 22 nt, Human
uuccuucucagcccucgaggau

SEQ ID NO: 745087 - RNA, 22 nt, Human
aaacucuaaucaaauauagcau

SEQ ID NO: 745088 - RNA, 22 nt, Human
gagcagugguugaacagaggca

SEQ ID NO: 745089 - RNA, 21 nt, Human
uuacaacauuuguguucuaug

SEQ ID NO: 745090 - RNA, 22 nt, Human
agccauuuugguaaugauaaca

SEQ ID NO: 745091 - RNA, 22 nt, Human
augcacuucaagcaucucucug

SEQ ID NO: 745092 - RNA, 22 nt, Human
gcccagggcuucaaagagagaa

SEQ ID NO: 745093 - RNA, 22 nt, Human
ucagcccaucacucacguauua

SEQ ID NO: 745094 - RNA, 22 nt, Human
agcagcagagcucuggucugca

SEQ ID NO: 745095 - RNA, 23 nt, Human
cccauuuucauguuaacuccugg

SEQ ID NO: 745096 - RNA, 22 nt, Human
gacagugguguuuuccauugca

SEQ ID NO: 745097 - RNA, 22 nt, Human
gcuuucugguuugugcuacagg

SEQ ID NO: 745098 - RNA, 22 nt, Human
uaacaguauugaagauaaacua

SEQ ID NO: 745099 - RNA, 22 nt, Human
gacauucacaguuuccgauggu

SEQ ID NO: 745100 - RNA, 22 nt, Human
gacauuuaaauugcaggcagcc

SEQ ID NO: 745101 - RNA, 22 nt, Human
cagcauuuaucuuguagcagga

SEQ ID NO: 745102 - RNA, 22 nt, Human
auucaagguauuuaaaacauaa

SEQ ID NO: 745103 - RNA, 22 nt, Human
ccaggacucaaugaccacaggg

SEQ ID NO: 745104 - RNA, 19 nt, Human
ggggagguauuguuuucau

SEQ ID NO: 745105 - RNA, 20 nt, Human
uucgcugggaguggccaggc

SEQ ID NO: 745106 - RNA, 22 nt, Human
aagagauuucuguaaaauguaa

SEQ ID NO: 745107 - RNA, 22 nt, Human
acccagaggcggagguugcagu

SEQ ID NO: 745108 - RNA, 22 nt, Human
gcagaaccauaaauucagguaa

SEQ ID NO: 745109 - RNA, 22 nt, Human
gagcuuuaagggauaaaaugau

SEQ ID NO: 745110 - RNA, 17 nt, Human
uugagucuggggucuac

SEQ ID NO: 745111 - RNA, 22 nt, Human
ggcagagaguucuccaccucuc

SEQ ID NO: 745112 - RNA, 22 nt, Human
agcugucugugaacacagcauu

SEQ ID NO: 745113 - RNA, 22 nt, Human
aaacaguacucgauuuuuguag

SEQ ID NO: 745114 - RNA, 22 nt, Human
ucaggacacuuggcacaagguc

SEQ ID NO: 745115 - RNA, 22 nt, Human
ucagggacgugagcucagaguc

SEQ ID NO: 745116 - RNA, 22 nt, Human
ugcagccaauucauucauucuu

SEQ ID NO: 745117 - RNA, 22 nt, Human
ucuuugaaacacccuaaccuuu

SEQ ID NO: 745118 - RNA, 22 nt, Human
uaaagguaguuuuaaaggugcu

SEQ ID NO: 745119 - RNA, 22 nt, Human
ugcccagccaauuuguuauguu

SEQ ID NO: 745120 - RNA, 22 nt, Human
gaggcucagagggacuuucaag

SEQ ID NO: 745121 - RNA, 22 nt, Human
cucaggaaggaagcagggagcc

SEQ ID NO: 745122 - RNA, 22 nt, Human
agcaaagaguaauuuuguuuug

SEQ ID NO: 745123 - RNA, 22 nt, Human
cagcacuuggugccauugagug

SEQ ID NO: 745124 - RNA, 22 nt, Human
uauuugcaacauaaaacucuga

SEQ ID NO: 745125 - RNA, 22 nt, Human
acagaccaaguuuccagcaggu

SEQ ID NO: 745126 - RNA, 22 nt, Human
gcucagggucccuuggugcugg

SEQ ID NO: 745127 - RNA, 22 nt, Human
agcaacaggcauaauguguuga

SEQ ID NO: 745128 - RNA, 22 nt, Human
ccuaccaguaggaggccagaga

SEQ ID NO: 745129 - RNA, 22 nt, Human
cgcugggcagguccacuuguua

SEQ ID NO: 745130 - RNA, 22 nt, Human
cucaggacggccgggggagccu

SEQ ID NO: 745131 - RNA, 22 nt, Human
ggccagagggagggcacaaauc

SEQ ID NO: 745132 - RNA, 22 nt, Human
aggugcuguuugucagcaguuu

SEQ ID NO: 745133 - RNA, 22 nt, Human
aguuuauuuuugauaagucuug

SEQ ID NO: 745134 - RNA, 22 nt, Human
ccaguucugagaugaauaucca

SEQ ID NO: 745135 - RNA, 22 nt, Human
acauguguaaaaguggauaaaa

SEQ ID NO: 745136 - RNA, 22 nt, Human
aaaucaucucugcauccuuagc

SEQ ID NO: 745137 - RNA, 22 nt, Human
ugaaauguguccauguuauuuc

SEQ ID NO: 745138 - RNA, 22 nt, Human
aaagaguuuccauugacauuuc

SEQ ID NO: 745139 - RNA, 22 nt, Human
ccaggugucuguggccagcccu

SEQ ID NO: 745140 - RNA, 22 nt, Human
cauacauuaccuaacuuaaugc

SEQ ID NO: 745141 - RNA, 22 nt, Human
ucagugcuaaaagagcuggugu

SEQ ID NO: 745142 - RNA, 22 nt, Human
cugaggcucccucgggucugcu

SEQ ID NO: 745143 - RNA, 22 nt, Human
cucugcuggcagcccccgggcc

SEQ ID NO: 745144 - RNA, 22 nt, Human
gcacaauaacagccaagguuau

SEQ ID NO: 745145 - RNA, 22 nt, Human
uggcuucagacuucugcuacgu

SEQ ID NO: 745146 - RNA, 22 nt, Human
acaauuugaggcuacucaauug

SEQ ID NO: 745147 - RNA, 22 nt, Human
gaauuucaaagagguuaagagg

SEQ ID NO: 745148 - RNA, 22 nt, Human
aagcucucuguccccuggacug

SEQ ID NO: 745149 - RNA, 22 nt, Human
ugggcuccguugccuggggcag

SEQ ID NO: 745150 - RNA, 22 nt, Human
ucugccuucgcugcucccugaa

SEQ ID NO: 745151 - RNA, 22 nt, Human
uauguuuuucagacguccuaca

SEQ ID NO: 745152 - RNA, 22 nt, Human
gagcaucuuguucccaacuucu

SEQ ID NO: 745153 - RNA, 22 nt, Human
gcugcuguccuuagggaguucu

SEQ ID NO: 745154 - RNA, 22 nt, Human
gcaccugccugggacugaagau

SEQ ID NO: 745155 - RNA, 22 nt, Human
agacagacuuugaucuggaugu

SEQ ID NO: 745156 - RNA, 22 nt, Human
augggaggaaggaggcccuuga

SEQ ID NO: 745157 - RNA, 21 nt, Human
ucucaggcgagaauucuuuua

SEQ ID NO: 745158 - RNA, 22 nt, Human
ucaaaggguccuuaacaugaga

SEQ ID NO: 745159 - RNA, 22 nt, Human
cccagcagugacccagugauac

SEQ ID NO: 745160 - RNA, 22 nt, Human
guuuauauucaacggaguaucu

SEQ ID NO: 745161 - RNA, 22 nt, Human
aggacagcccccaacagcaaca

SEQ ID NO: 745162 - RNA, 22 nt, Human
gagcaccucaauuugcuauuug

SEQ ID NO: 745163 - RNA, 22 nt, Human
uaucauuuaacagaaucauugc

SEQ ID NO: 745164 - RNA, 22 nt, Human
uugcucugacuggagugcagug

SEQ ID NO: 745165 - RNA, 22 nt, Human
ugaaaugagcauuuauucuuua

SEQ ID NO: 745166 - RNA, 19 nt, Human
ugucuccucaugcaagugu

SEQ ID NO: 745167 - RNA, 22 nt, Human
aucuuggggacugucucuugua

SEQ ID NO: 745168 - RNA, 23 nt, Human
acagccaguucaccucuccuugg

SEQ ID NO: 745169 - RNA, 22 nt, Human
auggcacuaagagggagcugga

SEQ ID NO: 745170 - RNA, 22 nt, Human
cauggccugccuccuccuggug

SEQ ID NO: 745171 - RNA, 22 nt, Human
uuuauugagcacccguugugcg

SEQ ID NO: 745172 - RNA, 22 nt, Human
gccuggcuuggggcucaguggu

SEQ ID NO: 745173 - RNA, 22 nt, Human
aggcuguugagccccagcaagu

SEQ ID NO: 745174 - RNA, 22 nt, Human
uuucacagcaacacugucugca

SEQ ID NO: 745175 - RNA, 22 nt, Human
guuucauacagauuauucaugg

SEQ ID NO: 745176 - RNA, 22 nt, Human
acauauaugcugggacugugac

SEQ ID NO: 745177 - RNA, 22 nt, Human
ggacaacauguuuuaauuaagg

SEQ ID NO: 745178 - RNA, 22 nt, Human
gcagcugaauguccauugcugc

SEQ ID NO: 745179 - RNA, 22 nt, Human
ugaggaauguuuugagugccga

SEQ ID NO: 745180 - RNA, 22 nt, Human
cauugcacuccacccuaggcaa

SEQ ID NO: 745181 - RNA, 22 nt, Human
auucacaacugauccuugcuca

SEQ ID NO: 745182 - RNA, 22 nt, Human
gcugaggcuccucgggaggaca

SEQ ID NO: 745183 - RNA, 22 nt, Human
ucuagauuuggggcaugaaguu

SEQ ID NO: 745184 - RNA, 22 nt, Human
ucuggaguggcagucaucugaa

SEQ ID NO: 745185 - RNA, 22 nt, Human
aaagguuauuauuacuauuguc

SEQ ID NO: 745186 - RNA, 22 nt, Human
ucugggucacugugggagggca

SEQ ID NO: 745187 - RNA, 22 nt, Human
uuucauguuuucuuaaauggca

SEQ ID NO: 745188 - RNA, 22 nt, Human
cauggacagugggacagugugu

SEQ ID NO: 745189 - RNA, 22 nt, Human
ucugcucuaguugcuuccugcc

SEQ ID NO: 745190 - RNA, 22 nt, Human
ucaggaaggagcuggccugcca

SEQ ID NO: 745191 - RNA, 22 nt, Human
uggcagaggaaaaagucacugg

SEQ ID NO: 745192 - RNA, 22 nt, Human
caggcucaaggcugacuuccau

SEQ ID NO: 745193 - RNA, 22 nt, Human
gagugcugcuugggauagugag

SEQ ID NO: 745194 - RNA, 22 nt, Human
gaccucugaaggcagagcaggg

SEQ ID NO: 745195 - RNA, 22 nt, Human
ggccuugguuccaaagcaggca

SEQ ID NO: 745196 - RNA, 22 nt, Human
uccugucuuaaugaucucgugc

SEQ ID NO: 745197 - RNA, 22 nt, Human
uauucacauucucaggccuggu

SEQ ID NO: 745198 - RNA, 22 nt, Human
ucuggagaggggccuagaauuu

SEQ ID NO: 745199 - RNA, 22 nt, Human
agggcagcagcccauggcucug

SEQ ID NO: 745200 - RNA, 22 nt, Human
caggugccgggaaugcagcaau

SEQ ID NO: 745201 - RNA, 22 nt, Human
acauaacaaucauaggacauag

SEQ ID NO: 745202 - RNA, 22 nt, Human
gaagcugcguguagccauacuu

SEQ ID NO: 745203 - RNA, 20 nt, Human
acagauaccagggacauggg

SEQ ID NO: 745204 - RNA, 22 nt, Human
uguuccagauuuagccaaccga

SEQ ID NO: 745205 - RNA, 22 nt, Human
uaucuuaaaugcaugauagaca

SEQ ID NO: 745206 - RNA, 23 nt, Human
gaacauucauugguugcuuuaga

SEQ ID NO: 745207 - RNA, 17 nt, Human
gcuuuccuugccccucc

SEQ ID NO: 745208 - RNA, 22 nt, Human
aggcuggcuggggaugcgucuu

SEQ ID NO: 745209 - RNA, 22 nt, Human
ccagcccugauuagagaauguc

SEQ ID NO: 745210 - RNA, 22 nt, Human
uagugugguaucuucuauggaa

SEQ ID NO: 745211 - RNA, 22 nt, Human
uauuuauaacagugagaacggg

SEQ ID NO: 745212 - RNA, 22 nt, Human
uucguuuucuaggaccaacaga

SEQ ID NO: 745213 - RNA, 22 nt, Human
ucucaggguuuguacaagugua

SEQ ID NO: 745214 - RNA, 21 nt, Human
acuuaaauuccuugauauuua

SEQ ID NO: 745215 - RNA, 22 nt, Human
gacaagcaggcuccugaagaaa

SEQ ID NO: 745216 - RNA, 22 nt, Human
aggcaguucucguguguguccc

SEQ ID NO: 745217 - RNA, 20 nt, Human
augcuuccagggugugucug

SEQ ID NO: 745218 - RNA, 22 nt, Human
cgagaggcuggacagggcuggg

SEQ ID NO: 745219 - RNA, 22 nt, Human
agcccagcuuucaccccucugg

SEQ ID NO: 745220 - RNA, 22 nt, Human
cugugcuuucaggccgcugugu

SEQ ID NO: 745221 - RNA, 22 nt, Human
cugagagaaucaugcugcaggu

SEQ ID NO: 745222 - RNA, 22 nt, Human
uccaggccccagcaccuuggga

SEQ ID NO: 745223 - RNA, 21 nt, Human
ggucccauugugaggcuugaa

SEQ ID NO: 745224 - RNA, 23 nt, Human
uccucccaaauuucagccucauu

SEQ ID NO: 745225 - RNA, 22 nt, Human
ggucugagguuugggauucacu

SEQ ID NO: 745226 - RNA, 22 nt, Human
aagcaaagaguuuaguggguga

SEQ ID NO: 745227 - RNA, 22 nt, Human
guggcauggagaaggaggcagu

SEQ ID NO: 745228 - RNA, 22 nt, Human
uuccuuccucuuucacaacagc

SEQ ID NO: 745229 - RNA, 22 nt, Human
auuucccacucuacuacaugcu

SEQ ID NO: 745230 - RNA, 22 nt, Human
ggguguccagggcgugucugga

SEQ ID NO: 745231 - RNA, 22 nt, Human
gcugugcagguccccacugccu

SEQ ID NO: 745232 - RNA, 22 nt, Human
auucacaaaaugauauagauac

SEQ ID NO: 745233 - RNA, 22 nt, Human
cauggcuugcaagcauaggaga

SEQ ID NO: 745234 - RNA, 22 nt, Human
cauucugagucacucuuuagca

SEQ ID NO: 745235 - RNA, 22 nt, Human
uuccaaauggagaagaugaguu

SEQ ID NO: 745236 - RNA, 22 nt, Human
cuagugugucuaugucuguucc

SEQ ID NO: 745237 - RNA, 22 nt, Human
auuuaugacuggugaauagaac

SEQ ID NO: 745238 - RNA, 22 nt, Human
auguuuacaaaaaggaggcuug

SEQ ID NO: 745239 - RNA, 22 nt, Human
gcagggcagaaggugcugagga

SEQ ID NO: 745240 - RNA, 22 nt, Human
auuugguuacucaguugucuga

SEQ ID NO: 745241 - RNA, 22 nt, Human
ggcugcaggcuucccuccagca

SEQ ID NO: 745242 - RNA, 22 nt, Human
gucaggaaaacccggguugacu

SEQ ID NO: 745243 - RNA, 22 nt, Human
cugucccauccuuacucuaccc

SEQ ID NO: 745244 - RNA, 22 nt, Human
aagcaugggaggccuggaggag

SEQ ID NO: 745245 - RNA, 23 nt, Human
acacauauauucagauacagaug

SEQ ID NO: 745246 - RNA, 22 nt, Human
cacucccuucaggagccuagga

SEQ ID NO: 745247 - RNA, 22 nt, Human
cucccugaccuggauuccaggc

SEQ ID NO: 745248 - RNA, 22 nt, Human
aagcacccaauuuacagcaguu

SEQ ID NO: 745249 - RNA, 22 nt, Human
agaacacacgucagaguuuccu

SEQ ID NO: 745250 - RNA, 22 nt, Human
uuguguacuguugguugauauu

SEQ ID NO: 745251 - RNA, 22 nt, Human
aaaguguagagugccucaaaau

SEQ ID NO: 745252 - RNA, 22 nt, Human
acauuuauuuucagcugggaaa

SEQ ID NO: 745253 - RNA, 22 nt, Human
gggcagcuccuguggaauccac

SEQ ID NO: 745254 - RNA, 17 nt, Human
uacaggagagcaggaac

SEQ ID NO: 745255 - RNA, 22 nt, Human
ccauggcucuuaccuuguuaua

SEQ ID NO: 745256 - RNA, 22 nt, Human
gcagaagcacaggugacgggcc

SEQ ID NO: 745257 - RNA, 22 nt, Human
uggcagucuggguuggcaguua

SEQ ID NO: 745258 - RNA, 21 nt, Human
cucagagaaaugucugggagc

SEQ ID NO: 745259 - RNA, 22 nt, Human
accccagcccugcuucugggag

SEQ ID NO: 745260 - RNA, 22 nt, Human
cuuacaaauacacuuaggagag

SEQ ID NO: 745261 - RNA, 22 nt, Human
ugcuuuuaagaacaaugcugcu

SEQ ID NO: 745262 - RNA, 22 nt, Human
augauacauugcaaaauuuuaa

SEQ ID NO: 745263 - RNA, 18 nt, Human
agcugcuuuuggcuuaaa

SEQ ID NO: 745264 - RNA, 22 nt, Human
aaccuggagcacccucauaucu

SEQ ID NO: 745265 - RNA, 22 nt, Human
gaggccagcuacccaaggguca

SEQ ID NO: 745266 - RNA, 22 nt, Human
gccucugggcucugccccuggc

SEQ ID NO: 745267 - RNA, 22 nt, Human
ucagaggucacacagcaaguuu

SEQ ID NO: 745268 - RNA, 22 nt, Human
uaauuauuugaagacauuagag

SEQ ID NO: 745269 - RNA, 21 nt, Human
uagcaaauugcuauuaaggca

SEQ ID NO: 745270 - RNA, 22 nt, Human
cagagcauugagggucugccaa

SEQ ID NO: 745271 - RNA, 22 nt, Human
cugaggucuauuuugaaacugc

SEQ ID NO: 745272 - RNA, 22 nt, Human
gagcugcccugagcuuugcaug

SEQ ID NO: 745273 - RNA, 22 nt, Human
cacagggcuaaaugaaggguug

SEQ ID NO: 745274 - RNA, 22 nt, Human
ucugugugcccuaaagccugcu

SEQ ID NO: 745275 - RNA, 22 nt, Human
aggcaggccccugagaauagac

SEQ ID NO: 745276 - RNA, 22 nt, Human
cuuugaauugccguuucaucug

SEQ ID NO: 745277 - RNA, 22 nt, Human
ccucacagccucaugcccagcc

SEQ ID NO: 745278 - RNA, 22 nt, Human
gaagaacaagcagugcuuuccu

SEQ ID NO: 745279 - RNA, 22 nt, Human
gcacccagggacuuggcuggcc

SEQ ID NO: 745280 - RNA, 22 nt, Human
gaugcauguauggagugagggu

SEQ ID NO: 745281 - RNA, 22 nt, Human
auguaguguagagauuagucuc

SEQ ID NO: 745282 - RNA, 22 nt, Human
cacagcugcccuacuccaugug

SEQ ID NO: 745283 - RNA, 22 nt, Human
agggccagcugcagaauuagca

SEQ ID NO: 745284 - RNA, 22 nt, Human
ggccucucaugcccagagccaa

SEQ ID NO: 745285 - RNA, 22 nt, Human
ugucaugccaggaaauaguccc

SEQ ID NO: 745286 - RNA, 22 nt, Human
ucccagagcugauaagccuuua

SEQ ID NO: 745287 - RNA, 22 nt, Human
acacauaucuaagauagaugac

SEQ ID NO: 745288 - RNA, 22 nt, Human
auguggauggaagucagauagc

SEQ ID NO: 745289 - RNA, 22 nt, Human
auuguggugucaguuauaggca

SEQ ID NO: 745290 - RNA, 22 nt, Human
gacuucacaauaaugugacacu

SEQ ID NO: 745291 - RNA, 22 nt, Human
uauagacaagcguaacaagaag

SEQ ID NO: 745292 - RNA, 22 nt, Human
uuucuaaggccagagacugcug

SEQ ID NO: 745293 - RNA, 22 nt, Human
ucagaacagcacagggugauuu

SEQ ID NO: 745294 - RNA, 22 nt, Human
acagcuggaggggcugcagagg

SEQ ID NO: 745295 - RNA, 22 nt, Human
aggacuccauguguccuggaga

SEQ ID NO: 745296 - RNA, 22 nt, Human
aagcacuggguauagcaaugau

SEQ ID NO: 745297 - RNA, 22 nt, Human
cuacaggcucagggagcccucu

SEQ ID NO: 745298 - RNA, 22 nt, Human
aauucacaauguguagucaugc

SEQ ID NO: 745299 - RNA, 23 nt, Human
agaaagucauggccagguuugau

SEQ ID NO: 745300 - RNA, 22 nt, Human
uuagcuuucagccuuucucacc

SEQ ID NO: 745301 - RNA, 23 nt, Human
ucugucaccuauggcugcucuuc

SEQ ID NO: 745302 - RNA, 22 nt, Human
gaaauuaagcaggggucugugg

SEQ ID NO: 745303 - RNA, 20 nt, Human
ucuggcacacugagaagcuc

SEQ ID NO: 745304 - RNA, 22 nt, Human
aucauuucccuuuagaucacaa

SEQ ID NO: 745305 - RNA, 22 nt, Human
agcgagggaggucugaggacag

SEQ ID NO: 745306 - RNA, 22 nt, Human
ggguugggacugucaucuggag

SEQ ID NO: 745307 - RNA, 22 nt, Human
acugaaauggggacaguccuua

SEQ ID NO: 745308 - RNA, 22 nt, Human
augcaacagagaaaauauugag

SEQ ID NO: 745309 - RNA, 22 nt, Human
uccaggugacagagacaggaua

SEQ ID NO: 745310 - RNA, 22 nt, Human
uucacauugugguucaugugaa

SEQ ID NO: 745311 - RNA, 23 nt, Human
uacaugcuauaauuucacccuca

SEQ ID NO: 745312 - RNA, 22 nt, Human
cuguuacuguauuuaaucaucu

SEQ ID NO: 745313 - RNA, 22 nt, Human
cugugcuuccaggauggcagcu

SEQ ID NO: 745314 - RNA, 22 nt, Human
acuguuuaguaaauugaaaugg

SEQ ID NO: 745315 - RNA, 22 nt, Human
agccagugccagucaugccugc

SEQ ID NO: 745316 - RNA, 22 nt, Human
ggugcagccuuuguuucuacuu

SEQ ID NO: 745317 - RNA, 22 nt, Human
uggcugagguuaugcugguugu

SEQ ID NO: 745318 - RNA, 22 nt, Human
gcagguggcagaggugggaucu

SEQ ID NO: 745319 - RNA, 21 nt, Human
agcugggccucagccugcagu

SEQ ID NO: 745320 - RNA, 22 nt, Human
gagaggcugugugccauuguug

SEQ ID NO: 745321 - RNA, 22 nt, Human
acugcuuuugaucucuucugua

SEQ ID NO: 745322 - RNA, 22 nt, Human
aaauggcugacuaaauuaaauu

SEQ ID NO: 745323 - RNA, 22 nt, Human
aaggcccuaauagagcacauau

SEQ ID NO: 745324 - RNA, 22 nt, Human
ugaguagacgugaucuaguaac

SEQ ID NO: 745325 - RNA, 22 nt, Human
uaaugcuucaauuuccuugauu

SEQ ID NO: 745326 - RNA, 22 nt, Human
aguggcugcugacuuuaauaca

SEQ ID NO: 745327 - RNA, 22 nt, Human
cccaccacgugcuuugcuggag

SEQ ID NO: 745328 - RNA, 22 nt, Human
gaaguuuauuucaaucuauuca

SEQ ID NO: 745329 - RNA, 22 nt, Human
cuccagucucuuucggagacac

SEQ ID NO: 745330 - RNA, 22 nt, Human
gcugaggauugaagaguugcca

SEQ ID NO: 745331 - RNA, 22 nt, Human
acagaguacauucagagacuau

SEQ ID NO: 745332 - RNA, 22 nt, Human
cuucaauaccugcguugcuagu

SEQ ID NO: 745333 - RNA, 22 nt, Human
ucucaguccaaaugagagguug

SEQ ID NO: 745334 - RNA, 22 nt, Human
gugcauuaggcuggaauguuga

SEQ ID NO: 745335 - RNA, 22 nt, Human
guggcagcucauguuguuuuaa

SEQ ID NO: 745336 - RNA, 22 nt, Human
gaaugcacacgugugugcaugc

SEQ ID NO: 745337 - RNA, 22 nt, Human
uugauucuuugagaccgugaua

SEQ ID NO: 745338 - RNA, 22 nt, Human
aggcaaauagauaguccauaca

SEQ ID NO: 745339 - RNA, 19 nt, Human
ugccccuuaagaguuucuc

SEQ ID NO: 745340 - RNA, 22 nt, Human
aggagugagcuuuggggucaga

SEQ ID NO: 745341 - RNA, 22 nt, Human
acagucaaugagugagugaaug

SEQ ID NO: 745342 - RNA, 22 nt, Human
caaggcagcuuaauagaauuug

SEQ ID NO: 745343 - RNA, 22 nt, Human
ucuucacauuuuagugguuugu

SEQ ID NO: 745344 - RNA, 22 nt, Human
aucaucaugcacucucagguuu

SEQ ID NO: 745345 - RNA, 21 nt, Human
acauacauuaucuuuuuaaaa

SEQ ID NO: 745346 - RNA, 22 nt, Human
cagcagaacaggcagggaagcu

SEQ ID NO: 745347 - RNA, 21 nt, Human
acacaggaguuucuucuuucu

SEQ ID NO: 745348 - RNA, 22 nt, Human
gaagacacuaaggcccagggag

SEQ ID NO: 745349 - RNA, 22 nt, Human
ccugagcucaaagggugccugg

SEQ ID NO: 745350 - RNA, 22 nt, Human
guacaaaaguuauugcgguuuu

SEQ ID NO: 745351 - RNA, 22 nt, Human
ugucacauguuuaauguggacu

SEQ ID NO: 745352 - RNA, 21 nt, Human
gggucugaauaucuggugcug

SEQ ID NO: 745353 - RNA, 18 nt, Human
ucagaggagauaccuaaa

SEQ ID NO: 745354 - RNA, 22 nt, Human
agcugggaagaguuuucugcag

SEQ ID NO: 745355 - RNA, 22 nt, Human
uggggcaagaagugcccugaag

SEQ ID NO: 745356 - RNA, 22 nt, Human
gcuccugaaggcucugcagggu

SEQ ID NO: 745357 - RNA, 20 nt, Human
auauguguacguguauacau

SEQ ID NO: 745358 - RNA, 22 nt, Human
gucugugugcacagcgagugcc

SEQ ID NO: 745359 - RNA, 22 nt, Human
augaguugaagcuacaagaggc

SEQ ID NO: 745360 - RNA, 16 nt, Human
uugaaugacugugugc

SEQ ID NO: 745361 - RNA, 22 nt, Human
uuggaaaugcaaauauauugaa

SEQ ID NO: 745362 - RNA, 19 nt, Human
gggagacagcucugggcug

SEQ ID NO: 745363 - RNA, 22 nt, Human
agauaaguacuguuauuauugc

SEQ ID NO: 745364 - RNA, 22 nt, Human
aggaagcuccuggagagccagu

SEQ ID NO: 745365 - RNA, 22 nt, Human
agcucaggccggagcuacaggc

SEQ ID NO: 745366 - RNA, 22 nt, Human
aaggcaauguaaauuacagcuu

SEQ ID NO: 745367 - RNA, 20 nt, Human
augugucuuagagcaucagg

SEQ ID NO: 745368 - RNA, 22 nt, Human
ugguccagaagauauucaacca

SEQ ID NO: 745369 - RNA, 22 nt, Human
aauuucaaacuaauaggaacca

SEQ ID NO: 745370 - RNA, 22 nt, Human
agaaugcuuccuuugaaacuga

SEQ ID NO: 745371 - RNA, 22 nt, Human
ggcaggcauugcaacauguaca

SEQ ID NO: 745372 - RNA, 22 nt, Human
aacauaaauuugaaguggcaaa

SEQ ID NO: 745373 - RNA, 23 nt, Human
acagaagccaggagccgcugggc

SEQ ID NO: 745374 - RNA, 22 nt, Human
ccaggcuuccuaaugugugcag

SEQ ID NO: 745375 - RNA, 22 nt, Human
ugaggcucaagaaucugcauuu

SEQ ID NO: 745376 - RNA, 22 nt, Human
augaaggcaguuaaacgucauc

SEQ ID NO: 745377 - RNA, 22 nt, Human
auuuugauaaucauguuagaga

SEQ ID NO: 745378 - RNA, 20 nt, Human
cugggcucaagugagccucc

SEQ ID NO: 745379 - RNA, 21 nt, Human
accucaagcaacaaccaaggu

SEQ ID NO: 745380 - RNA, 22 nt, Human
gggagcagccugccucccaccu

SEQ ID NO: 745381 - RNA, 22 nt, Human
augccagucaaagaagaugaca

SEQ ID NO: 745382 - RNA, 22 nt, Human
acagagagaggcccgaggcugc

SEQ ID NO: 745383 - RNA, 18 nt, Human
ugaacuuuggugucucuc

SEQ ID NO: 745384 - RNA, 22 nt, Human
ucagaggcugcauuuuuaucca

SEQ ID NO: 745385 - RNA, 22 nt, Human
cccuccucucccuaagagucac

SEQ ID NO: 745386 - RNA, 22 nt, Human
ugcuuaccucuggcuguuuucc

SEQ ID NO: 745387 - RNA, 22 nt, Human
ccuuuagagcaaacgccaccua

SEQ ID NO: 745388 - RNA, 22 nt, Human
agcagccuuugaucaucuggga

SEQ ID NO: 745389 - RNA, 20 nt, Human
gacaggugcuaaagaggggc

SEQ ID NO: 745390 - RNA, 22 nt, Human
uagggaugagccaguggguagu

SEQ ID NO: 745391 - RNA, 22 nt, Human
uccagagacuugcaugugcuug

SEQ ID NO: 745392 - RNA, 22 nt, Human
auaaagcuaagacuuacaugaa

SEQ ID NO: 745393 - RNA, 19 nt, Human
ugagccagggaggccaugc

SEQ ID NO: 745394 - RNA, 20 nt, Human
uccagcauauaaacuccucu

SEQ ID NO: 745395 - RNA, 22 nt, Human
ccaggcugagcaugauuggagc

SEQ ID NO: 745396 - RNA, 22 nt, Human
gcuucucuucgccuagguccuu

SEQ ID NO: 745397 - RNA, 22 nt, Human
aaaagcuagucaaugauguauu

SEQ ID NO: 745398 - RNA, 22 nt, Human
ucugaagaacugaguaaacaug

SEQ ID NO: 745399 - RNA, 22 nt, Human
gacacagggggauguguggacg

SEQ ID NO: 745400 - RNA, 22 nt, Human
uggcucuguuuguuaacuagac

SEQ ID NO: 745401 - RNA, 22 nt, Human
ugugcaaucauauuuuaaaaug

SEQ ID NO: 745402 - RNA, 22 nt, Human
agucuguggauggacuggcaga

SEQ ID NO: 745403 - RNA, 23 nt, Human
gcaauacaagacuggucaugagc

SEQ ID NO: 745404 - RNA, 22 nt, Human
aggccugacuugaauuuagggc

SEQ ID NO: 745405 - RNA, 22 nt, Human
uucuuucccagaagauauguuu

SEQ ID NO: 745406 - RNA, 17 nt, Human
gcaaucucagucuccuu

SEQ ID NO: 745407 - RNA, 22 nt, Human
ucugggugaugaaaugcacugu

SEQ ID NO: 745408 - RNA, 22 nt, Human
auacaaguugugauaauguaaa

SEQ ID NO: 745409 - RNA, 22 nt, Human
uggcagagccuugccaaacucc

SEQ ID NO: 745410 - RNA, 17 nt, Human
cccaggccgccgggagc

SEQ ID NO: 745411 - RNA, 18 nt, Human
aagcugggaaggagacag

SEQ ID NO: 745412 - RNA, 22 nt, Human
gagucacaaagccuuucuuauu

SEQ ID NO: 745413 - RNA, 23 nt, Human
uaucuuuuucaauguuggaaaua

SEQ ID NO: 745414 - RNA, 22 nt, Human
cagaggcuggcggccgccccga

SEQ ID NO: 745415 - RNA, 22 nt, Human
uuccaucugcuagguaaaugaa

SEQ ID NO: 745416 - RNA, 22 nt, Human
agaucagaaagccaauaucaua

SEQ ID NO: 745417 - RNA, 22 nt, Human
cuucuuuccuuccuccaguggc

SEQ ID NO: 745418 - RNA, 22 nt, Human
aagauucuacaaacucugguaa

SEQ ID NO: 745419 - RNA, 22 nt, Human
gaguggcuguguacaugcccag

SEQ ID NO: 745420 - RNA, 22 nt, Human
ggcuuagcaacuccugaggcuc

SEQ ID NO: 745421 - RNA, 21 nt, Human
uuucuaaggaggaagaaaaga

SEQ ID NO: 745422 - RNA, 22 nt, Human
uaagugucuaaaaggcagaacu

SEQ ID NO: 745423 - RNA, 22 nt, Human
uauggagauucaaaagcaucuu

SEQ ID NO: 745424 - RNA, 22 nt, Human
auucucagaucuuagaggaaua

SEQ ID NO: 745425 - RNA, 22 nt, Human
uucagucuccucauuuuacaaa

SEQ ID NO: 745426 - RNA, 22 nt, Human
cauuagacacagauguauaaau

SEQ ID NO: 745427 - RNA, 22 nt, Human
augucuucauagcuuauaucca

SEQ ID NO: 745428 - RNA, 22 nt, Human
gauuaagagaaguuucuuaucg

SEQ ID NO: 745429 - RNA, 22 nt, Human
gaguuaaauauuuucugaaguu

SEQ ID NO: 745430 - RNA, 17 nt, Human
aauaccugccaauucua

SEQ ID NO: 745431 - RNA, 22 nt, Human
ccuggauucaagucuuucuuuc

SEQ ID NO: 745432 - RNA, 22 nt, Human
accugcaggggugcucucuggg

SEQ ID NO: 745433 - RNA, 22 nt, Human
acaggccuacgaagucaggugc

SEQ ID NO: 745434 - RNA, 22 nt, Human
ccugccuggagcugagugugga

SEQ ID NO: 745435 - RNA, 19 nt, Human
caggauuguuuaaagcuuu

SEQ ID NO: 745436 - RNA, 22 nt, Human
gggcugaugaugagcagaggug

SEQ ID NO: 745437 - RNA, 22 nt, Human
ggcuccagguacguaugggagg

SEQ ID NO: 745438 - RNA, 22 nt, Human
ucugauuagagcauucuugagu

SEQ ID NO: 745439 - RNA, 22 nt, Human
auggaugggauauugcuugcca

SEQ ID NO: 745440 - RNA, 22 nt, Human
guuguauagagggcaugaaucu

SEQ ID NO: 745441 - RNA, 22 nt, Human
aauagauacuacuuagauguag

SEQ ID NO: 745442 - RNA, 22 nt, Human
gcuuccuugguccuggucuaag

SEQ ID NO: 745443 - RNA, 22 nt, Human
uuucaaucaccauaaagcaacu

SEQ ID NO: 745444 - RNA, 22 nt, Human
aaaccuguggccacuaaauuug

SEQ ID NO: 745445 - RNA, 22 nt, Human
auguagcaucuauccugauaaa

SEQ ID NO: 745446 - RNA, 22 nt, Human
cuuuuuauaccgugccaguuga

SEQ ID NO: 745447 - RNA, 22 nt, Human
gcaggccuuggcaaugagccug

SEQ ID NO: 745448 - RNA, 19 nt, Human
ucucaggcugggcggcugc

SEQ ID NO: 745449 - RNA, 22 nt, Human
uacagcuaugucuugguguucu

SEQ ID NO: 745450 - RNA, 22 nt, Human
aaaguccagagggcacacugaa

SEQ ID NO: 745451 - RNA, 22 nt, Human
ccccaggcagggccuaacagag

SEQ ID NO: 745452 - RNA, 22 nt, Human
ucuaaggacaguuauuacuggg

SEQ ID NO: 745453 - RNA, 22 nt, Human
uggcuccagaagggagggcgcc

SEQ ID NO: 745454 - RNA, 22 nt, Human
cagcauguaucuuucaggugug

SEQ ID NO: 745455 - RNA, 22 nt, Human
ucuguucuuuagccugcuugag

SEQ ID NO: 745456 - RNA, 22 nt, Human
uggagcuggaauuugagcugga

SEQ ID NO: 745457 - RNA, 22 nt, Human
uacauuuacagagccuucucug

SEQ ID NO: 745458 - RNA, 22 nt, Human
cagaugaggacagaugacuggg

SEQ ID NO: 745459 - RNA, 22 nt, Human
uuugucaaguuugcaaauacgu

SEQ ID NO: 745460 - RNA, 22 nt, Human
accaucuuagcagacugcagug

SEQ ID NO: 745461 - RNA, 22 nt, Human
cccagugucucuugugccuuuc

SEQ ID NO: 745462 - RNA, 22 nt, Human
gcuaguccacagccauccaggc

SEQ ID NO: 745463 - RNA, 22 nt, Human
cuuacaguacuucuaauaugau

SEQ ID NO: 745464 - RNA, 22 nt, Human
ggcagaagguugaaguaauuug

SEQ ID NO: 745465 - RNA, 22 nt, Human
ucuuucuugugggugcccuuuu

SEQ ID NO: 745466 - RNA, 22 nt, Human
guuucuuucuauugacugaaca

SEQ ID NO: 745467 - RNA, 22 nt, Human
ucauauuuaguucacgcucaau

SEQ ID NO: 745468 - RNA, 22 nt, Human
acagcugggaacucacacagca

SEQ ID NO: 745469 - RNA, 22 nt, Human
ccaguguguuaguggauuuccc

SEQ ID NO: 745470 - RNA, 22 nt, Human
aaaggucauugaaaaggaggaa

SEQ ID NO: 745471 - RNA, 22 nt, Human
aaauaauguuaggccuuugcuc

SEQ ID NO: 745472 - RNA, 22 nt, Human
agugcucauaaaaaugugaaac

SEQ ID NO: 745473 - RNA, 22 nt, Human
ugcccagcacccagcaugaugc

SEQ ID NO: 745474 - RNA, 22 nt, Human
aaggcuuuugggaauuuucaac

SEQ ID NO: 745475 - RNA, 20 nt, Human
cuccugugccucucugggcc

SEQ ID NO: 745476 - RNA, 22 nt, Human
gaagauuucuuuaugaaagaug

SEQ ID NO: 745477 - RNA, 22 nt, Human
ggcugcagcggauuggggauug

SEQ ID NO: 745478 - RNA, 22 nt, Human
ggcagcaguggcugcuauuguc

SEQ ID NO: 745479 - RNA, 22 nt, Human
aaaagcaucucaaaggagcuuc

SEQ ID NO: 745480 - RNA, 17 nt, Human
uggacccuugggccucc

SEQ ID NO: 745481 - RNA, 22 nt, Human
ucagaaugaaauuucuuucaga

SEQ ID NO: 745482 - RNA, 22 nt, Human
ugggcagugagaaaggucaggu

SEQ ID NO: 745483 - RNA, 22 nt, Human
cucagacaaaugauuaagguua

SEQ ID NO: 745484 - RNA, 22 nt, Human
uuucagacagauucuucucagu

SEQ ID NO: 745485 - RNA, 22 nt, Human
agggcucaguugccuggagccc

SEQ ID NO: 745486 - RNA, 22 nt, Human
ccacugaggggucaugguggga

SEQ ID NO: 745487 - RNA, 23 nt, Human
ggcagccucugacucugcuuugc

SEQ ID NO: 745488 - RNA, 22 nt, Human
gaaauuauugcuagagacugca

SEQ ID NO: 745489 - RNA, 21 nt, Human
uuucggucccagaugccugug

SEQ ID NO: 745490 - RNA, 22 nt, Human
uggcauggcaacccugcaggga

SEQ ID NO: 745491 - RNA, 22 nt, Human
gcccucagaaugggcucuaauc

SEQ ID NO: 745492 - RNA, 22 nt, Human
uggcccugagggcucggagcca

SEQ ID NO: 745493 - RNA, 22 nt, Human
cuuccagcugauuggcauccag

SEQ ID NO: 745494 - RNA, 22 nt, Human
aaguuuggaggucacuggucuu

SEQ ID NO: 745495 - RNA, 22 nt, Human
aucugucugggugcagcagucc

SEQ ID NO: 745496 - RNA, 22 nt, Human
agaauucugacaauagaauugg

SEQ ID NO: 745497 - RNA, 22 nt, Human
agagcagccugugaugaugcac

SEQ ID NO: 745498 - RNA, 22 nt, Human
uggcugaguuccuggcacacgg

SEQ ID NO: 745499 - RNA, 22 nt, Human
caugcagggagugcuccuauua

SEQ ID NO: 745500 - RNA, 22 nt, Human
uucugacaauucaguaacagca

SEQ ID NO: 745501 - RNA, 22 nt, Human
cccugggaaguauuccagcuau

SEQ ID NO: 745502 - RNA, 20 nt, Human
uccagauauuaagacaggca

SEQ ID NO: 745503 - RNA, 22 nt, Human
caccagcccccucacgcuguca

SEQ ID NO: 745504 - RNA, 22 nt, Human
uugggcugaacccugcagcuga

SEQ ID NO: 745505 - RNA, 22 nt, Human
gagggcugaugcuuacuuauuu

SEQ ID NO: 745506 - RNA, 22 nt, Human
cuggcccaggcuccuggggcac

SEQ ID NO: 745507 - RNA, 22 nt, Human
cugucacacugauaucaggcuu

SEQ ID NO: 745508 - RNA, 21 nt, Human
gggcacugaaagggaauagca

SEQ ID NO: 745509 - RNA, 22 nt, Human
gcucacaguacagugcuggcuc

SEQ ID NO: 745510 - RNA, 22 nt, Human
uguauuagagcaguagaauuau

SEQ ID NO: 745511 - RNA, 22 nt, Human
agaauucagaaugcauuucuaa

SEQ ID NO: 745512 - RNA, 22 nt, Human
gcucugcuggagggaaagagaa

SEQ ID NO: 745513 - RNA, 22 nt, Human
uccaggggagugcuacgcacag

SEQ ID NO: 745514 - RNA, 22 nt, Human
uucaagaugucuucacaauagu

SEQ ID NO: 745515 - RNA, 22 nt, Human
gauggaaugaauggcagauaca

SEQ ID NO: 745516 - RNA, 22 nt, Human
aggacaguccgggguccuccac

SEQ ID NO: 745517 - RNA, 22 nt, Human
ucagucuuucgaauucagccag

SEQ ID NO: 745518 - RNA, 22 nt, Human
ucugugccagcagccuccugga

SEQ ID NO: 745519 - RNA, 22 nt, Human
ugaggcaggacuugcauaaagu

SEQ ID NO: 745520 - RNA, 22 nt, Human
aaaguuuguugcuuacaaagaa

SEQ ID NO: 745521 - RNA, 22 nt, Human
gggucuggacggcugcaggaag

SEQ ID NO: 745522 - RNA, 22 nt, Human
gcuuggcauugaccauuaucau

SEQ ID NO: 745523 - RNA, 22 nt, Human
caucacauuuaaggggaaggac

SEQ ID NO: 745524 - RNA, 22 nt, Human
gggcacuggugcugccaucuug

SEQ ID NO: 745525 - RNA, 22 nt, Human
uggccucaaucuguccuccagc

SEQ ID NO: 745526 - RNA, 22 nt, Human
ccagacuuuuaguagugaguua

SEQ ID NO: 745527 - RNA, 22 nt, Human
ugcuuucagauaucuguuucaa

SEQ ID NO: 745528 - RNA, 22 nt, Human
ugugcuucaucacuucucaguu

SEQ ID NO: 745529 - RNA, 22 nt, Human
auucuucacauaagugcuguac

SEQ ID NO: 745530 - RNA, 21 nt, Human
ucuuuacauuugccucuugca

SEQ ID NO: 745531 - RNA, 22 nt, Human
uagccagugagacccagaaaua

SEQ ID NO: 745532 - RNA, 22 nt, Human
aguauuuagcugacucgcuaca

SEQ ID NO: 745533 - RNA, 22 nt, Human
auauacagggagaaacagcuua

SEQ ID NO: 745534 - RNA, 22 nt, Human
gcugcugccgcggccgcuggga

SEQ ID NO: 745535 - RNA, 22 nt, Human
cauuucauaguugucacaauaa

SEQ ID NO: 745536 - RNA, 22 nt, Human
ggaaucagaugaggggcagagc

SEQ ID NO: 745537 - RNA, 22 nt, Human
guguacaaaaugucuccaugga

SEQ ID NO: 745538 - RNA, 22 nt, Human
ucagcauaucuugagcuucaug

SEQ ID NO: 745539 - RNA, 23 nt, Human
aauuaaauugcuagauccagggc

SEQ ID NO: 745540 - RNA, 22 nt, Human
ugugaggcuaccugccaggguc

SEQ ID NO: 745541 - RNA, 22 nt, Human
aaaacaguuauaaacagaguca

SEQ ID NO: 745542 - RNA, 22 nt, Human
ucccucacugguucugcauccc

SEQ ID NO: 745543 - RNA, 22 nt, Human
ucagaaccugcaagucuaaccu

SEQ ID NO: 745544 - RNA, 22 nt, Human
agaugguucucagaaacucaac

SEQ ID NO: 745545 - RNA, 22 nt, Human
agucuugcucuugcaucugcuu

SEQ ID NO: 745546 - RNA, 22 nt, Human
aaguaacaucugaacaugaugu

SEQ ID NO: 745547 - RNA, 22 nt, Human
ucccagcaggaguccaguuccc

SEQ ID NO: 745548 - RNA, 22 nt, Human
cacugagccuugccagcuuggu

SEQ ID NO: 745549 - RNA, 19 nt, Human
caaggguugggucugucau

SEQ ID NO: 745550 - RNA, 23 nt, Human
gaagugucugagcuguauuuuuc

SEQ ID NO: 745551 - RNA, 22 nt, Human
guuaacacaugcaauugcacuu

SEQ ID NO: 745552 - RNA, 22 nt, Human
uugaagcauuguggcuuguauu

SEQ ID NO: 745553 - RNA, 22 nt, Human
cagcaacuuggacagcagucuu

SEQ ID NO: 745554 - RNA, 22 nt, Human
cauuauuaauucagcacaugcu

SEQ ID NO: 745555 - RNA, 22 nt, Human
cagcucucacacuuagcuucua

SEQ ID NO: 745556 - RNA, 22 nt, Human
cagggccucauccucagagauu

SEQ ID NO: 745557 - RNA, 22 nt, Human
gucuccagaagccuagacagcc

SEQ ID NO: 745558 - RNA, 22 nt, Human
cagcaccuaggacaguagucag

SEQ ID NO: 745559 - RNA, 22 nt, Human
ccugggcuuacgaccucugacu

SEQ ID NO: 745560 - RNA, 22 nt, Human
acaguaauauugaugcucguca

SEQ ID NO: 745561 - RNA, 21 nt, Human
acuuggcagaacgcagaaggc

SEQ ID NO: 745562 - RNA, 22 nt, Human
ugccaggauggccagggggcca

SEQ ID NO: 745563 - RNA, 22 nt, Human
ugaagccuuguguggccucucu

SEQ ID NO: 745564 - RNA, 22 nt, Human
gcugaacuacaugaaguugccg

SEQ ID NO: 745565 - RNA, 22 nt, Human
agcaaagucaguggaaccaucc

SEQ ID NO: 745566 - RNA, 22 nt, Human
gagcaacaguuuaugguuuuuc

SEQ ID NO: 745567 - RNA, 22 nt, Human
gaggcugcaggcaaugcugccc

SEQ ID NO: 745568 - RNA, 22 nt, Human
cuggagccagccagggcccucu

SEQ ID NO: 745569 - RNA, 22 nt, Human
gcagggcgcguuugagcgggcu

SEQ ID NO: 745570 - RNA, 22 nt, Human
ccucccugucuaccuguugugg

SEQ ID NO: 745571 - RNA, 22 nt, Human
accauacuugaaauggauagga

SEQ ID NO: 745572 - RNA, 22 nt, Human
ggaacaggaaaggagggaugcu

SEQ ID NO: 745573 - RNA, 22 nt, Human
uuauguacucugcaauguuuga

SEQ ID NO: 745574 - RNA, 22 nt, Human
gcaaaggcuucuuuuauucucc

SEQ ID NO: 745575 - RNA, 22 nt, Human
agaacacacugggggaaacaag

SEQ ID NO: 745576 - RNA, 23 nt, Human
cugccccaauuauaaaagaagau

SEQ ID NO: 745577 - RNA, 22 nt, Human
caggaagauuagaccaagagcu

SEQ ID NO: 745578 - RNA, 22 nt, Human
guuaacauaggcuuagggguuu

SEQ ID NO: 745579 - RNA, 22 nt, Human
gacuuuauuauaguggcaauag

SEQ ID NO: 745580 - RNA, 22 nt, Human
ucuguuauucugcucaguauag

SEQ ID NO: 745581 - RNA, 23 nt, Human
ugaauuuggaacucagagaauua

SEQ ID NO: 745582 - RNA, 22 nt, Human
caccuucagaaugcuccaggca

SEQ ID NO: 745583 - RNA, 20 nt, Human
augcaaacucacaaaauacc

SEQ ID NO: 745584 - RNA, 22 nt, Human
gcuuccuagaucugugguacuc

SEQ ID NO: 745585 - RNA, 22 nt, Human
acauugcaauuagguaccuaug

SEQ ID NO: 745586 - RNA, 22 nt, Human
uggcauccagccaugugauuuu

SEQ ID NO: 745587 - RNA, 22 nt, Human
uugcuuuauuggguuuacugcc

SEQ ID NO: 745588 - RNA, 22 nt, Human
uuacagagcucauuucuaaggg

SEQ ID NO: 745589 - RNA, 22 nt, Human
gaugagacagaauagcccaagg

SEQ ID NO: 745590 - RNA, 22 nt, Human
uuguuucucuggucuugaguga

SEQ ID NO: 745591 - RNA, 16 nt, Human
ggcuccagaauagcga

SEQ ID NO: 745592 - RNA, 22 nt, Human
cagcaggacauggaggaguaaa

SEQ ID NO: 745593 - RNA, 22 nt, Human
guuuuauaggugaaauauuacu

SEQ ID NO: 745594 - RNA, 22 nt, Human
ugaaggaaugagggaguggguc

SEQ ID NO: 745595 - RNA, 22 nt, Human
ucaggccaggagaucagauuga

SEQ ID NO: 745596 - RNA, 22 nt, Human
gcccugcucuuuugcccaccca

SEQ ID NO: 745597 - RNA, 22 nt, Human
cuuaagaagcaagucucagcaa

SEQ ID NO: 745598 - RNA, 22 nt, Human
gcucagaggguuuuggccaagu

SEQ ID NO: 745599 - RNA, 21 nt, Human
aagggagauaggaaucaggcc

SEQ ID NO: 745600 - RNA, 20 nt, Human
gcugucuggauuagaagccu

SEQ ID NO: 745601 - RNA, 22 nt, Human
ugggagauauugcuguggcugu

SEQ ID NO: 745602 - RNA, 22 nt, Human
gggauggggagcuggaaagggg

SEQ ID NO: 745603 - RNA, 22 nt, Human
aaaaccacuuccuugcuauugg

SEQ ID NO: 745604 - RNA, 22 nt, Human
ccagcugucugguuccagagcc

SEQ ID NO: 745605 - RNA, 22 nt, Human
guuuuucuuugugugaagacaa

SEQ ID NO: 745606 - RNA, 21 nt, Human
ucuggcuuucauuccccuucu

SEQ ID NO: 745607 - RNA, 22 nt, Human
uauaaguaguuguugaagacuu

SEQ ID NO: 745608 - RNA, 22 nt, Human
cagcuucaauaauggcugaugg

SEQ ID NO: 745609 - RNA, 22 nt, Human
cuggagccaugucuugacugcu

SEQ ID NO: 745610 - RNA, 22 nt, Human
ugccuggaaggcccaugggaag

SEQ ID NO: 745611 - RNA, 22 nt, Human
uuaaacuauagcuugaugugaa

SEQ ID NO: 745612 - RNA, 18 nt, Human
aggcaggcggaucacaag

SEQ ID NO: 745613 - RNA, 22 nt, Human
ugguccuucguggugcaguucu

SEQ ID NO: 745614 - RNA, 22 nt, Human
augaaacagugaauuagucaag

SEQ ID NO: 745615 - RNA, 22 nt, Human
gcccccagaccucagugggcug

SEQ ID NO: 745616 - RNA, 22 nt, Human
uuccuucuagagcuuguuuagg

SEQ ID NO: 745617 - RNA, 22 nt, Human
guggcugcuaagucuccuuccu

SEQ ID NO: 745618 - RNA, 22 nt, Human
cucccugguguccccuccagga

SEQ ID NO: 745619 - RNA, 22 nt, Human
ccagugugaccaucuguuagcu

SEQ ID NO: 745620 - RNA, 22 nt, Human
cugucugcucauaauggagggc

SEQ ID NO: 745621 - RNA, 20 nt, Human
cacguuuuuccacuagcaaa

SEQ ID NO: 745622 - RNA, 22 nt, Human
gucucagggacugcuucugggg

SEQ ID NO: 745623 - RNA, 22 nt, Human
ccccuucuggucuucaauggug

SEQ ID NO: 745624 - RNA, 22 nt, Human
cagcuucugcucauggaggggu

SEQ ID NO: 745625 - RNA, 22 nt, Human
aaagcacuucaggagcaguuug

SEQ ID NO: 745626 - RNA, 22 nt, Human
cuggagggagauucaaaggagg

SEQ ID NO: 745627 - RNA, 22 nt, Human
ugcuggccucggcgcugggccu

SEQ ID NO: 745628 - RNA, 19 nt, Human
uauuuucguggaggccuau

SEQ ID NO: 745629 - RNA, 22 nt, Human
acacuguuccacacuaagaagg

SEQ ID NO: 745630 - RNA, 22 nt, Human
cagauccacccuuguagugaca

SEQ ID NO: 745631 - RNA, 20 nt, Human
ucagugauuaucucugagug

SEQ ID NO: 745632 - RNA, 22 nt, Human
ucuucauguauacucaugguac

SEQ ID NO: 745633 - RNA, 22 nt, Human
ucugcucugggccagcuauuaa

SEQ ID NO: 745634 - RNA, 22 nt, Human
gcuuccaguaaguugcugccau

SEQ ID NO: 745635 - RNA, 20 nt, Human
aagucccuaagucucuggcc

SEQ ID NO: 745636 - RNA, 22 nt, Human
uggcacugucaccaaugcuguc

SEQ ID NO: 745637 - RNA, 22 nt, Human
aguguguaagggaucaaagagu

SEQ ID NO: 745638 - RNA, 16 nt, Human
ucagggcagaauggca

SEQ ID NO: 745639 - RNA, 22 nt, Human
aaagucauugcuguuaucaaug

SEQ ID NO: 745640 - RNA, 22 nt, Human
ucauguuuggaguuugcucacu

SEQ ID NO: 745641 - RNA, 22 nt, Human
aggcagguguugggagacacca

SEQ ID NO: 745642 - RNA, 22 nt, Human
uuucagaucauuuuuuaaguac

SEQ ID NO: 745643 - RNA, 22 nt, Human
uucacagauguauuggaacucc

SEQ ID NO: 745644 - RNA, 22 nt, Human
uuucacaaugcaauccuacuuc

SEQ ID NO: 745645 - RNA, 22 nt, Human
augcuauguaacuggcagauag

SEQ ID NO: 745646 - RNA, 22 nt, Human
gggcuggugaggcugcccugca

SEQ ID NO: 745647 - RNA, 22 nt, Human
uucaaugccuagaacuuagcau

SEQ ID NO: 745648 - RNA, 22 nt, Human
gagguucacuuccugaaauagc

SEQ ID NO: 745649 - RNA, 22 nt, Human
acuggagucagggaaaaagugu

SEQ ID NO: 745650 - RNA, 22 nt, Human
uggauggauugacgaaggcagc

SEQ ID NO: 745651 - RNA, 22 nt, Human
augcguguaggaacagugucua

SEQ ID NO: 745652 - RNA, 20 nt, Human
uugucacagcuuuccaucag

SEQ ID NO: 745653 - RNA, 22 nt, Human
agacauagaaaaucauuaggaa

SEQ ID NO: 745654 - RNA, 22 nt, Human
cugggcaggagggcucuaugga

SEQ ID NO: 745655 - RNA, 22 nt, Human
ugucucaggcccaagccaguaa

SEQ ID NO: 745656 - RNA, 22 nt, Human
uuuguaacaucccaacaaauuu

SEQ ID NO: 745657 - RNA, 22 nt, Human
cccucugagacagguagcucac

SEQ ID NO: 745658 - RNA, 22 nt, Human
gguaacacaggugcaguuuuaa

SEQ ID NO: 745659 - RNA, 22 nt, Human
cacuugauggaagagcagaaga

SEQ ID NO: 745660 - RNA, 22 nt, Human
acacacuggcccccaguacuga

SEQ ID NO: 745661 - RNA, 19 nt, Human
cuuauuucugguuuugggu

SEQ ID NO: 745662 - RNA, 22 nt, Human
gcauacauugcacccugguagu

SEQ ID NO: 745663 - RNA, 22 nt, Human
agggaguguaaauggugcucag

SEQ ID NO: 745664 - RNA, 22 nt, Human
ggagaaggaagaaagcuacuau

SEQ ID NO: 745665 - RNA, 22 nt, Human
cccugcagaucagugagaacuu

SEQ ID NO: 745666 - RNA, 22 nt, Human
acagcuccuacugaagccaugu

SEQ ID NO: 745667 - RNA, 22 nt, Human
gugcaugaagacucagaaaguc

SEQ ID NO: 745668 - RNA, 22 nt, Human
ucagaggaaacaaucuuuagua

SEQ ID NO: 745669 - RNA, 22 nt, Human
gaaagauauuuauuggcaacag

SEQ ID NO: 745670 - RNA, 22 nt, Human
auucuuaauuccaaagacugag

SEQ ID NO: 745671 - RNA, 22 nt, Human
uucauugaugugguuuaaugua

SEQ ID NO: 745672 - RNA, 22 nt, Human
acagucuaggugugugauuuaa

SEQ ID NO: 745673 - RNA, 22 nt, Human
gcaggcugcccucuuguguuga

SEQ ID NO: 745674 - RNA, 22 nt, Human
gcaaauguuuuugaguguuuac

SEQ ID NO: 745675 - RNA, 22 nt, Human
gaccacuggggugagggccauc

SEQ ID NO: 745676 - RNA, 22 nt, Human
gugccuguuucuuuugaauuca

SEQ ID NO: 745677 - RNA, 22 nt, Human
acagugaaugagaauggagaaa

SEQ ID NO: 745678 - RNA, 22 nt, Human
uccuucaaucacccagugggga

SEQ ID NO: 745679 - RNA, 22 nt, Human
uggcauguggcagcugguucag

SEQ ID NO: 745680 - RNA, 22 nt, Human
auauuugucaauucacuguuca

SEQ ID NO: 745681 - RNA, 22 nt, Human
ucaguaaacagguuuaaguccu

SEQ ID NO: 745682 - RNA, 22 nt, Human
guaaaugagucaaaugggggaa

SEQ ID NO: 745683 - RNA, 22 nt, Human
ccaggagcaaagaucacuggga

SEQ ID NO: 745684 - RNA, 22 nt, Human
caguuucuucaauucagacacu

SEQ ID NO: 745685 - RNA, 22 nt, Human
gucuccuggcugcagcuaagac

SEQ ID NO: 745686 - RNA, 22 nt, Human
aaaccuuuucagcugaauggag

SEQ ID NO: 745687 - RNA, 22 nt, Human
acuuaguuaaguauuuuggaaa

SEQ ID NO: 745688 - RNA, 22 nt, Human
ugggcuggcugaggcauucacu

SEQ ID NO: 745689 - RNA, 22 nt, Human
ugccaggcuguccugggccugg

SEQ ID NO: 745690 - RNA, 22 nt, Human
uagagaugcccuagcugaagua

SEQ ID NO: 745691 - RNA, 22 nt, Human
acaugcauaaacuacuucuuau

SEQ ID NO: 745692 - RNA, 19 nt, Human
uguacguguggguguuuaa

SEQ ID NO: 745693 - RNA, 22 nt, Human
uugcuguaggcugauugcugaa

SEQ ID NO: 745694 - RNA, 17 nt, Human
uggcuucagauguacau

SEQ ID NO: 745695 - RNA, 22 nt, Human
uaaguucauuagacuacagaua

SEQ ID NO: 745696 - RNA, 22 nt, Human
acauccauuugucagcucuuga

SEQ ID NO: 745697 - RNA, 22 nt, Human
gggcgcgggaaggagcccgaga

SEQ ID NO: 745698 - RNA, 16 nt, Human
augggcagugaggaag

SEQ ID NO: 745699 - RNA, 22 nt, Human
aagcaaaugugggugcagaauu

SEQ ID NO: 745700 - RNA, 22 nt, Human
uggagagcgcgacgggaggaag

SEQ ID NO: 745701 - RNA, 22 nt, Human
accagacacugugaagacaggc

SEQ ID NO: 745702 - RNA, 22 nt, Human
aucucccagccacagcauucuu

SEQ ID NO: 745703 - RNA, 22 nt, Human
cuucacagaauaaacucauuau

SEQ ID NO: 745704 - RNA, 22 nt, Human
ucacagaaguguagugaggaaa

SEQ ID NO: 745705 - RNA, 22 nt, Human
ugguugugcugaguuuagugca

SEQ ID NO: 745706 - RNA, 22 nt, Human
agcaguuuggaaaauacuagaa

SEQ ID NO: 745707 - RNA, 22 nt, Human
gagcugggccucagaacacagu

SEQ ID NO: 745708 - RNA, 22 nt, Human
cugagguggaacagaggugaag

SEQ ID NO: 745709 - RNA, 22 nt, Human
aguaacaaagugggagaaugau

SEQ ID NO: 745710 - RNA, 22 nt, Human
uuugacaauuagguagaaaaag

SEQ ID NO: 745711 - RNA, 22 nt, Human
cucugggcuuaccugcuuccug

SEQ ID NO: 745712 - RNA, 22 nt, Human
auggagaguucacuucuaaguu

SEQ ID NO: 745713 - RNA, 22 nt, Human
ugcccugguuacacuggagucc

SEQ ID NO: 745714 - RNA, 22 nt, Human
ugaggccagcuucagcagugga

SEQ ID NO: 745715 - RNA, 22 nt, Human
ggguccagcgacagcaggcuca

SEQ ID NO: 745716 - RNA, 22 nt, Human
ucagaggaaucuguacuugaaa

SEQ ID NO: 745717 - RNA, 22 nt, Human
agggaggucuggcugcccugag

SEQ ID NO: 745718 - RNA, 22 nt, Human
ccagcuggaagagugcagaacu

SEQ ID NO: 745719 - RNA, 22 nt, Human
ccacagcugacaauggauagac

SEQ ID NO: 745720 - RNA, 22 nt, Human
ccaguguguuuuucucugacuc

SEQ ID NO: 745721 - RNA, 22 nt, Human
agccugggcaacuccauucacu

SEQ ID NO: 745722 - RNA, 19 nt, Human
uggcuggagaucugcuacu

SEQ ID NO: 745723 - RNA, 22 nt, Human
gcacccagggcaggaagugagg

SEQ ID NO: 745724 - RNA, 22 nt, Human
caauuucuggaacuaauucuga

SEQ ID NO: 745725 - RNA, 22 nt, Human
ggucagcucuuugggcuggugg

SEQ ID NO: 745726 - RNA, 23 nt, Human
aucaaaguggaaaucaauuaucu

SEQ ID NO: 745727 - RNA, 22 nt, Human
uggcauugcuucugaaguggag

SEQ ID NO: 745728 - RNA, 22 nt, Human
ucagagucucccccaguuuggg

SEQ ID NO: 745729 - RNA, 22 nt, Human
uggucauugcuauuguuucuca

SEQ ID NO: 745730 - RNA, 22 nt, Human
uguccaggugugucuaaagaga

SEQ ID NO: 745731 - RNA, 23 nt, Human
cauuccugauauggccacaagag

SEQ ID NO: 745732 - RNA, 22 nt, Human
acugccugccucugauucugca

SEQ ID NO: 745733 - RNA, 20 nt, Human
aggcucugccauugucccug

SEQ ID NO: 745734 - RNA, 23 nt, Human
cagcugguugugggaguggcugc

SEQ ID NO: 745735 - RNA, 22 nt, Human
cucaucugcucuuauuaucuua

SEQ ID NO: 745736 - RNA, 22 nt, Human
agaaucaauucacugcugcagc

SEQ ID NO: 745737 - RNA, 22 nt, Human
augucugugugaucuuggauaa

SEQ ID NO: 745738 - RNA, 22 nt, Human
cuggagcauuuucugcuucugc

SEQ ID NO: 745739 - RNA, 22 nt, Human
ugucacuuugccuucuggacuu

SEQ ID NO: 745740 - RNA, 22 nt, Human
gcagcucucuggccugcccugg

SEQ ID NO: 745741 - RNA, 22 nt, Human
gagcugaggauacaucagugaa

SEQ ID NO: 745742 - RNA, 22 nt, Human
cucucagacacccauuuggaaa

SEQ ID NO: 745743 - RNA, 21 nt, Human
aaauuagcuucaaguucugca

SEQ ID NO: 745744 - RNA, 22 nt, Human
aaugauaugcaaauuaucauca

SEQ ID NO: 745745 - RNA, 19 nt, Human
uuccaggugcuguggggag

SEQ ID NO: 745746 - RNA, 22 nt, Human
auacacauauguguguauaugu

SEQ ID NO: 745747 - RNA, 20 nt, Human
uuuuauauguaggguauaug

SEQ ID NO: 745748 - RNA, 22 nt, Human
cauacuauuacuaggagcagga

SEQ ID NO: 745749 - RNA, 22 nt, Human
ucccagagaaagucaaggucuu

SEQ ID NO: 745750 - RNA, 21 nt, Human
agauuugucccuucccauuua

SEQ ID NO: 745751 - RNA, 22 nt, Human
cucugugaaccccuccuuucuu

SEQ ID NO: 745752 - RNA, 22 nt, Human
aagccagggguugguaugcuau

SEQ ID NO: 745753 - RNA, 20 nt, Human
agcaguguggggagacugug

SEQ ID NO: 745754 - RNA, 22 nt, Human
aaaaguaauugugguuuuugcu

SEQ ID NO: 745755 - RNA, 22 nt, Human
guauuucugguuaaaugugcua

SEQ ID NO: 745756 - RNA, 22 nt, Human
cugcugucauagccaucccucc

SEQ ID NO: 745757 - RNA, 19 nt, Human
ucucucuguacauuagaua

SEQ ID NO: 745758 - RNA, 22 nt, Human
cccuguggugacaggccugucu

SEQ ID NO: 745759 - RNA, 22 nt, Human
acaggcagguugagaaacauuu

SEQ ID NO: 745760 - RNA, 20 nt, Human
ucccaucacgccugugccag

SEQ ID NO: 745761 - RNA, 22 nt, Human
aagccagguguuuaggccagcg

SEQ ID NO: 745762 - RNA, 22 nt, Human
cccaggaaaguggaggcggcug

SEQ ID NO: 745763 - RNA, 22 nt, Human
guguccugaucaauugagcugg

SEQ ID NO: 745764 - RNA, 22 nt, Human
cuagaacagaaaguacaggaaa

SEQ ID NO: 745765 - RNA, 22 nt, Human
cagggagaaaucuccaggaggu

SEQ ID NO: 745766 - RNA, 22 nt, Human
gcaauaguauuuauuaaaguag

SEQ ID NO: 745767 - RNA, 22 nt, Human
ugugcagcucuagagccaagcc

SEQ ID NO: 745768 - RNA, 22 nt, Human
ggguuccuccaguuccuagagc

SEQ ID NO: 745769 - RNA, 22 nt, Human
agugauguaacaaacagaguua

SEQ ID NO: 745770 - RNA, 22 nt, Human
uccaucauggcagcagcaguga

SEQ ID NO: 745771 - RNA, 22 nt, Human
gaagcauacuuucuauacugcu

SEQ ID NO: 745772 - RNA, 22 nt, Human
caaggacacugagcuuuguaaa

SEQ ID NO: 745773 - RNA, 22 nt, Human
agaggaugauuuuaaggacacu

SEQ ID NO: 745774 - RNA, 22 nt, Human
uauuugucacugcacuugaaau

SEQ ID NO: 745775 - RNA, 22 nt, Human
aacugugggaugcauuaauuca

SEQ ID NO: 745776 - RNA, 22 nt, Human
aggccaaauugaucaucuuuag

SEQ ID NO: 745777 - RNA, 22 nt, Human
aaguuccugggccaaguccagg

SEQ ID NO: 745778 - RNA, 22 nt, Human
ugucuuaauuuggaugauguuu

SEQ ID NO: 745779 - RNA, 22 nt, Human
uccuccccugcccaugaggagg

SEQ ID NO: 745780 - RNA, 22 nt, Human
gcaguccuagggugcucugcag

SEQ ID NO: 745781 - RNA, 22 nt, Human
agugggugagcuuggucuagau

SEQ ID NO: 745782 - RNA, 22 nt, Human
uaauuuugucacagugacaugc

SEQ ID NO: 745783 - RNA, 22 nt, Human
acagaacuuccugcuggagugg

SEQ ID NO: 745784 - RNA, 22 nt, Human
acugggccgaaauggacagaau

SEQ ID NO: 745785 - RNA, 22 nt, Human
cauggccagggagagagaaugu

SEQ ID NO: 745786 - RNA, 22 nt, Human
cacagggcagagaccugggugc

SEQ ID NO: 745787 - RNA, 22 nt, Human
ucuuuucuccagaccugggauc

SEQ ID NO: 745788 - RNA, 22 nt, Human
aauaagaauuuacuugucaaga

SEQ ID NO: 745789 - RNA, 22 nt, Human
uucuucauggguucuuuuagga

SEQ ID NO: 745790 - RNA, 22 nt, Human
uaugaguggcguagagguaggg

SEQ ID NO: 745791 - RNA, 22 nt, Human
uuggcagagccccagccuugga

SEQ ID NO: 745792 - RNA, 22 nt, Human
cagaacauuccaugugcccugc

SEQ ID NO: 745793 - RNA, 21 nt, Human
aaguuuuauguugccauuugu

SEQ ID NO: 745794 - RNA, 22 nt, Human
acgugcaggaucugguuggcga

SEQ ID NO: 745795 - RNA, 20 nt, Human
uuauaucauaaugugccaau

SEQ ID NO: 745796 - RNA, 22 nt, Human
acauugaacuacuuguaaugag

SEQ ID NO: 745797 - RNA, 22 nt, Human
aggucugguguugggccugaaa

SEQ ID NO: 745798 - RNA, 22 nt, Human
auggcugagaugggcuccaggc

SEQ ID NO: 745799 - RNA, 22 nt, Human
acaggcagcgucauugcugcuc

SEQ ID NO: 745800 - RNA, 22 nt, Human
gaccuggaagaugguccucacc

SEQ ID NO: 745801 - RNA, 22 nt, Human
cagggcuugaaucaaggaaguc

SEQ ID NO: 745802 - RNA, 22 nt, Human
auacauaguaccacauuugaca

SEQ ID NO: 745803 - RNA, 22 nt, Human
ggaaggagucuuuaacacccau

SEQ ID NO: 745804 - RNA, 22 nt, Human
aauagcaguuaaaaaucagccc

SEQ ID NO: 745805 - RNA, 22 nt, Human
acauugaugugaugcagaagug

SEQ ID NO: 745806 - RNA, 22 nt, Human
acauuucugagcagggagcugu

SEQ ID NO: 745807 - RNA, 22 nt, Human
ccaucauuugauacagcugucu

SEQ ID NO: 745808 - RNA, 23 nt, Human
ugaagugaaauuucacaagggac

SEQ ID NO: 745809 - RNA, 22 nt, Human
gggcccuucagcuuccucugca

SEQ ID NO: 745810 - RNA, 23 nt, Human
cgcccagccucagugaccugggc

SEQ ID NO: 745811 - RNA, 22 nt, Human
ccauuaaaauggaauguaguga

SEQ ID NO: 745812 - RNA, 22 nt, Human
ugugaaauuacuuaaaggaaau

SEQ ID NO: 745813 - RNA, 22 nt, Human
gacauuuagcuguuuugcauuu

SEQ ID NO: 745814 - RNA, 22 nt, Human
gcagucagacaggaggagcucc

SEQ ID NO: 745815 - RNA, 22 nt, Human
aauuaagagagaguugaagcaa

SEQ ID NO: 745816 - RNA, 22 nt, Human
uuacacagcuucuauccuugaa

SEQ ID NO: 745817 - RNA, 21 nt, Human
aggaauguguauauauacaau

SEQ ID NO: 745818 - RNA, 22 nt, Human
agacagugugaguucagggugg

SEQ ID NO: 745819 - RNA, 22 nt, Human
cugucauuuuuuuagaacaccu

SEQ ID NO: 745820 - RNA, 22 nt, Human
ggaguugguggcccggaaucuc

SEQ ID NO: 745821 - RNA, 22 nt, Human
ccuuugugagguccuguggggg

SEQ ID NO: 745822 - RNA, 22 nt, Human
ggagucugggaauuggagagaa

SEQ ID NO: 745823 - RNA, 22 nt, Human
aggucaccauggcaugcuccac

SEQ ID NO: 745824 - RNA, 22 nt, Human
ugcaaauagccugaugaaagaa

SEQ ID NO: 745825 - RNA, 22 nt, Human
aguggcuuauguuuagaaucau

SEQ ID NO: 745826 - RNA, 22 nt, Human
ucugaaaauguugacuuuguuu

SEQ ID NO: 745827 - RNA, 22 nt, Human
auacagaauucacuacaguuuc

SEQ ID NO: 745828 - RNA, 22 nt, Human
cuguacaucccgagagccagua

SEQ ID NO: 745829 - RNA, 22 nt, Human
auuguucagaguagggcucugu

SEQ ID NO: 745830 - RNA, 23 nt, Human
uucccacaucuuccacagcuaug

SEQ ID NO: 745831 - RNA, 22 nt, Human
cuuuucuuauguggacguaccu

SEQ ID NO: 745832 - RNA, 22 nt, Human
auccauuucuaucuugcugagg

SEQ ID NO: 745833 - RNA, 22 nt, Human
uccauuuacuauucucauaucg

SEQ ID NO: 745834 - RNA, 22 nt, Human
ugcuggagagcuaguucugcag

SEQ ID NO: 745835 - RNA, 22 nt, Human
uaccacuacauuugcuaauggc

SEQ ID NO: 745836 - RNA, 22 nt, Human
cuuucaacuacauacaggcgau

SEQ ID NO: 745837 - RNA, 22 nt, Human
ucauguguccuaguucauauaa

SEQ ID NO: 745838 - RNA, 22 nt, Human
ucaaagcaucagucaauuuagg

SEQ ID NO: 745839 - RNA, 22 nt, Human
cagcccugagcaaggcuuuuaa

SEQ ID NO: 745840 - RNA, 22 nt, Human
augcuuccccucucauuucagc

SEQ ID NO: 745841 - RNA, 22 nt, Human
ugagagagcgccugggaucauu

SEQ ID NO: 745842 - RNA, 23 nt, Human
cagggaggagauacuguguaucu

SEQ ID NO: 745843 - RNA, 22 nt, Human
guuuaugaauguuacuauagag

SEQ ID NO: 745844 - RNA, 22 nt, Human
auuuaccauauguacugaguau

SEQ ID NO: 745845 - RNA, 17 nt, Human
ggcaccagacggagagu

SEQ ID NO: 745846 - RNA, 22 nt, Human
auucucaaacaagugguuugau

SEQ ID NO: 745847 - RNA, 22 nt, Human
uguggcagagagagcuuccuug

SEQ ID NO: 745848 - RNA, 22 nt, Human
augugauucccacugaaucacu

SEQ ID NO: 745849 - RNA, 22 nt, Human
uuacaaguucagauuuucucau

SEQ ID NO: 745850 - RNA, 22 nt, Human
cugcaggaaucugugcuaggug

SEQ ID NO: 745851 - RNA, 22 nt, Human
agguucacacacacaaaaagau

SEQ ID NO: 745852 - RNA, 22 nt, Human
ucaguuugaauguuagcacagu

SEQ ID NO: 745853 - RNA, 22 nt, Human
ccuggagcgcgggucaagcugg

SEQ ID NO: 745854 - RNA, 22 nt, Human
gaaaacacuuugaucugaaagu

SEQ ID NO: 745855 - RNA, 22 nt, Human
ccacagcaccgcugccaguccc

SEQ ID NO: 745856 - RNA, 22 nt, Human
uuauucugcacuuuuaaaauau

SEQ ID NO: 745857 - RNA, 22 nt, Human
cugagggucaacuugauuguau

SEQ ID NO: 745858 - RNA, 22 nt, Human
gucacagaucucuugagucaag

SEQ ID NO: 745859 - RNA, 22 nt, Human
uugcccugucaguagaagugca

SEQ ID NO: 745860 - RNA, 22 nt, Human
cugcacaguggacagugaagau

SEQ ID NO: 745861 - RNA, 22 nt, Human
uccagcucagaugcagggauca

SEQ ID NO: 745862 - RNA, 22 nt, Human
aaaaccuucagguuuggaguuu

SEQ ID NO: 745863 - RNA, 22 nt, Human
ugcauuccuccaccuccugcac

SEQ ID NO: 745864 - RNA, 22 nt, Human
uauuuaaaauaagccccagugg

SEQ ID NO: 745865 - RNA, 23 nt, Human
ugcucugugaauaguuggugacu

SEQ ID NO: 745866 - RNA, 22 nt, Human
cagauauguggauucuauuagc

SEQ ID NO: 745867 - RNA, 22 nt, Human
acugagguuuuuaguguuaaau

SEQ ID NO: 745868 - RNA, 22 nt, Human
aagacaauguuucugauagaua

SEQ ID NO: 745869 - RNA, 22 nt, Human
uguuuuaaucucccauugcucu

SEQ ID NO: 745870 - RNA, 22 nt, Human
ccugccagaaaagagggaguuc

SEQ ID NO: 745871 - RNA, 22 nt, Human
ugcuccacuaagccaucccauu

SEQ ID NO: 745872 - RNA, 22 nt, Human
acacuuuagauauucccuucug

SEQ ID NO: 745873 - RNA, 22 nt, Human
gagcugagcagggagccucacu

SEQ ID NO: 745874 - RNA, 22 nt, Human
cauggccacaugauaaucaagu

SEQ ID NO: 745875 - RNA, 23 nt, Human
agcuaaggaagcugaggcacagu

SEQ ID NO: 745876 - RNA, 22 nt, Human
cacagaggcaaccuucuggggu

SEQ ID NO: 745877 - RNA, 22 nt, Human
acauguaaaaggaacaugcaug

SEQ ID NO: 745878 - RNA, 21 nt, Human
cauuucaaagagcuggaaauc

SEQ ID NO: 745879 - RNA, 23 nt, Human
ccugugucuguugcugaauaaug

SEQ ID NO: 745880 - RNA, 22 nt, Human
gggcugacaaccaucugacaag

SEQ ID NO: 745881 - RNA, 22 nt, Human
auuggcuauugagugugugcug

SEQ ID NO: 745882 - RNA, 22 nt, Human
gcucugcccaaagcuguggcug

SEQ ID NO: 745883 - RNA, 22 nt, Human
ucagaaagcuauaugguguguc

SEQ ID NO: 745884 - RNA, 22 nt, Human
cuuggagagggagaaaaauaac

SEQ ID NO: 745885 - RNA, 22 nt, Human
aguucacaagcguaggugcuga

SEQ ID NO: 745886 - RNA, 22 nt, Human
uauggguacuuugauuuagaaa

SEQ ID NO: 745887 - RNA, 22 nt, Human
ggcuggguucugagaaagagua

SEQ ID NO: 745888 - RNA, 22 nt, Human
gccuccaguuuuuuucugaacu

SEQ ID NO: 745889 - RNA, 22 nt, Human
cuuauuauaaaauccuguuuga

SEQ ID NO: 745890 - RNA, 22 nt, Human
uauugacagaugcauuauguug

SEQ ID NO: 745891 - RNA, 22 nt, Human
guucuucaucauuaacacucug

SEQ ID NO: 745892 - RNA, 22 nt, Human
uacagucaagcauaagaaguca

SEQ ID NO: 745893 - RNA, 22 nt, Human
ugcaggaaugagguucucaguu

SEQ ID NO: 745894 - RNA, 22 nt, Human
ucugggucucagagugaccaug

SEQ ID NO: 745895 - RNA, 22 nt, Human
ugaagguggcauaggagagaug

SEQ ID NO: 745896 - RNA, 22 nt, Human
gccugugcuguucccucugcca

SEQ ID NO: 745897 - RNA, 22 nt, Human
cacugugucaguuugguuagac

SEQ ID NO: 745898 - RNA, 22 nt, Human
cuguaugaggaucagacuggac

SEQ ID NO: 745899 - RNA, 22 nt, Human
agcugacuucuugauccaauga

SEQ ID NO: 745900 - RNA, 22 nt, Human
cagaucuguuugccagaucagc

SEQ ID NO: 745901 - RNA, 22 nt, Human
acagcauucaauaaauaauaac

SEQ ID NO: 745902 - RNA, 22 nt, Human
ucccagagguugagucacuuau

SEQ ID NO: 745903 - RNA, 22 nt, Human
uucuguaugccaauggguuuuu

SEQ ID NO: 745904 - RNA, 22 nt, Human
ggcuucauggaggaggugaguc

SEQ ID NO: 745905 - RNA, 22 nt, Human
aaggagaguacaggaguuggua

SEQ ID NO: 745906 - RNA, 22 nt, Human
gggcucuguccauuccuucaua

SEQ ID NO: 745907 - RNA, 17 nt, Human
cuaaauacuugcguuuc

SEQ ID NO: 745908 - RNA, 22 nt, Human
uaagaagcuucugcuaaugccu

SEQ ID NO: 745909 - RNA, 21 nt, Human
gcugcagggcccagggcaccc

SEQ ID NO: 745910 - RNA, 22 nt, Human
uacaagaaauuucugcauauau

SEQ ID NO: 745911 - RNA, 22 nt, Human
ugacacauuaaaugcucacaaa

SEQ ID NO: 745912 - RNA, 23 nt, Human
uuuauccaacucuguaaucucuc

SEQ ID NO: 745913 - RNA, 19 nt, Human
uggaaggcuaagacacuug

SEQ ID NO: 745914 - RNA, 22 nt, Human
ggcugcauaggcagaagcugug

SEQ ID NO: 745915 - RNA, 22 nt, Human
gaauuauaaacuagugacuuca

SEQ ID NO: 745916 - RNA, 22 nt, Human
agauggcuuagccuggcuccca

SEQ ID NO: 745917 - RNA, 20 nt, Human
uagagcaugaaguccuaucc

SEQ ID NO: 745918 - RNA, 22 nt, Human
aauaugcauuaacuguguacau

SEQ ID NO: 745919 - RNA, 22 nt, Human
ucugccacaugagggcacagca

SEQ ID NO: 745920 - RNA, 22 nt, Human
uccacugugcagcucugcugau

SEQ ID NO: 745921 - RNA, 22 nt, Human
gcugccuguguggccacucacu

SEQ ID NO: 745922 - RNA, 22 nt, Human
aauccagcacauggacacaguc

SEQ ID NO: 745923 - RNA, 22 nt, Human
uggcccugacugauguggaggg

SEQ ID NO: 745924 - RNA, 19 nt, Human
aggcugugaggggaaggaa

SEQ ID NO: 745925 - RNA, 22 nt, Human
ucugcagacaggaagcugaggc

SEQ ID NO: 745926 - RNA, 22 nt, Human
cugcuugaccuguuguucucac

SEQ ID NO: 745927 - RNA, 22 nt, Human
cagcaaaagccagcauaagcuc

SEQ ID NO: 745928 - RNA, 22 nt, Human
gggauggggggaagcguccaug

SEQ ID NO: 745929 - RNA, 22 nt, Human
ugucucuugagcugccugaugc

SEQ ID NO: 745930 - RNA, 22 nt, Human
acugggcccagugguguggcug

SEQ ID NO: 745931 - RNA, 22 nt, Human
uggaucugacuggcuuuucuuc

SEQ ID NO: 745932 - RNA, 22 nt, Human
augaugguuguccuaggugcau

SEQ ID NO: 745933 - RNA, 22 nt, Human
cugccugaguacaagucccaga

SEQ ID NO: 745934 - RNA, 22 nt, Human
uagauacauacauuuuaaaaug

SEQ ID NO: 745935 - RNA, 22 nt, Human
aucuguguccuuauaagagaca

SEQ ID NO: 745936 - RNA, 22 nt, Human
ucugcaggucacgcuccagccu

SEQ ID NO: 745937 - RNA, 22 nt, Human
caggccaggugcucuagaauca

SEQ ID NO: 745938 - RNA, 17 nt, Human
uggcacagaggugcuau

SEQ ID NO: 745939 - RNA, 22 nt, Human
ugacagaaagaguauuaaagau

SEQ ID NO: 745940 - RNA, 22 nt, Human
gcugcccugugguccagcaggu

SEQ ID NO: 745941 - RNA, 22 nt, Human
ucugggauaagaccacagauuu

SEQ ID NO: 745942 - RNA, 20 nt, Human
ucuucagaugcuuuuggagu

SEQ ID NO: 745943 - RNA, 22 nt, Human
cgaggccacaccugcuucuggg

SEQ ID NO: 745944 - RNA, 22 nt, Human
gucuucaauagagccucaauuu

SEQ ID NO: 745945 - RNA, 22 nt, Human
guuugauuugauccggagagau

SEQ ID NO: 745946 - RNA, 22 nt, Human
cugggcacagacccccugggcc

SEQ ID NO: 745947 - RNA, 22 nt, Human
auguagauguucacuugauuuu

SEQ ID NO: 745948 - RNA, 22 nt, Human
uaugugcauuauuaccagugga

SEQ ID NO: 745949 - RNA, 22 nt, Human
acuacagucccucauauguugg

SEQ ID NO: 745950 - RNA, 20 nt, Human
auagacaaagacaugccaga

SEQ ID NO: 745951 - RNA, 22 nt, Human
agcagcagaaaguugauggcag

SEQ ID NO: 745952 - RNA, 20 nt, Human
uggcggggaugagggaguua

SEQ ID NO: 745953 - RNA, 22 nt, Human
gaaucucaggaagaucucugca

SEQ ID NO: 745954 - RNA, 21 nt, Human
gcuugguuuugguuacuugcc

SEQ ID NO: 745955 - RNA, 22 nt, Human
cgaggcggcggaagugcccgua

SEQ ID NO: 745956 - RNA, 22 nt, Human
acagccagaggagccaggcugg

SEQ ID NO: 745957 - RNA, 22 nt, Human
gggugcaggcagcccaggcagg

SEQ ID NO: 745958 - RNA, 22 nt, Human
guacacauuaugcuucucuaaa

SEQ ID NO: 745959 - RNA, 22 nt, Human
uacuacauuaauaaaacauuca

SEQ ID NO: 745960 - RNA, 22 nt, Human
auugaagaucagggaaagauuc

SEQ ID NO: 745961 - RNA, 22 nt, Human
ucaaaaauuuucugaggaugag

SEQ ID NO: 745962 - RNA, 22 nt, Human
ggaggagucaguugggcugcuu

SEQ ID NO: 745963 - RNA, 22 nt, Human
auucuggauuaucaguccacca

SEQ ID NO: 745964 - RNA, 22 nt, Human
gcugagcagccuaagcaaauuu

SEQ ID NO: 745965 - RNA, 22 nt, Human
ccuggaguuuuuugguugacuc

SEQ ID NO: 745966 - RNA, 22 nt, Human
ccaggcucagggcagacuuuca

SEQ ID NO: 745967 - RNA, 22 nt, Human
uuagaaacuuuggaggauagau

SEQ ID NO: 745968 - RNA, 22 nt, Human
aaagauucgagcgauguauaaa

SEQ ID NO: 745969 - RNA, 22 nt, Human
aauuagagaucaguucuuugac

SEQ ID NO: 745970 - RNA, 22 nt, Human
ccaagggcugagauacaucuag

SEQ ID NO: 745971 - RNA, 22 nt, Human
ucacagacgccuccccucgccu

SEQ ID NO: 745972 - RNA, 22 nt, Human
agcaaggcucggucagggugau

SEQ ID NO: 745973 - RNA, 22 nt, Human
auccaguuccaaagaucauuua

SEQ ID NO: 745974 - RNA, 21 nt, Human
acuuuacaauuuacauaguga

SEQ ID NO: 745975 - RNA, 22 nt, Human
aguuacaugugaauagaaagua

SEQ ID NO: 745976 - RNA, 22 nt, Human
augggaagcugaccugcaugga

SEQ ID NO: 745977 - RNA, 22 nt, Human
agggcuccuccccggccuccac

SEQ ID NO: 745978 - RNA, 22 nt, Human
gaucaucuuuuccugcuuccag

SEQ ID NO: 745979 - RNA, 22 nt, Human
ucuaugaaaagucuauucauuc

SEQ ID NO: 745980 - RNA, 22 nt, Human
cuugggcucagcaccgugugga

SEQ ID NO: 745981 - RNA, 22 nt, Human
uccaugagcuagcuuuccaaag

SEQ ID NO: 745982 - RNA, 22 nt, Human
cuuccuugcugucugcuccagg

SEQ ID NO: 745983 - RNA, 22 nt, Human
uccaugagagguaacuuuacaa

SEQ ID NO: 745984 - RNA, 23 nt, Human
uauuagcaauucccacagagcag

SEQ ID NO: 745985 - RNA, 22 nt, Human
ugacaggggcugguggauaaau

SEQ ID NO: 745986 - RNA, 22 nt, Human
augacauaagugaaaaacauca

SEQ ID NO: 745987 - RNA, 22 nt, Human
aagggcuguaguuuguugauca

SEQ ID NO: 745988 - RNA, 22 nt, Human
gucaggacauuuuaccauccug

SEQ ID NO: 745989 - RNA, 22 nt, Human
acaaauuggguaugagcuaaga

SEQ ID NO: 745990 - RNA, 18 nt, Human
gacccagcagaugggcuu

SEQ ID NO: 745991 - RNA, 22 nt, Human
cagucuuuguucccauuacuga

SEQ ID NO: 745992 - RNA, 22 nt, Human
aucucuggcaaugcagcaucgu

SEQ ID NO: 745993 - RNA, 22 nt, Human
agggaggcaggaaaguugucug

SEQ ID NO: 745994 - RNA, 22 nt, Human
ugggucagacagccagugggcc

SEQ ID NO: 745995 - RNA, 22 nt, Human
gaagcacagggcucgaucucag

SEQ ID NO: 745996 - RNA, 22 nt, Human
uucacaauuucccuucaucagg

SEQ ID NO: 745997 - RNA, 22 nt, Human
cucagugguggucacuuggugg

SEQ ID NO: 745998 - RNA, 22 nt, Human
gaggaguguauuccacaccacu

SEQ ID NO: 745999 - RNA, 17 nt, Human
uuacagcagcaauagag

SEQ ID NO: 746000 - RNA, 22 nt, Human
uugcuuuauauucaagagagga

SEQ ID NO: 746001 - RNA, 23 nt, Human
ucuguggcuccuucaggcugcug

SEQ ID NO: 746002 - RNA, 22 nt, Human
cuuggggcagugcuuggcacau

SEQ ID NO: 746003 - RNA, 22 nt, Human
aucuaaaaggagcucuuuaucu

SEQ ID NO: 746004 - RNA, 22 nt, Human
ccaugcuccuuaccacucacuu

SEQ ID NO: 746005 - RNA, 22 nt, Human
augguuuguguggcccagauga

SEQ ID NO: 746006 - RNA, 22 nt, Human
gaagguuugauccuuauuuaua

SEQ ID NO: 746007 - RNA, 22 nt, Human
uuaaacagacaguaaaugaaac

SEQ ID NO: 746008 - RNA, 22 nt, Human
uguccauggagaagcucagggc

SEQ ID NO: 746009 - RNA, 22 nt, Human
acaaagugugcggagcccaggg

SEQ ID NO: 746010 - RNA, 22 nt, Human
agauccauuuuggugucaacuc

SEQ ID NO: 746011 - RNA, 22 nt, Human
gucugaggccugaggcccuggg

SEQ ID NO: 746012 - RNA, 22 nt, Human
cuccagggagcugcgggagcca

SEQ ID NO: 746013 - RNA, 22 nt, Human
gggcugugcugaguaggaggug

SEQ ID NO: 746014 - RNA, 22 nt, Human
aggcugugcucagccaauggga

SEQ ID NO: 746015 - RNA, 22 nt, Human
uucaggacuaggggcuucaagg

SEQ ID NO: 746016 - RNA, 23 nt, Human
guauuucagcauucucaguuaaa

SEQ ID NO: 746017 - RNA, 22 nt, Human
ucugaggcugaauggacuccgu

SEQ ID NO: 746018 - RNA, 22 nt, Human
gacccaggagugcagagagugg

SEQ ID NO: 746019 - RNA, 22 nt, Human
acaguaaaaagccuuagaauuu

SEQ ID NO: 746020 - RNA, 22 nt, Human
auggccagagagagcacaccug

SEQ ID NO: 746021 - RNA, 22 nt, Human
aaacucagaagguacagaaggg

SEQ ID NO: 746022 - RNA, 22 nt, Human
agcccagcaaagggguuugaga

SEQ ID NO: 746023 - RNA, 23 nt, Human
uguuccagauacgccuuuuccuc

SEQ ID NO: 746024 - RNA, 22 nt, Human
acagugaugagccggcugaggc

SEQ ID NO: 746025 - RNA, 21 nt, Human
cagugcucaaucugacagugg

SEQ ID NO: 746026 - RNA, 22 nt, Human
caguggaggcucaagugugcuu

SEQ ID NO: 746027 - RNA, 22 nt, Human
uauacaguaucuuuugaaggca

SEQ ID NO: 746028 - RNA, 22 nt, Human
uuacaugguuguuggaaaugcu

SEQ ID NO: 746029 - RNA, 22 nt, Human
agggcuuguuaacauagagauu

SEQ ID NO: 746030 - RNA, 20 nt, Human
uccuuuggccuuagagcugu

SEQ ID NO: 746031 - RNA, 22 nt, Human
uaaggcagagguaccacuaggc

SEQ ID NO: 746032 - RNA, 22 nt, Human
uaagaguaucuauuaaguacuu

SEQ ID NO: 746033 - RNA, 20 nt, Human
acaugcacguguguauauau

SEQ ID NO: 746034 - RNA, 22 nt, Human
ccugaguggugcuaagcagaua

SEQ ID NO: 746035 - RNA, 22 nt, Human
uugugugacuccuagaguagag

SEQ ID NO: 746036 - RNA, 22 nt, Human
aacccuggggcugcucugccug

SEQ ID NO: 746037 - RNA, 22 nt, Human
cuccugggagucuuccuggaug

SEQ ID NO: 746038 - RNA, 22 nt, Human
cuggcuuguuuuaagaauacaa

SEQ ID NO: 746039 - RNA, 22 nt, Human
uucuucaaauagcagggaguca

SEQ ID NO: 746040 - RNA, 22 nt, Human
ucugggaacuauaucugguggu

SEQ ID NO: 746041 - RNA, 22 nt, Human
guguucugcagaccagcaucau

SEQ ID NO: 746042 - RNA, 22 nt, Human
uguauauuguucugucucuuca

SEQ ID NO: 746043 - RNA, 22 nt, Human
cuggccugagcacagcggcugc

SEQ ID NO: 746044 - RNA, 22 nt, Human
uagcuuggaauaaaaugagaau

SEQ ID NO: 746045 - RNA, 20 nt, Human
aacaaacuacaaaauuaugu

SEQ ID NO: 746046 - RNA, 22 nt, Human
ucuuuccauggccacacagucu

SEQ ID NO: 746047 - RNA, 22 nt, Human
uuauaacuuuggauaugacaag

SEQ ID NO: 746048 - RNA, 22 nt, Human
cacaauuuguuugcucuuaguc

SEQ ID NO: 746049 - RNA, 22 nt, Human
ugacagaacagguugggagcaa

SEQ ID NO: 746050 - RNA, 22 nt, Human
agccucucuuuauucccagcua

SEQ ID NO: 746051 - RNA, 22 nt, Human
auggaagguccuacagagcgca

SEQ ID NO: 746052 - RNA, 22 nt, Human
caauuucagguggauagguuuu

SEQ ID NO: 746053 - RNA, 22 nt, Human
uucaguauuucaugacuuucuu

SEQ ID NO: 746054 - RNA, 22 nt, Human
ggucagagccguuagcauucag

SEQ ID NO: 746055 - RNA, 22 nt, Human
uuuauaucuuaugucauuucaa

SEQ ID NO: 746056 - RNA, 22 nt, Human
gccugugcauagcagcggacuc

SEQ ID NO: 746057 - RNA, 22 nt, Human
uuuagggaauagaagaucugaa

SEQ ID NO: 746058 - RNA, 22 nt, Human
agcuccuguggcugaaagagga

SEQ ID NO: 746059 - RNA, 22 nt, Human
ucagugacuggguauuaaauca

SEQ ID NO: 746060 - RNA, 22 nt, Human
uucucagagugaccaagucuuu

SEQ ID NO: 746061 - RNA, 22 nt, Human
cuucagcuguggucuccaaggc

SEQ ID NO: 746062 - RNA, 23 nt, Human
guguguggaaagugcaugggccu

SEQ ID NO: 746063 - RNA, 21 nt, Human
auguggcucccuuccucagga

SEQ ID NO: 746064 - RNA, 22 nt, Human
ggaggugcagaguaggguuggu

SEQ ID NO: 746065 - RNA, 20 nt, Human
ccucaguguccuggacuggg

SEQ ID NO: 746066 - RNA, 22 nt, Human
ggcccaaggcccaggucgagcu

SEQ ID NO: 746067 - RNA, 22 nt, Human
cuggcagcguguuuaugaacau

SEQ ID NO: 746068 - RNA, 23 nt, Human
ugcccauugcaucuugguacugg

SEQ ID NO: 746069 - RNA, 22 nt, Human
aagcagaggccacagagugggc

SEQ ID NO: 746070 - RNA, 17 nt, Human
uccuguuuaucauugau

SEQ ID NO: 746071 - RNA, 23 nt, Human
ugcagcaaccuuggaagcauuuc

SEQ ID NO: 746072 - RNA, 18 nt, Human
ccuggcuuccaucuuggu

SEQ ID NO: 746073 - RNA, 22 nt, Human
aaggugaacugguaaugacaga

SEQ ID NO: 746074 - RNA, 22 nt, Human
uuucaauguaacauuuccaggc

SEQ ID NO: 746075 - RNA, 21 nt, Human
guccagagagccggcuccuga

SEQ ID NO: 746076 - RNA, 22 nt, Human
acagaggguguggaggaagacg

SEQ ID NO: 746077 - RNA, 22 nt, Human
cucuccaggcgagguccuacug

SEQ ID NO: 746078 - RNA, 22 nt, Human
ucuuaacaagcuccucagugcu

SEQ ID NO: 746079 - RNA, 22 nt, Human
ugugaaggcagagccagugaaa

SEQ ID NO: 746080 - RNA, 22 nt, Human
aggcuucuucucuauguacaag

SEQ ID NO: 746081 - RNA, 22 nt, Human
acccaggaggugacacagggcu

SEQ ID NO: 746082 - RNA, 21 nt, Human
ccagcugcuccuugagguucc

SEQ ID NO: 746083 - RNA, 22 nt, Human
uuauuugauuaguaaaccugua

SEQ ID NO: 746084 - RNA, 22 nt, Human
ggcguugcucuccccaggcuca

SEQ ID NO: 746085 - RNA, 22 nt, Human
ugauggagcaugugugcuuccu

SEQ ID NO: 746086 - RNA, 22 nt, Human
ugauuguuuccuauguacaccu

SEQ ID NO: 746087 - RNA, 22 nt, Human
aacaaugaccacacaauguacu

SEQ ID NO: 746088 - RNA, 22 nt, Human
cauuguuaccaucuuuuaccua

SEQ ID NO: 746089 - RNA, 22 nt, Human
ccucaccuuuucucugauugcu

SEQ ID NO: 746090 - RNA, 22 nt, Human
uugagucugugcccuaugcugu

SEQ ID NO: 746091 - RNA, 22 nt, Human
aucaagcauauauaaaacugca

SEQ ID NO: 746092 - RNA, 22 nt, Human
gggccugacugagagcuccuca

SEQ ID NO: 746093 - RNA, 22 nt, Human
aucccccucuuggauggcggca

SEQ ID NO: 746094 - RNA, 22 nt, Human
ugagcagggagcugggcugagc

SEQ ID NO: 746095 - RNA, 17 nt, Human
gucaauauuguugacag

SEQ ID NO: 746096 - RNA, 22 nt, Human
aacuuuuguccgaucuccugga

SEQ ID NO: 746097 - RNA, 22 nt, Human
gcagaugguggaggcaagaggc

SEQ ID NO: 746098 - RNA, 21 nt, Human
ccuggccaaucugauaggguu

SEQ ID NO: 746099 - RNA, 22 nt, Human
aacaugaaaaccuccacagcaa

SEQ ID NO: 746100 - RNA, 22 nt, Human
agugcugucccgacaacugagg

SEQ ID NO: 746101 - RNA, 22 nt, Human
uccuaacuaauuuguagcaaaa

SEQ ID NO: 746102 - RNA, 22 nt, Human
acaaagcacgagugccauggac

SEQ ID NO: 746103 - RNA, 22 nt, Human
ucuuggucuuucauccuucaac

SEQ ID NO: 746104 - RNA, 22 nt, Human
auugaacugucuuugaagaaau

SEQ ID NO: 746105 - RNA, 22 nt, Human
uuccauauguauauagcuguua

SEQ ID NO: 746106 - RNA, 22 nt, Human
uuccaagagcuuuaauuguuga

SEQ ID NO: 746107 - RNA, 22 nt, Human
gcuuggccagcagccgggaugc

SEQ ID NO: 746108 - RNA, 22 nt, Human
ggagcugaggcugaggccucac

SEQ ID NO: 746109 - RNA, 22 nt, Human
ugaugcugcugggaguggugcu

SEQ ID NO: 746110 - RNA, 22 nt, Human
ccuuucugguauuuaaccaaag

SEQ ID NO: 746111 - RNA, 22 nt, Human
auguacaaccugcaugacaguc

SEQ ID NO: 746112 - RNA, 22 nt, Human
uugaccacugaaugguucugaa

SEQ ID NO: 746113 - RNA, 22 nt, Human
uauuacaguucgaguuucuagg

SEQ ID NO: 746114 - RNA, 22 nt, Human
acaaugaaaaaauuuacugugg

SEQ ID NO: 746115 - RNA, 22 nt, Human
uaaagugccucagguccugggu

SEQ ID NO: 746116 - RNA, 22 nt, Human
aaacuuggccgcauccaccggg

SEQ ID NO: 746117 - RNA, 22 nt, Human
agcccugcccugccauguggca

SEQ ID NO: 746118 - RNA, 22 nt, Human
ggcaagagguccaagaggucuc

SEQ ID NO: 746119 - RNA, 22 nt, Human
gagacagaguuucacucuuguu

SEQ ID NO: 746120 - RNA, 22 nt, Human
acugaagucucuuuuguucucu

SEQ ID NO: 746121 - RNA, 20 nt, Human
cuaggaacuauggucuggcu

SEQ ID NO: 746122 - RNA, 22 nt, Human
acuuccuuuugggaaacuguuu

SEQ ID NO: 746123 - RNA, 22 nt, Human
uguuacagucauuguuuucuga

SEQ ID NO: 746124 - RNA, 22 nt, Human
aaaccuggacuuguaaugauaa

SEQ ID NO: 746125 - RNA, 22 nt, Human
gacaggacuucacuguguugcc

SEQ ID NO: 746126 - RNA, 22 nt, Human
gcuggccugcaaagcccggcug

SEQ ID NO: 746127 - RNA, 22 nt, Human
caaagugagagaauggcagaaa

SEQ ID NO: 746128 - RNA, 22 nt, Human
agcaaucagcuucuuuguguuu

SEQ ID NO: 746129 - RNA, 22 nt, Human
gcaguggccacauggaggagga

SEQ ID NO: 746130 - RNA, 22 nt, Human
ggggucggggcauagccacuua

SEQ ID NO: 746131 - RNA, 22 nt, Human
uccuccagugguacuggccaau

SEQ ID NO: 746132 - RNA, 22 nt, Human
ucccugggcacaaucugcuggc

SEQ ID NO: 746133 - RNA, 22 nt, Human
aaggucuguauuagaguuucau

SEQ ID NO: 746134 - RNA, 22 nt, Human
uuuaugcagcacuuuacauuug

SEQ ID NO: 746135 - RNA, 22 nt, Human
gccuggcugcuagccagaggca

SEQ ID NO: 746136 - RNA, 22 nt, Human
agcauucaaguaauucacuugg

SEQ ID NO: 746137 - RNA, 20 nt, Human
uggaaggcaucugcauuauu

SEQ ID NO: 746138 - RNA, 22 nt, Human
agaugcagaaaaacuaagugau

SEQ ID NO: 746139 - RNA, 22 nt, Human
guagaucaugagaauguuuuug

SEQ ID NO: 746140 - RNA, 22 nt, Human
ugugcgugggcacacacauaug

SEQ ID NO: 746141 - RNA, 22 nt, Human
ggcagauguugcagugagcaga

SEQ ID NO: 746142 - RNA, 22 nt, Human
acguaguguguuguggaaagag

SEQ ID NO: 746143 - RNA, 22 nt, Human
uaugaguacugugaacgagaau

SEQ ID NO: 746144 - RNA, 22 nt, Human
aggcugagagcaacgugucaga

SEQ ID NO: 746145 - RNA, 22 nt, Human
aggggaugccugaggaucugua

SEQ ID NO: 746146 - RNA, 22 nt, Human
guggaauugcuggauaauauca

SEQ ID NO: 746147 - RNA, 22 nt, Human
uuuuauucaaauaguucacacu

SEQ ID NO: 746148 - RNA, 22 nt, Human
aggcuggguaccugucauaugc

SEQ ID NO: 746149 - RNA, 22 nt, Human
uggaagcgagacagagaucucc

SEQ ID NO: 746150 - RNA, 22 nt, Human
gcucagagauggggaaugaaaa

SEQ ID NO: 746151 - RNA, 22 nt, Human
gcucccaggaugaggagccagg

SEQ ID NO: 746152 - RNA, 18 nt, Human
gguggcaggucagaugcc

SEQ ID NO: 746153 - RNA, 22 nt, Human
ucucugugggcuuuggacuuga

SEQ ID NO: 746154 - RNA, 22 nt, Human
cuuaagauuugagauaccuaau

SEQ ID NO: 746155 - RNA, 22 nt, Human
auuuggaacaaauauuaguaaa

SEQ ID NO: 746156 - RNA, 22 nt, Human
aggccacaguacuuugcagacc

SEQ ID NO: 746157 - RNA, 22 nt, Human
auauucacuccuggugagacua

SEQ ID NO: 746158 - RNA, 22 nt, Human
cagaggccuugucuucuuugcu

SEQ ID NO: 746159 - RNA, 19 nt, Human
ccugugcuaggagcugacc

SEQ ID NO: 746160 - RNA, 22 nt, Human
aacauugaguucuacuuccauu

SEQ ID NO: 746161 - RNA, 19 nt, Human
uggaggagaggaaaaguca

SEQ ID NO: 746162 - RNA, 22 nt, Human
gcacaguggguggucauguaca

SEQ ID NO: 746163 - RNA, 22 nt, Human
uuugucugccuugcuggacugu

SEQ ID NO: 746164 - RNA, 22 nt, Human
gagacuuuuuaaucacuaggaa

SEQ ID NO: 746165 - RNA, 19 nt, Human
ugcagggcugcgccugggg

SEQ ID NO: 746166 - RNA, 22 nt, Human
augauuuuuucuaacacagucg

SEQ ID NO: 746167 - RNA, 22 nt, Human
uuccugaggcucaucggagucg

SEQ ID NO: 746168 - RNA, 22 nt, Human
aaugggaggauuuucucucuug

SEQ ID NO: 746169 - RNA, 20 nt, Human
aauacuaaacacaaagcagu

SEQ ID NO: 746170 - RNA, 22 nt, Human
uuucugaacuugguacuggagc

SEQ ID NO: 746171 - RNA, 22 nt, Human
cugcuaaaccucucugagagcu

SEQ ID NO: 746172 - RNA, 22 nt, Human
aaaugucagaagcuuuacuucu

SEQ ID NO: 746173 - RNA, 22 nt, Human
aggaaguuggcauuuuguuuca

SEQ ID NO: 746174 - RNA, 22 nt, Human
aguuuugaaaugaaauguaguu

SEQ ID NO: 746175 - RNA, 22 nt, Human
cacagcugcacagaggaggugc

SEQ ID NO: 746176 - RNA, 22 nt, Human
cuaauuuaaugaaugagucuua

SEQ ID NO: 746177 - RNA, 17 nt, Human
ugggugguagggagagg

SEQ ID NO: 746178 - RNA, 22 nt, Human
acauaugcgaucauaggaugca

SEQ ID NO: 746179 - RNA, 22 nt, Human
ucuuagaaaaaugguauguuuu

SEQ ID NO: 746180 - RNA, 22 nt, Human
uccugggagagugggacuguau

SEQ ID NO: 746181 - RNA, 22 nt, Human
agugugucuuauccugggagaa

SEQ ID NO: 746182 - RNA, 22 nt, Human
agcaacugggcucauuuuuuaa

SEQ ID NO: 746183 - RNA, 22 nt, Human
aagcagauauugugggaguggg

SEQ ID NO: 746184 - RNA, 22 nt, Human
augaucucauucuuucaaaggg

SEQ ID NO: 746185 - RNA, 20 nt, Human
gaaaccagaacgcagcccug

SEQ ID NO: 746186 - RNA, 22 nt, Human
cugggcucuguguuucaguuuc

SEQ ID NO: 746187 - RNA, 22 nt, Human
guaagggauuugaacauagguu

SEQ ID NO: 746188 - RNA, 23 nt, Human
uggugccucagaagcagugggcu

SEQ ID NO: 746189 - RNA, 22 nt, Human
uccccucuggaggcugcagggg

SEQ ID NO: 746190 - RNA, 22 nt, Human
ggguaguguggucucugggcug

SEQ ID NO: 746191 - RNA, 22 nt, Human
aaggggaagagaccgcagaguc

SEQ ID NO: 746192 - RNA, 22 nt, Human
ccuuuucuugccacugacucgg

SEQ ID NO: 746193 - RNA, 22 nt, Human
gauggcuuccuucucacugugu

SEQ ID NO: 746194 - RNA, 22 nt, Human
ugcuccagcgcugccaccaguu

SEQ ID NO: 746195 - RNA, 22 nt, Human
augcaagauguauagaagacuu

SEQ ID NO: 746196 - RNA, 22 nt, Human
aaagugcugagacagacuggga

SEQ ID NO: 746197 - RNA, 22 nt, Human
gccuuccaggcagggggagcag

SEQ ID NO: 746198 - RNA, 22 nt, Human
cccagguccccaccugucugcu

SEQ ID NO: 746199 - RNA, 22 nt, Human
uagaggugagccaucaaggggc

SEQ ID NO: 746200 - RNA, 22 nt, Human
acuuuauuuccuauugcaucca

SEQ ID NO: 746201 - RNA, 22 nt, Human
ugagcagcuuguuccgaguguu

SEQ ID NO: 746202 - RNA, 22 nt, Human
aucugcuggcaucucuagccca

SEQ ID NO: 746203 - RNA, 22 nt, Human
aaagacacaaauguagaccaaa

SEQ ID NO: 746204 - RNA, 22 nt, Human
aguggcuggagccccaggcugg

SEQ ID NO: 746205 - RNA, 22 nt, Human
ccagagguggaagauuguuuug

SEQ ID NO: 746206 - RNA, 22 nt, Human
agucauuucuguagucauguuu

SEQ ID NO: 746207 - RNA, 22 nt, Human
ugggcuguccagcaccugggcu

SEQ ID NO: 746208 - RNA, 22 nt, Human
uggcuccagguugaacuuuggg

SEQ ID NO: 746209 - RNA, 22 nt, Human
acuagaaaauuccuagaaacua

SEQ ID NO: 746210 - RNA, 22 nt, Human
ccucaaagcgguaugcagacgg

SEQ ID NO: 746211 - RNA, 22 nt, Human
ucuauuuuuauaguugaagugc

SEQ ID NO: 746212 - RNA, 22 nt, Human
ugauguuuaauacuaugcuuuu

SEQ ID NO: 746213 - RNA, 22 nt, Human
uucagcaugaaaggauuugagu

SEQ ID NO: 746214 - RNA, 22 nt, Human
ccagguagccaaggggucuggg

SEQ ID NO: 746215 - RNA, 21 nt, Human
uucugcuccagcuccucuggg

SEQ ID NO: 746216 - RNA, 22 nt, Human
cacagcagaaaguguaggagga

SEQ ID NO: 746217 - RNA, 22 nt, Human
aagucauugguagcuugauagg

SEQ ID NO: 746218 - RNA, 22 nt, Human
guguuaaacauguucacagcau

SEQ ID NO: 746219 - RNA, 22 nt, Human
ucucuuuuauguacacccugac

SEQ ID NO: 746220 - RNA, 19 nt, Human
cugaggugcaguaagaggc

SEQ ID NO: 746221 - RNA, 22 nt, Human
cccugcugucaggugcugggag

SEQ ID NO: 746222 - RNA, 22 nt, Human
aggcuucuuagauuggcuggag

SEQ ID NO: 746223 - RNA, 22 nt, Human
uuuacuacuucauugacuuacg

SEQ ID NO: 746224 - RNA, 22 nt, Human
acagaacuucaguaguauuccc

SEQ ID NO: 746225 - RNA, 22 nt, Human
guccugguagcuggcuugguca

SEQ ID NO: 746226 - RNA, 22 nt, Human
acaaauuuggugagaguaaaua

SEQ ID NO: 746227 - RNA, 22 nt, Human
uuugaagucagacacugcuuug

SEQ ID NO: 746228 - RNA, 22 nt, Human
acugccuugaaagauuguugag

SEQ ID NO: 746229 - RNA, 21 nt, Human
ugucagaaauaagcaugugau

SEQ ID NO: 746230 - RNA, 22 nt, Human
guuuuccacuggauuguuugga

SEQ ID NO: 746231 - RNA, 20 nt, Human
cugugccuaaaccuccgggu

SEQ ID NO: 746232 - RNA, 22 nt, Human
ugauauuuaagcaaaaauaugg

SEQ ID NO: 746233 - RNA, 22 nt, Human
ccuuggugcucugcugggaugg

SEQ ID NO: 746234 - RNA, 21 nt, Human
cacauuugaaccucacagcaa

SEQ ID NO: 746235 - RNA, 22 nt, Human
ugccugaauucaauuccuggcu

SEQ ID NO: 746236 - RNA, 22 nt, Human
augucucugccccagagagcuu

SEQ ID NO: 746237 - RNA, 22 nt, Human
uccugaggcacaauccuagaau

SEQ ID NO: 746238 - RNA, 22 nt, Human
uuacaauaccacaucaccucau

SEQ ID NO: 746239 - RNA, 22 nt, Human
aaaugucuguuagucauaucau

SEQ ID NO: 746240 - RNA, 21 nt, Human
gccauuguuuucuaccuggag

SEQ ID NO: 746241 - RNA, 22 nt, Human
aggccaggacacuuaaguaaga

SEQ ID NO: 746242 - RNA, 22 nt, Human
ucguguguauucccucuccuuc

SEQ ID NO: 746243 - RNA, 22 nt, Human
guguggcuguuuagugacuuuc

SEQ ID NO: 746244 - RNA, 22 nt, Human
ggacucagcagccaggaguggc

SEQ ID NO: 746245 - RNA, 22 nt, Human
uuauugaaauggaagcuauaac

SEQ ID NO: 746246 - RNA, 22 nt, Human
agagggcagcagcaacaacucu

SEQ ID NO: 746247 - RNA, 22 nt, Human
aaacacugaagaccuaucuggu

SEQ ID NO: 746248 - RNA, 22 nt, Human
auuugccaugaagaguguuuga

SEQ ID NO: 746249 - RNA, 20 nt, Human
cuuccaccagggccgcugau

SEQ ID NO: 746250 - RNA, 22 nt, Human
ugcuuuauguuaucagaagggu

SEQ ID NO: 746251 - RNA, 22 nt, Human
gugcugaagugaaauucaucaa

SEQ ID NO: 746252 - RNA, 22 nt, Human
cagugugggugaaauacaaagu

SEQ ID NO: 746253 - RNA, 18 nt, Human
ugggcugccuggccucug

SEQ ID NO: 746254 - RNA, 22 nt, Human
ucccacccccuccaaggaggaa

SEQ ID NO: 746255 - RNA, 22 nt, Human
aggcuccagccaaugggucugu

SEQ ID NO: 746256 - RNA, 22 nt, Human
gaaucuuaaaucggaaucuuaa

SEQ ID NO: 746257 - RNA, 22 nt, Human
uuuaacagaugcuaugucuacc

SEQ ID NO: 746258 - RNA, 22 nt, Human
gccaggaguucagaugcauguu

SEQ ID NO: 746259 - RNA, 22 nt, Human
ucugggcuuggguagaaaucac

SEQ ID NO: 746260 - RNA, 22 nt, Human
augcuuggcagaguucuuuuuc

SEQ ID NO: 746261 - RNA, 22 nt, Human
acaggcaguugagguuugugug

SEQ ID NO: 746262 - RNA, 22 nt, Human
gaggagacauauuuuugaagca

SEQ ID NO: 746263 - RNA, 22 nt, Human
auuuccuucaguguuuaauacu

SEQ ID NO: 746264 - RNA, 22 nt, Human
ucuuucccuguguuagccugua

SEQ ID NO: 746265 - RNA, 22 nt, Human
aagggcccggcugugggcagag

SEQ ID NO: 746266 - RNA, 22 nt, Human
aagaacaguguccugggacucg

SEQ ID NO: 746267 - RNA, 22 nt, Human
gggcuggaccgcgaccccugag

SEQ ID NO: 746268 - RNA, 22 nt, Human
caggacagcugggccaccacca

SEQ ID NO: 746269 - RNA, 22 nt, Human
guccagcugaucuugacccagc

SEQ ID NO: 746270 - RNA, 22 nt, Human
uguaauuuuacgugacacaguu

SEQ ID NO: 746271 - RNA, 22 nt, Human
ggacaugaagcaaaaugggagg

SEQ ID NO: 746272 - RNA, 22 nt, Human
ugauucugcuuauggguggauu

SEQ ID NO: 746273 - RNA, 18 nt, Human
uauauuucacacauauuc

SEQ ID NO: 746274 - RNA, 22 nt, Human
gcugccugucccaggaugagga

SEQ ID NO: 746275 - RNA, 22 nt, Human
ccugggcaacauagugagaccc

SEQ ID NO: 746276 - RNA, 22 nt, Human
uguggcuggauugauuuuaccu

SEQ ID NO: 746277 - RNA, 22 nt, Human
cugguuggaagugcagacucuc

SEQ ID NO: 746278 - RNA, 20 nt, Human
guaaagcauucuuggcauac

SEQ ID NO: 746279 - RNA, 22 nt, Human
gcugccuguugaagggucugug

SEQ ID NO: 746280 - RNA, 22 nt, Human
cccugccagaugugcuucaguu

SEQ ID NO: 746281 - RNA, 22 nt, Human
ugcccucuaggcuacaguucca

SEQ ID NO: 746282 - RNA, 22 nt, Human
auuagaauuaugcuugcuaaug

SEQ ID NO: 746283 - RNA, 22 nt, Human
cuucugugaccaccagcagccc

SEQ ID NO: 746284 - RNA, 20 nt, Human
ccuagggcaagugggugggc

SEQ ID NO: 746285 - RNA, 18 nt, Human
agaggggagguaagucug

SEQ ID NO: 746286 - RNA, 23 nt, Human
agagggagauguuuuucucaaga

SEQ ID NO: 746287 - RNA, 22 nt, Human
gaggggaguguccuccgggccc

SEQ ID NO: 746288 - RNA, 22 nt, Human
gggugggagucuggcccucaaa

SEQ ID NO: 746289 - RNA, 22 nt, Human
gggggagcuaguccagcugagg

SEQ ID NO: 746290 - RNA, 22 nt, Human
cucauugcagcugcauuacugu

SEQ ID NO: 746291 - RNA, 22 nt, Human
acaguaaauaaugcauguugau

SEQ ID NO: 746292 - RNA, 22 nt, Human
acuguaauuaucugaacgugca

SEQ ID NO: 746293 - RNA, 22 nt, Human
ccagcucucuguccuccccaca

SEQ ID NO: 746294 - RNA, 22 nt, Human
ucagcaggcccauccuccaggc

SEQ ID NO: 746295 - RNA, 22 nt, Human
uagagcuuggggauuuaguagu

SEQ ID NO: 746296 - RNA, 22 nt, Human
auuguacagcucugagaggggg

SEQ ID NO: 746297 - RNA, 22 nt, Human
guggccucaugucuauaaagag

SEQ ID NO: 746298 - RNA, 22 nt, Human
uggacucagaaguguucuuuua

SEQ ID NO: 746299 - RNA, 22 nt, Human
agaucacugguuacuuaaugaa

SEQ ID NO: 746300 - RNA, 22 nt, Human
aagcagagcaagcguauuuauu

SEQ ID NO: 746301 - RNA, 22 nt, Human
ugcuucuuacucauaugcugau

SEQ ID NO: 746302 - RNA, 19 nt, Human
guuuugcaggcagagggga

SEQ ID NO: 746303 - RNA, 22 nt, Human
ugccuguguaugugcaugcaca

SEQ ID NO: 746304 - RNA, 20 nt, Human
aauaaaagaagccuucaccc

SEQ ID NO: 746305 - RNA, 22 nt, Human
ugugaagguuuuuaugggauau

SEQ ID NO: 746306 - RNA, 22 nt, Human
ggggaagaaugcucucuagaga

SEQ ID NO: 746307 - RNA, 22 nt, Human
gugccuggcacacagaaggcaa

SEQ ID NO: 746308 - RNA, 22 nt, Human
ccuuuugaagguguuguuaagu

SEQ ID NO: 746309 - RNA, 22 nt, Human
caguagcauguaauaaagacag

SEQ ID NO: 746310 - RNA, 22 nt, Human
acuggcugcguuccugugagac

SEQ ID NO: 746311 - RNA, 22 nt, Human
caaaccuguuagaggucaucgu

SEQ ID NO: 746312 - RNA, 22 nt, Human
aaagaggaaccaagagcacgug

SEQ ID NO: 746313 - RNA, 22 nt, Human
cuucuuguaucugccgccgagc

SEQ ID NO: 746314 - RNA, 22 nt, Human
acuggcuuugagggaauagcua

SEQ ID NO: 746315 - RNA, 22 nt, Human
gauuacauucuccuuguauuag

SEQ ID NO: 746316 - RNA, 22 nt, Human
cagcuuugauucuuucugccau

SEQ ID NO: 746317 - RNA, 22 nt, Human
auccaggcuuaaugggagccac

SEQ ID NO: 746318 - RNA, 19 nt, Human
ggcagccugcacgggcugc

SEQ ID NO: 746319 - RNA, 22 nt, Human
ucugagccccuagaacugagcg

SEQ ID NO: 746320 - RNA, 22 nt, Human
auucugcacauccaagaacagg

SEQ ID NO: 746321 - RNA, 22 nt, Human
cagcucagucuggagagaugca

SEQ ID NO: 746322 - RNA, 22 nt, Human
acccagagcagagcuuggcuuc

SEQ ID NO: 746323 - RNA, 22 nt, Human
aauuauggugugugguuaaggg

SEQ ID NO: 746324 - RNA, 22 nt, Human
auggcauugaguaaagucagua

SEQ ID NO: 746325 - RNA, 22 nt, Human
ucucugaguaagugacaguuca

SEQ ID NO: 746326 - RNA, 22 nt, Human
caaggaaaacagaugaucaaca

SEQ ID NO: 746327 - RNA, 22 nt, Human
uggugcuguggaggggcagaag

SEQ ID NO: 746328 - RNA, 22 nt, Human
agucugugcuguuggugaggau

SEQ ID NO: 746329 - RNA, 22 nt, Human
acaggcucucagccaguuggca

SEQ ID NO: 746330 - RNA, 22 nt, Human
cacaguuugcauaggaaaaaca

SEQ ID NO: 746331 - RNA, 22 nt, Human
gagcuguccuaccaggaguccu

SEQ ID NO: 746332 - RNA, 22 nt, Human
uacaacuuacuugaauggcuuu

SEQ ID NO: 746333 - RNA, 22 nt, Human
cccaguccagaccaugaccuca

SEQ ID NO: 746334 - RNA, 22 nt, Human
ugugacguuccugcuggcgacc

SEQ ID NO: 746335 - RNA, 22 nt, Human
uaggcuccaagagcgaacucag

SEQ ID NO: 746336 - RNA, 22 nt, Human
aguuuauguaaaauuaguaaug

SEQ ID NO: 746337 - RNA, 22 nt, Human
uagcagggauacaaggucgccu

SEQ ID NO: 746338 - RNA, 22 nt, Human
uaacuucugcacagaaaauuug

SEQ ID NO: 746339 - RNA, 19 nt, Human
ugcaucuugcaugggugag

SEQ ID NO: 746340 - RNA, 22 nt, Human
cugggcaguuuacauuccuacc

SEQ ID NO: 746341 - RNA, 18 nt, Human
uggcagccagcugcuccu

SEQ ID NO: 746342 - RNA, 22 nt, Human
ugcacacacgcggcacaucugu

SEQ ID NO: 746343 - RNA, 22 nt, Human
ucuggcuuucucagcauggcau

SEQ ID NO: 746344 - RNA, 22 nt, Human
uucuaguuaauguagcaucuug

SEQ ID NO: 746345 - RNA, 20 nt, Human
agaaacauuucuugagaacu

SEQ ID NO: 746346 - RNA, 22 nt, Human
auagcacuuauuguaugcugag

SEQ ID NO: 746347 - RNA, 23 nt, Human
cugugugugccgaggguggccac

SEQ ID NO: 746348 - RNA, 22 nt, Human
ugcugcccacuguauuucucca

SEQ ID NO: 746349 - RNA, 22 nt, Human
aauguuuuaaaagagauugaga

SEQ ID NO: 746350 - RNA, 22 nt, Human
cacauacauacguauguauaca

SEQ ID NO: 746351 - RNA, 22 nt, Human
ucucuggccccauggcugagcu

SEQ ID NO: 746352 - RNA, 22 nt, Human
cugugaguucauugugccaccu

SEQ ID NO: 746353 - RNA, 22 nt, Human
uuccacucuguccccuguggga

SEQ ID NO: 746354 - RNA, 18 nt, Human
agcuccaucugucagcau

SEQ ID NO: 746355 - RNA, 22 nt, Human
ggguggcaucucucugagcugu

SEQ ID NO: 746356 - RNA, 22 nt, Human
uugcuucccccuguucuaguuc

SEQ ID NO: 746357 - RNA, 20 nt, Human
agauggugggcuggaacacc

SEQ ID NO: 746358 - RNA, 21 nt, Human
ucauggaaguaacaaacauau

SEQ ID NO: 746359 - RNA, 22 nt, Human
ccagaggugcucuuuggaagug

SEQ ID NO: 746360 - RNA, 22 nt, Human
ccagccuucugagcugccugga

SEQ ID NO: 746361 - RNA, 22 nt, Human
cauagcaaggugcuuuccacau

SEQ ID NO: 746362 - RNA, 22 nt, Human
caggcccuccugugaucugccu

SEQ ID NO: 746363 - RNA, 19 nt, Human
gagcaacauauguaaacuc

SEQ ID NO: 746364 - RNA, 22 nt, Human
uugcuugcccugcagcauacuu

SEQ ID NO: 746365 - RNA, 22 nt, Human
gggcacagcugcuacccagugc

SEQ ID NO: 746366 - RNA, 22 nt, Human
ggaagcuggcauauguaauccu

SEQ ID NO: 746367 - RNA, 22 nt, Human
uagcaggguaaauguagaugga

SEQ ID NO: 746368 - RNA, 22 nt, Human
uguggccuccccacuucugggg

SEQ ID NO: 746369 - RNA, 22 nt, Human
agggucuguuguuuguucugga

SEQ ID NO: 746370 - RNA, 18 nt, Human
auguacauuugcuaaagc

SEQ ID NO: 746371 - RNA, 22 nt, Human
uucugagauuguuaggcacuaa

SEQ ID NO: 746372 - RNA, 22 nt, Human
aauggccuuugagaugaaaggg

SEQ ID NO: 746373 - RNA, 22 nt, Human
aagcagagguagggugugcagu

SEQ ID NO: 746374 - RNA, 22 nt, Human
gcauggcauuaacaagauggaa

SEQ ID NO: 746375 - RNA, 22 nt, Human
cagcuaguacaaugggagagca

SEQ ID NO: 746376 - RNA, 22 nt, Human
acuuuucucccuccugccuuca

SEQ ID NO: 746377 - RNA, 22 nt, Human
ggaucuguuuugccucugaggg

SEQ ID NO: 746378 - RNA, 22 nt, Human
cccugaggauagggcaggaccc

SEQ ID NO: 746379 - RNA, 22 nt, Human
aucagugcugagagacuaucaa

SEQ ID NO: 746380 - RNA, 22 nt, Human
ccaggccagagugcaguggcac

SEQ ID NO: 746381 - RNA, 22 nt, Human
gauccuguuauaauuuggaugu

SEQ ID NO: 746382 - RNA, 22 nt, Human
gcacucaggacucucaucagua

SEQ ID NO: 746383 - RNA, 22 nt, Human
gcuguggcugaccaccaggggg

SEQ ID NO: 746384 - RNA, 22 nt, Human
cccugucuguaccgugaugagc

SEQ ID NO: 746385 - RNA, 22 nt, Human
ucuggagcgaggucccugucug

SEQ ID NO: 746386 - RNA, 22 nt, Human
augaaugauuuuauguaaauga

SEQ ID NO: 746387 - RNA, 22 nt, Human
uauggaauggcuauuuucuagg

SEQ ID NO: 746388 - RNA, 22 nt, Human
cugguccuugcuacccagcaag

SEQ ID NO: 746389 - RNA, 22 nt, Human
cccagguagugagaaauggagg

SEQ ID NO: 746390 - RNA, 22 nt, Human
gccagcugcaucuccugggcug

SEQ ID NO: 746391 - RNA, 22 nt, Human
ggaggcacaccucagacuggga

SEQ ID NO: 746392 - RNA, 22 nt, Human
ucucaucuagacucugcccuug

SEQ ID NO: 746393 - RNA, 21 nt, Human
ucagagagucacagugaacug

SEQ ID NO: 746394 - RNA, 22 nt, Human
uuucucaguaauguccuggaau

SEQ ID NO: 746395 - RNA, 22 nt, Human
ucaauagauuagguauuagauu

SEQ ID NO: 746396 - RNA, 22 nt, Human
uagcacauacauaauagauaga

SEQ ID NO: 746397 - RNA, 23 nt, Human
auauaaacaccagauagauugua

SEQ ID NO: 746398 - RNA, 22 nt, Human
ucagugaaguaauggugagaga

SEQ ID NO: 746399 - RNA, 22 nt, Human
aucaguuuggaacauucaggcc

SEQ ID NO: 746400 - RNA, 22 nt, Human
guuucacagauggggagacacg

SEQ ID NO: 746401 - RNA, 22 nt, Human
ggccacacagaugacugcuuuc

SEQ ID NO: 746402 - RNA, 22 nt, Human
aggcuugggucagaaggcuugu

SEQ ID NO: 746403 - RNA, 22 nt, Human
gcagaaagcuuagaggguuugc

SEQ ID NO: 746404 - RNA, 22 nt, Human
cuggcagcaguuaugaaacaau

SEQ ID NO: 746405 - RNA, 22 nt, Human
agacagaccauggcuauucaga

SEQ ID NO: 746406 - RNA, 22 nt, Human
caaagaaucacucaucuuuagc

SEQ ID NO: 746407 - RNA, 21 nt, Human
ugcuucucuagaucaacuacu

SEQ ID NO: 746408 - RNA, 22 nt, Human
uugcuguaccaaagauuccuga

SEQ ID NO: 746409 - RNA, 22 nt, Human
caggccugugacaccgugucug

SEQ ID NO: 746410 - RNA, 22 nt, Human
uaaguucaccaguuguaauaag

SEQ ID NO: 746411 - RNA, 22 nt, Human
acaguauaaacuccuaaaagcc

SEQ ID NO: 746412 - RNA, 22 nt, Human
cugcuuugggcagcuuuguggc

SEQ ID NO: 746413 - RNA, 22 nt, Human
cccacagguccccaugaacucg

SEQ ID NO: 746414 - RNA, 22 nt, Human
gcagccagcccuagucccacuu

SEQ ID NO: 746415 - RNA, 23 nt, Human
cagaggugucagugcccaguguc

SEQ ID NO: 746416 - RNA, 22 nt, Human
guuucuuaaguuacaaaaucuu

SEQ ID NO: 746417 - RNA, 22 nt, Human
ucuuugcacugugcaagcagaa

SEQ ID NO: 746418 - RNA, 22 nt, Human
augugaacucuguacucucuga

SEQ ID NO: 746419 - RNA, 22 nt, Human
aggagcagaauuuaaugugcag

SEQ ID NO: 746420 - RNA, 22 nt, Human
ggacugggagaauggaggcaag

SEQ ID NO: 746421 - RNA, 22 nt, Human
gcaggcguguuucacgugccag

SEQ ID NO: 746422 - RNA, 22 nt, Human
uuuucuaauuuaguuacccucc

SEQ ID NO: 746423 - RNA, 22 nt, Human
acccagagcacugggugugggc

SEQ ID NO: 746424 - RNA, 22 nt, Human
caagauggagaagcagcaaggg

SEQ ID NO: 746425 - RNA, 22 nt, Human
ggucuggggcaggcaucugaca

SEQ ID NO: 746426 - RNA, 22 nt, Human
guaaauaacugguaauuggggu

SEQ ID NO: 746427 - RNA, 19 nt, Human
uccuggugcuugacacuga

SEQ ID NO: 746428 - RNA, 21 nt, Human
agagucugcauuucugacaag

SEQ ID NO: 746429 - RNA, 22 nt, Human
ggcugccugggagcccuccucu

SEQ ID NO: 746430 - RNA, 22 nt, Human
cuccuuccugcagaucugagau

SEQ ID NO: 746431 - RNA, 22 nt, Human
uuuagaguaaaaacugugaccu

SEQ ID NO: 746432 - RNA, 22 nt, Human
ucacaguuauagucuguagaau

SEQ ID NO: 746433 - RNA, 20 nt, Human
aaugucuugagacauuucag

SEQ ID NO: 746434 - RNA, 22 nt, Human
uccagggccugagguugaagug

SEQ ID NO: 746435 - RNA, 17 nt, Human
cauguguaugugggagu

SEQ ID NO: 746436 - RNA, 22 nt, Human
uuugguuuauuaaauuguaggc

SEQ ID NO: 746437 - RNA, 22 nt, Human
gaguccugcccuuguguagucc

SEQ ID NO: 746438 - RNA, 21 nt, Human
cacagagauauuggugagccu

SEQ ID NO: 746439 - RNA, 22 nt, Human
aggacacacuucugaggucuuu

SEQ ID NO: 746440 - RNA, 20 nt, Human
augugagggguugaaguggg

SEQ ID NO: 746441 - RNA, 22 nt, Human
uaaggcagauguggaaucaauu

SEQ ID NO: 746442 - RNA, 22 nt, Human
uuucaaagucaauaucauuacc

SEQ ID NO: 746443 - RNA, 22 nt, Human
cuuuugcagccauuauugcugc

SEQ ID NO: 746444 - RNA, 22 nt, Human
gaaguuuagaguguuguaauuu

SEQ ID NO: 746445 - RNA, 22 nt, Human
ugaguauccuauaugguguaag

SEQ ID NO: 746446 - RNA, 22 nt, Human
cagagagagcaggaaaccuccg

SEQ ID NO: 746447 - RNA, 22 nt, Human
aaggagaaggguaaucaacaca

SEQ ID NO: 746448 - RNA, 20 nt, Human
aagcuggguaggagaggagc

SEQ ID NO: 746449 - RNA, 22 nt, Human
gguuuucucccccucuucucag

SEQ ID NO: 746450 - RNA, 22 nt, Human
acagugugguuugagcacuggg

SEQ ID NO: 746451 - RNA, 22 nt, Human
ucaauacauguguguggauggu

SEQ ID NO: 746452 - RNA, 22 nt, Human
gaggcccaguccugcaagcacg

SEQ ID NO: 746453 - RNA, 22 nt, Human
acccugggagggagaaaucaga

SEQ ID NO: 746454 - RNA, 20 nt, Human
guggcccuuaaagagggaag

SEQ ID NO: 746455 - RNA, 22 nt, Human
ucagcuccucagagccucaguu

SEQ ID NO: 746456 - RNA, 22 nt, Human
ugcacacacaugaaguagcaug

SEQ ID NO: 746457 - RNA, 22 nt, Human
gcagcuuucuugcccuaaucuu

SEQ ID NO: 746458 - RNA, 22 nt, Human
aggaagcuagagccaccggacu

SEQ ID NO: 746459 - RNA, 22 nt, Human
acuccuggggauccauuccuuu

SEQ ID NO: 746460 - RNA, 22 nt, Human
ugggccaguagcuacucgcaag

SEQ ID NO: 746461 - RNA, 22 nt, Human
cagcugaguuuccaagucugcc

SEQ ID NO: 746462 - RNA, 22 nt, Human
uacacuauuuuacugauacaaa

SEQ ID NO: 746463 - RNA, 22 nt, Human
aguaaaauuucugcugaggaga

SEQ ID NO: 746464 - RNA, 22 nt, Human
ccaaucuugcuguccacuuggu

SEQ ID NO: 746465 - RNA, 22 nt, Human
cuauuuuucuguacccuaauuu

SEQ ID NO: 746466 - RNA, 22 nt, Human
aaucuacauagagaucaaauga

SEQ ID NO: 746467 - RNA, 22 nt, Human
ucaaaccaccuuguuacugggg

SEQ ID NO: 746468 - RNA, 22 nt, Human
gacuuuauuuccuuauuuguga

SEQ ID NO: 746469 - RNA, 22 nt, Human
uaugcaguguaugcacugagau

SEQ ID NO: 746470 - RNA, 22 nt, Human
guucacagcuucuuaggucaua

SEQ ID NO: 746471 - RNA, 22 nt, Human
caucuguucuauccacguugcu

SEQ ID NO: 746472 - RNA, 22 nt, Human
auggagggaaaaguggagagcc

SEQ ID NO: 746473 - RNA, 22 nt, Human
aagcccuggcucagcucaccag

SEQ ID NO: 746474 - RNA, 22 nt, Human
uggcugugauuugcacgagaug

SEQ ID NO: 746475 - RNA, 22 nt, Human
cucugcccacgucuugcccaga

SEQ ID NO: 746476 - RNA, 22 nt, Human
acucugccuuaguccuggggcu

SEQ ID NO: 746477 - RNA, 22 nt, Human
ucccugggcggacauucuccca

SEQ ID NO: 746478 - RNA, 22 nt, Human
gggcagucacagugcuggagca

SEQ ID NO: 746479 - RNA, 22 nt, Human
gcugguccacucccuggaggcu

SEQ ID NO: 746480 - RNA, 22 nt, Human
uaaggcagaaauaugagcaggg

SEQ ID NO: 746481 - RNA, 22 nt, Human
agcagagucuucaagggcaggc

SEQ ID NO: 746482 - RNA, 22 nt, Human
aggcauuuccuaugggcagaga

SEQ ID NO: 746483 - RNA, 22 nt, Human
aaggcuggguuugggaugugau

SEQ ID NO: 746484 - RNA, 22 nt, Human
gacauccaucauuuccuguuga

SEQ ID NO: 746485 - RNA, 22 nt, Human
ucuacagccauuuugagcagug

SEQ ID NO: 746486 - RNA, 22 nt, Human
uaggucuggcagaagaaaaaug

SEQ ID NO: 746487 - RNA, 22 nt, Human
uugcauagugcugagguucggg

SEQ ID NO: 746488 - RNA, 20 nt, Human
agcccuguuuccuggagaga

SEQ ID NO: 746489 - RNA, 22 nt, Human
uggcuuccaaauuaucccuaga

SEQ ID NO: 746490 - RNA, 22 nt, Human
ucccugccaguccuggucugaa

SEQ ID NO: 746491 - RNA, 22 nt, Human
ucauccaguuguggagagggaa

SEQ ID NO: 746492 - RNA, 22 nt, Human
agggagccaggaacgcaggucg

SEQ ID NO: 746493 - RNA, 22 nt, Human
uuuggaaugguaccuucaguug

SEQ ID NO: 746494 - RNA, 21 nt, Human
cacauugaauacagagaugga

SEQ ID NO: 746495 - RNA, 22 nt, Human
auuuauugaagcuuauuacguu

SEQ ID NO: 746496 - RNA, 22 nt, Human
gauucugcuuaccauuugaucu

SEQ ID NO: 746497 - RNA, 17 nt, Human
ugaaacaccaagacugu

SEQ ID NO: 746498 - RNA, 22 nt, Human
aguuuccuugggcauuuguuua

SEQ ID NO: 746499 - RNA, 22 nt, Human
caccagguggaaaugucacagc

SEQ ID NO: 746500 - RNA, 22 nt, Human
agacagggccacucauccucac

SEQ ID NO: 746501 - RNA, 22 nt, Human
gaggcccagagagguugcauga

SEQ ID NO: 746502 - RNA, 22 nt, Human
cuggcaguguccagcucgugau

SEQ ID NO: 746503 - RNA, 22 nt, Human
acugaggcagaaggguaagugg

SEQ ID NO: 746504 - RNA, 22 nt, Human
ggugggcagcucuuggcaggca

SEQ ID NO: 746505 - RNA, 19 nt, Human
aggcagcacccaguccuug

SEQ ID NO: 746506 - RNA, 22 nt, Human
gagacacacccaagguuaugag

SEQ ID NO: 746507 - RNA, 22 nt, Human
agguggcagagcuggcccagcg

SEQ ID NO: 746508 - RNA, 22 nt, Human
ugccacccagccaggaguggga

SEQ ID NO: 746509 - RNA, 23 nt, Human
ucuccaggccuuacuccaggccu

SEQ ID NO: 746510 - RNA, 22 nt, Human
agaaggggcccaaggaugucag

SEQ ID NO: 746511 - RNA, 22 nt, Human
auucaguauucugcugcauaau

SEQ ID NO: 746512 - RNA, 22 nt, Human
accagggcuuacagcaguagcu

SEQ ID NO: 746513 - RNA, 22 nt, Human
uucccacaguguugaauccucu

SEQ ID NO: 746514 - RNA, 22 nt, Human
uaacaugaaacuccaaauggua

SEQ ID NO: 746515 - RNA, 22 nt, Human
uauauauucuuaaguaguguag

SEQ ID NO: 746516 - RNA, 22 nt, Human
acuuggaaaauucaaaauggca

SEQ ID NO: 746517 - RNA, 22 nt, Human
acuuugugcccaacagaaagaa

SEQ ID NO: 746518 - RNA, 22 nt, Human
agcaagcuaccuagauagucua

SEQ ID NO: 746519 - RNA, 22 nt, Human
ugcaggcucaccugccagggcc

SEQ ID NO: 746520 - RNA, 22 nt, Human
gacuggggcucuagccaggccu

SEQ ID NO: 746521 - RNA, 22 nt, Human
aggcucugaguagagcugccag

SEQ ID NO: 746522 - RNA, 22 nt, Human
gcuguggcuugcagcuggggcu

SEQ ID NO: 746523 - RNA, 22 nt, Human
ucaggagauguaaccuuagcug

SEQ ID NO: 746524 - RNA, 22 nt, Human
cuaugaaaggauuuggaguugu

SEQ ID NO: 746525 - RNA, 22 nt, Human
cagauucuccaggggcugcaga

SEQ ID NO: 746526 - RNA, 22 nt, Human
ccaggaaggcaggccuccccgc

SEQ ID NO: 746527 - RNA, 22 nt, Human
gauagaaagagugguucuuuuu

SEQ ID NO: 746528 - RNA, 22 nt, Human
ucaggccugagaaaaauccuuu

SEQ ID NO: 746529 - RNA, 22 nt, Human
uaucucuaggcugccacuuaaa

SEQ ID NO: 746530 - RNA, 22 nt, Human
uugacuauacucuggcggaaaa

SEQ ID NO: 746531 - RNA, 23 nt, Human
uggcucucucagugcugcagagg

SEQ ID NO: 746532 - RNA, 22 nt, Human
aggcuguggcccuggucuagca

SEQ ID NO: 746533 - RNA, 22 nt, Human
aggcuucacgaugggugaggug

SEQ ID NO: 746534 - RNA, 22 nt, Human
agacucugguccucuugaauuu

SEQ ID NO: 746535 - RNA, 22 nt, Human
cacagcuaccugcaugccugcu

SEQ ID NO: 746536 - RNA, 22 nt, Human
gauggggaugagaagugagcag

SEQ ID NO: 746537 - RNA, 22 nt, Human
uaguuuaggaacaaguagugga

SEQ ID NO: 746538 - RNA, 22 nt, Human
aagugcaaaucuguggcugaaa

SEQ ID NO: 746539 - RNA, 22 nt, Human
gauauuuacaaauuugccaaua

SEQ ID NO: 746540 - RNA, 22 nt, Human
caggcaccaacuuccuggggag

SEQ ID NO: 746541 - RNA, 22 nt, Human
augucacagucugacucaguga

SEQ ID NO: 746542 - RNA, 22 nt, Human
gcacuuggauauacaaaugaag

SEQ ID NO: 746543 - RNA, 22 nt, Human
ggaccaugaggagaugggccuc

SEQ ID NO: 746544 - RNA, 22 nt, Human
gguggcugcaauggcuaacuuc

SEQ ID NO: 746545 - RNA, 20 nt, Human
gcucugugcuggcggaggcu

SEQ ID NO: 746546 - RNA, 22 nt, Human
gaggaaaauggaguguaauuaa

SEQ ID NO: 746547 - RNA, 18 nt, Human
aucugcuggcaggucugg

SEQ ID NO: 746548 - RNA, 22 nt, Human
gaagccuuugccuaaaacauua

SEQ ID NO: 746549 - RNA, 22 nt, Human
ggcuuaaaacuuugaaaguguu

SEQ ID NO: 746550 - RNA, 22 nt, Human
ggucacaaggcagauaauaagg

SEQ ID NO: 746551 - RNA, 22 nt, Human
aagguaaucagccuuuccacaa

SEQ ID NO: 746552 - RNA, 22 nt, Human
aucucuuugauggcuccuguga

SEQ ID NO: 746553 - RNA, 22 nt, Human
auaagaaacauuauucuuucca

SEQ ID NO: 746554 - RNA, 22 nt, Human
gccucuccucuuaauaccauua

SEQ ID NO: 746555 - RNA, 22 nt, Human
ccagccagucccgcaugaccgc

SEQ ID NO: 746556 - RNA, 22 nt, Human
gucuuucuaugcauagagcaga

SEQ ID NO: 746557 - RNA, 22 nt, Human
ugugugucagucuuguuuaggg

SEQ ID NO: 746558 - RNA, 22 nt, Human
ugguuaaaugcuccgaucuugg

SEQ ID NO: 746559 - RNA, 20 nt, Human
uuccuuuucgccucucuccc

SEQ ID NO: 746560 - RNA, 18 nt, Human
uaaaugcauguuaauaac

SEQ ID NO: 746561 - RNA, 19 nt, Human
uuuacaaguucuuuguaug

SEQ ID NO: 746562 - RNA, 20 nt, Human
cucagcucuucagggcaagu

SEQ ID NO: 746563 - RNA, 22 nt, Human
uuaagagggugaugcuagcauu

SEQ ID NO: 746564 - RNA, 22 nt, Human
ugcagaaagucacauucccuuu

SEQ ID NO: 746565 - RNA, 22 nt, Human
gcuucucuuaaugccuggcuuu

SEQ ID NO: 746566 - RNA, 22 nt, Human
ccacuguuuccuuucugcuggc

SEQ ID NO: 746567 - RNA, 22 nt, Human
cccagcaguuugcuuagaguga

SEQ ID NO: 746568 - RNA, 21 nt, Human
ggugucaguuuuggucauuag

SEQ ID NO: 746569 - RNA, 22 nt, Human
uagaggcagaagaaauugacaa

SEQ ID NO: 746570 - RNA, 22 nt, Human
gaggccaggaagcccaagauca

SEQ ID NO: 746571 - RNA, 22 nt, Human
uguacaguggaaaauggauucg

SEQ ID NO: 746572 - RNA, 22 nt, Human
accaucagagcacaguccgugc

SEQ ID NO: 746573 - RNA, 22 nt, Human
uaagaacagugucugucucaca

SEQ ID NO: 746574 - RNA, 18 nt, Human
agagaaagaccaaagcau

SEQ ID NO: 746575 - RNA, 23 nt, Human
cauuugauccucacaauaaaugg

SEQ ID NO: 746576 - RNA, 22 nt, Human
aguuucacacaacauuugcaug

SEQ ID NO: 746577 - RNA, 22 nt, Human
uuugccuucucugaaccuauuu

SEQ ID NO: 746578 - RNA, 22 nt, Human
auugcuuuuccuuaacacaugc

SEQ ID NO: 746579 - RNA, 21 nt, Human
aaaaggaggcaggugaacagc

SEQ ID NO: 746580 - RNA, 22 nt, Human
uuccuucaaacgccuccugcac

SEQ ID NO: 746581 - RNA, 22 nt, Human
ugccgcagugcggggagggccc

SEQ ID NO: 746582 - RNA, 22 nt, Human
uugugugugagccuucaccaca

SEQ ID NO: 746583 - RNA, 22 nt, Human
cugcucagcggaaggaagagcg

SEQ ID NO: 746584 - RNA, 22 nt, Human
cccagcuugcccaggacugagg

SEQ ID NO: 746585 - RNA, 22 nt, Human
gauguggaugaucuuagauggu

SEQ ID NO: 746586 - RNA, 22 nt, Human
auaaacugguaggaaaacagua

SEQ ID NO: 746587 - RNA, 20 nt, Human
agucauuggguguccuucgg

SEQ ID NO: 746588 - RNA, 22 nt, Human
auuuuccuagucaugugcuucu

SEQ ID NO: 746589 - RNA, 22 nt, Human
uuauggaaaacuccagagagua

SEQ ID NO: 746590 - RNA, 22 nt, Human
gaagaagacauggaacaauagu

SEQ ID NO: 746591 - RNA, 22 nt, Human
cuggggcuguaggaggacuuau

SEQ ID NO: 746592 - RNA, 22 nt, Human
uaagacuuaggucgaguuuggc

SEQ ID NO: 746593 - RNA, 22 nt, Human
caacagcucagacacgggaccu

SEQ ID NO: 746594 - RNA, 22 nt, Human
uagaaagaucuguaggcaagag

SEQ ID NO: 746595 - RNA, 22 nt, Human
aauagugcuuacauuaucauga

SEQ ID NO: 746596 - RNA, 21 nt, Human
caaucacuuuugcaccaagcu

SEQ ID NO: 746597 - RNA, 22 nt, Human
ccugcacuaccuggggcugcug

SEQ ID NO: 746598 - RNA, 21 nt, Human
cuugaaagguagagucuacag

SEQ ID NO: 746599 - RNA, 22 nt, Human
ugcugcagaucagcugaguccu

SEQ ID NO: 746600 - RNA, 22 nt, Human
uuauaggaaaaguucuagaaaa

SEQ ID NO: 746601 - RNA, 21 nt, Human
agucucucuaauaaaugcuug

SEQ ID NO: 746602 - RNA, 22 nt, Human
uugcaaggugauaaaagaauga

SEQ ID NO: 746603 - RNA, 22 nt, Human
ccacacugaaccucagugucuu

SEQ ID NO: 746604 - RNA, 22 nt, Human
gaacuacagugcauuuucuuaa

SEQ ID NO: 746605 - RNA, 20 nt, Human
aguucacaggccaaauuucu

SEQ ID NO: 746606 - RNA, 22 nt, Human
ucaguuuuuacggucacaggga

SEQ ID NO: 746607 - RNA, 19 nt, Human
cagagccuucagugacucc

SEQ ID NO: 746608 - RNA, 22 nt, Human
uauuuguguggguaucuauaua

SEQ ID NO: 746609 - RNA, 22 nt, Human
uuugcauugcauacaaggaacu

SEQ ID NO: 746610 - RNA, 22 nt, Human
cuggguggcgucuggggccagu

SEQ ID NO: 746611 - RNA, 22 nt, Human
gagcccuggcagucugggaugg

SEQ ID NO: 746612 - RNA, 22 nt, Human
cuucagugauauaggcuucucc

SEQ ID NO: 746613 - RNA, 22 nt, Human
uccuucccaggugucgccgccu

SEQ ID NO: 746614 - RNA, 22 nt, Human
caucuuuuggccuauucugagg

SEQ ID NO: 746615 - RNA, 22 nt, Human
gucauucagagaugcagguaga

SEQ ID NO: 746616 - RNA, 20 nt, Human
accaggcccggugucuccuc

SEQ ID NO: 746617 - RNA, 22 nt, Human
ugaaggcccuaucuccauauac

SEQ ID NO: 746618 - RNA, 22 nt, Human
acacaucuuagacugaaauaug

SEQ ID NO: 746619 - RNA, 22 nt, Human
uguaacugguuauaauuuuuga

SEQ ID NO: 746620 - RNA, 22 nt, Human
cccaugagauucugaauuuggc

SEQ ID NO: 746621 - RNA, 21 nt, Human
gcugagagguugggaaguuca

SEQ ID NO: 746622 - RNA, 22 nt, Human
aaagaggauggaguagucagcu

SEQ ID NO: 746623 - RNA, 22 nt, Human
acauuucucuuagaguuggacu

SEQ ID NO: 746624 - RNA, 22 nt, Human
acagagcauauaaagugcuuug

SEQ ID NO: 746625 - RNA, 22 nt, Human
aaauacugcugcuauuccuuuu

SEQ ID NO: 746626 - RNA, 17 nt, Human
agagggcucaaggcauc

SEQ ID NO: 746627 - RNA, 22 nt, Human
uaggguggagacuggaagcagg

SEQ ID NO: 746628 - RNA, 22 nt, Human
caagggaguuacugagggcggg

SEQ ID NO: 746629 - RNA, 22 nt, Human
caccucugccucaagcuuccca

SEQ ID NO: 746630 - RNA, 22 nt, Human
ccugacaggagaagcgcagcau

SEQ ID NO: 746631 - RNA, 22 nt, Human
cacagcuucccgugcauggaga

SEQ ID NO: 746632 - RNA, 22 nt, Human
uuuaauguagcgugaaaugauu

SEQ ID NO: 746633 - RNA, 23 nt, Human
ugcuggaguuuacucaggccagc

SEQ ID NO: 746634 - RNA, 23 nt, Human
cacugcagcguggucuggcagga

SEQ ID NO: 746635 - RNA, 22 nt, Human
ggaggccaaggcaggcggauca

SEQ ID NO: 746636 - RNA, 20 nt, Human
aucugggcaucaauuuugug

SEQ ID NO: 746637 - RNA, 22 nt, Human
ugcugugguucccagaguggau

SEQ ID NO: 746638 - RNA, 22 nt, Human
gccucugcccuccugggacugc

SEQ ID NO: 746639 - RNA, 22 nt, Human
aaggccugggaguacugggaca

SEQ ID NO: 746640 - RNA, 22 nt, Human
gggcuucaggguacuuccuccu

SEQ ID NO: 746641 - RNA, 22 nt, Human
cagcugcugcccuuggcugcag

SEQ ID NO: 746642 - RNA, 22 nt, Human
cacagugauugauuuuuacuuu

SEQ ID NO: 746643 - RNA, 22 nt, Human
cacagcagucuuucacuaaaua

SEQ ID NO: 746644 - RNA, 22 nt, Human
aagagcagaaguccuuggaucc

SEQ ID NO: 746645 - RNA, 22 nt, Human
aucaguuucuaccauguggaau

SEQ ID NO: 746646 - RNA, 22 nt, Human
cucaaaagacuuaaacauaaga

SEQ ID NO: 746647 - RNA, 22 nt, Human
acucuucaccgcuacugaaaua

SEQ ID NO: 746648 - RNA, 22 nt, Human
uccuugagccguggccagggcc

SEQ ID NO: 746649 - RNA, 22 nt, Human
caccaggcugcccaggacaggg

SEQ ID NO: 746650 - RNA, 22 nt, Human
gggcagcacagacagugaaggc

SEQ ID NO: 746651 - RNA, 22 nt, Human
uguagaggaggaaacugaggcu

SEQ ID NO: 746652 - RNA, 22 nt, Human
ugcuucacaagaauucaggacc

SEQ ID NO: 746653 - RNA, 22 nt, Human
cuggagcucagcccagguucca

SEQ ID NO: 746654 - RNA, 22 nt, Human
uagugaaaugauaacagagcag

SEQ ID NO: 746655 - RNA, 22 nt, Human
gcaggaguaugcagcuaugguu

SEQ ID NO: 746656 - RNA, 23 nt, Human
agucagagagugugagacaacug

SEQ ID NO: 746657 - RNA, 22 nt, Human
gauuuuaucuuugugugcagua

SEQ ID NO: 746658 - RNA, 22 nt, Human
gagcccugcugggccuugucuc

SEQ ID NO: 746659 - RNA, 16 nt, Human
caguuuuaaggcccaa

SEQ ID NO: 746660 - RNA, 22 nt, Human
aauuuguguuaguccacguuca

SEQ ID NO: 746661 - RNA, 22 nt, Human
uucucacagaagcacgaagccu

SEQ ID NO: 746662 - RNA, 23 nt, Human
ucagaggaucaucaaacguuuuc

SEQ ID NO: 746663 - RNA, 22 nt, Human
uuauaucagaaggugagauuga

SEQ ID NO: 746664 - RNA, 22 nt, Human
ggccccagguagaagauauaga

SEQ ID NO: 746665 - RNA, 22 nt, Human
gaggguggaaaggguguaccug

SEQ ID NO: 746666 - RNA, 22 nt, Human
aucagaaaaacauaauguuauu

SEQ ID NO: 746667 - RNA, 21 nt, Human
cauugucgacauuuuccccuc

SEQ ID NO: 746668 - RNA, 22 nt, Human
cuuucacagcugugcuuaugau

SEQ ID NO: 746669 - RNA, 22 nt, Human
aaaugcauuucacuaauguuuc

SEQ ID NO: 746670 - RNA, 22 nt, Human
uggauaugggccauggaaaaaa

SEQ ID NO: 746671 - RNA, 22 nt, Human
uccugcagagacagaggccuca

SEQ ID NO: 746672 - RNA, 22 nt, Human
gguacaauccacuguggguuag

SEQ ID NO: 746673 - RNA, 22 nt, Human
uauguucuuuacaucugugcaa

SEQ ID NO: 746674 - RNA, 22 nt, Human
agaccacuaaaacuuucucuau

SEQ ID NO: 746675 - RNA, 22 nt, Human
acuucuguccuccaagccacgu

SEQ ID NO: 746676 - RNA, 22 nt, Human
acaguaauuaaacauucugauu

SEQ ID NO: 746677 - RNA, 22 nt, Human
ucaggaaacuacaguugaacua

SEQ ID NO: 746678 - RNA, 22 nt, Human
uauaaaugcacuuuugaaauau

SEQ ID NO: 746679 - RNA, 22 nt, Human
ucugagaggauuccugucccga

SEQ ID NO: 746680 - RNA, 22 nt, Human
uagcauuuggcaccaguuauuu

SEQ ID NO: 746681 - RNA, 22 nt, Human
gacaccagcaaggcugugagga

SEQ ID NO: 746682 - RNA, 19 nt, Human
gccucugagggcaggacac

SEQ ID NO: 746683 - RNA, 22 nt, Human
ugcauuaauuuuugccagguuc

SEQ ID NO: 746684 - RNA, 19 nt, Human
aggguuacccgcugccacc

SEQ ID NO: 746685 - RNA, 22 nt, Human
gcugaguguaaugauggcagag

SEQ ID NO: 746686 - RNA, 22 nt, Human
aagggcucuucuauuuauggcc

SEQ ID NO: 746687 - RNA, 22 nt, Human
caggcagcccugcaccaagugu

SEQ ID NO: 746688 - RNA, 22 nt, Human
gggcuacagacaugcucuaagc

SEQ ID NO: 746689 - RNA, 22 nt, Human
cagaugugagcuggggagagug

SEQ ID NO: 746690 - RNA, 22 nt, Human
uaccagccugacccugucugac

SEQ ID NO: 746691 - RNA, 21 nt, Human
acagaaguggcuuggucucag

SEQ ID NO: 746692 - RNA, 22 nt, Human
gcuucagagauuucacuaguuu

SEQ ID NO: 746693 - RNA, 19 nt, Human
accuugggcaagugccuuc

SEQ ID NO: 746694 - RNA, 20 nt, Human
agaagcauucaaagaaaacu

SEQ ID NO: 746695 - RNA, 20 nt, Human
aggccccaggaaacucucag

SEQ ID NO: 746696 - RNA, 22 nt, Human
ucucuguccccucagcuggggu

SEQ ID NO: 746697 - RNA, 21 nt, Human
guuuuucagcccugaggugag

SEQ ID NO: 746698 - RNA, 22 nt, Human
ucauuucuauugcuacugucug

SEQ ID NO: 746699 - RNA, 17 nt, Human
ggccuuggggccucagu

SEQ ID NO: 746700 - RNA, 22 nt, Human
uucaaaucacuuuggagcuuaa

SEQ ID NO: 746701 - RNA, 22 nt, Human
ucagaagucaugcucagucugu

SEQ ID NO: 746702 - RNA, 22 nt, Human
ugccugccaugcagaaagcuga

SEQ ID NO: 746703 - RNA, 22 nt, Human
agccuggccaggccugcccagg

SEQ ID NO: 746704 - RNA, 20 nt, Human
aauugaagcagaggagaggc

SEQ ID NO: 746705 - RNA, 22 nt, Human
cuggaggcugaguugggucucc

SEQ ID NO: 746706 - RNA, 22 nt, Human
ucagcuuugggggucucaggag

SEQ ID NO: 746707 - RNA, 22 nt, Human
agaaauguuuauggcugccuau

SEQ ID NO: 746708 - RNA, 22 nt, Human
uguuuaagugcugguaggguug

SEQ ID NO: 746709 - RNA, 22 nt, Human
aggcuguuuuguauaaacugga

SEQ ID NO: 746710 - RNA, 22 nt, Human
acagucugcauaugaccuguag

SEQ ID NO: 746711 - RNA, 22 nt, Human
uucccagguaauucugaggcag

SEQ ID NO: 746712 - RNA, 22 nt, Human
gggacagcuguagugcuuggcu

SEQ ID NO: 746713 - RNA, 22 nt, Human
augcaauguuacagaauguacu

SEQ ID NO: 746714 - RNA, 22 nt, Human
uuggccagguccauuucuccau

SEQ ID NO: 746715 - RNA, 22 nt, Human
uccugggaggcaggaccccuuu

SEQ ID NO: 746716 - RNA, 17 nt, Human
gacugagguaaggugag

SEQ ID NO: 746717 - RNA, 22 nt, Human
cuucuaagcugagaaugccuuu

SEQ ID NO: 746718 - RNA, 22 nt, Human
gcaggaccucuggaugcaaugc

SEQ ID NO: 746719 - RNA, 22 nt, Human
gcacacagauuaggaaacagaa

SEQ ID NO: 746720 - RNA, 22 nt, Human
gugaaacuucacauuuugauag

SEQ ID NO: 746721 - RNA, 22 nt, Human
uccuuagagauacugucuugaa

SEQ ID NO: 746722 - RNA, 22 nt, Human
ugagugaggaagcgguggagga

SEQ ID NO: 746723 - RNA, 16 nt, Human
auucugcugccugcuc

SEQ ID NO: 746724 - RNA, 22 nt, Human
caggaagagguggggcuaaagu

SEQ ID NO: 746725 - RNA, 22 nt, Human
acaauuuauccauuguauaguu

SEQ ID NO: 746726 - RNA, 22 nt, Human
auuuuacuuaguguaaugucca

SEQ ID NO: 746727 - RNA, 22 nt, Human
ucaguccauaggugggccugag

SEQ ID NO: 746728 - RNA, 22 nt, Human
cccugcagagagugcuuuugug

SEQ ID NO: 746729 - RNA, 22 nt, Human
uaaagacauaggaucagggaga

SEQ ID NO: 746730 - RNA, 22 nt, Human
ucccagccuggacccugccagu

SEQ ID NO: 746731 - RNA, 22 nt, Human
cagggcucccugcagccucugu

SEQ ID NO: 746732 - RNA, 22 nt, Human
ggguuaggucccucccuucugg

SEQ ID NO: 746733 - RNA, 22 nt, Human
ugcauauuuguaugauguuuag

SEQ ID NO: 746734 - RNA, 22 nt, Human
aucucuggccuuccuuuuccaa

SEQ ID NO: 746735 - RNA, 22 nt, Human
cuugcuuuccaaaugacucacu

SEQ ID NO: 746736 - RNA, 22 nt, Human
uucuguuaucauuaagcauuau

SEQ ID NO: 746737 - RNA, 22 nt, Human
ucuucuuaaaguauguucucuu

SEQ ID NO: 746738 - RNA, 22 nt, Human
auccuggacaguuuccccuauu

SEQ ID NO: 746739 - RNA, 22 nt, Human
gaaccucuuuagugcauccuuc

SEQ ID NO: 746740 - RNA, 22 nt, Human
uuucaagaagcaaauuaaaguc

SEQ ID NO: 746741 - RNA, 22 nt, Human
uagagggccagcuggacagcga

SEQ ID NO: 746742 - RNA, 18 nt, Human
ugaggccagagugggcau

SEQ ID NO: 746743 - RNA, 22 nt, Human
agucugugaacuuggcagggaa

SEQ ID NO: 746744 - RNA, 21 nt, Human
acaucagaguugugaagguag

SEQ ID NO: 746745 - RNA, 22 nt, Human
auuggcuuccuucuuauuguca

SEQ ID NO: 746746 - RNA, 22 nt, Human
ccugcucaugggucccuggcag

SEQ ID NO: 746747 - RNA, 22 nt, Human
aagcacaauuucaccuucuugu

SEQ ID NO: 746748 - RNA, 22 nt, Human
gguguccaucaggcugugcuuc

SEQ ID NO: 746749 - RNA, 22 nt, Human
agaaaucugacugcugugcaca

SEQ ID NO: 746750 - RNA, 22 nt, Human
aacagaaaucauuuagggcucu

SEQ ID NO: 746751 - RNA, 22 nt, Human
cacugagcaugagugggcugug

SEQ ID NO: 746752 - RNA, 22 nt, Human
agacaucucccaugcauuuuua

SEQ ID NO: 746753 - RNA, 22 nt, Human
cggaggggauacauuuucugaa

SEQ ID NO: 746754 - RNA, 22 nt, Human
ugugccuucucaguccugcuca

SEQ ID NO: 746755 - RNA, 21 nt, Human
uucuccuccaaguugcuccug

SEQ ID NO: 746756 - RNA, 22 nt, Human
uccagggccaguccuugucugu

SEQ ID NO: 746757 - RNA, 21 nt, Human
uggcggggacuuguggcugcc

SEQ ID NO: 746758 - RNA, 22 nt, Human
uuuaaggaggggcucacguggg

SEQ ID NO: 746759 - RNA, 22 nt, Human
uaaaggaggaguuaaugagacu

SEQ ID NO: 746760 - RNA, 22 nt, Human
cuggcucauuuuagcaucaggu

SEQ ID NO: 746761 - RNA, 22 nt, Human
ugaagcacagaccugggcauca

SEQ ID NO: 746762 - RNA, 20 nt, Human
ggccucugaggacaaggaga

SEQ ID NO: 746763 - RNA, 22 nt, Human
auucaaguggcugcuauguuaa

SEQ ID NO: 746764 - RNA, 22 nt, Human
aucuucaacuuuggggcugccu

SEQ ID NO: 746765 - RNA, 22 nt, Human
gcugucccuuucacaagguuuu

SEQ ID NO: 746766 - RNA, 22 nt, Human
agcagggcuggauuuggcaaga

SEQ ID NO: 746767 - RNA, 22 nt, Human
gaggccucuucuuuguuaaccu

SEQ ID NO: 746768 - RNA, 22 nt, Human
accaugccaguggcagccagac

SEQ ID NO: 746769 - RNA, 22 nt, Human
aucuaauuuucacucauuugcu

SEQ ID NO: 746770 - RNA, 22 nt, Human
uucaguguuaaauucaaagagu

SEQ ID NO: 746771 - RNA, 22 nt, Human
ccagaggaugcuggucagccuc

SEQ ID NO: 746772 - RNA, 22 nt, Human
gaaccuuuuuccaaguaaacaa

SEQ ID NO: 746773 - RNA, 22 nt, Human
cucucuggucccagauuccaga

SEQ ID NO: 746774 - RNA, 22 nt, Human
cucuuuguagccuuugcauauu

SEQ ID NO: 746775 - RNA, 22 nt, Human
acuguaaaacagguuucaucau

SEQ ID NO: 746776 - RNA, 22 nt, Human
aggccuugugagaagcagagaa

SEQ ID NO: 746777 - RNA, 22 nt, Human
caggcacucagucuggaucccu

SEQ ID NO: 746778 - RNA, 22 nt, Human
aaaaagacuagucgagugcagu

SEQ ID NO: 746779 - RNA, 22 nt, Human
uggcccagcccugcucuagggc

SEQ ID NO: 746780 - RNA, 22 nt, Human
uugcucugaacccagggcacca

SEQ ID NO: 746781 - RNA, 22 nt, Human
auuucucacaaaguugcuuauc

SEQ ID NO: 746782 - RNA, 22 nt, Human
cuguucuucuaguccacugaca

SEQ ID NO: 746783 - RNA, 22 nt, Human
guccacucccagugccugaggc

SEQ ID NO: 746784 - RNA, 22 nt, Human
uauuucucuucaaaauugaugu

SEQ ID NO: 746785 - RNA, 22 nt, Human
acugguggcuuucagacagaaa

SEQ ID NO: 746786 - RNA, 22 nt, Human
guauucugggccgauuacaaaa

SEQ ID NO: 746787 - RNA, 17 nt, Human
ugcuccugggacaagga

SEQ ID NO: 746788 - RNA, 22 nt, Human
uagaggguuauuaggacagaag

SEQ ID NO: 746789 - RNA, 22 nt, Human
aguggcuggaauugcaggugcg

SEQ ID NO: 746790 - RNA, 22 nt, Human
aauggcagaggcaaagauggua

SEQ ID NO: 746791 - RNA, 22 nt, Human
gggauggccuagacuagcuugg

SEQ ID NO: 746792 - RNA, 22 nt, Human
cagcugcccaggccaccuggag

SEQ ID NO: 746793 - RNA, 22 nt, Human
gcagcucuuuucuuaaagagau

SEQ ID NO: 746794 - RNA, 22 nt, Human
gcuggggagcuagaccucagca

SEQ ID NO: 746795 - RNA, 22 nt, Human
uguggagaagaaggccacugca

SEQ ID NO: 746796 - RNA, 22 nt, Human
guagaaaugguguguuucuucu

SEQ ID NO: 746797 - RNA, 18 nt, Human
uggaggaaaaaucucaug

SEQ ID NO: 746798 - RNA, 22 nt, Human
aagcacuaggacuucagucucu

SEQ ID NO: 746799 - RNA, 22 nt, Human
ucugggaguaaggccuaggcau

SEQ ID NO: 746800 - RNA, 22 nt, Human
aaauccuaccaagaaauucccu

SEQ ID NO: 746801 - RNA, 22 nt, Human
aauaucacaggaggagaccaag

SEQ ID NO: 746802 - RNA, 22 nt, Human
ccugggucuggucacuaaguca

SEQ ID NO: 746803 - RNA, 22 nt, Human
cacagagagcuacgugcagcgu

SEQ ID NO: 746804 - RNA, 22 nt, Human
uuaucacuuaugagcuuuuugc

SEQ ID NO: 746805 - RNA, 21 nt, Human
agucugagguggggccuagga

SEQ ID NO: 746806 - RNA, 22 nt, Human
agaucauaugcaguaaugaacu

SEQ ID NO: 746807 - RNA, 22 nt, Human
aggccaggccuuucuccauucc

SEQ ID NO: 746808 - RNA, 22 nt, Human
uguucacaggggagccauuuau

SEQ ID NO: 746809 - RNA, 22 nt, Human
ucaugaaaaauuuuccauguca

SEQ ID NO: 746810 - RNA, 22 nt, Human
aauauuaucaaaagcuuuuuca

SEQ ID NO: 746811 - RNA, 22 nt, Human
cccugggcaagcccuauuuucc

SEQ ID NO: 746812 - RNA, 22 nt, Human
acaaaugucuacauugagaaua

SEQ ID NO: 746813 - RNA, 22 nt, Human
uagugcauaccuaacauuuuug

SEQ ID NO: 746814 - RNA, 22 nt, Human
gcuuaguguaggaccuggaaua

SEQ ID NO: 746815 - RNA, 17 nt, Human
ugccagccugucccagg

SEQ ID NO: 746816 - RNA, 22 nt, Human
cacuguugagcaauguacagug

SEQ ID NO: 746817 - RNA, 22 nt, Human
caccacuucauaggcuuuaagg

SEQ ID NO: 746818 - RNA, 22 nt, Human
aaucuguuuaacagauuucugu

SEQ ID NO: 746819 - RNA, 22 nt, Human
uggcucugugcuucuaguaucu

SEQ ID NO: 746820 - RNA, 20 nt, Human
augcaucugguaucuuuccu

SEQ ID NO: 746821 - RNA, 22 nt, Human
ccgggagaguggaaccaagagg

SEQ ID NO: 746822 - RNA, 22 nt, Human
ugaaagcacugauucucaacuc

SEQ ID NO: 746823 - RNA, 22 nt, Human
ccugcccauacugaccucuaau

SEQ ID NO: 746824 - RNA, 22 nt, Human
aggcacaggaacaggaaaagag

SEQ ID NO: 746825 - RNA, 22 nt, Human
gcccucugcuggccucaccucg

SEQ ID NO: 746826 - RNA, 18 nt, Human
gcugugugcaccugauaa

SEQ ID NO: 746827 - RNA, 22 nt, Human
gacauaauaaucugaccuagau

SEQ ID NO: 746828 - RNA, 22 nt, Human
aggaagaauguuuacauaucaa

SEQ ID NO: 746829 - RNA, 20 nt, Human
uucuacaaaacugauucuga

SEQ ID NO: 746830 - RNA, 22 nt, Human
agaggccucuagggccccucag

SEQ ID NO: 746831 - RNA, 22 nt, Human
cagaaacaggcaacgugugcac

SEQ ID NO: 746832 - RNA, 22 nt, Human
auggcuguagucaucugaaggc

SEQ ID NO: 746833 - RNA, 22 nt, Human
caugggcuugcucucugagcuc

SEQ ID NO: 746834 - RNA, 22 nt, Human
ccucagaacggaaaugguuuug

SEQ ID NO: 746835 - RNA, 22 nt, Human
uaaguauuggccuauagcuaga

SEQ ID NO: 746836 - RNA, 22 nt, Human
augugcaugcacuuacaugugu

SEQ ID NO: 746837 - RNA, 22 nt, Human
aguguuccugcucucaggaagc

SEQ ID NO: 746838 - RNA, 22 nt, Human
aaacaggcaucacucagcaaag

SEQ ID NO: 746839 - RNA, 22 nt, Human
cugggccacagacucaaggcag

SEQ ID NO: 746840 - RNA, 22 nt, Human
cuccuggccccagaucccaauc

SEQ ID NO: 746841 - RNA, 21 nt, Human
aaagcaucacgaacauuuggg

SEQ ID NO: 746842 - RNA, 22 nt, Human
ugagcaagagaaacugacugua

SEQ ID NO: 746843 - RNA, 22 nt, Human
uuugguuaaacgagagaacaua

SEQ ID NO: 746844 - RNA, 22 nt, Human
uguagaaggcuauagacuagga

SEQ ID NO: 746845 - RNA, 22 nt, Human
cuuuggaggucauagccaagag

SEQ ID NO: 746846 - RNA, 23 nt, Human
cuuuuaacuugaucugagaccag

SEQ ID NO: 746847 - RNA, 22 nt, Human
uuugacucagcaaauucacagg

SEQ ID NO: 746848 - RNA, 22 nt, Human
ugcagagauagaacuacuuucu

SEQ ID NO: 746849 - RNA, 22 nt, Human
acaugcauuaaaaauacuugug

SEQ ID NO: 746850 - RNA, 22 nt, Human
aggcaguuuauccccagagccu

SEQ ID NO: 746851 - RNA, 22 nt, Human
uucaaacaacucauuuaugcaa

SEQ ID NO: 746852 - RNA, 22 nt, Human
ugccugccaggugcuucuucau

SEQ ID NO: 746853 - RNA, 22 nt, Human
caagauuugacuucgugguuug

SEQ ID NO: 746854 - RNA, 22 nt, Human
agaagcugagaaugaauuaaga

SEQ ID NO: 746855 - RNA, 22 nt, Human
acagagucuuacguggugauaa

SEQ ID NO: 746856 - RNA, 22 nt, Human
accaggagaggcacuugcaaug

SEQ ID NO: 746857 - RNA, 22 nt, Human
agcugccacugagggugcacag

SEQ ID NO: 746858 - RNA, 22 nt, Human
uugcaggugagggaaaugacug

SEQ ID NO: 746859 - RNA, 22 nt, Human
ccugaguaacauggugagaacc

SEQ ID NO: 746860 - RNA, 22 nt, Human
uccuucuuucaccucauaguca

SEQ ID NO: 746861 - RNA, 22 nt, Human
cugggaugucuauagaacacuu

SEQ ID NO: 746862 - RNA, 22 nt, Human
acaaagucucuaauaaucuucu

SEQ ID NO: 746863 - RNA, 23 nt, Human
cuauggaauaccaaugauucuca

SEQ ID NO: 746864 - RNA, 22 nt, Human
caggaaugacugcagauggggc

SEQ ID NO: 746865 - RNA, 22 nt, Human
uauguucaucuggugcaucagu

SEQ ID NO: 746866 - RNA, 22 nt, Human
acucauguccuaggaguaaagc

SEQ ID NO: 746867 - RNA, 22 nt, Human
uccaggucccuggggagauuuu

SEQ ID NO: 746868 - RNA, 22 nt, Human
acauuuuucuaggaggcaaggu

SEQ ID NO: 746869 - RNA, 22 nt, Human
auagaacucgggcuuuggaauc

SEQ ID NO: 746870 - RNA, 22 nt, Human
gcagggucuugagaggcagcca

SEQ ID NO: 746871 - RNA, 22 nt, Human
uuuagggacaagggucuggggu

SEQ ID NO: 746872 - RNA, 22 nt, Human
guuuccugacccuggcccagca

SEQ ID NO: 746873 - RNA, 22 nt, Human
acagaggcugcgcuugggaacg

SEQ ID NO: 746874 - RNA, 22 nt, Human
ccuuggcuuccuucccucuaga

SEQ ID NO: 746875 - RNA, 22 nt, Human
ugagagacacacugugcaugua

SEQ ID NO: 746876 - RNA, 22 nt, Human
gccugcagcaugcuaggucuug

SEQ ID NO: 746877 - RNA, 22 nt, Human
cacagcaggcacuauacagggc

SEQ ID NO: 746878 - RNA, 22 nt, Human
cccugggcucagagcagguagc

SEQ ID NO: 746879 - RNA, 22 nt, Human
ucagauuuccuugcaguuugga

SEQ ID NO: 746880 - RNA, 22 nt, Human
auaaucuguggaugguuuugag

SEQ ID NO: 746881 - RNA, 22 nt, Human
ucagaggccugaaagaauuugg

SEQ ID NO: 746882 - RNA, 22 nt, Human
uggggaagacagcagacacugu

SEQ ID NO: 746883 - RNA, 22 nt, Human
auaacacuaaauguauguaaca

SEQ ID NO: 746884 - RNA, 22 nt, Human
uugagcuugaggaguuauuuga

SEQ ID NO: 746885 - RNA, 21 nt, Human
acauucacaggauauuaucau

SEQ ID NO: 746886 - RNA, 19 nt, Human
acucaggcaaugagaaaca

SEQ ID NO: 746887 - RNA, 22 nt, Human
ugggccgggcacuguacugggc

SEQ ID NO: 746888 - RNA, 22 nt, Human
uggugcaguccaaagggagcag

SEQ ID NO: 746889 - RNA, 22 nt, Human
aguggcuggucuaaggucacag

SEQ ID NO: 746890 - RNA, 22 nt, Human
ccagggcuucccacgugcccug

SEQ ID NO: 746891 - RNA, 22 nt, Human
ggcugugaacccuggcagugug

SEQ ID NO: 746892 - RNA, 22 nt, Human
uguuauccucagcucaccucua

SEQ ID NO: 746893 - RNA, 22 nt, Human
gccagcugucuaagagaguaaa

SEQ ID NO: 746894 - RNA, 22 nt, Human
caguccagcucaucaguggcac

SEQ ID NO: 746895 - RNA, 22 nt, Human
uuucagaauaucgauucaguga

SEQ ID NO: 746896 - RNA, 22 nt, Human
gacauaauccuccucaccuacu

SEQ ID NO: 746897 - RNA, 22 nt, Human
agagauucauguuuacuguagg

SEQ ID NO: 746898 - RNA, 22 nt, Human
ucugggaagcaaauauguaaga

SEQ ID NO: 746899 - RNA, 22 nt, Human
ucagccaguuugauucuauuug

SEQ ID NO: 746900 - RNA, 22 nt, Human
uaguagcaggggguaccucuca

SEQ ID NO: 746901 - RNA, 22 nt, Human
cauuacagugucagaggaacug

SEQ ID NO: 746902 - RNA, 22 nt, Human
ucccugcagccccugagccuuc

SEQ ID NO: 746903 - RNA, 22 nt, Human
cuguuuauuacacuggauagca

SEQ ID NO: 746904 - RNA, 22 nt, Human
uccugaaaugugcacaugacau

SEQ ID NO: 746905 - RNA, 20 nt, Human
ugcuguaagauuagagagcu

SEQ ID NO: 746906 - RNA, 22 nt, Human
gggcaggaggcuaauucugcau

SEQ ID NO: 746907 - RNA, 21 nt, Human
ugcagcagauuugggggaaga

SEQ ID NO: 746908 - RNA, 20 nt, Human
uuccagagaucugcauuuua

SEQ ID NO: 746909 - RNA, 22 nt, Human
agaaccugccuuuacucuccuu

SEQ ID NO: 746910 - RNA, 22 nt, Human
ugaugugugauucauucucaaa

SEQ ID NO: 746911 - RNA, 22 nt, Human
gcauggccaggaaagguagaaa

SEQ ID NO: 746912 - RNA, 22 nt, Human
cccaagcagggugcagaggcau

SEQ ID NO: 746913 - RNA, 22 nt, Human
uaaauugaaaaucuacagaaca

SEQ ID NO: 746914 - RNA, 22 nt, Human
cagcuguggagauggggugcau

SEQ ID NO: 746915 - RNA, 22 nt, Human
cccagcuugcucaccauuccca

SEQ ID NO: 746916 - RNA, 22 nt, Human
aucuggcucacuuagucuagga

SEQ ID NO: 746917 - RNA, 23 nt, Human
agaauuucuaacucuagcucugu

SEQ ID NO: 746918 - RNA, 22 nt, Human
ugacacaguugucgacucuaca

SEQ ID NO: 746919 - RNA, 20 nt, Human
ugacauagcucuuggggugc

SEQ ID NO: 746920 - RNA, 23 nt, Human
uuugaacauuucuagauuacaua

SEQ ID NO: 746921 - RNA, 22 nt, Human
gcugccagcucacucuccugag

SEQ ID NO: 746922 - RNA, 22 nt, Human
gcaggcuggucugaccaucccu

SEQ ID NO: 746923 - RNA, 22 nt, Human
uggguggcagcuucagcauguu

SEQ ID NO: 746924 - RNA, 21 nt, Human
auggagggaccagggaagcag

SEQ ID NO: 746925 - RNA, 22 nt, Human
gucccuuccucauuccacuuua

SEQ ID NO: 746926 - RNA, 22 nt, Human
gagcaaggaugggucuauagua

SEQ ID NO: 746927 - RNA, 22 nt, Human
uguacacaugguguacacuccc

SEQ ID NO: 746928 - RNA, 22 nt, Human
uauagugcauuauuuacaguaa

SEQ ID NO: 746929 - RNA, 22 nt, Human
cuuaaagaaauugaggagagga

SEQ ID NO: 746930 - RNA, 22 nt, Human
agcugucagugcugugccugua

SEQ ID NO: 746931 - RNA, 22 nt, Human
ugucuccaugugauaguggccu

SEQ ID NO: 746932 - RNA, 22 nt, Human
uuucaagggaauaugaaauuca

SEQ ID NO: 746933 - RNA, 16 nt, Human
gucucuucccugcuga

SEQ ID NO: 746934 - RNA, 22 nt, Human
uguagaaccuguuuauuauaga

SEQ ID NO: 746935 - RNA, 22 nt, Human
cacacaauuaugugugcacaau

SEQ ID NO: 746936 - RNA, 19 nt, Human
gcucaggcugugugugggg

SEQ ID NO: 746937 - RNA, 22 nt, Human
agcagaggaggauuuaguuagg

SEQ ID NO: 746938 - RNA, 20 nt, Human
auuaacacugagcuaugggu

SEQ ID NO: 746939 - RNA, 22 nt, Human
cagucaggaaugccuccuuccu

SEQ ID NO: 746940 - RNA, 22 nt, Human
uugaaauagaugcgucagagau

SEQ ID NO: 746941 - RNA, 22 nt, Human
agaggcugugcagagggagugc

SEQ ID NO: 746942 - RNA, 22 nt, Human
aggggugacacauaucagugca

SEQ ID NO: 746943 - RNA, 22 nt, Human
gaggacugcagaugggugcauc

SEQ ID NO: 746944 - RNA, 22 nt, Human
cucugcugggauguaaagucuu

SEQ ID NO: 746945 - RNA, 22 nt, Human
aaggcuuuaaauaaccguaaag

SEQ ID NO: 746946 - RNA, 22 nt, Human
ugacagagcauguagugacagc

SEQ ID NO: 746947 - RNA, 22 nt, Human
uuugcauuuguuuagaaccuga

SEQ ID NO: 746948 - RNA, 22 nt, Human
gacuuuaaaaugcuagaacagg

SEQ ID NO: 746949 - RNA, 22 nt, Human
ccugcucagagcgucuugugug

SEQ ID NO: 746950 - RNA, 22 nt, Human
guccucaggaaggcuuucugac

SEQ ID NO: 746951 - RNA, 20 nt, Human
uggcaggaauagggccagag

SEQ ID NO: 746952 - RNA, 22 nt, Human
ggcuccuuaucucuccuaugcc

SEQ ID NO: 746953 - RNA, 21 nt, Human
acagugagaaauaaauggaaa

SEQ ID NO: 746954 - RNA, 22 nt, Human
ucugagcucaagugacaguuag

SEQ ID NO: 746955 - RNA, 22 nt, Human
augggcuggccuuucccgcucu

SEQ ID NO: 746956 - RNA, 22 nt, Human
ugcagggcauaggguccaguuu

SEQ ID NO: 746957 - RNA, 22 nt, Human
uuacaagcagcuacauaucaca

SEQ ID NO: 746958 - RNA, 22 nt, Human
gcagauggagauaaauggaacu

SEQ ID NO: 746959 - RNA, 22 nt, Human
cagggccacccucugcugggug

SEQ ID NO: 746960 - RNA, 22 nt, Human
uauugcuuucucagacguuuag

SEQ ID NO: 746961 - RNA, 22 nt, Human
gcucccugaagagauuuggucu

SEQ ID NO: 746962 - RNA, 22 nt, Human
ucaggcucagguuaggggccaa

SEQ ID NO: 746963 - RNA, 22 nt, Human
uucacuuaacauuuaccaagga

SEQ ID NO: 746964 - RNA, 22 nt, Human
cucccacauggaauagcaggga

SEQ ID NO: 746965 - RNA, 22 nt, Human
aucuuuuacauuacugcccaga

SEQ ID NO: 746966 - RNA, 22 nt, Human
acagauaguauguaaauuaagc

SEQ ID NO: 746967 - RNA, 22 nt, Human
ccaucccuucucuggccagcag

SEQ ID NO: 746968 - RNA, 22 nt, Human
ucugucacaauuugcuuacucu

SEQ ID NO: 746969 - RNA, 22 nt, Human
uccagggcuuggcugggacggu

SEQ ID NO: 746970 - RNA, 22 nt, Human
uuuucagugguaucuuuguaaa

SEQ ID NO: 746971 - RNA, 22 nt, Human
gcuuccugagaaacaaucugau

SEQ ID NO: 746972 - RNA, 22 nt, Human
auucuugauauagauaguuaau

SEQ ID NO: 746973 - RNA, 22 nt, Human
uuuacacugacagcacauaagg

SEQ ID NO: 746974 - RNA, 22 nt, Human
augcaauauagggaagauagau

SEQ ID NO: 746975 - RNA, 22 nt, Human
agguggggcccaccaauuugca

SEQ ID NO: 746976 - RNA, 22 nt, Human
ggugcaggaaaauuaccuggag

SEQ ID NO: 746977 - RNA, 22 nt, Human
aaacaguguuuuuaugauuuau

SEQ ID NO: 746978 - RNA, 22 nt, Human
aauuccauccauuuguuucaac

SEQ ID NO: 746979 - RNA, 22 nt, Human
uuggcucacaugauuauggagg

SEQ ID NO: 746980 - RNA, 22 nt, Human
ugucagugaguuggguccugag

SEQ ID NO: 746981 - RNA, 22 nt, Human
agggguuggauuuggccuagag

SEQ ID NO: 746982 - RNA, 22 nt, Human
cauguaaagaauuucacacaag

SEQ ID NO: 746983 - RNA, 22 nt, Human
aguuaaacuuugccagauggga

SEQ ID NO: 746984 - RNA, 22 nt, Human
caggguagacaguaggugucug

SEQ ID NO: 746985 - RNA, 22 nt, Human
ucuguuuuagauaagaaaggcu

SEQ ID NO: 746986 - RNA, 22 nt, Human
auauuauucuagcucuugugug

SEQ ID NO: 746987 - RNA, 22 nt, Human
uugcccugccucccugagguga

SEQ ID NO: 746988 - RNA, 18 nt, Human
agucucagcggaggagua

SEQ ID NO: 746989 - RNA, 22 nt, Human
ucugaaauaggaaagcaaaugg

SEQ ID NO: 746990 - RNA, 21 nt, Human
gcucugccacuuaccagauuu

SEQ ID NO: 746991 - RNA, 22 nt, Human
gacagcaggaugugaggggaug

SEQ ID NO: 746992 - RNA, 22 nt, Human
uccaggaguccuggguggcccc

SEQ ID NO: 746993 - RNA, 22 nt, Human
aaguggaggccgaguucacgca

SEQ ID NO: 746994 - RNA, 22 nt, Human
ugcaaauggagcauguauaaga

SEQ ID NO: 746995 - RNA, 22 nt, Human
acuucacagguuuucauaaaac

SEQ ID NO: 746996 - RNA, 17 nt, Human
agcugccuugcuugagc

SEQ ID NO: 746997 - RNA, 22 nt, Human
guccuggaauccuagaacagug

SEQ ID NO: 746998 - RNA, 22 nt, Human
gcaguuuacugucaauaacucu

SEQ ID NO: 746999 - RNA, 22 nt, Human
uaagaaacaugauacuuuuccu

SEQ ID NO: 747000 - RNA, 22 nt, Human
agaggaaguaaucaggaccugc

SEQ ID NO: 747001 - RNA, 22 nt, Human
cacagcagauccagggguugug

SEQ ID NO: 747002 - RNA, 22 nt, Human
agaucucaccucuguguauuau

SEQ ID NO: 747003 - RNA, 22 nt, Human
aucuccaggcauuucaagagac

SEQ ID NO: 747004 - RNA, 22 nt, Human
uacauacaagauguguuuaaaa

SEQ ID NO: 747005 - RNA, 22 nt, Human
agugaggcaaagugagaggcag

SEQ ID NO: 747006 - RNA, 22 nt, Human
aucaaauacaaagggcauaagg

SEQ ID NO: 747007 - RNA, 22 nt, Human
gucuggaggaggaagaaggcac

SEQ ID NO: 747008 - RNA, 22 nt, Human
gugggcuuuugacagugccugg

SEQ ID NO: 747009 - RNA, 22 nt, Human
cuguagaacgauccaggcauuu

SEQ ID NO: 747010 - RNA, 22 nt, Human
gccuuugccugcgacguggcug

SEQ ID NO: 747011 - RNA, 22 nt, Human
aagcugcuuugucaggaauaug

SEQ ID NO: 747012 - RNA, 22 nt, Human
ccaguguucauaauuuuacacu

SEQ ID NO: 747013 - RNA, 19 nt, Human
gguggcagaacgugggucc

SEQ ID NO: 747014 - RNA, 22 nt, Human
caaggaaaagaaguauuucaga

SEQ ID NO: 747015 - RNA, 18 nt, Human
cccagcuuagcgccccuc

SEQ ID NO: 747016 - RNA, 22 nt, Human
gcucacagccggcuggcagggg

SEQ ID NO: 747017 - RNA, 16 nt, Human
aucuuccaaaguuauu

SEQ ID NO: 747018 - RNA, 22 nt, Human
acucccagguugccuggcaggc

SEQ ID NO: 747019 - RNA, 22 nt, Human
ggacagagcagacgagcagcgg

SEQ ID NO: 747020 - RNA, 22 nt, Human
ugugucccuuggaaccucagcu

SEQ ID NO: 747021 - RNA, 22 nt, Human
aaugaauaacaauccucuggag

SEQ ID NO: 747022 - RNA, 22 nt, Human
uauguauagagucuuuuaaauu

SEQ ID NO: 747023 - RNA, 22 nt, Human
aauggcaagcugaacucagaag

SEQ ID NO: 747024 - RNA, 22 nt, Human
ugugugucagcccaagggccuu

SEQ ID NO: 747025 - RNA, 22 nt, Human
uucacagaugagaaaauugagg

SEQ ID NO: 747026 - RNA, 22 nt, Human
uuccagauauuuuuauguggaa

SEQ ID NO: 747027 - RNA, 22 nt, Human
agcacagagaagauuucaauua

SEQ ID NO: 747028 - RNA, 21 nt, Human
uccugggaagcacuggggugg

SEQ ID NO: 747029 - RNA, 22 nt, Human
uuacaaagauuauauucaguua

SEQ ID NO: 747030 - RNA, 22 nt, Human
guggccaaggcagagaaagagc

SEQ ID NO: 747031 - RNA, 22 nt, Human
ugaggcucauucugcaugccaa

SEQ ID NO: 747032 - RNA, 22 nt, Human
auauauauugcccaggcugguu

SEQ ID NO: 747033 - RNA, 22 nt, Human
auagcaauuugcccaauuaccu

SEQ ID NO: 747034 - RNA, 22 nt, Human
gagcaagguagcucucuggggc

SEQ ID NO: 747035 - RNA, 22 nt, Human
ugcagagguuuccaggcaaguu

SEQ ID NO: 747036 - RNA, 22 nt, Human
cucugcaucagcuucauucugu

SEQ ID NO: 747037 - RNA, 22 nt, Human
cugucuuugguccugucuguua

SEQ ID NO: 747038 - RNA, 22 nt, Human
ucaggaugagcucauaacuaug

SEQ ID NO: 747039 - RNA, 20 nt, Human
cucaggauugucuagccccu

SEQ ID NO: 747040 - RNA, 22 nt, Human
gugcugggcccugagaccaggg

SEQ ID NO: 747041 - RNA, 22 nt, Human
aagagucccaaaaugauucuua

SEQ ID NO: 747042 - RNA, 22 nt, Human
uuuccucagaagugucuacuau

SEQ ID NO: 747043 - RNA, 22 nt, Human
agagcuggcagcagcuucuccu

SEQ ID NO: 747044 - RNA, 22 nt, Human
ucccuggguucccguggaagug

SEQ ID NO: 747045 - RNA, 22 nt, Human
ggccuggacaaaugcaccaagg

SEQ ID NO: 747046 - RNA, 22 nt, Human
cagcuucugagcaagccagggg

SEQ ID NO: 747047 - RNA, 22 nt, Human
gugacugugaacuguuucugau

SEQ ID NO: 747048 - RNA, 22 nt, Human
ugaaacggaauguucuuuaucg

SEQ ID NO: 747049 - RNA, 22 nt, Human
aagcuggacauuguagggggga

SEQ ID NO: 747050 - RNA, 22 nt, Human
augcuucccuuugcuccacaug

SEQ ID NO: 747051 - RNA, 22 nt, Human
aauuuuaagcauaugacugguu

SEQ ID NO: 747052 - RNA, 22 nt, Human
aaagacucuuaacucccuagcg

SEQ ID NO: 747053 - RNA, 22 nt, Human
agaguggcuugcucagcuagca

SEQ ID NO: 747054 - RNA, 22 nt, Human
uuauguaaguggagucauauag

SEQ ID NO: 747055 - RNA, 22 nt, Human
ugguccugcaguaauagacauc

SEQ ID NO: 747056 - RNA, 22 nt, Human
cuuaauuuaaaauaguucaggc

SEQ ID NO: 747057 - RNA, 22 nt, Human
aaguuucaaauguugauuaugc

SEQ ID NO: 747058 - RNA, 22 nt, Human
ugagcuagguccugugucagcu

SEQ ID NO: 747059 - RNA, 22 nt, Human
gcaaguuauuuccauuuaaagc

SEQ ID NO: 747060 - RNA, 22 nt, Human
uggcugaggcuggagugcagug

SEQ ID NO: 747061 - RNA, 22 nt, Human
accugccuucucaaggacauga

SEQ ID NO: 747062 - RNA, 20 nt, Human
ugagugaguuuguggcagga

SEQ ID NO: 747063 - RNA, 22 nt, Human
agugcaaacuuuauugugaccu

SEQ ID NO: 747064 - RNA, 22 nt, Human
cagggcucgcucuugcccuucg

SEQ ID NO: 747065 - RNA, 22 nt, Human
gaugaggcucaugcacccugcg

SEQ ID NO: 747066 - RNA, 22 nt, Human
cauuauccaacagcacuuucca

SEQ ID NO: 747067 - RNA, 22 nt, Human
ugcucaugcuggggacagaugu

SEQ ID NO: 747068 - RNA, 22 nt, Human
guaggcagggcuguggggagaa

SEQ ID NO: 747069 - RNA, 19 nt, Human
cuuauacagauuuucucau

SEQ ID NO: 747070 - RNA, 22 nt, Human
uuuagcaagaugcccuggcuuu

SEQ ID NO: 747071 - RNA, 22 nt, Human
ugugaggauguaaccagaaguc

SEQ ID NO: 747072 - RNA, 22 nt, Human
aguauaauuuacauuugguauu

SEQ ID NO: 747073 - RNA, 21 nt, Human
ugaaggagaggaccgagugcu

SEQ ID NO: 747074 - RNA, 22 nt, Human
uacucaaaaaguuaugaaucau

SEQ ID NO: 747075 - RNA, 22 nt, Human
aguggacucuucccagugcuug

SEQ ID NO: 747076 - RNA, 22 nt, Human
gcaaggcugggagaugaggccu

SEQ ID NO: 747077 - RNA, 22 nt, Human
agggcgugguggugcuggagca

SEQ ID NO: 747078 - RNA, 22 nt, Human
uccaaggcuccggcccuggcgu

SEQ ID NO: 747079 - RNA, 22 nt, Human
agucaguguucuggguuguaau

SEQ ID NO: 747080 - RNA, 22 nt, Human
auaugcuuccaaguuauuccac

SEQ ID NO: 747081 - RNA, 22 nt, Human
aggaguggugcaggaccugcca

SEQ ID NO: 747082 - RNA, 22 nt, Human
gaacagaugggcucagauccug

SEQ ID NO: 747083 - RNA, 22 nt, Human
aucacaucgaggagcaaucaga

SEQ ID NO: 747084 - RNA, 22 nt, Human
guccccucauuuuagagaaaga

SEQ ID NO: 747085 - RNA, 22 nt, Human
acugugcaugaaccgaaacaaa

SEQ ID NO: 747086 - RNA, 22 nt, Human
uuaaaguucauuaaaugagcca

SEQ ID NO: 747087 - RNA, 22 nt, Human
uuguugguggaauugaugcuag

SEQ ID NO: 747088 - RNA, 22 nt, Human
aauggcuuaaugauaccuuauc

SEQ ID NO: 747089 - RNA, 22 nt, Human
uaacauuguuaugaaucagguc

SEQ ID NO: 747090 - RNA, 22 nt, Human
caaaagcagcaaguuuauaugu

SEQ ID NO: 747091 - RNA, 22 nt, Human
gauacuuuccauccaaaugcau

SEQ ID NO: 747092 - RNA, 22 nt, Human
aagaugcaugcugaagcuggcu

SEQ ID NO: 747093 - RNA, 22 nt, Human
ugagugggaccugcguguguca

SEQ ID NO: 747094 - RNA, 22 nt, Human
gaccccaggcagaucagggggu

SEQ ID NO: 747095 - RNA, 22 nt, Human
uccugaagagcccugcucugug

SEQ ID NO: 747096 - RNA, 22 nt, Human
cacaggguuguucugaggauuc

SEQ ID NO: 747097 - RNA, 22 nt, Human
ucuguaaacaccauguuagagu

SEQ ID NO: 747098 - RNA, 19 nt, Human
agguagcucagacucaaag

SEQ ID NO: 747099 - RNA, 22 nt, Human
uugacaaaaaccucauuucacc

SEQ ID NO: 747100 - RNA, 22 nt, Human
ggugaggcagguggcugcugag

SEQ ID NO: 747101 - RNA, 22 nt, Human
uucuaccucaguuucccacuua

SEQ ID NO: 747102 - RNA, 22 nt, Human
auuggcagggccagcaucuccc

SEQ ID NO: 747103 - RNA, 22 nt, Human
auguuuuuggaaaugggaacau

SEQ ID NO: 747104 - RNA, 22 nt, Human
cagaagcagauucuaaagcaag

SEQ ID NO: 747105 - RNA, 22 nt, Human
ugccucagcugaggccgcucca

SEQ ID NO: 747106 - RNA, 22 nt, Human
agucagacauaauucuaacauu

SEQ ID NO: 747107 - RNA, 20 nt, Human
uacuuugaucugauaagcaa

SEQ ID NO: 747108 - RNA, 22 nt, Human
auaaagcaucuagucugucacu

SEQ ID NO: 747109 - RNA, 22 nt, Human
ccccagcagcaccuggggcagu

SEQ ID NO: 747110 - RNA, 22 nt, Human
uccagcauguuugugcugcuga

SEQ ID NO: 747111 - RNA, 22 nt, Human
caggaggaggguacaccaucag

SEQ ID NO: 747112 - RNA, 22 nt, Human
aguccccucuaacccaacuuua

SEQ ID NO: 747113 - RNA, 22 nt, Human
gaaguuauagcuaugaucuuaa

SEQ ID NO: 747114 - RNA, 22 nt, Human
aauguucagaggacaauauaaa

SEQ ID NO: 747115 - RNA, 18 nt, Human
cuucucccaucuuggcca

SEQ ID NO: 747116 - RNA, 22 nt, Human
gcauguggaaucucuccauggu

SEQ ID NO: 747117 - RNA, 22 nt, Human
guugugaauagugccgcaauaa

SEQ ID NO: 747118 - RNA, 22 nt, Human
gguggcucccacccagcuuuga

SEQ ID NO: 747119 - RNA, 22 nt, Human
cuguguaguauuuguacacaua

SEQ ID NO: 747120 - RNA, 22 nt, Human
agcugagcugcagaugacugua

SEQ ID NO: 747121 - RNA, 22 nt, Human
aaacugcugggcauauauuucu

SEQ ID NO: 747122 - RNA, 22 nt, Human
ggaggaaggguagcauaaugua

SEQ ID NO: 747123 - RNA, 22 nt, Human
ccugccucccagagguccucua

SEQ ID NO: 747124 - RNA, 22 nt, Human
gaaaugugggucaugacccauu

SEQ ID NO: 747125 - RNA, 22 nt, Human
gccuaauaugcaaaauugauac

SEQ ID NO: 747126 - RNA, 22 nt, Human
uguccagcucgagacacuaucu

SEQ ID NO: 747127 - RNA, 22 nt, Human
auggcaggcccagguguucauu

SEQ ID NO: 747128 - RNA, 22 nt, Human
ucuucucccaucuccaggcagg

SEQ ID NO: 747129 - RNA, 22 nt, Human
uaaugcuugcaaauuaugggac

SEQ ID NO: 747130 - RNA, 22 nt, Human
auguggcugucacagcauaaug

SEQ ID NO: 747131 - RNA, 22 nt, Human
caugaacauucagaaauacagc

SEQ ID NO: 747132 - RNA, 22 nt, Human
cagcaggguagguuguaucagu

SEQ ID NO: 747133 - RNA, 22 nt, Human
cuggagggacaagguaugcauu

SEQ ID NO: 747134 - RNA, 22 nt, Human
cagccuggauugcagaaugcua

SEQ ID NO: 747135 - RNA, 21 nt, Human
agggacacacaggauggggcu

SEQ ID NO: 747136 - RNA, 22 nt, Human
acccucaugaagcuggccugga

SEQ ID NO: 747137 - RNA, 22 nt, Human
agccagagacugugucuguaau

SEQ ID NO: 747138 - RNA, 22 nt, Human
gcugcaggcauuuuccugggca

SEQ ID NO: 747139 - RNA, 22 nt, Human
gaguuaaaggcaguugaggaaa

SEQ ID NO: 747140 - RNA, 22 nt, Human
ucucagaacacccuucuauggu

SEQ ID NO: 747141 - RNA, 22 nt, Human
caagacuuagagcaucuugaaa

SEQ ID NO: 747142 - RNA, 22 nt, Human
ugauucuauggaaggcauaagg

SEQ ID NO: 747143 - RNA, 22 nt, Human
aacagcuuugagcaguucugua

SEQ ID NO: 747144 - RNA, 22 nt, Human
ugugccuggucccugagucgag

SEQ ID NO: 747145 - RNA, 22 nt, Human
agaaacagcauuagcaucaauu

SEQ ID NO: 747146 - RNA, 22 nt, Human
ggcagucacuuuugcuugugcc

SEQ ID NO: 747147 - RNA, 22 nt, Human
gagguuucacuguguuguccag

SEQ ID NO: 747148 - RNA, 22 nt, Human
ggcagagacaccgaaugacucu

SEQ ID NO: 747149 - RNA, 22 nt, Human
ggagcccuuggcaccuaguagg

SEQ ID NO: 747150 - RNA, 23 nt, Human
auuuuaaccuugacuaacaugca

SEQ ID NO: 747151 - RNA, 22 nt, Human
cagcccucaucucagcuucuuu

SEQ ID NO: 747152 - RNA, 22 nt, Human
accguuuacaccacuaccgcuu

SEQ ID NO: 747153 - RNA, 22 nt, Human
uucucucuggaccugggaugcg

SEQ ID NO: 747154 - RNA, 22 nt, Human
gcaugaaaugagcgaauauaau

SEQ ID NO: 747155 - RNA, 22 nt, Human
gcuugggauaugcugauguaaa

SEQ ID NO: 747156 - RNA, 22 nt, Human
uucucuaauacauuuugacaaa

SEQ ID NO: 747157 - RNA, 22 nt, Human
ugucuucauucuguauguccag

SEQ ID NO: 747158 - RNA, 22 nt, Human
guuuuucuagacugggaguuug

SEQ ID NO: 747159 - RNA, 22 nt, Human
acugcccucccaucuauugcaa

SEQ ID NO: 747160 - RNA, 22 nt, Human
ccaggccugugcaaggagggag

SEQ ID NO: 747161 - RNA, 22 nt, Human
ugcccuuggguaacuugcugau

SEQ ID NO: 747162 - RNA, 22 nt, Human
gauuuaaaguagaccuuuguuu

SEQ ID NO: 747163 - RNA, 22 nt, Human
guuagacaugagugugcuuaca

SEQ ID NO: 747164 - RNA, 22 nt, Human
ucuguagcauucaccagcccug

SEQ ID NO: 747165 - RNA, 22 nt, Human
cagggccagcccacuagcgagg

SEQ ID NO: 747166 - RNA, 22 nt, Human
agccccaguaagggagggccug

SEQ ID NO: 747167 - RNA, 22 nt, Human
auaauuaauuucaguaaucucc

SEQ ID NO: 747168 - RNA, 22 nt, Human
ugaagggguucagcaugggggu

SEQ ID NO: 747169 - RNA, 22 nt, Human
gaaacugugaggaucuuaacuu

SEQ ID NO: 747170 - RNA, 22 nt, Human
ccgggggcgggacgagcuugac

SEQ ID NO: 747171 - RNA, 22 nt, Human
auguuauaaauagagacacugg

SEQ ID NO: 747172 - RNA, 22 nt, Human
agcuaucaccuuaauaaacuga

SEQ ID NO: 747173 - RNA, 21 nt, Human
uagagaaaagaagcuguuccu

SEQ ID NO: 747174 - RNA, 22 nt, Human
ggccuuggauuuuacccuaaag

SEQ ID NO: 747175 - RNA, 22 nt, Human
acugagcucuugacugggaguu

SEQ ID NO: 747176 - RNA, 22 nt, Human
auggaugaaggcgaggaugagg

SEQ ID NO: 747177 - RNA, 22 nt, Human
aaaauagcagggaugugggaaa

SEQ ID NO: 747178 - RNA, 22 nt, Human
guucauccugacuuggauuagu

SEQ ID NO: 747179 - RNA, 22 nt, Human
aagcacauuaaggaacauugaa

SEQ ID NO: 747180 - RNA, 22 nt, Human
ggccaggcgaugaccccuccac

SEQ ID NO: 747181 - RNA, 22 nt, Human
cacugcccagcgucuuaggcac

SEQ ID NO: 747182 - RNA, 22 nt, Human
cagcaucucauuugacuucugc

SEQ ID NO: 747183 - RNA, 22 nt, Human
aacaggaaauacuuaugaggua

SEQ ID NO: 747184 - RNA, 22 nt, Human
cugugcuuucgagaugugaucu

SEQ ID NO: 747185 - RNA, 22 nt, Human
caggcacuguguuaggcacugu

SEQ ID NO: 747186 - RNA, 22 nt, Human
gcagcaggaauuuaaauuuaua

SEQ ID NO: 747187 - RNA, 22 nt, Human
ugaaaucaauugcaauguuuau

SEQ ID NO: 747188 - RNA, 22 nt, Human
gauauuuucagucuccuuucaa

SEQ ID NO: 747189 - RNA, 22 nt, Human
gucucauugguucugccagagu

SEQ ID NO: 747190 - RNA, 22 nt, Human
aaguauucauaaggacauaugu

SEQ ID NO: 747191 - RNA, 16 nt, Human
augaggcauaggcugc

SEQ ID NO: 747192 - RNA, 22 nt, Human
uuugcuauaaaagggucacacg

SEQ ID NO: 747193 - RNA, 22 nt, Human
acuguguguuugucuagcacag

SEQ ID NO: 747194 - RNA, 22 nt, Human
ugggggucaggaugaggccuug

SEQ ID NO: 747195 - RNA, 22 nt, Human
ugcaguggugguaaagaugcuc

SEQ ID NO: 747196 - RNA, 22 nt, Human
auaggcaagcacaaagucagga

SEQ ID NO: 747197 - RNA, 22 nt, Human
cacuacagaaucaaauacgggc

SEQ ID NO: 747198 - RNA, 22 nt, Human
uugugagcaugugcagccucug

SEQ ID NO: 747199 - RNA, 22 nt, Human
gcugcuuugacagugggaacag

SEQ ID NO: 747200 - RNA, 20 nt, Human
agcugccuucauuuucuaga

SEQ ID NO: 747201 - RNA, 22 nt, Human
cuggcagauuggggucagcagu

SEQ ID NO: 747202 - RNA, 22 nt, Human
uagggcucugagaguucagccu

SEQ ID NO: 747203 - RNA, 22 nt, Human
acaaagggggacugcagagggu

SEQ ID NO: 747204 - RNA, 22 nt, Human
uauuuuacaaaugggaaugcug

SEQ ID NO: 747205 - RNA, 22 nt, Human
auggcagauggcuggagcaggu

SEQ ID NO: 747206 - RNA, 22 nt, Human
aggccucaguuugucaucugua

SEQ ID NO: 747207 - RNA, 22 nt, Human
acugucuguacuucuugcaagg

SEQ ID NO: 747208 - RNA, 22 nt, Human
ugcauuuauuugaauugaucua

SEQ ID NO: 747209 - RNA, 19 nt, Human
gcagacagguccagagagg

SEQ ID NO: 747210 - RNA, 22 nt, Human
uuucagagcucuaggcucucag

SEQ ID NO: 747211 - RNA, 22 nt, Human
ugaaauacugagugaaagaauu

SEQ ID NO: 747212 - RNA, 22 nt, Human
ugcauuauaacugaauguuguu

SEQ ID NO: 747213 - RNA, 22 nt, Human
cugacagucucauugauuugcu

SEQ ID NO: 747214 - RNA, 22 nt, Human
cugauacacucccuaaaauaua

SEQ ID NO: 747215 - RNA, 22 nt, Human
aacucuugggcugcaugcuguu

SEQ ID NO: 747216 - RNA, 17 nt, Human
ucuucucuuccagucuu

SEQ ID NO: 747217 - RNA, 22 nt, Human
aaacugcaauuauuuuugcaau

SEQ ID NO: 747218 - RNA, 22 nt, Human
ucucuguacaguacaugccgug

SEQ ID NO: 747219 - RNA, 22 nt, Human
agcuggcccacuguguggucca

SEQ ID NO: 747220 - RNA, 22 nt, Human
auguccaguuucuacacacaua

SEQ ID NO: 747221 - RNA, 22 nt, Human
uguuucuagagaaaauauuuac

SEQ ID NO: 747222 - RNA, 22 nt, Human
cacugcuugguugcaacauugc

SEQ ID NO: 747223 - RNA, 22 nt, Human
uccauuaaugauuauuucugug

SEQ ID NO: 747224 - RNA, 22 nt, Human
aaaugccuauuuguuccuucag

SEQ ID NO: 747225 - RNA, 22 nt, Human
auguccuuugcuucucuggucc

SEQ ID NO: 747226 - RNA, 22 nt, Human
acauagaguucaauuuucaguc

SEQ ID NO: 747227 - RNA, 22 nt, Human
agcagcucuguuuaccuggagg

SEQ ID NO: 747228 - RNA, 22 nt, Human
uggguagagcaggcuggggcuu

SEQ ID NO: 747229 - RNA, 22 nt, Human
guaagaggaucaaggcggugca

SEQ ID NO: 747230 - RNA, 22 nt, Human
uuucuaacagcaaauguuuauc

SEQ ID NO: 747231 - RNA, 23 nt, Human
gugauauuaaggauagagacaag

SEQ ID NO: 747232 - RNA, 22 nt, Human
uauaaagaaggcacagcaagac

SEQ ID NO: 747233 - RNA, 22 nt, Human
gccagcagcugugggguggcca

SEQ ID NO: 747234 - RNA, 22 nt, Human
ucccuugagaguuggccaauug

SEQ ID NO: 747235 - RNA, 22 nt, Human
agggccugagcucuccuccagu

SEQ ID NO: 747236 - RNA, 22 nt, Human
agggaagaggaccagagucucu

SEQ ID NO: 747237 - RNA, 22 nt, Human
cauggccaggcccagggcccag

SEQ ID NO: 747238 - RNA, 22 nt, Human
cauugcuguuaauugucucuag

SEQ ID NO: 747239 - RNA, 22 nt, Human
agcagcucccuccucagccacc

SEQ ID NO: 747240 - RNA, 22 nt, Human
augugucuugagggggauggag

SEQ ID NO: 747241 - RNA, 22 nt, Human
uccgauuagcucuuuauaaaac

SEQ ID NO: 747242 - RNA, 22 nt, Human
ggaaacauuccaagaguugaaa

SEQ ID NO: 747243 - RNA, 22 nt, Human
ggaggagggguuuacauuggaa

SEQ ID NO: 747244 - RNA, 22 nt, Human
augacuucugcaaggucauuug

SEQ ID NO: 747245 - RNA, 22 nt, Human
gugcgggccuggggguuucucu

SEQ ID NO: 747246 - RNA, 22 nt, Human
uuagcauucugccuccuauauc

SEQ ID NO: 747247 - RNA, 21 nt, Human
ggccucagccaccuggcucug

SEQ ID NO: 747248 - RNA, 21 nt, Human
gcagcuggucucagagcuugc

SEQ ID NO: 747249 - RNA, 22 nt, Human
caguuuucuaaagucucuuuaa

SEQ ID NO: 747250 - RNA, 22 nt, Human
ucucaggggauucacuggcacc

SEQ ID NO: 747251 - RNA, 22 nt, Human
accagccagccacaguggcucc

SEQ ID NO: 747252 - RNA, 22 nt, Human
acuguuaaguaugaaguaaggc

SEQ ID NO: 747253 - RNA, 22 nt, Human
ggccuccaucuuaucuuacucu

SEQ ID NO: 747254 - RNA, 22 nt, Human
uucuaagucugcugucuucauc

SEQ ID NO: 747255 - RNA, 22 nt, Human
gcugccagcuuuccuuggcuga

SEQ ID NO: 747256 - RNA, 22 nt, Human
augcucuauaaauaugacaugu

SEQ ID NO: 747257 - RNA, 22 nt, Human
cagcucuguugccaaagugggc

SEQ ID NO: 747258 - RNA, 22 nt, Human
cgcugggcgccgaccugcuggc

SEQ ID NO: 747259 - RNA, 22 nt, Human
gaggcagcaggcugaggaggau

SEQ ID NO: 747260 - RNA, 22 nt, Human
aaacaggcuuccauuagagcaa

SEQ ID NO: 747261 - RNA, 22 nt, Human
ucaaaaauaagauauucuggac

SEQ ID NO: 747262 - RNA, 22 nt, Human
ucccuggcagcuguccuuucag

SEQ ID NO: 747263 - RNA, 22 nt, Human
uauguucaugcuuaugcagaau

SEQ ID NO: 747264 - RNA, 22 nt, Human
ggaggacugagacacuccuggc

SEQ ID NO: 747265 - RNA, 22 nt, Human
ucccagcagagccagcaagccg

SEQ ID NO: 747266 - RNA, 22 nt, Human
acaggaagcuggagacccuuga

SEQ ID NO: 747267 - RNA, 22 nt, Human
uuccacucaugcaaagguccca

SEQ ID NO: 747268 - RNA, 22 nt, Human
ucacagcuccagacugcaacuc

SEQ ID NO: 747269 - RNA, 22 nt, Human
uuggccaauuccagaggaucau

SEQ ID NO: 747270 - RNA, 22 nt, Human
aauguguucaguuaaaugaacu

SEQ ID NO: 747271 - RNA, 22 nt, Human
aagagcuggcccaaucugagca

SEQ ID NO: 747272 - RNA, 20 nt, Human
uuacucaguuccugccaugc

SEQ ID NO: 747273 - RNA, 22 nt, Human
ucaucugucauccacaaagcug

SEQ ID NO: 747274 - RNA, 22 nt, Human
cucagcuagggaagguuagcuu

SEQ ID NO: 747275 - RNA, 22 nt, Human
uggaguccuaguauuggaaaca

SEQ ID NO: 747276 - RNA, 22 nt, Human
guccucuguuagaaaugugcuu

SEQ ID NO: 747277 - RNA, 18 nt, Human
ucagcccagagcccaguu

SEQ ID NO: 747278 - RNA, 22 nt, Human
uucaagucaauuuuugaaugac

SEQ ID NO: 747279 - RNA, 22 nt, Human
uugaucucuguugcugucuuug

SEQ ID NO: 747280 - RNA, 22 nt, Human
cuguggcuggccugucugacau

SEQ ID NO: 747281 - RNA, 22 nt, Human
uuuagauaaugcucaagcaauu

SEQ ID NO: 747282 - RNA, 22 nt, Human
agcugagauuaugcucuucuca

SEQ ID NO: 747283 - RNA, 22 nt, Human
cauguuaaguguuugauaacca

SEQ ID NO: 747284 - RNA, 22 nt, Human
aacccaggagacagguugcagu

SEQ ID NO: 747285 - RNA, 22 nt, Human
aaacagcuggucucaaauguuc

SEQ ID NO: 747286 - RNA, 22 nt, Human
ugagcagaggagugacguaggu

SEQ ID NO: 747287 - RNA, 22 nt, Human
cacaggcucuucucacuugauu

SEQ ID NO: 747288 - RNA, 22 nt, Human
auggcagcuggcuugggcaccu

SEQ ID NO: 747289 - RNA, 22 nt, Human
ugaagcaguuacuggguguuaa

SEQ ID NO: 747290 - RNA, 22 nt, Human
uuugaauaucacaaacuuucaa

SEQ ID NO: 747291 - RNA, 22 nt, Human
uguaugaaccuuuaauauagug

SEQ ID NO: 747292 - RNA, 22 nt, Human
augcaacaguucauaguuuuau

SEQ ID NO: 747293 - RNA, 22 nt, Human
uugugaaaagccgcaaguauag

SEQ ID NO: 747294 - RNA, 22 nt, Human
ccaaggagcaaguuuacaccug

SEQ ID NO: 747295 - RNA, 22 nt, Human
caggugaagaggauaaaaaguu

SEQ ID NO: 747296 - RNA, 22 nt, Human
agagggagaagcuaaaauaacu

SEQ ID NO: 747297 - RNA, 22 nt, Human
cagaaaccaaaugggaugggga

SEQ ID NO: 747298 - RNA, 22 nt, Human
cuuucccacgcaguggaugaga

SEQ ID NO: 747299 - RNA, 22 nt, Human
gacacugaccccaagcuguccu

SEQ ID NO: 747300 - RNA, 22 nt, Human
augcacgccccacacuggugug

SEQ ID NO: 747301 - RNA, 22 nt, Human
uuucuauugaucuaauaaacau

SEQ ID NO: 747302 - RNA, 22 nt, Human
gggggaagaaagaacauggcau

SEQ ID NO: 747303 - RNA, 22 nt, Human
agcgagugggucagcguugcag

SEQ ID NO: 747304 - RNA, 22 nt, Human
caggcagcucuaauggaaagug

SEQ ID NO: 747305 - RNA, 22 nt, Human
ccugagagugagugccuccuua

SEQ ID NO: 747306 - RNA, 22 nt, Human
ugauuucuuccuugucauuaga

SEQ ID NO: 747307 - RNA, 22 nt, Human
ggucucagaucuuuauuaaggc

SEQ ID NO: 747308 - RNA, 22 nt, Human
cuguguaucucugugggacaga

SEQ ID NO: 747309 - RNA, 22 nt, Human
cagcugugggccugacguggca

SEQ ID NO: 747310 - RNA, 22 nt, Human
ucuggcucauacaagccugcaa

SEQ ID NO: 747311 - RNA, 22 nt, Human
gaauucugggagagaucugaca

SEQ ID NO: 747312 - RNA, 22 nt, Human
ucugccugccagucugguccuc

SEQ ID NO: 747313 - RNA, 22 nt, Human
augacaaauucagaccauagca

SEQ ID NO: 747314 - RNA, 19 nt, Human
aguuggggcagggaagaga

SEQ ID NO: 747315 - RNA, 22 nt, Human
ucagcucugcacuccacugugg

SEQ ID NO: 747316 - RNA, 22 nt, Human
aggcuucacauuuucuaggccu

SEQ ID NO: 747317 - RNA, 22 nt, Human
uuguuuguaugcugagaagaau

SEQ ID NO: 747318 - RNA, 22 nt, Human
uccaggcugggcugaagggugc

SEQ ID NO: 747319 - RNA, 22 nt, Human
uagggcuccacucccagagauu

SEQ ID NO: 747320 - RNA, 22 nt, Human
agcagacaggcugccacagugc

SEQ ID NO: 747321 - RNA, 16 nt, Human
ggagguggguaaggug

SEQ ID NO: 747322 - RNA, 22 nt, Human
ggugaagcguauuuguggagcu

SEQ ID NO: 747323 - RNA, 22 nt, Human
agggccuggaacuggagaccac

SEQ ID NO: 747324 - RNA, 22 nt, Human
uaaaggguagguuuuacuguaa

SEQ ID NO: 747325 - RNA, 22 nt, Human
auaauaaaccaggaugggucug

SEQ ID NO: 747326 - RNA, 22 nt, Human
agucugggugugaaugaacuug

SEQ ID NO: 747327 - RNA, 22 nt, Human
uucuuaaucuguguggguucga

SEQ ID NO: 747328 - RNA, 22 nt, Human
agcccagaggcugggcgugcau

SEQ ID NO: 747329 - RNA, 22 nt, Human
agauuucaauggauauugcaag

SEQ ID NO: 747330 - RNA, 22 nt, Human
uaaauugcauaaguacaaauga

SEQ ID NO: 747331 - RNA, 22 nt, Human
ugaagcaggaucguuugcuuca

SEQ ID NO: 747332 - RNA, 21 nt, Human
ucagugcaauucuauggggaa

SEQ ID NO: 747333 - RNA, 22 nt, Human
cagccagguaugggcgugcggg

SEQ ID NO: 747334 - RNA, 20 nt, Human
aaugaaguuauuaaugaugu

SEQ ID NO: 747335 - RNA, 22 nt, Human
gagaucaucuuuuuuagauucc

SEQ ID NO: 747336 - RNA, 22 nt, Human
uccagcagacucaucagcaagg

SEQ ID NO: 747337 - RNA, 22 nt, Human
uugaacaauuugguauacaaac

SEQ ID NO: 747338 - RNA, 22 nt, Human
ggagguccaugugaauguggcc

SEQ ID NO: 747339 - RNA, 22 nt, Human
gggcugagauuggugcccuguc

SEQ ID NO: 747340 - RNA, 22 nt, Human
ggucuucagcuuugcaugucuu

SEQ ID NO: 747341 - RNA, 22 nt, Human
ggcucuugagaggcacagguuu

SEQ ID NO: 747342 - RNA, 20 nt, Human
aaguuuggagucaggagacc

SEQ ID NO: 747343 - RNA, 22 nt, Human
uugugaauagugccgcaauaaa

SEQ ID NO: 747344 - RNA, 22 nt, Human
agggaagcaggaauagcucuga

SEQ ID NO: 747345 - RNA, 22 nt, Human
agugcuccuauggaucaguugu

SEQ ID NO: 747346 - RNA, 21 nt, Human
gcagccacagccaccaagcua

SEQ ID NO: 747347 - RNA, 22 nt, Human
gucaauaauugauagauauugg

SEQ ID NO: 747348 - RNA, 22 nt, Human
cccuggcucugccucagagccc

SEQ ID NO: 747349 - RNA, 22 nt, Human
cauuuagucaaggacacguggc

SEQ ID NO: 747350 - RNA, 22 nt, Human
agcugguggauuaugcuguaca

SEQ ID NO: 747351 - RNA, 22 nt, Human
ggaucagaaucucugagaguuu

SEQ ID NO: 747352 - RNA, 22 nt, Human
cugcccucccaguugguccgug

SEQ ID NO: 747353 - RNA, 22 nt, Human
aacaugcucuggauugcuguga

SEQ ID NO: 747354 - RNA, 22 nt, Human
gagguccauuuucacauaugau

SEQ ID NO: 747355 - RNA, 22 nt, Human
ccaguguauuuuugggaccugc

SEQ ID NO: 747356 - RNA, 22 nt, Human
agcagugggggaguguuaguuu

SEQ ID NO: 747357 - RNA, 22 nt, Human
aggaagcucauuuugacauauc

SEQ ID NO: 747358 - RNA, 22 nt, Human
cuuucuuucgaagacgugauua

SEQ ID NO: 747359 - RNA, 22 nt, Human
cuguuauuugagaguguugaau

SEQ ID NO: 747360 - RNA, 22 nt, Human
agcucuggaauaaugaugugau

SEQ ID NO: 747361 - RNA, 22 nt, Human
aacaguuugcuuuaagaggcac

SEQ ID NO: 747362 - RNA, 22 nt, Human
agucacauggacucaggaugac

SEQ ID NO: 747363 - RNA, 22 nt, Human
uuaacaaagcucuguuccuuuu

SEQ ID NO: 747364 - RNA, 22 nt, Human
gagucaggcuagaggugagucu

SEQ ID NO: 747365 - RNA, 22 nt, Human
ggugaagguggaacgcagagca

SEQ ID NO: 747366 - RNA, 22 nt, Human
uuccugguuggauucugauuaa

SEQ ID NO: 747367 - RNA, 22 nt, Human
aggaagggcuguuucuccaaga

SEQ ID NO: 747368 - RNA, 22 nt, Human
aggcaguggcuuuuguuguguu

SEQ ID NO: 747369 - RNA, 17 nt, Human
agaggcagauacuugga

SEQ ID NO: 747370 - RNA, 22 nt, Human
acuuguuuacaagcaguucuga

SEQ ID NO: 747371 - RNA, 22 nt, Human
cuuauaaaguccaucugaacaa

SEQ ID NO: 747372 - RNA, 22 nt, Human
aagaggagacuucagcaacuug

SEQ ID NO: 747373 - RNA, 22 nt, Human
uucugcugguaacuauguuuca

SEQ ID NO: 747374 - RNA, 22 nt, Human
uguggguuuguaguuaaguucu

SEQ ID NO: 747375 - RNA, 22 nt, Human
gggacgagccccaggcuggagg

SEQ ID NO: 747376 - RNA, 22 nt, Human
acaacagagcuggacugagagg

SEQ ID NO: 747377 - RNA, 23 nt, Human
uaagacacccgacuccagagaug

SEQ ID NO: 747378 - RNA, 22 nt, Human
ugagguagaagccuggguugag

SEQ ID NO: 747379 - RNA, 22 nt, Human
acccuuucuuacucacacgcuc

SEQ ID NO: 747380 - RNA, 22 nt, Human
uugagguccccaguacccacug

SEQ ID NO: 747381 - RNA, 22 nt, Human
auccucacaauaaaaucagccu

SEQ ID NO: 747382 - RNA, 22 nt, Human
ucucccauucagcuugcaguca

SEQ ID NO: 747383 - RNA, 22 nt, Human
uuuauauagagauuugugcaug

SEQ ID NO: 747384 - RNA, 23 nt, Human
cugcauguccacugguguaaaug

SEQ ID NO: 747385 - RNA, 22 nt, Human
agucucuuggcauucugaaaca

SEQ ID NO: 747386 - RNA, 22 nt, Human
aaugauccuacacauggaauuc

SEQ ID NO: 747387 - RNA, 22 nt, Human
uaauccacaauagagauuaucu

SEQ ID NO: 747388 - RNA, 22 nt, Human
gcccuucugcuguuagguagcc

SEQ ID NO: 747389 - RNA, 20 nt, Human
gcuccaagccccuuuagagg

SEQ ID NO: 747390 - RNA, 22 nt, Human
ucaagcaacugaauucuaaaag

SEQ ID NO: 747391 - RNA, 21 nt, Human
cugaggcaugcaggccugggc

SEQ ID NO: 747392 - RNA, 22 nt, Human
auuugucucucuggguuuacuu

SEQ ID NO: 747393 - RNA, 20 nt, Human
gcugccagugccugaugcuu

SEQ ID NO: 747394 - RNA, 22 nt, Human
ugggaacucucugggaggcauc

SEQ ID NO: 747395 - RNA, 22 nt, Human
uuguuucccuggaucuagagcu

SEQ ID NO: 747396 - RNA, 23 nt, Human
auuacaguuaauuacaacaucuu

SEQ ID NO: 747397 - RNA, 22 nt, Human
uuugauucaaaaaccacuccac

SEQ ID NO: 747398 - RNA, 22 nt, Human
acacugaaucagaaauuguugg

SEQ ID NO: 747399 - RNA, 22 nt, Human
acagcagaguaguuuuccaacu

SEQ ID NO: 747400 - RNA, 22 nt, Human
cccagugccaggcacaggcagc

SEQ ID NO: 747401 - RNA, 22 nt, Human
augcuuuacgacaaaaaacuca

SEQ ID NO: 747402 - RNA, 22 nt, Human
accuuauucuugcccuuagaug

SEQ ID NO: 747403 - RNA, 21 nt, Human
ccugggccaaauucccuggac

SEQ ID NO: 747404 - RNA, 22 nt, Human
aagaagcauggcuguagauucc

SEQ ID NO: 747405 - RNA, 22 nt, Human
augcccaaugucacaauuuuug

SEQ ID NO: 747406 - RNA, 22 nt, Human
ccagugugguagguccacaggu

SEQ ID NO: 747407 - RNA, 22 nt, Human
aacucaguguguuucuuaguau

SEQ ID NO: 747408 - RNA, 22 nt, Human
acucauuuuauaacacuguagu

SEQ ID NO: 747409 - RNA, 22 nt, Human
uggcuaaacccuaguaaauuaa

SEQ ID NO: 747410 - RNA, 22 nt, Human
cggagcuggcgucuguguggac

SEQ ID NO: 747411 - RNA, 22 nt, Human
gagucaggcaugaagguaauua

SEQ ID NO: 747412 - RNA, 22 nt, Human
gucacucaggcuggaguucagu

SEQ ID NO: 747413 - RNA, 19 nt, Human
ggugagcccucgccugccu

SEQ ID NO: 747414 - RNA, 22 nt, Human
acagagcuuaauucaggagcuu

SEQ ID NO: 747415 - RNA, 22 nt, Human
ugaacacaguucugaugagcuu

SEQ ID NO: 747416 - RNA, 22 nt, Human
cugcagggcccaaggucaacgg

SEQ ID NO: 747417 - RNA, 22 nt, Human
uacuccacacgcuauuauaaug

SEQ ID NO: 747418 - RNA, 22 nt, Human
gacaaggguucugcagagccug

SEQ ID NO: 747419 - RNA, 22 nt, Human
uggagccagcccaggccccucu

SEQ ID NO: 747420 - RNA, 17 nt, Human
agguucagguuacauuc

SEQ ID NO: 747421 - RNA, 22 nt, Human
cuaggcagggugcugugccaug

SEQ ID NO: 747422 - RNA, 22 nt, Human
uguggccuugcagccuggaggu

SEQ ID NO: 747423 - RNA, 22 nt, Human
agaguuuggauuuuaggacauc

SEQ ID NO: 747424 - RNA, 22 nt, Human
ucuucagagauguaacauaugg

SEQ ID NO: 747425 - RNA, 22 nt, Human
ugcuggaguucgacauugcaaa

SEQ ID NO: 747426 - RNA, 22 nt, Human
ugaggggaacugaugcccauug

SEQ ID NO: 747427 - RNA, 21 nt, Human
gacaggggccauggguuucua

SEQ ID NO: 747428 - RNA, 22 nt, Human
auuccacaguguguggugagga

SEQ ID NO: 747429 - RNA, 22 nt, Human
gccccuuccaucaugugaggac

SEQ ID NO: 747430 - RNA, 22 nt, Human
aagggaaaauaguugaugacca

SEQ ID NO: 747431 - RNA, 22 nt, Human
cccaggcacaccccgaacggaa

SEQ ID NO: 747432 - RNA, 22 nt, Human
gagagcugcagccgagaggggg

SEQ ID NO: 747433 - RNA, 22 nt, Human
gcucaggaucccaggggugugc

SEQ ID NO: 747434 - RNA, 22 nt, Human
agaucaguaagaggaagaaugg

SEQ ID NO: 747435 - RNA, 22 nt, Human
aagaaagcauuagacaggcauu

SEQ ID NO: 747436 - RNA, 22 nt, Human
gcuaggaguggugggucaagga

SEQ ID NO: 747437 - RNA, 23 nt, Human
gcucugccacuuaauagcugugu

SEQ ID NO: 747438 - RNA, 22 nt, Human
augaccccuaaaauuuacuguc

SEQ ID NO: 747439 - RNA, 22 nt, Human
cugagggccuucuaugcugagc

SEQ ID NO: 747440 - RNA, 20 nt, Human
cccaggcagagcuagcggca

SEQ ID NO: 747441 - RNA, 22 nt, Human
auguggccagucauguaguaac

SEQ ID NO: 747442 - RNA, 22 nt, Human
ucucagaguuuagagcugagcc

SEQ ID NO: 747443 - RNA, 22 nt, Human
gcuuccagaaugacuaggaugu

SEQ ID NO: 747444 - RNA, 22 nt, Human
cuuuggaaaaauaccuggcaua

SEQ ID NO: 747445 - RNA, 22 nt, Human
ucugccuguaccucuuuuuugc

SEQ ID NO: 747446 - RNA, 22 nt, Human
acagaggaagcauauagcacaa

SEQ ID NO: 747447 - RNA, 22 nt, Human
agcuuacaguucaaugacaaag

SEQ ID NO: 747448 - RNA, 22 nt, Human
uggaggaaucagggcuuaggcu

SEQ ID NO: 747449 - RNA, 22 nt, Human
caguggcucaugccuauaaucc

SEQ ID NO: 747450 - RNA, 22 nt, Human
ccagggugcucuguggcgucgc

SEQ ID NO: 747451 - RNA, 22 nt, Human
ugcccagucuccgggccagccc

SEQ ID NO: 747452 - RNA, 21 nt, Human
uggcagggguaguaguacagc

SEQ ID NO: 747453 - RNA, 22 nt, Human
uuuggcacucacuuaucauugg

SEQ ID NO: 747454 - RNA, 22 nt, Human
auagaagcugauaaacuacuuc

SEQ ID NO: 747455 - RNA, 22 nt, Human
ggacauagaggcccugcauggc

SEQ ID NO: 747456 - RNA, 21 nt, Human
guuuucuuugauagagggaag

SEQ ID NO: 747457 - RNA, 22 nt, Human
uugcaauagccuuauuuccaaa

SEQ ID NO: 747458 - RNA, 22 nt, Human
uucaggagaaaguucaguacuu

SEQ ID NO: 747459 - RNA, 22 nt, Human
aucucauucucccgugccaugg

SEQ ID NO: 747460 - RNA, 22 nt, Human
aagggcugaaugaaggguugaa

SEQ ID NO: 747461 - RNA, 22 nt, Human
ggggcccagggcagcagugcag

SEQ ID NO: 747462 - RNA, 22 nt, Human
uagauucuaagauucuaagaau

SEQ ID NO: 747463 - RNA, 22 nt, Human
uaugagaauuugcuaauuggcu

SEQ ID NO: 747464 - RNA, 22 nt, Human
gagcccagguucugcuuccagc

SEQ ID NO: 747465 - RNA, 22 nt, Human
agauauauuuaagguaauaagu

SEQ ID NO: 747466 - RNA, 22 nt, Human
cccagcauuucugggcugcacu

SEQ ID NO: 747467 - RNA, 22 nt, Human
aucauaaaccacuuuguaaucu

SEQ ID NO: 747468 - RNA, 22 nt, Human
ugagaacauuugcagggagagu

SEQ ID NO: 747469 - RNA, 22 nt, Human
ucugaaggugcuagagaaagcu

SEQ ID NO: 747470 - RNA, 22 nt, Human
uacugcagauggccuuguucuu

SEQ ID NO: 747471 - RNA, 22 nt, Human
uaggcaaguggaccagagguuu

SEQ ID NO: 747472 - RNA, 22 nt, Human
aggugccacucucaugggcuac

SEQ ID NO: 747473 - RNA, 22 nt, Human
ugacaaagaccuucaacaagau

SEQ ID NO: 747474 - RNA, 22 nt, Human
ggacacuggccacauuucaaaa

SEQ ID NO: 747475 - RNA, 21 nt, Human
aagcuguguuccacugauagc

SEQ ID NO: 747476 - RNA, 22 nt, Human
cggcuggaagcuggacaggccg

SEQ ID NO: 747477 - RNA, 22 nt, Human
cagcagccacuagagggcucac

SEQ ID NO: 747478 - RNA, 22 nt, Human
auuucuugccccugcucccuga

SEQ ID NO: 747479 - RNA, 22 nt, Human
ugagagcugggaaauguuagcu

SEQ ID NO: 747480 - RNA, 22 nt, Human
uccuccaggcaccucacuggcu

SEQ ID NO: 747481 - RNA, 22 nt, Human
gcugcugcgcuugucuacuguu

SEQ ID NO: 747482 - RNA, 21 nt, Human
uaagugcaaagagacagauac

SEQ ID NO: 747483 - RNA, 22 nt, Human
agccagggagguggagguugca

SEQ ID NO: 747484 - RNA, 22 nt, Human
uuggcauaccuuagugguggag

SEQ ID NO: 747485 - RNA, 22 nt, Human
aagugcauaauaacucccaagu

SEQ ID NO: 747486 - RNA, 22 nt, Human
gugggaugguagguagguaaua

SEQ ID NO: 747487 - RNA, 22 nt, Human
ugauggcuccuucauuaugggu

SEQ ID NO: 747488 - RNA, 22 nt, Human
cugcuggagguuggagcaugca

SEQ ID NO: 747489 - RNA, 22 nt, Human
aggcuggagagugcaguggcgu

SEQ ID NO: 747490 - RNA, 22 nt, Human
aagagguucuccuuggaguggg

SEQ ID NO: 747491 - RNA, 22 nt, Human
gcucagggaaugagaagauguu

SEQ ID NO: 747492 - RNA, 22 nt, Human
ugcuucaggaagaaacgccagg

SEQ ID NO: 747493 - RNA, 22 nt, Human
aaauugcugugaggugguagua

SEQ ID NO: 747494 - RNA, 23 nt, Human
ccugucugugcuggguggacaca

SEQ ID NO: 747495 - RNA, 22 nt, Human
cugaagcauaucaugccaaguu

SEQ ID NO: 747496 - RNA, 22 nt, Human
gggaagugugcagaguucucuu

SEQ ID NO: 747497 - RNA, 22 nt, Human
ugcccagcuucuuacuuuuaaa

SEQ ID NO: 747498 - RNA, 22 nt, Human
uuggcacuucacgagacagcua

SEQ ID NO: 747499 - RNA, 22 nt, Human
ggcucuggugaggguaggagau

SEQ ID NO: 747500 - RNA, 22 nt, Human
ucugggucuaucccaugccuuu

SEQ ID NO: 747501 - RNA, 22 nt, Human
uacaguaaccagucuacuuaga

SEQ ID NO: 747502 - RNA, 22 nt, Human
uggggcuguggauucucacgaa

SEQ ID NO: 747503 - RNA, 23 nt, Human
uggccacaguccaugcaugccca

SEQ ID NO: 747504 - RNA, 22 nt, Human
uuacagaaaagggcuuuaagag

SEQ ID NO: 747505 - RNA, 18 nt, Human
ccagagggugcgucagcu

SEQ ID NO: 747506 - RNA, 22 nt, Human
aaguauaagcuauucuucauga

SEQ ID NO: 747507 - RNA, 22 nt, Human
acugcaggccuuggugccagca

SEQ ID NO: 747508 - RNA, 22 nt, Human
gauagcugcugggauauuuuua

SEQ ID NO: 747509 - RNA, 22 nt, Human
ggccuguguccuccuugcccug

SEQ ID NO: 747510 - RNA, 22 nt, Human
aaauggcaacagaagggaguuc

SEQ ID NO: 747511 - RNA, 22 nt, Human
aaaagagccacuuaugaccuca

SEQ ID NO: 747512 - RNA, 22 nt, Human
gagcagcucugggugacccagu

SEQ ID NO: 747513 - RNA, 22 nt, Human
guuguaaauacagcagauaauu

SEQ ID NO: 747514 - RNA, 17 nt, Human
ugguggcuggagucagg

SEQ ID NO: 747515 - RNA, 22 nt, Human
guuuccugacuguggaauuaua

SEQ ID NO: 747516 - RNA, 22 nt, Human
agagccugucugccuuucuacc

SEQ ID NO: 747517 - RNA, 22 nt, Human
uggcacgacaauuggcaccaau

SEQ ID NO: 747518 - RNA, 22 nt, Human
aaagcaguauaguggaagggcu

SEQ ID NO: 747519 - RNA, 22 nt, Human
uggauuaguuuaacaauguggc

SEQ ID NO: 747520 - RNA, 15 nt, Human
cagucccagggaccc

SEQ ID NO: 747521 - RNA, 22 nt, Human
uauuuugaaagucuguuuugaa

SEQ ID NO: 747522 - RNA, 19 nt, Human
aucugccuuagugcugcug

SEQ ID NO: 747523 - RNA, 22 nt, Human
acauacaugggauuaaaaaauu

SEQ ID NO: 747524 - RNA, 22 nt, Human
uuguauauauucuuaaagaugu

SEQ ID NO: 747525 - RNA, 22 nt, Human
gccuguccacuaaacagccaag

SEQ ID NO: 747526 - RNA, 22 nt, Human
ucugggaaauggcuacuuguca

SEQ ID NO: 747527 - RNA, 22 nt, Human
aaacagacugcacugccaguca

SEQ ID NO: 747528 - RNA, 22 nt, Human
aggucacagcuuucucgugagg

SEQ ID NO: 747529 - RNA, 22 nt, Human
aggaaacauccuuaucuauucu

SEQ ID NO: 747530 - RNA, 22 nt, Human
cuccugcuccugcuugcaagga

SEQ ID NO: 747531 - RNA, 22 nt, Human
aggcuccauucaugugaaggca

SEQ ID NO: 747532 - RNA, 21 nt, Human
gcaugaaaacagccugugcuc

SEQ ID NO: 747533 - RNA, 21 nt, Human
cugucccucuuugcuucccuc

SEQ ID NO: 747534 - RNA, 22 nt, Human
uguuuacacaauagucucucuc

SEQ ID NO: 747535 - RNA, 22 nt, Human
uuugaagggcacgacaauaguu

SEQ ID NO: 747536 - RNA, 22 nt, Human
aaagaagacagacauuucuuuc

SEQ ID NO: 747537 - RNA, 21 nt, Human
uaauauagguucacaacuagu

SEQ ID NO: 747538 - RNA, 17 nt, Human
aaacuucauucucagga

SEQ ID NO: 747539 - RNA, 22 nt, Human
agcgcgcucgaugguuuccgcg

SEQ ID NO: 747540 - RNA, 22 nt, Human
uucaaaauccgggaggcgcccc

SEQ ID NO: 747541 - RNA, 22 nt, Human
ugaggcucagagcaccugcucc

SEQ ID NO: 747542 - RNA, 19 nt, Human
uccugaaaacuucuggaau

SEQ ID NO: 747543 - RNA, 22 nt, Human
augucugucaucuuccaggaag

SEQ ID NO: 747544 - RNA, 22 nt, Human
uuaugacagaaaugaaaagcug

SEQ ID NO: 747545 - RNA, 22 nt, Human
aaagaguucuguuugagcugaa

SEQ ID NO: 747546 - RNA, 22 nt, Human
auucuucucuggguuggguuca

SEQ ID NO: 747547 - RNA, 22 nt, Human
ccuggccacccagccuuggcca

SEQ ID NO: 747548 - RNA, 22 nt, Human
cuguuauucaagacaaaggcag

SEQ ID NO: 747549 - RNA, 22 nt, Human
uggguaggugcuggggauucag

SEQ ID NO: 747550 - RNA, 22 nt, Human
cugggcacagcguugggcucuu

SEQ ID NO: 747551 - RNA, 22 nt, Human
uaguacaguuuaaauauuaaua

SEQ ID NO: 747552 - RNA, 22 nt, Human
uuucacacugcagcaucagaga

SEQ ID NO: 747553 - RNA, 22 nt, Human
gaaacugaauauaagaaaggua

SEQ ID NO: 747554 - RNA, 20 nt, Human
gcuuuuucuaauagcagucc

SEQ ID NO: 747555 - RNA, 20 nt, Human
agguccacugaggcugccuc

SEQ ID NO: 747556 - RNA, 22 nt, Human
accaggcaaaaccacaggagca

SEQ ID NO: 747557 - RNA, 22 nt, Human
uuggccuucccuaccugggcca

SEQ ID NO: 747558 - RNA, 18 nt, Human
agugcaugcuaggggaag

SEQ ID NO: 747559 - RNA, 22 nt, Human
auuacacuaaugugacaacaau

SEQ ID NO: 747560 - RNA, 22 nt, Human
aaguacauauauuuaugauucu

SEQ ID NO: 747561 - RNA, 22 nt, Human
uugacaauugggagauauaaag

SEQ ID NO: 747562 - RNA, 22 nt, Human
cucacugacgaggaagcugaga

SEQ ID NO: 747563 - RNA, 22 nt, Human
cacauacaugcacaccuaaaua

SEQ ID NO: 747564 - RNA, 22 nt, Human
uucagacuagacacauuucaag

SEQ ID NO: 747565 - RNA, 22 nt, Human
aauagaauguaaucuaauacau

SEQ ID NO: 747566 - RNA, 22 nt, Human
aaagguuuuauguuuuccacuu

SEQ ID NO: 747567 - RNA, 22 nt, Human
gugcaggagguaacauagcaaa

SEQ ID NO: 747568 - RNA, 22 nt, Human
ugugaguuauuuucaggaguuu

SEQ ID NO: 747569 - RNA, 22 nt, Human
uagggaccuuagaauuguaugu

SEQ ID NO: 747570 - RNA, 16 nt, Human
agugggaggagaaaga

SEQ ID NO: 747571 - RNA, 22 nt, Human
gcuugucucucagccccaguca

SEQ ID NO: 747572 - RNA, 21 nt, Human
agacagagugcagucuacaua

SEQ ID NO: 747573 - RNA, 22 nt, Human
ugaggugagucaugcauuggag

SEQ ID NO: 747574 - RNA, 22 nt, Human
ggacccagguagggaggaagau

SEQ ID NO: 747575 - RNA, 20 nt, Human
gcaauuaauuuuugguuaca

SEQ ID NO: 747576 - RNA, 22 nt, Human
ugcuucagugugucauuauuua

SEQ ID NO: 747577 - RNA, 22 nt, Human
agagguggagcucuuggcauca

SEQ ID NO: 747578 - RNA, 22 nt, Human
cuuacacacuagaugguaggug

SEQ ID NO: 747579 - RNA, 22 nt, Human
ggguugaggcggaugucggcgg

SEQ ID NO: 747580 - RNA, 22 nt, Human
ucuccaggggcagggucuggag

SEQ ID NO: 747581 - RNA, 22 nt, Human
uuucuaacguagacagggaggu

SEQ ID NO: 747582 - RNA, 22 nt, Human
acgggccuucucuucaggcgag

SEQ ID NO: 747583 - RNA, 22 nt, Human
ugacagaggcugaguuagucug

SEQ ID NO: 747584 - RNA, 22 nt, Human
aggcuggccuauuucuuuaucg

SEQ ID NO: 747585 - RNA, 23 nt, Human
agugugacuuuuuugacugucac

SEQ ID NO: 747586 - RNA, 16 nt, Human
agcagaggugagugaa

SEQ ID NO: 747587 - RNA, 22 nt, Human
uuuauuuauaagccacuugcug

SEQ ID NO: 747588 - RNA, 22 nt, Human
gaggagcacaugaggcugaggg

SEQ ID NO: 747589 - RNA, 22 nt, Human
gcccaggaaaugccccguggug

SEQ ID NO: 747590 - RNA, 22 nt, Human
auuccacagcuacaucaaucua

SEQ ID NO: 747591 - RNA, 22 nt, Human
ugcccaagccgagcucucuguu

SEQ ID NO: 747592 - RNA, 22 nt, Human
acauugcugcauucuccuuccc

SEQ ID NO: 747593 - RNA, 22 nt, Human
uccaguggcaccuuggcccuca

SEQ ID NO: 747594 - RNA, 21 nt, Human
ucaggggcuguguuuuccauc

SEQ ID NO: 747595 - RNA, 22 nt, Human
gaggcucagagaagucauggua

SEQ ID NO: 747596 - RNA, 22 nt, Human
ccucagcuugauuucugcagag

SEQ ID NO: 747597 - RNA, 22 nt, Human
gugauuuucuccuccuagaagu

SEQ ID NO: 747598 - RNA, 22 nt, Human
ucuauacacacaaagaaugcuu

SEQ ID NO: 747599 - RNA, 22 nt, Human
uuggcuucugauguauuccuga

SEQ ID NO: 747600 - RNA, 22 nt, Human
aggcauggacauuucggcagcu

SEQ ID NO: 747601 - RNA, 22 nt, Human
uggcuguguuaccacuucaugu

SEQ ID NO: 747602 - RNA, 21 nt, Human
uccugcaggaggccugagagg

SEQ ID NO: 747603 - RNA, 22 nt, Human
auuucccaauacgcuaagugga

SEQ ID NO: 747604 - RNA, 18 nt, Human
cuuucaguaauuucagcc

SEQ ID NO: 747605 - RNA, 21 nt, Human
aaauucaccuaguaaaacuuc

SEQ ID NO: 747606 - RNA, 22 nt, Human
aauguccuaggcaugauuuugu

SEQ ID NO: 747607 - RNA, 22 nt, Human
cugugggaugggaccucagcug

SEQ ID NO: 747608 - RNA, 19 nt, Human
uggucuaaaugugugcccc

SEQ ID NO: 747609 - RNA, 22 nt, Human
agcccagagacaaugcucagua

SEQ ID NO: 747610 - RNA, 23 nt, Human
cuuucauugugguuucacagagc

SEQ ID NO: 747611 - RNA, 22 nt, Human
gggcucucaaggcagggcccca

SEQ ID NO: 747612 - RNA, 22 nt, Human
augcugaauaguucacucuucu

SEQ ID NO: 747613 - RNA, 22 nt, Human
ucacauaaauuuaccagaugau

SEQ ID NO: 747614 - RNA, 21 nt, Human
cccuucuugggucaaaguaua

SEQ ID NO: 747615 - RNA, 22 nt, Human
ggcuuugcauuuugauggaggu

SEQ ID NO: 747616 - RNA, 22 nt, Human
uggcuccucuucuggguguccc

SEQ ID NO: 747617 - RNA, 22 nt, Human
uggcagccacaucucguggauu

SEQ ID NO: 747618 - RNA, 22 nt, Human
aacuaaaggcuguugcagggaa

SEQ ID NO: 747619 - RNA, 20 nt, Human
uccugagaggcucuuggaga

SEQ ID NO: 747620 - RNA, 22 nt, Human
augcauaugcaaugcacaauuu

SEQ ID NO: 747621 - RNA, 21 nt, Human
uccuccuguagaggguccugg

SEQ ID NO: 747622 - RNA, 23 nt, Human
agccucagccgguggcagaagug

SEQ ID NO: 747623 - RNA, 22 nt, Human
ugucugugaccucuuuggagcc

SEQ ID NO: 747624 - RNA, 22 nt, Human
gccuucagcccugacuggccag

SEQ ID NO: 747625 - RNA, 22 nt, Human
uacagagacuuuauggcacaaa

SEQ ID NO: 747626 - RNA, 22 nt, Human
ucucuguggcaacuacuuagcu

SEQ ID NO: 747627 - RNA, 22 nt, Human
uaggggaggggaucaugugcug

SEQ ID NO: 747628 - RNA, 22 nt, Human
uuaggucuguuuauaaaacagu

SEQ ID NO: 747629 - RNA, 22 nt, Human
uggcgaggccaggccagggccu

SEQ ID NO: 747630 - RNA, 22 nt, Human
gcagccacagaggagggaugca

SEQ ID NO: 747631 - RNA, 18 nt, Human
cacauuuaccuggcuccc

SEQ ID NO: 747632 - RNA, 18 nt, Human
augggaggggccaagaga

SEQ ID NO: 747633 - RNA, 22 nt, Human
gccauuuagggaggcaagguga

SEQ ID NO: 747634 - RNA, 22 nt, Human
caggcuggagugcagugucgcc

SEQ ID NO: 747635 - RNA, 22 nt, Human
cuuugcagcaauuucuguuaaa

SEQ ID NO: 747636 - RNA, 22 nt, Human
auacacuggacaucauugcauu

SEQ ID NO: 747637 - RNA, 22 nt, Human
aagcauuucagguagagauauu

SEQ ID NO: 747638 - RNA, 22 nt, Human
ugggagugauacaguauggaau

SEQ ID NO: 747639 - RNA, 22 nt, Human
augcuuuuccaggagaaauaua

SEQ ID NO: 747640 - RNA, 22 nt, Human
ucuccaggagcaagucacccag

SEQ ID NO: 747641 - RNA, 22 nt, Human
ugcuuuaucugacuuggcgcug

SEQ ID NO: 747642 - RNA, 22 nt, Human
acucagaguuugcguuccauac

SEQ ID NO: 747643 - RNA, 22 nt, Human
aggccagcccucaccuguguuc

SEQ ID NO: 747644 - RNA, 22 nt, Human
agaguuggccaaaaggggcauu

SEQ ID NO: 747645 - RNA, 22 nt, Human
ccucaagaacaauccaccauua

SEQ ID NO: 747646 - RNA, 22 nt, Human
aacaugcuaugugucugaauca

SEQ ID NO: 747647 - RNA, 22 nt, Human
ggguggagugugaaaucuggcu

SEQ ID NO: 747648 - RNA, 22 nt, Human
gagguggcuuagucucuggaca

SEQ ID NO: 747649 - RNA, 22 nt, Human
gcagucacagggagauggugac

SEQ ID NO: 747650 - RNA, 22 nt, Human
gcuguggcucucacaagcaaau

SEQ ID NO: 747651 - RNA, 22 nt, Human
agaggcccucucugcucagucu

SEQ ID NO: 747652 - RNA, 22 nt, Human
agguuccaggucuggguuaugu

SEQ ID NO: 747653 - RNA, 19 nt, Human
aucauugaucuucaccccu

SEQ ID NO: 747654 - RNA, 21 nt, Human
acagcagagaucaagacuaag

SEQ ID NO: 747655 - RNA, 22 nt, Human
auugagaaucugagagccuagg

SEQ ID NO: 747656 - RNA, 22 nt, Human
uacauuccacuagugacuggcg

SEQ ID NO: 747657 - RNA, 22 nt, Human
cuccaggauaccuguuccuaua

SEQ ID NO: 747658 - RNA, 18 nt, Human
uuauuuguuacagcacau

SEQ ID NO: 747659 - RNA, 21 nt, Human
gagugucuaauccaggcuguc

SEQ ID NO: 747660 - RNA, 22 nt, Human
ccugcagaugugggacagcugu

SEQ ID NO: 747661 - RNA, 22 nt, Human
ccaggaggcggaagguacagug

SEQ ID NO: 747662 - RNA, 22 nt, Human
acaggagacccugcugguucug

SEQ ID NO: 747663 - RNA, 22 nt, Human
ugugccaagacuauauugugcu

SEQ ID NO: 747664 - RNA, 22 nt, Human
auaaacaguaaaugugagcagu

SEQ ID NO: 747665 - RNA, 22 nt, Human
aaugccaucagagaaaacucuu

SEQ ID NO: 747666 - RNA, 22 nt, Human
ugugcucuguggaucugagcaa

SEQ ID NO: 747667 - RNA, 22 nt, Human
cacugcuugauugacaugcacg

SEQ ID NO: 747668 - RNA, 22 nt, Human
aggauguguuuugagcugacua

SEQ ID NO: 747669 - RNA, 22 nt, Human
cacaggugcaagaaguugcagu

SEQ ID NO: 747670 - RNA, 22 nt, Human
ucuguaggguaguaguggagau

SEQ ID NO: 747671 - RNA, 22 nt, Human
uugacaguugaggguugucuaa

SEQ ID NO: 747672 - RNA, 22 nt, Human
ggcugcuggggacgugggagag

SEQ ID NO: 747673 - RNA, 22 nt, Human
cucugagaauaugagcucuuug

SEQ ID NO: 747674 - RNA, 22 nt, Human
acaaguuucauuguuuagaacc

SEQ ID NO: 747675 - RNA, 22 nt, Human
uguuuucacaaugaugucagau

SEQ ID NO: 747676 - RNA, 22 nt, Human
ugguuucucagacucuuugcag

SEQ ID NO: 747677 - RNA, 20 nt, Human
uacagaaacaggacuuuugg

SEQ ID NO: 747678 - RNA, 22 nt, Human
agagucagacuaagccauggug

SEQ ID NO: 747679 - RNA, 22 nt, Human
ugguaucagagccaucuguauu

SEQ ID NO: 747680 - RNA, 22 nt, Human
gucuacacugaauuuccacaga

SEQ ID NO: 747681 - RNA, 22 nt, Human
agagguucagagaaggcgaucu

SEQ ID NO: 747682 - RNA, 22 nt, Human
cuguguggacugguugaggccc

SEQ ID NO: 747683 - RNA, 22 nt, Human
gugugggacgggugaguggcca

SEQ ID NO: 747684 - RNA, 21 nt, Human
ugcuuugcucguucccagagu

SEQ ID NO: 747685 - RNA, 22 nt, Human
aggucaaaccacagcucuaggc

SEQ ID NO: 747686 - RNA, 22 nt, Human
aacagcaggcauuucuuagcuc

SEQ ID NO: 747687 - RNA, 22 nt, Human
gggaccuggcaccuuugcucug

SEQ ID NO: 747688 - RNA, 22 nt, Human
ugaaagcuguccacuaggcugu

SEQ ID NO: 747689 - RNA, 23 nt, Human
agcuuuggugaugugacagauaa

SEQ ID NO: 747690 - RNA, 18 nt, Human
gaguuuagguuguagaau

SEQ ID NO: 747691 - RNA, 22 nt, Human
ggaaagauuugucacaugaaug

SEQ ID NO: 747692 - RNA, 22 nt, Human
accugaggacuggaugguagaa

SEQ ID NO: 747693 - RNA, 22 nt, Human
ggagcugaaggggugggcucag

SEQ ID NO: 747694 - RNA, 22 nt, Human
uuaagguugagcucacuuuuau

SEQ ID NO: 747695 - RNA, 22 nt, Human
gcaagcaaguaucuggcaggga

SEQ ID NO: 747696 - RNA, 22 nt, Human
ucaagaaagggcuucaccagga

SEQ ID NO: 747697 - RNA, 22 nt, Human
acaugauauuaaugucuuauuu

SEQ ID NO: 747698 - RNA, 22 nt, Human
ccugggagcuguggaaaggcug

SEQ ID NO: 747699 - RNA, 22 nt, Human
ggggccagagaggacccaggug

SEQ ID NO: 747700 - RNA, 22 nt, Human
acacccaggaauaaggacuggg

SEQ ID NO: 747701 - RNA, 22 nt, Human
ggacugggccagggguuggacu

SEQ ID NO: 747702 - RNA, 22 nt, Human
uacacaucccagacucccagga

SEQ ID NO: 747703 - RNA, 22 nt, Human
auaccauggcaguuuauucacg

SEQ ID NO: 747704 - RNA, 22 nt, Human
caugcuuugggucagaaaugcc

SEQ ID NO: 747705 - RNA, 21 nt, Human
uaaacauaaccuuguauggcu

SEQ ID NO: 747706 - RNA, 22 nt, Human
uggcaaagugacuccuuggggc

SEQ ID NO: 747707 - RNA, 22 nt, Human
agugcaauagcaaagaacaaca

SEQ ID NO: 747708 - RNA, 22 nt, Human
uacauuguucaugcaugagaaa

SEQ ID NO: 747709 - RNA, 22 nt, Human
gcagcugucacuuucacaaugc

SEQ ID NO: 747710 - RNA, 22 nt, Human
uaggaagauaaacauuuguaug

SEQ ID NO: 747711 - RNA, 22 nt, Human
ggaagaaaucugguuaagagau

SEQ ID NO: 747712 - RNA, 22 nt, Human
uuccugugcuuaauucucacug

SEQ ID NO: 747713 - RNA, 22 nt, Human
auuuacacuugguuuacuagag

SEQ ID NO: 747714 - RNA, 19 nt, Human
ggagucugagcccagguau

SEQ ID NO: 747715 - RNA, 22 nt, Human
caacuacaggaaaagucauuca

SEQ ID NO: 747716 - RNA, 19 nt, Human
ccaggacuuugcagacacu

SEQ ID NO: 747717 - RNA, 17 nt, Human
caguggccuauggcuuu

SEQ ID NO: 747718 - RNA, 22 nt, Human
aaagggccuccgccugggcagg

SEQ ID NO: 747719 - RNA, 22 nt, Human
uuucacauuuaggcgugaauug

SEQ ID NO: 747720 - RNA, 22 nt, Human
uaagaggauauuuggccagaag

SEQ ID NO: 747721 - RNA, 22 nt, Human
cugggccagggaggugucugua

SEQ ID NO: 747722 - RNA, 22 nt, Human
uccuccuccucacagucaccug

SEQ ID NO: 747723 - RNA, 22 nt, Human
gaagcagcaaguauaggacagg

SEQ ID NO: 747724 - RNA, 22 nt, Human
ucaaaacaacacucagguguaa

SEQ ID NO: 747725 - RNA, 22 nt, Human
cccaggaggcagagcuugcagu

SEQ ID NO: 747726 - RNA, 22 nt, Human
ugcuuucuguuuuucauauaau

SEQ ID NO: 747727 - RNA, 22 nt, Human
uucuagggaaugggaugaggau

SEQ ID NO: 747728 - RNA, 22 nt, Human
cagaggugcuggagugaguccu

SEQ ID NO: 747729 - RNA, 22 nt, Human
ugcagguaggccugacuuccag

SEQ ID NO: 747730 - RNA, 23 nt, Human
uaaagugcugauggugagggagc

SEQ ID NO: 747731 - RNA, 22 nt, Human
gucuucuuguguugccugucuu

SEQ ID NO: 747732 - RNA, 22 nt, Human
uguucacaagaugucuguggcu

SEQ ID NO: 747733 - RNA, 22 nt, Human
auucagaaagcaagugcugggu

SEQ ID NO: 747734 - RNA, 22 nt, Human
ggguaggcucugcaggcugggu

SEQ ID NO: 747735 - RNA, 22 nt, Human
gucugugugcacagagcuuugg

SEQ ID NO: 747736 - RNA, 22 nt, Human
cguugugagcuugguagacacu

SEQ ID NO: 747737 - RNA, 22 nt, Human
ugggccaggcaugugaucagca

SEQ ID NO: 747738 - RNA, 22 nt, Human
aacacagaagugccaagagcca

SEQ ID NO: 747739 - RNA, 22 nt, Human
ucugcccaguuugugcucaggu

SEQ ID NO: 747740 - RNA, 22 nt, Human
uucauugauuuccuuggaauaa

SEQ ID NO: 747741 - RNA, 22 nt, Human
aauugucuugaaagcaacacuu

SEQ ID NO: 747742 - RNA, 22 nt, Human
gcaagcaguucgcagcccgccu

SEQ ID NO: 747743 - RNA, 22 nt, Human
ugucuauuaauuccacauaaaa

SEQ ID NO: 747744 - RNA, 22 nt, Human
ucauccuggagaagcuccuucg

SEQ ID NO: 747745 - RNA, 23 nt, Human
ugagcaucacaggagaaccaggc

SEQ ID NO: 747746 - RNA, 22 nt, Human
aguggagugaguggcagaagga

SEQ ID NO: 747747 - RNA, 22 nt, Human
gagcaucugugguccaucagaa

SEQ ID NO: 747748 - RNA, 22 nt, Human
aacuuaguuuaggguauugauu

SEQ ID NO: 747749 - RNA, 22 nt, Human
caggugccauagacgggccugg

SEQ ID NO: 747750 - RNA, 22 nt, Human
augugucuggcauggcucuauu

SEQ ID NO: 747751 - RNA, 22 nt, Human
uagggcaauauuucccagaaaa

SEQ ID NO: 747752 - RNA, 22 nt, Human
uccaccacuuccugcagccauu

SEQ ID NO: 747753 - RNA, 22 nt, Human
caggggccuggcugucuaggaa

SEQ ID NO: 747754 - RNA, 23 nt, Human
uguguucucacacagaugcagua

SEQ ID NO: 747755 - RNA, 22 nt, Human
auauacacauguguauacauuu

SEQ ID NO: 747756 - RNA, 22 nt, Human
agcacuguuaugggaugacuua

SEQ ID NO: 747757 - RNA, 22 nt, Human
ccuguggcugccacuuggguga

SEQ ID NO: 747758 - RNA, 22 nt, Human
uguacuuccccaaugacagcac

SEQ ID NO: 747759 - RNA, 22 nt, Human
cagcccagcacuaaguagauuu

SEQ ID NO: 747760 - RNA, 22 nt, Human
auuucucacucacaguccaugu

SEQ ID NO: 747761 - RNA, 19 nt, Human
aguuauugaucuauucagg

SEQ ID NO: 747762 - RNA, 22 nt, Human
gcugaauaagagucuacuuugc

SEQ ID NO: 747763 - RNA, 18 nt, Human
guguaaacagccauugag

SEQ ID NO: 747764 - RNA, 22 nt, Human
uucaguguacagugaagggauu

SEQ ID NO: 747765 - RNA, 22 nt, Human
aggaagggauacauaggauagu

SEQ ID NO: 747766 - RNA, 22 nt, Human
uucaaacaguugcacaacuuau

SEQ ID NO: 747767 - RNA, 22 nt, Human
ugauuuuuagcuauucugaaga

SEQ ID NO: 747768 - RNA, 22 nt, Human
uaaauggcaaccccuagagcug

SEQ ID NO: 747769 - RNA, 22 nt, Human
auucagucaaaaaugauggaga

SEQ ID NO: 747770 - RNA, 22 nt, Human
guccucaguaagagggccucug

SEQ ID NO: 747771 - RNA, 16 nt, Human
ugggugggaggagcgg

SEQ ID NO: 747772 - RNA, 22 nt, Human
uugggggguugaggaguagaua

SEQ ID NO: 747773 - RNA, 22 nt, Human
gccuggaaucaugcagggguua

SEQ ID NO: 747774 - RNA, 22 nt, Human
cacccacauggaaauucacagu

SEQ ID NO: 747775 - RNA, 22 nt, Human
ccucagacucagugcguuguga

SEQ ID NO: 747776 - RNA, 22 nt, Human
ggggugagaucaaggaagcccu

SEQ ID NO: 747777 - RNA, 22 nt, Human
aacaaugucucauccuaugugg

SEQ ID NO: 747778 - RNA, 22 nt, Human
ucugucucucaagggccguccu

SEQ ID NO: 747779 - RNA, 22 nt, Human
aaaaggcuaauccagagcaacu

SEQ ID NO: 747780 - RNA, 22 nt, Human
caguguucccugaacauauguu

SEQ ID NO: 747781 - RNA, 22 nt, Human
cucagagggaggacugggcugg

SEQ ID NO: 747782 - RNA, 22 nt, Human
ucuccuggcucaccaggcugga

SEQ ID NO: 747783 - RNA, 22 nt, Human
auucagaaagauaugccugguu

SEQ ID NO: 747784 - RNA, 22 nt, Human
gagucccaggauaugugcuguu

SEQ ID NO: 747785 - RNA, 21 nt, Human
ucacaucuauguuaagcaaac

SEQ ID NO: 747786 - RNA, 22 nt, Human
aguauuucuaguugguucuacu

SEQ ID NO: 747787 - RNA, 22 nt, Human
ugagggagcugaccuuucugug

SEQ ID NO: 747788 - RNA, 22 nt, Human
gggcccugccccguggcucuga

SEQ ID NO: 747789 - RNA, 22 nt, Human
gcccugagaggcaaugacucuu

SEQ ID NO: 747790 - RNA, 22 nt, Human
cagcaccuuccuuaacuccagg

SEQ ID NO: 747791 - RNA, 22 nt, Human
aaaaaauuccauucugugccuu

SEQ ID NO: 747792 - RNA, 17 nt, Human
gugaauggcauagucgg

SEQ ID NO: 747793 - RNA, 21 nt, Human
uagcagagaguuaacuucucc

SEQ ID NO: 747794 - RNA, 22 nt, Human
ggcucaccauuuucacucucug

SEQ ID NO: 747795 - RNA, 22 nt, Human
ugggagaagagaaauuacugcc

SEQ ID NO: 747796 - RNA, 22 nt, Human
aaaggaauauucaaaacaguca

SEQ ID NO: 747797 - RNA, 22 nt, Human
gggcccuggcuuuccuguucuu

SEQ ID NO: 747798 - RNA, 21 nt, Human
ggccagcagcguccacugugg

SEQ ID NO: 747799 - RNA, 22 nt, Human
uagaauaugugguaggaucugg

SEQ ID NO: 747800 - RNA, 22 nt, Human
gggucagaguucaggucgaggg

SEQ ID NO: 747801 - RNA, 22 nt, Human
acaaagauguuuaaagcauuua

SEQ ID NO: 747802 - RNA, 22 nt, Human
ucuuuacaguccucugucaauc

SEQ ID NO: 747803 - RNA, 22 nt, Human
gaacauuuggauuuguaaauuu

SEQ ID NO: 747804 - RNA, 18 nt, Human
aaguuccacaagagaucu

SEQ ID NO: 747805 - RNA, 22 nt, Human
caauacacuaaacuucucugaa

SEQ ID NO: 747806 - RNA, 22 nt, Human
caggccaacugcauggugacca

SEQ ID NO: 747807 - RNA, 22 nt, Human
ucucccagaaguccucaguaca

SEQ ID NO: 747808 - RNA, 22 nt, Human
ucacacagugguaaaacccuga

SEQ ID NO: 747809 - RNA, 22 nt, Human
acccagucuggagugcagugac

SEQ ID NO: 747810 - RNA, 22 nt, Human
cuguggccccacccucuuggcc

SEQ ID NO: 747811 - RNA, 22 nt, Human
cuguuguaucauuuguucacau

SEQ ID NO: 747812 - RNA, 22 nt, Human
gaaacuguauguaguuuuuggg

SEQ ID NO: 747813 - RNA, 22 nt, Human
ucaggcuacacucuuuucaugg

SEQ ID NO: 747814 - RNA, 22 nt, Human
gccuggcaggccuguuggggcu

SEQ ID NO: 747815 - RNA, 21 nt, Human
agacugccauuguucuuuugg

SEQ ID NO: 747816 - RNA, 22 nt, Human
aggcaaaugauccugcuccuug

SEQ ID NO: 747817 - RNA, 20 nt, Human
cagcccuccaguggaggcag

SEQ ID NO: 747818 - RNA, 22 nt, Human
ugaguagcggcuauguguaacu

SEQ ID NO: 747819 - RNA, 22 nt, Human
ggucucaucuuucagcgucgag

SEQ ID NO: 747820 - RNA, 22 nt, Human
gggcuccaacuacaucagccuu

SEQ ID NO: 747821 - RNA, 22 nt, Human
agugucuguguuuucuauugcu

SEQ ID NO: 747822 - RNA, 18 nt, Human
ugguggugacagggucau

SEQ ID NO: 747823 - RNA, 22 nt, Human
uuuggcauagcucuuuguuccu

SEQ ID NO: 747824 - RNA, 22 nt, Human
uccaguggcacuggagacuaga

SEQ ID NO: 747825 - RNA, 22 nt, Human
ucuggcuuucauuuguuuaaag

SEQ ID NO: 747826 - RNA, 22 nt, Human
uaacagaaaggggacagaaaua

SEQ ID NO: 747827 - RNA, 22 nt, Human
gagcugggcacacgccacuuga

SEQ ID NO: 747828 - RNA, 22 nt, Human
aacaaagucguugccuagaaga

SEQ ID NO: 747829 - RNA, 22 nt, Human
uauuagguaaaggacuugcagg

SEQ ID NO: 747830 - RNA, 22 nt, Human
auuagcuauaugcuaugugcca

SEQ ID NO: 747831 - RNA, 22 nt, Human
gugcuucaaguucuuaauguuu

SEQ ID NO: 747832 - RNA, 22 nt, Human
agaaaaugugaacuugugaauu

SEQ ID NO: 747833 - RNA, 22 nt, Human
uuacagaagagaaagaauucag

SEQ ID NO: 747834 - RNA, 22 nt, Human
gcacagggaggcuggccuggcc

SEQ ID NO: 747835 - RNA, 22 nt, Human
agauacauggaacgucaaaccu

SEQ ID NO: 747836 - RNA, 19 nt, Human
agcaguuauaugcauggga

SEQ ID NO: 747837 - RNA, 22 nt, Human
gugggcagccuguccggagacc

SEQ ID NO: 747838 - RNA, 22 nt, Human
caguggcagagaacagagaccu

SEQ ID NO: 747839 - RNA, 22 nt, Human
uauguuaagugggauaaucaaa

SEQ ID NO: 747840 - RNA, 22 nt, Human
guguuuccucuagaagccaugg

SEQ ID NO: 747841 - RNA, 22 nt, Human
aaugcaaacagcccagaaucca

SEQ ID NO: 747842 - RNA, 22 nt, Human
aggcuucacucgacaugccaau

SEQ ID NO: 747843 - RNA, 22 nt, Human
acauggaagauaaaaauacuca

SEQ ID NO: 747844 - RNA, 22 nt, Human
ggcugucucugugacugccacc

SEQ ID NO: 747845 - RNA, 22 nt, Human
uggcuuuaggguuccuucuacc

SEQ ID NO: 747846 - RNA, 22 nt, Human
auuuugaaucaccuuggaagaa

SEQ ID NO: 747847 - RNA, 22 nt, Human
ugggcugcacugcucuuuaucg

SEQ ID NO: 747848 - RNA, 22 nt, Human
guauuauucucagcuuugggau

SEQ ID NO: 747849 - RNA, 22 nt, Human
uguuaauauacuaaaauccacu

SEQ ID NO: 747850 - RNA, 22 nt, Human
gagcccugugauucuguugugu

SEQ ID NO: 747851 - RNA, 22 nt, Human
ccuggcucuagaggccacuccu

SEQ ID NO: 747852 - RNA, 22 nt, Human
cacaggagaacccacagauucu

SEQ ID NO: 747853 - RNA, 22 nt, Human
acaugauauaugggaaaugcuu

SEQ ID NO: 747854 - RNA, 22 nt, Human
gguccguuuuugaagacagugg

SEQ ID NO: 747855 - RNA, 22 nt, Human
agggcuggagccacagcuggga

SEQ ID NO: 747856 - RNA, 22 nt, Human
cacagcuuugcuuuccuuaaua

SEQ ID NO: 747857 - RNA, 22 nt, Human
ugcagaguggauucuguauacc

SEQ ID NO: 747858 - RNA, 22 nt, Human
cccugagcagucugcagagagc

SEQ ID NO: 747859 - RNA, 22 nt, Human
gcugugauugucagucuucaau

SEQ ID NO: 747860 - RNA, 22 nt, Human
gaagcugggucgcugggauccu

SEQ ID NO: 747861 - RNA, 22 nt, Human
ugagccaggguuuccggcugcu

SEQ ID NO: 747862 - RNA, 19 nt, Human
caguccuuuccgcuuucuc

SEQ ID NO: 747863 - RNA, 22 nt, Human
cgagugucugcuaugggcugag

SEQ ID NO: 747864 - RNA, 22 nt, Human
cauggaacaaggaagauguuug

SEQ ID NO: 747865 - RNA, 22 nt, Human
cuguggcuucugggucaguuca

SEQ ID NO: 747866 - RNA, 22 nt, Human
aaauacaguggcagcagauaau

SEQ ID NO: 747867 - RNA, 22 nt, Human
ucacaaaugaccaugguuacua

SEQ ID NO: 747868 - RNA, 22 nt, Human
uggcacagacauuuaauagccu

SEQ ID NO: 747869 - RNA, 22 nt, Human
uggauuauuguaagacaaagua

SEQ ID NO: 747870 - RNA, 22 nt, Human
caaacauuccgcuucucccagg

SEQ ID NO: 747871 - RNA, 22 nt, Human
auaguacacauccuacaauguu

SEQ ID NO: 747872 - RNA, 22 nt, Human
cagaggcugacccugcuguugu

SEQ ID NO: 747873 - RNA, 19 nt, Human
ucagcagcacugugauuuc

SEQ ID NO: 747874 - RNA, 22 nt, Human
guuuguguaacaugaugaugau

SEQ ID NO: 747875 - RNA, 22 nt, Human
ugagaaggcucaggcuuagaga

SEQ ID NO: 747876 - RNA, 22 nt, Human
aguguuuuuggguagggugagu

SEQ ID NO: 747877 - RNA, 21 nt, Human
gggguuggcaagagcagagac

SEQ ID NO: 747878 - RNA, 22 nt, Human
gggagcugccuuagaccggagg

SEQ ID NO: 747879 - RNA, 22 nt, Human
uuucaucugugcugccaagacu

SEQ ID NO: 747880 - RNA, 22 nt, Human
ucacuugacuccaguuucuucu

SEQ ID NO: 747881 - RNA, 22 nt, Human
guaauccaaaguaacauuaaac

SEQ ID NO: 747882 - RNA, 22 nt, Human
augggguggaguccgggcagcg

SEQ ID NO: 747883 - RNA, 22 nt, Human
aaaugcauguagaauaauagag

SEQ ID NO: 747884 - RNA, 22 nt, Human
uaacaucuuaacuggauacuuc

SEQ ID NO: 747885 - RNA, 22 nt, Human
uaaagcaaggcaaauuguuggu

SEQ ID NO: 747886 - RNA, 22 nt, Human
uuuguaaaagcccaagcuguag

SEQ ID NO: 747887 - RNA, 22 nt, Human
ucucaggcugacauugggacuc

SEQ ID NO: 747888 - RNA, 22 nt, Human
uuagaaucuaacauucuuaucu

SEQ ID NO: 747889 - RNA, 21 nt, Human
uucucagaucgaguagugaga

SEQ ID NO: 747890 - RNA, 21 nt, Human
aacauuucugggagaacucac

SEQ ID NO: 747891 - RNA, 22 nt, Human
uugcuuuacuuugccauucguu

SEQ ID NO: 747892 - RNA, 22 nt, Human
gaggcugugugucccucuggac

SEQ ID NO: 747893 - RNA, 22 nt, Human
agcuguggaaaucaggcaauga

SEQ ID NO: 747894 - RNA, 22 nt, Human
aagacagagacucugcaacagg

SEQ ID NO: 747895 - RNA, 22 nt, Human
agcaguccaacugagguggcau

SEQ ID NO: 747896 - RNA, 22 nt, Human
augguacaaaauguauaaaguc

SEQ ID NO: 747897 - RNA, 22 nt, Human
ggccaggaggcaggggcucaau

SEQ ID NO: 747898 - RNA, 22 nt, Human
ggauaggaauugagaugcuauu

SEQ ID NO: 747899 - RNA, 22 nt, Human
ggaagacagaagccuacagcuu

SEQ ID NO: 747900 - RNA, 22 nt, Human
cugcugacuuacacuguuuauu

SEQ ID NO: 747901 - RNA, 22 nt, Human
uaaauuuacccaaggaacaugu

SEQ ID NO: 747902 - RNA, 22 nt, Human
gugggggcuggcucguccugug

SEQ ID NO: 747903 - RNA, 22 nt, Human
uauguauucugaguacaaguuc

SEQ ID NO: 747904 - RNA, 22 nt, Human
ucagcaggggccguugggugga

SEQ ID NO: 747905 - RNA, 22 nt, Human
aagucucugacucacacaaugu

SEQ ID NO: 747906 - RNA, 22 nt, Human
ggagcuaguaguuucaugaguu

SEQ ID NO: 747907 - RNA, 19 nt, Human
ucugucagugcaucaccuc

SEQ ID NO: 747908 - RNA, 19 nt, Human
ggccuuucaccuggaugcu

SEQ ID NO: 747909 - RNA, 22 nt, Human
acugaaaaagacaucuugguaa

SEQ ID NO: 747910 - RNA, 22 nt, Human
ucccagagucagagguggggcc

SEQ ID NO: 747911 - RNA, 22 nt, Human
uucaacauguucuacauaaggg

SEQ ID NO: 747912 - RNA, 22 nt, Human
ccuggcuucugggucugugaga

SEQ ID NO: 747913 - RNA, 21 nt, Human
guagggacagagaguugguga

SEQ ID NO: 747914 - RNA, 22 nt, Human
uuucagacuccaaauucauaag

SEQ ID NO: 747915 - RNA, 22 nt, Human
acagaauauuuggcaugcgucu

SEQ ID NO: 747916 - RNA, 22 nt, Human
gagcucugcuuggguucuuagg

SEQ ID NO: 747917 - RNA, 22 nt, Human
aacuugcuucaacuuauuucac

SEQ ID NO: 747918 - RNA, 22 nt, Human
cagauucuucauugccccauuc

SEQ ID NO: 747919 - RNA, 22 nt, Human
ucagggacaggaugggcauuuc

SEQ ID NO: 747920 - RNA, 21 nt, Human
ugaugaggucauagcacccuc

SEQ ID NO: 747921 - RNA, 22 nt, Human
ccugagggaggguauaggcugu

SEQ ID NO: 747922 - RNA, 22 nt, Human
augcugcagcugcaggaucaga

SEQ ID NO: 747923 - RNA, 22 nt, Human
ucugucacccaggcuggagugc

SEQ ID NO: 747924 - RNA, 22 nt, Human
gggugggacucuuuggccugag

SEQ ID NO: 747925 - RNA, 22 nt, Human
gcuucugcuguugaagccacca

SEQ ID NO: 747926 - RNA, 22 nt, Human
aagcugcccaagacugaagcau

SEQ ID NO: 747927 - RNA, 20 nt, Human
uuggaggugcagugcaugca

SEQ ID NO: 747928 - RNA, 22 nt, Human
gacugcagugaaggcacauggg

SEQ ID NO: 747929 - RNA, 22 nt, Human
cucacaggagaaagucaugguc

SEQ ID NO: 747930 - RNA, 22 nt, Human
gaaggccacaaaaaaugucaua

SEQ ID NO: 747931 - RNA, 22 nt, Human
ccagcuccagcauagccaccau

SEQ ID NO: 747932 - RNA, 22 nt, Human
aacaucauuauguccauuaaug

SEQ ID NO: 747933 - RNA, 22 nt, Human
gcaccacaucaaugaggggagc

SEQ ID NO: 747934 - RNA, 22 nt, Human
uucagggucuagaguaucuacc

SEQ ID NO: 747935 - RNA, 22 nt, Human
cugagaauaaagccagcaggag

SEQ ID NO: 747936 - RNA, 22 nt, Human
ugggauaguggccaggaccccc

SEQ ID NO: 747937 - RNA, 21 nt, Human
cucugcccagggccuccugcc

SEQ ID NO: 747938 - RNA, 20 nt, Human
agccaggguucuggaugcac

SEQ ID NO: 747939 - RNA, 22 nt, Human
ugagcuagggcuggugaggagc

SEQ ID NO: 747940 - RNA, 22 nt, Human
ggccauggggacagagggugaa

SEQ ID NO: 747941 - RNA, 17 nt, Human
agcuuggagcagcauga

SEQ ID NO: 747942 - RNA, 22 nt, Human
ucugcucuguggcuucagcuaa

SEQ ID NO: 747943 - RNA, 17 nt, Human
ugcugcuaauuaaaaua

SEQ ID NO: 747944 - RNA, 22 nt, Human
cagagggcacaugguuuccuca

SEQ ID NO: 747945 - RNA, 22 nt, Human
aaggggcaugcuuuugccagga

SEQ ID NO: 747946 - RNA, 22 nt, Human
ugugccugugacagcgaccugg

SEQ ID NO: 747947 - RNA, 22 nt, Human
ccauuaaagcaccacuguaaua

SEQ ID NO: 747948 - RNA, 22 nt, Human
ugggacaggaggccucuggaga

SEQ ID NO: 747949 - RNA, 19 nt, Human
uuuuaagugcccuuucuuc

SEQ ID NO: 747950 - RNA, 22 nt, Human
ucaugcagagccagucaggaua

SEQ ID NO: 747951 - RNA, 22 nt, Human
gccacaggcuuaggagggaggu

SEQ ID NO: 747952 - RNA, 22 nt, Human
ccaaauagucuuucauugaauu

SEQ ID NO: 747953 - RNA, 22 nt, Human
aaacuaagacuaaugaagaacu

SEQ ID NO: 747954 - RNA, 21 nt, Human
agccagauccauuuugcaugg

SEQ ID NO: 747955 - RNA, 22 nt, Human
gagagcccugcuccuaucccag

SEQ ID NO: 747956 - RNA, 21 nt, Human
gcagaugggagucaucaggcu

SEQ ID NO: 747957 - RNA, 23 nt, Human
uauuuuccaaaugaugacuacau

SEQ ID NO: 747958 - RNA, 22 nt, Human
gccagcagccacagaagucacu

SEQ ID NO: 747959 - RNA, 23 nt, Human
ugcaaaauuugcagaguucgaug

SEQ ID NO: 747960 - RNA, 22 nt, Human
uuauaaagugagaagugcuaug

SEQ ID NO: 747961 - RNA, 22 nt, Human
cagcuuguuaccgagggagggu

SEQ ID NO: 747962 - RNA, 22 nt, Human
acucugcucuuauaguguuaua

SEQ ID NO: 747963 - RNA, 22 nt, Human
gcagagcuaucuucuggauuug

SEQ ID NO: 747964 - RNA, 23 nt, Human
uaggaagacagcaaaagaaugga

SEQ ID NO: 747965 - RNA, 22 nt, Human
aaggcauguguccucagagaga

SEQ ID NO: 747966 - RNA, 22 nt, Human
uccuagaaggaucauucuagug

SEQ ID NO: 747967 - RNA, 18 nt, Human
aauuuccauaugaauugc

SEQ ID NO: 747968 - RNA, 22 nt, Human
aggaaugacagauguccgcacc

SEQ ID NO: 747969 - RNA, 22 nt, Human
acacauugcagacaucucauua

SEQ ID NO: 747970 - RNA, 22 nt, Human
aagcacacagcaaaggggagcu

SEQ ID NO: 747971 - RNA, 18 nt, Human
augcuucugauagaagca

SEQ ID NO: 747972 - RNA, 22 nt, Human
uucucuuccagccgggcuugca

SEQ ID NO: 747973 - RNA, 22 nt, Human
agagagaggcagcagugcucac

SEQ ID NO: 747974 - RNA, 22 nt, Human
gaaguuaucaaagauguauucu

SEQ ID NO: 747975 - RNA, 19 nt, Human
ugucuuuggucugaguuuc

SEQ ID NO: 747976 - RNA, 22 nt, Human
ccacagugaguucuguacucug

SEQ ID NO: 747977 - RNA, 18 nt, Human
ucaugagguagaggcugg

SEQ ID NO: 747978 - RNA, 22 nt, Human
gguguccuugcagaaggcggcg

SEQ ID NO: 747979 - RNA, 22 nt, Human
ugagcaccaucuguuugugugc

SEQ ID NO: 747980 - RNA, 21 nt, Human
cauuuacaugacagauugguu

SEQ ID NO: 747981 - RNA, 22 nt, Human
uuggcaguagugguaguacauu

SEQ ID NO: 747982 - RNA, 22 nt, Human
aucauaauugcuccagugauau

SEQ ID NO: 747983 - RNA, 21 nt, Human
agcagcagaucuggugagggc

SEQ ID NO: 747984 - RNA, 22 nt, Human
agcagaugaaucccagauaaag

SEQ ID NO: 747985 - RNA, 15 nt, Human
agcugccugggugcu

SEQ ID NO: 747986 - RNA, 22 nt, Human
gggaguccaaauugguacaaua

SEQ ID NO: 747987 - RNA, 22 nt, Human
ucuuuggaucccaacuggcugg

SEQ ID NO: 747988 - RNA, 22 nt, Human
uccucccacauaggacaauggg

SEQ ID NO: 747989 - RNA, 22 nt, Human
ggccagcucagucuccaucagg

SEQ ID NO: 747990 - RNA, 22 nt, Human
acugcccuuguccuggcacacc

SEQ ID NO: 747991 - RNA, 22 nt, Human
cucagagaguuaagugaauuac

SEQ ID NO: 747992 - RNA, 22 nt, Human
agccagcaggugagugcagccu

SEQ ID NO: 747993 - RNA, 21 nt, Human
agaagccaugugguggagaac

SEQ ID NO: 747994 - RNA, 22 nt, Human
agcaaggaaaguaggcacggaa

SEQ ID NO: 747995 - RNA, 22 nt, Human
aagcagagaccggcuaauggag

SEQ ID NO: 747996 - RNA, 22 nt, Human
aauucuacauugguucacauuu

SEQ ID NO: 747997 - RNA, 22 nt, Human
cuuguauuaagcuuagagaggc

SEQ ID NO: 747998 - RNA, 17 nt, Human
gcucugccucucccacc

SEQ ID NO: 747999 - RNA, 22 nt, Human
uagaaaugucgucuccacauuu

SEQ ID NO: 748000 - RNA, 22 nt, Human
aaaaguaauugcaguuuugcca

SEQ ID NO: 748001 - RNA, 22 nt, Human
aagccagguguugugguaagag

SEQ ID NO: 748002 - RNA, 22 nt, Human
aauacuuuccuauauaaggugc

SEQ ID NO: 748003 - RNA, 19 nt, Human
ucuucugacuucaagaaac

SEQ ID NO: 748004 - RNA, 22 nt, Human
ugccuacauuccuugcuuaugg

SEQ ID NO: 748005 - RNA, 22 nt, Human
cagcuucuguccuagaaacugg

SEQ ID NO: 748006 - RNA, 22 nt, Human
cugggcacugcaggguguugag

SEQ ID NO: 748007 - RNA, 22 nt, Human
gugguaaucggauucuuaccgg

SEQ ID NO: 748008 - RNA, 22 nt, Human
aaccuuccugaggaaagucuaa

SEQ ID NO: 748009 - RNA, 18 nt, Human
ugacagaaccuggagccu

SEQ ID NO: 748010 - RNA, 17 nt, Human
aucucucuaaggcaggc

SEQ ID NO: 748011 - RNA, 22 nt, Human
gaggcaggcccugaaugaguca

SEQ ID NO: 748012 - RNA, 22 nt, Human
gagcuaagcuauguuaugcagc

SEQ ID NO: 748013 - RNA, 22 nt, Human
gguguuaacaaagauugaaaug

SEQ ID NO: 748014 - RNA, 22 nt, Human
ucccucuggucuggacgccaua

SEQ ID NO: 748015 - RNA, 22 nt, Human
gcugaggcuuagcuaaaaauuu

SEQ ID NO: 748016 - RNA, 22 nt, Human
uuccagaggggagguggcagcc

SEQ ID NO: 748017 - RNA, 22 nt, Human
cuauugaggacauaaggacucu

SEQ ID NO: 748018 - RNA, 22 nt, Human
cacuguggagcaaauuuauuua

SEQ ID NO: 748019 - RNA, 22 nt, Human
aggaauuugcuggaacacagau

SEQ ID NO: 748020 - RNA, 22 nt, Human
ccagagcaauucucacagaacu

SEQ ID NO: 748021 - RNA, 22 nt, Human
acagucucuguugcugcuguuu

SEQ ID NO: 748022 - RNA, 22 nt, Human
cuguggcucuccaauggaggga

SEQ ID NO: 748023 - RNA, 22 nt, Human
uagagcugcuggacuguaacag

SEQ ID NO: 748024 - RNA, 22 nt, Human
agggacugagcuaggaucuagu

SEQ ID NO: 748025 - RNA, 22 nt, Human
uaagcauaguaccguagcagcu

SEQ ID NO: 748026 - RNA, 22 nt, Human
guuugaaaaaagcaguauguaa

SEQ ID NO: 748027 - RNA, 22 nt, Human
uagggcaggugaagaaaagcua

SEQ ID NO: 748028 - RNA, 19 nt, Human
ugcaaauucuaaaaacuga

SEQ ID NO: 748029 - RNA, 22 nt, Human
aaagcuguagaaucaucuuaau

SEQ ID NO: 748030 - RNA, 22 nt, Human
aucagugcauccugccacaaag

SEQ ID NO: 748031 - RNA, 22 nt, Human
acacauguauggcacuuacauu

SEQ ID NO: 748032 - RNA, 22 nt, Human
gccuggcugggcugaaugcuua

SEQ ID NO: 748033 - RNA, 22 nt, Human
uuggaaaugauuucuauuauua

SEQ ID NO: 748034 - RNA, 22 nt, Human
auuuggaggccucuccugcuug

SEQ ID NO: 748035 - RNA, 22 nt, Human
ugugcgugguucccggggccau

SEQ ID NO: 748036 - RNA, 20 nt, Human
auugugaauacugcauaugu

SEQ ID NO: 748037 - RNA, 22 nt, Human
ccccacucucggccagauaggc

SEQ ID NO: 748038 - RNA, 19 nt, Human
ggcugucuggcguguggau

SEQ ID NO: 748039 - RNA, 22 nt, Human
cagcucaguuucaauaccaggu

SEQ ID NO: 748040 - RNA, 22 nt, Human
gugcacagaaacauacaaugug

SEQ ID NO: 748041 - RNA, 22 nt, Human
agcagaaccugcagaccugucu

SEQ ID NO: 748042 - RNA, 22 nt, Human
gcaggcugagaguccaagaagg

SEQ ID NO: 748043 - RNA, 22 nt, Human
auuauugucaucuuaaucuuaa

SEQ ID NO: 748044 - RNA, 22 nt, Human
cugggccugugggcacacggac

SEQ ID NO: 748045 - RNA, 22 nt, Human
agugcaggagccuggccagagc

SEQ ID NO: 748046 - RNA, 22 nt, Human
agugcuuuguaguuucauugug

SEQ ID NO: 748047 - RNA, 21 nt, Human
cagaggcaggcucugugugug

SEQ ID NO: 748048 - RNA, 22 nt, Human
aagcuuuuuggauuugcuucag

SEQ ID NO: 748049 - RNA, 22 nt, Human
cugcuugccuggacagcguuag

SEQ ID NO: 748050 - RNA, 22 nt, Human
agaguguaccaaauauccuaca

SEQ ID NO: 748051 - RNA, 23 nt, Human
aagcaugguucacaguuaguacu

SEQ ID NO: 748052 - RNA, 22 nt, Human
uguuuuuaucucuguguacaac

SEQ ID NO: 748053 - RNA, 22 nt, Human
cuggcccaggagagcaggcauu

SEQ ID NO: 748054 - RNA, 22 nt, Human
aaaccucuuuuaaggaguuguu

SEQ ID NO: 748055 - RNA, 22 nt, Human
cccugaaauccugugcucugug

SEQ ID NO: 748056 - RNA, 22 nt, Human
aucaguuuggugcuuucaguga

SEQ ID NO: 748057 - RNA, 22 nt, Human
ccugucuguucugacuggucag

SEQ ID NO: 748058 - RNA, 22 nt, Human
auccccagggagugagcugucu

SEQ ID NO: 748059 - RNA, 22 nt, Human
ugagcacaaguuugcaugugug

SEQ ID NO: 748060 - RNA, 22 nt, Human
agcugcuccaauuuuuaccauu

SEQ ID NO: 748061 - RNA, 22 nt, Human
cuaauaacaugaacuacuuucu

SEQ ID NO: 748062 - RNA, 22 nt, Human
gcagguggaucaccacgucagg

SEQ ID NO: 748063 - RNA, 22 nt, Human
ccacugggggcugcucccaggu

SEQ ID NO: 748064 - RNA, 20 nt, Human
gugcugagggcugggcaaug

SEQ ID NO: 748065 - RNA, 22 nt, Human
ugaggggagcuagcaugccuug

SEQ ID NO: 748066 - RNA, 22 nt, Human
auuuaccauccugugaauggcc

SEQ ID NO: 748067 - RNA, 22 nt, Human
ucauggggcucuucaaguggag

SEQ ID NO: 748068 - RNA, 21 nt, Human
cucaaagaccaaaaguguaga

SEQ ID NO: 748069 - RNA, 22 nt, Human
gcuguguuuuauguuagguuaa

SEQ ID NO: 748070 - RNA, 22 nt, Human
caggaacaugucuccaauuaga

SEQ ID NO: 748071 - RNA, 22 nt, Human
ggcugugauugguggaugugaa

SEQ ID NO: 748072 - RNA, 22 nt, Human
ccaggcaggcgauggugcagug

SEQ ID NO: 748073 - RNA, 21 nt, Human
gcaaguacuaucaucauuauc

SEQ ID NO: 748074 - RNA, 22 nt, Human
guuucaaaagucaggcuauucu

SEQ ID NO: 748075 - RNA, 22 nt, Human
uuucugcuguguaaaaugaggg

SEQ ID NO: 748076 - RNA, 22 nt, Human
gauucacagaacuuagucaagc

SEQ ID NO: 748077 - RNA, 22 nt, Human
aaagugauuuaaguaccucagg

SEQ ID NO: 748078 - RNA, 21 nt, Human
uuuguucauagcucacucuuu

SEQ ID NO: 748079 - RNA, 22 nt, Human
aucaucuucgaaaaaagucaga

SEQ ID NO: 748080 - RNA, 22 nt, Human
acuuugcagggcuugauaucca

SEQ ID NO: 748081 - RNA, 22 nt, Human
ucagcugccccaguggccccag

SEQ ID NO: 748082 - RNA, 22 nt, Human
uuaggaaaagaagacauuucua

SEQ ID NO: 748083 - RNA, 22 nt, Human
ucauucaugaggugcuagugcu

SEQ ID NO: 748084 - RNA, 22 nt, Human
gagagggugccuggaagccagg

SEQ ID NO: 748085 - RNA, 23 nt, Human
ccucuaauaaacuugaccuugug

SEQ ID NO: 748086 - RNA, 22 nt, Human
uucauucagguguauuuauggg

SEQ ID NO: 748087 - RNA, 22 nt, Human
gugcguccugggggcugggucg

SEQ ID NO: 748088 - RNA, 22 nt, Human
uuugcagucaaauuugcuaaau

SEQ ID NO: 748089 - RNA, 23 nt, Human
uuucaacuccugccauuauuucu

SEQ ID NO: 748090 - RNA, 22 nt, Human
gcaggucuugaaggugugauuu

SEQ ID NO: 748091 - RNA, 22 nt, Human
cuuccuugugguccuucucauu

SEQ ID NO: 748092 - RNA, 22 nt, Human
uuggaaggggcagaguggcugc

SEQ ID NO: 748093 - RNA, 20 nt, Human
gcugccuuguccugcuuggu

SEQ ID NO: 748094 - RNA, 21 nt, Human
agcagaacagucgagcacugc

SEQ ID NO: 748095 - RNA, 22 nt, Human
ugggccuguggcuuggcucuag

SEQ ID NO: 748096 - RNA, 22 nt, Human
gacaauguaaaucaggauagca

SEQ ID NO: 748097 - RNA, 22 nt, Human
guggcuaguuggcagagaacag

SEQ ID NO: 748098 - RNA, 22 nt, Human
uaacuuugauaagaaucaggga

SEQ ID NO: 748099 - RNA, 22 nt, Human
cugacccuuuaggguauguuua

SEQ ID NO: 748100 - RNA, 22 nt, Human
auuuguaucaaucucaauauau

SEQ ID NO: 748101 - RNA, 22 nt, Human
ugaguccugcucugggcagggu

SEQ ID NO: 748102 - RNA, 22 nt, Human
cuaaacauguuggugcuuuaaa

SEQ ID NO: 748103 - RNA, 22 nt, Human
uuuauugucuaugaacugcuug

SEQ ID NO: 748104 - RNA, 22 nt, Human
ugggcaggauaauaucucaugu

SEQ ID NO: 748105 - RNA, 22 nt, Human
gggugcagugguucacgccugu

SEQ ID NO: 748106 - RNA, 22 nt, Human
cagccagaaccuaggaugagcu

SEQ ID NO: 748107 - RNA, 22 nt, Human
ucuggcccagccccugauccca

SEQ ID NO: 748108 - RNA, 22 nt, Human
agagccagaccauugccgugca

SEQ ID NO: 748109 - RNA, 23 nt, Human
cugcuguuuucuguaccugaagc

SEQ ID NO: 748110 - RNA, 22 nt, Human
gggaagaagacauggugaaggc

SEQ ID NO: 748111 - RNA, 22 nt, Human
ggugggagagcucugucuccag

SEQ ID NO: 748112 - RNA, 22 nt, Human
aagauaugaggucaccugcugg

SEQ ID NO: 748113 - RNA, 22 nt, Human
ccuuacaccuaaaaugagaguu

SEQ ID NO: 748114 - RNA, 22 nt, Human
aagccaggaccaaacucauccu

SEQ ID NO: 748115 - RNA, 22 nt, Human
ugugugugaguccuggcuuucc

SEQ ID NO: 748116 - RNA, 22 nt, Human
ucuucuuuuauuucaagggugu

SEQ ID NO: 748117 - RNA, 22 nt, Human
ucauuguugcguuaaugucuuc

SEQ ID NO: 748118 - RNA, 22 nt, Human
guguuuaaugcagaugugggug

SEQ ID NO: 748119 - RNA, 22 nt, Human
ggcugagcuuauauaugugcug

SEQ ID NO: 748120 - RNA, 22 nt, Human
cucugagcuccuggaagcgugc

SEQ ID NO: 748121 - RNA, 19 nt, Human
ucucucaauugcuucaauu

SEQ ID NO: 748122 - RNA, 22 nt, Human
cuguggcuuuuccggggagccu

SEQ ID NO: 748123 - RNA, 22 nt, Human
gagcagcucugugccuggagac

SEQ ID NO: 748124 - RNA, 22 nt, Human
cacugaacuggucuuaggaggu

SEQ ID NO: 748125 - RNA, 22 nt, Human
guaauuaggaauaaaaugggaa

SEQ ID NO: 748126 - RNA, 22 nt, Human
gagauuggauuuaauggccaaa

SEQ ID NO: 748127 - RNA, 22 nt, Human
agaggggaguccuaaucugauu

SEQ ID NO: 748128 - RNA, 22 nt, Human
ugacuugucaaagaaaugugug

SEQ ID NO: 748129 - RNA, 17 nt, Human
gagcucuguggcacaag

SEQ ID NO: 748130 - RNA, 23 nt, Human
acuuccaguugcuucagcauaug

SEQ ID NO: 748131 - RNA, 22 nt, Human
gcugggccagccagacauguga

SEQ ID NO: 748132 - RNA, 22 nt, Human
uaguuacagcaggcaggauaua

SEQ ID NO: 748133 - RNA, 22 nt, Human
uuguacagaaaaaauucuuggu

SEQ ID NO: 748134 - RNA, 22 nt, Human
agggcugacagugaggagucaa

SEQ ID NO: 748135 - RNA, 22 nt, Human
ggggagugacgcagggccauag

SEQ ID NO: 748136 - RNA, 22 nt, Human
aaguguuuacuuaaagucaugg

SEQ ID NO: 748137 - RNA, 22 nt, Human
gggcagauggggcacaggcuga

SEQ ID NO: 748138 - RNA, 22 nt, Human
guccucuggccuuucccaggac

SEQ ID NO: 748139 - RNA, 22 nt, Human
uaaggcagccgcucagagaggu

SEQ ID NO: 748140 - RNA, 16 nt, Human
uuguggcuuuugcaca

SEQ ID NO: 748141 - RNA, 22 nt, Human
gagauucugugaaacggacauu

SEQ ID NO: 748142 - RNA, 22 nt, Human
ccacaagugaaguacaccugcc

SEQ ID NO: 748143 - RNA, 22 nt, Human
gcagaggccaucaacuuugcca

SEQ ID NO: 748144 - RNA, 22 nt, Human
uauuucugggaguucagaaauu

SEQ ID NO: 748145 - RNA, 22 nt, Human
ugagaugguucacagagaaggc

SEQ ID NO: 748146 - RNA, 18 nt, Human
uuugcuuuccuucuucag

SEQ ID NO: 748147 - RNA, 22 nt, Human
aaguggcagaauaguggcagga

SEQ ID NO: 748148 - RNA, 22 nt, Human
aacauuuaggaaggaccuccuc

SEQ ID NO: 748149 - RNA, 22 nt, Human
uuaaacacacugagauuuaugu

SEQ ID NO: 748150 - RNA, 19 nt, Human
ucaguaacuuuuaagagga

SEQ ID NO: 748151 - RNA, 23 nt, Human
cccugcagucagggugagauggu

SEQ ID NO: 748152 - RNA, 17 nt, Human
gguuuaauccuuaccug

SEQ ID NO: 748153 - RNA, 22 nt, Human
auccaguuaagaugaggucaua

SEQ ID NO: 748154 - RNA, 22 nt, Human
gcauuuguguggcggaaggauu

SEQ ID NO: 748155 - RNA, 22 nt, Human
uuuuggggagaacgguugcuau

SEQ ID NO: 748156 - RNA, 22 nt, Human
ucagagaauccguaagucacaa

SEQ ID NO: 748157 - RNA, 20 nt, Human
cuuagaaauuuuuacccugg

SEQ ID NO: 748158 - RNA, 22 nt, Human
auauauaaccuggauaaggcuu

SEQ ID NO: 748159 - RNA, 22 nt, Human
gggggcuguccugugcauugua

SEQ ID NO: 748160 - RNA, 22 nt, Human
agaugaguaaauggagucuucc

SEQ ID NO: 748161 - RNA, 22 nt, Human
ucacaacucuuuccauuuaaua

SEQ ID NO: 748162 - RNA, 22 nt, Human
gcaccuugggaagcgccaguug

SEQ ID NO: 748163 - RNA, 22 nt, Human
gggcuccagcccgggaccaggu

SEQ ID NO: 748164 - RNA, 22 nt, Human
agacauaagugcuaugacauug

SEQ ID NO: 748165 - RNA, 21 nt, Human
ugggagagggcucagcuaccc

SEQ ID NO: 748166 - RNA, 20 nt, Human
ggcucaucuugucugcugac

SEQ ID NO: 748167 - RNA, 23 nt, Human
cucccugaacaugacacaccaga

SEQ ID NO: 748168 - RNA, 22 nt, Human
uucuggagaucugccuauggga

SEQ ID NO: 748169 - RNA, 22 nt, Human
cagugcaggcugggggcccugc

SEQ ID NO: 748170 - RNA, 21 nt, Human
cucaggcauuugaggagaguc

SEQ ID NO: 748171 - RNA, 22 nt, Human
uaacugugugaacgugaucauu

SEQ ID NO: 748172 - RNA, 22 nt, Human
acugugggacaucccucccuau

SEQ ID NO: 748173 - RNA, 21 nt, Human
agugaaaugaaguguaugcuc

SEQ ID NO: 748174 - RNA, 22 nt, Human
gcccugaguugagccuuccaaa

SEQ ID NO: 748175 - RNA, 22 nt, Human
ucaucuucuauuaauagggaga

SEQ ID NO: 748176 - RNA, 22 nt, Human
gagcuguuugugacaggcugug

SEQ ID NO: 748177 - RNA, 22 nt, Human
ccugccagggccuuggaagaaa

SEQ ID NO: 748178 - RNA, 22 nt, Human
gcuggggaggcagcagagaaca

SEQ ID NO: 748179 - RNA, 22 nt, Human
aagcagggcucccuggggacuc

SEQ ID NO: 748180 - RNA, 22 nt, Human
uuguguauuuccugaagguaag

SEQ ID NO: 748181 - RNA, 22 nt, Human
auccuguuagcaccuucaaacu

SEQ ID NO: 748182 - RNA, 23 nt, Human
uaacucugugaagggugacuggg

SEQ ID NO: 748183 - RNA, 22 nt, Human
cucagugcuuuggauccuggau

SEQ ID NO: 748184 - RNA, 22 nt, Human
aggcuuggugccaaggagccug

SEQ ID NO: 748185 - RNA, 22 nt, Human
cuggaagaggggaaaugccaug

SEQ ID NO: 748186 - RNA, 21 nt, Human
ccaggguccagcugccauggu

SEQ ID NO: 748187 - RNA, 22 nt, Human
ggggacugaggcacugaaggug

SEQ ID NO: 748188 - RNA, 22 nt, Human
aauaaagacucagaggcccagg

SEQ ID NO: 748189 - RNA, 23 nt, Human
cuccaaggcccaacugucuaggc

SEQ ID NO: 748190 - RNA, 23 nt, Human
acuuccaguuauaggaacucuuc

SEQ ID NO: 748191 - RNA, 22 nt, Human
cagggagcagcaugggcaaagg

SEQ ID NO: 748192 - RNA, 22 nt, Human
ucacacaucucagguguuuaau

SEQ ID NO: 748193 - RNA, 22 nt, Human
augaauugaggaaaacagucgu

SEQ ID NO: 748194 - RNA, 22 nt, Human
ugauuaaaauuuaacuuaguua

SEQ ID NO: 748195 - RNA, 22 nt, Human
cagcuguugucucucacauauu

SEQ ID NO: 748196 - RNA, 22 nt, Human
auaguggguacaggggcagaga

SEQ ID NO: 748197 - RNA, 22 nt, Human
uucuacuugccaaaugacacau

SEQ ID NO: 748198 - RNA, 22 nt, Human
uucuggcuacccuccuaauguu

SEQ ID NO: 748199 - RNA, 22 nt, Human
gguuuucaaagaggcauuucau

SEQ ID NO: 748200 - RNA, 22 nt, Human
caggcgucacugccacggguau

SEQ ID NO: 748201 - RNA, 20 nt, Human
aagcugucagagguggacag

SEQ ID NO: 748202 - RNA, 22 nt, Human
gagaggugaauguggaugccac

SEQ ID NO: 748203 - RNA, 22 nt, Human
aucugggccagccccaagagac

SEQ ID NO: 748204 - RNA, 22 nt, Human
cugaaggaagcagguggccugu

SEQ ID NO: 748205 - RNA, 22 nt, Human
aggcuaaggagugugaugcuca

SEQ ID NO: 748206 - RNA, 21 nt, Human
cacaugugaauuacugaacug

SEQ ID NO: 748207 - RNA, 19 nt, Human
uacaggaggccugcaaucu

SEQ ID NO: 748208 - RNA, 22 nt, Human
uuacacaaaagcaagugugugu

SEQ ID NO: 748209 - RNA, 22 nt, Human
gggucaggaagaauucugccaa

SEQ ID NO: 748210 - RNA, 22 nt, Human
acagcuugggaugcuuuauuuc

SEQ ID NO: 748211 - RNA, 22 nt, Human
ggcccugggcccucuagcuugu

SEQ ID NO: 748212 - RNA, 23 nt, Human
cuucagugugggacugcagcgug

SEQ ID NO: 748213 - RNA, 22 nt, Human
acaauauuugggggcaguuugu

SEQ ID NO: 748214 - RNA, 22 nt, Human
uggaauucuuauucugacuuca

SEQ ID NO: 748215 - RNA, 22 nt, Human
uacaucuuugucuaugaccagc

SEQ ID NO: 748216 - RNA, 22 nt, Human
uuuauuauagugguggggacug

SEQ ID NO: 748217 - RNA, 22 nt, Human
ccccagggucaguguguggagg

SEQ ID NO: 748218 - RNA, 22 nt, Human
cauggaggccaggaaacagccu

SEQ ID NO: 748219 - RNA, 22 nt, Human
auccugggccucagaggugugu

SEQ ID NO: 748220 - RNA, 22 nt, Human
ugcauaaaauaugagaaaugua

SEQ ID NO: 748221 - RNA, 22 nt, Human
aaaguuuccaaguuacaccauu

SEQ ID NO: 748222 - RNA, 22 nt, Human
caagagcuuuagaaaugcucau

SEQ ID NO: 748223 - RNA, 19 nt, Human
uaagguuuaccagcaaaau

SEQ ID NO: 748224 - RNA, 22 nt, Human
ggcaucagcccgguccugggcu

SEQ ID NO: 748225 - RNA, 22 nt, Human
gacccuguuucuacaaauaauu

SEQ ID NO: 748226 - RNA, 21 nt, Human
ugauugauauuugcaaacaga

SEQ ID NO: 748227 - RNA, 22 nt, Human
uuccagauguuuaaguucugcu

SEQ ID NO: 748228 - RNA, 22 nt, Human
gcagcagcaggcgcucggccgu

SEQ ID NO: 748229 - RNA, 22 nt, Human
ggucucagcccucgccagcagc

SEQ ID NO: 748230 - RNA, 22 nt, Human
ucuuuugugauucuuuaguuac

SEQ ID NO: 748231 - RNA, 22 nt, Human
aaauuccauuaugauaauuucg

SEQ ID NO: 748232 - RNA, 22 nt, Human
caauagcaggucuacagagaga

SEQ ID NO: 748233 - RNA, 22 nt, Human
uuuguucaaggaauaguaaaug

SEQ ID NO: 748234 - RNA, 22 nt, Human
caaaaguaauggcgguuuuuac

SEQ ID NO: 748235 - RNA, 22 nt, Human
gugcucugaguuugcaugucag

SEQ ID NO: 748236 - RNA, 21 nt, Human
gcaaggcaaugccaugauuuc

SEQ ID NO: 748237 - RNA, 22 nt, Human
uggucaguugcaucagagaagu

SEQ ID NO: 748238 - RNA, 22 nt, Human
uuugauugucaccuaccuugca

SEQ ID NO: 748239 - RNA, 22 nt, Human
aggcucugcaguccaucccgug

SEQ ID NO: 748240 - RNA, 22 nt, Human
ucucagaaggcaagggcugggg

SEQ ID NO: 748241 - RNA, 22 nt, Human
gagggcuccucacauucucuau

SEQ ID NO: 748242 - RNA, 22 nt, Human
ggaaaggagaugaauaggauua

SEQ ID NO: 748243 - RNA, 23 nt, Human
gcauugaacaaaagaggggagua

SEQ ID NO: 748244 - RNA, 22 nt, Human
guuuauuggguauuguggagcc

SEQ ID NO: 748245 - RNA, 22 nt, Human
ugagcaguaacagcucacaggg

SEQ ID NO: 748246 - RNA, 22 nt, Human
agcaggggcaggguuuugugcu

SEQ ID NO: 748247 - RNA, 22 nt, Human
ucugccagaaguucugagagua

SEQ ID NO: 748248 - RNA, 22 nt, Human
ggugugggcccugaugucagca

SEQ ID NO: 748249 - RNA, 22 nt, Human
gucugaaaguagggcugaucua

SEQ ID NO: 748250 - RNA, 22 nt, Human
aucaggaugacaacugcugggu

SEQ ID NO: 748251 - RNA, 22 nt, Human
ggccucuggcaggcaggcccuc

SEQ ID NO: 748252 - RNA, 22 nt, Human
aggcucuccagagagcugcuuu

SEQ ID NO: 748253 - RNA, 22 nt, Human
cuucuugggcugccaguuucag

SEQ ID NO: 748254 - RNA, 22 nt, Human
guggccugggguuuguucugag

SEQ ID NO: 748255 - RNA, 22 nt, Human
caugcucucuggcaacuugugu

SEQ ID NO: 748256 - RNA, 22 nt, Human
cacugaagaugcgacuagugcu

SEQ ID NO: 748257 - RNA, 21 nt, Human
uuguguuuccccagucacuuu

SEQ ID NO: 748258 - RNA, 22 nt, Human
aagggggcgaagacgugauuga

SEQ ID NO: 748259 - RNA, 22 nt, Human
gggaaauugucaacacucucaa

SEQ ID NO: 748260 - RNA, 22 nt, Human
uuguccugugauuucagggccu

SEQ ID NO: 748261 - RNA, 22 nt, Human
aaggguugcaaggucagaggaa

SEQ ID NO: 748262 - RNA, 22 nt, Human
gcaggggcugcugggaacucgg

SEQ ID NO: 748263 - RNA, 22 nt, Human
uucggucuggcuguuauacgcu

SEQ ID NO: 748264 - RNA, 22 nt, Human
ggagcacuauaauagagauuuu

SEQ ID NO: 748265 - RNA, 22 nt, Human
gaaauauacauugcaggaagag

SEQ ID NO: 748266 - RNA, 21 nt, Human
agcagaggggacauguuugau

SEQ ID NO: 748267 - RNA, 22 nt, Human
ucguggagaggccauguggagg

SEQ ID NO: 748268 - RNA, 22 nt, Human
cccagcaggugccaucacucug

SEQ ID NO: 748269 - RNA, 22 nt, Human
ugaaggcuguuggauggggaag

SEQ ID NO: 748270 - RNA, 22 nt, Human
ucaacacucuuuggcacaguua

SEQ ID NO: 748271 - RNA, 22 nt, Human
cuuguguggucuggucuugcua

SEQ ID NO: 748272 - RNA, 22 nt, Human
agugucugaaccugcaguggga

SEQ ID NO: 748273 - RNA, 22 nt, Human
uuacaagauaugugagaacuag

SEQ ID NO: 748274 - RNA, 22 nt, Human
uuugaagucaaagauugauucc

SEQ ID NO: 748275 - RNA, 22 nt, Human
ugcugccacauuuaaagagggg

SEQ ID NO: 748276 - RNA, 22 nt, Human
cuuauaguaugauguugagaau

SEQ ID NO: 748277 - RNA, 21 nt, Human
gauuuuaaagagacugccaca

SEQ ID NO: 748278 - RNA, 22 nt, Human
cugaagcagauguggcugagau

SEQ ID NO: 748279 - RNA, 22 nt, Human
uuauugcaacuuuagggauaga

SEQ ID NO: 748280 - RNA, 22 nt, Human
aacuuucaggcaaugaauauuu

SEQ ID NO: 748281 - RNA, 22 nt, Human
ggugugggagagauucuuuccu

SEQ ID NO: 748282 - RNA, 22 nt, Human
guaaguuuuguauaggcauggg

SEQ ID NO: 748283 - RNA, 22 nt, Human
ucaacacuuuugucuuuguccc

SEQ ID NO: 748284 - RNA, 22 nt, Human
ccauuguaguaucuguuuuagu

SEQ ID NO: 748285 - RNA, 19 nt, Human
ggugugaagugaggaguua

SEQ ID NO: 748286 - RNA, 22 nt, Human
uccugggguccugacugcuucc

SEQ ID NO: 748287 - RNA, 22 nt, Human
uaugcacagaaguuugcugaau

SEQ ID NO: 748288 - RNA, 22 nt, Human
gagcucagguggucaaaacaau

SEQ ID NO: 748289 - RNA, 22 nt, Human
cugcugugaguuuggaggucua

SEQ ID NO: 748290 - RNA, 23 nt, Human
uagugauuggaaaaacuaguuuu

SEQ ID NO: 748291 - RNA, 22 nt, Human
auuugcuucuagucaguuccau

SEQ ID NO: 748292 - RNA, 22 nt, Human
gcugccuggaauaacggcuggc

SEQ ID NO: 748293 - RNA, 22 nt, Human
gggggacuaacuggauccugga

SEQ ID NO: 748294 - RNA, 22 nt, Human
gugaauaugaucuuauuuggaa

SEQ ID NO: 748295 - RNA, 22 nt, Human
caggacaguuggcaucugcugc

SEQ ID NO: 748296 - RNA, 22 nt, Human
ugguucauaauuugcacuacug

SEQ ID NO: 748297 - RNA, 19 nt, Human
cauuuagaaguacauauua

SEQ ID NO: 748298 - RNA, 22 nt, Human
uucuaaugaaaucuguacagua

SEQ ID NO: 748299 - RNA, 22 nt, Human
gaaugugucacccugucccaug

SEQ ID NO: 748300 - RNA, 22 nt, Human
aggcccagcuugaagugggaag

SEQ ID NO: 748301 - RNA, 23 nt, Human
acagagguccaaacaguauaagc

SEQ ID NO: 748302 - RNA, 22 nt, Human
gugggugcugucaggcagggaa

SEQ ID NO: 748303 - RNA, 20 nt, Human
cucugcugcgcaucccacuu

SEQ ID NO: 748304 - RNA, 22 nt, Human
uucucugaguacguuucagugu

SEQ ID NO: 748305 - RNA, 19 nt, Human
gggagcaggaaagcugugg

SEQ ID NO: 748306 - RNA, 22 nt, Human
ugugacuugauguuugcaccag

SEQ ID NO: 748307 - RNA, 22 nt, Human
caggaacauuuaaccacagggu

SEQ ID NO: 748308 - RNA, 22 nt, Human
uucuggaagccccagagucaga

SEQ ID NO: 748309 - RNA, 22 nt, Human
cagugugccugaaucaaguguu

SEQ ID NO: 748310 - RNA, 22 nt, Human
cuguggcugaguuccuuauguu

SEQ ID NO: 748311 - RNA, 17 nt, Human
cacuugcuggucuaccu

SEQ ID NO: 748312 - RNA, 22 nt, Human
guggcagggagaagccauuggg

SEQ ID NO: 748313 - RNA, 22 nt, Human
aauaugcaaagcguguuaucug

SEQ ID NO: 748314 - RNA, 22 nt, Human
cagaguuugcaagggcagaagc

SEQ ID NO: 748315 - RNA, 22 nt, Human
acaguucuguccuagacuucgu

SEQ ID NO: 748316 - RNA, 22 nt, Human
acacaggacggcccuguggcuu

SEQ ID NO: 748317 - RNA, 22 nt, Human
acuuucuuggucccauguuuga

SEQ ID NO: 748318 - RNA, 22 nt, Human
gggaugauaaugccagaguuaa

SEQ ID NO: 748319 - RNA, 22 nt, Human
ugucaggagccaccagcacucc

SEQ ID NO: 748320 - RNA, 22 nt, Human
aacccugggucggcaccauuuu

SEQ ID NO: 748321 - RNA, 22 nt, Human
aucuuacacuguuggguuucuc

SEQ ID NO: 748322 - RNA, 22 nt, Human
ggagaagcagcuucuugaugaa

SEQ ID NO: 748323 - RNA, 22 nt, Human
gccugagaguugaaguucagug

SEQ ID NO: 748324 - RNA, 18 nt, Human
cacaggagaugaccugac

SEQ ID NO: 748325 - RNA, 22 nt, Human
gcagagccagaauggccaggac

SEQ ID NO: 748326 - RNA, 22 nt, Human
gcuggagaggaucccaaagcca

SEQ ID NO: 748327 - RNA, 22 nt, Human
uguuaaacuguauugcauaagg

SEQ ID NO: 748328 - RNA, 22 nt, Human
agcugcucuugggugacuucaa

SEQ ID NO: 748329 - RNA, 22 nt, Human
ggcucacuuuggggucagcugg

SEQ ID NO: 748330 - RNA, 22 nt, Human
acaguguggggugagauggaac

SEQ ID NO: 748331 - RNA, 22 nt, Human
gcuggguuuucuuccgggccua

SEQ ID NO: 748332 - RNA, 22 nt, Human
cugggccuuggauugacacugu

SEQ ID NO: 748333 - RNA, 17 nt, Human
gccuuccuuccuccaca

SEQ ID NO: 748334 - RNA, 21 nt, Human
uggaagggaagucuugguugu

SEQ ID NO: 748335 - RNA, 22 nt, Human
uaacugauguucccuuacugua

SEQ ID NO: 748336 - RNA, 22 nt, Human
gagcuggugaucagcuggagga

SEQ ID NO: 748337 - RNA, 22 nt, Human
aaugcuuccuccucaccucagg

SEQ ID NO: 748338 - RNA, 22 nt, Human
cucuggaagaauacacuuagaa

SEQ ID NO: 748339 - RNA, 22 nt, Human
cuucaggauuaauuuggggccu

SEQ ID NO: 748340 - RNA, 22 nt, Human
ggaggugguuugauuucuauau

SEQ ID NO: 748341 - RNA, 22 nt, Human
ugauggucaggaugcauggaga

SEQ ID NO: 748342 - RNA, 22 nt, Human
cugugccauccuagggcugcug

SEQ ID NO: 748343 - RNA, 22 nt, Human
ugacccugcuucuuggugcagg

SEQ ID NO: 748344 - RNA, 22 nt, Human
cacccaggcuggagugcauugg

SEQ ID NO: 748345 - RNA, 22 nt, Human
agcugcuuugcugggcaggccc

SEQ ID NO: 748346 - RNA, 22 nt, Human
augucccaagauacagcuagag

SEQ ID NO: 748347 - RNA, 21 nt, Human
ggcagcccgcccucuccuggc

SEQ ID NO: 748348 - RNA, 17 nt, Human
ucuguccagggagugug

SEQ ID NO: 748349 - RNA, 22 nt, Human
aaugaguuagaugagaaaauaa

SEQ ID NO: 748350 - RNA, 22 nt, Human
ugaaggagcugauguaaggggu

SEQ ID NO: 748351 - RNA, 22 nt, Human
gaaacguuguggaaaauccucu

SEQ ID NO: 748352 - RNA, 22 nt, Human
gaggggcagagguagagaacaa

SEQ ID NO: 748353 - RNA, 22 nt, Human
acuucauguuguuuacaacuua

SEQ ID NO: 748354 - RNA, 22 nt, Human
ugcagcaggcacaggacggaag

SEQ ID NO: 748355 - RNA, 22 nt, Human
ucuuauuuuuuaaugacagaga

SEQ ID NO: 748356 - RNA, 22 nt, Human
ccagcuucucucugaugcagcu

SEQ ID NO: 748357 - RNA, 18 nt, Human
gaggauggaaggagaugc

SEQ ID NO: 748358 - RNA, 18 nt, Human
aggugcagccucugaggc

SEQ ID NO: 748359 - RNA, 22 nt, Human
agggaggaguccucaaagucau

SEQ ID NO: 748360 - RNA, 22 nt, Human
uucuccaguuucucccuucagu

SEQ ID NO: 748361 - RNA, 22 nt, Human
accccaggagcugugccuaguc

SEQ ID NO: 748362 - RNA, 22 nt, Human
cagaggcugaugugggaugggc

SEQ ID NO: 748363 - RNA, 22 nt, Human
uucaagaaagaguggcuauucc

SEQ ID NO: 748364 - RNA, 19 nt, Human
caagacaaagcccaucuuc

SEQ ID NO: 748365 - RNA, 22 nt, Human
gcagcauacagggagaguacuc

SEQ ID NO: 748366 - RNA, 16 nt, Human
gcuaggcaacaggcug

SEQ ID NO: 748367 - RNA, 22 nt, Human
agcacccuucagcccagccugg

SEQ ID NO: 748368 - RNA, 22 nt, Human
ggaggucaaauggagggcuggg

SEQ ID NO: 748369 - RNA, 22 nt, Human
ccaagggcucugacuugccugc

SEQ ID NO: 748370 - RNA, 23 nt, Human
gcuuccauucuaguuugcugugc

SEQ ID NO: 748371 - RNA, 17 nt, Human
ccagagcuacugagacu

SEQ ID NO: 748372 - RNA, 20 nt, Human
aggcacuggggauagguaag

SEQ ID NO: 748373 - RNA, 21 nt, Human
uagcagaaacaguucaggcca

SEQ ID NO: 748374 - RNA, 22 nt, Human
uauuaacaugaacugacuuuuc

SEQ ID NO: 748375 - RNA, 22 nt, Human
gaggucagucagaccaggguuu

SEQ ID NO: 748376 - RNA, 22 nt, Human
guggagggaaugaaucuucucu

SEQ ID NO: 748377 - RNA, 22 nt, Human
gaggugugguccucagccccca

SEQ ID NO: 748378 - RNA, 19 nt, Human
uacaaguaggcguuuucuc

SEQ ID NO: 748379 - RNA, 22 nt, Human
uggagaaucuggaaacuguuga

SEQ ID NO: 748380 - RNA, 22 nt, Human
ugcugcugaucauuuauagucu

SEQ ID NO: 748381 - RNA, 22 nt, Human
caugggaggccugcugcuggug

SEQ ID NO: 748382 - RNA, 22 nt, Human
cauaauuauaaacgcaaguuca

SEQ ID NO: 748383 - RNA, 22 nt, Human
agcucacauucucaucagaugu

SEQ ID NO: 748384 - RNA, 21 nt, Human
ucuguuggaggccucucuucc

SEQ ID NO: 748385 - RNA, 17 nt, Human
gacagcugguuccuggc

SEQ ID NO: 748386 - RNA, 22 nt, Human
cuuucacauaauugaccuugaa

SEQ ID NO: 748387 - RNA, 22 nt, Human
cccugaggcaguaggagcuuuu

SEQ ID NO: 748388 - RNA, 22 nt, Human
uccauucauucauugaugaaca

SEQ ID NO: 748389 - RNA, 22 nt, Human
ucuuugaaguugaaguaguugg

SEQ ID NO: 748390 - RNA, 22 nt, Human
uggccugguaccacauagauuu

SEQ ID NO: 748391 - RNA, 22 nt, Human
ucacacagggucggaaagagug

SEQ ID NO: 748392 - RNA, 22 nt, Human
cagagaacauucagagcuguag

SEQ ID NO: 748393 - RNA, 22 nt, Human
ucccaggaggugcuuccuagga

SEQ ID NO: 748394 - RNA, 22 nt, Human
uaaaggcuuuuacaggagugca

SEQ ID NO: 748395 - RNA, 22 nt, Human
cugggcuccuaaccauccaggu

SEQ ID NO: 748396 - RNA, 22 nt, Human
agauggcugggccccaccccag

SEQ ID NO: 748397 - RNA, 22 nt, Human
ugggccagcaauugcugcucag

SEQ ID NO: 748398 - RNA, 22 nt, Human
gggggcggagcacgugaccacg

SEQ ID NO: 748399 - RNA, 22 nt, Human
uucaucaauguguuuaauaaug

SEQ ID NO: 748400 - RNA, 22 nt, Human
ucaggcaggaucccagggaagg

SEQ ID NO: 748401 - RNA, 22 nt, Human
ucugccugagaaguggggugcc

SEQ ID NO: 748402 - RNA, 20 nt, Human
gagagcuggggaugaggcug

SEQ ID NO: 748403 - RNA, 22 nt, Human
gcugucacaaauauuucucagc

SEQ ID NO: 748404 - RNA, 22 nt, Human
aaauugcagguaggugggugau

SEQ ID NO: 748405 - RNA, 22 nt, Human
gcacccuagaguugccugagga

SEQ ID NO: 748406 - RNA, 22 nt, Human
agcagcugguaggaguggccac

SEQ ID NO: 748407 - RNA, 22 nt, Human
agagaggcugcuggacuauaug

SEQ ID NO: 748408 - RNA, 22 nt, Human
ccugaggcaaggacuugguggc

SEQ ID NO: 748409 - RNA, 22 nt, Human
cccaggcaggagugugguggcu

SEQ ID NO: 748410 - RNA, 22 nt, Human
cuuaaccagaaaaugcacuugu

SEQ ID NO: 748411 - RNA, 22 nt, Human
ucucagagccuaacuaaccuaa

SEQ ID NO: 748412 - RNA, 22 nt, Human
gaacccaggcuuuugaggcugu

SEQ ID NO: 748413 - RNA, 22 nt, Human
uguguuaaggugcaucuagugc

SEQ ID NO: 748414 - RNA, 22 nt, Human
cugcuggugaugucugggcaug

SEQ ID NO: 748415 - RNA, 18 nt, Human
ccagggaugcaugguccc

SEQ ID NO: 748416 - RNA, 22 nt, Human
aaugaguucugacacuucacga

SEQ ID NO: 748417 - RNA, 22 nt, Human
gagcuggucaguuucagggcca

SEQ ID NO: 748418 - RNA, 22 nt, Human
acuagauuuuggccauuauaca

SEQ ID NO: 748419 - RNA, 22 nt, Human
uuguacaaguauuaugugaaca

SEQ ID NO: 748420 - RNA, 22 nt, Human
ucauugcucuagguuccuugga

SEQ ID NO: 748421 - RNA, 22 nt, Human
gagauggagaaggaagcuguuu

SEQ ID NO: 748422 - RNA, 20 nt, Human
uuuaccaaaggaguuaugau

SEQ ID NO: 748423 - RNA, 22 nt, Human
gcucuggguucugauuuaugag

SEQ ID NO: 748424 - RNA, 22 nt, Human
ugucugaaagaggacgagcugg

SEQ ID NO: 748425 - RNA, 22 nt, Human
uaauugucagguuuuaguauca

SEQ ID NO: 748426 - RNA, 22 nt, Human
acauggaagcaaaguucuauuu

SEQ ID NO: 748427 - RNA, 22 nt, Human
acuggcacaagaagagucgugg

SEQ ID NO: 748428 - RNA, 22 nt, Human
auguacacaugcaugcaugugc

SEQ ID NO: 748429 - RNA, 19 nt, Human
cucagucuggcucugccug

SEQ ID NO: 748430 - RNA, 22 nt, Human
ugucauuuaugcuucuucagug

SEQ ID NO: 748431 - RNA, 22 nt, Human
augcacaggaccacacauaaug

SEQ ID NO: 748432 - RNA, 21 nt, Human
gccugcaguuuugaagcccuu

SEQ ID NO: 748433 - RNA, 22 nt, Human
ugcaauaucagauucaacacau

SEQ ID NO: 748434 - RNA, 22 nt, Human
uauuuaauaaaacuauggcaug

SEQ ID NO: 748435 - RNA, 22 nt, Human
ucaagucuugaugagacaaacc

SEQ ID NO: 748436 - RNA, 22 nt, Human
cugcugcucagugucaucaugu

SEQ ID NO: 748437 - RNA, 22 nt, Human
acauugaagggaaugcaaagau

SEQ ID NO: 748438 - RNA, 22 nt, Human
ugaguagauccaagacuguccu

SEQ ID NO: 748439 - RNA, 22 nt, Human
aggugucugugaugggagcgau

SEQ ID NO: 748440 - RNA, 22 nt, Human
auucugaauucugagccuuuca

SEQ ID NO: 748441 - RNA, 22 nt, Human
gagcccugcggagccccgaggc

SEQ ID NO: 748442 - RNA, 22 nt, Human
ugucugaauuccacaucguucu

SEQ ID NO: 748443 - RNA, 22 nt, Human
agauuucugucaccuucuaugc

SEQ ID NO: 748444 - RNA, 22 nt, Human
agaguggguuauaggcagacuu

SEQ ID NO: 748445 - RNA, 22 nt, Human
agaaaggucacuuagccucagc

SEQ ID NO: 748446 - RNA, 21 nt, Human
guuuacaaggcuuugcuccug

SEQ ID NO: 748447 - RNA, 22 nt, Human
uggcaugauaggaggugcagaa

SEQ ID NO: 748448 - RNA, 19 nt, Human
cauuuucucauugugcccc

SEQ ID NO: 748449 - RNA, 22 nt, Human
uuugaaaguccuaggagagucc

SEQ ID NO: 748450 - RNA, 23 nt, Human
gaacagacauuagugagccaggc

SEQ ID NO: 748451 - RNA, 22 nt, Human
cacagggcagugcugcccacuc

SEQ ID NO: 748452 - RNA, 22 nt, Human
acaguggaauuuguagaugugu

SEQ ID NO: 748453 - RNA, 22 nt, Human
agagaugucgccuugcccaggg

SEQ ID NO: 748454 - RNA, 22 nt, Human
uaaggccagccagcaaaucugu

SEQ ID NO: 748455 - RNA, 22 nt, Human
cagagguugagcaaaaaugaua

SEQ ID NO: 748456 - RNA, 22 nt, Human
cacuaguccugguuucaugcua

SEQ ID NO: 748457 - RNA, 22 nt, Human
aaguaaaauguuuccuuuauua

SEQ ID NO: 748458 - RNA, 22 nt, Human
cugugggagcacuggggaccga

SEQ ID NO: 748459 - RNA, 22 nt, Human
guggaugauugacucuguagac

SEQ ID NO: 748460 - RNA, 22 nt, Human
auaacaugaccugugcuucaca

SEQ ID NO: 748461 - RNA, 22 nt, Human
ucauggcuucaaggaagcaggc

SEQ ID NO: 748462 - RNA, 22 nt, Human
ccagcuuuagguugccugccag

SEQ ID NO: 748463 - RNA, 22 nt, Human
acagccuggccugaguuaaggc

SEQ ID NO: 748464 - RNA, 22 nt, Human
auccucaguguuucugacaucu

SEQ ID NO: 748465 - RNA, 22 nt, Human
cacauguaguaagcaggcaaug

SEQ ID NO: 748466 - RNA, 22 nt, Human
gcggggggcagcagucgcucag

SEQ ID NO: 748467 - RNA, 22 nt, Human
uagcaucugcauuuguaacuag

SEQ ID NO: 748468 - RNA, 22 nt, Human
acccagggcagccagcggggag

SEQ ID NO: 748469 - RNA, 22 nt, Human
cugcgugcauuaauauuuccuu

SEQ ID NO: 748470 - RNA, 22 nt, Human
aucucguuuugagaacuguguu

SEQ ID NO: 748471 - RNA, 22 nt, Human
gagcagagcuucucaaaguaaa

SEQ ID NO: 748472 - RNA, 22 nt, Human
aauuuccugggauaaaaagcca

SEQ ID NO: 748473 - RNA, 21 nt, Human
aaauacagaaacuuguuuuca

SEQ ID NO: 748474 - RNA, 22 nt, Human
gugcuggggguuucuguagguc

SEQ ID NO: 748475 - RNA, 19 nt, Human
gugaggauacugcucagag

SEQ ID NO: 748476 - RNA, 22 nt, Human
uguuauuuaucugagcauuuau

SEQ ID NO: 748477 - RNA, 22 nt, Human
cuauuucaaggcccagauauga

SEQ ID NO: 748478 - RNA, 22 nt, Human
acugcagacucuacaguuauaa

SEQ ID NO: 748479 - RNA, 22 nt, Human
aagcauauuuuaauuagccaca

SEQ ID NO: 748480 - RNA, 22 nt, Human
cauucuucuggauaguuaguug

SEQ ID NO: 748481 - RNA, 22 nt, Human
ucacuguuagagcaaacguaug

SEQ ID NO: 748482 - RNA, 22 nt, Human
ccaccaggcacucacagggaag

SEQ ID NO: 748483 - RNA, 22 nt, Human
caauguuuuuccuuccuuaaua

SEQ ID NO: 748484 - RNA, 22 nt, Human
gugugggcugcagaggcacagc

SEQ ID NO: 748485 - RNA, 18 nt, Human
ucuacccucucagagucu

SEQ ID NO: 748486 - RNA, 22 nt, Human
uuuacucaaguaugcauuuaug

SEQ ID NO: 748487 - RNA, 22 nt, Human
ggagugaggcauuuguagcuga

SEQ ID NO: 748488 - RNA, 22 nt, Human
uguucagaaaacagauaacuaa

SEQ ID NO: 748489 - RNA, 22 nt, Human
cacugucuucaguuucacugca

SEQ ID NO: 748490 - RNA, 22 nt, Human
ucuuuaucuggcucagagacac

SEQ ID NO: 748491 - RNA, 22 nt, Human
aaaucuaggcucauccuggucc

SEQ ID NO: 748492 - RNA, 22 nt, Human
agcaggcagcaugggacccucc

SEQ ID NO: 748493 - RNA, 22 nt, Human
gcccagggcugcaaguggacgc

SEQ ID NO: 748494 - RNA, 22 nt, Human
acuuugcacuucaauauaacuu

SEQ ID NO: 748495 - RNA, 22 nt, Human
cauaaucccaggcuugcauuca

SEQ ID NO: 748496 - RNA, 22 nt, Human
gccacagugggcuggggccaga

SEQ ID NO: 748497 - RNA, 22 nt, Human
uccagcugacaucuccugaggg

SEQ ID NO: 748498 - RNA, 22 nt, Human
ggcaggcucuuggccuuaugag

SEQ ID NO: 748499 - RNA, 22 nt, Human
acaggacaacucagcagccagc

SEQ ID NO: 748500 - RNA, 22 nt, Human
gcccucucggcauagcaggggc

SEQ ID NO: 748501 - RNA, 22 nt, Human
gaggggaagacuucuggacagu

SEQ ID NO: 748502 - RNA, 22 nt, Human
aggccacauugugauucccgca

SEQ ID NO: 748503 - RNA, 18 nt, Human
gcuuuuuagugcaucuuc

SEQ ID NO: 748504 - RNA, 22 nt, Human
auucuuacaaagcagagucugu

SEQ ID NO: 748505 - RNA, 22 nt, Human
ucacauuguaggucauuugcaa

SEQ ID NO: 748506 - RNA, 20 nt, Human
uaaaugcaugaauguaaggc

SEQ ID NO: 748507 - RNA, 22 nt, Human
ugagaaucauccagaggcuucu

SEQ ID NO: 748508 - RNA, 22 nt, Human
cucuguggcuugccuuucuguc

SEQ ID NO: 748509 - RNA, 22 nt, Human
cacagugaccucuuuaaaaggg

SEQ ID NO: 748510 - RNA, 18 nt, Human
cagggccccagaauuauc

SEQ ID NO: 748511 - RNA, 22 nt, Human
ggaguggcuguuucugccccca

SEQ ID NO: 748512 - RNA, 22 nt, Human
cugauuuucaaaauguguuaaa

SEQ ID NO: 748513 - RNA, 22 nt, Human
cuuuaagacuaaauuagaguuu

SEQ ID NO: 748514 - RNA, 22 nt, Human
uauuacagggcuaguuaugagu

SEQ ID NO: 748515 - RNA, 22 nt, Human
ggaacauuuccuggcagagagg

SEQ ID NO: 748516 - RNA, 22 nt, Human
augagguaucucauuuccugaa

SEQ ID NO: 748517 - RNA, 22 nt, Human
ucaugcagcuuuuccauucagc

SEQ ID NO: 748518 - RNA, 22 nt, Human
guuacucuuccccggggucugg

SEQ ID NO: 748519 - RNA, 22 nt, Human
ggccucagaggaggugugaguc

SEQ ID NO: 748520 - RNA, 22 nt, Human
ccagccagcaagcucccaguuc

SEQ ID NO: 748521 - RNA, 22 nt, Human
ucauucucugggaugcaguuug

SEQ ID NO: 748522 - RNA, 22 nt, Human
aauccauguugauguauauuuu

SEQ ID NO: 748523 - RNA, 22 nt, Human
ucuggcucggauuugucuagca

SEQ ID NO: 748524 - RNA, 22 nt, Human
aaaauaacuucuacuauuugca

SEQ ID NO: 748525 - RNA, 22 nt, Human
caauuucugggccucacacaag

SEQ ID NO: 748526 - RNA, 22 nt, Human
guagaacucccagugguauugu

SEQ ID NO: 748527 - RNA, 22 nt, Human
caaguauauuugaacauguaaa

SEQ ID NO: 748528 - RNA, 22 nt, Human
uugucugcuugaugccaagcau

SEQ ID NO: 748529 - RNA, 22 nt, Human
gugcuuucugcugcauuccucu

SEQ ID NO: 748530 - RNA, 22 nt, Human
gaaggcuguggcuggucucagu

SEQ ID NO: 748531 - RNA, 22 nt, Human
auucagcauuggcaccauggau

SEQ ID NO: 748532 - RNA, 22 nt, Human
guacauauuacagacaaagcuu

SEQ ID NO: 748533 - RNA, 22 nt, Human
acagugaauaagacaugugcuu

SEQ ID NO: 748534 - RNA, 22 nt, Human
ggagucugaguccucauagaca

SEQ ID NO: 748535 - RNA, 22 nt, Human
aaagcaguauaaguaacggaag

SEQ ID NO: 748536 - RNA, 22 nt, Human
agcaggugagcacagccaggcu

SEQ ID NO: 748537 - RNA, 22 nt, Human
auucauguuagcccacauguag

SEQ ID NO: 748538 - RNA, 22 nt, Human
ucucucaaccucggcacuauug

SEQ ID NO: 748539 - RNA, 18 nt, Human
ucaagacaucaugaaaua

SEQ ID NO: 748540 - RNA, 19 nt, Human
cuggccuguguccugugcu

SEQ ID NO: 748541 - RNA, 22 nt, Human
agccaugggagacugugggaga

SEQ ID NO: 748542 - RNA, 22 nt, Human
acccaggcuggagugcaguguc

SEQ ID NO: 748543 - RNA, 22 nt, Human
uacaaugcagugaccuccuuua

SEQ ID NO: 748544 - RNA, 22 nt, Human
caguccuggagcccuucuuggc

SEQ ID NO: 748545 - RNA, 22 nt, Human
cacacacucuuccuggcaccua

SEQ ID NO: 748546 - RNA, 22 nt, Human
uucuaguugagggagacaaaua

SEQ ID NO: 748547 - RNA, 22 nt, Human
ugcugagacaccuaagguaaau

SEQ ID NO: 748548 - RNA, 18 nt, Human
uccagagcagucuuuggc

SEQ ID NO: 748549 - RNA, 22 nt, Human
uccugagggcugcagucauagg

SEQ ID NO: 748550 - RNA, 22 nt, Human
uuuaauuuuccucuuccuggag

SEQ ID NO: 748551 - RNA, 22 nt, Human
ucuaagaggcaucaagacaagc

SEQ ID NO: 748552 - RNA, 22 nt, Human
ggagggaguuucauuccugccc

SEQ ID NO: 748553 - RNA, 22 nt, Human
ucucauugguauauacaugugu

SEQ ID NO: 748554 - RNA, 22 nt, Human
cugccuccuggcugauggguag

SEQ ID NO: 748555 - RNA, 22 nt, Human
agggaagagcuugcaagaaacc

SEQ ID NO: 748556 - RNA, 18 nt, Human
guuuccugucuuacgggg

SEQ ID NO: 748557 - RNA, 22 nt, Human
augaauaugagacugagagccu

SEQ ID NO: 748558 - RNA, 22 nt, Human
auuauaaagaacaugugugugg

SEQ ID NO: 748559 - RNA, 22 nt, Human
gaccuggaggcuuuucccaaga

SEQ ID NO: 748560 - RNA, 22 nt, Human
ccguggaguugugcugaguaug

SEQ ID NO: 748561 - RNA, 22 nt, Human
aucagugcuaaagcaaaugccc

SEQ ID NO: 748562 - RNA, 22 nt, Human
aagucucucauggcugacagca

SEQ ID NO: 748563 - RNA, 22 nt, Human
aguguuucuggcaaaugaaagu

SEQ ID NO: 748564 - RNA, 22 nt, Human
uucuggaaagauuugcguguaa

SEQ ID NO: 748565 - RNA, 22 nt, Human
uguguaugcauacacacauaga

SEQ ID NO: 748566 - RNA, 23 nt, Human
ugcuuauucaaaaggugcuuuca

SEQ ID NO: 748567 - RNA, 23 nt, Human
cuacaagagcaagcauggacaag

SEQ ID NO: 748568 - RNA, 22 nt, Human
aucuacagugcacaggacagcc

SEQ ID NO: 748569 - RNA, 22 nt, Human
aaagccauugaacuguacuuua

SEQ ID NO: 748570 - RNA, 22 nt, Human
ccaugcacaccagcaggcagac

SEQ ID NO: 748571 - RNA, 22 nt, Human
gagcaucacuguccucuccccg

SEQ ID NO: 748572 - RNA, 22 nt, Human
uuguuacaucuuauguaagugg

SEQ ID NO: 748573 - RNA, 22 nt, Human
uagggcucugcucaucaguugu

SEQ ID NO: 748574 - RNA, 21 nt, Human
uccagcacagaugaccucccc

SEQ ID NO: 748575 - RNA, 22 nt, Human
cagagacaccccagaaaauaag

SEQ ID NO: 748576 - RNA, 22 nt, Human
gggcaaaaccugggcaucauga

SEQ ID NO: 748577 - RNA, 22 nt, Human
ugaaugaugcauuuguuuccca

SEQ ID NO: 748578 - RNA, 22 nt, Human
uacuucaauuuguauaugugaa

SEQ ID NO: 748579 - RNA, 22 nt, Human
ugccaccaucuggcuguguuga

SEQ ID NO: 748580 - RNA, 22 nt, Human
cugagggagaagucacgggcag

SEQ ID NO: 748581 - RNA, 22 nt, Human
uggugaggaagaccugcuccug

SEQ ID NO: 748582 - RNA, 22 nt, Human
cccucccuuugcagcagugcau

SEQ ID NO: 748583 - RNA, 23 nt, Human
ugugacagugacaauacugacuu

SEQ ID NO: 748584 - RNA, 22 nt, Human
auuaaacaauguaaaguucuug

SEQ ID NO: 748585 - RNA, 22 nt, Human
cugagccaccggcagggacauc

SEQ ID NO: 748586 - RNA, 22 nt, Human
caguauuuguuacagcauuagc

SEQ ID NO: 748587 - RNA, 22 nt, Human
ggcacagucccuggcacagagu

SEQ ID NO: 748588 - RNA, 22 nt, Human
ucagaaaagguagcugugacaa

SEQ ID NO: 748589 - RNA, 22 nt, Human
gcccagcugagaagcgcggggc

SEQ ID NO: 748590 - RNA, 22 nt, Human
auaaccugagauugagcugccu

SEQ ID NO: 748591 - RNA, 22 nt, Human
ucauugaauauggggccauaca

SEQ ID NO: 748592 - RNA, 22 nt, Human
auuccucagcaggccuuuuguu

SEQ ID NO: 748593 - RNA, 22 nt, Human
caugaacagauucuucauuucu

SEQ ID NO: 748594 - RNA, 22 nt, Human
ggaucauuaagaauagcuacua

SEQ ID NO: 748595 - RNA, 22 nt, Human
aagaacuaucucuggcuguagg

SEQ ID NO: 748596 - RNA, 19 nt, Human
auggccaguuuagagguuu

SEQ ID NO: 748597 - RNA, 22 nt, Human
agcacaaauauaaaaaugucug

SEQ ID NO: 748598 - RNA, 22 nt, Human
aguguguagcaauaugcuggca

SEQ ID NO: 748599 - RNA, 22 nt, Human
guccaagagucaagaagggggc

SEQ ID NO: 748600 - RNA, 18 nt, Human
cugugggcuggugcauga

SEQ ID NO: 748601 - RNA, 22 nt, Human
gauuuccaggucauuaauaaag

SEQ ID NO: 748602 - RNA, 22 nt, Human
acuugaaaggaagcucuaaaac

SEQ ID NO: 748603 - RNA, 22 nt, Human
aaucuuuugauucuagggcugu

SEQ ID NO: 748604 - RNA, 22 nt, Human
cucucagacugaagggccugug

SEQ ID NO: 748605 - RNA, 17 nt, Human
uuacaacaauucaugag

SEQ ID NO: 748606 - RNA, 22 nt, Human
gugucuuagaaagacugaaugc

SEQ ID NO: 748607 - RNA, 22 nt, Human
ggggaagauggcccuccaugug

SEQ ID NO: 748608 - RNA, 22 nt, Human
aguguuuccugaguguuaucau

SEQ ID NO: 748609 - RNA, 22 nt, Human
cuuuagaauuucauguuugguc

SEQ ID NO: 748610 - RNA, 22 nt, Human
cugggagucuaagcuagcaccg

SEQ ID NO: 748611 - RNA, 22 nt, Human
auuucccagauaaacagcugga

SEQ ID NO: 748612 - RNA, 22 nt, Human
cugaggaaggcugggggcaucc

SEQ ID NO: 748613 - RNA, 22 nt, Human
gacccuggggaccaucuagccc

SEQ ID NO: 748614 - RNA, 20 nt, Human
uguuucuuuuaaugagcggc

SEQ ID NO: 748615 - RNA, 22 nt, Human
uggugcugacaguucugagugc

SEQ ID NO: 748616 - RNA, 22 nt, Human
uuucucaucuggaaacagugcu

SEQ ID NO: 748617 - RNA, 22 nt, Human
cacauauaugaaaugaggaauu

SEQ ID NO: 748618 - RNA, 18 nt, Human
caaagcucacguuccauc

SEQ ID NO: 748619 - RNA, 22 nt, Human
augaugcuguuuaucauauacu

SEQ ID NO: 748620 - RNA, 22 nt, Human
acuuuuuacaggguguauacca

SEQ ID NO: 748621 - RNA, 22 nt, Human
ugcagcugaggccagcuaugcc

SEQ ID NO: 748622 - RNA, 22 nt, Human
uagcagggagggccagugucaa

SEQ ID NO: 748623 - RNA, 23 nt, Human
agccagggcacugguggagauug

SEQ ID NO: 748624 - RNA, 22 nt, Human
caagagcauuuaguuagcuggu

SEQ ID NO: 748625 - RNA, 22 nt, Human
uucuuucccuuccagcagcucc

SEQ ID NO: 748626 - RNA, 22 nt, Human
ggcugccuuuagaacggaugcu

SEQ ID NO: 748627 - RNA, 22 nt, Human
uguguccacgcacuggcaugau

SEQ ID NO: 748628 - RNA, 22 nt, Human
cagcacugcuucgcagccaggg

SEQ ID NO: 748629 - RNA, 22 nt, Human
acagcuuuugaaaaauuacugg

SEQ ID NO: 748630 - RNA, 22 nt, Human
uggcccugcacccagagcaguu

SEQ ID NO: 748631 - RNA, 22 nt, Human
ugccaggcugaacagggucuua

SEQ ID NO: 748632 - RNA, 22 nt, Human
aaauuguaaugacuucacuuga

SEQ ID NO: 748633 - RNA, 22 nt, Human
ugcugccaccccucaccagagc

SEQ ID NO: 748634 - RNA, 22 nt, Human
caugccuguauuucugaucuau

SEQ ID NO: 748635 - RNA, 22 nt, Human
ccacuguaaguuugaaaauaac

SEQ ID NO: 748636 - RNA, 22 nt, Human
cauccugagaggucucucuacc

SEQ ID NO: 748637 - RNA, 22 nt, Human
gcaguguggcguggggaccuaa

SEQ ID NO: 748638 - RNA, 22 nt, Human
uagaaagcuugggguguuuaaa

SEQ ID NO: 748639 - RNA, 22 nt, Human
uuuauguaauuucauaggugug

SEQ ID NO: 748640 - RNA, 22 nt, Human
auuacaacuacauaaucucaga

SEQ ID NO: 748641 - RNA, 22 nt, Human
uguuuauaccugcaaccuguca

SEQ ID NO: 748642 - RNA, 22 nt, Human
gacagggcugugggaggagcag

SEQ ID NO: 748643 - RNA, 22 nt, Human
aggcagugcucaagacagcagc

SEQ ID NO: 748644 - RNA, 23 nt, Human
ucugggcaccuuguugacaugau

SEQ ID NO: 748645 - RNA, 22 nt, Human
gagcccaguaggcaaagcugca

SEQ ID NO: 748646 - RNA, 20 nt, Human
ugucugcucauaauaaaccc

SEQ ID NO: 748647 - RNA, 22 nt, Human
cuggccagugccugugggcccc

SEQ ID NO: 748648 - RNA, 22 nt, Human
ggggggugcugaucaguggagc

SEQ ID NO: 748649 - RNA, 22 nt, Human
ucccugaaacaucucuguggau

SEQ ID NO: 748650 - RNA, 22 nt, Human
uccaggcugacgcagcuauuua

SEQ ID NO: 748651 - RNA, 22 nt, Human
gagggcuuccauggggagcccc

SEQ ID NO: 748652 - RNA, 22 nt, Human
cuggccagaguuggagggugug

SEQ ID NO: 748653 - RNA, 22 nt, Human
gucagaucuuuggggaugcugu

SEQ ID NO: 748654 - RNA, 22 nt, Human
uauaaagagucuaucugguggc

SEQ ID NO: 748655 - RNA, 22 nt, Human
gaaccugagcccagguggcauu

SEQ ID NO: 748656 - RNA, 22 nt, Human
ucuuuccuuagaauaauucuuu

SEQ ID NO: 748657 - RNA, 22 nt, Human
aucuagaaaguguugaagauca

SEQ ID NO: 748658 - RNA, 22 nt, Human
aucuggcucucucauuuacaaa

SEQ ID NO: 748659 - RNA, 22 nt, Human
uccuggcuaacacggugacacc

SEQ ID NO: 748660 - RNA, 22 nt, Human
caaggcuugaauucugaugggu

SEQ ID NO: 748661 - RNA, 22 nt, Human
uuuagcuugaaaguuuuggagg

SEQ ID NO: 748662 - RNA, 22 nt, Human
gcccagcccagaaagguucgga

SEQ ID NO: 748663 - RNA, 22 nt, Human
gaggaggcacuugagcagaugu

SEQ ID NO: 748664 - RNA, 22 nt, Human
cauuuguagcuauuuacuguau

SEQ ID NO: 748665 - RNA, 22 nt, Human
ucagaaguccccagucaaggag

SEQ ID NO: 748666 - RNA, 22 nt, Human
cagcagagaugagauuccuaua

SEQ ID NO: 748667 - RNA, 22 nt, Human
uccagcagccacaccucuggac

SEQ ID NO: 748668 - RNA, 22 nt, Human
aggccuguuccuuccugggcac

SEQ ID NO: 748669 - RNA, 22 nt, Human
ugaggauggucccgaggacacu

SEQ ID NO: 748670 - RNA, 22 nt, Human
uccagcccugcuuccugccuca

SEQ ID NO: 748671 - RNA, 22 nt, Human
aacuuuguuuuauucacugcug

SEQ ID NO: 748672 - RNA, 22 nt, Human
ucccuccaggcagcuggguacu

SEQ ID NO: 748673 - RNA, 22 nt, Human
gcagauggacuguaugaccuga

SEQ ID NO: 748674 - RNA, 16 nt, Human
agccaggcugccucgg

SEQ ID NO: 748675 - RNA, 22 nt, Human
accaggcuccccuuggauccug

SEQ ID NO: 748676 - RNA, 17 nt, Human
gagacagcaggagcccc

SEQ ID NO: 748677 - RNA, 22 nt, Human
ugugaaaucaauuagcugcaga

SEQ ID NO: 748678 - RNA, 22 nt, Human
aaaugaacaucaagaauagccu

SEQ ID NO: 748679 - RNA, 22 nt, Human
agcuguguagggaaucagagaa

SEQ ID NO: 748680 - RNA, 22 nt, Human
cccagcaggcauguugggagga

SEQ ID NO: 748681 - RNA, 22 nt, Human
auuccuucuaaaacgcugcccu

SEQ ID NO: 748682 - RNA, 22 nt, Human
ucuccucucuuaccugguacaa

SEQ ID NO: 748683 - RNA, 22 nt, Human
gaggagaagggcacggagaaaa

SEQ ID NO: 748684 - RNA, 22 nt, Human
agccucucuguuagucacuggg

SEQ ID NO: 748685 - RNA, 22 nt, Human
uauauuguaggugcuauuugaa

SEQ ID NO: 748686 - RNA, 22 nt, Human
aggcuaagauguggucugagca

SEQ ID NO: 748687 - RNA, 22 nt, Human
gcuggagauaguaggauccaua

SEQ ID NO: 748688 - RNA, 22 nt, Human
uuauggaauacuuaugcugcag

SEQ ID NO: 748689 - RNA, 22 nt, Human
agaagugagacucaguugauga

SEQ ID NO: 748690 - RNA, 22 nt, Human
ugcuauaagaauuauauuacuc

SEQ ID NO: 748691 - RNA, 22 nt, Human
aaggugguuguaggcuggucug

SEQ ID NO: 748692 - RNA, 22 nt, Human
ugcuggaauuugccuucuggaa

SEQ ID NO: 748693 - RNA, 21 nt, Human
agaagucaauugaacugaaau

SEQ ID NO: 748694 - RNA, 22 nt, Human
auuuuaucugcuuacuuucagg

SEQ ID NO: 748695 - RNA, 23 nt, Human
ucucaggcaaaccaggacaaguu

SEQ ID NO: 748696 - RNA, 22 nt, Human
uuaauguuuuaaguuauagaga

SEQ ID NO: 748697 - RNA, 22 nt, Human
aacaugauggggaagaacaaga

SEQ ID NO: 748698 - RNA, 22 nt, Human
ugcuuugccagacaguucccuu

SEQ ID NO: 748699 - RNA, 22 nt, Human
uggcacugaccccaggccugug

SEQ ID NO: 748700 - RNA, 22 nt, Human
gcccaggaguuggaggcugcag

SEQ ID NO: 748701 - RNA, 22 nt, Human
caggcuuggcagggaggcuggu

SEQ ID NO: 748702 - RNA, 22 nt, Human
ggcucagagguugaggccggca

SEQ ID NO: 748703 - RNA, 20 nt, Human
cgcagcaguggaaguggaau

SEQ ID NO: 748704 - RNA, 20 nt, Human
ucaagaugaggucauacugg

SEQ ID NO: 748705 - RNA, 22 nt, Human
uggcuucuggcuggugagaaau

SEQ ID NO: 748706 - RNA, 22 nt, Human
uaagcauuaugguaaagaagua

SEQ ID NO: 748707 - RNA, 22 nt, Human
acaguguucucuuccuguauag

SEQ ID NO: 748708 - RNA, 22 nt, Human
acuggcuugaaguagauucaaa

SEQ ID NO: 748709 - RNA, 22 nt, Human
accagggcaaauguuuguacuc

SEQ ID NO: 748710 - RNA, 22 nt, Human
gcucccuguucucagccaugau

SEQ ID NO: 748711 - RNA, 22 nt, Human
gaaagcuuccauuuuguacauu

SEQ ID NO: 748712 - RNA, 22 nt, Human
cuuggccucuucucaggguggg

SEQ ID NO: 748713 - RNA, 22 nt, Human
uccagagcagguggucagaagg

SEQ ID NO: 748714 - RNA, 22 nt, Human
ggucuagaucaagaacagaacu

SEQ ID NO: 748715 - RNA, 18 nt, Human
aacuguugaaauagcuug

SEQ ID NO: 748716 - RNA, 22 nt, Human
aagagcaucuauuucacagugg

SEQ ID NO: 748717 - RNA, 22 nt, Human
uagcacacgcauuagcaaauca

SEQ ID NO: 748718 - RNA, 22 nt, Human
ccagcaagugcagauggccaag

SEQ ID NO: 748719 - RNA, 22 nt, Human
auuagagguuguuuuguaaaga

SEQ ID NO: 748720 - RNA, 23 nt, Human
acagcugcaccuggccgccuggc

SEQ ID NO: 748721 - RNA, 22 nt, Human
gccaccuccuuauuccaccugu

SEQ ID NO: 748722 - RNA, 22 nt, Human
guacacaaaagaggaaaccgga

SEQ ID NO: 748723 - RNA, 22 nt, Human
cuggaucuugcugcauugagaa

SEQ ID NO: 748724 - RNA, 22 nt, Human
gccugggauagaggcaaugcau

SEQ ID NO: 748725 - RNA, 22 nt, Human
aucuguacaagauuuuaugcgu

SEQ ID NO: 748726 - RNA, 22 nt, Human
cugcagcuuucgcuccaucagc

SEQ ID NO: 748727 - RNA, 22 nt, Human
aauaucagaauguaaugguccu

SEQ ID NO: 748728 - RNA, 22 nt, Human
ugauggaacagccuuugccaaa

SEQ ID NO: 748729 - RNA, 22 nt, Human
cacgugagaccuugcagaggug

SEQ ID NO: 748730 - RNA, 22 nt, Human
aaaaccaggcuugcugugcucg

SEQ ID NO: 748731 - RNA, 22 nt, Human
acagucaagaaauggcagagcc

SEQ ID NO: 748732 - RNA, 22 nt, Human
ugguccagcuugauucucuucu

SEQ ID NO: 748733 - RNA, 22 nt, Human
cagccccauggugugcuccagc

SEQ ID NO: 748734 - RNA, 22 nt, Human
caaguauuuccugauggccugu

SEQ ID NO: 748735 - RNA, 22 nt, Human
acuuucugccuuacaggagucc

SEQ ID NO: 748736 - RNA, 22 nt, Human
aaagucauuggaauauuaauga

SEQ ID NO: 748737 - RNA, 22 nt, Human
uuucuagucuucccuaccuccc

SEQ ID NO: 748738 - RNA, 22 nt, Human
agacacuuauuuagugggaguu

SEQ ID NO: 748739 - RNA, 22 nt, Human
agcagcuguuuguugaauuggu

SEQ ID NO: 748740 - RNA, 22 nt, Human
uuggcuuccaggggcuuuuaca

SEQ ID NO: 748741 - RNA, 22 nt, Human
uacuuucuuucugauccuuaug

SEQ ID NO: 748742 - RNA, 22 nt, Human
acaaauuguugcuucaugaaug

SEQ ID NO: 748743 - RNA, 22 nt, Human
ucagagagccucaggcacugcc

SEQ ID NO: 748744 - RNA, 22 nt, Human
uuggaaauggcuguaguuauga

SEQ ID NO: 748745 - RNA, 22 nt, Human
ggucuggccaauagacagcccc

SEQ ID NO: 748746 - RNA, 22 nt, Human
auagauuagcccuauaguuuua

SEQ ID NO: 748747 - RNA, 21 nt, Human
ucucugggaggacuugugaga

SEQ ID NO: 748748 - RNA, 22 nt, Human
gagcugcuggcuccucagguua

SEQ ID NO: 748749 - RNA, 22 nt, Human
cuguuuccauacagguuuuugg

SEQ ID NO: 748750 - RNA, 22 nt, Human
ucaggacaaccuguuuucagac

SEQ ID NO: 748751 - RNA, 22 nt, Human
uuucuucucacccaggacagag

SEQ ID NO: 748752 - RNA, 22 nt, Human
ugugaguucuuagaaagucagu

SEQ ID NO: 748753 - RNA, 22 nt, Human
ucagaggcuggaagagccuccu

SEQ ID NO: 748754 - RNA, 22 nt, Human
gcccaaagagcuuugaucucag

SEQ ID NO: 748755 - RNA, 22 nt, Human
caggugggcugccucuccagcu

SEQ ID NO: 748756 - RNA, 22 nt, Human
uacaucuagccuuacaauuauu

SEQ ID NO: 748757 - RNA, 22 nt, Human
cugccuggaaggagcaagggga

SEQ ID NO: 748758 - RNA, 18 nt, Human
gagguggcugggccaucu

SEQ ID NO: 748759 - RNA, 22 nt, Human
gaaagugccucaguccucuuau

SEQ ID NO: 748760 - RNA, 22 nt, Human
gcucugagacaguagagauggc

SEQ ID NO: 748761 - RNA, 22 nt, Human
aacacaggggcguggcucuuac

SEQ ID NO: 748762 - RNA, 22 nt, Human
gcugaauacagcaugccuuaug

SEQ ID NO: 748763 - RNA, 23 nt, Human
gggcuucauuuuaauucagcugc

SEQ ID NO: 748764 - RNA, 23 nt, Human
aggaaagcauucauuuuuaccau

SEQ ID NO: 748765 - RNA, 22 nt, Human
uccucagucguuugagccaaaa

SEQ ID NO: 748766 - RNA, 22 nt, Human
aucacagagauugcuuuuaaaa

SEQ ID NO: 748767 - RNA, 22 nt, Human
uuauugaaggaacugaaauaaa

SEQ ID NO: 748768 - RNA, 22 nt, Human
gcugucugucucugugacuuaa

SEQ ID NO: 748769 - RNA, 22 nt, Human
uggcacugccaaccugcuaggu

SEQ ID NO: 748770 - RNA, 22 nt, Human
ucauugaacgaagagcuccauu

SEQ ID NO: 748771 - RNA, 22 nt, Human
gaauaaucaugaaauucaguga

SEQ ID NO: 748772 - RNA, 23 nt, Human
cugggacaugguaggggcacaac

SEQ ID NO: 748773 - RNA, 22 nt, Human
uggcagcuggagggcaauggcc

SEQ ID NO: 748774 - RNA, 22 nt, Human
uaggccuaagagauacuacugu

SEQ ID NO: 748775 - RNA, 22 nt, Human
gagcugggauuugaaccuggga

SEQ ID NO: 748776 - RNA, 22 nt, Human
ggggccagcacugugccuuugu

SEQ ID NO: 748777 - RNA, 22 nt, Human
ugugugaauagcaguggcuggu

SEQ ID NO: 748778 - RNA, 22 nt, Human
ggagagguguauucaguggguc

SEQ ID NO: 748779 - RNA, 22 nt, Human
ugucagcucccagucagagaga

SEQ ID NO: 748780 - RNA, 22 nt, Human
gaugauuuucuguguuagaaga

SEQ ID NO: 748781 - RNA, 22 nt, Human
acacuaaaugagucuacaguac

SEQ ID NO: 748782 - RNA, 22 nt, Human
uauugaagauuuugugguugcu

SEQ ID NO: 748783 - RNA, 22 nt, Human
acaauagugccuggcauagagu

SEQ ID NO: 748784 - RNA, 22 nt, Human
auucuacacaaagcaagaagac

SEQ ID NO: 748785 - RNA, 22 nt, Human
uaaacagaaagcagauguacuu

SEQ ID NO: 748786 - RNA, 22 nt, Human
ggcuuaaaucacagugacuuuu

SEQ ID NO: 748787 - RNA, 22 nt, Human
aaagugacaaccagcaggacuu

SEQ ID NO: 748788 - RNA, 22 nt, Human
agggcagaccacgugcaaggau

SEQ ID NO: 748789 - RNA, 22 nt, Human
augcaacauacauucugaagcu

SEQ ID NO: 748790 - RNA, 21 nt, Human
uuacuuuugcagcaaccuaau

SEQ ID NO: 748791 - RNA, 22 nt, Human
gaggagcccagcaccaucacuu

SEQ ID NO: 748792 - RNA, 20 nt, Human
uuuauugagcacguacugug

SEQ ID NO: 748793 - RNA, 22 nt, Human
uagcaacaccaucuggugagaa

SEQ ID NO: 748794 - RNA, 22 nt, Human
ggggugagugcucagccccgga

SEQ ID NO: 748795 - RNA, 18 nt, Human
cugcccagagcauuucau

SEQ ID NO: 748796 - RNA, 22 nt, Human
cagaugcugguaugggggaggu

SEQ ID NO: 748797 - RNA, 22 nt, Human
ucuucaggaagggaaaucaucc

SEQ ID NO: 748798 - RNA, 22 nt, Human
uacaugcucuucaaggacucau

SEQ ID NO: 748799 - RNA, 22 nt, Human
augcccaggcccauaccuagau

SEQ ID NO: 748800 - RNA, 22 nt, Human
gaaggaggucugauacaauaug

SEQ ID NO: 748801 - RNA, 20 nt, Human
auaauuauuuacuuuugugc

SEQ ID NO: 748802 - RNA, 22 nt, Human
uauggcuucuuguguuacugug

SEQ ID NO: 748803 - RNA, 22 nt, Human
guagauuccaguggucuguguc

SEQ ID NO: 748804 - RNA, 22 nt, Human
uguaaaaccaaaucaaucuagu

SEQ ID NO: 748805 - RNA, 22 nt, Human
ucacaaugaaaaacacuacaua

SEQ ID NO: 748806 - RNA, 19 nt, Human
ucccaguggggagaggugu

SEQ ID NO: 748807 - RNA, 22 nt, Human
gcuuccuucuaccacaucaugc

SEQ ID NO: 748808 - RNA, 22 nt, Human
uuauucacucauuaaagcagga

SEQ ID NO: 748809 - RNA, 22 nt, Human
ugggccucaugcccagccaccc

SEQ ID NO: 748810 - RNA, 22 nt, Human
agcagcagcucaguucucagcu

SEQ ID NO: 748811 - RNA, 22 nt, Human
ccacccagaccagggaucuggg

SEQ ID NO: 748812 - RNA, 22 nt, Human
uggcaggguacaccuuaacacc

SEQ ID NO: 748813 - RNA, 22 nt, Human
agccuggagaggcgccauacac

SEQ ID NO: 748814 - RNA, 22 nt, Human
gcagcagagcuuuguccuggcu

SEQ ID NO: 748815 - RNA, 21 nt, Human
cuacccucacucccauuccuc

SEQ ID NO: 748816 - RNA, 22 nt, Human
uuaggaaaaucaugagagauga

SEQ ID NO: 748817 - RNA, 22 nt, Human
guggcagaaauauucuugcucu

SEQ ID NO: 748818 - RNA, 22 nt, Human
ugcggcaggagaagguguuaug

SEQ ID NO: 748819 - RNA, 22 nt, Human
agucaccaacaugguucccagg

SEQ ID NO: 748820 - RNA, 22 nt, Human
agcugagaaucuuccccagugu

SEQ ID NO: 748821 - RNA, 22 nt, Human
ccaggaagccugugucucugga

SEQ ID NO: 748822 - RNA, 22 nt, Human
caguuuaguaggugauaucaau

SEQ ID NO: 748823 - RNA, 22 nt, Human
uaagaguuagggcuagcaauau

SEQ ID NO: 748824 - RNA, 21 nt, Human
gcucugucccugcuguguguc

SEQ ID NO: 748825 - RNA, 22 nt, Human
uggaaagaggaagugcccagca

SEQ ID NO: 748826 - RNA, 22 nt, Human
ggggucugggcuuagcuggaau

SEQ ID NO: 748827 - RNA, 22 nt, Human
gcauuguccugcuucugagugu

SEQ ID NO: 748828 - RNA, 22 nt, Human
acugggcagcagcucgagccgc

SEQ ID NO: 748829 - RNA, 22 nt, Human
ucuuuucuagcaaauccaggag

SEQ ID NO: 748830 - RNA, 19 nt, Human
cuggggcuuugguacugcc

SEQ ID NO: 748831 - RNA, 22 nt, Human
cucagggauggugaagcaccca

SEQ ID NO: 748832 - RNA, 22 nt, Human
uuugauauccuauacaaguaaa

SEQ ID NO: 748833 - RNA, 22 nt, Human
cagcccugcuuccccgcuaguu

SEQ ID NO: 748834 - RNA, 22 nt, Human
ccagcagcgauagggugagugc

SEQ ID NO: 748835 - RNA, 22 nt, Human
guucuguccuccuaccaggcau

SEQ ID NO: 748836 - RNA, 22 nt, Human
ucaggucuguacuauugucuug

SEQ ID NO: 748837 - RNA, 22 nt, Human
ucuggaguggagcugaucauuu

SEQ ID NO: 748838 - RNA, 22 nt, Human
gaaauucugugucccagagugc

SEQ ID NO: 748839 - RNA, 22 nt, Human
auagaauuacaguguguuugga

SEQ ID NO: 748840 - RNA, 20 nt, Human
cagcaaaaugaaaauggauu

SEQ ID NO: 748841 - RNA, 22 nt, Human
ucuucuuugaaucauagugacc

SEQ ID NO: 748842 - RNA, 22 nt, Human
ggacaggugugaggcuggcaca

SEQ ID NO: 748843 - RNA, 22 nt, Human
ccaggcucugcgcuggacaugg

SEQ ID NO: 748844 - RNA, 22 nt, Human
gccagccacuucccagacuggc

SEQ ID NO: 748845 - RNA, 22 nt, Human
ucacugggagaugugggaaggg

SEQ ID NO: 748846 - RNA, 20 nt, Human
guuuuaugccaguucugugu

SEQ ID NO: 748847 - RNA, 19 nt, Human
gaggagcuaucggagacag

SEQ ID NO: 748848 - RNA, 22 nt, Human
cugcuuugaaaauaaacuuguc

SEQ ID NO: 748849 - RNA, 22 nt, Human
augcagcuucaggauuaugaug

SEQ ID NO: 748850 - RNA, 17 nt, Human
uagcagcaguaauugug

SEQ ID NO: 748851 - RNA, 23 nt, Human
auaucacacccaguacagucucc

SEQ ID NO: 748852 - RNA, 22 nt, Human
agguggcagagugacaggcuga

SEQ ID NO: 748853 - RNA, 22 nt, Human
ucuggcucuauaacuccuagcu

SEQ ID NO: 748854 - RNA, 22 nt, Human
gaacacaugauuauaaaugcua

SEQ ID NO: 748855 - RNA, 22 nt, Human
uuuacagagguguccugcauug

SEQ ID NO: 748856 - RNA, 21 nt, Human
ugggcgcuugaccucugcacu

SEQ ID NO: 748857 - RNA, 22 nt, Human
uucucuggauguuucucaguca

SEQ ID NO: 748858 - RNA, 21 nt, Human
ugcagcagaguaagcagggga

SEQ ID NO: 748859 - RNA, 22 nt, Human
ccuugcagacaucaguaguggc

SEQ ID NO: 748860 - RNA, 22 nt, Human
ucuccccagggguauggguauu

SEQ ID NO: 748861 - RNA, 22 nt, Human
cuuguacacucaguacuucuag

SEQ ID NO: 748862 - RNA, 22 nt, Human
agggcuccgggcaggcgaugga

SEQ ID NO: 748863 - RNA, 22 nt, Human
uuacaucuaaacugugaacaau

SEQ ID NO: 748864 - RNA, 22 nt, Human
uguacaggagaacaaugagaaa

SEQ ID NO: 748865 - RNA, 22 nt, Human
cauuucacuauucacuaaaagg

SEQ ID NO: 748866 - RNA, 22 nt, Human
ggguggcugagaacaggacccc

SEQ ID NO: 748867 - RNA, 22 nt, Human
cauggaggaguuaggugugagu

SEQ ID NO: 748868 - RNA, 22 nt, Human
caggcaccugugugucucaggg

SEQ ID NO: 748869 - RNA, 22 nt, Human
agguacaguagacagacaguua

SEQ ID NO: 748870 - RNA, 22 nt, Human
aggcuggcugacuucugaagca

SEQ ID NO: 748871 - RNA, 22 nt, Human
auuauaaaccuuugaggguggg

SEQ ID NO: 748872 - RNA, 22 nt, Human
cucuuaaaauuaccuuugcaaa

SEQ ID NO: 748873 - RNA, 22 nt, Human
ugccuugguucucuacuuggag

SEQ ID NO: 748874 - RNA, 20 nt, Human
gaaucuuuccccaugcaaug

SEQ ID NO: 748875 - RNA, 22 nt, Human
uuucuuagggacuguaaaauag

SEQ ID NO: 748876 - RNA, 22 nt, Human
caacauucuuaucacuauaagc

SEQ ID NO: 748877 - RNA, 22 nt, Human
augccaggccccacgcugggca

SEQ ID NO: 748878 - RNA, 22 nt, Human
cccuggcugcuaccagguagcu

SEQ ID NO: 748879 - RNA, 22 nt, Human
cugugcacacgugcccaacagu

SEQ ID NO: 748880 - RNA, 22 nt, Human
ccucagcauccucaugcucagu

SEQ ID NO: 748881 - RNA, 22 nt, Human
agcacaaaaacauucccagagu

SEQ ID NO: 748882 - RNA, 23 nt, Human
uuuccaggugaccgucagaauua

SEQ ID NO: 748883 - RNA, 21 nt, Human
cagagagcuagaacuucauga

SEQ ID NO: 748884 - RNA, 22 nt, Human
ucucacuggguauaaaugagua

SEQ ID NO: 748885 - RNA, 22 nt, Human
gagaggcccugaagcccacaga

SEQ ID NO: 748886 - RNA, 18 nt, Human
caagagcugcuccuggcc

SEQ ID NO: 748887 - RNA, 22 nt, Human
uugaaaagcaaaugauggguag

SEQ ID NO: 748888 - RNA, 22 nt, Human
aggcucaggcaggaauggcgga

SEQ ID NO: 748889 - RNA, 22 nt, Human
aguuuagaguucaaauuaguuc

SEQ ID NO: 748890 - RNA, 22 nt, Human
cugugugucauuugucaauccu

SEQ ID NO: 748891 - RNA, 22 nt, Human
ucuuggcugcguccuggcugug

SEQ ID NO: 748892 - RNA, 22 nt, Human
ugacuuuaauaggauuuugcau

SEQ ID NO: 748893 - RNA, 22 nt, Human
acagcaggcccauacuggaagg

SEQ ID NO: 748894 - RNA, 22 nt, Human
guggcgcagaggguggcagaga

SEQ ID NO: 748895 - RNA, 22 nt, Human
gcagcuggaagugacacucugu

SEQ ID NO: 748896 - RNA, 22 nt, Human
agcagauaggacauuucauucu

SEQ ID NO: 748897 - RNA, 22 nt, Human
ucugaagagcuuuggaaguaug

SEQ ID NO: 748898 - RNA, 22 nt, Human
agagacugucacauaacagagg

SEQ ID NO: 748899 - RNA, 22 nt, Human
cuauaucauaaaucugaagagg

SEQ ID NO: 748900 - RNA, 22 nt, Human
gcaggccucuguugagggccuu

SEQ ID NO: 748901 - RNA, 22 nt, Human
uuucuacuucuccugaaugucu

SEQ ID NO: 748902 - RNA, 22 nt, Human
uuacaguaacauuuucagucug

SEQ ID NO: 748903 - RNA, 22 nt, Human
auuacagaagauaugcucaaca

SEQ ID NO: 748904 - RNA, 22 nt, Human
cacucugggggcugccgcugcc

SEQ ID NO: 748905 - RNA, 22 nt, Human
ccaaguacucucaccaaagcuu

SEQ ID NO: 748906 - RNA, 22 nt, Human
ucacaggguuuggaagccuccu

SEQ ID NO: 748907 - RNA, 22 nt, Human
ggcugcacgccucucagcuugc

SEQ ID NO: 748908 - RNA, 22 nt, Human
ucuccuuuaagauuuccucagg

SEQ ID NO: 748909 - RNA, 22 nt, Human
gguggggucacgacagagggaa

SEQ ID NO: 748910 - RNA, 22 nt, Human
ccaggaccacacgacaggagag

SEQ ID NO: 748911 - RNA, 22 nt, Human
aagaugcuggcaggaauagcua

SEQ ID NO: 748912 - RNA, 22 nt, Human
agcuaaggaacucuguaacacc

SEQ ID NO: 748913 - RNA, 22 nt, Human
gcccagcuuuuugaggcaggca

SEQ ID NO: 748914 - RNA, 22 nt, Human
ucagacuugacuuuguaaguuu

SEQ ID NO: 748915 - RNA, 21 nt, Human
ggugcuccuccaugcugcucu

SEQ ID NO: 748916 - RNA, 22 nt, Human
ggcaaccugagcuuguggagaa

SEQ ID NO: 748917 - RNA, 22 nt, Human
ugaaguggacccuggacagacc

SEQ ID NO: 748918 - RNA, 22 nt, Human
ccuuggcuugcacacggccacc

SEQ ID NO: 748919 - RNA, 22 nt, Human
agggccaguucuaccucugaau

SEQ ID NO: 748920 - RNA, 22 nt, Human
aagaaagguguguuugcagaug

SEQ ID NO: 748921 - RNA, 22 nt, Human
ucacccagcagcugcuucugcu

SEQ ID NO: 748922 - RNA, 22 nt, Human
gaggcugcggggaggagccugc

SEQ ID NO: 748923 - RNA, 22 nt, Human
uucaacuagauuuauacaauuc

SEQ ID NO: 748924 - RNA, 22 nt, Human
uucuguuugccauauauaguag

SEQ ID NO: 748925 - RNA, 22 nt, Human
uuucuauuggcgucacuguugu

SEQ ID NO: 748926 - RNA, 22 nt, Human
cccugcagccuugcaugccuuc

SEQ ID NO: 748927 - RNA, 22 nt, Human
uguauuuccugguuuagaucaa

SEQ ID NO: 748928 - RNA, 18 nt, Human
gacaggugggugagacca

SEQ ID NO: 748929 - RNA, 22 nt, Human
cagccagguucaaguccuuaua

SEQ ID NO: 748930 - RNA, 22 nt, Human
gaggacucugcaggcugcuccu

SEQ ID NO: 748931 - RNA, 19 nt, Human
aggucuaaucauaagacaa

SEQ ID NO: 748932 - RNA, 22 nt, Human
ugaggcagguaagcaaguuuug

SEQ ID NO: 748933 - RNA, 22 nt, Human
agccagagauugagaugcaggc

SEQ ID NO: 748934 - RNA, 22 nt, Human
acuugggucaaguagcucacag

SEQ ID NO: 748935 - RNA, 22 nt, Human
aggaauuuggaauuuuuccugu

SEQ ID NO: 748936 - RNA, 22 nt, Human
cacaugcccagaacuucucauu

SEQ ID NO: 748937 - RNA, 22 nt, Human
gcuccuggcucuggccaaggga

SEQ ID NO: 748938 - RNA, 22 nt, Human
gcaaagaaaguuuuaaugaggu

SEQ ID NO: 748939 - RNA, 22 nt, Human
agacaauggagagcagaguacu

SEQ ID NO: 748940 - RNA, 22 nt, Human
uccacccagcacacugugguag

SEQ ID NO: 748941 - RNA, 22 nt, Human
gggcugcuguagagaacauguu

SEQ ID NO: 748942 - RNA, 22 nt, Human
cuucuuuuacaggucuuggguu

SEQ ID NO: 748943 - RNA, 22 nt, Human
gcuccagggaacagaauguacu

SEQ ID NO: 748944 - RNA, 22 nt, Human
aagaucagaacuuuauacagga

SEQ ID NO: 748945 - RNA, 22 nt, Human
gaggcuccgugcugcugcccug

SEQ ID NO: 748946 - RNA, 20 nt, Human
aguacaauguaugauucaga

SEQ ID NO: 748947 - RNA, 22 nt, Human
cucugagggucuaaggagucac

SEQ ID NO: 748948 - RNA, 22 nt, Human
ccugccuggaucagccauccug

SEQ ID NO: 748949 - RNA, 22 nt, Human
uagacaacuggagauagucuga

SEQ ID NO: 748950 - RNA, 22 nt, Human
aguuauuucaguaacauaauag

SEQ ID NO: 748951 - RNA, 22 nt, Human
uuucuaauucuaacuggcagag

SEQ ID NO: 748952 - RNA, 22 nt, Human
cugcugugcaggugccuaugau

SEQ ID NO: 748953 - RNA, 22 nt, Human
gccuugcugauuaccuuccuuu

SEQ ID NO: 748954 - RNA, 22 nt, Human
ucaaugauagacaagaucuaag

SEQ ID NO: 748955 - RNA, 22 nt, Human
cccagcccaucucaaaggucua

SEQ ID NO: 748956 - RNA, 22 nt, Human
gagacugggggcuuggccuuuu

SEQ ID NO: 748957 - RNA, 22 nt, Human
guuuaaguuucagaagcuaaga

SEQ ID NO: 748958 - RNA, 22 nt, Human
uuugcuuugggagguugucugg

SEQ ID NO: 748959 - RNA, 22 nt, Human
cagcuuucuuuccauaagguuu

SEQ ID NO: 748960 - RNA, 22 nt, Human
cagaagcugcagugaucuggga

SEQ ID NO: 748961 - RNA, 19 nt, Human
uucucagagcuugcagcac

SEQ ID NO: 748962 - RNA, 22 nt, Human
gagcauggauagaaggugggau

SEQ ID NO: 748963 - RNA, 22 nt, Human
uuucugcugugcuuucuugcgu

SEQ ID NO: 748964 - RNA, 22 nt, Human
auauuucaugggguuccauacu

SEQ ID NO: 748965 - RNA, 18 nt, Human
ggaaaccacaggguucug

SEQ ID NO: 748966 - RNA, 22 nt, Human
ggugaggaauuggggacugacc

SEQ ID NO: 748967 - RNA, 22 nt, Human
ucagcaagcagggggauguuca

SEQ ID NO: 748968 - RNA, 22 nt, Human
guccugugucccagagaaagag

SEQ ID NO: 748969 - RNA, 22 nt, Human
guuuagacuccuuggucuucug

SEQ ID NO: 748970 - RNA, 22 nt, Human
aauaauccugcccgucucuccg

SEQ ID NO: 748971 - RNA, 22 nt, Human
aguacccuagggugggagcuca

SEQ ID NO: 748972 - RNA, 22 nt, Human
gcagggcucauucuaguacaau

SEQ ID NO: 748973 - RNA, 22 nt, Human
uuacacaugucucaguggaaau

SEQ ID NO: 748974 - RNA, 22 nt, Human
gggcaggugcccagggccagag

SEQ ID NO: 748975 - RNA, 17 nt, Human
cuguuccccacuacuca

SEQ ID NO: 748976 - RNA, 22 nt, Human
ggauccagaggugaagauggga

SEQ ID NO: 748977 - RNA, 22 nt, Human
gcucuucucagauuguacacuc

SEQ ID NO: 748978 - RNA, 22 nt, Human
agccuggcuguaaccucauggu

SEQ ID NO: 748979 - RNA, 18 nt, Human
gucuggaggucaggagcu

SEQ ID NO: 748980 - RNA, 22 nt, Human
caggucagagucccccuguccu

SEQ ID NO: 748981 - RNA, 22 nt, Human
acacaguucuuagcaggugucu

SEQ ID NO: 748982 - RNA, 22 nt, Human
ucuuagcaugcauguauaaaua

SEQ ID NO: 748983 - RNA, 22 nt, Human
cagagguaccagcagccucugg

SEQ ID NO: 748984 - RNA, 22 nt, Human
caugcauuuucuauucacucag

SEQ ID NO: 748985 - RNA, 22 nt, Human
gagcugccugugugccaugaug

SEQ ID NO: 748986 - RNA, 22 nt, Human
augaauuuuucuaagcuuuugu

SEQ ID NO: 748987 - RNA, 22 nt, Human
aagcuucuuagaaugcaugugc

SEQ ID NO: 748988 - RNA, 22 nt, Human
agcugcagguucagcauuccac

SEQ ID NO: 748989 - RNA, 22 nt, Human
uggggcagggaugggaaacuau

SEQ ID NO: 748990 - RNA, 22 nt, Human
agugucugcuuaucaguucuug

SEQ ID NO: 748991 - RNA, 22 nt, Human
agccagccaguucacuaggaaa

SEQ ID NO: 748992 - RNA, 22 nt, Human
aggggauggagcuggaaggcag

SEQ ID NO: 748993 - RNA, 22 nt, Human
uccagcccuguggcuuccaccc

SEQ ID NO: 748994 - RNA, 22 nt, Human
cuggccuggggggacacauccc

SEQ ID NO: 748995 - RNA, 22 nt, Human
gaacaaacacaucccagcagug

SEQ ID NO: 748996 - RNA, 22 nt, Human
aagugaaugaugugaaguguaa

SEQ ID NO: 748997 - RNA, 22 nt, Human
ugacaauugugggcaguuugug

SEQ ID NO: 748998 - RNA, 21 nt, Human
uggccaaggaauagaagcucu

SEQ ID NO: 748999 - RNA, 22 nt, Human
uuccauaacugaccgaaugcau

SEQ ID NO: 749000 - RNA, 22 nt, Human
agcuguuuaaaugacuuacuuu

SEQ ID NO: 749001 - RNA, 22 nt, Human
aauuuagauugauaaacaugga

SEQ ID NO: 749002 - RNA, 18 nt, Human
aaggcacaggagaacauu

SEQ ID NO: 749003 - RNA, 22 nt, Human
gccaccaggagcccaguccaaa

SEQ ID NO: 749004 - RNA, 22 nt, Human
aagcugugagcuggaugcucca

SEQ ID NO: 749005 - RNA, 22 nt, Human
ucauaguuuuacuuaguggugu

SEQ ID NO: 749006 - RNA, 22 nt, Human
uuuuuacacuuagcauugagcg

SEQ ID NO: 749007 - RNA, 22 nt, Human
uaggaauuuugcaugggaauuu

SEQ ID NO: 749008 - RNA, 20 nt, Human
cccuggccuguuucaugccc

SEQ ID NO: 749009 - RNA, 22 nt, Human
acagaugaggaauuuauuuggu

SEQ ID NO: 749010 - RNA, 22 nt, Human
ccucggaggcggaggcugcagu

SEQ ID NO: 749011 - RNA, 22 nt, Human
uaccuucaggcugcccuuugau

SEQ ID NO: 749012 - RNA, 20 nt, Human
agagagcacaggcaggaaag

SEQ ID NO: 749013 - RNA, 22 nt, Human
aggccacaagaacuaccccauc

SEQ ID NO: 749014 - RNA, 20 nt, Human
gugcuucagaagccauugcu

SEQ ID NO: 749015 - RNA, 22 nt, Human
cagagugaaaacugagcucaaa

SEQ ID NO: 749016 - RNA, 22 nt, Human
ggagguggcagggaacauaauu

SEQ ID NO: 749017 - RNA, 22 nt, Human
ggucauugucagagccuguacu

SEQ ID NO: 749018 - RNA, 22 nt, Human
ucucuacaaaaauuagcaugca

SEQ ID NO: 749019 - RNA, 22 nt, Human
acacugucugggacucaggagu

SEQ ID NO: 749020 - RNA, 22 nt, Human
ugcuggccggccaggugcugag

SEQ ID NO: 749021 - RNA, 22 nt, Human
uugcagacagugagagugaaag

SEQ ID NO: 749022 - RNA, 22 nt, Human
ucccaaggcacagggcagggac

SEQ ID NO: 749023 - RNA, 22 nt, Human
gagaacacaugcagacugggua

SEQ ID NO: 749024 - RNA, 22 nt, Human
agcaaauaccaaaggcugaugu

SEQ ID NO: 749025 - RNA, 22 nt, Human
uguuuucauuugauguaacaaa

SEQ ID NO: 749026 - RNA, 22 nt, Human
agucuucccugugccagagugu

SEQ ID NO: 749027 - RNA, 22 nt, Human
ucacccaggcuggacugcagug

SEQ ID NO: 749028 - RNA, 22 nt, Human
cugucugucccgucaccgcccc

SEQ ID NO: 749029 - RNA, 22 nt, Human
uuuggcucugcgucuucaccca

SEQ ID NO: 749030 - RNA, 22 nt, Human
accaggcuggagugcaguggcg

SEQ ID NO: 749031 - RNA, 22 nt, Human
ugggaggucucuugcggccuag

SEQ ID NO: 749032 - RNA, 20 nt, Human
aggaagcugagauguagagg

SEQ ID NO: 749033 - RNA, 22 nt, Human
augucaaaucaguuuuaucaga

SEQ ID NO: 749034 - RNA, 22 nt, Human
cacugagccaggagcaauauca

SEQ ID NO: 749035 - RNA, 22 nt, Human
cugcacccucaaacuccugggc

SEQ ID NO: 749036 - RNA, 22 nt, Human
agguccuggacugcucuuguua

SEQ ID NO: 749037 - RNA, 22 nt, Human
aggguggagggagucccugagc

SEQ ID NO: 749038 - RNA, 22 nt, Human
augcuuuuccuaaaaugaugcc

SEQ ID NO: 749039 - RNA, 22 nt, Human
aucuguguguugaguucucagc

SEQ ID NO: 749040 - RNA, 22 nt, Human
ucucuucugaccuagccuugga

SEQ ID NO: 749041 - RNA, 22 nt, Human
uggagcugguaaacagugacau

SEQ ID NO: 749042 - RNA, 22 nt, Human
cauguacacucauguaacuaua

SEQ ID NO: 749043 - RNA, 22 nt, Human
ugucauuaguuucagccauucu

SEQ ID NO: 749044 - RNA, 22 nt, Human
cuuaauuucaaacugcuaguga

SEQ ID NO: 749045 - RNA, 17 nt, Human
uuaguguaucuguuuug

SEQ ID NO: 749046 - RNA, 22 nt, Human
uuccacaaugguuaagcucguu

SEQ ID NO: 749047 - RNA, 22 nt, Human
ggcacagggaggcccuggugug

SEQ ID NO: 749048 - RNA, 22 nt, Human
uggcccagagcacugcugggca

SEQ ID NO: 749049 - RNA, 21 nt, Human
uuauugaauguuuaccgugug

SEQ ID NO: 749050 - RNA, 22 nt, Human
acuuccugcagcuucucagccc

SEQ ID NO: 749051 - RNA, 22 nt, Human
ugagaaugaaucuuuugcuuuc

SEQ ID NO: 749052 - RNA, 22 nt, Human
aucugucuuccaccacacaucc

SEQ ID NO: 749053 - RNA, 22 nt, Human
agaaagggcuauuuugagguag

SEQ ID NO: 749054 - RNA, 22 nt, Human
gauacaguauuuaaagagcaac

SEQ ID NO: 749055 - RNA, 20 nt, Human
caggucuucauguggcuguc

SEQ ID NO: 749056 - RNA, 22 nt, Human
aagagguugucugugaugaguu

SEQ ID NO: 749057 - RNA, 22 nt, Human
uacuuguuuuguguuccuaaac

SEQ ID NO: 749058 - RNA, 22 nt, Human
uauagauagacugacgauacag

SEQ ID NO: 749059 - RNA, 22 nt, Human
acagcuuuucugauagauccug

SEQ ID NO: 749060 - RNA, 22 nt, Human
uccucccuucucacugggaagg

SEQ ID NO: 749061 - RNA, 22 nt, Human
ccacagagucuuccuucucuuc

SEQ ID NO: 749062 - RNA, 22 nt, Human
gcuggguccuaugcugguagag

SEQ ID NO: 749063 - RNA, 22 nt, Human
uucaguaugauuccuccaguag

SEQ ID NO: 749064 - RNA, 19 nt, Human
ucugggaaugaugccagca

SEQ ID NO: 749065 - RNA, 22 nt, Human
uuccuugaaugagucauggaaa

SEQ ID NO: 749066 - RNA, 21 nt, Human
ccauaauuuuguuucagaagu

SEQ ID NO: 749067 - RNA, 22 nt, Human
ccacauggagcaggaggugggg

SEQ ID NO: 749068 - RNA, 23 nt, Human
gggaccugguaggaggugauugg

SEQ ID NO: 749069 - RNA, 22 nt, Human
aaaaaggcuaagcaucuugugc

SEQ ID NO: 749070 - RNA, 22 nt, Human
uugaaauauggauugaccuuga

SEQ ID NO: 749071 - RNA, 22 nt, Human
cacagugucugugcuucagugu

SEQ ID NO: 749072 - RNA, 22 nt, Human
auuuuguuauagaacucuguga

SEQ ID NO: 749073 - RNA, 22 nt, Human
agaaauguuacaguuguuauuu

SEQ ID NO: 749074 - RNA, 22 nt, Human
cucuggcuggcugggccucagu

SEQ ID NO: 749075 - RNA, 21 nt, Human
cagagccuguguugacaguug

SEQ ID NO: 749076 - RNA, 22 nt, Human
acacagguacacauauguaccu

SEQ ID NO: 749077 - RNA, 22 nt, Human
cauaucuucugacaugaucagg

SEQ ID NO: 749078 - RNA, 22 nt, Human
caaauaagcaauuccauucuuc

SEQ ID NO: 749079 - RNA, 22 nt, Human
uuuagugagugugaaucaaaug

SEQ ID NO: 749080 - RNA, 22 nt, Human
uauauuaacacccacuugccuc

SEQ ID NO: 749081 - RNA, 22 nt, Human
ugcggaggucggugcugcgggc

SEQ ID NO: 749082 - RNA, 22 nt, Human
auucagaauugugggcaguaca

SEQ ID NO: 749083 - RNA, 22 nt, Human
gugacaaaggucaagcuuuuga

SEQ ID NO: 749084 - RNA, 22 nt, Human
agggagcuauuucaggguuauu

SEQ ID NO: 749085 - RNA, 22 nt, Human
uccacuucauccagggucacca

SEQ ID NO: 749086 - RNA, 22 nt, Human
uccaaaggcccugaguucacuu

SEQ ID NO: 749087 - RNA, 22 nt, Human
guguuaaaaaucccaugauaug

SEQ ID NO: 749088 - RNA, 22 nt, Human
cugugugugagaagcagguuga

SEQ ID NO: 749089 - RNA, 22 nt, Human
guccaugauucugugacacccu

SEQ ID NO: 749090 - RNA, 22 nt, Human
cagugccucuuaagugucaccc

SEQ ID NO: 749091 - RNA, 22 nt, Human
caucaucucuggcccuugaagu

SEQ ID NO: 749092 - RNA, 22 nt, Human
ugaagccauaggacagaggaua

SEQ ID NO: 749093 - RNA, 18 nt, Human
ugaggcccgcagaggugg

SEQ ID NO: 749094 - RNA, 22 nt, Human
uauaacaggaaguauucaaaca

SEQ ID NO: 749095 - RNA, 22 nt, Human
aaacucuaagacacuguacaau

SEQ ID NO: 749096 - RNA, 22 nt, Human
cagcaggacccaggaauccugc

SEQ ID NO: 749097 - RNA, 22 nt, Human
cuucagcaucuuuuucuugggg

SEQ ID NO: 749098 - RNA, 20 nt, Human
ggcaccaggcuaggauugga

SEQ ID NO: 749099 - RNA, 22 nt, Human
aagggcugagaaguggggcugg

SEQ ID NO: 749100 - RNA, 22 nt, Human
gagagaagaacaaugucauuca

SEQ ID NO: 749101 - RNA, 22 nt, Human
gaaaguaugccaucuaccucuu

SEQ ID NO: 749102 - RNA, 22 nt, Human
caagucaagcaugcccuuauuu

SEQ ID NO: 749103 - RNA, 22 nt, Human
cagggcucccaaauaucucuuc

SEQ ID NO: 749104 - RNA, 22 nt, Human
uuacaguuacugguacuguuaa

SEQ ID NO: 749105 - RNA, 20 nt, Human
aagagcauaguacaggaaga

SEQ ID NO: 749106 - RNA, 22 nt, Human
agaagccucauccucucuagug

SEQ ID NO: 749107 - RNA, 22 nt, Human
aguucucuuuagcucauauggu

SEQ ID NO: 749108 - RNA, 22 nt, Human
ucauuuucccacugaagcuguc

SEQ ID NO: 749109 - RNA, 21 nt, Human
aggcagcucaggcccagagag

SEQ ID NO: 749110 - RNA, 22 nt, Human
uuguagaauuuggaucucggca

SEQ ID NO: 749111 - RNA, 22 nt, Human
aagagagaacacagcuugggca

SEQ ID NO: 749112 - RNA, 22 nt, Human
auucugaugccuggguacugcc

SEQ ID NO: 749113 - RNA, 22 nt, Human
aagaauguucauuaaacuguug

SEQ ID NO: 749114 - RNA, 22 nt, Human
uccacauccauugcuugacuuu

SEQ ID NO: 749115 - RNA, 22 nt, Human
cuucaguuaugugccaaggaca

SEQ ID NO: 749116 - RNA, 22 nt, Human
cauaucuuaugguuuucuaagu

SEQ ID NO: 749117 - RNA, 22 nt, Human
uaacuguauuuuaggucucauu

SEQ ID NO: 749118 - RNA, 22 nt, Human
ucucuuaaauacuucacaucuc

SEQ ID NO: 749119 - RNA, 22 nt, Human
cugggcucuucccagauccaga

SEQ ID NO: 749120 - RNA, 22 nt, Human
ugggcaggugcuauuuuccaug

SEQ ID NO: 749121 - RNA, 22 nt, Human
ggcagcaaguaggauucuuauu

SEQ ID NO: 749122 - RNA, 17 nt, Human
auuucacuuagcaugag

SEQ ID NO: 749123 - RNA, 22 nt, Human
uggcugagaccaucagggugua

SEQ ID NO: 749124 - RNA, 22 nt, Human
uuguauuucuuccggucucauu

SEQ ID NO: 749125 - RNA, 22 nt, Human
uucuccacccacucuuuuguug

SEQ ID NO: 749126 - RNA, 22 nt, Human
gggauggcucaaaggagucagg

SEQ ID NO: 749127 - RNA, 22 nt, Human
gcuccaggaggcucccgcgucu

SEQ ID NO: 749128 - RNA, 22 nt, Human
gcugccuguggcccuucugggu

SEQ ID NO: 749129 - RNA, 22 nt, Human
ggcucaguguuuguggaacaua

SEQ ID NO: 749130 - RNA, 22 nt, Human
acagagcaauaacagggagagg

SEQ ID NO: 749131 - RNA, 22 nt, Human
gcuugcaagauagguuacuuaa

SEQ ID NO: 749132 - RNA, 22 nt, Human
ccggcgggcagcggcagugagc

SEQ ID NO: 749133 - RNA, 22 nt, Human
uagaggcauuaaugaauaaaca

SEQ ID NO: 749134 - RNA, 22 nt, Human
uuucagaauagcaaagcaagcu

SEQ ID NO: 749135 - RNA, 19 nt, Human
gcuguuaaggacccucgga

SEQ ID NO: 749136 - RNA, 22 nt, Human
auacauauaugguacuuccugg

SEQ ID NO: 749137 - RNA, 22 nt, Human
gcugucuugaugauuggaugcu

SEQ ID NO: 749138 - RNA, 22 nt, Human
ucagaacagguuguacuauguc

SEQ ID NO: 749139 - RNA, 22 nt, Human
cagagccagcuguccuuggcau

SEQ ID NO: 749140 - RNA, 22 nt, Human
cagccuggacagcgaccagagu

SEQ ID NO: 749141 - RNA, 22 nt, Human
ugcaguguggccaugucagcua

SEQ ID NO: 749142 - RNA, 22 nt, Human
ugccccagaccuacugaauggg

SEQ ID NO: 749143 - RNA, 22 nt, Human
ccaggagagcaggcgugcagcu

SEQ ID NO: 749144 - RNA, 22 nt, Human
ucugaggaauaagaaggaagug

SEQ ID NO: 749145 - RNA, 22 nt, Human
uaugcauauguguucauuggag

SEQ ID NO: 749146 - RNA, 22 nt, Human
ugccccucagggaacggguauc

SEQ ID NO: 749147 - RNA, 22 nt, Human
uaccuugggagacgccaggccc

SEQ ID NO: 749148 - RNA, 22 nt, Human
ucaggaggaugucggcaaauuu

SEQ ID NO: 749149 - RNA, 22 nt, Human
aggcuccuuguucaucauccau

SEQ ID NO: 749150 - RNA, 22 nt, Human
agcagcaauggaaagcaacaca

SEQ ID NO: 749151 - RNA, 22 nt, Human
ucugggggcgaccagggacugc

SEQ ID NO: 749152 - RNA, 22 nt, Human
aacucacuuuguggcuucugaa

SEQ ID NO: 749153 - RNA, 22 nt, Human
cagaggcauuacugaaaaggug

SEQ ID NO: 749154 - RNA, 22 nt, Human
cuguaaauaaugacaguugacu

SEQ ID NO: 749155 - RNA, 22 nt, Human
gcaaagucugcaucuggaucag

SEQ ID NO: 749156 - RNA, 22 nt, Human
auguggauuugggagugaucag

SEQ ID NO: 749157 - RNA, 22 nt, Human
uaguuuaggugggguagacaga

SEQ ID NO: 749158 - RNA, 22 nt, Human
agugucaaugcucuguuaaaaa

SEQ ID NO: 749159 - RNA, 22 nt, Human
acagggcuggcguugggacaga

SEQ ID NO: 749160 - RNA, 22 nt, Human
auucuuuucccaacugcuuuaa

SEQ ID NO: 749161 - RNA, 22 nt, Human
acuguaauauuuuaagaugucu

SEQ ID NO: 749162 - RNA, 22 nt, Human
aggauuucugugccuggaaaau

SEQ ID NO: 749163 - RNA, 22 nt, Human
uagcaucugaacuguugaaaag

SEQ ID NO: 749164 - RNA, 22 nt, Human
auuuagcaaaaaaugaugaagc

SEQ ID NO: 749165 - RNA, 22 nt, Human
caguaacuaggacaaggaggaa

SEQ ID NO: 749166 - RNA, 22 nt, Human
auuguauuuccagcuugaaugu

SEQ ID NO: 749167 - RNA, 22 nt, Human
gaagauuuucuccuuuaaauga

SEQ ID NO: 749168 - RNA, 22 nt, Human
gggcuccagccacuggcugagg

SEQ ID NO: 749169 - RNA, 22 nt, Human
aaagagcucacaguccacugga

SEQ ID NO: 749170 - RNA, 22 nt, Human
uuuuuccuaagcaguggagcug

SEQ ID NO: 749171 - RNA, 18 nt, Human
auggcuucugaguggagg

SEQ ID NO: 749172 - RNA, 18 nt, Human
gagcagaggaggguuuuu

SEQ ID NO: 749173 - RNA, 22 nt, Human
agguggcaggaggucagagaaa

SEQ ID NO: 749174 - RNA, 22 nt, Human
guuuugaagaagaccuugaaac

SEQ ID NO: 749175 - RNA, 22 nt, Human
gcaggaugggagcuucacucug

SEQ ID NO: 749176 - RNA, 20 nt, Human
uguccccaccaaaauuucau

SEQ ID NO: 749177 - RNA, 22 nt, Human
aaauaguaaagugguagccauc

SEQ ID NO: 749178 - RNA, 22 nt, Human
gcacagaaccagacaugaggca

SEQ ID NO: 749179 - RNA, 22 nt, Human
guccagcaggaugcaagugcca

SEQ ID NO: 749180 - RNA, 22 nt, Human
cauuuguaguuaaaaaugucuc

SEQ ID NO: 749181 - RNA, 22 nt, Human
uuacaguaauguauuauuuaac

SEQ ID NO: 749182 - RNA, 22 nt, Human
cuccagcucgcgagcucugcuc

SEQ ID NO: 749183 - RNA, 22 nt, Human
ugcugggcuucaacugccugag

SEQ ID NO: 749184 - RNA, 22 nt, Human
ugaggaaggaauugagguuuua

SEQ ID NO: 749185 - RNA, 22 nt, Human
ggccuugagagccagugcaggc

SEQ ID NO: 749186 - RNA, 22 nt, Human
uuugaaagagcugauacaugaa

SEQ ID NO: 749187 - RNA, 22 nt, Human
gccaggcagacaggucaucagg

SEQ ID NO: 749188 - RNA, 19 nt, Human
aggaauggaauuaauucug

SEQ ID NO: 749189 - RNA, 22 nt, Human
gaggaaacauuguagaagcagu

SEQ ID NO: 749190 - RNA, 22 nt, Human
ucuacugugguccuuguaacca

SEQ ID NO: 749191 - RNA, 22 nt, Human
uucauucuguuuggaaaggugg

SEQ ID NO: 749192 - RNA, 21 nt, Human
guauucuuuaugaagugaaaa

SEQ ID NO: 749193 - RNA, 22 nt, Human
auaaagcaaauaggacuauugc

SEQ ID NO: 749194 - RNA, 22 nt, Human
ucacauucucagcaucuauaca

SEQ ID NO: 749195 - RNA, 22 nt, Human
ucuucuaguaggccaagaagcu

SEQ ID NO: 749196 - RNA, 22 nt, Human
guuuauaaggcccaauauuucu

SEQ ID NO: 749197 - RNA, 22 nt, Human
ucauggaaacaaugcggaaaaa

SEQ ID NO: 749198 - RNA, 22 nt, Human
cagggugcagagcuaggguagu

SEQ ID NO: 749199 - RNA, 22 nt, Human
uucugggggaauacagcuauga

SEQ ID NO: 749200 - RNA, 22 nt, Human
ucauagaaguaguauccacauu

SEQ ID NO: 749201 - RNA, 22 nt, Human
agaaagugugucauacuaagug

SEQ ID NO: 749202 - RNA, 22 nt, Human
uuuaguguagcauucagaguca

SEQ ID NO: 749203 - RNA, 22 nt, Human
cacuuggaggaaggccuauuca

SEQ ID NO: 749204 - RNA, 22 nt, Human
aaggugcucacgggcucaggga

SEQ ID NO: 749205 - RNA, 22 nt, Human
gaaugaauuuuggauggugaag

SEQ ID NO: 749206 - RNA, 18 nt, Human
gccacccuccucgucucc

SEQ ID NO: 749207 - RNA, 22 nt, Human
aggcuggcagccaccucagcag

SEQ ID NO: 749208 - RNA, 22 nt, Human
auuccaguuaguggcagcuuau

SEQ ID NO: 749209 - RNA, 18 nt, Human
gcacucugacugcagagc

SEQ ID NO: 749210 - RNA, 22 nt, Human
gcccaggaguucaaggcugcag

SEQ ID NO: 749211 - RNA, 22 nt, Human
cauguggauaugaauuguagaa

SEQ ID NO: 749212 - RNA, 19 nt, Human
uccuuucuguuccugagau

SEQ ID NO: 749213 - RNA, 22 nt, Human
uaguaaacagcucugccacaau

SEQ ID NO: 749214 - RNA, 22 nt, Human
gaaucucaaggcuugugaggau

SEQ ID NO: 749215 - RNA, 22 nt, Human
aauguucaaaagcaucagugaa

SEQ ID NO: 749216 - RNA, 22 nt, Human
guggcagagccuugcggcuuug

SEQ ID NO: 749217 - RNA, 22 nt, Human
uucagagguuagagcaguggga

SEQ ID NO: 749218 - RNA, 22 nt, Human
ggagaggguagggguccugccc

SEQ ID NO: 749219 - RNA, 22 nt, Human
caagguuucgaguucccaacca

SEQ ID NO: 749220 - RNA, 22 nt, Human
cugccagcucaccggcucagac

SEQ ID NO: 749221 - RNA, 22 nt, Human
uuucaggagagaccagaaauga

SEQ ID NO: 749222 - RNA, 22 nt, Human
uuguuuaauaucgugaaguacu

SEQ ID NO: 749223 - RNA, 22 nt, Human
ccaaaguccacaguuuacauua

SEQ ID NO: 749224 - RNA, 22 nt, Human
cugcaugagcugucaguggagg

SEQ ID NO: 749225 - RNA, 22 nt, Human
gggccuggggacaccaccauga

SEQ ID NO: 749226 - RNA, 18 nt, Human
ucaggagacacagacgca

SEQ ID NO: 749227 - RNA, 22 nt, Human
acacuucauagcaagguuggag

SEQ ID NO: 749228 - RNA, 22 nt, Human
aagcucagcaugucuccuagaa

SEQ ID NO: 749229 - RNA, 22 nt, Human
aagugucuacauuugcuaacca

SEQ ID NO: 749230 - RNA, 22 nt, Human
agaucacagagccaagauucca

SEQ ID NO: 749231 - RNA, 22 nt, Human
agggccaguucagaggacaugg

SEQ ID NO: 749232 - RNA, 22 nt, Human
uauggaaauaauuagacaagug

SEQ ID NO: 749233 - RNA, 22 nt, Human
uuauuccauucaguucaacaag

SEQ ID NO: 749234 - RNA, 20 nt, Human
guauuagguguuccucuuuc

SEQ ID NO: 749235 - RNA, 22 nt, Human
cucucuucccgugaguguugca

SEQ ID NO: 749236 - RNA, 22 nt, Human
uagaacacuugaccacugcucc

SEQ ID NO: 749237 - RNA, 22 nt, Human
acuaagaccuagauacuagggg

SEQ ID NO: 749238 - RNA, 22 nt, Human
ucugucucuuuguucugugagu

SEQ ID NO: 749239 - RNA, 22 nt, Human
ugaggcaggaguucaggcugcg

SEQ ID NO: 749240 - RNA, 22 nt, Human
gaaaguauuuaaguccauauuu

SEQ ID NO: 749241 - RNA, 22 nt, Human
ucaucaaagcgcuuggaguagg

SEQ ID NO: 749242 - RNA, 22 nt, Human
auuugucucugcacuuuacuca

SEQ ID NO: 749243 - RNA, 22 nt, Human
gcagcaggagaguaauagcggu

SEQ ID NO: 749244 - RNA, 22 nt, Human
cauggaucauaaaugugcuaaa

SEQ ID NO: 749245 - RNA, 22 nt, Human
ugcucugggcuaucugagaaag

SEQ ID NO: 749246 - RNA, 22 nt, Human
gagcuccacuuagcaaggccac

SEQ ID NO: 749247 - RNA, 22 nt, Human
cccucaguuuuccagugugggc

SEQ ID NO: 749248 - RNA, 22 nt, Human
gugcaaaaauaauugugguuuu

SEQ ID NO: 749249 - RNA, 23 nt, Human
ccuggcuguggauuugggccugc

SEQ ID NO: 749250 - RNA, 22 nt, Human
cguggcaguggaaggcugggug

SEQ ID NO: 749251 - RNA, 22 nt, Human
cucacaguuuucuguaguccaa

SEQ ID NO: 749252 - RNA, 22 nt, Human
uuguaguggccaaagaacucuu

SEQ ID NO: 749253 - RNA, 22 nt, Human
acugucaucugguagaugaugg

SEQ ID NO: 749254 - RNA, 22 nt, Human
uuugaaagcaccauuugaguag

SEQ ID NO: 749255 - RNA, 22 nt, Human
ggcugugccucaaggcuacuca

SEQ ID NO: 749256 - RNA, 22 nt, Human
ugccaauuugccccuuugcuga

SEQ ID NO: 749257 - RNA, 20 nt, Human
agugagauugcugcucuagc

SEQ ID NO: 749258 - RNA, 18 nt, Human
gccagcugcacggcccuc

SEQ ID NO: 749259 - RNA, 22 nt, Human
caucuuugaacucuguauaaac

SEQ ID NO: 749260 - RNA, 22 nt, Human
ugaggagcuucuggaaagugca

SEQ ID NO: 749261 - RNA, 22 nt, Human
ucucuggcuccugccgggucca

SEQ ID NO: 749262 - RNA, 18 nt, Human
gagcugggagaaggaagg

SEQ ID NO: 749263 - RNA, 22 nt, Human
aaaucguggaagacaccagugg

SEQ ID NO: 749264 - RNA, 22 nt, Human
gaggccaggagugcuguaaguu

SEQ ID NO: 749265 - RNA, 22 nt, Human
aacuucucagccugcaccuggc

SEQ ID NO: 749266 - RNA, 22 nt, Human
agagacauggagaggcaaaguu

SEQ ID NO: 749267 - RNA, 22 nt, Human
uuucaugugcaauuagcaauau

SEQ ID NO: 749268 - RNA, 22 nt, Human
aagccacuauuaaauaaugauu

SEQ ID NO: 749269 - RNA, 17 nt, Human
cccuggcaaagaauggc

SEQ ID NO: 749270 - RNA, 22 nt, Human
cccagcaguacccaagcccuug

SEQ ID NO: 749271 - RNA, 22 nt, Human
cuggaauggguuucaggcacug

SEQ ID NO: 749272 - RNA, 22 nt, Human
ggugcauggaaagaguaaguaa

SEQ ID NO: 749273 - RNA, 22 nt, Human
uaugucuuguguuugcuaaucu

SEQ ID NO: 749274 - RNA, 22 nt, Human
ggacauggaaaucggcuugcuc

SEQ ID NO: 749275 - RNA, 22 nt, Human
aacaaacaguuaaguguggaug

SEQ ID NO: 749276 - RNA, 22 nt, Human
guauaguuugcgauuugugguu

SEQ ID NO: 749277 - RNA, 22 nt, Human
cagagagaggccacugcuauua

SEQ ID NO: 749278 - RNA, 17 nt, Human
cuagagagaaagagcua

SEQ ID NO: 749279 - RNA, 22 nt, Human
agcacagacuggucccaggucu

SEQ ID NO: 749280 - RNA, 22 nt, Human
uauuaaauuauggauuuaggag

SEQ ID NO: 749281 - RNA, 22 nt, Human
acagccugacuuuuguugucac

SEQ ID NO: 749282 - RNA, 22 nt, Human
uacauugugauaggaagucacc

SEQ ID NO: 749283 - RNA, 22 nt, Human
uggcucacaggacucucugggc

SEQ ID NO: 749284 - RNA, 22 nt, Human
uuccaguucuggcuuugccacu

SEQ ID NO: 749285 - RNA, 22 nt, Human
gauuucuugauaauucaaaucc

SEQ ID NO: 749286 - RNA, 22 nt, Human
gcuguggaguacagagcugguu

SEQ ID NO: 749287 - RNA, 17 nt, Human
gggcugacaguggccuc

SEQ ID NO: 749288 - RNA, 22 nt, Human
cuggcaugcccaggguaugugg

SEQ ID NO: 749289 - RNA, 21 nt, Human
uccaggcugaugaugucaacu

SEQ ID NO: 749290 - RNA, 22 nt, Human
ccuucugucucccucauauuga

SEQ ID NO: 749291 - RNA, 22 nt, Human
ugaggccaagaaaagcugggug

SEQ ID NO: 749292 - RNA, 22 nt, Human
uggggagagauugaggaguuuu

SEQ ID NO: 749293 - RNA, 21 nt, Human
aggucccagguuugggcagca

SEQ ID NO: 749294 - RNA, 22 nt, Human
aagaccauuuaauggagaaaga

SEQ ID NO: 749295 - RNA, 22 nt, Human
guagcaucuguuggcugcuccu

SEQ ID NO: 749296 - RNA, 21 nt, Human
cacaccaaacaggaacaggga

SEQ ID NO: 749297 - RNA, 22 nt, Human
cuccaagggcucccagacgucu

SEQ ID NO: 749298 - RNA, 22 nt, Human
gagugugucggucagcguggcg

SEQ ID NO: 749299 - RNA, 19 nt, Human
acuggcaguuucugcaugg

SEQ ID NO: 749300 - RNA, 22 nt, Human
aaagauuugaaauuaggcauca

SEQ ID NO: 749301 - RNA, 22 nt, Human
ccuggagggcgccgcacagucc

SEQ ID NO: 749302 - RNA, 22 nt, Human
uauggcuuucuccauagggcag

SEQ ID NO: 749303 - RNA, 22 nt, Human
ucugucuuugagaucucagccu

SEQ ID NO: 749304 - RNA, 22 nt, Human
uccuugacugugaggaacuagc

SEQ ID NO: 749305 - RNA, 22 nt, Human
auugcaaaauuguccuguggaa

SEQ ID NO: 749306 - RNA, 22 nt, Human
uccugcugggucuaacucuggu

SEQ ID NO: 749307 - RNA, 22 nt, Human
aaugagacacgugaagcagaug

SEQ ID NO: 749308 - RNA, 22 nt, Human
cagaagcacuaggaggaaacgu

SEQ ID NO: 749309 - RNA, 22 nt, Human
acaucuuuauacuaguccuuga

SEQ ID NO: 749310 - RNA, 23 nt, Human
agagcuuucuaaaauguaaaucu

SEQ ID NO: 749311 - RNA, 22 nt, Human
agcugauuccacuuuuucccca

SEQ ID NO: 749312 - RNA, 22 nt, Human
ugcuuggcuucauuuaaguuuu

SEQ ID NO: 749313 - RNA, 22 nt, Human
auguccagagccggccugcuga

SEQ ID NO: 749314 - RNA, 23 nt, Human
ugaacaguaugugggacauugag

SEQ ID NO: 749315 - RNA, 22 nt, Human
uucaagucuguuucauugcaug

SEQ ID NO: 749316 - RNA, 21 nt, Human
acauguaagagaguuucaaga

SEQ ID NO: 749317 - RNA, 20 nt, Human
uucuuaaagaccucacuuug

SEQ ID NO: 749318 - RNA, 22 nt, Human
gguggagagcuggaugagaggu

SEQ ID NO: 749319 - RNA, 22 nt, Human
agggccagggaaacgaucagca

SEQ ID NO: 749320 - RNA, 19 nt, Human
ugcuuugccuugauuagcu

SEQ ID NO: 749321 - RNA, 22 nt, Human
auucucucuagaagcugagaug

SEQ ID NO: 749322 - RNA, 23 nt, Human
ugacacaggucaaaaauaagaug

SEQ ID NO: 749323 - RNA, 22 nt, Human
gaaaagggcaagagagagggca

SEQ ID NO: 749324 - RNA, 22 nt, Human
aaggugggcagaucacaagguc

SEQ ID NO: 749325 - RNA, 22 nt, Human
cauuauauuacagcacuguuaa

SEQ ID NO: 749326 - RNA, 22 nt, Human
accaguggaauuauucuguggu

SEQ ID NO: 749327 - RNA, 22 nt, Human
caacugccauacagcuccaugg

SEQ ID NO: 749328 - RNA, 22 nt, Human
ugcagagagauccucaggguuu

SEQ ID NO: 749329 - RNA, 20 nt, Human
uucuuaguagagcauguauu

SEQ ID NO: 749330 - RNA, 22 nt, Human
cuggggaacaauuugccacacu

SEQ ID NO: 749331 - RNA, 22 nt, Human
ucagugcaggaaucucuagcca

SEQ ID NO: 749332 - RNA, 22 nt, Human
uacaguuaaaaaguucaauggu

SEQ ID NO: 749333 - RNA, 22 nt, Human
agucuguguacuggguuucugu

SEQ ID NO: 749334 - RNA, 22 nt, Human
uguguguaaggaagcuuuaugg

SEQ ID NO: 749335 - RNA, 22 nt, Human
uuuuuguauagaaaugaacuaa

SEQ ID NO: 749336 - RNA, 22 nt, Human
acacagauuuuacauguuaugc

SEQ ID NO: 749337 - RNA, 22 nt, Human
cugccugggccggccacccucu

SEQ ID NO: 749338 - RNA, 22 nt, Human
aaauacaguguguguucuuuga

SEQ ID NO: 749339 - RNA, 22 nt, Human
gauuucaaguaucuugggcgag

SEQ ID NO: 749340 - RNA, 22 nt, Human
uuucaguucaguuuauuauauc

SEQ ID NO: 749341 - RNA, 22 nt, Human
uguaagauauucagcuuauuga

SEQ ID NO: 749342 - RNA, 22 nt, Human
ucugcuggccuuagcaggucua

SEQ ID NO: 749343 - RNA, 22 nt, Human
aauaaacaaauccuuccuuccc

SEQ ID NO: 749344 - RNA, 22 nt, Human
ccaccuggggcuguggccccuu

SEQ ID NO: 749345 - RNA, 22 nt, Human
cagagaaagggugaauuccuuc

SEQ ID NO: 749346 - RNA, 22 nt, Human
ccagccucaucauauuccugcu

SEQ ID NO: 749347 - RNA, 22 nt, Human
acaguuaagcaguaugaucaca

SEQ ID NO: 749348 - RNA, 22 nt, Human
aaaaaugugaccacaggguguu

SEQ ID NO: 749349 - RNA, 22 nt, Human
aguuaaacuugccuuuauuccu

SEQ ID NO: 749350 - RNA, 22 nt, Human
uaucgguaagauggaaaucagg

SEQ ID NO: 749351 - RNA, 22 nt, Human
uagaggaaauuuccaaggugag

SEQ ID NO: 749352 - RNA, 22 nt, Human
ugugcauagacuuucaccaccu

SEQ ID NO: 749353 - RNA, 22 nt, Human
uuugcauuucucguaaggaaac

SEQ ID NO: 749354 - RNA, 22 nt, Human
agagagcucuggcugggugacc

SEQ ID NO: 749355 - RNA, 22 nt, Human
cuucuggguugcaggucuuggc

SEQ ID NO: 749356 - RNA, 22 nt, Human
ucacuuuuggguuuccaguaga

SEQ ID NO: 749357 - RNA, 22 nt, Human
gcuucauuacugacagucugug

SEQ ID NO: 749358 - RNA, 22 nt, Human
ucauauuaggguaaugauaaga

SEQ ID NO: 749359 - RNA, 20 nt, Human
ucccaggcugggcuccagcu

SEQ ID NO: 749360 - RNA, 22 nt, Human
uuuucaucucugcuuuguaccu

SEQ ID NO: 749361 - RNA, 21 nt, Human
cgggcuggccgggcccucacc

SEQ ID NO: 749362 - RNA, 18 nt, Human
ucuggaacaacuucaugu

SEQ ID NO: 749363 - RNA, 22 nt, Human
ugcaauuucaaauaucagaaag

SEQ ID NO: 749364 - RNA, 22 nt, Human
ggaaggaggggcaaagcaguuc

SEQ ID NO: 749365 - RNA, 22 nt, Human
auguggcuccuuacucaucagc

SEQ ID NO: 749366 - RNA, 22 nt, Human
auaccucuggcacucaagacuu

SEQ ID NO: 749367 - RNA, 22 nt, Human
caaacauagugaagcaaugaca

SEQ ID NO: 749368 - RNA, 22 nt, Human
uuaguugacccccaguccuggc

SEQ ID NO: 749369 - RNA, 22 nt, Human
guuacacaggaaaacauuagca

SEQ ID NO: 749370 - RNA, 22 nt, Human
auugagcaccuacaguauuacc

SEQ ID NO: 749371 - RNA, 22 nt, Human
ucuucuguuaccacagcgauga

SEQ ID NO: 749372 - RNA, 22 nt, Human
cuguuuauuacguaauuaauau

SEQ ID NO: 749373 - RNA, 22 nt, Human
ugcuuugcucucacuguaaggu

SEQ ID NO: 749374 - RNA, 22 nt, Human
uccaucacuauuaucuacaaca

SEQ ID NO: 749375 - RNA, 22 nt, Human
uucaccagauuuuguauaguca

SEQ ID NO: 749376 - RNA, 22 nt, Human
cugccccugccaggcagcuguc

SEQ ID NO: 749377 - RNA, 22 nt, Human
cuuccugggucagccuggaggu

SEQ ID NO: 749378 - RNA, 21 nt, Human
gggcgaggccugauguggcuc

SEQ ID NO: 749379 - RNA, 22 nt, Human
ccagccagaaguccgggcuucu

SEQ ID NO: 749380 - RNA, 22 nt, Human
aggggagccagggcugcgaguu

SEQ ID NO: 749381 - RNA, 22 nt, Human
agguuucaugggagacaacuca

SEQ ID NO: 749382 - RNA, 18 nt, Human
caaauacuguugucuuau

SEQ ID NO: 749383 - RNA, 22 nt, Human
ucaggcuugaggucuguaugug

SEQ ID NO: 749384 - RNA, 22 nt, Human
uacauucccccaauuaccaaug

SEQ ID NO: 749385 - RNA, 22 nt, Human
aggcacagagagguuaaaugca

SEQ ID NO: 749386 - RNA, 22 nt, Human
ggugaggcuaagugacacaggg

SEQ ID NO: 749387 - RNA, 19 nt, Human
uagcucugucuuauuccaa

SEQ ID NO: 749388 - RNA, 22 nt, Human
aagucacauucugagguauugg

SEQ ID NO: 749389 - RNA, 22 nt, Human
caggcuguguuccuggaacccc

SEQ ID NO: 749390 - RNA, 22 nt, Human
gacagccaucagcacacgcugc

SEQ ID NO: 749391 - RNA, 22 nt, Human
gccagcugaggccgugcaggcu

SEQ ID NO: 749392 - RNA, 22 nt, Human
uccaggcuggacaugaggcggg

SEQ ID NO: 749393 - RNA, 22 nt, Human
ugcaggugugggcaggggagca

SEQ ID NO: 749394 - RNA, 22 nt, Human
uucccucuccuacucaggaaag

SEQ ID NO: 749395 - RNA, 22 nt, Human
caggcagccuucucgucucaca

SEQ ID NO: 749396 - RNA, 22 nt, Human
acugaaggcuuaacucuuucau

SEQ ID NO: 749397 - RNA, 22 nt, Human
uaauccaggguauucuaguuuc

SEQ ID NO: 749398 - RNA, 22 nt, Human
ucacauuuuaucugagauugac

SEQ ID NO: 749399 - RNA, 22 nt, Human
gaggcugggaaguccaagacca

SEQ ID NO: 749400 - RNA, 21 nt, Human
ugagccaggcugacggcugug

SEQ ID NO: 749401 - RNA, 17 nt, Human
gccaaaggguuccaauc

SEQ ID NO: 749402 - RNA, 22 nt, Human
aaacugcaauuacuuuugcagc

SEQ ID NO: 749403 - RNA, 22 nt, Human
guuauuuuaacuucucaguaau

SEQ ID NO: 749404 - RNA, 22 nt, Human
ucuuugaugugguuaauuauga

SEQ ID NO: 749405 - RNA, 22 nt, Human
cagcuugggucaggugccugcu

SEQ ID NO: 749406 - RNA, 22 nt, Human
ucugggcucugucagcaccucu

SEQ ID NO: 749407 - RNA, 22 nt, Human
ugggcagagaguagaggcaacg

SEQ ID NO: 749408 - RNA, 22 nt, Human
agcacagauggauguauucauu

SEQ ID NO: 749409 - RNA, 20 nt, Human
acauugauuauguuuguaga

SEQ ID NO: 749410 - RNA, 22 nt, Human
uucuccagaccacugccucugu

SEQ ID NO: 749411 - RNA, 22 nt, Human
uggagcuggaagacagugauau

SEQ ID NO: 749412 - RNA, 22 nt, Human
uuucuguuguacuuaaacuagg

SEQ ID NO: 749413 - RNA, 22 nt, Human
acaguuugcacuguucaucaaa

SEQ ID NO: 749414 - RNA, 22 nt, Human
ggucccugcccaaagcccuugg

SEQ ID NO: 749415 - RNA, 22 nt, Human
ucuugauuuuguuaaaauuaga

SEQ ID NO: 749416 - RNA, 22 nt, Human
caggagguacauagauucagau

SEQ ID NO: 749417 - RNA, 20 nt, Human
ugacaacaaaaugguaauuu

SEQ ID NO: 749418 - RNA, 22 nt, Human
acauuugucuggcuagaaaguu

SEQ ID NO: 749419 - RNA, 22 nt, Human
gcuacagguauauagaugaaac

SEQ ID NO: 749420 - RNA, 22 nt, Human
uuucacauguggaaugccaggu

SEQ ID NO: 749421 - RNA, 22 nt, Human
gggcuaaguggaucagucagga

SEQ ID NO: 749422 - RNA, 22 nt, Human
uuuuauugggaguccucuacug

SEQ ID NO: 749423 - RNA, 22 nt, Human
auuaaguguauugcugagggua

SEQ ID NO: 749424 - RNA, 22 nt, Human
cagcaucucuuuuugcauuccu

SEQ ID NO: 749425 - RNA, 22 nt, Human
ucugucaccgagggcauccaaa

SEQ ID NO: 749426 - RNA, 22 nt, Human
gccugucugcgucacgcuuauu

SEQ ID NO: 749427 - RNA, 22 nt, Human
agggaagcugcuggguccaccu

SEQ ID NO: 749428 - RNA, 22 nt, Human
ugcaacauuauuaaacuaagca

SEQ ID NO: 749429 - RNA, 20 nt, Human
cuacuuuaggcacugagaau

SEQ ID NO: 749430 - RNA, 20 nt, Human
cuguaucagguuacaaagua

SEQ ID NO: 749431 - RNA, 22 nt, Human
auguagcugcagaugauaaugc

SEQ ID NO: 749432 - RNA, 22 nt, Human
agagggggcagcggaccaguga

SEQ ID NO: 749433 - RNA, 22 nt, Human
uugcagggcuuggggauuacag

SEQ ID NO: 749434 - RNA, 22 nt, Human
ucaggcaaucugacagcuggag

SEQ ID NO: 749435 - RNA, 22 nt, Human
uugaaugcaugguucacucugu

SEQ ID NO: 749436 - RNA, 22 nt, Human
ucaugguauauuucacucuuua

SEQ ID NO: 749437 - RNA, 22 nt, Human
ggacagcauaucagcagggcag

SEQ ID NO: 749438 - RNA, 22 nt, Human
cugggcauuuuucucuguuaca

SEQ ID NO: 749439 - RNA, 22 nt, Human
agccaugauuuucucauuuuca

SEQ ID NO: 749440 - RNA, 22 nt, Human
aauucacauauacauuauuccu

SEQ ID NO: 749441 - RNA, 22 nt, Human
ccugcacccaggccgcaccucu

SEQ ID NO: 749442 - RNA, 18 nt, Human
ggccagcuccugaggcag

SEQ ID NO: 749443 - RNA, 22 nt, Human
cugcccugacugaccuuuugaa

SEQ ID NO: 749444 - RNA, 22 nt, Human
uuaacuguaucauacuguuuca

SEQ ID NO: 749445 - RNA, 22 nt, Human
agaaaucauucccaaacccaua

SEQ ID NO: 749446 - RNA, 22 nt, Human
cauguguagugaaauaagcagu

SEQ ID NO: 749447 - RNA, 23 nt, Human
ccuggcagcaaacgaggagguua

SEQ ID NO: 749448 - RNA, 22 nt, Human
gcaagcaagcagguagagcuga

SEQ ID NO: 749449 - RNA, 22 nt, Human
cuagccagaugauucccaaaua

SEQ ID NO: 749450 - RNA, 22 nt, Human
aguguacauaguuaggaacauc

SEQ ID NO: 749451 - RNA, 23 nt, Human
cagaaaugacaguaagcacccug

SEQ ID NO: 749452 - RNA, 17 nt, Human
cucuguacaggaaagag

SEQ ID NO: 749453 - RNA, 22 nt, Human
gugugucuuucauuucaugagg

SEQ ID NO: 749454 - RNA, 21 nt, Human
gcccucaggggaggauggccu

SEQ ID NO: 749455 - RNA, 22 nt, Human
uuacuacagagagagcuccagu

SEQ ID NO: 749456 - RNA, 22 nt, Human
acaguguguccuaaaggucugg

SEQ ID NO: 749457 - RNA, 22 nt, Human
ccagugugaaaggucauuuauc

SEQ ID NO: 749458 - RNA, 22 nt, Human
gcccugagacugaagaacuguc

SEQ ID NO: 749459 - RNA, 22 nt, Human
guguggucgaaguucucccgga

SEQ ID NO: 749460 - RNA, 22 nt, Human
ugcuuucauauugccuaugacu

SEQ ID NO: 749461 - RNA, 22 nt, Human
uaaugcuaacaucauaucacug

SEQ ID NO: 749462 - RNA, 22 nt, Human
cugggcccacgagggcucuggg

SEQ ID NO: 749463 - RNA, 22 nt, Human
uccucacagucaacacuuugag

SEQ ID NO: 749464 - RNA, 22 nt, Human
aauggcuuugaguauuuucugg

SEQ ID NO: 749465 - RNA, 22 nt, Human
acuucaugaacuaagggaucgg

SEQ ID NO: 749466 - RNA, 22 nt, Human
agagcauccauuuuugucacau

SEQ ID NO: 749467 - RNA, 22 nt, Human
ucagacaggcuucuuucucccu

SEQ ID NO: 749468 - RNA, 22 nt, Human
ggguacaaagauuucauaagau

SEQ ID NO: 749469 - RNA, 17 nt, Human
uguucucuucagaaauc

SEQ ID NO: 749470 - RNA, 20 nt, Human
ggagcuggcauccagccucu

SEQ ID NO: 749471 - RNA, 22 nt, Human
ugaaacuugcuaauugcacgua

SEQ ID NO: 749472 - RNA, 21 nt, Human
ucugucuuccucagccuaagg

SEQ ID NO: 749473 - RNA, 22 nt, Human
uagaggagaguugcuggaugga

SEQ ID NO: 749474 - RNA, 22 nt, Human
uguauuuugugaggaucacucu

SEQ ID NO: 749475 - RNA, 22 nt, Human
caacugaaaagauucuacgcag

SEQ ID NO: 749476 - RNA, 22 nt, Human
gcucugagugauuaaggagcuu

SEQ ID NO: 749477 - RNA, 22 nt, Human
aacagaaggggguauuuacauu

SEQ ID NO: 749478 - RNA, 22 nt, Human
aaagugcuaaauaagcccugaa

SEQ ID NO: 749479 - RNA, 22 nt, Human
uugccuggagggacauggagac

SEQ ID NO: 749480 - RNA, 22 nt, Human
ucacuggcaacuugugcucccu

SEQ ID NO: 749481 - RNA, 22 nt, Human
aggcugcuggcaggcguggacg

SEQ ID NO: 749482 - RNA, 22 nt, Human
gcugggagccguaccugucacg

SEQ ID NO: 749483 - RNA, 22 nt, Human
agcacauuuaaguaugaaauau

SEQ ID NO: 749484 - RNA, 22 nt, Human
cagaagaauggugucugagcuc

SEQ ID NO: 749485 - RNA, 22 nt, Human
aaacagcaauggagaagccagg

SEQ ID NO: 749486 - RNA, 22 nt, Human
auucuggaaagcuauucucucu

SEQ ID NO: 749487 - RNA, 22 nt, Human
uacuucauuccuuuguaaaaug

SEQ ID NO: 749488 - RNA, 22 nt, Human
cuuguacaggaauccaugguau

SEQ ID NO: 749489 - RNA, 22 nt, Human
cagcaucaccgccauuucugau

SEQ ID NO: 749490 - RNA, 22 nt, Human
aguccguuucuccuugaaggca

SEQ ID NO: 749491 - RNA, 22 nt, Human
aagccagugggcauagcaguug

SEQ ID NO: 749492 - RNA, 22 nt, Human
gcuccugggcucuaccuugcua

SEQ ID NO: 749493 - RNA, 22 nt, Human
ugaggcagccugcauuaaagag

SEQ ID NO: 749494 - RNA, 22 nt, Human
auuaguguacaucucacacgca

SEQ ID NO: 749495 - RNA, 22 nt, Human
ugaacacugccauauuuaagaa

SEQ ID NO: 749496 - RNA, 22 nt, Human
cagaaugaguagcaucuucacc

SEQ ID NO: 749497 - RNA, 22 nt, Human
gaggcugguaggaaaggaaaca

SEQ ID NO: 749498 - RNA, 22 nt, Human
ucaggggcagcugugcuuugug

SEQ ID NO: 749499 - RNA, 22 nt, Human
gggaggugaaaggucaugugug

SEQ ID NO: 749500 - RNA, 22 nt, Human
uugacucuaaauuuacuuuucc

SEQ ID NO: 749501 - RNA, 22 nt, Human
uaaauaaguucuucauuguuug

SEQ ID NO: 749502 - RNA, 22 nt, Human
acaggggauugauuggaagucu

SEQ ID NO: 749503 - RNA, 22 nt, Human
ucucuggaguauaaccagggau

SEQ ID NO: 749504 - RNA, 22 nt, Human
ucaauguucugauucuuuugca

SEQ ID NO: 749505 - RNA, 22 nt, Human
gacacucuccuccaguggauag

SEQ ID NO: 749506 - RNA, 22 nt, Human
ucuagagacuauaauguguccu

SEQ ID NO: 749507 - RNA, 22 nt, Human
aaacaguuuucucauuuagugu

SEQ ID NO: 749508 - RNA, 22 nt, Human
gagggaguaacguacuacagug

SEQ ID NO: 749509 - RNA, 22 nt, Human
agcccuggggcuggucuuggaa

SEQ ID NO: 749510 - RNA, 22 nt, Human
aauccugaggcaaagagaugag

SEQ ID NO: 749511 - RNA, 22 nt, Human
aagccagggauuccugagggag

SEQ ID NO: 749512 - RNA, 22 nt, Human
cacaggcaccccugacugcuca

SEQ ID NO: 749513 - RNA, 22 nt, Human
gaaaauuuaauucucuucugug

SEQ ID NO: 749514 - RNA, 22 nt, Human
caaauccuggagccaugguaac

SEQ ID NO: 749515 - RNA, 22 nt, Human
cgcuuaauuuucuauagaaaag

SEQ ID NO: 749516 - RNA, 22 nt, Human
uagaggcacagucuauguagag

SEQ ID NO: 749517 - RNA, 22 nt, Human
aagggagacaguugugugagga

SEQ ID NO: 749518 - RNA, 22 nt, Human
gcagaggugaguuucucagcug

SEQ ID NO: 749519 - RNA, 22 nt, Human
auccccagaaaauaggugccua

SEQ ID NO: 749520 - RNA, 22 nt, Human
uauauucaaugauuaguaucag

SEQ ID NO: 749521 - RNA, 22 nt, Human
agcaggcacuaugccaggaucu

SEQ ID NO: 749522 - RNA, 22 nt, Human
gcccaagaucacacuggaaauc

SEQ ID NO: 749523 - RNA, 22 nt, Human
uggcagugaugcuuaugguuug

SEQ ID NO: 749524 - RNA, 21 nt, Human
agguggucugcagcagcugaa

SEQ ID NO: 749525 - RNA, 22 nt, Human
cuugagucauauaaagacagag

SEQ ID NO: 749526 - RNA, 22 nt, Human
ucugugucagcagcacucagcc

SEQ ID NO: 749527 - RNA, 22 nt, Human
gcucagcacuuucuccaaccac

SEQ ID NO: 749528 - RNA, 20 nt, Human
gcuaccagaacaaggccauu

SEQ ID NO: 749529 - RNA, 22 nt, Human
ucucuggcuuagguugagugca

SEQ ID NO: 749530 - RNA, 22 nt, Human
aagauugacggcuuugagugcu

SEQ ID NO: 749531 - RNA, 22 nt, Human
aucugaaaagccucuuacuccu

SEQ ID NO: 749532 - RNA, 22 nt, Human
aggguagggcccggagacagac

SEQ ID NO: 749533 - RNA, 22 nt, Human
cuggagucucuucuguagcuac

SEQ ID NO: 749534 - RNA, 22 nt, Human
acuuuacaggcacuucaaguau

SEQ ID NO: 749535 - RNA, 19 nt, Human
ucuuuggcuucuggaucag

SEQ ID NO: 749536 - RNA, 22 nt, Human
gcugugugaccugggcaagucu

SEQ ID NO: 749537 - RNA, 22 nt, Human
uuuuaguuacugcaguagcaaa

SEQ ID NO: 749538 - RNA, 22 nt, Human
ucucacugauuugagaccaagg

SEQ ID NO: 749539 - RNA, 22 nt, Human
ccuguuuaucuaucuagagaug

SEQ ID NO: 749540 - RNA, 22 nt, Human
ucuuugcaugcauuuucccuua

SEQ ID NO: 749541 - RNA, 20 nt, Human
uucaugguguauuucuuucu

SEQ ID NO: 749542 - RNA, 22 nt, Human
ucuguccuguuuccuccugaca

SEQ ID NO: 749543 - RNA, 22 nt, Human
cccagagccgcuccccuacuuc

SEQ ID NO: 749544 - RNA, 22 nt, Human
ucaggaaagaguaauguauaca

SEQ ID NO: 749545 - RNA, 22 nt, Human
ugggcucugaagucagucugcu

SEQ ID NO: 749546 - RNA, 22 nt, Human
uacagugacuggacuuugucau

SEQ ID NO: 749547 - RNA, 22 nt, Human
acagcagcuuccugacuguacu

SEQ ID NO: 749548 - RNA, 22 nt, Human
gaagccaggggccugacaggca

SEQ ID NO: 749549 - RNA, 22 nt, Human
gcaggcacaugggcgggucugg

SEQ ID NO: 749550 - RNA, 19 nt, Human
cuuuucaagccaucaguuu

SEQ ID NO: 749551 - RNA, 22 nt, Human
ucacuuugacggccaacuucua

SEQ ID NO: 749552 - RNA, 22 nt, Human
uuuucaguaaugucuacauaau

SEQ ID NO: 749553 - RNA, 22 nt, Human
gcuucccaaacuuguggauaga

SEQ ID NO: 749554 - RNA, 22 nt, Human
ugaaaguugcacauaagagaau

SEQ ID NO: 749555 - RNA, 22 nt, Human
uuuucaugucauguccuugagg

SEQ ID NO: 749556 - RNA, 22 nt, Human
ggcagcucgucaggcugcggcg

SEQ ID NO: 749557 - RNA, 22 nt, Human
ggcgccgcacucggugcagccg

SEQ ID NO: 749558 - RNA, 22 nt, Human
gagcaaagcuuuuagggccuuu

SEQ ID NO: 749559 - RNA, 22 nt, Human
cccuuccugggugucccggagu

SEQ ID NO: 749560 - RNA, 22 nt, Human
ucccugggagaugaugaugagg

SEQ ID NO: 749561 - RNA, 22 nt, Human
uggcuacaaguguguuuaguuu

SEQ ID NO: 749562 - RNA, 22 nt, Human
ugaagagauagaaguacaugcu

SEQ ID NO: 749563 - RNA, 22 nt, Human
aucuggaguuucaguuuucugg

SEQ ID NO: 749564 - RNA, 22 nt, Human
uuucuaggcacagugucuuccc

SEQ ID NO: 749565 - RNA, 22 nt, Human
ucaggaacuucuaggaaagcug

SEQ ID NO: 749566 - RNA, 22 nt, Human
uccucaggugacuagguaucuu

SEQ ID NO: 749567 - RNA, 22 nt, Human
auacauacauguacacauaaau

SEQ ID NO: 749568 - RNA, 22 nt, Human
agacccccuuuaauggaagugc

SEQ ID NO: 749569 - RNA, 22 nt, Human
ugcugcuggaucuuacucaucu

SEQ ID NO: 749570 - RNA, 22 nt, Human
uuugggcaguagauguaucacu

SEQ ID NO: 749571 - RNA, 22 nt, Human
aacacaguuucugcauugguag

SEQ ID NO: 749572 - RNA, 22 nt, Human
cuguguuuggacaacuuuucag

SEQ ID NO: 749573 - RNA, 22 nt, Human
uugcaggggagaggaacaaaca

SEQ ID NO: 749574 - RNA, 22 nt, Human
cagaagucuuucuguuucaccu

SEQ ID NO: 749575 - RNA, 22 nt, Human
ucacaaaagcuuuugaauuugg

SEQ ID NO: 749576 - RNA, 22 nt, Human
uucauuacauucaaaaggcauu

SEQ ID NO: 749577 - RNA, 22 nt, Human
uucuauguuaguaugggucucc

SEQ ID NO: 749578 - RNA, 22 nt, Human
uucauggcaggagucagaagcu

SEQ ID NO: 749579 - RNA, 22 nt, Human
aggaggccccuccuggguugcu

SEQ ID NO: 749580 - RNA, 22 nt, Human
cagacuguggcuucuuggaggg

SEQ ID NO: 749581 - RNA, 22 nt, Human
uguuaaacagauauugcccaca

SEQ ID NO: 749582 - RNA, 22 nt, Human
gggcuggcuaagacuuuucugu

SEQ ID NO: 749583 - RNA, 22 nt, Human
aaacuaaggugcuguggacuga

SEQ ID NO: 749584 - RNA, 22 nt, Human
ccuccuggcuuuucccauugaa

SEQ ID NO: 749585 - RNA, 22 nt, Human
uaacucucacagugcaacauga

SEQ ID NO: 749586 - RNA, 22 nt, Human
acugggaaggaaaggaauguaa

SEQ ID NO: 749587 - RNA, 22 nt, Human
cucuucucugcagccuuugaag

SEQ ID NO: 749588 - RNA, 20 nt, Human
ggcagcucacuacuuucugu

SEQ ID NO: 749589 - RNA, 22 nt, Human
augguuuauccuuuaccagucg

SEQ ID NO: 749590 - RNA, 22 nt, Human
acuguacauauggauucuaaga

SEQ ID NO: 749591 - RNA, 22 nt, Human
cggggcuguagcacagcugagc

SEQ ID NO: 749592 - RNA, 22 nt, Human
uggggugggcaugcgcuguccu

SEQ ID NO: 749593 - RNA, 22 nt, Human
cugcuggggucagagcacuggg

SEQ ID NO: 749594 - RNA, 22 nt, Human
uaaaugcagauuccugagccua

SEQ ID NO: 749595 - RNA, 22 nt, Human
cagcaguggaacuacccaggga

SEQ ID NO: 749596 - RNA, 20 nt, Human
uuuuccagaaaguaucauug

SEQ ID NO: 749597 - RNA, 22 nt, Human
cucugggguuagaucugaugcu

SEQ ID NO: 749598 - RNA, 22 nt, Human
agaggccagaucaucauagaug

SEQ ID NO: 749599 - RNA, 22 nt, Human
auaacagacuuagaguuacaag

SEQ ID NO: 749600 - RNA, 22 nt, Human
agccaucauuucugucacuggc

SEQ ID NO: 749601 - RNA, 22 nt, Human
gaggcccaaugcuucccuccuu

SEQ ID NO: 749602 - RNA, 22 nt, Human
uauacacaccuccaaagcagga

SEQ ID NO: 749603 - RNA, 22 nt, Human
aagcacaucucaaacuucaucu

SEQ ID NO: 749604 - RNA, 22 nt, Human
ccacagaagauggggagagugg

SEQ ID NO: 749605 - RNA, 22 nt, Human
ccucugggcuggaaaauuaaug

SEQ ID NO: 749606 - RNA, 22 nt, Human
ucugagcagggcaguguccaug

SEQ ID NO: 749607 - RNA, 22 nt, Human
cagcucugccaucaucugccuu

SEQ ID NO: 749608 - RNA, 22 nt, Human
cacuucaauuaacuucagcauu

SEQ ID NO: 749609 - RNA, 21 nt, Human
ugcgugugcauggccuucggg

SEQ ID NO: 749610 - RNA, 22 nt, Human
cacacuuugugcuaaucuauuu

SEQ ID NO: 749611 - RNA, 22 nt, Human
uugcaacuucucccaucacucu

SEQ ID NO: 749612 - RNA, 22 nt, Human
uugcuuuacaaaaauugauggu

SEQ ID NO: 749613 - RNA, 22 nt, Human
guuuacacuccaggcuggggug

SEQ ID NO: 749614 - RNA, 22 nt, Human
ucuuuccacauucucuguuuag

SEQ ID NO: 749615 - RNA, 22 nt, Human
gggcagguuauuggaguaggga

SEQ ID NO: 749616 - RNA, 22 nt, Human
gguggccugaauuagcucaggg

SEQ ID NO: 749617 - RNA, 22 nt, Human
cagagagaggggcugccuggcc

SEQ ID NO: 749618 - RNA, 22 nt, Human
agcacacaucacuucugcucau

SEQ ID NO: 749619 - RNA, 22 nt, Human
gaucuuuucagucuugguaguu

SEQ ID NO: 749620 - RNA, 22 nt, Human
aaagauuucacaucccaagccu

SEQ ID NO: 749621 - RNA, 22 nt, Human
uggccugcccagagcagcucug

SEQ ID NO: 749622 - RNA, 22 nt, Human
gcagggcugauguuauugacga

SEQ ID NO: 749623 - RNA, 22 nt, Human
gcaugcagggagggucuggcug

SEQ ID NO: 749624 - RNA, 22 nt, Human
aaaagucagucucuccuagcuc

SEQ ID NO: 749625 - RNA, 22 nt, Human
uuagucacuucuuccuucauca

SEQ ID NO: 749626 - RNA, 22 nt, Human
cucuggaguuagugaucugggc

SEQ ID NO: 749627 - RNA, 22 nt, Human
uguuuacauggagguuuucagc

SEQ ID NO: 749628 - RNA, 22 nt, Human
cagagugauggcaccugcuggg

SEQ ID NO: 749629 - RNA, 22 nt, Human
ggcacugaaccaggacacaagc

SEQ ID NO: 749630 - RNA, 22 nt, Human
gcaagcuguccuuuugcauggc

SEQ ID NO: 749631 - RNA, 22 nt, Human
agagcuuauaucuuggccaucc

SEQ ID NO: 749632 - RNA, 22 nt, Human
ugcaggagggaggguuacaguu

SEQ ID NO: 749633 - RNA, 22 nt, Human
gcacugaacuuuaaucauuucu

SEQ ID NO: 749634 - RNA, 22 nt, Human
ugucaucucacugauauagaug

SEQ ID NO: 749635 - RNA, 22 nt, Human
guggaguggccuggcccugaga

SEQ ID NO: 749636 - RNA, 22 nt, Human
ucuuuggauaucgcuagaccgu

SEQ ID NO: 749637 - RNA, 22 nt, Human
cugacagaugcugcuggcagua

SEQ ID NO: 749638 - RNA, 22 nt, Human
uauuaugaggacugguguaagg

SEQ ID NO: 749639 - RNA, 22 nt, Human
aaacuagauuaccacugcuaga

SEQ ID NO: 749640 - RNA, 22 nt, Human
acacaaauuguaggauaauugc

SEQ ID NO: 749641 - RNA, 22 nt, Human
cuggagucuuagguuaugguga

SEQ ID NO: 749642 - RNA, 22 nt, Human
acaugcaugguguuggguugga

SEQ ID NO: 749643 - RNA, 22 nt, Human
auggcugggaggagaguaugau

SEQ ID NO: 749644 - RNA, 22 nt, Human
cucagccccaauuugcccucuu

SEQ ID NO: 749645 - RNA, 22 nt, Human
ucaccaggcuccuguuaagaug

SEQ ID NO: 749646 - RNA, 22 nt, Human
cuucuucacacuggucugaagc

SEQ ID NO: 749647 - RNA, 22 nt, Human
aauguuaugugguucaacuuaa

SEQ ID NO: 749648 - RNA, 22 nt, Human
cacuuuauuauaaauuugagag

SEQ ID NO: 749649 - RNA, 22 nt, Human
gcaggaguuaggguaaaaauga

SEQ ID NO: 749650 - RNA, 22 nt, Human
gaggaaccaaaucagcuugcac

SEQ ID NO: 749651 - RNA, 22 nt, Human
ugcauauaucuuauuuuucugu

SEQ ID NO: 749652 - RNA, 22 nt, Human
cugugggaauacugcgagugua

SEQ ID NO: 749653 - RNA, 22 nt, Human
acagucugucccccaggugcua

SEQ ID NO: 749654 - RNA, 22 nt, Human
uuguaacuugugauuauaaucu

SEQ ID NO: 749655 - RNA, 22 nt, Human
acagggagugcaauucauauug

SEQ ID NO: 749656 - RNA, 22 nt, Human
aagagcuguaugccauaugauu

SEQ ID NO: 749657 - RNA, 22 nt, Human
aagaaccuauaugcugaugaau

SEQ ID NO: 749658 - RNA, 22 nt, Human
aggcagguccccuggaaggcac

SEQ ID NO: 749659 - RNA, 22 nt, Human
aaacacugauggauauuuuucc

SEQ ID NO: 749660 - RNA, 20 nt, Human
caggcagaggaugcugacca

SEQ ID NO: 749661 - RNA, 22 nt, Human
agucacauagaaguggguuuaa

SEQ ID NO: 749662 - RNA, 22 nt, Human
ugccuuuaaccagucuagacag

SEQ ID NO: 749663 - RNA, 22 nt, Human
aacagcaauagcacuauucauu

SEQ ID NO: 749664 - RNA, 22 nt, Human
guucuugccagcauccucaggu

SEQ ID NO: 749665 - RNA, 22 nt, Human
auuucaaguguugagcucauaa

SEQ ID NO: 749666 - RNA, 22 nt, Human
acauggguuauugugagguuaa

SEQ ID NO: 749667 - RNA, 22 nt, Human
aaagccuggguuccucacuauc

SEQ ID NO: 749668 - RNA, 22 nt, Human
ucuuagaugaauaaaaaguuau

SEQ ID NO: 749669 - RNA, 22 nt, Human
ugcuucuccauugaugcuaagu

SEQ ID NO: 749670 - RNA, 22 nt, Human
uugcuuuuuaauuaggaggcag

SEQ ID NO: 749671 - RNA, 22 nt, Human
caggcagcaucagucugcugua

SEQ ID NO: 749672 - RNA, 22 nt, Human
auuuauugaacacugacuaugu

SEQ ID NO: 749673 - RNA, 22 nt, Human
ugcaagugccaugugcacagug

SEQ ID NO: 749674 - RNA, 22 nt, Human
ccuggagcucacugggagccgg

SEQ ID NO: 749675 - RNA, 22 nt, Human
cuggcugguaauggaacgacag

SEQ ID NO: 749676 - RNA, 22 nt, Human
cagggucuuauaaggccaauuu

SEQ ID NO: 749677 - RNA, 22 nt, Human
ggagagcuuggagugcgauuuu

SEQ ID NO: 749678 - RNA, 22 nt, Human
uaccaugucuucaauaagucua

SEQ ID NO: 749679 - RNA, 22 nt, Human
aaacucugccauuuuuggccug

SEQ ID NO: 749680 - RNA, 21 nt, Human
acccaggggaagcagaaacug

SEQ ID NO: 749681 - RNA, 22 nt, Human
ucagcagagcgagaccaaguca

SEQ ID NO: 749682 - RNA, 22 nt, Human
uguccuggugcuccagguggcu

SEQ ID NO: 749683 - RNA, 22 nt, Human
cagcucugagacugaggcuaug

SEQ ID NO: 749684 - RNA, 22 nt, Human
uagcauuuggacauugucaccu

SEQ ID NO: 749685 - RNA, 22 nt, Human
ggguaccaagcugcuugggggc

SEQ ID NO: 749686 - RNA, 22 nt, Human
acauguuuugugccuugacuag

SEQ ID NO: 749687 - RNA, 21 nt, Human
ucagcaggcaccagaaggcug

SEQ ID NO: 749688 - RNA, 22 nt, Human
uggcucaguuucaguccugguu

SEQ ID NO: 749689 - RNA, 22 nt, Human
gagggggacguauccugguaug

SEQ ID NO: 749690 - RNA, 22 nt, Human
acaaggcuaauuuggaagauac

SEQ ID NO: 749691 - RNA, 22 nt, Human
cugggagcuuuuagaaaugcag

SEQ ID NO: 749692 - RNA, 22 nt, Human
aacccaggguggagguugcagu

SEQ ID NO: 749693 - RNA, 22 nt, Human
ccagaaaagcaucugguucuuu

SEQ ID NO: 749694 - RNA, 17 nt, Human
agucauauugugcaguu

SEQ ID NO: 749695 - RNA, 22 nt, Human
gacauugaguauuucuuuucuc

SEQ ID NO: 749696 - RNA, 19 nt, Human
uaaugcacuuaacacaugg

SEQ ID NO: 749697 - RNA, 22 nt, Human
ugucacaaggccaugaaaagaa

SEQ ID NO: 749698 - RNA, 22 nt, Human
ccucaggcaggaaacugucccg

SEQ ID NO: 749699 - RNA, 22 nt, Human
ugagaccuguaaugagaaauug

SEQ ID NO: 749700 - RNA, 21 nt, Human
ccugggagaauuggguguggc

SEQ ID NO: 749701 - RNA, 22 nt, Human
ucauguuugcccuaagaaaaag

SEQ ID NO: 749702 - RNA, 18 nt, Human
uuuauauggauagagacc

SEQ ID NO: 749703 - RNA, 22 nt, Human
uuucagcugguaaaggaguagc

SEQ ID NO: 749704 - RNA, 22 nt, Human
cucuggagaacgcuauggaucu

SEQ ID NO: 749705 - RNA, 22 nt, Human
uacaguguauguauuuguaggu

SEQ ID NO: 749706 - RNA, 22 nt, Human
uggagggcucuuucaccuggua

SEQ ID NO: 749707 - RNA, 22 nt, Human
gaggcucaccuagggagcacug

SEQ ID NO: 749708 - RNA, 22 nt, Human
cugugucccuugucccagagcc

SEQ ID NO: 749709 - RNA, 22 nt, Human
gacagcuucuaugugacgagca

SEQ ID NO: 749710 - RNA, 22 nt, Human
ugaggaaguugaucucaucagu

SEQ ID NO: 749711 - RNA, 22 nt, Human
caucugagggaaaacauguagu

SEQ ID NO: 749712 - RNA, 22 nt, Human
uuuuuuguagcaagcgcagaua

SEQ ID NO: 749713 - RNA, 22 nt, Human
gaauaaucauaucgucucacau

SEQ ID NO: 749714 - RNA, 22 nt, Human
auguuucaccagcaaauuaccu

SEQ ID NO: 749715 - RNA, 22 nt, Human
cagaugugauucuucccucagc

SEQ ID NO: 749716 - RNA, 22 nt, Human
gggcauggcgugugcuggauuc

SEQ ID NO: 749717 - RNA, 22 nt, Human
aaugccguguuucuuacguuca

SEQ ID NO: 749718 - RNA, 22 nt, Human
aguacugucagcaggguguuga

SEQ ID NO: 749719 - RNA, 22 nt, Human
cuguuucaauuugaggaucagc

SEQ ID NO: 749720 - RNA, 22 nt, Human
cucugggaugaggccuaggcac

SEQ ID NO: 749721 - RNA, 22 nt, Human
ccaguccugggagcuugcacug

SEQ ID NO: 749722 - RNA, 22 nt, Human
ggacaaagggcuagccacaacu

SEQ ID NO: 749723 - RNA, 22 nt, Human
cuggugggaggcaagguggaag

SEQ ID NO: 749724 - RNA, 22 nt, Human
gggggcgcacagucaccacaaa

SEQ ID NO: 749725 - RNA, 22 nt, Human
cuggaggaccccugccuggaag

SEQ ID NO: 749726 - RNA, 22 nt, Human
aguuucuaacauauagcauugg

SEQ ID NO: 749727 - RNA, 22 nt, Human
gggagcuggaugauugaggcaa

SEQ ID NO: 749728 - RNA, 22 nt, Human
gauucugagcugguguuuuacg

SEQ ID NO: 749729 - RNA, 22 nt, Human
gcagaggauagcauaugaaccu

SEQ ID NO: 749730 - RNA, 22 nt, Human
augcuuuagugucaaguuuggg

SEQ ID NO: 749731 - RNA, 22 nt, Human
aagauauagauggugguauaaa

SEQ ID NO: 749732 - RNA, 22 nt, Human
ucccucagucccuggacaggca

SEQ ID NO: 749733 - RNA, 19 nt, Human
aaggcuuggcugagcuggg

SEQ ID NO: 749734 - RNA, 17 nt, Human
agccccucagcgucacc

SEQ ID NO: 749735 - RNA, 22 nt, Human
uaaaguguuuguaugcagauaa

SEQ ID NO: 749736 - RNA, 22 nt, Human
uggugcaguagagcugucuggg

SEQ ID NO: 749737 - RNA, 22 nt, Human
agcagcaggguguaauugggca

SEQ ID NO: 749738 - RNA, 22 nt, Human
caaucacuccacaauaugguuc

SEQ ID NO: 749739 - RNA, 22 nt, Human
gccacagucacugcugcagggg

SEQ ID NO: 749740 - RNA, 22 nt, Human
uuugaagaagcugaccuauuuu

SEQ ID NO: 749741 - RNA, 22 nt, Human
aacuccaugguucucagauucu

SEQ ID NO: 749742 - RNA, 22 nt, Human
caguggaaacuaugcugcugga

SEQ ID NO: 749743 - RNA, 22 nt, Human
aagguccuguagccacagagcc

SEQ ID NO: 749744 - RNA, 21 nt, Human
ccagggauguugaacugaaag

SEQ ID NO: 749745 - RNA, 22 nt, Human
acacaggggaaaguggagcuga

SEQ ID NO: 749746 - RNA, 22 nt, Human
cccagcuccgagcuccgagccg

SEQ ID NO: 749747 - RNA, 22 nt, Human
aaggaggcacccugagccugcc

SEQ ID NO: 749748 - RNA, 22 nt, Human
aggcgcugcaugugaaggaguu

SEQ ID NO: 749749 - RNA, 22 nt, Human
ugugaaauauuggcaauuucau

SEQ ID NO: 749750 - RNA, 22 nt, Human
uuuuccucuguauuugaaaugc

SEQ ID NO: 749751 - RNA, 22 nt, Human
cugggcuaauuaagcacagcug

SEQ ID NO: 749752 - RNA, 22 nt, Human
cuggcuggguuccaggauucca

SEQ ID NO: 749753 - RNA, 22 nt, Human
uuuuucuuaaauguggguuggc

SEQ ID NO: 749754 - RNA, 22 nt, Human
ggguggguggcagcaccgaggc

SEQ ID NO: 749755 - RNA, 22 nt, Human
uaucuguuccaggcacucagcu

SEQ ID NO: 749756 - RNA, 22 nt, Human
agcucuaucaccugucaguugc

SEQ ID NO: 749757 - RNA, 22 nt, Human
ugaaaauuguuguacuugauaa

SEQ ID NO: 749758 - RNA, 22 nt, Human
uuauacgcucaauccuaucauc

SEQ ID NO: 749759 - RNA, 22 nt, Human
auugaguauuguaaauaaaaca

SEQ ID NO: 749760 - RNA, 22 nt, Human
agugcuguaacaacuuauuugg

SEQ ID NO: 749761 - RNA, 18 nt, Human
cagugaggaugaaggguu

SEQ ID NO: 749762 - RNA, 22 nt, Human
gugcaggagcuucuggccugac

SEQ ID NO: 749763 - RNA, 22 nt, Human
uccaggcacgaggcccugugca

SEQ ID NO: 749764 - RNA, 22 nt, Human
auacaagacucagcacagacgg

SEQ ID NO: 749765 - RNA, 19 nt, Human
ccugugacuaucuuuguaa

SEQ ID NO: 749766 - RNA, 22 nt, Human
auauguauagccagucuuuagg

SEQ ID NO: 749767 - RNA, 22 nt, Human
guggccugaugccagcccugug

SEQ ID NO: 749768 - RNA, 22 nt, Human
agagagaauuggauaaauuggu

SEQ ID NO: 749769 - RNA, 22 nt, Human
uauauuaccugccugaucuaua

SEQ ID NO: 749770 - RNA, 22 nt, Human
uggaggcaguaacugagcaaca

SEQ ID NO: 749771 - RNA, 22 nt, Human
uuaugaaaacaaucaguaggca

SEQ ID NO: 749772 - RNA, 22 nt, Human
ugcagcugaccagcaaguccug

SEQ ID NO: 749773 - RNA, 22 nt, Human
aaaguucauugaugacugaggu

SEQ ID NO: 749774 - RNA, 22 nt, Human
agggccugggccagcacccuuu

SEQ ID NO: 749775 - RNA, 22 nt, Human
cugccucagcguuguggcccua

SEQ ID NO: 749776 - RNA, 22 nt, Human
aaaagucucucugaguaaaagu

SEQ ID NO: 749777 - RNA, 22 nt, Human
cugguuuagcuguaagguuccc

SEQ ID NO: 749778 - RNA, 22 nt, Human
gcacagaacccuaucuuucgga

SEQ ID NO: 749779 - RNA, 22 nt, Human
cccaggaguaagugacauuguu

SEQ ID NO: 749780 - RNA, 22 nt, Human
uugcagggcaaauggucagaua

SEQ ID NO: 749781 - RNA, 22 nt, Human
uugcaagggcaugugugcgugu

SEQ ID NO: 749782 - RNA, 22 nt, Human
ucacugcuuaacucaagaucuc

SEQ ID NO: 749783 - RNA, 22 nt, Human
ucacugcucucuaagcaucgcc

SEQ ID NO: 749784 - RNA, 22 nt, Human
caaaacugucuagagagagaag

SEQ ID NO: 749785 - RNA, 22 nt, Human
cugagcagcuguuacagagugu

SEQ ID NO: 749786 - RNA, 22 nt, Human
ggagccugguuacuagagccug

SEQ ID NO: 749787 - RNA, 19 nt, Human
uucugggcagcacaugaau

SEQ ID NO: 749788 - RNA, 22 nt, Human
aaugaugaguucuaauagaccc

SEQ ID NO: 749789 - RNA, 20 nt, Human
cagaugcuggaucuuggucc

SEQ ID NO: 749790 - RNA, 22 nt, Human
guucauccaugucagcguauau

SEQ ID NO: 749791 - RNA, 22 nt, Human
cucacaguuucacaguguagau

SEQ ID NO: 749792 - RNA, 22 nt, Human
caaguuuuagcaaguggaaagg

SEQ ID NO: 749793 - RNA, 22 nt, Human
uuccaaacucauaguauggugu

SEQ ID NO: 749794 - RNA, 22 nt, Human
ugggcagaauugugguaguuaa

SEQ ID NO: 749795 - RNA, 22 nt, Human
agucauauuuagcuuguggaau

SEQ ID NO: 749796 - RNA, 22 nt, Human
ccuccugggcuccugucugcac

SEQ ID NO: 749797 - RNA, 22 nt, Human
uaaguucaguuggucgaaguag

SEQ ID NO: 749798 - RNA, 22 nt, Human
cccucccugugugccucauuug

SEQ ID NO: 749799 - RNA, 22 nt, Human
auggagggugucagagagcgaa

SEQ ID NO: 749800 - RNA, 22 nt, Human
aucucucugcccaggggcugug

SEQ ID NO: 749801 - RNA, 22 nt, Human
aucauuuggggaauuguggaca

SEQ ID NO: 749802 - RNA, 22 nt, Human
caugcaaacacguaaacauuca

SEQ ID NO: 749803 - RNA, 22 nt, Human
cagugaacuugaguacuucauu

SEQ ID NO: 749804 - RNA, 22 nt, Human
uuguuucuccuggugccugaua

SEQ ID NO: 749805 - RNA, 22 nt, Human
agaggucuuaagaucuagacug

SEQ ID NO: 749806 - RNA, 22 nt, Human
caggggcgguggcucacgccug

SEQ ID NO: 749807 - RNA, 22 nt, Human
aacccauuaauccuugcaagca

SEQ ID NO: 749808 - RNA, 18 nt, Human
ccagauggccagucugcu

SEQ ID NO: 749809 - RNA, 22 nt, Human
cgugggaguggugggugcucag

SEQ ID NO: 749810 - RNA, 22 nt, Human
ucuggccaacaaaaacuaaguc

SEQ ID NO: 749811 - RNA, 22 nt, Human
cuggagagaauguggaaugauu

SEQ ID NO: 749812 - RNA, 22 nt, Human
gaggcucacuaggcauccuggg

SEQ ID NO: 749813 - RNA, 22 nt, Human
gcuggcacagguggaugcuggc

SEQ ID NO: 749814 - RNA, 22 nt, Human
agaggccuaauugcuacccuuu

SEQ ID NO: 749815 - RNA, 22 nt, Human
ugaaguuauauauguugaaaau

SEQ ID NO: 749816 - RNA, 22 nt, Human
uccagguccuacuggcccauag

SEQ ID NO: 749817 - RNA, 20 nt, Human
uucagaaauaaggaaugagg

SEQ ID NO: 749818 - RNA, 22 nt, Human
agccacagagagggagcugcaa

SEQ ID NO: 749819 - RNA, 22 nt, Human
acaguggaaagaacauggauuu

SEQ ID NO: 749820 - RNA, 21 nt, Human
ugugugggcauaucugcugca

SEQ ID NO: 749821 - RNA, 22 nt, Human
uaaagguuaguagcagggaaac

SEQ ID NO: 749822 - RNA, 20 nt, Human
agcuggagaagggcccuucc

SEQ ID NO: 749823 - RNA, 22 nt, Human
gaaauguuuuacaaggcauacu

SEQ ID NO: 749824 - RNA, 22 nt, Human
cagcaucuguuuuucugaccca

SEQ ID NO: 749825 - RNA, 22 nt, Human
augcuuccuuaccagaagauga

SEQ ID NO: 749826 - RNA, 22 nt, Human
caaagguuaugaaccacuugua

SEQ ID NO: 749827 - RNA, 22 nt, Human
ugcccucagccaccuccaaguu

SEQ ID NO: 749828 - RNA, 22 nt, Human
gggcagaggcucuggcccaucc

SEQ ID NO: 749829 - RNA, 20 nt, Human
ugguggccagugcugcaggc

SEQ ID NO: 749830 - RNA, 22 nt, Human
caggggcuuuuccucuauaagg

SEQ ID NO: 749831 - RNA, 22 nt, Human
aaggaguuuggguagucauaca

SEQ ID NO: 749832 - RNA, 21 nt, Human
ucuuccugacauaugcaaggc

SEQ ID NO: 749833 - RNA, 22 nt, Human
cucuuuucaaaccuguuuaugg

SEQ ID NO: 749834 - RNA, 22 nt, Human
gccucugccaagggggcugcgg

SEQ ID NO: 749835 - RNA, 22 nt, Human
gaaucaauuauccaggcuguug

SEQ ID NO: 749836 - RNA, 22 nt, Human
ugcuuucaaaggcuuucuagau

SEQ ID NO: 749837 - RNA, 22 nt, Human
ucagagugaccuuacauggucu

SEQ ID NO: 749838 - RNA, 22 nt, Human
agcuggaagcugaugagcacag

SEQ ID NO: 749839 - RNA, 22 nt, Human
gcuguguugggaaucauguggg

SEQ ID NO: 749840 - RNA, 22 nt, Human
acagaaauaacuuuuuauguuu

SEQ ID NO: 749841 - RNA, 22 nt, Human
cagaugcagcaaaaugacaggc

SEQ ID NO: 749842 - RNA, 22 nt, Human
acuucuugaugaaaaugguacu

SEQ ID NO: 749843 - RNA, 22 nt, Human
uggcugcaguugggcccucaga

SEQ ID NO: 749844 - RNA, 20 nt, Human
acugagcugcauggagagga

SEQ ID NO: 749845 - RNA, 22 nt, Human
ugagucucgguuuccccuccaa

SEQ ID NO: 749846 - RNA, 22 nt, Human
ucauuucaguggcacagaagau

SEQ ID NO: 749847 - RNA, 22 nt, Human
aguggaaggcugggaaaugcgg

SEQ ID NO: 749848 - RNA, 22 nt, Human
ucuaaagagaaccuuuucucau

SEQ ID NO: 749849 - RNA, 22 nt, Human
gugugcagaacagggagugggu

SEQ ID NO: 749850 - RNA, 22 nt, Human
agguccagguuccguuucugcg

SEQ ID NO: 749851 - RNA, 22 nt, Human
aggcagcuggcagcacccaggg

SEQ ID NO: 749852 - RNA, 22 nt, Human
gcucugagccgggggccugucc

SEQ ID NO: 749853 - RNA, 22 nt, Human
ugaugacaaacuuuccugaugc

SEQ ID NO: 749854 - RNA, 22 nt, Human
cugcagagcauaaaucugaaua

SEQ ID NO: 749855 - RNA, 22 nt, Human
gugggcagaggagagaacauua

SEQ ID NO: 749856 - RNA, 22 nt, Human
aaaggauaagguuaucaauuuu

SEQ ID NO: 749857 - RNA, 22 nt, Human
aaagacugguguguuacauaua

SEQ ID NO: 749858 - RNA, 22 nt, Human
gcccugagcacacaguagcaaa

SEQ ID NO: 749859 - RNA, 22 nt, Human
ggacuccucuagaaguugaggc

SEQ ID NO: 749860 - RNA, 22 nt, Human
uucugucuggaaaaggacauag

SEQ ID NO: 749861 - RNA, 22 nt, Human
acauacauggugcuuucuuggu

SEQ ID NO: 749862 - RNA, 22 nt, Human
uuauggagugcuuaccugccag

SEQ ID NO: 749863 - RNA, 22 nt, Human
ccaaggcuucccagagaugcuc

SEQ ID NO: 749864 - RNA, 22 nt, Human
aaggcuggaccuggaugaaucu

SEQ ID NO: 749865 - RNA, 22 nt, Human
ggugaagggccuuaggagacag

SEQ ID NO: 749866 - RNA, 22 nt, Human
ucacgagggcccugggcagcug

SEQ ID NO: 749867 - RNA, 22 nt, Human
aagggcucugugcuugucccau

SEQ ID NO: 749868 - RNA, 22 nt, Human
ugcagagaucugggcgucggcu

SEQ ID NO: 749869 - RNA, 22 nt, Human
gcugggagucgcgucuguggcc

SEQ ID NO: 749870 - RNA, 22 nt, Human
gugcuucacugaccuguuuuca

SEQ ID NO: 749871 - RNA, 22 nt, Human
ugccucugguuaucugguaccu

SEQ ID NO: 749872 - RNA, 22 nt, Human
uagcagagaggggacaguggca

SEQ ID NO: 749873 - RNA, 23 nt, Human
ccucaggggaccugugagccuga

SEQ ID NO: 749874 - RNA, 22 nt, Human
aauuugaugaguuuguaagucu

SEQ ID NO: 749875 - RNA, 22 nt, Human
acacauucuuuaaaugucuguu

SEQ ID NO: 749876 - RNA, 22 nt, Human
acucaggcuacaggggcagaag

SEQ ID NO: 749877 - RNA, 22 nt, Human
ggggcugaaccuggaggugguc

SEQ ID NO: 749878 - RNA, 19 nt, Human
ggcugcugguuacagaggc

SEQ ID NO: 749879 - RNA, 22 nt, Human
guaucuguggauuuugguaucc

SEQ ID NO: 749880 - RNA, 22 nt, Human
uaaucacagaaacagacuguuu

SEQ ID NO: 749881 - RNA, 22 nt, Human
aagacaauaauuuuugggcagg

SEQ ID NO: 749882 - RNA, 22 nt, Human
augugugccccuuuuacucuuu

SEQ ID NO: 749883 - RNA, 22 nt, Human
ucugcccuggggucagccucca

SEQ ID NO: 749884 - RNA, 22 nt, Human
aaggcugagacagcacaggucc

SEQ ID NO: 749885 - RNA, 22 nt, Human
agaggcacaaacuggaaaggac

SEQ ID NO: 749886 - RNA, 22 nt, Human
caggaagaccagggcuguggcu

SEQ ID NO: 749887 - RNA, 22 nt, Human
cuacuuuaacauggaggcacuu

SEQ ID NO: 749888 - RNA, 22 nt, Human
auagacuugguuaguaaauuug

SEQ ID NO: 749889 - RNA, 22 nt, Human
cuuguugcuaacauaugcuucu

SEQ ID NO: 749890 - RNA, 23 nt, Human
ucggugggcguggaggccgaggc

SEQ ID NO: 749891 - RNA, 22 nt, Human
ugcuguguggaugugaagaauc

SEQ ID NO: 749892 - RNA, 22 nt, Human
cuguggagguaggagcaggaca

SEQ ID NO: 749893 - RNA, 22 nt, Human
guuauauugccaaguauauugu

SEQ ID NO: 749894 - RNA, 22 nt, Human
ggagggcccugggugcagcucu

SEQ ID NO: 749895 - RNA, 22 nt, Human
ggcuuucuaugaacucaaaggc

SEQ ID NO: 749896 - RNA, 22 nt, Human
gaaagcaaguugacugcagaau

SEQ ID NO: 749897 - RNA, 22 nt, Human
ucuguacaaaggcuauuuggag

SEQ ID NO: 749898 - RNA, 22 nt, Human
gcucccagucugauggaggaga

SEQ ID NO: 749899 - RNA, 22 nt, Human
uuucuugagcuaggaaccuggg

SEQ ID NO: 749900 - RNA, 22 nt, Human
gagggcucacugagaaagcagu

SEQ ID NO: 749901 - RNA, 22 nt, Human
ggguaggagaggugucugugug

SEQ ID NO: 749902 - RNA, 22 nt, Human
ugggccagggcacccaguccag

SEQ ID NO: 749903 - RNA, 22 nt, Human
aacaucaggaucuuguuacagu

SEQ ID NO: 749904 - RNA, 22 nt, Human
aaaaugagccaugaaccaacca

SEQ ID NO: 749905 - RNA, 22 nt, Human
acucuggccccaggaucugugu

SEQ ID NO: 749906 - RNA, 22 nt, Human
cucuuuggauguuuaugauaag

SEQ ID NO: 749907 - RNA, 22 nt, Human
cacauuuacauauaaaacuuuc

SEQ ID NO: 749908 - RNA, 22 nt, Human
ugcaggcugcuggcaguagcuu

SEQ ID NO: 749909 - RNA, 22 nt, Human
auuugauuagcuguguaauuuu

SEQ ID NO: 749910 - RNA, 22 nt, Human
ucagcagcagcucagcauguuu

SEQ ID NO: 749911 - RNA, 22 nt, Human
agcaguauucuccuguggugga

SEQ ID NO: 749912 - RNA, 23 nt, Human
ucuuuacagcagcaggauuugga

SEQ ID NO: 749913 - RNA, 22 nt, Human
ggaaagggaguuuugcuuauga

SEQ ID NO: 749914 - RNA, 22 nt, Human
auacaaguggccacuugaauuc

SEQ ID NO: 749915 - RNA, 22 nt, Human
gcaagcaggguuccuuagggca

SEQ ID NO: 749916 - RNA, 22 nt, Human
cugugugagcaucacuucagau

SEQ ID NO: 749917 - RNA, 21 nt, Human
caguagugagguauuugccaa

SEQ ID NO: 749918 - RNA, 16 nt, Human
agcagggcgggaagga

SEQ ID NO: 749919 - RNA, 22 nt, Human
agcugaguuaauucaucacuua

SEQ ID NO: 749920 - RNA, 22 nt, Human
agaaguaucaggaagauucuca

SEQ ID NO: 749921 - RNA, 22 nt, Human
cagcagcaggcgcacggccguc

SEQ ID NO: 749922 - RNA, 22 nt, Human
ccuuuucuacaagcaaaugugc

SEQ ID NO: 749923 - RNA, 23 nt, Human
acccugggcaagucaccuaaccu

SEQ ID NO: 749924 - RNA, 22 nt, Human
acauuuaggauguuuugagaga

SEQ ID NO: 749925 - RNA, 22 nt, Human
ggcaauauggugaaaccccauc

SEQ ID NO: 749926 - RNA, 22 nt, Human
uugaucuucaucgaaauauugu

SEQ ID NO: 749927 - RNA, 22 nt, Human
caugaugguucuuacaaaggug

SEQ ID NO: 749928 - RNA, 22 nt, Human
aaauacagauucugacucagag

SEQ ID NO: 749929 - RNA, 22 nt, Human
ggcucuggaaaguguccuugau

SEQ ID NO: 749930 - RNA, 22 nt, Human
uuugaagucaggcuuucuaccc

SEQ ID NO: 749931 - RNA, 22 nt, Human
uauuuauguggaccauaagccu

SEQ ID NO: 749932 - RNA, 22 nt, Human
gagucagaaacucacucuauag

SEQ ID NO: 749933 - RNA, 22 nt, Human
acaguaaaucaacagaauaucu

SEQ ID NO: 749934 - RNA, 22 nt, Human
caauaguucgguccugaaggcc

SEQ ID NO: 749935 - RNA, 22 nt, Human
gguuuguugggguccaggccca

SEQ ID NO: 749936 - RNA, 22 nt, Human
ugucuuuaugcacacugacuug

SEQ ID NO: 749937 - RNA, 22 nt, Human
cagcuugcaguacuuguuuuug

SEQ ID NO: 749938 - RNA, 22 nt, Human
aaauccauucuguuuuaaaagu

SEQ ID NO: 749939 - RNA, 22 nt, Human
ucuucacaugaccuucaugucu

SEQ ID NO: 749940 - RNA, 22 nt, Human
ucauugaaagugccuccucgga

SEQ ID NO: 749941 - RNA, 22 nt, Human
gauucauguuauagagagucag

SEQ ID NO: 749942 - RNA, 22 nt, Human
uucuuggaaacugauuccuugu

SEQ ID NO: 749943 - RNA, 22 nt, Human
gaagaggaugacaggagccggu

SEQ ID NO: 749944 - RNA, 22 nt, Human
gccaccuggacagcugugcccu

SEQ ID NO: 749945 - RNA, 22 nt, Human
ggcacagcaagaagggaaauga

SEQ ID NO: 749946 - RNA, 22 nt, Human
agcacuuugugcauuucugaag

SEQ ID NO: 749947 - RNA, 22 nt, Human
aguguuuagaggaggaaagaug

SEQ ID NO: 749948 - RNA, 22 nt, Human
uuggcaguaaaagaaaaugcuu

SEQ ID NO: 749949 - RNA, 22 nt, Human
aacaggaggccuuccaguccag

SEQ ID NO: 749950 - RNA, 22 nt, Human
cugaggcaucauggagaacagu

SEQ ID NO: 749951 - RNA, 21 nt, Human
augcauguuccauaaaguggg

SEQ ID NO: 749952 - RNA, 22 nt, Human
gaugauuuuguuggugauucaa

SEQ ID NO: 749953 - RNA, 21 nt, Human
agcaucugaggcaguuuccua

SEQ ID NO: 749954 - RNA, 22 nt, Human
aacugcaagaguaaaugucuag

SEQ ID NO: 749955 - RNA, 22 nt, Human
cuuuccaacucuagugaaauuu

SEQ ID NO: 749956 - RNA, 22 nt, Human
gacaacaauaauguggagcuga

SEQ ID NO: 749957 - RNA, 22 nt, Human
guugacagcuggugagcugcua

SEQ ID NO: 749958 - RNA, 22 nt, Human
aaaacuguaucuucuugggacu

SEQ ID NO: 749959 - RNA, 22 nt, Human
cccugcccaucggggcggccug

SEQ ID NO: 749960 - RNA, 22 nt, Human
uaccagccucaguugugagccc

SEQ ID NO: 749961 - RNA, 22 nt, Human
ugaaugaugcaguauaaugaua

SEQ ID NO: 749962 - RNA, 22 nt, Human
gacagcuucuagaggaauuggu

SEQ ID NO: 749963 - RNA, 22 nt, Human
ucaguggaguauggaugaaguc

SEQ ID NO: 749964 - RNA, 22 nt, Human
auuuugacagaagaggcccuaa

SEQ ID NO: 749965 - RNA, 20 nt, Human
auguaugcaaaugucuucca

SEQ ID NO: 749966 - RNA, 22 nt, Human
caauucaaccuaagugcaucca

SEQ ID NO: 749967 - RNA, 22 nt, Human
uccucaggucaaagcaggagaa

SEQ ID NO: 749968 - RNA, 22 nt, Human
gcagccuuccguggaccuggac

SEQ ID NO: 749969 - RNA, 22 nt, Human
agagggaucacccuguuucugg

SEQ ID NO: 749970 - RNA, 22 nt, Human
caaauauuccagguacaucccu

SEQ ID NO: 749971 - RNA, 22 nt, Human
gcacugugaucaaggcuaagca

SEQ ID NO: 749972 - RNA, 22 nt, Human
ugauggaauauaccuucgggag

SEQ ID NO: 749973 - RNA, 23 nt, Human
agagcaaggaaaugaggugugau

SEQ ID NO: 749974 - RNA, 22 nt, Human
gccacagcggggccgcuagagc

SEQ ID NO: 749975 - RNA, 22 nt, Human
gugcucuguguauuaggauguc

SEQ ID NO: 749976 - RNA, 22 nt, Human
aaaguuacacaucuaguaagug

SEQ ID NO: 749977 - RNA, 22 nt, Human
caggccagggagaauaugaagc

SEQ ID NO: 749978 - RNA, 19 nt, Human
uccaaaggacccaccucca

SEQ ID NO: 749979 - RNA, 22 nt, Human
auuugcaaagguuaacagcagu

SEQ ID NO: 749980 - RNA, 22 nt, Human
gugugucagagcucagagaagu

SEQ ID NO: 749981 - RNA, 22 nt, Human
uucuuugaaauacuguuuugcc

SEQ ID NO: 749982 - RNA, 22 nt, Human
ucuguugacuccuagcagccau

SEQ ID NO: 749983 - RNA, 22 nt, Human
ugcuucagaggaaaggcaaaag

SEQ ID NO: 749984 - RNA, 18 nt, Human
ucugucuguacaaguauc

SEQ ID NO: 749985 - RNA, 22 nt, Human
ucaaaauuuuauuucucaagga

SEQ ID NO: 749986 - RNA, 23 nt, Human
agcuuccuagugaccuggagucu

SEQ ID NO: 749987 - RNA, 22 nt, Human
uaauuauaacaguuacaucuua

SEQ ID NO: 749988 - RNA, 22 nt, Human
aagauguuuuaauauuucgagg

SEQ ID NO: 749989 - RNA, 22 nt, Human
cuguuacauagcuuuucuuaac

SEQ ID NO: 749990 - RNA, 22 nt, Human
augagcuuccagacaaaggcau

SEQ ID NO: 749991 - RNA, 22 nt, Human
cacaagaaauaagcugccuuuc

SEQ ID NO: 749992 - RNA, 22 nt, Human
ugggccacugcuccaaguagcu

SEQ ID NO: 749993 - RNA, 22 nt, Human
ccagagcccagggucaugcagg

SEQ ID NO: 749994 - RNA, 22 nt, Human
uaaaggcaugcaggugaaugua

SEQ ID NO: 749995 - RNA, 22 nt, Human
gccucugauggaggccagcgcu

SEQ ID NO: 749996 - RNA, 22 nt, Human
ccuucauugcaucuuuaagaga

SEQ ID NO: 749997 - RNA, 22 nt, Human
aggcugagacugugcauuagug

SEQ ID NO: 749998 - RNA, 22 nt, Human
gacacuucaccuuucccagccu

SEQ ID NO: 749999 - RNA, 22 nt, Human
gcuuuaugcuacgauuucuagu

SEQ ID NO: 750000 - RNA, 22 nt, Human
cccaguggcuguccccaugggc

SEQ ID NO: 750001 - RNA, 22 nt, Human
ccaguccacgucaagaagaggu

SEQ ID NO: 750002 - RNA, 22 nt, Human
ugaaggugagcauuugcugauu

SEQ ID NO: 750003 - RNA, 22 nt, Human
cagagaccccgcugcccuucug

SEQ ID NO: 750004 - RNA, 22 nt, Human
cucugggcuuguugaccugcac

SEQ ID NO: 750005 - RNA, 22 nt, Human
acacagggaggaggugcugugc

SEQ ID NO: 750006 - RNA, 22 nt, Human
uggucccuuucuacugagcaca

SEQ ID NO: 750007 - RNA, 22 nt, Human
cuggcuggagcaggcaucuugu

SEQ ID NO: 750008 - RNA, 22 nt, Human
gcaggacaaaauuuccagggug

SEQ ID NO: 750009 - RNA, 22 nt, Human
cccucugccucugaguaggaca

SEQ ID NO: 750010 - RNA, 22 nt, Human
caggguggggaaauagcgcccu

SEQ ID NO: 750011 - RNA, 22 nt, Human
aagagggcugcaaucuuauugc

SEQ ID NO: 750012 - RNA, 21 nt, Human
ugcuggcugaaaggcacagag

SEQ ID NO: 750013 - RNA, 22 nt, Human
aaccguuuuaccauuuguaacu

SEQ ID NO: 750014 - RNA, 22 nt, Human
cuauuuuaagaggccauuaggu

SEQ ID NO: 750015 - RNA, 22 nt, Human
aguucucuggcuccuuuccaga

SEQ ID NO: 750016 - RNA, 22 nt, Human
ggagcucucuugugguacuccc

SEQ ID NO: 750017 - RNA, 22 nt, Human
augcgcuuugugugaagcagug

SEQ ID NO: 750018 - RNA, 22 nt, Human
uuccacaagugauaucuagcug

SEQ ID NO: 750019 - RNA, 22 nt, Human
acagguacauacuugggaucca

SEQ ID NO: 750020 - RNA, 22 nt, Human
aaguguuaaaagauuaaaugcu

SEQ ID NO: 750021 - RNA, 22 nt, Human
ggcacacauggugguuggugaa

SEQ ID NO: 750022 - RNA, 22 nt, Human
agcagcccagauaaagcucagg

SEQ ID NO: 750023 - RNA, 17 nt, Human
aguguguaacuugugua

SEQ ID NO: 750024 - RNA, 22 nt, Human
caugcacaacauacucaagagg

SEQ ID NO: 750025 - RNA, 22 nt, Human
gguuggggcgagcuggaggccc

SEQ ID NO: 750026 - RNA, 22 nt, Human
acacauuucucuuuuuguaagu

SEQ ID NO: 750027 - RNA, 22 nt, Human
auauuaaauggauuuugggagc

SEQ ID NO: 750028 - RNA, 22 nt, Human
aggcugucucaccucaggaggg

SEQ ID NO: 750029 - RNA, 22 nt, Human
cuccaggaaagucaggcuuaga

SEQ ID NO: 750030 - RNA, 22 nt, Human
ugggaaauauucuaaaagucuu

SEQ ID NO: 750031 - RNA, 22 nt, Human
ccucacagcccuccucuagcac

SEQ ID NO: 750032 - RNA, 22 nt, Human
uuuauuauucuguucucucuac

SEQ ID NO: 750033 - RNA, 22 nt, Human
ggccacucggccaccccugccg

SEQ ID NO: 750034 - RNA, 22 nt, Human
cugcuuuguaaaauagacauaa

SEQ ID NO: 750035 - RNA, 22 nt, Human
agacacuguucucacaugcuug

SEQ ID NO: 750036 - RNA, 22 nt, Human
caggucucugcagccccucugu

SEQ ID NO: 750037 - RNA, 22 nt, Human
cccugaggcacaggccacguau

SEQ ID NO: 750038 - RNA, 22 nt, Human
auaacagaguugggaagugaaa

SEQ ID NO: 750039 - RNA, 22 nt, Human
cuacugucuuccuugguaacaa

SEQ ID NO: 750040 - RNA, 18 nt, Human
ugagagugugugcucuug

SEQ ID NO: 750041 - RNA, 22 nt, Human
ucucuggggaugcuuauucuug

SEQ ID NO: 750042 - RNA, 22 nt, Human
ugagcucuguuagggcuggaac

SEQ ID NO: 750043 - RNA, 22 nt, Human
aaugaagauuauggugauuaag

SEQ ID NO: 750044 - RNA, 22 nt, Human
cauaauuaggcaguugaucauu

SEQ ID NO: 750045 - RNA, 22 nt, Human
uuucaauugacuuuggaagaaa

SEQ ID NO: 750046 - RNA, 22 nt, Human
gggaaggacacagccaugacug

SEQ ID NO: 750047 - RNA, 21 nt, Human
cacacagcugcccuuagguag

SEQ ID NO: 750048 - RNA, 22 nt, Human
auacagguguacacacaugcaa

SEQ ID NO: 750049 - RNA, 22 nt, Human
ucugaauuuuaacuacacaaag

SEQ ID NO: 750050 - RNA, 22 nt, Human
uguagaagcuagccuggagcca

SEQ ID NO: 750051 - RNA, 22 nt, Human
aauaucuucuaaggauagaacu

SEQ ID NO: 750052 - RNA, 22 nt, Human
aagucaucacuccucugaacuu

SEQ ID NO: 750053 - RNA, 22 nt, Human
aggcugcuuucauggccgcccc

SEQ ID NO: 750054 - RNA, 22 nt, Human
ccccugagauucuggcuuggga

SEQ ID NO: 750055 - RNA, 23 nt, Human
ugauuuuaaaaaguaaguuauca

SEQ ID NO: 750056 - RNA, 22 nt, Human
cuucugggccauggccuuccuc

SEQ ID NO: 750057 - RNA, 17 nt, Human
uucucugagcuguauug

SEQ ID NO: 750058 - RNA, 22 nt, Human
gaucuguuucauucacagucug

SEQ ID NO: 750059 - RNA, 20 nt, Human
caguuuaucuuuccggagcu

SEQ ID NO: 750060 - RNA, 22 nt, Human
ggucuucaggucuaguugguau

SEQ ID NO: 750061 - RNA, 22 nt, Human
cgcaggaagacaaggguggaaa

SEQ ID NO: 750062 - RNA, 19 nt, Human
cagcccucuuaccacugug

SEQ ID NO: 750063 - RNA, 22 nt, Human
gauuaagauuacauauuuaagu

SEQ ID NO: 750064 - RNA, 22 nt, Human
aagaacaugaguuaugaugauu

SEQ ID NO: 750065 - RNA, 21 nt, Human
ugucagcacgcaugaggccag

SEQ ID NO: 750066 - RNA, 22 nt, Human
gaagcagccacggggagacaga

SEQ ID NO: 750067 - RNA, 22 nt, Human
ccucaggcugggcugccccugg

SEQ ID NO: 750068 - RNA, 22 nt, Human
ugaacuuucacaagaauaugcu

SEQ ID NO: 750069 - RNA, 22 nt, Human
ucuuguauuugauuccuuccaa

SEQ ID NO: 750070 - RNA, 22 nt, Human
cagucccacuagugccaauacc

SEQ ID NO: 750071 - RNA, 22 nt, Human
acagagcacugcccugugccgc

SEQ ID NO: 750072 - RNA, 22 nt, Human
aaaugcaaggauuuuguuaggc

SEQ ID NO: 750073 - RNA, 22 nt, Human
acugggagaaacugacaccuua

SEQ ID NO: 750074 - RNA, 22 nt, Human
acauaugcucaucugcauuccc

SEQ ID NO: 750075 - RNA, 22 nt, Human
uaacuuuugugaucugucgauu

SEQ ID NO: 750076 - RNA, 22 nt, Human
acuccaggguuuugcaccugga

SEQ ID NO: 750077 - RNA, 22 nt, Human
ugacauaaugcuuugaaguugc

SEQ ID NO: 750078 - RNA, 22 nt, Human
ugugaaaagcaggcuacuuucu

SEQ ID NO: 750079 - RNA, 22 nt, Human
caggaaaugaggcugaagggug

SEQ ID NO: 750080 - RNA, 22 nt, Human
ugggcugcacuccauuuucugc

SEQ ID NO: 750081 - RNA, 22 nt, Human
uuccagaaaucuuucagcucaa

SEQ ID NO: 750082 - RNA, 22 nt, Human
aaacagcugggagguagaggcg

SEQ ID NO: 750083 - RNA, 22 nt, Human
uuacauguauuuuggaaaaagu

SEQ ID NO: 750084 - RNA, 22 nt, Human
uuacuuuagaucauacugugug

SEQ ID NO: 750085 - RNA, 22 nt, Human
ugggcugcccugaugguccuca

SEQ ID NO: 750086 - RNA, 22 nt, Human
uccucagauauaaaugagggug

SEQ ID NO: 750087 - RNA, 22 nt, Human
uggccagguugggcuuugcagc

SEQ ID NO: 750088 - RNA, 22 nt, Human
aauuuuacaagaaggccucgua

SEQ ID NO: 750089 - RNA, 22 nt, Human
ucuguuuuggucaccuuuauau

SEQ ID NO: 750090 - RNA, 22 nt, Human
gugacucucacuuuaccugacu

SEQ ID NO: 750091 - RNA, 22 nt, Human
gccugccuucggugcgcagcgg

SEQ ID NO: 750092 - RNA, 22 nt, Human
agcacagguacggagaugcuac

SEQ ID NO: 750093 - RNA, 22 nt, Human
ugagcaggugagucuagggcag

SEQ ID NO: 750094 - RNA, 22 nt, Human
cugggccucacacccaccaaau

SEQ ID NO: 750095 - RNA, 22 nt, Human
uucaggaauauaggcauugaca

SEQ ID NO: 750096 - RNA, 22 nt, Human
uguauguguauguacauaugca

SEQ ID NO: 750097 - RNA, 17 nt, Human
gcugagugcagggaguc

SEQ ID NO: 750098 - RNA, 22 nt, Human
accgggaaguccugcacugggc

SEQ ID NO: 750099 - RNA, 22 nt, Human
auugaagauucugacaucagaa

SEQ ID NO: 750100 - RNA, 22 nt, Human
ggcucagagaccugcgaucuga

SEQ ID NO: 750101 - RNA, 22 nt, Human
acagauacucagcucuaugcuu

SEQ ID NO: 750102 - RNA, 22 nt, Human
cugagcagcguggggagcuggc

SEQ ID NO: 750103 - RNA, 22 nt, Human
ccaggaaggcguuguuccucuc

SEQ ID NO: 750104 - RNA, 22 nt, Human
gauucccaugucugaggaggug

SEQ ID NO: 750105 - RNA, 22 nt, Human
ccugaaaugaguucugcucacu

SEQ ID NO: 750106 - RNA, 22 nt, Human
uacagaggguaauugaucaagg

SEQ ID NO: 750107 - RNA, 22 nt, Human
uggcacccugaaguuggucacu

SEQ ID NO: 750108 - RNA, 22 nt, Human
cuucccccaaaucaagagaccu

SEQ ID NO: 750109 - RNA, 22 nt, Human
acuggcagagguuggacaccau

SEQ ID NO: 750110 - RNA, 22 nt, Human
uguuugguuccagagggccucu

SEQ ID NO: 750111 - RNA, 22 nt, Human
uuagauaaaaguguucaauaaa

SEQ ID NO: 750112 - RNA, 22 nt, Human
uguucugcaaugcugccuccuu

SEQ ID NO: 750113 - RNA, 22 nt, Human
ggcugccucuggaagcuggaga

SEQ ID NO: 750114 - RNA, 22 nt, Human
uuucugaauaacucuaugauau

SEQ ID NO: 750115 - RNA, 22 nt, Human
gcccaagaucaguggggcagau

SEQ ID NO: 750116 - RNA, 22 nt, Human
guggcccugucccaggccuccu

SEQ ID NO: 750117 - RNA, 22 nt, Human
uugcauugcuuggucuucaaga

SEQ ID NO: 750118 - RNA, 22 nt, Human
uucugggccaaucucuuaaucu

SEQ ID NO: 750119 - RNA, 22 nt, Human
uuauauaacucaggugggcuca

SEQ ID NO: 750120 - RNA, 22 nt, Human
uccagaaaaaguaauuuauuug

SEQ ID NO: 750121 - RNA, 22 nt, Human
uggaagggaaaguuuggggucc

SEQ ID NO: 750122 - RNA, 22 nt, Human
accguggauuuguagucauuuc

SEQ ID NO: 750123 - RNA, 22 nt, Human
uugaagauggaucgccacucuc

SEQ ID NO: 750124 - RNA, 17 nt, Human
ugcacaagagacaauag

SEQ ID NO: 750125 - RNA, 22 nt, Human
caccagcuacagacuacugugu

SEQ ID NO: 750126 - RNA, 17 nt, Human
gggcgcggguagagccc

SEQ ID NO: 750127 - RNA, 22 nt, Human
aaauguaguauguugcauguau

SEQ ID NO: 750128 - RNA, 22 nt, Human
aagugcuuuaaaauuuccugag

SEQ ID NO: 750129 - RNA, 22 nt, Human
gggucugagggccuuaccacuc

SEQ ID NO: 750130 - RNA, 22 nt, Human
uuagauaauguagagauaugag

SEQ ID NO: 750131 - RNA, 22 nt, Human
ugggaagggccugcccuuccuc

SEQ ID NO: 750132 - RNA, 22 nt, Human
cuuauuaauggaauccuaauga

SEQ ID NO: 750133 - RNA, 22 nt, Human
cagcagcuccucugcggcuaug

SEQ ID NO: 750134 - RNA, 22 nt, Human
ucucaggaucuaauacauggua

SEQ ID NO: 750135 - RNA, 20 nt, Human
accuaguacaaucuguuucu

SEQ ID NO: 750136 - RNA, 22 nt, Human
aggaagagcauucacaugguag

SEQ ID NO: 750137 - RNA, 22 nt, Human
agcccgagcgcaccuguggaaa

SEQ ID NO: 750138 - RNA, 22 nt, Human
acuuuguucuaauaguaucucu

SEQ ID NO: 750139 - RNA, 22 nt, Human
ugcuucugcaggagcuccugau

SEQ ID NO: 750140 - RNA, 22 nt, Human
auucuucaccauggauaauuug

SEQ ID NO: 750141 - RNA, 18 nt, Human
cuccagguaauucugaua

SEQ ID NO: 750142 - RNA, 20 nt, Human
uccuggaggcuucauccaua

SEQ ID NO: 750143 - RNA, 22 nt, Human
uuccagagucugguuccauggu

SEQ ID NO: 750144 - RNA, 22 nt, Human
cagaauaugacaagauuuuccu

SEQ ID NO: 750145 - RNA, 22 nt, Human
ucuuuuaaaagcccugcugucu

SEQ ID NO: 750146 - RNA, 22 nt, Human
gagugucucacaguagcauuuu

SEQ ID NO: 750147 - RNA, 22 nt, Human
acagagguaggacaugagauau

SEQ ID NO: 750148 - RNA, 22 nt, Human
uacagcauauacagaaugaaca

SEQ ID NO: 750149 - RNA, 22 nt, Human
uagaacuaaagaacaacuuuga

SEQ ID NO: 750150 - RNA, 22 nt, Human
aaugugauuagccucuacugga

SEQ ID NO: 750151 - RNA, 22 nt, Human
cauggugaggggugaagggcag

SEQ ID NO: 750152 - RNA, 22 nt, Human
gcuuuagaaauaucacugugga

SEQ ID NO: 750153 - RNA, 18 nt, Human
aaguaacagaagagcaca

SEQ ID NO: 750154 - RNA, 22 nt, Human
uuaagaagguacucaaagaucu

SEQ ID NO: 750155 - RNA, 22 nt, Human
ucugagcugggcacagaaggcg

SEQ ID NO: 750156 - RNA, 22 nt, Human
gccagagacacuuggagguaga

SEQ ID NO: 750157 - RNA, 22 nt, Human
ucaaaguuuguggcaauuuauu

SEQ ID NO: 750158 - RNA, 22 nt, Human
ugaaauggcaaggcagagcuuu

SEQ ID NO: 750159 - RNA, 22 nt, Human
ggugaggggcaccucugcccgg

SEQ ID NO: 750160 - RNA, 22 nt, Human
aggcuucaauuccuuacccagu

SEQ ID NO: 750161 - RNA, 22 nt, Human
gcuuaaaguuguaaauuagaga

SEQ ID NO: 750162 - RNA, 22 nt, Human
ugucaucugcggguggcacugc

SEQ ID NO: 750163 - RNA, 22 nt, Human
acacuucucuuugaagaacaau

SEQ ID NO: 750164 - RNA, 20 nt, Human
uggcugugggcaucuguuuc

SEQ ID NO: 750165 - RNA, 22 nt, Human
uggcucugcagcagugugcgug

SEQ ID NO: 750166 - RNA, 22 nt, Human
aagaacauuuuguagaaugaca

SEQ ID NO: 750167 - RNA, 22 nt, Human
aagucaaucacaugcacacuga

SEQ ID NO: 750168 - RNA, 22 nt, Human
uggcagaauuucuagcagauuc

SEQ ID NO: 750169 - RNA, 22 nt, Human
ccacagagacucugcaggacug

SEQ ID NO: 750170 - RNA, 22 nt, Human
auuuagaaguuggagggcaaga

SEQ ID NO: 750171 - RNA, 20 nt, Human
accucugcaucaauccuuug

SEQ ID NO: 750172 - RNA, 20 nt, Human
ggcaggacccgguagggagc

SEQ ID NO: 750173 - RNA, 22 nt, Human
agugugggccacgcagcugagc

SEQ ID NO: 750174 - RNA, 22 nt, Human
ugccccucuugcuggcccuguc

SEQ ID NO: 750175 - RNA, 22 nt, Human
aaaggucagacuuaggcugggc

SEQ ID NO: 750176 - RNA, 20 nt, Human
gccauccagccucccaggag

SEQ ID NO: 750177 - RNA, 22 nt, Human
cugucauuucuauuauagagga

SEQ ID NO: 750178 - RNA, 22 nt, Human
uugcuuggcaggcuuccagucu

SEQ ID NO: 750179 - RNA, 22 nt, Human
ccagagacuggcugagagaucu

SEQ ID NO: 750180 - RNA, 22 nt, Human
cuccaguggcaaguccgggcgg

SEQ ID NO: 750181 - RNA, 22 nt, Human
gggcucagcugggcgugcuggu

SEQ ID NO: 750182 - RNA, 22 nt, Human
ccagagguuccaggcuagggag

SEQ ID NO: 750183 - RNA, 22 nt, Human
agcccuuaguacauuucucaag

SEQ ID NO: 750184 - RNA, 22 nt, Human
uucucagaugauucagauaaac

SEQ ID NO: 750185 - RNA, 22 nt, Human
aaaagugaugggauggcacuuc

SEQ ID NO: 750186 - RNA, 22 nt, Human
uguguguguaaaagcauuuaua

SEQ ID NO: 750187 - RNA, 22 nt, Human
uggggagcacgguagggaaaug

SEQ ID NO: 750188 - RNA, 22 nt, Human
acagcucugagauauuacuauu

SEQ ID NO: 750189 - RNA, 22 nt, Human
agcccaaggcuucccugcuggc

SEQ ID NO: 750190 - RNA, 22 nt, Human
cagcagcaucaggucugugguu

SEQ ID NO: 750191 - RNA, 22 nt, Human
caggaguccagagugucauuuu

SEQ ID NO: 750192 - RNA, 23 nt, Human
ucucuguacagaugaggacacac

SEQ ID NO: 750193 - RNA, 22 nt, Human
gagcuggcugugguugagugca

SEQ ID NO: 750194 - RNA, 22 nt, Human
gugcaaagugcauggggaaggg

SEQ ID NO: 750195 - RNA, 22 nt, Human
aggucccugcagcagacugcca

SEQ ID NO: 750196 - RNA, 22 nt, Human
uauuuccaaaaaggccauauuc

SEQ ID NO: 750197 - RNA, 22 nt, Human
gccugggaacucugaucuccug

SEQ ID NO: 750198 - RNA, 20 nt, Human
uggcuccagccuccccuacc

SEQ ID NO: 750199 - RNA, 22 nt, Human
aggucucaaacuggcacccugu

SEQ ID NO: 750200 - RNA, 22 nt, Human
auaucacagaugcagaaagaga

SEQ ID NO: 750201 - RNA, 22 nt, Human
aguguuugucccguuagaaaug

SEQ ID NO: 750202 - RNA, 22 nt, Human
aagcaggagaugcaggaaugua

SEQ ID NO: 750203 - RNA, 19 nt, Human
uucagcauuauauucuagc

SEQ ID NO: 750204 - RNA, 22 nt, Human
caguucacacugugcuaucugc

SEQ ID NO: 750205 - RNA, 22 nt, Human
ggaguggcagcuaggcugucag

SEQ ID NO: 750206 - RNA, 22 nt, Human
aggacaauuagucuggcuuggc

SEQ ID NO: 750207 - RNA, 22 nt, Human
ucucuuccuagugaugggcuuu

SEQ ID NO: 750208 - RNA, 22 nt, Human
caacagaaggaagcagggucag

SEQ ID NO: 750209 - RNA, 22 nt, Human
gaaggagacccugaagaugcug

SEQ ID NO: 750210 - RNA, 22 nt, Human
ugggcccagguccugggagaag

SEQ ID NO: 750211 - RNA, 22 nt, Human
cugacuguugcuguugaugagg

SEQ ID NO: 750212 - RNA, 23 nt, Human
cagaucauauauccagcuguaag

SEQ ID NO: 750213 - RNA, 20 nt, Human
ccacaggaguccagucgacc

SEQ ID NO: 750214 - RNA, 22 nt, Human
ucugcaacauuccucuccccac

SEQ ID NO: 750215 - RNA, 22 nt, Human
gucugagcuacuuaggauauaa

SEQ ID NO: 750216 - RNA, 22 nt, Human
ugggaagaggaugaggcauaug

SEQ ID NO: 750217 - RNA, 22 nt, Human
accuuugguaaguuuccaaaac

SEQ ID NO: 750218 - RNA, 22 nt, Human
uccuugaggaggugacacugga

SEQ ID NO: 750219 - RNA, 22 nt, Human
gccagggagucugggccacaga

SEQ ID NO: 750220 - RNA, 22 nt, Human
caugcacacacaguucuaauua

SEQ ID NO: 750221 - RNA, 22 nt, Human
cuuucacagucauaugaugaau

SEQ ID NO: 750222 - RNA, 22 nt, Human
aacaugauuggaaaaugcuguc

SEQ ID NO: 750223 - RNA, 22 nt, Human
uggcucagccuggcccuuucau

SEQ ID NO: 750224 - RNA, 22 nt, Human
cuccucaguugucccauggaga

SEQ ID NO: 750225 - RNA, 22 nt, Human
aucagaaacucuuagagcaggg

SEQ ID NO: 750226 - RNA, 22 nt, Human
accugaauugucauaucuuauu

SEQ ID NO: 750227 - RNA, 22 nt, Human
aagagcuuggacuuucaaguca

SEQ ID NO: 750228 - RNA, 22 nt, Human
cagcagguccugggcguggccu

SEQ ID NO: 750229 - RNA, 22 nt, Human
ucuacaugauguaccaucuaag

SEQ ID NO: 750230 - RNA, 22 nt, Human
cuucaaggcuuauuccaguugu

SEQ ID NO: 750231 - RNA, 21 nt, Human
gcagcaugagaaagccccaaa

SEQ ID NO: 750232 - RNA, 22 nt, Human
acaguuaccacuuagcaguuac

SEQ ID NO: 750233 - RNA, 22 nt, Human
aaucacaguuaguaagggagaa

SEQ ID NO: 750234 - RNA, 22 nt, Human
acugagagaacgggcugcuccc

SEQ ID NO: 750235 - RNA, 22 nt, Human
auuuccuucccagauuugguuc

SEQ ID NO: 750236 - RNA, 22 nt, Human
ugcccaggcuggagugcagagg

SEQ ID NO: 750237 - RNA, 18 nt, Human
uucucugguggauguuau

SEQ ID NO: 750238 - RNA, 21 nt, Human
guacacagugguucugaggga

SEQ ID NO: 750239 - RNA, 22 nt, Human
cagggccugcaagagaccuggg

SEQ ID NO: 750240 - RNA, 22 nt, Human
cugcguguuugcacccugucug

SEQ ID NO: 750241 - RNA, 22 nt, Human
ucagagaagguaagugaccugc

SEQ ID NO: 750242 - RNA, 22 nt, Human
guguucuuuugcuucacagaaa

SEQ ID NO: 750243 - RNA, 22 nt, Human
gcaggauggguguagcccagca

SEQ ID NO: 750244 - RNA, 22 nt, Human
agugugggggcuuuggugucac

SEQ ID NO: 750245 - RNA, 22 nt, Human
gaaugaguagaguauaaacaaa

SEQ ID NO: 750246 - RNA, 18 nt, Human
ucugccugcagggcaucu

SEQ ID NO: 750247 - RNA, 22 nt, Human
aacuguuuggaacucuuccaca

SEQ ID NO: 750248 - RNA, 22 nt, Human
gggaaggccgguccagucaggu

SEQ ID NO: 750249 - RNA, 22 nt, Human
gcagcugucgcuaggagcugug

SEQ ID NO: 750250 - RNA, 22 nt, Human
augaugugugcugaucaagcuu

SEQ ID NO: 750251 - RNA, 22 nt, Human
uagcagagcagggaucagagcc

SEQ ID NO: 750252 - RNA, 22 nt, Human
ggccagaggccacagcuguguc

SEQ ID NO: 750253 - RNA, 22 nt, Human
auggcugcagagaccugaagaa

SEQ ID NO: 750254 - RNA, 22 nt, Human
ccuggacuuucauuuccccuug

SEQ ID NO: 750255 - RNA, 22 nt, Human
aggccagugcagcuggaacaga

SEQ ID NO: 750256 - RNA, 20 nt, Human
uugaggucaaggacuaggcc

SEQ ID NO: 750257 - RNA, 22 nt, Human
uggcucucaauggcuguacuau

SEQ ID NO: 750258 - RNA, 22 nt, Human
uaagguuugaagaagacugagc

SEQ ID NO: 750259 - RNA, 21 nt, Human
auguuuacacugacuacugug

SEQ ID NO: 750260 - RNA, 22 nt, Human
aaaugcuugcucuugauuauuu

SEQ ID NO: 750261 - RNA, 22 nt, Human
guuaaagugagcuacuuuaggu

SEQ ID NO: 750262 - RNA, 19 nt, Human
uugguggugguuuugguuc

SEQ ID NO: 750263 - RNA, 22 nt, Human
uacaaagugaaauaauucugag

SEQ ID NO: 750264 - RNA, 22 nt, Human
cuuaggaacgcucugccuagug

SEQ ID NO: 750265 - RNA, 22 nt, Human
cugugugcaacuugcaguuuug

SEQ ID NO: 750266 - RNA, 22 nt, Human
agcccugcucaucuggaucccg

SEQ ID NO: 750267 - RNA, 22 nt, Human
uuauagcagcaugauuuacaau

SEQ ID NO: 750268 - RNA, 19 nt, Human
cugccuguuauggagagaa

SEQ ID NO: 750269 - RNA, 22 nt, Human
aauuaaaaaaggagagcuugcu

SEQ ID NO: 750270 - RNA, 22 nt, Human
cuaauuauguuguuauaaucaa

SEQ ID NO: 750271 - RNA, 22 nt, Human
gacauagucucugucuucaugg

SEQ ID NO: 750272 - RNA, 22 nt, Human
agggucagcuggcugucagggg

SEQ ID NO: 750273 - RNA, 22 nt, Human
auggcuguaaauucagagaugg

SEQ ID NO: 750274 - RNA, 22 nt, Human
aaccuggcccuaaucccaguag

SEQ ID NO: 750275 - RNA, 22 nt, Human
cagcugggugaucuugggcagg

SEQ ID NO: 750276 - RNA, 22 nt, Human
caugucuuucucaucacaucua

SEQ ID NO: 750277 - RNA, 22 nt, Human
gagcugguucuguccagggaau

SEQ ID NO: 750278 - RNA, 22 nt, Human
ccaccccuguagagggacagac

SEQ ID NO: 750279 - RNA, 22 nt, Human
ucacuuuacagcuaagguuguu

SEQ ID NO: 750280 - RNA, 22 nt, Human
cacaggcacgccucuggccagg

SEQ ID NO: 750281 - RNA, 18 nt, Human
cugugggaagaguuuggg

SEQ ID NO: 750282 - RNA, 19 nt, Human
gcccuccucacugagcucu

SEQ ID NO: 750283 - RNA, 22 nt, Human
auugucuuguacguuugccugu

SEQ ID NO: 750284 - RNA, 22 nt, Human
uuguuacuguucuacauacagu

SEQ ID NO: 750285 - RNA, 22 nt, Human
ucaggagcuauggacugucaaa

SEQ ID NO: 750286 - RNA, 17 nt, Human
uuuagaauacaauguuu

SEQ ID NO: 750287 - RNA, 22 nt, Human
ggggacgggacuuagcaugagu

SEQ ID NO: 750288 - RNA, 22 nt, Human
aggcaacaggaaaccacaugau

SEQ ID NO: 750289 - RNA, 22 nt, Human
ggcugcuuuaucggcugcugaa

SEQ ID NO: 750290 - RNA, 22 nt, Human
ggccagaaaguuaagcuguggc

SEQ ID NO: 750291 - RNA, 17 nt, Human
uguuuucauucauugcu

SEQ ID NO: 750292 - RNA, 22 nt, Human
gagcccuguucaggccuccuca

SEQ ID NO: 750293 - RNA, 22 nt, Human
uuguuucaugaguguaaaggga

SEQ ID NO: 750294 - RNA, 22 nt, Human
uuuauugggugcagugcccaca

SEQ ID NO: 750295 - RNA, 22 nt, Human
auacaacuuuacaugcaauucc

SEQ ID NO: 750296 - RNA, 22 nt, Human
uuugacaaauauuuauuggcac

SEQ ID NO: 750297 - RNA, 22 nt, Human
aaugcuuauaccuaaugaucuu

SEQ ID NO: 750298 - RNA, 22 nt, Human
ugggagagugcucaaugugcaa

SEQ ID NO: 750299 - RNA, 22 nt, Human
acuugaauaggugucaaggcca

SEQ ID NO: 750300 - RNA, 22 nt, Human
ccacacugaccagcugugagac

SEQ ID NO: 750301 - RNA, 22 nt, Human
guccacagggauggccacacau

SEQ ID NO: 750302 - RNA, 22 nt, Human
aggacaguauaggcuuuaggag

SEQ ID NO: 750303 - RNA, 20 nt, Human
ccacccacgcgggcucugcc

SEQ ID NO: 750304 - RNA, 22 nt, Human
uuugauucuguaaaauaacagg

SEQ ID NO: 750305 - RNA, 20 nt, Human
gcugagguuucuuccuauau

SEQ ID NO: 750306 - RNA, 22 nt, Human
uacaugcaauuaagagggugaa

SEQ ID NO: 750307 - RNA, 22 nt, Human
ugguccuggagaucaauaugca

SEQ ID NO: 750308 - RNA, 22 nt, Human
ucugaccugcaggcacagcaau

SEQ ID NO: 750309 - RNA, 22 nt, Human
uuggcaauucaccaaggcucgc

SEQ ID NO: 750310 - RNA, 22 nt, Human
cugucuuuaguacaaaaaaugu

SEQ ID NO: 750311 - RNA, 22 nt, Human
uuguuuaucgcuugcucacaua

SEQ ID NO: 750312 - RNA, 22 nt, Human
ucauccauccucgccuuugcuu

SEQ ID NO: 750313 - RNA, 22 nt, Human
cucaggccaauaagcuccagcc

SEQ ID NO: 750314 - RNA, 22 nt, Human
auguuuauggagcagguauuag

SEQ ID NO: 750315 - RNA, 22 nt, Human
uccucauacauaucucagucuu

SEQ ID NO: 750316 - RNA, 20 nt, Human
acacuugacaccagaaaugg

SEQ ID NO: 750317 - RNA, 22 nt, Human
uuguguaacuugagcaaacaca

SEQ ID NO: 750318 - RNA, 22 nt, Human
uaggccacucuccuuugucuca

SEQ ID NO: 750319 - RNA, 22 nt, Human
caucccugauuccuaguacagu

SEQ ID NO: 750320 - RNA, 20 nt, Human
ucucuauucccacgaggaaa

SEQ ID NO: 750321 - RNA, 22 nt, Human
aacacuucccaucagagggaca

SEQ ID NO: 750322 - RNA, 20 nt, Human
ggaaggggcaaaguguguga

SEQ ID NO: 750323 - RNA, 16 nt, Human
uggaggcaucuggccc

SEQ ID NO: 750324 - RNA, 23 nt, Human
aauaucaaggugauguucccaga

SEQ ID NO: 750325 - RNA, 22 nt, Human
gagagggcaagguagaugcuac

SEQ ID NO: 750326 - RNA, 17 nt, Human
gcccugccugcugcccu

SEQ ID NO: 750327 - RNA, 22 nt, Human
caugcaguauucaggacaguuc

SEQ ID NO: 750328 - RNA, 22 nt, Human
ugcugaggaauaauuguuccug

SEQ ID NO: 750329 - RNA, 22 nt, Human
cccaguaagaagcuggcaccag

SEQ ID NO: 750330 - RNA, 19 nt, Human
uacaugcucuugguucagg

SEQ ID NO: 750331 - RNA, 22 nt, Human
ggagccugacagugcccagcau

SEQ ID NO: 750332 - RNA, 22 nt, Human
cugcagggguguccuguauugg

SEQ ID NO: 750333 - RNA, 22 nt, Human
acacauauaugugcguguauau

SEQ ID NO: 750334 - RNA, 22 nt, Human
ucuugacaacuauacuacuuac

SEQ ID NO: 750335 - RNA, 22 nt, Human
uguccuuuuggcugucuauggu

SEQ ID NO: 750336 - RNA, 22 nt, Human
cugcagaaauauggaugugaua

SEQ ID NO: 750337 - RNA, 22 nt, Human
uuuagaguugguccccugugag

SEQ ID NO: 750338 - RNA, 22 nt, Human
ugcagcucauugcuggggucug

SEQ ID NO: 750339 - RNA, 22 nt, Human
acuccaaggccacaugcauucc

SEQ ID NO: 750340 - RNA, 22 nt, Human
ccucucuccaauuuucaccuca

SEQ ID NO: 750341 - RNA, 22 nt, Human
agguauuuaugagagcacauau

SEQ ID NO: 750342 - RNA, 22 nt, Human
aaggaaaugugccugacacugc

SEQ ID NO: 750343 - RNA, 22 nt, Human
gcaggaguaucuauacauuaaa

SEQ ID NO: 750344 - RNA, 22 nt, Human
uaguagcaggaaucugaaggua

SEQ ID NO: 750345 - RNA, 22 nt, Human
agccaaagaucagugugcaagu

SEQ ID NO: 750346 - RNA, 22 nt, Human
aagauguuaaaucuguagaauu

SEQ ID NO: 750347 - RNA, 22 nt, Human
cuuuaauuaggaaguauaauga

SEQ ID NO: 750348 - RNA, 21 nt, Human
aaucagaggcuuccuaguugg

SEQ ID NO: 750349 - RNA, 22 nt, Human
ccaggagaauaauggcagauua

SEQ ID NO: 750350 - RNA, 22 nt, Human
ucaggagguguaacgaauacag

SEQ ID NO: 750351 - RNA, 23 nt, Human
cccaggucaaaauucacaggccu

SEQ ID NO: 750352 - RNA, 22 nt, Human
ucuuuuguugccuacuuauuaa

SEQ ID NO: 750353 - RNA, 22 nt, Human
aaguaugucuuuggguauuauu

SEQ ID NO: 750354 - RNA, 22 nt, Human
uuuagucauagauacccaaggu

SEQ ID NO: 750355 - RNA, 22 nt, Human
uuucuuuugcugagaggggcac

SEQ ID NO: 750356 - RNA, 22 nt, Human
uccugggacaagccguggaagu

SEQ ID NO: 750357 - RNA, 22 nt, Human
ugugugaaggaauauauacuca

SEQ ID NO: 750358 - RNA, 22 nt, Human
acagauuuuaaauuuguaguug

SEQ ID NO: 750359 - RNA, 22 nt, Human
aauguacaccguggguuuuuua

SEQ ID NO: 750360 - RNA, 22 nt, Human
caagcccaggauuccccaguua

SEQ ID NO: 750361 - RNA, 22 nt, Human
cauggccucucuccuggaaugg

SEQ ID NO: 750362 - RNA, 22 nt, Human
ggcacugagaggcucuuccuaa

SEQ ID NO: 750363 - RNA, 22 nt, Human
ugucuuuaaaauuaaacacauc

SEQ ID NO: 750364 - RNA, 22 nt, Human
ucagcauuccugaagacaagca

SEQ ID NO: 750365 - RNA, 22 nt, Human
uagggcuuugcgauggcuauuc

SEQ ID NO: 750366 - RNA, 22 nt, Human
guagaacuaggacuucagguau

SEQ ID NO: 750367 - RNA, 22 nt, Human
gcugggaggcagcaccuuuagc

SEQ ID NO: 750368 - RNA, 22 nt, Human
uaauuucuucaucucugcagcu

SEQ ID NO: 750369 - RNA, 22 nt, Human
aaugucuugagaagagaaaucu

SEQ ID NO: 750370 - RNA, 23 nt, Human
gcucuuuguucauguggaugccu

SEQ ID NO: 750371 - RNA, 22 nt, Human
ugcauuuaagaaaacaugaguc

SEQ ID NO: 750372 - RNA, 19 nt, Human
acacauguguguuaugugc

SEQ ID NO: 750373 - RNA, 21 nt, Human
ucugcacagccccgcaggagg

SEQ ID NO: 750374 - RNA, 22 nt, Human
gcuuuuaauuaguugcuuccau

SEQ ID NO: 750375 - RNA, 22 nt, Human
uuuuccugccugucucuagagg

SEQ ID NO: 750376 - RNA, 22 nt, Human
aaauaguucagcuuguaaaccc

SEQ ID NO: 750377 - RNA, 22 nt, Human
uuaaaggaucuuugucauuaau

SEQ ID NO: 750378 - RNA, 22 nt, Human
ccugggcucaccaugccuugga

SEQ ID NO: 750379 - RNA, 22 nt, Human
cccagguggguuggccucuguc

SEQ ID NO: 750380 - RNA, 22 nt, Human
cugagccaugggucuaagcacu

SEQ ID NO: 750381 - RNA, 22 nt, Human
cccagaguuggucaggggaccc

SEQ ID NO: 750382 - RNA, 22 nt, Human
ugacaggauugguugcuucuga

SEQ ID NO: 750383 - RNA, 22 nt, Human
cuguuuaucucuaaccuguuua

SEQ ID NO: 750384 - RNA, 22 nt, Human
gaagagcauuugcccaggcugu

SEQ ID NO: 750385 - RNA, 22 nt, Human
ucagcagggcauacugagccua

SEQ ID NO: 750386 - RNA, 22 nt, Human
ugggccugggcuccuguccucu

SEQ ID NO: 750387 - RNA, 22 nt, Human
acagugcaaauaggacugucuu

SEQ ID NO: 750388 - RNA, 22 nt, Human
ucugauaaugugcuucgugacc

SEQ ID NO: 750389 - RNA, 21 nt, Human
ugcagcugacacccuuuggga

SEQ ID NO: 750390 - RNA, 22 nt, Human
uucuguauuuaguuugaggaca

SEQ ID NO: 750391 - RNA, 22 nt, Human
ugaucuucaccuuguucuuugg

SEQ ID NO: 750392 - RNA, 22 nt, Human
acacuuguggccuuucuaguaa

SEQ ID NO: 750393 - RNA, 22 nt, Human
aggucugguauuuuucuauacu

SEQ ID NO: 750394 - RNA, 22 nt, Human
aagucagaaaacagagcaauua

SEQ ID NO: 750395 - RNA, 22 nt, Human
aagaaaccuagucuggagcagc

SEQ ID NO: 750396 - RNA, 22 nt, Human
uaugaaaagguggccaauguag

SEQ ID NO: 750397 - RNA, 22 nt, Human
aggaccuuggaauaacaaauuc

SEQ ID NO: 750398 - RNA, 22 nt, Human
cuggaucaugcauugcuugucc

SEQ ID NO: 750399 - RNA, 22 nt, Human
ugaguggagacuguguguagag

SEQ ID NO: 750400 - RNA, 22 nt, Human
cagagccucuaaaauuucuauc

SEQ ID NO: 750401 - RNA, 22 nt, Human
augggcaacagcagucacaaug

SEQ ID NO: 750402 - RNA, 22 nt, Human
gaagggagaagguugggugacg

SEQ ID NO: 750403 - RNA, 21 nt, Human
agcugugguuuuacaucuuuu

SEQ ID NO: 750404 - RNA, 22 nt, Human
ucagaguuggccuuucuguauu

SEQ ID NO: 750405 - RNA, 22 nt, Human
cagaaagcucuuucaaucuugc

SEQ ID NO: 750406 - RNA, 22 nt, Human
ucagaaaccccaacaauggaga

SEQ ID NO: 750407 - RNA, 22 nt, Human
cugcuucugggaugauggagua

SEQ ID NO: 750408 - RNA, 20 nt, Human
gggcuccagcugugauucuu

SEQ ID NO: 750409 - RNA, 22 nt, Human
caaugacaucucccugcucuaa

SEQ ID NO: 750410 - RNA, 21 nt, Human
ugugaaauagcuaugcuacau

SEQ ID NO: 750411 - RNA, 22 nt, Human
gugcuuuagcugaguuggucaa

SEQ ID NO: 750412 - RNA, 22 nt, Human
auacauacguacauacguaugu

SEQ ID NO: 750413 - RNA, 23 nt, Human
aguuaggucaaguuaggucaauu

SEQ ID NO: 750414 - RNA, 22 nt, Human
ucucuuccauguuucagcccca

SEQ ID NO: 750415 - RNA, 22 nt, Human
caaugcacauggacaucaggcu

SEQ ID NO: 750416 - RNA, 19 nt, Human
ugacaggcuguugccuuga

SEQ ID NO: 750417 - RNA, 22 nt, Human
ggaguuccagaaucugcuuuuu

SEQ ID NO: 750418 - RNA, 22 nt, Human
ugccugcgaggcaugggugaga

SEQ ID NO: 750419 - RNA, 15 nt, Human
gcuucuccagaugac

SEQ ID NO: 750420 - RNA, 22 nt, Human
aaucacaaauuuagacagagcu

SEQ ID NO: 750421 - RNA, 22 nt, Human
aggcccuggcacugccugggag

SEQ ID NO: 750422 - RNA, 22 nt, Human
ggcugggagccccacagaguca

SEQ ID NO: 750423 - RNA, 22 nt, Human
aggccuugccaaugagagaacu

SEQ ID NO: 750424 - RNA, 22 nt, Human
uaaagcaggcaucucucuccuc

SEQ ID NO: 750425 - RNA, 22 nt, Human
accuccccgggagcagccuccu

SEQ ID NO: 750426 - RNA, 22 nt, Human
agcuuuuaguacguuaaaauug

SEQ ID NO: 750427 - RNA, 22 nt, Human
aggagcagauugguaagaucau

SEQ ID NO: 750428 - RNA, 22 nt, Human
ccccagaaggggacagagggua

SEQ ID NO: 750429 - RNA, 22 nt, Human
ucuuucaauccauucauauguc

SEQ ID NO: 750430 - RNA, 22 nt, Human
ucagaaaugaucguuauucauu

SEQ ID NO: 750431 - RNA, 22 nt, Human
cagccuugauggaugaggaagu

SEQ ID NO: 750432 - RNA, 22 nt, Human
gauuucaauccagcuuucuucu

SEQ ID NO: 750433 - RNA, 22 nt, Human
gcagugaaucuggcaagaauuu

SEQ ID NO: 750434 - RNA, 22 nt, Human
auucuggacaaugagaaacugg

SEQ ID NO: 750435 - RNA, 22 nt, Human
aagacgggagucaggugagcuc

SEQ ID NO: 750436 - RNA, 22 nt, Human
ucccucagggugcaguugcuuu

SEQ ID NO: 750437 - RNA, 22 nt, Human
aacaaccaaaaagaugaaugua

SEQ ID NO: 750438 - RNA, 21 nt, Human
ucucugugucuuuaagcugga

SEQ ID NO: 750439 - RNA, 22 nt, Human
uuacuuuaagggugucuuauua

SEQ ID NO: 750440 - RNA, 17 nt, Human
cagaccucugugaagcc

SEQ ID NO: 750441 - RNA, 22 nt, Human
auucuucaccugagucagucua

SEQ ID NO: 750442 - RNA, 23 nt, Human
agcacaaaguguuuuccuuguag

SEQ ID NO: 750443 - RNA, 21 nt, Human
agaaacugacuccuagaggca

SEQ ID NO: 750444 - RNA, 22 nt, Human
uucuccuaggaucagggguccu

SEQ ID NO: 750445 - RNA, 22 nt, Human
ugcuucugucucuuaugccuug

SEQ ID NO: 750446 - RNA, 22 nt, Human
ucaggcacugcuuucugauaug

SEQ ID NO: 750447 - RNA, 22 nt, Human
aaucacauuacagcauaucugu

SEQ ID NO: 750448 - RNA, 22 nt, Human
cugucaggggcggguggagcgg

SEQ ID NO: 750449 - RNA, 22 nt, Human
gcucccagcauugcugcugaau

SEQ ID NO: 750450 - RNA, 22 nt, Human
ugggaaggacagaacauaauug

SEQ ID NO: 750451 - RNA, 22 nt, Human
gcugggucuggaugcucaggug

SEQ ID NO: 750452 - RNA, 22 nt, Human
guuuuagauaaagcuguccuug

SEQ ID NO: 750453 - RNA, 22 nt, Human
uucucuggguuaggggaacuau

SEQ ID NO: 750454 - RNA, 22 nt, Human
agucucagcaagcauggcuagu

SEQ ID NO: 750455 - RNA, 22 nt, Human
ggcucccuggcccuggggacac

SEQ ID NO: 750456 - RNA, 22 nt, Human
augaucugauaaucauccacua

SEQ ID NO: 750457 - RNA, 22 nt, Human
acagaagaaguucaaggugaag

SEQ ID NO: 750458 - RNA, 22 nt, Human
gagagugaggccugggaaucua

SEQ ID NO: 750459 - RNA, 22 nt, Human
gcugggcaagugccuuggguuu

SEQ ID NO: 750460 - RNA, 22 nt, Human
gcaggaaagguugagacuuugc

SEQ ID NO: 750461 - RNA, 22 nt, Human
agaugauauacuacauggcuuc

SEQ ID NO: 750462 - RNA, 22 nt, Human
agucuucugaauaagaaucacu

SEQ ID NO: 750463 - RNA, 22 nt, Human
ucagagaaucucuccuuaguuu

SEQ ID NO: 750464 - RNA, 22 nt, Human
uuucccaagaaaaauaauugga

SEQ ID NO: 750465 - RNA, 22 nt, Human
auaguggggacaggaugguugg

SEQ ID NO: 750466 - RNA, 22 nt, Human
cuggccccaggcagccugcugg

SEQ ID NO: 750467 - RNA, 22 nt, Human
aagcuucacauugaacuugggu

SEQ ID NO: 750468 - RNA, 22 nt, Human
aaauguuuugcucccauguggu

SEQ ID NO: 750469 - RNA, 23 nt, Human
ucccugagaugcugcucuguccc

SEQ ID NO: 750470 - RNA, 22 nt, Human
uaagagaauguuguggcuaggu

SEQ ID NO: 750471 - RNA, 23 nt, Human
uuggaagccagacagcugugcag

SEQ ID NO: 750472 - RNA, 22 nt, Human
acugggccaggggcuuuggagc

SEQ ID NO: 750473 - RNA, 23 nt, Human
uguuccugucaaauuuucuuccc

SEQ ID NO: 750474 - RNA, 22 nt, Human
caacagucagaaugaagcugag

SEQ ID NO: 750475 - RNA, 15 nt, Human
cuccaugauuuugca

SEQ ID NO: 750476 - RNA, 22 nt, Human
agaaaucuuggagucuguggua

SEQ ID NO: 750477 - RNA, 22 nt, Human
cuucacauaaacaaagggccau

SEQ ID NO: 750478 - RNA, 22 nt, Human
auuaaggagggcugggcaugau

SEQ ID NO: 750479 - RNA, 22 nt, Human
accaagcuagaacauuacaggc

SEQ ID NO: 750480 - RNA, 22 nt, Human
ugggaagggagaguguccugga

SEQ ID NO: 750481 - RNA, 22 nt, Human
agcaauguuggccuauauaccu

SEQ ID NO: 750482 - RNA, 18 nt, Human
aggucugaggaagagccu

SEQ ID NO: 750483 - RNA, 22 nt, Human
caucauuguuagggacucuaac

SEQ ID NO: 750484 - RNA, 22 nt, Human
cugaggaagacagcagcugugu

SEQ ID NO: 750485 - RNA, 22 nt, Human
caguagccuuauuuggaucauu

SEQ ID NO: 750486 - RNA, 22 nt, Human
gcagcugaaagggaucucuaca

SEQ ID NO: 750487 - RNA, 22 nt, Human
cugaggcuucucuaguucagcu

SEQ ID NO: 750488 - RNA, 22 nt, Human
uggccucugugggagcugagca

SEQ ID NO: 750489 - RNA, 22 nt, Human
ucaggccaagguagacaugacu

SEQ ID NO: 750490 - RNA, 22 nt, Human
cugcaguaucuuaaaauuugua

SEQ ID NO: 750491 - RNA, 22 nt, Human
agccaggaauuggacaacacau

SEQ ID NO: 750492 - RNA, 22 nt, Human
gggaggcugccauccuucagga

SEQ ID NO: 750493 - RNA, 23 nt, Human
ucugucuuguuuaggccacuguu

SEQ ID NO: 750494 - RNA, 22 nt, Human
acagcaugagaguagcaaaagg

SEQ ID NO: 750495 - RNA, 22 nt, Human
ccuguguucuaauccaucucag

SEQ ID NO: 750496 - RNA, 22 nt, Human
aguucugaaugaggaaucuggg

SEQ ID NO: 750497 - RNA, 22 nt, Human
ugccuaggcuggaaugcagugg

SEQ ID NO: 750498 - RNA, 22 nt, Human
cacacuguccccuucuccccag

SEQ ID NO: 750499 - RNA, 22 nt, Human
ugaugagggggaacagagauuu

SEQ ID NO: 750500 - RNA, 22 nt, Human
cagaaagaccugggcucaagag

SEQ ID NO: 750501 - RNA, 22 nt, Human
caugaguucaaaaugccugccu

SEQ ID NO: 750502 - RNA, 22 nt, Human
gcuccucuuauuucaucagggc

SEQ ID NO: 750503 - RNA, 22 nt, Human
aucugcuuccugggcuccauga

SEQ ID NO: 750504 - RNA, 22 nt, Human
cuucuucauguauugauagucu

SEQ ID NO: 750505 - RNA, 22 nt, Human
gcugauagacugaauguuggga

SEQ ID NO: 750506 - RNA, 22 nt, Human
ucuacaaagaagaauuaauguc

SEQ ID NO: 750507 - RNA, 23 nt, Human
uuuauuuauuuaggcugagggau

SEQ ID NO: 750508 - RNA, 22 nt, Human
agcuccuugaagggcucuggga

SEQ ID NO: 750509 - RNA, 22 nt, Human
agccucaguuucaggccuccuc

SEQ ID NO: 750510 - RNA, 22 nt, Human
uucaugaaagacagcaacugug

SEQ ID NO: 750511 - RNA, 22 nt, Human
cugggugaguauaggaaaggga

SEQ ID NO: 750512 - RNA, 17 nt, Human
agucagaggaguaucug

SEQ ID NO: 750513 - RNA, 22 nt, Human
ucacauuucuuuauguagucuu

SEQ ID NO: 750514 - RNA, 22 nt, Human
uugcuuauagagaguuucauac

SEQ ID NO: 750515 - RNA, 22 nt, Human
ggacugggcaugggugcucugc

SEQ ID NO: 750516 - RNA, 22 nt, Human
uggcagcaaguucuugggaggu

SEQ ID NO: 750517 - RNA, 22 nt, Human
uuccucuuuagggcuggccagg

SEQ ID NO: 750518 - RNA, 19 nt, Human
cucuccagcuccaguagcu

SEQ ID NO: 750519 - RNA, 22 nt, Human
gguggggcccuggcacugguau

SEQ ID NO: 750520 - RNA, 23 nt, Human
ugucuuuguuaggacuguguuua

SEQ ID NO: 750521 - RNA, 22 nt, Human
uagggcucagagaaguggggcc

SEQ ID NO: 750522 - RNA, 22 nt, Human
ugauuugagguacauaaaucca

SEQ ID NO: 750523 - RNA, 22 nt, Human
aucagagaaguuucacuggcau

SEQ ID NO: 750524 - RNA, 22 nt, Human
gcucacagcccaggccagcgug

SEQ ID NO: 750525 - RNA, 22 nt, Human
aggaagaugugcaaaguuggaa

SEQ ID NO: 750526 - RNA, 22 nt, Human
ucucugaguuuuaaggaugaug

SEQ ID NO: 750527 - RNA, 22 nt, Human
uggguccuugccaucuuggagu

SEQ ID NO: 750528 - RNA, 22 nt, Human
uagaaacccauguuuauucagu

SEQ ID NO: 750529 - RNA, 22 nt, Human
ugccaggcuaaguggaggacuu

SEQ ID NO: 750530 - RNA, 22 nt, Human
acagggauuuuccaggcuaccc

SEQ ID NO: 750531 - RNA, 22 nt, Human
ugauuaaagguggaaggcaggu

SEQ ID NO: 750532 - RNA, 22 nt, Human
guugaauaucccguaucuuaaa

SEQ ID NO: 750533 - RNA, 22 nt, Human
auguaagacuuuaagaaccuaa

SEQ ID NO: 750534 - RNA, 22 nt, Human
cagcauuuggugaucaucuuaa

SEQ ID NO: 750535 - RNA, 22 nt, Human
ccagcugacgaugccuggucuc

SEQ ID NO: 750536 - RNA, 22 nt, Human
uguaggucucagugucugagcu

SEQ ID NO: 750537 - RNA, 22 nt, Human
auuucagcuaaaauucuuaauu

SEQ ID NO: 750538 - RNA, 22 nt, Human
aggucaugauccauuggugagu

SEQ ID NO: 750539 - RNA, 22 nt, Human
auggcuucgaguauauacauag

SEQ ID NO: 750540 - RNA, 23 nt, Human
uguaccaggaguuucagcagacu

SEQ ID NO: 750541 - RNA, 22 nt, Human
cuucauuaaccaaaaugcaaua

SEQ ID NO: 750542 - RNA, 22 nt, Human
gggcagguggcagggucucugg

SEQ ID NO: 750543 - RNA, 22 nt, Human
ucaaugaugcugaagguagcgu

SEQ ID NO: 750544 - RNA, 22 nt, Human
aaacacugcgugguggcaacuc

SEQ ID NO: 750545 - RNA, 22 nt, Human
agugaauguccccgcgggucag

SEQ ID NO: 750546 - RNA, 22 nt, Human
ugcugcugaugcauagucugcu

SEQ ID NO: 750547 - RNA, 22 nt, Human
guggcagugccagcuccgacaa

SEQ ID NO: 750548 - RNA, 22 nt, Human
aagcagggugucuugacccaug

SEQ ID NO: 750549 - RNA, 22 nt, Human
uuuccuaaggcucauuuuaaaa

SEQ ID NO: 750550 - RNA, 22 nt, Human
uucucucuuccaguucccacuu

SEQ ID NO: 750551 - RNA, 21 nt, Human
cagugcugccuaauagggagu

SEQ ID NO: 750552 - RNA, 22 nt, Human
uguaggaauuccagugacuuca

SEQ ID NO: 750553 - RNA, 22 nt, Human
ccugagaauguuuaacagagaa

SEQ ID NO: 750554 - RNA, 22 nt, Human
gagcucagcaaaggucugugug

SEQ ID NO: 750555 - RNA, 22 nt, Human
ugugguuuuucaguugcuggag

SEQ ID NO: 750556 - RNA, 22 nt, Human
aaguguccucauucaacaugca

SEQ ID NO: 750557 - RNA, 22 nt, Human
agaacaucuaaauaucugagac

SEQ ID NO: 750558 - RNA, 22 nt, Human
uauuagcagccaacuuagcugu

SEQ ID NO: 750559 - RNA, 22 nt, Human
aagacacuggguuaggcacgug

SEQ ID NO: 750560 - RNA, 22 nt, Human
ccaugggaauugggagguccca

SEQ ID NO: 750561 - RNA, 22 nt, Human
uuuguacauauauaaaaucugu

SEQ ID NO: 750562 - RNA, 22 nt, Human
uucagggcagagaguucaggga

SEQ ID NO: 750563 - RNA, 22 nt, Human
uaguuaaugcuaauuaacaaau

SEQ ID NO: 750564 - RNA, 19 nt, Human
cucugccauuugcugccug

SEQ ID NO: 750565 - RNA, 19 nt, Human
ggccaggcugacugugguc

SEQ ID NO: 750566 - RNA, 22 nt, Human
ucuggcugacauccuguaugag

SEQ ID NO: 750567 - RNA, 22 nt, Human
cucuucaggaauaugucaguca

SEQ ID NO: 750568 - RNA, 22 nt, Human
cuucccuuuuuaugucuucagc

SEQ ID NO: 750569 - RNA, 22 nt, Human
ugggaugagaagugcgaggguu

SEQ ID NO: 750570 - RNA, 22 nt, Human
guggcccucugauagggucagg

SEQ ID NO: 750571 - RNA, 22 nt, Human
gacacugugcuagcugggcuua

SEQ ID NO: 750572 - RNA, 22 nt, Human
cacagaggcaugacccugcccu

SEQ ID NO: 750573 - RNA, 22 nt, Human
gcagaagguuguuugggaaagg

SEQ ID NO: 750574 - RNA, 22 nt, Human
cacaggaccaauucacauucca

SEQ ID NO: 750575 - RNA, 22 nt, Human
acaggcugggcgcuuccugcgg

SEQ ID NO: 750576 - RNA, 22 nt, Human
cuuuacaccaagcagaucuuuc

SEQ ID NO: 750577 - RNA, 22 nt, Human
ggcagagaaucuggcuguuuac

SEQ ID NO: 750578 - RNA, 22 nt, Human
cacucacuuauuucuaacagaa

SEQ ID NO: 750579 - RNA, 22 nt, Human
uccagggcgugugugaaggaaa

SEQ ID NO: 750580 - RNA, 22 nt, Human
gacagaggagaagaugcugugg

SEQ ID NO: 750581 - RNA, 22 nt, Human
uuggcucacaaggacgguugcu

SEQ ID NO: 750582 - RNA, 22 nt, Human
agcuggugcugaagcucuugag

SEQ ID NO: 750583 - RNA, 22 nt, Human
ugaagauugugcuuggccugua

SEQ ID NO: 750584 - RNA, 22 nt, Human
ggggguaggcagacaaggacau

SEQ ID NO: 750585 - RNA, 22 nt, Human
cagacuguagaguuugagaagu

SEQ ID NO: 750586 - RNA, 19 nt, Human
cagcucaggacucagcccc

SEQ ID NO: 750587 - RNA, 22 nt, Human
ugucagcagaucuccugcagcc

SEQ ID NO: 750588 - RNA, 20 nt, Human
guggcaggcagugaaggagc

SEQ ID NO: 750589 - RNA, 22 nt, Human
acucaucugccauuccuguacc

SEQ ID NO: 750590 - RNA, 22 nt, Human
cccaggagagaggccaguuggc

SEQ ID NO: 750591 - RNA, 20 nt, Human
ucauccaggacaggaguggc

SEQ ID NO: 750592 - RNA, 17 nt, Human
uuccccugaccaagccu

SEQ ID NO: 750593 - RNA, 22 nt, Human
cagggccauaucuugugcacca

SEQ ID NO: 750594 - RNA, 22 nt, Human
cauuaaaucuuccagaccucac

SEQ ID NO: 750595 - RNA, 22 nt, Human
agcagggcaugaauaaggguuu

SEQ ID NO: 750596 - RNA, 22 nt, Human
gagcuguucaaggacaggcacg

SEQ ID NO: 750597 - RNA, 22 nt, Human
uucuaacucuguuauguguuuc

SEQ ID NO: 750598 - RNA, 22 nt, Human
ucagccuuguggcccugcucca

SEQ ID NO: 750599 - RNA, 22 nt, Human
aaaaggauguuuucaugaaaca

SEQ ID NO: 750600 - RNA, 22 nt, Human
aaugaucuacucucauuaucuc

SEQ ID NO: 750601 - RNA, 22 nt, Human
cuggcucucugauuucacauuc

SEQ ID NO: 750602 - RNA, 20 nt, Human
uuguuagaggaaugccauag

SEQ ID NO: 750603 - RNA, 22 nt, Human
accuuucauuaaagucuguagu

SEQ ID NO: 750604 - RNA, 22 nt, Human
cagcagcccuuuggcugaacug

SEQ ID NO: 750605 - RNA, 21 nt, Human
gcuguugcccgccgccucuuc

SEQ ID NO: 750606 - RNA, 22 nt, Human
agacccagagggcugcugggag

SEQ ID NO: 750607 - RNA, 23 nt, Human
agggcugaugccauugcagcucu

SEQ ID NO: 750608 - RNA, 21 nt, Human
agcuggccugguuugagcucc

SEQ ID NO: 750609 - RNA, 22 nt, Human
cuguaugaacccauauacuuau

SEQ ID NO: 750610 - RNA, 22 nt, Human
uccagcagguuggucaggugca

SEQ ID NO: 750611 - RNA, 22 nt, Human
gugagcaggauuucauggugua

SEQ ID NO: 750612 - RNA, 22 nt, Human
gagaggaguaggcugauggugc

SEQ ID NO: 750613 - RNA, 22 nt, Human
gccuaggagacaagcgugaaag

SEQ ID NO: 750614 - RNA, 22 nt, Human
ugcuucuuuaugauguaugauu

SEQ ID NO: 750615 - RNA, 22 nt, Human
uuggccaguggaaagaggagga

SEQ ID NO: 750616 - RNA, 22 nt, Human
ucucacucauuuccuaggucuu

SEQ ID NO: 750617 - RNA, 22 nt, Human
gucugcugugccuuggggaaaa

SEQ ID NO: 750618 - RNA, 22 nt, Human
cugugaucauucuugauuuaag

SEQ ID NO: 750619 - RNA, 22 nt, Human
gugaauaaucacccuucuggau

SEQ ID NO: 750620 - RNA, 22 nt, Human
gccaacaggccuugcucugcuc

SEQ ID NO: 750621 - RNA, 22 nt, Human
uacaguauguucuugaauuugg

SEQ ID NO: 750622 - RNA, 22 nt, Human
cagcagagacgguaagcagaac

SEQ ID NO: 750623 - RNA, 21 nt, Human
gcuccuggugcugcguggcgc

SEQ ID NO: 750624 - RNA, 22 nt, Human
uuucuccuccagagagacacag

SEQ ID NO: 750625 - RNA, 22 nt, Human
gcucucagggugauggcauacu

SEQ ID NO: 750626 - RNA, 22 nt, Human
ugguaaaauauuacaaggcacu

SEQ ID NO: 750627 - RNA, 22 nt, Human
gcagaagcagggcaggggcaaa

SEQ ID NO: 750628 - RNA, 22 nt, Human
agcuuuaugggagcuuagauaa

SEQ ID NO: 750629 - RNA, 22 nt, Human
aaauuguugaucuacaguaagg

SEQ ID NO: 750630 - RNA, 22 nt, Human
uuccgcuggggccgccuggcgg

SEQ ID NO: 750631 - RNA, 22 nt, Human
uggcugcaggggugucugacau

SEQ ID NO: 750632 - RNA, 22 nt, Human
ugaggaacucaccaggcagaga

SEQ ID NO: 750633 - RNA, 22 nt, Human
gaaagcugaaccaggaaccaug

SEQ ID NO: 750634 - RNA, 20 nt, Human
aagggagaauaaugauugua

SEQ ID NO: 750635 - RNA, 22 nt, Human
augcaaaauuaccauucuguuc

SEQ ID NO: 750636 - RNA, 22 nt, Human
gucugcccugcugaucucaccc

SEQ ID NO: 750637 - RNA, 22 nt, Human
cugagaaaauuucaggaagugu

SEQ ID NO: 750638 - RNA, 23 nt, Human
uugucugugcuuuuccaguugcu

SEQ ID NO: 750639 - RNA, 22 nt, Human
cgagcagaauggagggugccga

SEQ ID NO: 750640 - RNA, 22 nt, Human
ucuugacauugcaaucuucaga

SEQ ID NO: 750641 - RNA, 22 nt, Human
aagaguauagcuuuaggauuga

SEQ ID NO: 750642 - RNA, 22 nt, Human
agugucacaaaccugccuugua

SEQ ID NO: 750643 - RNA, 22 nt, Human
uaagaaacuuaacugggaacua

SEQ ID NO: 750644 - RNA, 22 nt, Human
cuccaagucggcugcagcugga

SEQ ID NO: 750645 - RNA, 22 nt, Human
ucuggcuuggcuggcaucucug

SEQ ID NO: 750646 - RNA, 22 nt, Human
cucacaccagcuuacaagacuu

SEQ ID NO: 750647 - RNA, 22 nt, Human
gccugguggacacugggcauca

SEQ ID NO: 750648 - RNA, 19 nt, Human
acugugcucgggaaccacu

SEQ ID NO: 750649 - RNA, 22 nt, Human
uagauguugaagucauauuugg

SEQ ID NO: 750650 - RNA, 17 nt, Human
uuacaacgucaucucug

SEQ ID NO: 750651 - RNA, 21 nt, Human
gccugccccauguuucuguug

SEQ ID NO: 750652 - RNA, 22 nt, Human
agggccugcucuaucacucuca

SEQ ID NO: 750653 - RNA, 20 nt, Human
cucuuauugcauuaguuucu

SEQ ID NO: 750654 - RNA, 22 nt, Human
gaccagcugguccuguccuggg

SEQ ID NO: 750655 - RNA, 19 nt, Human
agucucuucggaggagguu

SEQ ID NO: 750656 - RNA, 19 nt, Human
acaauaacucauugauugc

SEQ ID NO: 750657 - RNA, 22 nt, Human
ggucucagugaaggagugugcu

SEQ ID NO: 750658 - RNA, 15 nt, Human
gcucuggguauuuga

SEQ ID NO: 750659 - RNA, 22 nt, Human
uggucucugacucugaagaccc

SEQ ID NO: 750660 - RNA, 22 nt, Human
acccucagcuggagauugaauu

SEQ ID NO: 750661 - RNA, 22 nt, Human
aggucuccuugugggucuugcc

SEQ ID NO: 750662 - RNA, 22 nt, Human
uuucagacucaucucaagcuuu

SEQ ID NO: 750663 - RNA, 22 nt, Human
uauucuacaguguuaguguuag

SEQ ID NO: 750664 - RNA, 22 nt, Human
ugucccucauugacgcugugcc

SEQ ID NO: 750665 - RNA, 22 nt, Human
uccaggccaggguaagaggaga

SEQ ID NO: 750666 - RNA, 22 nt, Human
cagaugcuauguauuauguaug

SEQ ID NO: 750667 - RNA, 18 nt, Human
agcaagcaguuuucaugu

SEQ ID NO: 750668 - RNA, 22 nt, Human
guuggaauuugcucauccauuu

SEQ ID NO: 750669 - RNA, 22 nt, Human
uagaccauuuuacaauagugug

SEQ ID NO: 750670 - RNA, 22 nt, Human
aucugcugucacauguuugaag

SEQ ID NO: 750671 - RNA, 22 nt, Human
gugggccaggcgucuaggcccu

SEQ ID NO: 750672 - RNA, 22 nt, Human
uuugaagacauauuguuacaua

SEQ ID NO: 750673 - RNA, 22 nt, Human
cauucauuuaugaaauaucuau

SEQ ID NO: 750674 - RNA, 22 nt, Human
gauuucaaagguucugcaugcc

SEQ ID NO: 750675 - RNA, 22 nt, Human
cagguagguuuuaggcuaaaca

SEQ ID NO: 750676 - RNA, 22 nt, Human
gacuuuaaaaguuugugcuugg

SEQ ID NO: 750677 - RNA, 22 nt, Human
uggagauguaaagcaaggcuua

SEQ ID NO: 750678 - RNA, 20 nt, Human
gcagggcaucuuggccccca

SEQ ID NO: 750679 - RNA, 22 nt, Human
caggaaugccaaccagugcaug

SEQ ID NO: 750680 - RNA, 22 nt, Human
aaagucauuuagccuuaucucc

SEQ ID NO: 750681 - RNA, 22 nt, Human
ggagcugucuguagggcacagg

SEQ ID NO: 750682 - RNA, 22 nt, Human
auacaguauguaggcuuuucag

SEQ ID NO: 750683 - RNA, 22 nt, Human
aagagcauauuaauaguggaga

SEQ ID NO: 750684 - RNA, 22 nt, Human
uuuucucuccagguggggugau

SEQ ID NO: 750685 - RNA, 22 nt, Human
uuccucagagagacagaaacua

SEQ ID NO: 750686 - RNA, 22 nt, Human
gugugcaugugcuugcacagau

SEQ ID NO: 750687 - RNA, 22 nt, Human
aagagcaggcugcuguggagua

SEQ ID NO: 750688 - RNA, 22 nt, Human
gguuuuaacuacagaauugcaa

SEQ ID NO: 750689 - RNA, 22 nt, Human
aaaaucuaaguagcgaguaagg

SEQ ID NO: 750690 - RNA, 22 nt, Human
gagaggcugguaaagucugaac

SEQ ID NO: 750691 - RNA, 22 nt, Human
ucacaucacaugacaguaggcc

SEQ ID NO: 750692 - RNA, 19 nt, Human
gaguccugugcuccuuguu

SEQ ID NO: 750693 - RNA, 22 nt, Human
acaaaaccagaaaaucucuacc

SEQ ID NO: 750694 - RNA, 22 nt, Human
agggcaugaagcaguggacagc

SEQ ID NO: 750695 - RNA, 22 nt, Human
ucaguguaaguuauguagaugu

SEQ ID NO: 750696 - RNA, 22 nt, Human
uucaacuauuaugaauaaaauu

SEQ ID NO: 750697 - RNA, 22 nt, Human
aguguuuagugaugaaagagaa

SEQ ID NO: 750698 - RNA, 22 nt, Human
uauauacuaugcgauuccugcc

SEQ ID NO: 750699 - RNA, 22 nt, Human
gggugggguucaggaaucuuca

SEQ ID NO: 750700 - RNA, 22 nt, Human
gaggauggugagcaggacccag

SEQ ID NO: 750701 - RNA, 22 nt, Human
agcaggaguuugaugcuuuuau

SEQ ID NO: 750702 - RNA, 22 nt, Human
uucugccuuacgauauuuucaa

SEQ ID NO: 750703 - RNA, 22 nt, Human
ucuucaucucagauuaacagga

SEQ ID NO: 750704 - RNA, 22 nt, Human
ugccugcugcuaagcucuuugu

SEQ ID NO: 750705 - RNA, 22 nt, Human
auaucacaggaaaggaagauac

SEQ ID NO: 750706 - RNA, 22 nt, Human
gcuggagaccucagagaaccca

SEQ ID NO: 750707 - RNA, 22 nt, Human
acaggcaauuagcaagcuguua

SEQ ID NO: 750708 - RNA, 22 nt, Human
cuggcucugugggaccuggccu

SEQ ID NO: 750709 - RNA, 22 nt, Human
ggacaguccaccucagugaaga

SEQ ID NO: 750710 - RNA, 22 nt, Human
aaacugcaugaagcugauuuua

SEQ ID NO: 750711 - RNA, 22 nt, Human
uucugcucuaauguacaccagc

SEQ ID NO: 750712 - RNA, 22 nt, Human
guucugaguggcccaagcccug

SEQ ID NO: 750713 - RNA, 22 nt, Human
aaagaacaauguggaaucuccu

SEQ ID NO: 750714 - RNA, 20 nt, Human
uaaucacuuauaagacaaug

SEQ ID NO: 750715 - RNA, 22 nt, Human
acguggagagaauagggcacca

SEQ ID NO: 750716 - RNA, 22 nt, Human
ugucucagaguaucccugaacu

SEQ ID NO: 750717 - RNA, 22 nt, Human
cuuggcagagggcugggcucag

SEQ ID NO: 750718 - RNA, 22 nt, Human
ucccacugugccuguuguaauc

SEQ ID NO: 750719 - RNA, 22 nt, Human
auaguacauggguguccucaca

SEQ ID NO: 750720 - RNA, 22 nt, Human
gaaccuggaaucuauuacaagg

SEQ ID NO: 750721 - RNA, 22 nt, Human
agguccugacgcccuuugaaau

SEQ ID NO: 750722 - RNA, 20 nt, Human
aguuauaguaucuagccaug

SEQ ID NO: 750723 - RNA, 22 nt, Human
gaggaagaugguugaguggucc

SEQ ID NO: 750724 - RNA, 22 nt, Human
aaggcacauauuuuagagucac

SEQ ID NO: 750725 - RNA, 22 nt, Human
auucuggggcugguuauuuuga

SEQ ID NO: 750726 - RNA, 22 nt, Human
accagcaucaccuggaggccug

SEQ ID NO: 750727 - RNA, 22 nt, Human
ugagaguucucucuucaggugg

SEQ ID NO: 750728 - RNA, 22 nt, Human
cucugcccucgcacaucugcca

SEQ ID NO: 750729 - RNA, 22 nt, Human
cuccagcugccaccagauguuu

SEQ ID NO: 750730 - RNA, 20 nt, Human
ggaccagcugucugaggggc

SEQ ID NO: 750731 - RNA, 22 nt, Human
gcagccacacuguuacagaaug

SEQ ID NO: 750732 - RNA, 22 nt, Human
acuggggcaggaaaguaugcug

SEQ ID NO: 750733 - RNA, 19 nt, Human
uccucaggggcucacagac

SEQ ID NO: 750734 - RNA, 22 nt, Human
agcacagugcugggcacacagu

SEQ ID NO: 750735 - RNA, 22 nt, Human
uucauucuucagagcugcgcuu

SEQ ID NO: 750736 - RNA, 16 nt, Human
aggcagagauuuaccc

SEQ ID NO: 750737 - RNA, 22 nt, Human
caggccucaccagcggagcugc

SEQ ID NO: 750738 - RNA, 22 nt, Human
augucacauggccuguacuuug

SEQ ID NO: 750739 - RNA, 20 nt, Human
ucugugcuacacuccagauu

SEQ ID NO: 750740 - RNA, 22 nt, Human
ggugacgaauccauagcaucga

SEQ ID NO: 750741 - RNA, 22 nt, Human
cugccuuuggggaguuagaggg

SEQ ID NO: 750742 - RNA, 22 nt, Human
aaugaugguuucaucacuugaa

SEQ ID NO: 750743 - RNA, 22 nt, Human
ggcacagcacuguaggccuggg

SEQ ID NO: 750744 - RNA, 22 nt, Human
gacuauugcacacuucucucac

SEQ ID NO: 750745 - RNA, 22 nt, Human
agugacaggggaggcaggugug

SEQ ID NO: 750746 - RNA, 22 nt, Human
gaggcagagugcaccccaggag

SEQ ID NO: 750747 - RNA, 22 nt, Human
ucaagacauauuaaaugugcga

SEQ ID NO: 750748 - RNA, 22 nt, Human
gugccugccccacuccucagca

SEQ ID NO: 750749 - RNA, 22 nt, Human
uuucucaaguacugcacaugaa

SEQ ID NO: 750750 - RNA, 22 nt, Human
agaggucugagcaaucucaagc

SEQ ID NO: 750751 - RNA, 21 nt, Human
aaucugcuucccugugacuug

SEQ ID NO: 750752 - RNA, 22 nt, Human
ugccagcuuguggucagaggcu

SEQ ID NO: 750753 - RNA, 18 nt, Human
gcuuuauuucuuggggaa

SEQ ID NO: 750754 - RNA, 22 nt, Human
ugacaauugcagacacagaagu

SEQ ID NO: 750755 - RNA, 22 nt, Human
uucauuugucugcuauagaucc

SEQ ID NO: 750756 - RNA, 22 nt, Human
ucucugagacaguagccucugc

SEQ ID NO: 750757 - RNA, 22 nt, Human
ugagguaggagggugaucagca

SEQ ID NO: 750758 - RNA, 22 nt, Human
aaucuguuuccaauacuugcua

SEQ ID NO: 750759 - RNA, 22 nt, Human
guccacucuagggcagcucucg

SEQ ID NO: 750760 - RNA, 22 nt, Human
ucugggccgcugcguuccauga

SEQ ID NO: 750761 - RNA, 22 nt, Human
ggcugguguugagugccuguag

SEQ ID NO: 750762 - RNA, 22 nt, Human
auagauguuuuaguaauacugu

SEQ ID NO: 750763 - RNA, 22 nt, Human
ggcccugugauggauguauuag

SEQ ID NO: 750764 - RNA, 22 nt, Human
acagcauucccuuuggcugcuu

SEQ ID NO: 750765 - RNA, 22 nt, Human
ugucaugccauuuaaaauguuu

SEQ ID NO: 750766 - RNA, 22 nt, Human
cuuccugcaacaccuguguugc

SEQ ID NO: 750767 - RNA, 22 nt, Human
uuucaguuuaugucuugaauua

SEQ ID NO: 750768 - RNA, 22 nt, Human
gagaaacaggaauugagucgcu

SEQ ID NO: 750769 - RNA, 19 nt, Human
gggcuccuugggccucucu

SEQ ID NO: 750770 - RNA, 22 nt, Human
acuuucugcaguguuggaaaug

SEQ ID NO: 750771 - RNA, 22 nt, Human
cagagcagggugcaccuugggc

SEQ ID NO: 750772 - RNA, 22 nt, Human
ccaguccuggccaguaacauga

SEQ ID NO: 750773 - RNA, 22 nt, Human
cauggccagauucuuucuucuc

SEQ ID NO: 750774 - RNA, 22 nt, Human
aaugguuugauggacaaaauga

SEQ ID NO: 750775 - RNA, 22 nt, Human
uuaaauuauugagggauuguca

SEQ ID NO: 750776 - RNA, 22 nt, Human
gaguagaaggaaguuaucuacc

SEQ ID NO: 750777 - RNA, 22 nt, Human
uagaaacauguucuguucuguu

SEQ ID NO: 750778 - RNA, 22 nt, Human
gaaggccuaggaaggaagccuu

SEQ ID NO: 750779 - RNA, 22 nt, Human
agagcugaggauccagcugagc

SEQ ID NO: 750780 - RNA, 22 nt, Human
acaaaagcacugcagaguaagc

SEQ ID NO: 750781 - RNA, 22 nt, Human
cagaauuuaaguggauuauucu

SEQ ID NO: 750782 - RNA, 22 nt, Human
cacaugggugugccuggaggaa

SEQ ID NO: 750783 - RNA, 22 nt, Human
uauaaacuccucuugcauuccu

SEQ ID NO: 750784 - RNA, 22 nt, Human
guaauugaaauugccuuggguu

SEQ ID NO: 750785 - RNA, 22 nt, Human
aaggcauaggacaaaucaguga

SEQ ID NO: 750786 - RNA, 17 nt, Human
augcuccauucagaagc

SEQ ID NO: 750787 - RNA, 22 nt, Human
gucacacucagaaugacuagag

SEQ ID NO: 750788 - RNA, 22 nt, Human
acugccugugcacuggucuuuu

SEQ ID NO: 750789 - RNA, 23 nt, Human
agugcugaauugaaagcuccagg

SEQ ID NO: 750790 - RNA, 22 nt, Human
uggccacccacccuaaucuuuc

SEQ ID NO: 750791 - RNA, 22 nt, Human
cuguuuauagcagagcaagccu

SEQ ID NO: 750792 - RNA, 22 nt, Human
aggcuucuacguggucccaggg

SEQ ID NO: 750793 - RNA, 22 nt, Human
uaucagcucggaaucuguugaa

SEQ ID NO: 750794 - RNA, 22 nt, Human
gaaagcaguauuuaguucuguu

SEQ ID NO: 750795 - RNA, 22 nt, Human
cagauuccaguuuguggcuccc

SEQ ID NO: 750796 - RNA, 22 nt, Human
ggcggcccugcacgugcugagg

SEQ ID NO: 750797 - RNA, 22 nt, Human
uaauacauuaccuaaccucucu

SEQ ID NO: 750798 - RNA, 22 nt, Human
ucccauggucuauauagaggca

SEQ ID NO: 750799 - RNA, 22 nt, Human
cugcugugccuuaaaaugcaag

SEQ ID NO: 750800 - RNA, 22 nt, Human
uaugagaagaacaggugacuuu

SEQ ID NO: 750801 - RNA, 22 nt, Human
ucacuguugaccuggaaguggg

SEQ ID NO: 750802 - RNA, 22 nt, Human
uucuuuagcaacuuggauuuag

SEQ ID NO: 750803 - RNA, 22 nt, Human
uucugcugguguuuugugaggc

SEQ ID NO: 750804 - RNA, 21 nt, Human
cacauuccaugggucuauuua

SEQ ID NO: 750805 - RNA, 22 nt, Human
gcuucagauucuuuucaugucu

SEQ ID NO: 750806 - RNA, 22 nt, Human
gaauuaaaauaguuuuggucga

SEQ ID NO: 750807 - RNA, 22 nt, Human
ucacagaaguguguuucaggag

SEQ ID NO: 750808 - RNA, 22 nt, Human
gaagccacguuaaauuggcugu

SEQ ID NO: 750809 - RNA, 22 nt, Human
ucucccaaggcacagaaagagu

SEQ ID NO: 750810 - RNA, 22 nt, Human
guuaaaugcacuauugaaagcu

SEQ ID NO: 750811 - RNA, 22 nt, Human
aggggaggagcuuuucuugccu

SEQ ID NO: 750812 - RNA, 22 nt, Human
aaagugaugccaggagucuggu

SEQ ID NO: 750813 - RNA, 21 nt, Human
uguuccuguucucuaggaucc

SEQ ID NO: 750814 - RNA, 22 nt, Human
ggugggaucaaagagucauucg

SEQ ID NO: 750815 - RNA, 22 nt, Human
gggccagagcuuggcagcuggg

SEQ ID NO: 750816 - RNA, 22 nt, Human
aaugccuuuccacuggguauca

SEQ ID NO: 750817 - RNA, 22 nt, Human
uuuucuuaggugcuccaaguag

SEQ ID NO: 750818 - RNA, 20 nt, Human
ucuagcuuagugccugccuc

SEQ ID NO: 750819 - RNA, 22 nt, Human
aaaguguaggcuucaaagaggg

SEQ ID NO: 750820 - RNA, 22 nt, Human
uuaccaauucagacaucucuuc

SEQ ID NO: 750821 - RNA, 22 nt, Human
gccagccccuccauccuguuca

SEQ ID NO: 750822 - RNA, 22 nt, Human
ccaagaggaccuugccagggca

SEQ ID NO: 750823 - RNA, 22 nt, Human
caggccaauuucuugucauuua

SEQ ID NO: 750824 - RNA, 19 nt, Human
uuucaggagcuaugcaggg

SEQ ID NO: 750825 - RNA, 22 nt, Human
uuucaaagaguuguaaauuacu

SEQ ID NO: 750826 - RNA, 22 nt, Human
ccucccuuccccaguagucaag

SEQ ID NO: 750827 - RNA, 19 nt, Human
uccugcagguggcuugcag

SEQ ID NO: 750828 - RNA, 22 nt, Human
uagucaccuuuggcaccugcaa

SEQ ID NO: 750829 - RNA, 22 nt, Human
uuacaguuuaccaagaauauug

SEQ ID NO: 750830 - RNA, 22 nt, Human
gcugccaugccacagcacucac

SEQ ID NO: 750831 - RNA, 22 nt, Human
cauuaggguaauugaacacuua

SEQ ID NO: 750832 - RNA, 22 nt, Human
uugagguaauaaacagccauuc

SEQ ID NO: 750833 - RNA, 16 nt, Human
ucucccuguucuccaa

SEQ ID NO: 750834 - RNA, 22 nt, Human
ugucaugucuguaaauacacca

SEQ ID NO: 750835 - RNA, 22 nt, Human
ugccugucucugacugccauua

SEQ ID NO: 750836 - RNA, 22 nt, Human
uggagucaugauggcugcugau

SEQ ID NO: 750837 - RNA, 22 nt, Human
ucacccuugauaauguucuucu

SEQ ID NO: 750838 - RNA, 20 nt, Human
auagauccugguucuuugca

SEQ ID NO: 750839 - RNA, 22 nt, Human
agcugggcugggcugagcugag

SEQ ID NO: 750840 - RNA, 22 nt, Human
uagagcuauuuagagcauuuua

SEQ ID NO: 750841 - RNA, 22 nt, Human
cacccaggcuggauugcagugg

SEQ ID NO: 750842 - RNA, 22 nt, Human
uggagcagggcaucacugugcg

SEQ ID NO: 750843 - RNA, 22 nt, Human
auuguucuggauauuuacauug

SEQ ID NO: 750844 - RNA, 22 nt, Human
cagccaagaaccacagacccag

SEQ ID NO: 750845 - RNA, 21 nt, Human
uucuccuguuuugcaccacag

SEQ ID NO: 750846 - RNA, 22 nt, Human
agcacauuuuauuuaagaaaau

SEQ ID NO: 750847 - RNA, 20 nt, Human
acacaguagaugagugacug

SEQ ID NO: 750848 - RNA, 22 nt, Human
augggaggcagacacuaaguuc

SEQ ID NO: 750849 - RNA, 22 nt, Human
cagcccuucuuccaaccagcuu

SEQ ID NO: 750850 - RNA, 22 nt, Human
gcucgaccgccagaaacuuccu

SEQ ID NO: 750851 - RNA, 22 nt, Human
guauagguuuggcucucuccag

SEQ ID NO: 750852 - RNA, 22 nt, Human
cugcagcaucgccaccugccuc

SEQ ID NO: 750853 - RNA, 22 nt, Human
uucugucacuuaggaggucaua

SEQ ID NO: 750854 - RNA, 22 nt, Human
gggcacuggccgcccaucccug

SEQ ID NO: 750855 - RNA, 22 nt, Human
ggugaacauugaugugguuaca

SEQ ID NO: 750856 - RNA, 22 nt, Human
cccuccagggagccaugcuggg

SEQ ID NO: 750857 - RNA, 22 nt, Human
cuucuuccugaaagcuggcucu

SEQ ID NO: 750858 - RNA, 22 nt, Human
aaucauaauucaaauaagcuua

SEQ ID NO: 750859 - RNA, 22 nt, Human
ugucuucaucuccaugcacaga

SEQ ID NO: 750860 - RNA, 22 nt, Human
uaaguucauaagcuuauucuua

SEQ ID NO: 750861 - RNA, 22 nt, Human
uuacaauguaaggcaugguucu

SEQ ID NO: 750862 - RNA, 22 nt, Human
gguccagggaacuuugaaggau

SEQ ID NO: 750863 - RNA, 22 nt, Human
auuuacagaaacuuaaucauag

SEQ ID NO: 750864 - RNA, 22 nt, Human
uagugcuuuggagcuuucuccu

SEQ ID NO: 750865 - RNA, 22 nt, Human
ucacaauugagauccucccacc

SEQ ID NO: 750866 - RNA, 23 nt, Human
agggaaauacugcaauuuuugga

SEQ ID NO: 750867 - RNA, 22 nt, Human
cugggagaugacucagagcagg

SEQ ID NO: 750868 - RNA, 22 nt, Human
aacuguggacuugagacugaug

SEQ ID NO: 750869 - RNA, 21 nt, Human
uagguauuucuaucaugucuc

SEQ ID NO: 750870 - RNA, 22 nt, Human
acaugaguacagauggauguaa

SEQ ID NO: 750871 - RNA, 20 nt, Human
ccucaggaugagggugagca

SEQ ID NO: 750872 - RNA, 20 nt, Human
cauauggaaagauauuguuc

SEQ ID NO: 750873 - RNA, 22 nt, Human
guccuggggauacagaagugaa

SEQ ID NO: 750874 - RNA, 22 nt, Human
ucuggcagcuauccucuggcca

SEQ ID NO: 750875 - RNA, 22 nt, Human
aaagaauacccugggucauaaa

SEQ ID NO: 750876 - RNA, 22 nt, Human
cagaagagaugaaauaguauua

SEQ ID NO: 750877 - RNA, 22 nt, Human
gaauucugguuuugaaaugaau

SEQ ID NO: 750878 - RNA, 22 nt, Human
acauacauguaaaggaaauuau

SEQ ID NO: 750879 - RNA, 22 nt, Human
cucuagaguacgggcuggcaug

SEQ ID NO: 750880 - RNA, 22 nt, Human
ucacuuuggauuauguaauuuc

SEQ ID NO: 750881 - RNA, 22 nt, Human
gacuguggcaggcucagcacug

SEQ ID NO: 750882 - RNA, 22 nt, Human
acagaauauuguaagugccacu

SEQ ID NO: 750883 - RNA, 22 nt, Human
ccacagcuagggcaaucugauu

SEQ ID NO: 750884 - RNA, 22 nt, Human
acaggccugugugcacacgagg

SEQ ID NO: 750885 - RNA, 22 nt, Human
aaauacauaaagguuguaccag

SEQ ID NO: 750886 - RNA, 19 nt, Human
ucccgcccacugagcgugc

SEQ ID NO: 750887 - RNA, 22 nt, Human
gcucaggccuggcuauccauug

SEQ ID NO: 750888 - RNA, 22 nt, Human
agccuggaguucccaggagaag

SEQ ID NO: 750889 - RNA, 22 nt, Human
uuuacuaacaccauacaugcug

SEQ ID NO: 750890 - RNA, 22 nt, Human
uugacuuuacaguuuucuuagg

SEQ ID NO: 750891 - RNA, 22 nt, Human
acaacaaagacacuugaaauga

SEQ ID NO: 750892 - RNA, 22 nt, Human
uaaagaauagauggguagggag

SEQ ID NO: 750893 - RNA, 22 nt, Human
ugguggcuguugcagaacugag

SEQ ID NO: 750894 - RNA, 22 nt, Human
acagaaagauaggcacaagguc

SEQ ID NO: 750895 - RNA, 22 nt, Human
uaacuuugaagggaauuuuacu

SEQ ID NO: 750896 - RNA, 20 nt, Human
ucuuauacagaaaacauuuu

SEQ ID NO: 750897 - RNA, 21 nt, Human
cugcaaauaccuaguuaucug

SEQ ID NO: 750898 - RNA, 22 nt, Human
agguggguccuggcucugccau

SEQ ID NO: 750899 - RNA, 22 nt, Human
uccaguccauggccucagucuu

SEQ ID NO: 750900 - RNA, 22 nt, Human
acagauguaccuuagugauggg

SEQ ID NO: 750901 - RNA, 22 nt, Human
aucuacucaguaacugcuuagg

SEQ ID NO: 750902 - RNA, 21 nt, Human
ggauaaauggucugguuucuc

SEQ ID NO: 750903 - RNA, 22 nt, Human
uaauucaugggcccagugauau

SEQ ID NO: 750904 - RNA, 22 nt, Human
uaaagacaauuucgagcuguag

SEQ ID NO: 750905 - RNA, 22 nt, Human
cugacaggguagacagagggca

SEQ ID NO: 750906 - RNA, 22 nt, Human
caagaaaucuagaagucagugg

SEQ ID NO: 750907 - RNA, 22 nt, Human
cucacugcaaguuccaccuacc

SEQ ID NO: 750908 - RNA, 22 nt, Human
ggccucuggucaagacaagcau

SEQ ID NO: 750909 - RNA, 22 nt, Human
ucagugucaucacuuaauauaa

SEQ ID NO: 750910 - RNA, 19 nt, Human
ggaaggagagaaaugcaug

SEQ ID NO: 750911 - RNA, 22 nt, Human
uaugucuucgucaccuaucuca

SEQ ID NO: 750912 - RNA, 22 nt, Human
ggcuucccaaggagccaggaug

SEQ ID NO: 750913 - RNA, 18 nt, Human
acuggagcauuagcagcu

SEQ ID NO: 750914 - RNA, 22 nt, Human
gcucuuccauuucucuugaacu

SEQ ID NO: 750915 - RNA, 22 nt, Human
ucagccagcaucagcuaagugc

SEQ ID NO: 750916 - RNA, 22 nt, Human
aucacuguggcccaaaaccuca

SEQ ID NO: 750917 - RNA, 22 nt, Human
auaacucuguuuuuuucaugca

SEQ ID NO: 750918 - RNA, 22 nt, Human
aaucccuuuuucauuuaauaga

SEQ ID NO: 750919 - RNA, 22 nt, Human
uucucucugugucauuauggac

SEQ ID NO: 750920 - RNA, 22 nt, Human
aggugccaccucuggugcuguc

SEQ ID NO: 750921 - RNA, 22 nt, Human
agcugcagauaggauguuauuu

SEQ ID NO: 750922 - RNA, 18 nt, Human
uagaguuacuacaugauu

SEQ ID NO: 750923 - RNA, 22 nt, Human
uuggugugacuaaggcagugug

SEQ ID NO: 750924 - RNA, 22 nt, Human
gcaggagcagucaggggcagcu

SEQ ID NO: 750925 - RNA, 22 nt, Human
guccacucacucuuagucacuc

SEQ ID NO: 750926 - RNA, 22 nt, Human
cauaauuucccaagagauugaa

SEQ ID NO: 750927 - RNA, 22 nt, Human
cuccuguauguugggcuucaca

SEQ ID NO: 750928 - RNA, 23 nt, Human
ugucuuugaaugggcuguagaca

SEQ ID NO: 750929 - RNA, 22 nt, Human
agcaugcuuggcauuugucaga

SEQ ID NO: 750930 - RNA, 22 nt, Human
uauuguucuucacuggucuuau

SEQ ID NO: 750931 - RNA, 21 nt, Human
ucagcuuugcaacugcacauc

SEQ ID NO: 750932 - RNA, 22 nt, Human
ccacagaaagccugggaagugg

SEQ ID NO: 750933 - RNA, 22 nt, Human
uuuuaaaggauacucuugucua

SEQ ID NO: 750934 - RNA, 21 nt, Human
gcauguguggugugcuccaca

SEQ ID NO: 750935 - RNA, 22 nt, Human
ccaggucuuggcccccggaccu

SEQ ID NO: 750936 - RNA, 22 nt, Human
cuggccugagaaugcuacccuu

SEQ ID NO: 750937 - RNA, 22 nt, Human
cuccaggagguugcugcuuccu

SEQ ID NO: 750938 - RNA, 22 nt, Human
aaagcaguaguuuucaaauagu

SEQ ID NO: 750939 - RNA, 22 nt, Human
augcagggauuaaaugacugcc

SEQ ID NO: 750940 - RNA, 22 nt, Human
ugcuuuauaggggauugcaggc

SEQ ID NO: 750941 - RNA, 22 nt, Human
ccacagccauuccagggaggcu

SEQ ID NO: 750942 - RNA, 21 nt, Human
aggaggcugucucuuucagcu

SEQ ID NO: 750943 - RNA, 22 nt, Human
agcagccuggacuuggaugugg

SEQ ID NO: 750944 - RNA, 22 nt, Human
aaaagucuuggggaaggccagg

SEQ ID NO: 750945 - RNA, 22 nt, Human
ugcaggaacuugguuuuacuca

SEQ ID NO: 750946 - RNA, 22 nt, Human
ugcccuggcuccucccacgcug

SEQ ID NO: 750947 - RNA, 22 nt, Human
gcugccaccguggagaugagug

SEQ ID NO: 750948 - RNA, 22 nt, Human
uuugcauuuuagauuuaggccu

SEQ ID NO: 750949 - RNA, 22 nt, Human
cucccucauauacccagcgaga

SEQ ID NO: 750950 - RNA, 22 nt, Human
aaauggcuuugaggguaggaca

SEQ ID NO: 750951 - RNA, 22 nt, Human
uuuacagaugaggaaacugaga

SEQ ID NO: 750952 - RNA, 22 nt, Human
ucaccagaugauuuuucuucag

SEQ ID NO: 750953 - RNA, 22 nt, Human
aagggagaaaacuuguggcuua

SEQ ID NO: 750954 - RNA, 19 nt, Human
auaaggcaauuggauuugg

SEQ ID NO: 750955 - RNA, 22 nt, Human
uucuuacaucaguuuauuuugu

SEQ ID NO: 750956 - RNA, 22 nt, Human
ggagccagagcacuggggagcc

SEQ ID NO: 750957 - RNA, 22 nt, Human
uggaagugccuugcuggcugug

SEQ ID NO: 750958 - RNA, 22 nt, Human
agucauaugacccuucacaaac

SEQ ID NO: 750959 - RNA, 22 nt, Human
gcaccagagggggcucugcagg

SEQ ID NO: 750960 - RNA, 22 nt, Human
uggcucucccaauaccuuucug

SEQ ID NO: 750961 - RNA, 20 nt, Human
agccugccagcuggcccaga

SEQ ID NO: 750962 - RNA, 21 nt, Human
aggaguugagugcacaguugg

SEQ ID NO: 750963 - RNA, 22 nt, Human
gguguggcaguggaccugugaa

SEQ ID NO: 750964 - RNA, 22 nt, Human
aggagaccuucaccacuuccac

SEQ ID NO: 750965 - RNA, 22 nt, Human
auccccuugugggcuggcagca

SEQ ID NO: 750966 - RNA, 19 nt, Human
uuuuuacaaguagguguga

SEQ ID NO: 750967 - RNA, 22 nt, Human
uaugaguuuaaggcuaaaauag

SEQ ID NO: 750968 - RNA, 22 nt, Human
acaaaauuaccuaguuauuuuc

SEQ ID NO: 750969 - RNA, 22 nt, Human
ggcuucuuaaucaugagaguga

SEQ ID NO: 750970 - RNA, 22 nt, Human
ggggugagguuuauguucuggg

SEQ ID NO: 750971 - RNA, 22 nt, Human
aaggcuuguguguucagugagg

SEQ ID NO: 750972 - RNA, 22 nt, Human
auuuccaugaaguuuaguuaua

SEQ ID NO: 750973 - RNA, 22 nt, Human
cugcuuuagugugguguuagag

SEQ ID NO: 750974 - RNA, 22 nt, Human
uucauacauuuuuacuaacagc

SEQ ID NO: 750975 - RNA, 22 nt, Human
augagguauucguaauauuucc

SEQ ID NO: 750976 - RNA, 22 nt, Human
gggcacagaagucuaagacauc

SEQ ID NO: 750977 - RNA, 20 nt, Human
ggugcagguaacgcugugcu

SEQ ID NO: 750978 - RNA, 22 nt, Human
acugggaagauggaggcaagca

SEQ ID NO: 750979 - RNA, 22 nt, Human
ccugugacgugucuccuggcac

SEQ ID NO: 750980 - RNA, 22 nt, Human
augugcuugagggaaaucaguu

SEQ ID NO: 750981 - RNA, 23 nt, Human
uaaagucacauauuagagugagc

SEQ ID NO: 750982 - RNA, 22 nt, Human
cuugcuucugcugcacuauccu

SEQ ID NO: 750983 - RNA, 22 nt, Human
auaacagaauaagucauuaccg

SEQ ID NO: 750984 - RNA, 22 nt, Human
acagugcucaugugacauggug

SEQ ID NO: 750985 - RNA, 22 nt, Human
uugagaggauggauuagacaaa

SEQ ID NO: 750986 - RNA, 22 nt, Human
uggcuuggugagcagaguguag

SEQ ID NO: 750987 - RNA, 22 nt, Human
cggaagagggacagcgccagcc

SEQ ID NO: 750988 - RNA, 22 nt, Human
acacuguucuuugcacugagaa

SEQ ID NO: 750989 - RNA, 22 nt, Human
gcugucgugugcaagugacaga

SEQ ID NO: 750990 - RNA, 22 nt, Human
gaggggggcgcccugcagugca

SEQ ID NO: 750991 - RNA, 22 nt, Human
uccaggcccgagaugggcugga

SEQ ID NO: 750992 - RNA, 22 nt, Human
agguggggaggagugucucuuu

SEQ ID NO: 750993 - RNA, 22 nt, Human
cagcugccaagaaucuuuucua

SEQ ID NO: 750994 - RNA, 22 nt, Human
aaccuguaaauccaaacaaucu

SEQ ID NO: 750995 - RNA, 22 nt, Human
guacacauauuuccaaggguaa

SEQ ID NO: 750996 - RNA, 23 nt, Human
caucuagcauccagugaguagug

SEQ ID NO: 750997 - RNA, 22 nt, Human
agcucagggcuccaggaccgcu

SEQ ID NO: 750998 - RNA, 19 nt, Human
uacauccucuuccucuuug

SEQ ID NO: 750999 - RNA, 20 nt, Human
cugggcucgguggcccuggc

SEQ ID NO: 751000 - RNA, 22 nt, Human
uaacagaauccuguuauugcca

SEQ ID NO: 751001 - RNA, 22 nt, Human
ucagggcauacucuucaagguc

SEQ ID NO: 751002 - RNA, 22 nt, Human
auguuucaaugcacuuuagccu

SEQ ID NO: 751003 - RNA, 20 nt, Human
aauagcugagggcaagagua

SEQ ID NO: 751004 - RNA, 22 nt, Human
cucaggcacgggucagugagcg

SEQ ID NO: 751005 - RNA, 22 nt, Human
ucaggaggcggugcugccuuug

SEQ ID NO: 751006 - RNA, 22 nt, Human
aacccaggaguuggaggcugug

SEQ ID NO: 751007 - RNA, 22 nt, Human
ucuccucuacugggucugcaga

SEQ ID NO: 751008 - RNA, 21 nt, Human
agaauucuuaaguauucuaau

SEQ ID NO: 751009 - RNA, 22 nt, Human
agaagccaaaugccagugaccu

SEQ ID NO: 751010 - RNA, 22 nt, Human
ugggcacauaguuuuaugguca

SEQ ID NO: 751011 - RNA, 22 nt, Human
aaucuuaagcugaauucucucc

SEQ ID NO: 751012 - RNA, 22 nt, Human
ugccuggcucuaucaguggugg

SEQ ID NO: 751013 - RNA, 22 nt, Human
gcuggugugugaaccuagggac

SEQ ID NO: 751014 - RNA, 22 nt, Human
ucugagggcuugaggggaagua

SEQ ID NO: 751015 - RNA, 22 nt, Human
uucugauaccuugcaggauccu

SEQ ID NO: 751016 - RNA, 22 nt, Human
aaagcaaugaugguagacacgu

SEQ ID NO: 751017 - RNA, 19 nt, Human
cucucacucgccacauccu

SEQ ID NO: 751018 - RNA, 22 nt, Human
cauuaagauuuuuuucuacugg

SEQ ID NO: 751019 - RNA, 22 nt, Human
acuguacacacuucucugucuu

SEQ ID NO: 751020 - RNA, 22 nt, Human
cgcagcagccccgugguaggug

SEQ ID NO: 751021 - RNA, 22 nt, Human
ucuaaacuuguaaacaagcaua

SEQ ID NO: 751022 - RNA, 22 nt, Human
augugcuucauucuacaugaca

SEQ ID NO: 751023 - RNA, 22 nt, Human
ugcuaucucuauauccauuuau

SEQ ID NO: 751024 - RNA, 22 nt, Human
ugggaccucucuugagagagca

SEQ ID NO: 751025 - RNA, 22 nt, Human
auacaauuauucugcagauauu

SEQ ID NO: 751026 - RNA, 22 nt, Human
aacaugaagguaggaugguuuu

SEQ ID NO: 751027 - RNA, 22 nt, Human
ugcugccuuucaauguugucau

SEQ ID NO: 751028 - RNA, 20 nt, Human
aaacauaguggauaccacag

SEQ ID NO: 751029 - RNA, 22 nt, Human
acaaggcauuccggaaguaacc

SEQ ID NO: 751030 - RNA, 22 nt, Human
uccuugagaggacagagccaua

SEQ ID NO: 751031 - RNA, 22 nt, Human
uuugcagugucagcuucugugu

SEQ ID NO: 751032 - RNA, 22 nt, Human
uccaggcagucauuaaucucua

SEQ ID NO: 751033 - RNA, 22 nt, Human
uggccuggaaccuggcagggac

SEQ ID NO: 751034 - RNA, 22 nt, Human
gugccaucauucaauaaauuca

SEQ ID NO: 751035 - RNA, 23 nt, Human
gcagagguuuuucaguaugguuu

SEQ ID NO: 751036 - RNA, 22 nt, Human
agccucucuuucugguggcuaa

SEQ ID NO: 751037 - RNA, 22 nt, Human
ggcacacagauggagcacuagc

SEQ ID NO: 751038 - RNA, 22 nt, Human
gucccagggcaaggcuguuucu

SEQ ID NO: 751039 - RNA, 22 nt, Human
uguuuacagcugaucaggcauc

SEQ ID NO: 751040 - RNA, 20 nt, Human
gaaauguacacauuaccaca

SEQ ID NO: 751041 - RNA, 22 nt, Human
aggcaguguauugcuagcggcu

SEQ ID NO: 751042 - RNA, 22 nt, Human
ucauuuaauagcuuuugucuuu

SEQ ID NO: 751043 - RNA, 22 nt, Human
uccccaggaguuuuacuuugca

SEQ ID NO: 751044 - RNA, 22 nt, Human
ucaaugacugguccaagguggc

SEQ ID NO: 751045 - RNA, 22 nt, Human
uggaguggacuucaugaggcca

SEQ ID NO: 751046 - RNA, 21 nt, Human
accagcaggagaucagaagga

SEQ ID NO: 751047 - RNA, 22 nt, Human
gucuccagauauccuacacaac

SEQ ID NO: 751048 - RNA, 22 nt, Human
uggaaacuaggauggaagaaau

SEQ ID NO: 751049 - RNA, 22 nt, Human
uauugcugaugcugaagggaag

SEQ ID NO: 751050 - RNA, 22 nt, Human
uuauuuccaguccagaaauuua

SEQ ID NO: 751051 - RNA, 22 nt, Human
aacaucuucagagaagcuaagu

SEQ ID NO: 751052 - RNA, 22 nt, Human
uuagcaaaaauaucucauauua

SEQ ID NO: 751053 - RNA, 22 nt, Human
uaugccuggggugcucaggcca

SEQ ID NO: 751054 - RNA, 22 nt, Human
gaguguccgugcagccccagac

SEQ ID NO: 751055 - RNA, 22 nt, Human
gcaguacuuuaagggaugaagc

SEQ ID NO: 751056 - RNA, 22 nt, Human
ggcucagcuuggugcgcagaaa

SEQ ID NO: 751057 - RNA, 22 nt, Human
ugacagaaagaauaugucaauc

SEQ ID NO: 751058 - RNA, 22 nt, Human
aguucagaggcaggagaaggcu

SEQ ID NO: 751059 - RNA, 22 nt, Human
gccuucaggugcugccaggcua

SEQ ID NO: 751060 - RNA, 22 nt, Human
guuuacaaauauuuuaaauggu

SEQ ID NO: 751061 - RNA, 22 nt, Human
aggagccaugagugacaucaca

SEQ ID NO: 751062 - RNA, 22 nt, Human
cagcuuuaguaacccacugcuc

SEQ ID NO: 751063 - RNA, 22 nt, Human
aaccugaauuuaauugaaauga

SEQ ID NO: 751064 - RNA, 22 nt, Human
ccugccacuucuugcuauggag

SEQ ID NO: 751065 - RNA, 19 nt, Human
aaggacacaacagagauag

SEQ ID NO: 751066 - RNA, 22 nt, Human
gaaaccugagugcagaucagga

SEQ ID NO: 751067 - RNA, 22 nt, Human
uuuaggcagaacauggacuuug

SEQ ID NO: 751068 - RNA, 22 nt, Human
cuggagggcuucugcagguuac

SEQ ID NO: 751069 - RNA, 22 nt, Human
ucugggugucacuccugccugc

SEQ ID NO: 751070 - RNA, 22 nt, Human
guacauuucaguuuccuuaaga

SEQ ID NO: 751071 - RNA, 22 nt, Human
ucugucugccuugugagggcac

SEQ ID NO: 751072 - RNA, 23 nt, Human
aucugaaaaggcauuuucuuccc

SEQ ID NO: 751073 - RNA, 22 nt, Human
uggcagagaacacacaugauuc

SEQ ID NO: 751074 - RNA, 22 nt, Human
uuucuuccaaaggcacguucuc

SEQ ID NO: 751075 - RNA, 22 nt, Human
ggccugagucacaucaggagag

SEQ ID NO: 751076 - RNA, 22 nt, Human
uugaaaugagacuaauugauug

SEQ ID NO: 751077 - RNA, 17 nt, Human
ccuggcugggaaucuga

SEQ ID NO: 751078 - RNA, 22 nt, Human
cccuuuggguuccccaagccug

SEQ ID NO: 751079 - RNA, 22 nt, Human
gucugaauucuguguaacucua

SEQ ID NO: 751080 - RNA, 22 nt, Human
cuuucuuaauuuuuaaggacac

SEQ ID NO: 751081 - RNA, 22 nt, Human
aauacuguaugagcuaugguag

SEQ ID NO: 751082 - RNA, 22 nt, Human
gaggcaagagaagccagcuuuc

SEQ ID NO: 751083 - RNA, 22 nt, Human
uuguuuucuccacugcaucuua

SEQ ID NO: 751084 - RNA, 22 nt, Human
ccaguguuagagacugauacag

SEQ ID NO: 751085 - RNA, 22 nt, Human
gcuaggaaucggacccaggaag

SEQ ID NO: 751086 - RNA, 22 nt, Human
aagaaaacaugaucuaauuuaa

SEQ ID NO: 751087 - RNA, 20 nt, Human
ucagugcucaggcaccaggu

SEQ ID NO: 751088 - RNA, 22 nt, Human
aggacccaagcacaguuccugg

SEQ ID NO: 751089 - RNA, 22 nt, Human
aaagcaauuacaaaagggauaa

SEQ ID NO: 751090 - RNA, 22 nt, Human
uccagguacucauuggcuguua

SEQ ID NO: 751091 - RNA, 19 nt, Human
ucauuuacgguuuugauga

SEQ ID NO: 751092 - RNA, 22 nt, Human
ugggcagagucauacaggagac

SEQ ID NO: 751093 - RNA, 22 nt, Human
ucuagguuagaacccagaaaag

SEQ ID NO: 751094 - RNA, 22 nt, Human
aguuuccacuggagacacugug

SEQ ID NO: 751095 - RNA, 22 nt, Human
agucacagaaugauggcuccag

SEQ ID NO: 751096 - RNA, 22 nt, Human
aagcugucaauguaucuagucu

SEQ ID NO: 751097 - RNA, 22 nt, Human
cuuccucccggcccaugcucug

SEQ ID NO: 751098 - RNA, 22 nt, Human
aggaauguuaagaaggucuacc

SEQ ID NO: 751099 - RNA, 22 nt, Human
gauucauaccguuucuucucca

SEQ ID NO: 751100 - RNA, 22 nt, Human
auauucacugagcauaaagcca

SEQ ID NO: 751101 - RNA, 17 nt, Human
ccaggcuccaucacugu

SEQ ID NO: 751102 - RNA, 22 nt, Human
accaggaacucacccgcagagg

SEQ ID NO: 751103 - RNA, 22 nt, Human
uuccugugaagccgguggucuc

SEQ ID NO: 751104 - RNA, 22 nt, Human
aacaucuacuaagugccaggca

SEQ ID NO: 751105 - RNA, 22 nt, Human
guacaaaguggaccugauagua

SEQ ID NO: 751106 - RNA, 22 nt, Human
uuaguuuucucaucuaucucac

SEQ ID NO: 751107 - RNA, 22 nt, Human
gccacagucaggacggggagag

SEQ ID NO: 751108 - RNA, 22 nt, Human
ccugggcuugcaucugugcugg

SEQ ID NO: 751109 - RNA, 22 nt, Human
cuguggaaggccuguccugaaa

SEQ ID NO: 751110 - RNA, 22 nt, Human
aggagcugcaaauauuaguaau

SEQ ID NO: 751111 - RNA, 22 nt, Human
ggcaugugccugaggucacaca

SEQ ID NO: 751112 - RNA, 22 nt, Human
uguccugggaggcgggguccag

SEQ ID NO: 751113 - RNA, 22 nt, Human
uacauccaaaugaauuagaauu

SEQ ID NO: 751114 - RNA, 22 nt, Human
uuacagagauaaacuguaagug

SEQ ID NO: 751115 - RNA, 22 nt, Human
uuacaaugaugggauucagcca

SEQ ID NO: 751116 - RNA, 18 nt, Human
agcucacagaucuguuuu

SEQ ID NO: 751117 - RNA, 22 nt, Human
gccucagagggcagggugguga

SEQ ID NO: 751118 - RNA, 22 nt, Human
ggggaggccaguggaccguccc

SEQ ID NO: 751119 - RNA, 22 nt, Human
cuugggcucugugggccuuagu

SEQ ID NO: 751120 - RNA, 23 nt, Human
auugaccagcugucucauuuuca

SEQ ID NO: 751121 - RNA, 22 nt, Human
gcauggcuauucuaacucacau

SEQ ID NO: 751122 - RNA, 22 nt, Human
aagccauggcaugccaggauca

SEQ ID NO: 751123 - RNA, 22 nt, Human
ugcccuggggucuggagcagca

SEQ ID NO: 751124 - RNA, 22 nt, Human
cagaucauaacagauacauaga

SEQ ID NO: 751125 - RNA, 22 nt, Human
aaacuacuaugggaauguacuu

SEQ ID NO: 751126 - RNA, 22 nt, Human
gaacugaagacuuuuacuguac

SEQ ID NO: 751127 - RNA, 22 nt, Human
ugcccucagaauugcucccugc

SEQ ID NO: 751128 - RNA, 22 nt, Human
aguuaucagguguuuucaugga

SEQ ID NO: 751129 - RNA, 22 nt, Human
auuagugucauguugaggacuu

SEQ ID NO: 751130 - RNA, 22 nt, Human
aagggugcaaagcacucuagcu

SEQ ID NO: 751131 - RNA, 22 nt, Human
ccaaaaaguacauuuaggugug

SEQ ID NO: 751132 - RNA, 20 nt, Human
agcccuguaaauccccugga

SEQ ID NO: 751133 - RNA, 22 nt, Human
cugggaagaauccaagggcccu

SEQ ID NO: 751134 - RNA, 22 nt, Human
agcagcagggugauagugccca

SEQ ID NO: 751135 - RNA, 22 nt, Human
cacagguguccaauaccugcuu

SEQ ID NO: 751136 - RNA, 22 nt, Human
uuaguagaauguuauagcaauu

SEQ ID NO: 751137 - RNA, 22 nt, Human
ucccagggugcgccugcccucg

SEQ ID NO: 751138 - RNA, 22 nt, Human
uacaaaacagugcucugguccu

SEQ ID NO: 751139 - RNA, 22 nt, Human
gaaacuucuugucucacaguuc

SEQ ID NO: 751140 - RNA, 22 nt, Human
aggaaaauuaucaugagagcca

SEQ ID NO: 751141 - RNA, 22 nt, Human
uccagggcauggggagagagug

SEQ ID NO: 751142 - RNA, 22 nt, Human
ggcagaagaaaggcuaagucuc

SEQ ID NO: 751143 - RNA, 22 nt, Human
uggucagguaccucuggcuguc

SEQ ID NO: 751144 - RNA, 22 nt, Human
agcuccugugugcccaccugcu

SEQ ID NO: 751145 - RNA, 22 nt, Human
ggucagcagugcagggcagagc

SEQ ID NO: 751146 - RNA, 22 nt, Human
ugcuucuggggacaggcugccu

SEQ ID NO: 751147 - RNA, 22 nt, Human
gaagccagauuaucacaagcca

SEQ ID NO: 751148 - RNA, 22 nt, Human
agaaguaguccaguggaaagua

SEQ ID NO: 751149 - RNA, 22 nt, Human
agcaaugcuuauugcugacuau

SEQ ID NO: 751150 - RNA, 22 nt, Human
caaggcaaucucauggcuucuu

SEQ ID NO: 751151 - RNA, 22 nt, Human
gcuuccugauauucauacuguu

SEQ ID NO: 751152 - RNA, 22 nt, Human
aguuugaauugaaaugcagaug

SEQ ID NO: 751153 - RNA, 22 nt, Human
gggagagaaauuauagcaauga

SEQ ID NO: 751154 - RNA, 22 nt, Human
gauagucaccucccuuaacuuu

SEQ ID NO: 751155 - RNA, 22 nt, Human
cuuccucaggcauuagcuggac

SEQ ID NO: 751156 - RNA, 22 nt, Human
gcucugugccccugccguggac

SEQ ID NO: 751157 - RNA, 22 nt, Human
uuauucagcauuuagaggaagg

SEQ ID NO: 751158 - RNA, 21 nt, Human
ucuuucugaaaucucagucug

SEQ ID NO: 751159 - RNA, 22 nt, Human
acaguuuauugcacagguaacc

SEQ ID NO: 751160 - RNA, 22 nt, Human
cucugggguuaagcuuccaugg

SEQ ID NO: 751161 - RNA, 22 nt, Human
uuggaucaaauuucaugcuguc

SEQ ID NO: 751162 - RNA, 20 nt, Human
uauuuugcaauuaugguuca

SEQ ID NO: 751163 - RNA, 19 nt, Human
gcaggcaguggcauucgga

SEQ ID NO: 751164 - RNA, 23 nt, Human
cucucucuaccaugugaggacac

SEQ ID NO: 751165 - RNA, 22 nt, Human
ccagguacauggagaagaacag

SEQ ID NO: 751166 - RNA, 22 nt, Human
cuguuaauucuagauggugagu

SEQ ID NO: 751167 - RNA, 22 nt, Human
uuugcauuucuaaugagcuccg

SEQ ID NO: 751168 - RNA, 22 nt, Human
aacagcagcuuucaggaucauc

SEQ ID NO: 751169 - RNA, 22 nt, Human
caaggcagcguuccuuucugga

SEQ ID NO: 751170 - RNA, 22 nt, Human
ggggggcuguucuggacaggaa

SEQ ID NO: 751171 - RNA, 23 nt, Human
aguuucacauuuuacauguggcu

SEQ ID NO: 751172 - RNA, 22 nt, Human
uucugagaaauggguucacaua

SEQ ID NO: 751173 - RNA, 22 nt, Human
cuccuuugaucccaaaugaccc

SEQ ID NO: 751174 - RNA, 22 nt, Human
aaguauauuuuuugaagcauau

SEQ ID NO: 751175 - RNA, 22 nt, Human
auguguaggugaaucgaggcug

SEQ ID NO: 751176 - RNA, 22 nt, Human
cacaacuuuaggaaccacauuc

SEQ ID NO: 751177 - RNA, 22 nt, Human
uguauucuuaguuuuaaucaga

SEQ ID NO: 751178 - RNA, 22 nt, Human
ucucagugguggcauuccagac

SEQ ID NO: 751179 - RNA, 21 nt, Human
gagcaucuccuuccuccugcu

SEQ ID NO: 751180 - RNA, 22 nt, Human
ugagcaucuucgugaaagcuuc

SEQ ID NO: 751181 - RNA, 22 nt, Human
aucugcauuuacauugcuugua

SEQ ID NO: 751182 - RNA, 21 nt, Human
cagggcuagagagaaugacaa

SEQ ID NO: 751183 - RNA, 22 nt, Human
cugugacuuccacuacugauca

SEQ ID NO: 751184 - RNA, 22 nt, Human
agguuccagguucgaaucccau

SEQ ID NO: 751185 - RNA, 22 nt, Human
aguuuucuguucuacaauuuga

SEQ ID NO: 751186 - RNA, 22 nt, Human
uggucaaaaaggccuagacaca

SEQ ID NO: 751187 - RNA, 22 nt, Human
gcccugcugcuggcagaggcgc

SEQ ID NO: 751188 - RNA, 22 nt, Human
gaggggcaaugagggaaagagu

SEQ ID NO: 751189 - RNA, 22 nt, Human
aagguuuuuuuccaguaucucu

SEQ ID NO: 751190 - RNA, 22 nt, Human
ucacagaaggagggaagcuagu

SEQ ID NO: 751191 - RNA, 22 nt, Human
cugccuggucucaggcaugggg

SEQ ID NO: 751192 - RNA, 22 nt, Human
agugggagagaagcaaguagua

SEQ ID NO: 751193 - RNA, 22 nt, Human
agccagggaggauuacacccca

SEQ ID NO: 751194 - RNA, 22 nt, Human
uugcacagaugcacaugguugc

SEQ ID NO: 751195 - RNA, 22 nt, Human
ggaggaaaggcucccucccucu

SEQ ID NO: 751196 - RNA, 22 nt, Human
cucagggcaguauggcugagag

SEQ ID NO: 751197 - RNA, 22 nt, Human
uagacaaucucagcaaacacac

SEQ ID NO: 751198 - RNA, 21 nt, Human
aauccuuaaugaggaguuggu

SEQ ID NO: 751199 - RNA, 22 nt, Human
agcugcucaggagagccagguc

SEQ ID NO: 751200 - RNA, 22 nt, Human
gcugggccagacuuucaauguc

SEQ ID NO: 751201 - RNA, 22 nt, Human
gcauccucccggugcugcuggc

SEQ ID NO: 751202 - RNA, 22 nt, Human
uggaccagggucccagaguaug

SEQ ID NO: 751203 - RNA, 22 nt, Human
ucccagccuccugacaguuuug

SEQ ID NO: 751204 - RNA, 22 nt, Human
uucaauucugaugaaggcaaua

SEQ ID NO: 751205 - RNA, 22 nt, Human
agcagcaagcagugcacggguu

SEQ ID NO: 751206 - RNA, 22 nt, Human
aguuuccaaauauuguuuuagc

SEQ ID NO: 751207 - RNA, 22 nt, Human
ugcccaagguggccuuuuacuc

SEQ ID NO: 751208 - RNA, 22 nt, Human
uucuccugaguucccaggucua

SEQ ID NO: 751209 - RNA, 22 nt, Human
agcaacauuuuucaauuaacau

SEQ ID NO: 751210 - RNA, 22 nt, Human
uggaggccacaugaacgcugcg

SEQ ID NO: 751211 - RNA, 21 nt, Human
ugguccuucuuuacugccucc

SEQ ID NO: 751212 - RNA, 22 nt, Human
acccaggccugagagacaggag

SEQ ID NO: 751213 - RNA, 22 nt, Human
uuugucuuaaaucuuguuacug

SEQ ID NO: 751214 - RNA, 22 nt, Human
uguucagaacaaagguaaauga

SEQ ID NO: 751215 - RNA, 22 nt, Human
cucuuugaaauccaucacugcu

SEQ ID NO: 751216 - RNA, 22 nt, Human
ggcaagaguugaagcuccagga

SEQ ID NO: 751217 - RNA, 22 nt, Human
agaugggcgcgcugcucugaug

SEQ ID NO: 751218 - RNA, 22 nt, Human
caccagcugcaacaccaucucc

SEQ ID NO: 751219 - RNA, 22 nt, Human
uccugcagacauuuacaccuuu

SEQ ID NO: 751220 - RNA, 17 nt, Human
uggggaagcucagauuu

SEQ ID NO: 751221 - RNA, 22 nt, Human
gggugguggcggaggcuccagg

SEQ ID NO: 751222 - RNA, 22 nt, Human
ucauugaauacauauuugggau

SEQ ID NO: 751223 - RNA, 22 nt, Human
uucugggaggcuggcugucaua

SEQ ID NO: 751224 - RNA, 22 nt, Human
uuuagagcccaugugaguguga

SEQ ID NO: 751225 - RNA, 22 nt, Human
gucagcuaauaggguguguguc

SEQ ID NO: 751226 - RNA, 22 nt, Human
ugcagagaccacugugccuucc

SEQ ID NO: 751227 - RNA, 22 nt, Human
ucucugugcaggaugcugaguu

SEQ ID NO: 751228 - RNA, 22 nt, Human
cgaggccaauguguuuuaugaa

SEQ ID NO: 751229 - RNA, 22 nt, Human
cuucuucaaccugaaaguuuca

SEQ ID NO: 751230 - RNA, 22 nt, Human
ucaguuuuuaaaugauauaauu

SEQ ID NO: 751231 - RNA, 22 nt, Human
auugcugaaaguauuuuaugac

SEQ ID NO: 751232 - RNA, 22 nt, Human
gcuauacacauuucuugguagu

SEQ ID NO: 751233 - RNA, 22 nt, Human
ucuggcucaucucuccagguaa

SEQ ID NO: 751234 - RNA, 22 nt, Human
cucagucucuugggcugugaag

SEQ ID NO: 751235 - RNA, 22 nt, Human
uucaguucacauguaucauggc

SEQ ID NO: 751236 - RNA, 22 nt, Human
agaucaguuagauagcuugaug

SEQ ID NO: 751237 - RNA, 22 nt, Human
agcccucaggcuuugcugggcc

SEQ ID NO: 751238 - RNA, 22 nt, Human
acaagauguguuuauacaagcu

SEQ ID NO: 751239 - RNA, 22 nt, Human
aucuuaugagacccauaaagau

SEQ ID NO: 751240 - RNA, 22 nt, Human
acuguuaacgguaugaugcucg

SEQ ID NO: 751241 - RNA, 22 nt, Human
agaccucuggauagaugugagg

SEQ ID NO: 751242 - RNA, 22 nt, Human
uuccaaggccagacagggcagu

SEQ ID NO: 751243 - RNA, 22 nt, Human
acagggcuuguugaaagcggag

SEQ ID NO: 751244 - RNA, 18 nt, Human
aguuuuuaggaagaaaug

SEQ ID NO: 751245 - RNA, 22 nt, Human
uggagaagcuguagguggacuc

SEQ ID NO: 751246 - RNA, 22 nt, Human
aaauuacuuuacacuuucaucu

SEQ ID NO: 751247 - RNA, 19 nt, Human
uuacaauggugauuagguu

SEQ ID NO: 751248 - RNA, 22 nt, Human
cugagcugcggcaggcaccugg

SEQ ID NO: 751249 - RNA, 22 nt, Human
gugcccugacacaccuggugug

SEQ ID NO: 751250 - RNA, 22 nt, Human
ggaccugaacauaaaacgaggc

SEQ ID NO: 751251 - RNA, 22 nt, Human
acauuucuccuacuuguuauuu

SEQ ID NO: 751252 - RNA, 22 nt, Human
gcgcgcuaccgccagggcugca

SEQ ID NO: 751253 - RNA, 22 nt, Human
ucaugcagguuuccagccagau

SEQ ID NO: 751254 - RNA, 22 nt, Human
ugucucaggggcauugaaauaa

SEQ ID NO: 751255 - RNA, 21 nt, Human
agcuguuugaagcuauauugg

SEQ ID NO: 751256 - RNA, 22 nt, Human
caguaguaguuaaacuguguau

SEQ ID NO: 751257 - RNA, 22 nt, Human
cugcagggcuuaccuugcucug

SEQ ID NO: 751258 - RNA, 22 nt, Human
auauuagguuggugcaaaagua

SEQ ID NO: 751259 - RNA, 22 nt, Human
aaagcacuauagccaaauagcc

SEQ ID NO: 751260 - RNA, 22 nt, Human
ucucucuucaugcuuuuagaau

SEQ ID NO: 751261 - RNA, 22 nt, Human
aacugagggcccugcugaagca

SEQ ID NO: 751262 - RNA, 22 nt, Human
gccaagcucaccuucugaugga

SEQ ID NO: 751263 - RNA, 22 nt, Human
cccaagggugcccagcagagga

SEQ ID NO: 751264 - RNA, 20 nt, Human
agggucugaugugguggccc

SEQ ID NO: 751265 - RNA, 22 nt, Human
gcugugagggucuagugaggug

SEQ ID NO: 751266 - RNA, 22 nt, Human
agcacaguuucuuuuccuuguc

SEQ ID NO: 751267 - RNA, 22 nt, Human
ggcuguaguuaccugaugaaau

SEQ ID NO: 751268 - RNA, 22 nt, Human
uguccucaggaccuggcacagu

SEQ ID NO: 751269 - RNA, 22 nt, Human
agggaucacgguggacuuggau

SEQ ID NO: 751270 - RNA, 22 nt, Human
uugcuuuaccugugguauauuu

SEQ ID NO: 751271 - RNA, 22 nt, Human
gggcugagggccaauuccuacu

SEQ ID NO: 751272 - RNA, 19 nt, Human
accuuuccuuucucagaug

SEQ ID NO: 751273 - RNA, 22 nt, Human
uuaucuacguauuuaaacucuu

SEQ ID NO: 751274 - RNA, 22 nt, Human
uggaaagucucuuuugacugua

SEQ ID NO: 751275 - RNA, 22 nt, Human
aacaggagaggggaauguagag

SEQ ID NO: 751276 - RNA, 22 nt, Human
gaugcugaagugaagugaucuu

SEQ ID NO: 751277 - RNA, 22 nt, Human
ucugggcagcagcagcuaguag

SEQ ID NO: 751278 - RNA, 22 nt, Human
uugcugccuugucucagggucu

SEQ ID NO: 751279 - RNA, 22 nt, Human
auaugaaaguaagcaugugugu

SEQ ID NO: 751280 - RNA, 22 nt, Human
aacuuuacuugaaagaacaugu

SEQ ID NO: 751281 - RNA, 22 nt, Human
auuuuccagccuuucuagaacu

SEQ ID NO: 751282 - RNA, 22 nt, Human
aggcagacuuccugcuuggauc

SEQ ID NO: 751283 - RNA, 22 nt, Human
uagaaagcuggaggaauucuuu

SEQ ID NO: 751284 - RNA, 22 nt, Human
gguuugacagcuuggggcuguc

SEQ ID NO: 751285 - RNA, 22 nt, Human
ucagcuuucuauguugcuaaac

SEQ ID NO: 751286 - RNA, 22 nt, Human
ggucucagacuggcaggcagug

SEQ ID NO: 751287 - RNA, 22 nt, Human
cuacagaaaccuuuuucauaca

SEQ ID NO: 751288 - RNA, 22 nt, Human
uacugaaagacugaauauuuag

SEQ ID NO: 751289 - RNA, 22 nt, Human
ccauggccucgcucuacguggg

SEQ ID NO: 751290 - RNA, 22 nt, Human
ucugaggcccaguucaacucuu

SEQ ID NO: 751291 - RNA, 20 nt, Human
ugcugggcaugcaguggaaa

SEQ ID NO: 751292 - RNA, 22 nt, Human
ucucuggcagaggcccuauccc

SEQ ID NO: 751293 - RNA, 22 nt, Human
aaauguguuucgaaaacuggug

SEQ ID NO: 751294 - RNA, 22 nt, Human
agcaggaccaagaaggggaaaa

SEQ ID NO: 751295 - RNA, 22 nt, Human
uuuaucacagaauaagaaguca

SEQ ID NO: 751296 - RNA, 18 nt, Human
gaugucucgaggagacua

SEQ ID NO: 751297 - RNA, 22 nt, Human
gcaggcaggaaggacuaaguaa

SEQ ID NO: 751298 - RNA, 17 nt, Human
agcaggcacgucagcac

SEQ ID NO: 751299 - RNA, 22 nt, Human
auucauagcucaguacagacuc

SEQ ID NO: 751300 - RNA, 22 nt, Human
accauccaaacugcuuucugug

SEQ ID NO: 751301 - RNA, 22 nt, Human
aucaggaaauacuuauuuauaa

SEQ ID NO: 751302 - RNA, 22 nt, Human
uccagcccgacugggccugccg

SEQ ID NO: 751303 - RNA, 22 nt, Human
aggaauaaccucauugcuuuuu

SEQ ID NO: 751304 - RNA, 22 nt, Human
ugccauauuauugagcauauua

SEQ ID NO: 751305 - RNA, 22 nt, Human
aguuucacagaauaugaagguu

SEQ ID NO: 751306 - RNA, 22 nt, Human
uuacacaucuagacccauuuuu

SEQ ID NO: 751307 - RNA, 22 nt, Human
gaugaggaauuugagguuagaa

SEQ ID NO: 751308 - RNA, 22 nt, Human
uguaugaaaaggaauagauuga

SEQ ID NO: 751309 - RNA, 22 nt, Human
ccagggugaccagcuggccuag

SEQ ID NO: 751310 - RNA, 21 nt, Human
ccagagccugcugagcccccu

SEQ ID NO: 751311 - RNA, 22 nt, Human
gacuacaggugugugccaccau

SEQ ID NO: 751312 - RNA, 22 nt, Human
accaggcccgcugcuauggugg

SEQ ID NO: 751313 - RNA, 22 nt, Human
agaucagaaauguaauggcagu

SEQ ID NO: 751314 - RNA, 22 nt, Human
caugcuccaaaaacaagagaau

SEQ ID NO: 751315 - RNA, 22 nt, Human
aggcccuggcuggguuucuuua

SEQ ID NO: 751316 - RNA, 22 nt, Human
augccaauaaauguuaauaucu

SEQ ID NO: 751317 - RNA, 22 nt, Human
uugcauaaaagaguauaucuua

SEQ ID NO: 751318 - RNA, 22 nt, Human
ggcagggaaacagcugauccca

SEQ ID NO: 751319 - RNA, 22 nt, Human
aaaugaaaugagugccuggagg

SEQ ID NO: 751320 - RNA, 22 nt, Human
uaaagaauaauacccauggagc

SEQ ID NO: 751321 - RNA, 22 nt, Human
gucucugcucuagagucuguga

SEQ ID NO: 751322 - RNA, 22 nt, Human
uuuuaaguuaauauaauugagg

SEQ ID NO: 751323 - RNA, 22 nt, Human
caggccucccggugcacacuga

SEQ ID NO: 751324 - RNA, 22 nt, Human
ugacccauggucugaucauagg

SEQ ID NO: 751325 - RNA, 22 nt, Human
acagaguacagacaaaggucag

SEQ ID NO: 751326 - RNA, 21 nt, Human
aggggcccuugccaggacgcc

SEQ ID NO: 751327 - RNA, 22 nt, Human
uauggguaucaaugacaaacau

SEQ ID NO: 751328 - RNA, 22 nt, Human
ugcccacugugucaaagaaaua

SEQ ID NO: 751329 - RNA, 22 nt, Human
auuugaaugcagguagcugagu

SEQ ID NO: 751330 - RNA, 22 nt, Human
cggccaagccggggccccgaag

SEQ ID NO: 751331 - RNA, 22 nt, Human
auuugcuggugaauguauagcu

SEQ ID NO: 751332 - RNA, 22 nt, Human
uucuuaagcguaugauaaugaa

SEQ ID NO: 751333 - RNA, 22 nt, Human
uucagagggacauucaagggaa

SEQ ID NO: 751334 - RNA, 22 nt, Human
uacaugcuuaaaaugcaauguu

SEQ ID NO: 751335 - RNA, 22 nt, Human
cucugcuuuuuagggagccuag

SEQ ID NO: 751336 - RNA, 22 nt, Human
ugcccccugguggccagagccg

SEQ ID NO: 751337 - RNA, 22 nt, Human
uaaacaugugagugugcauaua

SEQ ID NO: 751338 - RNA, 22 nt, Human
auggcuggaggccgggcuuccu

SEQ ID NO: 751339 - RNA, 22 nt, Human
gagagggcuggaaacuuccugg

SEQ ID NO: 751340 - RNA, 22 nt, Human
ccaagcuacuuaggagucugag

SEQ ID NO: 751341 - RNA, 22 nt, Human
acaguaaugcauacaaguuagu

SEQ ID NO: 751342 - RNA, 22 nt, Human
uuccaauuuguggugaguuaau

SEQ ID NO: 751343 - RNA, 18 nt, Human
gcagagcaucaaggguua

SEQ ID NO: 751344 - RNA, 22 nt, Human
cuggugccauucuguggccuag

SEQ ID NO: 751345 - RNA, 22 nt, Human
caggcucggaagugcuggcuuu

SEQ ID NO: 751346 - RNA, 22 nt, Human
cugagcagcaauugcuggccca

SEQ ID NO: 751347 - RNA, 22 nt, Human
cugucuuuuacuaucauuuacu

SEQ ID NO: 751348 - RNA, 22 nt, Human
uggcuaagcaugcuccagcugc

SEQ ID NO: 751349 - RNA, 22 nt, Human
uuucacaaacugaggagacaau

SEQ ID NO: 751350 - RNA, 22 nt, Human
uccuguuuuuguaaucgacucu

SEQ ID NO: 751351 - RNA, 22 nt, Human
caucacaccacaggcauuuucu

SEQ ID NO: 751352 - RNA, 22 nt, Human
cuacaugaauggguguauuacu

SEQ ID NO: 751353 - RNA, 22 nt, Human
uaauuuaauccaaguguuacau

SEQ ID NO: 751354 - RNA, 22 nt, Human
aaggaaagauucucucucuaga

SEQ ID NO: 751355 - RNA, 22 nt, Human
uuacuucuuuggccuucagcca

SEQ ID NO: 751356 - RNA, 22 nt, Human
uaggcagauuccauauuuuggc

SEQ ID NO: 751357 - RNA, 22 nt, Human
accccaagacaguagaagagaa

SEQ ID NO: 751358 - RNA, 22 nt, Human
ugaaagcagcaccaauaccauu

SEQ ID NO: 751359 - RNA, 22 nt, Human
agauucauuauuaaugugaucu

SEQ ID NO: 751360 - RNA, 22 nt, Human
gaggccucugucccaccaggga

SEQ ID NO: 751361 - RNA, 22 nt, Human
acagugcaaacuuuugucuccu

SEQ ID NO: 751362 - RNA, 22 nt, Human
gagagcuguaauagucaugucu

SEQ ID NO: 751363 - RNA, 23 nt, Human
acagggaaaagucaucaguguga

SEQ ID NO: 751364 - RNA, 19 nt, Human
ccagugcaagguaagauag

SEQ ID NO: 751365 - RNA, 22 nt, Human
caaggacacugauguucauccu

SEQ ID NO: 751366 - RNA, 22 nt, Human
gggcacuggaaggcucucaggc

SEQ ID NO: 751367 - RNA, 22 nt, Human
auuccuucuuugagaauaagca

SEQ ID NO: 751368 - RNA, 22 nt, Human
aaagaugucaguuugaaauaac

SEQ ID NO: 751369 - RNA, 22 nt, Human
acagcucuguugccagaucugc

SEQ ID NO: 751370 - RNA, 22 nt, Human
ugugcccucagaagaguacauc

SEQ ID NO: 751371 - RNA, 18 nt, Human
ucucuaccagaagugacg

SEQ ID NO: 751372 - RNA, 20 nt, Human
gaugucuuggucacaguggc

SEQ ID NO: 751373 - RNA, 22 nt, Human
agcuuauuaauuuuucugcaug

SEQ ID NO: 751374 - RNA, 23 nt, Human
aaccuagacuacuuacuaugugg

SEQ ID NO: 751375 - RNA, 22 nt, Human
ccaggcucuaucccuccuucuu

SEQ ID NO: 751376 - RNA, 22 nt, Human
caccagcuugggcuguggaaau

SEQ ID NO: 751377 - RNA, 22 nt, Human
gaagcagcaaaucugcaguauc

SEQ ID NO: 751378 - RNA, 20 nt, Human
ugaggcucagagagguugag

SEQ ID NO: 751379 - RNA, 22 nt, Human
agcugccaucagccuuuggaug

SEQ ID NO: 751380 - RNA, 22 nt, Human
ugcaugcacgugcuauguauga

SEQ ID NO: 751381 - RNA, 20 nt, Human
ggaggucaaaugaugagaag

SEQ ID NO: 751382 - RNA, 19 nt, Human
ucaggaaguugaugaggug

SEQ ID NO: 751383 - RNA, 17 nt, Human
ugcaaacaaucacauau

SEQ ID NO: 751384 - RNA, 23 nt, Human
uccagucuccugaaaggcagcgu

SEQ ID NO: 751385 - RNA, 22 nt, Human
uuauuccaaaucaugguugcau

SEQ ID NO: 751386 - RNA, 22 nt, Human
ggcaguguccuugcagcucuac

SEQ ID NO: 751387 - RNA, 22 nt, Human
gaaggccucacucugcagcaua

SEQ ID NO: 751388 - RNA, 22 nt, Human
caggcuguggaucaggagccuu

SEQ ID NO: 751389 - RNA, 19 nt, Human
uccagaacugcccuggccu

SEQ ID NO: 751390 - RNA, 22 nt, Human
cuccagaagacccauccucaug

SEQ ID NO: 751391 - RNA, 22 nt, Human
cauggcagagccugcagguggg

SEQ ID NO: 751392 - RNA, 22 nt, Human
ccaggagcagggcuggcugcac

SEQ ID NO: 751393 - RNA, 22 nt, Human
uguuaucugguugucugauuac

SEQ ID NO: 751394 - RNA, 22 nt, Human
aagcugaggucaaguagcuagu

SEQ ID NO: 751395 - RNA, 22 nt, Human
aucuuucagggccauuuguauu

SEQ ID NO: 751396 - RNA, 22 nt, Human
ggaguauuguagcuuccaguuc

SEQ ID NO: 751397 - RNA, 22 nt, Human
gaaugcaaauauauggaucagu

SEQ ID NO: 751398 - RNA, 22 nt, Human
cagcacaguacaaggcacggau

SEQ ID NO: 751399 - RNA, 22 nt, Human
ccucacccacuacacucaaggg

SEQ ID NO: 751400 - RNA, 22 nt, Human
uuugaagacagaucaauauaag

SEQ ID NO: 751401 - RNA, 22 nt, Human
acaugaggaaacaaggguauau

SEQ ID NO: 751402 - RNA, 22 nt, Human
acagagcaugauggaagaucga

SEQ ID NO: 751403 - RNA, 22 nt, Human
aaagaaggaccuggaggaggau

SEQ ID NO: 751404 - RNA, 22 nt, Human
caguggagagacuuuuacucuu

SEQ ID NO: 751405 - RNA, 22 nt, Human
acuacugaauauuaguucugaa

SEQ ID NO: 751406 - RNA, 22 nt, Human
ugaggggaaggcaugauaaaua

SEQ ID NO: 751407 - RNA, 22 nt, Human
uuuaacagauaguuucuucugu

SEQ ID NO: 751408 - RNA, 22 nt, Human
uggcauguaguaggugcuauaa

SEQ ID NO: 751409 - RNA, 22 nt, Human
ugcuccuggcuccuucccuaac

SEQ ID NO: 751410 - RNA, 22 nt, Human
auguacauacugcauuuucaaa

SEQ ID NO: 751411 - RNA, 22 nt, Human
ugcuugacuuugucacagcaug

SEQ ID NO: 751412 - RNA, 21 nt, Human
ucaggcagugcaaauacaugg

SEQ ID NO: 751413 - RNA, 22 nt, Human
augucuuuuauggagaugucau

SEQ ID NO: 751414 - RNA, 22 nt, Human
uggggcugugagacuacaggau

SEQ ID NO: 751415 - RNA, 22 nt, Human
ucugaaagucugaaacaguguc

SEQ ID NO: 751416 - RNA, 20 nt, Human
aguguaugaacagaugcggg

SEQ ID NO: 751417 - RNA, 22 nt, Human
cagagguguuggugaauggaga

SEQ ID NO: 751418 - RNA, 22 nt, Human
uuucccuucuuuccugaguaau

SEQ ID NO: 751419 - RNA, 22 nt, Human
ccugagagugagugccaccuua

SEQ ID NO: 751420 - RNA, 22 nt, Human
gaggaaagcugguuuaaaguau

SEQ ID NO: 751421 - RNA, 22 nt, Human
uucuaacuuuugaggcaaugug

SEQ ID NO: 751422 - RNA, 22 nt, Human
uccuggagaauggacaaugcac

SEQ ID NO: 751423 - RNA, 22 nt, Human
accugauauguuugaucacccu

SEQ ID NO: 751424 - RNA, 22 nt, Human
uaaacauggauucugaucacag

SEQ ID NO: 751425 - RNA, 21 nt, Human
guuuagaaguagucuggcuca

SEQ ID NO: 751426 - RNA, 22 nt, Human
aaucacacaaaggcaacuuuug

SEQ ID NO: 751427 - RNA, 22 nt, Human
uaauacuugucauaaaggcauu

SEQ ID NO: 751428 - RNA, 22 nt, Human
aaggcaguuugggccaccaucu

SEQ ID NO: 751429 - RNA, 22 nt, Human
uccguucucuaggagaaacuuc

SEQ ID NO: 751430 - RNA, 22 nt, Human
aauauuauacagucaaccucuu

SEQ ID NO: 751431 - RNA, 22 nt, Human
guuuccuaggcuuauacagcug

SEQ ID NO: 751432 - RNA, 22 nt, Human
ugggugagugggaaaagcccag

SEQ ID NO: 751433 - RNA, 22 nt, Human
ggugaagggugucauggcauuu

SEQ ID NO: 751434 - RNA, 22 nt, Human
agcuugauuucucugcagugug

SEQ ID NO: 751435 - RNA, 22 nt, Human
agcaauaugacauugcuacauc

SEQ ID NO: 751436 - RNA, 22 nt, Human
cauggggaugaggcugagacuu

SEQ ID NO: 751437 - RNA, 22 nt, Human
auauccaagaaacaauuaauuc

SEQ ID NO: 751438 - RNA, 22 nt, Human
gcacccacuuaggccagucaau

SEQ ID NO: 751439 - RNA, 19 nt, Human
uuuggcucuggucagagag

SEQ ID NO: 751440 - RNA, 18 nt, Human
aggcaggugcuggaaguc

SEQ ID NO: 751441 - RNA, 22 nt, Human
ccacccagccagaugcaggaag

SEQ ID NO: 751442 - RNA, 22 nt, Human
ucucaggggccuggaguccugg

SEQ ID NO: 751443 - RNA, 22 nt, Human
ggcaggugcgcauguugcauua

SEQ ID NO: 751444 - RNA, 22 nt, Human
uucuccuuauucauaguugucu

SEQ ID NO: 751445 - RNA, 21 nt, Human
gggaggaagcugcuucucucu

SEQ ID NO: 751446 - RNA, 22 nt, Human
ugacaguauacuugugauggga

SEQ ID NO: 751447 - RNA, 22 nt, Human
cugugucucguuaaagcauugg

SEQ ID NO: 751448 - RNA, 22 nt, Human
cuuuuccucaggaggagacgcg

SEQ ID NO: 751449 - RNA, 22 nt, Human
ugcuucagugcucugagccugu

SEQ ID NO: 751450 - RNA, 22 nt, Human
ugggacagugugccuugcuccu

SEQ ID NO: 751451 - RNA, 22 nt, Human
ugucuguguccaaauuuccucu

SEQ ID NO: 751452 - RNA, 21 nt, Human
uuagacuuggguuuuuccugg

SEQ ID NO: 751453 - RNA, 22 nt, Human
uuaaaaugcagauucugauuca

SEQ ID NO: 751454 - RNA, 22 nt, Human
agggaggaccaaugugugguua

SEQ ID NO: 751455 - RNA, 22 nt, Human
agcccuccaaagguugggggag

SEQ ID NO: 751456 - RNA, 22 nt, Human
uuccuucuaauauucugccugu

SEQ ID NO: 751457 - RNA, 22 nt, Human
cugucugcaggauaguacccuc

SEQ ID NO: 751458 - RNA, 22 nt, Human
cagucccagaagagccugggag

SEQ ID NO: 751459 - RNA, 22 nt, Human
ccuaagaucugguaugugacag

SEQ ID NO: 751460 - RNA, 22 nt, Human
cccagugucauucuaagggagg

SEQ ID NO: 751461 - RNA, 22 nt, Human
ugagguuagcugggauuucaug

SEQ ID NO: 751462 - RNA, 22 nt, Human
acccuguaugcuauaucccuaa

SEQ ID NO: 751463 - RNA, 22 nt, Human
gcuuucugugcagugaacacua

SEQ ID NO: 751464 - RNA, 19 nt, Human
acccaggguugauguccag

SEQ ID NO: 751465 - RNA, 22 nt, Human
acugaacauccauaagauuuuu

SEQ ID NO: 751466 - RNA, 22 nt, Human
ugauuuugagguuucaggucuu

SEQ ID NO: 751467 - RNA, 22 nt, Human
ucucucucagccauuacagaac

SEQ ID NO: 751468 - RNA, 22 nt, Human
agggucuguggaugcaucuggg

SEQ ID NO: 751469 - RNA, 22 nt, Human
gaacuuuaccauuuagguaacu

SEQ ID NO: 751470 - RNA, 22 nt, Human
gcaggugaaugauggacuagga

SEQ ID NO: 751471 - RNA, 23 nt, Human
acagggcuagcugacagugguau

SEQ ID NO: 751472 - RNA, 22 nt, Human
aaguauacuuaggcauaauggu

SEQ ID NO: 751473 - RNA, 22 nt, Human
ggcucccuagggagagugggag

SEQ ID NO: 751474 - RNA, 22 nt, Human
gggggcucugacucccucagcu

SEQ ID NO: 751475 - RNA, 22 nt, Human
guggcagaacuaugugauugcu

SEQ ID NO: 751476 - RNA, 22 nt, Human
uucucuuucuacagugugauug

SEQ ID NO: 751477 - RNA, 22 nt, Human
acugagggccaaaggcacugag

SEQ ID NO: 751478 - RNA, 18 nt, Human
ugacauuuccagagugua

SEQ ID NO: 751479 - RNA, 22 nt, Human
agguaagggucacaguucauau

SEQ ID NO: 751480 - RNA, 22 nt, Human
cauugcuugauagcugaaaauu

SEQ ID NO: 751481 - RNA, 22 nt, Human
auuacacuuguucaucaucacc

SEQ ID NO: 751482 - RNA, 22 nt, Human
agucccagugagaugaaccagg

SEQ ID NO: 751483 - RNA, 22 nt, Human
ucauaaagugaaggaugauggg

SEQ ID NO: 751484 - RNA, 22 nt, Human
cagaggccuggcuuggacaccu

SEQ ID NO: 751485 - RNA, 22 nt, Human
uuccauacgacugaggucucgg

SEQ ID NO: 751486 - RNA, 22 nt, Human
uucauuguacuuuaagagaugc

SEQ ID NO: 751487 - RNA, 22 nt, Human
guagucugaacaguaauuuugu

SEQ ID NO: 751488 - RNA, 22 nt, Human
agagguguggccaggacucaag

SEQ ID NO: 751489 - RNA, 22 nt, Human
cuaaggguugaaacagcaagaa

SEQ ID NO: 751490 - RNA, 22 nt, Human
aagugucuuuauauuugagaaa

SEQ ID NO: 751491 - RNA, 22 nt, Human
ucuggggugcagccuggacaua

SEQ ID NO: 751492 - RNA, 22 nt, Human
ugagaggcgcucacucucaggu

SEQ ID NO: 751493 - RNA, 22 nt, Human
cuggccacuggagguggcaccc

SEQ ID NO: 751494 - RNA, 22 nt, Human
ugagugugcuaggugucucggu

SEQ ID NO: 751495 - RNA, 22 nt, Human
auccaggcugucuaaugggaga

SEQ ID NO: 751496 - RNA, 22 nt, Human
uuuccugcacccgcugaugcca

SEQ ID NO: 751497 - RNA, 22 nt, Human
cugguucugauguucuuggcuu

SEQ ID NO: 751498 - RNA, 22 nt, Human
acauuuguauauaugcagcaua

SEQ ID NO: 751499 - RNA, 22 nt, Human
aggccagcagcaugacggcauc

SEQ ID NO: 751500 - RNA, 22 nt, Human
aaugaucuggcucaggauauca

SEQ ID NO: 751501 - RNA, 22 nt, Human
acagcuaaucccccuagauucu

SEQ ID NO: 751502 - RNA, 22 nt, Human
uuuuggaacacagacauuagaa

SEQ ID NO: 751503 - RNA, 22 nt, Human
uggaggccuagguugaugugug

SEQ ID NO: 751504 - RNA, 21 nt, Human
aaccagagccaggcucucagc

SEQ ID NO: 751505 - RNA, 22 nt, Human
guaauugacucagcucuguuca

SEQ ID NO: 751506 - RNA, 22 nt, Human
gcccucagcauccucagggcca

SEQ ID NO: 751507 - RNA, 22 nt, Human
gagaaggagcuccuuggggucu

SEQ ID NO: 751508 - RNA, 22 nt, Human
cccagcauggagugaggacuca

SEQ ID NO: 751509 - RNA, 22 nt, Human
cccgaggaaccagagguagcuc

SEQ ID NO: 751510 - RNA, 22 nt, Human
ggcccugcugaguggaguggag

SEQ ID NO: 751511 - RNA, 22 nt, Human
uucuccuggagugcuuguuggg

SEQ ID NO: 751512 - RNA, 20 nt, Human
gaggaugcagacagagggca

SEQ ID NO: 751513 - RNA, 20 nt, Human
ucaaaggcaaaggugggugu

SEQ ID NO: 751514 - RNA, 22 nt, Human
acagaugaaaaagcuuguggau

SEQ ID NO: 751515 - RNA, 21 nt, Human
agaccucuucccuucaugcac

SEQ ID NO: 751516 - RNA, 22 nt, Human
uccugaggccucugugauguga

SEQ ID NO: 751517 - RNA, 22 nt, Human
cugggccucacccuagaccaau

SEQ ID NO: 751518 - RNA, 22 nt, Human
ugaaagaacuagcaucuucaag

SEQ ID NO: 751519 - RNA, 22 nt, Human
cuccagauuccguuuauucagg

SEQ ID NO: 751520 - RNA, 22 nt, Human
ucuucacagaugcauauacuuc

SEQ ID NO: 751521 - RNA, 22 nt, Human
aaagauuucagaagccugugcc

SEQ ID NO: 751522 - RNA, 22 nt, Human
acagaauagguacagucaguca

SEQ ID NO: 751523 - RNA, 17 nt, Human
ccaggucuccuugcuuu

SEQ ID NO: 751524 - RNA, 22 nt, Human
agacugugagaagauggcugcg

SEQ ID NO: 751525 - RNA, 22 nt, Human
uagcauuucacugaucuucacu

SEQ ID NO: 751526 - RNA, 22 nt, Human
ugucacuuuggggagaguuuug

SEQ ID NO: 751527 - RNA, 22 nt, Human
auucuggauauuacuuaucuau

SEQ ID NO: 751528 - RNA, 22 nt, Human
cacagggcagaggguccguggc

SEQ ID NO: 751529 - RNA, 22 nt, Human
aggucaagaguaaauuugggua

SEQ ID NO: 751530 - RNA, 22 nt, Human
ucaugucucuaugugccuauua

SEQ ID NO: 751531 - RNA, 22 nt, Human
gcugggacaggcuuggcccugu

SEQ ID NO: 751532 - RNA, 22 nt, Human
aagagagggacuuauuaaaguc

SEQ ID NO: 751533 - RNA, 22 nt, Human
ugucagcaccauggguagugau

SEQ ID NO: 751534 - RNA, 22 nt, Human
ugaaaggugacauuucuuggau

SEQ ID NO: 751535 - RNA, 22 nt, Human
cuggagggcuggacuaaggaaa

SEQ ID NO: 751536 - RNA, 22 nt, Human
acauuuauuuuggcacggcaca

SEQ ID NO: 751537 - RNA, 22 nt, Human
cccacccagccuggcugagggg

SEQ ID NO: 751538 - RNA, 22 nt, Human
cuggccuuucgugagagcuggg

SEQ ID NO: 751539 - RNA, 22 nt, Human
gagcucaguguagucauggcuu

SEQ ID NO: 751540 - RNA, 22 nt, Human
ggugcagagcagugucagagca

SEQ ID NO: 751541 - RNA, 22 nt, Human
cacauacaagccauggggggau

SEQ ID NO: 751542 - RNA, 22 nt, Human
aacauauaaacucuuaaguuca

SEQ ID NO: 751543 - RNA, 20 nt, Human
ggcuuaaggaauucuuuucu

SEQ ID NO: 751544 - RNA, 22 nt, Human
aaaacacaagaagcaggguaca

SEQ ID NO: 751545 - RNA, 22 nt, Human
aguaaacaauguaugaggacag

SEQ ID NO: 751546 - RNA, 22 nt, Human
cagaggguugaugugaggcuua

SEQ ID NO: 751547 - RNA, 22 nt, Human
caggaagcacagugaggagacc

SEQ ID NO: 751548 - RNA, 22 nt, Human
ucuucuccaguucauccuacca

SEQ ID NO: 751549 - RNA, 22 nt, Human
augauauacuuccuagaacagu

SEQ ID NO: 751550 - RNA, 22 nt, Human
ccuggagaccagaggauacuuc

SEQ ID NO: 751551 - RNA, 22 nt, Human
uggcagugucuuaucaggagug

SEQ ID NO: 751552 - RNA, 22 nt, Human
cuguccuguggaccugaggacg

SEQ ID NO: 751553 - RNA, 22 nt, Human
uuagcaucugcuguaagcuuau

SEQ ID NO: 751554 - RNA, 22 nt, Human
uugcauuuuuacaaguagccag

SEQ ID NO: 751555 - RNA, 22 nt, Human
uggcuagaauuggguucacagg

SEQ ID NO: 751556 - RNA, 22 nt, Human
cccagggauguggcagauguua

SEQ ID NO: 751557 - RNA, 21 nt, Human
cagugaggcccuccuguuccc

SEQ ID NO: 751558 - RNA, 21 nt, Human
cuucaucccggagauucuggu

SEQ ID NO: 751559 - RNA, 22 nt, Human
aggcagguguuaccucugguuu

SEQ ID NO: 751560 - RNA, 22 nt, Human
uucaguguuuguagagauaacu

SEQ ID NO: 751561 - RNA, 22 nt, Human
uauauuaaacccucucuguagg

SEQ ID NO: 751562 - RNA, 22 nt, Human
aggaccaacauagcagcagugg

SEQ ID NO: 751563 - RNA, 22 nt, Human
acacacagaguuuauacaggca

SEQ ID NO: 751564 - RNA, 22 nt, Human
ggcaggugcuugucgaaggccu

SEQ ID NO: 751565 - RNA, 22 nt, Human
uguaaaguaucugugagcucuc

SEQ ID NO: 751566 - RNA, 22 nt, Human
cugagaauuacucugaugagua

SEQ ID NO: 751567 - RNA, 22 nt, Human
agggcuuucggcacucugaggg

SEQ ID NO: 751568 - RNA, 22 nt, Human
auuuuacuucauuugaaaugcc

SEQ ID NO: 751569 - RNA, 22 nt, Human
ggauggcagucugcaugagaaa

SEQ ID NO: 751570 - RNA, 22 nt, Human
gugauggagucaaggcuagaac

SEQ ID NO: 751571 - RNA, 22 nt, Human
ccacaguacaggaaaucuuguu

SEQ ID NO: 751572 - RNA, 22 nt, Human
gcagagaaaguuuuguccucag

SEQ ID NO: 751573 - RNA, 22 nt, Human
aagaguaaaugucuaauuagga

SEQ ID NO: 751574 - RNA, 20 nt, Human
gcuuagcaggcauaguagcu

SEQ ID NO: 751575 - RNA, 22 nt, Human
uucucuuuuagaggcuccauga

SEQ ID NO: 751576 - RNA, 18 nt, Human
agggagcaucugguugcc

SEQ ID NO: 751577 - RNA, 23 nt, Human
gcuggcuggcaguaaagguuguu

SEQ ID NO: 751578 - RNA, 22 nt, Human
aagcacauuguacauuugugcu

SEQ ID NO: 751579 - RNA, 22 nt, Human
uucauugaguauagggguauac

SEQ ID NO: 751580 - RNA, 22 nt, Human
ugcucuggaaauaaaugauuua

SEQ ID NO: 751581 - RNA, 22 nt, Human
gcccagagugaguccugggccc

SEQ ID NO: 751582 - RNA, 22 nt, Human
agaaggcuuaaaacauggaaua

SEQ ID NO: 751583 - RNA, 22 nt, Human
agguaaugcauauaaagugcuu

SEQ ID NO: 751584 - RNA, 23 nt, Human
gagcugaguguagggagacuagg

SEQ ID NO: 751585 - RNA, 22 nt, Human
cagaguguggcaucuuccaacu

SEQ ID NO: 751586 - RNA, 22 nt, Human
gcuguggucugugagcuccaaa

SEQ ID NO: 751587 - RNA, 22 nt, Human
gggaugagagcugggacagaag

SEQ ID NO: 751588 - RNA, 22 nt, Human
agaagugucucaucaggcaaua

SEQ ID NO: 751589 - RNA, 22 nt, Human
cagggcucaucugugugaccag

SEQ ID NO: 751590 - RNA, 22 nt, Human
gaggguggccuuuagagcccau

SEQ ID NO: 751591 - RNA, 22 nt, Human
cggggacacacuggcagcuccu

SEQ ID NO: 751592 - RNA, 22 nt, Human
aucuggaauuaagagaaaguga

SEQ ID NO: 751593 - RNA, 23 nt, Human
ugggcuucugagaaagcaccuaa

SEQ ID NO: 751594 - RNA, 22 nt, Human
cauugcacuucugcuuuuccuc

SEQ ID NO: 751595 - RNA, 22 nt, Human
gaauuuaucuacguuaaguaug

SEQ ID NO: 751596 - RNA, 22 nt, Human
uucuaaagccuguccuaucaga

SEQ ID NO: 751597 - RNA, 22 nt, Human
uuccugaauauaaagacacuag

SEQ ID NO: 751598 - RNA, 22 nt, Human
uucuuuacaguggguuuugaau

SEQ ID NO: 751599 - RNA, 22 nt, Human
gcaauaaacucucucaagccac

SEQ ID NO: 751600 - RNA, 22 nt, Human
uacaagagacaccagggaggcu

SEQ ID NO: 751601 - RNA, 22 nt, Human
uuuuguauccucccuuucacug

SEQ ID NO: 751602 - RNA, 22 nt, Human
cauucagucaugcugguuuuga

SEQ ID NO: 751603 - RNA, 22 nt, Human
aaugcucugucucugacagugg

SEQ ID NO: 751604 - RNA, 22 nt, Human
gauaauuuuagucugaaaauug

SEQ ID NO: 751605 - RNA, 22 nt, Human
uucuucagacuacugaugauug

SEQ ID NO: 751606 - RNA, 22 nt, Human
uuccuggcaaagugagcaucac

SEQ ID NO: 751607 - RNA, 19 nt, Human
ugaggcacuagucuggucc

SEQ ID NO: 751608 - RNA, 22 nt, Human
cuuguuuucuucugcagucuau

SEQ ID NO: 751609 - RNA, 22 nt, Human
acacauuaggcagugcuuaaau

SEQ ID NO: 751610 - RNA, 22 nt, Human
aucccuggacggcgccucccca

SEQ ID NO: 751611 - RNA, 22 nt, Human
ugggucuguagggcuguccaau

SEQ ID NO: 751612 - RNA, 22 nt, Human
gaauacaaacuuaaggcuuuac

SEQ ID NO: 751613 - RNA, 22 nt, Human
cauuugaaccuggauguucuua

SEQ ID NO: 751614 - RNA, 22 nt, Human
ccuggcugguggcagcgacaag

SEQ ID NO: 751615 - RNA, 18 nt, Human
aggggcagcuugugugga

SEQ ID NO: 751616 - RNA, 22 nt, Human
uagcugcugcagcacagggagg

SEQ ID NO: 751617 - RNA, 22 nt, Human
ccaggguggaggcuggauggag

SEQ ID NO: 751618 - RNA, 22 nt, Human
ugccuaggaaaccucaugcuuc

SEQ ID NO: 751619 - RNA, 22 nt, Human
aauccuguagauucuaauuccu

SEQ ID NO: 751620 - RNA, 22 nt, Human
ucaauagcauagcaauuaaugu

SEQ ID NO: 751621 - RNA, 22 nt, Human
gcuuguuugugauuucuccaga

SEQ ID NO: 751622 - RNA, 22 nt, Human
aaguaacuaaagauauccauuu

SEQ ID NO: 751623 - RNA, 22 nt, Human
agugcgugggcaggcauggaag

SEQ ID NO: 751624 - RNA, 22 nt, Human
uuucauuuugguuaugccauaa

SEQ ID NO: 751625 - RNA, 22 nt, Human
agcaguggccuggggcucugug

SEQ ID NO: 751626 - RNA, 22 nt, Human
ucuuggcuauccaaguuaucca

SEQ ID NO: 751627 - RNA, 22 nt, Human
cuauauauaucaucuuccaguu

SEQ ID NO: 751628 - RNA, 22 nt, Human
gaccuggaauuuguguguguuc

SEQ ID NO: 751629 - RNA, 22 nt, Human
acacaguauuacaauaggugcu

SEQ ID NO: 751630 - RNA, 19 nt, Human
ggcagguagagggccaguc

SEQ ID NO: 751631 - RNA, 22 nt, Human
uggcccugaaucaaggccagca

SEQ ID NO: 751632 - RNA, 22 nt, Human
gggcuggcugauuuuccucucu

SEQ ID NO: 751633 - RNA, 22 nt, Human
uuacuuugaugaucaaugagcg

SEQ ID NO: 751634 - RNA, 22 nt, Human
aauccauucagaaauugggaau

SEQ ID NO: 751635 - RNA, 22 nt, Human
guccucagagugggcagguccu

SEQ ID NO: 751636 - RNA, 22 nt, Human
cucccagagagcaggugggccg

SEQ ID NO: 751637 - RNA, 22 nt, Human
aaauagacaggcuuaaauagga

SEQ ID NO: 751638 - RNA, 22 nt, Human
ucacaaagggagggauagcugg

SEQ ID NO: 751639 - RNA, 22 nt, Human
aagcaaaagguuacacuucugg

SEQ ID NO: 751640 - RNA, 22 nt, Human
cacagggcuucucauggggugc

SEQ ID NO: 751641 - RNA, 22 nt, Human
aaaaccagacacuguuucuggg

SEQ ID NO: 751642 - RNA, 22 nt, Human
caauuucaucuugugcuucaau

SEQ ID NO: 751643 - RNA, 22 nt, Human
gaagacgagauaaaaugguguc

SEQ ID NO: 751644 - RNA, 22 nt, Human
gggcagcugccaagugcaucgc

SEQ ID NO: 751645 - RNA, 22 nt, Human
ggccuggcugguucaguacccu

SEQ ID NO: 751646 - RNA, 22 nt, Human
agaauucuggaguugggaggaa

SEQ ID NO: 751647 - RNA, 22 nt, Human
gcucugaaucaaucagauaagg

SEQ ID NO: 751648 - RNA, 22 nt, Human
uccugcagccaagggucaucga

SEQ ID NO: 751649 - RNA, 22 nt, Human
ggagggagcauccccuugcuga

SEQ ID NO: 751650 - RNA, 22 nt, Human
ucaggagagagaaauuggggcu

SEQ ID NO: 751651 - RNA, 22 nt, Human
aguaacaaauagcugccuuuaa

SEQ ID NO: 751652 - RNA, 22 nt, Human
ugcuccugagcgguuuccauga

SEQ ID NO: 751653 - RNA, 22 nt, Human
aguugcugggaaagauuucagu

SEQ ID NO: 751654 - RNA, 23 nt, Human
caaagaugauuggaacauggcuu

SEQ ID NO: 751655 - RNA, 17 nt, Human
cugggauguggacucuu

SEQ ID NO: 751656 - RNA, 22 nt, Human
caaugaacacagcaauuucaua

SEQ ID NO: 751657 - RNA, 22 nt, Human
gagcaggccagcaauggaaggg

SEQ ID NO: 751658 - RNA, 22 nt, Human
aagacaggaaaagcuccaggcc

SEQ ID NO: 751659 - RNA, 22 nt, Human
augcucugggcaggagcccugg

SEQ ID NO: 751660 - RNA, 22 nt, Human
cauuuagacauuugauuugggg

SEQ ID NO: 751661 - RNA, 22 nt, Human
aacuguacgauaauaaauuugu

SEQ ID NO: 751662 - RNA, 22 nt, Human
ucugggggaggaggcauggccc

SEQ ID NO: 751663 - RNA, 22 nt, Human
gccuucugaucgcuggacugac

SEQ ID NO: 751664 - RNA, 22 nt, Human
agcagcucuggcacuguagcau

SEQ ID NO: 751665 - RNA, 22 nt, Human
uaagacaaauacuauuucaaga

SEQ ID NO: 751666 - RNA, 22 nt, Human
acaacaggguaaggcaggccau

SEQ ID NO: 751667 - RNA, 22 nt, Human
aacaguuuaugagauaugcuau

SEQ ID NO: 751668 - RNA, 22 nt, Human
gaggagguggaauuccaggaau

SEQ ID NO: 751669 - RNA, 22 nt, Human
uucugcugcugcugcacccaau

SEQ ID NO: 751670 - RNA, 22 nt, Human
ucuucagagugagcagugucau

SEQ ID NO: 751671 - RNA, 22 nt, Human
ccagcaucagucagauuuugcu

SEQ ID NO: 751672 - RNA, 22 nt, Human
cuggucaugccagguuugcugc

SEQ ID NO: 751673 - RNA, 22 nt, Human
gagaguggauggagcugcgaag

SEQ ID NO: 751674 - RNA, 22 nt, Human
ccugaguucuuauuuccaguca

SEQ ID NO: 751675 - RNA, 22 nt, Human
ucaucaguguccuuaucacuua

SEQ ID NO: 751676 - RNA, 22 nt, Human
cuggcuggccggaggcaucccu

SEQ ID NO: 751677 - RNA, 21 nt, Human
auuugcauuaaaauauuacgc

SEQ ID NO: 751678 - RNA, 22 nt, Human
auuccucaaagguagcccauua

SEQ ID NO: 751679 - RNA, 22 nt, Human
gaggacaaagcccaggugcugg

SEQ ID NO: 751680 - RNA, 22 nt, Human
ccugugggagggagcggcugga

SEQ ID NO: 751681 - RNA, 22 nt, Human
gcuaggcucggaagcagcaggg

SEQ ID NO: 751682 - RNA, 22 nt, Human
cugugcauugucuugucuguag

SEQ ID NO: 751683 - RNA, 19 nt, Human
ccagagucaugucuccccc

SEQ ID NO: 751684 - RNA, 22 nt, Human
cugggcucugcaguugauguuu

SEQ ID NO: 751685 - RNA, 22 nt, Human
ccaagggcugcugaggugucca

SEQ ID NO: 751686 - RNA, 22 nt, Human
cuagucacucagcacugacaaa

SEQ ID NO: 751687 - RNA, 22 nt, Human
acauuuacagugcuagacaauc

SEQ ID NO: 751688 - RNA, 22 nt, Human
guguccagggccguguugucuu

SEQ ID NO: 751689 - RNA, 22 nt, Human
acuggaaaauucaaaugggguc

SEQ ID NO: 751690 - RNA, 22 nt, Human
gccuguuuacuuugccgcagga

SEQ ID NO: 751691 - RNA, 22 nt, Human
gggagcuguaagggacagguag

SEQ ID NO: 751692 - RNA, 22 nt, Human
uacguuuuaaacacggagccag

SEQ ID NO: 751693 - RNA, 23 nt, Human
ugugcacaucugacgggugaagg

SEQ ID NO: 751694 - RNA, 22 nt, Human
caucacaucuacuauaagugau

SEQ ID NO: 751695 - RNA, 22 nt, Human
agguaaagacagugaaagaggg

SEQ ID NO: 751696 - RNA, 22 nt, Human
ccccaaagccucagccugccug

SEQ ID NO: 751697 - RNA, 23 nt, Human
caugccaguuugugcaggcagau

SEQ ID NO: 751698 - RNA, 19 nt, Human
auguaugaggucuucugcu

SEQ ID NO: 751699 - RNA, 22 nt, Human
gcuccaggcugcucugucccau

SEQ ID NO: 751700 - RNA, 19 nt, Human
ucuccaggcaggugagcga

SEQ ID NO: 751701 - RNA, 22 nt, Human
agagcccugaagcagagcuaaa

SEQ ID NO: 751702 - RNA, 19 nt, Human
uguccucacagagcauaac

SEQ ID NO: 751703 - RNA, 22 nt, Human
ggcuucuccccuuugagucuuc

SEQ ID NO: 751704 - RNA, 22 nt, Human
gcuccagagcagagacuagguu

SEQ ID NO: 751705 - RNA, 22 nt, Human
aggcccugcuuuccagagcuca

SEQ ID NO: 751706 - RNA, 22 nt, Human
aaagcaauggaugagaaucugu

SEQ ID NO: 751707 - RNA, 22 nt, Human
cacuggaagagcaucugagcca

SEQ ID NO: 751708 - RNA, 22 nt, Human
ggcccaggaugcaagaacugaa

SEQ ID NO: 751709 - RNA, 22 nt, Human
gaacaugaaaagucuuacacgc

SEQ ID NO: 751710 - RNA, 22 nt, Human
gggcaggaugcaguuucagaga

SEQ ID NO: 751711 - RNA, 22 nt, Human
gcagccaggaagccuuucccuc

SEQ ID NO: 751712 - RNA, 22 nt, Human
uaaagcaaaaaugaacugccau

SEQ ID NO: 751713 - RNA, 22 nt, Human
ugggccugaguuugggaacugg

SEQ ID NO: 751714 - RNA, 22 nt, Human
cccaguggaaggaguagaagac

SEQ ID NO: 751715 - RNA, 22 nt, Human
guuuccugaaauagaguacugg

SEQ ID NO: 751716 - RNA, 23 nt, Human
uuguuucuuuguauugucucuau

SEQ ID NO: 751717 - RNA, 22 nt, Human
caucauuuuuguaagcugguag

SEQ ID NO: 751718 - RNA, 22 nt, Human
cuggcuggaaguuagagaacuu

SEQ ID NO: 751719 - RNA, 22 nt, Human
cacuguacccauuuaaauaaau

SEQ ID NO: 751720 - RNA, 22 nt, Human
agccacagugggcuaccagcuc

SEQ ID NO: 751721 - RNA, 22 nt, Human
gccccugggagcagagccacca

SEQ ID NO: 751722 - RNA, 22 nt, Human
uaggguccauauggaugaaugg

SEQ ID NO: 751723 - RNA, 22 nt, Human
gaggaugccugggucggggaag

SEQ ID NO: 751724 - RNA, 17 nt, Human
agacugaggacacagga

SEQ ID NO: 751725 - RNA, 21 nt, Human
aguauguguuagggauaauuu

SEQ ID NO: 751726 - RNA, 22 nt, Human
gucuguggcaggggagaaguuu

SEQ ID NO: 751727 - RNA, 22 nt, Human
uuaaaccacuuuguugcaagua

SEQ ID NO: 751728 - RNA, 22 nt, Human
ugggcagucaucagcacaccgg

SEQ ID NO: 751729 - RNA, 22 nt, Human
uuccagccaugguuucccuaug

SEQ ID NO: 751730 - RNA, 22 nt, Human
ggucacccaugaucacaucacc

SEQ ID NO: 751731 - RNA, 22 nt, Human
ucuuaucuuauaccuaacagcc

SEQ ID NO: 751732 - RNA, 22 nt, Human
ggugcagggagaggcaggcccc

SEQ ID NO: 751733 - RNA, 22 nt, Human
gucugccugcaauccagagacu

SEQ ID NO: 751734 - RNA, 22 nt, Human
uugaaaggugaacaugaugcac

SEQ ID NO: 751735 - RNA, 22 nt, Human
aagcaggcccugggccagggga

SEQ ID NO: 751736 - RNA, 22 nt, Human
cucugugugguccucuguauug

SEQ ID NO: 751737 - RNA, 22 nt, Human
aauugcuuaguugcaacuaugc

SEQ ID NO: 751738 - RNA, 19 nt, Human
uggcuaauuuuauagaggc

SEQ ID NO: 751739 - RNA, 22 nt, Human
guucugucacacacugguacuu

SEQ ID NO: 751740 - RNA, 22 nt, Human
cacauauaaccuagacaaggcc

SEQ ID NO: 751741 - RNA, 22 nt, Human
cccaggaggcagauguugcagu

SEQ ID NO: 751742 - RNA, 22 nt, Human
acugaauauauuccauugcaug

SEQ ID NO: 751743 - RNA, 22 nt, Human
ugggucaggcugggaguccuga

SEQ ID NO: 751744 - RNA, 22 nt, Human
acaggccucaaauagggugccu

SEQ ID NO: 751745 - RNA, 22 nt, Human
acucacugggucccggaagccc

SEQ ID NO: 751746 - RNA, 22 nt, Human
aaagaagggacagacugccucu

SEQ ID NO: 751747 - RNA, 22 nt, Human
aaccggagugauucccaccucu

SEQ ID NO: 751748 - RNA, 22 nt, Human
cagagcauuaaaaccagcucug

SEQ ID NO: 751749 - RNA, 22 nt, Human
gcuggcuccaaaagcaggggcu

SEQ ID NO: 751750 - RNA, 22 nt, Human
gagagagaaggccugugggugu

SEQ ID NO: 751751 - RNA, 23 nt, Human
acaugauacacaauuagcaaacc

SEQ ID NO: 751752 - RNA, 19 nt, Human
aucacagacgugccucauc

SEQ ID NO: 751753 - RNA, 22 nt, Human
gggagucaggcucccucagaga

SEQ ID NO: 751754 - RNA, 22 nt, Human
aaacacagauuucuuuguccca

SEQ ID NO: 751755 - RNA, 22 nt, Human
augagcuucccagacaggaugg

SEQ ID NO: 751756 - RNA, 22 nt, Human
augcagauguuccuacuguguu

SEQ ID NO: 751757 - RNA, 22 nt, Human
gcagcugagcgugaggaagagu

SEQ ID NO: 751758 - RNA, 22 nt, Human
gagguggccucaagcagucuuc

SEQ ID NO: 751759 - RNA, 22 nt, Human
gccucccuggcccacagcagcg

SEQ ID NO: 751760 - RNA, 22 nt, Human
aggcacugcagauuacaggcgc

SEQ ID NO: 751761 - RNA, 22 nt, Human
guaacagaaagucaugcucauu

SEQ ID NO: 751762 - RNA, 22 nt, Human
agguaaagacugcaaggagaau

SEQ ID NO: 751763 - RNA, 22 nt, Human
ggagugaguggccuugucacug

SEQ ID NO: 751764 - RNA, 22 nt, Human
aagcagcuggaagaguaagaug

SEQ ID NO: 751765 - RNA, 22 nt, Human
uuuggaagggaaagaaaguacu

SEQ ID NO: 751766 - RNA, 22 nt, Human
cagcagggcccccgggugcgcc

SEQ ID NO: 751767 - RNA, 22 nt, Human
agaggggcucaagcaguggucu

SEQ ID NO: 751768 - RNA, 22 nt, Human
ugcauuuaugucucccaccagc

SEQ ID NO: 751769 - RNA, 22 nt, Human
gugacagaaacagggcuagaau

SEQ ID NO: 751770 - RNA, 22 nt, Human
uggccugaauuauggcagaucu

SEQ ID NO: 751771 - RNA, 19 nt, Human
aaaggcaguggguggcgug

SEQ ID NO: 751772 - RNA, 22 nt, Human
caucaaugugcagagaugaacg

SEQ ID NO: 751773 - RNA, 22 nt, Human
cagggcaguuuuacuucucucu

SEQ ID NO: 751774 - RNA, 22 nt, Human
gaggguggcuccucccugggcc

SEQ ID NO: 751775 - RNA, 22 nt, Human
ugccuugcacauaauauacauu

SEQ ID NO: 751776 - RNA, 22 nt, Human
ucuuggaguauugggccucagg

SEQ ID NO: 751777 - RNA, 22 nt, Human
cagccccuuccuggcaucugga

SEQ ID NO: 751778 - RNA, 22 nt, Human
auuguagcaauuucucuuaauu

SEQ ID NO: 751779 - RNA, 22 nt, Human
aagaguuuccaugcucugugcu

SEQ ID NO: 751780 - RNA, 22 nt, Human
uuccuuucucuggacugcagcc

SEQ ID NO: 751781 - RNA, 22 nt, Human
aaauuuucagagcacuagagaa

SEQ ID NO: 751782 - RNA, 22 nt, Human
ugggcuggcguggagaguuuag

SEQ ID NO: 751783 - RNA, 22 nt, Human
gaugagaaauggacaggagugg

SEQ ID NO: 751784 - RNA, 22 nt, Human
acuccuggggcugccaucacag

SEQ ID NO: 751785 - RNA, 22 nt, Human
uugcagggucccagaggccugg

SEQ ID NO: 751786 - RNA, 22 nt, Human
accugcccuuaacacugugugc

SEQ ID NO: 751787 - RNA, 22 nt, Human
ggaggagguggguuaaguugua

SEQ ID NO: 751788 - RNA, 21 nt, Human
agucuguuaggaugacucuga

SEQ ID NO: 751789 - RNA, 22 nt, Human
cugggaccagugaagcaacuca

SEQ ID NO: 751790 - RNA, 23 nt, Human
agguucaggagauggaggaacaa

SEQ ID NO: 751791 - RNA, 22 nt, Human
ucuucagauugcacugagcaag

SEQ ID NO: 751792 - RNA, 22 nt, Human
ugauuagcuuugaaugugcugc

SEQ ID NO: 751793 - RNA, 20 nt, Human
ucagggcaugggacagcccc

SEQ ID NO: 751794 - RNA, 22 nt, Human
cagcugagaccagaaugcaggu

SEQ ID NO: 751795 - RNA, 22 nt, Human
uccaggcaaggauaauaaacau

SEQ ID NO: 751796 - RNA, 22 nt, Human
ugauuuccuggcuuuggaguuc

SEQ ID NO: 751797 - RNA, 22 nt, Human
aaggcaaguuuuaguuuucugg

SEQ ID NO: 751798 - RNA, 22 nt, Human
uaucagaaaugccuuaaauugg

SEQ ID NO: 751799 - RNA, 18 nt, Human
uggccuggagacaacucu

SEQ ID NO: 751800 - RNA, 22 nt, Human
gcacauaaagggcaugggaggu

SEQ ID NO: 751801 - RNA, 21 nt, Human
cucugggccauuuucuuccac

SEQ ID NO: 751802 - RNA, 22 nt, Human
agggggcauuaugaggcuuuuc

SEQ ID NO: 751803 - RNA, 22 nt, Human
aaucacaucacugagaaugagg

SEQ ID NO: 751804 - RNA, 22 nt, Human
ccuuucucuggcagcaggacag

SEQ ID NO: 751805 - RNA, 22 nt, Human
cuggcccugcuccgcgccgcgg

SEQ ID NO: 751806 - RNA, 22 nt, Human
auguuccugguauaucaugacc

SEQ ID NO: 751807 - RNA, 22 nt, Human
aaggccacugaagaaaucacaa

SEQ ID NO: 751808 - RNA, 22 nt, Human
aaacuucagacuccccacuucu

SEQ ID NO: 751809 - RNA, 22 nt, Human
gagcugugagggacacauugcu

SEQ ID NO: 751810 - RNA, 22 nt, Human
aaaaugugaucuacaaaugcaa

SEQ ID NO: 751811 - RNA, 19 nt, Human
cuuccccuguuaccucacu

SEQ ID NO: 751812 - RNA, 22 nt, Human
agcaucuguugaauauaauauu

SEQ ID NO: 751813 - RNA, 22 nt, Human
aauugcacuuuagcaaugguga

SEQ ID NO: 751814 - RNA, 22 nt, Human
auauauucuuaaagaaucugac

SEQ ID NO: 751815 - RNA, 22 nt, Human
caacaauaugccagacucaauu

SEQ ID NO: 751816 - RNA, 22 nt, Human
auuucacagcgugguugacugc

SEQ ID NO: 751817 - RNA, 22 nt, Human
cacaugaguccugccagguaug

SEQ ID NO: 751818 - RNA, 22 nt, Human
augugagcaggugcuggcugcu

SEQ ID NO: 751819 - RNA, 21 nt, Human
ugcugccuguggguguuuacc

SEQ ID NO: 751820 - RNA, 22 nt, Human
ucuuagaaauuccccaguggcu

SEQ ID NO: 751821 - RNA, 23 nt, Human
uacuguauauuacuguguuauac

SEQ ID NO: 751822 - RNA, 19 nt, Human
uauguguauauguaucugu

SEQ ID NO: 751823 - RNA, 22 nt, Human
acacuuuaucaauauucaaaaa

SEQ ID NO: 751824 - RNA, 22 nt, Human
uagacagauuuaaaggaaugga

SEQ ID NO: 751825 - RNA, 22 nt, Human
cccugugccagagaggcaggag

SEQ ID NO: 751826 - RNA, 22 nt, Human
augggaggcaggcucagaaccg

SEQ ID NO: 751827 - RNA, 23 nt, Human
guccucuggagagaaaggcagua

SEQ ID NO: 751828 - RNA, 22 nt, Human
ucagggcugccgggcagaccgu

SEQ ID NO: 751829 - RNA, 22 nt, Human
uguacacaaugauaaauuauua

SEQ ID NO: 751830 - RNA, 21 nt, Human
acacugagugaauuagcacau

SEQ ID NO: 751831 - RNA, 22 nt, Human
ccuggcugcugucacugaccau

SEQ ID NO: 751832 - RNA, 22 nt, Human
acuguuggcuucugguagugac

SEQ ID NO: 751833 - RNA, 22 nt, Human
uuaaguaacuuguccaaaugag

SEQ ID NO: 751834 - RNA, 22 nt, Human
cauuaaguauuucaguuacugu

SEQ ID NO: 751835 - RNA, 22 nt, Human
uccaccccugggaaugucaaua

SEQ ID NO: 751836 - RNA, 22 nt, Human
gcagggcucaacaggacacccc

SEQ ID NO: 751837 - RNA, 22 nt, Human
uuccaaauguuggacaacugua

SEQ ID NO: 751838 - RNA, 22 nt, Human
auggauaagaacaaauaucuga

SEQ ID NO: 751839 - RNA, 22 nt, Human
agcugggaggugggcagugaga

SEQ ID NO: 751840 - RNA, 22 nt, Human
auucauaucauagaguuauuga

SEQ ID NO: 751841 - RNA, 22 nt, Human
uuucuguaaguggcaaauaaug

SEQ ID NO: 751842 - RNA, 22 nt, Human
gucaccaggucugaugcagcca

SEQ ID NO: 751843 - RNA, 22 nt, Human
auuuguaucuucuaauauuauc

SEQ ID NO: 751844 - RNA, 22 nt, Human
ggcuuaagauauuucugauucc

SEQ ID NO: 751845 - RNA, 22 nt, Human
caauugucagugcuguuuaaau

SEQ ID NO: 751846 - RNA, 22 nt, Human
ugccugccuugcugcuggacag

SEQ ID NO: 751847 - RNA, 22 nt, Human
ugggaggcuuccagaccuugcu

SEQ ID NO: 751848 - RNA, 23 nt, Human
uaggcucuguagguagagauggg

SEQ ID NO: 751849 - RNA, 22 nt, Human
ugucuguauaucacuuuugucc

SEQ ID NO: 751850 - RNA, 22 nt, Human
acucuucacacuugucuccagg

SEQ ID NO: 751851 - RNA, 22 nt, Human
ggcacugcuguaggcagugagg

SEQ ID NO: 751852 - RNA, 22 nt, Human
gggcaggagagaacagucaugg

SEQ ID NO: 751853 - RNA, 22 nt, Human
gcagagugguuucagaguugag

SEQ ID NO: 751854 - RNA, 19 nt, Human
gggaucagcccagggcucu

SEQ ID NO: 751855 - RNA, 22 nt, Human
ggggauggauuccgggucccug

SEQ ID NO: 751856 - RNA, 22 nt, Human
acauucuuugaguuuuguuaaa

SEQ ID NO: 751857 - RNA, 22 nt, Human
auucccaucgucaacuucacug

SEQ ID NO: 751858 - RNA, 22 nt, Human
uccucuggaaccucacccuugc

SEQ ID NO: 751859 - RNA, 23 nt, Human
agguucagcuuucuuacucuggg

SEQ ID NO: 751860 - RNA, 22 nt, Human
auuucccuccagggaaagcuua

SEQ ID NO: 751861 - RNA, 22 nt, Human
uacagcauuaacaggcuguuua

SEQ ID NO: 751862 - RNA, 22 nt, Human
ucugucugacuaccaugaggca

SEQ ID NO: 751863 - RNA, 22 nt, Human
uaauuuuaacugugcuguuugg

SEQ ID NO: 751864 - RNA, 22 nt, Human
cauggcagcaauuuuccugacu

SEQ ID NO: 751865 - RNA, 22 nt, Human
uggagauggccucaggcccuca

SEQ ID NO: 751866 - RNA, 22 nt, Human
acagugcauaaaaacaacuuuu

SEQ ID NO: 751867 - RNA, 22 nt, Human
ucacaugacuuuuugguggccu

SEQ ID NO: 751868 - RNA, 23 nt, Human
ggacacugcuauaaaggaucugc

SEQ ID NO: 751869 - RNA, 22 nt, Human
auuauuucucacucacauaaua

SEQ ID NO: 751870 - RNA, 22 nt, Human
uaaggcaccuguccaggcuggg

SEQ ID NO: 751871 - RNA, 20 nt, Human
aagcauggucaaaacuuaug

SEQ ID NO: 751872 - RNA, 22 nt, Human
aagaugguaaggcagcuggcag

SEQ ID NO: 751873 - RNA, 22 nt, Human
caggauggccccggggcugugc

SEQ ID NO: 751874 - RNA, 22 nt, Human
gacuccagguguccaggccucc

SEQ ID NO: 751875 - RNA, 22 nt, Human
uggcucagcuuuccccaucugg

SEQ ID NO: 751876 - RNA, 22 nt, Human
gauggcagguaguggucucauc

SEQ ID NO: 751877 - RNA, 22 nt, Human
acaguguuuaaaauaauaugcu

SEQ ID NO: 751878 - RNA, 22 nt, Human
acaucauucagggccucguugg

SEQ ID NO: 751879 - RNA, 22 nt, Human
auaucuucuuuauuuugugagg

SEQ ID NO: 751880 - RNA, 22 nt, Human
aggucugagcuccuuccucuga

SEQ ID NO: 751881 - RNA, 22 nt, Human
uggacaaauagcaugacacuug

SEQ ID NO: 751882 - RNA, 22 nt, Human
aagauuucugcuuuuggaggca

SEQ ID NO: 751883 - RNA, 22 nt, Human
acccagcuggaugcauggaggc

SEQ ID NO: 751884 - RNA, 22 nt, Human
gcagugcaggacaaaucagugc

SEQ ID NO: 751885 - RNA, 22 nt, Human
uaagaacaagcuggggguucca

SEQ ID NO: 751886 - RNA, 22 nt, Human
aaccucgaaugccuuccugagg

SEQ ID NO: 751887 - RNA, 20 nt, Human
gccuggaguuaguuuuccuu

SEQ ID NO: 751888 - RNA, 22 nt, Human
uggagcccagacacuggcauug

SEQ ID NO: 751889 - RNA, 22 nt, Human
cuggucagcugaagccccacac

SEQ ID NO: 751890 - RNA, 22 nt, Human
gaacucuagguaaaugagauau

SEQ ID NO: 751891 - RNA, 22 nt, Human
cagaaauacccagcauuuggag

SEQ ID NO: 751892 - RNA, 22 nt, Human
gaaacauucauaugagaaaccu

SEQ ID NO: 751893 - RNA, 22 nt, Human
gcucagagaaguuaaggaauuu

SEQ ID NO: 751894 - RNA, 22 nt, Human
uaugcaacagcauuauuacaau

SEQ ID NO: 751895 - RNA, 22 nt, Human
cacauuuaucuguucuuucuag

SEQ ID NO: 751896 - RNA, 22 nt, Human
cauaauccugguguagcccucu

SEQ ID NO: 751897 - RNA, 23 nt, Human
uucaaagaucuucugaaaucugu

SEQ ID NO: 751898 - RNA, 22 nt, Human
uauuuggacaccaaguagaagu

SEQ ID NO: 751899 - RNA, 22 nt, Human
uggcagcagggccccuggagga

SEQ ID NO: 751900 - RNA, 22 nt, Human
acagcuuuguuuucccugcuga

SEQ ID NO: 751901 - RNA, 20 nt, Human
ucacaugagcuggggcaggc

SEQ ID NO: 751902 - RNA, 22 nt, Human
uaucacauaguguuuaguaaau

SEQ ID NO: 751903 - RNA, 22 nt, Human
gucaggagagaucaggacagca

SEQ ID NO: 751904 - RNA, 22 nt, Human
uuacaucagaaggaaacagcgu

SEQ ID NO: 751905 - RNA, 22 nt, Human
gaauuccacuuuggcuuuuggg

SEQ ID NO: 751906 - RNA, 22 nt, Human
ugccgcugucgccaccauggcu

SEQ ID NO: 751907 - RNA, 22 nt, Human
aacagaauauuuugccuuucuc

SEQ ID NO: 751908 - RNA, 22 nt, Human
aaauggugagggaauugaacag

SEQ ID NO: 751909 - RNA, 22 nt, Human
cuacuuuaacaauucgcaagaa

SEQ ID NO: 751910 - RNA, 22 nt, Human
gacagcugaaggaugauucagg

SEQ ID NO: 751911 - RNA, 22 nt, Human
ggccugagggugggcucucagu

SEQ ID NO: 751912 - RNA, 22 nt, Human
gccagcuccgcaggauggcgcg

SEQ ID NO: 751913 - RNA, 22 nt, Human
uguuuacuucuuuccauggcuu

SEQ ID NO: 751914 - RNA, 22 nt, Human
uccaggccugcaaugacaaagc

SEQ ID NO: 751915 - RNA, 20 nt, Human
gcaaggcacagugaggaggg

SEQ ID NO: 751916 - RNA, 18 nt, Human
uuggaccugugucagggc

SEQ ID NO: 751917 - RNA, 22 nt, Human
acucaguacaucuggaguuggc

SEQ ID NO: 751918 - RNA, 22 nt, Human
ucucacagcaggggccaggucu

SEQ ID NO: 751919 - RNA, 22 nt, Human
uuucaaaguugggaauuguaau

SEQ ID NO: 751920 - RNA, 22 nt, Human
aggcaguguggagggcuguugc

SEQ ID NO: 751921 - RNA, 22 nt, Human
uuugucaucccuuuugaaacug

SEQ ID NO: 751922 - RNA, 22 nt, Human
caggaggcgucuucaguuuguu

SEQ ID NO: 751923 - RNA, 22 nt, Human
uggaaaggaggcuuguggaaua

SEQ ID NO: 751924 - RNA, 21 nt, Human
ucaaauccugcuguuaccacu

SEQ ID NO: 751925 - RNA, 22 nt, Human
ugcaaagaagccuuugccuucu

SEQ ID NO: 751926 - RNA, 21 nt, Human
agggaaagaaaaugagcuaau

SEQ ID NO: 751927 - RNA, 22 nt, Human
ugugcuuugguuuuacaggaug

SEQ ID NO: 751928 - RNA, 22 nt, Human
cugaggccucuguucaccagaa

SEQ ID NO: 751929 - RNA, 22 nt, Human
aggagccaaaagcugaacaaga

SEQ ID NO: 751930 - RNA, 22 nt, Human
aagacaacagagaugacagacu

SEQ ID NO: 751931 - RNA, 22 nt, Human
agcuacaugaaauugcugauau

SEQ ID NO: 751932 - RNA, 22 nt, Human
guaaauauuaaaggcugcuaga

SEQ ID NO: 751933 - RNA, 22 nt, Human
gugggcagugccugacggauga

SEQ ID NO: 751934 - RNA, 22 nt, Human
uuagggaaauauuuauauacuu

SEQ ID NO: 751935 - RNA, 17 nt, Human
accagccucuccugggg

SEQ ID NO: 751936 - RNA, 22 nt, Human
uugucucuacagagaguaguag

SEQ ID NO: 751937 - RNA, 22 nt, Human
uaaacuguguaauaugaugucu

SEQ ID NO: 751938 - RNA, 23 nt, Human
cugcuccaggacagcauggaggu

SEQ ID NO: 751939 - RNA, 22 nt, Human
uuaauauguugaaauuuauuag

SEQ ID NO: 751940 - RNA, 22 nt, Human
accaggagacaugaccaaugag

SEQ ID NO: 751941 - RNA, 22 nt, Human
acaguagacccuggauaaacau

SEQ ID NO: 751942 - RNA, 22 nt, Human
agugucugaagccucagcccga

SEQ ID NO: 751943 - RNA, 22 nt, Human
ugucucugaagcccccuccuuu

SEQ ID NO: 751944 - RNA, 22 nt, Human
guguaauguugucagcaucauc

SEQ ID NO: 751945 - RNA, 22 nt, Human
ggagcuguguuauccauuccca

SEQ ID NO: 751946 - RNA, 22 nt, Human
caggguggggcuggcuaucaaa

SEQ ID NO: 751947 - RNA, 22 nt, Human
agggggcuggagacaccuccuc

SEQ ID NO: 751948 - RNA, 22 nt, Human
guuuggaaguuaagugcagcag

SEQ ID NO: 751949 - RNA, 22 nt, Human
ugcaguguuuggaugcugaguc

SEQ ID NO: 751950 - RNA, 22 nt, Human
cagcuauuuucucauuaaggau

SEQ ID NO: 751951 - RNA, 22 nt, Human
ugugugugacaaccuaguucag

SEQ ID NO: 751952 - RNA, 23 nt, Human
ucacuuugauguaauugaaaagc

SEQ ID NO: 751953 - RNA, 17 nt, Human
cugcagcuggagggcca

SEQ ID NO: 751954 - RNA, 22 nt, Human
gcagccagguuugaggaccacu

SEQ ID NO: 751955 - RNA, 22 nt, Human
cuguggcuccagugaaccaaug

SEQ ID NO: 751956 - RNA, 22 nt, Human
auguguaugcaugcacuaagau

SEQ ID NO: 751957 - RNA, 22 nt, Human
agcugggaugaggagcauccuu

SEQ ID NO: 751958 - RNA, 22 nt, Human
auacagugccccuuuucacaug

SEQ ID NO: 751959 - RNA, 22 nt, Human
uggaauguuuuccuaaaucaga

SEQ ID NO: 751960 - RNA, 22 nt, Human
aguguggggucaccggcccagg

SEQ ID NO: 751961 - RNA, 22 nt, Human
ucagagcugcccaugcaagggg

SEQ ID NO: 751962 - RNA, 22 nt, Human
gagggcucuacucaccacccug

SEQ ID NO: 751963 - RNA, 22 nt, Human
ccugcccacugcccggucagcc

SEQ ID NO: 751964 - RNA, 22 nt, Human
uugguuuagcaacuuccugugu

SEQ ID NO: 751965 - RNA, 19 nt, Human
aggcagaggcuuggcuagc

SEQ ID NO: 751966 - RNA, 22 nt, Human
cugcuguggaugcaggaccuca

SEQ ID NO: 751967 - RNA, 22 nt, Human
uaaaaugcacagcaguugaaag

SEQ ID NO: 751968 - RNA, 22 nt, Human
aagaaucuaugguacauccaag

SEQ ID NO: 751969 - RNA, 22 nt, Human
gccuggcucugaguuucucucc

SEQ ID NO: 751970 - RNA, 22 nt, Human
cuugcuuggagaagagaucagu

SEQ ID NO: 751971 - RNA, 22 nt, Human
ucuggccccuggcaguccugga

SEQ ID NO: 751972 - RNA, 22 nt, Human
caguuuuaaauuguuagauaau

SEQ ID NO: 751973 - RNA, 22 nt, Human
agccccacacucucucugagaa

SEQ ID NO: 751974 - RNA, 22 nt, Human
auacaaugauaauaguacuuua

SEQ ID NO: 751975 - RNA, 22 nt, Human
guaucuuugucuucauguugga

SEQ ID NO: 751976 - RNA, 22 nt, Human
uagagcauucuaucuccaacag

SEQ ID NO: 751977 - RNA, 22 nt, Human
gcagcugggacacugaggccag

SEQ ID NO: 751978 - RNA, 22 nt, Human
aaugcuguugaguuguuccugu

SEQ ID NO: 751979 - RNA, 22 nt, Human
uucucagagcucacuguaguaa

SEQ ID NO: 751980 - RNA, 22 nt, Human
acucuuauucccucagaaauau

SEQ ID NO: 751981 - RNA, 22 nt, Human
uauucuagaaguccaccagucu

SEQ ID NO: 751982 - RNA, 22 nt, Human
uguuugcauuguuaauucaguc

SEQ ID NO: 751983 - RNA, 22 nt, Human
guuucuguguuagaugagucuu

SEQ ID NO: 751984 - RNA, 22 nt, Human
cauaaacucuugagauucuugu

SEQ ID NO: 751985 - RNA, 22 nt, Human
uauguuuacgcugguagaauua

SEQ ID NO: 751986 - RNA, 18 nt, Human
cucaccauucugcccaau

SEQ ID NO: 751987 - RNA, 22 nt, Human
cggggcagaaaguugucuuuug

SEQ ID NO: 751988 - RNA, 22 nt, Human
ugcccugccaagaccaaguggu

SEQ ID NO: 751989 - RNA, 22 nt, Human
ggugugugguuuugauacaguc

SEQ ID NO: 751990 - RNA, 22 nt, Human
ccuuggcccuagccucaggcaa

SEQ ID NO: 751991 - RNA, 20 nt, Human
ucugguccaggucuucaugg

SEQ ID NO: 751992 - RNA, 22 nt, Human
uuguaugagcuccaggaacuca

SEQ ID NO: 751993 - RNA, 22 nt, Human
caaauguaucagcccagggauu

SEQ ID NO: 751994 - RNA, 22 nt, Human
gagcccagcugcggcccucagc

SEQ ID NO: 751995 - RNA, 22 nt, Human
acuccaggaaacuuaggggaaa

SEQ ID NO: 751996 - RNA, 23 nt, Human
ucugggcugcuuaaggaucaagg

SEQ ID NO: 751997 - RNA, 22 nt, Human
aggaaagccaaucucucuugac

SEQ ID NO: 751998 - RNA, 22 nt, Human
agcuggaggggccagcaggugu

SEQ ID NO: 751999 - RNA, 22 nt, Human
aggcucaagcacugauauuuuu

SEQ ID NO: 752000 - RNA, 22 nt, Human
ugagaaaacaguuuguaauaau

SEQ ID NO: 752001 - RNA, 22 nt, Human
ugagccuggccugcagagacca

SEQ ID NO: 752002 - RNA, 22 nt, Human
aacuuucugucugagcugcaga

SEQ ID NO: 752003 - RNA, 22 nt, Human
ugggagcaguugcaucuccagu

SEQ ID NO: 752004 - RNA, 22 nt, Human
ggcaccaggacaugacucccag

SEQ ID NO: 752005 - RNA, 22 nt, Human
ugaggaaguuguuucucuucua

SEQ ID NO: 752006 - RNA, 22 nt, Human
caucaauaggguuugaaagcaa

SEQ ID NO: 752007 - RNA, 22 nt, Human
ccucacagcaaggauuucagug

SEQ ID NO: 752008 - RNA, 22 nt, Human
ugcugggcacugucucugggga

SEQ ID NO: 752009 - RNA, 22 nt, Human
acaugcacggcaccaucuucug

SEQ ID NO: 752010 - RNA, 22 nt, Human
ucaaaucagcaagcagcuuccc

SEQ ID NO: 752011 - RNA, 22 nt, Human
agcagccucuguagaggucucc

SEQ ID NO: 752012 - RNA, 22 nt, Human
ucaugcaaaagacuugaacuuu

SEQ ID NO: 752013 - RNA, 22 nt, Human
aagaugguguggucaaggacca

SEQ ID NO: 752014 - RNA, 22 nt, Human
cauauacacuuccaccucugug

SEQ ID NO: 752015 - RNA, 22 nt, Human
uagguaagauguuaacagcuga

SEQ ID NO: 752016 - RNA, 22 nt, Human
ugugcugugggacucaggcucc

SEQ ID NO: 752017 - RNA, 22 nt, Human
ugcuuggccuacuuguccuuug

SEQ ID NO: 752018 - RNA, 22 nt, Human
guauuagggccaaaggcaggaa

SEQ ID NO: 752019 - RNA, 22 nt, Human
ggcagucaagagggagucugaa

SEQ ID NO: 752020 - RNA, 22 nt, Human
auuagggaaacugacuugucuc

SEQ ID NO: 752021 - RNA, 22 nt, Human
agcaggaacugacaccaagcca

SEQ ID NO: 752022 - RNA, 22 nt, Human
cugugaaaucaaccuugagccc

SEQ ID NO: 752023 - RNA, 22 nt, Human
uuccucaugggguuccuucaga

SEQ ID NO: 752024 - RNA, 22 nt, Human
agcaugcaggaaccacauggca

SEQ ID NO: 752025 - RNA, 22 nt, Human
uggcuggggccacaguuuuccu

SEQ ID NO: 752026 - RNA, 22 nt, Human
uggcugagaaugggaugaugcc

SEQ ID NO: 752027 - RNA, 22 nt, Human
ccuggcuuccuucaugaccugg

SEQ ID NO: 752028 - RNA, 22 nt, Human
uuaacacaucccugcucuaccc

SEQ ID NO: 752029 - RNA, 22 nt, Human
accaaggagaaggugcaagcuu

SEQ ID NO: 752030 - RNA, 22 nt, Human
uguauguauguauguauuuggg

SEQ ID NO: 752031 - RNA, 18 nt, Human
gagacacaagggccugga

SEQ ID NO: 752032 - RNA, 22 nt, Human
uuccuucccucaguggcugaag

SEQ ID NO: 752033 - RNA, 22 nt, Human
agggggugaucaaggugcggcg

SEQ ID NO: 752034 - RNA, 22 nt, Human
ugccugagggaguaagaguccu

SEQ ID NO: 752035 - RNA, 22 nt, Human
ucagccaggccaccuucagcuu

SEQ ID NO: 752036 - RNA, 22 nt, Human
gaugcaaacugugacauagagu

SEQ ID NO: 752037 - RNA, 22 nt, Human
gugaagcagggaaggaaaggau

SEQ ID NO: 752038 - RNA, 22 nt, Human
auggucaggcaaggagggcugg

SEQ ID NO: 752039 - RNA, 22 nt, Human
aggacaggauugagcugaacug

SEQ ID NO: 752040 - RNA, 22 nt, Human
augcaacaauguauuuauguau

SEQ ID NO: 752041 - RNA, 22 nt, Human
aacauucagcuggguggagcag

SEQ ID NO: 752042 - RNA, 22 nt, Human
cuuuaucauggagguaaauaug

SEQ ID NO: 752043 - RNA, 22 nt, Human
caggaggaaaugugacccugcu

SEQ ID NO: 752044 - RNA, 22 nt, Human
cugagcugggaguagagacucu

SEQ ID NO: 752045 - RNA, 22 nt, Human
agcuuaaacucuuugaaguuau

SEQ ID NO: 752046 - RNA, 22 nt, Human
uguuuaaucuauaaaauggaga

SEQ ID NO: 752047 - RNA, 22 nt, Human
ugacaacaaggauccugccugg

SEQ ID NO: 752048 - RNA, 22 nt, Human
uaucucuuucauuuuagaguca

SEQ ID NO: 752049 - RNA, 23 nt, Human
gcccucccucccagguggguguu

SEQ ID NO: 752050 - RNA, 22 nt, Human
gaaauguuaugagauauguacu

SEQ ID NO: 752051 - RNA, 22 nt, Human
ucuccagguagauaugucagga

SEQ ID NO: 752052 - RNA, 22 nt, Human
ucuccagaaauggggcugggga

SEQ ID NO: 752053 - RNA, 22 nt, Human
cacagccuccuucagagagcau

SEQ ID NO: 752054 - RNA, 22 nt, Human
aaccuuucaauuauccucaucu

SEQ ID NO: 752055 - RNA, 22 nt, Human
aggaacagaagagcaaugcagg

SEQ ID NO: 752056 - RNA, 22 nt, Human
cugcaggguuuuucaaggacaa

SEQ ID NO: 752057 - RNA, 22 nt, Human
cucagugcagcuaggcaugaga

SEQ ID NO: 752058 - RNA, 22 nt, Human
uagucagcaugaaauaagcagc

SEQ ID NO: 752059 - RNA, 22 nt, Human
uuggcucaggcuuucauuguaa

SEQ ID NO: 752060 - RNA, 22 nt, Human
uugaagacuaauuuagauaaug

SEQ ID NO: 752061 - RNA, 20 nt, Human
uggccaccugcgucccagcc

SEQ ID NO: 752062 - RNA, 19 nt, Human
gccaggacauccuccugcu

SEQ ID NO: 752063 - RNA, 22 nt, Human
ggcacuuggaucuuaguugggg

SEQ ID NO: 752064 - RNA, 17 nt, Human
uccuccccgcaguugca

SEQ ID NO: 752065 - RNA, 22 nt, Human
uucuccaagaugaagcugugua

SEQ ID NO: 752066 - RNA, 19 nt, Human
uuccugggguuccauugug

SEQ ID NO: 752067 - RNA, 22 nt, Human
augucuguguuaucuguagaau

SEQ ID NO: 752068 - RNA, 22 nt, Human
gagggggcucugccaaccuguc

SEQ ID NO: 752069 - RNA, 22 nt, Human
cuggucaauaaucauguaguac

SEQ ID NO: 752070 - RNA, 22 nt, Human
uuuauugaauuguaacccuauu

SEQ ID NO: 752071 - RNA, 22 nt, Human
ucauccauacuauugagaggca

SEQ ID NO: 752072 - RNA, 22 nt, Human
cugcuucuaagaaccugcagcu

SEQ ID NO: 752073 - RNA, 22 nt, Human
uaugagaaauugcugauauuug

SEQ ID NO: 752074 - RNA, 22 nt, Human
acagacauuuaauaaaugcuga

SEQ ID NO: 752075 - RNA, 22 nt, Human
ggaaaacaagagaaugauguuu

SEQ ID NO: 752076 - RNA, 23 nt, Human
ggguccagagacaggcaugggug

SEQ ID NO: 752077 - RNA, 22 nt, Human
acacaugcagguauacauguuc

SEQ ID NO: 752078 - RNA, 22 nt, Human
gugauaauugcagagaaaggag

SEQ ID NO: 752079 - RNA, 19 nt, Human
uaucuuuaugcaguggugg

SEQ ID NO: 752080 - RNA, 22 nt, Human
aagggagguaaagcuauuuaaa

SEQ ID NO: 752081 - RNA, 22 nt, Human
cuguguagccucaugugggcuu

SEQ ID NO: 752082 - RNA, 22 nt, Human
uuucagacaggcucagagccgu

SEQ ID NO: 752083 - RNA, 22 nt, Human
uuuucuauucauugucuauggu

SEQ ID NO: 752084 - RNA, 22 nt, Human
uuggagguuucccaacuguggg

SEQ ID NO: 752085 - RNA, 22 nt, Human
uaagugaauuguccgaggacac

SEQ ID NO: 752086 - RNA, 22 nt, Human
ugcucugcaagcaggagcaaga

SEQ ID NO: 752087 - RNA, 22 nt, Human
ucuccacaccagaaggagcuga

SEQ ID NO: 752088 - RNA, 22 nt, Human
aagucacagaacccauuguaac

SEQ ID NO: 752089 - RNA, 22 nt, Human
cugggcagaauuuuaggauggc

SEQ ID NO: 752090 - RNA, 22 nt, Human
uuucucagcucagcaucugggu

SEQ ID NO: 752091 - RNA, 22 nt, Human
aggcagcaauugaaaucauugu

SEQ ID NO: 752092 - RNA, 22 nt, Human
gggcagguggccucuuguacua

SEQ ID NO: 752093 - RNA, 22 nt, Human
cugcccucuagaggaggacuga

SEQ ID NO: 752094 - RNA, 22 nt, Human
cugaagucauacacuguucuga

SEQ ID NO: 752095 - RNA, 22 nt, Human
cugcuuuggcucagugacauca

SEQ ID NO: 752096 - RNA, 22 nt, Human
ccagggugagugucauggguua

SEQ ID NO: 752097 - RNA, 22 nt, Human
uuccaaaguuauucaagcagua

SEQ ID NO: 752098 - RNA, 22 nt, Human
ggcuuuaucaaaugagacccug

SEQ ID NO: 752099 - RNA, 22 nt, Human
agucaaauaucuuaaaaggcua

SEQ ID NO: 752100 - RNA, 22 nt, Human
gcugagagcacauagaaggggc

SEQ ID NO: 752101 - RNA, 22 nt, Human
acaguuuggcgugauugauagu

SEQ ID NO: 752102 - RNA, 22 nt, Human
cuggaacaaguggccuugcaag

SEQ ID NO: 752103 - RNA, 18 nt, Human
caggagcaggaguugaac

SEQ ID NO: 752104 - RNA, 22 nt, Human
aagcacagauaaaacaggauuc

SEQ ID NO: 752105 - RNA, 22 nt, Human
cuuguggccaauguuuguuaua

SEQ ID NO: 752106 - RNA, 16 nt, Human
ucaguguuccagaaua

SEQ ID NO: 752107 - RNA, 21 nt, Human
gagaaucaggaaggauugaug

SEQ ID NO: 752108 - RNA, 22 nt, Human
uauaguacauggaaucuucaua

SEQ ID NO: 752109 - RNA, 22 nt, Human
gguguggcugugaguuuuugau

SEQ ID NO: 752110 - RNA, 23 nt, Human
acucacaaagcaggaucauguug

SEQ ID NO: 752111 - RNA, 23 nt, Human
uuuuuaguuacaccucugccacc

SEQ ID NO: 752112 - RNA, 22 nt, Human
gcucagggccuggcugcggacu

SEQ ID NO: 752113 - RNA, 22 nt, Human
cucacagguuaguuguguggau

SEQ ID NO: 752114 - RNA, 21 nt, Human
acugugggucugaccaccugg

SEQ ID NO: 752115 - RNA, 22 nt, Human
gacuuggguggauugugacucu

SEQ ID NO: 752116 - RNA, 22 nt, Human
guucaaaucucaggacuucaga

SEQ ID NO: 752117 - RNA, 22 nt, Human
uccauggagauggaugacugua

SEQ ID NO: 752118 - RNA, 22 nt, Human
uaacuugaacauggagaguaag

SEQ ID NO: 752119 - RNA, 22 nt, Human
uucuauguaccuagcguuguau

SEQ ID NO: 752120 - RNA, 22 nt, Human
guguaugauuucaaauggcuag

SEQ ID NO: 752121 - RNA, 22 nt, Human
uaaagcagugguucucaaacuu

SEQ ID NO: 752122 - RNA, 22 nt, Human
guguuaaugguagaaucugagu

SEQ ID NO: 752123 - RNA, 22 nt, Human
uuccccaguaacauacauguga

SEQ ID NO: 752124 - RNA, 20 nt, Human
agucacaggccuggaacaug

SEQ ID NO: 752125 - RNA, 22 nt, Human
caccuuugcaaaccaaaucuga

SEQ ID NO: 752126 - RNA, 17 nt, Human
uaggagacuggcugucc

SEQ ID NO: 752127 - RNA, 22 nt, Human
gccauggggacuucauggauuu

SEQ ID NO: 752128 - RNA, 22 nt, Human
cagcaggauuggauacaucuca

SEQ ID NO: 752129 - RNA, 22 nt, Human
ugcucccaggcucuguggucug

SEQ ID NO: 752130 - RNA, 22 nt, Human
aaggacagguuggggcuucagg

SEQ ID NO: 752131 - RNA, 22 nt, Human
guguccugcauuggcucugccc

SEQ ID NO: 752132 - RNA, 22 nt, Human
ugugacagaucucuauacauga

SEQ ID NO: 752133 - RNA, 18 nt, Human
ucucugaauauuuuaugu

SEQ ID NO: 752134 - RNA, 22 nt, Human
ugugaggagaggcccagcuccc

SEQ ID NO: 752135 - RNA, 20 nt, Human
agcaaagccuuuagaguuug

SEQ ID NO: 752136 - RNA, 22 nt, Human
agggcaguucaacuucauagug

SEQ ID NO: 752137 - RNA, 22 nt, Human
aaagggaggggcgauaagccgg

SEQ ID NO: 752138 - RNA, 22 nt, Human
uacugcugagcuggguagaagg

SEQ ID NO: 752139 - RNA, 22 nt, Human
ucuuuccuaggugauaugcaau

SEQ ID NO: 752140 - RNA, 22 nt, Human
uuucacagcgucuuucucuugc

SEQ ID NO: 752141 - RNA, 22 nt, Human
gcagccaggcuacagcgggcuu

SEQ ID NO: 752142 - RNA, 22 nt, Human
uagacaauauuugaaaguagug

SEQ ID NO: 752143 - RNA, 22 nt, Human
uccagggaguuggcuggauagu

SEQ ID NO: 752144 - RNA, 22 nt, Human
aggugucuggacuugugaagca

SEQ ID NO: 752145 - RNA, 22 nt, Human
aaauaacuugguuucaucagag

SEQ ID NO: 752146 - RNA, 22 nt, Human
aucauccaucuagcgcgggggg

SEQ ID NO: 752147 - RNA, 22 nt, Human
uaggcuggaacuuaggcagagg

SEQ ID NO: 752148 - RNA, 22 nt, Human
ccuuucugacagugaugggggg

SEQ ID NO: 752149 - RNA, 22 nt, Human
uguuugaauaacuuggauauau

SEQ ID NO: 752150 - RNA, 22 nt, Human
ucuucuuaugugccauuaucuc

SEQ ID NO: 752151 - RNA, 22 nt, Human
uauuaauuuaaucuccauggua

SEQ ID NO: 752152 - RNA, 22 nt, Human
aaggagguuaucccaguggacu

SEQ ID NO: 752153 - RNA, 22 nt, Human
ggcuugaacucccaaucauuua

SEQ ID NO: 752154 - RNA, 22 nt, Human
ccucaggaaaugaauaaauggc

SEQ ID NO: 752155 - RNA, 22 nt, Human
auucaguagaaguuagcuauua

SEQ ID NO: 752156 - RNA, 22 nt, Human
ucugccagcccugugagucuug

SEQ ID NO: 752157 - RNA, 23 nt, Human
cagcccuggagaugugggaggca

SEQ ID NO: 752158 - RNA, 22 nt, Human
ugaggcugacaaaagaugaggu

SEQ ID NO: 752159 - RNA, 19 nt, Human
aaaguuuuauucucauuug

SEQ ID NO: 752160 - RNA, 20 nt, Human
gucuuauuuaacacaugacu

SEQ ID NO: 752161 - RNA, 22 nt, Human
uugcugaucugugaaucagcca

SEQ ID NO: 752162 - RNA, 20 nt, Human
uaagaacaagacuaggaagc

SEQ ID NO: 752163 - RNA, 22 nt, Human
cuggccugcugggugagguccu

SEQ ID NO: 752164 - RNA, 22 nt, Human
gucaaguuaagauaaggucaug

SEQ ID NO: 752165 - RNA, 22 nt, Human
aaggucauuuaacaauuuauga

SEQ ID NO: 752166 - RNA, 22 nt, Human
cagaaggcaaggccugccacgc

SEQ ID NO: 752167 - RNA, 19 nt, Human
auuuccaagaauuggagag

SEQ ID NO: 752168 - RNA, 20 nt, Human
auggcucuguuuggcaguga

SEQ ID NO: 752169 - RNA, 22 nt, Human
ggccuaggauucugcauuucua

SEQ ID NO: 752170 - RNA, 22 nt, Human
aaguauuauuuaacaaauuugu

SEQ ID NO: 752171 - RNA, 22 nt, Human
caggccugguugagcccugaga

SEQ ID NO: 752172 - RNA, 22 nt, Human
aggguaggguaaaugaugcauc

SEQ ID NO: 752173 - RNA, 22 nt, Human
ugaguccuggcuuugggaugua

SEQ ID NO: 752174 - RNA, 22 nt, Human
ucacaggaggacugaaagauau

SEQ ID NO: 752175 - RNA, 22 nt, Human
uacaaagcuguauagccugguc

SEQ ID NO: 752176 - RNA, 22 nt, Human
ucuuugauggagagauagauau

SEQ ID NO: 752177 - RNA, 22 nt, Human
uuaaaacagcgugaaucuggca

SEQ ID NO: 752178 - RNA, 22 nt, Human
aagcuggacucugccauuuacu

SEQ ID NO: 752179 - RNA, 22 nt, Human
uaaauacuuuacaggaugucuc

SEQ ID NO: 752180 - RNA, 22 nt, Human
acaauguaggauauguacuugu

SEQ ID NO: 752181 - RNA, 22 nt, Human
ugugaaaugaguauauuugaau

SEQ ID NO: 752182 - RNA, 22 nt, Human
accugagcaugccaggagagug

SEQ ID NO: 752183 - RNA, 19 nt, Human
ugaguucugugguucucaa

SEQ ID NO: 752184 - RNA, 22 nt, Human
uggaauuaucugaagugauuug

SEQ ID NO: 752185 - RNA, 22 nt, Human
uuuccaaagguggcaggaacaa

SEQ ID NO: 752186 - RNA, 23 nt, Human
cccaagccugugcccucugacuc

SEQ ID NO: 752187 - RNA, 22 nt, Human
cuggcacaggauccgagaccuu

SEQ ID NO: 752188 - RNA, 22 nt, Human
uccugguguaaugguaagcaug

SEQ ID NO: 752189 - RNA, 22 nt, Human
cucucugaggaaggagcaucug

SEQ ID NO: 752190 - RNA, 19 nt, Human
augcaacaaaaguguaaga

SEQ ID NO: 752191 - RNA, 22 nt, Human
cugccuuggcccuaguucaugg

SEQ ID NO: 752192 - RNA, 22 nt, Human
ucuucaugcaccucacagcuag

SEQ ID NO: 752193 - RNA, 22 nt, Human
acuguggagcaguggcuaggga

SEQ ID NO: 752194 - RNA, 22 nt, Human
aauucauuaagaaagagcuaaa

SEQ ID NO: 752195 - RNA, 20 nt, Human
uagaggugggauuuggguuu

SEQ ID NO: 752196 - RNA, 22 nt, Human
aggaagccuggggcugcccucg

SEQ ID NO: 752197 - RNA, 22 nt, Human
uggagcagaguucagcggggag

SEQ ID NO: 752198 - RNA, 22 nt, Human
caucacauuagucucaagagaa

SEQ ID NO: 752199 - RNA, 22 nt, Human
acauucaugucccacuucuagc

SEQ ID NO: 752200 - RNA, 22 nt, Human
ucacaggaggaaccuggccugg

SEQ ID NO: 752201 - RNA, 19 nt, Human
ugagacugggugcaguacu

SEQ ID NO: 752202 - RNA, 22 nt, Human
ccagccagccuugaucugagua

SEQ ID NO: 752203 - RNA, 22 nt, Human
ccaggagacuguacugauauuu

SEQ ID NO: 752204 - RNA, 22 nt, Human
ugaggugggugucaggucagag

SEQ ID NO: 752205 - RNA, 22 nt, Human
gggcugagugaccucaggccaa

SEQ ID NO: 752206 - RNA, 20 nt, Human
aggcucugccugcaggccca

SEQ ID NO: 752207 - RNA, 22 nt, Human
aaggcagcccuggcucagccug

SEQ ID NO: 752208 - RNA, 22 nt, Human
uuguccuuggaugaagcuggga

SEQ ID NO: 752209 - RNA, 22 nt, Human
gaggagcaagaaauagugccca

SEQ ID NO: 752210 - RNA, 22 nt, Human
gauggcaggugauagccgaguc

SEQ ID NO: 752211 - RNA, 22 nt, Human
ugcaggagagugagucaguagg

SEQ ID NO: 752212 - RNA, 22 nt, Human
agcuccuggggguuccaagcag

SEQ ID NO: 752213 - RNA, 22 nt, Human
ggugacaguuccggagguacag

SEQ ID NO: 752214 - RNA, 22 nt, Human
cugaagcugaaaacuuccagca

SEQ ID NO: 752215 - RNA, 18 nt, Human
ucaggcugcccugugucu

SEQ ID NO: 752216 - RNA, 22 nt, Human
ucugagcccagugagucucgca

SEQ ID NO: 752217 - RNA, 22 nt, Human
gaggguggggaauagacugcua

SEQ ID NO: 752218 - RNA, 22 nt, Human
aguuucauuucuuaguaccagu

SEQ ID NO: 752219 - RNA, 22 nt, Human
gaccauuuguugaaaagauuau

SEQ ID NO: 752220 - RNA, 22 nt, Human
ucugggucaugacucagcguga

SEQ ID NO: 752221 - RNA, 22 nt, Human
gaagagcugucagaaaagcuaa

SEQ ID NO: 752222 - RNA, 22 nt, Human
caggcagugucccaggaagcca

SEQ ID NO: 752223 - RNA, 22 nt, Human
ucccugcagacguccugcgggu

SEQ ID NO: 752224 - RNA, 22 nt, Human
ccacagaauucugucuccagga

SEQ ID NO: 752225 - RNA, 22 nt, Human
ccaggccauucccagaguugcu

SEQ ID NO: 752226 - RNA, 22 nt, Human
gacuccugggccucugagaggc

SEQ ID NO: 752227 - RNA, 22 nt, Human
ggugcaggagcggggugcucgg

SEQ ID NO: 752228 - RNA, 22 nt, Human
cugcagggccauggguucuaua

SEQ ID NO: 752229 - RNA, 20 nt, Human
uacauucaaaacaaacucug

SEQ ID NO: 752230 - RNA, 22 nt, Human
aucuuugaugacuaaugcuuug

SEQ ID NO: 752231 - RNA, 22 nt, Human
gcagauggaaagugcuugaggg

SEQ ID NO: 752232 - RNA, 22 nt, Human
augcauauuucaugaaucuuug

SEQ ID NO: 752233 - RNA, 22 nt, Human
uccuguggcuuccacgaccuaa

SEQ ID NO: 752234 - RNA, 22 nt, Human
guacuuuaaaucaauguagauu

SEQ ID NO: 752235 - RNA, 22 nt, Human
aggcacugcuucuaaguaggaa

SEQ ID NO: 752236 - RNA, 22 nt, Human
guguuguggagcuugucagggg

SEQ ID NO: 752237 - RNA, 22 nt, Human
gagaaguuguaggagaauuuug

SEQ ID NO: 752238 - RNA, 22 nt, Human
cugucugugccucuucucccag

SEQ ID NO: 752239 - RNA, 22 nt, Human
ugaggccccgaagcugagguuu

SEQ ID NO: 752240 - RNA, 22 nt, Human
ucauuguauacuuuauuuauga

SEQ ID NO: 752241 - RNA, 22 nt, Human
uugagacucgagucucucagac

SEQ ID NO: 752242 - RNA, 22 nt, Human
ugggcuucuggaguggggcaga

SEQ ID NO: 752243 - RNA, 22 nt, Human
agaugaaaagauaagcagcaau

SEQ ID NO: 752244 - RNA, 22 nt, Human
uggucugauauuuuuucuuacc

SEQ ID NO: 752245 - RNA, 22 nt, Human
cuaccuucaaguuccucccucu

SEQ ID NO: 752246 - RNA, 22 nt, Human
gccaguggagacugaaacccau

SEQ ID NO: 752247 - RNA, 22 nt, Human
ggcugugggugugacaggccuc

SEQ ID NO: 752248 - RNA, 19 nt, Human
cuuuagacacaccuggaca

SEQ ID NO: 752249 - RNA, 22 nt, Human
aaaacauuuuacugccaucuca

SEQ ID NO: 752250 - RNA, 23 nt, Human
uguugaaguaacuguuacauaga

SEQ ID NO: 752251 - RNA, 22 nt, Human
ugcucucucaggccuggcccac

SEQ ID NO: 752252 - RNA, 22 nt, Human
agugucugggcucccuuggagc

SEQ ID NO: 752253 - RNA, 18 nt, Human
gagagcugcuaccuagcu

SEQ ID NO: 752254 - RNA, 18 nt, Human
guuuggcauaacugaugc

SEQ ID NO: 752255 - RNA, 22 nt, Human
gcgcgccucugcccgguguucc

SEQ ID NO: 752256 - RNA, 22 nt, Human
acauuguacucuuagcguuguu

SEQ ID NO: 752257 - RNA, 22 nt, Human
uagaucauuugaauugagguag

SEQ ID NO: 752258 - RNA, 22 nt, Human
cacagugcuuuaugagagaucu

SEQ ID NO: 752259 - RNA, 22 nt, Human
caggcacuucugcugcuugucu

SEQ ID NO: 752260 - RNA, 22 nt, Human
agcaauuuucccuuagucuuug

SEQ ID NO: 752261 - RNA, 22 nt, Human
cuuugaaaacuuaaauaacagc

SEQ ID NO: 752262 - RNA, 22 nt, Human
acauuguuccagcgauagagaa

SEQ ID NO: 752263 - RNA, 22 nt, Human
gucugagggguuucccaggaca

SEQ ID NO: 752264 - RNA, 22 nt, Human
aggccucaggaagguaaagaag

SEQ ID NO: 752265 - RNA, 22 nt, Human
cugcccgucccuuugcucucgc

SEQ ID NO: 752266 - RNA, 22 nt, Human
auugaauagaugcauuauacua

SEQ ID NO: 752267 - RNA, 22 nt, Human
auauuaggcaaggagauuauuu

SEQ ID NO: 752268 - RNA, 18 nt, Human
ucauuuguuuugcaugaa

SEQ ID NO: 752269 - RNA, 23 nt, Human
cagcagagagcagaccuuugugu

SEQ ID NO: 752270 - RNA, 22 nt, Human
auuguacaaugcugagguuugg

SEQ ID NO: 752271 - RNA, 22 nt, Human
ugugagugacaguucccuuggu

SEQ ID NO: 752272 - RNA, 22 nt, Human
uagcaaagcuccguaguuauuu

SEQ ID NO: 752273 - RNA, 22 nt, Human
ucaggcaguagaauugcuugaa

SEQ ID NO: 752274 - RNA, 23 nt, Human
augggccaagcaagacccaugac

SEQ ID NO: 752275 - RNA, 22 nt, Human
gagcaguggucacagggaggga

SEQ ID NO: 752276 - RNA, 22 nt, Human
aggaaugacuuguagcucugag

SEQ ID NO: 752277 - RNA, 22 nt, Human
acacaugaggaaggccucaccc

SEQ ID NO: 752278 - RNA, 22 nt, Human
uuuagcacgguaacacauaaag

SEQ ID NO: 752279 - RNA, 22 nt, Human
ugggagcaguugugaagcucag

SEQ ID NO: 752280 - RNA, 22 nt, Human
acuucacaacuguacauggcag

SEQ ID NO: 752281 - RNA, 22 nt, Human
agcagcagcucuguugcccuac

SEQ ID NO: 752282 - RNA, 22 nt, Human
acuuuugaggacuuuauuguau

SEQ ID NO: 752283 - RNA, 22 nt, Human
uagcuguguaagcuugguaaga

SEQ ID NO: 752284 - RNA, 22 nt, Human
uuacacuuguaauuauauaacg

SEQ ID NO: 752285 - RNA, 22 nt, Human
ucauuacagagauauaaucuac

SEQ ID NO: 752286 - RNA, 22 nt, Human
gggugggugguccgcagacaua

SEQ ID NO: 752287 - RNA, 22 nt, Human
aucauagguauaaguaaauuag

SEQ ID NO: 752288 - RNA, 22 nt, Human
uggagagaagaggcagugugcu

SEQ ID NO: 752289 - RNA, 22 nt, Human
gaacuugagcaacacugaguga

SEQ ID NO: 752290 - RNA, 22 nt, Human
gagaaaccuguaaggaaggaag

SEQ ID NO: 752291 - RNA, 22 nt, Human
ucaucacauguguagucauccc

SEQ ID NO: 752292 - RNA, 22 nt, Human
ggaaagaaucaagugauccugu

SEQ ID NO: 752293 - RNA, 22 nt, Human
uagcaacaagugacuaucuaua

SEQ ID NO: 752294 - RNA, 22 nt, Human
ggaagaguaacaggagguggaa

SEQ ID NO: 752295 - RNA, 22 nt, Human
uggagcauauucuggagcuugg

SEQ ID NO: 752296 - RNA, 22 nt, Human
uucaaggaaaccagcauuuggu

SEQ ID NO: 752297 - RNA, 22 nt, Human
gggaagcagcauugugcuggcu

SEQ ID NO: 752298 - RNA, 22 nt, Human
ucugagcucuaucugugggaau

SEQ ID NO: 752299 - RNA, 22 nt, Human
gaaucagacugaccugaguuca

SEQ ID NO: 752300 - RNA, 22 nt, Human
cugacuguaauucuguucuuaa

SEQ ID NO: 752301 - RNA, 22 nt, Human
uacagagggauuaucuaagggu

SEQ ID NO: 752302 - RNA, 22 nt, Human
ucuuggagacucuuguauauuu

SEQ ID NO: 752303 - RNA, 22 nt, Human
cuggagggugagccucaucucu

SEQ ID NO: 752304 - RNA, 22 nt, Human
acaucugauuacaugagaauau

SEQ ID NO: 752305 - RNA, 22 nt, Human
ugcaugcaacaauucuucuaua

SEQ ID NO: 752306 - RNA, 22 nt, Human
augaggcagguggaggcugcca

SEQ ID NO: 752307 - RNA, 22 nt, Human
ggcaagguacucuagagcacau

SEQ ID NO: 752308 - RNA, 22 nt, Human
gguccucuccagcgccacagug

SEQ ID NO: 752309 - RNA, 22 nt, Human
agcacaguggcuucuaugucua

SEQ ID NO: 752310 - RNA, 22 nt, Human
agagcugggaccgucuggaagu

SEQ ID NO: 752311 - RNA, 22 nt, Human
uccagagcucugggcauagcug

SEQ ID NO: 752312 - RNA, 23 nt, Human
agucugugcuuggugggagggcc

SEQ ID NO: 752313 - RNA, 22 nt, Human
ugggaagcauuaaugauagggg

SEQ ID NO: 752314 - RNA, 22 nt, Human
ccaggcaccauguucuuaggac

SEQ ID NO: 752315 - RNA, 19 nt, Human
cuugguuaugguaugaugc

SEQ ID NO: 752316 - RNA, 22 nt, Human
aaaggugacugcagcagcuauu

SEQ ID NO: 752317 - RNA, 22 nt, Human
caaagcaguauuggauucuuua

SEQ ID NO: 752318 - RNA, 22 nt, Human
agcauugccugccuauugcuaa

SEQ ID NO: 752319 - RNA, 22 nt, Human
aguuucauauuaccaugucacc

SEQ ID NO: 752320 - RNA, 22 nt, Human
cccagcagaccgcugugauggc

SEQ ID NO: 752321 - RNA, 22 nt, Human
acuguucugccaagaucaacgu

SEQ ID NO: 752322 - RNA, 22 nt, Human
uguaccaagacaaaucagaaac

SEQ ID NO: 752323 - RNA, 22 nt, Human
ugcauuuccagauuucuggagu

SEQ ID NO: 752324 - RNA, 22 nt, Human
ugaguuuaauuggagccugaau

SEQ ID NO: 752325 - RNA, 22 nt, Human
aacaaauggggccuuguaugaa

SEQ ID NO: 752326 - RNA, 22 nt, Human
guccuucagcaccucccucggc

SEQ ID NO: 752327 - RNA, 22 nt, Human
cugaguggaacauaggaugaua

SEQ ID NO: 752328 - RNA, 22 nt, Human
agacacuuggcagagagcuguu

SEQ ID NO: 752329 - RNA, 22 nt, Human
aggaauuuuucuagccggaguu

SEQ ID NO: 752330 - RNA, 22 nt, Human
agcagcauauugugucuucaua

SEQ ID NO: 752331 - RNA, 22 nt, Human
uuacagcuagccaauuauuuag

SEQ ID NO: 752332 - RNA, 22 nt, Human
cugccuccugccgugcagcuuc

SEQ ID NO: 752333 - RNA, 22 nt, Human
uugcugggugcuauuaugaaca

SEQ ID NO: 752334 - RNA, 22 nt, Human
ugaucuuugguaaucuggcaca

SEQ ID NO: 752335 - RNA, 17 nt, Human
gacuuuggaguuucaua

SEQ ID NO: 752336 - RNA, 22 nt, Human
cucccguggauguucuucaguc

SEQ ID NO: 752337 - RNA, 22 nt, Human
ucuccuuucuuuuaaaauguca

SEQ ID NO: 752338 - RNA, 22 nt, Human
ucagaggaacuggacuaaagcc

SEQ ID NO: 752339 - RNA, 22 nt, Human
ccagagcccgggaccuggacuu

SEQ ID NO: 752340 - RNA, 22 nt, Human
gaaaugugaccuacuuccuugu

SEQ ID NO: 752341 - RNA, 22 nt, Human
cuaacuuugucaucuucccuuu

SEQ ID NO: 752342 - RNA, 22 nt, Human
ccuccugcacuugcuuuccuuc

SEQ ID NO: 752343 - RNA, 22 nt, Human
caccucaggcagcaaagucuca

SEQ ID NO: 752344 - RNA, 22 nt, Human
gaauguuugacuaaagguagcu

SEQ ID NO: 752345 - RNA, 22 nt, Human
ucuucagucaauccagauguuu

SEQ ID NO: 752346 - RNA, 22 nt, Human
gcaggugguuaaggucccaugu

SEQ ID NO: 752347 - RNA, 22 nt, Human
agaggccaagccagacugugca

SEQ ID NO: 752348 - RNA, 22 nt, Human
aaagauuaagguauuguuagcu

SEQ ID NO: 752349 - RNA, 23 nt, Human
gacacaggagcacccagcugagc

SEQ ID NO: 752350 - RNA, 22 nt, Human
auggccagcuagcacuugcauu

SEQ ID NO: 752351 - RNA, 22 nt, Human
agcuguguaggaucauaacacg

SEQ ID NO: 752352 - RNA, 22 nt, Human
cucaucugauaaaucacucuua

SEQ ID NO: 752353 - RNA, 20 nt, Human
aguuuaagaaaaagcuccag

SEQ ID NO: 752354 - RNA, 22 nt, Human
auguuaugacaagcaugacaga

SEQ ID NO: 752355 - RNA, 22 nt, Human
aacaugcauuugugggauggaa

SEQ ID NO: 752356 - RNA, 22 nt, Human
augcauauagaacauuugacau

SEQ ID NO: 752357 - RNA, 22 nt, Human
uggaagagguggaaguggcuuc

SEQ ID NO: 752358 - RNA, 22 nt, Human
ccugccacuguaggugacaguu

SEQ ID NO: 752359 - RNA, 21 nt, Human
auggacaauugagugucuguc

SEQ ID NO: 752360 - RNA, 18 nt, Human
ugaggcucagagacggug

SEQ ID NO: 752361 - RNA, 22 nt, Human
gcuggccaaaguguaccuggag

SEQ ID NO: 752362 - RNA, 22 nt, Human
gaacagaugccugauucauagg

SEQ ID NO: 752363 - RNA, 21 nt, Human
gcaggggauagaaauggucug

SEQ ID NO: 752364 - RNA, 19 nt, Human
cugucugugcagagaugug

SEQ ID NO: 752365 - RNA, 22 nt, Human
cuaucuuuuguucauuuugagu

SEQ ID NO: 752366 - RNA, 22 nt, Human
ccucugagagaaggccuucagc

SEQ ID NO: 752367 - RNA, 22 nt, Human
ugaaacauuugaugaucuuugg

SEQ ID NO: 752368 - RNA, 22 nt, Human
auacagguaauuugaauaauag

SEQ ID NO: 752369 - RNA, 22 nt, Human
uugaacagcuguuacauuguua

SEQ ID NO: 752370 - RNA, 19 nt, Human
acacagggcuagaguuaca

SEQ ID NO: 752371 - RNA, 22 nt, Human
ugagcugugugacauugagcca

SEQ ID NO: 752372 - RNA, 22 nt, Human
ucccucuaaacuguaagauucu

SEQ ID NO: 752373 - RNA, 22 nt, Human
cuggcaucuagugcguugaggu

SEQ ID NO: 752374 - RNA, 22 nt, Human
gccugcucuccggaucccugau

SEQ ID NO: 752375 - RNA, 22 nt, Human
cccugauggcacaguggcaggc

SEQ ID NO: 752376 - RNA, 22 nt, Human
gaggagggagaauuaggcuuaa

SEQ ID NO: 752377 - RNA, 22 nt, Human
uggcagugggaauggacaaaca

SEQ ID NO: 752378 - RNA, 22 nt, Human
caggauauuaguuuucuuguua

SEQ ID NO: 752379 - RNA, 22 nt, Human
uaauaauagcaguagcugccac

SEQ ID NO: 752380 - RNA, 22 nt, Human
uggggaaggaucaccacaaucu

SEQ ID NO: 752381 - RNA, 20 nt, Human
agucccagaucaaauuucug

SEQ ID NO: 752382 - RNA, 22 nt, Human
cccagaggaggcaaagcucugu

SEQ ID NO: 752383 - RNA, 22 nt, Human
aucuacuccugaauauaucuag

SEQ ID NO: 752384 - RNA, 22 nt, Human
auuuagaagcuaauuuuucaga

SEQ ID NO: 752385 - RNA, 22 nt, Human
gagaagguggaccugaaggagc

SEQ ID NO: 752386 - RNA, 22 nt, Human
aguuacaaacacuaucaguucu

SEQ ID NO: 752387 - RNA, 22 nt, Human
ccugauggagcccugcugcaug

SEQ ID NO: 752388 - RNA, 22 nt, Human
ucccagcgcggggggaggaucc

SEQ ID NO: 752389 - RNA, 20 nt, Human
uggagcuccagcguccaugu

SEQ ID NO: 752390 - RNA, 22 nt, Human
cgaggugggcagaucacagagu

SEQ ID NO: 752391 - RNA, 22 nt, Human
aggacaguggcaaggcaggaca

SEQ ID NO: 752392 - RNA, 22 nt, Human
caccugcccagcaccugggauc

SEQ ID NO: 752393 - RNA, 22 nt, Human
ccaguuuauaagaaagaaaacc

SEQ ID NO: 752394 - RNA, 22 nt, Human
ggcccagcaucuugugaaguuu

SEQ ID NO: 752395 - RNA, 22 nt, Human
agggauggaagcucgucugcaa

SEQ ID NO: 752396 - RNA, 22 nt, Human
ggcuuggcccaggccucacucc

SEQ ID NO: 752397 - RNA, 17 nt, Human
ucauuugggccucacaa

SEQ ID NO: 752398 - RNA, 22 nt, Human
uggcacaggaauuuagaugcag

SEQ ID NO: 752399 - RNA, 22 nt, Human
uacaagagguauauagaaacag

SEQ ID NO: 752400 - RNA, 22 nt, Human
gagcugaaggagaaagcagggg

SEQ ID NO: 752401 - RNA, 22 nt, Human
cugucccaggauccugacucca

SEQ ID NO: 752402 - RNA, 22 nt, Human
gaagggggagcucuuccuaauu

SEQ ID NO: 752403 - RNA, 22 nt, Human
caguaaugggcaagacaauaug

SEQ ID NO: 752404 - RNA, 20 nt, Human
aaaggaauauaugaaguaua

SEQ ID NO: 752405 - RNA, 22 nt, Human
gggagccagcagggcauggagc

SEQ ID NO: 752406 - RNA, 22 nt, Human
cuguguuucugagaagugggga

SEQ ID NO: 752407 - RNA, 22 nt, Human
gcagggcugauggcuucccuca

SEQ ID NO: 752408 - RNA, 22 nt, Human
ugucuucagcaaaugccuuucu

SEQ ID NO: 752409 - RNA, 22 nt, Human
aacccagggugaggggagucua

SEQ ID NO: 752410 - RNA, 22 nt, Human
aaucacaguggguacuagauug

SEQ ID NO: 752411 - RNA, 22 nt, Human
agcagcuccugccaugagugcu

SEQ ID NO: 752412 - RNA, 22 nt, Human
aaagccagguugugugcaggaa

SEQ ID NO: 752413 - RNA, 21 nt, Human
gauauuuaugacucauuccuu

SEQ ID NO: 752414 - RNA, 22 nt, Human
gcguuauuuccugucugauuuc

SEQ ID NO: 752415 - RNA, 22 nt, Human
uacuggagucagaaaugccuug

SEQ ID NO: 752416 - RNA, 22 nt, Human
guuagugcuuauuaaauaguau

SEQ ID NO: 752417 - RNA, 20 nt, Human
aucccucuuccuagaguccc

SEQ ID NO: 752418 - RNA, 22 nt, Human
uggcucuguugagguauggauu

SEQ ID NO: 752419 - RNA, 22 nt, Human
caucagcugagggugagcagaa

SEQ ID NO: 752420 - RNA, 23 nt, Human
uggggagaguuacccuggaagcg

SEQ ID NO: 752421 - RNA, 21 nt, Human
uccagcugugauuaugaaugu

SEQ ID NO: 752422 - RNA, 22 nt, Human
agcaauauuuaaagguuugcaa

SEQ ID NO: 752423 - RNA, 22 nt, Human
ucaugcucaucauuagagugac

SEQ ID NO: 752424 - RNA, 22 nt, Human
aggccagcucacccuggcuccu

SEQ ID NO: 752425 - RNA, 22 nt, Human
cugaggagagguggccuguguu

SEQ ID NO: 752426 - RNA, 22 nt, Human
gggaaccagccgcuuccgccuc

SEQ ID NO: 752427 - RNA, 22 nt, Human
aaaggccaagcaugagguggac

SEQ ID NO: 752428 - RNA, 22 nt, Human
gggucugaccugggcacaccau

SEQ ID NO: 752429 - RNA, 22 nt, Human
gaggccaggacaugaaagcuga

SEQ ID NO: 752430 - RNA, 22 nt, Human
ccaguggccaugcacgagcagc

SEQ ID NO: 752431 - RNA, 22 nt, Human
uccagagauaacuauuuaggag

SEQ ID NO: 752432 - RNA, 22 nt, Human
augcuucaugauuuggccaugu

SEQ ID NO: 752433 - RNA, 22 nt, Human
aaaguuacuaucacaaugaaau

SEQ ID NO: 752434 - RNA, 22 nt, Human
uagugcuuauuacugugcuguc

SEQ ID NO: 752435 - RNA, 22 nt, Human
ucaagucccagcucuucacuua

SEQ ID NO: 752436 - RNA, 22 nt, Human
ggucacugagcuguaauucugu

SEQ ID NO: 752437 - RNA, 22 nt, Human
cuggccucuguguucaccauag

SEQ ID NO: 752438 - RNA, 22 nt, Human
ucacagcauuuuuagaaagauu

SEQ ID NO: 752439 - RNA, 22 nt, Human
uuacagcauuuaaugagaucug

SEQ ID NO: 752440 - RNA, 22 nt, Human
agccugugugcuuuggacaggg

SEQ ID NO: 752441 - RNA, 22 nt, Human
cuucaucuuucugagccucagu

SEQ ID NO: 752442 - RNA, 22 nt, Human
aguggagacaggacagucgaua

SEQ ID NO: 752443 - RNA, 22 nt, Human
gccuuggcuguuggagcuugau

SEQ ID NO: 752444 - RNA, 22 nt, Human
uugcucaggcuggugugcagug

SEQ ID NO: 752445 - RNA, 22 nt, Human
uuuagcaaauauuucuguugau

SEQ ID NO: 752446 - RNA, 22 nt, Human
uccaggcaugguguaauuuugc

SEQ ID NO: 752447 - RNA, 22 nt, Human
agcucccagggcugggcaaguu

SEQ ID NO: 752448 - RNA, 22 nt, Human
gcuuuuggccagauggggaaac

SEQ ID NO: 752449 - RNA, 22 nt, Human
ugggcagagucguggggaauag

SEQ ID NO: 752450 - RNA, 22 nt, Human
uccauacucagaaaguauugca

SEQ ID NO: 752451 - RNA, 22 nt, Human
gcaauagagcagcuaauggaaa

SEQ ID NO: 752452 - RNA, 22 nt, Human
uaacacuugaagccauuuuugc

SEQ ID NO: 752453 - RNA, 22 nt, Human
ccaucagugaaggagacagauu

SEQ ID NO: 752454 - RNA, 22 nt, Human
ggaggugguggcagugacaauu

SEQ ID NO: 752455 - RNA, 22 nt, Human
ccuggcugaaccaaugaagugg

SEQ ID NO: 752456 - RNA, 22 nt, Human
gcacuuaugcucaccuuguucu

SEQ ID NO: 752457 - RNA, 22 nt, Human
ccugucugcggaggaguggaag

SEQ ID NO: 752458 - RNA, 22 nt, Human
cuccagcuucugcccagagacu

SEQ ID NO: 752459 - RNA, 22 nt, Human
agaaggcccuguguggucugag

SEQ ID NO: 752460 - RNA, 23 nt, Human
agcugaaagcuugcaacgaggca

SEQ ID NO: 752461 - RNA, 22 nt, Human
uuaaugaauaugacaggagagg

SEQ ID NO: 752462 - RNA, 22 nt, Human
cuggaacaguguuggagcuuga

SEQ ID NO: 752463 - RNA, 22 nt, Human
ucauuauuugcuuuaguuaugu

SEQ ID NO: 752464 - RNA, 22 nt, Human
ccuguauuagguagacaacuau

SEQ ID NO: 752465 - RNA, 22 nt, Human
ggcuucagaggagaagagggug

SEQ ID NO: 752466 - RNA, 22 nt, Human
aucagcaagcauuuauugagug

SEQ ID NO: 752467 - RNA, 22 nt, Human
uggcugucagcugccuggugcg

SEQ ID NO: 752468 - RNA, 22 nt, Human
uguaggauuuucaccagaccuu

SEQ ID NO: 752469 - RNA, 22 nt, Human
ucauuucagccauuuuuaaaug

SEQ ID NO: 752470 - RNA, 22 nt, Human
aaugucuuucuguucuaugaga

SEQ ID NO: 752471 - RNA, 18 nt, Human
gauucugauucuggaggc

SEQ ID NO: 752472 - RNA, 22 nt, Human
gucaauauauucugucucuuug

SEQ ID NO: 752473 - RNA, 22 nt, Human
augaaaugagucaaugcgacua

SEQ ID NO: 752474 - RNA, 22 nt, Human
agaguuucuugugagcacugac

SEQ ID NO: 752475 - RNA, 19 nt, Human
agagaggcugugugaggga

SEQ ID NO: 752476 - RNA, 22 nt, Human
ucccuggcuguguucaggugcg

SEQ ID NO: 752477 - RNA, 22 nt, Human
aaacucuagcuacuaggauaac

SEQ ID NO: 752478 - RNA, 22 nt, Human
caggucugcagacagggccaug

SEQ ID NO: 752479 - RNA, 22 nt, Human
augauggugggagaugacccag

SEQ ID NO: 752480 - RNA, 22 nt, Human
gccuggcucccucugcagcucc

SEQ ID NO: 752481 - RNA, 22 nt, Human
gugcuuccucaguguuuaagga

SEQ ID NO: 752482 - RNA, 19 nt, Human
agcuagugcucagcuguca

SEQ ID NO: 752483 - RNA, 22 nt, Human
aucuggcucauucagggaacgg

SEQ ID NO: 752484 - RNA, 22 nt, Human
acggggcuagagaagguuucuu

SEQ ID NO: 752485 - RNA, 23 nt, Human
ucauggaaugaauucuucuguua

SEQ ID NO: 752486 - RNA, 22 nt, Human
uuggauccaucucaggcauagg

SEQ ID NO: 752487 - RNA, 22 nt, Human
uggcuccacuacuggguguguu

SEQ ID NO: 752488 - RNA, 22 nt, Human
cagagagcacauaggauacuuu

SEQ ID NO: 752489 - RNA, 17 nt, Human
agaaagaggauccacag

SEQ ID NO: 752490 - RNA, 23 nt, Human
uuacaacuauuugccauguuguu

SEQ ID NO: 752491 - RNA, 22 nt, Human
agcccuucaaccugccuacucc

SEQ ID NO: 752492 - RNA, 22 nt, Human
gccaggagaaugcuagcagagg

SEQ ID NO: 752493 - RNA, 22 nt, Human
aauguacaaaagucagccaacu

SEQ ID NO: 752494 - RNA, 22 nt, Human
gccagccagagaggcaugguua

SEQ ID NO: 752495 - RNA, 22 nt, Human
gagccacagugguggcccacgu

SEQ ID NO: 752496 - RNA, 22 nt, Human
gcugcucucucccuaaguuggg

SEQ ID NO: 752497 - RNA, 22 nt, Human
ccucagagcagcacccagauga

SEQ ID NO: 752498 - RNA, 22 nt, Human
cguuaguggaguuugaagcugu

SEQ ID NO: 752499 - RNA, 22 nt, Human
auucauucugaccucaagagaa

SEQ ID NO: 752500 - RNA, 22 nt, Human
uggcuggggagccccgacuccc

SEQ ID NO: 752501 - RNA, 22 nt, Human
cugcaucaguggauaugauggu

SEQ ID NO: 752502 - RNA, 22 nt, Human
auuacaguucuacacauccuuu

SEQ ID NO: 752503 - RNA, 22 nt, Human
aacaugugucuggcuagauugu

SEQ ID NO: 752504 - RNA, 22 nt, Human
uccucccugggagcuucugagu

SEQ ID NO: 752505 - RNA, 22 nt, Human
cuauaucuacauuugcuguuug

SEQ ID NO: 752506 - RNA, 22 nt, Human
cccugcagccggccagcucauu

SEQ ID NO: 752507 - RNA, 21 nt, Human
caaggacagguugcagggcaa

SEQ ID NO: 752508 - RNA, 22 nt, Human
auuaaagaaacccagcauguga

SEQ ID NO: 752509 - RNA, 22 nt, Human
ccuggagauuauuugguccaau

SEQ ID NO: 752510 - RNA, 22 nt, Human
ccagcugagaaguguaaaguga

SEQ ID NO: 752511 - RNA, 22 nt, Human
ggcacagcccucucuguggaca

SEQ ID NO: 752512 - RNA, 18 nt, Human
gagaggagccagaauuuu

SEQ ID NO: 752513 - RNA, 22 nt, Human
uuagauaccuuuguguuguaga

SEQ ID NO: 752514 - RNA, 22 nt, Human
uauuuagaugcauuuggauugc

SEQ ID NO: 752515 - RNA, 22 nt, Human
augcaggagaccaauuggaugg

SEQ ID NO: 752516 - RNA, 22 nt, Human
gcuggcugcgucaucacagggc

SEQ ID NO: 752517 - RNA, 22 nt, Human
uuucagacuguacuuugggguu

SEQ ID NO: 752518 - RNA, 19 nt, Human
ucccaggcaaaggcuucuc

SEQ ID NO: 752519 - RNA, 22 nt, Human
uuaaagucccugccuuaauucc

SEQ ID NO: 752520 - RNA, 22 nt, Human
auuuuaauaagauucccaagua

SEQ ID NO: 752521 - RNA, 22 nt, Human
uacuaggaagcagcugcauugg

SEQ ID NO: 752522 - RNA, 22 nt, Human
aaggcacugaacuuaaauucug

SEQ ID NO: 752523 - RNA, 22 nt, Human
gugggcaguggggucuucugcc

SEQ ID NO: 752524 - RNA, 22 nt, Human
ucagaaagcuuagugucuugca

SEQ ID NO: 752525 - RNA, 22 nt, Human
ugguuccaagauggcugccaca

SEQ ID NO: 752526 - RNA, 22 nt, Human
ucacagaaugucuagcauaauu

SEQ ID NO: 752527 - RNA, 22 nt, Human
aaucaugaaauaucaguucuuu

SEQ ID NO: 752528 - RNA, 22 nt, Human
ugauuacaauugucuuagauuu

SEQ ID NO: 752529 - RNA, 21 nt, Human
aggcccuggaggucagagaaa

SEQ ID NO: 752530 - RNA, 22 nt, Human
guacaacaggauugauguacca

SEQ ID NO: 752531 - RNA, 22 nt, Human
ucugaagugaucaucauuucuc

SEQ ID NO: 752532 - RNA, 22 nt, Human
caggcagcugacugucagauau

SEQ ID NO: 752533 - RNA, 18 nt, Human
uaacauguuuucauuaag

SEQ ID NO: 752534 - RNA, 22 nt, Human
gagagcuaacuaccuggaaaug

SEQ ID NO: 752535 - RNA, 22 nt, Human
cugcucuagagagcauuaguca

SEQ ID NO: 752536 - RNA, 22 nt, Human
gugcaaaagcaguuggauuuuu

SEQ ID NO: 752537 - RNA, 22 nt, Human
agugagggaugaagaacugcgg

SEQ ID NO: 752538 - RNA, 20 nt, Human
agcaccagugggggcagccc

SEQ ID NO: 752539 - RNA, 22 nt, Human
ucccaggaugugcgugccgccg

SEQ ID NO: 752540 - RNA, 22 nt, Human
agcccagugggccgaggcgggg

SEQ ID NO: 752541 - RNA, 22 nt, Human
gaagaucaagugucauucugug

SEQ ID NO: 752542 - RNA, 22 nt, Human
cugcagcagugugucucauuuu

SEQ ID NO: 752543 - RNA, 22 nt, Human
ggaagaaagguggacaacaggu

SEQ ID NO: 752544 - RNA, 22 nt, Human
gaggcuaagcacuggcauuucu

SEQ ID NO: 752545 - RNA, 22 nt, Human
gagccagguuggaggcugcagu

SEQ ID NO: 752546 - RNA, 22 nt, Human
uagggcaguuauaacauuagug

SEQ ID NO: 752547 - RNA, 22 nt, Human
ucucuguggugggaggcugagu

SEQ ID NO: 752548 - RNA, 22 nt, Human
auaauaucgcuccuuuuuuuga

SEQ ID NO: 752549 - RNA, 22 nt, Human
agccuggagguaaugaggaaac

SEQ ID NO: 752550 - RNA, 22 nt, Human
gaaugauauuauuucgugcugg

SEQ ID NO: 752551 - RNA, 22 nt, Human
ugaagcaggguggccagauugu

SEQ ID NO: 752552 - RNA, 22 nt, Human
gggccuguguguucaggagccu

SEQ ID NO: 752553 - RNA, 22 nt, Human
cagaguuuuaucauacguggau

SEQ ID NO: 752554 - RNA, 22 nt, Human
gaaaugucaagauauguuugga

SEQ ID NO: 752555 - RNA, 22 nt, Human
gaagagcuggaauccagucugg

SEQ ID NO: 752556 - RNA, 22 nt, Human
cagcaggccaugcugcuuuuca

SEQ ID NO: 752557 - RNA, 22 nt, Human
uaugugaauacagcaguggaug

SEQ ID NO: 752558 - RNA, 22 nt, Human
ucucuguagagacagcacugug

SEQ ID NO: 752559 - RNA, 22 nt, Human
auuuccauacacccauuucuga

SEQ ID NO: 752560 - RNA, 22 nt, Human
acugugugaggcugggugaguc

SEQ ID NO: 752561 - RNA, 22 nt, Human
ugagagccuguguucaaaugcc

SEQ ID NO: 752562 - RNA, 22 nt, Human
cccacccagcugagccgcucac

SEQ ID NO: 752563 - RNA, 22 nt, Human
ccugccugcagaaaguaucucc

SEQ ID NO: 752564 - RNA, 22 nt, Human
ggcauuaacucuguuucaauuu

SEQ ID NO: 752565 - RNA, 22 nt, Human
gcaguacuuuaucacauggaau

SEQ ID NO: 752566 - RNA, 22 nt, Human
acuguggcucaucaggcuggug

SEQ ID NO: 752567 - RNA, 23 nt, Human
aaacuacaacgccaggcacugag

SEQ ID NO: 752568 - RNA, 22 nt, Human
gcaacagcauucucauugacau

SEQ ID NO: 752569 - RNA, 22 nt, Human
uuggaaggguuucaguuagucu

SEQ ID NO: 752570 - RNA, 23 nt, Human
cacuccuguuucuaagccagcau

SEQ ID NO: 752571 - RNA, 22 nt, Human
agaaaugcucaggucaacuuaa

SEQ ID NO: 752572 - RNA, 22 nt, Human
gcucccagcuggagccucaaca

SEQ ID NO: 752573 - RNA, 22 nt, Human
ugugugucacugaaagaaaucu

SEQ ID NO: 752574 - RNA, 22 nt, Human
uguagcaguuuuucauuaucca

SEQ ID NO: 752575 - RNA, 22 nt, Human
cuggcagguccagcuggacuca

SEQ ID NO: 752576 - RNA, 20 nt, Human
acuuucucgguuucucaccu

SEQ ID NO: 752577 - RNA, 22 nt, Human
accagcugaguaggggagggcc

SEQ ID NO: 752578 - RNA, 22 nt, Human
agauaacauguugcagauucug

SEQ ID NO: 752579 - RNA, 22 nt, Human
uuagaggacaagaggccuggcu

SEQ ID NO: 752580 - RNA, 22 nt, Human
ugaguuacugccuaguaacuug

SEQ ID NO: 752581 - RNA, 19 nt, Human
uuccugugcugcugugucc

SEQ ID NO: 752582 - RNA, 22 nt, Human
gaggccuggguuggaggugcau

SEQ ID NO: 752583 - RNA, 22 nt, Human
cuguauaacaucuuuuguuucc

SEQ ID NO: 752584 - RNA, 22 nt, Human
ucugcugcuacagacucucuag

SEQ ID NO: 752585 - RNA, 21 nt, Human
aggcaugagcccugcauggac

SEQ ID NO: 752586 - RNA, 23 nt, Human
uugaaggagaaagcuuucuuggu

SEQ ID NO: 752587 - RNA, 22 nt, Human
caucaaaauuagacauuguuga

SEQ ID NO: 752588 - RNA, 22 nt, Human
guggugaguucaggcuggggug

SEQ ID NO: 752589 - RNA, 22 nt, Human
ccagcaggacuuuggaaauaug

SEQ ID NO: 752590 - RNA, 22 nt, Human
agcuucugcccguguuugcucu

SEQ ID NO: 752591 - RNA, 22 nt, Human
gugugugcaagagguuuauuga

SEQ ID NO: 752592 - RNA, 22 nt, Human
augaauuguccgauguugugca

SEQ ID NO: 752593 - RNA, 22 nt, Human
gaucaauacuauuaagaucaua

SEQ ID NO: 752594 - RNA, 22 nt, Human
uguaacagagcuuuuuuauagc

SEQ ID NO: 752595 - RNA, 22 nt, Human
uuuccacuccuauugcaucuca

SEQ ID NO: 752596 - RNA, 22 nt, Human
gauccuugcacuugacuuggca

SEQ ID NO: 752597 - RNA, 22 nt, Human
cuguucacagaauccuccccug

SEQ ID NO: 752598 - RNA, 22 nt, Human
ugugaaagagucuuauaguuuc

SEQ ID NO: 752599 - RNA, 22 nt, Human
gucauuuaucuucagaauuucu

SEQ ID NO: 752600 - RNA, 22 nt, Human
uggcaagaauauuggaccagaa

SEQ ID NO: 752601 - RNA, 22 nt, Human
auagcauggccugugacacuuu

SEQ ID NO: 752602 - RNA, 22 nt, Human
cacugucccuguuuccuggaaa

SEQ ID NO: 752603 - RNA, 22 nt, Human
gcucaggcauguaugugguugc

SEQ ID NO: 752604 - RNA, 22 nt, Human
gcccccagaagggccacagauu

SEQ ID NO: 752605 - RNA, 22 nt, Human
agcuagaauauugaucugaaau

SEQ ID NO: 752606 - RNA, 22 nt, Human
auguuauuuauuauccucgguu

SEQ ID NO: 752607 - RNA, 22 nt, Human
uuauuugaaaagaagguuacgu

SEQ ID NO: 752608 - RNA, 22 nt, Human
uggagcugaggggaaugcugag

SEQ ID NO: 752609 - RNA, 22 nt, Human
gcaugcauuuucugagagucag

SEQ ID NO: 752610 - RNA, 20 nt, Human
gcuuucuaugagauggacug

SEQ ID NO: 752611 - RNA, 22 nt, Human
uuucagacugcccauguuugcc

SEQ ID NO: 752612 - RNA, 22 nt, Human
gcucagugaauuuuugcccaug

SEQ ID NO: 752613 - RNA, 22 nt, Human
ggaaagcuuuguuuuccucacc

SEQ ID NO: 752614 - RNA, 22 nt, Human
ugaaagaagccucccuuuggag

SEQ ID NO: 752615 - RNA, 22 nt, Human
aacuaaaucuggcauuuagagc

SEQ ID NO: 752616 - RNA, 22 nt, Human
acaaaaguaguugcgguuuuug

SEQ ID NO: 752617 - RNA, 22 nt, Human
agugcugacucugggcacagug

SEQ ID NO: 752618 - RNA, 22 nt, Human
agugagggacuagugcugggga

SEQ ID NO: 752619 - RNA, 22 nt, Human
gugacagaguuuuagaucucau

SEQ ID NO: 752620 - RNA, 22 nt, Human
ugccugugucacagugauguuu

SEQ ID NO: 752621 - RNA, 22 nt, Human
aaauucagauggcuuucuuuuc

SEQ ID NO: 752622 - RNA, 22 nt, Human
gcccacucuggagccuguuccc

SEQ ID NO: 752623 - RNA, 22 nt, Human
uggccaggggaguuccccucca

SEQ ID NO: 752624 - RNA, 22 nt, Human
ucucaaauucccuuuuccuccu

SEQ ID NO: 752625 - RNA, 22 nt, Human
uccagcacucgcccagggcuug

SEQ ID NO: 752626 - RNA, 22 nt, Human
aaaccuuugccuggaagggagu

SEQ ID NO: 752627 - RNA, 22 nt, Human
ugcauccuccuuuguccucuug

SEQ ID NO: 752628 - RNA, 22 nt, Human
acugggcuucacuuggcacauc

SEQ ID NO: 752629 - RNA, 22 nt, Human
ccuggacuaaaaucuuuucuua

SEQ ID NO: 752630 - RNA, 19 nt, Human
ugcauugagggcugucuca

SEQ ID NO: 752631 - RNA, 22 nt, Human
aaugaacuguguuaacugaaua

SEQ ID NO: 752632 - RNA, 22 nt, Human
uagggcuucaggugugaggcag

SEQ ID NO: 752633 - RNA, 22 nt, Human
uuucacauguauauaggcauua

SEQ ID NO: 752634 - RNA, 22 nt, Human
aggaauuccugggaaggcacag

SEQ ID NO: 752635 - RNA, 22 nt, Human
ccugaggucuagagucagggug

SEQ ID NO: 752636 - RNA, 22 nt, Human
uaugugaagagauuaaaaaaua

SEQ ID NO: 752637 - RNA, 22 nt, Human
cauucaaacauuaauuuauuca

SEQ ID NO: 752638 - RNA, 22 nt, Human
uggguccacaaacaucagauau

SEQ ID NO: 752639 - RNA, 22 nt, Human
acugcuuuucagagucugccug

SEQ ID NO: 752640 - RNA, 22 nt, Human
ugugggcucuaauggcagcaga

SEQ ID NO: 752641 - RNA, 22 nt, Human
uacacaaugacuuaagauguca

SEQ ID NO: 752642 - RNA, 19 nt, Human
acaagggcaggcaagguga

SEQ ID NO: 752643 - RNA, 23 nt, Human
aauagcugguaaugauagcacaa

SEQ ID NO: 752644 - RNA, 22 nt, Human
gaugccucuuuuggcugaauua

SEQ ID NO: 752645 - RNA, 22 nt, Human
uccagccaugacucggacagug

SEQ ID NO: 752646 - RNA, 22 nt, Human
gcuguucuuugcaucucuggug

SEQ ID NO: 752647 - RNA, 21 nt, Human
gccugggauaguggccuccgg

SEQ ID NO: 752648 - RNA, 22 nt, Human
auaaauuaugaauggcccuuuu

SEQ ID NO: 752649 - RNA, 22 nt, Human
auucuacaccucucucauuuag

SEQ ID NO: 752650 - RNA, 22 nt, Human
aaacugugagcuaguaaauagg

SEQ ID NO: 752651 - RNA, 22 nt, Human
cagcucugcugggaggaugcag

SEQ ID NO: 752652 - RNA, 19 nt, Human
ccugcagggaugagagguu

SEQ ID NO: 752653 - RNA, 22 nt, Human
cugugucuaaucaggucaguca

SEQ ID NO: 752654 - RNA, 22 nt, Human
aucuucucauguguaaugaggu

SEQ ID NO: 752655 - RNA, 19 nt, Human
agucauauuguucaucuug

SEQ ID NO: 752656 - RNA, 22 nt, Human
aaaacccuucugcagacucuga

SEQ ID NO: 752657 - RNA, 22 nt, Human
aaccugaagaaaauauuugcug

SEQ ID NO: 752658 - RNA, 22 nt, Human
uaagagauucuaaagcuacugg

SEQ ID NO: 752659 - RNA, 22 nt, Human
aggcagugagaaauagcaagau

SEQ ID NO: 752660 - RNA, 22 nt, Human
agcugggugcccgaagccacgu

SEQ ID NO: 752661 - RNA, 22 nt, Human
uuuagggaagaagcccauggcc

SEQ ID NO: 752662 - RNA, 22 nt, Human
uucucucauucaaauuaaagug

SEQ ID NO: 752663 - RNA, 20 nt, Human
guacacauauauguaugugu

SEQ ID NO: 752664 - RNA, 22 nt, Human
gcagcauccuuggccuccaccc

SEQ ID NO: 752665 - RNA, 21 nt, Human
ugguuaaaguugugucauccc

SEQ ID NO: 752666 - RNA, 22 nt, Human
aaagcuaugaggcaugcauuuc

SEQ ID NO: 752667 - RNA, 22 nt, Human
aaggcugccucugccagaggag

SEQ ID NO: 752668 - RNA, 22 nt, Human
ggccuuggcuccugcagggagu

SEQ ID NO: 752669 - RNA, 22 nt, Human
ggugagaguuaugauuccaauu

SEQ ID NO: 752670 - RNA, 22 nt, Human
uuuaauuuucugggcccagcag

SEQ ID NO: 752671 - RNA, 22 nt, Human
ggcagcagggcugucucccuac

SEQ ID NO: 752672 - RNA, 21 nt, Human
cugcuuuacuucagaggaucu

SEQ ID NO: 752673 - RNA, 22 nt, Human
ggcccuuccugcucucuuagcu

SEQ ID NO: 752674 - RNA, 22 nt, Human
gugacagagauuaauagcuugg

SEQ ID NO: 752675 - RNA, 22 nt, Human
caugcuaaaccagaacauagga

SEQ ID NO: 752676 - RNA, 22 nt, Human
agcaaagaaauggaggcucaga

SEQ ID NO: 752677 - RNA, 22 nt, Human
ggugggguauuugguacuugua

SEQ ID NO: 752678 - RNA, 22 nt, Human
uuucaucuaacacuacauaggg

SEQ ID NO: 752679 - RNA, 22 nt, Human
aaaggcaugcauggucugcucc

SEQ ID NO: 752680 - RNA, 22 nt, Human
guacagaaggauuucuaguagu

SEQ ID NO: 752681 - RNA, 22 nt, Human
agcauauuguaugucuauaugu

SEQ ID NO: 752682 - RNA, 22 nt, Human
gccacuauuuucccaccuuucu

SEQ ID NO: 752683 - RNA, 22 nt, Human
auucuuaauugccaugcuguau

SEQ ID NO: 752684 - RNA, 22 nt, Human
ccugugccugccugugaguucu

SEQ ID NO: 752685 - RNA, 22 nt, Human
gagcucagcccaaagagcagug

SEQ ID NO: 752686 - RNA, 22 nt, Human
ccgcggggcgugggcucuuacc

SEQ ID NO: 752687 - RNA, 21 nt, Human
uauacagcaaagucuggagca

SEQ ID NO: 752688 - RNA, 22 nt, Human
uggaggcaucagagugcuuggc

SEQ ID NO: 752689 - RNA, 22 nt, Human
ugcagcugcucauucucucagu

SEQ ID NO: 752690 - RNA, 22 nt, Human
acaucuauuuuuuucuguccau

SEQ ID NO: 752691 - RNA, 22 nt, Human
ucaggaagauuaguuuccuacc

SEQ ID NO: 752692 - RNA, 22 nt, Human
auguuauuucaaaauucccuug

SEQ ID NO: 752693 - RNA, 23 nt, Human
cuucacagguucaggggauuaag

SEQ ID NO: 752694 - RNA, 22 nt, Human
agaauguguuuuaacaugggaa

SEQ ID NO: 752695 - RNA, 22 nt, Human
auauuaaaacuaugguuuucag

SEQ ID NO: 752696 - RNA, 22 nt, Human
auuauuuagaaaucgauugaaa

SEQ ID NO: 752697 - RNA, 22 nt, Human
cauccuucucaaagagugcaug

SEQ ID NO: 752698 - RNA, 22 nt, Human
acccagcuaacccuacccugga

SEQ ID NO: 752699 - RNA, 23 nt, Human
cacaucaguuuaggucagauuuu

SEQ ID NO: 752700 - RNA, 22 nt, Human
uuuguuuucuguaggccuuucc

SEQ ID NO: 752701 - RNA, 22 nt, Human
aagcacagugccaaguucuauu

SEQ ID NO: 752702 - RNA, 22 nt, Human
acagaacauauugcuucucuca

SEQ ID NO: 752703 - RNA, 22 nt, Human
gagcuaagaacugugccaggug

SEQ ID NO: 752704 - RNA, 22 nt, Human
uuuggaaugaaacagcagagcc

SEQ ID NO: 752705 - RNA, 22 nt, Human
uaaaccuugguagcaucuugcu

SEQ ID NO: 752706 - RNA, 22 nt, Human
ugucuuuacuuagaaguucagg

SEQ ID NO: 752707 - RNA, 22 nt, Human
auugaacagaaaccaucagagu

SEQ ID NO: 752708 - RNA, 22 nt, Human
agguaucugguaagaggcagac

SEQ ID NO: 752709 - RNA, 22 nt, Human
uuuuacaccucagaugagcaga

SEQ ID NO: 752710 - RNA, 22 nt, Human
gucaggaugagggaugaggagu

SEQ ID NO: 752711 - RNA, 22 nt, Human
gacagagaggcugagcaguaca

SEQ ID NO: 752712 - RNA, 22 nt, Human
caggcggccaugaucuggcagg

SEQ ID NO: 752713 - RNA, 22 nt, Human
gcuggccaguguggugaccacc

SEQ ID NO: 752714 - RNA, 20 nt, Human
ucuuccagcuucugguagaa

SEQ ID NO: 752715 - RNA, 22 nt, Human
agcugagcacauucaaacaggu

SEQ ID NO: 752716 - RNA, 22 nt, Human
gcaggggaguccacucuaugca

SEQ ID NO: 752717 - RNA, 22 nt, Human
uucauuuuauaaacccugcuga

SEQ ID NO: 752718 - RNA, 22 nt, Human
caucagcuaaacuuagugaaau

SEQ ID NO: 752719 - RNA, 22 nt, Human
caaauagacaagauggcaggaa

SEQ ID NO: 752720 - RNA, 22 nt, Human
uggagaugaggacauggacguc

SEQ ID NO: 752721 - RNA, 23 nt, Human
uggacaggacccccuucggaccc

SEQ ID NO: 752722 - RNA, 21 nt, Human
cuggaucugucaucgaguuuu

SEQ ID NO: 752723 - RNA, 20 nt, Human
cagaacaugagcaucgagcc

SEQ ID NO: 752724 - RNA, 22 nt, Human
augucagucuuucugucucaga

SEQ ID NO: 752725 - RNA, 22 nt, Human
uagauguuuuaacucuugguua

SEQ ID NO: 752726 - RNA, 22 nt, Human
aaagcagagguugcagugagcu

SEQ ID NO: 752727 - RNA, 22 nt, Human
uuccaaauuaaaauguacaaug

SEQ ID NO: 752728 - RNA, 22 nt, Human
ggcuucagaagacuggacaggu

SEQ ID NO: 752729 - RNA, 22 nt, Human
aaaucagagucugauuuuaagg

SEQ ID NO: 752730 - RNA, 22 nt, Human
uucaaguaacacaaaugcaccc

SEQ ID NO: 752731 - RNA, 22 nt, Human
ugaauucuuaaugaaaucuacu

SEQ ID NO: 752732 - RNA, 22 nt, Human
ugagggaauccucacaucaauc

SEQ ID NO: 752733 - RNA, 22 nt, Human
cacugugcuccuaacuagcugu

SEQ ID NO: 752734 - RNA, 22 nt, Human
gcaguggcuaagcucgcaugca

SEQ ID NO: 752735 - RNA, 22 nt, Human
aggcugaggagggauguugcuu

SEQ ID NO: 752736 - RNA, 22 nt, Human
uggaaucuguauguauguauaa

SEQ ID NO: 752737 - RNA, 22 nt, Human
gugaccaucaucucagcuaguu

SEQ ID NO: 752738 - RNA, 22 nt, Human
agaagugaggaaauccucuuua

SEQ ID NO: 752739 - RNA, 22 nt, Human
gccuccacuuuugcuggcuucu

SEQ ID NO: 752740 - RNA, 22 nt, Human
ugcccuugaaauacgcuugggg

SEQ ID NO: 752741 - RNA, 22 nt, Human
uuggggucccacaggcugccug

SEQ ID NO: 752742 - RNA, 22 nt, Human
gagaaacuuggaguuauucugg

SEQ ID NO: 752743 - RNA, 22 nt, Human
ugcuaaauaacuuacauagugg

SEQ ID NO: 752744 - RNA, 22 nt, Human
ugggaugauagguaaguaauua

SEQ ID NO: 752745 - RNA, 22 nt, Human
gugggcugaggggacaccaagg

SEQ ID NO: 752746 - RNA, 22 nt, Human
ggcgcccaucggugcagagggc

SEQ ID NO: 752747 - RNA, 20 nt, Human
uacaguucuguagaaguaga

SEQ ID NO: 752748 - RNA, 22 nt, Human
guguaugcaauugagucauaga

SEQ ID NO: 752749 - RNA, 22 nt, Human
uacuccaggacuccauuugaaa

SEQ ID NO: 752750 - RNA, 21 nt, Human
auugaaagucaacaaucaguu

SEQ ID NO: 752751 - RNA, 20 nt, Human
gacuuuacaucagcacucuu

SEQ ID NO: 752752 - RNA, 22 nt, Human
gaggacacggccuuuuggaaaa

SEQ ID NO: 752753 - RNA, 22 nt, Human
cgagauccuucagagcgcggac

SEQ ID NO: 752754 - RNA, 22 nt, Human
uucaaacacugcuuugagaggg

SEQ ID NO: 752755 - RNA, 22 nt, Human
cucagaguccccacaucugggu

SEQ ID NO: 752756 - RNA, 22 nt, Human
ugugagacaauugcaucagggc

SEQ ID NO: 752757 - RNA, 22 nt, Human
agcagccauuuaaaaugaauug

SEQ ID NO: 752758 - RNA, 22 nt, Human
cagccucucuguaucucaggau

SEQ ID NO: 752759 - RNA, 22 nt, Human
cuguggcagaggugacaccucu

SEQ ID NO: 752760 - RNA, 22 nt, Human
uggauuuauuagguuggugaaa

SEQ ID NO: 752761 - RNA, 22 nt, Human
guuucuaagggagagcugccag

SEQ ID NO: 752762 - RNA, 22 nt, Human
caggcagcagaggaguguggga

SEQ ID NO: 752763 - RNA, 19 nt, Human
cauaaauguacaagauaca

SEQ ID NO: 752764 - RNA, 16 nt, Human
cuggcccuggcucugg

SEQ ID NO: 752765 - RNA, 22 nt, Human
ggcucauguuucagaaagugga

SEQ ID NO: 752766 - RNA, 22 nt, Human
ugggccaguuauuucaccucug

SEQ ID NO: 752767 - RNA, 22 nt, Human
cuucccugguguuagcccaaug

SEQ ID NO: 752768 - RNA, 22 nt, Human
auuuagucucccuuaucaagga

SEQ ID NO: 752769 - RNA, 22 nt, Human
ucucaaauguaaagcaugauuu

SEQ ID NO: 752770 - RNA, 22 nt, Human
uuuagacauuugugguuugcaa

SEQ ID NO: 752771 - RNA, 22 nt, Human
aggugcaggagcugugcaggga

SEQ ID NO: 752772 - RNA, 22 nt, Human
uggcaaagcuagacauucccuc

SEQ ID NO: 752773 - RNA, 17 nt, Human
uguccauuugccuggag

SEQ ID NO: 752774 - RNA, 19 nt, Human
ccacagagcaugcugaggc

SEQ ID NO: 752775 - RNA, 22 nt, Human
agcugugggauuugggugugcc

SEQ ID NO: 752776 - RNA, 22 nt, Human
uguugauuaguguuuagacuua

SEQ ID NO: 752777 - RNA, 22 nt, Human
cacagaugaaguaaacaacucu

SEQ ID NO: 752778 - RNA, 22 nt, Human
agccuggauucgugcauccaca

SEQ ID NO: 752779 - RNA, 22 nt, Human
uacaucauguaagcagaaucau

SEQ ID NO: 752780 - RNA, 22 nt, Human
gaacuauaucuucaagaaaaug

SEQ ID NO: 752781 - RNA, 22 nt, Human
uugccuuuaaguauaacugcug

SEQ ID NO: 752782 - RNA, 22 nt, Human
uggaaauagcuccaguuucauu

SEQ ID NO: 752783 - RNA, 22 nt, Human
cagagaaacucagauagcugau

SEQ ID NO: 752784 - RNA, 21 nt, Human
cagaaguaaggguaacuucuc

SEQ ID NO: 752785 - RNA, 22 nt, Human
acaauaauguauugccaaaagu

SEQ ID NO: 752786 - RNA, 22 nt, Human
auucaguuguaaucuuuguuag

SEQ ID NO: 752787 - RNA, 22 nt, Human
acuucacagauauuuauuuggu

SEQ ID NO: 752788 - RNA, 22 nt, Human
uuuuacaggucauagguauagu

SEQ ID NO: 752789 - RNA, 22 nt, Human
cugagcugcaguccuggcucug

SEQ ID NO: 752790 - RNA, 22 nt, Human
gcagcuggagccagccagacac

SEQ ID NO: 752791 - RNA, 22 nt, Human
ggcucugcuucagaaggcucau

SEQ ID NO: 752792 - RNA, 22 nt, Human
uuguucaucguccuugcucugu

SEQ ID NO: 752793 - RNA, 22 nt, Human
agcacagaguugcucacugccg

SEQ ID NO: 752794 - RNA, 22 nt, Human
ucccugagcuucucugaaaugg

SEQ ID NO: 752795 - RNA, 22 nt, Human
auucaguucuaaggucagugcc

SEQ ID NO: 752796 - RNA, 22 nt, Human
ggccuuggauccaagcugcggc

SEQ ID NO: 752797 - RNA, 22 nt, Human
gugccugguuuggggaguguuc

SEQ ID NO: 752798 - RNA, 22 nt, Human
gugaaaaaucaucaugacuuga

SEQ ID NO: 752799 - RNA, 22 nt, Human
cugcuuuaccaaacucuuggau

SEQ ID NO: 752800 - RNA, 22 nt, Human
auacaguaauugcccugcaaug

SEQ ID NO: 752801 - RNA, 22 nt, Human
gccuugccucagccauggaaac

SEQ ID NO: 752802 - RNA, 22 nt, Human
cugcugcugagagcucagccug

SEQ ID NO: 752803 - RNA, 22 nt, Human
cuuccagaggaacucugcagug

SEQ ID NO: 752804 - RNA, 22 nt, Human
aggagaaagacuggacagccaa

SEQ ID NO: 752805 - RNA, 22 nt, Human
uuuuaaacugcagaauuuagaa

SEQ ID NO: 752806 - RNA, 22 nt, Human
acaggagcccaggaugggcgga

SEQ ID NO: 752807 - RNA, 21 nt, Human
agaggcaggcauuaaguacac

SEQ ID NO: 752808 - RNA, 22 nt, Human
agccagaguugaaugugagucu

SEQ ID NO: 752809 - RNA, 22 nt, Human
ugcuggcuguguaccaucucaa

SEQ ID NO: 752810 - RNA, 22 nt, Human
uaccuucucuagaucuuuauuc

SEQ ID NO: 752811 - RNA, 22 nt, Human
agugcugggauugcaggcauga

SEQ ID NO: 752812 - RNA, 22 nt, Human
uguaucuguuuagcacccagcc

SEQ ID NO: 752813 - RNA, 22 nt, Human
uuccaaagaaauugaccaagac

SEQ ID NO: 752814 - RNA, 22 nt, Human
agugcugggauuacaggcauaa

SEQ ID NO: 752815 - RNA, 22 nt, Human
caaggcaggucugaggagguug

SEQ ID NO: 752816 - RNA, 23 nt, Human
agcauucucuccaacauuuaaca

SEQ ID NO: 752817 - RNA, 22 nt, Human
auggucuugugagaguaacagu

SEQ ID NO: 752818 - RNA, 22 nt, Human
uacagccuccacaggccaagug

SEQ ID NO: 752819 - RNA, 20 nt, Human
ugucagugccugaggcacag

SEQ ID NO: 752820 - RNA, 22 nt, Human
cucuuccaccuccuucaggaga

SEQ ID NO: 752821 - RNA, 22 nt, Human
auuaacacuuuggagucugcuc

SEQ ID NO: 752822 - RNA, 22 nt, Human
uagcuauuguugguaguuaccc

SEQ ID NO: 752823 - RNA, 22 nt, Human
ggcaccugguaagugcucagua

SEQ ID NO: 752824 - RNA, 22 nt, Human
guggagccaggggcuguaggua

SEQ ID NO: 752825 - RNA, 22 nt, Human
agcugagcuaguaguuccagug

SEQ ID NO: 752826 - RNA, 22 nt, Human
uggacucuaugaugcgccagca

SEQ ID NO: 752827 - RNA, 22 nt, Human
agauggaggaaggcugaacuca

SEQ ID NO: 752828 - RNA, 22 nt, Human
uucagagaagcaaaggcagauu

SEQ ID NO: 752829 - RNA, 23 nt, Human
acugauucuugaaguugacaagu

SEQ ID NO: 752830 - RNA, 22 nt, Human
aguaaaaucaccaucucuuugu

SEQ ID NO: 752831 - RNA, 22 nt, Human
gcucuguacgcaggaugagggg

SEQ ID NO: 752832 - RNA, 22 nt, Human
cagcccugcugacacugucuga

SEQ ID NO: 752833 - RNA, 21 nt, Human
ugucugccccuguuuaccaga

SEQ ID NO: 752834 - RNA, 22 nt, Human
acaggucuccagagugagagga

SEQ ID NO: 752835 - RNA, 22 nt, Human
auguuucaguucuaaaguuaga

SEQ ID NO: 752836 - RNA, 22 nt, Human
ccaggguuggaugagucacuua

SEQ ID NO: 752837 - RNA, 22 nt, Human
guuccugaagggacuggugcag

SEQ ID NO: 752838 - RNA, 22 nt, Human
acacagcuaugggguaggaaac

SEQ ID NO: 752839 - RNA, 22 nt, Human
auccaaaccuggacaugagugg

SEQ ID NO: 752840 - RNA, 22 nt, Human
uucuaaagugcaaucugacaga

SEQ ID NO: 752841 - RNA, 22 nt, Human
cuggauggucccaugagcagcu

SEQ ID NO: 752842 - RNA, 22 nt, Human
cacaaugucugguaggccacuu

SEQ ID NO: 752843 - RNA, 22 nt, Human
uaauguguugaauauuuguaca

SEQ ID NO: 752844 - RNA, 22 nt, Human
caauucaaaugcauaguucaca

SEQ ID NO: 752845 - RNA, 22 nt, Human
uggcucuguggucuuagcaugc

SEQ ID NO: 752846 - RNA, 22 nt, Human
uagaacauaagucauucauuug

SEQ ID NO: 752847 - RNA, 22 nt, Human
acacaggcaagagugcaggucu

SEQ ID NO: 752848 - RNA, 22 nt, Human
aaggaagaagggaaguuacuua

SEQ ID NO: 752849 - RNA, 22 nt, Human
agcagccacagcagaucugagu

SEQ ID NO: 752850 - RNA, 22 nt, Human
gcugaagcccacguggcuugua

SEQ ID NO: 752851 - RNA, 22 nt, Human
uucugugauugacauguggcuu

SEQ ID NO: 752852 - RNA, 22 nt, Human
ugacugccgauuguccuucucu

SEQ ID NO: 752853 - RNA, 22 nt, Human
uuuaauggcaagaaggcugcag

SEQ ID NO: 752854 - RNA, 19 nt, Human
aggcccagcgcugggggcu

SEQ ID NO: 752855 - RNA, 19 nt, Human
ucugggcagggccagcacc

SEQ ID NO: 752856 - RNA, 22 nt, Human
caaguuuugauuuugcaguaaa

SEQ ID NO: 752857 - RNA, 22 nt, Human
uuucagacauaccaguuauuga

SEQ ID NO: 752858 - RNA, 22 nt, Human
acucccuccaaaucugcacagu

SEQ ID NO: 752859 - RNA, 22 nt, Human
agcugccagaugacagugcuau

SEQ ID NO: 752860 - RNA, 22 nt, Human
acugagguuguaguaggaauuc

SEQ ID NO: 752861 - RNA, 22 nt, Human
agagccaggaucuguuuugggg

SEQ ID NO: 752862 - RNA, 22 nt, Human
uauaggaaggcagauuuuagcu

SEQ ID NO: 752863 - RNA, 22 nt, Human
uccugcagagucccacugauuu

SEQ ID NO: 752864 - RNA, 22 nt, Human
aaguucaaucagaugaaaaagc

SEQ ID NO: 752865 - RNA, 22 nt, Human
ugagccagguuaagacaggagc

SEQ ID NO: 752866 - RNA, 22 nt, Human
guuaaauaaccucauguccguu

SEQ ID NO: 752867 - RNA, 22 nt, Human
ugccauuugcugguuuucugau

SEQ ID NO: 752868 - RNA, 22 nt, Human
gucugaaauggaggugggaacu

SEQ ID NO: 752869 - RNA, 22 nt, Human
uggcucuguuuuaugaguacca

SEQ ID NO: 752870 - RNA, 20 nt, Human
uagauccuggggauuuauug

SEQ ID NO: 752871 - RNA, 22 nt, Human
ugggaagauggagugacaggca

SEQ ID NO: 752872 - RNA, 22 nt, Human
aaaugcaugagaaaguauucug

SEQ ID NO: 752873 - RNA, 22 nt, Human
ggccaagauggaaggagagaug

SEQ ID NO: 752874 - RNA, 22 nt, Human
aaacuuuugguccucauggguu

SEQ ID NO: 752875 - RNA, 22 nt, Human
aacaaugcacuaucguaagugg

SEQ ID NO: 752876 - RNA, 22 nt, Human
gcagcccaaaaaagagguagau

SEQ ID NO: 752877 - RNA, 22 nt, Human
gcccaagguauaucagagacag

SEQ ID NO: 752878 - RNA, 22 nt, Human
cuggcagcaggucacacgcaga

SEQ ID NO: 752879 - RNA, 22 nt, Human
gaacuuuaauuagcuuuugucu

SEQ ID NO: 752880 - RNA, 22 nt, Human
ucugucaucuguucagugcuca

SEQ ID NO: 752881 - RNA, 22 nt, Human
augcauauugauuauagauuca

SEQ ID NO: 752882 - RNA, 22 nt, Human
uucaauucuaaacuaauauucu

SEQ ID NO: 752883 - RNA, 22 nt, Human
cugagaggcagccagagaaaau

SEQ ID NO: 752884 - RNA, 22 nt, Human
auuauuacuccugauuguacug

SEQ ID NO: 752885 - RNA, 22 nt, Human
cagcauauuacuuuaaaaaauc

SEQ ID NO: 752886 - RNA, 22 nt, Human
gggugggccacugagcagcgug

SEQ ID NO: 752887 - RNA, 22 nt, Human
aggcaggcccugggccaucccg

SEQ ID NO: 752888 - RNA, 22 nt, Human
ccugcuccugcuauucuucugg

SEQ ID NO: 752889 - RNA, 22 nt, Human
ggagcagagcucuucaucugca

SEQ ID NO: 752890 - RNA, 22 nt, Human
cagacacacaagcaaucuaagu

SEQ ID NO: 752891 - RNA, 22 nt, Human
ucucaggcaugguuuguucauc

SEQ ID NO: 752892 - RNA, 21 nt, Human
uuagaagcuaaugcagcuggu

SEQ ID NO: 752893 - RNA, 23 nt, Human
agacugaggcugccagggucaga

SEQ ID NO: 752894 - RNA, 21 nt, Human
guggcccugguguggcugcac

SEQ ID NO: 752895 - RNA, 22 nt, Human
gcaaggagacuguagggccaag

SEQ ID NO: 752896 - RNA, 22 nt, Human
ucuggagagucacagugccaga

SEQ ID NO: 752897 - RNA, 22 nt, Human
gcaggagucacugacuuggucc

SEQ ID NO: 752898 - RNA, 22 nt, Human
cugggccuugccuugcccacag

SEQ ID NO: 752899 - RNA, 22 nt, Human
uuucugcuuaggacucugugga

SEQ ID NO: 752900 - RNA, 22 nt, Human
auacuaagcucauuacauuuug

SEQ ID NO: 752901 - RNA, 22 nt, Human
aggcagagcuggguuuugaaau

SEQ ID NO: 752902 - RNA, 22 nt, Human
uagaaaagccccagcuggaggg

SEQ ID NO: 752903 - RNA, 21 nt, Human
acccugcuuuaugccguccuc

SEQ ID NO: 752904 - RNA, 22 nt, Human
ccauuuuauuagugacauuuag

SEQ ID NO: 752905 - RNA, 22 nt, Human
uccggggcuuccccgcagugcc

SEQ ID NO: 752906 - RNA, 22 nt, Human
gcuggcaggguucucacugaaa

SEQ ID NO: 752907 - RNA, 22 nt, Human
accuggagucauuugaggagua

SEQ ID NO: 752908 - RNA, 22 nt, Human
ggagcugugcagugacuacaga

SEQ ID NO: 752909 - RNA, 22 nt, Human
uuuuuccuagcgauuugucagc

SEQ ID NO: 752910 - RNA, 22 nt, Human
uccugccuagcaggugaccuau

SEQ ID NO: 752911 - RNA, 22 nt, Human
uugaaguucuaagccccaguac

SEQ ID NO: 752912 - RNA, 22 nt, Human
gcgugcauggccguguguaugc

SEQ ID NO: 752913 - RNA, 22 nt, Human
ggacaggccuggcacaguacug

SEQ ID NO: 752914 - RNA, 22 nt, Human
caugcuaagucauaaaagagua

SEQ ID NO: 752915 - RNA, 18 nt, Human
guaggucaguaccaagca

SEQ ID NO: 752916 - RNA, 20 nt, Human
aaaguucauguuugcacuuu

SEQ ID NO: 752917 - RNA, 23 nt, Human
ucugagggagugggcaguggcac

SEQ ID NO: 752918 - RNA, 22 nt, Human
uacuagaaugccacuguuagug

SEQ ID NO: 752919 - RNA, 22 nt, Human
cuggaguguaaagagcauagaa

SEQ ID NO: 752920 - RNA, 22 nt, Human
gcuuggcuggagaaaguuaccu

SEQ ID NO: 752921 - RNA, 22 nt, Human
cugagugauagcgauggggaac

SEQ ID NO: 752922 - RNA, 22 nt, Human
gcuucugguagaauucaauaga

SEQ ID NO: 752923 - RNA, 22 nt, Human
cugagagguaagcagcgcagug

SEQ ID NO: 752924 - RNA, 22 nt, Human
gggggacuggaccguccugggu

SEQ ID NO: 752925 - RNA, 22 nt, Human
ugauucaagagaguugggguau

SEQ ID NO: 752926 - RNA, 19 nt, Human
uuuagcuuacguuucauug

SEQ ID NO: 752927 - RNA, 22 nt, Human
aaugucauagcauuucuucaau

SEQ ID NO: 752928 - RNA, 22 nt, Human
uaugucuggaauuugagguuca

SEQ ID NO: 752929 - RNA, 22 nt, Human
cauggcaggugcagauucugug

SEQ ID NO: 752930 - RNA, 22 nt, Human
agcagugaguaacacagaccag

SEQ ID NO: 752931 - RNA, 23 nt, Human
uucagaagaaaugaguacaggag

SEQ ID NO: 752932 - RNA, 22 nt, Human
gaucagaauuuacuuauaauug

SEQ ID NO: 752933 - RNA, 22 nt, Human
agccaggaagagaggccucacc

SEQ ID NO: 752934 - RNA, 22 nt, Human
cagcacaugcucaucagggaag

SEQ ID NO: 752935 - RNA, 20 nt, Human
uuuucugugccaagaaaacu

SEQ ID NO: 752936 - RNA, 22 nt, Human
uguuuaauucaccaucauguuc

SEQ ID NO: 752937 - RNA, 22 nt, Human
uacuuguucuuucaagagauag

SEQ ID NO: 752938 - RNA, 22 nt, Human
cuguauucaagcuucugcccaa

SEQ ID NO: 752939 - RNA, 22 nt, Human
uugcuguuucucugugucuggu

SEQ ID NO: 752940 - RNA, 22 nt, Human
auacauguaacugcauuguaau

SEQ ID NO: 752941 - RNA, 22 nt, Human
auggaguucugccagcgcugcu

SEQ ID NO: 752942 - RNA, 22 nt, Human
aaaucucuggucacagaacuua

SEQ ID NO: 752943 - RNA, 22 nt, Human
uagguucacacaucuuccagau

SEQ ID NO: 752944 - RNA, 22 nt, Human
guggucaggggcugaggugccc

SEQ ID NO: 752945 - RNA, 22 nt, Human
agaggagcuuuuggaaaaggcc

SEQ ID NO: 752946 - RNA, 22 nt, Human
gccucugaguuuggagaagagc

SEQ ID NO: 752947 - RNA, 22 nt, Human
caggcacuucggcagcguggua

SEQ ID NO: 752948 - RNA, 21 nt, Human
gugcucugggcagcagagggc

SEQ ID NO: 752949 - RNA, 22 nt, Human
uaggccuauuguauucuuaucu

SEQ ID NO: 752950 - RNA, 22 nt, Human
ggcuacagaggccgugagccug

SEQ ID NO: 752951 - RNA, 22 nt, Human
aagacauuacuggaaucugacu

SEQ ID NO: 752952 - RNA, 22 nt, Human
cuacacuugcaugagucuugaa

SEQ ID NO: 752953 - RNA, 22 nt, Human
ugcucuguaggggaaagagagc

SEQ ID NO: 752954 - RNA, 22 nt, Human
cuccaaguauguuaaaaucuaa

SEQ ID NO: 752955 - RNA, 22 nt, Human
cagugagguagacagcuuuuuc

SEQ ID NO: 752956 - RNA, 22 nt, Human
cugacccuggucaaguugccuc

SEQ ID NO: 752957 - RNA, 22 nt, Human
uggcccuucaaauucccuaguc

SEQ ID NO: 752958 - RNA, 22 nt, Human
aguugcagacgcagagauguug

SEQ ID NO: 752959 - RNA, 22 nt, Human
cagaggcuaaggguagcuuggg

SEQ ID NO: 752960 - RNA, 22 nt, Human
ucuccugaugaugguacuggca

SEQ ID NO: 752961 - RNA, 22 nt, Human
ccugccuauguaagugguuucu

SEQ ID NO: 752962 - RNA, 22 nt, Human
cugggccuaggauggaagggcc

SEQ ID NO: 752963 - RNA, 22 nt, Human
agaucuuuagaagauagaauca

SEQ ID NO: 752964 - RNA, 22 nt, Human
uaggcuccaguguguggcgagu

SEQ ID NO: 752965 - RNA, 22 nt, Human
agguggcuguauucagcuguaa

SEQ ID NO: 752966 - RNA, 22 nt, Human
aguggcugagugacugugacuc

SEQ ID NO: 752967 - RNA, 22 nt, Human
augaagcaacagcccuccuauu

SEQ ID NO: 752968 - RNA, 22 nt, Human
caguauauuuuagagaaguccc

SEQ ID NO: 752969 - RNA, 22 nt, Human
cagucuccugggggcuguuguu

SEQ ID NO: 752970 - RNA, 22 nt, Human
auuauauaggacuugcccuucc

SEQ ID NO: 752971 - RNA, 22 nt, Human
gcucaggccucggacacacaau

SEQ ID NO: 752972 - RNA, 22 nt, Human
ucucuggccgagagucccuggg

SEQ ID NO: 752973 - RNA, 22 nt, Human
augucugguggucgaugcuaca

SEQ ID NO: 752974 - RNA, 22 nt, Human
uacauagaggguaauagcauca

SEQ ID NO: 752975 - RNA, 22 nt, Human
uacagauauuguacaguuauag

SEQ ID NO: 752976 - RNA, 22 nt, Human
uucugggcuguccagaggguga

SEQ ID NO: 752977 - RNA, 23 nt, Human
gcagacagagcagacuaagacaa

SEQ ID NO: 752978 - RNA, 22 nt, Human
gugcaaaaguaauugcgguuuu

SEQ ID NO: 752979 - RNA, 22 nt, Human
aggacuaaaaagaugcucuccc

SEQ ID NO: 752980 - RNA, 22 nt, Human
guacaaguguauuuggcuugau

SEQ ID NO: 752981 - RNA, 22 nt, Human
ggagacacccacauugcugggu

SEQ ID NO: 752982 - RNA, 22 nt, Human
uuuagcaauuagaauccagcau

SEQ ID NO: 752983 - RNA, 22 nt, Human
uacaguaaaugugguagaaacu

SEQ ID NO: 752984 - RNA, 18 nt, Human
acuguuaucugauaaggc

SEQ ID NO: 752985 - RNA, 22 nt, Human
agcugggcagugcuuggauuca

SEQ ID NO: 752986 - RNA, 22 nt, Human
gcugcucuguuaauugcuguaa

SEQ ID NO: 752987 - RNA, 22 nt, Human
aggggcuggcuuaucugagagu

SEQ ID NO: 752988 - RNA, 22 nt, Human
gccucccuguucuuccacaaua

SEQ ID NO: 752989 - RNA, 22 nt, Human
ucagccuggcaggauggccugg

SEQ ID NO: 752990 - RNA, 23 nt, Human
acacugucucauggauagacugc

SEQ ID NO: 752991 - RNA, 22 nt, Human
ucugguuagccaauaaugccaa

SEQ ID NO: 752992 - RNA, 22 nt, Human
ucaagucuggagaucuggaacu

SEQ ID NO: 752993 - RNA, 22 nt, Human
caucaucaaaagugacagagaa

SEQ ID NO: 752994 - RNA, 22 nt, Human
agcugaaguccucgcggugcua

SEQ ID NO: 752995 - RNA, 20 nt, Human
agcacugucugaccaguggc

SEQ ID NO: 752996 - RNA, 22 nt, Human
uguuuacaugcauaagcuuaag

SEQ ID NO: 752997 - RNA, 22 nt, Human
auucuauuaauauuucuaggaa

SEQ ID NO: 752998 - RNA, 22 nt, Human
cuuuacaauucaagggaacucu

SEQ ID NO: 752999 - RNA, 22 nt, Human
cuggaccagaaaggacauggcu

SEQ ID NO: 753000 - RNA, 17 nt, Human
agagggaaaaugcgguu

SEQ ID NO: 753001 - RNA, 22 nt, Human
cugggccuuuaccuacggaguu

SEQ ID NO: 753002 - RNA, 22 nt, Human
uugacagcuauuuugcuuugau

SEQ ID NO: 753003 - RNA, 22 nt, Human
uagugucuguugcuuuuguuca

SEQ ID NO: 753004 - RNA, 22 nt, Human
aggcacagcacaccuggccccc

SEQ ID NO: 753005 - RNA, 22 nt, Human
auguauuuuaagauuugccuca

SEQ ID NO: 753006 - RNA, 22 nt, Human
gccugcuggauguggccaggcc

SEQ ID NO: 753007 - RNA, 22 nt, Human
uccuggccuuagcgaggcgguc

SEQ ID NO: 753008 - RNA, 22 nt, Human
acauucaacauggcuggucuag

SEQ ID NO: 753009 - RNA, 22 nt, Human
cugaaaagugucuguugaguua

SEQ ID NO: 753010 - RNA, 22 nt, Human
gcagcucuggggcaggccugag

SEQ ID NO: 753011 - RNA, 22 nt, Human
uacaaaguagaaauucaguaaa

SEQ ID NO: 753012 - RNA, 22 nt, Human
ucucugagcugcuucuugcaua

SEQ ID NO: 753013 - RNA, 22 nt, Human
cuggagccgcauggagcaggga

SEQ ID NO: 753014 - RNA, 22 nt, Human
ugcacauggccugagugccuga

SEQ ID NO: 753015 - RNA, 21 nt, Human
cagagcugaaggguguagugu

SEQ ID NO: 753016 - RNA, 22 nt, Human
uuuucugugcccugcuagcugg

SEQ ID NO: 753017 - RNA, 22 nt, Human
acuugguggcgaacgaggguca

SEQ ID NO: 753018 - RNA, 22 nt, Human
ccugcucagcuguccucacgcu

SEQ ID NO: 753019 - RNA, 22 nt, Human
ucauguguguuucauguaugga

SEQ ID NO: 753020 - RNA, 22 nt, Human
acagguggccccgagggagugg

SEQ ID NO: 753021 - RNA, 22 nt, Human
uucuucuugucugcccucacau

SEQ ID NO: 753022 - RNA, 22 nt, Human
ucaaaauuagugaccaaaggca

SEQ ID NO: 753023 - RNA, 22 nt, Human
ugcuggcuuugcgagaugcauu

SEQ ID NO: 753024 - RNA, 22 nt, Human
gaauuagacaugcuuugcuuuu

SEQ ID NO: 753025 - RNA, 22 nt, Human
uuauccaacaugacuuaugucc

SEQ ID NO: 753026 - RNA, 22 nt, Human
gugagggguggcugagcaguuu

SEQ ID NO: 753027 - RNA, 22 nt, Human
cagucccuaguggagcucacag

SEQ ID NO: 753028 - RNA, 22 nt, Human
uuucucauggacccuucaugau

SEQ ID NO: 753029 - RNA, 21 nt, Human
ucuagaauccuguauaagacu

SEQ ID NO: 753030 - RNA, 22 nt, Human
aggcacagccucccccaacucc

SEQ ID NO: 753031 - RNA, 22 nt, Human
uguuuacagggugauuuuaccu

SEQ ID NO: 753032 - RNA, 22 nt, Human
guggucauggaagguccuaccu

SEQ ID NO: 753033 - RNA, 22 nt, Human
cucaguguuaaauauaagguau

SEQ ID NO: 753034 - RNA, 22 nt, Human
agaaggaguguacaggucaugc

SEQ ID NO: 753035 - RNA, 22 nt, Human
gcaguguugcuaggugcgguga

SEQ ID NO: 753036 - RNA, 22 nt, Human
ccucaggcucugggugccuacc

SEQ ID NO: 753037 - RNA, 22 nt, Human
accugggaacgcuuuguggagg

SEQ ID NO: 753038 - RNA, 22 nt, Human
guuucgucaggcuuauucuauc

SEQ ID NO: 753039 - RNA, 22 nt, Human
ccuggcaccuguguuuucugga

SEQ ID NO: 753040 - RNA, 22 nt, Human
cacuucaagagcaagggugcca

SEQ ID NO: 753041 - RNA, 23 nt, Human
gagcucagguagggcucgcccgc

SEQ ID NO: 753042 - RNA, 22 nt, Human
uaucucuugucuguuuugcaaa

SEQ ID NO: 753043 - RNA, 22 nt, Human
ggcugaggguauagcuguccca

SEQ ID NO: 753044 - RNA, 22 nt, Human
ucuggcagaagugcugucagua

SEQ ID NO: 753045 - RNA, 22 nt, Human
uugaagcaaauucugugcagua

SEQ ID NO: 753046 - RNA, 22 nt, Human
ccagugugggcccggccuccuc

SEQ ID NO: 753047 - RNA, 22 nt, Human
acuacaauacucuuaguaaaag

SEQ ID NO: 753048 - RNA, 22 nt, Human
aggaaaauggaccagaguuguu

SEQ ID NO: 753049 - RNA, 22 nt, Human
uaugagguagguauuauacuua

SEQ ID NO: 753050 - RNA, 22 nt, Human
cucucugggggccaugccaaga

SEQ ID NO: 753051 - RNA, 22 nt, Human
uuguuucagcccagaucuuuac

SEQ ID NO: 753052 - RNA, 22 nt, Human
cuuggagagagccucagcuguu

SEQ ID NO: 753053 - RNA, 22 nt, Human
ccagaagaccggggagucaggg

SEQ ID NO: 753054 - RNA, 22 nt, Human
aucuuucacuuuuuguggauga

SEQ ID NO: 753055 - RNA, 22 nt, Human
acuggagcccguggaggcgcag

SEQ ID NO: 753056 - RNA, 20 nt, Human
augaggccagcagggcucag

SEQ ID NO: 753057 - RNA, 22 nt, Human
ugucauuuaguccucugugugu

SEQ ID NO: 753058 - RNA, 22 nt, Human
ucaaacaggacuacauucucau

SEQ ID NO: 753059 - RNA, 22 nt, Human
aauccauuaaaaacaagcgcau

SEQ ID NO: 753060 - RNA, 22 nt, Human
accaugcacagcuguucuauua

SEQ ID NO: 753061 - RNA, 22 nt, Human
uggggaaggcggagcuugcagc

SEQ ID NO: 753062 - RNA, 22 nt, Human
aguuuauguguaagacagcugu

SEQ ID NO: 753063 - RNA, 22 nt, Human
gccuggagaccugcuccucuac

SEQ ID NO: 753064 - RNA, 22 nt, Human
cuuuccccaagcaccacagugc

SEQ ID NO: 753065 - RNA, 22 nt, Human
gugccagccuggugcgccuggg

SEQ ID NO: 753066 - RNA, 22 nt, Human
uuucuacaguacugauuucaua

SEQ ID NO: 753067 - RNA, 22 nt, Human
ggccugcugcuaugacuuccug

SEQ ID NO: 753068 - RNA, 22 nt, Human
gaggcagcugaaggagugacag

SEQ ID NO: 753069 - RNA, 22 nt, Human
uuauuauugugaccugagaaug

SEQ ID NO: 753070 - RNA, 22 nt, Human
ugggccuccgcauggcccagcg

SEQ ID NO: 753071 - RNA, 22 nt, Human
auuucuuuucaagagggugcuu

SEQ ID NO: 753072 - RNA, 22 nt, Human
uguggacuuuaguaggugagag

SEQ ID NO: 753073 - RNA, 22 nt, Human
ggcuagggaaauccugauccaa

SEQ ID NO: 753074 - RNA, 22 nt, Human
ucacagaauagcacuguaagcg

SEQ ID NO: 753075 - RNA, 22 nt, Human
aacuuuuacaaauugucaucau

SEQ ID NO: 753076 - RNA, 22 nt, Human
agaucaaaucugggauuucuaa

SEQ ID NO: 753077 - RNA, 22 nt, Human
ucacaacugggugucuucauca

SEQ ID NO: 753078 - RNA, 20 nt, Human
cacagacuguaugggcacca

SEQ ID NO: 753079 - RNA, 22 nt, Human
gaggccuggcugucagucccca

SEQ ID NO: 753080 - RNA, 22 nt, Human
uuccaaacugccaauucagaag

SEQ ID NO: 753081 - RNA, 22 nt, Human
auauaguuggguuucauucuac

SEQ ID NO: 753082 - RNA, 21 nt, Human
ccuauugaauauaggaagauu

SEQ ID NO: 753083 - RNA, 22 nt, Human
agaagcacaccugaccucuagc

SEQ ID NO: 753084 - RNA, 22 nt, Human
cagugagaccuucuaagguggu

SEQ ID NO: 753085 - RNA, 22 nt, Human
cucuggcuggcauugcuggacu

SEQ ID NO: 753086 - RNA, 22 nt, Human
uucuaguguccuuggacuugcu

SEQ ID NO: 753087 - RNA, 22 nt, Human
acuuuccuagacuucagugaca

SEQ ID NO: 753088 - RNA, 22 nt, Human
aaguagaaaaccgcacuggacu

SEQ ID NO: 753089 - RNA, 22 nt, Human
ggagcuguuaaaugcagaauuu

SEQ ID NO: 753090 - RNA, 22 nt, Human
gcaucuaagguggauaacuucu

SEQ ID NO: 753091 - RNA, 22 nt, Human
ucacaggguaucugggauggau

SEQ ID NO: 753092 - RNA, 22 nt, Human
accugccuaguugguucugccc

SEQ ID NO: 753093 - RNA, 22 nt, Human
aggcuacauguugggguggaag

SEQ ID NO: 753094 - RNA, 22 nt, Human
acuuucucccacccacccgucu

SEQ ID NO: 753095 - RNA, 22 nt, Human
agcccugagcuggccugggcuu

SEQ ID NO: 753096 - RNA, 22 nt, Human
ccucucuuggauguggaugggu

SEQ ID NO: 753097 - RNA, 22 nt, Human
uaccagcaauguaugaguguuu

SEQ ID NO: 753098 - RNA, 22 nt, Human
uagacuuuacuaaggcucauuu

SEQ ID NO: 753099 - RNA, 17 nt, Human
ugggguccccgauggug

SEQ ID NO: 753100 - RNA, 22 nt, Human
ccuaggcuuguuuucaucagcu

SEQ ID NO: 753101 - RNA, 22 nt, Human
ggcagggugccuggcuccuguu

SEQ ID NO: 753102 - RNA, 22 nt, Human
aagcuguuggcagauagcucug

SEQ ID NO: 753103 - RNA, 22 nt, Human
gucuccucuucauauaccuguu

SEQ ID NO: 753104 - RNA, 22 nt, Human
uacaggcaugaaugaaaucugu

SEQ ID NO: 753105 - RNA, 22 nt, Human
cagggagcuggugccagccgac

SEQ ID NO: 753106 - RNA, 22 nt, Human
uaacauuuaaauuuuucacaua

SEQ ID NO: 753107 - RNA, 22 nt, Human
acuuagcagguacuuucauauu

SEQ ID NO: 753108 - RNA, 22 nt, Human
gaauacaagccugccaccugga

SEQ ID NO: 753109 - RNA, 22 nt, Human
gacaggcaauuaccagcgccca

SEQ ID NO: 753110 - RNA, 22 nt, Human
gcuauuuauuaaaauggugaag

SEQ ID NO: 753111 - RNA, 23 nt, Human
cagcccugaaaucgaggugacac

SEQ ID NO: 753112 - RNA, 22 nt, Human
uacaaugaugauacuuuacugg

SEQ ID NO: 753113 - RNA, 22 nt, Human
ugucugagucaugcagagauau

SEQ ID NO: 753114 - RNA, 22 nt, Human
gugacucuccacuaguaugaaa

SEQ ID NO: 753115 - RNA, 22 nt, Human
ugguuuucuggugguggcagug

SEQ ID NO: 753116 - RNA, 22 nt, Human
gcccaguaguucaagguugcag

SEQ ID NO: 753117 - RNA, 22 nt, Human
acagaccuauggcagcugccau

SEQ ID NO: 753118 - RNA, 22 nt, Human
ugggaggaucgcuugagcccag

SEQ ID NO: 753119 - RNA, 23 nt, Human
aguggcugagaguguuucauaug

SEQ ID NO: 753120 - RNA, 22 nt, Human
gagccaaggguugccauggaga

SEQ ID NO: 753121 - RNA, 22 nt, Human
cugucuguccugaguucaacca

SEQ ID NO: 753122 - RNA, 22 nt, Human
agcucacagaaauccugcagga

SEQ ID NO: 753123 - RNA, 22 nt, Human
uggagagguuuaaacaaaaguu

SEQ ID NO: 753124 - RNA, 22 nt, Human
ggacacaguggaagacagcuug

SEQ ID NO: 753125 - RNA, 22 nt, Human
ugccccucgacgcaaugaaggg

SEQ ID NO: 753126 - RNA, 22 nt, Human
guccagggggcuuaagcaaacu

SEQ ID NO: 753127 - RNA, 22 nt, Human
guccugggaacuggacagcuaa

SEQ ID NO: 753128 - RNA, 22 nt, Human
uggguccacuucugcacugugg

SEQ ID NO: 753129 - RNA, 22 nt, Human
gucugggucuccacagucagca

SEQ ID NO: 753130 - RNA, 22 nt, Human
ucugagcuucugcauuuccaac

SEQ ID NO: 753131 - RNA, 21 nt, Human
uccauuguuuucccaggguuu

SEQ ID NO: 753132 - RNA, 22 nt, Human
gugcugaguagaaugaaugccu

SEQ ID NO: 753133 - RNA, 22 nt, Human
acacaguuuaaacgauuaguac

SEQ ID NO: 753134 - RNA, 22 nt, Human
agugacagcugggaaggugaaa

SEQ ID NO: 753135 - RNA, 22 nt, Human
acaauuuuaagccagagugggu

SEQ ID NO: 753136 - RNA, 17 nt, Human
ucacaucacacaagcaa

SEQ ID NO: 753137 - RNA, 22 nt, Human
ucagugcuuuugucacaugguc

SEQ ID NO: 753138 - RNA, 22 nt, Human
gcagaggacagggauuuagauu

SEQ ID NO: 753139 - RNA, 22 nt, Human
uucugaaggucagcagcuuggu

SEQ ID NO: 753140 - RNA, 22 nt, Human
caggccagcguccagaacaagc

SEQ ID NO: 753141 - RNA, 22 nt, Human
cacaaggcuuucaucuggcaua

SEQ ID NO: 753142 - RNA, 22 nt, Human
accauuuacucccauuggaagu

SEQ ID NO: 753143 - RNA, 17 nt, Human
aguguuuccuuaucauu

SEQ ID NO: 753144 - RNA, 18 nt, Human
uggagucagugacaccag

SEQ ID NO: 753145 - RNA, 22 nt, Human
ugcucaguuccaugaguggagu

SEQ ID NO: 753146 - RNA, 22 nt, Human
gaaaauacuucaguguucuggc

SEQ ID NO: 753147 - RNA, 22 nt, Human
acagaggccaugagcugccacc

SEQ ID NO: 753148 - RNA, 22 nt, Human
ucaggccuuucuucagagcuuc

SEQ ID NO: 753149 - RNA, 22 nt, Human
acaggaguucagaggacacccc

SEQ ID NO: 753150 - RNA, 20 nt, Human
agggucagagagcgugagug

SEQ ID NO: 753151 - RNA, 22 nt, Human
gcagggcuggguccugucucau

SEQ ID NO: 753152 - RNA, 22 nt, Human
cagccucuaagcacagccucuc

SEQ ID NO: 753153 - RNA, 22 nt, Human
uucauuuucuuucacgcugcug

SEQ ID NO: 753154 - RNA, 22 nt, Human
gaugaaaaauugcugugucaua

SEQ ID NO: 753155 - RNA, 18 nt, Human
gauggguaaaggcauaaa

SEQ ID NO: 753156 - RNA, 22 nt, Human
uucauucccaagaguaaacaua

SEQ ID NO: 753157 - RNA, 22 nt, Human
uuuggcagagucauuucagaaa

SEQ ID NO: 753158 - RNA, 22 nt, Human
ugcagggccuuguugaugugcu

SEQ ID NO: 753159 - RNA, 22 nt, Human
cugguguggcggcgcccuguag

SEQ ID NO: 753160 - RNA, 22 nt, Human
cuugagguuuugacucagcuuu

SEQ ID NO: 753161 - RNA, 22 nt, Human
uggcagaugagccgcgcuccaa

SEQ ID NO: 753162 - RNA, 22 nt, Human
cguguacacgcacacguguccu

SEQ ID NO: 753163 - RNA, 22 nt, Human
ggaggccaggaaggcucggaga

SEQ ID NO: 753164 - RNA, 22 nt, Human
caucagcagucacaugaugcug

SEQ ID NO: 753165 - RNA, 22 nt, Human
ucccagggacugggcuaggcuu

SEQ ID NO: 753166 - RNA, 22 nt, Human
uugcaaauauuguuuaccuuuc

SEQ ID NO: 753167 - RNA, 22 nt, Human
acuguaauuggauugucugacu

SEQ ID NO: 753168 - RNA, 22 nt, Human
gagaagggggcucgaguguccu

SEQ ID NO: 753169 - RNA, 22 nt, Human
cauguucaccuguggcacuagu

SEQ ID NO: 753170 - RNA, 22 nt, Human
ucuuuagaguuaacaauaauga

SEQ ID NO: 753171 - RNA, 23 nt, Human
uuuagcaugaagcagcuggagaa

SEQ ID NO: 753172 - RNA, 22 nt, Human
cugggacugccauucacagcca

SEQ ID NO: 753173 - RNA, 22 nt, Human
caggccucgaggagacagcuac

SEQ ID NO: 753174 - RNA, 22 nt, Human
aagugcuuaaaaggguggucua

SEQ ID NO: 753175 - RNA, 22 nt, Human
uaucaugaucagcaacuaauca

SEQ ID NO: 753176 - RNA, 22 nt, Human
uuucucaaggugucauguauuu

SEQ ID NO: 753177 - RNA, 22 nt, Human
cuggccagcauggcugaaguac

SEQ ID NO: 753178 - RNA, 22 nt, Human
cucagaaacggagcugccauuu

SEQ ID NO: 753179 - RNA, 22 nt, Human
agaguguuuuucugucaaggac

SEQ ID NO: 753180 - RNA, 22 nt, Human
uacuguuaauguuaaauucagg

SEQ ID NO: 753181 - RNA, 22 nt, Human
gaaaucacuuuuuucauaguug

SEQ ID NO: 753182 - RNA, 22 nt, Human
uaaguucaaaucaucccaacuu

SEQ ID NO: 753183 - RNA, 22 nt, Human
cagcuccccaugguuccugaag

SEQ ID NO: 753184 - RNA, 22 nt, Human
ucaauucauagaguugacacag

SEQ ID NO: 753185 - RNA, 22 nt, Human
uucccuuuguuaaauuggaaga

SEQ ID NO: 753186 - RNA, 22 nt, Human
agccucugaugaucacaggggg

SEQ ID NO: 753187 - RNA, 22 nt, Human
ucuggagcuggcagggcccugg

SEQ ID NO: 753188 - RNA, 22 nt, Human
ugaacacacacaucuuaauaau

SEQ ID NO: 753189 - RNA, 22 nt, Human
ugcugugucuuucugugaaaag

SEQ ID NO: 753190 - RNA, 22 nt, Human
cuuucacacacauacauuugga

SEQ ID NO: 753191 - RNA, 22 nt, Human
aaggauugucuggcuauuuaug

SEQ ID NO: 753192 - RNA, 22 nt, Human
uggaaagugcucuagacuuucu

SEQ ID NO: 753193 - RNA, 22 nt, Human
uucccauuugugguagugaauu

SEQ ID NO: 753194 - RNA, 22 nt, Human
ugaugcacaaagucagcauccu

SEQ ID NO: 753195 - RNA, 22 nt, Human
ggaaggugcucccuggacagag

SEQ ID NO: 753196 - RNA, 22 nt, Human
aacuagaaccacuuguauuucc

SEQ ID NO: 753197 - RNA, 22 nt, Human
gccccagguugccugucccagg

SEQ ID NO: 753198 - RNA, 22 nt, Human
auggcuguguuguuccucugaa

SEQ ID NO: 753199 - RNA, 22 nt, Human
ggcuugcuucuuguccaggaau

SEQ ID NO: 753200 - RNA, 18 nt, Human
ccucaggggaccuggcag

SEQ ID NO: 753201 - RNA, 22 nt, Human
uuauucaccgcaggugcuuccc

SEQ ID NO: 753202 - RNA, 22 nt, Human
ccauuacugaaauaaagagaau

SEQ ID NO: 753203 - RNA, 22 nt, Human
aguccucuggaguaugccuuau

SEQ ID NO: 753204 - RNA, 22 nt, Human
caaaguccauaguuuacaauag

SEQ ID NO: 753205 - RNA, 22 nt, Human
uugcugagcuuuggcaaggaag

SEQ ID NO: 753206 - RNA, 22 nt, Human
gcuuucugcucuguaaaauggg

SEQ ID NO: 753207 - RNA, 22 nt, Human
uuuacauguaauguuauacaaa

SEQ ID NO: 753208 - RNA, 22 nt, Human
uggucagcuucagaguguucca

SEQ ID NO: 753209 - RNA, 22 nt, Human
aucaguuuuguucacuacuaua

SEQ ID NO: 753210 - RNA, 22 nt, Human
gugaaaauaaggcugguucuug

SEQ ID NO: 753211 - RNA, 22 nt, Human
cugcuguguuucugcuagaaaa

SEQ ID NO: 753212 - RNA, 18 nt, Human
uguguaugucucagggaa

SEQ ID NO: 753213 - RNA, 22 nt, Human
gcuaggaagcuggggagaaguc

SEQ ID NO: 753214 - RNA, 22 nt, Human
ucccagcccagacuucuccagu

SEQ ID NO: 753215 - RNA, 22 nt, Human
uuuuauagcugaauaguauucc

SEQ ID NO: 753216 - RNA, 22 nt, Human
ggcccaaggugccaaggccucc

SEQ ID NO: 753217 - RNA, 22 nt, Human
guggcacagccaagccucacuc

SEQ ID NO: 753218 - RNA, 18 nt, Human
aaggucugucugguaggu

SEQ ID NO: 753219 - RNA, 22 nt, Human
ucaggagaaucagggcuguccu

SEQ ID NO: 753220 - RNA, 22 nt, Human
gaggggcaguugauugugcuau

SEQ ID NO: 753221 - RNA, 22 nt, Human
uggcucaugccuguaaucuuag

SEQ ID NO: 753222 - RNA, 22 nt, Human
uuccucucucuugccagaaugu

SEQ ID NO: 753223 - RNA, 22 nt, Human
uuccaggacaagauguuucagg

SEQ ID NO: 753224 - RNA, 22 nt, Human
cuagggagacucgcaggacuca

SEQ ID NO: 753225 - RNA, 22 nt, Human
agcagagaccauauagcccaga

SEQ ID NO: 753226 - RNA, 22 nt, Human
acucuggcuugaggaccagguc

SEQ ID NO: 753227 - RNA, 22 nt, Human
uggcuuucgcuauagagcacgg

SEQ ID NO: 753228 - RNA, 20 nt, Human
gcacagagaugagcaaagua

SEQ ID NO: 753229 - RNA, 22 nt, Human
acaugcagacgggauccuggca

SEQ ID NO: 753230 - RNA, 22 nt, Human
agcugccauccgaggugucaga

SEQ ID NO: 753231 - RNA, 22 nt, Human
uacuucaugaguuaauaugcag

SEQ ID NO: 753232 - RNA, 22 nt, Human
ucuuuaacaggaauuauuacag

SEQ ID NO: 753233 - RNA, 16 nt, Human
cuguggcucccagguu

SEQ ID NO: 753234 - RNA, 22 nt, Human
aaagggaauguguaggacaugu

SEQ ID NO: 753235 - RNA, 20 nt, Human
agauuauuccuaagauuucu

SEQ ID NO: 753236 - RNA, 22 nt, Human
cuguccuugcuggccagguaug

SEQ ID NO: 753237 - RNA, 22 nt, Human
caagggcagaggcagggccccg

SEQ ID NO: 753238 - RNA, 22 nt, Human
ccagcugcuuuuugucacaugg

SEQ ID NO: 753239 - RNA, 22 nt, Human
caaugucagucaagcagcaaau

SEQ ID NO: 753240 - RNA, 23 nt, Human
ucucugugugccucaguuucuuc

SEQ ID NO: 753241 - RNA, 22 nt, Human
aaucauguuucagaugaguuuu

SEQ ID NO: 753242 - RNA, 19 nt, Human
gggaugggcccucacccuc

SEQ ID NO: 753243 - RNA, 22 nt, Human
caccagagugaguggacugucg

SEQ ID NO: 753244 - RNA, 22 nt, Human
cguggcuggggaggucagccag

SEQ ID NO: 753245 - RNA, 22 nt, Human
agaauaaucacugaaguucaaa

SEQ ID NO: 753246 - RNA, 22 nt, Human
cuauauacuuuucacagauguu

SEQ ID NO: 753247 - RNA, 22 nt, Human
aggacauguaaauggagaggga

SEQ ID NO: 753248 - RNA, 22 nt, Human
gcaguguugugauccaggucuu

SEQ ID NO: 753249 - RNA, 22 nt, Human
ugaguggacgugaggcugagua

SEQ ID NO: 753250 - RNA, 22 nt, Human
ucucuaagauaggaauacaguu

SEQ ID NO: 753251 - RNA, 22 nt, Human
auucagcacaucuuuguacagc

SEQ ID NO: 753252 - RNA, 22 nt, Human
ugcuuucugcucuuguccacac

SEQ ID NO: 753253 - RNA, 20 nt, Human
guggaugaucaguguagugg

SEQ ID NO: 753254 - RNA, 22 nt, Human
aacaugucuggguauucacaag

SEQ ID NO: 753255 - RNA, 22 nt, Human
aguucacaagugcauuucagga

SEQ ID NO: 753256 - RNA, 22 nt, Human
gcugugcuugggaagaaucucu

SEQ ID NO: 753257 - RNA, 22 nt, Human
gggcuucuggcuacuguaugag

SEQ ID NO: 753258 - RNA, 22 nt, Human
cugaaggauuagagagcacuua

SEQ ID NO: 753259 - RNA, 22 nt, Human
ugcaguuagccuaggauugagc

SEQ ID NO: 753260 - RNA, 22 nt, Human
gaaauguaugucuucccccauu

SEQ ID NO: 753261 - RNA, 22 nt, Human
uauagagguggaaacugagguu

SEQ ID NO: 753262 - RNA, 22 nt, Human
guugaaacuuaguugaaauuua

SEQ ID NO: 753263 - RNA, 22 nt, Human
agugcaauguguacagaaaaau

SEQ ID NO: 753264 - RNA, 22 nt, Human
ugauuugcgucucauuugaaau

SEQ ID NO: 753265 - RNA, 22 nt, Human
cugugccaggcccagcugacuu

SEQ ID NO: 753266 - RNA, 19 nt, Human
ucacagacagagcaaucac

SEQ ID NO: 753267 - RNA, 22 nt, Human
augcaacaggguugggaggcgg

SEQ ID NO: 753268 - RNA, 20 nt, Human
agcaggcugcagggugaaau

SEQ ID NO: 753269 - RNA, 22 nt, Human
aacaugaaaguugcuaagugca

SEQ ID NO: 753270 - RNA, 22 nt, Human
acauuucuuccacaugcugcug

SEQ ID NO: 753271 - RNA, 22 nt, Human
ugucaaaaugacuuuacuacag

SEQ ID NO: 753272 - RNA, 18 nt, Human
acagugauuguucuaugc

SEQ ID NO: 753273 - RNA, 22 nt, Human
cccuccagccauggacccaggu

SEQ ID NO: 753274 - RNA, 22 nt, Human
cugcuguggugucaagcaucuc

SEQ ID NO: 753275 - RNA, 20 nt, Human
gggcugugccuccucguggu

SEQ ID NO: 753276 - RNA, 22 nt, Human
ugcuugcuaugcauccugaacu

SEQ ID NO: 753277 - RNA, 22 nt, Human
gacauuuagguagcuuccaguu

SEQ ID NO: 753278 - RNA, 22 nt, Human
gaggcucaaaccuggacagagc

SEQ ID NO: 753279 - RNA, 22 nt, Human
uuccccaguagugacaaucaaa

SEQ ID NO: 753280 - RNA, 22 nt, Human
cacugagaaagugaccugccaa

SEQ ID NO: 753281 - RNA, 20 nt, Human
uuaagaaaagcacauccugc

SEQ ID NO: 753282 - RNA, 22 nt, Human
aaaggcuggauucagagaggug

SEQ ID NO: 753283 - RNA, 22 nt, Human
agggaagaggcaagguuuaugg

SEQ ID NO: 753284 - RNA, 22 nt, Human
agccuggaggaggaguugagca

SEQ ID NO: 753285 - RNA, 22 nt, Human
aaaucaguucucccuuucuuca

SEQ ID NO: 753286 - RNA, 21 nt, Human
uucucuccauaugcccagccc

SEQ ID NO: 753287 - RNA, 22 nt, Human
ccaggcucugucuggucagaag

SEQ ID NO: 753288 - RNA, 22 nt, Human
aacuguaauuuuuacauaguaa

SEQ ID NO: 753289 - RNA, 22 nt, Human
aagaauaaauuaagauacuuag

SEQ ID NO: 753290 - RNA, 22 nt, Human
cauaagaagguaacauccuuaa

SEQ ID NO: 753291 - RNA, 22 nt, Human
aaagaaguguugaauuugcaag

SEQ ID NO: 753292 - RNA, 22 nt, Human
cuggcacauaguaggugcacag

SEQ ID NO: 753293 - RNA, 22 nt, Human
uuagcacuggauuaaucaaagu

SEQ ID NO: 753294 - RNA, 22 nt, Human
ugggccagaaguaugcauguuu

SEQ ID NO: 753295 - RNA, 22 nt, Human
aaguugaaugcguacgugacau

SEQ ID NO: 753296 - RNA, 22 nt, Human
auacuucucaugggcucugagc

SEQ ID NO: 753297 - RNA, 22 nt, Human
aaggcuggucagauguggugaa

SEQ ID NO: 753298 - RNA, 22 nt, Human
uugacacuaagauuuccaaaca

SEQ ID NO: 753299 - RNA, 22 nt, Human
ugccugugcccuuugcugggag

SEQ ID NO: 753300 - RNA, 22 nt, Human
uccuggucagcuuugagguugu

SEQ ID NO: 753301 - RNA, 23 nt, Human
ggcuccaggccugacgggcgcgg

SEQ ID NO: 753302 - RNA, 22 nt, Human
cuggggcccaucgagggcugag

SEQ ID NO: 753303 - RNA, 18 nt, Human
uggcugcuuccagguaca

SEQ ID NO: 753304 - RNA, 22 nt, Human
agagaucccuucugccugggga

SEQ ID NO: 753305 - RNA, 22 nt, Human
cccaggaggguggccucugccc

SEQ ID NO: 753306 - RNA, 22 nt, Human
gcagcuuuguaaaguaugaagc

SEQ ID NO: 753307 - RNA, 22 nt, Human
aauagcaaacacugguaaaguu

SEQ ID NO: 753308 - RNA, 22 nt, Human
cugggguggauggguccaaguu

SEQ ID NO: 753309 - RNA, 22 nt, Human
cagagcuggggacuguuggaug

SEQ ID NO: 753310 - RNA, 22 nt, Human
uugauucuuagcuggugauaau

SEQ ID NO: 753311 - RNA, 22 nt, Human
gcccuuccuuagacagcaggau

SEQ ID NO: 753312 - RNA, 22 nt, Human
cuuuaguugucuccucaagggu

SEQ ID NO: 753313 - RNA, 22 nt, Human
uggagcagcacaagaaagggga

SEQ ID NO: 753314 - RNA, 22 nt, Human
agcagguguuggcugggccauc

SEQ ID NO: 753315 - RNA, 22 nt, Human
uguagcuucagucugaucucau

SEQ ID NO: 753316 - RNA, 22 nt, Human
ccagaaaguucagcugugaaug

SEQ ID NO: 753317 - RNA, 22 nt, Human
uuggcaaaggacucaaagcagg

SEQ ID NO: 753318 - RNA, 22 nt, Human
ccaacacagauguguuaguguu

SEQ ID NO: 753319 - RNA, 22 nt, Human
uuugaauguuuuagguacuuaa

SEQ ID NO: 753320 - RNA, 22 nt, Human
aacuuucucuggauggcuuccu

SEQ ID NO: 753321 - RNA, 22 nt, Human
agaggcccucucucuccugaug

SEQ ID NO: 753322 - RNA, 22 nt, Human
acugccauuggucaaaugagug

SEQ ID NO: 753323 - RNA, 22 nt, Human
ggucaggguuccagguaucuuc

SEQ ID NO: 753324 - RNA, 22 nt, Human
acaugagaucacaaagauaaau

SEQ ID NO: 753325 - RNA, 22 nt, Human
uguuugugguuauaauaaguau

SEQ ID NO: 753326 - RNA, 20 nt, Human
aacacaggguuaccaucaga

SEQ ID NO: 753327 - RNA, 22 nt, Human
ugcauguguuucccagcaagcu

SEQ ID NO: 753328 - RNA, 22 nt, Human
cacagaggugauaguggucaag

SEQ ID NO: 753329 - RNA, 22 nt, Human
uguaaucaugcaucaguuaguu

SEQ ID NO: 753330 - RNA, 22 nt, Human
auucagcaaugagcuuggauuu

SEQ ID NO: 753331 - RNA, 22 nt, Human
agauggggcugaaaguuccaau

SEQ ID NO: 753332 - RNA, 22 nt, Human
agagucuguuacuuguccccua

SEQ ID NO: 753333 - RNA, 22 nt, Human
acugagcauaaauaugugucca

SEQ ID NO: 753334 - RNA, 22 nt, Human
gagagcugugguuugaccaggc

SEQ ID NO: 753335 - RNA, 22 nt, Human
gccauaaauugcuggucaaaau

SEQ ID NO: 753336 - RNA, 22 nt, Human
cuucaggauuuaggaagaugaa

SEQ ID NO: 753337 - RNA, 22 nt, Human
cacauuguagagauuagaaaga

SEQ ID NO: 753338 - RNA, 20 nt, Human
gaaauucucguauuaguuua

SEQ ID NO: 753339 - RNA, 20 nt, Human
gcuguggcaaagcuuugugu

SEQ ID NO: 753340 - RNA, 22 nt, Human
aauaagaacaacuaagguuuau

SEQ ID NO: 753341 - RNA, 22 nt, Human
cuguugaucucaguuagcuaga

SEQ ID NO: 753342 - RNA, 23 nt, Human
uucaucaguugcuguugcagaac

SEQ ID NO: 753343 - RNA, 22 nt, Human
cuggacuuuggcccaucugcca

SEQ ID NO: 753344 - RNA, 22 nt, Human
aauacagaggaaacauuuaaua

SEQ ID NO: 753345 - RNA, 22 nt, Human
aauguuguuuuucugcaugucu

SEQ ID NO: 753346 - RNA, 22 nt, Human
gugcuuggcuuggugugaccug

SEQ ID NO: 753347 - RNA, 22 nt, Human
augaggccauggcugucacuaa

SEQ ID NO: 753348 - RNA, 22 nt, Human
guauuuuacuuacgcaugacuu

SEQ ID NO: 753349 - RNA, 22 nt, Human
cuccuccacuaggcaaaaugug

SEQ ID NO: 753350 - RNA, 22 nt, Human
cagugauguuucugcaucagag

SEQ ID NO: 753351 - RNA, 21 nt, Human
ucagcagaaagcaaggucagu

SEQ ID NO: 753352 - RNA, 22 nt, Human
agugucuuaguccauuugggcu

SEQ ID NO: 753353 - RNA, 22 nt, Human
gcugggcuucucaaugcugccu

SEQ ID NO: 753354 - RNA, 22 nt, Human
cugccuggcccagggaugggcc

SEQ ID NO: 753355 - RNA, 20 nt, Human
cugggaggucuuccaaauca

SEQ ID NO: 753356 - RNA, 22 nt, Human
agccugagagccaagcugugca

SEQ ID NO: 753357 - RNA, 23 nt, Human
ugucuggcucauggugggucuca

SEQ ID NO: 753358 - RNA, 22 nt, Human
aaaaccacaaaaguggcuuggu

SEQ ID NO: 753359 - RNA, 20 nt, Human
agcugcagaacccacuggac

SEQ ID NO: 753360 - RNA, 22 nt, Human
acuguagagaaucugagaaaaa

SEQ ID NO: 753361 - RNA, 22 nt, Human
auagcaaauucuuuaggugcuu

SEQ ID NO: 753362 - RNA, 22 nt, Human
gaugauuuugaugcaguaaaga

SEQ ID NO: 753363 - RNA, 21 nt, Human
ucugaacaacauacgaaucuu

SEQ ID NO: 753364 - RNA, 22 nt, Human
caagguuugaaaacgccauggc

SEQ ID NO: 753365 - RNA, 22 nt, Human
uuugaaauaugaggcauuauga

SEQ ID NO: 753366 - RNA, 22 nt, Human
acugcacacauguuuaagugga

SEQ ID NO: 753367 - RNA, 22 nt, Human
cucacagcagcucugcgagaua

SEQ ID NO: 753368 - RNA, 22 nt, Human
gccuggugucuccccaaggaag

SEQ ID NO: 753369 - RNA, 22 nt, Human
cuacuguaauagaugaauuuga

SEQ ID NO: 753370 - RNA, 22 nt, Human
auacagaauuugcccuuuucau

SEQ ID NO: 753371 - RNA, 22 nt, Human
agugucugaugcacaguugucc

SEQ ID NO: 753372 - RNA, 22 nt, Human
uccagcagugcucaggacucac

SEQ ID NO: 753373 - RNA, 22 nt, Human
cuccugggagcuguggcagagc

SEQ ID NO: 753374 - RNA, 22 nt, Human
cauggcaggcuucuucagccuu

SEQ ID NO: 753375 - RNA, 21 nt, Human
ugggcacugagggugcugcuc

SEQ ID NO: 753376 - RNA, 22 nt, Human
agucuucagagaaauuaacucu

SEQ ID NO: 753377 - RNA, 22 nt, Human
ugaagcuggaaguuagguagac

SEQ ID NO: 753378 - RNA, 22 nt, Human
cuguuuuucagaagguaaggga

SEQ ID NO: 753379 - RNA, 22 nt, Human
ucugagaggcagaccuuccuaa

SEQ ID NO: 753380 - RNA, 22 nt, Human
uaggacaggugaggggcugugg

SEQ ID NO: 753381 - RNA, 19 nt, Human
agcuccaggccuggaugcu

SEQ ID NO: 753382 - RNA, 22 nt, Human
aucaucuggguuaaugugcuca

SEQ ID NO: 753383 - RNA, 22 nt, Human
acuaaagucaucaaagaacuuu

SEQ ID NO: 753384 - RNA, 22 nt, Human
ggagagcauucuuagucuguuu

SEQ ID NO: 753385 - RNA, 22 nt, Human
cucauagacaagccucuuuuaa

SEQ ID NO: 753386 - RNA, 19 nt, Human
cugugcaggccgggcugag

SEQ ID NO: 753387 - RNA, 22 nt, Human
ggcaccagggacaauccucuuc

SEQ ID NO: 753388 - RNA, 22 nt, Human
gugagugucagucaaagguuuu

SEQ ID NO: 753389 - RNA, 22 nt, Human
cuucuuugugccuauuggugac

SEQ ID NO: 753390 - RNA, 22 nt, Human
aaagacauauuucuaaguuuau

SEQ ID NO: 753391 - RNA, 22 nt, Human
uggguaggccaggaagcagugu

SEQ ID NO: 753392 - RNA, 22 nt, Human
ucagagaggauuuuaauaagug

SEQ ID NO: 753393 - RNA, 22 nt, Human
ugguccugguagcggugugcuu

SEQ ID NO: 753394 - RNA, 22 nt, Human
caaggcagcuguagggauuugg

SEQ ID NO: 753395 - RNA, 22 nt, Human
ggcucagauuccgaguggcccu

SEQ ID NO: 753396 - RNA, 22 nt, Human
uuacagauucaagcucuuugaa

SEQ ID NO: 753397 - RNA, 22 nt, Human
guuguacagcauuccauauagg

SEQ ID NO: 753398 - RNA, 19 nt, Human
ucacaggcaucuccccaga

SEQ ID NO: 753399 - RNA, 22 nt, Human
uuucaguggguuuauuucaugu

SEQ ID NO: 753400 - RNA, 22 nt, Human
gcagcuuggugaaaggugaugg

SEQ ID NO: 753401 - RNA, 22 nt, Human
ugaggaacugccagacuguuuu

SEQ ID NO: 753402 - RNA, 22 nt, Human
uuccagggcuagguaaugggua

SEQ ID NO: 753403 - RNA, 21 nt, Human
cagcuucugaagguguaggaa

SEQ ID NO: 753404 - RNA, 22 nt, Human
gcuggcugcuguugagacuugu

SEQ ID NO: 753405 - RNA, 22 nt, Human
ugagccuguccugugcauguga

SEQ ID NO: 753406 - RNA, 22 nt, Human
ugccuugcgggcguuucuguug

SEQ ID NO: 753407 - RNA, 22 nt, Human
agagaagggguaaagaguccug

SEQ ID NO: 753408 - RNA, 22 nt, Human
aaucauuguucuucagauuuga

SEQ ID NO: 753409 - RNA, 22 nt, Human
ugccuugggagccagcaugcca

SEQ ID NO: 753410 - RNA, 22 nt, Human
uaucaguagaacaauggacauu

SEQ ID NO: 753411 - RNA, 22 nt, Human
agcaccuccgugcagcguggcc

SEQ ID NO: 753412 - RNA, 23 nt, Human
acuagacuucaucgaagguuacc

SEQ ID NO: 753413 - RNA, 22 nt, Human
ggaagaggcugaggccaugcug

SEQ ID NO: 753414 - RNA, 22 nt, Human
uaucuguucugcuugauuuuga

SEQ ID NO: 753415 - RNA, 22 nt, Human
uuugacauuauccuguuacugg

SEQ ID NO: 753416 - RNA, 22 nt, Human
aaggacagaaacagauugcugg

SEQ ID NO: 753417 - RNA, 22 nt, Human
cagccugcucucagauguugag

SEQ ID NO: 753418 - RNA, 22 nt, Human
aggaccaguaugagagcaucug

SEQ ID NO: 753419 - RNA, 20 nt, Human
aucaggauucuugcuuuguu

SEQ ID NO: 753420 - RNA, 22 nt, Human
cuauuuugccugccuagaaauc

SEQ ID NO: 753421 - RNA, 22 nt, Human
ggcagguacagcaagaggacaa

SEQ ID NO: 753422 - RNA, 22 nt, Human
gccuggcuugccagcccuggcg

SEQ ID NO: 753423 - RNA, 22 nt, Human
uaaagcacgucuauuuaaugau

SEQ ID NO: 753424 - RNA, 22 nt, Human
uguuacaaacuguuguuucuau

SEQ ID NO: 753425 - RNA, 22 nt, Human
gaacacauuagucugaguuggc

SEQ ID NO: 753426 - RNA, 22 nt, Human
gcugccagcacaguucagcugu

SEQ ID NO: 753427 - RNA, 22 nt, Human
gggcccagcgugguuccaucug

SEQ ID NO: 753428 - RNA, 22 nt, Human
cauuuuaccuagaagcugaaag

SEQ ID NO: 753429 - RNA, 22 nt, Human
aggcugaaaacgagauggcaau

SEQ ID NO: 753430 - RNA, 22 nt, Human
cauuuggaccaaaauagccaac

SEQ ID NO: 753431 - RNA, 21 nt, Human
cugcaggaugcugaagccagg

SEQ ID NO: 753432 - RNA, 22 nt, Human
ccaggccagcgcuggcuggagg

SEQ ID NO: 753433 - RNA, 22 nt, Human
ccucucccgggugccgcugggc

SEQ ID NO: 753434 - RNA, 22 nt, Human
uuuuacaccuguuaacucuaag

SEQ ID NO: 753435 - RNA, 20 nt, Human
ccagagaguagguuagugau

SEQ ID NO: 753436 - RNA, 22 nt, Human
ugauaaauccauguaaauggua

SEQ ID NO: 753437 - RNA, 22 nt, Human
uagggugggcaguucuugggga

SEQ ID NO: 753438 - RNA, 22 nt, Human
gggacagaaggaagugagcaca

SEQ ID NO: 753439 - RNA, 22 nt, Human
cagugguugcuugcauggcucc

SEQ ID NO: 753440 - RNA, 22 nt, Human
acaauuguggcaauuuguaugu

SEQ ID NO: 753441 - RNA, 22 nt, Human
cccagccuuugcuuccugguuc

SEQ ID NO: 753442 - RNA, 22 nt, Human
cucaggauggaagccuacagga

SEQ ID NO: 753443 - RNA, 22 nt, Human
ucucagaacuuuauauguauca

SEQ ID NO: 753444 - RNA, 22 nt, Human
auacaugcuuggguguagugcg

SEQ ID NO: 753445 - RNA, 23 nt, Human
cauaugaaaguagacacuuucca

SEQ ID NO: 753446 - RNA, 22 nt, Human
ccugugcuggacagggcugggc

SEQ ID NO: 753447 - RNA, 22 nt, Human
ccaggaggcagagguuguagug

SEQ ID NO: 753448 - RNA, 22 nt, Human
agucagagugugcaggccggcu

SEQ ID NO: 753449 - RNA, 22 nt, Human
uacugugguaacauuuuaaauu

SEQ ID NO: 753450 - RNA, 22 nt, Human
uuuggcuuuagugccuucugau

SEQ ID NO: 753451 - RNA, 22 nt, Human
gaggagcuucagaggaaucuua

SEQ ID NO: 753452 - RNA, 22 nt, Human
gcacauauguaaauagcugccu

SEQ ID NO: 753453 - RNA, 22 nt, Human
uaauccaauggcacaauguaug

SEQ ID NO: 753454 - RNA, 22 nt, Human
ucugcguggcgugguucugugc

SEQ ID NO: 753455 - RNA, 22 nt, Human
ugauggcuuauggagagagcaa

SEQ ID NO: 753456 - RNA, 22 nt, Human
cugugggcauuugagugugggu

SEQ ID NO: 753457 - RNA, 22 nt, Human
ucuuccucaauguaacaacccc

SEQ ID NO: 753458 - RNA, 22 nt, Human
ggagaagguggcucagcaaagg

SEQ ID NO: 753459 - RNA, 22 nt, Human
ggcuccagggaguggagagaag

SEQ ID NO: 753460 - RNA, 22 nt, Human
uccacaucucucgccaaccaau

SEQ ID NO: 753461 - RNA, 22 nt, Human
caauauucaguggaaaagccau

SEQ ID NO: 753462 - RNA, 22 nt, Human
uggcuccagcguccacguccug

SEQ ID NO: 753463 - RNA, 22 nt, Human
gcggcaggaagagcgcagcccc

SEQ ID NO: 753464 - RNA, 22 nt, Human
gaagccaagggcugcuuuuccu

SEQ ID NO: 753465 - RNA, 22 nt, Human
acacuuaacuucugagaauaaa

SEQ ID NO: 753466 - RNA, 22 nt, Human
gcagggaaggggcaugcuggag

SEQ ID NO: 753467 - RNA, 22 nt, Human
aagccacuuucagcugucucag

SEQ ID NO: 753468 - RNA, 21 nt, Human
agaauaaugguaucauuugcu

SEQ ID NO: 753469 - RNA, 22 nt, Human
uccguugacagggcacuugaca

SEQ ID NO: 753470 - RNA, 22 nt, Human
cugaggcuuggaggggucuggu

SEQ ID NO: 753471 - RNA, 22 nt, Human
uucugcuuucaguucuucuggg

SEQ ID NO: 753472 - RNA, 22 nt, Human
augcacauacauaugcucuaua

SEQ ID NO: 753473 - RNA, 22 nt, Human
uagcauuccaucacucagcacc

SEQ ID NO: 753474 - RNA, 20 nt, Human
auaugggugaugaugucugu

SEQ ID NO: 753475 - RNA, 22 nt, Human
gcagagcugggucuguauccaa

SEQ ID NO: 753476 - RNA, 22 nt, Human
auaaagcaauagauuguguaau

SEQ ID NO: 753477 - RNA, 22 nt, Human
cuguguucagugcuacugaguu

SEQ ID NO: 753478 - RNA, 22 nt, Human
ccagaaaaggagcugcaggaug

SEQ ID NO: 753479 - RNA, 22 nt, Human
gagcgauugcgggggucagagg

SEQ ID NO: 753480 - RNA, 22 nt, Human
aaggcaauaguauuaaacugga

SEQ ID NO: 753481 - RNA, 23 nt, Human
ucugucacuuucugcuguggagu

SEQ ID NO: 753482 - RNA, 22 nt, Human
ucaggaucggccuuuuuuuaag

SEQ ID NO: 753483 - RNA, 17 nt, Human
ggacaccuggagucucc

SEQ ID NO: 753484 - RNA, 22 nt, Human
aaggaagacacagaugaaguga

SEQ ID NO: 753485 - RNA, 22 nt, Human
agcagccuggucucucgccaau

SEQ ID NO: 753486 - RNA, 17 nt, Human
ccagcugcucccucaga

SEQ ID NO: 753487 - RNA, 22 nt, Human
gggcucuguuuagaucagagau

SEQ ID NO: 753488 - RNA, 22 nt, Human
uuguauucuuuaugacuucccu

SEQ ID NO: 753489 - RNA, 22 nt, Human
uggggccagggaggaccagaca

SEQ ID NO: 753490 - RNA, 22 nt, Human
uuagauauguuuuugcuaaugc

SEQ ID NO: 753491 - RNA, 22 nt, Human
uauggcuugucuuuauaccagg

SEQ ID NO: 753492 - RNA, 22 nt, Human
ugcccugggaacacagaugcca

SEQ ID NO: 753493 - RNA, 19 nt, Human
ucuccaggugccccaaaca

SEQ ID NO: 753494 - RNA, 22 nt, Human
aaaagcaguuuauagucaguug

SEQ ID NO: 753495 - RNA, 22 nt, Human
caaaaguaauugcgguuuuugc

SEQ ID NO: 753496 - RNA, 22 nt, Human
ucccagccggugccuggguccc

SEQ ID NO: 753497 - RNA, 23 nt, Human
gagaaaccucgguaagcaggagg

SEQ ID NO: 753498 - RNA, 22 nt, Human
ucagggucaggacccagcuguu

SEQ ID NO: 753499 - RNA, 22 nt, Human
ugcuccguucuucugcuucuug

SEQ ID NO: 753500 - RNA, 22 nt, Human
acucuggggugaugucucugag

SEQ ID NO: 753501 - RNA, 22 nt, Human
guaugcaucgacucaagucuga

SEQ ID NO: 753502 - RNA, 22 nt, Human
aagggccauugcugagagcagu

SEQ ID NO: 753503 - RNA, 19 nt, Human
agauggggaagagugugag

SEQ ID NO: 753504 - RNA, 22 nt, Human
gggcaggagaagguggaugucc

SEQ ID NO: 753505 - RNA, 17 nt, Human
aggugcuggagcaucag

SEQ ID NO: 753506 - RNA, 22 nt, Human
uggcugagggggcaguucagga

SEQ ID NO: 753507 - RNA, 22 nt, Human
ggagagcugguagcuggcucca

SEQ ID NO: 753508 - RNA, 23 nt, Human
ggcuucagugagagucccugcug

SEQ ID NO: 753509 - RNA, 22 nt, Human
gagcugggagcugggauuugga

SEQ ID NO: 753510 - RNA, 20 nt, Human
ugggcugaggaucaggugcc

SEQ ID NO: 753511 - RNA, 22 nt, Human
ccaccaggacagcccugagggg

SEQ ID NO: 753512 - RNA, 20 nt, Human
ugcagcugguuucacaggga

SEQ ID NO: 753513 - RNA, 22 nt, Human
ucucuuaauucagaggcaguua

SEQ ID NO: 753514 - RNA, 22 nt, Human
uccucuccauauuuucugauuu

SEQ ID NO: 753515 - RNA, 23 nt, Human
agaguuuguuucuaaugagugag

SEQ ID NO: 753516 - RNA, 22 nt, Human
ucuuuauugcuacugguuuguc

SEQ ID NO: 753517 - RNA, 22 nt, Human
caaaagaagcucuuggggcuag

SEQ ID NO: 753518 - RNA, 22 nt, Human
aauucucaggaauuucaucugu

SEQ ID NO: 753519 - RNA, 22 nt, Human
uaggaaaauaucucuuauuggg

SEQ ID NO: 753520 - RNA, 22 nt, Human
gccugccuuugugaggaagcgg

SEQ ID NO: 753521 - RNA, 22 nt, Human
cuaggcugagcugggcugagcu

SEQ ID NO: 753522 - RNA, 22 nt, Human
caguguuuaaucauugugaauu

SEQ ID NO: 753523 - RNA, 22 nt, Human
ccucuguggcccugacucucuu

SEQ ID NO: 753524 - RNA, 22 nt, Human
auguauuugcuuguuauggauu

SEQ ID NO: 753525 - RNA, 19 nt, Human
gggacuggaggauguggag

SEQ ID NO: 753526 - RNA, 22 nt, Human
gcugagucuugagcacugagca

SEQ ID NO: 753527 - RNA, 22 nt, Human
ccagggcuuaacuuuucaggag

SEQ ID NO: 753528 - RNA, 22 nt, Human
uuuguaaaggccugaauuucag

SEQ ID NO: 753529 - RNA, 22 nt, Human
guagaaaaagcaguaagucuca

SEQ ID NO: 753530 - RNA, 22 nt, Human
agauuucagguuggggcagaag

SEQ ID NO: 753531 - RNA, 22 nt, Human
cuuuggaauauuuuauugagaa

SEQ ID NO: 753532 - RNA, 22 nt, Human
uuucauucagcacccugaggug

SEQ ID NO: 753533 - RNA, 22 nt, Human
uaaagaugcuauagugaaggag

SEQ ID NO: 753534 - RNA, 22 nt, Human
agauauuaggaggauucauaau

SEQ ID NO: 753535 - RNA, 22 nt, Human
uggcucuggauuaaucuaggaa

SEQ ID NO: 753536 - RNA, 22 nt, Human
gccaggagaaaaggcgaaugau

SEQ ID NO: 753537 - RNA, 22 nt, Human
uuacacagaugguuaguagagg

SEQ ID NO: 753538 - RNA, 22 nt, Human
cuuuaacaaaugacucuugucu

SEQ ID NO: 753539 - RNA, 22 nt, Human
cacaggaauuagcagccuaaaa

SEQ ID NO: 753540 - RNA, 22 nt, Human
agaugguuuugucuuuaugauu

SEQ ID NO: 753541 - RNA, 22 nt, Human
acagucaaucagaacagcaugu

SEQ ID NO: 753542 - RNA, 19 nt, Human
aaguguguugagccaggau

SEQ ID NO: 753543 - RNA, 22 nt, Human
gggcaccuugggucucaggcaa

SEQ ID NO: 753544 - RNA, 22 nt, Human
agagaguuguaccacacucaua

SEQ ID NO: 753545 - RNA, 22 nt, Human
agcuaaugaaauauuuucugau

SEQ ID NO: 753546 - RNA, 22 nt, Human
cgcauacauagaaacacacaga

SEQ ID NO: 753547 - RNA, 22 nt, Human
acagaacugcagacagugccaa

SEQ ID NO: 753548 - RNA, 22 nt, Human
cucuggcuauggcacggcgcuc

SEQ ID NO: 753549 - RNA, 22 nt, Human
gcuggcuguuggagguaccugc

SEQ ID NO: 753550 - RNA, 22 nt, Human
aucuccuuggucucguuccagg

SEQ ID NO: 753551 - RNA, 22 nt, Human
ucugcacagagacccuugccag

SEQ ID NO: 753552 - RNA, 21 nt, Human
gcugcucgagauccagugcuu

SEQ ID NO: 753553 - RNA, 22 nt, Human
ucucccacgguacaggauaaac

SEQ ID NO: 753554 - RNA, 22 nt, Human
cccaggcucccaggugggacaa

SEQ ID NO: 753555 - RNA, 22 nt, Human
ugucucaucucuuaaccccacu

SEQ ID NO: 753556 - RNA, 22 nt, Human
uccaagcuguauguuccuagag

SEQ ID NO: 753557 - RNA, 22 nt, Human
uuacaugggccauuuagacaug

SEQ ID NO: 753558 - RNA, 22 nt, Human
gcugcugucucaugcgaugcgg

SEQ ID NO: 753559 - RNA, 22 nt, Human
aggccuguuggcgugggcucua

SEQ ID NO: 753560 - RNA, 20 nt, Human
cuucaggacccauccucccc

SEQ ID NO: 753561 - RNA, 22 nt, Human
aagucacacugcugggaacucu

SEQ ID NO: 753562 - RNA, 22 nt, Human
caggagccgccaggcacguugg

SEQ ID NO: 753563 - RNA, 22 nt, Human
cauggcugcgagaagagugggu

SEQ ID NO: 753564 - RNA, 22 nt, Human
gcauugaucuguaugcauuaag

SEQ ID NO: 753565 - RNA, 22 nt, Human
gucuuguuugggauguggaugg

SEQ ID NO: 753566 - RNA, 22 nt, Human
acucagaaccauuuacucugag

SEQ ID NO: 753567 - RNA, 20 nt, Human
ggcacuggaagcacacagga

SEQ ID NO: 753568 - RNA, 22 nt, Human
acaggcauugggauggagguug

SEQ ID NO: 753569 - RNA, 22 nt, Human
gauuuccauuuucaacuccugc

SEQ ID NO: 753570 - RNA, 22 nt, Human
gaggagggcuuuguugauguua

SEQ ID NO: 753571 - RNA, 22 nt, Human
guaugaaggcgagagcccacua

SEQ ID NO: 753572 - RNA, 21 nt, Human
uaauuuauucagcacaguguu

SEQ ID NO: 753573 - RNA, 22 nt, Human
agcugcugggauacaguaguga

SEQ ID NO: 753574 - RNA, 22 nt, Human
uggccucagauuucaggggugg

SEQ ID NO: 753575 - RNA, 22 nt, Human
agccuucauaaucuugggcuuu

SEQ ID NO: 753576 - RNA, 22 nt, Human
agcucugggcugacaugcuccc

SEQ ID NO: 753577 - RNA, 22 nt, Human
agaugcugcuccacaggccagg

SEQ ID NO: 753578 - RNA, 22 nt, Human
ucaugcaguuacuguuaugcaa

SEQ ID NO: 753579 - RNA, 22 nt, Human
gagaagcaaucaguggccaccc

SEQ ID NO: 753580 - RNA, 22 nt, Human
ugggcucugugccagguuggug

SEQ ID NO: 753581 - RNA, 22 nt, Human
ucuuugcauggacauguguuuu

SEQ ID NO: 753582 - RNA, 22 nt, Human
uccagacccaugacccugggga

SEQ ID NO: 753583 - RNA, 21 nt, Human
uggcucuggguaggagagugc

SEQ ID NO: 753584 - RNA, 22 nt, Human
auuuggauucuuauuuagcacu

SEQ ID NO: 753585 - RNA, 22 nt, Human
agcuguggccagaugugagcgg

SEQ ID NO: 753586 - RNA, 20 nt, Human
cagaugggacguggaggagu

SEQ ID NO: 753587 - RNA, 22 nt, Human
gccucaguaaccuuaggggaua

SEQ ID NO: 753588 - RNA, 22 nt, Human
gaggcuccagcgacaccuaggc

SEQ ID NO: 753589 - RNA, 22 nt, Human
cuuccagcuuguggcgcuuucc

SEQ ID NO: 753590 - RNA, 22 nt, Human
uugugcuccuaugagaaucuaa

SEQ ID NO: 753591 - RNA, 22 nt, Human
acacugacugggacagaagacc

SEQ ID NO: 753592 - RNA, 22 nt, Human
uuggaaacgucaccuuuuccuu

SEQ ID NO: 753593 - RNA, 22 nt, Human
uuccucagcuggccugauuggg

SEQ ID NO: 753594 - RNA, 22 nt, Human
cagcuccuguuggucuugagga

SEQ ID NO: 753595 - RNA, 22 nt, Human
agaguacacuguacacacaauu

SEQ ID NO: 753596 - RNA, 22 nt, Human
augcaguacauacaaacacuga

SEQ ID NO: 753597 - RNA, 22 nt, Human
ugccaggcaacugcccagccau

SEQ ID NO: 753598 - RNA, 22 nt, Human
ggcacauguaugugggagugug

SEQ ID NO: 753599 - RNA, 22 nt, Human
gguugccggggcaggacuggaa

SEQ ID NO: 753600 - RNA, 22 nt, Human
cugcaguaguuuuugacucuag

SEQ ID NO: 753601 - RNA, 22 nt, Human
ccaggcagagggauccccaucc

SEQ ID NO: 753602 - RNA, 22 nt, Human
gcacacuuaauacucacugugc

SEQ ID NO: 753603 - RNA, 22 nt, Human
aaagccagagcaagcugucaca

SEQ ID NO: 753604 - RNA, 22 nt, Human
ucauuuaauugguuuugcucgu

SEQ ID NO: 753605 - RNA, 22 nt, Human
ccucucuuuccuacaccuugga

SEQ ID NO: 753606 - RNA, 22 nt, Human
gagagaauguacaugcuagggg

SEQ ID NO: 753607 - RNA, 22 nt, Human
uuauuaggaaaaggucagaugu

SEQ ID NO: 753608 - RNA, 22 nt, Human
ccagaaaaugcagaacauagaa

SEQ ID NO: 753609 - RNA, 22 nt, Human
gaaggcauuucagagaucucug

SEQ ID NO: 753610 - RNA, 22 nt, Human
aucugggcucgaauccuagcuc

SEQ ID NO: 753611 - RNA, 22 nt, Human
uuauguacaauguuaauguaaa

SEQ ID NO: 753612 - RNA, 19 nt, Human
gucuucugaauguggcugc

SEQ ID NO: 753613 - RNA, 22 nt, Human
aaacacucauguguuacucucc

SEQ ID NO: 753614 - RNA, 22 nt, Human
ugucugugcccaaggcucccgg

SEQ ID NO: 753615 - RNA, 22 nt, Human
aguuuuucugggaggcacugcu

SEQ ID NO: 753616 - RNA, 20 nt, Human
agcaggaaugaugcuuucau

SEQ ID NO: 753617 - RNA, 22 nt, Human
ucauuucacuucucuagggaga

SEQ ID NO: 753618 - RNA, 22 nt, Human
uguuuucagaugcagggacaca

SEQ ID NO: 753619 - RNA, 22 nt, Human
ucuguaaagacuccaaaagcca

SEQ ID NO: 753620 - RNA, 22 nt, Human
acaguguuguggcucuuaauag

SEQ ID NO: 753621 - RNA, 22 nt, Human
ucuucagcagagaauuaugaug

SEQ ID NO: 753622 - RNA, 16 nt, Human
ggcaccagugaacaca

SEQ ID NO: 753623 - RNA, 22 nt, Human
aagcugaggcuccccugaggga

SEQ ID NO: 753624 - RNA, 22 nt, Human
aaagcacaugaguaguguagua

SEQ ID NO: 753625 - RNA, 22 nt, Human
aucaccuggccauuggguuaac

SEQ ID NO: 753626 - RNA, 22 nt, Human
cacagucaauguagaaauauga

SEQ ID NO: 753627 - RNA, 22 nt, Human
agcaguuauauugaaauaaaaa

SEQ ID NO: 753628 - RNA, 22 nt, Human
uuucugcuuccuugagaaggag

SEQ ID NO: 753629 - RNA, 22 nt, Human
ccauccaggcugugggugagcu

SEQ ID NO: 753630 - RNA, 22 nt, Human
agcugccugggcuuguacaccu

SEQ ID NO: 753631 - RNA, 22 nt, Human
acaugcuuugcacuuacaucau

SEQ ID NO: 753632 - RNA, 22 nt, Human
cugaaaaacgggauuuggcugg

SEQ ID NO: 753633 - RNA, 22 nt, Human
ggcagggcccugauuccugggg

SEQ ID NO: 753634 - RNA, 22 nt, Human
uuggaucuuaugaagguggcau

SEQ ID NO: 753635 - RNA, 22 nt, Human
acaggacagguaggauucgcag

SEQ ID NO: 753636 - RNA, 22 nt, Human
ucacaugcagucacugagcagg

SEQ ID NO: 753637 - RNA, 22 nt, Human
gauacagcucuggccagaugug

SEQ ID NO: 753638 - RNA, 22 nt, Human
aaaugcagguucuugagccaag

SEQ ID NO: 753639 - RNA, 20 nt, Human
cugcugugugugccucagcc

SEQ ID NO: 753640 - RNA, 22 nt, Human
gcccuccauggugauccaggcc

SEQ ID NO: 753641 - RNA, 22 nt, Human
cucccucacaaagcauucucuu

SEQ ID NO: 753642 - RNA, 22 nt, Human
gcugccugcccugggucaucug

SEQ ID NO: 753643 - RNA, 22 nt, Human
acuuuaaagcagaauggcuaug

SEQ ID NO: 753644 - RNA, 22 nt, Human
ggagccagcagggugacacuga

SEQ ID NO: 753645 - RNA, 22 nt, Human
aagcaggcauuccagagacaau

SEQ ID NO: 753646 - RNA, 22 nt, Human
aguuuuauaucuuccauugguu

SEQ ID NO: 753647 - RNA, 22 nt, Human
cacauuguauuguggaaaguua

SEQ ID NO: 753648 - RNA, 22 nt, Human
uaccuggaaucacagaggcuga

SEQ ID NO: 753649 - RNA, 22 nt, Human
agaccaagugcaggugccacua

SEQ ID NO: 753650 - RNA, 22 nt, Human
ucauacaauucaaucucugauu

SEQ ID NO: 753651 - RNA, 22 nt, Human
caggaaugacccaacaguuuca

SEQ ID NO: 753652 - RNA, 22 nt, Human
uauuuucuggacagucuugcuu

SEQ ID NO: 753653 - RNA, 22 nt, Human
ucagaguggugguuuugccuuc

SEQ ID NO: 753654 - RNA, 19 nt, Human
agugaguggggaaggcccu

SEQ ID NO: 753655 - RNA, 22 nt, Human
gcucuugggggacagauggagu

SEQ ID NO: 753656 - RNA, 22 nt, Human
gcauggcuuccaaaagugcuaa

SEQ ID NO: 753657 - RNA, 22 nt, Human
ccagugugccaauuuacagcug

SEQ ID NO: 753658 - RNA, 22 nt, Human
gcagcugcucacauucucacaa

SEQ ID NO: 753659 - RNA, 22 nt, Human
augauauagagaguagauuaaa

SEQ ID NO: 753660 - RNA, 22 nt, Human
uccaaagaaccuggcuacuguc

SEQ ID NO: 753661 - RNA, 22 nt, Human
ccugugucaccggaacggagga

SEQ ID NO: 753662 - RNA, 22 nt, Human
uccuggcugccgucguccugcg

SEQ ID NO: 753663 - RNA, 22 nt, Human
uaugcaaaucauuagauuuccu

SEQ ID NO: 753664 - RNA, 22 nt, Human
aaacugagaccgaaagggguag

SEQ ID NO: 753665 - RNA, 23 nt, Human
cccagcagagaugaggagggguc

SEQ ID NO: 753666 - RNA, 22 nt, Human
ugcuccagggccuccagugggg

SEQ ID NO: 753667 - RNA, 22 nt, Human
uccugggagcacaugguccugc

SEQ ID NO: 753668 - RNA, 22 nt, Human
auuuggaagaaaucugucacag

SEQ ID NO: 753669 - RNA, 22 nt, Human
acuuagugcccuggcccuuaca

SEQ ID NO: 753670 - RNA, 22 nt, Human
aacacuuaaggagagaucaaau

SEQ ID NO: 753671 - RNA, 22 nt, Human
uuaaucacagcucugccaugag

SEQ ID NO: 753672 - RNA, 22 nt, Human
cauuuucucaaugaacccucuu

SEQ ID NO: 753673 - RNA, 22 nt, Human
cugggucugugcccagggaccu

SEQ ID NO: 753674 - RNA, 22 nt, Human
uuaugcuaagugcaacaagcca

SEQ ID NO: 753675 - RNA, 22 nt, Human
gugcccaguugaggccaggacu

SEQ ID NO: 753676 - RNA, 23 nt, Human
agcagcuggggugcucuuuuguc

SEQ ID NO: 753677 - RNA, 21 nt, Human
gcaggcuggucaaaccucagu

SEQ ID NO: 753678 - RNA, 22 nt, Human
ugcaugauagagaugguauuag

SEQ ID NO: 753679 - RNA, 22 nt, Human
uucuuuuuaucuucccauaaga

SEQ ID NO: 753680 - RNA, 22 nt, Human
uuauacaguuuauacuuagaau

SEQ ID NO: 753681 - RNA, 22 nt, Human
aggcugccuguuccaaucuccu

SEQ ID NO: 753682 - RNA, 22 nt, Human
ugggaagggccgauggagccuc

SEQ ID NO: 753683 - RNA, 22 nt, Human
ucagcaaaggaccagcacaggc

SEQ ID NO: 753684 - RNA, 22 nt, Human
ggggcuccagucuucacauuuu

SEQ ID NO: 753685 - RNA, 22 nt, Human
aaggcagagauauucuugaucu

SEQ ID NO: 753686 - RNA, 22 nt, Human
agaagccaccagcugaggaaga

SEQ ID NO: 753687 - RNA, 19 nt, Human
ugggcagcucccucugucc

SEQ ID NO: 753688 - RNA, 22 nt, Human
cacagcuucuccccgcugcggc

SEQ ID NO: 753689 - RNA, 23 nt, Human
uggcuucaacucugucggcagcc

SEQ ID NO: 753690 - RNA, 19 nt, Human
uucacaauuaugaaauuag

SEQ ID NO: 753691 - RNA, 22 nt, Human
uuucucuccuccaaaccaaaga

SEQ ID NO: 753692 - RNA, 22 nt, Human
uaggcucccagaucguuugcug

SEQ ID NO: 753693 - RNA, 22 nt, Human
cuguuauuuggaggaugcuugg

SEQ ID NO: 753694 - RNA, 22 nt, Human
ucugaggucauaaagcaacuuu

SEQ ID NO: 753695 - RNA, 22 nt, Human
gcugcaggggggucuggacuug

SEQ ID NO: 753696 - RNA, 22 nt, Human
acaguggaaaugugggagggga

SEQ ID NO: 753697 - RNA, 22 nt, Human
ugaaaauucucaggcucacccc

SEQ ID NO: 753698 - RNA, 22 nt, Human
cccagccuacucugccauagca

SEQ ID NO: 753699 - RNA, 19 nt, Human
ccuuggaguuccaggugga

SEQ ID NO: 753700 - RNA, 22 nt, Human
ucucuucuaauuuucccgagua

SEQ ID NO: 753701 - RNA, 22 nt, Human
uaccaguaauugcuugugcugu

SEQ ID NO: 753702 - RNA, 22 nt, Human
ucugccuguucccgauuccaug

SEQ ID NO: 753703 - RNA, 22 nt, Human
uggggaggaagucagauuucag

SEQ ID NO: 753704 - RNA, 22 nt, Human
ccugcagaggucaggccagaaa

SEQ ID NO: 753705 - RNA, 22 nt, Human
uauacacauguguguauucaua

SEQ ID NO: 753706 - RNA, 22 nt, Human
guauaggcauuuugauuagagu

SEQ ID NO: 753707 - RNA, 22 nt, Human
cagguugggcugcgaggaggag

SEQ ID NO: 753708 - RNA, 22 nt, Human
uuauagcaggugacuaaugagu

SEQ ID NO: 753709 - RNA, 21 nt, Human
caggucuggugaacacucuca

SEQ ID NO: 753710 - RNA, 22 nt, Human
acugccagaggagguaucugaa

SEQ ID NO: 753711 - RNA, 22 nt, Human
uuccauuuauucuuguccagau

SEQ ID NO: 753712 - RNA, 21 nt, Human
agcaggcuuuggaguggggcu

SEQ ID NO: 753713 - RNA, 22 nt, Human
cuuguaauggcagagaccuguc

SEQ ID NO: 753714 - RNA, 23 nt, Human
ucucagaggauuccugggccuug

SEQ ID NO: 753715 - RNA, 22 nt, Human
acauagaaccuggcacauagua

SEQ ID NO: 753716 - RNA, 22 nt, Human
ucagccaggcagcccccugguc

SEQ ID NO: 753717 - RNA, 22 nt, Human
agggccugucagcgguguccug

SEQ ID NO: 753718 - RNA, 22 nt, Human
uacagaaucuaugcuucacagu

SEQ ID NO: 753719 - RNA, 20 nt, Human
cacagaacaaauugcaggac

SEQ ID NO: 753720 - RNA, 22 nt, Human
cacuuuauaaaauuggugugag

SEQ ID NO: 753721 - RNA, 22 nt, Human
uucacagugguagugcauuuag

SEQ ID NO: 753722 - RNA, 22 nt, Human
uacagccaugguuaauuuaccu

SEQ ID NO: 753723 - RNA, 22 nt, Human
aaagcagcggugucuuuacugc

SEQ ID NO: 753724 - RNA, 21 nt, Human
ugguacaccuugccugucaga

SEQ ID NO: 753725 - RNA, 22 nt, Human
ggcaggugcccagagagcacga

SEQ ID NO: 753726 - RNA, 22 nt, Human
auggcauucacauuuccagaga

SEQ ID NO: 753727 - RNA, 22 nt, Human
cuggccuuguuccuccccaagu

SEQ ID NO: 753728 - RNA, 22 nt, Human
ugcauauuuuauaaagauggaa

SEQ ID NO: 753729 - RNA, 22 nt, Human
ggcugggcugcggcuguaccug

SEQ ID NO: 753730 - RNA, 22 nt, Human
ucauuuacaugucuuucucuga

SEQ ID NO: 753731 - RNA, 22 nt, Human
uacaacacugguucgacaugug

SEQ ID NO: 753732 - RNA, 22 nt, Human
uaaaugucaaugugauuuauaa

SEQ ID NO: 753733 - RNA, 22 nt, Human
ugugccugaguuggcugaguac

SEQ ID NO: 753734 - RNA, 22 nt, Human
auugacaauucuaugcagagca

SEQ ID NO: 753735 - RNA, 22 nt, Human
acuuaucaguugucucuaaugu

SEQ ID NO: 753736 - RNA, 18 nt, Human
ccagcaugccagaggcug

SEQ ID NO: 753737 - RNA, 22 nt, Human
uucacaagucuggaauaugcua

SEQ ID NO: 753738 - RNA, 22 nt, Human
ugcaaacaauuuccuauaaagu

SEQ ID NO: 753739 - RNA, 17 nt, Human
aaguccagccugcagcu

SEQ ID NO: 753740 - RNA, 20 nt, Human
gaggagccaccuugagcugg

SEQ ID NO: 753741 - RNA, 22 nt, Human
auuugcuuguccuggugacugu

SEQ ID NO: 753742 - RNA, 20 nt, Human
agguggcuccugcugggggu

SEQ ID NO: 753743 - RNA, 22 nt, Human
uucagaaaugaauauugguauu

SEQ ID NO: 753744 - RNA, 22 nt, Human
aaugccguagacuuuuacuuau

SEQ ID NO: 753745 - RNA, 23 nt, Human
acauuucauauaaaagggaucag

SEQ ID NO: 753746 - RNA, 22 nt, Human
agaguucacacucagugcaccc

SEQ ID NO: 753747 - RNA, 22 nt, Human
ucagccaggcacaauggcagcu

SEQ ID NO: 753748 - RNA, 22 nt, Human
agcugaggguucgguguccaca

SEQ ID NO: 753749 - RNA, 22 nt, Human
uguaugcuugaguguguauacu

SEQ ID NO: 753750 - RNA, 18 nt, Human
ucagagagcagcuuuauu

SEQ ID NO: 753751 - RNA, 22 nt, Human
ugggaagacuccucaggaggcg

SEQ ID NO: 753752 - RNA, 23 nt, Human
gggaccaggcccuuccugguuug

SEQ ID NO: 753753 - RNA, 22 nt, Human
cacaugcuuagauuucagugga

SEQ ID NO: 753754 - RNA, 22 nt, Human
ggaaggaucuggcugaaaucca

SEQ ID NO: 753755 - RNA, 22 nt, Human
agaagccacuggagguugagau

SEQ ID NO: 753756 - RNA, 22 nt, Human
ggccagcuucucugcugccugu

SEQ ID NO: 753757 - RNA, 22 nt, Human
cuccacucuggggugggugaga

SEQ ID NO: 753758 - RNA, 22 nt, Human
gacagcauggugucuguucagg

SEQ ID NO: 753759 - RNA, 22 nt, Human
ucacaugagucacuaucuuaau

SEQ ID NO: 753760 - RNA, 22 nt, Human
ugccugcauuuuguggcuggcu

SEQ ID NO: 753761 - RNA, 22 nt, Human
uggcauuuggcuuacuuauguu

SEQ ID NO: 753762 - RNA, 22 nt, Human
gcugaauaggggucccaaagau

SEQ ID NO: 753763 - RNA, 22 nt, Human
ucauuuaaaauguaccaggauu

SEQ ID NO: 753764 - RNA, 22 nt, Human
aguguuaaugguguauauuagg

SEQ ID NO: 753765 - RNA, 22 nt, Human
ccagcucucugcagaaaggacu

SEQ ID NO: 753766 - RNA, 22 nt, Human
gccagcugguaggcaccuagcc

SEQ ID NO: 753767 - RNA, 21 nt, Human
aguggcugucaagggggccuu

SEQ ID NO: 753768 - RNA, 22 nt, Human
aggaacuggggcuauucacccu

SEQ ID NO: 753769 - RNA, 22 nt, Human
uuagcaaaguuugccaucuagu

SEQ ID NO: 753770 - RNA, 22 nt, Human
uuaacacuccuaacuacagucu

SEQ ID NO: 753771 - RNA, 22 nt, Human
aagcuggagugcagugcaaugg

SEQ ID NO: 753772 - RNA, 22 nt, Human
ggagagccugugcagccggguu

SEQ ID NO: 753773 - RNA, 17 nt, Human
caagagagaugacugga

SEQ ID NO: 753774 - RNA, 22 nt, Human
auauuauagacagagucuucug

SEQ ID NO: 753775 - RNA, 21 nt, Human
ugcauuucuaacuaguugacc

SEQ ID NO: 753776 - RNA, 22 nt, Human
caagguuuugcuuguaagggaa

SEQ ID NO: 753777 - RNA, 22 nt, Human
cugcuucauauuucauagugau

SEQ ID NO: 753778 - RNA, 22 nt, Human
ggccucugcuuaugcugaugac

SEQ ID NO: 753779 - RNA, 22 nt, Human
cagagguacaagcuaaguuggg

SEQ ID NO: 753780 - RNA, 22 nt, Human
accaggagccauagagucaggc

SEQ ID NO: 753781 - RNA, 22 nt, Human
uucuuuuuggauagcugaugaa

SEQ ID NO: 753782 - RNA, 22 nt, Human
auuaugaaguugagggacccug

SEQ ID NO: 753783 - RNA, 22 nt, Human
acagaaggacuugagaaagaca

SEQ ID NO: 753784 - RNA, 22 nt, Human
ugcagggcuacaggacuacaac

SEQ ID NO: 753785 - RNA, 22 nt, Human
ccuguggcugccccgcuguugg

SEQ ID NO: 753786 - RNA, 22 nt, Human
cucugcuuuuaugugccggcgc

SEQ ID NO: 753787 - RNA, 22 nt, Human
ugugaugcuggagugcgaauau

SEQ ID NO: 753788 - RNA, 22 nt, Human
aaugcagugagccauuaaaugg

SEQ ID NO: 753789 - RNA, 23 nt, Human
gcucccugugcuccaggagaugc

SEQ ID NO: 753790 - RNA, 22 nt, Human
aaagauuaaaucaaauugguca

SEQ ID NO: 753791 - RNA, 22 nt, Human
guuuccuagaucaguguucuua

SEQ ID NO: 753792 - RNA, 19 nt, Human
uuuccuaaaaagcugugcu

SEQ ID NO: 753793 - RNA, 22 nt, Human
agggcccauagaucgucagcuu

SEQ ID NO: 753794 - RNA, 20 nt, Human
acacauagauaagaagcuga

SEQ ID NO: 753795 - RNA, 22 nt, Human
gagagcacaugaacauggagga

SEQ ID NO: 753796 - RNA, 22 nt, Human
auggcccaggccaggauccagc

SEQ ID NO: 753797 - RNA, 22 nt, Human
uuagcagcaauggcaucaacua

SEQ ID NO: 753798 - RNA, 22 nt, Human
uccugacuuggcuguuggcccu

SEQ ID NO: 753799 - RNA, 22 nt, Human
cugggccuggcguuccaggcug

SEQ ID NO: 753800 - RNA, 22 nt, Human
gcacugaaaauguuggauucca

SEQ ID NO: 753801 - RNA, 22 nt, Human
cagugguugguagauacuugag

SEQ ID NO: 753802 - RNA, 22 nt, Human
ucagcugaguucuagagcacuc

SEQ ID NO: 753803 - RNA, 20 nt, Human
ggcaugagaugugagggagg

SEQ ID NO: 753804 - RNA, 22 nt, Human
augcacaauuaggauauagcuu

SEQ ID NO: 753805 - RNA, 22 nt, Human
uucucuucuguucagugcccaa

SEQ ID NO: 753806 - RNA, 22 nt, Human
ucaaggaggugcuuggcuucac

SEQ ID NO: 753807 - RNA, 22 nt, Human
ugggaagcuacucaugcaggca

SEQ ID NO: 753808 - RNA, 22 nt, Human
uaagacacaguccgcacucucu

SEQ ID NO: 753809 - RNA, 22 nt, Human
ugaggggagaagcagcagccug

SEQ ID NO: 753810 - RNA, 22 nt, Human
gcugcaggagcuggagcugugg

SEQ ID NO: 753811 - RNA, 22 nt, Human
aucaggaugaagcuguagcgaa

SEQ ID NO: 753812 - RNA, 22 nt, Human
ggaugggaacuugguagggcau

SEQ ID NO: 753813 - RNA, 22 nt, Human
cagugccucaggccagccugca

SEQ ID NO: 753814 - RNA, 22 nt, Human
gcucugggaacugacugccuuc

SEQ ID NO: 753815 - RNA, 22 nt, Human
ucuguguauuugugaccuguau

SEQ ID NO: 753816 - RNA, 22 nt, Human
uagacuauuucuuuugcauagg

SEQ ID NO: 753817 - RNA, 22 nt, Human
ccuuuguggggcgguggguaau

SEQ ID NO: 753818 - RNA, 22 nt, Human
uucugccuucaguccucugacu

SEQ ID NO: 753819 - RNA, 22 nt, Human
uugcuauaaaugguuucauauu

SEQ ID NO: 753820 - RNA, 22 nt, Human
ucagugguuaaguucuguccac

SEQ ID NO: 753821 - RNA, 22 nt, Human
cucagagcaaugaacaugcaaa

SEQ ID NO: 753822 - RNA, 22 nt, Human
augucuuucucacagccaguuc

SEQ ID NO: 753823 - RNA, 22 nt, Human
acagcugggugcugcucagagc

SEQ ID NO: 753824 - RNA, 22 nt, Human
uccugcgagugcgcuuuugguc

SEQ ID NO: 753825 - RNA, 22 nt, Human
aucugcuucagugauaugugaa

SEQ ID NO: 753826 - RNA, 22 nt, Human
ggcaggcuguucaccugcuuuu

SEQ ID NO: 753827 - RNA, 22 nt, Human
ucuuuaauauaaaggaaugaau

SEQ ID NO: 753828 - RNA, 20 nt, Human
acaauuuccucacuauaugc

SEQ ID NO: 753829 - RNA, 22 nt, Human
uggaggaauaacagcaaccuua

SEQ ID NO: 753830 - RNA, 22 nt, Human
caaauacucuggauguguuugu

SEQ ID NO: 753831 - RNA, 22 nt, Human
uaggucuccuggccuagagauu

SEQ ID NO: 753832 - RNA, 22 nt, Human
aauuggaaaaugcuacauauca

SEQ ID NO: 753833 - RNA, 22 nt, Human
ugguggccaauucacagggcuc

SEQ ID NO: 753834 - RNA, 22 nt, Human
aauagcaugcauccugcauaga

SEQ ID NO: 753835 - RNA, 22 nt, Human
agguggggcugggaaagauucc

SEQ ID NO: 753836 - RNA, 22 nt, Human
uauuccugggccccauuccaga

SEQ ID NO: 753837 - RNA, 22 nt, Human
uaugaaauuucuaguucugcuu

SEQ ID NO: 753838 - RNA, 22 nt, Human
auacaaugggugcaaagaugug

SEQ ID NO: 753839 - RNA, 22 nt, Human
uauaggaaguaauuguugccug

SEQ ID NO: 753840 - RNA, 22 nt, Human
agacauaagccagucacucacu

SEQ ID NO: 753841 - RNA, 22 nt, Human
uucuuuucugcagcugguauuu

SEQ ID NO: 753842 - RNA, 22 nt, Human
agccugccuugggcugcuugag

SEQ ID NO: 753843 - RNA, 22 nt, Human
gcauuaauguaagacccacucc

SEQ ID NO: 753844 - RNA, 22 nt, Human
ccguauuauaaguuuuuccuuc

SEQ ID NO: 753845 - RNA, 22 nt, Human
accaggggaugguuggcacugu

SEQ ID NO: 753846 - RNA, 22 nt, Human
uacacaggggagcaugguugac

SEQ ID NO: 753847 - RNA, 22 nt, Human
caggcacacaggcucccugggc

SEQ ID NO: 753848 - RNA, 23 nt, Human
guccuauuuuuugaaauacugag

SEQ ID NO: 753849 - RNA, 23 nt, Human
caugggagugagaaugccagcuc

SEQ ID NO: 753850 - RNA, 22 nt, Human
agcccuggggcuggugcuuacc

SEQ ID NO: 753851 - RNA, 22 nt, Human
agccagcaggaacgucuagguu

SEQ ID NO: 753852 - RNA, 22 nt, Human
caggagcuucugcccauggcca

SEQ ID NO: 753853 - RNA, 22 nt, Human
aucucagggcuggagcccugga

SEQ ID NO: 753854 - RNA, 22 nt, Human
uuuaaauguucaugauacugaa

SEQ ID NO: 753855 - RNA, 22 nt, Human
aaaucaacuugugacguuaggu

SEQ ID NO: 753856 - RNA, 22 nt, Human
cugagcagaagggugcacgugc

SEQ ID NO: 753857 - RNA, 22 nt, Human
aagcagcagcaggauuaaagag

SEQ ID NO: 753858 - RNA, 22 nt, Human
gcaugggcaagaggacuggggg

SEQ ID NO: 753859 - RNA, 22 nt, Human
gucuugucaguguuggcagcuu

SEQ ID NO: 753860 - RNA, 22 nt, Human
ccugcccagcuucccgagugca

SEQ ID NO: 753861 - RNA, 22 nt, Human
gaccuggcuuugggccccggca

SEQ ID NO: 753862 - RNA, 20 nt, Human
ggaaacauuuuuauuuccau

SEQ ID NO: 753863 - RNA, 22 nt, Human
uauguacucuaauuugucucau

SEQ ID NO: 753864 - RNA, 22 nt, Human
acacauuuauggaucgcagaaa

SEQ ID NO: 753865 - RNA, 22 nt, Human
caggaggcagaggaugcccagu

SEQ ID NO: 753866 - RNA, 22 nt, Human
auacuucaugcuucaugucugu

SEQ ID NO: 753867 - RNA, 22 nt, Human
gucuccaguuacagcagccagg

SEQ ID NO: 753868 - RNA, 22 nt, Human
gagcucuguccacacuuggaga

SEQ ID NO: 753869 - RNA, 22 nt, Human
ccucaguguguuuggggugagg

SEQ ID NO: 753870 - RNA, 22 nt, Human
uggaagacagugacugguugug

SEQ ID NO: 753871 - RNA, 22 nt, Human
ugggucagaggaccucguggcc

SEQ ID NO: 753872 - RNA, 22 nt, Human
accugaauuugaaauguuuauu

SEQ ID NO: 753873 - RNA, 22 nt, Human
ggcccagcuuucauuccuugcu

SEQ ID NO: 753874 - RNA, 22 nt, Human
ugucuugacuuuagagccagga

SEQ ID NO: 753875 - RNA, 22 nt, Human
aaaggccuugagcugggugcca

SEQ ID NO: 753876 - RNA, 22 nt, Human
cuagguggugguggguugacau

SEQ ID NO: 753877 - RNA, 22 nt, Human
aauguuaaaaccuucagugcuu

SEQ ID NO: 753878 - RNA, 19 nt, Human
uggcagccuccacuuuugc

SEQ ID NO: 753879 - RNA, 22 nt, Human
aaggcugauuagacugauagcu

SEQ ID NO: 753880 - RNA, 22 nt, Human
ggcaaggccuugcccagcauuc

SEQ ID NO: 753881 - RNA, 22 nt, Human
cagaugcuuuugauucuggggu

SEQ ID NO: 753882 - RNA, 22 nt, Human
agugccuugugugugggcagcc

SEQ ID NO: 753883 - RNA, 22 nt, Human
auaagguuaacaucaucaguga

SEQ ID NO: 753884 - RNA, 22 nt, Human
auucugaguacaacaagauguu

SEQ ID NO: 753885 - RNA, 22 nt, Human
cagcugccacaccucuuucucu

SEQ ID NO: 753886 - RNA, 22 nt, Human
auccagagacccaaggacagaa

SEQ ID NO: 753887 - RNA, 23 nt, Human
uggaaucagccuuuuuuccaagg

SEQ ID NO: 753888 - RNA, 22 nt, Human
ucaggcucaaagggccggauga

SEQ ID NO: 753889 - RNA, 19 nt, Human
acccucugccacaagccuc

SEQ ID NO: 753890 - RNA, 22 nt, Human
uccugagcaacacagcuaagug

SEQ ID NO: 753891 - RNA, 22 nt, Human
cagcuggcagaaccugcaucca

SEQ ID NO: 753892 - RNA, 22 nt, Human
augaagcugguuuuggcuuggg

SEQ ID NO: 753893 - RNA, 22 nt, Human
ccagaucuucuuuucagugucu

SEQ ID NO: 753894 - RNA, 22 nt, Human
ugagcccagagcccuuguaggg

SEQ ID NO: 753895 - RNA, 22 nt, Human
uggagagcagggcuggaguuca

SEQ ID NO: 753896 - RNA, 22 nt, Human
ucuuccucucuaauugaucaga

SEQ ID NO: 753897 - RNA, 22 nt, Human
ugucuuuguuauuguggacagg

SEQ ID NO: 753898 - RNA, 22 nt, Human
ugcacagcugccuccucucugc

SEQ ID NO: 753899 - RNA, 17 nt, Human
gucuggaguggccuuca

SEQ ID NO: 753900 - RNA, 21 nt, Human
aggcucucauccagggaccca

SEQ ID NO: 753901 - RNA, 22 nt, Human
uacugcauagacacugggauau

SEQ ID NO: 753902 - RNA, 22 nt, Human
ucaaagcaauuucaccagugcc

SEQ ID NO: 753903 - RNA, 22 nt, Human
gcugcaggaugaggcucugcuc

SEQ ID NO: 753904 - RNA, 22 nt, Human
gcucacaggucuguggcuauug

SEQ ID NO: 753905 - RNA, 22 nt, Human
aaauaacagucagggacaacau

SEQ ID NO: 753906 - RNA, 22 nt, Human
ucagagaacacagaggugaugu

SEQ ID NO: 753907 - RNA, 22 nt, Human
caggaggccaacugugggacuu

SEQ ID NO: 753908 - RNA, 22 nt, Human
uugguuuguucaccaucaagca

SEQ ID NO: 753909 - RNA, 22 nt, Human
uguuuucagucauauagcaggu

SEQ ID NO: 753910 - RNA, 22 nt, Human
ggugguugcauaggccagcagc

SEQ ID NO: 753911 - RNA, 22 nt, Human
agauaucaccaguuuuacauac

SEQ ID NO: 753912 - RNA, 22 nt, Human
gaaauauacaugaagucggcug

SEQ ID NO: 753913 - RNA, 22 nt, Human
aaggcagcaagaauuccagguu

SEQ ID NO: 753914 - RNA, 21 nt, Human
uggacuggugaguuuaggcug

SEQ ID NO: 753915 - RNA, 22 nt, Human
ugcucuucggggccacugcuug

SEQ ID NO: 753916 - RNA, 21 nt, Human
uuguucuuccagaagcaaagu

SEQ ID NO: 753917 - RNA, 22 nt, Human
ggggauggugggaaggcaaucu

SEQ ID NO: 753918 - RNA, 22 nt, Human
aacauauucagaugccaagucc

SEQ ID NO: 753919 - RNA, 22 nt, Human
aaugcaaagugaggugaguggc

SEQ ID NO: 753920 - RNA, 22 nt, Human
uuuacagaaugucaauuucuau

SEQ ID NO: 753921 - RNA, 22 nt, Human
gauacaagacuaauaggaaaca

SEQ ID NO: 753922 - RNA, 22 nt, Human
cauucaaauuaagauuuuguua

SEQ ID NO: 753923 - RNA, 22 nt, Human
acugagggugcacaggcaggca

SEQ ID NO: 753924 - RNA, 22 nt, Human
agacaguggaucgggaugcacu

SEQ ID NO: 753925 - RNA, 22 nt, Human
caggcccucaggcaagggcucu

SEQ ID NO: 753926 - RNA, 22 nt, Human
acuuuggacgccaugcuguuug

SEQ ID NO: 753927 - RNA, 22 nt, Human
ugcuuugcaaauaauagaaugu

SEQ ID NO: 753928 - RNA, 22 nt, Human
gcagaaguaggcucuguguagg

SEQ ID NO: 753929 - RNA, 22 nt, Human
gaacagggaguacggcacauuu

SEQ ID NO: 753930 - RNA, 22 nt, Human
agugcgugguuuacagcuaguu

SEQ ID NO: 753931 - RNA, 22 nt, Human
aacuacauuguccuuucugaag

SEQ ID NO: 753932 - RNA, 22 nt, Human
ggcagcugauuagcaucaagga

SEQ ID NO: 753933 - RNA, 22 nt, Human
cucuauuuuucuuggcuagugu

SEQ ID NO: 753934 - RNA, 22 nt, Human
gaaggcaagcagcauaaauguc

SEQ ID NO: 753935 - RNA, 22 nt, Human
gcccugaauaauagagugggga

SEQ ID NO: 753936 - RNA, 22 nt, Human
ugucaauaacuggagucauuau

SEQ ID NO: 753937 - RNA, 22 nt, Human
ugagcagacuugaugaggcagc

SEQ ID NO: 753938 - RNA, 22 nt, Human
cauuggaaugaucguuuugcug

SEQ ID NO: 753939 - RNA, 22 nt, Human
agagucagaaccaagaugaggc

SEQ ID NO: 753940 - RNA, 22 nt, Human
caaagguuguugagagugcagg

SEQ ID NO: 753941 - RNA, 22 nt, Human
uccagagggcgauggcuggggg

SEQ ID NO: 753942 - RNA, 22 nt, Human
ugaaauagacuugcacuauaug

SEQ ID NO: 753943 - RNA, 16 nt, Human
guaaaggcagggaauu

SEQ ID NO: 753944 - RNA, 22 nt, Human
uuuuaaugggcgacuauuaugg

SEQ ID NO: 753945 - RNA, 19 nt, Human
agguuucuaacuauucaag

SEQ ID NO: 753946 - RNA, 22 nt, Human
guagcuauuuaugauacucaug

SEQ ID NO: 753947 - RNA, 22 nt, Human
cugcccugugguuguggguucu

SEQ ID NO: 753948 - RNA, 22 nt, Human
uugcucuccagaggcucacagc

SEQ ID NO: 753949 - RNA, 23 nt, Human
uggcagauacaggcaugacuucu

SEQ ID NO: 753950 - RNA, 22 nt, Human
agaauguguuauuagagaagga

SEQ ID NO: 753951 - RNA, 22 nt, Human
gaaauauuucucuugagccccu

SEQ ID NO: 753952 - RNA, 22 nt, Human
cugcaucacagcaggaggcaca

SEQ ID NO: 753953 - RNA, 20 nt, Human
acaguguuuuugaguagagc

SEQ ID NO: 753954 - RNA, 22 nt, Human
acagagccuccaggagugcugg

SEQ ID NO: 753955 - RNA, 22 nt, Human
uauauaauuuguaaaagcaccu

SEQ ID NO: 753956 - RNA, 22 nt, Human
agguucucacacgucuacaccc

SEQ ID NO: 753957 - RNA, 22 nt, Human
aggcuucagcagcccucucuug

SEQ ID NO: 753958 - RNA, 22 nt, Human
uggcucaggguccccaaauggu

SEQ ID NO: 753959 - RNA, 22 nt, Human
aaauucuaaggucacaauguug

SEQ ID NO: 753960 - RNA, 22 nt, Human
cuguguacccacgugggcaccc

SEQ ID NO: 753961 - RNA, 22 nt, Human
acugugaaucacuacuaguaga

SEQ ID NO: 753962 - RNA, 22 nt, Human
augccuggauuugggacucaaa

SEQ ID NO: 753963 - RNA, 22 nt, Human
agaggugggagccuggucacau

SEQ ID NO: 753964 - RNA, 22 nt, Human
cccagugucugggccugcaggg

SEQ ID NO: 753965 - RNA, 21 nt, Human
ugacuuuauuugacagcccag

SEQ ID NO: 753966 - RNA, 22 nt, Human
uggcagcuccuggggccagcac

SEQ ID NO: 753967 - RNA, 22 nt, Human
ucugcccauucuuagagucuag

SEQ ID NO: 753968 - RNA, 22 nt, Human
cucuggaggucagguguggugg

SEQ ID NO: 753969 - RNA, 22 nt, Human
uguccugggucaaauccugguc

SEQ ID NO: 753970 - RNA, 22 nt, Human
gcucugcucuaacauuccugac

SEQ ID NO: 753971 - RNA, 23 nt, Human
ccaccuggacucugggcaggugc

SEQ ID NO: 753972 - RNA, 22 nt, Human
ucuuugcaugugcuucuuggcc

SEQ ID NO: 753973 - RNA, 22 nt, Human
cagagccugcucacgucucugu

SEQ ID NO: 753974 - RNA, 22 nt, Human
augaaagcacgugggaagauaa

SEQ ID NO: 753975 - RNA, 22 nt, Human
uauuauuuuagcacugaggauu

SEQ ID NO: 753976 - RNA, 22 nt, Human
ggcauagcggcucagcguccag

SEQ ID NO: 753977 - RNA, 22 nt, Human
cagauguaguagcuuuauugca

SEQ ID NO: 753978 - RNA, 22 nt, Human
aauacauauggaauuccauguu

SEQ ID NO: 753979 - RNA, 22 nt, Human
gccuggccgcuccgagcuccgc

SEQ ID NO: 753980 - RNA, 22 nt, Human
caucaaaucugacuuuucuucc

SEQ ID NO: 753981 - RNA, 22 nt, Human
uugccucccagcaugggcagcu

SEQ ID NO: 753982 - RNA, 22 nt, Human
uggcagagucaucacaucugga

SEQ ID NO: 753983 - RNA, 22 nt, Human
gggguggauuccuacaggucca

SEQ ID NO: 753984 - RNA, 22 nt, Human
gugcuccaggucgcucagagag

SEQ ID NO: 753985 - RNA, 22 nt, Human
uaaguaacugcauaauuaaauu

SEQ ID NO: 753986 - RNA, 22 nt, Human
cagcuuuggagugugagugcug

SEQ ID NO: 753987 - RNA, 22 nt, Human
augacagacccucuaaagacaa

SEQ ID NO: 753988 - RNA, 22 nt, Human
cauauuuauagaucuggcauuu

SEQ ID NO: 753989 - RNA, 22 nt, Human
ccagcugcauccuauucacugc

SEQ ID NO: 753990 - RNA, 22 nt, Human
ucucuacagacacuguugacuu

SEQ ID NO: 753991 - RNA, 22 nt, Human
agcagauaugauacuuaauuua

SEQ ID NO: 753992 - RNA, 22 nt, Human
cuagaauacucguauuauuccc

SEQ ID NO: 753993 - RNA, 22 nt, Human
ucuucacauggaacaugaagcu

SEQ ID NO: 753994 - RNA, 22 nt, Human
caggagaugacagggaagaacc

SEQ ID NO: 753995 - RNA, 22 nt, Human
aguuaagagugugaaaauguua

SEQ ID NO: 753996 - RNA, 22 nt, Human
cuuccagagauccaugaauacc

SEQ ID NO: 753997 - RNA, 22 nt, Human
acagggcuccuugggcugacac

SEQ ID NO: 753998 - RNA, 22 nt, Human
cacccuggcuggaggugcagug

SEQ ID NO: 753999 - RNA, 22 nt, Human
ugggauggcauccugggccuug

SEQ ID NO: 754000 - RNA, 20 nt, Human
uguuaaaggacacuugcuuu

SEQ ID NO: 754001 - RNA, 22 nt, Human
acugaggcgcaguccggcuguc

SEQ ID NO: 754002 - RNA, 22 nt, Human
gcccugagccaccaaugccauu

SEQ ID NO: 754003 - RNA, 22 nt, Human
uucaucaggcaucaugcucaag

SEQ ID NO: 754004 - RNA, 18 nt, Human
gccugcucugcucucccc

SEQ ID NO: 754005 - RNA, 22 nt, Human
cacauggcagaaucaugcaucu

SEQ ID NO: 754006 - RNA, 22 nt, Human
uuguccagcagcucagucuacg

SEQ ID NO: 754007 - RNA, 22 nt, Human
gagugcugaaugcgagaacaga

SEQ ID NO: 754008 - RNA, 22 nt, Human
uuagauaaauuaagacuuuaca

SEQ ID NO: 754009 - RNA, 23 nt, Human
uguauacacccugugcaucuggg

SEQ ID NO: 754010 - RNA, 22 nt, Human
uguuuaauugggccaacagcgg

SEQ ID NO: 754011 - RNA, 22 nt, Human
cugggugcuuacuuugugcuag

SEQ ID NO: 754012 - RNA, 22 nt, Human
cuuccugagcaaggaacuauag

SEQ ID NO: 754013 - RNA, 22 nt, Human
ucuaaugagggugaaggcccag

SEQ ID NO: 754014 - RNA, 22 nt, Human
ggcaggcacuguguuuuguguu

SEQ ID NO: 754015 - RNA, 22 nt, Human
cuggaggcuggcuuccccuggc

SEQ ID NO: 754016 - RNA, 20 nt, Human
accccacagaguccauugca

SEQ ID NO: 754017 - RNA, 22 nt, Human
aauuugauucagcaaauguuca

SEQ ID NO: 754018 - RNA, 19 nt, Human
ggucacagggguuacaagg

SEQ ID NO: 754019 - RNA, 22 nt, Human
gcaaagggaaaguggcaggguc

SEQ ID NO: 754020 - RNA, 22 nt, Human
cauugcacagcccuguggugau

SEQ ID NO: 754021 - RNA, 22 nt, Human
acuguuggucagggauauugug

SEQ ID NO: 754022 - RNA, 22 nt, Human
uucgacucugugccugaagagc

SEQ ID NO: 754023 - RNA, 22 nt, Human
augaagcuaaacccugcagcca

SEQ ID NO: 754024 - RNA, 22 nt, Human
uuuuauacuuaagacagaguuu

SEQ ID NO: 754025 - RNA, 22 nt, Human
gagcuuccucagccuuucucac

SEQ ID NO: 754026 - RNA, 20 nt, Human
aagauucauuguaauuaggg

SEQ ID NO: 754027 - RNA, 22 nt, Human
uuaaacugcagacucaguguuc

SEQ ID NO: 754028 - RNA, 21 nt, Human
caguuuaauaacaaagaagga

SEQ ID NO: 754029 - RNA, 22 nt, Human
agaaggccaagaagaagccuau

SEQ ID NO: 754030 - RNA, 22 nt, Human
ugauucuguaagucauauuguu

SEQ ID NO: 754031 - RNA, 22 nt, Human
ucacaggcuccagggccuggau

SEQ ID NO: 754032 - RNA, 22 nt, Human
gaggccagcgcgcagcacuuuu

SEQ ID NO: 754033 - RNA, 22 nt, Human
gggcaagcacagcgagcgugcg

SEQ ID NO: 754034 - RNA, 21 nt, Human
uuucccagcagagauagcugg

SEQ ID NO: 754035 - RNA, 22 nt, Human
guucuccaggggcuguucaucu

SEQ ID NO: 754036 - RNA, 22 nt, Human
agacucugcauuucuaauaagc

SEQ ID NO: 754037 - RNA, 22 nt, Human
ugcgagaguggaaaggaagccu

SEQ ID NO: 754038 - RNA, 22 nt, Human
cgagaguuagcuaggagucaca

SEQ ID NO: 754039 - RNA, 22 nt, Human
ucuggcccaaguuuucggugag

SEQ ID NO: 754040 - RNA, 22 nt, Human
uguucucacuggaugcuucaca

SEQ ID NO: 754041 - RNA, 22 nt, Human
cuggucugaaaaggaggcaugc

SEQ ID NO: 754042 - RNA, 22 nt, Human
guuccuuguauuucagacauga

SEQ ID NO: 754043 - RNA, 22 nt, Human
aaguuauugcagcaauccaagu

SEQ ID NO: 754044 - RNA, 22 nt, Human
aagauaaguaacgagccucagu

SEQ ID NO: 754045 - RNA, 22 nt, Human
augcacaggugcugaugcacgc

SEQ ID NO: 754046 - RNA, 22 nt, Human
aguuucucuagagucuuugaaa

SEQ ID NO: 754047 - RNA, 22 nt, Human
agauggcaggcccugugggggu

SEQ ID NO: 754048 - RNA, 22 nt, Human
agccagcagggcuuagaggaca

SEQ ID NO: 754049 - RNA, 22 nt, Human
gcagggugacguugcccaccuc

SEQ ID NO: 754050 - RNA, 22 nt, Human
cugaaguuaguuaugccuaaaa

SEQ ID NO: 754051 - RNA, 22 nt, Human
uuuacacaaaauguuaguagau

SEQ ID NO: 754052 - RNA, 22 nt, Human
augucugcaaauaucugccagu

SEQ ID NO: 754053 - RNA, 22 nt, Human
gcagaugcuguggugauagaag

SEQ ID NO: 754054 - RNA, 22 nt, Human
gcugggaguuugauuugacugg

SEQ ID NO: 754055 - RNA, 22 nt, Human
augggcaugauauuaguaccua

SEQ ID NO: 754056 - RNA, 22 nt, Human
uucucuggacagugaagagagg

SEQ ID NO: 754057 - RNA, 22 nt, Human
ggauggccuucuugcucaggaa

SEQ ID NO: 754058 - RNA, 22 nt, Human
uucaggaagccuuucuuggucu

SEQ ID NO: 754059 - RNA, 22 nt, Human
cuggagugaagucuggcagcuu

SEQ ID NO: 754060 - RNA, 22 nt, Human
uacaguagcuacucaauaacua

SEQ ID NO: 754061 - RNA, 22 nt, Human
agugucugugaugaggucagga

SEQ ID NO: 754062 - RNA, 22 nt, Human
auccaaauauauuuuauucacu

SEQ ID NO: 754063 - RNA, 22 nt, Human
ccuugacugccuucaggcuggg

SEQ ID NO: 754064 - RNA, 22 nt, Human
aacauguaucgcuuuuuaauau

SEQ ID NO: 754065 - RNA, 22 nt, Human
ucagaacaugaagguuaauuug

SEQ ID NO: 754066 - RNA, 20 nt, Human
cccagggguuguggugagga

SEQ ID NO: 754067 - RNA, 21 nt, Human
ugguuaguuauuggcagugcc

SEQ ID NO: 754068 - RNA, 22 nt, Human
cagcaucucugggagaagcauc

SEQ ID NO: 754069 - RNA, 22 nt, Human
aaugcaaauuaucaggcuucuc

SEQ ID NO: 754070 - RNA, 22 nt, Human
agccaagcaccacuggcacucg

SEQ ID NO: 754071 - RNA, 22 nt, Human
cauuccaaguauauacaugaua

SEQ ID NO: 754072 - RNA, 22 nt, Human
agggccaguaaauguuuccuca

SEQ ID NO: 754073 - RNA, 22 nt, Human
uuuaaggauguaaaggaagaag

SEQ ID NO: 754074 - RNA, 22 nt, Human
ucaaaccugcugucuuguucau

SEQ ID NO: 754075 - RNA, 22 nt, Human
uaaagccacuucauucuagucu

SEQ ID NO: 754076 - RNA, 22 nt, Human
uuugcaaaccggagcucugcaa

SEQ ID NO: 754077 - RNA, 22 nt, Human
cucaggauucucgacacucaca

SEQ ID NO: 754078 - RNA, 22 nt, Human
ucugaggccccagcccugcaca

SEQ ID NO: 754079 - RNA, 22 nt, Human
gccuggggggcaugucauaaua

SEQ ID NO: 754080 - RNA, 22 nt, Human
ggcugaaauucagaguaaauuc

SEQ ID NO: 754081 - RNA, 22 nt, Human
cuggagaaacaucaggcauagg

SEQ ID NO: 754082 - RNA, 22 nt, Human
aggcacagguggacuucacagu

SEQ ID NO: 754083 - RNA, 22 nt, Human
gcucuggaagcaucugagagga

SEQ ID NO: 754084 - RNA, 18 nt, Human
uguagcuggaggccaggc

SEQ ID NO: 754085 - RNA, 19 nt, Human
gguguuucuucauuuucca

SEQ ID NO: 754086 - RNA, 22 nt, Human
ggagcugggacccugucaucug

SEQ ID NO: 754087 - RNA, 22 nt, Human
cagcuuugcaggcuggucagug

SEQ ID NO: 754088 - RNA, 22 nt, Human
uucugugacuccucagagauuu

SEQ ID NO: 754089 - RNA, 20 nt, Human
cccacacccuucccacuugg

SEQ ID NO: 754090 - RNA, 22 nt, Human
cagcagguggacacacucaccu

SEQ ID NO: 754091 - RNA, 22 nt, Human
uuuaaacuaacaguacacguug

SEQ ID NO: 754092 - RNA, 22 nt, Human
augcagaagcagaacuuacaca

SEQ ID NO: 754093 - RNA, 23 nt, Human
uuggcaaagccuaugaaguccuc

SEQ ID NO: 754094 - RNA, 22 nt, Human
uggcccaggugcacccagaggc

SEQ ID NO: 754095 - RNA, 22 nt, Human
ucagauuuagggugauuaccuu

SEQ ID NO: 754096 - RNA, 22 nt, Human
uuuucuccagggaacaagguga

SEQ ID NO: 754097 - RNA, 22 nt, Human
ccagcccuguaaggaugaggca

SEQ ID NO: 754098 - RNA, 22 nt, Human
gcuucccacagcuggacugggg

SEQ ID NO: 754099 - RNA, 22 nt, Human
uaauuuugcugugaccauugaa

SEQ ID NO: 754100 - RNA, 22 nt, Human
uggccugcagaggcuguggggc

SEQ ID NO: 754101 - RNA, 22 nt, Human
auucuauagacagaaggucaau

SEQ ID NO: 754102 - RNA, 22 nt, Human
cucuagcuuuugauaccagugu

SEQ ID NO: 754103 - RNA, 20 nt, Human
guguggccaggagcugcgcu

SEQ ID NO: 754104 - RNA, 22 nt, Human
aaacucuaguaaaauguauuca

SEQ ID NO: 754105 - RNA, 22 nt, Human
cugaagcucuccaguuuguuuc

SEQ ID NO: 754106 - RNA, 22 nt, Human
cacaaugugguuugucaucuuu

SEQ ID NO: 754107 - RNA, 22 nt, Human
aaucagcaguuggaauuagaua

SEQ ID NO: 754108 - RNA, 22 nt, Human
uagggcagccacccaggcugcu

SEQ ID NO: 754109 - RNA, 18 nt, Human
uguggcaggggugggaga

SEQ ID NO: 754110 - RNA, 22 nt, Human
ccagugcuaagguagccucugc

SEQ ID NO: 754111 - RNA, 22 nt, Human
ggccacagcaaugcugugaugu

SEQ ID NO: 754112 - RNA, 22 nt, Human
ucugggagagcacguggcugac

SEQ ID NO: 754113 - RNA, 22 nt, Human
ccucagugaguguuuccuucuu

SEQ ID NO: 754114 - RNA, 22 nt, Human
ucucugugacagcuggguaugu

SEQ ID NO: 754115 - RNA, 22 nt, Human
guguggcccugcguccugaguc

SEQ ID NO: 754116 - RNA, 22 nt, Human
acucaucugaaaaaugaggaga

SEQ ID NO: 754117 - RNA, 22 nt, Human
ucugagguuauugucugccauu

SEQ ID NO: 754118 - RNA, 22 nt, Human
guugcaggaagcacacacaugu

SEQ ID NO: 754119 - RNA, 22 nt, Human
gcuucugccuugcacuuuguca

SEQ ID NO: 754120 - RNA, 22 nt, Human
uuauauaaagauaacuuuucuu

SEQ ID NO: 754121 - RNA, 22 nt, Human
gcucagggagagagggcagccg

SEQ ID NO: 754122 - RNA, 22 nt, Human
aguuuauguagaauuggcaaua

SEQ ID NO: 754123 - RNA, 22 nt, Human
aggccaggguagggcccauugu

SEQ ID NO: 754124 - RNA, 22 nt, Human
cgcaggcugcagccaagaagag

SEQ ID NO: 754125 - RNA, 22 nt, Human
gccuucaggaggguuccagaca

SEQ ID NO: 754126 - RNA, 22 nt, Human
uaugcaugugguauaugcuuau

SEQ ID NO: 754127 - RNA, 23 nt, Human
aguguucagcauguaguaaauac

SEQ ID NO: 754128 - RNA, 22 nt, Human
cagggcuggauuucauuucuag

SEQ ID NO: 754129 - RNA, 22 nt, Human
gccaugaggcuccgagaaguca

SEQ ID NO: 754130 - RNA, 22 nt, Human
gggacugggagauccuccuggc

SEQ ID NO: 754131 - RNA, 22 nt, Human
uggcaccaucaaggcugagaac

SEQ ID NO: 754132 - RNA, 16 nt, Human
cuucacagaggagagu

SEQ ID NO: 754133 - RNA, 22 nt, Human
caggccgggcacugcgcuaggu

SEQ ID NO: 754134 - RNA, 22 nt, Human
aggccuuggaagccagggagcc

SEQ ID NO: 754135 - RNA, 22 nt, Human
agugucugaacugggugcugac

SEQ ID NO: 754136 - RNA, 22 nt, Human
gagucagaagaaacuauuuaca

SEQ ID NO: 754137 - RNA, 22 nt, Human
uguggcagaggaggcagcgucc

SEQ ID NO: 754138 - RNA, 22 nt, Human
gauaaaagaggaaauuuguuca

SEQ ID NO: 754139 - RNA, 22 nt, Human
uauguucuagacuuuugcugug

SEQ ID NO: 754140 - RNA, 22 nt, Human
gagaggugaaggcugcccuggg

SEQ ID NO: 754141 - RNA, 22 nt, Human
ccugagguuuuuggauaguugu

SEQ ID NO: 754142 - RNA, 22 nt, Human
aaguuucuuuauuagcuugucc

SEQ ID NO: 754143 - RNA, 22 nt, Human
cuggcuuucauucauucaggcc

SEQ ID NO: 754144 - RNA, 22 nt, Human
aaagcauagaauuagaguuagg

SEQ ID NO: 754145 - RNA, 22 nt, Human
uaacucuuuacuauacauuuau

SEQ ID NO: 754146 - RNA, 22 nt, Human
uguacaaauucauugaacugua

SEQ ID NO: 754147 - RNA, 22 nt, Human
gguuugaacagcuuuggagaag

SEQ ID NO: 754148 - RNA, 22 nt, Human
aguaugaaucucuuuauucugc

SEQ ID NO: 754149 - RNA, 22 nt, Human
guccagccacccuggaggcacg

SEQ ID NO: 754150 - RNA, 22 nt, Human
acccaggagacggaggugcagu

SEQ ID NO: 754151 - RNA, 22 nt, Human
ggcagucacaggggagacuggg

SEQ ID NO: 754152 - RNA, 22 nt, Human
ggagugcuuugaagccuucauu

SEQ ID NO: 754153 - RNA, 22 nt, Human
auuccuugggaauuauugaaug

SEQ ID NO: 754154 - RNA, 22 nt, Human
uugugagcauuuuggugagcuu

SEQ ID NO: 754155 - RNA, 22 nt, Human
augaaucaaaguucauuugauc

SEQ ID NO: 754156 - RNA, 22 nt, Human
augcaggagagcauguuuaaga

SEQ ID NO: 754157 - RNA, 22 nt, Human
uuaguguuuaaagguuucagag

SEQ ID NO: 754158 - RNA, 22 nt, Human
ccagaggggcacaaaaguagaa

SEQ ID NO: 754159 - RNA, 22 nt, Human
cauucacauucuucuuacuguu

SEQ ID NO: 754160 - RNA, 22 nt, Human
aggccuagaggaauggccaggg

SEQ ID NO: 754161 - RNA, 22 nt, Human
auuguacuacaccauaguacug

SEQ ID NO: 754162 - RNA, 22 nt, Human
cuggcucuuucagccgcuggag

SEQ ID NO: 754163 - RNA, 22 nt, Human
uggcuucucccuacaacaugcc

SEQ ID NO: 754164 - RNA, 22 nt, Human
cucucuccuuagcugcagacca

SEQ ID NO: 754165 - RNA, 19 nt, Human
acaguuugggaaaugagca

SEQ ID NO: 754166 - RNA, 22 nt, Human
aacagcauaaguauuuauuuca

SEQ ID NO: 754167 - RNA, 22 nt, Human
ucggagcuguagaugaaacccu

SEQ ID NO: 754168 - RNA, 22 nt, Human
uacaagaaggaaaacuagcaau

SEQ ID NO: 754169 - RNA, 22 nt, Human
gaaaucuacgauuagugaaaau

SEQ ID NO: 754170 - RNA, 22 nt, Human
ugcugcagggauuucagagaca

SEQ ID NO: 754171 - RNA, 22 nt, Human
aagauauaauaacuguugucau

SEQ ID NO: 754172 - RNA, 22 nt, Human
caugacagaugcaaaggauugg

SEQ ID NO: 754173 - RNA, 22 nt, Human
uccagaccauggauggcugcaa

SEQ ID NO: 754174 - RNA, 22 nt, Human
cggccaggcacaguggcccacg

SEQ ID NO: 754175 - RNA, 22 nt, Human
gugucauggaaaauugcaaugg

SEQ ID NO: 754176 - RNA, 22 nt, Human
uguacaugacagagagagccaa

SEQ ID NO: 754177 - RNA, 22 nt, Human
cuggagauuaaguucucagcca

SEQ ID NO: 754178 - RNA, 22 nt, Human
guggcaggagagacacagccau

SEQ ID NO: 754179 - RNA, 19 nt, Human
uagaaagccagaaaacaga

SEQ ID NO: 754180 - RNA, 22 nt, Human
acauuuaaguuaaaaccucagu

SEQ ID NO: 754181 - RNA, 22 nt, Human
uagcagcaagaaugggaugugu

SEQ ID NO: 754182 - RNA, 22 nt, Human
agcuggucugcugcauggagug

SEQ ID NO: 754183 - RNA, 22 nt, Human
ugagaagcugcuugugcuguau

SEQ ID NO: 754184 - RNA, 22 nt, Human
gggcuccuccucugacuguggc

SEQ ID NO: 754185 - RNA, 22 nt, Human
caaggcaugaaaggagugagug

SEQ ID NO: 754186 - RNA, 22 nt, Human
cucuuugccuaacuguuuucaa

SEQ ID NO: 754187 - RNA, 22 nt, Human
uucucagaaaauguagagaaaa

SEQ ID NO: 754188 - RNA, 22 nt, Human
acugggcaugaugagucaccua

SEQ ID NO: 754189 - RNA, 22 nt, Human
guguagcuuuggagugggaggc

SEQ ID NO: 754190 - RNA, 22 nt, Human
gaaguuacauacugucacuucu

SEQ ID NO: 754191 - RNA, 22 nt, Human
ggggagaauaaaucagauuuua

SEQ ID NO: 754192 - RNA, 22 nt, Human
gcugcccaggcaacauugacuu

SEQ ID NO: 754193 - RNA, 22 nt, Human
aagggagcuuaggagaucaggc

SEQ ID NO: 754194 - RNA, 22 nt, Human
aucuggcucccuuggaauccgu

SEQ ID NO: 754195 - RNA, 22 nt, Human
agcaggcaggcugccagugaau

SEQ ID NO: 754196 - RNA, 22 nt, Human
auuuauugguuugcauggugaa

SEQ ID NO: 754197 - RNA, 22 nt, Human
uagaggaaccaggcaggcugag

SEQ ID NO: 754198 - RNA, 22 nt, Human
ggagagcaggguccugagauac

SEQ ID NO: 754199 - RNA, 22 nt, Human
uuagagaaauucugguaaugua

SEQ ID NO: 754200 - RNA, 22 nt, Human
cagguacacucccuugugcuga

SEQ ID NO: 754201 - RNA, 22 nt, Human
uucuacacagugcggguuaaca

SEQ ID NO: 754202 - RNA, 22 nt, Human
acuugaauuauauuucuagaga

SEQ ID NO: 754203 - RNA, 17 nt, Human
gcagccucuugguagug

SEQ ID NO: 754204 - RNA, 22 nt, Human
ccagaggugguggugucuagaa

SEQ ID NO: 754205 - RNA, 22 nt, Human
cagguucccagguccagggcuu

SEQ ID NO: 754206 - RNA, 22 nt, Human
ugaagcaaacgcuucuguuccu

SEQ ID NO: 754207 - RNA, 22 nt, Human
gugcuguaacaacagagugucu

SEQ ID NO: 754208 - RNA, 22 nt, Human
acagagagaaacaaucagcagc

SEQ ID NO: 754209 - RNA, 22 nt, Human
gcaccagccugagccucuugca

SEQ ID NO: 754210 - RNA, 20 nt, Human
acauaugugugcauaucuuu

SEQ ID NO: 754211 - RNA, 22 nt, Human
ucugaggcccuacccugagccu

SEQ ID NO: 754212 - RNA, 22 nt, Human
ggguccugcgugggcccaggac

SEQ ID NO: 754213 - RNA, 22 nt, Human
uuccaaguagaagcauuugcau

SEQ ID NO: 754214 - RNA, 22 nt, Human
uuuucugcggugugaauggccu

SEQ ID NO: 754215 - RNA, 22 nt, Human
auugaccugauuguuccuggaa

SEQ ID NO: 754216 - RNA, 22 nt, Human
ucuccugauaucugcagaccua

SEQ ID NO: 754217 - RNA, 22 nt, Human
agggagccagaguugggagcuc

SEQ ID NO: 754218 - RNA, 22 nt, Human
uauauguagucagucagaguaa

SEQ ID NO: 754219 - RNA, 22 nt, Human
ugggaguagaugaggagugggc

SEQ ID NO: 754220 - RNA, 20 nt, Human
aggcaagguagaugucugcu

SEQ ID NO: 754221 - RNA, 22 nt, Human
ggagcccugaagcaagaaagua

SEQ ID NO: 754222 - RNA, 22 nt, Human
uucagugcuuacagguuucuuu

SEQ ID NO: 754223 - RNA, 22 nt, Human
aggcuguggugcugaaggaggg

SEQ ID NO: 754224 - RNA, 22 nt, Human
uccagaguuugagucuccuucc

SEQ ID NO: 754225 - RNA, 22 nt, Human
gccagagcugagacacgagucc

SEQ ID NO: 754226 - RNA, 22 nt, Human
cagagggguguagagaucacug

SEQ ID NO: 754227 - RNA, 22 nt, Human
gcugcuguugauuuaguccaau

SEQ ID NO: 754228 - RNA, 22 nt, Human
ccacuggcauccagcugccauc

SEQ ID NO: 754229 - RNA, 22 nt, Human
auuugaggauaguuggguacuc

SEQ ID NO: 754230 - RNA, 22 nt, Human
ccuagcaauaaagauaucauuu

SEQ ID NO: 754231 - RNA, 17 nt, Human
ucuuuccugccaugcuc

SEQ ID NO: 754232 - RNA, 22 nt, Human
uggcuccugcauuugugcuaac

SEQ ID NO: 754233 - RNA, 22 nt, Human
ugggaaauuguauuucuauuuc

SEQ ID NO: 754234 - RNA, 22 nt, Human
gccccaccugcuaccuuccagc

SEQ ID NO: 754235 - RNA, 22 nt, Human
caguaaguauucgagucuccau

SEQ ID NO: 754236 - RNA, 22 nt, Human
gccagguggagguugcagugag

SEQ ID NO: 754237 - RNA, 22 nt, Human
gccaggaauuucaagagccacu

SEQ ID NO: 754238 - RNA, 22 nt, Human
caccagggcagcagccuagucu

SEQ ID NO: 754239 - RNA, 22 nt, Human
agcucucccauagggcaagauc

SEQ ID NO: 754240 - RNA, 22 nt, Human
ugcccuggcuggagugcagugg

SEQ ID NO: 754241 - RNA, 22 nt, Human
cagaggucccuguucuuaagga

SEQ ID NO: 754242 - RNA, 22 nt, Human
uaauaauuuuaaagaaggcuag

SEQ ID NO: 754243 - RNA, 22 nt, Human
uacauucagaagaauggacacg

SEQ ID NO: 754244 - RNA, 22 nt, Human
gcccaggauggcuggaggugcu

SEQ ID NO: 754245 - RNA, 22 nt, Human
uagggcugcugcagaugacagg

SEQ ID NO: 754246 - RNA, 22 nt, Human
aaagguuuucaucacagcaaga

SEQ ID NO: 754247 - RNA, 22 nt, Human
uaucaucuuguugucaugcagc

SEQ ID NO: 754248 - RNA, 22 nt, Human
caacaccuugaucuuggacuuc

SEQ ID NO: 754249 - RNA, 22 nt, Human
uuauugaagcaagcuuuucuga

SEQ ID NO: 754250 - RNA, 22 nt, Human
ucaggaagcuacugccagcagc

SEQ ID NO: 754251 - RNA, 22 nt, Human
cugcuugggguuaggguguccu

SEQ ID NO: 754252 - RNA, 22 nt, Human
agaacagcaggaaggccaggua

SEQ ID NO: 754253 - RNA, 22 nt, Human
uucuauguagauaaggcugcuc

SEQ ID NO: 754254 - RNA, 22 nt, Human
aaaaccacaauuauuuuugcac

SEQ ID NO: 754255 - RNA, 22 nt, Human
aaacacaucauucaugucguca

SEQ ID NO: 754256 - RNA, 22 nt, Human
aaguucuugcugugugucagau

SEQ ID NO: 754257 - RNA, 20 nt, Human
cuguggaauuuuaccaugcg

SEQ ID NO: 754258 - RNA, 22 nt, Human
augccuuauuccaacaaucuag

SEQ ID NO: 754259 - RNA, 22 nt, Human
gugcaaaaguaauugcaguuuu

SEQ ID NO: 754260 - RNA, 22 nt, Human
ggcagcuucucccaggcuguuu

SEQ ID NO: 754261 - RNA, 22 nt, Human
aaugcacauauauuuccuuauu

SEQ ID NO: 754262 - RNA, 22 nt, Human
uucccuucuaguuuugagagac

SEQ ID NO: 754263 - RNA, 22 nt, Human
gcagcaaggaugaagcacuugg

SEQ ID NO: 754264 - RNA, 22 nt, Human
uucuuugcccauguuuccuaag

SEQ ID NO: 754265 - RNA, 22 nt, Human
ucuuaaugcuagccaauagaga

SEQ ID NO: 754266 - RNA, 22 nt, Human
guucaaccccuugaugguacag

SEQ ID NO: 754267 - RNA, 22 nt, Human
cuagggaccucagcuccuggag

SEQ ID NO: 754268 - RNA, 22 nt, Human
aacacuguaucagucuucaaua

SEQ ID NO: 754269 - RNA, 22 nt, Human
aggagaaauccaucgagaaugg

SEQ ID NO: 754270 - RNA, 22 nt, Human
aauguaugaagguuccaguuuc

SEQ ID NO: 754271 - RNA, 22 nt, Human
ggaaggggugggugagccucag

SEQ ID NO: 754272 - RNA, 22 nt, Human
ucucuaaaucugguucacuugc

SEQ ID NO: 754273 - RNA, 22 nt, Human
acucugacuggagugagagagg

SEQ ID NO: 754274 - RNA, 22 nt, Human
cacagaggacuguagcggggag

SEQ ID NO: 754275 - RNA, 22 nt, Human
uucugcuuauucuguagccuuu

SEQ ID NO: 754276 - RNA, 22 nt, Human
gucuuuuugucuggcagagguc

SEQ ID NO: 754277 - RNA, 22 nt, Human
agccucuggcccuagacugcuu

SEQ ID NO: 754278 - RNA, 22 nt, Human
cuauggcucaauucuagugguu

SEQ ID NO: 754279 - RNA, 20 nt, Human
aucuuugucucuguaguugu

SEQ ID NO: 754280 - RNA, 23 nt, Human
uggcugagauccuacuguuugcu

SEQ ID NO: 754281 - RNA, 22 nt, Human
gugaggaucaaaugaaauagca

SEQ ID NO: 754282 - RNA, 22 nt, Human
uaucacuugcguuuuggcagag

SEQ ID NO: 754283 - RNA, 22 nt, Human
uggagagguugaauaacuuguc

SEQ ID NO: 754284 - RNA, 22 nt, Human
cccuccaugagugugcugcugg

SEQ ID NO: 754285 - RNA, 22 nt, Human
uccagcuguuguuuuaucucag

SEQ ID NO: 754286 - RNA, 22 nt, Human
agccagaggaagccuggcccuc

SEQ ID NO: 754287 - RNA, 22 nt, Human
agaaacuucagcuauucuuuug

SEQ ID NO: 754288 - RNA, 22 nt, Human
guauuucuagaaugguagcacu

SEQ ID NO: 754289 - RNA, 22 nt, Human
gggcagguguugucaaucuaau

SEQ ID NO: 754290 - RNA, 22 nt, Human
gugugugccaucaagagcuuuc

SEQ ID NO: 754291 - RNA, 22 nt, Human
aagaggcuagccggcucacuaa

SEQ ID NO: 754292 - RNA, 22 nt, Human
cagagccuuccuagcagacucu

SEQ ID NO: 754293 - RNA, 22 nt, Human
acagcuggcaggggggcaugaa

SEQ ID NO: 754294 - RNA, 22 nt, Human
ucugagcugccccuuuacuuug

SEQ ID NO: 754295 - RNA, 22 nt, Human
uugaacaaucaaaagaauucau

SEQ ID NO: 754296 - RNA, 22 nt, Human
ugugaggaggcggccagaagag

SEQ ID NO: 754297 - RNA, 22 nt, Human
uccuggggccagcacuggugga

SEQ ID NO: 754298 - RNA, 22 nt, Human
uuacaaugggagcccuuggacu

SEQ ID NO: 754299 - RNA, 22 nt, Human
cugccugcuucugagccagagg

SEQ ID NO: 754300 - RNA, 22 nt, Human
auaaucuuguauuuccuaaagu

SEQ ID NO: 754301 - RNA, 22 nt, Human
auguuuacaauucaguauuaca

SEQ ID NO: 754302 - RNA, 22 nt, Human
aucuuaaucgaguccaugaaaa

SEQ ID NO: 754303 - RNA, 22 nt, Human
uauagcaagcucuuuguaacca

SEQ ID NO: 754304 - RNA, 22 nt, Human
uggcaauuguccacugucugcc

SEQ ID NO: 754305 - RNA, 22 nt, Human
guuuccuauguccauugaggga

SEQ ID NO: 754306 - RNA, 21 nt, Human
cccaggaggcugagaagagca

SEQ ID NO: 754307 - RNA, 22 nt, Human
ugacagacuuuacuucuccuau

SEQ ID NO: 754308 - RNA, 22 nt, Human
cccgacuagcugggauuacagg

SEQ ID NO: 754309 - RNA, 18 nt, Human
cccacuguccccacaggc

SEQ ID NO: 754310 - RNA, 22 nt, Human
acaguuaauaaguaguaaguca

SEQ ID NO: 754311 - RNA, 22 nt, Human
cuccaggacucaggccccuggg

SEQ ID NO: 754312 - RNA, 22 nt, Human
agucugggauguauaaacugaa

SEQ ID NO: 754313 - RNA, 22 nt, Human
ugaggagcgggcagggaugcag

SEQ ID NO: 754314 - RNA, 22 nt, Human
ucccugggccuccugcuaugca

SEQ ID NO: 754315 - RNA, 23 nt, Human
ucagggacaugaugugucauauc

SEQ ID NO: 754316 - RNA, 22 nt, Human
ugcauggaggaagaugaaugca

SEQ ID NO: 754317 - RNA, 22 nt, Human
uuguucuuuugcuuagacagau

SEQ ID NO: 754318 - RNA, 22 nt, Human
cagcacuaugacauuuaauucu

SEQ ID NO: 754319 - RNA, 20 nt, Human
cugugggccucacuuggggu

SEQ ID NO: 754320 - RNA, 22 nt, Human
ccucuggggguccucagagucu

SEQ ID NO: 754321 - RNA, 22 nt, Human
aauuaucagauauaaaacugca

SEQ ID NO: 754322 - RNA, 22 nt, Human
uaagauguaagaucagagcuug

SEQ ID NO: 754323 - RNA, 22 nt, Human
uuagauaauguuauuguaauuu

SEQ ID NO: 754324 - RNA, 22 nt, Human
uaucaacaaaggccuuguguuu

SEQ ID NO: 754325 - RNA, 23 nt, Human
auuagacacuuuggguugucuuc

SEQ ID NO: 754326 - RNA, 22 nt, Human
uuaucugaaaaccucaaaauau

SEQ ID NO: 754327 - RNA, 19 nt, Human
uucuuuccacaucuucucu

SEQ ID NO: 754328 - RNA, 22 nt, Human
aggagucaggaccaaauggaaa

SEQ ID NO: 754329 - RNA, 22 nt, Human
gcaugauaccauagguuuugcc

SEQ ID NO: 754330 - RNA, 20 nt, Human
ugcucaggauggagaggugu

SEQ ID NO: 754331 - RNA, 22 nt, Human
ugcauucaucauuugaaagccc

SEQ ID NO: 754332 - RNA, 20 nt, Human
uguagguguacaguaaggag

SEQ ID NO: 754333 - RNA, 21 nt, Human
auuuccaaggguaccuaagau

SEQ ID NO: 754334 - RNA, 22 nt, Human
augcacacugaaugcuuacuuu

SEQ ID NO: 754335 - RNA, 22 nt, Human
uauacacaaggugugcauuugu

SEQ ID NO: 754336 - RNA, 22 nt, Human
ucagcugccuuucccaugcuag

SEQ ID NO: 754337 - RNA, 22 nt, Human
gaauauauuggugaaaauaguu

SEQ ID NO: 754338 - RNA, 22 nt, Human
auacagccuauucuuaccauug

SEQ ID NO: 754339 - RNA, 22 nt, Human
ucaguuuauaaauuguauuuag

SEQ ID NO: 754340 - RNA, 22 nt, Human
gcuggcacauggcucagggccu

SEQ ID NO: 754341 - RNA, 22 nt, Human
ucaggaugaagucagagggguc

SEQ ID NO: 754342 - RNA, 20 nt, Human
uggagucaugggacacucac

SEQ ID NO: 754343 - RNA, 22 nt, Human
agggccagaggcaccuugcagc

SEQ ID NO: 754344 - RNA, 21 nt, Human
aauaaccacuaauauaguggc

SEQ ID NO: 754345 - RNA, 22 nt, Human
cagugucugaaauaacaccgga

SEQ ID NO: 754346 - RNA, 22 nt, Human
cugagccuugaugucccuuguc

SEQ ID NO: 754347 - RNA, 22 nt, Human
gcagggcucagccgcucccacc

SEQ ID NO: 754348 - RNA, 22 nt, Human
uagaggcuacuagaggcaccug

SEQ ID NO: 754349 - RNA, 22 nt, Human
ugaacuccaaauacugcugauu

SEQ ID NO: 754350 - RNA, 22 nt, Human
uuuugcuugagugcacaaaaug

SEQ ID NO: 754351 - RNA, 18 nt, Human
gccucuguugcuugccug

SEQ ID NO: 754352 - RNA, 22 nt, Human
ucugggagguacugggaggugu

SEQ ID NO: 754353 - RNA, 22 nt, Human
ucauaacaggcugagaggauuu

SEQ ID NO: 754354 - RNA, 22 nt, Human
agauucauugcuuuaggcauug

SEQ ID NO: 754355 - RNA, 22 nt, Human
uuacacaugcuuuguguguaug

SEQ ID NO: 754356 - RNA, 22 nt, Human
acacaggaggaggauggugguc

SEQ ID NO: 754357 - RNA, 16 nt, Human
aagccaguucagcauu

SEQ ID NO: 754358 - RNA, 22 nt, Human
ucagagugugagacauauugga

SEQ ID NO: 754359 - RNA, 22 nt, Human
ucuuuagacauccaguuucucu

SEQ ID NO: 754360 - RNA, 22 nt, Human
agaagccaugguaugcaacuac

SEQ ID NO: 754361 - RNA, 22 nt, Human
uucagaggugggcugagaggau

SEQ ID NO: 754362 - RNA, 22 nt, Human
auaaaacuuauuagaauugugu

SEQ ID NO: 754363 - RNA, 22 nt, Human
cacuggccuaagcgccucagcc

SEQ ID NO: 754364 - RNA, 22 nt, Human
cagcugucugaagcaggagucc

SEQ ID NO: 754365 - RNA, 17 nt, Human
uccaagccagcuugccu

SEQ ID NO: 754366 - RNA, 22 nt, Human
agauauacagagaauuauucac

SEQ ID NO: 754367 - RNA, 22 nt, Human
gcccagagagaugcuguagacc

SEQ ID NO: 754368 - RNA, 22 nt, Human
acuaacuucugagaaccaauug

SEQ ID NO: 754369 - RNA, 22 nt, Human
uuuccucuuuguaccuugacua

SEQ ID NO: 754370 - RNA, 22 nt, Human
aguccaagauuagggugacagc

SEQ ID NO: 754371 - RNA, 22 nt, Human
accuuuauagcugauuaugaca

SEQ ID NO: 754372 - RNA, 22 nt, Human
aggcugggcuccgcccaacucc

SEQ ID NO: 754373 - RNA, 22 nt, Human
uuccugugugacucaagugguu

SEQ ID NO: 754374 - RNA, 22 nt, Human
ugugcccauuacacagaggcau

SEQ ID NO: 754375 - RNA, 22 nt, Human
aagggugcauugcgcggggcug

SEQ ID NO: 754376 - RNA, 22 nt, Human
cugccuugaaaaugaagcuuua

SEQ ID NO: 754377 - RNA, 17 nt, Human
ucuccuggcucuaucag

SEQ ID NO: 754378 - RNA, 22 nt, Human
gaagugcaaccugaaauacuag

SEQ ID NO: 754379 - RNA, 22 nt, Human
cagcaccccuccuggcuaugaa

SEQ ID NO: 754380 - RNA, 22 nt, Human
ggcaggcuuucagcaucaaguc

SEQ ID NO: 754381 - RNA, 22 nt, Human
uagggcuguuaguaauucucag

SEQ ID NO: 754382 - RNA, 22 nt, Human
cagcaaggcauucuguggauua

SEQ ID NO: 754383 - RNA, 21 nt, Human
ugugucacuaacuagaggcua

SEQ ID NO: 754384 - RNA, 23 nt, Human
uguagcugucugagcagacacug

SEQ ID NO: 754385 - RNA, 20 nt, Human
acaucugagaaacacuuaaa

SEQ ID NO: 754386 - RNA, 22 nt, Human
ugaaugcuuuggagccuucuaa

SEQ ID NO: 754387 - RNA, 22 nt, Human
uggggccugagguggagcugca

SEQ ID NO: 754388 - RNA, 23 nt, Human
auuagaaaggcuuucuggugaaa

SEQ ID NO: 754389 - RNA, 22 nt, Human
gucuccuccauggagaugguau

SEQ ID NO: 754390 - RNA, 22 nt, Human
ugagcuaaguacucucaucaag

SEQ ID NO: 754391 - RNA, 22 nt, Human
gagaagcaaucgugacaucucc

SEQ ID NO: 754392 - RNA, 22 nt, Human
aggaagcucggagagggcaaau

SEQ ID NO: 754393 - RNA, 22 nt, Human
accauucuuuacaucagcacag

SEQ ID NO: 754394 - RNA, 22 nt, Human
gaacaaugagucauucagguga

SEQ ID NO: 754395 - RNA, 22 nt, Human
ugcaggagcaccagcucacccu

SEQ ID NO: 754396 - RNA, 22 nt, Human
ugagaaagguauuucaugcacu

SEQ ID NO: 754397 - RNA, 21 nt, Human
aggccucuucauggccaugau

SEQ ID NO: 754398 - RNA, 22 nt, Human
ucugaguuacacaagcaagggu

SEQ ID NO: 754399 - RNA, 22 nt, Human
aggcugccuggcugugagugaa

SEQ ID NO: 754400 - RNA, 22 nt, Human
gagagcuggauucuggauaggu

SEQ ID NO: 754401 - RNA, 22 nt, Human
guuagggagggugcauaugugu

SEQ ID NO: 754402 - RNA, 20 nt, Human
ccugugugguuugcacuaca

SEQ ID NO: 754403 - RNA, 22 nt, Human
ggcugcucugccuuccagcugg

SEQ ID NO: 754404 - RNA, 22 nt, Human
cucugaggucuaggaccauggc

SEQ ID NO: 754405 - RNA, 22 nt, Human
ucccaaagaacugaauaguaau

SEQ ID NO: 754406 - RNA, 17 nt, Human
gcccucagcuuuaacca

SEQ ID NO: 754407 - RNA, 22 nt, Human
ugguuucaugagaugagaauuu

SEQ ID NO: 754408 - RNA, 22 nt, Human
guaguauuuucugugauguagg

SEQ ID NO: 754409 - RNA, 21 nt, Human
uguaaguuucaucugaauugg

SEQ ID NO: 754410 - RNA, 22 nt, Human
aaagaugaccguaugucagagc

SEQ ID NO: 754411 - RNA, 22 nt, Human
cucccaggguagggagagacua

SEQ ID NO: 754412 - RNA, 20 nt, Human
ccaccuggccaaggcugugc

SEQ ID NO: 754413 - RNA, 21 nt, Human
cagugguuuauaaacaacaga

SEQ ID NO: 754414 - RNA, 22 nt, Human
ugacagggggcagagguggcug

SEQ ID NO: 754415 - RNA, 19 nt, Human
ggccugcccaaugucugcu

SEQ ID NO: 754416 - RNA, 22 nt, Human
uucugaggccauuaccaauaaa

SEQ ID NO: 754417 - RNA, 22 nt, Human
ucauuucagaugcauuuagaau

SEQ ID NO: 754418 - RNA, 22 nt, Human
ugcaggguguccggaggaucac

SEQ ID NO: 754419 - RNA, 22 nt, Human
augucauuuaaauguuuguaua

SEQ ID NO: 754420 - RNA, 22 nt, Human
ucugaaauguucucuuguuuug

SEQ ID NO: 754421 - RNA, 22 nt, Human
acagagagcugugauugaguua

SEQ ID NO: 754422 - RNA, 22 nt, Human
agcucucccaccuucuucuuac

SEQ ID NO: 754423 - RNA, 22 nt, Human
acugcagcaaagcccgugucuu

SEQ ID NO: 754424 - RNA, 22 nt, Human
gccaguggagcacauggugaag

SEQ ID NO: 754425 - RNA, 22 nt, Human
aucuuauguuguauucaaaauc

SEQ ID NO: 754426 - RNA, 23 nt, Human
uucugucuugcugucagcuuucu

SEQ ID NO: 754427 - RNA, 21 nt, Human
uauaggcuuccauaugaaggg

SEQ ID NO: 754428 - RNA, 22 nt, Human
cgccaggcuugguagcucaugc

SEQ ID NO: 754429 - RNA, 22 nt, Human
cuccugggucauugccagcaaa

SEQ ID NO: 754430 - RNA, 22 nt, Human
ccugggccugaaaacauuucuc

SEQ ID NO: 754431 - RNA, 22 nt, Human
aagaauguucaacgcuuuuuug

SEQ ID NO: 754432 - RNA, 22 nt, Human
uccaggcugauccaugaagaau

SEQ ID NO: 754433 - RNA, 22 nt, Human
ugcauccuuaaccagcaucacu

SEQ ID NO: 754434 - RNA, 22 nt, Human
cugcucuaauaucagauagacu

SEQ ID NO: 754435 - RNA, 22 nt, Human
ccccacuuugaguagcacuuga

SEQ ID NO: 754436 - RNA, 18 nt, Human
gaucgggggcgccccaag

SEQ ID NO: 754437 - RNA, 22 nt, Human
ugugccugagucucggcccacc

SEQ ID NO: 754438 - RNA, 22 nt, Human
acauagcacgucucaauuugga

SEQ ID NO: 754439 - RNA, 20 nt, Human
agaaguuuggggguguggag

SEQ ID NO: 754440 - RNA, 22 nt, Human
ggccugugcugagaaccuggcu

SEQ ID NO: 754441 - RNA, 22 nt, Human
gcagugugucucuuggcuuccu

SEQ ID NO: 754442 - RNA, 22 nt, Human
uacugccaaauugcagcaaugu

SEQ ID NO: 754443 - RNA, 22 nt, Human
agacacagcagugccugccuca

SEQ ID NO: 754444 - RNA, 22 nt, Human
uguggaagaacuucuugcuugg

SEQ ID NO: 754445 - RNA, 22 nt, Human
aggggcuccuggccuggagagc

SEQ ID NO: 754446 - RNA, 22 nt, Human
caauuauauuuagaaugauaca

SEQ ID NO: 754447 - RNA, 19 nt, Human
ugccccugcagucuaccca

SEQ ID NO: 754448 - RNA, 22 nt, Human
ucuguacauuuguguugugaau

SEQ ID NO: 754449 - RNA, 22 nt, Human
acauucauuccaggucagucag

SEQ ID NO: 754450 - RNA, 22 nt, Human
ggcuuugcuuaacgugcuucua

SEQ ID NO: 754451 - RNA, 22 nt, Human
uggcucagcugucacagccugg

SEQ ID NO: 754452 - RNA, 22 nt, Human
uggcccugcagaacuagccugg

SEQ ID NO: 754453 - RNA, 22 nt, Human
ucauuucucugagucugauaau

SEQ ID NO: 754454 - RNA, 18 nt, Human
guucccagauggugcuga

SEQ ID NO: 754455 - RNA, 22 nt, Human
auuugcuuaucuccacaguugu

SEQ ID NO: 754456 - RNA, 22 nt, Human
gggagggaaagcuugaucuguc

SEQ ID NO: 754457 - RNA, 20 nt, Human
cuuggccuacuuagcuuugu

SEQ ID NO: 754458 - RNA, 22 nt, Human
cuugaaauccagauuucagagg

SEQ ID NO: 754459 - RNA, 22 nt, Human
gcacugcaucuacuggcaagua

SEQ ID NO: 754460 - RNA, 19 nt, Human
gcuggggccugaccagaca

SEQ ID NO: 754461 - RNA, 22 nt, Human
uggcugggggugcuauagcugc

SEQ ID NO: 754462 - RNA, 22 nt, Human
ugucaucuguguuuugcuggag

SEQ ID NO: 754463 - RNA, 22 nt, Human
ugacucucccaaguuugaggga

SEQ ID NO: 754464 - RNA, 22 nt, Human
ugcucuggaauaguccuaggca

SEQ ID NO: 754465 - RNA, 23 nt, Human
gugagucuugccuuugcugugga

SEQ ID NO: 754466 - RNA, 22 nt, Human
ugcuuccaggaauccaucuggc

SEQ ID NO: 754467 - RNA, 22 nt, Human
uccuccagugucuggggccuug

SEQ ID NO: 754468 - RNA, 22 nt, Human
auuucucaguuccuacuguuua

SEQ ID NO: 754469 - RNA, 22 nt, Human
ucacaugagguuaugacaaagc

SEQ ID NO: 754470 - RNA, 22 nt, Human
gggcaagaagcuggaagcauuc

SEQ ID NO: 754471 - RNA, 22 nt, Human
ucugaaauccuuuaucuuggcu

SEQ ID NO: 754472 - RNA, 18 nt, Human
ggcucagcaggcucucuc

SEQ ID NO: 754473 - RNA, 22 nt, Human
uaaggcagguagaugacuacgg

SEQ ID NO: 754474 - RNA, 22 nt, Human
gugagcagcucaggguggucuc

SEQ ID NO: 754475 - RNA, 22 nt, Human
uucaacacaggaacaugauaua

SEQ ID NO: 754476 - RNA, 22 nt, Human
gcagcugggccccagccucucc

SEQ ID NO: 754477 - RNA, 22 nt, Human
cauggauagaugaaugcuuaaa

SEQ ID NO: 754478 - RNA, 22 nt, Human
ccagguggacggcgaguacagg

SEQ ID NO: 754479 - RNA, 22 nt, Human
aaauguuucuacuugugagcau

SEQ ID NO: 754480 - RNA, 22 nt, Human
auguguguaugugccuauaucu

SEQ ID NO: 754481 - RNA, 22 nt, Human
auuugacauugacacaccuaug

SEQ ID NO: 754482 - RNA, 19 nt, Human
ugaguguguguuucucuaa

SEQ ID NO: 754483 - RNA, 22 nt, Human
uacauucuauaucuguuacauc

SEQ ID NO: 754484 - RNA, 22 nt, Human
uaugucaugggucaaaaugaag

SEQ ID NO: 754485 - RNA, 22 nt, Human
uuuacgaaaagugacuaauagg

SEQ ID NO: 754486 - RNA, 22 nt, Human
aucuuuaauuuggaucagggcc

SEQ ID NO: 754487 - RNA, 22 nt, Human
acauguuuaaguuuguuauaug

SEQ ID NO: 754488 - RNA, 22 nt, Human
uguacaaugccagggaacacca

SEQ ID NO: 754489 - RNA, 20 nt, Human
cugaaccaaggcuuucucag

SEQ ID NO: 754490 - RNA, 22 nt, Human
guguggggccaggaucagggcu

SEQ ID NO: 754491 - RNA, 22 nt, Human
agcugcaguuagccccagauga

SEQ ID NO: 754492 - RNA, 22 nt, Human
gcagacacuuuuauucugcaua

SEQ ID NO: 754493 - RNA, 22 nt, Human
aucauguucaucguauuuaggc

SEQ ID NO: 754494 - RNA, 22 nt, Human
gagccaggcccguacuugcugu

SEQ ID NO: 754495 - RNA, 19 nt, Human
aaauaucagagagaugaua

SEQ ID NO: 754496 - RNA, 22 nt, Human
agggcugcugaggaagccuugc

SEQ ID NO: 754497 - RNA, 22 nt, Human
cacugucugagcuggugauuag

SEQ ID NO: 754498 - RNA, 22 nt, Human
agcccuagagaaccagccugug

SEQ ID NO: 754499 - RNA, 22 nt, Human
acuugcauuauauuuaucacaa

SEQ ID NO: 754500 - RNA, 22 nt, Human
aaauguuccggguaaggagaaa

SEQ ID NO: 754501 - RNA, 22 nt, Human
cauuuaguuuugcaguagcagg

SEQ ID NO: 754502 - RNA, 22 nt, Human
uccugaggaaugugaagagaac

SEQ ID NO: 754503 - RNA, 22 nt, Human
ucuaacuuguauguauaguuuu

SEQ ID NO: 754504 - RNA, 22 nt, Human
uuccuaacaagucuaucuuuga

SEQ ID NO: 754505 - RNA, 20 nt, Human
ugagugcuccauucugccca

SEQ ID NO: 754506 - RNA, 22 nt, Human
cugggaagaagggacaacagcg

SEQ ID NO: 754507 - RNA, 22 nt, Human
ccagguguagcacugcucacag

SEQ ID NO: 754508 - RNA, 22 nt, Human
uaguaaucagagguaaacuuua

SEQ ID NO: 754509 - RNA, 22 nt, Human
caggucagcacuuggaggugca

SEQ ID NO: 754510 - RNA, 22 nt, Human
cccugaggaugucuccuuccug

SEQ ID NO: 754511 - RNA, 22 nt, Human
gccacaugcaauugcagcacgu

SEQ ID NO: 754512 - RNA, 22 nt, Human
agggagccuuccuggcuguggu

SEQ ID NO: 754513 - RNA, 22 nt, Human
gcuucaugggugugcaaccugu

SEQ ID NO: 754514 - RNA, 22 nt, Human
cacaggaggaggccagagcgua

SEQ ID NO: 754515 - RNA, 22 nt, Human
acagaacaggcugagaaaaaca

SEQ ID NO: 754516 - RNA, 22 nt, Human
aagucccaucugccuccaugua

SEQ ID NO: 754517 - RNA, 23 nt, Human
aggcuggcuucaggagccucucc

SEQ ID NO: 754518 - RNA, 22 nt, Human
gcaugcauuacaugggauaugc

SEQ ID NO: 754519 - RNA, 19 nt, Human
ggcauccacgaaugcagag

SEQ ID NO: 754520 - RNA, 22 nt, Human
cggggagggcagaggcucccuc

SEQ ID NO: 754521 - RNA, 22 nt, Human
ccugcaggggagagacuucuag

SEQ ID NO: 754522 - RNA, 22 nt, Human
cuuggagaaugacaguggauua

SEQ ID NO: 754523 - RNA, 22 nt, Human
aaugcugucuuuucuacuucau

SEQ ID NO: 754524 - RNA, 22 nt, Human
ggucaguggcaggggguacuuc

SEQ ID NO: 754525 - RNA, 22 nt, Human
uugugcauuucucugagugugu

SEQ ID NO: 754526 - RNA, 22 nt, Human
uccuugggaaacaucauguaau

SEQ ID NO: 754527 - RNA, 22 nt, Human
aaaguugugguuugaugcaguu

SEQ ID NO: 754528 - RNA, 22 nt, Human
ggaggguccccagcagcaugaa

SEQ ID NO: 754529 - RNA, 22 nt, Human
uuugaaugauuaucuuucggca

SEQ ID NO: 754530 - RNA, 22 nt, Human
auuuggaaacaauuauauucuu

SEQ ID NO: 754531 - RNA, 22 nt, Human
uaggauuuggcuuuagucaggu

SEQ ID NO: 754532 - RNA, 22 nt, Human
uggcuccuucauucuccugcca

SEQ ID NO: 754533 - RNA, 22 nt, Human
cauucuaucuuggacuggaucu

SEQ ID NO: 754534 - RNA, 22 nt, Human
aggcuuguggauuggagcgagu

SEQ ID NO: 754535 - RNA, 23 nt, Human
ucucucuggcaaauuucacauau

SEQ ID NO: 754536 - RNA, 22 nt, Human
uuaaauaguaggucuauuuugg

SEQ ID NO: 754537 - RNA, 22 nt, Human
cagccuccugggacacucaccg

SEQ ID NO: 754538 - RNA, 22 nt, Human
uugaaugaauuugagcagagau

SEQ ID NO: 754539 - RNA, 22 nt, Human
ccuguuuauugugaagaaccca

SEQ ID NO: 754540 - RNA, 22 nt, Human
ggcauguaugugcauuuuugua

SEQ ID NO: 754541 - RNA, 22 nt, Human
gcagggaagaucuuggagcugc

SEQ ID NO: 754542 - RNA, 22 nt, Human
ucugagauuaagcagagaugga

SEQ ID NO: 754543 - RNA, 22 nt, Human
gccuucugcgcucgugucuccg

SEQ ID NO: 754544 - RNA, 22 nt, Human
auuauuagauucuuaauuguaa

SEQ ID NO: 754545 - RNA, 22 nt, Human
aaucagagucccaagaucugua

SEQ ID NO: 754546 - RNA, 22 nt, Human
auccugggcagugugucacucu

SEQ ID NO: 754547 - RNA, 22 nt, Human
uuuacacuugaggaaacugagg

SEQ ID NO: 754548 - RNA, 22 nt, Human
aacuguggccagggacuggagu

SEQ ID NO: 754549 - RNA, 22 nt, Human
cuguccaugcauguugucugcu

SEQ ID NO: 754550 - RNA, 22 nt, Human
ugcugagagccagggcuggcau

SEQ ID NO: 754551 - RNA, 20 nt, Human
auuguugcugcugcuguuga

SEQ ID NO: 754552 - RNA, 22 nt, Human
gaguuagagccauagagcacgg

SEQ ID NO: 754553 - RNA, 22 nt, Human
ugucugcagaagauggcauggg

SEQ ID NO: 754554 - RNA, 22 nt, Human
gaguuauuuguagggauuauau

SEQ ID NO: 754555 - RNA, 22 nt, Human
uacagcaugaucacaauggaaa

SEQ ID NO: 754556 - RNA, 22 nt, Human
ucuauaaaugcagauaugugug

SEQ ID NO: 754557 - RNA, 22 nt, Human
aaauugcaaaaguacuuuuagg

SEQ ID NO: 754558 - RNA, 22 nt, Human
ccucagagguuuucauucugua

SEQ ID NO: 754559 - RNA, 22 nt, Human
cugggccaucuccuuugugugg

SEQ ID NO: 754560 - RNA, 22 nt, Human
acugaaaaugaauuagaaacag

SEQ ID NO: 754561 - RNA, 22 nt, Human
aggcagccuuuagacagucugc

SEQ ID NO: 754562 - RNA, 22 nt, Human
gcccaagcuccgccuccugucg

SEQ ID NO: 754563 - RNA, 22 nt, Human
gacccuuagaaugugaucuuau

SEQ ID NO: 754564 - RNA, 21 nt, Human
aggguccuacagggcucagga

SEQ ID NO: 754565 - RNA, 22 nt, Human
aaagugcugggauuacaggugu

SEQ ID NO: 754566 - RNA, 22 nt, Human
cagcuggcuggucagugcacaa

SEQ ID NO: 754567 - RNA, 22 nt, Human
auuacacagcgguuacuacuag

SEQ ID NO: 754568 - RNA, 22 nt, Human
guauuugauacaugaaauggug

SEQ ID NO: 754569 - RNA, 22 nt, Human
ugauauuuuaugagcuuucaua

SEQ ID NO: 754570 - RNA, 22 nt, Human
aaggaaccuggaguagagggag

SEQ ID NO: 754571 - RNA, 22 nt, Human
cagccugggcuccagagucccu

SEQ ID NO: 754572 - RNA, 22 nt, Human
cuuuugauugagcaguuucaaa

SEQ ID NO: 754573 - RNA, 22 nt, Human
uccuguggucuggaaggaaugg

SEQ ID NO: 754574 - RNA, 22 nt, Human
caacacagguucugcaaaggaa

SEQ ID NO: 754575 - RNA, 22 nt, Human
gggagcuccacugccucucauu

SEQ ID NO: 754576 - RNA, 21 nt, Human
uggcucuguucaauauaugga

SEQ ID NO: 754577 - RNA, 22 nt, Human
aagcugucagugucaggcuaaa

SEQ ID NO: 754578 - RNA, 22 nt, Human
auacagaugggucagauuucau

SEQ ID NO: 754579 - RNA, 22 nt, Human
gaugcugugcuaugucuacaga

SEQ ID NO: 754580 - RNA, 22 nt, Human
gagcucagacucgggccugggg

SEQ ID NO: 754581 - RNA, 22 nt, Human
ccaggucccuggaauuuaugag

SEQ ID NO: 754582 - RNA, 19 nt, Human
ugagugggagcccagguau

SEQ ID NO: 754583 - RNA, 22 nt, Human
ggugaccucaccuggucccacc

SEQ ID NO: 754584 - RNA, 22 nt, Human
ggcuuucagccaaaggacaacc

SEQ ID NO: 754585 - RNA, 22 nt, Human
acgauguggccugaaucaggca

SEQ ID NO: 754586 - RNA, 22 nt, Human
gagauuagaguuguuucauugu

SEQ ID NO: 754587 - RNA, 22 nt, Human
gacaggcuuugagucccagaac

SEQ ID NO: 754588 - RNA, 22 nt, Human
cacucuccagcacaccccauuu

SEQ ID NO: 754589 - RNA, 22 nt, Human
aaagaucacgucccaggacucg

SEQ ID NO: 754590 - RNA, 22 nt, Human
gcugagcuagaaaaggaccaca

SEQ ID NO: 754591 - RNA, 22 nt, Human
ggagcugcauuuagggagccuu

SEQ ID NO: 754592 - RNA, 22 nt, Human
cacaguuuugcccagggcuucu

SEQ ID NO: 754593 - RNA, 22 nt, Human
aacaggcuccuugugaauggau

SEQ ID NO: 754594 - RNA, 22 nt, Human
aaauagauuuaacauccauccc

SEQ ID NO: 754595 - RNA, 22 nt, Human
gcagggguuuucugacuugagu

SEQ ID NO: 754596 - RNA, 22 nt, Human
ucugagguucuguuuucaacug

SEQ ID NO: 754597 - RNA, 23 nt, Human
acucaaauuucgcuuggaguuca

SEQ ID NO: 754598 - RNA, 22 nt, Human
caaggcaggcaguucacuugag

SEQ ID NO: 754599 - RNA, 22 nt, Human
uggcagcacauugacccgggcu

SEQ ID NO: 754600 - RNA, 22 nt, Human
caggagcuacucagguuggguu

SEQ ID NO: 754601 - RNA, 22 nt, Human
ccagagagaguacugggcucug

SEQ ID NO: 754602 - RNA, 22 nt, Human
augaguaagaccauaauuuuug

SEQ ID NO: 754603 - RNA, 22 nt, Human
uauguguaaccuugugauuuau

SEQ ID NO: 754604 - RNA, 22 nt, Human
caaagggcucuagacucagcag

SEQ ID NO: 754605 - RNA, 22 nt, Human
uuuauugaacacuugcacuggc

SEQ ID NO: 754606 - RNA, 22 nt, Human
ugcagccuugaccuccagugcu

SEQ ID NO: 754607 - RNA, 22 nt, Human
acaguuuauguaaagcugccaa

SEQ ID NO: 754608 - RNA, 22 nt, Human
ucuauuuucuugccaaaacugc

SEQ ID NO: 754609 - RNA, 22 nt, Human
gucuggguuucaugggcacugg

SEQ ID NO: 754610 - RNA, 22 nt, Human
gugcuuuaaagacaguuaugcu

SEQ ID NO: 754611 - RNA, 22 nt, Human
ugaggaaugcugagcagaggaa

SEQ ID NO: 754612 - RNA, 22 nt, Human
uuaucuguuguuuuaguacaau

SEQ ID NO: 754613 - RNA, 22 nt, Human
ccagaagucaaguaagaugaag

SEQ ID NO: 754614 - RNA, 22 nt, Human
cccugagaugccucacccuagu

SEQ ID NO: 754615 - RNA, 22 nt, Human
auucuuuaauucaauugaagga

SEQ ID NO: 754616 - RNA, 22 nt, Human
uugcuucagucagugcugccca

SEQ ID NO: 754617 - RNA, 22 nt, Human
gacacaugaccauaaaugcuaa

SEQ ID NO: 754618 - RNA, 22 nt, Human
cuaccugaaaagguugugguga

SEQ ID NO: 754619 - RNA, 20 nt, Human
cauuuguuagcuuucuacug

SEQ ID NO: 754620 - RNA, 22 nt, Human
accagccuccuagcugcuccug

SEQ ID NO: 754621 - RNA, 23 nt, Human
ugcuccagccucuuugauagugu

SEQ ID NO: 754622 - RNA, 22 nt, Human
gacagcaaccucaugagaaacu

SEQ ID NO: 754623 - RNA, 22 nt, Human
uucugguguguucucucuaggc

SEQ ID NO: 754624 - RNA, 23 nt, Human
cuuguauucacucauuugggaac

SEQ ID NO: 754625 - RNA, 22 nt, Human
agagauaauuagguuaaaugag

SEQ ID NO: 754626 - RNA, 22 nt, Human
gaggugagaagggggucagaug

SEQ ID NO: 754627 - RNA, 22 nt, Human
uaggcacugaggggagcaaggu

SEQ ID NO: 754628 - RNA, 22 nt, Human
gugugcaggcuugaggauuagg

SEQ ID NO: 754629 - RNA, 22 nt, Human
aaagguuuugcccuggguauuc

SEQ ID NO: 754630 - RNA, 22 nt, Human
aggcuggcaaggcagaugugug

SEQ ID NO: 754631 - RNA, 23 nt, Human
agcuguuucauuauuacaacacc

SEQ ID NO: 754632 - RNA, 22 nt, Human
uuuuaagaugcuaguauuucag

SEQ ID NO: 754633 - RNA, 22 nt, Human
gguggagcuguggacaggaagg

SEQ ID NO: 754634 - RNA, 22 nt, Human
uuagaacauuccaucacugggu

SEQ ID NO: 754635 - RNA, 16 nt, Human
ccacagggcaaggggc

SEQ ID NO: 754636 - RNA, 19 nt, Human
gcauaaaaugucaaugugu

SEQ ID NO: 754637 - RNA, 22 nt, Human
gaacagcagcucguucucgaug

SEQ ID NO: 754638 - RNA, 22 nt, Human
gugucacaugguuuacugcagc

SEQ ID NO: 754639 - RNA, 22 nt, Human
gaagacacucugcagaguuauc

SEQ ID NO: 754640 - RNA, 22 nt, Human
ggcucugggucuguggggagcg

SEQ ID NO: 754641 - RNA, 22 nt, Human
aucugcugcccagccacuugcu

SEQ ID NO: 754642 - RNA, 22 nt, Human
ugcugugcuccauugucuucac

SEQ ID NO: 754643 - RNA, 22 nt, Human
acagaacugcaggaggaaaagc

SEQ ID NO: 754644 - RNA, 22 nt, Human
ccacccugccuugggccaguga

SEQ ID NO: 754645 - RNA, 22 nt, Human
gcguuuaagugaugaucgucuu

SEQ ID NO: 754646 - RNA, 22 nt, Human
gcauccauucacucaacuuaga

SEQ ID NO: 754647 - RNA, 22 nt, Human
aggcccugauccgaauccagau

SEQ ID NO: 754648 - RNA, 22 nt, Human
uggacauguaaaggcucaaggu

SEQ ID NO: 754649 - RNA, 22 nt, Human
uacauauucaacguucaguauu

SEQ ID NO: 754650 - RNA, 22 nt, Human
cugggagcggcugucacugguu

SEQ ID NO: 754651 - RNA, 22 nt, Human
ucucucagaggaagaggcagug

SEQ ID NO: 754652 - RNA, 22 nt, Human
uuuccuguucuaguuguugcca

SEQ ID NO: 754653 - RNA, 22 nt, Human
ugagcuuacuucuguacacaga

SEQ ID NO: 754654 - RNA, 22 nt, Human
gacagcugaaaaauguaaggua

SEQ ID NO: 754655 - RNA, 22 nt, Human
ggagucaggauccuggggaugg

SEQ ID NO: 754656 - RNA, 22 nt, Human
agcagguguagggcucuuugua

SEQ ID NO: 754657 - RNA, 22 nt, Human
agcuccugcuugacagaagagg

SEQ ID NO: 754658 - RNA, 22 nt, Human
ugcuggcuguucuagggaggcc

SEQ ID NO: 754659 - RNA, 22 nt, Human
ggaauagggagagaaucguuug

SEQ ID NO: 754660 - RNA, 22 nt, Human
agagugaucagauaucaggugu

SEQ ID NO: 754661 - RNA, 22 nt, Human
uuacuuuauagaacacuggggg

SEQ ID NO: 754662 - RNA, 22 nt, Human
acucuuuauuguuuguggcuag

SEQ ID NO: 754663 - RNA, 22 nt, Human
agagacuguaaugagagguaca

SEQ ID NO: 754664 - RNA, 22 nt, Human
gguccagaagcugguaggguag

SEQ ID NO: 754665 - RNA, 22 nt, Human
agccuggaggccaggagacagu

SEQ ID NO: 754666 - RNA, 22 nt, Human
cuacuuuaccuccaucagacug

SEQ ID NO: 754667 - RNA, 22 nt, Human
aagcuguuguucauccugaauu

SEQ ID NO: 754668 - RNA, 22 nt, Human
gagcacagggaauagacagaua

SEQ ID NO: 754669 - RNA, 22 nt, Human
uuuccaagagcuuauuucugaa

SEQ ID NO: 754670 - RNA, 22 nt, Human
aaggacaggcuaaccugacauu

SEQ ID NO: 754671 - RNA, 22 nt, Human
ucagacagggcuucucaaacuu

SEQ ID NO: 754672 - RNA, 22 nt, Human
ugaaaucuacccuauucagggu

SEQ ID NO: 754673 - RNA, 22 nt, Human
ucuuuguaagacauguaagucc

SEQ ID NO: 754674 - RNA, 22 nt, Human
uucugguuuaagaaagugcugg

SEQ ID NO: 754675 - RNA, 22 nt, Human
gaggcucacuuucauccucuuc

SEQ ID NO: 754676 - RNA, 22 nt, Human
ggaccaggccagccucccugcg

SEQ ID NO: 754677 - RNA, 22 nt, Human
uacagcgaaaauuuagcuugau

SEQ ID NO: 754678 - RNA, 22 nt, Human
acaauguagaggcugaaagcaa

SEQ ID NO: 754679 - RNA, 22 nt, Human
caguacauuucauaugauucua

SEQ ID NO: 754680 - RNA, 22 nt, Human
gaguguaguucauuccguccua

SEQ ID NO: 754681 - RNA, 22 nt, Human
cacuaaguugguguuaauuagu

SEQ ID NO: 754682 - RNA, 22 nt, Human
gcuucuguuaacuuauguuccc

SEQ ID NO: 754683 - RNA, 22 nt, Human
uacuguacucaacaugugaguu

SEQ ID NO: 754684 - RNA, 22 nt, Human
aagaggugagaagcuacacuua

SEQ ID NO: 754685 - RNA, 22 nt, Human
ggcugagacuagagugaggcau

SEQ ID NO: 754686 - RNA, 19 nt, Human
accugcaguaauaauuccu

SEQ ID NO: 754687 - RNA, 22 nt, Human
gaaggaagugcucauacuaguu

SEQ ID NO: 754688 - RNA, 22 nt, Human
gggcuccaaaauccuguagccu

SEQ ID NO: 754689 - RNA, 22 nt, Human
aagaggagggcagauucaaggc

SEQ ID NO: 754690 - RNA, 18 nt, Human
ccagaggcccgggcaggc

SEQ ID NO: 754691 - RNA, 22 nt, Human
ugcccacauucugaagcucccu

SEQ ID NO: 754692 - RNA, 22 nt, Human
uuccuggcugucaugcccuagu

SEQ ID NO: 754693 - RNA, 22 nt, Human
ggccaggaagggaagaucagca

SEQ ID NO: 754694 - RNA, 18 nt, Human
aucaaggaggggaagguc

SEQ ID NO: 754695 - RNA, 22 nt, Human
gccaagcuuauaugaugcuuga

SEQ ID NO: 754696 - RNA, 22 nt, Human
ggcacugggagaggugagacgg

SEQ ID NO: 754697 - RNA, 22 nt, Human
caggcugauaggguccaaaguu

SEQ ID NO: 754698 - RNA, 22 nt, Human
ugagaugaugggauaagagggc

SEQ ID NO: 754699 - RNA, 22 nt, Human
augucacuuuugagacuagguu

SEQ ID NO: 754700 - RNA, 22 nt, Human
ucuguggaaauuuccugaggca

SEQ ID NO: 754701 - RNA, 22 nt, Human
cagggggugcaggcccugugac

SEQ ID NO: 754702 - RNA, 22 nt, Human
ccaggaucugauauugggcucc

SEQ ID NO: 754703 - RNA, 22 nt, Human
aguaggcauugugaaacugcau

SEQ ID NO: 754704 - RNA, 22 nt, Human
aaaaguaaucgcaguuuuugcc

SEQ ID NO: 754705 - RNA, 22 nt, Human
caacacauugaagcuaugauga

SEQ ID NO: 754706 - RNA, 22 nt, Human
auuucuacaguacacaugcauu

SEQ ID NO: 754707 - RNA, 22 nt, Human
uugaaaugcucuuuggaaucua

SEQ ID NO: 754708 - RNA, 19 nt, Human
ucaaugucuggccaauggu

SEQ ID NO: 754709 - RNA, 22 nt, Human
cacaggcagccuuguagaagaa

SEQ ID NO: 754710 - RNA, 22 nt, Human
cccuugcacauuugucuuuaau

SEQ ID NO: 754711 - RNA, 22 nt, Human
guggcagggugcucaucaugca

SEQ ID NO: 754712 - RNA, 22 nt, Human
uccugaauugaacucaguuaau

SEQ ID NO: 754713 - RNA, 22 nt, Human
aaagucugaaagaugcuaacau

SEQ ID NO: 754714 - RNA, 22 nt, Human
uucagugugugauaccugcugu

SEQ ID NO: 754715 - RNA, 22 nt, Human
gaaagcacuaaaagagaauccu

SEQ ID NO: 754716 - RNA, 22 nt, Human
agcuaggagauuuugugaggcu

SEQ ID NO: 754717 - RNA, 22 nt, Human
ccaugcccuaaaggacuggcag

SEQ ID NO: 754718 - RNA, 22 nt, Human
caucuuuaguuauugaauauag

SEQ ID NO: 754719 - RNA, 22 nt, Human
uacccagggcuuuucugaugca

SEQ ID NO: 754720 - RNA, 22 nt, Human
ucuccuggucaccucagaaguc

SEQ ID NO: 754721 - RNA, 19 nt, Human
acuccagggaugacagaag

SEQ ID NO: 754722 - RNA, 22 nt, Human
aaagcaaugggucuaagguaaa

SEQ ID NO: 754723 - RNA, 19 nt, Human
gcauuucauuuaaccauca

SEQ ID NO: 754724 - RNA, 22 nt, Human
cagucccaucucccagguggcu

SEQ ID NO: 754725 - RNA, 22 nt, Human
agaguauuuugauuauccugga

SEQ ID NO: 754726 - RNA, 22 nt, Human
uugaaaggccuguuuauccagc

SEQ ID NO: 754727 - RNA, 22 nt, Human
uucuaagugauucuagcuggac

SEQ ID NO: 754728 - RNA, 22 nt, Human
ccagagucccuugcagcucagu

SEQ ID NO: 754729 - RNA, 22 nt, Human
ugagucagccagagcugccaug

SEQ ID NO: 754730 - RNA, 22 nt, Human
agggccugacacccuugccagc

SEQ ID NO: 754731 - RNA, 22 nt, Human
cccaggaccgcgcggcugagcg

SEQ ID NO: 754732 - RNA, 22 nt, Human
cugagagucaguggaguggugu

SEQ ID NO: 754733 - RNA, 22 nt, Human
gguggcaccuuacccugcgcag

SEQ ID NO: 754734 - RNA, 22 nt, Human
ccccagcacaggcuccucagau

SEQ ID NO: 754735 - RNA, 22 nt, Human
cagcauuguaagaaugaagacc

SEQ ID NO: 754736 - RNA, 22 nt, Human
uaggguacaugugcacaacaug

SEQ ID NO: 754737 - RNA, 22 nt, Human
auuauccaacacccaguuacau

SEQ ID NO: 754738 - RNA, 22 nt, Human
uuuaauacuauggggaugaaca

SEQ ID NO: 754739 - RNA, 22 nt, Human
acuauucaccuuucaugcagga

SEQ ID NO: 754740 - RNA, 22 nt, Human
uaaugcuuugucagccuaaggg

SEQ ID NO: 754741 - RNA, 22 nt, Human
cagguacaaagcuacugccuga

SEQ ID NO: 754742 - RNA, 22 nt, Human
uacccagcuucaagucaggacu

SEQ ID NO: 754743 - RNA, 22 nt, Human
ucaacucacaagaaugagcaag

SEQ ID NO: 754744 - RNA, 22 nt, Human
augcagagcuuccaguggccug

SEQ ID NO: 754745 - RNA, 22 nt, Human
auucugagaaaugcauugucag

SEQ ID NO: 754746 - RNA, 22 nt, Human
auggcauuauagcaaugguuug

SEQ ID NO: 754747 - RNA, 22 nt, Human
ccuucucccucugagaggaacc

SEQ ID NO: 754748 - RNA, 22 nt, Human
ccacagcaugcaggccugacac

SEQ ID NO: 754749 - RNA, 22 nt, Human
gcucagaaaagugaggcucagu

SEQ ID NO: 754750 - RNA, 21 nt, Human
ucaggaggcucagacuccugc

SEQ ID NO: 754751 - RNA, 22 nt, Human
gaacaguaucaguagugccagu

SEQ ID NO: 754752 - RNA, 22 nt, Human
gaguccagacaccauaccugau

SEQ ID NO: 754753 - RNA, 22 nt, Human
uccaggcuggagugcaguggca

SEQ ID NO: 754754 - RNA, 22 nt, Human
aguaaggcauuuuucauguuua

SEQ ID NO: 754755 - RNA, 22 nt, Human
uucaucuugauggcuuccuaau

SEQ ID NO: 754756 - RNA, 22 nt, Human
caguccuuggcaaguucucagu

SEQ ID NO: 754757 - RNA, 22 nt, Human
aagugcaauuugaaauucugca

SEQ ID NO: 754758 - RNA, 22 nt, Human
agacagcugccuccaccacagc

SEQ ID NO: 754759 - RNA, 22 nt, Human
auuauucagucuuguaaggagu

SEQ ID NO: 754760 - RNA, 22 nt, Human
ucacccagauagugagcauagu

SEQ ID NO: 754761 - RNA, 22 nt, Human
ucauuuuucacacagggucacc

SEQ ID NO: 754762 - RNA, 22 nt, Human
cagcucaaguuucccaggucag

SEQ ID NO: 754763 - RNA, 22 nt, Human
aguauuuccuggcuuaucugcu

SEQ ID NO: 754764 - RNA, 22 nt, Human
agagaggauuuguuuuucuccu

SEQ ID NO: 754765 - RNA, 22 nt, Human
ccaguccagugccaugcauggc

SEQ ID NO: 754766 - RNA, 22 nt, Human
aaagacuagcauuuauauguac

SEQ ID NO: 754767 - RNA, 22 nt, Human
gcagaugccacuaggugaagug

SEQ ID NO: 754768 - RNA, 22 nt, Human
aaugaaauaguuggcuguagag

SEQ ID NO: 754769 - RNA, 22 nt, Human
accugguaaccugccugacuaa

SEQ ID NO: 754770 - RNA, 22 nt, Human
aguuuagaaaaucuguuucuuc

SEQ ID NO: 754771 - RNA, 22 nt, Human
caucuguagcuccaugacaauu

SEQ ID NO: 754772 - RNA, 22 nt, Human
uccagcaugaaggggcuuuuau

SEQ ID NO: 754773 - RNA, 22 nt, Human
uggagaaaagguugaauccauc

SEQ ID NO: 754774 - RNA, 19 nt, Human
aaucagaaauaucgaggcc

SEQ ID NO: 754775 - RNA, 22 nt, Human
uggcaaggccacaggugcaguu

SEQ ID NO: 754776 - RNA, 22 nt, Human
uugauacauagcacaguuuagg

SEQ ID NO: 754777 - RNA, 22 nt, Human
agucuggauuuagaggugggcc

SEQ ID NO: 754778 - RNA, 22 nt, Human
acaguucugccuguuugagaag

SEQ ID NO: 754779 - RNA, 22 nt, Human
gcugcuucagggacgugccagc

SEQ ID NO: 754780 - RNA, 22 nt, Human
aguuuuauggcucaaccuaaua

SEQ ID NO: 754781 - RNA, 22 nt, Human
gacagcagcauaauacaugaac

SEQ ID NO: 754782 - RNA, 22 nt, Human
aaauucuaugucaauguuuauu

SEQ ID NO: 754783 - RNA, 22 nt, Human
ugccccugaugccuagaacaga

SEQ ID NO: 754784 - RNA, 22 nt, Human
auuuacucgugucuccagugcu

SEQ ID NO: 754785 - RNA, 22 nt, Human
agccaaggucgccccagggcaa

SEQ ID NO: 754786 - RNA, 19 nt, Human
uggagaggaaaugcugcuc

SEQ ID NO: 754787 - RNA, 18 nt, Human
agcuccuggucucaggga

SEQ ID NO: 754788 - RNA, 22 nt, Human
aauccgauucguguacauuaau

SEQ ID NO: 754789 - RNA, 22 nt, Human
ucaugcaaauacuguuccagaa

SEQ ID NO: 754790 - RNA, 22 nt, Human
ccagagccggauugugaagugc

SEQ ID NO: 754791 - RNA, 22 nt, Human
gauuuacagaucuaagggucac

SEQ ID NO: 754792 - RNA, 20 nt, Human
gcccaagguccagaaggggg

SEQ ID NO: 754793 - RNA, 22 nt, Human
cacugaaaggaaaccagagcau

SEQ ID NO: 754794 - RNA, 22 nt, Human
cacauucaggauuuuccauguc

SEQ ID NO: 754795 - RNA, 22 nt, Human
cugggccacaagccugugugau

SEQ ID NO: 754796 - RNA, 22 nt, Human
ccauuuguuuucgcuaccaugg

SEQ ID NO: 754797 - RNA, 22 nt, Human
ccacagggcucuaggcgcuucc

SEQ ID NO: 754798 - RNA, 22 nt, Human
ugccaggcaggacccuagaacc

SEQ ID NO: 754799 - RNA, 22 nt, Human
ggcagggaagcuggcaucacgg

SEQ ID NO: 754800 - RNA, 22 nt, Human
agacagcagaaacuagagcacu

SEQ ID NO: 754801 - RNA, 22 nt, Human
gaaaacauccagagauagaccu

SEQ ID NO: 754802 - RNA, 22 nt, Human
cuuuauauauucccaggcugcc

SEQ ID NO: 754803 - RNA, 22 nt, Human
ugcccugucgcucacucccacc

SEQ ID NO: 754804 - RNA, 22 nt, Human
gaagcuucguggcucuucaaau

SEQ ID NO: 754805 - RNA, 22 nt, Human
cugggagagccuuuccugaguc

SEQ ID NO: 754806 - RNA, 22 nt, Human
ggccagcugagcugcugcacag

SEQ ID NO: 754807 - RNA, 22 nt, Human
uagaaacaaaaucugaugacuc

SEQ ID NO: 754808 - RNA, 22 nt, Human
gaaccuguccugagugaggagu

SEQ ID NO: 754809 - RNA, 22 nt, Human
aauccacuaaugaagaaugggc

SEQ ID NO: 754810 - RNA, 22 nt, Human
caguauuuauggcuugaguauu

SEQ ID NO: 754811 - RNA, 22 nt, Human
ucugccuagugggacagcagcc

SEQ ID NO: 754812 - RNA, 22 nt, Human
gaguuuuaaccucagcucucug

SEQ ID NO: 754813 - RNA, 22 nt, Human
caaggccagggaauuuuucugg

SEQ ID NO: 754814 - RNA, 22 nt, Human
ucauuuacuggauccauaagca

SEQ ID NO: 754815 - RNA, 22 nt, Human
caguugaugggacucauguggg

SEQ ID NO: 754816 - RNA, 22 nt, Human
gcugggcugcccaaccucugac

SEQ ID NO: 754817 - RNA, 22 nt, Human
uagaaaggauauugagaugaau

SEQ ID NO: 754818 - RNA, 22 nt, Human
cauguguuuugucauuucaaua

SEQ ID NO: 754819 - RNA, 22 nt, Human
ucugcacauguaguaaauauua

SEQ ID NO: 754820 - RNA, 19 nt, Human
uuuauuugagacaugccuu

SEQ ID NO: 754821 - RNA, 22 nt, Human
agcagcuuaucuuggagaggca

SEQ ID NO: 754822 - RNA, 22 nt, Human
cagggucauggcaccugcacgg

SEQ ID NO: 754823 - RNA, 18 nt, Human
aguggaaaacaaauacac

SEQ ID NO: 754824 - RNA, 22 nt, Human
auguggcuagugcaacugagaa

SEQ ID NO: 754825 - RNA, 22 nt, Human
guguccugagugaggccuggcc

SEQ ID NO: 754826 - RNA, 16 nt, Human
ucucccuugucaccug

SEQ ID NO: 754827 - RNA, 22 nt, Human
ggccucugccucaucugggcac

SEQ ID NO: 754828 - RNA, 22 nt, Human
acaugcuuccaaauuauguugg

SEQ ID NO: 754829 - RNA, 22 nt, Human
gccaggcauuauuccgaucccu

SEQ ID NO: 754830 - RNA, 22 nt, Human
agggcucagccagccugugugc

SEQ ID NO: 754831 - RNA, 21 nt, Human
uacagaugaggagaccaaggc

SEQ ID NO: 754832 - RNA, 22 nt, Human
cuggaaaggguccucauucugu

SEQ ID NO: 754833 - RNA, 22 nt, Human
uguguuuuaucuauuguaucuu

SEQ ID NO: 754834 - RNA, 19 nt, Human
uuccuggcucuucuguuuu

SEQ ID NO: 754835 - RNA, 18 nt, Human
guuggcugcuguggcugg

SEQ ID NO: 754836 - RNA, 22 nt, Human
accauuugacucucuaaggaua

SEQ ID NO: 754837 - RNA, 22 nt, Human
uacauuuucuaggggaccaaga

SEQ ID NO: 754838 - RNA, 21 nt, Human
agccaggcaagcacccccacu

SEQ ID NO: 754839 - RNA, 22 nt, Human
cuguccauauucaagggguagg

SEQ ID NO: 754840 - RNA, 22 nt, Human
accaaauaggcuuccuggguug

SEQ ID NO: 754841 - RNA, 22 nt, Human
aaguugcuaaugauguguuugc

SEQ ID NO: 754842 - RNA, 22 nt, Human
cuucuugguugguuucauucca

SEQ ID NO: 754843 - RNA, 22 nt, Human
gccuggcuucccuuggagcauu

SEQ ID NO: 754844 - RNA, 22 nt, Human
gugugugugcauauaacauaua

SEQ ID NO: 754845 - RNA, 22 nt, Human
cuggucacuggucucauccagc

SEQ ID NO: 754846 - RNA, 22 nt, Human
aaauacuagaauucagaguuga

SEQ ID NO: 754847 - RNA, 22 nt, Human
ugacuccacaauuugacuuaua

SEQ ID NO: 754848 - RNA, 22 nt, Human
caagauuuagccugcugccugu

SEQ ID NO: 754849 - RNA, 22 nt, Human
ggcaugcauguuguuuuaggug

SEQ ID NO: 754850 - RNA, 23 nt, Human
uccuuccuuugagaggcuccauc

SEQ ID NO: 754851 - RNA, 22 nt, Human
aguuucuuauucuuaguuaugu

SEQ ID NO: 754852 - RNA, 22 nt, Human
aaauacauuagacggagaguua

SEQ ID NO: 754853 - RNA, 22 nt, Human
gcaacuuaggaguuagagcaug

SEQ ID NO: 754854 - RNA, 22 nt, Human
cuguuuucccuggaguucagca

SEQ ID NO: 754855 - RNA, 22 nt, Human
ucuugaaacauaugaguaagug

SEQ ID NO: 754856 - RNA, 22 nt, Human
gcuuccuaaaugcacagggcag

SEQ ID NO: 754857 - RNA, 22 nt, Human
uccugagcacagagacaaggaa

SEQ ID NO: 754858 - RNA, 22 nt, Human
acucuacagaaugaauaccugu

SEQ ID NO: 754859 - RNA, 22 nt, Human
caucauauggaauuuaaaguca

SEQ ID NO: 754860 - RNA, 22 nt, Human
uuccaggagccacacaggggcg

SEQ ID NO: 754861 - RNA, 22 nt, Human
uggaaaaaaauuggcuagcuuc

SEQ ID NO: 754862 - RNA, 22 nt, Human
caccaucuagcauuuauuugga

SEQ ID NO: 754863 - RNA, 22 nt, Human
agugggcauaugaagucucaag

SEQ ID NO: 754864 - RNA, 22 nt, Human
gccuccugaagugcugggauua

SEQ ID NO: 754865 - RNA, 22 nt, Human
cuugucugggcagcuugggagu

SEQ ID NO: 754866 - RNA, 22 nt, Human
aaacauugcuaaauaaugcugc

SEQ ID NO: 754867 - RNA, 22 nt, Human
agauauaauaauuuacaagugu

SEQ ID NO: 754868 - RNA, 21 nt, Human
ucuaagaacaugauucucccu

SEQ ID NO: 754869 - RNA, 22 nt, Human
accagcacggauuagaaugcuu

SEQ ID NO: 754870 - RNA, 22 nt, Human
augaaacaacagacuuggucaa

SEQ ID NO: 754871 - RNA, 22 nt, Human
aaaugucaaagacguguuuuug

SEQ ID NO: 754872 - RNA, 22 nt, Human
uaaugccacggcagggaacagc

SEQ ID NO: 754873 - RNA, 22 nt, Human
uuuguagacgucagaaguuacu

SEQ ID NO: 754874 - RNA, 22 nt, Human
aauuacagucggagcagcacug

SEQ ID NO: 754875 - RNA, 22 nt, Human
acauauauuuucacacaugguu

SEQ ID NO: 754876 - RNA, 22 nt, Human
uggcuuggcuaagaucuaagcu

SEQ ID NO: 754877 - RNA, 20 nt, Human
uucauuugggaaaaucugcg

SEQ ID NO: 754878 - RNA, 22 nt, Human
agggcuuuugcaauccaagucu

SEQ ID NO: 754879 - RNA, 22 nt, Human
ucccagacaaucauuggccacc

SEQ ID NO: 754880 - RNA, 22 nt, Human
uagcucuucauuucaucugauu

SEQ ID NO: 754881 - RNA, 21 nt, Human
ccagaugcaaaugcagacauu

SEQ ID NO: 754882 - RNA, 22 nt, Human
ucagauuuuccagccuuucucu

SEQ ID NO: 754883 - RNA, 22 nt, Human
auaaacugaagggaacacugag

SEQ ID NO: 754884 - RNA, 22 nt, Human
cucugacauucugugacucuga

SEQ ID NO: 754885 - RNA, 22 nt, Human
uaacuuuucuaggugugauaau

SEQ ID NO: 754886 - RNA, 22 nt, Human
ggugggaguggaacguggaaga

SEQ ID NO: 754887 - RNA, 22 nt, Human
ugccuggcaaugccagaagcca

SEQ ID NO: 754888 - RNA, 22 nt, Human
ggcugagaaggagugggugagg

SEQ ID NO: 754889 - RNA, 22 nt, Human
aaaggcaucuagccaaguugag

SEQ ID NO: 754890 - RNA, 22 nt, Human
ugagcuggagucuguggcuccu

SEQ ID NO: 754891 - RNA, 21 nt, Human
auuagaagguauuuagggccu

SEQ ID NO: 754892 - RNA, 22 nt, Human
uuucaaggauguuauauaaaug

SEQ ID NO: 754893 - RNA, 22 nt, Human
guccugguccugccuccccaug

SEQ ID NO: 754894 - RNA, 22 nt, Human
aaugaagccagcugggaugcga

SEQ ID NO: 754895 - RNA, 22 nt, Human
uaaaauguuugcaagagaccag

SEQ ID NO: 754896 - RNA, 22 nt, Human
cuguuauuuagaacauggaauc

SEQ ID NO: 754897 - RNA, 22 nt, Human
caggugaguuugcuauuguaca

SEQ ID NO: 754898 - RNA, 22 nt, Human
uaggaacacacauguguagcug

SEQ ID NO: 754899 - RNA, 19 nt, Human
cucugggcaagucacuuaa

SEQ ID NO: 754900 - RNA, 22 nt, Human
ucagaagguacagaagggaggu

SEQ ID NO: 754901 - RNA, 22 nt, Human
cccaccaguacagaugguagau

SEQ ID NO: 754902 - RNA, 19 nt, Human
ccugggacuuaggcugggu

SEQ ID NO: 754903 - RNA, 17 nt, Human
agcaaaaguaucaaagc

SEQ ID NO: 754904 - RNA, 22 nt, Human
ucucuuuaaguauaaucuuaua

SEQ ID NO: 754905 - RNA, 22 nt, Human
augcucuggaguacgugaaauu

SEQ ID NO: 754906 - RNA, 22 nt, Human
uacuuacacugaagcaaagaua

SEQ ID NO: 754907 - RNA, 22 nt, Human
cuucacugaguagucuagacuc

SEQ ID NO: 754908 - RNA, 22 nt, Human
cucuuugugcuauuaugauccu

SEQ ID NO: 754909 - RNA, 22 nt, Human
acagggccuuauauccagaagg

SEQ ID NO: 754910 - RNA, 22 nt, Human
gcuggcagucccaucagcuggg

SEQ ID NO: 754911 - RNA, 22 nt, Human
uaguuuuuaaguguacaauuuc

SEQ ID NO: 754912 - RNA, 21 nt, Human
ggcaggugggucucuguugcu

SEQ ID NO: 754913 - RNA, 22 nt, Human
uucuucaauuuuccauauacug

SEQ ID NO: 754914 - RNA, 22 nt, Human
aauauucauuugcagaagaagu

SEQ ID NO: 754915 - RNA, 22 nt, Human
gcaguaaauaauuuuguguaua

SEQ ID NO: 754916 - RNA, 22 nt, Human
acugcagccuagggaccacagu

SEQ ID NO: 754917 - RNA, 22 nt, Human
uaggacaugcuacauaaauagg

SEQ ID NO: 754918 - RNA, 22 nt, Human
ccaugcaugccugaaauugcug

SEQ ID NO: 754919 - RNA, 22 nt, Human
uuucuuguaagauguuuauuaa

SEQ ID NO: 754920 - RNA, 22 nt, Human
ucauugaaugcucugcagguug

SEQ ID NO: 754921 - RNA, 22 nt, Human
cccuggccccucacuccgaggc

SEQ ID NO: 754922 - RNA, 22 nt, Human
ucugggcccugagauguucuuc

SEQ ID NO: 754923 - RNA, 22 nt, Human
uucuacacuuuucauuagcuag

SEQ ID NO: 754924 - RNA, 22 nt, Human
agguauaagucucauuucuguu

SEQ ID NO: 754925 - RNA, 22 nt, Human
agggagagacauuuccuucuug

SEQ ID NO: 754926 - RNA, 22 nt, Human
auggaguggggacugcagugga

SEQ ID NO: 754927 - RNA, 22 nt, Human
caccacagcauccacuagaagg

SEQ ID NO: 754928 - RNA, 22 nt, Human
uccaggcuagagugcaguggcc

SEQ ID NO: 754929 - RNA, 22 nt, Human
agagacuucugccuuagcaaga

SEQ ID NO: 754930 - RNA, 22 nt, Human
gggugggaacaggaugccagga

SEQ ID NO: 754931 - RNA, 22 nt, Human
acagaugaggcccaucagucug

SEQ ID NO: 754932 - RNA, 22 nt, Human
gacuuuauccugccugaccacg

SEQ ID NO: 754933 - RNA, 22 nt, Human
acaaacugggauaggauccugu

SEQ ID NO: 754934 - RNA, 22 nt, Human
ugggacacacaaggucagcucu

SEQ ID NO: 754935 - RNA, 22 nt, Human
aguaaagcggugucacagaaug

SEQ ID NO: 754936 - RNA, 22 nt, Human
aaggauacuuuuagagccugag

SEQ ID NO: 754937 - RNA, 22 nt, Human
gaggaacaugaggugaccuggg

SEQ ID NO: 754938 - RNA, 22 nt, Human
cacugucuugauuacuaugggu

SEQ ID NO: 754939 - RNA, 22 nt, Human
gagcugugacacgcagcccagg

SEQ ID NO: 754940 - RNA, 22 nt, Human
ucaugcaaagccaauuccagcu

SEQ ID NO: 754941 - RNA, 22 nt, Human
uggcagguagucagaggcgaca

SEQ ID NO: 754942 - RNA, 22 nt, Human
acuguaaaauacauaaguauug

SEQ ID NO: 754943 - RNA, 22 nt, Human
aggcacuguggaagacaugguu

SEQ ID NO: 754944 - RNA, 22 nt, Human
uagcuagcugcacaggcccugg

SEQ ID NO: 754945 - RNA, 22 nt, Human
ugaaagguagcuggccucauag

SEQ ID NO: 754946 - RNA, 22 nt, Human
guccugggcaugcagggcuuuc

SEQ ID NO: 754947 - RNA, 22 nt, Human
ggccugugcaagacagcacccc

SEQ ID NO: 754948 - RNA, 22 nt, Human
ggaaagagaaguugggaggaau

SEQ ID NO: 754949 - RNA, 22 nt, Human
cacaggaagaucucccagaggu

SEQ ID NO: 754950 - RNA, 22 nt, Human
aauaauagcagaguuuacaauc

SEQ ID NO: 754951 - RNA, 22 nt, Human
uuugacaugaaguagcuuauaa

SEQ ID NO: 754952 - RNA, 22 nt, Human
aggcauguauaugugcacaugu

SEQ ID NO: 754953 - RNA, 22 nt, Human
agccuggugauaucagugguuu

SEQ ID NO: 754954 - RNA, 22 nt, Human
gcaggaagggaaagguugacuc

SEQ ID NO: 754955 - RNA, 22 nt, Human
guucacagggauccuuguugaa

SEQ ID NO: 754956 - RNA, 22 nt, Human
uuauuuccaaacuggauauacc

SEQ ID NO: 754957 - RNA, 22 nt, Human
agcugccuuugcaucacuuuaa

SEQ ID NO: 754958 - RNA, 20 nt, Human
agggugagacaugagccucc

SEQ ID NO: 754959 - RNA, 22 nt, Human
aauugcuuuacaagccguuuaa

SEQ ID NO: 754960 - RNA, 22 nt, Human
acugggcuccaaggaccuggag

SEQ ID NO: 754961 - RNA, 22 nt, Human
uauguguguuucaguggaaaug

SEQ ID NO: 754962 - RNA, 22 nt, Human
cugcagaacaauuccugcuguu

SEQ ID NO: 754963 - RNA, 22 nt, Human
ccgcaaggcagagguugcagug

SEQ ID NO: 754964 - RNA, 23 nt, Human
uuuguacauugaggaggcagaau

SEQ ID NO: 754965 - RNA, 22 nt, Human
aguguaugugaaacuuuccaaa

SEQ ID NO: 754966 - RNA, 21 nt, Human
ccauccaucucccuuugcugg

SEQ ID NO: 754967 - RNA, 22 nt, Human
agcuccaggaucugaaaguucg

SEQ ID NO: 754968 - RNA, 22 nt, Human
gucagacacauuucuuucagug

SEQ ID NO: 754969 - RNA, 22 nt, Human
cugagagaugguguguuuauaa

SEQ ID NO: 754970 - RNA, 20 nt, Human
cuucuucauuaacccuacug

SEQ ID NO: 754971 - RNA, 22 nt, Human
aauuaagucacacaccuaaacc

SEQ ID NO: 754972 - RNA, 22 nt, Human
cuccauauguucaguuaugcag

SEQ ID NO: 754973 - RNA, 22 nt, Human
gcuggcuuuugaagucuagcua

SEQ ID NO: 754974 - RNA, 22 nt, Human
gcuucucucaggagcaucagcc

SEQ ID NO: 754975 - RNA, 21 nt, Human
auggcuucucaggugcacuga

SEQ ID NO: 754976 - RNA, 22 nt, Human
guacuucuggccaggcuggcca

SEQ ID NO: 754977 - RNA, 22 nt, Human
caccaggugcuggaggacauca

SEQ ID NO: 754978 - RNA, 22 nt, Human
cuggggaugggaccuggcauaa

SEQ ID NO: 754979 - RNA, 22 nt, Human
guacagaaauggggccccaggu

SEQ ID NO: 754980 - RNA, 22 nt, Human
aguuauuuggcuauagauggua

SEQ ID NO: 754981 - RNA, 22 nt, Human
acagcagguagcuuugugccuc

SEQ ID NO: 754982 - RNA, 22 nt, Human
aaagugcugggauuacaggcuu

SEQ ID NO: 754983 - RNA, 22 nt, Human
gcaaacauaauaugaagacacu

SEQ ID NO: 754984 - RNA, 22 nt, Human
caguuuaaagaaggaugggagu

SEQ ID NO: 754985 - RNA, 22 nt, Human
ugagaggcuagaucagcucugu

SEQ ID NO: 754986 - RNA, 22 nt, Human
aauugcuugaugacuaguaauu

SEQ ID NO: 754987 - RNA, 19 nt, Human
agaugucuauuugacuauc

SEQ ID NO: 754988 - RNA, 22 nt, Human
aaaaagcuuaaaugagcaguuc

SEQ ID NO: 754989 - RNA, 20 nt, Human
ccuucucuggaauugccucc

SEQ ID NO: 754990 - RNA, 22 nt, Human
guuccuaagcacugugcauucu

SEQ ID NO: 754991 - RNA, 22 nt, Human
cuaaaugacagguaccauagug

SEQ ID NO: 754992 - RNA, 22 nt, Human
caugauguuaucuaaaucuggu

SEQ ID NO: 754993 - RNA, 22 nt, Human
gacagacagggguucuccugga

SEQ ID NO: 754994 - RNA, 22 nt, Human
gagcagcuggacaggccucccu

SEQ ID NO: 754995 - RNA, 22 nt, Human
guaaacaaacucucaggccagu

SEQ ID NO: 754996 - RNA, 22 nt, Human
uaggaaacucaaagggaagugg

SEQ ID NO: 754997 - RNA, 22 nt, Human
ggcagccaugcacgcugccugg

SEQ ID NO: 754998 - RNA, 22 nt, Human
agcaccaggaaagaaggggcca

SEQ ID NO: 754999 - RNA, 23 nt, Human
auguuuuaugucucuagcugcca

SEQ ID NO: 755000 - RNA, 22 nt, Human
aggcuccacggucacuggcucu

SEQ ID NO: 755001 - RNA, 22 nt, Human
gaacuucuucuuuaagagacuc

SEQ ID NO: 755002 - RNA, 22 nt, Human
aguggcaucaaaucaagguuug

SEQ ID NO: 755003 - RNA, 22 nt, Human
agucugaaggcaaucugcugac

SEQ ID NO: 755004 - RNA, 22 nt, Human
cuaguccacuguccugccucca

SEQ ID NO: 755005 - RNA, 22 nt, Human
cagcuauuccaggaguagaauc

SEQ ID NO: 755006 - RNA, 22 nt, Human
gcugagguccagcauucgccua

SEQ ID NO: 755007 - RNA, 22 nt, Human
cuuagcuuuguccuaggucucu

SEQ ID NO: 755008 - RNA, 22 nt, Human
ggggaucuaggcuuaugagggc

SEQ ID NO: 755009 - RNA, 22 nt, Human
ucucuggguaaaguucucucau

SEQ ID NO: 755010 - RNA, 22 nt, Human
gauuucuugaccccugucucag

SEQ ID NO: 755011 - RNA, 22 nt, Human
cagcaacuuaggcagaacaucu

SEQ ID NO: 755012 - RNA, 22 nt, Human
gaggcacugagagugggggaug

SEQ ID NO: 755013 - RNA, 22 nt, Human
ucuuacagaaaauagauaacau

SEQ ID NO: 755014 - RNA, 22 nt, Human
uuguauuuggguaguauagaga

SEQ ID NO: 755015 - RNA, 22 nt, Human
acucacucuuaaucagacuccc

SEQ ID NO: 755016 - RNA, 22 nt, Human
gaggggaguaaagucauguuac

SEQ ID NO: 755017 - RNA, 22 nt, Human
gcucagagcagaugguacucag

SEQ ID NO: 755018 - RNA, 22 nt, Human
gugggagaagcccuguucguag

SEQ ID NO: 755019 - RNA, 22 nt, Human
uuucaggaaacauuuaauggca

SEQ ID NO: 755020 - RNA, 22 nt, Human
ggagccuguggccgucacgacu

SEQ ID NO: 755021 - RNA, 22 nt, Human
cuccagggcuaccagguuuuag

SEQ ID NO: 755022 - RNA, 22 nt, Human
ugcagagagccagcucucucgg

SEQ ID NO: 755023 - RNA, 22 nt, Human
cagaccuggggccugggagccc

SEQ ID NO: 755024 - RNA, 22 nt, Human
ucucccagugucuggcagucag

SEQ ID NO: 755025 - RNA, 22 nt, Human
agcuggguguagggcuggacaa

SEQ ID NO: 755026 - RNA, 19 nt, Human
aaaaagaggcuauaauauu

SEQ ID NO: 755027 - RNA, 22 nt, Human
cugcucugagaggcucuuccua

SEQ ID NO: 755028 - RNA, 22 nt, Human
gaucugagaucuaaaccagagg

SEQ ID NO: 755029 - RNA, 22 nt, Human
ugaagcccugucuuauggaaga

SEQ ID NO: 755030 - RNA, 22 nt, Human
gugaagagcuguugcagagauu

SEQ ID NO: 755031 - RNA, 22 nt, Human
gggcuggcaggaccugggcuga

SEQ ID NO: 755032 - RNA, 22 nt, Human
uguaaaagacauuucuaagcaa

SEQ ID NO: 755033 - RNA, 22 nt, Human
cucauaaagugagaauaugacc

SEQ ID NO: 755034 - RNA, 22 nt, Human
uuucuacuaagaaaguugauua

SEQ ID NO: 755035 - RNA, 22 nt, Human
ggguaugauagggaggugaaau

SEQ ID NO: 755036 - RNA, 22 nt, Human
cucauaaacauuauucauuauu

SEQ ID NO: 755037 - RNA, 22 nt, Human
guggggcugcuuaggcugcgca

SEQ ID NO: 755038 - RNA, 22 nt, Human
uggcuucuuugugacagcucuu

SEQ ID NO: 755039 - RNA, 22 nt, Human
ggcugagaguggaucccaggga

SEQ ID NO: 755040 - RNA, 22 nt, Human
uugcauuugcucauuugauaug

SEQ ID NO: 755041 - RNA, 20 nt, Human
aguuuauuccaggagaacug

SEQ ID NO: 755042 - RNA, 17 nt, Human
cauaaaacaguucuauu

SEQ ID NO: 755043 - RNA, 22 nt, Human
agggucaaaugggcaggaagag

SEQ ID NO: 755044 - RNA, 22 nt, Human
gagagaagggacuucuacacuu

SEQ ID NO: 755045 - RNA, 22 nt, Human
aagauugccccauuuacacugc

SEQ ID NO: 755046 - RNA, 22 nt, Human
gagugagggcagcaggggcugc

SEQ ID NO: 755047 - RNA, 22 nt, Human
cuucacauuugcgaaggccaaa

SEQ ID NO: 755048 - RNA, 18 nt, Human
caggaugagugaugggga

SEQ ID NO: 755049 - RNA, 22 nt, Human
ugaggcugagauaucagggagg

SEQ ID NO: 755050 - RNA, 22 nt, Human
acauagaucugugauucauucu

SEQ ID NO: 755051 - RNA, 22 nt, Human
acauuccugaggaaauacauuc

SEQ ID NO: 755052 - RNA, 22 nt, Human
uaaaucacucuucucucaccac

SEQ ID NO: 755053 - RNA, 22 nt, Human
ucagggaaaccuaaggaagcca

SEQ ID NO: 755054 - RNA, 22 nt, Human
ugagccagucugucugggugaa

SEQ ID NO: 755055 - RNA, 22 nt, Human
uuucuuccuuaccuuacuagag

SEQ ID NO: 755056 - RNA, 22 nt, Human
ggcucuguuuacuuucagaggc

SEQ ID NO: 755057 - RNA, 22 nt, Human
uagaaaugcccagauucugcua

SEQ ID NO: 755058 - RNA, 22 nt, Human
gguucauucugaagucuucagc

SEQ ID NO: 755059 - RNA, 22 nt, Human
ccucugugucagggaagagacu

SEQ ID NO: 755060 - RNA, 22 nt, Human
gcaguguuucaaaucaaaggca

SEQ ID NO: 755061 - RNA, 22 nt, Human
uccucaguuauaaauaggaaac

SEQ ID NO: 755062 - RNA, 22 nt, Human
uucugcucugacuugcaaggaa

SEQ ID NO: 755063 - RNA, 22 nt, Human
ccugagccugaguggugcaggg

SEQ ID NO: 755064 - RNA, 22 nt, Human
gcugugggccacacggcugagu

SEQ ID NO: 755065 - RNA, 22 nt, Human
gcuccuccaauauggacuccuc

SEQ ID NO: 755066 - RNA, 18 nt, Human
ugcugcccaacucucccc

SEQ ID NO: 755067 - RNA, 22 nt, Human
ucuggcuccaggaccgggcaca

SEQ ID NO: 755068 - RNA, 22 nt, Human
cucucagauggagugugaaugg

SEQ ID NO: 755069 - RNA, 22 nt, Human
acauggaucaaccuauuuucuu

SEQ ID NO: 755070 - RNA, 22 nt, Human
uagaaaucuacuuagacuuucu

SEQ ID NO: 755071 - RNA, 21 nt, Human
gccuugccgugaaagcccuuu

SEQ ID NO: 755072 - RNA, 22 nt, Human
gaaccucucagcagccaugauc

SEQ ID NO: 755073 - RNA, 22 nt, Human
ucauuuccucaaauucaagguu

SEQ ID NO: 755074 - RNA, 22 nt, Human
gcagaggacacaggagggcaag

SEQ ID NO: 755075 - RNA, 21 nt, Human
ucugggaaauugggaaagaag

SEQ ID NO: 755076 - RNA, 22 nt, Human
uacagaaaaacaucuggagccg

SEQ ID NO: 755077 - RNA, 22 nt, Human
ugcccugcagacccugcagugu

SEQ ID NO: 755078 - RNA, 22 nt, Human
uugacaaaggaccuugcuauuu

SEQ ID NO: 755079 - RNA, 22 nt, Human
uccagucuucuugcagcuacau

SEQ ID NO: 755080 - RNA, 22 nt, Human
ggaacauacuguguagacuuug

SEQ ID NO: 755081 - RNA, 22 nt, Human
ugccuguguccccuucuuggca

SEQ ID NO: 755082 - RNA, 22 nt, Human
ggacccugggcagcuggcugcu

SEQ ID NO: 755083 - RNA, 22 nt, Human
aaggcagcaacuaauggaucuc

SEQ ID NO: 755084 - RNA, 22 nt, Human
accugagagcuauaagguuuua

SEQ ID NO: 755085 - RNA, 22 nt, Human
uaaaacagcagggcagagaagu

SEQ ID NO: 755086 - RNA, 22 nt, Human
guacacaggcagcccagugcug

SEQ ID NO: 755087 - RNA, 22 nt, Human
ucaaagcacacuuagugguaga

SEQ ID NO: 755088 - RNA, 22 nt, Human
ccacuguaguuaugaugaaguu

SEQ ID NO: 755089 - RNA, 22 nt, Human
gcagcugaagcugcaguuccag

SEQ ID NO: 755090 - RNA, 19 nt, Human
uguguucauucaucagagg

SEQ ID NO: 755091 - RNA, 19 nt, Human
caagugaagccugggaugg

SEQ ID NO: 755092 - RNA, 23 nt, Human
uuuuccuguggagacaugacugg

SEQ ID NO: 755093 - RNA, 22 nt, Human
ugaucuuugguaguacgauaau

SEQ ID NO: 755094 - RNA, 22 nt, Human
cucauauucagucacugaugca

SEQ ID NO: 755095 - RNA, 17 nt, Human
uacauguguaucugauu

SEQ ID NO: 755096 - RNA, 22 nt, Human
aauaagauugacacaaguaccu

SEQ ID NO: 755097 - RNA, 22 nt, Human
ucugcccucaggguaaugauca

SEQ ID NO: 755098 - RNA, 22 nt, Human
ucacacuuuauuuauuucaugc

SEQ ID NO: 755099 - RNA, 22 nt, Human
auuugcagauucugucagguuu

SEQ ID NO: 755100 - RNA, 22 nt, Human
gagucccaugaugauagccaca

SEQ ID NO: 755101 - RNA, 22 nt, Human
gugcugagcacaccuuggagca

SEQ ID NO: 755102 - RNA, 22 nt, Human
agcagauauuuguugagcacuu

SEQ ID NO: 755103 - RNA, 22 nt, Human
agauauuuguaucuugcuauug

SEQ ID NO: 755104 - RNA, 22 nt, Human
uacauugaaagucauuuaaucc

SEQ ID NO: 755105 - RNA, 22 nt, Human
ucugggagguaaccaugcugau

SEQ ID NO: 755106 - RNA, 22 nt, Human
aguguuucaagugaugcuuugg

SEQ ID NO: 755107 - RNA, 22 nt, Human
uccagguaggccaagacagcua

SEQ ID NO: 755108 - RNA, 22 nt, Human
agaguguggaaauguucagagu

SEQ ID NO: 755109 - RNA, 22 nt, Human
agccaggcagggcucucgcucu

SEQ ID NO: 755110 - RNA, 22 nt, Human
uaagaacagugacagccaacau

SEQ ID NO: 755111 - RNA, 20 nt, Human
gcaggcagggaaugggggug

SEQ ID NO: 755112 - RNA, 22 nt, Human
ggcaguggguuccccaaggcac

SEQ ID NO: 755113 - RNA, 22 nt, Human
uuacacagugguuaagucuggg

SEQ ID NO: 755114 - RNA, 22 nt, Human
uccugaauaaauuagcugucac

SEQ ID NO: 755115 - RNA, 22 nt, Human
uucagagagaaaccagugggaa

SEQ ID NO: 755116 - RNA, 22 nt, Human
aaucagaaaggcuaaggaagca

SEQ ID NO: 755117 - RNA, 22 nt, Human
cuccaucagcuguugguugagg

SEQ ID NO: 755118 - RNA, 18 nt, Human
aguugcuuauucugugca

SEQ ID NO: 755119 - RNA, 22 nt, Human
acugcaugauaauaauagcaga

SEQ ID NO: 755120 - RNA, 22 nt, Human
agauacaacuguuuaaacauua

SEQ ID NO: 755121 - RNA, 22 nt, Human
cauuuaaugccuuugccaucca

SEQ ID NO: 755122 - RNA, 22 nt, Human
cugaugcucuggauguagucaa

SEQ ID NO: 755123 - RNA, 22 nt, Human
caaugauugcuauuuacauaaa

SEQ ID NO: 755124 - RNA, 22 nt, Human
gaaaccagauaagggaggcuga

SEQ ID NO: 755125 - RNA, 22 nt, Human
cugagcugacaucuuccucuuu

SEQ ID NO: 755126 - RNA, 22 nt, Human
gcaggccaggcuaggggcuguc

SEQ ID NO: 755127 - RNA, 22 nt, Human
gagcuggucaguuucaggagag

SEQ ID NO: 755128 - RNA, 20 nt, Human
ugugggcccuuggcuggcaa

SEQ ID NO: 755129 - RNA, 22 nt, Human
uagcaaagaagauauuauugca

SEQ ID NO: 755130 - RNA, 22 nt, Human
ggaccagagaagugagcaccug

SEQ ID NO: 755131 - RNA, 22 nt, Human
cagagcccauccuauacucucc

SEQ ID NO: 755132 - RNA, 22 nt, Human
agucagagagcucucagcauag

SEQ ID NO: 755133 - RNA, 22 nt, Human
auuucagcagcccauguuugga

SEQ ID NO: 755134 - RNA, 22 nt, Human
gacagcagguaauuaguuaaca

SEQ ID NO: 755135 - RNA, 22 nt, Human
acauguuaaacaucauggaaug

SEQ ID NO: 755136 - RNA, 22 nt, Human
cacucugcgcugggcgccagcg

SEQ ID NO: 755137 - RNA, 17 nt, Human
ucaugcccaacuauuac

SEQ ID NO: 755138 - RNA, 22 nt, Human
aaagccaguucuuagagaaagc

SEQ ID NO: 755139 - RNA, 22 nt, Human
aauccaggguguggccuuucca

SEQ ID NO: 755140 - RNA, 22 nt, Human
uaggaacacagggacuugauga

SEQ ID NO: 755141 - RNA, 22 nt, Human
cuacagcuguguguuuaugugc

SEQ ID NO: 755142 - RNA, 22 nt, Human
uuccaugcaagaaguauggcuc

SEQ ID NO: 755143 - RNA, 22 nt, Human
ugccugucuuuccucccucgua

SEQ ID NO: 755144 - RNA, 22 nt, Human
uguggccugauuuugcaucucu

SEQ ID NO: 755145 - RNA, 22 nt, Human
gguggcaucucuuuccagauuu

SEQ ID NO: 755146 - RNA, 22 nt, Human
gacauucaacuuugaugauuau

SEQ ID NO: 755147 - RNA, 21 nt, Human
agacaggucagggagagguga

SEQ ID NO: 755148 - RNA, 22 nt, Human
uuguaacagcugcuuaauagag

SEQ ID NO: 755149 - RNA, 22 nt, Human
uucagauguggcuuugucaggc

SEQ ID NO: 755150 - RNA, 19 nt, Human
aggcacagguugucuggac

SEQ ID NO: 755151 - RNA, 19 nt, Human
ugggaguggggaagguccu

SEQ ID NO: 755152 - RNA, 22 nt, Human
gcagacuguaucaaugucagua

SEQ ID NO: 755153 - RNA, 21 nt, Human
ucugggcugcugcugcccauc

SEQ ID NO: 755154 - RNA, 17 nt, Human
aauguccuuggaccaca

SEQ ID NO: 755155 - RNA, 22 nt, Human
aaggccaggccagaugacaguc

SEQ ID NO: 755156 - RNA, 22 nt, Human
uuugcauuguuucaaaagugaa

SEQ ID NO: 755157 - RNA, 22 nt, Human
gggcaugccugcgcagugcaug

SEQ ID NO: 755158 - RNA, 22 nt, Human
gcuggccuuugaggaagcugcg

SEQ ID NO: 755159 - RNA, 22 nt, Human
ugggcuuccuggagccugugcu

SEQ ID NO: 755160 - RNA, 22 nt, Human
ggagccuggcccggcccuuggc

SEQ ID NO: 755161 - RNA, 22 nt, Human
aagcagcugaaggauucagggu

SEQ ID NO: 755162 - RNA, 20 nt, Human
gguagcagcugcugucaucc

SEQ ID NO: 755163 - RNA, 22 nt, Human
caggcacuuugcugggggcgca

SEQ ID NO: 755164 - RNA, 22 nt, Human
ucagagcugugcuucaggaaag

SEQ ID NO: 755165 - RNA, 22 nt, Human
uggagggaacaaaggaguccca

SEQ ID NO: 755166 - RNA, 22 nt, Human
uuugaacagggaauguuccaca

SEQ ID NO: 755167 - RNA, 22 nt, Human
aagcagaggaccgacggaggga

SEQ ID NO: 755168 - RNA, 22 nt, Human
ucagcuuuuuacaugugaaaua

SEQ ID NO: 755169 - RNA, 22 nt, Human
gcugagggcauguguggcgacu

SEQ ID NO: 755170 - RNA, 22 nt, Human
gugcagacuuacagauuauccc

SEQ ID NO: 755171 - RNA, 22 nt, Human
gcuuucugggcuauagaacggg

SEQ ID NO: 755172 - RNA, 22 nt, Human
uauugugaguauaacugcauuu

SEQ ID NO: 755173 - RNA, 22 nt, Human
ugcauuaagcacacuuuugaau

SEQ ID NO: 755174 - RNA, 22 nt, Human
cagagccaugguaugggcuugu

SEQ ID NO: 755175 - RNA, 22 nt, Human
gucuuauaguacaauuugaagu

SEQ ID NO: 755176 - RNA, 22 nt, Human
caguuuuacccaagcuuauuuu

SEQ ID NO: 755177 - RNA, 22 nt, Human
uagaaaugauugguugagcucu

SEQ ID NO: 755178 - RNA, 22 nt, Human
gacaguggauucaucuagucaa

SEQ ID NO: 755179 - RNA, 22 nt, Human
ugggccacgugacccuuacccu

SEQ ID NO: 755180 - RNA, 22 nt, Human
gaucaggaauauuggaaaguac

SEQ ID NO: 755181 - RNA, 22 nt, Human
cagagcuuuggcuagaugguug

SEQ ID NO: 755182 - RNA, 22 nt, Human
uuugacagcuuguuacaaaguu

SEQ ID NO: 755183 - RNA, 22 nt, Human
augcaauaaauacuuuccagcu

SEQ ID NO: 755184 - RNA, 22 nt, Human
uggcagaccugaagguucggcg

SEQ ID NO: 755185 - RNA, 23 nt, Human
caugaagguagcacaaagccucu

SEQ ID NO: 755186 - RNA, 22 nt, Human
uggcucaggccuacgacgccuu

SEQ ID NO: 755187 - RNA, 22 nt, Human
cacugaaucucaaggggagggu

SEQ ID NO: 755188 - RNA, 22 nt, Human
cccuggcucuucaccaccugcc

SEQ ID NO: 755189 - RNA, 22 nt, Human
ggcauagauuucuuuagguuua

SEQ ID NO: 755190 - RNA, 20 nt, Human
uguugauuggugucaucuca

SEQ ID NO: 755191 - RNA, 22 nt, Human
aggagccaaggaaaacaguauu

SEQ ID NO: 755192 - RNA, 22 nt, Human
agcucuuccugcaccuguggcu

SEQ ID NO: 755193 - RNA, 22 nt, Human
uacacuuauaacucugugugug

SEQ ID NO: 755194 - RNA, 22 nt, Human
cugaguguuuucagccacggcc

SEQ ID NO: 755195 - RNA, 22 nt, Human
gauggcuucagucuccuugggu

SEQ ID NO: 755196 - RNA, 22 nt, Human
agaccuggaaguucaagagaaa

SEQ ID NO: 755197 - RNA, 22 nt, Human
ccucugaguccucccugguugc

SEQ ID NO: 755198 - RNA, 22 nt, Human
uucaggaagguccuauagcaga

SEQ ID NO: 755199 - RNA, 22 nt, Human
caguagggaaugugggaggcug

SEQ ID NO: 755200 - RNA, 20 nt, Human
caggcuccgcaggacuaggg

SEQ ID NO: 755201 - RNA, 22 nt, Human
ucaggagauggucuuuauaggc

SEQ ID NO: 755202 - RNA, 22 nt, Human
ggcagcugagcauggcuaccuu

SEQ ID NO: 755203 - RNA, 22 nt, Human
aggggagaguuaaugugaaugu

SEQ ID NO: 755204 - RNA, 22 nt, Human
caggagugucuccacacagcaa

SEQ ID NO: 755205 - RNA, 21 nt, Human
aggcagaaagagcccaggcug

SEQ ID NO: 755206 - RNA, 22 nt, Human
uucaagauccagcacaacagug

SEQ ID NO: 755207 - RNA, 22 nt, Human
ugcuacacuuaaaucagucacc

SEQ ID NO: 755208 - RNA, 22 nt, Human
uggcuucuaaaguuucuuuuag

SEQ ID NO: 755209 - RNA, 22 nt, Human
caggccuggcccccggcacacc

SEQ ID NO: 755210 - RNA, 22 nt, Human
auagccuugacucacagcucuu

SEQ ID NO: 755211 - RNA, 17 nt, Human
aaacaaugcagacaagc

SEQ ID NO: 755212 - RNA, 19 nt, Human
acuucugaggaacugcaca

SEQ ID NO: 755213 - RNA, 22 nt, Human
gcauguguuagagugugcaugc

SEQ ID NO: 755214 - RNA, 22 nt, Human
cugaagauucgccuuuguuuau

SEQ ID NO: 755215 - RNA, 22 nt, Human
acagcuaagggcacaggucacc

SEQ ID NO: 755216 - RNA, 22 nt, Human
uagagguuggccuuagaaagau

SEQ ID NO: 755217 - RNA, 22 nt, Human
uucucaggucaccagggugcca

SEQ ID NO: 755218 - RNA, 22 nt, Human
aaacaagguacacaguaauggu

SEQ ID NO: 755219 - RNA, 22 nt, Human
acuuagcagguggugacucgaa

SEQ ID NO: 755220 - RNA, 22 nt, Human
gacaauaaaaugaucuuacagu

SEQ ID NO: 755221 - RNA, 22 nt, Human
guuauauauaguauuucucuga

SEQ ID NO: 755222 - RNA, 22 nt, Human
gccugggauuguguaagugaau

SEQ ID NO: 755223 - RNA, 22 nt, Human
ucacuagcauuguugaaggacu

SEQ ID NO: 755224 - RNA, 22 nt, Human
gcuucuguggugcaucuuugcu

SEQ ID NO: 755225 - RNA, 22 nt, Human
uccuccagggggaucuucagcc

SEQ ID NO: 755226 - RNA, 23 nt, Human
gcagaggagcaagcuggacacca

SEQ ID NO: 755227 - RNA, 22 nt, Human
gcuuaguggugugcaaaggggu

SEQ ID NO: 755228 - RNA, 18 nt, Human
cugucuuuuuucucucca

SEQ ID NO: 755229 - RNA, 22 nt, Human
ggucccugccugaggcuggccu

SEQ ID NO: 755230 - RNA, 18 nt, Human
aguguucucguuuuauaa

SEQ ID NO: 755231 - RNA, 22 nt, Human
aagugaaucuccuuucuuuauu

SEQ ID NO: 755232 - RNA, 22 nt, Human
agggaaggaaaagcugucgcuu

SEQ ID NO: 755233 - RNA, 21 nt, Human
agaaaaaccagcauguuuuca

SEQ ID NO: 755234 - RNA, 22 nt, Human
agccaugggcucccaguccuuu

SEQ ID NO: 755235 - RNA, 22 nt, Human
ccaguucuucuugacacgaaag

SEQ ID NO: 755236 - RNA, 22 nt, Human
caggcaccucacguggguccca

SEQ ID NO: 755237 - RNA, 17 nt, Human
auggcucaccugugggc

SEQ ID NO: 755238 - RNA, 22 nt, Human
uaguuuguagaaaucuagaaau

SEQ ID NO: 755239 - RNA, 22 nt, Human
ucuggcucagggcucugaggga

SEQ ID NO: 755240 - RNA, 22 nt, Human
uaugcacuggauuacaaagcaa

SEQ ID NO: 755241 - RNA, 18 nt, Human
aggcuucccaggcaggcc

SEQ ID NO: 755242 - RNA, 22 nt, Human
gucucucucccaagauuggcua

SEQ ID NO: 755243 - RNA, 22 nt, Human
auuauugugauaggugucagug

SEQ ID NO: 755244 - RNA, 22 nt, Human
ccagaagggcuauugcagugac

SEQ ID NO: 755245 - RNA, 22 nt, Human
gggcuucauucaggcagaauuu

SEQ ID NO: 755246 - RNA, 22 nt, Human
agcuccugggccaagcccaugc

SEQ ID NO: 755247 - RNA, 22 nt, Human
agagggugagcagguacacaug

SEQ ID NO: 755248 - RNA, 22 nt, Human
acucagaggaaaguugagauug

SEQ ID NO: 755249 - RNA, 22 nt, Human
cagccaggggcuggcguguuga

SEQ ID NO: 755250 - RNA, 22 nt, Human
agcagcauuaugauauaucuua

SEQ ID NO: 755251 - RNA, 22 nt, Human
gaacaucugggaucauugcugu

SEQ ID NO: 755252 - RNA, 22 nt, Human
cucaguccuuauuugccucuac

SEQ ID NO: 755253 - RNA, 22 nt, Human
acaggcuuggggcucagacaga

SEQ ID NO: 755254 - RNA, 22 nt, Human
ugccaggcucagccccuaucuu

SEQ ID NO: 755255 - RNA, 22 nt, Human
cucagaggguacaggugaaccc

SEQ ID NO: 755256 - RNA, 22 nt, Human
cuguuccagaucaggacaccgu

SEQ ID NO: 755257 - RNA, 22 nt, Human
augucaggacccuacugcauug

SEQ ID NO: 755258 - RNA, 22 nt, Human
agagccugcuaccucauuccag

SEQ ID NO: 755259 - RNA, 22 nt, Human
acaggcaagucacacaacuugu

SEQ ID NO: 755260 - RNA, 22 nt, Human
ggcuggcuggaugaauggauua

SEQ ID NO: 755261 - RNA, 22 nt, Human
ucaacugcaaguuugcuuaguu

SEQ ID NO: 755262 - RNA, 22 nt, Human
uuaguacauugauucauuaugu

SEQ ID NO: 755263 - RNA, 22 nt, Human
uuccaguucaaauuggccaaua

SEQ ID NO: 755264 - RNA, 22 nt, Human
uuuuucugccauucaaagagga

SEQ ID NO: 755265 - RNA, 22 nt, Human
agcuuuggggguagguauagag

SEQ ID NO: 755266 - RNA, 22 nt, Human
ucauugcagugauguuguaugu

SEQ ID NO: 755267 - RNA, 22 nt, Human
ugcuuuggccacuagaauucag

SEQ ID NO: 755268 - RNA, 22 nt, Human
auuagcauauuaaauagucauu

SEQ ID NO: 755269 - RNA, 22 nt, Human
cugagcuuccaguuccuccagg

SEQ ID NO: 755270 - RNA, 22 nt, Human
ucaggaggcgugcugggguaca

SEQ ID NO: 755271 - RNA, 22 nt, Human
cucuggaauuaaggaagccugu

SEQ ID NO: 755272 - RNA, 22 nt, Human
uggcccuucugagcacagggcc

SEQ ID NO: 755273 - RNA, 22 nt, Human
guuuucuuccugcaauuggcau

SEQ ID NO: 755274 - RNA, 22 nt, Human
agcagaccaggagugcacaggu

SEQ ID NO: 755275 - RNA, 22 nt, Human
gaggccucugucccgccaggga

SEQ ID NO: 755276 - RNA, 22 nt, Human
guuauacauauguguuaacaaa

SEQ ID NO: 755277 - RNA, 22 nt, Human
gcucagaggccacuguuggaaa

SEQ ID NO: 755278 - RNA, 22 nt, Human
aaaaugagacacaugugacucc

SEQ ID NO: 755279 - RNA, 22 nt, Human
ugcugugggcaguacauaagcu

SEQ ID NO: 755280 - RNA, 22 nt, Human
aggcagucagcccugcuagggu

SEQ ID NO: 755281 - RNA, 22 nt, Human
aagugauuuagucuuauaaagg

SEQ ID NO: 755282 - RNA, 22 nt, Human
acugccuuauaugcugugugug

SEQ ID NO: 755283 - RNA, 22 nt, Human
uggcaccaccagacaccaggag

SEQ ID NO: 755284 - RNA, 22 nt, Human
cacuggcaugugaggcgguggc

SEQ ID NO: 755285 - RNA, 22 nt, Human
aagggcugaaagaccuugggca

SEQ ID NO: 755286 - RNA, 22 nt, Human
ugguccacagggaguccgugcu

SEQ ID NO: 755287 - RNA, 22 nt, Human
cccuuucuucuugacugaaaac

SEQ ID NO: 755288 - RNA, 22 nt, Human
acaacuuuaauggguuucagcu

SEQ ID NO: 755289 - RNA, 22 nt, Human
acugugugcccugacgccaggg

SEQ ID NO: 755290 - RNA, 22 nt, Human
cagcucuuugaguauuccauuu

SEQ ID NO: 755291 - RNA, 16 nt, Human
aaauggcuuaggcuua

SEQ ID NO: 755292 - RNA, 22 nt, Human
uuuaguguuugcguguacuccu

SEQ ID NO: 755293 - RNA, 22 nt, Human
acucagagauauggugguugau

SEQ ID NO: 755294 - RNA, 21 nt, Human
ucccugcuuucuggcccaguc

SEQ ID NO: 755295 - RNA, 22 nt, Human
aggaggugcguggugauccccu

SEQ ID NO: 755296 - RNA, 22 nt, Human
cuuucucuucagcacccagccc

SEQ ID NO: 755297 - RNA, 22 nt, Human
uguguacucaauugagccauuu

SEQ ID NO: 755298 - RNA, 22 nt, Human
uggccugguccuugucaaggca

SEQ ID NO: 755299 - RNA, 22 nt, Human
gaaaaguacacagcccaaacau

SEQ ID NO: 755300 - RNA, 22 nt, Human
aagagggaagucaccuggaggu

SEQ ID NO: 755301 - RNA, 22 nt, Human
ggacaggaugcugaagaugaag

SEQ ID NO: 755302 - RNA, 23 nt, Human
ucccuguguacagccugcaugag

SEQ ID NO: 755303 - RNA, 22 nt, Human
augucuuucuuauggucuguug

SEQ ID NO: 755304 - RNA, 20 nt, Human
ggccauggguugccugaggu

SEQ ID NO: 755305 - RNA, 22 nt, Human
ccauuuuucauaaacuauccaa

SEQ ID NO: 755306 - RNA, 22 nt, Human
cugugucuugaguaauucggug

SEQ ID NO: 755307 - RNA, 22 nt, Human
ugugacugaagugucuagaccu

SEQ ID NO: 755308 - RNA, 22 nt, Human
cuacuguccauaaaguauaacu

SEQ ID NO: 755309 - RNA, 23 nt, Human
aaacuucaguagugucaucagcc

SEQ ID NO: 755310 - RNA, 22 nt, Human
uagcaggaggcaguuccucgcu

SEQ ID NO: 755311 - RNA, 22 nt, Human
uuuguacagugaaagcgagguu

SEQ ID NO: 755312 - RNA, 22 nt, Human
uggcaaggaagagccuggugca

SEQ ID NO: 755313 - RNA, 20 nt, Human
cugagccaacucucuucuug

SEQ ID NO: 755314 - RNA, 22 nt, Human
caugcaaaauguauuuuauuag

SEQ ID NO: 755315 - RNA, 22 nt, Human
gcccugcccuguugaaacuaga

SEQ ID NO: 755316 - RNA, 22 nt, Human
uuccagccuuuauccauccaga

SEQ ID NO: 755317 - RNA, 22 nt, Human
acgggugguaaugagaaaagga

SEQ ID NO: 755318 - RNA, 22 nt, Human
aaagguuugaggugggaagagg

SEQ ID NO: 755319 - RNA, 22 nt, Human
agccacugugcaggagcagugu

SEQ ID NO: 755320 - RNA, 21 nt, Human
uccugggagucugagauccug

SEQ ID NO: 755321 - RNA, 22 nt, Human
guccugacggcugauuggccug

SEQ ID NO: 755322 - RNA, 22 nt, Human
cauugcuuauuucagcuaaagu

SEQ ID NO: 755323 - RNA, 22 nt, Human
caggggcggguaaaaggccucc

SEQ ID NO: 755324 - RNA, 21 nt, Human
gugucaugguugacuuuggca

SEQ ID NO: 755325 - RNA, 22 nt, Human
cuggcucagugccuucagaagu

SEQ ID NO: 755326 - RNA, 22 nt, Human
cuguacaggugaggagggggcu

SEQ ID NO: 755327 - RNA, 19 nt, Human
ucucacaucagcuccuagc

SEQ ID NO: 755328 - RNA, 20 nt, Human
ucacuaguaaccaucugcuu

SEQ ID NO: 755329 - RNA, 21 nt, Human
caccuuauagauaaaauuaga

SEQ ID NO: 755330 - RNA, 20 nt, Human
caugagaagggcagugugag

SEQ ID NO: 755331 - RNA, 22 nt, Human
gauuaugguagaaacaagaagu

SEQ ID NO: 755332 - RNA, 22 nt, Human
ugagccagagagguugaggcua

SEQ ID NO: 755333 - RNA, 22 nt, Human
uaugcaguguacgauguuuagu

SEQ ID NO: 755334 - RNA, 22 nt, Human
uagcccagauacaaaucaugau

SEQ ID NO: 755335 - RNA, 22 nt, Human
agggcuccgggccaccggccug

SEQ ID NO: 755336 - RNA, 20 nt, Human
uggacagaauuagacacuuu

SEQ ID NO: 755337 - RNA, 20 nt, Human
aagcagaagcugcucucagc

SEQ ID NO: 755338 - RNA, 19 nt, Human
ucagaggauuuggcuauga

SEQ ID NO: 755339 - RNA, 22 nt, Human
guagcccaccuggggagggcga

SEQ ID NO: 755340 - RNA, 22 nt, Human
ucugccugcggcugcagguggc

SEQ ID NO: 755341 - RNA, 22 nt, Human
augcauaucagugauuguuugc

SEQ ID NO: 755342 - RNA, 22 nt, Human
uggguaaacaauguuugccuaa

SEQ ID NO: 755343 - RNA, 22 nt, Human
agcagggcuucugugccugugc

SEQ ID NO: 755344 - RNA, 22 nt, Human
cagaaguggcaucauucaagag

SEQ ID NO: 755345 - RNA, 22 nt, Human
gcugccugauguccagcaggac

SEQ ID NO: 755346 - RNA, 22 nt, Human
uggcagccaucugagggugggg

SEQ ID NO: 755347 - RNA, 22 nt, Human
cagagcugggaucccaugggcg

SEQ ID NO: 755348 - RNA, 22 nt, Human
gcauucccaaaagacacuuacc

SEQ ID NO: 755349 - RNA, 20 nt, Human
acuaaggugguagcagcagg

SEQ ID NO: 755350 - RNA, 22 nt, Human
cuccaggugcagaaggacucag

SEQ ID NO: 755351 - RNA, 22 nt, Human
ugcaaaucauaaacaauagugu

SEQ ID NO: 755352 - RNA, 22 nt, Human
aaugucaauuaccagaacagaa

SEQ ID NO: 755353 - RNA, 22 nt, Human
gcucugccagacacuguggcca

SEQ ID NO: 755354 - RNA, 22 nt, Human
ggaggccaggaagagccgcccu

SEQ ID NO: 755355 - RNA, 20 nt, Human
caucuccugccuccauguuc

SEQ ID NO: 755356 - RNA, 22 nt, Human
ugagcaggagauaaacagguag

SEQ ID NO: 755357 - RNA, 22 nt, Human
gggcuugcuaagaagagcgcau

SEQ ID NO: 755358 - RNA, 22 nt, Human
ggcaccugcucaucuggacuca

SEQ ID NO: 755359 - RNA, 22 nt, Human
ccacacagucaguuuccaagaa

SEQ ID NO: 755360 - RNA, 22 nt, Human
gagcagcucgagaaggaagcag

SEQ ID NO: 755361 - RNA, 22 nt, Human
gaguagcauucuagaguaugcu

SEQ ID NO: 755362 - RNA, 22 nt, Human
uggcuucuugggaugggucauu

SEQ ID NO: 755363 - RNA, 22 nt, Human
agagugcaaccgaaacaagcag

SEQ ID NO: 755364 - RNA, 22 nt, Human
auauaauacaaccugcuaagug

SEQ ID NO: 755365 - RNA, 22 nt, Human
ugcacacaguggacaagucuug

SEQ ID NO: 755366 - RNA, 22 nt, Human
agaugcagacuugguucaggca

SEQ ID NO: 755367 - RNA, 22 nt, Human
cucucugggcccaguuggcacc

SEQ ID NO: 755368 - RNA, 22 nt, Human
agugcaugaaagcauacaaggc

SEQ ID NO: 755369 - RNA, 22 nt, Human
auuagauuguaaauguuuucac

SEQ ID NO: 755370 - RNA, 22 nt, Human
uuucugaacaaagccauuauca

SEQ ID NO: 755371 - RNA, 22 nt, Human
caggcagcugcgacaagagagc

SEQ ID NO: 755372 - RNA, 22 nt, Human
aaagcacuugaaaucuggcagu

SEQ ID NO: 755373 - RNA, 22 nt, Human
gaggaugcugcagugcaggaca

SEQ ID NO: 755374 - RNA, 22 nt, Human
agcaggugggaucaagcuggca

SEQ ID NO: 755375 - RNA, 22 nt, Human
uccagguaucuuuaugaaacuu

SEQ ID NO: 755376 - RNA, 22 nt, Human
caguaugcaguugaaaauaagc

SEQ ID NO: 755377 - RNA, 22 nt, Human
ucacuguaauagguuugaagau

SEQ ID NO: 755378 - RNA, 22 nt, Human
ugccucagucuaaagucucuca

SEQ ID NO: 755379 - RNA, 22 nt, Human
ucuggaaaagcgauaaaccauu

SEQ ID NO: 755380 - RNA, 22 nt, Human
uauuucccagggagcaacaagc

SEQ ID NO: 755381 - RNA, 22 nt, Human
aauuucaaagcucacuggcaua

SEQ ID NO: 755382 - RNA, 22 nt, Human
cacaggaaggccuucucacaau

SEQ ID NO: 755383 - RNA, 22 nt, Human
acagcaguucaggccgcagagg

SEQ ID NO: 755384 - RNA, 22 nt, Human
ugugaauaccuugaauucauca

SEQ ID NO: 755385 - RNA, 22 nt, Human
ccaguggaaauguggucaggau

SEQ ID NO: 755386 - RNA, 22 nt, Human
gugucgugcuugccauggguac

SEQ ID NO: 755387 - RNA, 22 nt, Human
gggcugugagaguggggcugcu

SEQ ID NO: 755388 - RNA, 22 nt, Human
uuuauuguuguuagucauaagu

SEQ ID NO: 755389 - RNA, 22 nt, Human
cucagagaaccuaagcggagga

SEQ ID NO: 755390 - RNA, 22 nt, Human
uccuuccuggggucucugcugc

SEQ ID NO: 755391 - RNA, 22 nt, Human
auggcagccuguggacagucaa

SEQ ID NO: 755392 - RNA, 22 nt, Human
aaguuuacauaagugaugauga

SEQ ID NO: 755393 - RNA, 22 nt, Human
uucugcauuauacacaaccuaa

SEQ ID NO: 755394 - RNA, 20 nt, Human
ucugccacugcacucugccc

SEQ ID NO: 755395 - RNA, 22 nt, Human
aagugcauauuuuuguuguaga

SEQ ID NO: 755396 - RNA, 23 nt, Human
uugcacauuggagcuggucuucu

SEQ ID NO: 755397 - RNA, 22 nt, Human
gucccuaguggaaagacaugau

SEQ ID NO: 755398 - RNA, 22 nt, Human
auaacuuucuucacccuugcug

SEQ ID NO: 755399 - RNA, 23 nt, Human
ugcguacggcugccagugugacu

SEQ ID NO: 755400 - RNA, 19 nt, Human
uggguuggaagggaaugaa

SEQ ID NO: 755401 - RNA, 22 nt, Human
gccccaggauaaauuuguaaga

SEQ ID NO: 755402 - RNA, 23 nt, Human
ggggaaguggcagugagugaggc

SEQ ID NO: 755403 - RNA, 20 nt, Human
aacuuguuuuguuuucuaau

SEQ ID NO: 755404 - RNA, 22 nt, Human
uuuaaucucccacucucagccu

SEQ ID NO: 755405 - RNA, 22 nt, Human
gggagacaagaaguagccugcu

SEQ ID NO: 755406 - RNA, 22 nt, Human
aucauuaaauauaagcuucaca

SEQ ID NO: 755407 - RNA, 22 nt, Human
caggaggcaguuucagaaguca

SEQ ID NO: 755408 - RNA, 22 nt, Human
caaauaauuacuauccucacuu

SEQ ID NO: 755409 - RNA, 22 nt, Human
auuucucagugaaaugacaggc

SEQ ID NO: 755410 - RNA, 19 nt, Human
gauuucuacaaaugucaga

SEQ ID NO: 755411 - RNA, 22 nt, Human
gugugggugggacaucaucuuu

SEQ ID NO: 755412 - RNA, 22 nt, Human
ugcugcuuuggaacuccacagg

SEQ ID NO: 755413 - RNA, 22 nt, Human
ugcugacuccuggcugugacac

SEQ ID NO: 755414 - RNA, 22 nt, Human
agacaaauggaguaugagcaac

SEQ ID NO: 755415 - RNA, 22 nt, Human
acuaaauauuugagagguguag

SEQ ID NO: 755416 - RNA, 22 nt, Human
ccaugccucgggaagagucugu

SEQ ID NO: 755417 - RNA, 22 nt, Human
gcagacuggucuucagccuugg

SEQ ID NO: 755418 - RNA, 22 nt, Human
uccgggcaacugaagggagguu

SEQ ID NO: 755419 - RNA, 22 nt, Human
acguuuuauucccaugcagcau

SEQ ID NO: 755420 - RNA, 22 nt, Human
uaauuccaaguugagacaugca

SEQ ID NO: 755421 - RNA, 22 nt, Human
caggccagagcgcgugguuggg

SEQ ID NO: 755422 - RNA, 22 nt, Human
gcucccuccaugaggcagaccg

SEQ ID NO: 755423 - RNA, 22 nt, Human
ucugagaacuccggguuagauc

SEQ ID NO: 755424 - RNA, 22 nt, Human
ugagaaccucgaagauuuugcc

SEQ ID NO: 755425 - RNA, 19 nt, Human
gaaagauuucaguugagga

SEQ ID NO: 755426 - RNA, 18 nt, Human
aaugaaauguacaccuuu

SEQ ID NO: 755427 - RNA, 22 nt, Human
caccccagcuucucaggauaga

SEQ ID NO: 755428 - RNA, 22 nt, Human
gaaagaaugcuauagugacuuc

SEQ ID NO: 755429 - RNA, 22 nt, Human
ggucugaaauuaugucacugcu

SEQ ID NO: 755430 - RNA, 22 nt, Human
gaggaggggacaguacuugugc

SEQ ID NO: 755431 - RNA, 22 nt, Human
ucugccuuggcaaccacagcuu

SEQ ID NO: 755432 - RNA, 22 nt, Human
cuauuuguacagcauuaguaau

SEQ ID NO: 755433 - RNA, 22 nt, Human
agguucagaguuguugauguuu

SEQ ID NO: 755434 - RNA, 22 nt, Human
acagaauugggguucuugggga

SEQ ID NO: 755435 - RNA, 22 nt, Human
gaccaggcccaggugcaaggga

SEQ ID NO: 755436 - RNA, 22 nt, Human
cuggagggacuuucucacggau

SEQ ID NO: 755437 - RNA, 22 nt, Human
acacucuguaaugucacacucc

SEQ ID NO: 755438 - RNA, 22 nt, Human
ggagucaccugggaggacuggg

SEQ ID NO: 755439 - RNA, 22 nt, Human
ugggaauugaggugauugugag

SEQ ID NO: 755440 - RNA, 22 nt, Human
gacuucaugacauucaggucag

SEQ ID NO: 755441 - RNA, 18 nt, Human
cucucugggugaggacaa

SEQ ID NO: 755442 - RNA, 22 nt, Human
uccucccuaaauccuagacugu

SEQ ID NO: 755443 - RNA, 20 nt, Human
uuccagccgccacuuccgcc

SEQ ID NO: 755444 - RNA, 18 nt, Human
auccugggagcagacagc

SEQ ID NO: 755445 - RNA, 17 nt, Human
cugaggcccagggccca

SEQ ID NO: 755446 - RNA, 22 nt, Human
ugagcacacuccuggugagcga

SEQ ID NO: 755447 - RNA, 22 nt, Human
uacuuuaucagcgucaaaggua

SEQ ID NO: 755448 - RNA, 22 nt, Human
cugccuguuuucugauagauuu

SEQ ID NO: 755449 - RNA, 22 nt, Human
uaggcaccaccuagggugaccc

SEQ ID NO: 755450 - RNA, 23 nt, Human
ugaagguauuaccugagaugcuc

SEQ ID NO: 755451 - RNA, 22 nt, Human
uaaaggcaguucugauuagguc

SEQ ID NO: 755452 - RNA, 22 nt, Human
uaucuuggcuugaaagaugcuu

SEQ ID NO: 755453 - RNA, 22 nt, Human
aacauuuaugguagucauugca

SEQ ID NO: 755454 - RNA, 22 nt, Human
gcaggcugugaggcucagaugg

SEQ ID NO: 755455 - RNA, 22 nt, Human
acucuaccaugccacuccauag

SEQ ID NO: 755456 - RNA, 22 nt, Human
agauuuguugugagcaggaaua

SEQ ID NO: 755457 - RNA, 22 nt, Human
ugcuauaagcuccacgcuguag

SEQ ID NO: 755458 - RNA, 22 nt, Human
uuccucuguaguugcugaugaa

SEQ ID NO: 755459 - RNA, 22 nt, Human
uggguggcggccugguucugag

SEQ ID NO: 755460 - RNA, 22 nt, Human
augcaugugcauggcucuaucu

SEQ ID NO: 755461 - RNA, 22 nt, Human
ucaggggaaaucucucagcgaa

SEQ ID NO: 755462 - RNA, 22 nt, Human
ugccaguguggaacuaggaaga

SEQ ID NO: 755463 - RNA, 22 nt, Human
uaagccugcaugaaccaugaga

SEQ ID NO: 755464 - RNA, 22 nt, Human
uauuaggguuuugaagguuugu

SEQ ID NO: 755465 - RNA, 22 nt, Human
uccauuggucucugugcccagg

SEQ ID NO: 755466 - RNA, 22 nt, Human
cacauguacagaagcaggcugg

SEQ ID NO: 755467 - RNA, 19 nt, Human
gggcaucaaagugcuggug

SEQ ID NO: 755468 - RNA, 22 nt, Human
cagcaggcccaggugcugguga

SEQ ID NO: 755469 - RNA, 22 nt, Human
agugugagggguucuuugauau

SEQ ID NO: 755470 - RNA, 23 nt, Human
ugggggugcacgggccacaucuu

SEQ ID NO: 755471 - RNA, 22 nt, Human
aggaagaugggagagcucugga

SEQ ID NO: 755472 - RNA, 18 nt, Human
ucugaggaauggaagagc

SEQ ID NO: 755473 - RNA, 22 nt, Human
uacauagaacauguuuaauguc

SEQ ID NO: 755474 - RNA, 22 nt, Human
uagcuacaaucacuguccuuug

SEQ ID NO: 755475 - RNA, 22 nt, Human
agagaagagucuugucaaauua

SEQ ID NO: 755476 - RNA, 22 nt, Human
agguccagagguugaacggugg

SEQ ID NO: 755477 - RNA, 22 nt, Human
gcugggcuguaguuugcugacc

SEQ ID NO: 755478 - RNA, 22 nt, Human
cugagguacaagaaaggcaccu

SEQ ID NO: 755479 - RNA, 22 nt, Human
accuuuggauaaucuuuguguu

SEQ ID NO: 755480 - RNA, 22 nt, Human
agauauucuagaaccuaguaga

SEQ ID NO: 755481 - RNA, 22 nt, Human
uuaaaguaaucugugugaauuu

SEQ ID NO: 755482 - RNA, 23 nt, Human
gccagagcugccugcccuugcug

SEQ ID NO: 755483 - RNA, 22 nt, Human
gcucugucauuuugcagacacu

SEQ ID NO: 755484 - RNA, 22 nt, Human
uggacaggcaagcaagacauac

SEQ ID NO: 755485 - RNA, 19 nt, Human
ucagggccaugagcgccac

SEQ ID NO: 755486 - RNA, 22 nt, Human
uugauuuuuccagcuucuagag

SEQ ID NO: 755487 - RNA, 22 nt, Human
cagcagagguuuugcuccauga

SEQ ID NO: 755488 - RNA, 22 nt, Human
cacauuuagguuccuauagcca

SEQ ID NO: 755489 - RNA, 21 nt, Human
aacugagaccagcuaaagugg

SEQ ID NO: 755490 - RNA, 22 nt, Human
gcaacaaguguaaacaugcauu

SEQ ID NO: 755491 - RNA, 22 nt, Human
gccucuggucccucaugcugug

SEQ ID NO: 755492 - RNA, 22 nt, Human
aagugguugcuugugagucccc

SEQ ID NO: 755493 - RNA, 22 nt, Human
acuuucugucaucuagacaagu

SEQ ID NO: 755494 - RNA, 22 nt, Human
agcugccacaugcccaagggca

SEQ ID NO: 755495 - RNA, 21 nt, Human
auaaacugcaucaaguuggug

SEQ ID NO: 755496 - RNA, 22 nt, Human
aaguaaaccacagagaagccac

SEQ ID NO: 755497 - RNA, 22 nt, Human
uguuuuuguucaaugcuagguc

SEQ ID NO: 755498 - RNA, 22 nt, Human
uugaggucuucaggaucaggcu

SEQ ID NO: 755499 - RNA, 22 nt, Human
caugcuuucuguccaaauguua

SEQ ID NO: 755500 - RNA, 22 nt, Human
uucagggcagacagaagagaug

SEQ ID NO: 755501 - RNA, 22 nt, Human
cucaaguaagaaacagaauugg

SEQ ID NO: 755502 - RNA, 22 nt, Human
uucuacaauaugaauaaugaag

SEQ ID NO: 755503 - RNA, 22 nt, Human
ugcaggucuccauuggcagacu

SEQ ID NO: 755504 - RNA, 22 nt, Human
ucagaagcagaaaauagguggg

SEQ ID NO: 755505 - RNA, 22 nt, Human
gacagacaggaggccaccugcu

SEQ ID NO: 755506 - RNA, 22 nt, Human
gagaaacuaacaucugaaggug

SEQ ID NO: 755507 - RNA, 22 nt, Human
guuuuauaguucgggaccuguu

SEQ ID NO: 755508 - RNA, 22 nt, Human
auuucucacccuaccucacucc

SEQ ID NO: 755509 - RNA, 18 nt, Human
ggagcccagaggugaguu

SEQ ID NO: 755510 - RNA, 22 nt, Human
uuguggcucaucuucagcuccc

SEQ ID NO: 755511 - RNA, 22 nt, Human
cagugcagguggcagaggacag

SEQ ID NO: 755512 - RNA, 22 nt, Human
aaaguagaguuguggaauuacu

SEQ ID NO: 755513 - RNA, 22 nt, Human
guuauucuagugcucagccauu

SEQ ID NO: 755514 - RNA, 22 nt, Human
cuggcagcuuccuuugcaucug

SEQ ID NO: 755515 - RNA, 22 nt, Human
agaauuagguaaguucaucuga

SEQ ID NO: 755516 - RNA, 22 nt, Human
acccagggaccccgcugacgcc

SEQ ID NO: 755517 - RNA, 22 nt, Human
auagcaauuaagcuccagaauu

SEQ ID NO: 755518 - RNA, 22 nt, Human
uacuggagauggaaugcuuuug

SEQ ID NO: 755519 - RNA, 22 nt, Human
ccuugccucauugugcuucucc

SEQ ID NO: 755520 - RNA, 22 nt, Human
uacaagaugacaggugcaugau

SEQ ID NO: 755521 - RNA, 22 nt, Human
auuugcugaaucaaugaauuuu

SEQ ID NO: 755522 - RNA, 22 nt, Human
acucugagccaccagaucccca

SEQ ID NO: 755523 - RNA, 22 nt, Human
ccagggccuacagcuuaagucc

SEQ ID NO: 755524 - RNA, 22 nt, Human
ggaggacucaggucuggccaug

SEQ ID NO: 755525 - RNA, 22 nt, Human
aggcaaagcgauaccagagcua

SEQ ID NO: 755526 - RNA, 22 nt, Human
uuggcgcccaggacgccgccgc

SEQ ID NO: 755527 - RNA, 22 nt, Human
uucccugaagaccucaugugac

SEQ ID NO: 755528 - RNA, 22 nt, Human
acaggaucgcccuguugcccag

SEQ ID NO: 755529 - RNA, 22 nt, Human
acuggcagccacaacuggcagg

SEQ ID NO: 755530 - RNA, 22 nt, Human
gagucaggcuagggugacaggc

SEQ ID NO: 755531 - RNA, 22 nt, Human
uucugauaauaccacaucgcag

SEQ ID NO: 755532 - RNA, 22 nt, Human
gguguccucacuauagcaaguc

SEQ ID NO: 755533 - RNA, 22 nt, Human
aucuguuccccuaugcucucua

SEQ ID NO: 755534 - RNA, 22 nt, Human
acauuuaccuaguuaagucaau

SEQ ID NO: 755535 - RNA, 22 nt, Human
guagaggggugauucugugaga

SEQ ID NO: 755536 - RNA, 19 nt, Human
agcacaguuuccacaugca

SEQ ID NO: 755537 - RNA, 22 nt, Human
agugugagaacggacuaauaaa

SEQ ID NO: 755538 - RNA, 22 nt, Human
acaugcuuucuagguccuucug

SEQ ID NO: 755539 - RNA, 22 nt, Human
agcuccuggcaaggucauggug

SEQ ID NO: 755540 - RNA, 22 nt, Human
agguccuguguccaggggccug

SEQ ID NO: 755541 - RNA, 22 nt, Human
ugauaaacuggagagguggagg

SEQ ID NO: 755542 - RNA, 22 nt, Human
uggagcugagagccaggcuggc

SEQ ID NO: 755543 - RNA, 22 nt, Human
uugacuguacaaccuuuuguag

SEQ ID NO: 755544 - RNA, 22 nt, Human
gcugcagagacagcugccgaug

SEQ ID NO: 755545 - RNA, 20 nt, Human
aucagcaacugccacucagu

SEQ ID NO: 755546 - RNA, 22 nt, Human
uuagaucauuuuagcuaaaugg

SEQ ID NO: 755547 - RNA, 22 nt, Human
uccaggcccacucagcugaaau

SEQ ID NO: 755548 - RNA, 22 nt, Human
agaaucaggaccuguggcuguc

SEQ ID NO: 755549 - RNA, 22 nt, Human
ccuggacuugauauucucuuuc

SEQ ID NO: 755550 - RNA, 22 nt, Human
uggaggcaugacagugucugga

SEQ ID NO: 755551 - RNA, 22 nt, Human
augucucucucugagugccaga

SEQ ID NO: 755552 - RNA, 22 nt, Human
guugucuuagucagaaauaugc

SEQ ID NO: 755553 - RNA, 22 nt, Human
guaucacuuuugagagugagaa

SEQ ID NO: 755554 - RNA, 22 nt, Human
gaaguauuucugaguugcccag

SEQ ID NO: 755555 - RNA, 22 nt, Human
ccagcagccaccuucucgaaau

SEQ ID NO: 755556 - RNA, 22 nt, Human
uucucaggugaggcugaggcug

SEQ ID NO: 755557 - RNA, 22 nt, Human
cacaggaacuuacuggccacuu

SEQ ID NO: 755558 - RNA, 22 nt, Human
gcacaaauacaaaguugagaaa

SEQ ID NO: 755559 - RNA, 22 nt, Human
cugaaugagggauucugagggc

SEQ ID NO: 755560 - RNA, 22 nt, Human
ggugugccacuucacugagcag

SEQ ID NO: 755561 - RNA, 23 nt, Human
ucuuuagaagaacaucagaaaug

SEQ ID NO: 755562 - RNA, 21 nt, Human
aggacacagagacaccuauug

SEQ ID NO: 755563 - RNA, 22 nt, Human
cagggagcggagucccaugccu

SEQ ID NO: 755564 - RNA, 22 nt, Human
cuagcuuuuuaugacaaucuug

SEQ ID NO: 755565 - RNA, 22 nt, Human
ccagaacugggcaacagaaagu

SEQ ID NO: 755566 - RNA, 22 nt, Human
uguaaaaggaaaucaaagcacu

SEQ ID NO: 755567 - RNA, 22 nt, Human
gucagcagaaacgccacaugca

SEQ ID NO: 755568 - RNA, 22 nt, Human
cugggaggcagucucucuagaa

SEQ ID NO: 755569 - RNA, 22 nt, Human
gagcacagugcaguuucugcua

SEQ ID NO: 755570 - RNA, 22 nt, Human
aauaugcagcuuaucuucuagg

SEQ ID NO: 755571 - RNA, 21 nt, Human
agaaggcaaaagcagacaucu

SEQ ID NO: 755572 - RNA, 22 nt, Human
acagaacugagaauucucuauc

SEQ ID NO: 755573 - RNA, 21 nt, Human
aggaaguggccagauugggaa

SEQ ID NO: 755574 - RNA, 22 nt, Human
agucccagugagaugagccacg

SEQ ID NO: 755575 - RNA, 22 nt, Human
ggaaggggagcuaaaucuacug

SEQ ID NO: 755576 - RNA, 22 nt, Human
ccugaguugucaguugcuguag

SEQ ID NO: 755577 - RNA, 22 nt, Human
uuugacagagcucuuagucucu

SEQ ID NO: 755578 - RNA, 22 nt, Human
aaguucuugauaaguccacugu

SEQ ID NO: 755579 - RNA, 22 nt, Human
acaguucaagacaucaguauga

SEQ ID NO: 755580 - RNA, 22 nt, Human
ugcuggguuaccuaagccuaaa

SEQ ID NO: 755581 - RNA, 22 nt, Human
augacagaggauuguaaagagg

SEQ ID NO: 755582 - RNA, 22 nt, Human
ugugaacuuacuguccccacag

SEQ ID NO: 755583 - RNA, 22 nt, Human
ugcaggaauauugaugaacuua

SEQ ID NO: 755584 - RNA, 22 nt, Human
ucccugagcugagcucaacagc

SEQ ID NO: 755585 - RNA, 22 nt, Human
auuuguaagcuagagccaugau

SEQ ID NO: 755586 - RNA, 22 nt, Human
acucuauaaagauaccucaauu

SEQ ID NO: 755587 - RNA, 18 nt, Human
cugcugcaggcacucagg

SEQ ID NO: 755588 - RNA, 22 nt, Human
ccucauggaccucagacugucc

SEQ ID NO: 755589 - RNA, 22 nt, Human
ggcaagaaggcuucagguagcu

SEQ ID NO: 755590 - RNA, 22 nt, Human
cagacaauuaaguaauugaggu

SEQ ID NO: 755591 - RNA, 22 nt, Human
cugagcugggcaacucuuagau

SEQ ID NO: 755592 - RNA, 21 nt, Human
ucagcagcuuuugcagucccu

SEQ ID NO: 755593 - RNA, 22 nt, Human
gagcagaacuacucacauaucg

SEQ ID NO: 755594 - RNA, 22 nt, Human
cucugccaucuuggagcucaag

SEQ ID NO: 755595 - RNA, 22 nt, Human
uucaauaucucuaagaaugagg

SEQ ID NO: 755596 - RNA, 22 nt, Human
aaacugcaauuauguuugcaga

SEQ ID NO: 755597 - RNA, 22 nt, Human
agaaaccagggcuuaccagugc

SEQ ID NO: 755598 - RNA, 22 nt, Human
cuuccagguucugguugggaag

SEQ ID NO: 755599 - RNA, 22 nt, Human
gcuggaaaaggaggcaaaauau

SEQ ID NO: 755600 - RNA, 22 nt, Human
ugggcugaaaugcuguggacua

SEQ ID NO: 755601 - RNA, 22 nt, Human
uacucagagucauugcccuucu

SEQ ID NO: 755602 - RNA, 22 nt, Human
cuucacagucacccugcugugu

SEQ ID NO: 755603 - RNA, 22 nt, Human
cagugagagagaacgcauucau

SEQ ID NO: 755604 - RNA, 22 nt, Human
uuauuaaucuuaucuuuggaaa

SEQ ID NO: 755605 - RNA, 22 nt, Human
ugguggcaaaguacaaagugac

SEQ ID NO: 755606 - RNA, 22 nt, Human
guucaaauuuuggcuguacugc

SEQ ID NO: 755607 - RNA, 22 nt, Human
cauauuucagucuaagaugugu

SEQ ID NO: 755608 - RNA, 22 nt, Human
agccagggaugcagcacaguga

SEQ ID NO: 755609 - RNA, 22 nt, Human
uagauaaauuagaaaguuuacu

SEQ ID NO: 755610 - RNA, 23 nt, Human
cugaggccugcugcguucagguu

SEQ ID NO: 755611 - RNA, 22 nt, Human
ugcuccuggcaucucugcgucc

SEQ ID NO: 755612 - RNA, 22 nt, Human
uggugucuccauccugcccugc

SEQ ID NO: 755613 - RNA, 22 nt, Human
uauuuccaggccccacucuaga

SEQ ID NO: 755614 - RNA, 22 nt, Human
cccugguggggccagacuugcu

SEQ ID NO: 755615 - RNA, 22 nt, Human
uucaggaugaaagugugcaaca

SEQ ID NO: 755616 - RNA, 22 nt, Human
uuuuggcuccagugguuugugc

SEQ ID NO: 755617 - RNA, 22 nt, Human
caauacugaguuuacauucauc

SEQ ID NO: 755618 - RNA, 22 nt, Human
ccagucccagcucugccaugcu

SEQ ID NO: 755619 - RNA, 22 nt, Human
aguucacuuucuguaguggaag

SEQ ID NO: 755620 - RNA, 22 nt, Human
aauacagauauucagugguacu

SEQ ID NO: 755621 - RNA, 22 nt, Human
acuucagagaaagagggaauuc

SEQ ID NO: 755622 - RNA, 22 nt, Human
aguggcugguaguuacugagca

SEQ ID NO: 755623 - RNA, 22 nt, Human
gcugccagccagggugggaucc

SEQ ID NO: 755624 - RNA, 22 nt, Human
cuccucugucuggcccugagcc

SEQ ID NO: 755625 - RNA, 22 nt, Human
uugcuaacgcucacccuuugcc

SEQ ID NO: 755626 - RNA, 22 nt, Human
ggaagagagggcugggccucaa

SEQ ID NO: 755627 - RNA, 19 nt, Human
uggcagggagugauauuag

SEQ ID NO: 755628 - RNA, 21 nt, Human
ggccuuccccugcagucuccg

SEQ ID NO: 755629 - RNA, 22 nt, Human
uuugugaauggaauccacagac

SEQ ID NO: 755630 - RNA, 22 nt, Human
uccaggagguaugaguggcccc

SEQ ID NO: 755631 - RNA, 22 nt, Human
guccuuugaaggcaaaaggaga

SEQ ID NO: 755632 - RNA, 22 nt, Human
acagcuggccgaggcucaggga

SEQ ID NO: 755633 - RNA, 22 nt, Human
aggaaugauucaagacuuggcu

SEQ ID NO: 755634 - RNA, 22 nt, Human
aauuggacugugcugcucaaaa

SEQ ID NO: 755635 - RNA, 22 nt, Human
uuacagagguauguaugucucu

SEQ ID NO: 755636 - RNA, 22 nt, Human
ugccugcugccacugcuguuac

SEQ ID NO: 755637 - RNA, 22 nt, Human
ccuuugggugaauuccucucuu

SEQ ID NO: 755638 - RNA, 22 nt, Human
gaacuagaauguucugauggag

SEQ ID NO: 755639 - RNA, 22 nt, Human
uugcaaaggggaauaaagcaau

SEQ ID NO: 755640 - RNA, 22 nt, Human
cccagccuuccacccuggacua

SEQ ID NO: 755641 - RNA, 22 nt, Human
gaaggcugcugggaaguguggu

SEQ ID NO: 755642 - RNA, 22 nt, Human
ucuucuggaugagagcggaggc

SEQ ID NO: 755643 - RNA, 20 nt, Human
uccaugcaguuuccauacag

SEQ ID NO: 755644 - RNA, 22 nt, Human
uguccugugaccuggcaccaca

SEQ ID NO: 755645 - RNA, 22 nt, Human
agggcuuuggcccccugcugca

SEQ ID NO: 755646 - RNA, 22 nt, Human
aacaacagugagugcugggagg

SEQ ID NO: 755647 - RNA, 22 nt, Human
ggcugugggaugcauaggagcu

SEQ ID NO: 755648 - RNA, 22 nt, Human
gccagagccggcuucacaggau

SEQ ID NO: 755649 - RNA, 22 nt, Human
agcccugguuugcagcauuugc

SEQ ID NO: 755650 - RNA, 23 nt, Human
caggaaaucaauucuuccagcau

SEQ ID NO: 755651 - RNA, 22 nt, Human
cucuccagaauuauuacuauua

SEQ ID NO: 755652 - RNA, 22 nt, Human
gcuggcaccuauuuggaccugg

SEQ ID NO: 755653 - RNA, 22 nt, Human
ucacaugaggcauccccgggca

SEQ ID NO: 755654 - RNA, 22 nt, Human
aggccacaggcacccuguguuc

SEQ ID NO: 755655 - RNA, 22 nt, Human
uuuccaugaucguuauagaacu

SEQ ID NO: 755656 - RNA, 22 nt, Human
aguauauugcucuuaaucauag

SEQ ID NO: 755657 - RNA, 22 nt, Human
aggagacauaacuaugaugaga

SEQ ID NO: 755658 - RNA, 22 nt, Human
ucccagagaagagcuggaugga

SEQ ID NO: 755659 - RNA, 22 nt, Human
gauugaaaggucuuuaaauugg

SEQ ID NO: 755660 - RNA, 22 nt, Human
auggcuugucuaugagugcucu

SEQ ID NO: 755661 - RNA, 22 nt, Human
uaaagucagauaucuggguuga

SEQ ID NO: 755662 - RNA, 22 nt, Human
ccauguacaugaacacggcggc

SEQ ID NO: 755663 - RNA, 22 nt, Human
aucugcuuguugcaugucuguu

SEQ ID NO: 755664 - RNA, 23 nt, Human
uggagcugacagucagagggagg

SEQ ID NO: 755665 - RNA, 22 nt, Human
acucacuucuuuuacuauaaaa

SEQ ID NO: 755666 - RNA, 22 nt, Human
gggcuucugggcaccacucccu

SEQ ID NO: 755667 - RNA, 22 nt, Human
caugcauauuacuagcacagca

SEQ ID NO: 755668 - RNA, 22 nt, Human
acagguguccucacagggggug

SEQ ID NO: 755669 - RNA, 22 nt, Human
gggacgggcacggagggcccuc

SEQ ID NO: 755670 - RNA, 22 nt, Human
aggagugcaaauaguccagaga

SEQ ID NO: 755671 - RNA, 22 nt, Human
ucaccagucuuucuuaccauug

SEQ ID NO: 755672 - RNA, 22 nt, Human
ugugaagaauuaaugugaauca

SEQ ID NO: 755673 - RNA, 22 nt, Human
gcugagaggcagccagacccuc

SEQ ID NO: 755674 - RNA, 22 nt, Human
uugugaguagugccgcaauaaa

SEQ ID NO: 755675 - RNA, 22 nt, Human
uucagcauuucuguuguuggcu

SEQ ID NO: 755676 - RNA, 22 nt, Human
ucucuggguccuggcaagcuca

SEQ ID NO: 755677 - RNA, 19 nt, Human
uagaagcagggaagcugag

SEQ ID NO: 755678 - RNA, 22 nt, Human
ggggugggagugccauccuuga

SEQ ID NO: 755679 - RNA, 22 nt, Human
acuaaagaagccaaaguuuucu

SEQ ID NO: 755680 - RNA, 22 nt, Human
uguccuuuaugaaaugguguuu

SEQ ID NO: 755681 - RNA, 22 nt, Human
ccucagucauuggccuacacuu

SEQ ID NO: 755682 - RNA, 20 nt, Human
ugagucagcugcaugggugg

SEQ ID NO: 755683 - RNA, 22 nt, Human
uuuaggaaguuucagauaggaa

SEQ ID NO: 755684 - RNA, 22 nt, Human
aagaguuuucucugauggcauu

SEQ ID NO: 755685 - RNA, 22 nt, Human
aguuuauagcccagauucaugg

SEQ ID NO: 755686 - RNA, 22 nt, Human
agagccugaggccaggaaaaug

SEQ ID NO: 755687 - RNA, 22 nt, Human
aauagcucacugauuucucuuu

SEQ ID NO: 755688 - RNA, 22 nt, Human
uuauuccagugggugguuucuc

SEQ ID NO: 755689 - RNA, 22 nt, Human
ucaccggcagacguggccugau

SEQ ID NO: 755690 - RNA, 20 nt, Human
aacuugucuuccuguuuggc

SEQ ID NO: 755691 - RNA, 22 nt, Human
gaauacauggcagggagucauc

SEQ ID NO: 755692 - RNA, 19 nt, Human
gccuuugggcguuguuggg

SEQ ID NO: 755693 - RNA, 22 nt, Human
ggaagccuaaagcccaggucuc

SEQ ID NO: 755694 - RNA, 22 nt, Human
cugcagggaccacaagcagguu

SEQ ID NO: 755695 - RNA, 20 nt, Human
cugcugagagccuggcuugc

SEQ ID NO: 755696 - RNA, 22 nt, Human
gggcucagcuccuuccuuccua

SEQ ID NO: 755697 - RNA, 22 nt, Human
gggccugugcacaguucuguua

SEQ ID NO: 755698 - RNA, 22 nt, Human
gaggcaagaaaggacuuucuag

SEQ ID NO: 755699 - RNA, 22 nt, Human
agucucagaaaauaugcuuuuu

SEQ ID NO: 755700 - RNA, 22 nt, Human
uuucuucagccacuccaaacug

SEQ ID NO: 755701 - RNA, 22 nt, Human
ucccagagcccaaguuggagag

SEQ ID NO: 755702 - RNA, 21 nt, Human
auggcugguggcucagccucc

SEQ ID NO: 755703 - RNA, 22 nt, Human
guuugcauguguacuuaauugg

SEQ ID NO: 755704 - RNA, 22 nt, Human
auacaugacacugggcuacagg

SEQ ID NO: 755705 - RNA, 22 nt, Human
cccaggucucccugcagcccug

SEQ ID NO: 755706 - RNA, 22 nt, Human
uacagaauauuucugcccugag

SEQ ID NO: 755707 - RNA, 22 nt, Human
cugggcuggguuuacccucuuc

SEQ ID NO: 755708 - RNA, 22 nt, Human
ucuaggccguaggauacagagc

SEQ ID NO: 755709 - RNA, 22 nt, Human
ucugcagaaggaaucagcugag

SEQ ID NO: 755710 - RNA, 22 nt, Human
aaugugcuccaauugucuacuu

SEQ ID NO: 755711 - RNA, 22 nt, Human
ucaggcugggagacaaucacug

SEQ ID NO: 755712 - RNA, 21 nt, Human
uacaugaguguaugagcauau

SEQ ID NO: 755713 - RNA, 22 nt, Human
aguagauuucugcugaagcuuu

SEQ ID NO: 755714 - RNA, 22 nt, Human
auuuugcuacaguugguggaaa

SEQ ID NO: 755715 - RNA, 22 nt, Human
acagucuaaucuuguguucugu

SEQ ID NO: 755716 - RNA, 22 nt, Human
uacaauacuuaaccuauuuugc

SEQ ID NO: 755717 - RNA, 22 nt, Human
uaucauaaguuaauuaaacagu

SEQ ID NO: 755718 - RNA, 22 nt, Human
acagcagagacacucaggaggc

SEQ ID NO: 755719 - RNA, 22 nt, Human
cugugcauuguugaguguuuag

SEQ ID NO: 755720 - RNA, 22 nt, Human
cuguacuuuugcaggucacagc

SEQ ID NO: 755721 - RNA, 22 nt, Human
aagaacagguucuagaaccauu

SEQ ID NO: 755722 - RNA, 22 nt, Human
uuggcuuccaggaucucagcag

SEQ ID NO: 755723 - RNA, 22 nt, Human
gggcacugugcuaggugcugag

SEQ ID NO: 755724 - RNA, 22 nt, Human
gagcccugcuuccaagggggca

SEQ ID NO: 755725 - RNA, 20 nt, Human
aguaggcaaaggaaagaucu

SEQ ID NO: 755726 - RNA, 22 nt, Human
cacugaagcuuucauucucuug

SEQ ID NO: 755727 - RNA, 22 nt, Human
aagucacagaguuggaagucag

SEQ ID NO: 755728 - RNA, 22 nt, Human
ugcucagagcuccagcucuccu

SEQ ID NO: 755729 - RNA, 22 nt, Human
caaacuuucaguuauaacauga

SEQ ID NO: 755730 - RNA, 22 nt, Human
ucucagagagcuguguuuuccu

SEQ ID NO: 755731 - RNA, 22 nt, Human
cuggcucuaagugucagcuccc

SEQ ID NO: 755732 - RNA, 22 nt, Human
auguuuuaugcuucagaugagg

SEQ ID NO: 755733 - RNA, 22 nt, Human
cagccacuggugccaggcuguu

SEQ ID NO: 755734 - RNA, 22 nt, Human
cacaggaaucagcauuaauggc

SEQ ID NO: 755735 - RNA, 21 nt, Human
uuggaaucuuaggaguguggg

SEQ ID NO: 755736 - RNA, 22 nt, Human
agcagcuggguccggcggagca

SEQ ID NO: 755737 - RNA, 22 nt, Human
ugcauccuguucuagguuuggg

SEQ ID NO: 755738 - RNA, 22 nt, Human
aggcugugcauuuuggagggcc

SEQ ID NO: 755739 - RNA, 22 nt, Human
uguggccucaaggcugcccuca

SEQ ID NO: 755740 - RNA, 22 nt, Human
agaagccaauucugugugaguc

SEQ ID NO: 755741 - RNA, 22 nt, Human
uggagguacauaaugagagggu

SEQ ID NO: 755742 - RNA, 22 nt, Human
aagcuucaguggacuguagugu

SEQ ID NO: 755743 - RNA, 22 nt, Human
cuugguaaaacugucuuaaauu

SEQ ID NO: 755744 - RNA, 22 nt, Human
cagaacauucacucauaugugg

SEQ ID NO: 755745 - RNA, 22 nt, Human
agucucuuauucccuauugcug

SEQ ID NO: 755746 - RNA, 22 nt, Human
cucuguaccuggcauagcaacc

SEQ ID NO: 755747 - RNA, 22 nt, Human
agucaccaucuguggcagccug

SEQ ID NO: 755748 - RNA, 22 nt, Human
cucuuacaagcucccgauauaa

SEQ ID NO: 755749 - RNA, 22 nt, Human
agggugggcuagacucuucccc

SEQ ID NO: 755750 - RNA, 22 nt, Human
uagcagcuggggcuauucauca

SEQ ID NO: 755751 - RNA, 22 nt, Human
gcuggcaggauagaagucuaau

SEQ ID NO: 755752 - RNA, 22 nt, Human
aucaggcuaguguguguguuca

SEQ ID NO: 755753 - RNA, 22 nt, Human
cagagccuaaaacgacuccacu

SEQ ID NO: 755754 - RNA, 22 nt, Human
augggcugaggaagcuccugag

SEQ ID NO: 755755 - RNA, 22 nt, Human
agcagcuggugagcaagcucag

SEQ ID NO: 755756 - RNA, 22 nt, Human
ccaguguuccagagagcugaug

SEQ ID NO: 755757 - RNA, 22 nt, Human
gauucuggguccugugucuugc

SEQ ID NO: 755758 - RNA, 22 nt, Human
cucccuggcagccgcacuccug

SEQ ID NO: 755759 - RNA, 22 nt, Human
gaucauugaacaggcacuggag

SEQ ID NO: 755760 - RNA, 22 nt, Human
acagauuuugguauuugcaaug

SEQ ID NO: 755761 - RNA, 22 nt, Human
cacaauuuuccuuuaaguguau

SEQ ID NO: 755762 - RNA, 22 nt, Human
aguacagaccugucucuuccug

SEQ ID NO: 755763 - RNA, 22 nt, Human
auccugaaaacuuacgaagugg

SEQ ID NO: 755764 - RNA, 22 nt, Human
agcagcagaggucagaaaggua

SEQ ID NO: 755765 - RNA, 22 nt, Human
auccguuuuuaugaaaugucca

SEQ ID NO: 755766 - RNA, 22 nt, Human
acagcucuucuucaagccuggc

SEQ ID NO: 755767 - RNA, 22 nt, Human
uuauccaaacuggugaaucauu

SEQ ID NO: 755768 - RNA, 22 nt, Human
ggcucuggcgagcuuuaguaca

SEQ ID NO: 755769 - RNA, 22 nt, Human
aacugaacagcaggcuucuacc

SEQ ID NO: 755770 - RNA, 23 nt, Human
ccugaagggucaggguccucagc

SEQ ID NO: 755771 - RNA, 22 nt, Human
ucuuugcaguucugauuaaaua

SEQ ID NO: 755772 - RNA, 22 nt, Human
aguggcuguaggcuaugagaga

SEQ ID NO: 755773 - RNA, 22 nt, Human
ccucuggcauagcaaguggccu

SEQ ID NO: 755774 - RNA, 22 nt, Human
cauggcaggaaggacaugcacu

SEQ ID NO: 755775 - RNA, 22 nt, Human
cggggagaacacuguguccuuc

SEQ ID NO: 755776 - RNA, 22 nt, Human
ccaggagguggagauugcagug

SEQ ID NO: 755777 - RNA, 22 nt, Human
cccucccugaagaaguuacucu

SEQ ID NO: 755778 - RNA, 22 nt, Human
guguacaguaagugaaucuagg

SEQ ID NO: 755779 - RNA, 22 nt, Human
aggucuggaggcggagucagga

SEQ ID NO: 755780 - RNA, 22 nt, Human
auguguauuuauuuggggcuua

SEQ ID NO: 755781 - RNA, 22 nt, Human
gcacugggaaugagggcagcuu

SEQ ID NO: 755782 - RNA, 22 nt, Human
gacccaggcccaaggcugccag

SEQ ID NO: 755783 - RNA, 22 nt, Human
agcaggguccugaggugaguca

SEQ ID NO: 755784 - RNA, 22 nt, Human
gcucaggagcugacagccucaa

SEQ ID NO: 755785 - RNA, 22 nt, Human
gggcucuggaaaugggagcucc

SEQ ID NO: 755786 - RNA, 22 nt, Human
ggagcccuugcugaccuuccaa

SEQ ID NO: 755787 - RNA, 22 nt, Human
aacaugucuuacuuugcuuucu

SEQ ID NO: 755788 - RNA, 21 nt, Human
uagagaugacgagcucuagca

SEQ ID NO: 755789 - RNA, 20 nt, Human
cuccucaguuccaugggagg

SEQ ID NO: 755790 - RNA, 22 nt, Human
cccuggcaugcaugucccuggc

SEQ ID NO: 755791 - RNA, 22 nt, Human
agggagaaugaccaagguauau

SEQ ID NO: 755792 - RNA, 22 nt, Human
aagcaacuggcucauugucuca

SEQ ID NO: 755793 - RNA, 22 nt, Human
cuggcucucgcugggaguacuu

SEQ ID NO: 755794 - RNA, 22 nt, Human
aaggcugaggagggccugcagg

SEQ ID NO: 755795 - RNA, 23 nt, Human
agcuccaggugauuguaaugugu

SEQ ID NO: 755796 - RNA, 20 nt, Human
acuccagguggcaugaggac

SEQ ID NO: 755797 - RNA, 22 nt, Human
agucuccacuugacaucagcag

SEQ ID NO: 755798 - RNA, 21 nt, Human
uucaaugaaaacaaagugagg

SEQ ID NO: 755799 - RNA, 16 nt, Human
uaugugugugggagug

SEQ ID NO: 755800 - RNA, 22 nt, Human
aaccucuacauccaggaaagga

SEQ ID NO: 755801 - RNA, 22 nt, Human
uuuggacaaaugucugacuuuc

SEQ ID NO: 755802 - RNA, 20 nt, Human
ccugggcucaaagcauccuc

SEQ ID NO: 755803 - RNA, 22 nt, Human
gggaccugccaaggccacccag

SEQ ID NO: 755804 - RNA, 22 nt, Human
gagccaagcaccacauuaaguu

SEQ ID NO: 755805 - RNA, 22 nt, Human
aacuaguaaaagcaacaguaua

SEQ ID NO: 755806 - RNA, 22 nt, Human
ggcucagaaggccaugcucugc

SEQ ID NO: 755807 - RNA, 22 nt, Human
uuucucuuaaugucucugugcu

SEQ ID NO: 755808 - RNA, 22 nt, Human
acagcaucuaguacagucuagu

SEQ ID NO: 755809 - RNA, 22 nt, Human
uccucuggggcgugguccugga

SEQ ID NO: 755810 - RNA, 22 nt, Human
ucccaagagcucugggauaagg

SEQ ID NO: 755811 - RNA, 22 nt, Human
ccugggcuuccacgagcagagg

SEQ ID NO: 755812 - RNA, 22 nt, Human
ccuggguccacccugugaagua

SEQ ID NO: 755813 - RNA, 22 nt, Human
aacuugcagacaccugucucaa

SEQ ID NO: 755814 - RNA, 22 nt, Human
uggcugagagcaauugacucug

SEQ ID NO: 755815 - RNA, 23 nt, Human
aggaaggagguccuaacaguauc

SEQ ID NO: 755816 - RNA, 22 nt, Human
cuacuagaucaguaugccucaa

SEQ ID NO: 755817 - RNA, 17 nt, Human
ucugcucugccaaucca

SEQ ID NO: 755818 - RNA, 22 nt, Human
agcacagagaaacuaagacauu

SEQ ID NO: 755819 - RNA, 22 nt, Human
cuuuacauccuguuucccguuu

SEQ ID NO: 755820 - RNA, 21 nt, Human
agcugccuccacuucugaggc

SEQ ID NO: 755821 - RNA, 22 nt, Human
ccagcuccucuucccaguguca

SEQ ID NO: 755822 - RNA, 22 nt, Human
gaggaagcagggcuuggcugag

SEQ ID NO: 755823 - RNA, 22 nt, Human
agaggaaacauagguuuuuaaa

SEQ ID NO: 755824 - RNA, 22 nt, Human
uuugaucagcaagauaaauaga

SEQ ID NO: 755825 - RNA, 22 nt, Human
gaggagaggcuggacgcgguga

SEQ ID NO: 755826 - RNA, 22 nt, Human
gcauucuuugaaugcuucuaau

SEQ ID NO: 755827 - RNA, 22 nt, Human
uacaucauaauaauacuuagaa

SEQ ID NO: 755828 - RNA, 22 nt, Human
uacagugcuugguaucuaguaa

SEQ ID NO: 755829 - RNA, 22 nt, Human
cuuuggaagugaccacaauccu

SEQ ID NO: 755830 - RNA, 23 nt, Human
acaguuauagcugugaauaacau

SEQ ID NO: 755831 - RNA, 22 nt, Human
uucagcacccucugaggcaucc

SEQ ID NO: 755832 - RNA, 22 nt, Human
ccuucagccuuuguuuaucaga

SEQ ID NO: 755833 - RNA, 23 nt, Human
agucuuacugucccagaacaggg

SEQ ID NO: 755834 - RNA, 22 nt, Human
cuguuacuaaucuuuucugcua

SEQ ID NO: 755835 - RNA, 22 nt, Human
gaccacacuuuggaaaucacga

SEQ ID NO: 755836 - RNA, 22 nt, Human
ggcugggcuccgggagcaugcg

SEQ ID NO: 755837 - RNA, 22 nt, Human
gugagguccugagaggcuugug

SEQ ID NO: 755838 - RNA, 22 nt, Human
uucaaguuaccuuuaaacagcu

SEQ ID NO: 755839 - RNA, 22 nt, Human
guuucuuauuugcagguugcuu

SEQ ID NO: 755840 - RNA, 22 nt, Human
uuggcagacugacaaucuguuu

SEQ ID NO: 755841 - RNA, 19 nt, Human
agagucugugcucuuccua

SEQ ID NO: 755842 - RNA, 22 nt, Human
uguacaagcaaauagaccuuca

SEQ ID NO: 755843 - RNA, 22 nt, Human
gcccucagcuccuggacacaug

SEQ ID NO: 755844 - RNA, 22 nt, Human
uuccaaggcaacagccuaggcu

SEQ ID NO: 755845 - RNA, 22 nt, Human
gcaugguggagucugagcaggg

SEQ ID NO: 755846 - RNA, 22 nt, Human
aggcuggaaaucacuagauucc

SEQ ID NO: 755847 - RNA, 22 nt, Human
uggcaggauuugcccggaagga

SEQ ID NO: 755848 - RNA, 19 nt, Human
uggaggcaagacauggagg

SEQ ID NO: 755849 - RNA, 22 nt, Human
cagguggaucucuaaggacuga

SEQ ID NO: 755850 - RNA, 22 nt, Human
ucuggagaccugcauuuauauu

SEQ ID NO: 755851 - RNA, 22 nt, Human
cagcugagucugagguucuuug

SEQ ID NO: 755852 - RNA, 22 nt, Human
ccuuggcugaggagggagcuga

SEQ ID NO: 755853 - RNA, 22 nt, Human
ugguggggcuuuccuucugcuu

SEQ ID NO: 755854 - RNA, 22 nt, Human
ggggcuucuuucugccaccgac

SEQ ID NO: 755855 - RNA, 22 nt, Human
gaaaguaacauuucuugaauua

SEQ ID NO: 755856 - RNA, 22 nt, Human
aaauccuaaggagaauaugauu

SEQ ID NO: 755857 - RNA, 22 nt, Human
uuuacaguaagguggaugguac

SEQ ID NO: 755858 - RNA, 22 nt, Human
gauuacacguuuuuaaucacau

SEQ ID NO: 755859 - RNA, 19 nt, Human
augcagagaauggcaguag

SEQ ID NO: 755860 - RNA, 22 nt, Human
gcugacugcucagggccagcug

SEQ ID NO: 755861 - RNA, 22 nt, Human
agagaacaugacguaauagugg

SEQ ID NO: 755862 - RNA, 19 nt, Human
acccucucagugccugagg

SEQ ID NO: 755863 - RNA, 22 nt, Human
guccccagcuaaucucuuugcc

SEQ ID NO: 755864 - RNA, 22 nt, Human
ggaagcuggacaggcuuugagu

SEQ ID NO: 755865 - RNA, 22 nt, Human
uacuuacauaaaaacugaaugu

SEQ ID NO: 755866 - RNA, 22 nt, Human
uuucuacaugucaguaacugau

SEQ ID NO: 755867 - RNA, 22 nt, Human
cauuuaauagaugcuguuucag

SEQ ID NO: 755868 - RNA, 22 nt, Human
uucauugaguuacugccugggc

SEQ ID NO: 755869 - RNA, 22 nt, Human
guacaugcagauuauagcuaau

SEQ ID NO: 755870 - RNA, 22 nt, Human
ccucccguauauguccugggcu

SEQ ID NO: 755871 - RNA, 22 nt, Human
cagagcucagagcagggcacuc

SEQ ID NO: 755872 - RNA, 22 nt, Human
uuguucuagccuccuguuuuga

SEQ ID NO: 755873 - RNA, 22 nt, Human
uuucuaaguaucuugcaguuuu

SEQ ID NO: 755874 - RNA, 22 nt, Human
gggcucugggauucagagcaag

SEQ ID NO: 755875 - RNA, 22 nt, Human
uagagcuagcuucaaaaugcga

SEQ ID NO: 755876 - RNA, 22 nt, Human
uucucugggacaggaacaguuu

SEQ ID NO: 755877 - RNA, 22 nt, Human
agggcuaggaauggaacuggag

SEQ ID NO: 755878 - RNA, 21 nt, Human
uguuuucuaaagggcggauca

SEQ ID NO: 755879 - RNA, 20 nt, Human
ugcuggcacggguggacucc

SEQ ID NO: 755880 - RNA, 22 nt, Human
ucucagagcaucauuuucuuag

SEQ ID NO: 755881 - RNA, 22 nt, Human
aucuuuuaugagcguucugaca

SEQ ID NO: 755882 - RNA, 22 nt, Human
aacagacauauuuuuaauaugc

SEQ ID NO: 755883 - RNA, 22 nt, Human
guggcuuggaccagucacagug

SEQ ID NO: 755884 - RNA, 22 nt, Human
uggugugaggcgggaguguagu

SEQ ID NO: 755885 - RNA, 22 nt, Human
aaggccaacuaggaugagcuag

SEQ ID NO: 755886 - RNA, 22 nt, Human
gcugucucauacaaggcccugc

SEQ ID NO: 755887 - RNA, 22 nt, Human
auuuugcuuuauguaaauaugu

SEQ ID NO: 755888 - RNA, 22 nt, Human
gggccuggugcuucugacuccu

SEQ ID NO: 755889 - RNA, 22 nt, Human
acugcacuucacccugggugac

SEQ ID NO: 755890 - RNA, 22 nt, Human
uucccugagucucccugagucu

SEQ ID NO: 755891 - RNA, 22 nt, Human
gagcaggaugggagcuggggcc

SEQ ID NO: 755892 - RNA, 17 nt, Human
ggcuuccagguggcucu

SEQ ID NO: 755893 - RNA, 22 nt, Human
gcugcugggaaugaacaguguu

SEQ ID NO: 755894 - RNA, 22 nt, Human
agcuuucuucuaguuguacagu

SEQ ID NO: 755895 - RNA, 22 nt, Human
aguggggcggacaggaccagga

SEQ ID NO: 755896 - RNA, 22 nt, Human
ugcccugugccagacuuccugg

SEQ ID NO: 755897 - RNA, 22 nt, Human
uucaaugcauauagauauagaa

SEQ ID NO: 755898 - RNA, 22 nt, Human
agaaaucuuuccugaaguguuu

SEQ ID NO: 755899 - RNA, 22 nt, Human
uguaauggaagugggauugcau

SEQ ID NO: 755900 - RNA, 22 nt, Human
gucacuguuuccuauuauauuu

SEQ ID NO: 755901 - RNA, 22 nt, Human
gggagcugggcugguuuugcug

SEQ ID NO: 755902 - RNA, 22 nt, Human
cuggguucuuggcacagcagga

SEQ ID NO: 755903 - RNA, 22 nt, Human
guuagggagucagguggcucuu

SEQ ID NO: 755904 - RNA, 22 nt, Human
aucauguacuugacaaauaugu

SEQ ID NO: 755905 - RNA, 22 nt, Human
cacagaggucugggcccagcag

SEQ ID NO: 755906 - RNA, 22 nt, Human
gcacagggagacagccguggcc

SEQ ID NO: 755907 - RNA, 22 nt, Human
uuauguucagcaucugcuuuau

SEQ ID NO: 755908 - RNA, 22 nt, Human
ugcagagagcccugccuuccuc

SEQ ID NO: 755909 - RNA, 22 nt, Human
caggugacccucucaccugcuu

SEQ ID NO: 755910 - RNA, 22 nt, Human
agagccagauggagccgugugu

SEQ ID NO: 755911 - RNA, 22 nt, Human
gggcuucaaaauuggcacucuu

SEQ ID NO: 755912 - RNA, 22 nt, Human
agggcuccaggggcugggugac

SEQ ID NO: 755913 - RNA, 23 nt, Human
ucguugaauagcaauagcacaac

SEQ ID NO: 755914 - RNA, 22 nt, Human
aagugucuucugauggggugug

SEQ ID NO: 755915 - RNA, 22 nt, Human
uugagcaagaguaggaacugaa

SEQ ID NO: 755916 - RNA, 22 nt, Human
agacauuuugcaauggguagcu

SEQ ID NO: 755917 - RNA, 21 nt, Human
gccaccucaaucuucuagcgc

SEQ ID NO: 755918 - RNA, 22 nt, Human
gucacaaaggugagggacauga

SEQ ID NO: 755919 - RNA, 22 nt, Human
aaggagucugggccauucagag

SEQ ID NO: 755920 - RNA, 22 nt, Human
guguuuggucagacguccgggg

SEQ ID NO: 755921 - RNA, 22 nt, Human
aaggcucucugauggcagcagu

SEQ ID NO: 755922 - RNA, 22 nt, Human
auggaaagccaguguuccauca

SEQ ID NO: 755923 - RNA, 22 nt, Human
ucaguguugaauuuuuugcaaa

SEQ ID NO: 755924 - RNA, 23 nt, Human
gcccucaguagaaaauguuagaa

SEQ ID NO: 755925 - RNA, 22 nt, Human
cuggguuuuauuacagugagcu

SEQ ID NO: 755926 - RNA, 22 nt, Human
uguagcacagagcuuugacacu

SEQ ID NO: 755927 - RNA, 22 nt, Human
gagcuggcuccgccaugcugcu

SEQ ID NO: 755928 - RNA, 22 nt, Human
gguggggccagggcuccaaccu

SEQ ID NO: 755929 - RNA, 22 nt, Human
ccuucugugugcccacguuuau

SEQ ID NO: 755930 - RNA, 22 nt, Human
gcagagcauguccucaggacag

SEQ ID NO: 755931 - RNA, 22 nt, Human
ugggacagggaaucugaucccc

SEQ ID NO: 755932 - RNA, 22 nt, Human
cuuauugaaagccccugugccu

SEQ ID NO: 755933 - RNA, 22 nt, Human
ugcuugggaauguggagucaga

SEQ ID NO: 755934 - RNA, 20 nt, Human
ugagaggacauuuuucaugu

SEQ ID NO: 755935 - RNA, 22 nt, Human
uucugaaaccacugaccaacua

SEQ ID NO: 755936 - RNA, 22 nt, Human
uuucaguucaucugugaagauu

SEQ ID NO: 755937 - RNA, 19 nt, Human
guuuuucccagacgaggca

SEQ ID NO: 755938 - RNA, 22 nt, Human
uggacaggaucugagacugaga

SEQ ID NO: 755939 - RNA, 22 nt, Human
cugcagggcuguggucuggagu

SEQ ID NO: 755940 - RNA, 20 nt, Human
ccacagaggacagggcugug

SEQ ID NO: 755941 - RNA, 22 nt, Human
uuuaaugugagucccuuucaag

SEQ ID NO: 755942 - RNA, 22 nt, Human
cuccagugcgcaggacagcccc

SEQ ID NO: 755943 - RNA, 22 nt, Human
uuuuggaaugaggaacauccag

SEQ ID NO: 755944 - RNA, 22 nt, Human
aucuuuaaagacaugugaacuu

SEQ ID NO: 755945 - RNA, 22 nt, Human
cucauccaccgcagccccucag

SEQ ID NO: 755946 - RNA, 22 nt, Human
gcagcugccccgacugugaguc

SEQ ID NO: 755947 - RNA, 22 nt, Human
aaagcagccugcucauccugga

SEQ ID NO: 755948 - RNA, 22 nt, Human
uggcaggcggagguugcaguga

SEQ ID NO: 755949 - RNA, 22 nt, Human
uccuagagaugcaauuugauuu

SEQ ID NO: 755950 - RNA, 22 nt, Human
acuuugcagagccagaagagaa

SEQ ID NO: 755951 - RNA, 19 nt, Human
ccaaaagcaauuccaagua

SEQ ID NO: 755952 - RNA, 22 nt, Human
gggccacaggccuugcccgcag

SEQ ID NO: 755953 - RNA, 22 nt, Human
aaaugcauguauguaauaugcu

SEQ ID NO: 755954 - RNA, 22 nt, Human
gcugcagcccugcggaucacuu

SEQ ID NO: 755955 - RNA, 22 nt, Human
uccaggcuggagugcaguggcg

SEQ ID NO: 755956 - RNA, 22 nt, Human
accaucaguacuggaugcugac

SEQ ID NO: 755957 - RNA, 22 nt, Human
gaugccugcauuucaggagagu

SEQ ID NO: 755958 - RNA, 22 nt, Human
agcugccuggagucauuuccug

SEQ ID NO: 755959 - RNA, 22 nt, Human
acugccaccuggugguccugga

SEQ ID NO: 755960 - RNA, 22 nt, Human
uacugcauaacuggcauguggg

SEQ ID NO: 755961 - RNA, 21 nt, Human
aagcuuccaaacugcuggacu

SEQ ID NO: 755962 - RNA, 22 nt, Human
gccacguugccacccgggugac

SEQ ID NO: 755963 - RNA, 22 nt, Human
ccacuggcuuuuccuaggucuc

SEQ ID NO: 755964 - RNA, 22 nt, Human
cacugggcuuuguaguuagcau

SEQ ID NO: 755965 - RNA, 22 nt, Human
cuucagaaauaacaacaauuac

SEQ ID NO: 755966 - RNA, 22 nt, Human
ugcuuaauacguauuugcugga

SEQ ID NO: 755967 - RNA, 22 nt, Human
uacuaggcaauuauguaaauaa

SEQ ID NO: 755968 - RNA, 18 nt, Human
acagaacucaggggcacc

SEQ ID NO: 755969 - RNA, 23 nt, Human
aggaacugaggccuagggaggua

SEQ ID NO: 755970 - RNA, 22 nt, Human
auucucuggucauugaguauaa

SEQ ID NO: 755971 - RNA, 23 nt, Human
ucuauacauacugcagccucugg

SEQ ID NO: 755972 - RNA, 22 nt, Human
uccaggucuuccuauuccaggu

SEQ ID NO: 755973 - RNA, 22 nt, Human
acagccagucaucucagcaggg

SEQ ID NO: 755974 - RNA, 22 nt, Human
guuggcacuucauaauaugaaa

SEQ ID NO: 755975 - RNA, 22 nt, Human
gcacuggggucauagccuccag

SEQ ID NO: 755976 - RNA, 21 nt, Human
cagacaugagucucagcuuug

SEQ ID NO: 755977 - RNA, 22 nt, Human
ggaguuaaggccuaagaaauag

SEQ ID NO: 755978 - RNA, 22 nt, Human
ggcugugacccccacaggggug

SEQ ID NO: 755979 - RNA, 22 nt, Human
guauuuuacugcucaaagcucu

SEQ ID NO: 755980 - RNA, 22 nt, Human
cugugugcauaguugugcucaa

SEQ ID NO: 755981 - RNA, 20 nt, Human
ggaaaaguacuccuccuuaa

SEQ ID NO: 755982 - RNA, 22 nt, Human
auuguggcuagacagucacaau

SEQ ID NO: 755983 - RNA, 22 nt, Human
ucaguuuucucauuuaugagau

SEQ ID NO: 755984 - RNA, 22 nt, Human
aacaaacucaaauggaagagug

SEQ ID NO: 755985 - RNA, 22 nt, Human
ccaggugcugaccggucagauu

SEQ ID NO: 755986 - RNA, 16 nt, Human
ugggaccuguggccaa

SEQ ID NO: 755987 - RNA, 22 nt, Human
uagaaacagagagauaugcccc

SEQ ID NO: 755988 - RNA, 22 nt, Human
auguauugucucuuuuccuuaa

SEQ ID NO: 755989 - RNA, 22 nt, Human
uggggagaguuacaaggaaucu

SEQ ID NO: 755990 - RNA, 22 nt, Human
aaaugcacagaaaggaugugga

SEQ ID NO: 755991 - RNA, 22 nt, Human
uucagcuugcugacugcggcag

SEQ ID NO: 755992 - RNA, 22 nt, Human
uccucagcuuugguuuacucau

SEQ ID NO: 755993 - RNA, 22 nt, Human
ucaaaucaccaaacucacuggc

SEQ ID NO: 755994 - RNA, 22 nt, Human
auugucuucugucuuauaguuc

SEQ ID NO: 755995 - RNA, 22 nt, Human
ggaggccaggguggguggaucg

SEQ ID NO: 755996 - RNA, 22 nt, Human
cacaauuacuuuugcaccaaca

SEQ ID NO: 755997 - RNA, 22 nt, Human
ucugaacaugaugucaucugga

SEQ ID NO: 755998 - RNA, 22 nt, Human
agaggcugggcaggacccacag

SEQ ID NO: 755999 - RNA, 22 nt, Human
cuuuaugagccuugugaaggag

SEQ ID NO: 756000 - RNA, 22 nt, Human
ccauuucauugccuguaaagug

SEQ ID NO: 756001 - RNA, 22 nt, Human
uacaaaugaaccaacuuugaug

SEQ ID NO: 756002 - RNA, 22 nt, Human
uaugcuuugguagagaguugug

SEQ ID NO: 756003 - RNA, 22 nt, Human
uauuagaaaggcuauugcauag

SEQ ID NO: 756004 - RNA, 22 nt, Human
cccagggacagaugggcagcua

SEQ ID NO: 756005 - RNA, 21 nt, Human
uccucccugagcuguggggga

SEQ ID NO: 756006 - RNA, 22 nt, Human
auggaauauagucuuauaucuc

SEQ ID NO: 756007 - RNA, 22 nt, Human
agcacagagguggaaguguaua

SEQ ID NO: 756008 - RNA, 22 nt, Human
ucugguggugggccacaagcau

SEQ ID NO: 756009 - RNA, 22 nt, Human
cagcccugcuggcaaugaugag

SEQ ID NO: 756010 - RNA, 22 nt, Human
ccagccuugacugccccagcac

SEQ ID NO: 756011 - RNA, 22 nt, Human
guacuucccugggaggcaagca

SEQ ID NO: 756012 - RNA, 22 nt, Human
uggcaagcagagucuggugggg

SEQ ID NO: 756013 - RNA, 22 nt, Human
acuuccuguuaugugugccucu

SEQ ID NO: 756014 - RNA, 22 nt, Human
uggcucagugcauucacaguaa

SEQ ID NO: 756015 - RNA, 22 nt, Human
uagcaaagaggagaccuaggca

SEQ ID NO: 756016 - RNA, 22 nt, Human
cuacagaguucacaggauuuua

SEQ ID NO: 756017 - RNA, 22 nt, Human
cauguauauuuuauguggagag

SEQ ID NO: 756018 - RNA, 17 nt, Human
gguguauggggagggaa

SEQ ID NO: 756019 - RNA, 22 nt, Human
ucaucugucugagagacuucug

SEQ ID NO: 756020 - RNA, 23 nt, Human
gggcagguuuuuauaggcuucag

SEQ ID NO: 756021 - RNA, 21 nt, Human
ugcagacagggacagaaugga

SEQ ID NO: 756022 - RNA, 22 nt, Human
aguacaaauuauagcgcuugga

SEQ ID NO: 756023 - RNA, 22 nt, Human
aaacuugaggcaaugaaggugu

SEQ ID NO: 756024 - RNA, 22 nt, Human
ucugccuggccuggagggcaca

SEQ ID NO: 756025 - RNA, 22 nt, Human
ucugcuguaaagaauuucugcc

SEQ ID NO: 756026 - RNA, 22 nt, Human
ggggcugagucagugggaagag

SEQ ID NO: 756027 - RNA, 22 nt, Human
ugguauuucagcuuuuguaucu

SEQ ID NO: 756028 - RNA, 22 nt, Human
uguauuuuuaggaaugcgcuau

SEQ ID NO: 756029 - RNA, 22 nt, Human
ugagcuggcaggggcucaggga

SEQ ID NO: 756030 - RNA, 22 nt, Human
cacacuuuguugaaguuuucau

SEQ ID NO: 756031 - RNA, 22 nt, Human
auauacuuuucacuaauggcua

SEQ ID NO: 756032 - RNA, 22 nt, Human
uguuuacauaguagcugcccug

SEQ ID NO: 756033 - RNA, 22 nt, Human
caucacccggaacugugucugc

SEQ ID NO: 756034 - RNA, 22 nt, Human
aaacucuguugagauaauauuu

SEQ ID NO: 756035 - RNA, 22 nt, Human
ucaaaguuuuugagaauuacau

SEQ ID NO: 756036 - RNA, 22 nt, Human
aguggcagagcaggugcuggaa

SEQ ID NO: 756037 - RNA, 22 nt, Human
aguguuucugugccccaguguu

SEQ ID NO: 756038 - RNA, 18 nt, Human
auugcacaccagccuggg

SEQ ID NO: 756039 - RNA, 22 nt, Human
aucuuuagauuagaaacucuaa

SEQ ID NO: 756040 - RNA, 22 nt, Human
cacugguguacaggagguaaaa

SEQ ID NO: 756041 - RNA, 22 nt, Human
aauguggccacuuuuuucuggg

SEQ ID NO: 756042 - RNA, 23 nt, Human
uggaaacauucugaauguccauc

SEQ ID NO: 756043 - RNA, 22 nt, Human
ccaggagcagccggcccaccug

SEQ ID NO: 756044 - RNA, 22 nt, Human
aaguugcuaaaggaguucuuug

SEQ ID NO: 756045 - RNA, 19 nt, Human
ggcuuuaacucuuguagcu

SEQ ID NO: 756046 - RNA, 23 nt, Human
ugaagcauggauaacucacaccu

SEQ ID NO: 756047 - RNA, 19 nt, Human
uccaguuuggcaggaagac

SEQ ID NO: 756048 - RNA, 22 nt, Human
gauaaaauucuuauuuuacccg

SEQ ID NO: 756049 - RNA, 22 nt, Human
gcuccugugcaggucucgguug

SEQ ID NO: 756050 - RNA, 22 nt, Human
guucaaagcuccugguacagua

SEQ ID NO: 756051 - RNA, 22 nt, Human
ggcugccccaugggcugggcug

SEQ ID NO: 756052 - RNA, 22 nt, Human
uuucuaguaaaagcuaauuacc

SEQ ID NO: 756053 - RNA, 22 nt, Human
ucugggcucacgagucuggaca

SEQ ID NO: 756054 - RNA, 22 nt, Human
agaguuccacguacagcuuuug

SEQ ID NO: 756055 - RNA, 22 nt, Human
ucagcaaaggcaauucauuauu

SEQ ID NO: 756056 - RNA, 22 nt, Human
acguggcggccgccgugagcgg

SEQ ID NO: 756057 - RNA, 22 nt, Human
uacauguggagauaacugaagc

SEQ ID NO: 756058 - RNA, 22 nt, Human
ugaguuaagcagguagcaagcu

SEQ ID NO: 756059 - RNA, 22 nt, Human
accacaggacccaugagucagu

SEQ ID NO: 756060 - RNA, 20 nt, Human
ugcaaacacagaguguauga

SEQ ID NO: 756061 - RNA, 22 nt, Human
gcccauggacacccaagugcca

SEQ ID NO: 756062 - RNA, 22 nt, Human
agucugucuacuuaaagucugu

SEQ ID NO: 756063 - RNA, 22 nt, Human
ugcuuuaacgcugagggucuca

SEQ ID NO: 756064 - RNA, 23 nt, Human
ugaauuuuggcauauucugaaau

SEQ ID NO: 756065 - RNA, 22 nt, Human
gugcugggauuacaggugugag

SEQ ID NO: 756066 - RNA, 22 nt, Human
ucagaggagcaaaagaggggau

SEQ ID NO: 756067 - RNA, 22 nt, Human
aacaggaaaacagcacaauagc

SEQ ID NO: 756068 - RNA, 22 nt, Human
aacaguguucuaggguguggcu

SEQ ID NO: 756069 - RNA, 22 nt, Human
uauugaugcuuggauugggcca

SEQ ID NO: 756070 - RNA, 22 nt, Human
acaucugaggagaccagccucu

SEQ ID NO: 756071 - RNA, 22 nt, Human
ucuguuucuccaacauugugag

SEQ ID NO: 756072 - RNA, 22 nt, Human
uuuguuuagaaagagauuggug

SEQ ID NO: 756073 - RNA, 22 nt, Human
uaauaguugugacuuuguaaag

SEQ ID NO: 756074 - RNA, 22 nt, Human
gauggcuuugaggaauuugaau

SEQ ID NO: 756075 - RNA, 22 nt, Human
guccccucaaaauucauauguu

SEQ ID NO: 756076 - RNA, 20 nt, Human
ucucauuauauccaagaggc

SEQ ID NO: 756077 - RNA, 22 nt, Human
aagauguucuauuuucacuuuu

SEQ ID NO: 756078 - RNA, 23 nt, Human
accagcaaaaaugacagcccagg

SEQ ID NO: 756079 - RNA, 22 nt, Human
aauuagggagccaucauaaggu

SEQ ID NO: 756080 - RNA, 22 nt, Human
uacagaaugauguguuuaaaua

SEQ ID NO: 756081 - RNA, 19 nt, Human
uuuuaaguccucucuauuc

SEQ ID NO: 756082 - RNA, 22 nt, Human
uuuguaacuuuagaauugaucc

SEQ ID NO: 756083 - RNA, 22 nt, Human
gcaguagugucaguacagcaaa

SEQ ID NO: 756084 - RNA, 22 nt, Human
ucuggggauggucuacuuucug

SEQ ID NO: 756085 - RNA, 22 nt, Human
ucucagaguuuuuuuccaggac

SEQ ID NO: 756086 - RNA, 22 nt, Human
uggcaggaggaugaggcggcua

SEQ ID NO: 756087 - RNA, 22 nt, Human
ugggcucauguuuauacauauc

SEQ ID NO: 756088 - RNA, 22 nt, Human
aaaugguauuuacucuguauua

SEQ ID NO: 756089 - RNA, 22 nt, Human
gaggcccagcauucagggcagg

SEQ ID NO: 756090 - RNA, 22 nt, Human
aguacacagaguuauuuugugu

SEQ ID NO: 756091 - RNA, 22 nt, Human
aaacaucuaucagcauuuuuua

SEQ ID NO: 756092 - RNA, 22 nt, Human
aggaacugucauguauugcuca

SEQ ID NO: 756093 - RNA, 22 nt, Human
aaauguguguauguacauauau

SEQ ID NO: 756094 - RNA, 22 nt, Human
ugugaauggcaguuggauagca

SEQ ID NO: 756095 - RNA, 22 nt, Human
gugaauaacuuucuauguuaau

SEQ ID NO: 756096 - RNA, 21 nt, Human
acagggcuucagggaggguua

SEQ ID NO: 756097 - RNA, 22 nt, Human
acuuagaagaugcaguaaagca

SEQ ID NO: 756098 - RNA, 22 nt, Human
uugaguuccaggaugguuguua

SEQ ID NO: 756099 - RNA, 22 nt, Human
gaauucuagucacacacauuca

SEQ ID NO: 756100 - RNA, 20 nt, Human
uuuggagagaaagaaguagu

SEQ ID NO: 756101 - RNA, 22 nt, Human
ggaggugacgaaaagaaauugu

SEQ ID NO: 756102 - RNA, 22 nt, Human
aacaauguucuuuuagcuugaa

SEQ ID NO: 756103 - RNA, 22 nt, Human
aucagacaauuguugaguacug

SEQ ID NO: 756104 - RNA, 22 nt, Human
aauaaaugaacaaagcagguug

SEQ ID NO: 756105 - RNA, 22 nt, Human
uacagcacugugcauagugguu

SEQ ID NO: 756106 - RNA, 23 nt, Human
uuuugacaggaggaagguguuga

SEQ ID NO: 756107 - RNA, 22 nt, Human
cuuaagagucuuucuguguuua

SEQ ID NO: 756108 - RNA, 22 nt, Human
cuccagucauagccucuugagu

SEQ ID NO: 756109 - RNA, 22 nt, Human
ugacaccacaacuagccauuga

SEQ ID NO: 756110 - RNA, 22 nt, Human
aaauccuaauaaugcacuagug

SEQ ID NO: 756111 - RNA, 22 nt, Human
uuccugguccuauuauauacac

SEQ ID NO: 756112 - RNA, 22 nt, Human
aaguuacuaugacucuucuuuu

SEQ ID NO: 756113 - RNA, 17 nt, Human
aauacuuccaacuagug

SEQ ID NO: 756114 - RNA, 22 nt, Human
agcacagaaaguauugacugaa

SEQ ID NO: 756115 - RNA, 22 nt, Human
cugucuguggagcuucugaugu

SEQ ID NO: 756116 - RNA, 22 nt, Human
uugaggucaaguaaccacugga

SEQ ID NO: 756117 - RNA, 22 nt, Human
uggauauccuuguuaacuuucu

SEQ ID NO: 756118 - RNA, 22 nt, Human
aaggagugauauaugggugcua

SEQ ID NO: 756119 - RNA, 22 nt, Human
aggaacuggugggaggugauug

SEQ ID NO: 756120 - RNA, 22 nt, Human
gguggggagucaggcauucuug

SEQ ID NO: 756121 - RNA, 22 nt, Human
uucugcuuuuauugccagaguu

SEQ ID NO: 756122 - RNA, 22 nt, Human
cagccacucggccauaaaggcu

SEQ ID NO: 756123 - RNA, 22 nt, Human
gcuccccauugaucugcaggcu

SEQ ID NO: 756124 - RNA, 22 nt, Human
ugagaaggguuggagaaauaau

SEQ ID NO: 756125 - RNA, 22 nt, Human
agcacaggacguagagcuugga

SEQ ID NO: 756126 - RNA, 22 nt, Human
ucucuaaaguagaaaagacccc

SEQ ID NO: 756127 - RNA, 22 nt, Human
auuuuguuuccuuuggaguaga

SEQ ID NO: 756128 - RNA, 22 nt, Human
guacaugugcacaaugugcagg

SEQ ID NO: 756129 - RNA, 22 nt, Human
ucugaggcauacccaggccccc

SEQ ID NO: 756130 - RNA, 22 nt, Human
agcugcuuguacaugaccacau

SEQ ID NO: 756131 - RNA, 22 nt, Human
aacugcaacuucguaaagugag

SEQ ID NO: 756132 - RNA, 19 nt, Human
aaugcauggaaguuggaga

SEQ ID NO: 756133 - RNA, 22 nt, Human
aagugucugcaaaaugacagag

SEQ ID NO: 756134 - RNA, 23 nt, Human
agcugaggcugugggugucagag

SEQ ID NO: 756135 - RNA, 22 nt, Human
ggccuucacgugaccuggcgug

SEQ ID NO: 756136 - RNA, 17 nt, Human
cucagagcaggacagaa

SEQ ID NO: 756137 - RNA, 22 nt, Human
uaacaaagguugccaaacuaag

SEQ ID NO: 756138 - RNA, 22 nt, Human
ucucagugauggcccauuugga

SEQ ID NO: 756139 - RNA, 22 nt, Human
gggcuggagaugcuuauggaga

SEQ ID NO: 756140 - RNA, 22 nt, Human
uucaagucagagcaagccaagu

SEQ ID NO: 756141 - RNA, 22 nt, Human
agagcuguucagcagccagguu

SEQ ID NO: 756142 - RNA, 22 nt, Human
aggaauguaauaguguggcuca

SEQ ID NO: 756143 - RNA, 22 nt, Human
gaaggcugaguggguacggagg

SEQ ID NO: 756144 - RNA, 21 nt, Human
gcugugcacauaguagaagug

SEQ ID NO: 756145 - RNA, 22 nt, Human
aaguaugugauacauguuaauu

SEQ ID NO: 756146 - RNA, 22 nt, Human
agccugcaggaugggcagcacc

SEQ ID NO: 756147 - RNA, 22 nt, Human
uaugaagcuuugaaaagcuuac

SEQ ID NO: 756148 - RNA, 22 nt, Human
aagcaagaguuggagugauguu

SEQ ID NO: 756149 - RNA, 22 nt, Human
gacagagauugaaucaggaaau

SEQ ID NO: 756150 - RNA, 22 nt, Human
uguauuuauucaggauguaacu

SEQ ID NO: 756151 - RNA, 22 nt, Human
gaggagaaauuuggggaccuga

SEQ ID NO: 756152 - RNA, 22 nt, Human
ugucugaacugcacugaaagac

SEQ ID NO: 756153 - RNA, 20 nt, Human
aauuuacucacagaaugaau

SEQ ID NO: 756154 - RNA, 22 nt, Human
uauacugaucacugaggucauc

SEQ ID NO: 756155 - RNA, 22 nt, Human
gcuccaggccccagcguuccgc

SEQ ID NO: 756156 - RNA, 22 nt, Human
caguguuuguauagaauaugca

SEQ ID NO: 756157 - RNA, 18 nt, Human
acccucuggcuucugagc

SEQ ID NO: 756158 - RNA, 22 nt, Human
cagaaaaggguguuuguucagg

SEQ ID NO: 756159 - RNA, 22 nt, Human
cauccugaaagaaacauuuccu

SEQ ID NO: 756160 - RNA, 22 nt, Human
aucaauuuugaggauacaagaa

SEQ ID NO: 756161 - RNA, 20 nt, Human
aagcuuccaggaucuggugu

SEQ ID NO: 756162 - RNA, 22 nt, Human
uuuccucaacugucaaaugggg

SEQ ID NO: 756163 - RNA, 22 nt, Human
uggaggaugagugugggcucug

SEQ ID NO: 756164 - RNA, 22 nt, Human
ugcagguggcagcggggcacca

SEQ ID NO: 756165 - RNA, 22 nt, Human
gugcccugguccccagcauaua

SEQ ID NO: 756166 - RNA, 22 nt, Human
uccugggacccugggugcagag

SEQ ID NO: 756167 - RNA, 18 nt, Human
ggaaguaggaagaggaag

SEQ ID NO: 756168 - RNA, 22 nt, Human
cuugagaagagauuuauauuug

SEQ ID NO: 756169 - RNA, 22 nt, Human
uuccucagagggcgcuggggaa

SEQ ID NO: 756170 - RNA, 22 nt, Human
aagugcuuucauauagucuuaa

SEQ ID NO: 756171 - RNA, 22 nt, Human
cuugggugcuggaggcugccgc

SEQ ID NO: 756172 - RNA, 20 nt, Human
agagccuugaggaagaugau

SEQ ID NO: 756173 - RNA, 22 nt, Human
ugaaggccagcagagugaaggc

SEQ ID NO: 756174 - RNA, 22 nt, Human
agauggcuccaguguccagagg

SEQ ID NO: 756175 - RNA, 22 nt, Human
guccucuguagggcugggccac

SEQ ID NO: 756176 - RNA, 22 nt, Human
uguguuuaaagaggaagugaga

SEQ ID NO: 756177 - RNA, 22 nt, Human
ugggaaggcguggaaguagaag

SEQ ID NO: 756178 - RNA, 22 nt, Human
gcaugauagcuaacuccccuca

SEQ ID NO: 756179 - RNA, 22 nt, Human
aggcccugaagucggccccuca

SEQ ID NO: 756180 - RNA, 23 nt, Human
cugcuuucccacuccaugcucuu

SEQ ID NO: 756181 - RNA, 22 nt, Human
uggcagagucucuccuuuccag

SEQ ID NO: 756182 - RNA, 22 nt, Human
ggagccccaauugagcaguacg

SEQ ID NO: 756183 - RNA, 22 nt, Human
ugagcuggcacuuuuccuggga

SEQ ID NO: 756184 - RNA, 22 nt, Human
ucaggaacacaggggcccaugc

SEQ ID NO: 756185 - RNA, 22 nt, Human
caggcagaggaggccuucuccu

SEQ ID NO: 756186 - RNA, 19 nt, Human
uuugaaaggauuguuauuu

SEQ ID NO: 756187 - RNA, 22 nt, Human
agcacagaguugcagagagcgu

SEQ ID NO: 756188 - RNA, 22 nt, Human
uccagucaacuuaaucucuuua

SEQ ID NO: 756189 - RNA, 22 nt, Human
aguaaaaucuuaagcacagugg

SEQ ID NO: 756190 - RNA, 22 nt, Human
agaggauccuaagaagauauga

SEQ ID NO: 756191 - RNA, 22 nt, Human
ugucaguuuggcucuaaaguuu

SEQ ID NO: 756192 - RNA, 22 nt, Human
aguggcugccaagagcaaugcu

SEQ ID NO: 756193 - RNA, 22 nt, Human
uaucuugagagacaacacagca

SEQ ID NO: 756194 - RNA, 23 nt, Human
aggcugcagaagaauagggucau

SEQ ID NO: 756195 - RNA, 23 nt, Human
aucuuacauauuuagcaccugaa

SEQ ID NO: 756196 - RNA, 22 nt, Human
auugcauuguauuguaaauguu

SEQ ID NO: 756197 - RNA, 22 nt, Human
guccucugaaguugugcaaugc

SEQ ID NO: 756198 - RNA, 22 nt, Human
gauuuccaugauugggccagaa

SEQ ID NO: 756199 - RNA, 19 nt, Human
ugaggccaaggucacagau

SEQ ID NO: 756200 - RNA, 22 nt, Human
ugagggcugcuuccagagcuag

SEQ ID NO: 756201 - RNA, 22 nt, Human
uagauugauugcaaagacaggc

SEQ ID NO: 756202 - RNA, 22 nt, Human
ggcagcugggucacaccgaucu

SEQ ID NO: 756203 - RNA, 21 nt, Human
agugucauucccaagcuguga

SEQ ID NO: 756204 - RNA, 22 nt, Human
uaagguuuaacgcccugucucg

SEQ ID NO: 756205 - RNA, 22 nt, Human
ugaguggaguagugaaugcauu

SEQ ID NO: 756206 - RNA, 22 nt, Human
gccaaggcugaggcccugggcu

SEQ ID NO: 756207 - RNA, 22 nt, Human
cucaugucuucacccauucuaa

SEQ ID NO: 756208 - RNA, 22 nt, Human
ccacacuggcaugggauggagg

SEQ ID NO: 756209 - RNA, 22 nt, Human
agggagacaaaagcagcugcca

SEQ ID NO: 756210 - RNA, 22 nt, Human
uaagaacaguagaacaguaggu

SEQ ID NO: 756211 - RNA, 19 nt, Human
cuggaaugagaacaugccc

SEQ ID NO: 756212 - RNA, 22 nt, Human
augguuucacaaacaaaagguu

SEQ ID NO: 756213 - RNA, 22 nt, Human
ucauaaaacacaccagguaguu

SEQ ID NO: 756214 - RNA, 22 nt, Human
aauggcuuagcagaguuagaag

SEQ ID NO: 756215 - RNA, 22 nt, Human
caggguggaacaggcaauacuu

SEQ ID NO: 756216 - RNA, 19 nt, Human
aggcuggagacaccaggcc

SEQ ID NO: 756217 - RNA, 22 nt, Human
uccacaucaagggcagagaggu

SEQ ID NO: 756218 - RNA, 22 nt, Human
ucuguggcacgauugcacugca

SEQ ID NO: 756219 - RNA, 22 nt, Human
agacuguacuuucugcagcucu

SEQ ID NO: 756220 - RNA, 17 nt, Human
agaaugcaaagcaggcu

SEQ ID NO: 756221 - RNA, 22 nt, Human
ucugaaaugcaggcaauuugcu

SEQ ID NO: 756222 - RNA, 22 nt, Human
ccuggcuccaaagcugugacuc

SEQ ID NO: 756223 - RNA, 22 nt, Human
ugugcuaaguauuuucuuauuu

SEQ ID NO: 756224 - RNA, 22 nt, Human
uuacugauggaacagagauaga

SEQ ID NO: 756225 - RNA, 22 nt, Human
aguggcaguggggcagggcccu

SEQ ID NO: 756226 - RNA, 22 nt, Human
gguggcugguuuuauaagaggu

SEQ ID NO: 756227 - RNA, 22 nt, Human
gcacugccugugagcccugguu

SEQ ID NO: 756228 - RNA, 22 nt, Human
gucccaggcaggccacuggcag

SEQ ID NO: 756229 - RNA, 22 nt, Human
gccuggugcuaugagggccagc

SEQ ID NO: 756230 - RNA, 18 nt, Human
ccucacagacuuccaugu

SEQ ID NO: 756231 - RNA, 22 nt, Human
uguugcacggccuucacagagc

SEQ ID NO: 756232 - RNA, 17 nt, Human
ggccagaggcggggcug

SEQ ID NO: 756233 - RNA, 22 nt, Human
auuccacagccgauaccaugac

SEQ ID NO: 756234 - RNA, 22 nt, Human
cugcccuggucccauggcugau

SEQ ID NO: 756235 - RNA, 22 nt, Human
auggcuccagcuuggcuucacc

SEQ ID NO: 756236 - RNA, 22 nt, Human
uccuccaguggcccaguccuuc

SEQ ID NO: 756237 - RNA, 22 nt, Human
ucuuccuauggggcugcaggaa

SEQ ID NO: 756238 - RNA, 22 nt, Human
cuuuccccaguauaucauugcc

SEQ ID NO: 756239 - RNA, 19 nt, Human
ggacagucucagccucaug

SEQ ID NO: 756240 - RNA, 18 nt, Human
ggguccuguucuuggaag

SEQ ID NO: 756241 - RNA, 22 nt, Human
uccagcagaaaagagguaggga

SEQ ID NO: 756242 - RNA, 22 nt, Human
gcagaaggauccgcaggugcaa

SEQ ID NO: 756243 - RNA, 21 nt, Human
guuuucaugauagagucugua

SEQ ID NO: 756244 - RNA, 22 nt, Human
acauugaccugauuuugaagac

SEQ ID NO: 756245 - RNA, 23 nt, Human
ccacugaagaauccagggaguuu

SEQ ID NO: 756246 - RNA, 22 nt, Human
ucagaugccuguggggucuagg

SEQ ID NO: 756247 - RNA, 22 nt, Human
cacagguguaugaauaugucca

SEQ ID NO: 756248 - RNA, 22 nt, Human
ugccuggcaagaggggcuggcu

SEQ ID NO: 756249 - RNA, 22 nt, Human
caaaguuuggcucucaugacau

SEQ ID NO: 756250 - RNA, 22 nt, Human
uccucagggaagaugagccuca

SEQ ID NO: 756251 - RNA, 19 nt, Human
cuauacagccucugaggaa

SEQ ID NO: 756252 - RNA, 19 nt, Human
cagaacagcugggaagaga

SEQ ID NO: 756253 - RNA, 22 nt, Human
uccugggucucuuccuuaguuc

SEQ ID NO: 756254 - RNA, 22 nt, Human
ucucuggggauggaccugggag

SEQ ID NO: 756255 - RNA, 22 nt, Human
ggagcuguuggcagcuaucuug

SEQ ID NO: 756256 - RNA, 18 nt, Human
gaggcacauaguuggggc

SEQ ID NO: 756257 - RNA, 18 nt, Human
caugagcugccccuagac

SEQ ID NO: 756258 - RNA, 20 nt, Human
uucucuuuggguccagagaa

SEQ ID NO: 756259 - RNA, 22 nt, Human
ucccagcauaacaaacugcccg

SEQ ID NO: 756260 - RNA, 22 nt, Human
cccuguccuuggcugugaggcu

SEQ ID NO: 756261 - RNA, 22 nt, Human
ucaccccuugugaaugcugcuc

SEQ ID NO: 756262 - RNA, 22 nt, Human
caaaggacccauaauuaaaacc

SEQ ID NO: 756263 - RNA, 22 nt, Human
caggcucagcucuggccagugc

SEQ ID NO: 756264 - RNA, 22 nt, Human
aggcugaggcgggaggaucacu

SEQ ID NO: 756265 - RNA, 22 nt, Human
guucacaaaguacuguaugcau

SEQ ID NO: 756266 - RNA, 22 nt, Human
ugcagaagaaugagcuuggagu

SEQ ID NO: 756267 - RNA, 22 nt, Human
augcaaaugcuagagaauguug

SEQ ID NO: 756268 - RNA, 22 nt, Human
uggcucagcaagacauugaccu

SEQ ID NO: 756269 - RNA, 20 nt, Human
uccuaauaaccugaagaaau

SEQ ID NO: 756270 - RNA, 22 nt, Human
ugcauuguugaugaguugaaua

SEQ ID NO: 756271 - RNA, 22 nt, Human
ggacauuuaguuucauugggca

SEQ ID NO: 756272 - RNA, 20 nt, Human
ugcuuuuauaccuauaauga

SEQ ID NO: 756273 - RNA, 22 nt, Human
uuacaaacaagaucuuauucuu

SEQ ID NO: 756274 - RNA, 22 nt, Human
ugggccagauccauggcaauaa

SEQ ID NO: 756275 - RNA, 22 nt, Human
agagccaguuguuaagcacuua

SEQ ID NO: 756276 - RNA, 22 nt, Human
cucccaggggaacuaucaagua

SEQ ID NO: 756277 - RNA, 22 nt, Human
acccagaguaacagauggauuc

SEQ ID NO: 756278 - RNA, 22 nt, Human
gcucagugguauucggaaacug

SEQ ID NO: 756279 - RNA, 19 nt, Human
ccagcagcuuugauucucu

SEQ ID NO: 756280 - RNA, 22 nt, Human
gggcuccagggcccgagucguc

SEQ ID NO: 756281 - RNA, 22 nt, Human
auagucuuuacugcugaauuga

SEQ ID NO: 756282 - RNA, 22 nt, Human
ugcauuggucauuuagaaaaua

SEQ ID NO: 756283 - RNA, 22 nt, Human
uauguuuccugagcuuacacca

SEQ ID NO: 756284 - RNA, 22 nt, Human
cagcuuucuuccuucugucugu

SEQ ID NO: 756285 - RNA, 22 nt, Human
aaggcacacaguuagauagagc

SEQ ID NO: 756286 - RNA, 22 nt, Human
aguuuacaucuucaaucucauu

SEQ ID NO: 756287 - RNA, 22 nt, Human
uguuaucacuuguaaaagcaau

SEQ ID NO: 756288 - RNA, 22 nt, Human
augucuguccccuagcccugau

SEQ ID NO: 756289 - RNA, 22 nt, Human
gcagcuuucugcaaugucaucc

SEQ ID NO: 756290 - RNA, 22 nt, Human
gaaagggucuuugauuucccuc

SEQ ID NO: 756291 - RNA, 22 nt, Human
gaggcucagagugguuaaauaa

SEQ ID NO: 756292 - RNA, 22 nt, Human
ggacaaaggucuggggaaccug

SEQ ID NO: 756293 - RNA, 22 nt, Human
ugcaaauacaaaaugguacagc

SEQ ID NO: 756294 - RNA, 22 nt, Human
cccaggggagguccucagggaa

SEQ ID NO: 756295 - RNA, 18 nt, Human
cagaggagagacauucag

SEQ ID NO: 756296 - RNA, 20 nt, Human
ccucucugcccugcaaggcc

SEQ ID NO: 756297 - RNA, 22 nt, Human
acugccugcuccuggcuccaca

SEQ ID NO: 756298 - RNA, 22 nt, Human
uuuucuccuaagacccuucacc

SEQ ID NO: 756299 - RNA, 22 nt, Human
gcaugcagagaauaccugugau

SEQ ID NO: 756300 - RNA, 22 nt, Human
acauagcauaaagaaugacucu

SEQ ID NO: 756301 - RNA, 22 nt, Human
ugcacacaguucucaggaaaga

SEQ ID NO: 756302 - RNA, 22 nt, Human
uguguagugauuuucuuccaac

SEQ ID NO: 756303 - RNA, 22 nt, Human
caagggcugcuaucagcuacug

SEQ ID NO: 756304 - RNA, 22 nt, Human
cuuacauugugugcaugagggg

SEQ ID NO: 756305 - RNA, 22 nt, Human
uuacacucauauugcacuuacc

SEQ ID NO: 756306 - RNA, 22 nt, Human
ugugggugguaaaauacaauga

SEQ ID NO: 756307 - RNA, 22 nt, Human
guuuuauuggaacacagccaug

SEQ ID NO: 756308 - RNA, 22 nt, Human
uguuuacuuaugugggucacau

SEQ ID NO: 756309 - RNA, 22 nt, Human
cuguauuuuuuaagugaucugg

SEQ ID NO: 756310 - RNA, 22 nt, Human
gggagcuggggcauuuauaccc

SEQ ID NO: 756311 - RNA, 22 nt, Human
gauggcaggcaggugaguagag

SEQ ID NO: 756312 - RNA, 22 nt, Human
uuacacaugcucacuuauuugu

SEQ ID NO: 756313 - RNA, 22 nt, Human
gccaagcuguuuuucagagacg

SEQ ID NO: 756314 - RNA, 19 nt, Human
ccagaugagcagcugagau

SEQ ID NO: 756315 - RNA, 22 nt, Human
cucuccuuuacugcagagagcg

SEQ ID NO: 756316 - RNA, 22 nt, Human
uucacauggcaauagagaggga

SEQ ID NO: 756317 - RNA, 22 nt, Human
cuggcaccuccagcucauggcc

SEQ ID NO: 756318 - RNA, 22 nt, Human
ugccuugggauauauggacacu

SEQ ID NO: 756319 - RNA, 22 nt, Human
gagugguaggcaguguuaggaa

SEQ ID NO: 756320 - RNA, 22 nt, Human
ccagcccuugcugaaggguggc

SEQ ID NO: 756321 - RNA, 22 nt, Human
aucauucuaguccuuauggucu

SEQ ID NO: 756322 - RNA, 22 nt, Human
accagagcccaucugcuccuag

SEQ ID NO: 756323 - RNA, 22 nt, Human
uccagcugacaguucaaaauga

SEQ ID NO: 756324 - RNA, 22 nt, Human
uaaagugcuuaugauaaccaag

SEQ ID NO: 756325 - RNA, 22 nt, Human
ugcuuugcagugucuaacagaa

SEQ ID NO: 756326 - RNA, 22 nt, Human
ggggcagaaguagugccccuga

SEQ ID NO: 756327 - RNA, 22 nt, Human
uaauuauucuagucacauagca

SEQ ID NO: 756328 - RNA, 22 nt, Human
ugcaugcuccacagcccauuca

SEQ ID NO: 756329 - RNA, 22 nt, Human
cugagagccuccuguuggcuag

SEQ ID NO: 756330 - RNA, 22 nt, Human
auuuuucaacuuuggaaauggc

SEQ ID NO: 756331 - RNA, 22 nt, Human
agaagccauaguaucucagggu

SEQ ID NO: 756332 - RNA, 22 nt, Human
uggcccugacuuggaggccuga

SEQ ID NO: 756333 - RNA, 21 nt, Human
aggggaaguagaguuuugauu

SEQ ID NO: 756334 - RNA, 22 nt, Human
ugccauuuguuacuaucaggac

SEQ ID NO: 756335 - RNA, 22 nt, Human
aggcugcagaacagucaggugc

SEQ ID NO: 756336 - RNA, 22 nt, Human
ucugcaaacuggcucuuacugc

SEQ ID NO: 756337 - RNA, 22 nt, Human
uccaggguguguuuacuggggu

SEQ ID NO: 756338 - RNA, 22 nt, Human
aagguggauguaagcggcaaug

SEQ ID NO: 756339 - RNA, 20 nt, Human
gaaucuuacuacauucucuc

SEQ ID NO: 756340 - RNA, 22 nt, Human
uagugucugauccguaguuaca

SEQ ID NO: 756341 - RNA, 20 nt, Human
guucucacugaucugcaggg

SEQ ID NO: 756342 - RNA, 22 nt, Human
cagauacauuaaaaugaugauu

SEQ ID NO: 756343 - RNA, 22 nt, Human
cccuguacagucucuguggcac

SEQ ID NO: 756344 - RNA, 22 nt, Human
uccuggccgcuggccccugaga

SEQ ID NO: 756345 - RNA, 22 nt, Human
aggguugcauuuuuagaggcuc

SEQ ID NO: 756346 - RNA, 22 nt, Human
acucuguaauucuauaugcagu

SEQ ID NO: 756347 - RNA, 22 nt, Human
acauacuuuuuaaaagauugcu

SEQ ID NO: 756348 - RNA, 22 nt, Human
guccacugcugugugcuucacc

SEQ ID NO: 756349 - RNA, 22 nt, Human
gugccuuccccgguggucuguu

SEQ ID NO: 756350 - RNA, 22 nt, Human
caggggcugaaauguugggguu

SEQ ID NO: 756351 - RNA, 22 nt, Human
agacaagagcugaggacauauu

SEQ ID NO: 756352 - RNA, 22 nt, Human
agaagucaaguggucuaugaaa

SEQ ID NO: 756353 - RNA, 17 nt, Human
cagugaucauuacauua

SEQ ID NO: 756354 - RNA, 22 nt, Human
auauucuugugauuauaaagua

SEQ ID NO: 756355 - RNA, 22 nt, Human
aucagcaagcaugguuaggugu

SEQ ID NO: 756356 - RNA, 22 nt, Human
ugcuggcuuagauaucacugcc

SEQ ID NO: 756357 - RNA, 22 nt, Human
cacauucaauuacacagauagg

SEQ ID NO: 756358 - RNA, 22 nt, Human
uucuucaaccaucuacauaaac

SEQ ID NO: 756359 - RNA, 22 nt, Human
aaugauugcaaacauugagaac

SEQ ID NO: 756360 - RNA, 22 nt, Human
cacugcuuuuuuggcuauguac

SEQ ID NO: 756361 - RNA, 22 nt, Human
augcaguaaauguucuaguuug

SEQ ID NO: 756362 - RNA, 22 nt, Human
cuauccauuaaagccuuggaaa

SEQ ID NO: 756363 - RNA, 22 nt, Human
guucuaauaggagaaaagacag

SEQ ID NO: 756364 - RNA, 22 nt, Human
agaugcaaccucugcuuaacaa

SEQ ID NO: 756365 - RNA, 22 nt, Human
uucauucugcaguucucagcuc

SEQ ID NO: 756366 - RNA, 22 nt, Human
gcugugggugcuggcuccaccc

SEQ ID NO: 756367 - RNA, 22 nt, Human
agcugaauguucucagaccaga

SEQ ID NO: 756368 - RNA, 22 nt, Human
agaggcggagcuugcagugagc

SEQ ID NO: 756369 - RNA, 22 nt, Human
agcaggagagcagugcgugguc

SEQ ID NO: 756370 - RNA, 22 nt, Human
uucuccuugguuuaugggacau

SEQ ID NO: 756371 - RNA, 22 nt, Human
uaauaucuacuucauagaguuu

SEQ ID NO: 756372 - RNA, 22 nt, Human
ugcaggcugcucaagacuuagu

SEQ ID NO: 756373 - RNA, 20 nt, Human
auucugcuuugaaaauaagg

SEQ ID NO: 756374 - RNA, 22 nt, Human
gagcugugccaaucugucuggg

SEQ ID NO: 756375 - RNA, 22 nt, Human
aggagacccagaauguugcugu

SEQ ID NO: 756376 - RNA, 22 nt, Human
ucagcauuguggcagagaaugg

SEQ ID NO: 756377 - RNA, 20 nt, Human
agggcccaggaagagaguua

SEQ ID NO: 756378 - RNA, 22 nt, Human
gaagguccagcguggccaaguc

SEQ ID NO: 756379 - RNA, 22 nt, Human
gauccugucuguggagucagca

SEQ ID NO: 756380 - RNA, 22 nt, Human
aaauguacacuuugcaucuuga

SEQ ID NO: 756381 - RNA, 22 nt, Human
agaggccagcaaccacaguaaa

SEQ ID NO: 756382 - RNA, 22 nt, Human
uccuuaauaaguacuucauugu

SEQ ID NO: 756383 - RNA, 22 nt, Human
agaaagggagagccagcacacg

SEQ ID NO: 756384 - RNA, 22 nt, Human
gcuggaggcaguucagacacca

SEQ ID NO: 756385 - RNA, 22 nt, Human
aguuauguccucagcaaaucaa

SEQ ID NO: 756386 - RNA, 23 nt, Human
ucccaggaaucugcauuuuuaac

SEQ ID NO: 756387 - RNA, 22 nt, Human
gagggccacguucagggcucuc

SEQ ID NO: 756388 - RNA, 20 nt, Human
gugcagaggcagccuguggg

SEQ ID NO: 756389 - RNA, 22 nt, Human
gcacaugacaguaaguagagca

SEQ ID NO: 756390 - RNA, 22 nt, Human
gagucagaauuguauuuuaaac

SEQ ID NO: 756391 - RNA, 22 nt, Human
agcuugguguugccugcuugag

SEQ ID NO: 756392 - RNA, 17 nt, Human
ggaacaaauacuaugca

SEQ ID NO: 756393 - RNA, 22 nt, Human
uuccuggugagauuucguucug

SEQ ID NO: 756394 - RNA, 22 nt, Human
gcugaggauuacuugaagucag

SEQ ID NO: 756395 - RNA, 22 nt, Human
guaaucuguaguaaagcaccau

SEQ ID NO: 756396 - RNA, 21 nt, Human
cacuguauagcaggagaaaac

SEQ ID NO: 756397 - RNA, 22 nt, Human
cauugaaaccuaacauaggcug

SEQ ID NO: 756398 - RNA, 22 nt, Human
cuggccugcagaucccaggguc

SEQ ID NO: 756399 - RNA, 22 nt, Human
uuacaacaaaggcacgugcaug

SEQ ID NO: 756400 - RNA, 22 nt, Human
acagcucugcauggcaguuauu

SEQ ID NO: 756401 - RNA, 22 nt, Human
ugaauccagagcuauuucgucc

SEQ ID NO: 756402 - RNA, 22 nt, Human
ugggugaguggagggcauucua

SEQ ID NO: 756403 - RNA, 22 nt, Human
cacagaggaaaggcaguuggua

SEQ ID NO: 756404 - RNA, 22 nt, Human
ucaaucaaagcacugggcuuug

SEQ ID NO: 756405 - RNA, 22 nt, Human
ggacagagagugaauaugacau

SEQ ID NO: 756406 - RNA, 22 nt, Human
agcagcuuacauguggccuauc

SEQ ID NO: 756407 - RNA, 22 nt, Human
cuggcucccgucugguggccau

SEQ ID NO: 756408 - RNA, 22 nt, Human
ccagggugugagaaggaaguag

SEQ ID NO: 756409 - RNA, 22 nt, Human
acucagugggcuugaugucgaa

SEQ ID NO: 756410 - RNA, 22 nt, Human
acugcuuuagaccuagagcucu

SEQ ID NO: 756411 - RNA, 22 nt, Human
auaaaucucuuaagacucaaca

SEQ ID NO: 756412 - RNA, 22 nt, Human
gguaggggcagggccaagcugu

SEQ ID NO: 756413 - RNA, 22 nt, Human
uucaguguggcccaugaagagg

SEQ ID NO: 756414 - RNA, 22 nt, Human
agguggcuucuggccaggugug

SEQ ID NO: 756415 - RNA, 22 nt, Human
acucuucauucaaguaugcaaa

SEQ ID NO: 756416 - RNA, 22 nt, Human
cugggcaguuuauucaguucug

SEQ ID NO: 756417 - RNA, 22 nt, Human
ucuaguucuagaucccugagga

SEQ ID NO: 756418 - RNA, 22 nt, Human
ugcuucuguauuuugggcuuga

SEQ ID NO: 756419 - RNA, 22 nt, Human
uuguaacaaucugucauaaaug

SEQ ID NO: 756420 - RNA, 22 nt, Human
aaauaucauucuggugcacaga

SEQ ID NO: 756421 - RNA, 22 nt, Human
acauuaaagaguaagguuaguu

SEQ ID NO: 756422 - RNA, 22 nt, Human
ugcaccccauuuuacauuuaca

SEQ ID NO: 756423 - RNA, 22 nt, Human
acacaugugucugcaugcagug

SEQ ID NO: 756424 - RNA, 22 nt, Human
uucuaacuuucaagguccuuuc

SEQ ID NO: 756425 - RNA, 22 nt, Human
agaaguguuuauuucagcaaca

SEQ ID NO: 756426 - RNA, 22 nt, Human
ucugauuagcaguuuagggaaa

SEQ ID NO: 756427 - RNA, 22 nt, Human
uacauuuauaaggcuucucugu

SEQ ID NO: 756428 - RNA, 22 nt, Human
aaggcaaugacugauuuagaau

SEQ ID NO: 756429 - RNA, 22 nt, Human
caggggcucuaaugcaugauca

SEQ ID NO: 756430 - RNA, 22 nt, Human
cuggacacaaacaucuccucug

SEQ ID NO: 756431 - RNA, 22 nt, Human
aguggggagguccaggccaccc

SEQ ID NO: 756432 - RNA, 22 nt, Human
gcugccugaagugucuacacug

SEQ ID NO: 756433 - RNA, 22 nt, Human
aggagugggggcgagaaguuaa

SEQ ID NO: 756434 - RNA, 22 nt, Human
ugcacacacucugcauauacuu

SEQ ID NO: 756435 - RNA, 22 nt, Human
uugcauuuuuagaugcuucugu

SEQ ID NO: 756436 - RNA, 22 nt, Human
ugagcagaugucuaacuuuuac

SEQ ID NO: 756437 - RNA, 22 nt, Human
uuucagagucagcuccucucua

SEQ ID NO: 756438 - RNA, 22 nt, Human
cagagaaagaagcccauucauu

SEQ ID NO: 756439 - RNA, 22 nt, Human
uuugacagaaaguuauuauuuu

SEQ ID NO: 756440 - RNA, 21 nt, Human
uugaccaagggugcgugcucc

SEQ ID NO: 756441 - RNA, 22 nt, Human
uagauuucaggagacaaaaugg

SEQ ID NO: 756442 - RNA, 22 nt, Human
agggcuuuugagcgcacgucug

SEQ ID NO: 756443 - RNA, 23 nt, Human
uggcacagaggaccaugcuuugc

SEQ ID NO: 756444 - RNA, 22 nt, Human
ggaaacugcuuacacuagaggg

SEQ ID NO: 756445 - RNA, 22 nt, Human
aguucuguggcugugcccugua

SEQ ID NO: 756446 - RNA, 22 nt, Human
ucuggcaggguguguauuuaca

SEQ ID NO: 756447 - RNA, 22 nt, Human
aggaagagcccgggugacauaa

SEQ ID NO: 756448 - RNA, 22 nt, Human
ugcauuccacauaaagcgauaa

SEQ ID NO: 756449 - RNA, 19 nt, Human
uggcagcauugguaccuug

SEQ ID NO: 756450 - RNA, 22 nt, Human
agcagcaggauuuucguuggga

SEQ ID NO: 756451 - RNA, 22 nt, Human
ugaaagcugaggacaggagggu

SEQ ID NO: 756452 - RNA, 22 nt, Human
auucucagcuuucaaauagaca

SEQ ID NO: 756453 - RNA, 22 nt, Human
cucaggcugucuaauggauuag

SEQ ID NO: 756454 - RNA, 22 nt, Human
agguuaguaugacacgguuaua

SEQ ID NO: 756455 - RNA, 22 nt, Human
aggcacaggaggugguaagaag

SEQ ID NO: 756456 - RNA, 22 nt, Human
uggccacacugcccccacuggg

SEQ ID NO: 756457 - RNA, 22 nt, Human
gucuuuauauuuacuaaagaau

SEQ ID NO: 756458 - RNA, 22 nt, Human
aaaauacuguggaguguugaaa

SEQ ID NO: 756459 - RNA, 22 nt, Human
cugaggccguuggugggccuua

SEQ ID NO: 756460 - RNA, 22 nt, Human
uccagugcuggaccagagcacc

SEQ ID NO: 756461 - RNA, 22 nt, Human
cgcugccuucaucccacgccua

SEQ ID NO: 756462 - RNA, 16 nt, Human
aggagcuggguaggag

SEQ ID NO: 756463 - RNA, 22 nt, Human
cuguccuaugaguacucacuag

SEQ ID NO: 756464 - RNA, 22 nt, Human
caugcaggugaccagguguggg

SEQ ID NO: 756465 - RNA, 22 nt, Human
gugcacacaagcaaugcacuua

SEQ ID NO: 756466 - RNA, 22 nt, Human
cagggggcuguggcuguccagu

SEQ ID NO: 756467 - RNA, 22 nt, Human
acucucugugauggaggccagc

SEQ ID NO: 756468 - RNA, 22 nt, Human
uguggcaggaugcggaagaugc

SEQ ID NO: 756469 - RNA, 22 nt, Human
uucuugcaggucacucacugag

SEQ ID NO: 756470 - RNA, 22 nt, Human
cacaaaguggguggaaaacuaa

SEQ ID NO: 756471 - RNA, 22 nt, Human
acuacuuugggccauuuguuua

SEQ ID NO: 756472 - RNA, 22 nt, Human
acgaguauguuuguauuuucuu

SEQ ID NO: 756473 - RNA, 22 nt, Human
ugcacacauguauguauaugug

SEQ ID NO: 756474 - RNA, 22 nt, Human
uuucugcaacgagucuuugacu

SEQ ID NO: 756475 - RNA, 22 nt, Human
cucugcagaggcccaaggcuga

SEQ ID NO: 756476 - RNA, 22 nt, Human
agcaucuggugagggccuaguu

SEQ ID NO: 756477 - RNA, 19 nt, Human
ugccagagauacucccaga

SEQ ID NO: 756478 - RNA, 22 nt, Human
gcugagagugggugcagugcuu

SEQ ID NO: 756479 - RNA, 20 nt, Human
agcaugcagccagagccaac

SEQ ID NO: 756480 - RNA, 22 nt, Human
cacagguuugacaaggauaaaa

SEQ ID NO: 756481 - RNA, 22 nt, Human
agcaguuaugugucucuugacu

SEQ ID NO: 756482 - RNA, 19 nt, Human
acucaagucuaaugaaauc

SEQ ID NO: 756483 - RNA, 22 nt, Human
agcagcauguaugagggugaac

SEQ ID NO: 756484 - RNA, 22 nt, Human
aauaaauguuuguuggauguuu

SEQ ID NO: 756485 - RNA, 22 nt, Human
uuagagucaaaauggcauguua

SEQ ID NO: 756486 - RNA, 22 nt, Human
gcauggaucuaagaggucaagg

SEQ ID NO: 756487 - RNA, 22 nt, Human
uugaaaguaauaacuuuguuca

SEQ ID NO: 756488 - RNA, 21 nt, Human
ucagcaaaauaagcaaaugga

SEQ ID NO: 756489 - RNA, 22 nt, Human
cagaggcucagauggcccuggc

SEQ ID NO: 756490 - RNA, 22 nt, Human
ugggacugcucuugcugggguc

SEQ ID NO: 756491 - RNA, 22 nt, Human
gggcugugccucaggugggguc

SEQ ID NO: 756492 - RNA, 22 nt, Human
uugaagcauuucuuugagcuuc

SEQ ID NO: 756493 - RNA, 22 nt, Human
uaacugaagcuggaagcgcugg

SEQ ID NO: 756494 - RNA, 22 nt, Human
uaauuuacucagauguucaauc

SEQ ID NO: 756495 - RNA, 19 nt, Human
ucuuccagcaucugggggc

SEQ ID NO: 756496 - RNA, 22 nt, Human
ggggugagcugggccugugccu

SEQ ID NO: 756497 - RNA, 22 nt, Human
uccaguggagugugggggugaa

SEQ ID NO: 756498 - RNA, 22 nt, Human
ucagcaggcacggacaggcugc

SEQ ID NO: 756499 - RNA, 16 nt, Human
uguaugaacgucucca

SEQ ID NO: 756500 - RNA, 22 nt, Human
uuagauaacaguagaauaucaa

SEQ ID NO: 756501 - RNA, 22 nt, Human
ugguccuggucaucugggcugg

SEQ ID NO: 756502 - RNA, 21 nt, Human
uuacuaaacaaaacaugcagg

SEQ ID NO: 756503 - RNA, 22 nt, Human
ugggccuguugccugaguccau

SEQ ID NO: 756504 - RNA, 22 nt, Human
cucugggugggcagcagaugga

SEQ ID NO: 756505 - RNA, 22 nt, Human
uuucuaaggugagguagaaaau

SEQ ID NO: 756506 - RNA, 22 nt, Human
gaacugaguuuucugccuggac

SEQ ID NO: 756507 - RNA, 20 nt, Human
guggcagugguggcagcagu

SEQ ID NO: 756508 - RNA, 22 nt, Human
acagaugaauuuauggauggaa

SEQ ID NO: 756509 - RNA, 22 nt, Human
uacacaucucugucaguaguga

SEQ ID NO: 756510 - RNA, 22 nt, Human
aaagccaucuguauuaagugaa

SEQ ID NO: 756511 - RNA, 21 nt, Human
cucaggauggcggccuggugg

SEQ ID NO: 756512 - RNA, 22 nt, Human
uucacagcuccuuuuacucaac

SEQ ID NO: 756513 - RNA, 22 nt, Human
acuugggagggugugggcagcu

SEQ ID NO: 756514 - RNA, 22 nt, Human
uuccuggugguggugacagcac

SEQ ID NO: 756515 - RNA, 22 nt, Human
aaagucaucuguccuaggcucu

SEQ ID NO: 756516 - RNA, 22 nt, Human
aagcuggauguaggaucccccu

SEQ ID NO: 756517 - RNA, 21 nt, Human
ugagagccuccaaccggcuac

SEQ ID NO: 756518 - RNA, 22 nt, Human
augcugacagacuauuaacuau

SEQ ID NO: 756519 - RNA, 22 nt, Human
auguuucagggugauagaaggu

SEQ ID NO: 756520 - RNA, 22 nt, Human
cacugaaccguaaaugauuuag

SEQ ID NO: 756521 - RNA, 22 nt, Human
uguuccaucaguuuuugguuga

SEQ ID NO: 756522 - RNA, 22 nt, Human
uaagaugucuaagaggagaugc

SEQ ID NO: 756523 - RNA, 22 nt, Human
gggccacacagggcagcucccu

SEQ ID NO: 756524 - RNA, 22 nt, Human
cgucccaguuccagccgcgcug

SEQ ID NO: 756525 - RNA, 22 nt, Human
acuguggggugcgaggcaguga

SEQ ID NO: 756526 - RNA, 22 nt, Human
ugggccuccugcccuggccuag

SEQ ID NO: 756527 - RNA, 21 nt, Human
cugccuugaaugguacuggga

SEQ ID NO: 756528 - RNA, 22 nt, Human
uggcuucucgccugucaucccg

SEQ ID NO: 756529 - RNA, 22 nt, Human
aagugcuuggagcauaccuguu

SEQ ID NO: 756530 - RNA, 22 nt, Human
uaaggaagucacaagaaucgcu

SEQ ID NO: 756531 - RNA, 22 nt, Human
aucauacacucacauaaacaga

SEQ ID NO: 756532 - RNA, 22 nt, Human
acaugaagcaagaaagaugcua

SEQ ID NO: 756533 - RNA, 22 nt, Human
uacugaaauagcacucugaugc

SEQ ID NO: 756534 - RNA, 22 nt, Human
augcacaacaguggcugccuug

SEQ ID NO: 756535 - RNA, 22 nt, Human
uuucugcuugagagaauugcug

SEQ ID NO: 756536 - RNA, 22 nt, Human
ccugguggcuucuggguggacg

SEQ ID NO: 756537 - RNA, 22 nt, Human
ugaaggcuugacugaggcagga

SEQ ID NO: 756538 - RNA, 17 nt, Human
gucauucucagaaaaug

SEQ ID NO: 756539 - RNA, 22 nt, Human
cugucagaggcucucuguugcc

SEQ ID NO: 756540 - RNA, 22 nt, Human
ucccagccacaguuuccaccug

SEQ ID NO: 756541 - RNA, 22 nt, Human
ugccucaguuucuccauaugaa

SEQ ID NO: 756542 - RNA, 23 nt, Human
ucuuuccucagcacacaccaaga

SEQ ID NO: 756543 - RNA, 22 nt, Human
aagcaauaagccagauuuggau

SEQ ID NO: 756544 - RNA, 22 nt, Human
cucagaaaaccucuuucuugau

SEQ ID NO: 756545 - RNA, 22 nt, Human
acugugggucccagcugugucu

SEQ ID NO: 756546 - RNA, 22 nt, Human
cagcccugugcggagggcccug

SEQ ID NO: 756547 - RNA, 22 nt, Human
uuucacagagaaauauaacagg

SEQ ID NO: 756548 - RNA, 22 nt, Human
augcauaagugcagcagauuug

SEQ ID NO: 756549 - RNA, 22 nt, Human
aucacauucuuucaaagcaguc

SEQ ID NO: 756550 - RNA, 22 nt, Human
acccuggagcaauaaucccugg

SEQ ID NO: 756551 - RNA, 22 nt, Human
ucccagugcugcuaaagaggua

SEQ ID NO: 756552 - RNA, 22 nt, Human
ucaguuaagaggccacggcagu

SEQ ID NO: 756553 - RNA, 22 nt, Human
cuauugaauagcccaaaucauu

SEQ ID NO: 756554 - RNA, 22 nt, Human
gccuaaggauaugcuuugcuug

SEQ ID NO: 756555 - RNA, 22 nt, Human
aagggcuguaagccaaguaaag

SEQ ID NO: 756556 - RNA, 21 nt, Human
gcauuccuaggagguaagcau

SEQ ID NO: 756557 - RNA, 22 nt, Human
acacauuuucaacacugucaag

SEQ ID NO: 756558 - RNA, 22 nt, Human
aguggucuccccaguagaauaa

SEQ ID NO: 756559 - RNA, 22 nt, Human
auaacuuagaguaggcaaaagu

SEQ ID NO: 756560 - RNA, 22 nt, Human
uuagcaauaugaaugcauuugc

SEQ ID NO: 756561 - RNA, 22 nt, Human
uauugcuuucaguugcuuugag

SEQ ID NO: 756562 - RNA, 22 nt, Human
ucugugccaucagucuccagag

SEQ ID NO: 756563 - RNA, 21 nt, Human
aacuacaguuguuccuucauu

SEQ ID NO: 756564 - RNA, 19 nt, Human
cugugagucuuguggccuc

SEQ ID NO: 756565 - RNA, 22 nt, Human
acagagcuguacaugugccaug

SEQ ID NO: 756566 - RNA, 22 nt, Human
cugcugccaagggugccacagg

SEQ ID NO: 756567 - RNA, 22 nt, Human
uuauucacucauuuaacauuau

SEQ ID NO: 756568 - RNA, 22 nt, Human
cugccucugguuuuggucccug

SEQ ID NO: 756569 - RNA, 22 nt, Human
uaacuuguguuacauuacucuu

SEQ ID NO: 756570 - RNA, 22 nt, Human
aaaucacuaaguuauagugugg

SEQ ID NO: 756571 - RNA, 22 nt, Human
aaggcuccacccucauggaugc

SEQ ID NO: 756572 - RNA, 22 nt, Human
gaagcaaguggccugauucaga

SEQ ID NO: 756573 - RNA, 22 nt, Human
aggguggcugugaagugcuugg

SEQ ID NO: 756574 - RNA, 22 nt, Human
aggaaacuaaggcucagugaag

SEQ ID NO: 756575 - RNA, 22 nt, Human
uguggggacccaugccaugggc

SEQ ID NO: 756576 - RNA, 22 nt, Human
gccuccaccgaacgcucucuug

SEQ ID NO: 756577 - RNA, 22 nt, Human
acaggaacgaauguacauuguu

SEQ ID NO: 756578 - RNA, 22 nt, Human
uaccugaaccaagcccagcucu

SEQ ID NO: 756579 - RNA, 22 nt, Human
cuuccuuccuuccccgaaaugc

SEQ ID NO: 756580 - RNA, 22 nt, Human
gaagguuuuguuugcaaaucau

SEQ ID NO: 756581 - RNA, 22 nt, Human
acagcagguuauuguuauggca

SEQ ID NO: 756582 - RNA, 22 nt, Human
cacuucaaggaauaucuagaaa

SEQ ID NO: 756583 - RNA, 22 nt, Human
cccagaggugacaucccauucu

SEQ ID NO: 756584 - RNA, 22 nt, Human
ugugaauagugccgcaauaaac

SEQ ID NO: 756585 - RNA, 22 nt, Human
gaaugcagauggcugguguaug

SEQ ID NO: 756586 - RNA, 21 nt, Human
aguuuuauauuauaagcuaaa

SEQ ID NO: 756587 - RNA, 20 nt, Human
cauuugaaucuccauucugc

SEQ ID NO: 756588 - RNA, 21 nt, Human
auccuugaucagaagagugcu

SEQ ID NO: 756589 - RNA, 22 nt, Human
ugcauuaagaauuucugaggau

SEQ ID NO: 756590 - RNA, 22 nt, Human
acucucugagcuaccaggugag

SEQ ID NO: 756591 - RNA, 22 nt, Human
aaucauuguugucguuccuaga

SEQ ID NO: 756592 - RNA, 22 nt, Human
uugucauugggguuauuuguua

SEQ ID NO: 756593 - RNA, 22 nt, Human
cagacacugcagcagucuccca

SEQ ID NO: 756594 - RNA, 22 nt, Human
cagagucagagcuccauggagu

SEQ ID NO: 756595 - RNA, 19 nt, Human
augcuuuauguuauuucuu

SEQ ID NO: 756596 - RNA, 22 nt, Human
acacuguuccugaaauuguuau

SEQ ID NO: 756597 - RNA, 22 nt, Human
gggcacauguaaagcuggagaa

SEQ ID NO: 756598 - RNA, 22 nt, Human
ugcaaacaggcauuucacaaac

SEQ ID NO: 756599 - RNA, 22 nt, Human
cucagaggguugaaggugcucu

SEQ ID NO: 756600 - RNA, 22 nt, Human
caaggcugcuucagacuaguga

SEQ ID NO: 756601 - RNA, 22 nt, Human
aggcauggcuuuaggcaggcgu

SEQ ID NO: 756602 - RNA, 22 nt, Human
aggcaguuguugcugagcagcu

SEQ ID NO: 756603 - RNA, 22 nt, Human
auguguaaaaagugcuuaauau

SEQ ID NO: 756604 - RNA, 22 nt, Human
gcuggcagagagcuggugagga

SEQ ID NO: 756605 - RNA, 22 nt, Human
gcuuggcuuugucuuguucacu

SEQ ID NO: 756606 - RNA, 21 nt, Human
ccagaagcugcuugcaggcua

SEQ ID NO: 756607 - RNA, 22 nt, Human
gcgagggcacgcgguugaaggc

SEQ ID NO: 756608 - RNA, 22 nt, Human
cugcucggcgcgcauggcugcc

SEQ ID NO: 756609 - RNA, 22 nt, Human
gcauucuuguuuuuccuacccu

SEQ ID NO: 756610 - RNA, 22 nt, Human
gugcugagcugcagaugcgcuc

SEQ ID NO: 756611 - RNA, 22 nt, Human
gggcccugccuaaggaacacac

SEQ ID NO: 756612 - RNA, 20 nt, Human
uccugaauuuccuuucugcu

SEQ ID NO: 756613 - RNA, 22 nt, Human
uggcucagagagggagugugga

SEQ ID NO: 756614 - RNA, 22 nt, Human
cagggcggggucugccggcccu

SEQ ID NO: 756615 - RNA, 22 nt, Human
aagcagccucauuugugguaag

SEQ ID NO: 756616 - RNA, 22 nt, Human
ucaagaagauaaugucuagggu

SEQ ID NO: 756617 - RNA, 23 nt, Human
agguggccuuugccucuuucucu

SEQ ID NO: 756618 - RNA, 22 nt, Human
uagagguguugacgccaaggua

SEQ ID NO: 756619 - RNA, 22 nt, Human
gaguggcauaugugccugugaa

SEQ ID NO: 756620 - RNA, 22 nt, Human
cauacaagcguucaauagaugu

SEQ ID NO: 756621 - RNA, 22 nt, Human
acagagccacuuuggugccuac

SEQ ID NO: 756622 - RNA, 22 nt, Human
ucccuguggcuaagacaugaca

SEQ ID NO: 756623 - RNA, 22 nt, Human
aaguauuucguucugaaaaagu

SEQ ID NO: 756624 - RNA, 22 nt, Human
gaggagacggggugccuggagc

SEQ ID NO: 756625 - RNA, 22 nt, Human
auccuuuaaguuaauaaaauuc

SEQ ID NO: 756626 - RNA, 22 nt, Human
agaaggaaggaagcauucuguu

SEQ ID NO: 756627 - RNA, 22 nt, Human
guauacaacuauuguuggguaa

SEQ ID NO: 756628 - RNA, 22 nt, Human
uucuggaagcugcagguggccg

SEQ ID NO: 756629 - RNA, 22 nt, Human
augggcaggcacuggcucucag

SEQ ID NO: 756630 - RNA, 22 nt, Human
caggagccccaggcugacaaua

SEQ ID NO: 756631 - RNA, 22 nt, Human
agcagagccaggucucucugua

SEQ ID NO: 756632 - RNA, 20 nt, Human
gcagcagugcaaguccucuu

SEQ ID NO: 756633 - RNA, 21 nt, Human
cugcaucucauagaacauguc

SEQ ID NO: 756634 - RNA, 22 nt, Human
auagaugguauuuagacuagcg

SEQ ID NO: 756635 - RNA, 22 nt, Human
cuuuccuggcuggcaguugugg

SEQ ID NO: 756636 - RNA, 22 nt, Human
ccuggcucugagguaugccugg

SEQ ID NO: 756637 - RNA, 22 nt, Human
cacuaauuccaucuccuuuucc

SEQ ID NO: 756638 - RNA, 22 nt, Human
aguagggagaccggaggccgcc

SEQ ID NO: 756639 - RNA, 22 nt, Human
cugggcacacucugcuccagcu

SEQ ID NO: 756640 - RNA, 22 nt, Human
ugaguguauaucaggagagagc

SEQ ID NO: 756641 - RNA, 20 nt, Human
ucaggaugugcugagugaag

SEQ ID NO: 756642 - RNA, 22 nt, Human
agcuggaagauccugguuuugu

SEQ ID NO: 756643 - RNA, 22 nt, Human
agagacuggcuucuaaaauggc

SEQ ID NO: 756644 - RNA, 22 nt, Human
acugggaacaaggugcucagcg

SEQ ID NO: 756645 - RNA, 22 nt, Human
ucccuggagauaacuucuggga

SEQ ID NO: 756646 - RNA, 22 nt, Human
ggaaaugguggaggaaggcuua

SEQ ID NO: 756647 - RNA, 22 nt, Human
agcugcugggaccccagaucca

SEQ ID NO: 756648 - RNA, 22 nt, Human
cuauuagaaagcaucuucuaua

SEQ ID NO: 756649 - RNA, 22 nt, Human
uucuccagccuauuggccuauc

SEQ ID NO: 756650 - RNA, 22 nt, Human
ucaguguguucaauuggauagg

SEQ ID NO: 756651 - RNA, 22 nt, Human
ucagugcacagagauuuuuguu

SEQ ID NO: 756652 - RNA, 22 nt, Human
gccuugccgcucagcagugggg

SEQ ID NO: 756653 - RNA, 22 nt, Human
cuugcuugccaugggcuugggc

SEQ ID NO: 756654 - RNA, 22 nt, Human
ugccagggccauagggagucua

SEQ ID NO: 756655 - RNA, 18 nt, Human
ccugccagucuggagcag

SEQ ID NO: 756656 - RNA, 22 nt, Human
aaaacacacuggaccaauuuaa

SEQ ID NO: 756657 - RNA, 22 nt, Human
uggcuucccauagcuugcuagu

SEQ ID NO: 756658 - RNA, 22 nt, Human
uuaaauagcucuuguagaagaa

SEQ ID NO: 756659 - RNA, 22 nt, Human
ccuuuuauauggcucaucacag

SEQ ID NO: 756660 - RNA, 22 nt, Human
ccugaguguaauaaugaaggca

SEQ ID NO: 756661 - RNA, 22 nt, Human
ugaggaagggugugacggcacc

SEQ ID NO: 756662 - RNA, 22 nt, Human
agcacuuuaagcaacagaucaa

SEQ ID NO: 756663 - RNA, 22 nt, Human
cuucuggaggacacuggcccca

SEQ ID NO: 756664 - RNA, 22 nt, Human
gagaagaaauagaaucacauuu

SEQ ID NO: 756665 - RNA, 22 nt, Human
ccagcaggguugguuucuucug

SEQ ID NO: 756666 - RNA, 22 nt, Human
guggccaggagagggugggaca

SEQ ID NO: 756667 - RNA, 22 nt, Human
cugaucccauuggcaguccagu

SEQ ID NO: 756668 - RNA, 22 nt, Human
ccucagccccugaauggagaga

SEQ ID NO: 756669 - RNA, 22 nt, Human
aaaguacaaauguucuagccau

SEQ ID NO: 756670 - RNA, 22 nt, Human
aaaguuuuauaugcugcagcga

SEQ ID NO: 756671 - RNA, 22 nt, Human
gcagaggggaagcugaggaauu

SEQ ID NO: 756672 - RNA, 22 nt, Human
ugggaugaguuguuaggacuga

SEQ ID NO: 756673 - RNA, 19 nt, Human
cugcucccuccuucuggca

SEQ ID NO: 756674 - RNA, 22 nt, Human
gagcuuccagagacaucagagu

SEQ ID NO: 756675 - RNA, 22 nt, Human
auucucugugucugcuuuccca

SEQ ID NO: 756676 - RNA, 22 nt, Human
ugaaugagugaguucagaccuc

SEQ ID NO: 756677 - RNA, 22 nt, Human
cuggcaggcagacuucugcaag

SEQ ID NO: 756678 - RNA, 22 nt, Human
uuacuuuggguccugcuuauaa

SEQ ID NO: 756679 - RNA, 22 nt, Human
ucaagacaucacugugcauuuu

SEQ ID NO: 756680 - RNA, 21 nt, Human
agcagacagcccaagaaaauc

SEQ ID NO: 756681 - RNA, 22 nt, Human
cucuuauagacacucuucuaua

SEQ ID NO: 756682 - RNA, 22 nt, Human
uaagcauuguuucugaggaugg

SEQ ID NO: 756683 - RNA, 22 nt, Human
auguccuucuccucuuaccugc

SEQ ID NO: 756684 - RNA, 22 nt, Human
cucuccagggcaugaguuccac

SEQ ID NO: 756685 - RNA, 23 nt, Human
agcugaggcagaggggcauucuc

SEQ ID NO: 756686 - RNA, 22 nt, Human
uucaggauccccuugaugggcu

SEQ ID NO: 756687 - RNA, 23 nt, Human
augguuuauguuguugugaagca

SEQ ID NO: 756688 - RNA, 22 nt, Human
ucuggggagugccuaaguggaa

SEQ ID NO: 756689 - RNA, 22 nt, Human
ucugggagguggcagggugcau

SEQ ID NO: 756690 - RNA, 22 nt, Human
ucauaauacaaagaguucugca

SEQ ID NO: 756691 - RNA, 22 nt, Human
cucugggcugccuuuuagcucu

SEQ ID NO: 756692 - RNA, 22 nt, Human
aacaguuuaucaaguuuuuaca

SEQ ID NO: 756693 - RNA, 22 nt, Human
ugccugugggugaugauuugau

SEQ ID NO: 756694 - RNA, 22 nt, Human
ucccagcacuguaauucuuugg

SEQ ID NO: 756695 - RNA, 22 nt, Human
ucuccugggaggacaaggaagg

SEQ ID NO: 756696 - RNA, 22 nt, Human
uauuucuaagcuguaagucuga

SEQ ID NO: 756697 - RNA, 22 nt, Human
aauuucuucagcucuaaaaugg

SEQ ID NO: 756698 - RNA, 22 nt, Human
cugcaggcauuuauucaugcaa

SEQ ID NO: 756699 - RNA, 22 nt, Human
gcagcgacaggcacuggucagg

SEQ ID NO: 756700 - RNA, 22 nt, Human
agucagggguuggacggggcca

SEQ ID NO: 756701 - RNA, 22 nt, Human
ccugucugcagauaucucaggu

SEQ ID NO: 756702 - RNA, 22 nt, Human
uuuaguaccaucauuugccucu

SEQ ID NO: 756703 - RNA, 22 nt, Human
aggaggcccuagagcucuagag

SEQ ID NO: 756704 - RNA, 18 nt, Human
cccagcuggugggucagu

SEQ ID NO: 756705 - RNA, 22 nt, Human
guuauucuacagucauugaagu

SEQ ID NO: 756706 - RNA, 22 nt, Human
gagggcugccacguugggcgag

SEQ ID NO: 756707 - RNA, 22 nt, Human
ucagugaaccuucuguggcagg

SEQ ID NO: 756708 - RNA, 22 nt, Human
uuuugugauggcauuacauuua

SEQ ID NO: 756709 - RNA, 22 nt, Human
aagguacaccaaaguucaaguu

SEQ ID NO: 756710 - RNA, 22 nt, Human
aauucuaaauguaauuuagaau

SEQ ID NO: 756711 - RNA, 22 nt, Human
aaucuuucguuucuccugucug

SEQ ID NO: 756712 - RNA, 22 nt, Human
ggcuacagacugcauaagggca

SEQ ID NO: 756713 - RNA, 22 nt, Human
acugggcaccaucaugagaugg

SEQ ID NO: 756714 - RNA, 22 nt, Human
cugccuccaggcucaccuugac

SEQ ID NO: 756715 - RNA, 22 nt, Human
cugugccuucugccuggaacau

SEQ ID NO: 756716 - RNA, 22 nt, Human
aguugaaagccuuauuucucug

SEQ ID NO: 756717 - RNA, 22 nt, Human
aaauaggagcuuaagcacuucu

SEQ ID NO: 756718 - RNA, 22 nt, Human
agucacagaaacccaggugugg

SEQ ID NO: 756719 - RNA, 22 nt, Human
gucugugggccaaauacagccc

SEQ ID NO: 756720 - RNA, 22 nt, Human
ucagggacuaggugcugccuga

SEQ ID NO: 756721 - RNA, 22 nt, Human
aaacagcugcaguacacggccu

SEQ ID NO: 756722 - RNA, 22 nt, Human
aaauacagaguuauggaccuca

SEQ ID NO: 756723 - RNA, 21 nt, Human
auaagcaugcugauuacauuu

SEQ ID NO: 756724 - RNA, 22 nt, Human
gucugcuuugucuuucaugaua

SEQ ID NO: 756725 - RNA, 22 nt, Human
ugguccugucucaaggagccuu

SEQ ID NO: 756726 - RNA, 22 nt, Human
gaaucacacucguaagugaguu

SEQ ID NO: 756727 - RNA, 22 nt, Human
ugguccugccccgugcacagag

SEQ ID NO: 756728 - RNA, 22 nt, Human
gucccaggaguugcugggccuu

SEQ ID NO: 756729 - RNA, 22 nt, Human
cugauaauguccugcaguaaau

SEQ ID NO: 756730 - RNA, 22 nt, Human
ugcccaggcuucacccucagag

SEQ ID NO: 756731 - RNA, 22 nt, Human
aacuacaggggguggcaggcgg

SEQ ID NO: 756732 - RNA, 22 nt, Human
agcccugagccagccuggucag

SEQ ID NO: 756733 - RNA, 22 nt, Human
ugaaacauuauagaauauuuau

SEQ ID NO: 756734 - RNA, 17 nt, Human
uguauuuaucaugucag

SEQ ID NO: 756735 - RNA, 22 nt, Human
aacgugcauuaggaccucucca

SEQ ID NO: 756736 - RNA, 18 nt, Human
gcugucugaggucugagg

SEQ ID NO: 756737 - RNA, 22 nt, Human
ucagcucuuccccccagccagg

SEQ ID NO: 756738 - RNA, 22 nt, Human
ugagguaaauagaaaaaccaug

SEQ ID NO: 756739 - RNA, 22 nt, Human
agggcugcuccuccuucaggcc

SEQ ID NO: 756740 - RNA, 22 nt, Human
ccaguguuacggcuugaacuau

SEQ ID NO: 756741 - RNA, 22 nt, Human
uacagaauguuaugaagcauag

SEQ ID NO: 756742 - RNA, 22 nt, Human
gaugucuuugcuguuauccacu

SEQ ID NO: 756743 - RNA, 22 nt, Human
ggagggccccuccagugggcag

SEQ ID NO: 756744 - RNA, 22 nt, Human
aaaugauugucaaaguucuguu

SEQ ID NO: 756745 - RNA, 22 nt, Human
aggauucagaauguaugcagug

SEQ ID NO: 756746 - RNA, 22 nt, Human
aggcgcagaaggccaggggccu

SEQ ID NO: 756747 - RNA, 22 nt, Human
acaugacuuuucucuuccagag

SEQ ID NO: 756748 - RNA, 22 nt, Human
ucucuguagcagcuuccuuccu

SEQ ID NO: 756749 - RNA, 22 nt, Human
agccagaggaacuugaugacug

SEQ ID NO: 756750 - RNA, 22 nt, Human
agagcagucaggcuaggacacu

SEQ ID NO: 756751 - RNA, 22 nt, Human
cagggacagccuugggguggcg

SEQ ID NO: 756752 - RNA, 22 nt, Human
uucucaaagggugguuugcaaa

SEQ ID NO: 756753 - RNA, 22 nt, Human
uguuacagugacuaauguuuua

SEQ ID NO: 756754 - RNA, 22 nt, Human
uccuccugccuuugcuucuugu

SEQ ID NO: 756755 - RNA, 22 nt, Human
uuagggcuuuucugaauaggcc

SEQ ID NO: 756756 - RNA, 22 nt, Human
uggaauagaggugcugauauua

SEQ ID NO: 756757 - RNA, 22 nt, Human
gcucugaggcugugaggugcug

SEQ ID NO: 756758 - RNA, 22 nt, Human
auguggcugguaguugacaacu

SEQ ID NO: 756759 - RNA, 16 nt, Human
ugguggggaggacagc

SEQ ID NO: 756760 - RNA, 22 nt, Human
aacuuuaucggaacagguacuc

SEQ ID NO: 756761 - RNA, 19 nt, Human
cccaguccuuguccugggc

SEQ ID NO: 756762 - RNA, 22 nt, Human
aauguuuugcauuaguuuucua

SEQ ID NO: 756763 - RNA, 22 nt, Human
cccugaguuaguacaguugagu

SEQ ID NO: 756764 - RNA, 22 nt, Human
uccccagcucugugcuuccacu

SEQ ID NO: 756765 - RNA, 22 nt, Human
uucuuucuguccauaaugagac

SEQ ID NO: 756766 - RNA, 22 nt, Human
ucagcaaaauguggcuagugcu

SEQ ID NO: 756767 - RNA, 22 nt, Human
uccagguagauuuauuccagcc

SEQ ID NO: 756768 - RNA, 22 nt, Human
ugcaauaacuacuuuaauguug

SEQ ID NO: 756769 - RNA, 22 nt, Human
uguccaguccuuggggugcugu

SEQ ID NO: 756770 - RNA, 22 nt, Human
agacagcauuucuagcaccagg

SEQ ID NO: 756771 - RNA, 22 nt, Human
agcugguaaguggcagagauuc

SEQ ID NO: 756772 - RNA, 22 nt, Human
uugucugucccagcuugugcau

SEQ ID NO: 756773 - RNA, 18 nt, Human
acacacacaccuguguau

SEQ ID NO: 756774 - RNA, 21 nt, Human
ccacauucucauucugacugc

SEQ ID NO: 756775 - RNA, 22 nt, Human
uucagcaccacuuccagagaag

SEQ ID NO: 756776 - RNA, 22 nt, Human
ugcaggcucacccuggagcuga

SEQ ID NO: 756777 - RNA, 22 nt, Human
gcagcuggagaaauaccacccu

SEQ ID NO: 756778 - RNA, 18 nt, Human
gggcaucauucacaaagu

SEQ ID NO: 756779 - RNA, 19 nt, Human
uccuggggaggggcauggc

SEQ ID NO: 756780 - RNA, 22 nt, Human
gagaccaggaaguacagcagcc

SEQ ID NO: 756781 - RNA, 22 nt, Human
uggcagcagccauggaaggccc

SEQ ID NO: 756782 - RNA, 22 nt, Human
gcucugagaggugcagcaguaa

SEQ ID NO: 756783 - RNA, 22 nt, Human
gggagcugaccugcagguuccc

SEQ ID NO: 756784 - RNA, 22 nt, Human
caggcucccuucucggaauucu

SEQ ID NO: 756785 - RNA, 22 nt, Human
auguggcaaugguuagcacugu

SEQ ID NO: 756786 - RNA, 22 nt, Human
ugucucuuggagggucuaguga

SEQ ID NO: 756787 - RNA, 22 nt, Human
aagcuuuagagaugaguuccuu

SEQ ID NO: 756788 - RNA, 22 nt, Human
aggcuagggccauggcugguga

SEQ ID NO: 756789 - RNA, 22 nt, Human
cugggugucaggagacaugaug

SEQ ID NO: 756790 - RNA, 18 nt, Human
cauuaugugguuauagaa

SEQ ID NO: 756791 - RNA, 22 nt, Human
ggcacugaucugauuucccucc

SEQ ID NO: 756792 - RNA, 22 nt, Human
gcuucagaccugaaaggaaaaa

SEQ ID NO: 756793 - RNA, 22 nt, Human
caaaugaaguccaaagggcuua

SEQ ID NO: 756794 - RNA, 22 nt, Human
gagggugcugugccaagaugac

SEQ ID NO: 756795 - RNA, 19 nt, Human
ccaggaccuuuccaggguc

SEQ ID NO: 756796 - RNA, 22 nt, Human
uagcugagaggccaauugaacu

SEQ ID NO: 756797 - RNA, 22 nt, Human
cagggcuucgugucucagugcu

SEQ ID NO: 756798 - RNA, 22 nt, Human
aggcuucuggggcaccgagcga

SEQ ID NO: 756799 - RNA, 22 nt, Human
acaguguuuuaugagaauuguu

SEQ ID NO: 756800 - RNA, 22 nt, Human
augaaugaagaacaucugugcc

SEQ ID NO: 756801 - RNA, 22 nt, Human
uaacaugcuaauuugcagauag

SEQ ID NO: 756802 - RNA, 22 nt, Human
agcugccuggagccagaguuga

SEQ ID NO: 756803 - RNA, 20 nt, Human
agugcauggagggagagggc

SEQ ID NO: 756804 - RNA, 22 nt, Human
gcugucagugaggugagacaug

SEQ ID NO: 756805 - RNA, 22 nt, Human
gggggggucuucagaccucaga

SEQ ID NO: 756806 - RNA, 22 nt, Human
cagggccauuggaacaaagagg

SEQ ID NO: 756807 - RNA, 22 nt, Human
aguguacaucagaacauaucaa

SEQ ID NO: 756808 - RNA, 22 nt, Human
uuggaacaaucacauccuugcu

SEQ ID NO: 756809 - RNA, 22 nt, Human
acucuggguccugccauucacu

SEQ ID NO: 756810 - RNA, 22 nt, Human
ugcaagagcccagggccaggaa

SEQ ID NO: 756811 - RNA, 22 nt, Human
uugguuccuucugaaaguauug

SEQ ID NO: 756812 - RNA, 22 nt, Human
ugugaaaggagccauagacagu

SEQ ID NO: 756813 - RNA, 22 nt, Human
uuguacaaauaggaaccucuga

SEQ ID NO: 756814 - RNA, 22 nt, Human
caccuuuugugucugcguuugu

SEQ ID NO: 756815 - RNA, 22 nt, Human
aagccaaaggcuccagugaccu

SEQ ID NO: 756816 - RNA, 23 nt, Human
uuucacauuuacuguuagauggc

SEQ ID NO: 756817 - RNA, 22 nt, Human
ggcauuagcguugaauuuuauu

SEQ ID NO: 756818 - RNA, 22 nt, Human
aaccuagacagggccucuguua

SEQ ID NO: 756819 - RNA, 22 nt, Human
uggcuacagauuugcugacaau

SEQ ID NO: 756820 - RNA, 22 nt, Human
cuguggcuuuggggcggaggac

SEQ ID NO: 756821 - RNA, 22 nt, Human
uguccuguaggaggcagaacaa

SEQ ID NO: 756822 - RNA, 23 nt, Human
uggagguuuuacugaguugagga

SEQ ID NO: 756823 - RNA, 22 nt, Human
ucauuucaugucucaggcacug

SEQ ID NO: 756824 - RNA, 22 nt, Human
uuuaaagugcugcuccuauccu

SEQ ID NO: 756825 - RNA, 22 nt, Human
uucaaggagauuggagucuacu

SEQ ID NO: 756826 - RNA, 22 nt, Human
gcaauaaaauguaaugauuggg

SEQ ID NO: 756827 - RNA, 22 nt, Human
gcuuuaaugaagucacgcaaag

SEQ ID NO: 756828 - RNA, 20 nt, Human
augauucugggcuacacugg

SEQ ID NO: 756829 - RNA, 22 nt, Human
uggcugccuagucccucagccu

SEQ ID NO: 756830 - RNA, 22 nt, Human
ugauaaacagcugaugaagacc

SEQ ID NO: 756831 - RNA, 22 nt, Human
uuugucuuuccccuccucauug

SEQ ID NO: 756832 - RNA, 22 nt, Human
auauauaagcugaugagccaca

SEQ ID NO: 756833 - RNA, 22 nt, Human
aggcauaggacaucuaugucau

SEQ ID NO: 756834 - RNA, 17 nt, Human
ugcucaaauacuuuuga

SEQ ID NO: 756835 - RNA, 22 nt, Human
uuaaaaaccaucuuccuuuccu

SEQ ID NO: 756836 - RNA, 22 nt, Human
agcugccacagagccuggccag

SEQ ID NO: 756837 - RNA, 22 nt, Human
auucagaaauagaaaauuugau

SEQ ID NO: 756838 - RNA, 18 nt, Human
agcaacaggaucccaggg

SEQ ID NO: 756839 - RNA, 22 nt, Human
auggcucagcccauggaagaaa

SEQ ID NO: 756840 - RNA, 22 nt, Human
auguggcuauuuuaauguuaau

SEQ ID NO: 756841 - RNA, 22 nt, Human
ucuacuauguuucuuaaauaga

SEQ ID NO: 756842 - RNA, 22 nt, Human
acacauauauuugcauauacac

SEQ ID NO: 756843 - RNA, 22 nt, Human
acagacauauuuggcccauagc

SEQ ID NO: 756844 - RNA, 22 nt, Human
uccaacuuucuccuccggcuug

SEQ ID NO: 756845 - RNA, 19 nt, Human
ugcuucuggaaugcaaggc

SEQ ID NO: 756846 - RNA, 22 nt, Human
guucacagguucucuuucuaag

SEQ ID NO: 756847 - RNA, 22 nt, Human
agcugcuuuuagggccgggcuc

SEQ ID NO: 756848 - RNA, 22 nt, Human
ucaggcugguggucagauggcu

SEQ ID NO: 756849 - RNA, 22 nt, Human
gggacagacccaugggccaggu

SEQ ID NO: 756850 - RNA, 22 nt, Human
cauuucaaaagaauugccagaa

SEQ ID NO: 756851 - RNA, 22 nt, Human
gaggaggucgcugcugagcccc

SEQ ID NO: 756852 - RNA, 22 nt, Human
gaucugguacaggccugcagcc

SEQ ID NO: 756853 - RNA, 22 nt, Human
uuuguacacaggauguuauaau

SEQ ID NO: 756854 - RNA, 22 nt, Human
agcuguugcagggaucagcacc

SEQ ID NO: 756855 - RNA, 17 nt, Human
caaggccagcaucuuca

SEQ ID NO: 756856 - RNA, 22 nt, Human
augcacuugcguguuugcaaau

SEQ ID NO: 756857 - RNA, 22 nt, Human
cuuccccaaguagagaggggag

SEQ ID NO: 756858 - RNA, 22 nt, Human
cugccaggggccucacaggcca

SEQ ID NO: 756859 - RNA, 22 nt, Human
uguguuaaggcacugauaucug

SEQ ID NO: 756860 - RNA, 22 nt, Human
gcuugccuaucugguggucguu

SEQ ID NO: 756861 - RNA, 23 nt, Human
auacugaaacuguuguuuaucug

SEQ ID NO: 756862 - RNA, 22 nt, Human
gccaaggccucugcaggaugag

SEQ ID NO: 756863 - RNA, 22 nt, Human
ucacucagguucaugucuuugu

SEQ ID NO: 756864 - RNA, 22 nt, Human
uugcccuuguggaguuuacaug

SEQ ID NO: 756865 - RNA, 22 nt, Human
cuuucuuauaccugucagggcc

SEQ ID NO: 756866 - RNA, 22 nt, Human
caugcucacaaaagauggcaaa

SEQ ID NO: 756867 - RNA, 22 nt, Human
gcccacagaggcaccaccaggc

SEQ ID NO: 756868 - RNA, 22 nt, Human
ucucccaggcuggagugcagug

SEQ ID NO: 756869 - RNA, 21 nt, Human
auaugaguuucagauguugcu

SEQ ID NO: 756870 - RNA, 23 nt, Human
ugcagcugccucuggcgggccgg

SEQ ID NO: 756871 - RNA, 22 nt, Human
ugugcagaaacugggaaggaag

SEQ ID NO: 756872 - RNA, 22 nt, Human
uuccaauauuuacaaugcauua

SEQ ID NO: 756873 - RNA, 22 nt, Human
uuccucaguuagugccugaggc

SEQ ID NO: 756874 - RNA, 22 nt, Human
acuguuaauucaaucaacaggu

SEQ ID NO: 756875 - RNA, 22 nt, Human
cuguggaaauaaacaaugcuaa

SEQ ID NO: 756876 - RNA, 22 nt, Human
ugucuuauuaagaccagugacu

SEQ ID NO: 756877 - RNA, 22 nt, Human
gaaaccugggauauauaaguuu

SEQ ID NO: 756878 - RNA, 21 nt, Human
uuucccucauuguguuggcac

SEQ ID NO: 756879 - RNA, 22 nt, Human
caugcaucgaugaaugcguggg

SEQ ID NO: 756880 - RNA, 23 nt, Human
ucucaggacacacaugucuauca

SEQ ID NO: 756881 - RNA, 22 nt, Human
ugucacauuauaugugaggaua

SEQ ID NO: 756882 - RNA, 22 nt, Human
cagcuuccgaccgggggcugca

SEQ ID NO: 756883 - RNA, 20 nt, Human
ggucagccccaccuggcagc

SEQ ID NO: 756884 - RNA, 22 nt, Human
uauuuggauacaaucauuugcu

SEQ ID NO: 756885 - RNA, 22 nt, Human
gggcuaaaugcagaaaugcaga

SEQ ID NO: 756886 - RNA, 22 nt, Human
ucuucucccagggucgcccaag

SEQ ID NO: 756887 - RNA, 22 nt, Human
ucagggacuuacaaaccagaag

SEQ ID NO: 756888 - RNA, 22 nt, Human
ucacaguaguuguucucuguuu

SEQ ID NO: 756889 - RNA, 22 nt, Human
acagcagcuugcgugucugguc

SEQ ID NO: 756890 - RNA, 22 nt, Human
cuuacagugaucaacacaaaga

SEQ ID NO: 756891 - RNA, 22 nt, Human
aaucagaaagaggucauguugc

SEQ ID NO: 756892 - RNA, 22 nt, Human
ugaaagguuaaaaguaguauug

SEQ ID NO: 756893 - RNA, 22 nt, Human
ggaggccacgguuuagcaccga

SEQ ID NO: 756894 - RNA, 22 nt, Human
ucacagaagagcauuaagauga

SEQ ID NO: 756895 - RNA, 22 nt, Human
cugagaaaggaccucaaacagg

SEQ ID NO: 756896 - RNA, 22 nt, Human
agguggccggugccagccgggc

SEQ ID NO: 756897 - RNA, 22 nt, Human
aguagacagacagaacacagcc

SEQ ID NO: 756898 - RNA, 18 nt, Human
agcaguguggcaagcaga

SEQ ID NO: 756899 - RNA, 22 nt, Human
uugacauaagacuuagaguauu

SEQ ID NO: 756900 - RNA, 22 nt, Human
uggaccgcagggaugcccggca

SEQ ID NO: 756901 - RNA, 22 nt, Human
uggcuuucucccccagcuucuc

SEQ ID NO: 756902 - RNA, 22 nt, Human
acagggccauuaucuguucuag

SEQ ID NO: 756903 - RNA, 22 nt, Human
uacagaccaguaguucucagcg

SEQ ID NO: 756904 - RNA, 17 nt, Human
ucuacuccugaaggaag

SEQ ID NO: 756905 - RNA, 22 nt, Human
agcuccagaggcagugaugaag

SEQ ID NO: 756906 - RNA, 22 nt, Human
uaucacacuguuuuaauuacuu

SEQ ID NO: 756907 - RNA, 22 nt, Human
caaugugguggcagaugucagu

SEQ ID NO: 756908 - RNA, 22 nt, Human
gcuucucuggccugcagggcau

SEQ ID NO: 756909 - RNA, 22 nt, Human
ucacaaauuucagcucccugaa

SEQ ID NO: 756910 - RNA, 22 nt, Human
uggauggaucucaagggaauua

SEQ ID NO: 756911 - RNA, 22 nt, Human
ggauggcagacagugaguggcu

SEQ ID NO: 756912 - RNA, 22 nt, Human
agaguuuacagaaauaagcugu

SEQ ID NO: 756913 - RNA, 22 nt, Human
acagccaguccucccacagggu

SEQ ID NO: 756914 - RNA, 22 nt, Human
agaaccuuucuuuagaaauuca

SEQ ID NO: 756915 - RNA, 22 nt, Human
caccacugcuuccugccaucug

SEQ ID NO: 756916 - RNA, 22 nt, Human
caagguuuuggaagauuuucgu

SEQ ID NO: 756917 - RNA, 22 nt, Human
aggcuggcccuacuggcugccu

SEQ ID NO: 756918 - RNA, 22 nt, Human
uccgauaagcaauucuugugcu

SEQ ID NO: 756919 - RNA, 22 nt, Human
ucuacacuguagaauuauaagg

SEQ ID NO: 756920 - RNA, 20 nt, Human
uggccucugagaugccacgg

SEQ ID NO: 756921 - RNA, 22 nt, Human
cccugcagagggaugggggcag

SEQ ID NO: 756922 - RNA, 22 nt, Human
guuaaauucgaugauggauaaa

SEQ ID NO: 756923 - RNA, 22 nt, Human
aauauuaauagaagggguucua

SEQ ID NO: 756924 - RNA, 22 nt, Human
guaaaauagaauaacguggcua

SEQ ID NO: 756925 - RNA, 23 nt, Human
ugcuggaagguccaauuugcuca

SEQ ID NO: 756926 - RNA, 22 nt, Human
aggaugagagauacauggagca

SEQ ID NO: 756927 - RNA, 22 nt, Human
ccagugcuuccaggaauacggu

SEQ ID NO: 756928 - RNA, 22 nt, Human
auuuuguuauaggagcugaaau

SEQ ID NO: 756929 - RNA, 22 nt, Human
gagggccagccugccaagggcc

SEQ ID NO: 756930 - RNA, 22 nt, Human
aauagcaaacagacaugcacaa

SEQ ID NO: 756931 - RNA, 22 nt, Human
aaugaugacaggauaaagaaca

SEQ ID NO: 756932 - RNA, 22 nt, Human
auuccaaagacagaagcagcug

SEQ ID NO: 756933 - RNA, 22 nt, Human
gcaauacaguagguuuauuggu

SEQ ID NO: 756934 - RNA, 22 nt, Human
acccaggagacagguugcagug

SEQ ID NO: 756935 - RNA, 22 nt, Human
cuuggagacaggacaggcagaa

SEQ ID NO: 756936 - RNA, 22 nt, Human
cugcagaggucuugcugauggu

SEQ ID NO: 756937 - RNA, 22 nt, Human
acuagaaccagaggaggcaggu

SEQ ID NO: 756938 - RNA, 22 nt, Human
cuuccaagaugaacagcaagcg

SEQ ID NO: 756939 - RNA, 22 nt, Human
ccugacaguccuuuucuagugu

SEQ ID NO: 756940 - RNA, 22 nt, Human
aaaaauacuucacuucugggug

SEQ ID NO: 756941 - RNA, 22 nt, Human
acauaaauagauuauugggagg

SEQ ID NO: 756942 - RNA, 23 nt, Human
ggaguuggauuguacuugcugcu

SEQ ID NO: 756943 - RNA, 22 nt, Human
cugggcaauaugcugggccugg

SEQ ID NO: 756944 - RNA, 23 nt, Human
agaagcagcuucuggaguaucgg

SEQ ID NO: 756945 - RNA, 22 nt, Human
ucacaucuccauguguuguuca

SEQ ID NO: 756946 - RNA, 22 nt, Human
uguaaacaugcugaggcuggag

SEQ ID NO: 756947 - RNA, 22 nt, Human
uuugaugaaccuauauaauuug

SEQ ID NO: 756948 - RNA, 22 nt, Human
cugcaguaucugcuuuggguag

SEQ ID NO: 756949 - RNA, 22 nt, Human
gucugguauucaauuauuauuu

SEQ ID NO: 756950 - RNA, 23 nt, Human
ugauggaaaugaucugggucugu

SEQ ID NO: 756951 - RNA, 22 nt, Human
cccagggguaaggcgcagcgug

SEQ ID NO: 756952 - RNA, 22 nt, Human
caggccuggcugcagcucgccu

SEQ ID NO: 756953 - RNA, 22 nt, Human
augucccuugucugugaugucu

SEQ ID NO: 756954 - RNA, 22 nt, Human
uuccugagucgccgagucuaug

SEQ ID NO: 756955 - RNA, 22 nt, Human
ucugugcugccauccuguggcc

SEQ ID NO: 756956 - RNA, 22 nt, Human
augucagagcuuccacaauagu

SEQ ID NO: 756957 - RNA, 22 nt, Human
ugugccuuucaucaugcuuuug

SEQ ID NO: 756958 - RNA, 22 nt, Human
acugccugcauccuuaggguag

SEQ ID NO: 756959 - RNA, 22 nt, Human
uggggcucaccuaggcuggaag

SEQ ID NO: 756960 - RNA, 22 nt, Human
gcucagaagauauuugaugcug

SEQ ID NO: 756961 - RNA, 22 nt, Human
cacaaaauaucaagcacuuuua

SEQ ID NO: 756962 - RNA, 22 nt, Human
ggcuccuggggaggugagcuug

SEQ ID NO: 756963 - RNA, 18 nt, Human
uggcuccugccuccugca

SEQ ID NO: 756964 - RNA, 21 nt, Human
acucaucuuuuuggagaccag

SEQ ID NO: 756965 - RNA, 21 nt, Human
gagugggcugagauggggcug

SEQ ID NO: 756966 - RNA, 22 nt, Human
ucaggcagagggagaagccaag

SEQ ID NO: 756967 - RNA, 22 nt, Human
aacuccucacugccucuggcac

SEQ ID NO: 756968 - RNA, 22 nt, Human
cuguuuucuagggcugagguga

SEQ ID NO: 756969 - RNA, 22 nt, Human
ggaaguguuugugcagauggcc

SEQ ID NO: 756970 - RNA, 22 nt, Human
aggcagccauuaccaagggcau

SEQ ID NO: 756971 - RNA, 22 nt, Human
cacaguuuuaucuuauacugau

SEQ ID NO: 756972 - RNA, 22 nt, Human
cagagagagucaaaucuuugcu

SEQ ID NO: 756973 - RNA, 18 nt, Human
cuguugagauguggcuga

SEQ ID NO: 756974 - RNA, 22 nt, Human
agccaaaacaugugaguuuuga

SEQ ID NO: 756975 - RNA, 22 nt, Human
aaacuacacuuugggaccagca

SEQ ID NO: 756976 - RNA, 22 nt, Human
uaguggagaggauguggagaaa

SEQ ID NO: 756977 - RNA, 18 nt, Human
cucaggcagagaagcuuu

SEQ ID NO: 756978 - RNA, 23 nt, Human
auaaggcauaaagguacauugga

SEQ ID NO: 756979 - RNA, 22 nt, Human
cagaucaugaaugacugacaga

SEQ ID NO: 756980 - RNA, 22 nt, Human
ccugaguggccaggcagcugug

SEQ ID NO: 756981 - RNA, 22 nt, Human
ucugcuugcguucugcucccuc

SEQ ID NO: 756982 - RNA, 19 nt, Human
cacuuugcugaacucuucu

SEQ ID NO: 756983 - RNA, 22 nt, Human
caggacagacagaaugccuaac

SEQ ID NO: 756984 - RNA, 22 nt, Human
cagcagcucacucagguggcuc

SEQ ID NO: 756985 - RNA, 22 nt, Human
uucccagaccuguaggaucaga

SEQ ID NO: 756986 - RNA, 20 nt, Human
accagaggaaagagcaguga

SEQ ID NO: 756987 - RNA, 22 nt, Human
uguucacaagcagauguugcuu

SEQ ID NO: 756988 - RNA, 22 nt, Human
ugcccuggcgcugucucuaugg

SEQ ID NO: 756989 - RNA, 22 nt, Human
accagcaccugauaggcaguaa

SEQ ID NO: 756990 - RNA, 22 nt, Human
ugcagagcagcaacugcgugcg

SEQ ID NO: 756991 - RNA, 22 nt, Human
cauaggucacuguacagguuaa

SEQ ID NO: 756992 - RNA, 22 nt, Human
gggugggaugccgcugucucca

SEQ ID NO: 756993 - RNA, 22 nt, Human
agccuggagaagauguguauug

SEQ ID NO: 756994 - RNA, 22 nt, Human
ccugucuggccuuccacggggg

SEQ ID NO: 756995 - RNA, 22 nt, Human
ccugggaacaguggguuggcuc

SEQ ID NO: 756996 - RNA, 22 nt, Human
acaugccagccucagcagcagu

SEQ ID NO: 756997 - RNA, 19 nt, Human
ucaguggagaaaggggaag

SEQ ID NO: 756998 - RNA, 22 nt, Human
acuucauauuguuuccacuaga

SEQ ID NO: 756999 - RNA, 22 nt, Human
ucugaaauauugguaauacuuu

SEQ ID NO: 757000 - RNA, 23 nt, Human
uuacaacaguguccauauuugua

SEQ ID NO: 757001 - RNA, 20 nt, Human
acugagguuagauaacaggu

SEQ ID NO: 757002 - RNA, 22 nt, Human
ucuuucaaaguaacaaccacga

SEQ ID NO: 757003 - RNA, 22 nt, Human
ugagcacauuucacaugacagg

SEQ ID NO: 757004 - RNA, 22 nt, Human
uuuuacuucauuccugacuuca

SEQ ID NO: 757005 - RNA, 22 nt, Human
aguuuccugggagauucuuaca

SEQ ID NO: 757006 - RNA, 22 nt, Human
ucuggcucugaauucacuucug

SEQ ID NO: 757007 - RNA, 22 nt, Human
gacccuggugggcacuggcacc

SEQ ID NO: 757008 - RNA, 22 nt, Human
aaagguuuuguucaucgauuuu

SEQ ID NO: 757009 - RNA, 22 nt, Human
uugaaaggaauacagaggccua

SEQ ID NO: 757010 - RNA, 23 nt, Human
aggaacugcuucauuuuugaaag

SEQ ID NO: 757011 - RNA, 22 nt, Human
acauucuuaacaguuaaaaacu

SEQ ID NO: 757012 - RNA, 22 nt, Human
agggcaauggacuacaaaaggu

SEQ ID NO: 757013 - RNA, 22 nt, Human
aagaaauggcuucaucugagua

SEQ ID NO: 757014 - RNA, 22 nt, Human
uuuguucaauccagacaauagc

SEQ ID NO: 757015 - RNA, 22 nt, Human
aucuuuguuuugaugcagaucu

SEQ ID NO: 757016 - RNA, 22 nt, Human
uuauuauuuuguguacagcaaa

SEQ ID NO: 757017 - RNA, 22 nt, Human
gcagccuguuguaccagccugu

SEQ ID NO: 757018 - RNA, 22 nt, Human
uggcuucaaagguagcauacaa

SEQ ID NO: 757019 - RNA, 22 nt, Human
uuuccuuucucaagagccggca

SEQ ID NO: 757020 - RNA, 22 nt, Human
guucaaccaugauuaggaacug

SEQ ID NO: 757021 - RNA, 21 nt, Human
uaagcauaucagauagacucu

SEQ ID NO: 757022 - RNA, 22 nt, Human
agugaccaaucaugguuagauu

SEQ ID NO: 757023 - RNA, 22 nt, Human
gaaacaaucaucaugugauuug

SEQ ID NO: 757024 - RNA, 22 nt, Human
gacaauguguugaaagggaaaa

SEQ ID NO: 757025 - RNA, 21 nt, Human
ugcagcugacacugguaugcc

SEQ ID NO: 757026 - RNA, 22 nt, Human
aaaguguggcacaagucacauc

SEQ ID NO: 757027 - RNA, 22 nt, Human
aaaaugauauccugacuuuuau

SEQ ID NO: 757028 - RNA, 22 nt, Human
auggguaaagcaggaagagagu

SEQ ID NO: 757029 - RNA, 21 nt, Human
uucaaaguuugccuaaagauu

SEQ ID NO: 757030 - RNA, 22 nt, Human
aauuaccaggauuuuucaguau

SEQ ID NO: 757031 - RNA, 22 nt, Human
guggcaggucccauuggagcag

SEQ ID NO: 757032 - RNA, 22 nt, Human
uccuggguagccuguccaagau

SEQ ID NO: 757033 - RNA, 22 nt, Human
gcucucuggcuaguccaucggg

SEQ ID NO: 757034 - RNA, 22 nt, Human
agcuggugaaccugaggcacag

SEQ ID NO: 757035 - RNA, 22 nt, Human
aaggaggcagaacucacaugga

SEQ ID NO: 757036 - RNA, 22 nt, Human
agaugcuuuccugauauuuaug

SEQ ID NO: 757037 - RNA, 22 nt, Human
uccccaggaaauucugauucuu

SEQ ID NO: 757038 - RNA, 22 nt, Human
ucauuuacgcgccuccuuccuu

SEQ ID NO: 757039 - RNA, 21 nt, Human
uggaucugugaucuggggcac

SEQ ID NO: 757040 - RNA, 22 nt, Human
uucauuuguaacucuguuaggg

SEQ ID NO: 757041 - RNA, 22 nt, Human
gcagcauggaguuguggaauga

SEQ ID NO: 757042 - RNA, 22 nt, Human
agcccagagccccggccauguu

SEQ ID NO: 757043 - RNA, 22 nt, Human
ugagcacagcuuucacuagaaa

SEQ ID NO: 757044 - RNA, 22 nt, Human
ggcaccaggcugggcauaggcc

SEQ ID NO: 757045 - RNA, 22 nt, Human
gcuucagaaaugaacacugucu

SEQ ID NO: 757046 - RNA, 22 nt, Human
aacaguauaugaaauguuagga

SEQ ID NO: 757047 - RNA, 22 nt, Human
aaacucagacacaguaucuguu

SEQ ID NO: 757048 - RNA, 22 nt, Human
aaggcagaggaaggucuaguuu

SEQ ID NO: 757049 - RNA, 22 nt, Human
cagacagaaggcuccuugaggu

SEQ ID NO: 757050 - RNA, 22 nt, Human
uuuaggauauuaauguucagag

SEQ ID NO: 757051 - RNA, 22 nt, Human
auuguucacugugaaucuugau

SEQ ID NO: 757052 - RNA, 22 nt, Human
ugacuauuacggccacgaauuu

SEQ ID NO: 757053 - RNA, 22 nt, Human
gagcuuccuuuuucugcaugac

SEQ ID NO: 757054 - RNA, 22 nt, Human
ucauccuguauccucagaccau

SEQ ID NO: 757055 - RNA, 19 nt, Human
agcccagcuuauuugucag

SEQ ID NO: 757056 - RNA, 22 nt, Human
cucagcaggcacugugccuuac

SEQ ID NO: 757057 - RNA, 22 nt, Human
auuaauuuuaccuuuguaaaca

SEQ ID NO: 757058 - RNA, 22 nt, Human
acuggcugaucaccugccucag

SEQ ID NO: 757059 - RNA, 22 nt, Human
gccacagcuuagaucacagccu

SEQ ID NO: 757060 - RNA, 22 nt, Human
cagcagcugguuauaccugugg

SEQ ID NO: 757061 - RNA, 22 nt, Human
augugcaggauccaggcuccua

SEQ ID NO: 757062 - RNA, 22 nt, Human
ugcagagguguugcugagauaa

SEQ ID NO: 757063 - RNA, 22 nt, Human
cauuucugugacacuuccaucu

SEQ ID NO: 757064 - RNA, 18 nt, Human
gagcugagaagaggaugc

SEQ ID NO: 757065 - RNA, 22 nt, Human
aggucaaguuuagauagaguua

SEQ ID NO: 757066 - RNA, 22 nt, Human
cuggccaggcggccccugcaug

SEQ ID NO: 757067 - RNA, 22 nt, Human
ugugcauguucucauuucuaac

SEQ ID NO: 757068 - RNA, 21 nt, Human
agagcuggccugccaggcccu

SEQ ID NO: 757069 - RNA, 22 nt, Human
agaggccggccgagcccauggg

SEQ ID NO: 757070 - RNA, 22 nt, Human
ucuauacaaguuucacuuugac

SEQ ID NO: 757071 - RNA, 22 nt, Human
aaagcuuuuguuuucguaacug

SEQ ID NO: 757072 - RNA, 23 nt, Human
gaauggcuaagcacauagacuug

SEQ ID NO: 757073 - RNA, 22 nt, Human
gcauuuuaaugagguuuaugag

SEQ ID NO: 757074 - RNA, 22 nt, Human
ggcaggguccacaccugggaaa

SEQ ID NO: 757075 - RNA, 22 nt, Human
auguguguguauauacacacau

SEQ ID NO: 757076 - RNA, 22 nt, Human
ccacaaauuagguuuugcuugu

SEQ ID NO: 757077 - RNA, 21 nt, Human
ugggcagauggcaguguggcu

SEQ ID NO: 757078 - RNA, 22 nt, Human
gcagaggccaggccaccagcaa

SEQ ID NO: 757079 - RNA, 22 nt, Human
cuggcaccaggcaugcugggag

SEQ ID NO: 757080 - RNA, 22 nt, Human
cugggaccaucugugucuacuu

SEQ ID NO: 757081 - RNA, 22 nt, Human
uuagagauugguugacagauuu

SEQ ID NO: 757082 - RNA, 20 nt, Human
aggaugcagggagucugcag

SEQ ID NO: 757083 - RNA, 22 nt, Human
aaacaauguacauuuauaaugc

SEQ ID NO: 757084 - RNA, 22 nt, Human
caccuggacccugggaggaggg

SEQ ID NO: 757085 - RNA, 22 nt, Human
ugcugggccugccccugucagc

SEQ ID NO: 757086 - RNA, 22 nt, Human
gggaacuauuuuaagcacuuga

SEQ ID NO: 757087 - RNA, 22 nt, Human
uucccagaaugaauggauggag

SEQ ID NO: 757088 - RNA, 22 nt, Human
gaugcacaaagcagagggaauc

SEQ ID NO: 757089 - RNA, 22 nt, Human
agcuguggcagcagccguggca

SEQ ID NO: 757090 - RNA, 22 nt, Human
agcuuucuauauaugaguugcu

SEQ ID NO: 757091 - RNA, 22 nt, Human
gcugcuuccuuuccugcugacc

SEQ ID NO: 757092 - RNA, 22 nt, Human
uccucugcuccaggcuggacuu

SEQ ID NO: 757093 - RNA, 22 nt, Human
aacgugcaccaggaggucauga

SEQ ID NO: 757094 - RNA, 22 nt, Human
uugagaagaauguguugaguuu

SEQ ID NO: 757095 - RNA, 22 nt, Human
cuuaggcaagcagagcccaucc

SEQ ID NO: 757096 - RNA, 22 nt, Human
gugccuggacccucuuuccgga

SEQ ID NO: 757097 - RNA, 22 nt, Human
auguauaguggugaugauuaca

SEQ ID NO: 757098 - RNA, 22 nt, Human
gagcaacagggcgaggagaacu

SEQ ID NO: 757099 - RNA, 22 nt, Human
gcgggcagggcacugguccccu

SEQ ID NO: 757100 - RNA, 23 nt, Human
aggugcagcccuggaccugcccc

SEQ ID NO: 757101 - RNA, 22 nt, Human
acagcaagccagcuugucacug

SEQ ID NO: 757102 - RNA, 22 nt, Human
ggccucugcaacuggcuguggc

SEQ ID NO: 757103 - RNA, 23 nt, Human
aaaguugauuugcaguuuaagag

SEQ ID NO: 757104 - RNA, 22 nt, Human
ccagagucauuuugagucauaa

SEQ ID NO: 757105 - RNA, 22 nt, Human
uggcucugagacacaggcucuc

SEQ ID NO: 757106 - RNA, 22 nt, Human
gcucccagcaauugaggcagcc

SEQ ID NO: 757107 - RNA, 22 nt, Human
uuuguaacaaguugaucuggua

SEQ ID NO: 757108 - RNA, 21 nt, Human
uuuuuucuugcgugaggccug

SEQ ID NO: 757109 - RNA, 22 nt, Human
auaaacugugcuggaugaugag

SEQ ID NO: 757110 - RNA, 22 nt, Human
gcaguaucuaugugauggguug

SEQ ID NO: 757111 - RNA, 22 nt, Human
gaaauucaaaaugucaguauag

SEQ ID NO: 757112 - RNA, 22 nt, Human
uggcucauucuuuagaauauac

SEQ ID NO: 757113 - RNA, 22 nt, Human
agccaaucuacaacaaaggaua

SEQ ID NO: 757114 - RNA, 22 nt, Human
agcuccagcccuaguacagcug

SEQ ID NO: 757115 - RNA, 22 nt, Human
aggaggccauucucucaguagc

SEQ ID NO: 757116 - RNA, 22 nt, Human
uagaaacauauaggauggcagg

SEQ ID NO: 757117 - RNA, 22 nt, Human
accuuaaaacugacacauggag

SEQ ID NO: 757118 - RNA, 22 nt, Human
uaaggaauagugcuaugaaaaa

SEQ ID NO: 757119 - RNA, 20 nt, Human
aggcugccuaaggcucugca

SEQ ID NO: 757120 - RNA, 22 nt, Human
gcuggccugcgagggcaggcug

SEQ ID NO: 757121 - RNA, 22 nt, Human
cugucuguguggacacggcugc

SEQ ID NO: 757122 - RNA, 22 nt, Human
augcagaauugcuaaguaucug

SEQ ID NO: 757123 - RNA, 22 nt, Human
ggcgggaggcugaggaguuggu

SEQ ID NO: 757124 - RNA, 22 nt, Human
agagacaggaauggcauuaaga

SEQ ID NO: 757125 - RNA, 22 nt, Human
gcccacaccauuuauucuuugu

SEQ ID NO: 757126 - RNA, 22 nt, Human
gcugaauagaagucuucaaagg

SEQ ID NO: 757127 - RNA, 22 nt, Human
agacagcauuucccggaaccgc

SEQ ID NO: 757128 - RNA, 22 nt, Human
agugggcugguggcagggagaa

SEQ ID NO: 757129 - RNA, 23 nt, Human
gcauucugaugguucucugugau

SEQ ID NO: 757130 - RNA, 22 nt, Human
ccagcuggagcucgcagauagg

SEQ ID NO: 757131 - RNA, 22 nt, Human
uccagugguaguaaagaggucu

SEQ ID NO: 757132 - RNA, 22 nt, Human
ccuuuucugaaccacuuaaaua

SEQ ID NO: 757133 - RNA, 22 nt, Human
uucaaugauuuuuagggaucau

SEQ ID NO: 757134 - RNA, 22 nt, Human
ccagcugcaggggagcagugga

SEQ ID NO: 757135 - RNA, 22 nt, Human
uaaagcagccagggucuaagcc

SEQ ID NO: 757136 - RNA, 22 nt, Human
uugugauaaaacauuagacauu

SEQ ID NO: 757137 - RNA, 22 nt, Human
ggcuggcuccaccuagguagcu

SEQ ID NO: 757138 - RNA, 22 nt, Human
aaagaucagucugaagcaacau

SEQ ID NO: 757139 - RNA, 22 nt, Human
uugguuuaggaacuggcuugga

SEQ ID NO: 757140 - RNA, 22 nt, Human
agauacauugaguuuccuccug

SEQ ID NO: 757141 - RNA, 22 nt, Human
ucaggcuguggcuucaguucuu

SEQ ID NO: 757142 - RNA, 22 nt, Human
cacauucagguggcauguuaga

SEQ ID NO: 757143 - RNA, 22 nt, Human
ccagcagcauccugcagcacuu

SEQ ID NO: 757144 - RNA, 22 nt, Human
ucuuuuagcucugcaaggaaag

SEQ ID NO: 757145 - RNA, 22 nt, Human
uggccagcccucuucccacacu

SEQ ID NO: 757146 - RNA, 22 nt, Human
ggcauggcuggguucuggugag

SEQ ID NO: 757147 - RNA, 22 nt, Human
gacaguauuuaacuaguucauu

SEQ ID NO: 757148 - RNA, 22 nt, Human
ucuccaagaaaagaucucagcu

SEQ ID NO: 757149 - RNA, 22 nt, Human
ugucuacuccugugcuagcucc

SEQ ID NO: 757150 - RNA, 22 nt, Human
cucccugaaauucagaugccuc

SEQ ID NO: 757151 - RNA, 22 nt, Human
aagacacacacauaugcugagu

SEQ ID NO: 757152 - RNA, 22 nt, Human
uaaaugaagaaauggagauugu

SEQ ID NO: 757153 - RNA, 22 nt, Human
aggagaaggaagugcaucacua

SEQ ID NO: 757154 - RNA, 22 nt, Human
augcaaagcacacacagaaucc

SEQ ID NO: 757155 - RNA, 22 nt, Human
ucuuuuaaccuaacuagcuugg

SEQ ID NO: 757156 - RNA, 22 nt, Human
uauauacaagguagguuuaggu

SEQ ID NO: 757157 - RNA, 21 nt, Human
acugucauuugcuuagggagg

SEQ ID NO: 757158 - RNA, 19 nt, Human
caauauauagugaguggau

SEQ ID NO: 757159 - RNA, 22 nt, Human
gcaggaugccagggcagcagcg

SEQ ID NO: 757160 - RNA, 22 nt, Human
auucuccacuguaagguuauua

SEQ ID NO: 757161 - RNA, 22 nt, Human
guggcaucaagauuuagauuca

SEQ ID NO: 757162 - RNA, 22 nt, Human
uuagcuuuggauugcauuuagu

SEQ ID NO: 757163 - RNA, 22 nt, Human
agucugucucugcuaaucacua

SEQ ID NO: 757164 - RNA, 21 nt, Human
ucuuggccuaaguucacugaa

SEQ ID NO: 757165 - RNA, 22 nt, Human
caaauguguaaggaaguguuag

SEQ ID NO: 757166 - RNA, 22 nt, Human
uggggggcacuucagcacaaug

SEQ ID NO: 757167 - RNA, 22 nt, Human
gaaugcacucacccaucacuca

SEQ ID NO: 757168 - RNA, 20 nt, Human
aauuuuacuguccuauagag

SEQ ID NO: 757169 - RNA, 22 nt, Human
aacuuggcuaccagcguuaaau

SEQ ID NO: 757170 - RNA, 20 nt, Human
ucagagaagggacugagauu

SEQ ID NO: 757171 - RNA, 22 nt, Human
caguucaaaguuaagcagcagu

SEQ ID NO: 757172 - RNA, 22 nt, Human
gcaggagugugucuaauacuca

SEQ ID NO: 757173 - RNA, 22 nt, Human
gauauucauaggcagguauuua

SEQ ID NO: 757174 - RNA, 22 nt, Human
gagcugcagcggcugacgcaac

SEQ ID NO: 757175 - RNA, 22 nt, Human
cugugggccuagucuggccuag

SEQ ID NO: 757176 - RNA, 22 nt, Human
gcaagcugcucuuauguggagg

SEQ ID NO: 757177 - RNA, 22 nt, Human
aaguccagguccucauuccauc

SEQ ID NO: 757178 - RNA, 20 nt, Human
uagauuucauacuucucuuu

SEQ ID NO: 757179 - RNA, 22 nt, Human
auguggcucauuguuugcuuac

SEQ ID NO: 757180 - RNA, 22 nt, Human
acagcucuguguauugucaucu

SEQ ID NO: 757181 - RNA, 22 nt, Human
ugucacauaauuuaucuguagg

SEQ ID NO: 757182 - RNA, 22 nt, Human
cagcugagagacaaugagucau

SEQ ID NO: 757183 - RNA, 22 nt, Human
gcagaggcucuuuaaugcuuag

SEQ ID NO: 757184 - RNA, 22 nt, Human
auugaacuauaauuaugauuug

SEQ ID NO: 757185 - RNA, 22 nt, Human
ugcugccuugaccuccugggcu

SEQ ID NO: 757186 - RNA, 22 nt, Human
gagcaggacgugggaaugggaa

SEQ ID NO: 757187 - RNA, 22 nt, Human
aaaguuguaauggaagaaaugc

SEQ ID NO: 757188 - RNA, 22 nt, Human
ucucaaauggacaauauugugg

SEQ ID NO: 757189 - RNA, 22 nt, Human
ccagcugucacucagaaaggcc

SEQ ID NO: 757190 - RNA, 22 nt, Human
ggucuggacccuccuggagugg

SEQ ID NO: 757191 - RNA, 22 nt, Human
uucaacugggcggaucugagaa

SEQ ID NO: 757192 - RNA, 22 nt, Human
ggcaggugaccuggccucccag

SEQ ID NO: 757193 - RNA, 22 nt, Human
uucuuggcaaugguauucaucc

SEQ ID NO: 757194 - RNA, 22 nt, Human
cauccauagauugagagauggu

SEQ ID NO: 757195 - RNA, 19 nt, Human
gcaggucauuaggcuaggu

SEQ ID NO: 757196 - RNA, 19 nt, Human
uuaugaauagcuucaucca

SEQ ID NO: 757197 - RNA, 22 nt, Human
uaucagaacacauguuuugcag

SEQ ID NO: 757198 - RNA, 22 nt, Human
agcagcugaccagugaguccug

SEQ ID NO: 757199 - RNA, 22 nt, Human
ugucuucuaccuugacagcauu

SEQ ID NO: 757200 - RNA, 21 nt, Human
gcuggcuggcugaccggccuu

SEQ ID NO: 757201 - RNA, 22 nt, Human
aagcaacuaaggcaaggaaaug

SEQ ID NO: 757202 - RNA, 22 nt, Human
cagugcccucaucuaugaaauc

SEQ ID NO: 757203 - RNA, 22 nt, Human
auuuccuuugcaaagacugugc

SEQ ID NO: 757204 - RNA, 22 nt, Human
guuaugaaauaaauauagauca

SEQ ID NO: 757205 - RNA, 22 nt, Human
agcuuuauggugccucacuuga

SEQ ID NO: 757206 - RNA, 22 nt, Human
ugcugccaucucaacugcccuu

SEQ ID NO: 757207 - RNA, 22 nt, Human
uuguguguacugguuaugggca

SEQ ID NO: 757208 - RNA, 23 nt, Human
uugcaaaaugcaauugaguuaga

SEQ ID NO: 757209 - RNA, 22 nt, Human
aagacagcauugcugagggcuu

SEQ ID NO: 757210 - RNA, 19 nt, Human
aaaguucugacuguagagc

SEQ ID NO: 757211 - RNA, 22 nt, Human
uggcccaguauguauaaucuua

SEQ ID NO: 757212 - RNA, 22 nt, Human
uuacaaacugucauauaguauu

SEQ ID NO: 757213 - RNA, 22 nt, Human
gucuuguccauuccaugcugcu

SEQ ID NO: 757214 - RNA, 22 nt, Human
caaugcuuuuagcuucagcuug

SEQ ID NO: 757215 - RNA, 22 nt, Human
ugauuucccuguagccucugaa

SEQ ID NO: 757216 - RNA, 22 nt, Human
ugucacauauauaauguucaau

SEQ ID NO: 757217 - RNA, 22 nt, Human
gagcuagagggagaagggcacu

SEQ ID NO: 757218 - RNA, 22 nt, Human
cagcagugugcaggugugcugg

SEQ ID NO: 757219 - RNA, 22 nt, Human
aacugagauuacaagagacauu

SEQ ID NO: 757220 - RNA, 22 nt, Human
ccagcuggaaacaaauagagug

SEQ ID NO: 757221 - RNA, 22 nt, Human
uuuagaaggacuacagugugau

SEQ ID NO: 757222 - RNA, 22 nt, Human
cucaaaaugguuaauuuuaaua

SEQ ID NO: 757223 - RNA, 17 nt, Human
ucugccgacugccagcu

SEQ ID NO: 757224 - RNA, 22 nt, Human
agcuggcuuugagcugggaggu

SEQ ID NO: 757225 - RNA, 22 nt, Human
guguuacauauaccugagcuua

SEQ ID NO: 757226 - RNA, 22 nt, Human
gagguucgauacagcguauuua

SEQ ID NO: 757227 - RNA, 22 nt, Human
cagacaguggacuugauaaagg

SEQ ID NO: 757228 - RNA, 22 nt, Human
auccccuucacacccucugcau

SEQ ID NO: 757229 - RNA, 22 nt, Human
gugcaauauugccauguucuug

SEQ ID NO: 757230 - RNA, 22 nt, Human
aucucugggcuuugaguuuguu

SEQ ID NO: 757231 - RNA, 16 nt, Human
ucugccagggacaggc

SEQ ID NO: 757232 - RNA, 22 nt, Human
uccagggcugacuugggagagg

SEQ ID NO: 757233 - RNA, 18 nt, Human
agcagagcccaugcauuc

SEQ ID NO: 757234 - RNA, 17 nt, Human
ggaaaaggaugauacag

SEQ ID NO: 757235 - RNA, 22 nt, Human
aaugaacacuuagccuuucuau

SEQ ID NO: 757236 - RNA, 20 nt, Human
gcagugcuggugccucugcu

SEQ ID NO: 757237 - RNA, 22 nt, Human
cuuugaaaaaugguuuccuaga

SEQ ID NO: 757238 - RNA, 22 nt, Human
acaaaagugagugugucucaga

SEQ ID NO: 757239 - RNA, 22 nt, Human
uucuuucucuacuagcagagcu

SEQ ID NO: 757240 - RNA, 22 nt, Human
ugcuuaauauugugauguaaua

SEQ ID NO: 757241 - RNA, 22 nt, Human
cauacuuacuguguaccaggug

SEQ ID NO: 757242 - RNA, 22 nt, Human
augaggagucaaggagucggag

SEQ ID NO: 757243 - RNA, 22 nt, Human
aucuggcuuggguguggguagc

SEQ ID NO: 757244 - RNA, 22 nt, Human
caguuuagaagaaucaugaaca

SEQ ID NO: 757245 - RNA, 22 nt, Human
agcagauguuucagagcaggcu

SEQ ID NO: 757246 - RNA, 20 nt, Human
ggcagagggccugggagaag

SEQ ID NO: 757247 - RNA, 22 nt, Human
gaggaaggcuaaggggcuuaga

SEQ ID NO: 757248 - RNA, 19 nt, Human
gagcugccuuuugaagacc

SEQ ID NO: 757249 - RNA, 22 nt, Human
uuuuaguuuggauuucuaaagc

SEQ ID NO: 757250 - RNA, 22 nt, Human
acagaaagaccuuguaacacuu

SEQ ID NO: 757251 - RNA, 22 nt, Human
uuuuauuaguggcuagaugggg

SEQ ID NO: 757252 - RNA, 22 nt, Human
ggcuuugcccuggacugaggca

SEQ ID NO: 757253 - RNA, 22 nt, Human
ugaagccaccgaaccagaagag

SEQ ID NO: 757254 - RNA, 22 nt, Human
cugcuuggguccuggcaugggu

SEQ ID NO: 757255 - RNA, 22 nt, Human
gcccugcuccuccgucccacga

SEQ ID NO: 757256 - RNA, 22 nt, Human
gcuuuguguagaaggaggaugg

SEQ ID NO: 757257 - RNA, 22 nt, Human
ugguggcaucagugaaguacac

SEQ ID NO: 757258 - RNA, 22 nt, Human
acauugaagcugugaaaucaaa

SEQ ID NO: 757259 - RNA, 22 nt, Human
cagcagccauguaccacacuca

SEQ ID NO: 757260 - RNA, 22 nt, Human
agcacagaaugagguggaagug

SEQ ID NO: 757261 - RNA, 23 nt, Human
acauacauggagauaaagugaug

SEQ ID NO: 757262 - RNA, 22 nt, Human
ucccacagaguggcucaccuag

SEQ ID NO: 757263 - RNA, 22 nt, Human
cugugccacugccccaggccuc

SEQ ID NO: 757264 - RNA, 21 nt, Human
uuguuucccagagcucgcucc

SEQ ID NO: 757265 - RNA, 22 nt, Human
aagugcauuagauagaaugaug

SEQ ID NO: 757266 - RNA, 22 nt, Human
aacauucugucaauugaugacc

SEQ ID NO: 757267 - RNA, 22 nt, Human
augcuguguggccaccuccaug

SEQ ID NO: 757268 - RNA, 22 nt, Human
aaaugcaauuguauguacucca

SEQ ID NO: 757269 - RNA, 22 nt, Human
ugacagggucagagcugagcug

SEQ ID NO: 757270 - RNA, 22 nt, Human
uugccagggucaggaugagauc

SEQ ID NO: 757271 - RNA, 22 nt, Human
ccuggcacauaguaaguacuag

SEQ ID NO: 757272 - RNA, 22 nt, Human
uaugcucuccucccagucccag

SEQ ID NO: 757273 - RNA, 21 nt, Human
aagaaagauaauuaaggaccc

SEQ ID NO: 757274 - RNA, 22 nt, Human
ugguacacauguccaaggucag

SEQ ID NO: 757275 - RNA, 17 nt, Human
acacagccagguucucc

SEQ ID NO: 757276 - RNA, 22 nt, Human
cgugcaugauauaugaguuguu

SEQ ID NO: 757277 - RNA, 22 nt, Human
cuggugucuacuacaugguuga

SEQ ID NO: 757278 - RNA, 22 nt, Human
agcagcaggaggcuguccacca

SEQ ID NO: 757279 - RNA, 22 nt, Human
ccaccuccuaggccuggagaag

SEQ ID NO: 757280 - RNA, 22 nt, Human
cugaagcuuuacuucaaauaca

SEQ ID NO: 757281 - RNA, 22 nt, Human
cucuccagcagauguagucugu

SEQ ID NO: 757282 - RNA, 22 nt, Human
cuccaggacugaggacagagcu

SEQ ID NO: 757283 - RNA, 22 nt, Human
uaaguuaucggaguguguuuca

SEQ ID NO: 757284 - RNA, 22 nt, Human
aaagggcagaguucacuagaaa

SEQ ID NO: 757285 - RNA, 22 nt, Human
ggccagcuuauuagcucagagg

SEQ ID NO: 757286 - RNA, 22 nt, Human
gcugugagggcuucugaggcau

SEQ ID NO: 757287 - RNA, 22 nt, Human
gugcauuaacaacccagaacuc

SEQ ID NO: 757288 - RNA, 22 nt, Human
cuauacagugacuagaaguaau

SEQ ID NO: 757289 - RNA, 22 nt, Human
uggugccaagcaugaggacucu

SEQ ID NO: 757290 - RNA, 22 nt, Human
ccugagagcagcuuccugcuua

SEQ ID NO: 757291 - RNA, 22 nt, Human
uuaauccauggcaguuauuaaa

SEQ ID NO: 757292 - RNA, 20 nt, Human
uccagcuccguguucuuccu

SEQ ID NO: 757293 - RNA, 22 nt, Human
uuguuuuaaccuaguguuuaug

SEQ ID NO: 757294 - RNA, 22 nt, Human
ccagagaaaagaggccaaggau

SEQ ID NO: 757295 - RNA, 22 nt, Human
ucagccuggugauuccucuguc

SEQ ID NO: 757296 - RNA, 22 nt, Human
gcaaggcugaccucucuagacu

SEQ ID NO: 757297 - RNA, 22 nt, Human
agggcuccaggggaccaucagu

SEQ ID NO: 757298 - RNA, 22 nt, Human
uguuaacaucuuggacucguga

SEQ ID NO: 757299 - RNA, 22 nt, Human
cagugcagccaaggacaggcac

SEQ ID NO: 757300 - RNA, 22 nt, Human
aagggcaggcagagaucauaua

SEQ ID NO: 757301 - RNA, 22 nt, Human
uuggccuuguuaaggaggcccu

SEQ ID NO: 757302 - RNA, 22 nt, Human
cuggggcucacuccagcccugg

SEQ ID NO: 757303 - RNA, 22 nt, Human
agcaccaggcaguauaucaaag

SEQ ID NO: 757304 - RNA, 18 nt, Human
ugagaggcagguagagga

SEQ ID NO: 757305 - RNA, 20 nt, Human
ucugagaagcaaacaauguu

SEQ ID NO: 757306 - RNA, 22 nt, Human
ugugcgcgugcagcggaguguu

SEQ ID NO: 757307 - RNA, 22 nt, Human
acauuucauuugcaguauggau

SEQ ID NO: 757308 - RNA, 22 nt, Human
uguguggauucaucucaaagag

SEQ ID NO: 757309 - RNA, 22 nt, Human
ugguaccauuucccaggagugu

SEQ ID NO: 757310 - RNA, 22 nt, Human
agaagcugacagaugcagcagg

SEQ ID NO: 757311 - RNA, 22 nt, Human
gcucugugcuagaacuaagaau

SEQ ID NO: 757312 - RNA, 22 nt, Human
auugacaagugagcugggcugc

SEQ ID NO: 757313 - RNA, 22 nt, Human
ucaaagagcucuaucuucaaaa

SEQ ID NO: 757314 - RNA, 22 nt, Human
uccgccaggacugagggcccau

SEQ ID NO: 757315 - RNA, 22 nt, Human
uaaaucacuguacuuuauuccu

SEQ ID NO: 757316 - RNA, 22 nt, Human
ccacucugauuuuggcuccacu

SEQ ID NO: 757317 - RNA, 22 nt, Human
agaaacauauucagugaguaau

SEQ ID NO: 757318 - RNA, 22 nt, Human
aggaauuugagugcuguaggaa

SEQ ID NO: 757319 - RNA, 22 nt, Human
ggaggugaggccguagggugug

SEQ ID NO: 757320 - RNA, 22 nt, Human
ucagcuucucaaaauggcuuag

SEQ ID NO: 757321 - RNA, 22 nt, Human
acagagaugucagauuggcagc

SEQ ID NO: 757322 - RNA, 22 nt, Human
augaaaauguacauguguauaa

SEQ ID NO: 757323 - RNA, 22 nt, Human
uaaaaugacuuccuccaacauc

SEQ ID NO: 757324 - RNA, 18 nt, Human
guuucaugcaugugaaac

SEQ ID NO: 757325 - RNA, 22 nt, Human
agcacugcuuuagagccucugc

SEQ ID NO: 757326 - RNA, 22 nt, Human
aaacagugcaggaaguuaagca

SEQ ID NO: 757327 - RNA, 22 nt, Human
cuggagguuggguccaggccag

SEQ ID NO: 757328 - RNA, 22 nt, Human
ugcugaggcccaggagcacuuu

SEQ ID NO: 757329 - RNA, 22 nt, Human
uuacagagaggugauugugaag

SEQ ID NO: 757330 - RNA, 22 nt, Human
ucuguggcuuucuuauguugua

SEQ ID NO: 757331 - RNA, 22 nt, Human
caggcuggagugaguguagugg

SEQ ID NO: 757332 - RNA, 22 nt, Human
uggcugagugauauuugcaaag

SEQ ID NO: 757333 - RNA, 23 nt, Human
uguaggcuguaguuuguaggucc

SEQ ID NO: 757334 - RNA, 22 nt, Human
aagagggguggucugugaggau

SEQ ID NO: 757335 - RNA, 22 nt, Human
uuuucaguuccaucucugcucu

SEQ ID NO: 757336 - RNA, 22 nt, Human
agaggucagagcaggaaaggca

SEQ ID NO: 757337 - RNA, 22 nt, Human
gccaggcucagcagucaaccug

SEQ ID NO: 757338 - RNA, 22 nt, Human
uacauugacucucugucccuaa

SEQ ID NO: 757339 - RNA, 22 nt, Human
guuucucagcaugucaguacaa

SEQ ID NO: 757340 - RNA, 22 nt, Human
ggcaggugguaaggauuucaua

SEQ ID NO: 757341 - RNA, 22 nt, Human
ucuguuccuguccuaagggcca

SEQ ID NO: 757342 - RNA, 22 nt, Human
uuuggccaugcucaaggguaua

SEQ ID NO: 757343 - RNA, 22 nt, Human
ccuuuaaagacugcauaacuuc

SEQ ID NO: 757344 - RNA, 22 nt, Human
aaaauucugucauuaaauugug

SEQ ID NO: 757345 - RNA, 22 nt, Human
uaaacagagaagacuuugagca

SEQ ID NO: 757346 - RNA, 22 nt, Human
ggugcagcugcagccugggagc

SEQ ID NO: 757347 - RNA, 22 nt, Human
auuaucuauguagaaugauuuu

SEQ ID NO: 757348 - RNA, 22 nt, Human
gcuuccagcaaacacuggcugc

SEQ ID NO: 757349 - RNA, 17 nt, Human
uauguguguguuuauac

SEQ ID NO: 757350 - RNA, 22 nt, Human
uggaaugaauauguuuuaagga

SEQ ID NO: 757351 - RNA, 21 nt, Human
ucucugguuggaguugugcca

SEQ ID NO: 757352 - RNA, 22 nt, Human
ugaggcucagagaacagugacu

SEQ ID NO: 757353 - RNA, 22 nt, Human
cucagggacguuagaggacagg

SEQ ID NO: 757354 - RNA, 22 nt, Human
uauuugaagauucuucugaugu

SEQ ID NO: 757355 - RNA, 22 nt, Human
acaugcacacgauucagucugg

SEQ ID NO: 757356 - RNA, 22 nt, Human
cauagaauguaauaaagaguag

SEQ ID NO: 757357 - RNA, 22 nt, Human
cugaucuuaaguaacauuauuu

SEQ ID NO: 757358 - RNA, 22 nt, Human
gugcuuuauauguggguaucca

SEQ ID NO: 757359 - RNA, 22 nt, Human
ugcccugcaugcagggagcugu

SEQ ID NO: 757360 - RNA, 22 nt, Human
uucuaccagcuacucacugaua

SEQ ID NO: 757361 - RNA, 22 nt, Human
auauuugagggcaauagggugg

SEQ ID NO: 757362 - RNA, 22 nt, Human
uggucaggauucucagcccuuc

SEQ ID NO: 757363 - RNA, 22 nt, Human
uguacacaugcccacuugaagc

SEQ ID NO: 757364 - RNA, 22 nt, Human
auauuuucuggaacuaugccug

SEQ ID NO: 757365 - RNA, 22 nt, Human
uuucugugguggguaguucaga

SEQ ID NO: 757366 - RNA, 22 nt, Human
acaguucccgucuugcacagcu

SEQ ID NO: 757367 - RNA, 22 nt, Human
aaugcauuguugauuuggagug

SEQ ID NO: 757368 - RNA, 22 nt, Human
uggccaggcagguagaacggcc

SEQ ID NO: 757369 - RNA, 22 nt, Human
cuguccauuuucgugccuccuu

SEQ ID NO: 757370 - RNA, 22 nt, Human
ugaaucuggaucuaugaucaau

SEQ ID NO: 757371 - RNA, 17 nt, Human
agccaggcauaugaagu

SEQ ID NO: 757372 - RNA, 22 nt, Human
gccagcauccugguggugguug

SEQ ID NO: 757373 - RNA, 22 nt, Human
acugaggcuuaaagagauuagg

SEQ ID NO: 757374 - RNA, 22 nt, Human
ccagagccucgcccggagccuc

SEQ ID NO: 757375 - RNA, 22 nt, Human
cuggggagugaagguaauuaca

SEQ ID NO: 757376 - RNA, 22 nt, Human
gcaggacacagaugcaaggcca

SEQ ID NO: 757377 - RNA, 22 nt, Human
auuagaagauagugauuucugc

SEQ ID NO: 757378 - RNA, 22 nt, Human
gcauucaggaaccggaagggua

SEQ ID NO: 757379 - RNA, 22 nt, Human
guagccauuggcaaugaagccu

SEQ ID NO: 757380 - RNA, 22 nt, Human
caguggccuugaugccucauuc

SEQ ID NO: 757381 - RNA, 22 nt, Human
caucacagaaauaaacauaccu

SEQ ID NO: 757382 - RNA, 22 nt, Human
gcuggccaggugcuuugguucu

SEQ ID NO: 757383 - RNA, 22 nt, Human
cauggccaaggaugcucaacca

SEQ ID NO: 757384 - RNA, 20 nt, Human
guaggcauaugaccaauuac

SEQ ID NO: 757385 - RNA, 22 nt, Human
cagaacagucgccugcauggau

SEQ ID NO: 757386 - RNA, 18 nt, Human
auugagcaugacagaccu

SEQ ID NO: 757387 - RNA, 22 nt, Human
aagacauuccaaaguggcuaau

SEQ ID NO: 757388 - RNA, 22 nt, Human
aagcacauuuggaaaacaugga

SEQ ID NO: 757389 - RNA, 22 nt, Human
uauuccaaaauaguuaagcacu

SEQ ID NO: 757390 - RNA, 19 nt, Human
agcagagcccugaagaucc

SEQ ID NO: 757391 - RNA, 22 nt, Human
agacuucuaaauagcagcuucu

SEQ ID NO: 757392 - RNA, 22 nt, Human
ugugaaaucugaacucaaagau

SEQ ID NO: 757393 - RNA, 23 nt, Human
acagggcauugcuggccucgagg

SEQ ID NO: 757394 - RNA, 22 nt, Human
uuccaguucacuccauuucugg

SEQ ID NO: 757395 - RNA, 22 nt, Human
cagccacugacaggaauggucc

SEQ ID NO: 757396 - RNA, 22 nt, Human
cugcagagaugaagaagguggc

SEQ ID NO: 757397 - RNA, 22 nt, Human
agccugcugggaagggaggcuu

SEQ ID NO: 757398 - RNA, 22 nt, Human
auuucucaguguacauuauguu

SEQ ID NO: 757399 - RNA, 22 nt, Human
caauaauauccugugcuguuug

SEQ ID NO: 757400 - RNA, 23 nt, Human
guuaacaugguccauggaagagc

SEQ ID NO: 757401 - RNA, 22 nt, Human
cacagcagacagggaggcggcu

SEQ ID NO: 757402 - RNA, 22 nt, Human
ccaggagaagcaucugagugua

SEQ ID NO: 757403 - RNA, 22 nt, Human
aaaagauuguuagggagaaugu

SEQ ID NO: 757404 - RNA, 22 nt, Human
uuucacauaugguuguugauug

SEQ ID NO: 757405 - RNA, 22 nt, Human
ucugcuucugugaaggcagucu

SEQ ID NO: 757406 - RNA, 22 nt, Human
ugagccagcaggccuccagugg

SEQ ID NO: 757407 - RNA, 22 nt, Human
agcuggagauucuggggacagu

SEQ ID NO: 757408 - RNA, 22 nt, Human
uacuagaaaaacacaugcucug

SEQ ID NO: 757409 - RNA, 22 nt, Human
aauuauauuguggugugaaugu

SEQ ID NO: 757410 - RNA, 22 nt, Human
uuacaacauaugauaggagucu

SEQ ID NO: 757411 - RNA, 23 nt, Human
auccuauauaaccuuggaggcug

SEQ ID NO: 757412 - RNA, 22 nt, Human
gcagagugaagggagaggugug

SEQ ID NO: 757413 - RNA, 22 nt, Human
ucaaaggcgguccaggaauaaa

SEQ ID NO: 757414 - RNA, 20 nt, Human
uugauucaagggcugaugga

SEQ ID NO: 757415 - RNA, 22 nt, Human
acagaauuuuuacacaggguaa

SEQ ID NO: 757416 - RNA, 22 nt, Human
ggcaggaagaggagggugaacu

SEQ ID NO: 757417 - RNA, 21 nt, Human
acacugacaaccauccacgag

SEQ ID NO: 757418 - RNA, 22 nt, Human
uuucaucucucuaaaagacagu

SEQ ID NO: 757419 - RNA, 21 nt, Human
gggcaggucucugaugucaac

SEQ ID NO: 757420 - RNA, 22 nt, Human
uuccccucucagaucuggccua

SEQ ID NO: 757421 - RNA, 22 nt, Human
uagcaagaucgugucucuaaaa

SEQ ID NO: 757422 - RNA, 22 nt, Human
uuucuuuaucauagcaucuuug

SEQ ID NO: 757423 - RNA, 22 nt, Human
cuccagugagugagcaggcgac

SEQ ID NO: 757424 - RNA, 22 nt, Human
ggguggugagauguagcugaug

SEQ ID NO: 757425 - RNA, 22 nt, Human
ggccuccucacccugcucaggc

SEQ ID NO: 757426 - RNA, 22 nt, Human
ugaagcaacuggacaaguuggc

SEQ ID NO: 757427 - RNA, 22 nt, Human
acugcugagcacacaagagugu

SEQ ID NO: 757428 - RNA, 22 nt, Human
uagcagcuuaaguaauuagaau

SEQ ID NO: 757429 - RNA, 22 nt, Human
ugcaauauguugcauuguaugg

SEQ ID NO: 757430 - RNA, 22 nt, Human
aggucaaggcugcagugagcug

SEQ ID NO: 757431 - RNA, 22 nt, Human
gucugggcaucagacugcgggc

SEQ ID NO: 757432 - RNA, 22 nt, Human
aucaaaguucguaacugauaac

SEQ ID NO: 757433 - RNA, 19 nt, Human
agcaaauauaauaguguuc

SEQ ID NO: 757434 - RNA, 22 nt, Human
gcuggagggguaauaggauggg

SEQ ID NO: 757435 - RNA, 22 nt, Human
uguccugggccggcgacugguc

SEQ ID NO: 757436 - RNA, 22 nt, Human
uuccauccauaucuuguugagg

SEQ ID NO: 757437 - RNA, 22 nt, Human
auuuccuauccuggucuuaaaa

SEQ ID NO: 757438 - RNA, 22 nt, Human
ucuuuugagggccagaggaaga

SEQ ID NO: 757439 - RNA, 22 nt, Human
ucucacagggcuaggcccugcc

SEQ ID NO: 757440 - RNA, 22 nt, Human
agccauugaguuuuaugugcua

SEQ ID NO: 757441 - RNA, 22 nt, Human
cagagcuguccaaacccugaca

SEQ ID NO: 757442 - RNA, 22 nt, Human
cagagugaaauaggggaucaag

SEQ ID NO: 757443 - RNA, 22 nt, Human
aggggagaaaaaugccuucugu

SEQ ID NO: 757444 - RNA, 22 nt, Human
cacacauugaauucauucuugu

SEQ ID NO: 757445 - RNA, 22 nt, Human
auagaucacaaugguucacuuu

SEQ ID NO: 757446 - RNA, 22 nt, Human
acagagggggccuuggagugca

SEQ ID NO: 757447 - RNA, 22 nt, Human
uuuguucaaaaauuauaagaua

SEQ ID NO: 757448 - RNA, 22 nt, Human
gggcugacucugcacugagcca

SEQ ID NO: 757449 - RNA, 22 nt, Human
cagggcugaagaaauucaaaag

SEQ ID NO: 757450 - RNA, 22 nt, Human
agagcccucugcaaugccucag

SEQ ID NO: 757451 - RNA, 22 nt, Human
gucuccagaauucuugggaggg

SEQ ID NO: 757452 - RNA, 22 nt, Human
agaauagagaaaaagguuauuu

SEQ ID NO: 757453 - RNA, 19 nt, Human
uugaggggccaggggagau

SEQ ID NO: 757454 - RNA, 22 nt, Human
uuuguaaaaggaggaagcaugg

SEQ ID NO: 757455 - RNA, 22 nt, Human
uuuuuauacuuugcucaagauu

SEQ ID NO: 757456 - RNA, 22 nt, Human
cacaguggcagguguggguugu

SEQ ID NO: 757457 - RNA, 22 nt, Human
ugaggcagugcugggaagccug

SEQ ID NO: 757458 - RNA, 22 nt, Human
gucuguaauuauuaaagaaagg

SEQ ID NO: 757459 - RNA, 22 nt, Human
acagccugauuuauggagcagu

SEQ ID NO: 757460 - RNA, 22 nt, Human
uccaucugcauuugguuucugu

SEQ ID NO: 757461 - RNA, 22 nt, Human
ccaggccugcaucugcugcgca

SEQ ID NO: 757462 - RNA, 22 nt, Human
gcuggcagcuggaaguugggcu

SEQ ID NO: 757463 - RNA, 22 nt, Human
cugcuuuaacucugggaagcca

SEQ ID NO: 757464 - RNA, 21 nt, Human
acaguauauuagauauuugaa

SEQ ID NO: 757465 - RNA, 22 nt, Human
cuuuucaugagucuguuauggg

SEQ ID NO: 757466 - RNA, 22 nt, Human
cagcccagagccaguucccgcu

SEQ ID NO: 757467 - RNA, 22 nt, Human
cagucacauagguauacacaua

SEQ ID NO: 757468 - RNA, 22 nt, Human
ggcccagccuugggguuucuuu

SEQ ID NO: 757469 - RNA, 22 nt, Human
aauauguugagucuaucuuuau

SEQ ID NO: 757470 - RNA, 20 nt, Human
ggcucuggaaucuggugggc

SEQ ID NO: 757471 - RNA, 22 nt, Human
uaaagacaugguguaggugaac

SEQ ID NO: 757472 - RNA, 22 nt, Human
aucauagaacaccuaccuaccu

SEQ ID NO: 757473 - RNA, 22 nt, Human
cugacaguaacuaauguggaga

SEQ ID NO: 757474 - RNA, 22 nt, Human
ugucaccuugcagggcuggggc

SEQ ID NO: 757475 - RNA, 19 nt, Human
accaggaacuucccuaggc

SEQ ID NO: 757476 - RNA, 22 nt, Human
augaaugauuaaagaguacagu

SEQ ID NO: 757477 - RNA, 22 nt, Human
auaaaguuuaaaagucaauagu

SEQ ID NO: 757478 - RNA, 23 nt, Human
uuaaacacuaguucgaguagcau

SEQ ID NO: 757479 - RNA, 22 nt, Human
ggcaggacugaucagugggaug

SEQ ID NO: 757480 - RNA, 22 nt, Human
auacaagaucacuccagaaaau

SEQ ID NO: 757481 - RNA, 22 nt, Human
aauaauauuccucugugugcgu

SEQ ID NO: 757482 - RNA, 22 nt, Human
cuugacuuugccuuuuaaaugu

SEQ ID NO: 757483 - RNA, 22 nt, Human
ugcauauuugauugagauaccu

SEQ ID NO: 757484 - RNA, 21 nt, Human
aggcccagcuuuccucuugcu

SEQ ID NO: 757485 - RNA, 22 nt, Human
uuugcugacuggaugcaguugg

SEQ ID NO: 757486 - RNA, 22 nt, Human
gcaucauucuggcucuuuccau

SEQ ID NO: 757487 - RNA, 22 nt, Human
aagcucagagucucggagggaa

SEQ ID NO: 757488 - RNA, 22 nt, Human
caacucaggcaccucauauaag

SEQ ID NO: 757489 - RNA, 18 nt, Human
ccucagggagauccagug

SEQ ID NO: 757490 - RNA, 22 nt, Human
ugccuuuuccagcuuccaggag

SEQ ID NO: 757491 - RNA, 22 nt, Human
uccccuccucuccugauauggg

SEQ ID NO: 757492 - RNA, 22 nt, Human
ccaaauuaaaucauacagacag

SEQ ID NO: 757493 - RNA, 22 nt, Human
aacuggagccccucugccacug

SEQ ID NO: 757494 - RNA, 22 nt, Human
uccuccugucuaccaguuccug

SEQ ID NO: 757495 - RNA, 22 nt, Human
caguguuuccgucaguauguga

SEQ ID NO: 757496 - RNA, 21 nt, Human
uuauucugagaugagauucuu

SEQ ID NO: 757497 - RNA, 22 nt, Human
uuagagauacauuuguagcuug

SEQ ID NO: 757498 - RNA, 22 nt, Human
acaaauugccuagucuagcauc

SEQ ID NO: 757499 - RNA, 22 nt, Human
caagaaaugggauuugacugcc

SEQ ID NO: 757500 - RNA, 22 nt, Human
caucagaccugccagacuaggu

SEQ ID NO: 757501 - RNA, 22 nt, Human
augugaaaauccaauggcagca

SEQ ID NO: 757502 - RNA, 22 nt, Human
gaaucuuauuuuuaaaucuucc

SEQ ID NO: 757503 - RNA, 22 nt, Human
uaugaguacaaggacucugucu

SEQ ID NO: 757504 - RNA, 22 nt, Human
uuuguucugcaucacagaaaaa

SEQ ID NO: 757505 - RNA, 22 nt, Human
cuuugcaaacgauuaccacaug

SEQ ID NO: 757506 - RNA, 22 nt, Human
uuucacagguacaaacacuccu

SEQ ID NO: 757507 - RNA, 19 nt, Human
acaauguuguuggacacuc

SEQ ID NO: 757508 - RNA, 22 nt, Human
uucagguuuuuaaguucugccu

SEQ ID NO: 757509 - RNA, 19 nt, Human
ugugacugguugucucgcu

SEQ ID NO: 757510 - RNA, 22 nt, Human
ugcagggcaguggagguugagu

SEQ ID NO: 757511 - RNA, 20 nt, Human
agcucuuaagaagaagauga

SEQ ID NO: 757512 - RNA, 22 nt, Human
ugccagaagauucucuaucaga

SEQ ID NO: 757513 - RNA, 22 nt, Human
uuuagcaaaacauuaugucugu

SEQ ID NO: 757514 - RNA, 22 nt, Human
caggaaauaggcguuuguccuc

SEQ ID NO: 757515 - RNA, 18 nt, Human
ucuuccagcuucuggagg

SEQ ID NO: 757516 - RNA, 22 nt, Human
aguuuaauccuccagcccaacu

SEQ ID NO: 757517 - RNA, 22 nt, Human
cauuucaagcauugacuucuau

SEQ ID NO: 757518 - RNA, 22 nt, Human
guggcuucacauggcauuuggc

SEQ ID NO: 757519 - RNA, 22 nt, Human
acagaaauuagcagugaguuua

SEQ ID NO: 757520 - RNA, 22 nt, Human
ugggcagggagcuggaaccaca

SEQ ID NO: 757521 - RNA, 22 nt, Human
uuuauacauggagaauuuuugc

SEQ ID NO: 757522 - RNA, 22 nt, Human
cacugaagccugggaguaagac

SEQ ID NO: 757523 - RNA, 22 nt, Human
caccagacagguguaugcauau

SEQ ID NO: 757524 - RNA, 22 nt, Human
uaucaguggucacaagauacau

SEQ ID NO: 757525 - RNA, 22 nt, Human
uggaauggaaacaaacugagga

SEQ ID NO: 757526 - RNA, 22 nt, Human
uucucuccagacugcagugggu

SEQ ID NO: 757527 - RNA, 23 nt, Human
aggcagagccaaggucaaaaccc

SEQ ID NO: 757528 - RNA, 22 nt, Human
gagucuggaaugaugaagaccu

SEQ ID NO: 757529 - RNA, 22 nt, Human
uguguguuaacuuauuuaaugu

SEQ ID NO: 757530 - RNA, 22 nt, Human
aacaugaaaagcccagagaggu

SEQ ID NO: 757531 - RNA, 21 nt, Human
aauggcugggcaaggucucuc

SEQ ID NO: 757532 - RNA, 22 nt, Human
gagagcaggaggcagcgggacg

SEQ ID NO: 757533 - RNA, 22 nt, Human
aggcuucccuuccucugggggu

SEQ ID NO: 757534 - RNA, 22 nt, Human
gaggagagccugcacuuugacc

SEQ ID NO: 757535 - RNA, 22 nt, Human
aaaacugagguuuccugaagaa

SEQ ID NO: 757536 - RNA, 22 nt, Human
uugauuuuaaaauagugacacu

SEQ ID NO: 757537 - RNA, 22 nt, Human
agccuggaagaaccugaagucu

SEQ ID NO: 757538 - RNA, 19 nt, Human
uggagacugagagugagca

SEQ ID NO: 757539 - RNA, 22 nt, Human
cguguguguaccugcgcauuua

SEQ ID NO: 757540 - RNA, 22 nt, Human
gggguagggugauugugaagua

SEQ ID NO: 757541 - RNA, 22 nt, Human
uuguuggugaauaggguggaau

SEQ ID NO: 757542 - RNA, 22 nt, Human
guauucagggcuagucagagga

SEQ ID NO: 757543 - RNA, 22 nt, Human
ucugcugccaccuuguggugag

SEQ ID NO: 757544 - RNA, 22 nt, Human
uggagacagagauagccaauug

SEQ ID NO: 757545 - RNA, 22 nt, Human
uaaacagccuccccuuucacuc

SEQ ID NO: 757546 - RNA, 22 nt, Human
agcagggcugugcuccuuccga

SEQ ID NO: 757547 - RNA, 23 nt, Human
auacaaaccuugcaggacauguu

SEQ ID NO: 757548 - RNA, 22 nt, Human
aaagcaauugugguuuuugcca

SEQ ID NO: 757549 - RNA, 22 nt, Human
caggcagcguccugcuuccugu

SEQ ID NO: 757550 - RNA, 22 nt, Human
ccuggcucaaggcgaggacucc

SEQ ID NO: 757551 - RNA, 22 nt, Human
uaguggaggccuguugugugca

SEQ ID NO: 757552 - RNA, 22 nt, Human
aacuacagaaucauagaaaaua

SEQ ID NO: 757553 - RNA, 22 nt, Human
ugcuugauggcucuucuuucua

SEQ ID NO: 757554 - RNA, 22 nt, Human
ugcaggcuccaugaggacaggc

SEQ ID NO: 757555 - RNA, 22 nt, Human
uuguuucuccagucuaggaaaa

SEQ ID NO: 757556 - RNA, 22 nt, Human
uaugcuuucauucauaugugag

SEQ ID NO: 757557 - RNA, 22 nt, Human
uuccaggaacagaugaagguug

SEQ ID NO: 757558 - RNA, 22 nt, Human
cacaggcaggagguucuccagu

SEQ ID NO: 757559 - RNA, 22 nt, Human
cuucucuucccagggacacagg

SEQ ID NO: 757560 - RNA, 22 nt, Human
cuucucuuggguguggugucuu

SEQ ID NO: 757561 - RNA, 22 nt, Human
uccuagaaugcaccucugcugu

SEQ ID NO: 757562 - RNA, 22 nt, Human
cagcaagucauccaggaugaug

SEQ ID NO: 757563 - RNA, 22 nt, Human
aagagcauuuggugagauuuga

SEQ ID NO: 757564 - RNA, 22 nt, Human
gggcgcugggugucgagacuca

SEQ ID NO: 757565 - RNA, 22 nt, Human
ccaggucuucacuuuacugaag

SEQ ID NO: 757566 - RNA, 22 nt, Human
uuuccuuuaugacaucaccacu

SEQ ID NO: 757567 - RNA, 22 nt, Human
ccugggaaggggaagagaauuc

SEQ ID NO: 757568 - RNA, 19 nt, Human
cuggucugucaugcucccc

SEQ ID NO: 757569 - RNA, 22 nt, Human
ugucagugucuaugaagaauuu

SEQ ID NO: 757570 - RNA, 22 nt, Human
gaauauauuucucuuaccuuua

SEQ ID NO: 757571 - RNA, 22 nt, Human
cacuugggacaaagcuucugcu

SEQ ID NO: 757572 - RNA, 22 nt, Human
aggggcuucccuuccuggguag

SEQ ID NO: 757573 - RNA, 22 nt, Human
ccaggcaguggaagcuaaaauu

SEQ ID NO: 757574 - RNA, 23 nt, Human
cuguggagcccuuuguugggaga

SEQ ID NO: 757575 - RNA, 22 nt, Human
ugagagcugaagauauguuaac

SEQ ID NO: 757576 - RNA, 22 nt, Human
acaguguauauuguuuaucugg

SEQ ID NO: 757577 - RNA, 19 nt, Human
cccagcuguucuuccacca

SEQ ID NO: 757578 - RNA, 19 nt, Human
cccaggagcaguauugaug

SEQ ID NO: 757579 - RNA, 22 nt, Human
cagguggggcagcugugggagc

SEQ ID NO: 757580 - RNA, 22 nt, Human
gaugagcauuguuucauguguu

SEQ ID NO: 757581 - RNA, 22 nt, Human
agcagggcuguguagguaauga

SEQ ID NO: 757582 - RNA, 22 nt, Human
cuuuuggccucaaaggaaagaa

SEQ ID NO: 757583 - RNA, 22 nt, Human
cuuuccuccacucccuaggcuu

SEQ ID NO: 757584 - RNA, 22 nt, Human
uacagggcugagugagacaugg

SEQ ID NO: 757585 - RNA, 22 nt, Human
ccaggguugguauucaccugga

SEQ ID NO: 757586 - RNA, 22 nt, Human
ggaggccaggugggagucaucu

SEQ ID NO: 757587 - RNA, 22 nt, Human
uugacacagaucaauauucaac

SEQ ID NO: 757588 - RNA, 20 nt, Human
cagcaggaaaagugccucag

SEQ ID NO: 757589 - RNA, 22 nt, Human
uuucuguaauuaaaagggcagg

SEQ ID NO: 757590 - RNA, 22 nt, Human
uagaucauggguacugcauaug

SEQ ID NO: 757591 - RNA, 22 nt, Human
uucagagugguaugaagugaug

SEQ ID NO: 757592 - RNA, 22 nt, Human
cacagcugggaaaauuuguaca

SEQ ID NO: 757593 - RNA, 22 nt, Human
ugguuccaaucgcacuggcuca

SEQ ID NO: 757594 - RNA, 22 nt, Human
uacaaagucaccagcuucuugc

SEQ ID NO: 757595 - RNA, 22 nt, Human
cccugcugaaucccauggaguc

SEQ ID NO: 757596 - RNA, 22 nt, Human
cucaggccauucuuccagcugc

SEQ ID NO: 757597 - RNA, 22 nt, Human
uaucuagaaacagaguuuuacu

SEQ ID NO: 757598 - RNA, 22 nt, Human
cagaauucgaaugagcagaauc

SEQ ID NO: 757599 - RNA, 22 nt, Human
ucaggaaguugaggcguagaga

SEQ ID NO: 757600 - RNA, 22 nt, Human
ugaggcaguugagcuuccugag

SEQ ID NO: 757601 - RNA, 22 nt, Human
uugucuuaaauggauggacaau

SEQ ID NO: 757602 - RNA, 22 nt, Human
uaacaugagagcuaagacauua

SEQ ID NO: 757603 - RNA, 22 nt, Human
ucuuuucuguaacucagugucu

SEQ ID NO: 757604 - RNA, 22 nt, Human
ggcaaagccuuacucuaacuga

SEQ ID NO: 757605 - RNA, 23 nt, Human
agguggagcugugcagccggggc

SEQ ID NO: 757606 - RNA, 22 nt, Human
ucuuugaauucaaacuguucaa

SEQ ID NO: 757607 - RNA, 22 nt, Human
ggcuucccagcagagggcgcac

SEQ ID NO: 757608 - RNA, 22 nt, Human
cagcccuggcuagggcgagggc

SEQ ID NO: 757609 - RNA, 22 nt, Human
aagugagugguaaggagcaugg

SEQ ID NO: 757610 - RNA, 22 nt, Human
uccaggccccacugaagccccu

SEQ ID NO: 757611 - RNA, 22 nt, Human
ucagguccagcuccugugccuc

SEQ ID NO: 757612 - RNA, 22 nt, Human
aaggaaucacuucuuuaaauga

SEQ ID NO: 757613 - RNA, 22 nt, Human
gaaaucugaacucuguauccuu

SEQ ID NO: 757614 - RNA, 22 nt, Human
ucuucaaaaauacagguuuuca

SEQ ID NO: 757615 - RNA, 22 nt, Human
auggcaguugcccagccaaucc

SEQ ID NO: 757616 - RNA, 22 nt, Human
ccuggagacgaggcuggaccau

SEQ ID NO: 757617 - RNA, 22 nt, Human
aaucaacaggaugugcauugua

SEQ ID NO: 757618 - RNA, 22 nt, Human
uuguacauucuauggguuugga

SEQ ID NO: 757619 - RNA, 22 nt, Human
cggcaggguugguuuucucuga

SEQ ID NO: 757620 - RNA, 22 nt, Human
acacugguaggaagagauggcu

SEQ ID NO: 757621 - RNA, 20 nt, Human
aggaaaaauggaaacuggag

SEQ ID NO: 757622 - RNA, 22 nt, Human
cacucugagaaacacuaaacca

SEQ ID NO: 757623 - RNA, 17 nt, Human
gcuuuggaaggguagac

SEQ ID NO: 757624 - RNA, 22 nt, Human
ugcaguguuccuguagccugcc

SEQ ID NO: 757625 - RNA, 22 nt, Human
ccagcuuuccaggguugacugg

SEQ ID NO: 757626 - RNA, 22 nt, Human
uuaacuggggaagcauuucaug

SEQ ID NO: 757627 - RNA, 22 nt, Human
uguaacagcucuccaugugggg

SEQ ID NO: 757628 - RNA, 22 nt, Human
ucagaaacagaaacuaagaacc

SEQ ID NO: 757629 - RNA, 22 nt, Human
ucacuggauccuagcugagccu

SEQ ID NO: 757630 - RNA, 22 nt, Human
caggccaggcugcauuugcccc

SEQ ID NO: 757631 - RNA, 20 nt, Human
aagcaauauagugcaaaugu

SEQ ID NO: 757632 - RNA, 22 nt, Human
cugcugucuuuauuucacugcu

SEQ ID NO: 757633 - RNA, 22 nt, Human
cuguggaguggggaguacuggu

SEQ ID NO: 757634 - RNA, 22 nt, Human
uccauuuuucaugacuccucaa

SEQ ID NO: 757635 - RNA, 20 nt, Human
cugagcugagcuccaugggu

SEQ ID NO: 757636 - RNA, 19 nt, Human
acauagcuggcuacacugu

SEQ ID NO: 757637 - RNA, 22 nt, Human
cugcugugcuuguggccacccg

SEQ ID NO: 757638 - RNA, 22 nt, Human
acaguguguucugggaccucca

SEQ ID NO: 757639 - RNA, 22 nt, Human
aauauauuugaaucaggaacaa

SEQ ID NO: 757640 - RNA, 22 nt, Human
agacucuggaggggcugguccu

SEQ ID NO: 757641 - RNA, 22 nt, Human
gagcugaguaucccacugaagu

SEQ ID NO: 757642 - RNA, 22 nt, Human
ccugcugucucugggcaggcag

SEQ ID NO: 757643 - RNA, 22 nt, Human
ggaggccagaaucuguguugga

SEQ ID NO: 757644 - RNA, 19 nt, Human
gcgaggaagucacuguggu

SEQ ID NO: 757645 - RNA, 22 nt, Human
ccauggccgccgcugcucagga

SEQ ID NO: 757646 - RNA, 22 nt, Human
uucucucuguggucccauuuug

SEQ ID NO: 757647 - RNA, 19 nt, Human
gagggcucauuugaacaau

SEQ ID NO: 757648 - RNA, 22 nt, Human
aaccucaaacucuugggcuuaa

SEQ ID NO: 757649 - RNA, 20 nt, Human
agggccugcucugugguguc

SEQ ID NO: 757650 - RNA, 22 nt, Human
uaagauaaggaacauucuguga

SEQ ID NO: 757651 - RNA, 22 nt, Human
ugggaggugauuaaauuauggg

SEQ ID NO: 757652 - RNA, 22 nt, Human
agacauauauugcaauucacug

SEQ ID NO: 757653 - RNA, 22 nt, Human
auguuucagauacagaucaaau

SEQ ID NO: 757654 - RNA, 22 nt, Human
ccugucuguccucucaugagcc

SEQ ID NO: 757655 - RNA, 20 nt, Human
acugcaaaguacucuuucag

SEQ ID NO: 757656 - RNA, 22 nt, Human
uuguagaaaauuagaugcaugg

SEQ ID NO: 757657 - RNA, 22 nt, Human
acagaugauuuuuaugaaaaca

SEQ ID NO: 757658 - RNA, 22 nt, Human
cuuucacaguccugacugagcg

SEQ ID NO: 757659 - RNA, 22 nt, Human
ggagcucaggcccagcaaggcc

SEQ ID NO: 757660 - RNA, 22 nt, Human
uucacagugugaucuaugggca

SEQ ID NO: 757661 - RNA, 22 nt, Human
caguucuggaggauagaagucu

SEQ ID NO: 757662 - RNA, 22 nt, Human
ucccugggaacaaaggaugaga

SEQ ID NO: 757663 - RNA, 22 nt, Human
ccaggccagcaggcacaccugc

SEQ ID NO: 757664 - RNA, 22 nt, Human
auacaaagcuaaauaugguuuc

SEQ ID NO: 757665 - RNA, 22 nt, Human
gagguggcagaggccuggaccu

SEQ ID NO: 757666 - RNA, 22 nt, Human
cuuugaagaucacauguugcuc

SEQ ID NO: 757667 - RNA, 22 nt, Human
aguucuggcggcugucggcacu

SEQ ID NO: 757668 - RNA, 22 nt, Human
ggcacugauaauguccucucuc

SEQ ID NO: 757669 - RNA, 22 nt, Human
aaucuggacacaguucucaugc

SEQ ID NO: 757670 - RNA, 22 nt, Human
uggcacacagagaagacacuug

SEQ ID NO: 757671 - RNA, 22 nt, Human
aauauuugaacagucacugagu

SEQ ID NO: 757672 - RNA, 22 nt, Human
gacagugacagcuuggaaagca

SEQ ID NO: 757673 - RNA, 22 nt, Human
agccuucacugggaccuuggau

SEQ ID NO: 757674 - RNA, 22 nt, Human
cuccuucagucugcguggcugu

SEQ ID NO: 757675 - RNA, 22 nt, Human
uaccucagauugcugccuuggg

SEQ ID NO: 757676 - RNA, 22 nt, Human
auaucauuauguuaugagcaca

SEQ ID NO: 757677 - RNA, 22 nt, Human
auauggaagagccugggaauuu

SEQ ID NO: 757678 - RNA, 22 nt, Human
cuggccuuggugcuugcagaca

SEQ ID NO: 757679 - RNA, 22 nt, Human
uccagcagugcucuagagcgug

SEQ ID NO: 757680 - RNA, 22 nt, Human
ucugaguuuucugagaagcuua

SEQ ID NO: 757681 - RNA, 19 nt, Human
gcuguauuaaagauacaug

SEQ ID NO: 757682 - RNA, 22 nt, Human
gauauuuucgcagggagaauuc

SEQ ID NO: 757683 - RNA, 22 nt, Human
acacauguuuccaaaagcaccc

SEQ ID NO: 757684 - RNA, 22 nt, Human
gagccagccgcaagagcuguga

SEQ ID NO: 757685 - RNA, 22 nt, Human
gcauccaaauguuucauuucuu

SEQ ID NO: 757686 - RNA, 22 nt, Human
auacaaguuaaugagaaugaca

SEQ ID NO: 757687 - RNA, 22 nt, Human
gacuuugguuugagcaagucag

SEQ ID NO: 757688 - RNA, 22 nt, Human
guaguuuucugaaaauuacuuu

SEQ ID NO: 757689 - RNA, 22 nt, Human
uugaggucccaaacccacugag

SEQ ID NO: 757690 - RNA, 22 nt, Human
uuucagguaagaaaacuaagaa

SEQ ID NO: 757691 - RNA, 22 nt, Human
acauuucuaguuguucaucucc

SEQ ID NO: 757692 - RNA, 22 nt, Human
ucuuucccgccagagcaugagu

SEQ ID NO: 757693 - RNA, 22 nt, Human
ucuaugcuugagacagaugggg

SEQ ID NO: 757694 - RNA, 22 nt, Human
auaugcuggaguacaggaaaua

SEQ ID NO: 757695 - RNA, 22 nt, Human
gucccucacccagaugcuccca

SEQ ID NO: 757696 - RNA, 22 nt, Human
ccucuacuuaccacucagccag

SEQ ID NO: 757697 - RNA, 22 nt, Human
ugaaauguuuggguccagaagu

SEQ ID NO: 757698 - RNA, 22 nt, Human
cugagcuuaacccuguuagcaa

SEQ ID NO: 757699 - RNA, 23 nt, Human
ggccacuuugugucaguaugugc

SEQ ID NO: 757700 - RNA, 22 nt, Human
ugcaggguagaugcaggcugug

SEQ ID NO: 757701 - RNA, 22 nt, Human
agagccacugggagacagagca

SEQ ID NO: 757702 - RNA, 23 nt, Human
agggaacaagcaagcugcuaguc

SEQ ID NO: 757703 - RNA, 22 nt, Human
agaugaagacucaggagcaggu

SEQ ID NO: 757704 - RNA, 22 nt, Human
cuuuccuagaaauauauacuua

SEQ ID NO: 757705 - RNA, 22 nt, Human
acaguguucugcuuuuuaaucc

SEQ ID NO: 757706 - RNA, 22 nt, Human
acauuucaguaaguguuaauuu

SEQ ID NO: 757707 - RNA, 22 nt, Human
uggcugugggaugagagccuca

SEQ ID NO: 757708 - RNA, 22 nt, Human
aaguuacaguuacagaauggag

SEQ ID NO: 757709 - RNA, 22 nt, Human
uaguauuugcagauuuguguca

SEQ ID NO: 757710 - RNA, 22 nt, Human
gugacaaaaacacugauuauuu

SEQ ID NO: 757711 - RNA, 22 nt, Human
accagggcacaggagucugaag

SEQ ID NO: 757712 - RNA, 20 nt, Human
ugccgggcagccugaggagu

SEQ ID NO: 757713 - RNA, 23 nt, Human
gcugagguccugcugaguggugg

SEQ ID NO: 757714 - RNA, 22 nt, Human
caaaagcaguucuaucugaguu

SEQ ID NO: 757715 - RNA, 22 nt, Human
uuuaguguagccuaagcagaau

SEQ ID NO: 757716 - RNA, 22 nt, Human
gaaggccugugguagugagacg

SEQ ID NO: 757717 - RNA, 22 nt, Human
aguggcggggauuagcaguguu

SEQ ID NO: 757718 - RNA, 22 nt, Human
uugcaggguacauucuuagaau

SEQ ID NO: 757719 - RNA, 22 nt, Human
cuguagcuccagccugucuaca

SEQ ID NO: 757720 - RNA, 22 nt, Human
uugggcccauggggcuaagcua

SEQ ID NO: 757721 - RNA, 22 nt, Human
caggggacaguaugguggauga

SEQ ID NO: 757722 - RNA, 22 nt, Human
uaguacagaauuaauaauugug

SEQ ID NO: 757723 - RNA, 22 nt, Human
ugaaggcacguggguggauacu

SEQ ID NO: 757724 - RNA, 22 nt, Human
cuccgugcuauuuuaguaucgc

SEQ ID NO: 757725 - RNA, 22 nt, Human
aaagacuaaccaguugucaaaa

SEQ ID NO: 757726 - RNA, 21 nt, Human
uuaaagcuaugguagugggcu

SEQ ID NO: 757727 - RNA, 22 nt, Human
gcagaagcugggagaagggauu

SEQ ID NO: 757728 - RNA, 22 nt, Human
cagaugaacucuauccuguggc

SEQ ID NO: 757729 - RNA, 22 nt, Human
uuauacagggaguuucccugca

SEQ ID NO: 757730 - RNA, 22 nt, Human
cagauaacacaaagaaaugggc

SEQ ID NO: 757731 - RNA, 22 nt, Human
uuugcaaauaccaugaaacuug

SEQ ID NO: 757732 - RNA, 21 nt, Human
ccccugggagcccugucagua

SEQ ID NO: 757733 - RNA, 21 nt, Human
gcagggaccgcgacuucuggg

SEQ ID NO: 757734 - RNA, 20 nt, Human
gcuuccuucccagcccccac

SEQ ID NO: 757735 - RNA, 18 nt, Human
gagaaaguuugggcagaa

SEQ ID NO: 757736 - RNA, 22 nt, Human
uaacacuggcuuuugcugaggc

SEQ ID NO: 757737 - RNA, 18 nt, Human
ccuagccuccaagcucau

SEQ ID NO: 757738 - RNA, 22 nt, Human
uuccuggaaauuaugcucaccu

SEQ ID NO: 757739 - RNA, 22 nt, Human
guucucucucuugccugggugg

SEQ ID NO: 757740 - RNA, 22 nt, Human
ccuguugucauggaauaaguua

SEQ ID NO: 757741 - RNA, 22 nt, Human
gcuggcaccugcaccaagcagg

SEQ ID NO: 757742 - RNA, 22 nt, Human
gugaagcauaugcuucucugcc

SEQ ID NO: 757743 - RNA, 22 nt, Human
gagagggagccagccaggaacc

SEQ ID NO: 757744 - RNA, 22 nt, Human
gagcuguguucaugaggagaaa

SEQ ID NO: 757745 - RNA, 22 nt, Human
acaaugucugcuauuuggcucu

SEQ ID NO: 757746 - RNA, 22 nt, Human
ccaggugugcucugcaguggau

SEQ ID NO: 757747 - RNA, 22 nt, Human
uaacuugaccuguauaaaacac

SEQ ID NO: 757748 - RNA, 22 nt, Human
acugagcagaacaaugggagcc

SEQ ID NO: 757749 - RNA, 22 nt, Human
uugugucccccuuugagagcca

SEQ ID NO: 757750 - RNA, 22 nt, Human
gaagcagcuaggaucuucauuu

SEQ ID NO: 757751 - RNA, 20 nt, Human
ugaauagagagcacauaugc

SEQ ID NO: 757752 - RNA, 22 nt, Human
gcaguguuucccagagauggaa

SEQ ID NO: 757753 - RNA, 22 nt, Human
auguggcuuuucuaacccuucc

SEQ ID NO: 757754 - RNA, 22 nt, Human
ucugccaguuuauagacaagcc

SEQ ID NO: 757755 - RNA, 22 nt, Human
agcacccucagccuuauccaga

SEQ ID NO: 757756 - RNA, 18 nt, Human
cuugagcuaagggacccc

SEQ ID NO: 757757 - RNA, 22 nt, Human
ugcugaggucaccuugcugcua

SEQ ID NO: 757758 - RNA, 22 nt, Human
ugcauuauacuuuuagaaauuu

SEQ ID NO: 757759 - RNA, 22 nt, Human
ucucuucacaugcuugcuccaa

SEQ ID NO: 757760 - RNA, 22 nt, Human
ccagaaguggcuuucucaggga

SEQ ID NO: 757761 - RNA, 22 nt, Human
uuccuguaguugugcaauguac

SEQ ID NO: 757762 - RNA, 22 nt, Human
auucagaauuuuggggagcuaa

SEQ ID NO: 757763 - RNA, 22 nt, Human
aggcugugagcaagaacaccua

SEQ ID NO: 757764 - RNA, 22 nt, Human
gugcuuggaccaggucaucuuc

SEQ ID NO: 757765 - RNA, 22 nt, Human
aucacuguuaucuagaagcaca

SEQ ID NO: 757766 - RNA, 22 nt, Human
gcccugcuguuuagagagcuac

SEQ ID NO: 757767 - RNA, 22 nt, Human
cucaugugcaaaaguccaaauu

SEQ ID NO: 757768 - RNA, 22 nt, Human
cagagcagauuucuaaguauug

SEQ ID NO: 757769 - RNA, 21 nt, Human
ggaaaacuuuccuugucugaa

SEQ ID NO: 757770 - RNA, 22 nt, Human
cauggcuucaugaggguuuugc

SEQ ID NO: 757771 - RNA, 22 nt, Human
acaacuucucacagauaaauuu

SEQ ID NO: 757772 - RNA, 22 nt, Human
cagcagugcuucagugugagau

SEQ ID NO: 757773 - RNA, 18 nt, Human
ggaagauuggcuaugugc

SEQ ID NO: 757774 - RNA, 22 nt, Human
gccaggcgggucucaaacuccu

SEQ ID NO: 757775 - RNA, 22 nt, Human
uguccucuaauuggccucuugc

SEQ ID NO: 757776 - RNA, 22 nt, Human
agcagggaggcggugugcuggc

SEQ ID NO: 757777 - RNA, 22 nt, Human
aaagagaugugccaaauagccu

SEQ ID NO: 757778 - RNA, 22 nt, Human
aggcauauacucucagaaaaaa

SEQ ID NO: 757779 - RNA, 22 nt, Human
gaagaggacuguggcauccuag

SEQ ID NO: 757780 - RNA, 22 nt, Human
ucccagagacaucauuucuccg

SEQ ID NO: 757781 - RNA, 22 nt, Human
uggcaaaggaaaugauuuaaga

SEQ ID NO: 757782 - RNA, 22 nt, Human
ccugagcuugauccuucugucu

SEQ ID NO: 757783 - RNA, 22 nt, Human
uacuuugaccaccaucugauua

SEQ ID NO: 757784 - RNA, 22 nt, Human
aaggauuuguccaaagucacac

SEQ ID NO: 757785 - RNA, 22 nt, Human
ccaguccucagauggucugugc

SEQ ID NO: 757786 - RNA, 22 nt, Human
uguauacauucucuuggguuug

SEQ ID NO: 757787 - RNA, 22 nt, Human
uccagcccagcuccucucagaa

SEQ ID NO: 757788 - RNA, 22 nt, Human
ccugaagauccauuauagacac

SEQ ID NO: 757789 - RNA, 22 nt, Human
gcagagcagagccugcauuggc

SEQ ID NO: 757790 - RNA, 22 nt, Human
aaacaucaauugcaucucccaa

SEQ ID NO: 757791 - RNA, 22 nt, Human
caccaggcugaaccagagggga

SEQ ID NO: 757792 - RNA, 22 nt, Human
agcuauuucaaaguuugagaca

SEQ ID NO: 757793 - RNA, 22 nt, Human
ggccccuggcaccaggcugauu

SEQ ID NO: 757794 - RNA, 22 nt, Human
gggaaagagugcuuguccagag

SEQ ID NO: 757795 - RNA, 22 nt, Human
cccagugugccccuccugcagc

SEQ ID NO: 757796 - RNA, 22 nt, Human
aaguuauaucaucucauugacg

SEQ ID NO: 757797 - RNA, 22 nt, Human
caugggcaguuggcagggcuca

SEQ ID NO: 757798 - RNA, 22 nt, Human
uuucuccaauguaucagcacac

SEQ ID NO: 757799 - RNA, 22 nt, Human
ucucugugaguggaaggcaccc

SEQ ID NO: 757800 - RNA, 22 nt, Human
gcuggcugccaauuucagagcu

SEQ ID NO: 757801 - RNA, 22 nt, Human
agagcugaauuuggguggugga

SEQ ID NO: 757802 - RNA, 22 nt, Human
cuggcccugccuaauguacuug

SEQ ID NO: 757803 - RNA, 22 nt, Human
gcuuugcuaugacucaccagca

SEQ ID NO: 757804 - RNA, 22 nt, Human
aaaugcacacaccaggaaacua

SEQ ID NO: 757805 - RNA, 22 nt, Human
ugaucaguguugguucuaucua

SEQ ID NO: 757806 - RNA, 22 nt, Human
aguccaaggccauacaguugug

SEQ ID NO: 757807 - RNA, 22 nt, Human
cuccucucaaaaguagguugac

SEQ ID NO: 757808 - RNA, 18 nt, Human
uaguggaacugcucuggg

SEQ ID NO: 757809 - RNA, 19 nt, Human
gcccugaguaagcuaggag

SEQ ID NO: 757810 - RNA, 22 nt, Human
ucacccagacagcuugcacuga

SEQ ID NO: 757811 - RNA, 22 nt, Human
cugcuuuauagggcuuccaugu

SEQ ID NO: 757812 - RNA, 22 nt, Human
aagucuuuuugaaucuauaacu

SEQ ID NO: 757813 - RNA, 22 nt, Human
ucuguugguucuguuucucuga

SEQ ID NO: 757814 - RNA, 21 nt, Human
gcagaggcacggcaccaaggg

SEQ ID NO: 757815 - RNA, 22 nt, Human
cacugcacaggugagauguggg

SEQ ID NO: 757816 - RNA, 22 nt, Human
gggaacagagugccagacugac

SEQ ID NO: 757817 - RNA, 22 nt, Human
cugagcagcaccuucaagaaac

SEQ ID NO: 757818 - RNA, 22 nt, Human
auuuuccaaaauaauuguuacu

SEQ ID NO: 757819 - RNA, 22 nt, Human
acucuugaacugauuaagaaug

SEQ ID NO: 757820 - RNA, 22 nt, Human
cagagauaccauugcuaaaauu

SEQ ID NO: 757821 - RNA, 22 nt, Human
gcccaugcucucaggcgggccu

SEQ ID NO: 757822 - RNA, 22 nt, Human
uuucuacagaagauacacugcu

SEQ ID NO: 757823 - RNA, 22 nt, Human
ccacugccucuccagggccauc

SEQ ID NO: 757824 - RNA, 22 nt, Human
gcacuucaccacuguccugguu

SEQ ID NO: 757825 - RNA, 22 nt, Human
cggggcagagggucuucuccag

SEQ ID NO: 757826 - RNA, 22 nt, Human
agguggcagaggacuccuccug

SEQ ID NO: 757827 - RNA, 22 nt, Human
cacaugagguggagaugaauga

SEQ ID NO: 757828 - RNA, 22 nt, Human
cuguggggaagauagaaccgac

SEQ ID NO: 757829 - RNA, 22 nt, Human
agcagaagaaagccacaugacu

SEQ ID NO: 757830 - RNA, 22 nt, Human
gaggcacaccagggagucuugu

SEQ ID NO: 757831 - RNA, 22 nt, Human
cuucaagagaaugcagggaugu

SEQ ID NO: 757832 - RNA, 22 nt, Human
gccugaugagcuuccagcugag

SEQ ID NO: 757833 - RNA, 22 nt, Human
gcucugagagugggugauucug

SEQ ID NO: 757834 - RNA, 22 nt, Human
uauggauggaaagggccaagcu

SEQ ID NO: 757835 - RNA, 22 nt, Human
cagaggccaguggacaagggcc

SEQ ID NO: 757836 - RNA, 22 nt, Human
uggagggcauagcuguucuuuc

SEQ ID NO: 757837 - RNA, 22 nt, Human
aaggccuggauuuagguuguga

SEQ ID NO: 757838 - RNA, 22 nt, Human
gagggaugcagaaacagaggcc

SEQ ID NO: 757839 - RNA, 22 nt, Human
uucuaucauacuugaauacauu

SEQ ID NO: 757840 - RNA, 22 nt, Human
auguuucccagagcaaaucugg

SEQ ID NO: 757841 - RNA, 22 nt, Human
ugcuacacucaaucagugcuau

SEQ ID NO: 757842 - RNA, 22 nt, Human
cacccuagcugucauuucaguu

SEQ ID NO: 757843 - RNA, 18 nt, Human
aacuucaacuacaaugga

SEQ ID NO: 757844 - RNA, 22 nt, Human
ucucugugucuuagugaaggga

SEQ ID NO: 757845 - RNA, 22 nt, Human
auauggcauuuuaauguaugag

SEQ ID NO: 757846 - RNA, 22 nt, Human
gaauuuuaauaaagguuuauca

SEQ ID NO: 757847 - RNA, 22 nt, Human
aguggcagagaccccagccagc

SEQ ID NO: 757848 - RNA, 22 nt, Human
ucuaaggacauuggcuuuggag

SEQ ID NO: 757849 - RNA, 22 nt, Human
cccuuuggaagaggcucacuga

SEQ ID NO: 757850 - RNA, 20 nt, Human
cccagaagcuuaacagagca

SEQ ID NO: 757851 - RNA, 22 nt, Human
uuaguuaggauuuggugguaua

SEQ ID NO: 757852 - RNA, 22 nt, Human
aaguuuuugguagagaaaagua

SEQ ID NO: 757853 - RNA, 22 nt, Human
acuggauugggaaaguacuuca

SEQ ID NO: 757854 - RNA, 22 nt, Human
uaaaguuuguagcaauugauau

SEQ ID NO: 757855 - RNA, 22 nt, Human
ugaagcaauagagacaagacca

SEQ ID NO: 757856 - RNA, 22 nt, Human
aagcaauaaauaauuuuuagua

SEQ ID NO: 757857 - RNA, 22 nt, Human
uucuguauguacauauguguau

SEQ ID NO: 757858 - RNA, 22 nt, Human
acuguugucaggcugcuuugga

SEQ ID NO: 757859 - RNA, 22 nt, Human
cagucuaagacucacgccaaga

SEQ ID NO: 757860 - RNA, 22 nt, Human
cccaggagacagaaacagaggu

SEQ ID NO: 757861 - RNA, 22 nt, Human
uuggcugcugaaauauguucug

SEQ ID NO: 757862 - RNA, 22 nt, Human
gaggcuccccaugaggccccag

SEQ ID NO: 757863 - RNA, 22 nt, Human
uuucaaggccuucugguucagu

SEQ ID NO: 757864 - RNA, 22 nt, Human
uugaaguugcacauuauaauuu

SEQ ID NO: 757865 - RNA, 22 nt, Human
augugugcauauucugccaccu

SEQ ID NO: 757866 - RNA, 22 nt, Human
acauuuguaugcguuuuuacug

SEQ ID NO: 757867 - RNA, 20 nt, Human
uccagcucaguuuuuuuguc

SEQ ID NO: 757868 - RNA, 23 nt, Human
uccugcugaaagcuccagcuggc

SEQ ID NO: 757869 - RNA, 22 nt, Human
uuugacagacauuuacuacauu

SEQ ID NO: 757870 - RNA, 22 nt, Human
ccugagggcucagcccccagcc

SEQ ID NO: 757871 - RNA, 22 nt, Human
ucaggcugagaaaaucuggacc

SEQ ID NO: 757872 - RNA, 22 nt, Human
cugagcucaagugaucugccca

SEQ ID NO: 757873 - RNA, 22 nt, Human
ugggcagcaaagacugugugcu

SEQ ID NO: 757874 - RNA, 22 nt, Human
uccuuagggauuuuuccaguca

SEQ ID NO: 757875 - RNA, 22 nt, Human
uagcacaugccgggagugaucu

SEQ ID NO: 757876 - RNA, 22 nt, Human
uauaacaguuuaggugguguca

SEQ ID NO: 757877 - RNA, 22 nt, Human
ggcuuuauuuugcaugaaugcu

SEQ ID NO: 757878 - RNA, 22 nt, Human
uaguuugagaauugaaauagaa

SEQ ID NO: 757879 - RNA, 22 nt, Human
aauagaggagcuuuggacuccc

SEQ ID NO: 757880 - RNA, 22 nt, Human
aggcagcuuuaacugguaguag

SEQ ID NO: 757881 - RNA, 22 nt, Human
ugacuucucuggccuggugcag

SEQ ID NO: 757882 - RNA, 22 nt, Human
ugugcucugaagagugcauguc

SEQ ID NO: 757883 - RNA, 22 nt, Human
ugcaauacucaucauuggagau

SEQ ID NO: 757884 - RNA, 22 nt, Human
aguguauuaugcagcggagguc

SEQ ID NO: 757885 - RNA, 22 nt, Human
uuuuagauugggaaauguaaag

SEQ ID NO: 757886 - RNA, 22 nt, Human
gacauuggguguacaauuggca

SEQ ID NO: 757887 - RNA, 21 nt, Human
ucccacuggcccagggcucca

SEQ ID NO: 757888 - RNA, 23 nt, Human
auguuauuauuagcagucuugcc

SEQ ID NO: 757889 - RNA, 22 nt, Human
aguacaaaugcagccagaguag

SEQ ID NO: 757890 - RNA, 22 nt, Human
uagugaauaguccaaucccgca

SEQ ID NO: 757891 - RNA, 22 nt, Human
auuugugaauuaagcaugucaa

SEQ ID NO: 757892 - RNA, 22 nt, Human
cugacucugacaggacuugugg

SEQ ID NO: 757893 - RNA, 22 nt, Human
cugacccuuaaugagcaaguaa

SEQ ID NO: 757894 - RNA, 22 nt, Human
uuguuuuaagccagucugccua

SEQ ID NO: 757895 - RNA, 22 nt, Human
auucagacugucuaaaugguuu

SEQ ID NO: 757896 - RNA, 22 nt, Human
acaguggagaaggcaugaggcu

SEQ ID NO: 757897 - RNA, 22 nt, Human
gcugccuccugaaagcgcucug

SEQ ID NO: 757898 - RNA, 22 nt, Human
ccacuuccugcagguaaggagc

SEQ ID NO: 757899 - RNA, 21 nt, Human
auacauucuauuaagcauuua

SEQ ID NO: 757900 - RNA, 22 nt, Human
uucuuacauuagucugugcuuu

SEQ ID NO: 757901 - RNA, 22 nt, Human
cuuuacuucucaaaauaaagca

SEQ ID NO: 757902 - RNA, 22 nt, Human
ugcauguguuugccacagugag

SEQ ID NO: 757903 - RNA, 21 nt, Human
cagaggcugagagggcaaucu

SEQ ID NO: 757904 - RNA, 22 nt, Human
auuguauaauuguauugccaaa

SEQ ID NO: 757905 - RNA, 22 nt, Human
ucuguagguuaaaaguagacaa

SEQ ID NO: 757906 - RNA, 22 nt, Human
agcacguucuucauuacuucac

SEQ ID NO: 757907 - RNA, 22 nt, Human
augucaccuucgguggcacggu

SEQ ID NO: 757908 - RNA, 22 nt, Human
uugagcaaaucagaaguuuaga

SEQ ID NO: 757909 - RNA, 19 nt, Human
gucuuggcucucaaccauc

SEQ ID NO: 757910 - RNA, 22 nt, Human
ugcugagaggaaggugcacugg

SEQ ID NO: 757911 - RNA, 21 nt, Human
guauugcagaguuaugugcuc

SEQ ID NO: 757912 - RNA, 22 nt, Human
acauucuauagcaagcugaucu

SEQ ID NO: 757913 - RNA, 22 nt, Human
caagagcucaccggagagcauu

SEQ ID NO: 757914 - RNA, 22 nt, Human
cucagaguccccaguggguuug

SEQ ID NO: 757915 - RNA, 22 nt, Human
acacuaguggaaauugauuugu

SEQ ID NO: 757916 - RNA, 22 nt, Human
cuugccuucuguuccuauagaa

SEQ ID NO: 757917 - RNA, 22 nt, Human
cacauucacuucucuguccacc

SEQ ID NO: 757918 - RNA, 22 nt, Human
ugaggccauggaacuagcuugg

SEQ ID NO: 757919 - RNA, 22 nt, Human
aauuccaacagacaaaguuaga

SEQ ID NO: 757920 - RNA, 22 nt, Human
auacagcuuucuuucacaugag

SEQ ID NO: 757921 - RNA, 22 nt, Human
cacagugcaugaugggcagaag

SEQ ID NO: 757922 - RNA, 22 nt, Human
gccccacagccugcggucucag

SEQ ID NO: 757923 - RNA, 22 nt, Human
cacaguuugguauagaagugau

SEQ ID NO: 757924 - RNA, 22 nt, Human
ggcuuuauauuguuugagcaga

SEQ ID NO: 757925 - RNA, 22 nt, Human
gcagauggugggggaggaguac

SEQ ID NO: 757926 - RNA, 22 nt, Human
gauuuuacugucuguguaucuc

SEQ ID NO: 757927 - RNA, 22 nt, Human
gagcugugcuuauaccaauuca

SEQ ID NO: 757928 - RNA, 22 nt, Human
ugugugucuggaagcucaggga

SEQ ID NO: 757929 - RNA, 22 nt, Human
uccugggacucugccucaggcu

SEQ ID NO: 757930 - RNA, 22 nt, Human
acagcccagaaagccuaagggg

SEQ ID NO: 757931 - RNA, 22 nt, Human
cugaauuaagcauuacauacau

SEQ ID NO: 757932 - RNA, 22 nt, Human
acacagagcaaaucaugacaga

SEQ ID NO: 757933 - RNA, 22 nt, Human
gaaaauaggcugcaucuccuuc

SEQ ID NO: 757934 - RNA, 22 nt, Human
agaaaucaugacuaagagcagu

SEQ ID NO: 757935 - RNA, 22 nt, Human
ucagacuucuacuuugcagagc

SEQ ID NO: 757936 - RNA, 22 nt, Human
gcucugcugauccgcagccauc

SEQ ID NO: 757937 - RNA, 21 nt, Human
caauggcgagaucuuggcuca

SEQ ID NO: 757938 - RNA, 22 nt, Human
guuuuccauggaggucugaccu

SEQ ID NO: 757939 - RNA, 21 nt, Human
ugcaguauguauuuguaucca

SEQ ID NO: 757940 - RNA, 22 nt, Human
aagacagugacagucacaauug

SEQ ID NO: 757941 - RNA, 22 nt, Human
ggguggcagcuguugccaaggu

SEQ ID NO: 757942 - RNA, 18 nt, Human
uggacacauggccugggu

SEQ ID NO: 757943 - RNA, 23 nt, Human
ucuuuacauacugaugaguucuc

SEQ ID NO: 757944 - RNA, 22 nt, Human
acacaugcauaagccuucccuu

SEQ ID NO: 757945 - RNA, 22 nt, Human
cacacaugguuccgcaggaugc

SEQ ID NO: 757946 - RNA, 22 nt, Human
gggagacacgcugcaggcauaa

SEQ ID NO: 757947 - RNA, 22 nt, Human
uacugaaagaauacauaauuuc

SEQ ID NO: 757948 - RNA, 22 nt, Human
aauguucagcgagggaugcuag

SEQ ID NO: 757949 - RNA, 22 nt, Human
gugcaaccaucaccacugacuc

SEQ ID NO: 757950 - RNA, 22 nt, Human
uuggaauagggaggcuggcaua

SEQ ID NO: 757951 - RNA, 22 nt, Human
agggaagcaauauuagauauca

SEQ ID NO: 757952 - RNA, 22 nt, Human
agcucccagaaggcccugcgcc

SEQ ID NO: 757953 - RNA, 22 nt, Human
gaauagauuauacuugaagcau

SEQ ID NO: 757954 - RNA, 22 nt, Human
aaagagccgcugaugucagccc

SEQ ID NO: 757955 - RNA, 22 nt, Human
gcccugggcucccugcuccaca

SEQ ID NO: 757956 - RNA, 22 nt, Human
cuggcucugggcuaagcuccca

SEQ ID NO: 757957 - RNA, 22 nt, Human
ucuucuuccuccacagggccca

SEQ ID NO: 757958 - RNA, 22 nt, Human
uucuuuuaauuucugucugcag

SEQ ID NO: 757959 - RNA, 22 nt, Human
ggagucugauuuuuuaugggug

SEQ ID NO: 757960 - RNA, 22 nt, Human
ucaggcucugagcugaugcuaa

SEQ ID NO: 757961 - RNA, 22 nt, Human
gugugauaacagggcaugacgg

SEQ ID NO: 757962 - RNA, 22 nt, Human
aaguaaaagcaggugugcuggg

SEQ ID NO: 757963 - RNA, 22 nt, Human
ucugccuguugagccuaaggcc

SEQ ID NO: 757964 - RNA, 22 nt, Human
aacacagguucauucugugagg

SEQ ID NO: 757965 - RNA, 22 nt, Human
cuguaugauuccauuucuauaa

SEQ ID NO: 757966 - RNA, 22 nt, Human
cugaggcacagugaacuucucc

SEQ ID NO: 757967 - RNA, 22 nt, Human
ugggggugguucuugccuccag

SEQ ID NO: 757968 - RNA, 22 nt, Human
gggaaggcauaccugagggaga

SEQ ID NO: 757969 - RNA, 18 nt, Human
ugaauagggguuugcaga

SEQ ID NO: 757970 - RNA, 22 nt, Human
ugcaacaggcugugacauggaa

SEQ ID NO: 757971 - RNA, 22 nt, Human
ggagaagggacagacucagcuu

SEQ ID NO: 757972 - RNA, 22 nt, Human
caggaacaauaucuguccuggu

SEQ ID NO: 757973 - RNA, 22 nt, Human
agggcagcucucaccucuggcc

SEQ ID NO: 757974 - RNA, 22 nt, Human
uaaguauguuagaaaaucaagu

SEQ ID NO: 757975 - RNA, 22 nt, Human
acacauguauguuuuguauuug

SEQ ID NO: 757976 - RNA, 22 nt, Human
caguggguccugcgucugccag

SEQ ID NO: 757977 - RNA, 22 nt, Human
aaggaaauacaacauguauuca

SEQ ID NO: 757978 - RNA, 22 nt, Human
gccuucaguagugucagcugua

SEQ ID NO: 757979 - RNA, 22 nt, Human
acagaugcgcuugguugccaga

SEQ ID NO: 757980 - RNA, 22 nt, Human
ggcagucuuucccuugagcucu

SEQ ID NO: 757981 - RNA, 22 nt, Human
gcucaggaaggcucaaccagga

SEQ ID NO: 757982 - RNA, 19 nt, Human
ggccuuggggucccaaagu

SEQ ID NO: 757983 - RNA, 22 nt, Human
agccuggcggucgucggucagg

SEQ ID NO: 757984 - RNA, 22 nt, Human
cugugagauuuuuaaauaacuu

SEQ ID NO: 757985 - RNA, 22 nt, Human
ccacccagcagaggaggcaaga

SEQ ID NO: 757986 - RNA, 22 nt, Human
gcuguucugcgucccaggcugg

SEQ ID NO: 757987 - RNA, 22 nt, Human
uugcagcugcaguaaauguuca

SEQ ID NO: 757988 - RNA, 22 nt, Human
uauguguauaucuguaugugca

SEQ ID NO: 757989 - RNA, 22 nt, Human
cucagacacagccccacgaagu

SEQ ID NO: 757990 - RNA, 22 nt, Human
gaauugcucugccuggccagcc

SEQ ID NO: 757991 - RNA, 22 nt, Human
uagcaucugcguuggguuggac

SEQ ID NO: 757992 - RNA, 22 nt, Human
agucucugcugguugugccuau

SEQ ID NO: 757993 - RNA, 22 nt, Human
uccagcccugcacugauuagau

SEQ ID NO: 757994 - RNA, 22 nt, Human
gucauuuuaugggaacagauuu

SEQ ID NO: 757995 - RNA, 16 nt, Human
ccaggaacacacagcu

SEQ ID NO: 757996 - RNA, 22 nt, Human
auggaaauggagugugcuugcu

SEQ ID NO: 757997 - RNA, 22 nt, Human
uuugcaaaaugaggugaagagu

SEQ ID NO: 757998 - RNA, 23 nt, Human
accuuggacuucccagcuuccag

SEQ ID NO: 757999 - RNA, 22 nt, Human
auacaugugggucuaaacauau

SEQ ID NO: 758000 - RNA, 19 nt, Human
agggagaauuccaagagga

SEQ ID NO: 758001 - RNA, 22 nt, Human
auaauggcaugacaguuauaua

SEQ ID NO: 758002 - RNA, 22 nt, Human
uuucugcauuuacaaaaugagg

SEQ ID NO: 758003 - RNA, 22 nt, Human
uccagcuugacaaaugauuuua

SEQ ID NO: 758004 - RNA, 22 nt, Human
ccuggcucugguucccucagcu

SEQ ID NO: 758005 - RNA, 22 nt, Human
uuucuggaaacuguaaagagga

SEQ ID NO: 758006 - RNA, 22 nt, Human
acuucuugggacccuggcaccg

SEQ ID NO: 758007 - RNA, 22 nt, Human
gagccagggcugugagcugagc

SEQ ID NO: 758008 - RNA, 18 nt, Human
gcugagcaaauuccuccc

SEQ ID NO: 758009 - RNA, 22 nt, Human
uucagagaaacugagguuuaga

SEQ ID NO: 758010 - RNA, 22 nt, Human
uuggaaaugcauuuguuauuau

SEQ ID NO: 758011 - RNA, 22 nt, Human
uggcacagccacugaaucggga

SEQ ID NO: 758012 - RNA, 22 nt, Human
cugcaggcugagcgccugccgg

SEQ ID NO: 758013 - RNA, 22 nt, Human
caggcugggcugguguuagagu

SEQ ID NO: 758014 - RNA, 22 nt, Human
ugcauuaaaaugauggagaaau

SEQ ID NO: 758015 - RNA, 22 nt, Human
gggagagcgggaggugccacag

SEQ ID NO: 758016 - RNA, 22 nt, Human
ggcuccugggagauagagguca

SEQ ID NO: 758017 - RNA, 20 nt, Human
ugaagauuuuguguuuagaa

SEQ ID NO: 758018 - RNA, 18 nt, Human
ggucaggggcggagagaa

SEQ ID NO: 758019 - RNA, 17 nt, Human
uggcaugaggguguggg

SEQ ID NO: 758020 - RNA, 22 nt, Human
agagccuggagguucugcugaa

SEQ ID NO: 758021 - RNA, 22 nt, Human
ugggugccaaccucugguggcc

SEQ ID NO: 758022 - RNA, 19 nt, Human
guggccagggcaggggcug

SEQ ID NO: 758023 - RNA, 22 nt, Human
cgucauccuuuggaugaaucac

SEQ ID NO: 758024 - RNA, 17 nt, Human
cucuccuuccucugagg

SEQ ID NO: 758025 - RNA, 22 nt, Human
ucuucagacccuuagcugugau

SEQ ID NO: 758026 - RNA, 22 nt, Human
ucauguuuuaguaaagugaagg

SEQ ID NO: 758027 - RNA, 18 nt, Human
aaaugcuaggcuacauga

SEQ ID NO: 758028 - RNA, 22 nt, Human
acaauagacaaagugaauggcu

SEQ ID NO: 758029 - RNA, 22 nt, Human
ucuggaauucucaaguccugga

SEQ ID NO: 758030 - RNA, 22 nt, Human
uucucaggccccugccuggacu

SEQ ID NO: 758031 - RNA, 22 nt, Human
cugucuccagggcaggugcagg

SEQ ID NO: 758032 - RNA, 22 nt, Human
aggaacaauugauaaacucaca

SEQ ID NO: 758033 - RNA, 20 nt, Human
uucuaacuacucucccuuug

SEQ ID NO: 758034 - RNA, 22 nt, Human
aggcucaguucacgucaacuuu

SEQ ID NO: 758035 - RNA, 22 nt, Human
gaauuuuaaguguucgccucuu

SEQ ID NO: 758036 - RNA, 22 nt, Human
gagcuuuagcugagaccugcuu

SEQ ID NO: 758037 - RNA, 22 nt, Human
acaguaauuaaaauggaucugc

SEQ ID NO: 758038 - RNA, 22 nt, Human
ugcuggagaccugcuugcacca

SEQ ID NO: 758039 - RNA, 23 nt, Human
acagccaggaugggagcagaagc

SEQ ID NO: 758040 - RNA, 22 nt, Human
cauguugaauggccuugauuuu

SEQ ID NO: 758041 - RNA, 22 nt, Human
uauacaguuugaguucuugcau

SEQ ID NO: 758042 - RNA, 22 nt, Human
gaggccuggagccgccuaggcg

SEQ ID NO: 758043 - RNA, 22 nt, Human
gcaauacaguaagaguacugua

SEQ ID NO: 758044 - RNA, 22 nt, Human
ucugcguccaucugccugcuug

SEQ ID NO: 758045 - RNA, 22 nt, Human
caaggcauuaccauggcuagag

SEQ ID NO: 758046 - RNA, 22 nt, Human
aaggcacuuuuccugagaugau

SEQ ID NO: 758047 - RNA, 20 nt, Human
cuagucucacaucccuggca

SEQ ID NO: 758048 - RNA, 22 nt, Human
uggcucuuuucacguccccucu

SEQ ID NO: 758049 - RNA, 22 nt, Human
uaggcucacauagcacuaagug

SEQ ID NO: 758050 - RNA, 21 nt, Human
uggcacugcuuagcagguucc

SEQ ID NO: 758051 - RNA, 22 nt, Human
gcagaggaggacccaggaauua

SEQ ID NO: 758052 - RNA, 22 nt, Human
gugaaaaaugauuuguuaacug

SEQ ID NO: 758053 - RNA, 20 nt, Human
caggugagcagaucugggug

SEQ ID NO: 758054 - RNA, 22 nt, Human
ugggccguggagcacucugaga

SEQ ID NO: 758055 - RNA, 22 nt, Human
gguucacuccgaucucugccuc

SEQ ID NO: 758056 - RNA, 22 nt, Human
gagaggaauaucauuauauuag

SEQ ID NO: 758057 - RNA, 22 nt, Human
gguggcaguuacaggggcaaau

SEQ ID NO: 758058 - RNA, 22 nt, Human
ucccucugggcuggagcagggu

SEQ ID NO: 758059 - RNA, 22 nt, Human
aaagaucugacuuagacacaga

SEQ ID NO: 758060 - RNA, 22 nt, Human
uguauacaggauuacucauagc

SEQ ID NO: 758061 - RNA, 22 nt, Human
uauaggcucuuguuaaccuuuu

SEQ ID NO: 758062 - RNA, 22 nt, Human
auuugcuugugcuaugaaaguu

SEQ ID NO: 758063 - RNA, 22 nt, Human
uugcugugucugauggcugaga

SEQ ID NO: 758064 - RNA, 22 nt, Human
auauauagagcuagauguuaaa

SEQ ID NO: 758065 - RNA, 22 nt, Human
ucacccagacuugugaaugugu

SEQ ID NO: 758066 - RNA, 21 nt, Human
uuuuaugcauaggaaauauau

SEQ ID NO: 758067 - RNA, 19 nt, Human
agucucaguguacagaggc

SEQ ID NO: 758068 - RNA, 22 nt, Human
ugcugggcccagggagccucug

SEQ ID NO: 758069 - RNA, 22 nt, Human
caagacauugauuuuguacaga

SEQ ID NO: 758070 - RNA, 22 nt, Human
ugucaucugauauuacuuauag

SEQ ID NO: 758071 - RNA, 22 nt, Human
uaggggcucagaacauguccuu

SEQ ID NO: 758072 - RNA, 22 nt, Human
acacugaauguuuaagaacuug

SEQ ID NO: 758073 - RNA, 22 nt, Human
agggaaggcuuuugacauuucc

SEQ ID NO: 758074 - RNA, 22 nt, Human
agggcacccucucugcaguacc

SEQ ID NO: 758075 - RNA, 22 nt, Human
uuucucugggcacucuccaaac

SEQ ID NO: 758076 - RNA, 22 nt, Human
cgcuggccauagccuccugugu

SEQ ID NO: 758077 - RNA, 22 nt, Human
uuugcuucacaaguaugguucu

SEQ ID NO: 758078 - RNA, 22 nt, Human
ugaggccagugacauauauuaa

SEQ ID NO: 758079 - RNA, 22 nt, Human
auggacaggcugagcuuccuca

SEQ ID NO: 758080 - RNA, 20 nt, Human
ucugaacaaaauguaauguc

SEQ ID NO: 758081 - RNA, 22 nt, Human
gaccauuugcuaguaaauugca

SEQ ID NO: 758082 - RNA, 22 nt, Human
uuguguuucuggccaagaugga

SEQ ID NO: 758083 - RNA, 22 nt, Human
gugugccuuaagcucuauagac

SEQ ID NO: 758084 - RNA, 22 nt, Human
guaguucugcagugucaccuga

SEQ ID NO: 758085 - RNA, 17 nt, Human
aauugcuuguacuccca

SEQ ID NO: 758086 - RNA, 22 nt, Human
cugcaggaggauccugagagug

SEQ ID NO: 758087 - RNA, 22 nt, Human
cuggagccacuuuuuauccuuu

SEQ ID NO: 758088 - RNA, 22 nt, Human
gguggccuagggcccagccugu

SEQ ID NO: 758089 - RNA, 20 nt, Human
uuccuguauacaaagaguuc

SEQ ID NO: 758090 - RNA, 22 nt, Human
gcaggcugugguauguugggca

SEQ ID NO: 758091 - RNA, 22 nt, Human
acagaggccucguagguacaac

SEQ ID NO: 758092 - RNA, 20 nt, Human
agggccuggaguacagcagg

SEQ ID NO: 758093 - RNA, 22 nt, Human
agaccuggaugugagggaagua

SEQ ID NO: 758094 - RNA, 22 nt, Human
uggcagcagacaucugaggucu

SEQ ID NO: 758095 - RNA, 22 nt, Human
aauaauacugcauguaaggugc

SEQ ID NO: 758096 - RNA, 20 nt, Human
gcccuggacguggccucggc

SEQ ID NO: 758097 - RNA, 22 nt, Human
cuggcaguauuaagagaaguga

SEQ ID NO: 758098 - RNA, 22 nt, Human
ucuucauuccguagauauuuau

SEQ ID NO: 758099 - RNA, 22 nt, Human
agcuggagcuucaagcagguaa

SEQ ID NO: 758100 - RNA, 22 nt, Human
ucuuagcagugcugagaagaau

SEQ ID NO: 758101 - RNA, 22 nt, Human
acaagcagagauuaaauguuuu

SEQ ID NO: 758102 - RNA, 22 nt, Human
gaugcuuuccaagaaauccuca

SEQ ID NO: 758103 - RNA, 22 nt, Human
gaggccuugggaugugccacgg

SEQ ID NO: 758104 - RNA, 22 nt, Human
ccugguggaaggugagugaggc

SEQ ID NO: 758105 - RNA, 22 nt, Human
guucacagauccuugaagccag

SEQ ID NO: 758106 - RNA, 22 nt, Human
cccuguugggaagagagauggc

SEQ ID NO: 758107 - RNA, 20 nt, Human
ucacuguaauugccuacauu

SEQ ID NO: 758108 - RNA, 23 nt, Human
ucugugcucgggggagcucucug

SEQ ID NO: 758109 - RNA, 22 nt, Human
caauuagcugguacugacagga

SEQ ID NO: 758110 - RNA, 22 nt, Human
aaucccuacuagagcauaccgu

SEQ ID NO: 758111 - RNA, 22 nt, Human
cacagcaggcagaacgugggca

SEQ ID NO: 758112 - RNA, 22 nt, Human
cacaaaugacugaaacgacugu

SEQ ID NO: 758113 - RNA, 22 nt, Human
acuuacaagcuagggaagcuug

SEQ ID NO: 758114 - RNA, 22 nt, Human
agcuucaaagcuaggaagaucu

SEQ ID NO: 758115 - RNA, 22 nt, Human
cccuccaggcacugcccucuuc

SEQ ID NO: 758116 - RNA, 22 nt, Human
ucucaggaagugauauugagac

SEQ ID NO: 758117 - RNA, 22 nt, Human
uccagccccgaggccggcgacg

SEQ ID NO: 758118 - RNA, 22 nt, Human
ucugucagccccucagcuguca

SEQ ID NO: 758119 - RNA, 22 nt, Human
ucauaaaguuguuuuaauggga

SEQ ID NO: 758120 - RNA, 22 nt, Human
gaauuuccucuaaaccccugag

SEQ ID NO: 758121 - RNA, 22 nt, Human
ccuuccuggagcccaugcagau

SEQ ID NO: 758122 - RNA, 23 nt, Human
auuuuuagccucucugagcugag

SEQ ID NO: 758123 - RNA, 20 nt, Human
ucaagacagacauggaguuu

SEQ ID NO: 758124 - RNA, 22 nt, Human
ugcccaagauccuacauccuga

SEQ ID NO: 758125 - RNA, 22 nt, Human
caugacaguccugaagagaacg

SEQ ID NO: 758126 - RNA, 22 nt, Human
gcagugacagggcugcugccuu

SEQ ID NO: 758127 - RNA, 22 nt, Human
ccaggucucgggucugcucgug

SEQ ID NO: 758128 - RNA, 22 nt, Human
uaaucuguaauuuuugcaauag

SEQ ID NO: 758129 - RNA, 19 nt, Human
agucuguggauuugugggu

SEQ ID NO: 758130 - RNA, 22 nt, Human
cugcaggucucugugugcauuc

SEQ ID NO: 758131 - RNA, 22 nt, Human
ugucuuauggcauguccacugg

SEQ ID NO: 758132 - RNA, 22 nt, Human
agagccaggccaggccggggca

SEQ ID NO: 758133 - RNA, 18 nt, Human
ugaacuuuuccugcugcu

SEQ ID NO: 758134 - RNA, 22 nt, Human
guuuagaacacggaaauacuga

SEQ ID NO: 758135 - RNA, 22 nt, Human
gacuuuaaagguucugcugcuu

SEQ ID NO: 758136 - RNA, 22 nt, Human
uuugggaagugggagcaaggug

SEQ ID NO: 758137 - RNA, 22 nt, Human
auuauuuuaugugcggccugau

SEQ ID NO: 758138 - RNA, 22 nt, Human
uaaagagcacgcuuuucucucu

SEQ ID NO: 758139 - RNA, 22 nt, Human
auggccauagccuuauagcagg

SEQ ID NO: 758140 - RNA, 22 nt, Human
aaagaagcauaggcuagacuuc

SEQ ID NO: 758141 - RNA, 22 nt, Human
agucucuccacauuguuauaaa

SEQ ID NO: 758142 - RNA, 21 nt, Human
ccagggaagaaaugagggcag

SEQ ID NO: 758143 - RNA, 22 nt, Human
cagggcaguuugugccuaugag

SEQ ID NO: 758144 - RNA, 22 nt, Human
gaugugugcugcauaguauauu

SEQ ID NO: 758145 - RNA, 20 nt, Human
aggcacaguuccuaguuggg

SEQ ID NO: 758146 - RNA, 22 nt, Human
cacagggaacaacuagaacaaa

SEQ ID NO: 758147 - RNA, 22 nt, Human
ucucacagugagccugaggucg

SEQ ID NO: 758148 - RNA, 22 nt, Human
cuuucucuucgaaaaccugccc

SEQ ID NO: 758149 - RNA, 22 nt, Human
uagauucucccaucaugagaug

SEQ ID NO: 758150 - RNA, 22 nt, Human
uagcaucagccacaccuuguac

SEQ ID NO: 758151 - RNA, 22 nt, Human
caggcccauuuguagccacuuu

SEQ ID NO: 758152 - RNA, 22 nt, Human
agcaccuugcucuuggccuucc

SEQ ID NO: 758153 - RNA, 22 nt, Human
uaggcugagguugaugccaggg

SEQ ID NO: 758154 - RNA, 21 nt, Human
cacaccaggcaugucuugagc

SEQ ID NO: 758155 - RNA, 20 nt, Human
ucuuuagauuuaucuuaugu

SEQ ID NO: 758156 - RNA, 20 nt, Human
gcucuuuguaagggaauuug

SEQ ID NO: 758157 - RNA, 22 nt, Human
ucacuguaaaguaauacuguca

SEQ ID NO: 758158 - RNA, 22 nt, Human
uccagauagaguccuguuagua

SEQ ID NO: 758159 - RNA, 22 nt, Human
aagaggaagucuccauggagag

SEQ ID NO: 758160 - RNA, 22 nt, Human
gcuggcaggagccuuucccuuu

SEQ ID NO: 758161 - RNA, 21 nt, Human
ucuuugcaucaguuguuuucu

SEQ ID NO: 758162 - RNA, 22 nt, Human
ucaguuaacaacuauuuauuga

SEQ ID NO: 758163 - RNA, 22 nt, Human
auugauaaauugcaauggggcu

SEQ ID NO: 758164 - RNA, 17 nt, Human
acagggcagaaacagcu

SEQ ID NO: 758165 - RNA, 22 nt, Human
ugcuggcaguggcagugauggu

SEQ ID NO: 758166 - RNA, 22 nt, Human
uuccuaacaagggguauucauc

SEQ ID NO: 758167 - RNA, 22 nt, Human
ucaagcaaacucugagaaauaa

SEQ ID NO: 758168 - RNA, 22 nt, Human
cuuguauuaggaagaaugcuuu

SEQ ID NO: 758169 - RNA, 22 nt, Human
uucuggaaguggaauuuuugua

SEQ ID NO: 758170 - RNA, 22 nt, Human
ugcugcagcuaaggugaggugc

SEQ ID NO: 758171 - RNA, 22 nt, Human
cagagaugggucgcagagaugg

SEQ ID NO: 758172 - RNA, 22 nt, Human
ucccuucaauaauucaacauua

SEQ ID NO: 758173 - RNA, 22 nt, Human
caacugcugacaccaucacucc

SEQ ID NO: 758174 - RNA, 22 nt, Human
uggcauguauuuguggugaauu

SEQ ID NO: 758175 - RNA, 22 nt, Human
ccagcuguuucugaugcuaggc

SEQ ID NO: 758176 - RNA, 22 nt, Human
aacacaggccagccugugcagu

SEQ ID NO: 758177 - RNA, 22 nt, Human
uguuauucuaguggaucacguc

SEQ ID NO: 758178 - RNA, 22 nt, Human
ugauucuuuggagagcuauaua

SEQ ID NO: 758179 - RNA, 22 nt, Human
agagcuggugcauauucagaaa

SEQ ID NO: 758180 - RNA, 20 nt, Human
aaagagaagccucaccuugu

SEQ ID NO: 758181 - RNA, 22 nt, Human
ugguccaguuuagcauugagug

SEQ ID NO: 758182 - RNA, 22 nt, Human
gcugcagggggugggcgucucc

SEQ ID NO: 758183 - RNA, 22 nt, Human
uccucuuucucaacauuaguua

SEQ ID NO: 758184 - RNA, 22 nt, Human
uuuucuuggaguggcuguccuu

SEQ ID NO: 758185 - RNA, 22 nt, Human
gccugccuguuggcugaggugc

SEQ ID NO: 758186 - RNA, 22 nt, Human
uaccugagcccagugcagcaua

SEQ ID NO: 758187 - RNA, 19 nt, Human
ucaggaguuaguugugcuc

SEQ ID NO: 758188 - RNA, 22 nt, Human
uaucuucaauuuauucaaggag

SEQ ID NO: 758189 - RNA, 22 nt, Human
cugugguggcacagcgggcugg

SEQ ID NO: 758190 - RNA, 22 nt, Human
cugagguguuuaguaggggcgg

SEQ ID NO: 758191 - RNA, 22 nt, Human
agaaaauaauuucuuggcuggu

SEQ ID NO: 758192 - RNA, 15 nt, Human
ucccucagcuaaaga

SEQ ID NO: 758193 - RNA, 22 nt, Human
gagcucuguguggcuugggugg

SEQ ID NO: 758194 - RNA, 21 nt, Human
acauacauaccuuaccaccuu

SEQ ID NO: 758195 - RNA, 22 nt, Human
ugagggcaaaguggugcugagg

SEQ ID NO: 758196 - RNA, 22 nt, Human
accacuggcucaggagcuggga

SEQ ID NO: 758197 - RNA, 22 nt, Human
ggugggcgacugagagggguuu

SEQ ID NO: 758198 - RNA, 23 nt, Human
ggcaugcaauggacagagcugga

SEQ ID NO: 758199 - RNA, 22 nt, Human
aagauucuagaggaacuucuua

SEQ ID NO: 758200 - RNA, 22 nt, Human
acaaaugugucuaauugugccu

SEQ ID NO: 758201 - RNA, 20 nt, Human
aauuauauaacuccaacauu

SEQ ID NO: 758202 - RNA, 22 nt, Human
cagcuucuccggccuggugcgg

SEQ ID NO: 758203 - RNA, 22 nt, Human
uuuauucuugagagugagaaga

SEQ ID NO: 758204 - RNA, 22 nt, Human
ucaggagcugcacugggcccac

SEQ ID NO: 758205 - RNA, 22 nt, Human
gcggggggcaggcaguacguug

SEQ ID NO: 758206 - RNA, 22 nt, Human
gaguaggaauguucugccaucu

SEQ ID NO: 758207 - RNA, 22 nt, Human
uuauuauugauucgcucucaaa

SEQ ID NO: 758208 - RNA, 22 nt, Human
aacacugaagccguuaaaccuu

SEQ ID NO: 758209 - RNA, 22 nt, Human
ucaaacauaucugauuuuccau

SEQ ID NO: 758210 - RNA, 22 nt, Human
uuccacuggcuuucagugaucu

SEQ ID NO: 758211 - RNA, 23 nt, Human
agguuaugauuauagagcgagga

SEQ ID NO: 758212 - RNA, 22 nt, Human
gcucuccaggggcucccaggau

SEQ ID NO: 758213 - RNA, 22 nt, Human
caggauauuaccuaauauuuga

SEQ ID NO: 758214 - RNA, 22 nt, Human
ucaguuuucaauuucaucagag

SEQ ID NO: 758215 - RNA, 22 nt, Human
ggcccaaaccaaguaccucaaa

SEQ ID NO: 758216 - RNA, 22 nt, Human
ggggaagagcauugcacggugu

SEQ ID NO: 758217 - RNA, 22 nt, Human
ggcccagaauacuuuguaaaau

SEQ ID NO: 758218 - RNA, 22 nt, Human
accaggcaacugugaaugggcu

SEQ ID NO: 758219 - RNA, 22 nt, Human
uuucuagagugggcaugucuua

SEQ ID NO: 758220 - RNA, 22 nt, Human
gcaguguugguuugcucugcag

SEQ ID NO: 758221 - RNA, 22 nt, Human
acuccagguguguuggacucua

SEQ ID NO: 758222 - RNA, 22 nt, Human
cucucagggcagguggccuuuc

SEQ ID NO: 758223 - RNA, 22 nt, Human
cuaacauuuggaaggcuuauga

SEQ ID NO: 758224 - RNA, 22 nt, Human
uaguggcugcuucauuggugag

SEQ ID NO: 758225 - RNA, 18 nt, Human
ucauggcuugcagauggu

SEQ ID NO: 758226 - RNA, 22 nt, Human
ggccugugucugugccuguccu

SEQ ID NO: 758227 - RNA, 22 nt, Human
ucauucagagagaauguuccag

SEQ ID NO: 758228 - RNA, 22 nt, Human
aggcagugagcagggugucaug

SEQ ID NO: 758229 - RNA, 22 nt, Human
aaauuucaguuggaaugagcuc

SEQ ID NO: 758230 - RNA, 22 nt, Human
caacagcuuuagaaacacuuuc

SEQ ID NO: 758231 - RNA, 23 nt, Human
gccucugcagccuaguuaguguc

SEQ ID NO: 758232 - RNA, 22 nt, Human
acugaaggguaaugugggagcc

SEQ ID NO: 758233 - RNA, 22 nt, Human
ugcauguauuuaaaguugcaau

SEQ ID NO: 758234 - RNA, 22 nt, Human
agguuuucagcuguauccugag

SEQ ID NO: 758235 - RNA, 22 nt, Human
auguuuaaucggcugccuuucc

SEQ ID NO: 758236 - RNA, 18 nt, Human
acagacaaaauggaaaug

SEQ ID NO: 758237 - RNA, 22 nt, Human
uuggugaguauggacacagaga

SEQ ID NO: 758238 - RNA, 22 nt, Human
agaggcacuaagggaagagcag

SEQ ID NO: 758239 - RNA, 22 nt, Human
uuggcagcauuccagccaagca

SEQ ID NO: 758240 - RNA, 19 nt, Human
gcucugagaggggcauggg

SEQ ID NO: 758241 - RNA, 22 nt, Human
cuccugaggggacaggacucau

SEQ ID NO: 758242 - RNA, 22 nt, Human
uccacacacauuucuaugugca

SEQ ID NO: 758243 - RNA, 22 nt, Human
cugucuucuaccuucaaccucc

SEQ ID NO: 758244 - RNA, 22 nt, Human
uucugggguuaugggugauucu

SEQ ID NO: 758245 - RNA, 22 nt, Human
aggcuguguggauaauauuggg

SEQ ID NO: 758246 - RNA, 18 nt, Human
cagcucuucuccaguaac

SEQ ID NO: 758247 - RNA, 22 nt, Human
ugcaaacauccgacugaaagcc

SEQ ID NO: 758248 - RNA, 22 nt, Human
cugggcagugguggcccuuccc

SEQ ID NO: 758249 - RNA, 22 nt, Human
cagccugacuauggcugcaggu

SEQ ID NO: 758250 - RNA, 22 nt, Human
cugccugcugacauucuuuaua

SEQ ID NO: 758251 - RNA, 22 nt, Human
gaggaggcugaacaaugcccug

SEQ ID NO: 758252 - RNA, 22 nt, Human
cauaacauuauuuucugaagau

SEQ ID NO: 758253 - RNA, 22 nt, Human
uucuggaagcugggcagcaccc

SEQ ID NO: 758254 - RNA, 22 nt, Human
gcccugaaauauuuccacggcc

SEQ ID NO: 758255 - RNA, 17 nt, Human
uggucauuuuaauuuua

SEQ ID NO: 758256 - RNA, 22 nt, Human
cacacagguaagccucuuucaa

SEQ ID NO: 758257 - RNA, 22 nt, Human
cuuauucaaugcuggaaauguu

SEQ ID NO: 758258 - RNA, 22 nt, Human
gaauaacagcaaguuugcaggc

SEQ ID NO: 758259 - RNA, 17 nt, Human
ccaaggcuauuuguagu

SEQ ID NO: 758260 - RNA, 22 nt, Human
ggagaaagcuguaguggaaugu

SEQ ID NO: 758261 - RNA, 22 nt, Human
ccagcauuugcuucuggugggg

SEQ ID NO: 758262 - RNA, 22 nt, Human
gacauacaagcugguaccuccu

SEQ ID NO: 758263 - RNA, 22 nt, Human
ugauagaaaaugcugucaagcu

SEQ ID NO: 758264 - RNA, 22 nt, Human
ugugaauagucagcauuuuguu

SEQ ID NO: 758265 - RNA, 22 nt, Human
ugcacauugaaugagcaaacug

SEQ ID NO: 758266 - RNA, 22 nt, Human
ugaggcacuccaggaugcuguu

SEQ ID NO: 758267 - RNA, 22 nt, Human
cucaggaggugguagaggcccu

SEQ ID NO: 758268 - RNA, 22 nt, Human
gaaugauauauuagcagauuuu

SEQ ID NO: 758269 - RNA, 22 nt, Human
cagcagacuuacuagaauguaa

SEQ ID NO: 758270 - RNA, 22 nt, Human
cacagccugcugcacucaagaa

SEQ ID NO: 758271 - RNA, 22 nt, Human
guccugugccgaggugggaagc

SEQ ID NO: 758272 - RNA, 22 nt, Human
ucugucacugagcucaggauuc

SEQ ID NO: 758273 - RNA, 22 nt, Human
uauccauauuaagaugccucug

SEQ ID NO: 758274 - RNA, 22 nt, Human
agagccagagaccuggguucac

SEQ ID NO: 758275 - RNA, 22 nt, Human
uggcacaggcgguaagggugug

SEQ ID NO: 758276 - RNA, 22 nt, Human
caaguccuuagaugguucuuug

SEQ ID NO: 758277 - RNA, 23 nt, Human
uucuggaagauuuacuugagaca

SEQ ID NO: 758278 - RNA, 22 nt, Human
ugggggcuccaggcuccaggga

SEQ ID NO: 758279 - RNA, 22 nt, Human
ucuugggcauguguuugauuuc

SEQ ID NO: 758280 - RNA, 22 nt, Human
cauugcacugcagcccgggcaa

SEQ ID NO: 758281 - RNA, 22 nt, Human
cccucucagucagagccagaua

SEQ ID NO: 758282 - RNA, 22 nt, Human
caagguuuacuuuaugauccag

SEQ ID NO: 758283 - RNA, 22 nt, Human
ugaagacacauacaagggaaug

SEQ ID NO: 758284 - RNA, 22 nt, Human
gccacaugucaugugcucagua

SEQ ID NO: 758285 - RNA, 22 nt, Human
cuucugugaaugaaguguggga

SEQ ID NO: 758286 - RNA, 22 nt, Human
cagcuccuagaucggcgaagug

SEQ ID NO: 758287 - RNA, 22 nt, Human
ccaggaaguaugacccaacaga

SEQ ID NO: 758288 - RNA, 22 nt, Human
uugcucuguccagccagcaggu

SEQ ID NO: 758289 - RNA, 22 nt, Human
cagcuucagcgugacaccagug

SEQ ID NO: 758290 - RNA, 22 nt, Human
caggcucuuccauccugcugag

SEQ ID NO: 758291 - RNA, 22 nt, Human
aaguuuaguauuagggaaaagu

SEQ ID NO: 758292 - RNA, 22 nt, Human
ugccugccugcauagucccacg

SEQ ID NO: 758293 - RNA, 22 nt, Human
cuggugaucuugggcaagucac

SEQ ID NO: 758294 - RNA, 22 nt, Human
aggccugucccagcugaggacg

SEQ ID NO: 758295 - RNA, 22 nt, Human
uuaagagaagaguaucuagaac

SEQ ID NO: 758296 - RNA, 22 nt, Human
agccaagcacucaacuccugga

SEQ ID NO: 758297 - RNA, 23 nt, Human
ucaguuuuggcuguucaguguug

SEQ ID NO: 758298 - RNA, 22 nt, Human
uggcagcuccggguaggggcug

SEQ ID NO: 758299 - RNA, 22 nt, Human
auuucaggauagccuaguuuug

SEQ ID NO: 758300 - RNA, 22 nt, Human
auucucucuucugcugcccgug

SEQ ID NO: 758301 - RNA, 22 nt, Human
uccugagcccuguaggacccug

SEQ ID NO: 758302 - RNA, 22 nt, Human
uugaaagacuucuccugugaaa

SEQ ID NO: 758303 - RNA, 22 nt, Human
ggucugaguggugcugacucag

SEQ ID NO: 758304 - RNA, 22 nt, Human
uaacagcacuggcaggcacugu

SEQ ID NO: 758305 - RNA, 22 nt, Human
uuagaaagaauagccuggcugc

SEQ ID NO: 758306 - RNA, 22 nt, Human
ggagccuguggcugcuugaagc

SEQ ID NO: 758307 - RNA, 22 nt, Human
uuuacaguccccaggugaggau

SEQ ID NO: 758308 - RNA, 22 nt, Human
uuuacuacuugugauaacugaa

SEQ ID NO: 758309 - RNA, 22 nt, Human
gcagaugggagccccaggggag

SEQ ID NO: 758310 - RNA, 22 nt, Human
ugaaaugauguacaagaaggca

SEQ ID NO: 758311 - RNA, 22 nt, Human
auggacaguacugaguggacua

SEQ ID NO: 758312 - RNA, 22 nt, Human
agcagcaggcugggaugagucu

SEQ ID NO: 758313 - RNA, 22 nt, Human
acacuucaaagggugacuugau

SEQ ID NO: 758314 - RNA, 20 nt, Human
ugguccaggaccuggugucc

SEQ ID NO: 758315 - RNA, 22 nt, Human
gaguccuuuguuccuugccaca

SEQ ID NO: 758316 - RNA, 22 nt, Human
uucuaagagaguacaagcaauu

SEQ ID NO: 758317 - RNA, 22 nt, Human
gugaggcagcaggagccucugu

SEQ ID NO: 758318 - RNA, 22 nt, Human
ucugcuguuuacugugugauau

SEQ ID NO: 758319 - RNA, 22 nt, Human
augaggcacguguuacuggccu

SEQ ID NO: 758320 - RNA, 18 nt, Human
gguggcucagucaugggg

SEQ ID NO: 758321 - RNA, 22 nt, Human
cugagaggggaccaggguguuu

SEQ ID NO: 758322 - RNA, 22 nt, Human
ucugccuggcggacucccggaa

SEQ ID NO: 758323 - RNA, 22 nt, Human
gggccagccuacugcuagaccc

SEQ ID NO: 758324 - RNA, 22 nt, Human
accagcuggucaguugaagauu

SEQ ID NO: 758325 - RNA, 22 nt, Human
aggauggcuugcaggaggcugu

SEQ ID NO: 758326 - RNA, 22 nt, Human
auuuguacaaauuuauguuagu

SEQ ID NO: 758327 - RNA, 23 nt, Human
auaacugagccgaggcuuaagaa

SEQ ID NO: 758328 - RNA, 22 nt, Human
acuaaauagccucugguaguug

SEQ ID NO: 758329 - RNA, 22 nt, Human
guuauguaugagggaaugauua

SEQ ID NO: 758330 - RNA, 22 nt, Human
caacugaacugauaucaacuau

SEQ ID NO: 758331 - RNA, 17 nt, Human
acucaggaucugggagu

SEQ ID NO: 758332 - RNA, 20 nt, Human
ugucauuguuucuaggaccu

SEQ ID NO: 758333 - RNA, 22 nt, Human
caugcaaagcguuuugaccagc

SEQ ID NO: 758334 - RNA, 22 nt, Human
aagcagaguuagcuugucaccu

SEQ ID NO: 758335 - RNA, 22 nt, Human
aauagcagaagacuaguagaca

SEQ ID NO: 758336 - RNA, 22 nt, Human
aacguuuuaucgugugcucuuc

SEQ ID NO: 758337 - RNA, 22 nt, Human
gcaggaguuagagguuuaaucu

SEQ ID NO: 758338 - RNA, 22 nt, Human
cagggcaguaacgggaacaucu

SEQ ID NO: 758339 - RNA, 22 nt, Human
augcacaugaggcaagcaaaau

SEQ ID NO: 758340 - RNA, 18 nt, Human
guggccagccuggucuug

SEQ ID NO: 758341 - RNA, 22 nt, Human
uauaaagugugaacugugagua

SEQ ID NO: 758342 - RNA, 22 nt, Human
cccagcagaaucugaugagggc

SEQ ID NO: 758343 - RNA, 22 nt, Human
gaggagaggccaucguuguuau

SEQ ID NO: 758344 - RNA, 22 nt, Human
ccuuccagaggcgugacacccu

SEQ ID NO: 758345 - RNA, 22 nt, Human
ugcagggaggccccgcagcccu

SEQ ID NO: 758346 - RNA, 22 nt, Human
ucaguguuggagauaauugcac

SEQ ID NO: 758347 - RNA, 22 nt, Human
uucuggaagccaugggaacagg

SEQ ID NO: 758348 - RNA, 22 nt, Human
gcugccugcucggcuccuggga

SEQ ID NO: 758349 - RNA, 22 nt, Human
ugcugcaggccuuggcugggaa

SEQ ID NO: 758350 - RNA, 21 nt, Human
cucagacagggaggcucuggg

SEQ ID NO: 758351 - RNA, 22 nt, Human
aaaaguaauugaugcaaucgua

SEQ ID NO: 758352 - RNA, 22 nt, Human
uacaguaagaugaaauagcaau

SEQ ID NO: 758353 - RNA, 22 nt, Human
uggcucucagcucccagcagcc

SEQ ID NO: 758354 - RNA, 22 nt, Human
ugaauacaggaaaauauacuga

SEQ ID NO: 758355 - RNA, 21 nt, Human
gcucaugguggagaaaagcag

SEQ ID NO: 758356 - RNA, 22 nt, Human
agugccaggagcaaggagcucc

SEQ ID NO: 758357 - RNA, 22 nt, Human
ucacugcucgauaacaugauua

SEQ ID NO: 758358 - RNA, 22 nt, Human
gcacaauggaccgugugcucug

SEQ ID NO: 758359 - RNA, 22 nt, Human
ccagagcugaugggcccagggu

SEQ ID NO: 758360 - RNA, 22 nt, Human
cagacaggaauucuggcguggu

SEQ ID NO: 758361 - RNA, 22 nt, Human
aaauagcugaaaguuccuagau

SEQ ID NO: 758362 - RNA, 22 nt, Human
cauguaaaacacucagaacagu

SEQ ID NO: 758363 - RNA, 22 nt, Human
uuuuuggguccaggcuguaucu

SEQ ID NO: 758364 - RNA, 22 nt, Human
ugcagcuguuacggacccuguc

SEQ ID NO: 758365 - RNA, 18 nt, Human
gcaggugccacugcuguu

SEQ ID NO: 758366 - RNA, 23 nt, Human
aaugauuucaugaugauagcagc

SEQ ID NO: 758367 - RNA, 18 nt, Human
aagccaggucaagauaag

SEQ ID NO: 758368 - RNA, 19 nt, Human
agcagccaucgaccaugga

SEQ ID NO: 758369 - RNA, 19 nt, Human
uccugggcguugacuuugg

SEQ ID NO: 758370 - RNA, 22 nt, Human
gaaugauaaauggaagcagcau

SEQ ID NO: 758371 - RNA, 22 nt, Human
cacugaaaauuagcuuuccuga

SEQ ID NO: 758372 - RNA, 22 nt, Human
cugaggaaggaguuaggcaguu

SEQ ID NO: 758373 - RNA, 22 nt, Human
auugguggugaggacaugccag

SEQ ID NO: 758374 - RNA, 22 nt, Human
gagcugaggccagagucuucug

SEQ ID NO: 758375 - RNA, 22 nt, Human
ggguggaagccagagaggucau

SEQ ID NO: 758376 - RNA, 23 nt, Human
uuuauucucagauacauaggucu

SEQ ID NO: 758377 - RNA, 21 nt, Human
ugucugccugcuucuucacuc

SEQ ID NO: 758378 - RNA, 22 nt, Human
gugggcaggcccuaggcgauuu

SEQ ID NO: 758379 - RNA, 22 nt, Human
cucuaauacugaccaagucacc

SEQ ID NO: 758380 - RNA, 22 nt, Human
guucaaauugauuuugguaaag

SEQ ID NO: 758381 - RNA, 22 nt, Human
gagggcgcuucagagagaugaa

SEQ ID NO: 758382 - RNA, 22 nt, Human
gcagccugaugaucuggguugu

SEQ ID NO: 758383 - RNA, 22 nt, Human
gcugcagcuguaggacacaauu

SEQ ID NO: 758384 - RNA, 22 nt, Human
gagggaagaaagaauugaugcg

SEQ ID NO: 758385 - RNA, 22 nt, Human
aagaguuugggcaagucauaaa

SEQ ID NO: 758386 - RNA, 22 nt, Human
cuggggaggcagggcugccccu

SEQ ID NO: 758387 - RNA, 17 nt, Human
agaguuuuaagaaauuu

SEQ ID NO: 758388 - RNA, 22 nt, Human
uguggcagacaagauucuaugu

SEQ ID NO: 758389 - RNA, 22 nt, Human
uuuagcagcugguguuaccaua

SEQ ID NO: 758390 - RNA, 20 nt, Human
cacaggccccaagaccugua

SEQ ID NO: 758391 - RNA, 22 nt, Human
uucuccugcgcaggcccaggga

SEQ ID NO: 758392 - RNA, 22 nt, Human
ggcucucuggaggagcucaccc

SEQ ID NO: 758393 - RNA, 18 nt, Human
agguggccugggagcuuu

SEQ ID NO: 758394 - RNA, 22 nt, Human
uuucugauauucauuuagaaga

SEQ ID NO: 758395 - RNA, 21 nt, Human
uagcuuuaauauucccacauu

SEQ ID NO: 758396 - RNA, 21 nt, Human
agcaccaguuuuaugccaggc

SEQ ID NO: 758397 - RNA, 22 nt, Human
uugggcccugcucugaguugcu

SEQ ID NO: 758398 - RNA, 22 nt, Human
caguauuugguaauuggcuacc

SEQ ID NO: 758399 - RNA, 22 nt, Human
auacuacacuaugcauggaugu

SEQ ID NO: 758400 - RNA, 22 nt, Human
ccccaccagcacccucucuauc

SEQ ID NO: 758401 - RNA, 22 nt, Human
cugccuggugcggugcccaccc

SEQ ID NO: 758402 - RNA, 21 nt, Human
acaugucuggucauuuuuagc

SEQ ID NO: 758403 - RNA, 22 nt, Human
cugugauuguuaguuccuauac

SEQ ID NO: 758404 - RNA, 22 nt, Human
caauauagagagaaaauuaugu

SEQ ID NO: 758405 - RNA, 20 nt, Human
uaaagcagccguggagggua

SEQ ID NO: 758406 - RNA, 22 nt, Human
cucagguagagucugcaugggg

SEQ ID NO: 758407 - RNA, 22 nt, Human
uuagaacugaagaagauuaagg

SEQ ID NO: 758408 - RNA, 22 nt, Human
agcaggcugcuggcguugaagu

SEQ ID NO: 758409 - RNA, 22 nt, Human
aaauuguauauuccauuuguau

SEQ ID NO: 758410 - RNA, 22 nt, Human
ucagcagugcagggugaggcag

SEQ ID NO: 758411 - RNA, 22 nt, Human
uuagaaccaccuggagagcuuu

SEQ ID NO: 758412 - RNA, 22 nt, Human
auucaguuacucuagacacuuc

SEQ ID NO: 758413 - RNA, 22 nt, Human
aucuggaacaaagcuuaggaau

SEQ ID NO: 758414 - RNA, 22 nt, Human
cucccuuccaaugacuaugcuu

SEQ ID NO: 758415 - RNA, 22 nt, Human
uuauuuauuguguaccuacugu

SEQ ID NO: 758416 - RNA, 17 nt, Human
aguuaaggcucuuugcu

SEQ ID NO: 758417 - RNA, 22 nt, Human
agggaaauuaaugugagcaaug

SEQ ID NO: 758418 - RNA, 22 nt, Human
uauuuucaucuuguccuuggau

SEQ ID NO: 758419 - RNA, 22 nt, Human
agcaggcuccaggcuggccauc

SEQ ID NO: 758420 - RNA, 22 nt, Human
uaaaugauuuauguaugugaaa

SEQ ID NO: 758421 - RNA, 22 nt, Human
gaaacccaaacuaagacaguag

SEQ ID NO: 758422 - RNA, 22 nt, Human
gagcugucucuauaugaaugcu

SEQ ID NO: 758423 - RNA, 20 nt, Human
ugagggaguauugauuuccc

SEQ ID NO: 758424 - RNA, 22 nt, Human
uuggauuacaugaaaugcagaa

SEQ ID NO: 758425 - RNA, 22 nt, Human
cccucuggcucuucucaggccg

SEQ ID NO: 758426 - RNA, 22 nt, Human
ugaggcuuggaggcuccagugg

SEQ ID NO: 758427 - RNA, 22 nt, Human
uggcaggcugaguuggccuggu

SEQ ID NO: 758428 - RNA, 22 nt, Human
accgugucugacacuuugggcg

SEQ ID NO: 758429 - RNA, 22 nt, Human
uucuccuuuguaauucucaucc

SEQ ID NO: 758430 - RNA, 22 nt, Human
ugguccuuuaagucuuucucug

SEQ ID NO: 758431 - RNA, 22 nt, Human
uucaauuuugcagaggaaugca

SEQ ID NO: 758432 - RNA, 22 nt, Human
gucaucuuaucauuguugcugu

SEQ ID NO: 758433 - RNA, 22 nt, Human
cuccaccccgugccggugcugg

SEQ ID NO: 758434 - RNA, 22 nt, Human
aauagguagccagauauauaaa

SEQ ID NO: 758435 - RNA, 22 nt, Human
uaauugcuccaaggagaacuaa

SEQ ID NO: 758436 - RNA, 22 nt, Human
gcugagcuagcuaucucagucu

SEQ ID NO: 758437 - RNA, 22 nt, Human
uugccagggcuuugguggcauc

SEQ ID NO: 758438 - RNA, 22 nt, Human
cugggcacuugcucacagcucu

SEQ ID NO: 758439 - RNA, 22 nt, Human
acauuguagacuuuucauaugu

SEQ ID NO: 758440 - RNA, 22 nt, Human
uugagaagaaauaguuugcaau

SEQ ID NO: 758441 - RNA, 22 nt, Human
ucuccuggaagaauaccacacu

SEQ ID NO: 758442 - RNA, 22 nt, Human
uuuguacacaggucauucaggg

SEQ ID NO: 758443 - RNA, 22 nt, Human
uguguauuaauguuuguauaug

SEQ ID NO: 758444 - RNA, 22 nt, Human
cuaugcaucugaacaauagaga

SEQ ID NO: 758445 - RNA, 22 nt, Human
acaggcuguugggguccagggu

SEQ ID NO: 758446 - RNA, 22 nt, Human
ugcauauucuccuuuauuuugu

SEQ ID NO: 758447 - RNA, 22 nt, Human
gugcagggcuggcaccggaggc

SEQ ID NO: 758448 - RNA, 22 nt, Human
caaauuacccucaacaucuaga

SEQ ID NO: 758449 - RNA, 22 nt, Human
gguggcucucuuaagggcagcg

SEQ ID NO: 758450 - RNA, 22 nt, Human
uuagccauuuuauacaagugua

SEQ ID NO: 758451 - RNA, 22 nt, Human
ucaaagauagauguugagaaau

SEQ ID NO: 758452 - RNA, 22 nt, Human
ugggugugaagucuguuggccu

SEQ ID NO: 758453 - RNA, 22 nt, Human
uguguuggcugccggcacagga

SEQ ID NO: 758454 - RNA, 22 nt, Human
auuugucaguggaagugauuca

SEQ ID NO: 758455 - RNA, 22 nt, Human
uccuggucuacacugcauuggg

SEQ ID NO: 758456 - RNA, 22 nt, Human
augggaaguguuagaagauuuu

SEQ ID NO: 758457 - RNA, 22 nt, Human
agccagagggaaucuuugggga

SEQ ID NO: 758458 - RNA, 18 nt, Human
aauugcauuuguuuccuu

SEQ ID NO: 758459 - RNA, 22 nt, Human
agugucuggaggcauucuuggu

SEQ ID NO: 758460 - RNA, 18 nt, Human
acacuuccugguggugug

SEQ ID NO: 758461 - RNA, 22 nt, Human
acucuuggccacucuugguguc

SEQ ID NO: 758462 - RNA, 22 nt, Human
uuucuaaucugauucuccuacc

SEQ ID NO: 758463 - RNA, 19 nt, Human
agacacuggauggaaaaug

SEQ ID NO: 758464 - RNA, 22 nt, Human
acuggcagcagcagcccuuggg

SEQ ID NO: 758465 - RNA, 22 nt, Human
cucucuuucugaaugaggacua

SEQ ID NO: 758466 - RNA, 22 nt, Human
ccugaggcucgcgcgccccugg

SEQ ID NO: 758467 - RNA, 22 nt, Human
gagcucugguucaugaucuauu

SEQ ID NO: 758468 - RNA, 22 nt, Human
uuuaaacaucuuguugccuuaa

SEQ ID NO: 758469 - RNA, 22 nt, Human
cccagugugguucuuuggagaa

SEQ ID NO: 758470 - RNA, 22 nt, Human
caaaagcaaagucccugaaugu

SEQ ID NO: 758471 - RNA, 22 nt, Human
ucucucacuggugccucuguug

SEQ ID NO: 758472 - RNA, 22 nt, Human
ccagcucugccaagcgucagcu

SEQ ID NO: 758473 - RNA, 22 nt, Human
gucuucuggaagagagccagcu

SEQ ID NO: 758474 - RNA, 22 nt, Human
aagcagcauuguaaccaaugcc

SEQ ID NO: 758475 - RNA, 23 nt, Human
uugaggcaaacauguaaguagga

SEQ ID NO: 758476 - RNA, 22 nt, Human
aggcaggcacuccggaaguguc

SEQ ID NO: 758477 - RNA, 22 nt, Human
gaaggcaagaucucaguggagg

SEQ ID NO: 758478 - RNA, 20 nt, Human
acagauauuugauuuucagu

SEQ ID NO: 758479 - RNA, 22 nt, Human
ugagucacacauuucuucauac

SEQ ID NO: 758480 - RNA, 22 nt, Human
aucucugcuagccuucuucagg

SEQ ID NO: 758481 - RNA, 22 nt, Human
uacauauacugagugauuugcu

SEQ ID NO: 758482 - RNA, 22 nt, Human
cuguuucaagugaagucagaca

SEQ ID NO: 758483 - RNA, 22 nt, Human
ucuaggagcuuaaaggaggcca

SEQ ID NO: 758484 - RNA, 22 nt, Human
ggguggagcuuggacaccagua

SEQ ID NO: 758485 - RNA, 22 nt, Human
aaauguacaacauccauauaua

SEQ ID NO: 758486 - RNA, 22 nt, Human
gggcaggagagggccaccugga

SEQ ID NO: 758487 - RNA, 22 nt, Human
auguguauauuuggugucaaua

SEQ ID NO: 758488 - RNA, 22 nt, Human
agggaucagcagaggguguggu

SEQ ID NO: 758489 - RNA, 22 nt, Human
gguuccagaguauuucauuuca

SEQ ID NO: 758490 - RNA, 22 nt, Human
uccagccaugcaugacaaucac

SEQ ID NO: 758491 - RNA, 22 nt, Human
uagcaucuccuuaggguaagga

SEQ ID NO: 758492 - RNA, 22 nt, Human
uccuggauuuagaagagccucc

SEQ ID NO: 758493 - RNA, 22 nt, Human
aaaaacugguaacuauucccca

SEQ ID NO: 758494 - RNA, 23 nt, Human
ggaaagagaggaguugugcauag

SEQ ID NO: 758495 - RNA, 23 nt, Human
aggcuucauccauauuuauugcc

SEQ ID NO: 758496 - RNA, 22 nt, Human
cuccagcucuuaacugcggaag

SEQ ID NO: 758497 - RNA, 22 nt, Human
cagcugcaguucaaugcuugcu

SEQ ID NO: 758498 - RNA, 22 nt, Human
gcugggcaacggaagagagaaa

SEQ ID NO: 758499 - RNA, 22 nt, Human
caggugggcuugggagaacacu

SEQ ID NO: 758500 - RNA, 22 nt, Human
caucaucucucccccaggccug

SEQ ID NO: 758501 - RNA, 22 nt, Human
ggugcauguagccaucaagaua

SEQ ID NO: 758502 - RNA, 22 nt, Human
gguggcaggcuggcauuggcaa

SEQ ID NO: 758503 - RNA, 22 nt, Human
ggcugccuucauagaccauggg

SEQ ID NO: 758504 - RNA, 22 nt, Human
uagcuaauggugaagauucaga

SEQ ID NO: 758505 - RNA, 19 nt, Human
cuccucagucccagagguc

SEQ ID NO: 758506 - RNA, 22 nt, Human
aauuccaggguuagcucauuug

SEQ ID NO: 758507 - RNA, 22 nt, Human
auuaacaugaguuggagauagg

SEQ ID NO: 758508 - RNA, 22 nt, Human
agucugaguuaguggaaaugua

SEQ ID NO: 758509 - RNA, 22 nt, Human
aagccaggaauggagucuucgc

SEQ ID NO: 758510 - RNA, 22 nt, Human
ccuggccuuaagggcagggagc

SEQ ID NO: 758511 - RNA, 22 nt, Human
caaagaguuuuuucauauaaug

SEQ ID NO: 758512 - RNA, 22 nt, Human
aaucuguuugaugcuugugaua

SEQ ID NO: 758513 - RNA, 22 nt, Human
aaucuucagugucuaaaaagca

SEQ ID NO: 758514 - RNA, 22 nt, Human
ccagccucacuggcaucaccua

SEQ ID NO: 758515 - RNA, 21 nt, Human
cuuggcugcagugacaggcau

SEQ ID NO: 758516 - RNA, 16 nt, Human
gcagaggaaaggggag

SEQ ID NO: 758517 - RNA, 22 nt, Human
ucucugggagcaauuguuugcu

SEQ ID NO: 758518 - RNA, 18 nt, Human
gugucuuauuacaguggg

SEQ ID NO: 758519 - RNA, 22 nt, Human
uacaaacucuuuauauuucaua

SEQ ID NO: 758520 - RNA, 22 nt, Human
aaugcuuaauucaauacugugu

SEQ ID NO: 758521 - RNA, 22 nt, Human
gugauaaaauucaaauagcucu

SEQ ID NO: 758522 - RNA, 22 nt, Human
uuuuaagcaaaagaauggugug

SEQ ID NO: 758523 - RNA, 21 nt, Human
agcaccuuacagcuauaaugg

SEQ ID NO: 758524 - RNA, 22 nt, Human
gaggcagcucuucugaaugggg

SEQ ID NO: 758525 - RNA, 22 nt, Human
acugaaaguccagcaugguaca

SEQ ID NO: 758526 - RNA, 22 nt, Human
ucacugcucagucuguacuaca

SEQ ID NO: 758527 - RNA, 22 nt, Human
aggaagacaaucugugugcugu

SEQ ID NO: 758528 - RNA, 22 nt, Human
acaguggagcucagaugaaaau

SEQ ID NO: 758529 - RNA, 22 nt, Human
gaggaacagagacgggaucgcu

SEQ ID NO: 758530 - RNA, 22 nt, Human
uugaauaguguuuucaguauac

SEQ ID NO: 758531 - RNA, 22 nt, Human
ucuccccaaccauggcacucac

SEQ ID NO: 758532 - RNA, 22 nt, Human
gguaugaauucacuacuuccaa

SEQ ID NO: 758533 - RNA, 22 nt, Human
acuggggccuccuccaugcucu

SEQ ID NO: 758534 - RNA, 22 nt, Human
caguucuggaggcuccacaucu

SEQ ID NO: 758535 - RNA, 22 nt, Human
acacugacugggcaguauaguc

SEQ ID NO: 758536 - RNA, 22 nt, Human
acauuucucagggaguuuugcu

SEQ ID NO: 758537 - RNA, 22 nt, Human
cauuuguucugauuucaaaagg

SEQ ID NO: 758538 - RNA, 22 nt, Human
uuauguauggauggcugaaagu

SEQ ID NO: 758539 - RNA, 21 nt, Human
ucaagacagcauauuuaagaa

SEQ ID NO: 758540 - RNA, 22 nt, Human
cuugcagcauccgguccucucu

SEQ ID NO: 758541 - RNA, 22 nt, Human
uccuuuaaagaacugugcuuuu

SEQ ID NO: 758542 - RNA, 22 nt, Human
agcuggcauacuuugcuaggaa

SEQ ID NO: 758543 - RNA, 22 nt, Human
auguguuaaugagcaaugaccu

SEQ ID NO: 758544 - RNA, 22 nt, Human
agaauucuguucuucgggugug

SEQ ID NO: 758545 - RNA, 21 nt, Human
agcagcagggaagccucaucc

SEQ ID NO: 758546 - RNA, 22 nt, Human
auuaagugacuaaaguaaugcu

SEQ ID NO: 758547 - RNA, 22 nt, Human
aggcuccaugcaaaggcuguuu

SEQ ID NO: 758548 - RNA, 22 nt, Human
cagcuuggcgaauguagguaug

SEQ ID NO: 758549 - RNA, 22 nt, Human
uucaagaucgaguuuaaaguga

SEQ ID NO: 758550 - RNA, 22 nt, Human
ggggcagagaauaaaaaccuaa

SEQ ID NO: 758551 - RNA, 22 nt, Human
uuugggaagaggaaucucugga

SEQ ID NO: 758552 - RNA, 22 nt, Human
ugcuuucaaugaauuguauacu

SEQ ID NO: 758553 - RNA, 22 nt, Human
guuuggcucugggugccugugc

SEQ ID NO: 758554 - RNA, 22 nt, Human
aaggaaagacaggacggaauuc

SEQ ID NO: 758555 - RNA, 22 nt, Human
ucauuuuuugcauaccuguguc

SEQ ID NO: 758556 - RNA, 22 nt, Human
uacaggaagucucaguacagua

SEQ ID NO: 758557 - RNA, 22 nt, Human
uuacaguagauuuugaaugugg

SEQ ID NO: 758558 - RNA, 22 nt, Human
uggguacuccuauuaguucagu

SEQ ID NO: 758559 - RNA, 22 nt, Human
uguguccuuuggaggaucagcg

SEQ ID NO: 758560 - RNA, 22 nt, Human
auuugcaagcaugcacaaaagc

SEQ ID NO: 758561 - RNA, 22 nt, Human
augaggcauagcagggaucgga

SEQ ID NO: 758562 - RNA, 22 nt, Human
gcagcugcuguggcaucaagcu

SEQ ID NO: 758563 - RNA, 22 nt, Human
guggccuugggcacugaccuug

SEQ ID NO: 758564 - RNA, 18 nt, Human
ucacagugcucuugccua

SEQ ID NO: 758565 - RNA, 22 nt, Human
cagacagagucuucccaucagu

SEQ ID NO: 758566 - RNA, 22 nt, Human
aggaaggacugcagcauuuggu

SEQ ID NO: 758567 - RNA, 22 nt, Human
uaggcuccugaggacuccaugc

SEQ ID NO: 758568 - RNA, 22 nt, Human
cauccaaacucucauuaucugu

SEQ ID NO: 758569 - RNA, 22 nt, Human
gcuggagcgugauccuugaucu

SEQ ID NO: 758570 - RNA, 22 nt, Human
agccaccucuaucuugggcucc

SEQ ID NO: 758571 - RNA, 22 nt, Human
gcacaaggagcaguguaugaaa

SEQ ID NO: 758572 - RNA, 22 nt, Human
aacaguguuuugcucuuugccc

SEQ ID NO: 758573 - RNA, 22 nt, Human
gcucagguguuaccuccucuag

SEQ ID NO: 758574 - RNA, 22 nt, Human
gcaggcucguuggaaguccccu

SEQ ID NO: 758575 - RNA, 22 nt, Human
cagcccugcugccuuagugccu

SEQ ID NO: 758576 - RNA, 22 nt, Human
cacuauaucucuuucaucuuuu

SEQ ID NO: 758577 - RNA, 22 nt, Human
acuuguuucaacuguacucucc

SEQ ID NO: 758578 - RNA, 21 nt, Human
uuguagcuuguuagaccaugu

SEQ ID NO: 758579 - RNA, 22 nt, Human
cagguggcuaacggccucauag

SEQ ID NO: 758580 - RNA, 22 nt, Human
ggcaucuucaaaauugccaaau

SEQ ID NO: 758581 - RNA, 22 nt, Human
cucuccagggaagcaguguacu

SEQ ID NO: 758582 - RNA, 22 nt, Human
agggagaggagggucuuguuga

SEQ ID NO: 758583 - RNA, 23 nt, Human
agugcucccaggaccuggggcag

SEQ ID NO: 758584 - RNA, 20 nt, Human
uuuauagugaucaauuuaua

SEQ ID NO: 758585 - RNA, 22 nt, Human
gguggcagcgucuaucugacau

SEQ ID NO: 758586 - RNA, 22 nt, Human
uggccugggccggcagauauac

SEQ ID NO: 758587 - RNA, 22 nt, Human
ccugagggaaggaugcuaccca

SEQ ID NO: 758588 - RNA, 22 nt, Human
ucucucuacuggggcacuagga

SEQ ID NO: 758589 - RNA, 22 nt, Human
ucuuccaggcccugccacagcu

SEQ ID NO: 758590 - RNA, 22 nt, Human
cugcuuuggacaacuauucuug

SEQ ID NO: 758591 - RNA, 22 nt, Human
cagugacagcaagcagugcugg

SEQ ID NO: 758592 - RNA, 22 nt, Human
gcugcugucuggucugagggcu

SEQ ID NO: 758593 - RNA, 22 nt, Human
cugagaaauucuuucuuucacu

SEQ ID NO: 758594 - RNA, 23 nt, Human
uuggagagggugaguagugucag

SEQ ID NO: 758595 - RNA, 22 nt, Human
uucuugaaucacuuuagagaua

SEQ ID NO: 758596 - RNA, 22 nt, Human
gcaaagcaaucaggaguagcau

SEQ ID NO: 758597 - RNA, 22 nt, Human
ucuuccagaugcagaugcuucu

SEQ ID NO: 758598 - RNA, 22 nt, Human
uugaauguaggucuuggugagc

SEQ ID NO: 758599 - RNA, 19 nt, Human
uauauauuuugggguugug

SEQ ID NO: 758600 - RNA, 22 nt, Human
augcaagucuuaauaguuuagg

SEQ ID NO: 758601 - RNA, 22 nt, Human
uguggcugcaaaggaaggcugc

SEQ ID NO: 758602 - RNA, 22 nt, Human
ucuugcaggcaugaaaggacuc

SEQ ID NO: 758603 - RNA, 22 nt, Human
agggaagggcagggucuaugca

SEQ ID NO: 758604 - RNA, 22 nt, Human
uagccgggugugguggaacucc

SEQ ID NO: 758605 - RNA, 22 nt, Human
ucauugaggaaagguaguggcu

SEQ ID NO: 758606 - RNA, 22 nt, Human
uaacuuugagaacuuucuggug

SEQ ID NO: 758607 - RNA, 22 nt, Human
augaagcagaauuucccacucu

SEQ ID NO: 758608 - RNA, 22 nt, Human
gagaaagauguaggcugggagg

SEQ ID NO: 758609 - RNA, 22 nt, Human
ccagagaaagcucacaggcagu

SEQ ID NO: 758610 - RNA, 22 nt, Human
gcugcaacuguugcucucugca

SEQ ID NO: 758611 - RNA, 22 nt, Human
ccagggcuuugccaaaguccag

SEQ ID NO: 758612 - RNA, 22 nt, Human
uauucagaaaacugagcgauga

SEQ ID NO: 758613 - RNA, 22 nt, Human
ucucuguucauggcacuauguc

SEQ ID NO: 758614 - RNA, 22 nt, Human
ucucuguaagcugccuucucgu

SEQ ID NO: 758615 - RNA, 22 nt, Human
agaggucagcugcaugccacau

SEQ ID NO: 758616 - RNA, 22 nt, Human
ccuggaaacacaugaugaugaa

SEQ ID NO: 758617 - RNA, 18 nt, Human
cuccccuguuuucccugc

SEQ ID NO: 758618 - RNA, 21 nt, Human
ccuggacugggagcagcacug

SEQ ID NO: 758619 - RNA, 22 nt, Human
auuuucugaguccagaauuuac

SEQ ID NO: 758620 - RNA, 22 nt, Human
auaacugagagcaaucuuucuu

SEQ ID NO: 758621 - RNA, 22 nt, Human
agcuggcuggccccuuccugcc

SEQ ID NO: 758622 - RNA, 22 nt, Human
ugagcaggacucacugcagccu

SEQ ID NO: 758623 - RNA, 22 nt, Human
gugcuguugccuggcugcacgg

SEQ ID NO: 758624 - RNA, 22 nt, Human
uccuuuaucugcucagaaagua

SEQ ID NO: 758625 - RNA, 22 nt, Human
cugccagcucgccacaaugaca

SEQ ID NO: 758626 - RNA, 22 nt, Human
gcccuuggaaagccaaggcagc

SEQ ID NO: 758627 - RNA, 22 nt, Human
ugaaacaaguuuaagggaucua

SEQ ID NO: 758628 - RNA, 21 nt, Human
ucuguggcggacucuaggccc

SEQ ID NO: 758629 - RNA, 22 nt, Human
uggcuucugcuuucaguggagg

SEQ ID NO: 758630 - RNA, 22 nt, Human
uuggguaggagaaagaacagau

SEQ ID NO: 758631 - RNA, 22 nt, Human
uguuuuucaaauauugcucugu

SEQ ID NO: 758632 - RNA, 22 nt, Human
gaaaggucaguuccacuuccau

SEQ ID NO: 758633 - RNA, 22 nt, Human
ccuagggagccugagagcagug

SEQ ID NO: 758634 - RNA, 22 nt, Human
cauuucaaguaacagauugcuu

SEQ ID NO: 758635 - RNA, 22 nt, Human
ccaugagcuuccuauauagggu

SEQ ID NO: 758636 - RNA, 22 nt, Human
auguauaaugcuaauuagcuag

SEQ ID NO: 758637 - RNA, 22 nt, Human
auccacagugcagcaagggccc

SEQ ID NO: 758638 - RNA, 22 nt, Human
uuuucucaagauccaaugcacu

SEQ ID NO: 758639 - RNA, 22 nt, Human
ucaacccuuccuccauauuucc

SEQ ID NO: 758640 - RNA, 20 nt, Human
ccuuuauuauuuguaugaug

SEQ ID NO: 758641 - RNA, 22 nt, Human
agccuucuaggaugucaucugc

SEQ ID NO: 758642 - RNA, 22 nt, Human
auggcuuuguguucagagcuga

SEQ ID NO: 758643 - RNA, 22 nt, Human
uaagauguuuugguuugauaag

SEQ ID NO: 758644 - RNA, 22 nt, Human
agcgugugugcgggucuucuuu

SEQ ID NO: 758645 - RNA, 22 nt, Human
gaucacaugaauggaauagaag

SEQ ID NO: 758646 - RNA, 22 nt, Human
aucagaaauugcccagcuguuu

SEQ ID NO: 758647 - RNA, 22 nt, Human
ccucugugauuucugagccaau

SEQ ID NO: 758648 - RNA, 22 nt, Human
acaggcagcccucucccugguu

SEQ ID NO: 758649 - RNA, 21 nt, Human
augaagucuaugcuucugugu

SEQ ID NO: 758650 - RNA, 23 nt, Human
gcccacccucagcguccucacgg

SEQ ID NO: 758651 - RNA, 22 nt, Human
ggcaaaaaccacaauuacuuuu

SEQ ID NO: 758652 - RNA, 22 nt, Human
agcagggcagguaaggaucaga

SEQ ID NO: 758653 - RNA, 14 nt, Human
acacuguguuuaga

SEQ ID NO: 758654 - RNA, 22 nt, Human
cuucuuggacuacucacuagag

SEQ ID NO: 758655 - RNA, 22 nt, Human
gcugcuuugucuguaaaaugga

SEQ ID NO: 758656 - RNA, 22 nt, Human
auuaagggccaauccuccagcc

SEQ ID NO: 758657 - RNA, 22 nt, Human
gggaucugaguaggcagaagcu

SEQ ID NO: 758658 - RNA, 22 nt, Human
acccaggguuccugggucccag

SEQ ID NO: 758659 - RNA, 22 nt, Human
uaacagaaauagaaaugagagu

SEQ ID NO: 758660 - RNA, 22 nt, Human
gcccacagcucguuccucuccu

SEQ ID NO: 758661 - RNA, 22 nt, Human
acugauacgguuuuagagucca

SEQ ID NO: 758662 - RNA, 22 nt, Human
cuccaaggugguuauuugagau

SEQ ID NO: 758663 - RNA, 22 nt, Human
ccugauucaguggugcccagag

SEQ ID NO: 758664 - RNA, 19 nt, Human
caggaacauggagggaggg

SEQ ID NO: 758665 - RNA, 22 nt, Human
agaaagggucacugaaagagga

SEQ ID NO: 758666 - RNA, 22 nt, Human
uucuucagggaagcuuguuaau

SEQ ID NO: 758667 - RNA, 22 nt, Human
agcuauauagaugguguguuug

SEQ ID NO: 758668 - RNA, 22 nt, Human
cuggaaguuuccuuccugguca

SEQ ID NO: 758669 - RNA, 20 nt, Human
uccaguauguuauuuggugu

SEQ ID NO: 758670 - RNA, 22 nt, Human
acagcuuuaguguggguggugc

SEQ ID NO: 758671 - RNA, 20 nt, Human
ucuaauuaaaauugucuagu

SEQ ID NO: 758672 - RNA, 22 nt, Human
cagcugaggaauacuagaugua

SEQ ID NO: 758673 - RNA, 22 nt, Human
aauaauugucaacuaugcuaca

SEQ ID NO: 758674 - RNA, 22 nt, Human
ugugguagucucagggcaguau

SEQ ID NO: 758675 - RNA, 20 nt, Human
gagggugggacuuccuaggc

SEQ ID NO: 758676 - RNA, 22 nt, Human
uauuugcaaagaacuacacuag

SEQ ID NO: 758677 - RNA, 22 nt, Human
uacagugugaauaagcaggcau

SEQ ID NO: 758678 - RNA, 22 nt, Human
gugggggaugcugaguuggaaa

SEQ ID NO: 758679 - RNA, 22 nt, Human
gaacuguuucuggugaaagagu

SEQ ID NO: 758680 - RNA, 22 nt, Human
augagagcucuaugaucuguuu

SEQ ID NO: 758681 - RNA, 20 nt, Human
ugugugaacacggacucugu

SEQ ID NO: 758682 - RNA, 22 nt, Human
gaacagagaagcuuuacuaaag

SEQ ID NO: 758683 - RNA, 22 nt, Human
cagacuggcugaaggccgagug

SEQ ID NO: 758684 - RNA, 22 nt, Human
uuugcaaauauguguuucuauu

SEQ ID NO: 758685 - RNA, 22 nt, Human
ugcugucuuccaggauggugaa

SEQ ID NO: 758686 - RNA, 22 nt, Human
caguucugagcuuucccagaag

SEQ ID NO: 758687 - RNA, 22 nt, Human
aggcagagagcaguggccgucu

SEQ ID NO: 758688 - RNA, 22 nt, Human
gucagugcuugaagggcagaga

SEQ ID NO: 758689 - RNA, 16 nt, Human
uccaagaagugccccu

SEQ ID NO: 758690 - RNA, 22 nt, Human
cagaggucccuauuucuuuguu

SEQ ID NO: 758691 - RNA, 19 nt, Human
aagcauggugccucaccuc

SEQ ID NO: 758692 - RNA, 22 nt, Human
acaagaguaauuucaacagagu

SEQ ID NO: 758693 - RNA, 22 nt, Human
ucugcccucauugcugccugga

SEQ ID NO: 758694 - RNA, 22 nt, Human
uaucauugcugaugugcugaga

SEQ ID NO: 758695 - RNA, 22 nt, Human
ucacccagguccaggcucuggc

SEQ ID NO: 758696 - RNA, 22 nt, Human
cugaagagguuguugaggaaua

SEQ ID NO: 758697 - RNA, 22 nt, Human
aaacaacaauccaaugggagcu

SEQ ID NO: 758698 - RNA, 22 nt, Human
ggccugcucaaacagauuccug

SEQ ID NO: 758699 - RNA, 22 nt, Human
uuuacugagugaccuagaauaa

SEQ ID NO: 758700 - RNA, 22 nt, Human
acaggaguggcucuaccagacc

SEQ ID NO: 758701 - RNA, 22 nt, Human
acugggaagagagaauucuguc

SEQ ID NO: 758702 - RNA, 22 nt, Human
aggcugggaagguaaaguugua

SEQ ID NO: 758703 - RNA, 22 nt, Human
uaacaagucauuuuaaauuaug

SEQ ID NO: 758704 - RNA, 22 nt, Human
gaagauuggggccucugcaccc

SEQ ID NO: 758705 - RNA, 22 nt, Human
cugggccagaagacauuuagga

SEQ ID NO: 758706 - RNA, 22 nt, Human
uuucucaaaagacagaagugaa

SEQ ID NO: 758707 - RNA, 22 nt, Human
acaguaugaaugcagaauguag

SEQ ID NO: 758708 - RNA, 22 nt, Human
gguggcucagugucaggcccug

SEQ ID NO: 758709 - RNA, 22 nt, Human
guuacagugagaagauagccua

SEQ ID NO: 758710 - RNA, 22 nt, Human
aagugguuugauucaguuuaug

SEQ ID NO: 758711 - RNA, 22 nt, Human
gugaaccucugaaaggcaguga

SEQ ID NO: 758712 - RNA, 22 nt, Human
ucucaagcuuguugguauguuu

SEQ ID NO: 758713 - RNA, 22 nt, Human
uucaccagagguuagaauauuu

SEQ ID NO: 758714 - RNA, 22 nt, Human
cagcaauaaugucuacaaaucu

SEQ ID NO: 758715 - RNA, 22 nt, Human
aguuuaugucuuuacuucagcu

SEQ ID NO: 758716 - RNA, 22 nt, Human
aggcuuccucgugccuuagaua

SEQ ID NO: 758717 - RNA, 22 nt, Human
aaggccaucuacuuacggaauu

SEQ ID NO: 758718 - RNA, 22 nt, Human
ccagcaggaaagugacguuuga

SEQ ID NO: 758719 - RNA, 18 nt, Human
ucugggcuucccgaggcu

SEQ ID NO: 758720 - RNA, 19 nt, Human
gcugggugggguccacagc

SEQ ID NO: 758721 - RNA, 22 nt, Human
ugagggagucaugauuaaggaa

SEQ ID NO: 758722 - RNA, 22 nt, Human
acuucaaaaugaguuuccuggu

SEQ ID NO: 758723 - RNA, 22 nt, Human
auuagucuacugucuaauaaau

SEQ ID NO: 758724 - RNA, 22 nt, Human
ccagagucccuguucucggccu

SEQ ID NO: 758725 - RNA, 22 nt, Human
ugguuuacucuguaaaccagga

SEQ ID NO: 758726 - RNA, 22 nt, Human
ccacccugagccgcaagagcag

SEQ ID NO: 758727 - RNA, 22 nt, Human
aacagcuugagacuggauaugc

SEQ ID NO: 758728 - RNA, 22 nt, Human
ucuuugcaacucccauuuccau

SEQ ID NO: 758729 - RNA, 19 nt, Human
ucagucuaggaaugagcua

SEQ ID NO: 758730 - RNA, 21 nt, Human
gaucucuggaaggagaaagcu

SEQ ID NO: 758731 - RNA, 22 nt, Human
uacuauguucuuccuaaauagu

SEQ ID NO: 758732 - RNA, 19 nt, Human
aggugcuggugaggguguu

SEQ ID NO: 758733 - RNA, 22 nt, Human
uuguguuugaugcugacacgca

SEQ ID NO: 758734 - RNA, 22 nt, Human
uaggccaaaugacuugauguuu

SEQ ID NO: 758735 - RNA, 22 nt, Human
aagggcuccacuugaaucacac

SEQ ID NO: 758736 - RNA, 22 nt, Human
caguccucucacucaggccuuu

SEQ ID NO: 758737 - RNA, 22 nt, Human
acaguguuuaagagauggcauu

SEQ ID NO: 758738 - RNA, 22 nt, Human
cuuauguauauuuggaacguac

SEQ ID NO: 758739 - RNA, 22 nt, Human
uacaagauguacuaaaaauuau

SEQ ID NO: 758740 - RNA, 22 nt, Human
aacauguaaccagcauucaucu

SEQ ID NO: 758741 - RNA, 22 nt, Human
ggcuucauuucuguccuugauu

SEQ ID NO: 758742 - RNA, 22 nt, Human
auguuaccaucuuuuaucuaca

SEQ ID NO: 758743 - RNA, 22 nt, Human
ucugggucuaugaucucacuuc

SEQ ID NO: 758744 - RNA, 22 nt, Human
gcaauaaauaacauggaagaca

SEQ ID NO: 758745 - RNA, 22 nt, Human
gggcggcgucggcgaggccauc

SEQ ID NO: 758746 - RNA, 22 nt, Human
ugcaggcauaaccgauguugau

SEQ ID NO: 758747 - RNA, 22 nt, Human
auuuuaugacacgauucuucca

SEQ ID NO: 758748 - RNA, 20 nt, Human
aagagaagaagucuuugaaa

SEQ ID NO: 758749 - RNA, 22 nt, Human
cuguccauggugcuggacgguc

SEQ ID NO: 758750 - RNA, 22 nt, Human
augaggcauuccacucaaacuc

SEQ ID NO: 758751 - RNA, 22 nt, Human
aagauguuuagauuuauacaau

SEQ ID NO: 758752 - RNA, 22 nt, Human
augaaucaagugagaacagcau

SEQ ID NO: 758753 - RNA, 22 nt, Human
aucauucuauuguugagcugcc

SEQ ID NO: 758754 - RNA, 22 nt, Human
ugucugcccauucaugggcaca

SEQ ID NO: 758755 - RNA, 22 nt, Human
augaauccaaaguuuacuauua

SEQ ID NO: 758756 - RNA, 21 nt, Human
uguguuugagacuauguuucc

SEQ ID NO: 758757 - RNA, 22 nt, Human
uucagcaaugggauggugcagg

SEQ ID NO: 758758 - RNA, 22 nt, Human
accucugcucaagaccccuccg

SEQ ID NO: 758759 - RNA, 22 nt, Human
agagcugcaccuaugcagaccu

SEQ ID NO: 758760 - RNA, 22 nt, Human
cccucccucugcuggguguaga

SEQ ID NO: 758761 - RNA, 22 nt, Human
aacagaaugcaggggaugcugc

SEQ ID NO: 758762 - RNA, 22 nt, Human
ugagcagaggaggcugccaacu

SEQ ID NO: 758763 - RNA, 22 nt, Human
ucacaguugauugaaacacagc

SEQ ID NO: 758764 - RNA, 22 nt, Human
aaaccuuaaaccaagcucuuga

SEQ ID NO: 758765 - RNA, 22 nt, Human
aguuauaaucugcuacugauau

SEQ ID NO: 758766 - RNA, 22 nt, Human
gacacaggauuccuggcucugc

SEQ ID NO: 758767 - RNA, 22 nt, Human
ggaggccaaggugggcggauca

SEQ ID NO: 758768 - RNA, 22 nt, Human
cugugaggcggaaaggacucuc

SEQ ID NO: 758769 - RNA, 16 nt, Human
aguggcagauaauacc

SEQ ID NO: 758770 - RNA, 22 nt, Human
aggccagcagacgugggacuga

SEQ ID NO: 758771 - RNA, 22 nt, Human
augcauauaauggccagaacaa

SEQ ID NO: 758772 - RNA, 22 nt, Human
agcagcuggggccugugacgau

SEQ ID NO: 758773 - RNA, 22 nt, Human
gccaguggucagugggagggug

SEQ ID NO: 758774 - RNA, 22 nt, Human
agacaggcuuugcuguauauca

SEQ ID NO: 758775 - RNA, 22 nt, Human
agucagugaaugguguaugcua

SEQ ID NO: 758776 - RNA, 22 nt, Human
uguagcauguaaauugguuauu

SEQ ID NO: 758777 - RNA, 22 nt, Human
aaacugcacaagggugcauagc

SEQ ID NO: 758778 - RNA, 22 nt, Human
uuggaggggccacugcagagcu

SEQ ID NO: 758779 - RNA, 22 nt, Human
agggucagguuaagggagucau

SEQ ID NO: 758780 - RNA, 22 nt, Human
gaaaaggaaauuuauagagauc

SEQ ID NO: 758781 - RNA, 22 nt, Human
cagcucugacacaguacaaaau

SEQ ID NO: 758782 - RNA, 22 nt, Human
gagguucacuuccuggauccuu

SEQ ID NO: 758783 - RNA, 22 nt, Human
uccugccuguuuaccuguacuu

SEQ ID NO: 758784 - RNA, 22 nt, Human
ucuggcuguguaauauguguag

SEQ ID NO: 758785 - RNA, 19 nt, Human
cacagcuggcgcugaccgc

SEQ ID NO: 758786 - RNA, 21 nt, Human
uaaagaagaugaaugugauca

SEQ ID NO: 758787 - RNA, 22 nt, Human
acugggcuccagaugugauacg

SEQ ID NO: 758788 - RNA, 22 nt, Human
cacaguuucuauaggucagaau

SEQ ID NO: 758789 - RNA, 22 nt, Human
aagcuuuaugacuuggagacag

SEQ ID NO: 758790 - RNA, 22 nt, Human
aucccacaccccuacaacauau

SEQ ID NO: 758791 - RNA, 22 nt, Human
aucugaagggaaguggaaggca

SEQ ID NO: 758792 - RNA, 22 nt, Human
auugaacuguagucuucugucu

SEQ ID NO: 758793 - RNA, 22 nt, Human
auguuuuccugggagagcacuc

SEQ ID NO: 758794 - RNA, 22 nt, Human
ccagcuggugggucuuucucug

SEQ ID NO: 758795 - RNA, 22 nt, Human
aguccugggucuggagaaugga

SEQ ID NO: 758796 - RNA, 22 nt, Human
cuauauuuggugagggaugucu

SEQ ID NO: 758797 - RNA, 22 nt, Human
ggaggcugagaaguccaagauc

SEQ ID NO: 758798 - RNA, 22 nt, Human
aggggcaggugcugcacuuaga

SEQ ID NO: 758799 - RNA, 22 nt, Human
uuugaaaauuuaagugcuacac

SEQ ID NO: 758800 - RNA, 22 nt, Human
gcaguguguagaguuuaggaaa

SEQ ID NO: 758801 - RNA, 22 nt, Human
ccuccaggaggaaauggaacac

SEQ ID NO: 758802 - RNA, 22 nt, Human
ggcucuuguucguaccauggcu

SEQ ID NO: 758803 - RNA, 22 nt, Human
uaggauuuuuuggauucuggau

SEQ ID NO: 758804 - RNA, 22 nt, Human
cccaccccuggacaggugagug

SEQ ID NO: 758805 - RNA, 22 nt, Human
guggcugcuguccucucugguu

SEQ ID NO: 758806 - RNA, 22 nt, Human
uacuuugucauucuaaccuucc

SEQ ID NO: 758807 - RNA, 20 nt, Human
ucuguagucuaugaggcuua

SEQ ID NO: 758808 - RNA, 22 nt, Human
caggaagccacaggacagguag

SEQ ID NO: 758809 - RNA, 22 nt, Human
uagagguagcaacaggacuaga

SEQ ID NO: 758810 - RNA, 23 nt, Human
uaggaggagaccgcaguguuacc

SEQ ID NO: 758811 - RNA, 21 nt, Human
cuaagcaaggagcagggguag

SEQ ID NO: 758812 - RNA, 22 nt, Human
guuuagaagccaagauuugggu

SEQ ID NO: 758813 - RNA, 22 nt, Human
ugggcuggugagggaucauuua

SEQ ID NO: 758814 - RNA, 19 nt, Human
ggaguuuccaauggguaaa

SEQ ID NO: 758815 - RNA, 22 nt, Human
augccuguaaucccagugcuuu

SEQ ID NO: 758816 - RNA, 22 nt, Human
cagggacugagauccagacugu

SEQ ID NO: 758817 - RNA, 22 nt, Human
ucaggggcuugaggugcauguc

SEQ ID NO: 758818 - RNA, 20 nt, Human
aggggugaucgggugacacu

SEQ ID NO: 758819 - RNA, 22 nt, Human
uuucacagucaauuuggaguca

SEQ ID NO: 758820 - RNA, 22 nt, Human
gagcaaugcccuucaccagccc

SEQ ID NO: 758821 - RNA, 22 nt, Human
aggaguguggccagggcucugg

SEQ ID NO: 758822 - RNA, 22 nt, Human
accuaaaucuaccucauguuuu

SEQ ID NO: 758823 - RNA, 22 nt, Human
ggcacugggaaugcagugauga

SEQ ID NO: 758824 - RNA, 21 nt, Human
ggccacaagcggaggagccgc

SEQ ID NO: 758825 - RNA, 22 nt, Human
ugcaugcaugauguuugguagc

SEQ ID NO: 758826 - RNA, 18 nt, Human
gaaagugcggggcagggg

SEQ ID NO: 758827 - RNA, 22 nt, Human
gggcagugucuggcccccaggc

SEQ ID NO: 758828 - RNA, 22 nt, Human
ccugccugccugcuggccggga

SEQ ID NO: 758829 - RNA, 22 nt, Human
agaccugugaucacauggaaug

SEQ ID NO: 758830 - RNA, 22 nt, Human
aaucaguuguucacucugaaaa

SEQ ID NO: 758831 - RNA, 22 nt, Human
augggaugcauggcuguggcca

SEQ ID NO: 758832 - RNA, 22 nt, Human
ucagagagguuggugauaagaa

SEQ ID NO: 758833 - RNA, 22 nt, Human
uuccagugaaacaugaggugug

SEQ ID NO: 758834 - RNA, 22 nt, Human
caggcuccaagcccucugaugu

SEQ ID NO: 758835 - RNA, 22 nt, Human
aggcucugggcucuagauuuug

SEQ ID NO: 758836 - RNA, 22 nt, Human
ugccaggcacgugagaguggcc

SEQ ID NO: 758837 - RNA, 22 nt, Human
ugugugaacauguuuucauuuc

SEQ ID NO: 758838 - RNA, 23 nt, Human
uggccagcagaagcaaggggagc

SEQ ID NO: 758839 - RNA, 22 nt, Human
caccagguuccgggcagagcug

SEQ ID NO: 758840 - RNA, 22 nt, Human
cagcuauuguucuguauaauga

SEQ ID NO: 758841 - RNA, 22 nt, Human
ggcagugaaucugagagccugg

SEQ ID NO: 758842 - RNA, 22 nt, Human
ccucaggcuucgucuuccaccc

SEQ ID NO: 758843 - RNA, 22 nt, Human
cccugccuacaggguuuucuuu

SEQ ID NO: 758844 - RNA, 22 nt, Human
augucacugugaggcagcuguc

SEQ ID NO: 758845 - RNA, 22 nt, Human
uucaagaguccaggagagucug

SEQ ID NO: 758846 - RNA, 22 nt, Human
ccucagcauccuccugcucagu

SEQ ID NO: 758847 - RNA, 22 nt, Human
ggcagccagcaaugagaaguuu

SEQ ID NO: 758848 - RNA, 22 nt, Human
cuuuauguuggggugucuuagu

SEQ ID NO: 758849 - RNA, 22 nt, Human
ggccugugagcccuugcaugua

SEQ ID NO: 758850 - RNA, 22 nt, Human
auucacagaauaguuuuaccag

SEQ ID NO: 758851 - RNA, 22 nt, Human
uccacauuagaauguuuucuca

SEQ ID NO: 758852 - RNA, 22 nt, Human
uccagucccuugccuccacagc

SEQ ID NO: 758853 - RNA, 22 nt, Human
cugcacagggauauggggagcu

SEQ ID NO: 758854 - RNA, 22 nt, Human
ucauuuugccugccauuugagu

SEQ ID NO: 758855 - RNA, 22 nt, Human
gagaagaacuugggcaaaguca

SEQ ID NO: 758856 - RNA, 22 nt, Human
gaccaaggccaggccagggcgu

SEQ ID NO: 758857 - RNA, 22 nt, Human
ggcuucucgugccgaagcaaga

SEQ ID NO: 758858 - RNA, 22 nt, Human
aucaucuugaaagucuauguuu

SEQ ID NO: 758859 - RNA, 22 nt, Human
cugcugugcagacagacucucu

SEQ ID NO: 758860 - RNA, 22 nt, Human
auucuucagcaggggacacuau

SEQ ID NO: 758861 - RNA, 22 nt, Human
uccgaggcgcaccggcgcuccu

SEQ ID NO: 758862 - RNA, 22 nt, Human
ugauuucauaguauauacauga

SEQ ID NO: 758863 - RNA, 22 nt, Human
cagcuguuucaguagcguuacu

SEQ ID NO: 758864 - RNA, 22 nt, Human
ggcacacucaccacguggaggg

SEQ ID NO: 758865 - RNA, 22 nt, Human
acugaacagaccauuuuguccu

SEQ ID NO: 758866 - RNA, 22 nt, Human
uucccuaaugucuaacgcuauu

SEQ ID NO: 758867 - RNA, 22 nt, Human
auauauuuugaauagccucugu

SEQ ID NO: 758868 - RNA, 22 nt, Human
guaaccugggauguagcacaga

SEQ ID NO: 758869 - RNA, 22 nt, Human
ugugaacuuuggaugguucuga

SEQ ID NO: 758870 - RNA, 22 nt, Human
acaauguaggcugaaaaagcuu

SEQ ID NO: 758871 - RNA, 22 nt, Human
aaccauuugcaguuacugagac

SEQ ID NO: 758872 - RNA, 23 nt, Human
agguuacaguuguuaaguugcaa

SEQ ID NO: 758873 - RNA, 22 nt, Human
aggcacuuuacaaugugugaca

SEQ ID NO: 758874 - RNA, 22 nt, Human
ugcuuuaucaaagcuauaguga

SEQ ID NO: 758875 - RNA, 22 nt, Human
uucaugaauaccccuucuguaa

SEQ ID NO: 758876 - RNA, 22 nt, Human
uggucagcguuugucagagcag

SEQ ID NO: 758877 - RNA, 22 nt, Human
ccaggagagcagaagcccaggc

SEQ ID NO: 758878 - RNA, 18 nt, Human
gcccagaggucugggccc

SEQ ID NO: 758879 - RNA, 22 nt, Human
agucucugcacaguaagaagca

SEQ ID NO: 758880 - RNA, 22 nt, Human
auuuuuucuguaaacuggccuu

SEQ ID NO: 758881 - RNA, 22 nt, Human
ugcucuuacauuaauucagcau

SEQ ID NO: 758882 - RNA, 22 nt, Human
aggaagcuuggggcagggcuac

SEQ ID NO: 758883 - RNA, 22 nt, Human
agucaacacauuaaaccuaggg

SEQ ID NO: 758884 - RNA, 22 nt, Human
gcuuccuguaggcagguccaag

SEQ ID NO: 758885 - RNA, 22 nt, Human
gaugauggacaaagcauuggug

SEQ ID NO: 758886 - RNA, 22 nt, Human
agugaguggauguaggaauugg

SEQ ID NO: 758887 - RNA, 22 nt, Human
aggguaggaacugaguggaagg

SEQ ID NO: 758888 - RNA, 22 nt, Human
gugggcaaggucccugccagcu

SEQ ID NO: 758889 - RNA, 22 nt, Human
auacuuccugcuucccugaucu

SEQ ID NO: 758890 - RNA, 22 nt, Human
cagcaaggacugggcaugugaa

SEQ ID NO: 758891 - RNA, 22 nt, Human
gcuuccagggugggggauguuu

SEQ ID NO: 758892 - RNA, 22 nt, Human
gggcucuuuucugagcuucacu

SEQ ID NO: 758893 - RNA, 22 nt, Human
cucuugccagagaugagacucu

SEQ ID NO: 758894 - RNA, 22 nt, Human
cccagcagcuugcacagugcug

SEQ ID NO: 758895 - RNA, 22 nt, Human
gcaccccugcgugccuucccuu

SEQ ID NO: 758896 - RNA, 22 nt, Human
gaggccuggaccagccacagag

SEQ ID NO: 758897 - RNA, 22 nt, Human
aucuuucuaugguacuuucucc

SEQ ID NO: 758898 - RNA, 22 nt, Human
ucuguacauuuggggaccccag

SEQ ID NO: 758899 - RNA, 18 nt, Human
cugcuccagucuggccag

SEQ ID NO: 758900 - RNA, 20 nt, Human
auguagaugaaagcaaaggc

SEQ ID NO: 758901 - RNA, 20 nt, Human
guggccucucacauucugag

SEQ ID NO: 758902 - RNA, 22 nt, Human
agccucucacugucacccuccc

SEQ ID NO: 758903 - RNA, 22 nt, Human
aggcugggaaaccugaaguugu

SEQ ID NO: 758904 - RNA, 22 nt, Human
ccaguggcuacagggggguuga

SEQ ID NO: 758905 - RNA, 22 nt, Human
ugggcucucgucccugcagaag

SEQ ID NO: 758906 - RNA, 22 nt, Human
cucagagaagucuuugcuaaac

SEQ ID NO: 758907 - RNA, 22 nt, Human
ugaugacuauauaugacuagug

SEQ ID NO: 758908 - RNA, 22 nt, Human
ucaggaaauggacaucuuugcu

SEQ ID NO: 758909 - RNA, 22 nt, Human
acugugggcagcuucugggaac

SEQ ID NO: 758910 - RNA, 22 nt, Human
gcagcauuaccaagacauggca

SEQ ID NO: 758911 - RNA, 22 nt, Human
gcacagggcccugugcguaggu

SEQ ID NO: 758912 - RNA, 19 nt, Human
gcuggccacgccccaguug

SEQ ID NO: 758913 - RNA, 22 nt, Human
cucuuuggagaagcacguauua

SEQ ID NO: 758914 - RNA, 22 nt, Human
agcuaguucacugaagccuaug

SEQ ID NO: 758915 - RNA, 22 nt, Human
uccaagaagcucagcaaacauc

SEQ ID NO: 758916 - RNA, 22 nt, Human
aauagucucucccacaccaucc

SEQ ID NO: 758917 - RNA, 22 nt, Human
agccuguggaucccugcacugg

SEQ ID NO: 758918 - RNA, 22 nt, Human
ugcaggcuauccuuugcugcaa

SEQ ID NO: 758919 - RNA, 21 nt, Human
ggaguuuuucuggaagggacu

SEQ ID NO: 758920 - RNA, 22 nt, Human
gaggcucagggaaacagcgcag

SEQ ID NO: 758921 - RNA, 22 nt, Human
ugcauggaguaauugaugcuug

SEQ ID NO: 758922 - RNA, 22 nt, Human
cccugcuagaaccuccaacaug

SEQ ID NO: 758923 - RNA, 22 nt, Human
aggcacugacaauucuggacug

SEQ ID NO: 758924 - RNA, 22 nt, Human
gaguuuaguuuggcuuaaacug

SEQ ID NO: 758925 - RNA, 22 nt, Human
ccugucuguccuuugcauucuu

SEQ ID NO: 758926 - RNA, 21 nt, Human
uggcuucugccaauguuaaga

SEQ ID NO: 758927 - RNA, 17 nt, Human
cacaugucuacauggau

SEQ ID NO: 758928 - RNA, 22 nt, Human
cccaggacuaaugagcucuacg

SEQ ID NO: 758929 - RNA, 22 nt, Human
auucuaagcacgcugaagucuu

SEQ ID NO: 758930 - RNA, 20 nt, Human
aggagccauugacugcagca

SEQ ID NO: 758931 - RNA, 22 nt, Human
ucuguacuuuuauuuuggcacu

SEQ ID NO: 758932 - RNA, 22 nt, Human
cugguggaggugccaggauuug

SEQ ID NO: 758933 - RNA, 19 nt, Human
agcuucuuuggaaacauuu

SEQ ID NO: 758934 - RNA, 22 nt, Human
aagauaacaggaggaguuugua

SEQ ID NO: 758935 - RNA, 22 nt, Human
acagccagugacugcagacccu

SEQ ID NO: 758936 - RNA, 22 nt, Human
cugugccuuaguauucucauuu

SEQ ID NO: 758937 - RNA, 22 nt, Human
ugggaagaggagcacuggaaug

SEQ ID NO: 758938 - RNA, 22 nt, Human
agcagccucccagggagcagcc

SEQ ID NO: 758939 - RNA, 22 nt, Human
acaguccuuguuucggucagau

SEQ ID NO: 758940 - RNA, 22 nt, Human
aggacaugugccuccagggcag

SEQ ID NO: 758941 - RNA, 22 nt, Human
ggcuccuucaaagcaccuggcu

SEQ ID NO: 758942 - RNA, 22 nt, Human
caggagcucucaucgucagggc

SEQ ID NO: 758943 - RNA, 22 nt, Human
gcacuucacaugccuuuuccug

SEQ ID NO: 758944 - RNA, 22 nt, Human
guggcucaucuuugggaaguaa

SEQ ID NO: 758945 - RNA, 22 nt, Human
acugucacugacagaaucaaca

SEQ ID NO: 758946 - RNA, 22 nt, Human
auugucauuccagucauuguua

SEQ ID NO: 758947 - RNA, 22 nt, Human
ucuuucagccacuuaccugucu

SEQ ID NO: 758948 - RNA, 22 nt, Human
auagaauuuguacuuguagaac

SEQ ID NO: 758949 - RNA, 22 nt, Human
ugugugcacuuaaugcaaucau

SEQ ID NO: 758950 - RNA, 22 nt, Human
ccuggccagggucugggcugcu

SEQ ID NO: 758951 - RNA, 22 nt, Human
uccucuucaaaauagcucugaa

SEQ ID NO: 758952 - RNA, 22 nt, Human
aaagaaucacauccuucagcaa

SEQ ID NO: 758953 - RNA, 23 nt, Human
ccagucucacguauacaggauuu

SEQ ID NO: 758954 - RNA, 22 nt, Human
aggcccugcggaaaugaucauu

SEQ ID NO: 758955 - RNA, 22 nt, Human
cagauagcguuugagagcauaa

SEQ ID NO: 758956 - RNA, 20 nt, Human
auauaccaucccacaacagg

SEQ ID NO: 758957 - RNA, 22 nt, Human
acagcagagugugagauagcca

SEQ ID NO: 758958 - RNA, 22 nt, Human
uccccagaggugaggcagcuuu

SEQ ID NO: 758959 - RNA, 18 nt, Human
ucacacuuccuuuggguc

SEQ ID NO: 758960 - RNA, 22 nt, Human
cuggguagggcaaggaacuggc

SEQ ID NO: 758961 - RNA, 22 nt, Human
gccagagcuugguuuuuauuua

SEQ ID NO: 758962 - RNA, 22 nt, Human
acaguuagggacuauaaucauu

SEQ ID NO: 758963 - RNA, 22 nt, Human
uacagccuguuaccuauauuug

SEQ ID NO: 758964 - RNA, 22 nt, Human
gcagggcugcagagggcacugu

SEQ ID NO: 758965 - RNA, 22 nt, Human
agggccugagaccguggcuuga

SEQ ID NO: 758966 - RNA, 22 nt, Human
ccuccuggaggcucuaagggag

SEQ ID NO: 758967 - RNA, 22 nt, Human
gccaccccauagguguuaggug

SEQ ID NO: 758968 - RNA, 22 nt, Human
aaguccauagguuucaugaggg

SEQ ID NO: 758969 - RNA, 22 nt, Human
uacauauagacaguuacucuag

SEQ ID NO: 758970 - RNA, 22 nt, Human
aggcagcuggcaaauucuagag

SEQ ID NO: 758971 - RNA, 22 nt, Human
acccccacggaaggccguacgc

SEQ ID NO: 758972 - RNA, 22 nt, Human
agggcagauggaacuuccccga

SEQ ID NO: 758973 - RNA, 20 nt, Human
auauaggcauaguaaaauga

SEQ ID NO: 758974 - RNA, 22 nt, Human
cagggccuccccggcagucuuu

SEQ ID NO: 758975 - RNA, 22 nt, Human
gaguuuaguggaauuuccuucu

SEQ ID NO: 758976 - RNA, 22 nt, Human
ggccccagggauuaggccaacc

SEQ ID NO: 758977 - RNA, 21 nt, Human
uugcacagaaaaccauagaga

SEQ ID NO: 758978 - RNA, 22 nt, Human
cugucauuuucuuccaauauaa

SEQ ID NO: 758979 - RNA, 22 nt, Human
uccagcugcugacccaguagcc

SEQ ID NO: 758980 - RNA, 22 nt, Human
gagcuggaagucuguggucaga

SEQ ID NO: 758981 - RNA, 22 nt, Human
cagugauuaaaacaugacagcc

SEQ ID NO: 758982 - RNA, 22 nt, Human
cauggccaggccaagagaguac

SEQ ID NO: 758983 - RNA, 22 nt, Human
ugcaggagauaauggugcuuag

SEQ ID NO: 758984 - RNA, 22 nt, Human
uucuacauuuaaaaggaaaauc

SEQ ID NO: 758985 - RNA, 22 nt, Human
cucucagggacccagccagccu

SEQ ID NO: 758986 - RNA, 22 nt, Human
uucucuggcgguguguuuuccu

SEQ ID NO: 758987 - RNA, 23 nt, Human
auguccccuucuugaugccuggc

SEQ ID NO: 758988 - RNA, 22 nt, Human
ggugaggguaaauauaggcaaa

SEQ ID NO: 758989 - RNA, 22 nt, Human
gauguaaaaacuccuuucgaaa

SEQ ID NO: 758990 - RNA, 20 nt, Human
ggccggggagcucuccaggg

SEQ ID NO: 758991 - RNA, 22 nt, Human
ggccaccucugcccuacugagu

SEQ ID NO: 758992 - RNA, 22 nt, Human
uuacuugguguucugcccagga

SEQ ID NO: 758993 - RNA, 22 nt, Human
cuguugcaugacugugcaugcu

SEQ ID NO: 758994 - RNA, 22 nt, Human
uaaauuaugucacaugacucug

SEQ ID NO: 758995 - RNA, 22 nt, Human
guggcucaguuaacuuccaugu

SEQ ID NO: 758996 - RNA, 22 nt, Human
uagaugcuguagaaauacuuau

SEQ ID NO: 758997 - RNA, 23 nt, Human
gguggcaggaguggaugcugagc

SEQ ID NO: 758998 - RNA, 20 nt, Human
uaugcaguauguguguauaa

SEQ ID NO: 758999 - RNA, 22 nt, Human
uugcaccaaaugaguuaaaauu

SEQ ID NO: 759000 - RNA, 22 nt, Human
aaguuuggaaugauagagaccu

SEQ ID NO: 759001 - RNA, 22 nt, Human
uugucugaagucacacagaugc

SEQ ID NO: 759002 - RNA, 22 nt, Human
agugcauuccuggggaagaagc

SEQ ID NO: 759003 - RNA, 22 nt, Human
gcccaagcuggacugcaguggc

SEQ ID NO: 759004 - RNA, 22 nt, Human
auucucagggaguauuuucuau

SEQ ID NO: 759005 - RNA, 19 nt, Human
aaggaauggcuuuaaguag

SEQ ID NO: 759006 - RNA, 22 nt, Human
ucagaggacaagcucccuggug

SEQ ID NO: 759007 - RNA, 22 nt, Human
agaguuuggagguguuccugga

SEQ ID NO: 759008 - RNA, 22 nt, Human
uagcaacaauggaaguaacuuc

SEQ ID NO: 759009 - RNA, 22 nt, Human
gucuguaucagaggagugaaug

SEQ ID NO: 759010 - RNA, 22 nt, Human
uuaggaaauuccaccuguauuc

SEQ ID NO: 759011 - RNA, 22 nt, Human
uggcauguacccaggaauggac

SEQ ID NO: 759012 - RNA, 22 nt, Human
guacacucccccugugaaguug

SEQ ID NO: 759013 - RNA, 22 nt, Human
cagucacagugacaggaugugg

SEQ ID NO: 759014 - RNA, 22 nt, Human
uggugaauaguagcuucagacu

SEQ ID NO: 759015 - RNA, 22 nt, Human
cauuguucaacacugacuugca

SEQ ID NO: 759016 - RNA, 22 nt, Human
gaagucagucaucuccugucuc

SEQ ID NO: 759017 - RNA, 22 nt, Human
caggaaaccgcaucccaguggg

SEQ ID NO: 759018 - RNA, 22 nt, Human
gcuaauacuuuggaaagaaugu

SEQ ID NO: 759019 - RNA, 22 nt, Human
uaaguuuaaauguacaugaagc

SEQ ID NO: 759020 - RNA, 22 nt, Human
cccuuagcuccaagggguuugg

SEQ ID NO: 759021 - RNA, 23 nt, Human
ggguccagccaauuccaaggaaa

SEQ ID NO: 759022 - RNA, 22 nt, Human
cugagagaagagcgcaguuugu

SEQ ID NO: 759023 - RNA, 22 nt, Human
cuggccauguugccucugagac

SEQ ID NO: 759024 - RNA, 22 nt, Human
cuggagcaggcuugucccagcu

SEQ ID NO: 759025 - RNA, 22 nt, Human
ggugggaaggggccagugugcg

SEQ ID NO: 759026 - RNA, 22 nt, Human
uggucugaaggacuucugaggg

SEQ ID NO: 759027 - RNA, 22 nt, Human
aauugugcuaugauuaugaaag

SEQ ID NO: 759028 - RNA, 22 nt, Human
uauugacaauaggcaacugagg

SEQ ID NO: 759029 - RNA, 22 nt, Human
acucugggauuguuucugguau

SEQ ID NO: 759030 - RNA, 22 nt, Human
ucagugcauucauggguggcug

SEQ ID NO: 759031 - RNA, 22 nt, Human
accagcaguuaugaggccagga

SEQ ID NO: 759032 - RNA, 22 nt, Human
cauggcuuuguucuguuagaug

SEQ ID NO: 759033 - RNA, 21 nt, Human
aagugguuuagguuaccgggg

SEQ ID NO: 759034 - RNA, 22 nt, Human
ugcuucagagacauccuacuca

SEQ ID NO: 759035 - RNA, 22 nt, Human
aaaaucuugacuguuuuuagaa

SEQ ID NO: 759036 - RNA, 23 nt, Human
aucauuacuuugauaccuuuucu

SEQ ID NO: 759037 - RNA, 20 nt, Human
caggcacacucauuccugcu

SEQ ID NO: 759038 - RNA, 22 nt, Human
ccuucagccaguuuucuuuguu

SEQ ID NO: 759039 - RNA, 22 nt, Human
aaaaaugcugugguagcugugu

SEQ ID NO: 759040 - RNA, 22 nt, Human
cuggaaggguacauaggaaacu

SEQ ID NO: 759041 - RNA, 22 nt, Human
auucugacuuucaucugccuuu

SEQ ID NO: 759042 - RNA, 22 nt, Human
gccccaccuugagagcagaaac

SEQ ID NO: 759043 - RNA, 22 nt, Human
guggcuguucuugccccaugcu

SEQ ID NO: 759044 - RNA, 22 nt, Human
acuuuuuaguuuccucaaacau

SEQ ID NO: 759045 - RNA, 22 nt, Human
uuucauugcagagucugugugc

SEQ ID NO: 759046 - RNA, 22 nt, Human
gaagauuugaaacacauagaca

SEQ ID NO: 759047 - RNA, 22 nt, Human
ugaaaacacuuuaguuuagguc

SEQ ID NO: 759048 - RNA, 22 nt, Human
aacacuuagauuuuuaagguuu

SEQ ID NO: 759049 - RNA, 19 nt, Human
gaaggcugaaaugaagcac

SEQ ID NO: 759050 - RNA, 22 nt, Human
accagagggcaaaccccagugu

SEQ ID NO: 759051 - RNA, 22 nt, Human
gcuucucuuucuccccuggcgg

SEQ ID NO: 759052 - RNA, 22 nt, Human
aaggacaggagaaaacgggauc

SEQ ID NO: 759053 - RNA, 21 nt, Human
acaauagaauagaguguggug

SEQ ID NO: 759054 - RNA, 22 nt, Human
ggcuguguuccaagugucagga

SEQ ID NO: 759055 - RNA, 22 nt, Human
gccacugaacauuagagcuagu

SEQ ID NO: 759056 - RNA, 22 nt, Human
ucacaucuguugauacagcauc

SEQ ID NO: 759057 - RNA, 22 nt, Human
acuacaguacuauaucuauagg

SEQ ID NO: 759058 - RNA, 23 nt, Human
agagcuuagggaauucacaugag

SEQ ID NO: 759059 - RNA, 22 nt, Human
uucacuuauagggauguuauug

SEQ ID NO: 759060 - RNA, 22 nt, Human
aaaccacuuauaucgugauuug

SEQ ID NO: 759061 - RNA, 22 nt, Human
ccaggaagcugucugauaugaa

SEQ ID NO: 759062 - RNA, 22 nt, Human
ucuauacaugugcacacacauc

SEQ ID NO: 759063 - RNA, 22 nt, Human
gggaggucagggugccugcugg

SEQ ID NO: 759064 - RNA, 22 nt, Human
uugaaaacuuucuagaccaaga

SEQ ID NO: 759065 - RNA, 22 nt, Human
cuuagcaugugguguccuugua

SEQ ID NO: 759066 - RNA, 22 nt, Human
ugcagagggagugacgguucac

SEQ ID NO: 759067 - RNA, 22 nt, Human
gcucaggcaccauaugaugugu

SEQ ID NO: 759068 - RNA, 23 nt, Human
agugcaugcuugacuuagcaagc

SEQ ID NO: 759069 - RNA, 22 nt, Human
ggcuuaaguccugaauuuaugc

SEQ ID NO: 759070 - RNA, 22 nt, Human
acauugaauuucacuuuuguac

SEQ ID NO: 759071 - RNA, 21 nt, Human
cacagaauauacauuuuaguu

SEQ ID NO: 759072 - RNA, 22 nt, Human
uauggguaaauaauaauuuuag

SEQ ID NO: 759073 - RNA, 22 nt, Human
ggucucugcucagaugccacuu

SEQ ID NO: 759074 - RNA, 22 nt, Human
acagaugcucugaugucugggu

SEQ ID NO: 759075 - RNA, 22 nt, Human
cuaaggaugcauauguuuuguu

SEQ ID NO: 759076 - RNA, 22 nt, Human
ugggccacagcucacacaucca

SEQ ID NO: 759077 - RNA, 22 nt, Human
uguccccugcccagggauggga

SEQ ID NO: 759078 - RNA, 22 nt, Human
ugggcagcagcaaagccagacu

SEQ ID NO: 759079 - RNA, 22 nt, Human
agaaauagaggaaagguuugac

SEQ ID NO: 759080 - RNA, 22 nt, Human
gaugggcugucugagcgcugug

SEQ ID NO: 759081 - RNA, 20 nt, Human
ccuguguggccagcugaggc

SEQ ID NO: 759082 - RNA, 22 nt, Human
augaggaggccaguaagagccu

SEQ ID NO: 759083 - RNA, 22 nt, Human
ggagaaggcacacccaccucug

SEQ ID NO: 759084 - RNA, 22 nt, Human
cagcagcugcgugcccaggccg

SEQ ID NO: 759085 - RNA, 22 nt, Human
ucuugguuaggggaaauaggca

SEQ ID NO: 759086 - RNA, 22 nt, Human
ccacguccagcuaauuuucgua

SEQ ID NO: 759087 - RNA, 22 nt, Human
uggaauuaauaggggauauaca

SEQ ID NO: 759088 - RNA, 22 nt, Human
ugugagaaaaugauugcacagu

SEQ ID NO: 759089 - RNA, 22 nt, Human
gguuuauuaaugugaacuguau

SEQ ID NO: 759090 - RNA, 22 nt, Human
acuuuggcacagaacuuccauu

SEQ ID NO: 759091 - RNA, 22 nt, Human
gcaucaagacgaugugaaaucg

SEQ ID NO: 759092 - RNA, 22 nt, Human
agaaauguggaucguuuuaaaa

SEQ ID NO: 759093 - RNA, 22 nt, Human
aggcuucauauuuaggcauaug

SEQ ID NO: 759094 - RNA, 20 nt, Human
ugagcaccaagaaucaagaa

SEQ ID NO: 759095 - RNA, 22 nt, Human
uacuuacauuagcaaacaaggu

SEQ ID NO: 759096 - RNA, 22 nt, Human
uggagguguccaacucgugggu

SEQ ID NO: 759097 - RNA, 19 nt, Human
cgcagguggaaggagccgc

SEQ ID NO: 759098 - RNA, 22 nt, Human
ucacuguaugucuuuuuuugau

SEQ ID NO: 759099 - RNA, 22 nt, Human
ggagcucuuccagcuuguugcu

SEQ ID NO: 759100 - RNA, 22 nt, Human
ggucuccugaggcugccacacc

SEQ ID NO: 759101 - RNA, 22 nt, Human
aauaguccucuccuuggaauuu

SEQ ID NO: 759102 - RNA, 20 nt, Human
agggcagcuugaggagccgg

SEQ ID NO: 759103 - RNA, 22 nt, Human
ucuuuacaucacaauuguaugg

SEQ ID NO: 759104 - RNA, 22 nt, Human
gagcucuggcagggcaggucug

SEQ ID NO: 759105 - RNA, 22 nt, Human
gaggcccucuugccacaaugaa

SEQ ID NO: 759106 - RNA, 22 nt, Human
caggaacaccugcagcuagugg

SEQ ID NO: 759107 - RNA, 22 nt, Human
auguuuauuguuuuaagcugcu

SEQ ID NO: 759108 - RNA, 22 nt, Human
uucagaggguuuuagggucaga

SEQ ID NO: 759109 - RNA, 18 nt, Human
uaggaaccacuugcagag

SEQ ID NO: 759110 - RNA, 17 nt, Human
ugguuccaaccauacgc

SEQ ID NO: 759111 - RNA, 22 nt, Human
uucucaguaguuagcauuugug

SEQ ID NO: 759112 - RNA, 22 nt, Human
aaucaggcacagcgacugcagc

SEQ ID NO: 759113 - RNA, 22 nt, Human
ugugacugagcugcagaguguc

SEQ ID NO: 759114 - RNA, 22 nt, Human
gugcgugugccuaucaauaaag

SEQ ID NO: 759115 - RNA, 22 nt, Human
cucuggguucacugaggcucug

SEQ ID NO: 759116 - RNA, 22 nt, Human
uagagcaguggguaccauggca

SEQ ID NO: 759117 - RNA, 22 nt, Human
agcucagaaaugccaguaggua

SEQ ID NO: 759118 - RNA, 22 nt, Human
cuccugggaaaugaaggggcag

SEQ ID NO: 759119 - RNA, 22 nt, Human
ucucagugggaagggcacaguu

SEQ ID NO: 759120 - RNA, 22 nt, Human
ggaaguagaaguaaugaaauca

SEQ ID NO: 759121 - RNA, 22 nt, Human
gaggggcugggcagucccugga

SEQ ID NO: 759122 - RNA, 22 nt, Human
agguuuauuaaguaaauagagc

SEQ ID NO: 759123 - RNA, 22 nt, Human
ugcagggcuauaacuccauucu

SEQ ID NO: 759124 - RNA, 22 nt, Human
uucugcauacacugaauguagu

SEQ ID NO: 759125 - RNA, 22 nt, Human
cuuugauucagacuuugucggc

SEQ ID NO: 759126 - RNA, 22 nt, Human
gagcagcuuaugucaagccaga

SEQ ID NO: 759127 - RNA, 22 nt, Human
uacuguaaugagauuagcuucc

SEQ ID NO: 759128 - RNA, 22 nt, Human
acugugcacaauucuaaguccu

SEQ ID NO: 759129 - RNA, 22 nt, Human
ccacagaguccgcauuugaggc

SEQ ID NO: 759130 - RNA, 22 nt, Human
uccagcauuagaugugaaauug

SEQ ID NO: 759131 - RNA, 22 nt, Human
caaacuauuuacaauggaauca

SEQ ID NO: 759132 - RNA, 22 nt, Human
aagaacauugauauugucuaug

SEQ ID NO: 759133 - RNA, 22 nt, Human
uaacauguguauugguuuccua

SEQ ID NO: 759134 - RNA, 22 nt, Human
cucuuaauuaagcugagaucug

SEQ ID NO: 759135 - RNA, 22 nt, Human
caccugggcuaaacuaugcagg

SEQ ID NO: 759136 - RNA, 22 nt, Human
acccaggcuagagugcaguggu

SEQ ID NO: 759137 - RNA, 22 nt, Human
aauugcuuugaagaagggagcg

SEQ ID NO: 759138 - RNA, 19 nt, Human
aggcuucauccugggcagc

SEQ ID NO: 759139 - RNA, 19 nt, Human
cacuucacauggugaaagc

SEQ ID NO: 759140 - RNA, 22 nt, Human
agcugcuccuuggcugugguuc

SEQ ID NO: 759141 - RNA, 22 nt, Human
ugcagggcuaagucagagccug

SEQ ID NO: 759142 - RNA, 22 nt, Human
uuacaaagcgcuuuaccucuga

SEQ ID NO: 759143 - RNA, 22 nt, Human
augcuguuaagauaauggguuc

SEQ ID NO: 759144 - RNA, 21 nt, Human
ugaaaucugaugggacaaaug

SEQ ID NO: 759145 - RNA, 22 nt, Human
uccagguaugacauggcuguuu

SEQ ID NO: 759146 - RNA, 22 nt, Human
aggcugagauagguggaucauu

SEQ ID NO: 759147 - RNA, 22 nt, Human
guuucacagucugcagaauuuu

SEQ ID NO: 759148 - RNA, 22 nt, Human
aggagcugcacugggaguuuuu

SEQ ID NO: 759149 - RNA, 22 nt, Human
aaguguuuauuuauaacgaucu

SEQ ID NO: 759150 - RNA, 22 nt, Human
aaaugcagaucccugaaucuca

SEQ ID NO: 759151 - RNA, 22 nt, Human
cccacuuugguugcacucugcc

SEQ ID NO: 759152 - RNA, 22 nt, Human
cucagaggucaagagcagagcu

SEQ ID NO: 759153 - RNA, 22 nt, Human
aaucaacauuguuuuaagucaa

SEQ ID NO: 759154 - RNA, 22 nt, Human
ucuggacuaacagcagccucag

SEQ ID NO: 759155 - RNA, 22 nt, Human
uugaggccugcuggaagguguu

SEQ ID NO: 759156 - RNA, 22 nt, Human
uuuacaagucagggacuguucu

SEQ ID NO: 759157 - RNA, 22 nt, Human
ucugggagcagcucagcagauu

SEQ ID NO: 759158 - RNA, 22 nt, Human
guuuggggaguuccuuuaggcc

SEQ ID NO: 759159 - RNA, 22 nt, Human
acugggcucaagugauuguccu

SEQ ID NO: 759160 - RNA, 22 nt, Human
uguauuuucuucuggaagcuua

SEQ ID NO: 759161 - RNA, 22 nt, Human
agcuggguacagccugugccua

SEQ ID NO: 759162 - RNA, 22 nt, Human
uugaaagugccaaguccuagug

SEQ ID NO: 759163 - RNA, 22 nt, Human
uucuguggcaguuugggaggug

SEQ ID NO: 759164 - RNA, 22 nt, Human
auuuccaggagaaaggauuuua

SEQ ID NO: 759165 - RNA, 22 nt, Human
agcaguuaucgaagaaucaggu

SEQ ID NO: 759166 - RNA, 22 nt, Human
auauuuucacugaaccaaagua

SEQ ID NO: 759167 - RNA, 22 nt, Human
gaagagaugacaaaggagcaug

SEQ ID NO: 759168 - RNA, 20 nt, Human
uugaaaaugcauugugcagu

SEQ ID NO: 759169 - RNA, 22 nt, Human
uuccaagagccuuucuucuaga

SEQ ID NO: 759170 - RNA, 22 nt, Human
gcagagcucuguucuuaucucc

SEQ ID NO: 759171 - RNA, 21 nt, Human
aucuuaaaaggucuuaacuuu

SEQ ID NO: 759172 - RNA, 22 nt, Human
guuuucauuacugcugugauuu

SEQ ID NO: 759173 - RNA, 22 nt, Human
auuucagauucgagaggaagug

SEQ ID NO: 759174 - RNA, 22 nt, Human
cagcaucuucaugugcaucucc

SEQ ID NO: 759175 - RNA, 22 nt, Human
ggcuguauauacuguauacagu

SEQ ID NO: 759176 - RNA, 22 nt, Human
ugggaaugggccuagaaggcug

SEQ ID NO: 759177 - RNA, 22 nt, Human
ucuuggccccaacccucuauuu

SEQ ID NO: 759178 - RNA, 22 nt, Human
ugguaauuuacgcauuucugua

SEQ ID NO: 759179 - RNA, 22 nt, Human
acaugacaaaaugcacaggauu

SEQ ID NO: 759180 - RNA, 22 nt, Human
gaaaggugccccauaggcagga

SEQ ID NO: 759181 - RNA, 22 nt, Human
guggcccuggaguugugacacu

SEQ ID NO: 759182 - RNA, 22 nt, Human
gugugcauauguguggcucucc

SEQ ID NO: 759183 - RNA, 22 nt, Human
gaacagaagaggcuggugccac

SEQ ID NO: 759184 - RNA, 22 nt, Human
cggcugagacggccauagacac

SEQ ID NO: 759185 - RNA, 22 nt, Human
cucuccuccaggaacucacagu

SEQ ID NO: 759186 - RNA, 22 nt, Human
accucuaaaaaauuagaagccu

SEQ ID NO: 759187 - RNA, 20 nt, Human
uuauuugcucuuuaucugca

SEQ ID NO: 759188 - RNA, 22 nt, Human
aaaucagucccucuuggaauuu

SEQ ID NO: 759189 - RNA, 22 nt, Human
uguccugggaacucacagucca

SEQ ID NO: 759190 - RNA, 17 nt, Human
ggacacagcucauggcu

SEQ ID NO: 759191 - RNA, 22 nt, Human
ugcacaaauuuguguaugcuca

SEQ ID NO: 759192 - RNA, 22 nt, Human
ucuagucauauuuuuucaguau

SEQ ID NO: 759193 - RNA, 22 nt, Human
acuucugaagcagagauuuggg

SEQ ID NO: 759194 - RNA, 22 nt, Human
uccugcucugauggguucuccu

SEQ ID NO: 759195 - RNA, 22 nt, Human
aaaugcuuagagguguucaaau

SEQ ID NO: 759196 - RNA, 22 nt, Human
ugcaggugauucugaugcaguu

SEQ ID NO: 759197 - RNA, 19 nt, Human
gaaugggaaugggaaagcu

SEQ ID NO: 759198 - RNA, 22 nt, Human
uugcuuuagaaucugcuucugg

SEQ ID NO: 759199 - RNA, 22 nt, Human
gcugccuuagagggagugguuc

SEQ ID NO: 759200 - RNA, 22 nt, Human
auucagugccaaggagaacuug

SEQ ID NO: 759201 - RNA, 21 nt, Human
gggcuggauauuggaaagagg

SEQ ID NO: 759202 - RNA, 20 nt, Human
uccuccagaagggcagggug

SEQ ID NO: 759203 - RNA, 23 nt, Human
guuaccuuacuucugugaucuuc

SEQ ID NO: 759204 - RNA, 22 nt, Human
gaggaguggguuagugcuuauu

SEQ ID NO: 759205 - RNA, 22 nt, Human
cagcaguguacaaggugucaga

SEQ ID NO: 759206 - RNA, 22 nt, Human
uucagaaaaagaccauugcaau

SEQ ID NO: 759207 - RNA, 22 nt, Human
agauacaucuugaacuucuaga

SEQ ID NO: 759208 - RNA, 22 nt, Human
acauguaaaaauuaagguaaga

SEQ ID NO: 759209 - RNA, 22 nt, Human
ggauuagcuuuuguucuugacu

SEQ ID NO: 759210 - RNA, 22 nt, Human
ggaagaggaggagccaggcuuu

SEQ ID NO: 759211 - RNA, 21 nt, Human
uucaagucucuaggacuucuc

SEQ ID NO: 759212 - RNA, 22 nt, Human
augcuugguuccuacuucuggc

SEQ ID NO: 759213 - RNA, 21 nt, Human
uuugaaagugggugauucuuu

SEQ ID NO: 759214 - RNA, 22 nt, Human
gcuggagagugaggggagcaag

SEQ ID NO: 759215 - RNA, 22 nt, Human
agaggaauggagacuaaacgcu

SEQ ID NO: 759216 - RNA, 22 nt, Human
agauacaguguuacauuuuuau

SEQ ID NO: 759217 - RNA, 20 nt, Human
gugaccagaagacagugggu

SEQ ID NO: 759218 - RNA, 22 nt, Human
uauaaauuauuaggcugcuaaa

SEQ ID NO: 759219 - RNA, 19 nt, Human
acuaaaaaugauguuugag

SEQ ID NO: 759220 - RNA, 22 nt, Human
acuguccauucacucauauuca

SEQ ID NO: 759221 - RNA, 22 nt, Human
ggcuucaccaggugcaugcaug

SEQ ID NO: 759222 - RNA, 22 nt, Human
cuuuuucuucuaggugugccug

SEQ ID NO: 759223 - RNA, 17 nt, Human
aauguggaaguacaugc

SEQ ID NO: 759224 - RNA, 22 nt, Human
aaucuuaaagaauauucuacca

SEQ ID NO: 759225 - RNA, 22 nt, Human
cucaggauguacuacagaaggc

SEQ ID NO: 759226 - RNA, 19 nt, Human
auggaaaaugccagacuga

SEQ ID NO: 759227 - RNA, 22 nt, Human
cuggaagggucuacuuagcaga

SEQ ID NO: 759228 - RNA, 22 nt, Human
cucugugggaagcuggguguga

SEQ ID NO: 759229 - RNA, 22 nt, Human
agggggugucucugauuggguu

SEQ ID NO: 759230 - RNA, 22 nt, Human
aauggcaaaguguuuucauacc

SEQ ID NO: 759231 - RNA, 22 nt, Human
ucacucaagcaucuacagggau

SEQ ID NO: 759232 - RNA, 22 nt, Human
aauguguauaugaacauacagg

SEQ ID NO: 759233 - RNA, 22 nt, Human
uugcaacacaaaguuugauucc

SEQ ID NO: 759234 - RNA, 22 nt, Human
ucagaggaagcaucaaguucuc

SEQ ID NO: 759235 - RNA, 22 nt, Human
uuuuccugccuuugcucaggga

SEQ ID NO: 759236 - RNA, 22 nt, Human
uuccagaacaauguggacguau

SEQ ID NO: 759237 - RNA, 19 nt, Human
aucuugggaaaugguaacu

SEQ ID NO: 759238 - RNA, 22 nt, Human
ucugucacuuuuauuuacugaa

SEQ ID NO: 759239 - RNA, 22 nt, Human
ggccagcugcucagugucucug

SEQ ID NO: 759240 - RNA, 22 nt, Human
gcaggucucaaucugagcaggc

SEQ ID NO: 759241 - RNA, 20 nt, Human
ggcugugcccuuccguggcc

SEQ ID NO: 759242 - RNA, 22 nt, Human
caggagcccugguggguggaca

SEQ ID NO: 759243 - RNA, 22 nt, Human
augugaggaagaaagagguaag

SEQ ID NO: 759244 - RNA, 22 nt, Human
agguagagcuccaguagaaaau

SEQ ID NO: 759245 - RNA, 22 nt, Human
uccugaaggccugaguuccacc

SEQ ID NO: 759246 - RNA, 23 nt, Human
aguggcuggacagacuuuccugg

SEQ ID NO: 759247 - RNA, 22 nt, Human
ugcaguaggcacguggcuguga

SEQ ID NO: 759248 - RNA, 22 nt, Human
uuagcuuuuaagugugcuacau

SEQ ID NO: 759249 - RNA, 22 nt, Human
ucuacugcacuggugucucauc

SEQ ID NO: 759250 - RNA, 22 nt, Human
ggaagaagcagggcauuugaau

SEQ ID NO: 759251 - RNA, 22 nt, Human
uaaugugugucaucaguagagu

SEQ ID NO: 759252 - RNA, 22 nt, Human
cugaaggggguuucacugagcu

SEQ ID NO: 759253 - RNA, 22 nt, Human
uugauucugcugaucucggacg

SEQ ID NO: 759254 - RNA, 22 nt, Human
ugugucuguccucgguugaugc

SEQ ID NO: 759255 - RNA, 22 nt, Human
cuaggcuguaaagagcuaggag

SEQ ID NO: 759256 - RNA, 22 nt, Human
auguggcuuggcagggaauaug

SEQ ID NO: 759257 - RNA, 22 nt, Human
aaggcuccgugacuggggcuga

SEQ ID NO: 759258 - RNA, 20 nt, Human
ucccuccugcagauagagaa

SEQ ID NO: 759259 - RNA, 22 nt, Human
ccaggggccugugaaggugccc

SEQ ID NO: 759260 - RNA, 22 nt, Human
acucugggaucuugaaaagagu

SEQ ID NO: 759261 - RNA, 22 nt, Human
ucaguugcauauuuuguguucu

SEQ ID NO: 759262 - RNA, 22 nt, Human
ugucauugaggaaaacuaggug

SEQ ID NO: 759263 - RNA, 22 nt, Human
caaaguauaguguaggauggca

SEQ ID NO: 759264 - RNA, 22 nt, Human
cuggggugagcagaaacagggg

SEQ ID NO: 759265 - RNA, 22 nt, Human
auacacugaguccuuuucucau

SEQ ID NO: 759266 - RNA, 22 nt, Human
guccucugcccaggucaagguu

SEQ ID NO: 759267 - RNA, 22 nt, Human
auuccacagugccuuccgugaa

SEQ ID NO: 759268 - RNA, 22 nt, Human
ucccugggcuucuccagacuug

SEQ ID NO: 759269 - RNA, 22 nt, Human
gcagcugguuaaugggagaauu

SEQ ID NO: 759270 - RNA, 22 nt, Human
ugucacaauaucccaaucugcc

SEQ ID NO: 759271 - RNA, 22 nt, Human
ucuuaauucugugucuucacua

SEQ ID NO: 759272 - RNA, 22 nt, Human
cagcucuggguaggaggaaucu

SEQ ID NO: 759273 - RNA, 22 nt, Human
agugggggcagagccucucucg

SEQ ID NO: 759274 - RNA, 22 nt, Human
aagauauuuuagaacauucacu

SEQ ID NO: 759275 - RNA, 22 nt, Human
guguccugcaggccaggaaugg

SEQ ID NO: 759276 - RNA, 22 nt, Human
caggguugggcuccaaggaugg

SEQ ID NO: 759277 - RNA, 22 nt, Human
ugaggcaggagaauggcgggaa

SEQ ID NO: 759278 - RNA, 20 nt, Human
agaaggcuccuuuugccaag

SEQ ID NO: 759279 - RNA, 22 nt, Human
cgcaggcucgguucacagagca

SEQ ID NO: 759280 - RNA, 22 nt, Human
auuugucacugagagaguuaga

SEQ ID NO: 759281 - RNA, 22 nt, Human
uuucccaacagucucucucaaa

SEQ ID NO: 759282 - RNA, 22 nt, Human
auacagcagugaauaagauaaa

SEQ ID NO: 759283 - RNA, 22 nt, Human
ccugcccuaugaccagcuucac

SEQ ID NO: 759284 - RNA, 22 nt, Human
agcuggugcucaggggcaugga

SEQ ID NO: 759285 - RNA, 22 nt, Human
caggagcuggaucuccuugcgg

SEQ ID NO: 759286 - RNA, 22 nt, Human
gacauaaaauggaauucuguug

SEQ ID NO: 759287 - RNA, 22 nt, Human
agaacauuugucgaucaauuug

SEQ ID NO: 759288 - RNA, 22 nt, Human
acauuuguaggacagaggaaga

SEQ ID NO: 759289 - RNA, 22 nt, Human
ucuucagacuccaaauguuuua

SEQ ID NO: 759290 - RNA, 22 nt, Human
uaauuuauauggaauuguugcu

SEQ ID NO: 759291 - RNA, 22 nt, Human
uagaguccuucauucugugcag

SEQ ID NO: 759292 - RNA, 22 nt, Human
guacgugcaugcacgugugccu

SEQ ID NO: 759293 - RNA, 22 nt, Human
aagaaagugcuuuguaaauuau

SEQ ID NO: 759294 - RNA, 22 nt, Human
ggugcccaccugucuuccugga

SEQ ID NO: 759295 - RNA, 22 nt, Human
cccagccucugggcucacccaa

SEQ ID NO: 759296 - RNA, 22 nt, Human
gugggagcuuuggcaucaggcu

SEQ ID NO: 759297 - RNA, 22 nt, Human
gggagcucgugcgcccaggugc

SEQ ID NO: 759298 - RNA, 22 nt, Human
gaguuuagccaauuuggucccc

SEQ ID NO: 759299 - RNA, 22 nt, Human
ucagugugaggggcuggguccu

SEQ ID NO: 759300 - RNA, 22 nt, Human
gacaucugaauuuagcaguuuu

SEQ ID NO: 759301 - RNA, 18 nt, Human
agcuuagcauacuuuucc

SEQ ID NO: 759302 - RNA, 22 nt, Human
auuucucugccucagcuucugc

SEQ ID NO: 759303 - RNA, 22 nt, Human
gagguucacaggcuaucacagu

SEQ ID NO: 759304 - RNA, 22 nt, Human
cuuaggaauauccacagcaggu

SEQ ID NO: 759305 - RNA, 22 nt, Human
gaggcccaggguacaggccgcu

SEQ ID NO: 759306 - RNA, 22 nt, Human
aauuuauauguaauuaggcaca

SEQ ID NO: 759307 - RNA, 22 nt, Human
gaagcucucaaacucuccccuu

SEQ ID NO: 759308 - RNA, 22 nt, Human
ggagacucucauugucaagcuu

SEQ ID NO: 759309 - RNA, 22 nt, Human
acaugcauucucuaaaagcaaa

SEQ ID NO: 759310 - RNA, 22 nt, Human
guuuuauaugucucugcugaca

SEQ ID NO: 759311 - RNA, 18 nt, Human
cugggacucaaugcuacu

SEQ ID NO: 759312 - RNA, 22 nt, Human
cccuaaggacaccugcugucca

SEQ ID NO: 759313 - RNA, 22 nt, Human
cuguaaauggaacuauguagua

SEQ ID NO: 759314 - RNA, 22 nt, Human
acagcuucgaggaucucauccc

SEQ ID NO: 759315 - RNA, 22 nt, Human
cagccugccgucagccagguag

SEQ ID NO: 759316 - RNA, 22 nt, Human
agaggacaaaaugagaagugcu

SEQ ID NO: 759317 - RNA, 22 nt, Human
cacaaugcguacauauaucaaa

SEQ ID NO: 759318 - RNA, 22 nt, Human
ggcagagcucuggacugagaac

SEQ ID NO: 759319 - RNA, 22 nt, Human
uaucacaucaauguuuuaaaau

SEQ ID NO: 759320 - RNA, 22 nt, Human
cuguggugggcccugggcuuca

SEQ ID NO: 759321 - RNA, 21 nt, Human
ucccaagcugcuggcucagcu

SEQ ID NO: 759322 - RNA, 22 nt, Human
ggacaaagccugguggcaggug

SEQ ID NO: 759323 - RNA, 22 nt, Human
acagggcaccugagguaggaag

SEQ ID NO: 759324 - RNA, 22 nt, Human
cucucccccacagcagccuucu

SEQ ID NO: 759325 - RNA, 22 nt, Human
ccaggagcuauguacacacuau

SEQ ID NO: 759326 - RNA, 22 nt, Human
uuaauugucugugaguaccuga

SEQ ID NO: 759327 - RNA, 22 nt, Human
ucucuccuccacaccgggugcu

SEQ ID NO: 759328 - RNA, 22 nt, Human
gugaacuuccagaugauaaaca

SEQ ID NO: 759329 - RNA, 22 nt, Human
agcagagcgccugcucagaggg

SEQ ID NO: 759330 - RNA, 22 nt, Human
gcagcagcucugaaugggcccc

SEQ ID NO: 759331 - RNA, 22 nt, Human
uuugcaaagugcuugcagagua

SEQ ID NO: 759332 - RNA, 22 nt, Human
gaaggaaaggucucaugccuuu

SEQ ID NO: 759333 - RNA, 22 nt, Human
cuugccuuugucuucaaaggcu

SEQ ID NO: 759334 - RNA, 22 nt, Human
agccuccuggaguuucugggau

SEQ ID NO: 759335 - RNA, 18 nt, Human
cuccugggcugcagaugc

SEQ ID NO: 759336 - RNA, 22 nt, Human
uucaggaugacaccauguccag

SEQ ID NO: 759337 - RNA, 22 nt, Human
acugaggucagggguaugugau

SEQ ID NO: 759338 - RNA, 22 nt, Human
cauaggaaaagcauucuucuug

SEQ ID NO: 759339 - RNA, 16 nt, Human
aacaaugccaauccag

SEQ ID NO: 759340 - RNA, 22 nt, Human
ggucagaagugcaaaaucaguu

SEQ ID NO: 759341 - RNA, 22 nt, Human
aaugcuuucaaaaaugugcagu

SEQ ID NO: 759342 - RNA, 19 nt, Human
agagacugccaccagcugu

SEQ ID NO: 759343 - RNA, 22 nt, Human
augcagaaagcggcaaacaggu

SEQ ID NO: 759344 - RNA, 21 nt, Human
gaugaagcaaucuuucuguug

SEQ ID NO: 759345 - RNA, 22 nt, Human
uccuccaggucuaggguggcuu

SEQ ID NO: 759346 - RNA, 22 nt, Human
ucuggcucauaggaaggccauu

SEQ ID NO: 759347 - RNA, 17 nt, Human
ccacagccuggcacuug

SEQ ID NO: 759348 - RNA, 22 nt, Human
ugacgucaacugcaaaggccuu

SEQ ID NO: 759349 - RNA, 22 nt, Human
gcaggcggaucacuggaaguca

SEQ ID NO: 759350 - RNA, 22 nt, Human
cuuuaguuuaagaacaugauga

SEQ ID NO: 759351 - RNA, 22 nt, Human
auguguauccaucugucuauuu

SEQ ID NO: 759352 - RNA, 22 nt, Human
caggguagggcaagggaaccug

SEQ ID NO: 759353 - RNA, 21 nt, Human
caggaaagaaaacguacauau

SEQ ID NO: 759354 - RNA, 22 nt, Human
cuggcugcaaaaucuauucacu

SEQ ID NO: 759355 - RNA, 22 nt, Human
caguuucuguggucucuuuuca

SEQ ID NO: 759356 - RNA, 22 nt, Human
uucaacaaugcacuugaguaua

SEQ ID NO: 759357 - RNA, 22 nt, Human
accuuucaaaguggcuaucacu

SEQ ID NO: 759358 - RNA, 21 nt, Human
ggcacagccugaaaugccuca

SEQ ID NO: 759359 - RNA, 20 nt, Human
cucucucuccauucccaggg

SEQ ID NO: 759360 - RNA, 22 nt, Human
gagcugagggucuaggaggguu

SEQ ID NO: 759361 - RNA, 22 nt, Human
agaagccagucgcucucccgca

SEQ ID NO: 759362 - RNA, 22 nt, Human
ccuuccaggagucucugcaggu

SEQ ID NO: 759363 - RNA, 22 nt, Human
ggaggggaugguuugacccugg

SEQ ID NO: 759364 - RNA, 22 nt, Human
uacugucuaauaagauugaugg

SEQ ID NO: 759365 - RNA, 22 nt, Human
acaaagagggaccagugacuug

SEQ ID NO: 759366 - RNA, 22 nt, Human
agauaacuuuuggguauucaug

SEQ ID NO: 759367 - RNA, 20 nt, Human
acccugaggcuccccagccu

SEQ ID NO: 759368 - RNA, 22 nt, Human
ccaggacucaguggggaaaggg

SEQ ID NO: 759369 - RNA, 22 nt, Human
guguucaucccaaugcugauag

SEQ ID NO: 759370 - RNA, 22 nt, Human
uguuuacuaugauguaaccuau

SEQ ID NO: 759371 - RNA, 22 nt, Human
agggaugcuuugcugacagauu

SEQ ID NO: 759372 - RNA, 22 nt, Human
gcuggcucccauugguccuucc

SEQ ID NO: 759373 - RNA, 21 nt, Human
agagaagggacucuuccaguc

SEQ ID NO: 759374 - RNA, 22 nt, Human
ccuuuugagacuuccacugugu

SEQ ID NO: 759375 - RNA, 22 nt, Human
ugggaauggaugcuaagugcua

SEQ ID NO: 759376 - RNA, 22 nt, Human
aggauuugcacugguguuugag

SEQ ID NO: 759377 - RNA, 22 nt, Human
ugggcucagccaugaccuccac

SEQ ID NO: 759378 - RNA, 22 nt, Human
ucaggaugguccuuuaugagaa

SEQ ID NO: 759379 - RNA, 23 nt, Human
gggaagcuccauggaggugcugg

SEQ ID NO: 759380 - RNA, 22 nt, Human
ccuuuggguucaaucucggucu

SEQ ID NO: 759381 - RNA, 22 nt, Human
agagaugguagaacagucauaa

SEQ ID NO: 759382 - RNA, 22 nt, Human
gguacagaauaaaaauccuaca

SEQ ID NO: 759383 - RNA, 22 nt, Human
ugcagcucugggguaaggggug

SEQ ID NO: 759384 - RNA, 21 nt, Human
aaggcagaagcauggaaugag

SEQ ID NO: 759385 - RNA, 19 nt, Human
uacaggcaguuucuacaau

SEQ ID NO: 759386 - RNA, 22 nt, Human
caugcauguuuacuacagugac

SEQ ID NO: 759387 - RNA, 22 nt, Human
cugguggguagagggcaucagg

SEQ ID NO: 759388 - RNA, 22 nt, Human
ccuguacuagggucucauugcc

SEQ ID NO: 759389 - RNA, 18 nt, Human
ucuugccugcacccucuc

SEQ ID NO: 759390 - RNA, 22 nt, Human
ucagggcucaccagccucugcc

SEQ ID NO: 759391 - RNA, 22 nt, Human
accuuuccaaguaucagguggu

SEQ ID NO: 759392 - RNA, 22 nt, Human
uguguaaauggacugugaauua

SEQ ID NO: 759393 - RNA, 22 nt, Human
gggagcugccaccaccccuggg

SEQ ID NO: 759394 - RNA, 23 nt, Human
gagauggcugguuguccucugaa

SEQ ID NO: 759395 - RNA, 22 nt, Human
uguccuggagugcuugggggaa

SEQ ID NO: 759396 - RNA, 22 nt, Human
cuacaggucaagcaguagcucu

SEQ ID NO: 759397 - RNA, 22 nt, Human
guucuucagucacaucacagaa

SEQ ID NO: 759398 - RNA, 22 nt, Human
cuuuaugaaggaacaaugcucc

SEQ ID NO: 759399 - RNA, 18 nt, Human
gcuucucauuucuaagca

SEQ ID NO: 759400 - RNA, 22 nt, Human
uucagggcaugagggacacauc

SEQ ID NO: 759401 - RNA, 22 nt, Human
cuuucagucuuuacaagguugc

SEQ ID NO: 759402 - RNA, 20 nt, Human
gucuccacuggggguuaacc

SEQ ID NO: 759403 - RNA, 22 nt, Human
guggcagugccguuugguucag

SEQ ID NO: 759404 - RNA, 22 nt, Human
agugggcugagcuugcugggug

SEQ ID NO: 759405 - RNA, 22 nt, Human
uuuggcauuuaauaggugauca

SEQ ID NO: 759406 - RNA, 22 nt, Human
gucuuucuaugaugaacuguug

SEQ ID NO: 759407 - RNA, 22 nt, Human
auuccaaacagugcugcagacu

SEQ ID NO: 759408 - RNA, 22 nt, Human
agaaaugcaguuucaagacaaa

SEQ ID NO: 759409 - RNA, 21 nt, Human
aguuuccucaacugcagaagg

SEQ ID NO: 759410 - RNA, 22 nt, Human
aaagaguuuggagacaagauca

SEQ ID NO: 759411 - RNA, 22 nt, Human
gaggcuggugguuaguuccauu

SEQ ID NO: 759412 - RNA, 22 nt, Human
aacacucuacgugcagcuccua

SEQ ID NO: 759413 - RNA, 22 nt, Human
uagcauuccaucuuggacuugu

SEQ ID NO: 759414 - RNA, 22 nt, Human
auuuuagcaaaugcaagaugga

SEQ ID NO: 759415 - RNA, 22 nt, Human
ggcacagcacaguggacccagg

SEQ ID NO: 759416 - RNA, 23 nt, Human
aguguuuauguucagugacccuc

SEQ ID NO: 759417 - RNA, 22 nt, Human
aaaguaugauuggggauuauuu

SEQ ID NO: 759418 - RNA, 22 nt, Human
guucaaggaagggaggaaagcc

SEQ ID NO: 759419 - RNA, 22 nt, Human
uugaggccaaaaaguccuauga

SEQ ID NO: 759420 - RNA, 22 nt, Human
uugacaagcgaaguaccauaau

SEQ ID NO: 759421 - RNA, 22 nt, Human
gcacaggcacagagggccacug

SEQ ID NO: 759422 - RNA, 22 nt, Human
acuguauuccuacuagaaucua

SEQ ID NO: 759423 - RNA, 22 nt, Human
ggcuuuaaacacugaaauugca

SEQ ID NO: 759424 - RNA, 22 nt, Human
ucuccucugugccacagcuugg

SEQ ID NO: 759425 - RNA, 22 nt, Human
uuucacauuagauaugucauuu

SEQ ID NO: 759426 - RNA, 22 nt, Human
ugcucccaaacgaccuacugug

SEQ ID NO: 759427 - RNA, 22 nt, Human
uuuuauucuaaguaugauggga

SEQ ID NO: 759428 - RNA, 22 nt, Human
gcacugggcuccaggaaggagg

SEQ ID NO: 759429 - RNA, 22 nt, Human
aagcacagauugcugcauccau

SEQ ID NO: 759430 - RNA, 22 nt, Human
uuugaaguucccccauaucaga

SEQ ID NO: 759431 - RNA, 22 nt, Human
gcagcuuuuuggaugucaguua

SEQ ID NO: 759432 - RNA, 22 nt, Human
aauuucaguaugaaguuucaca

SEQ ID NO: 759433 - RNA, 22 nt, Human
cuggagcugcuguccuugggug

SEQ ID NO: 759434 - RNA, 22 nt, Human
aaaaaucuaugacugcuucucc

SEQ ID NO: 759435 - RNA, 22 nt, Human
ugggcugaguguggaacuaguu

SEQ ID NO: 759436 - RNA, 22 nt, Human
uguuuucucuugaaaagcaguc

SEQ ID NO: 759437 - RNA, 22 nt, Human
gaggugccuggcgaugucucug

SEQ ID NO: 759438 - RNA, 22 nt, Human
gcccuggagcuagacuaggaca

SEQ ID NO: 759439 - RNA, 22 nt, Human
augaggcaaggcuggccguguu

SEQ ID NO: 759440 - RNA, 22 nt, Human
uaaugucuaugggccagauaau

SEQ ID NO: 759441 - RNA, 22 nt, Human
gugcaaaagucauugugguuuu

SEQ ID NO: 759442 - RNA, 22 nt, Human
cagcaauaguguguuuguuuca

SEQ ID NO: 759443 - RNA, 22 nt, Human
uccagggcuggguuggcucagc

SEQ ID NO: 759444 - RNA, 22 nt, Human
aaaauaugaaguugucaguaug

SEQ ID NO: 759445 - RNA, 22 nt, Human
agacucugauucccucauguca

SEQ ID NO: 759446 - RNA, 22 nt, Human
uuuccuucuuagcgguguucuu

SEQ ID NO: 759447 - RNA, 22 nt, Human
agcagguggccacgaggaggag

SEQ ID NO: 759448 - RNA, 22 nt, Human
gguuggugagugcaggguguua

SEQ ID NO: 759449 - RNA, 22 nt, Human
agugucugaaccaccggggcau

SEQ ID NO: 759450 - RNA, 22 nt, Human
cugagauggaguuuugcucuug

SEQ ID NO: 759451 - RNA, 21 nt, Human
uccauaagagaccaucuccua

SEQ ID NO: 759452 - RNA, 23 nt, Human
gggaagugaggagccccucagcc

SEQ ID NO: 759453 - RNA, 22 nt, Human
augcaagagcaauaugguaugc

SEQ ID NO: 759454 - RNA, 21 nt, Human
ucugucucuccacugcccugc

SEQ ID NO: 759455 - RNA, 22 nt, Human
aagcuuuggaagggcaggguug

SEQ ID NO: 759456 - RNA, 22 nt, Human
aauugaaagaagugggauugcc

SEQ ID NO: 759457 - RNA, 22 nt, Human
aaagugcaccugcuucuucuug

SEQ ID NO: 759458 - RNA, 22 nt, Human
gaauuucaagcagugcaauguu

SEQ ID NO: 759459 - RNA, 22 nt, Human
aaaggcuccuucucccaugacc

SEQ ID NO: 759460 - RNA, 22 nt, Human
uagcagaggguagugccggggc

SEQ ID NO: 759461 - RNA, 22 nt, Human
gggaucaguuaaggagaguuuu

SEQ ID NO: 759462 - RNA, 22 nt, Human
acaucugaccauuacaagacau

SEQ ID NO: 759463 - RNA, 22 nt, Human
ugcccuguuaucuuggaagagu

SEQ ID NO: 759464 - RNA, 22 nt, Human
agucaauucuuuucaacucaag

SEQ ID NO: 759465 - RNA, 22 nt, Human
uggccacauccuuuccuuguca

SEQ ID NO: 759466 - RNA, 22 nt, Human
ccagcagcugcaaagccugggu

SEQ ID NO: 759467 - RNA, 20 nt, Human
ugcuuguaauaccugcuuca

SEQ ID NO: 759468 - RNA, 22 nt, Human
uagcagggguagauagagugug

SEQ ID NO: 759469 - RNA, 22 nt, Human
agcagcaggugaccucgaugcc

SEQ ID NO: 759470 - RNA, 22 nt, Human
aaucuucauaaaaaucuaguag

SEQ ID NO: 759471 - RNA, 22 nt, Human
cugcuuccaugcaauggcaguc

SEQ ID NO: 759472 - RNA, 20 nt, Human
aggaaaaggguggugguaga

SEQ ID NO: 759473 - RNA, 22 nt, Human
cggggaggcuucggauuaaagc

SEQ ID NO: 759474 - RNA, 22 nt, Human
uccacugguauccacagugggg

SEQ ID NO: 759475 - RNA, 17 nt, Human
cuggagccuccaacucc

SEQ ID NO: 759476 - RNA, 22 nt, Human
agaaguaugugagaaauuaucc

SEQ ID NO: 759477 - RNA, 22 nt, Human
gacaccagaagacauaagcaga

SEQ ID NO: 759478 - RNA, 22 nt, Human
gacaagacaccucucuccaucc

SEQ ID NO: 759479 - RNA, 22 nt, Human
uuaauaaacaggugcagcugaa

SEQ ID NO: 759480 - RNA, 22 nt, Human
aaaugggccuggaaagaggaug

SEQ ID NO: 759481 - RNA, 22 nt, Human
gugugaaaguaauugcgguuuu

SEQ ID NO: 759482 - RNA, 22 nt, Human
uuauuaguguugauauuaggau

SEQ ID NO: 759483 - RNA, 22 nt, Human
uuguauuucgaugcacguguag

SEQ ID NO: 759484 - RNA, 22 nt, Human
cuaaaggcucagcauucuuuuc

SEQ ID NO: 759485 - RNA, 22 nt, Human
uucugggagagaaagggccuug

SEQ ID NO: 759486 - RNA, 22 nt, Human
ccucuggcuguaccacuggcac

SEQ ID NO: 759487 - RNA, 22 nt, Human
gcacugggugugaggcagcguc

SEQ ID NO: 759488 - RNA, 22 nt, Human
ccagggcacguugggacaguac

SEQ ID NO: 759489 - RNA, 22 nt, Human
aaggcgcugggcuaaggcacca

SEQ ID NO: 759490 - RNA, 22 nt, Human
agcaccugcuaugugucaggga

SEQ ID NO: 759491 - RNA, 22 nt, Human
uguaugcuuguguauaauauaa

SEQ ID NO: 759492 - RNA, 22 nt, Human
gcugcuggagcuuugcagaagg

SEQ ID NO: 759493 - RNA, 22 nt, Human
agcuguuuguacuuagauagua

SEQ ID NO: 759494 - RNA, 22 nt, Human
auaugaauuuggcuggaaaggu

SEQ ID NO: 759495 - RNA, 22 nt, Human
gcccucagcaggaaagaucaac

SEQ ID NO: 759496 - RNA, 22 nt, Human
caggcugggacugaccccugcu

SEQ ID NO: 759497 - RNA, 22 nt, Human
uguggggcagcuagccggccug

SEQ ID NO: 759498 - RNA, 22 nt, Human
uucagcaacauuuguugagugc

SEQ ID NO: 759499 - RNA, 22 nt, Human
cugggcuggagugcaauggcgc

SEQ ID NO: 759500 - RNA, 22 nt, Human
ugggagaagcagcagccaagug

SEQ ID NO: 759501 - RNA, 22 nt, Human
ugaggugggcuuguggauuugc

SEQ ID NO: 759502 - RNA, 22 nt, Human
uaucuucucaguauaugggaug

SEQ ID NO: 759503 - RNA, 22 nt, Human
aggacuggcggucgguggggau

SEQ ID NO: 759504 - RNA, 22 nt, Human
auauacacuccacugauacagg

SEQ ID NO: 759505 - RNA, 22 nt, Human
acaguggagaagcaaaugcagu

SEQ ID NO: 759506 - RNA, 22 nt, Human
cugcagccuccuccagcuacgu

SEQ ID NO: 759507 - RNA, 19 nt, Human
ccaggcuuuaugcaaauac

SEQ ID NO: 759508 - RNA, 22 nt, Human
uugaagcaugguacuuguucaa

SEQ ID NO: 759509 - RNA, 22 nt, Human
uggaagcggugcuggcccaugg

SEQ ID NO: 759510 - RNA, 22 nt, Human
agauggagaccuuggaugaacu

SEQ ID NO: 759511 - RNA, 22 nt, Human
aaacagcaauuacuuuugcacc

SEQ ID NO: 759512 - RNA, 22 nt, Human
cuccuggcaguuccccuuguca

SEQ ID NO: 759513 - RNA, 22 nt, Human
uggcuuccuaggagcccgugcu

SEQ ID NO: 759514 - RNA, 22 nt, Human
guaaaugugaaugucauuuagc

SEQ ID NO: 759515 - RNA, 22 nt, Human
auucuacaaaagaacuggaucu

SEQ ID NO: 759516 - RNA, 22 nt, Human
aacaugcauguuauuuaucagu

SEQ ID NO: 759517 - RNA, 22 nt, Human
gaaggagggagcggcgcggauu

SEQ ID NO: 759518 - RNA, 22 nt, Human
uauaaagcugacucaugaaacu

SEQ ID NO: 759519 - RNA, 22 nt, Human
caauaacuuugauauuuugcgg

SEQ ID NO: 759520 - RNA, 22 nt, Human
ugcacacagaugguacaugcau

SEQ ID NO: 759521 - RNA, 20 nt, Human
ucucaggcccccuccuugcu

SEQ ID NO: 759522 - RNA, 23 nt, Human
ugggcaucuccucugugccaggc

SEQ ID NO: 759523 - RNA, 22 nt, Human
ggucaucugccuccaaagcacu

SEQ ID NO: 759524 - RNA, 22 nt, Human
uucuuuccccauggaguucgga

SEQ ID NO: 759525 - RNA, 22 nt, Human
acucacagcagacuaugaggga

SEQ ID NO: 759526 - RNA, 22 nt, Human
agggccagcacuccuggcagga

SEQ ID NO: 759527 - RNA, 22 nt, Human
uuauaucuuuuuacaucucucc

SEQ ID NO: 759528 - RNA, 22 nt, Human
agucacugaauaccuuaauguu

SEQ ID NO: 759529 - RNA, 22 nt, Human
ggcugaaaggugggaggauggc

SEQ ID NO: 759530 - RNA, 22 nt, Human
gucugcccuuccucuccacgau

SEQ ID NO: 759531 - RNA, 22 nt, Human
gcagggcagaccuccagccuau

SEQ ID NO: 759532 - RNA, 22 nt, Human
caaagugcugggauuagugcug

SEQ ID NO: 759533 - RNA, 17 nt, Human
cucacggaggaugaauc

SEQ ID NO: 759534 - RNA, 22 nt, Human
auauuacauaaacaugagugaa

SEQ ID NO: 759535 - RNA, 22 nt, Human
cguccauauucaugagcugagu

SEQ ID NO: 759536 - RNA, 22 nt, Human
ugacacaaaggaaagcauaauc

SEQ ID NO: 759537 - RNA, 22 nt, Human
ccugagaaaccuggugcaauua

SEQ ID NO: 759538 - RNA, 22 nt, Human
ccagacaugugcccuugaggaa

SEQ ID NO: 759539 - RNA, 20 nt, Human
cuccagccccugcccugguc

SEQ ID NO: 759540 - RNA, 22 nt, Human
ccaauccucauguucaacaacc

SEQ ID NO: 759541 - RNA, 22 nt, Human
gccucaaauguggagcacuauu

SEQ ID NO: 759542 - RNA, 22 nt, Human
aaagacugcaaaaacgcacaga

SEQ ID NO: 759543 - RNA, 22 nt, Human
ugucccagggaaggcccagcac

SEQ ID NO: 759544 - RNA, 22 nt, Human
uuugaaaauuagacacaggcua

SEQ ID NO: 759545 - RNA, 22 nt, Human
uuuugggugaauuugccaguua

SEQ ID NO: 759546 - RNA, 22 nt, Human
ggcuguguccuguaugauuauu

SEQ ID NO: 759547 - RNA, 22 nt, Human
ucacugaacucucauagagaaa

SEQ ID NO: 759548 - RNA, 22 nt, Human
uugccaggcuuguuucuaggcu

SEQ ID NO: 759549 - RNA, 22 nt, Human
aggcucugccaauuccuuccuc

SEQ ID NO: 759550 - RNA, 22 nt, Human
acuggcaguuugagaaugcauu

SEQ ID NO: 759551 - RNA, 22 nt, Human
gccacagcuccagucaggugac

SEQ ID NO: 759552 - RNA, 22 nt, Human
gcuuuagauagauuuagucuuu

SEQ ID NO: 759553 - RNA, 22 nt, Human
uauuuucaccuucucuggauau

SEQ ID NO: 759554 - RNA, 22 nt, Human
uggucugaacuaagacaguagu

SEQ ID NO: 759555 - RNA, 22 nt, Human
uuucacauuuuauacuuaagcc

SEQ ID NO: 759556 - RNA, 22 nt, Human
ugcuaugugacugcuucagauu

SEQ ID NO: 759557 - RNA, 22 nt, Human
ugugaauaaugccgcaauaaac

SEQ ID NO: 759558 - RNA, 17 nt, Human
gcccuggagccaggcua

SEQ ID NO: 759559 - RNA, 22 nt, Human
ucucugucugagccuggcagac

SEQ ID NO: 759560 - RNA, 22 nt, Human
uguguucaccaaaguguagaaa

SEQ ID NO: 759561 - RNA, 22 nt, Human
uuucacacuagucagaauacca

SEQ ID NO: 759562 - RNA, 23 nt, Human
ggaugggcaagccuagugccuac

SEQ ID NO: 759563 - RNA, 22 nt, Human
agcugaggacgugaagggcggc

SEQ ID NO: 759564 - RNA, 22 nt, Human
gacuuuccagguccugggcuau

SEQ ID NO: 759565 - RNA, 22 nt, Human
cccaggcagggacgugcucugg

SEQ ID NO: 759566 - RNA, 22 nt, Human
guuaauuugcagcuuucgagcu

SEQ ID NO: 759567 - RNA, 22 nt, Human
aacauguugcuuuaauaauauu

SEQ ID NO: 759568 - RNA, 22 nt, Human
caggaccaggcguucugggcug

SEQ ID NO: 759569 - RNA, 22 nt, Human
ccaagaugaucuuuacaguguu

SEQ ID NO: 759570 - RNA, 22 nt, Human
auuuccuauacaguuguccaua

SEQ ID NO: 759571 - RNA, 20 nt, Human
cagccuccacucacucagcu

SEQ ID NO: 759572 - RNA, 18 nt, Human
uguagagccagguuugcc

SEQ ID NO: 759573 - RNA, 22 nt, Human
augucuucuaagcucuaagcug

SEQ ID NO: 759574 - RNA, 22 nt, Human
uugcaaauuccaauccaauauu

SEQ ID NO: 759575 - RNA, 22 nt, Human
agaaugcuccagagcugaaaga

SEQ ID NO: 759576 - RNA, 22 nt, Human
cugggcuggauaauucuuugcu

SEQ ID NO: 759577 - RNA, 22 nt, Human
aaugagaaaacacagaggaggu

SEQ ID NO: 759578 - RNA, 22 nt, Human
augucagaagcuggaugacagc

SEQ ID NO: 759579 - RNA, 22 nt, Human
ucugaggcugucucugggcucc

SEQ ID NO: 759580 - RNA, 22 nt, Human
ugccuucaccaggccuucagcc

SEQ ID NO: 759581 - RNA, 22 nt, Human
gcagcguggggacaggagcuca

SEQ ID NO: 759582 - RNA, 22 nt, Human
aaaagagaauccuguacagaga

SEQ ID NO: 759583 - RNA, 22 nt, Human
agggccaggaucacagccaaga

SEQ ID NO: 759584 - RNA, 21 nt, Human
cccagagccuagggagggcac

SEQ ID NO: 759585 - RNA, 22 nt, Human
ccucagaccccugcugagcuuc

SEQ ID NO: 759586 - RNA, 22 nt, Human
ucuuacaagucacccgcuuucu

SEQ ID NO: 759587 - RNA, 22 nt, Human
gaaggcugcgaggggagugccg

SEQ ID NO: 759588 - RNA, 22 nt, Human
cuggcuguggucacagguaacu

SEQ ID NO: 759589 - RNA, 22 nt, Human
gaguuuagguucaugaacgagu

SEQ ID NO: 759590 - RNA, 22 nt, Human
caggcucacuguaaggucagcu

SEQ ID NO: 759591 - RNA, 22 nt, Human
uucucuaauggugaugauuaga

SEQ ID NO: 759592 - RNA, 22 nt, Human
acacuuggagcaacacuuaugg

SEQ ID NO: 759593 - RNA, 22 nt, Human
auauuacuuccugguauaaaau

SEQ ID NO: 759594 - RNA, 21 nt, Human
agacacagggguugcuggggu

SEQ ID NO: 759595 - RNA, 22 nt, Human
uagccucucuccuccacaaccu

SEQ ID NO: 759596 - RNA, 22 nt, Human
gugcauugcgaugcagacgacc

SEQ ID NO: 759597 - RNA, 22 nt, Human
aaaccucuccacuacaugacag

SEQ ID NO: 759598 - RNA, 22 nt, Human
cucuuuaacucccauucugucc

SEQ ID NO: 759599 - RNA, 18 nt, Human
guucaaggucaagagaga

SEQ ID NO: 759600 - RNA, 22 nt, Human
gagaaguuguguggauuuaaag

SEQ ID NO: 759601 - RNA, 22 nt, Human
ugugcgugauggaccgggccug

SEQ ID NO: 759602 - RNA, 22 nt, Human
cacugcaaccuccgccucuugg

SEQ ID NO: 759603 - RNA, 22 nt, Human
ucccgggcaggucgagcgagcc

SEQ ID NO: 759604 - RNA, 22 nt, Human
auuuguaauuucuuaucugugu

SEQ ID NO: 759605 - RNA, 22 nt, Human
ucuaaaguaugcuaauauguga

SEQ ID NO: 759606 - RNA, 22 nt, Human
aggacagcaguuggugagguuc

SEQ ID NO: 759607 - RNA, 22 nt, Human
acaguggaugugauguccaggu

SEQ ID NO: 759608 - RNA, 22 nt, Human
gcacccaguuugucucaggguu

SEQ ID NO: 759609 - RNA, 22 nt, Human
uuaaagaauagugccccuauug

SEQ ID NO: 759610 - RNA, 22 nt, Human
gagcagcuagauaaagcccuuc

SEQ ID NO: 759611 - RNA, 22 nt, Human
aauuuauaauaaauagggcuuu

SEQ ID NO: 759612 - RNA, 22 nt, Human
caccagcucuccaccagguuuc

SEQ ID NO: 759613 - RNA, 22 nt, Human
aacacugugcccacccuagucc

SEQ ID NO: 759614 - RNA, 22 nt, Human
cccaggguagcugagcuggcag

SEQ ID NO: 759615 - RNA, 17 nt, Human
ccucacagggaccagac

SEQ ID NO: 759616 - RNA, 22 nt, Human
gcagagugggagcccagggcug

SEQ ID NO: 759617 - RNA, 22 nt, Human
uguaggaauguuuuuaaguugg

SEQ ID NO: 759618 - RNA, 22 nt, Human
acucauugggaaagugcucucu

SEQ ID NO: 759619 - RNA, 22 nt, Human
uguuuaagccuguggugucauc

SEQ ID NO: 759620 - RNA, 22 nt, Human
ccuuuggcugcauagggaaggg

SEQ ID NO: 759621 - RNA, 22 nt, Human
uagaacagcauuuggcuauuaa

SEQ ID NO: 759622 - RNA, 22 nt, Human
cugcuggugcagaguggggcug

SEQ ID NO: 759623 - RNA, 19 nt, Human
cucuggagcagacacugga

SEQ ID NO: 759624 - RNA, 22 nt, Human
gcugaggcucaagucauggguc

SEQ ID NO: 759625 - RNA, 22 nt, Human
ggcugggcagcagcuguuaagc

SEQ ID NO: 759626 - RNA, 22 nt, Human
gggaagugagcuggaaucaagg

SEQ ID NO: 759627 - RNA, 22 nt, Human
uaucagaagacuuacaguaucg

SEQ ID NO: 759628 - RNA, 22 nt, Human
uagaggccugaaagaaugauca

SEQ ID NO: 759629 - RNA, 22 nt, Human
auagaucauguuaaaagcucca

SEQ ID NO: 759630 - RNA, 22 nt, Human
uggcuucacugcucaagugauu

SEQ ID NO: 759631 - RNA, 22 nt, Human
ugcugagguuucugacuaugga

SEQ ID NO: 759632 - RNA, 22 nt, Human
cagcucucuaaggucuugcuuu

SEQ ID NO: 759633 - RNA, 22 nt, Human
aaggcagauaagaauucagcaa

SEQ ID NO: 759634 - RNA, 22 nt, Human
aggcgcagacauacagggucug

SEQ ID NO: 759635 - RNA, 22 nt, Human
uagaugauuuucagucaaagca

SEQ ID NO: 759636 - RNA, 22 nt, Human
gugcuaggauuacaggcauggg

SEQ ID NO: 759637 - RNA, 22 nt, Human
aggaggcucucagguccucccc

SEQ ID NO: 759638 - RNA, 22 nt, Human
ccuggaugauccaugucaugga

SEQ ID NO: 759639 - RNA, 17 nt, Human
guccuggugugugagga

SEQ ID NO: 759640 - RNA, 22 nt, Human
gaguggggcguggauccagcgu

SEQ ID NO: 759641 - RNA, 22 nt, Human
uuauucacuucuuggucccuca

SEQ ID NO: 759642 - RNA, 22 nt, Human
ucugauuccagaaggggcauac

SEQ ID NO: 759643 - RNA, 22 nt, Human
aacuuuucauuccaaaggugcu

SEQ ID NO: 759644 - RNA, 22 nt, Human
uuguucauaaagacaguucaga

SEQ ID NO: 759645 - RNA, 22 nt, Human
aucuguccugugacagugggag

SEQ ID NO: 759646 - RNA, 22 nt, Human
uuuccuaggagauugaucacau

SEQ ID NO: 759647 - RNA, 22 nt, Human
aaagagaaaaagaucccggcuc

SEQ ID NO: 759648 - RNA, 23 nt, Human
aggccagcgcagacaccgagcac

SEQ ID NO: 759649 - RNA, 22 nt, Human
ggcugcuggauuguguaucugu

SEQ ID NO: 759650 - RNA, 22 nt, Human
acaugagauuagcucacccacu

SEQ ID NO: 759651 - RNA, 22 nt, Human
auacagaugcuugcucgugacu

SEQ ID NO: 759652 - RNA, 22 nt, Human
uggagcaggacugcugcccuca

SEQ ID NO: 759653 - RNA, 22 nt, Human
uaaugcucacccugcaucaggc

SEQ ID NO: 759654 - RNA, 22 nt, Human
ccucaguguguggauguuagag

SEQ ID NO: 759655 - RNA, 22 nt, Human
uagacuagaggaucagcaaggg

SEQ ID NO: 759656 - RNA, 22 nt, Human
gaugguuuaugauagaugggaa

SEQ ID NO: 759657 - RNA, 22 nt, Human
uguaugaaugggaaaaggaaac

SEQ ID NO: 759658 - RNA, 22 nt, Human
ccuuggauuuugugcccacgcc

SEQ ID NO: 759659 - RNA, 20 nt, Human
uacacuaaguaugaagugcu

SEQ ID NO: 759660 - RNA, 19 nt, Human
ccccaggguaggcuagggg

SEQ ID NO: 759661 - RNA, 22 nt, Human
uauaaaauggcaucagcuccaa

SEQ ID NO: 759662 - RNA, 22 nt, Human
ucuauguccuuucucccauucc

SEQ ID NO: 759663 - RNA, 22 nt, Human
gcaaagcauucuguggagucua

SEQ ID NO: 759664 - RNA, 22 nt, Human
gccccagaaggggaaagccugg

SEQ ID NO: 759665 - RNA, 22 nt, Human
aucugcuguguguaauggaaug

SEQ ID NO: 759666 - RNA, 22 nt, Human
gacuucaaaucaugcuaaaccu

SEQ ID NO: 759667 - RNA, 22 nt, Human
gugaggucaaagccuuggguau

SEQ ID NO: 759668 - RNA, 22 nt, Human
uaccaggcagcugcacagaggc

SEQ ID NO: 759669 - RNA, 22 nt, Human
uccaagcuuuccaugcccucac

SEQ ID NO: 759670 - RNA, 22 nt, Human
gacccaggcucgugggacggcu

SEQ ID NO: 759671 - RNA, 22 nt, Human
uacaacauguaaagugguuuaa

SEQ ID NO: 759672 - RNA, 20 nt, Human
uuucaguuaucuugaccuuc

SEQ ID NO: 759673 - RNA, 22 nt, Human
caggauaacagaaaauagcuga

SEQ ID NO: 759674 - RNA, 22 nt, Human
aauauauagaaguacccguugu

SEQ ID NO: 759675 - RNA, 22 nt, Human
uggcaggaagcaucuauagguc

SEQ ID NO: 759676 - RNA, 22 nt, Human
uguccuuguuccuaauguaaaa

SEQ ID NO: 759677 - RNA, 22 nt, Human
ugaucugguccuacugugggca

SEQ ID NO: 759678 - RNA, 23 nt, Human
aggcagugggggccacuuugcuu

SEQ ID NO: 759679 - RNA, 22 nt, Human
uccccuuggcuuggucaagagg

SEQ ID NO: 759680 - RNA, 22 nt, Human
agggacuuguguccuauguaug

SEQ ID NO: 759681 - RNA, 22 nt, Human
uucugcagcccaacaguaguuu

SEQ ID NO: 759682 - RNA, 22 nt, Human
cugcccaccccgaggcaggaag

SEQ ID NO: 759683 - RNA, 18 nt, Human
ccuucugacgcuugagaa

SEQ ID NO: 759684 - RNA, 22 nt, Human
agagucugaaugcucagaguug

SEQ ID NO: 759685 - RNA, 22 nt, Human
ucccugcccucagugcacccgg

SEQ ID NO: 759686 - RNA, 22 nt, Human
agagcacaggcucaccauuguu

SEQ ID NO: 759687 - RNA, 22 nt, Human
uuucuauuguaagucuccuaua

SEQ ID NO: 759688 - RNA, 22 nt, Human
cauuuauugaguggccacagug

SEQ ID NO: 759689 - RNA, 22 nt, Human
uggguagaggaauugggcuacc

SEQ ID NO: 759690 - RNA, 22 nt, Human
aaccuggaccuuuuggguauug

SEQ ID NO: 759691 - RNA, 22 nt, Human
ccaaggccaucagguagguccu

SEQ ID NO: 759692 - RNA, 22 nt, Human
ggucccaggaagugcggcggcg

SEQ ID NO: 759693 - RNA, 22 nt, Human
ucuauuagauuauucucaagga

SEQ ID NO: 759694 - RNA, 22 nt, Human
augcuuuauugcuucugggcac

SEQ ID NO: 759695 - RNA, 22 nt, Human
caaaugugacuuuugggcuucu

SEQ ID NO: 759696 - RNA, 22 nt, Human
agccagaaaggggcauuaucug

SEQ ID NO: 759697 - RNA, 22 nt, Human
uuccuguccgcaauggccuggg

SEQ ID NO: 759698 - RNA, 22 nt, Human
auuuaagaggcugcuagaguau

SEQ ID NO: 759699 - RNA, 22 nt, Human
auauuuuccgaacuugagguag

SEQ ID NO: 759700 - RNA, 22 nt, Human
gagagcaauggggacgggcagg

SEQ ID NO: 759701 - RNA, 21 nt, Human
aagcagcuuaauaaaguaugu

SEQ ID NO: 759702 - RNA, 22 nt, Human
uccuggagaagaggggcuugga

SEQ ID NO: 759703 - RNA, 22 nt, Human
ucacugcuucuuggagaauguc

SEQ ID NO: 759704 - RNA, 22 nt, Human
ugcauuuacgguacaacagcag

SEQ ID NO: 759705 - RNA, 22 nt, Human
ugcaugcagcauaugaggccuc

SEQ ID NO: 759706 - RNA, 22 nt, Human
ggagugaaguggcgcgaucucg

SEQ ID NO: 759707 - RNA, 19 nt, Human
gaggaggaaaacuagugua

SEQ ID NO: 759708 - RNA, 22 nt, Human
ugggcacuauggcucugugcac

SEQ ID NO: 759709 - RNA, 22 nt, Human
aggcugaugcuggcugaggcug

SEQ ID NO: 759710 - RNA, 22 nt, Human
aguuucuagccucacuguuuag

SEQ ID NO: 759711 - RNA, 22 nt, Human
aaagaucagaggauagcugagu

SEQ ID NO: 759712 - RNA, 19 nt, Human
uguggcugagcacuccuua

SEQ ID NO: 759713 - RNA, 22 nt, Human
cagauuucuuuagcaagcuaag

SEQ ID NO: 759714 - RNA, 22 nt, Human
cagugcuauaauccagugucgu

SEQ ID NO: 759715 - RNA, 22 nt, Human
aaguaacacauguuacuucugc

SEQ ID NO: 759716 - RNA, 19 nt, Human
ugagacagaagaugagccu

SEQ ID NO: 759717 - RNA, 22 nt, Human
ugaaacauuaggaaaucauuau

SEQ ID NO: 759718 - RNA, 22 nt, Human
agaagauuauuagagacuuugu

SEQ ID NO: 759719 - RNA, 22 nt, Human
acagugggacagugacggggga

SEQ ID NO: 759720 - RNA, 22 nt, Human
uuugauacuuugugcaauuucu

SEQ ID NO: 759721 - RNA, 22 nt, Human
cagcuugugcaaagguccuggg

SEQ ID NO: 759722 - RNA, 22 nt, Human
ccaggcagagggaauagcaagu

SEQ ID NO: 759723 - RNA, 22 nt, Human
gagauauguuagaaagcuauug

SEQ ID NO: 759724 - RNA, 22 nt, Human
ucauugcaccccagucccagcu

SEQ ID NO: 759725 - RNA, 22 nt, Human
gaggucugggcuugggccuggu

SEQ ID NO: 759726 - RNA, 22 nt, Human
cucccagguuccgacgccucuu

SEQ ID NO: 759727 - RNA, 22 nt, Human
cucugugggggagaggcagcug

SEQ ID NO: 759728 - RNA, 22 nt, Human
gcuguuucugaguagcuaggcu

SEQ ID NO: 759729 - RNA, 22 nt, Human
gugcaaaaguaauugcuguuuu

SEQ ID NO: 759730 - RNA, 22 nt, Human
agacacagcaauaacuacuguu

SEQ ID NO: 759731 - RNA, 22 nt, Human
ugcaugaaauauuuucuguagg

SEQ ID NO: 759732 - RNA, 22 nt, Human
uugggcugaucuguggaagaag

SEQ ID NO: 759733 - RNA, 22 nt, Human
uccuuggcaugccgucuucucc

SEQ ID NO: 759734 - RNA, 22 nt, Human
cuauauuucuuggcuuuaaaca

SEQ ID NO: 759735 - RNA, 19 nt, Human
gccucacaggucucaggcc

SEQ ID NO: 759736 - RNA, 22 nt, Human
uuauucuguagaaccuaguaca

SEQ ID NO: 759737 - RNA, 22 nt, Human
ugaaggagcucaggagauaguc

SEQ ID NO: 759738 - RNA, 20 nt, Human
aguguaugaaucuggauggg

SEQ ID NO: 759739 - RNA, 22 nt, Human
caucauuuguucacuugauucc

SEQ ID NO: 759740 - RNA, 22 nt, Human
gagcacagcugucuugcaagcu

SEQ ID NO: 759741 - RNA, 22 nt, Human
ccuuaaaagaacuaucucuucu

SEQ ID NO: 759742 - RNA, 22 nt, Human
ugcagaggcccagcgguucuuc

SEQ ID NO: 759743 - RNA, 22 nt, Human
cuacagacccaccuuggaagaa

SEQ ID NO: 759744 - RNA, 22 nt, Human
uauuugcugaaucugauucaga

SEQ ID NO: 759745 - RNA, 22 nt, Human
uucuuuaucaguuacucauagg

SEQ ID NO: 759746 - RNA, 22 nt, Human
uuaaagcugagcccucagaagc

SEQ ID NO: 759747 - RNA, 20 nt, Human
ucugcaaacaaguuuuagac

SEQ ID NO: 759748 - RNA, 20 nt, Human
uucuggaggcuacaagucug

SEQ ID NO: 759749 - RNA, 22 nt, Human
aauguguacuuuuucaugcuca

SEQ ID NO: 759750 - RNA, 22 nt, Human
cgcucuggagaauaguagcuuu

SEQ ID NO: 759751 - RNA, 22 nt, Human
auggauaaucaugaacuuugag

SEQ ID NO: 759752 - RNA, 22 nt, Human
uaucacccuacauaagaaauaa

SEQ ID NO: 759753 - RNA, 22 nt, Human
auaaucuggucuuuguaugagu

SEQ ID NO: 759754 - RNA, 22 nt, Human
cugggcuuugaagccaggcugc

SEQ ID NO: 759755 - RNA, 22 nt, Human
ucuggcccuauggcauguaccu

SEQ ID NO: 759756 - RNA, 22 nt, Human
aguaaacagaaagcaagaugau

SEQ ID NO: 759757 - RNA, 22 nt, Human
uuccugaaugcuguugugcugu

SEQ ID NO: 759758 - RNA, 22 nt, Human
gcuuaauucuggcucaguuucc

SEQ ID NO: 759759 - RNA, 22 nt, Human
cacaguauuuguuuuucugagu

SEQ ID NO: 759760 - RNA, 22 nt, Human
uaucuaaaggauuuaauuuagu

SEQ ID NO: 759761 - RNA, 22 nt, Human
uggcugaguaaguugugauaug

SEQ ID NO: 759762 - RNA, 22 nt, Human
cacagggcaccaguuggccauc

SEQ ID NO: 759763 - RNA, 22 nt, Human
ggaagacugcauggcauaguga

SEQ ID NO: 759764 - RNA, 20 nt, Human
agugucuggauuuuguaacc

SEQ ID NO: 759765 - RNA, 21 nt, Human
ugacaggcacccuggcuguga

SEQ ID NO: 759766 - RNA, 21 nt, Human
cugugacucccugggcaaucc

SEQ ID NO: 759767 - RNA, 22 nt, Human
cagugugacuucugagcugcca

SEQ ID NO: 759768 - RNA, 22 nt, Human
ggaggggagguccagcugaucu

SEQ ID NO: 759769 - RNA, 22 nt, Human
uagaaucuggaaggggcuauuc

SEQ ID NO: 759770 - RNA, 20 nt, Human
uuauuucaguugcuagauug

SEQ ID NO: 759771 - RNA, 22 nt, Human
cacagcuuagaaaagaagccau

SEQ ID NO: 759772 - RNA, 22 nt, Human
agcuuuauauuuaaugaauucu

SEQ ID NO: 759773 - RNA, 22 nt, Human
agaggaggcucugggaucgucc

SEQ ID NO: 759774 - RNA, 22 nt, Human
uuaaacaccaagugcaaaccac

SEQ ID NO: 759775 - RNA, 22 nt, Human
guagcuuccagaaagugucuuu

SEQ ID NO: 759776 - RNA, 21 nt, Human
agaggcccucggacugggcgu

SEQ ID NO: 759777 - RNA, 22 nt, Human
ggaucugggguagagcaguggg

SEQ ID NO: 759778 - RNA, 22 nt, Human
cccaggaggcagagguugcagu

SEQ ID NO: 759779 - RNA, 22 nt, Human
ggcugggcauccauccaugaga

SEQ ID NO: 759780 - RNA, 22 nt, Human
ugggacuugccucgagggcugc

SEQ ID NO: 759781 - RNA, 22 nt, Human
uuauucugagaguugaaguaau

SEQ ID NO: 759782 - RNA, 22 nt, Human
uggccuggggaccugugagacc

SEQ ID NO: 759783 - RNA, 22 nt, Human
gcacagagugggugagaugugg

SEQ ID NO: 759784 - RNA, 22 nt, Human
ugggagaagcauggggugcaga

SEQ ID NO: 759785 - RNA, 22 nt, Human
aucacagauugugaauaacuau

SEQ ID NO: 759786 - RNA, 22 nt, Human
uuccaagucacccuuaggguca

SEQ ID NO: 759787 - RNA, 22 nt, Human
auguccaggaucuauccccaga

SEQ ID NO: 759788 - RNA, 22 nt, Human
uguggcagauuuuauaaauugc

SEQ ID NO: 759789 - RNA, 22 nt, Human
aggcagaucaguacaggguuaa

SEQ ID NO: 759790 - RNA, 22 nt, Human
gaaggcccagcuugaaugcugc

SEQ ID NO: 759791 - RNA, 22 nt, Human
cauuacaaccccaaauuacaaa

SEQ ID NO: 759792 - RNA, 22 nt, Human
cauuuaaugcacggauguagcc

SEQ ID NO: 759793 - RNA, 22 nt, Human
gugcaugugcguugacugucca

SEQ ID NO: 759794 - RNA, 22 nt, Human
cucacuguccaacaggcuuuac

SEQ ID NO: 759795 - RNA, 22 nt, Human
uggacagggcagagaccgaguc

SEQ ID NO: 759796 - RNA, 22 nt, Human
aaaccugucugauuauggagac

SEQ ID NO: 759797 - RNA, 22 nt, Human
agaggcucuggugcagcaugca

SEQ ID NO: 759798 - RNA, 22 nt, Human
agaugcuucaguguuuaauuua

SEQ ID NO: 759799 - RNA, 22 nt, Human
aaucacuuguaaggaauucaau

SEQ ID NO: 759800 - RNA, 22 nt, Human
gugugcgccgacacagccaggu

SEQ ID NO: 759801 - RNA, 17 nt, Human
gcuaggagagggaggag

SEQ ID NO: 759802 - RNA, 22 nt, Human
agucagaguucuuggggagaca

SEQ ID NO: 759803 - RNA, 22 nt, Human
uuuggcacauucugucacauuc

SEQ ID NO: 759804 - RNA, 22 nt, Human
gcagcaggucugucaaugucau

SEQ ID NO: 759805 - RNA, 22 nt, Human
caggcacaaugagcgccaucuu

SEQ ID NO: 759806 - RNA, 22 nt, Human
uccaggagauucauuaggucau

SEQ ID NO: 759807 - RNA, 22 nt, Human
uggugucuuggaaguaggugcu

SEQ ID NO: 759808 - RNA, 18 nt, Human
aagcugcccucaggcagg

SEQ ID NO: 759809 - RNA, 22 nt, Human
uuugagaagauaggggaauacu

SEQ ID NO: 759810 - RNA, 22 nt, Human
uaaaugaaaggguuuaauuuau

SEQ ID NO: 759811 - RNA, 22 nt, Human
gcauaucaugacuucuaucuua

SEQ ID NO: 759812 - RNA, 22 nt, Human
aggguauguuuuaggcugaguu

SEQ ID NO: 759813 - RNA, 22 nt, Human
cuagcaggucaaaccagcugau

SEQ ID NO: 759814 - RNA, 22 nt, Human
aggggaugauccucccgcagcg

SEQ ID NO: 759815 - RNA, 22 nt, Human
ggcagcugugaagugccucaca

SEQ ID NO: 759816 - RNA, 22 nt, Human
acacaguaugacauuggcagag

SEQ ID NO: 759817 - RNA, 22 nt, Human
gucacccugcuggcuguucagc

SEQ ID NO: 759818 - RNA, 22 nt, Human
uacacacaugcauuugccuuau

SEQ ID NO: 759819 - RNA, 16 nt, Human
cagcccaggggcgggc

SEQ ID NO: 759820 - RNA, 22 nt, Human
acuuguucauugaguacauaug

SEQ ID NO: 759821 - RNA, 22 nt, Human
aguggcagacagagacaguacc

SEQ ID NO: 759822 - RNA, 22 nt, Human
gaaucucaaauuaagaauuuua

SEQ ID NO: 759823 - RNA, 22 nt, Human
cagugcaauguuaaauaggaaa

SEQ ID NO: 759824 - RNA, 22 nt, Human
cagagcagugaggaguugugua

SEQ ID NO: 759825 - RNA, 22 nt, Human
ccauuuggaggucauuaggaca

SEQ ID NO: 759826 - RNA, 22 nt, Human
gccuggagcccaguguggggcu

SEQ ID NO: 759827 - RNA, 22 nt, Human
agggcagagggugccucaccug

SEQ ID NO: 759828 - RNA, 22 nt, Human
caaaguaucaacucccacacug

SEQ ID NO: 759829 - RNA, 22 nt, Human
cucauuuacucaucugcaaaac

SEQ ID NO: 759830 - RNA, 22 nt, Human
acugagugggagguuuguguga

SEQ ID NO: 759831 - RNA, 22 nt, Human
uucugcaguguuaacaauguca

SEQ ID NO: 759832 - RNA, 22 nt, Human
ccuucugagcuucaauuucagu

SEQ ID NO: 759833 - RNA, 17 nt, Human
caggcuccuuccagauu

SEQ ID NO: 759834 - RNA, 22 nt, Human
ccagccccuauccucgcuccac

SEQ ID NO: 759835 - RNA, 23 nt, Human
uggcuuuauucacauaucugacc

SEQ ID NO: 759836 - RNA, 19 nt, Human
agaaauagccuuccuuguc

SEQ ID NO: 759837 - RNA, 22 nt, Human
uuagcacuuugauucaugcaga

SEQ ID NO: 759838 - RNA, 22 nt, Human
agguaggguuaauggagauaua

SEQ ID NO: 759839 - RNA, 22 nt, Human
ugacaauacagagagagcaaaa

SEQ ID NO: 759840 - RNA, 22 nt, Human
aauccacuuugugccccucucu

SEQ ID NO: 759841 - RNA, 22 nt, Human
ccuuuucuaggaugcuuuauag

SEQ ID NO: 759842 - RNA, 22 nt, Human
gugaggucuuugggaggugauu

SEQ ID NO: 759843 - RNA, 22 nt, Human
ucuaagaauacucauaucuucu

SEQ ID NO: 759844 - RNA, 22 nt, Human
ccuuggcugugcugcccuuugc

SEQ ID NO: 759845 - RNA, 22 nt, Human
cugccugugccaccgccucauu

SEQ ID NO: 759846 - RNA, 22 nt, Human
uuucucugaguuguuacaaaac

SEQ ID NO: 759847 - RNA, 22 nt, Human
uucauugaaggagggacuugcu

SEQ ID NO: 759848 - RNA, 22 nt, Human
aggccaaguagcuagcauugaa

SEQ ID NO: 759849 - RNA, 22 nt, Human
aggacacaugcacacccugcgu

SEQ ID NO: 759850 - RNA, 20 nt, Human
uucuuuguuccuuacauuug

SEQ ID NO: 759851 - RNA, 22 nt, Human
cacacagcucaggggcacugcc

SEQ ID NO: 759852 - RNA, 22 nt, Human
uggaugagaaacucuggugacu

SEQ ID NO: 759853 - RNA, 22 nt, Human
agcuugccucccccucuuagga

SEQ ID NO: 759854 - RNA, 22 nt, Human
ccuggaaagcugcccugugaca

SEQ ID NO: 759855 - RNA, 22 nt, Human
ucugaggaagcagcaggaagug

SEQ ID NO: 759856 - RNA, 22 nt, Human
gauauaaauuaaucaagugcaa

SEQ ID NO: 759857 - RNA, 22 nt, Human
auagacaacacuuauuauuccu

SEQ ID NO: 759858 - RNA, 22 nt, Human
uuucuacauguuuucuauugaa

SEQ ID NO: 759859 - RNA, 22 nt, Human
uuuccagagcugagaaggcuug

SEQ ID NO: 759860 - RNA, 22 nt, Human
gcaagauguuaacauagggaga

SEQ ID NO: 759861 - RNA, 21 nt, Human
auggcucaggccaucaaugga

SEQ ID NO: 759862 - RNA, 22 nt, Human
uacuucugccuuagagaacacu

SEQ ID NO: 759863 - RNA, 22 nt, Human
gugcugcugccagcaggauccu

SEQ ID NO: 759864 - RNA, 22 nt, Human
augcccugcugccaucuggccg

SEQ ID NO: 759865 - RNA, 22 nt, Human
uacagcccaagaaguuuauacg

SEQ ID NO: 759866 - RNA, 22 nt, Human
gacagacuaaauggcuguagga

SEQ ID NO: 759867 - RNA, 22 nt, Human
gggaaggcagugucugguugaa

SEQ ID NO: 759868 - RNA, 22 nt, Human
guaugaaguaagauauuguuca

SEQ ID NO: 759869 - RNA, 22 nt, Human
gaagaagccucuguggaucuga

SEQ ID NO: 759870 - RNA, 22 nt, Human
aaagcagagaucauggcuugua

SEQ ID NO: 759871 - RNA, 22 nt, Human
gcgggccaccuuggagagcgcu

SEQ ID NO: 759872 - RNA, 22 nt, Human
aaaugucuuuaucucauguaac

SEQ ID NO: 759873 - RNA, 22 nt, Human
uuuggucucugugcauccuccu

SEQ ID NO: 759874 - RNA, 23 nt, Human
gcucauccacggagaggggcucc

SEQ ID NO: 759875 - RNA, 22 nt, Human
ucucaggaguagugggauccau

SEQ ID NO: 759876 - RNA, 22 nt, Human
gagggccucugugggugcucac

SEQ ID NO: 759877 - RNA, 23 nt, Human
agggaaaguaguaauggccuuug

SEQ ID NO: 759878 - RNA, 22 nt, Human
gacacaggaaaagcuccagccc

SEQ ID NO: 759879 - RNA, 21 nt, Human
agggcagauuagcuguaagag

SEQ ID NO: 759880 - RNA, 22 nt, Human
ggccucucauucucccuggucc

SEQ ID NO: 759881 - RNA, 22 nt, Human
cugcccugcuugaugacagcga

SEQ ID NO: 759882 - RNA, 22 nt, Human
uugcaagacacuuggaagcaca

SEQ ID NO: 759883 - RNA, 23 nt, Human
aggauggguggcaauagaaagac

SEQ ID NO: 759884 - RNA, 20 nt, Human
ucccuggaggugguggcauc

SEQ ID NO: 759885 - RNA, 22 nt, Human
agaauaagccugacgaaaccua

SEQ ID NO: 759886 - RNA, 22 nt, Human
aacagcagggggaccugcuggu

SEQ ID NO: 759887 - RNA, 22 nt, Human
accagcugaguucucggauggu

SEQ ID NO: 759888 - RNA, 19 nt, Human
agaaaucucgagauuuguu

SEQ ID NO: 759889 - RNA, 22 nt, Human
gauucuggcaaaauccuggcuu

SEQ ID NO: 759890 - RNA, 22 nt, Human
ggguuaaagcaggaagcaucuu

SEQ ID NO: 759891 - RNA, 22 nt, Human
cugcugugagugguucuugccu

SEQ ID NO: 759892 - RNA, 22 nt, Human
cugcuuugaggggcucuguaua

SEQ ID NO: 759893 - RNA, 22 nt, Human
auuuccauuuucagccauuacu

SEQ ID NO: 759894 - RNA, 22 nt, Human
auuuagaaccccuuccaaccug

SEQ ID NO: 759895 - RNA, 22 nt, Human
cagcagcucacugaauaaugac

SEQ ID NO: 759896 - RNA, 22 nt, Human
gaacacuugcuguuaauaagug

SEQ ID NO: 759897 - RNA, 22 nt, Human
ucgagucauguucucccauuaa

SEQ ID NO: 759898 - RNA, 22 nt, Human
acaguccuguugucaaagcaau

SEQ ID NO: 759899 - RNA, 22 nt, Human
cccagcucuaggagugguggca

SEQ ID NO: 759900 - RNA, 22 nt, Human
ucacaauaugggugugggaacu

SEQ ID NO: 759901 - RNA, 22 nt, Human
ccugaauaggcucugcucaaaa

SEQ ID NO: 759902 - RNA, 22 nt, Human
uuuggaauguaguuuaaucauc

SEQ ID NO: 759903 - RNA, 22 nt, Human
acuuccaggguagaggggaaga

SEQ ID NO: 759904 - RNA, 22 nt, Human
ggaagagggaaccacgacugua

SEQ ID NO: 759905 - RNA, 22 nt, Human
auuuaugauagcugcauuaaag

SEQ ID NO: 759906 - RNA, 22 nt, Human
ucaauacauacaauguauagug

SEQ ID NO: 759907 - RNA, 22 nt, Human
auucuuuccagacacugauugc

SEQ ID NO: 759908 - RNA, 22 nt, Human
cugagaauguuuucugauugau

SEQ ID NO: 759909 - RNA, 22 nt, Human
auguuuccauuuucuuguauca

SEQ ID NO: 759910 - RNA, 22 nt, Human
uguauuccaaaaugcugaggau

SEQ ID NO: 759911 - RNA, 22 nt, Human
gcccaagaucuggagcugcagg

SEQ ID NO: 759912 - RNA, 22 nt, Human
acccagauaaaugacagggcuu

SEQ ID NO: 759913 - RNA, 22 nt, Human
ucugcugcugaccaacacugug

SEQ ID NO: 759914 - RNA, 22 nt, Human
uccagggagauggcagaggcug

SEQ ID NO: 759915 - RNA, 22 nt, Human
gcuucuaaccugcuuccuguag

SEQ ID NO: 759916 - RNA, 22 nt, Human
aacaaugcuugccaagugugau

SEQ ID NO: 759917 - RNA, 22 nt, Human
cucauauugcugguggucuaag

SEQ ID NO: 759918 - RNA, 22 nt, Human
cugagguccucagagggaaagg

SEQ ID NO: 759919 - RNA, 21 nt, Human
acagccuugugauggagacag

SEQ ID NO: 759920 - RNA, 22 nt, Human
uaaggcaccauaauauauuuaa

SEQ ID NO: 759921 - RNA, 22 nt, Human
auuuccuaacagaggcaacagu

SEQ ID NO: 759922 - RNA, 23 nt, Human
aaggucacagaacuuagcaagcc

SEQ ID NO: 759923 - RNA, 22 nt, Human
augugucuggcauggaaagugu

SEQ ID NO: 759924 - RNA, 22 nt, Human
guggggcuuccuggggcaaguu

SEQ ID NO: 759925 - RNA, 22 nt, Human
cagggccaguucucgcagcagu

SEQ ID NO: 759926 - RNA, 22 nt, Human
ucugacagggccaaacaugaca

SEQ ID NO: 759927 - RNA, 22 nt, Human
uccugaggcccuguuagggucu

SEQ ID NO: 759928 - RNA, 18 nt, Human
uggcuucuugagcuaaca

SEQ ID NO: 759929 - RNA, 22 nt, Human
ggcucuguaaagugacaccugc

SEQ ID NO: 759930 - RNA, 22 nt, Human
aaguuuaucccucucacaguua

SEQ ID NO: 759931 - RNA, 22 nt, Human
aguggcagaucucuggucugga

SEQ ID NO: 759932 - RNA, 22 nt, Human
uccuguuucaacccuuacacug

SEQ ID NO: 759933 - RNA, 19 nt, Human
ggaccagcuuucaggaggc

SEQ ID NO: 759934 - RNA, 22 nt, Human
uacacauccauguuuugacuuu

SEQ ID NO: 759935 - RNA, 22 nt, Human
aagccaguggcuucucccugcu

SEQ ID NO: 759936 - RNA, 22 nt, Human
aaaaaugcuuggacuuaauaaa

SEQ ID NO: 759937 - RNA, 22 nt, Human
cuguuuaucuaggaguugcagg

SEQ ID NO: 759938 - RNA, 22 nt, Human
ucagggaaccucuccuguuucu

SEQ ID NO: 759939 - RNA, 22 nt, Human
gaagcauauagguacugaacua

SEQ ID NO: 759940 - RNA, 22 nt, Human
aggcucugacccaugggaccca

SEQ ID NO: 759941 - RNA, 22 nt, Human
agcuaggaaauugaggcugaga

SEQ ID NO: 759942 - RNA, 22 nt, Human
uggagcagcaucacuuugagcu

SEQ ID NO: 759943 - RNA, 22 nt, Human
acagagaugggaacauucaggu

SEQ ID NO: 759944 - RNA, 22 nt, Human
agguggcagaugggggugcucg

SEQ ID NO: 759945 - RNA, 22 nt, Human
uuccuucuuuuacaccauaaau

SEQ ID NO: 759946 - RNA, 22 nt, Human
caguuuaguguugcauuuggag

SEQ ID NO: 759947 - RNA, 22 nt, Human
cccagcccacgguccugggugg

SEQ ID NO: 759948 - RNA, 22 nt, Human
ccccgcccugcgcggggauaac

SEQ ID NO: 759949 - RNA, 22 nt, Human
uggccaggccucuuggugccca

SEQ ID NO: 759950 - RNA, 22 nt, Human
aucucaaaugauuacaccaagc

SEQ ID NO: 759951 - RNA, 22 nt, Human
uagcaucaugaucagaacuguu

SEQ ID NO: 759952 - RNA, 22 nt, Human
aacagcgucuuuccagcuguuc

SEQ ID NO: 759953 - RNA, 22 nt, Human
cugcagugaaaucaggaagcaa

SEQ ID NO: 759954 - RNA, 22 nt, Human
ggggccuuuucugaauguggaa

SEQ ID NO: 759955 - RNA, 22 nt, Human
uauauacuuucuuccuggguag

SEQ ID NO: 759956 - RNA, 22 nt, Human
uguuuauucauggcuaaugaaa

SEQ ID NO: 759957 - RNA, 19 nt, Human
gaggggaggaauugacaag

SEQ ID NO: 759958 - RNA, 22 nt, Human
ccugaccuccaaguggcucugg

SEQ ID NO: 759959 - RNA, 22 nt, Human
cgaggaagaaguuugagucaag

SEQ ID NO: 759960 - RNA, 22 nt, Human
ugggacaguuguccuccacucu

SEQ ID NO: 759961 - RNA, 22 nt, Human
aggccugccuggagccuggcug

SEQ ID NO: 759962 - RNA, 20 nt, Human
cuguuaaaagguaugaauuc

SEQ ID NO: 759963 - RNA, 22 nt, Human
cugugcuggagaugggccagag

SEQ ID NO: 759964 - RNA, 22 nt, Human
cugggcugcaguuccugguccu

SEQ ID NO: 759965 - RNA, 22 nt, Human
cuacauuucauccagggagagc

SEQ ID NO: 759966 - RNA, 23 nt, Human
agggcuccuuguugauuagcauu

SEQ ID NO: 759967 - RNA, 22 nt, Human
gugagcuguuggaguggcagag

SEQ ID NO: 759968 - RNA, 22 nt, Human
gccagcuggaaaucugcuugaa

SEQ ID NO: 759969 - RNA, 22 nt, Human
ccauggaucuggaucuaucuuu

SEQ ID NO: 759970 - RNA, 22 nt, Human
uugcuggcuugaagauagagga

SEQ ID NO: 759971 - RNA, 22 nt, Human
uccugagaggugugaggugcag

SEQ ID NO: 759972 - RNA, 22 nt, Human
cuuguuaaaaugccgauucuga

SEQ ID NO: 759973 - RNA, 22 nt, Human
ggcuuaagaaaugucuaguuuu

SEQ ID NO: 759974 - RNA, 22 nt, Human
auucuuucauauaaaggcucag

SEQ ID NO: 759975 - RNA, 22 nt, Human
uacagcuaggcaaaaaugacau

SEQ ID NO: 759976 - RNA, 22 nt, Human
auacauuagugaacaaaagaga

SEQ ID NO: 759977 - RNA, 22 nt, Human
cagcuucuauuuaucuuugugu

SEQ ID NO: 759978 - RNA, 22 nt, Human
ggcagucauuuaaucccugcau

SEQ ID NO: 759979 - RNA, 22 nt, Human
ugaagccauuacuguguuaggg

SEQ ID NO: 759980 - RNA, 22 nt, Human
caggcugucugaauggaggccc

SEQ ID NO: 759981 - RNA, 23 nt, Human
uccugaggaauggcaucucacau

SEQ ID NO: 759982 - RNA, 22 nt, Human
cagcuggaggagcagcuuccag

SEQ ID NO: 759983 - RNA, 22 nt, Human
cagccacucucagacaguccca

SEQ ID NO: 759984 - RNA, 22 nt, Human
ucugcagauuuaucagcagcug

SEQ ID NO: 759985 - RNA, 22 nt, Human
ccuuggguuccaagucacugaa

SEQ ID NO: 759986 - RNA, 22 nt, Human
acggcuucuugacuguggguug

SEQ ID NO: 759987 - RNA, 22 nt, Human
uccagccuaauguucuucccac

SEQ ID NO: 759988 - RNA, 22 nt, Human
agagggggugucagcacugcag

SEQ ID NO: 759989 - RNA, 17 nt, Human
aggcauggucuggggug

SEQ ID NO: 759990 - RNA, 22 nt, Human
aaauguucccaauaugaagcug

SEQ ID NO: 759991 - RNA, 22 nt, Human
agcugccaaguuggaguagcaa

SEQ ID NO: 759992 - RNA, 22 nt, Human
acaaugcuguugagacauucuu

SEQ ID NO: 759993 - RNA, 22 nt, Human
agaagcuggaggaagacuaagc

SEQ ID NO: 759994 - RNA, 22 nt, Human
caguccagcccccugcuaaaag

SEQ ID NO: 759995 - RNA, 22 nt, Human
ucagcugagcuccagcucauag

SEQ ID NO: 759996 - RNA, 22 nt, Human
acaggguugaagagcauaaagu

SEQ ID NO: 759997 - RNA, 22 nt, Human
aaguuucuguaugcucuucugu

SEQ ID NO: 759998 - RNA, 22 nt, Human
uacuaaauaguuuaauuccuca

SEQ ID NO: 759999 - RNA, 22 nt, Human
aggaaacaggcagccuuugaac

SEQ ID NO: 760000 - RNA, 22 nt, Human
ggcgaggccgggacaggcugga

SEQ ID NO: 760001 - RNA, 21 nt, Human
ccuuuuugcuuauggacagac

SEQ ID NO: 760002 - RNA, 23 nt, Human
gaggccuggcccugccacaucuc

SEQ ID NO: 760003 - RNA, 22 nt, Human
gcugcuguguuggccacugcuu

SEQ ID NO: 760004 - RNA, 22 nt, Human
auacauacauguaugcacauac

SEQ ID NO: 760005 - RNA, 22 nt, Human
auuuccaauuucauccaugucc

SEQ ID NO: 760006 - RNA, 22 nt, Human
ucagggcaagauugguuaauaa

SEQ ID NO: 760007 - RNA, 22 nt, Human
ggccaccuuccaguugccugca

SEQ ID NO: 760008 - RNA, 22 nt, Human
agguggaaauggcuuuccuagg

SEQ ID NO: 760009 - RNA, 22 nt, Human
acaauagacccaugacacauac

SEQ ID NO: 760010 - RNA, 22 nt, Human
ccuuggcuggaauuacucuggg

SEQ ID NO: 760011 - RNA, 22 nt, Human
gcaaauuaaccaaucaugcucg

SEQ ID NO: 760012 - RNA, 22 nt, Human
acaguauaacuccaugccaccc

SEQ ID NO: 760013 - RNA, 22 nt, Human
gagacacacauucuggagagaa

SEQ ID NO: 760014 - RNA, 22 nt, Human
auuguauuuaggagaaaagggu

SEQ ID NO: 760015 - RNA, 22 nt, Human
aaaugcacaaaguaaguguaau

SEQ ID NO: 760016 - RNA, 18 nt, Human
uggaggaaucacaauggc

SEQ ID NO: 760017 - RNA, 22 nt, Human
gguagcugcagcaggcuggcaa

SEQ ID NO: 760018 - RNA, 22 nt, Human
aggugaaguugaggaggcagaa

SEQ ID NO: 760019 - RNA, 22 nt, Human
ccagcugcccaagaggcauccu

SEQ ID NO: 760020 - RNA, 22 nt, Human
gugaagaccagggaacgcuggc

SEQ ID NO: 760021 - RNA, 22 nt, Human
accuuggaaaugcccauugccu

SEQ ID NO: 760022 - RNA, 19 nt, Human
gagaaagcaggcacagcac

SEQ ID NO: 760023 - RNA, 22 nt, Human
uggagcaugagagucuuuagcu

SEQ ID NO: 760024 - RNA, 22 nt, Human
uugcuuccuugagcuggucuga

SEQ ID NO: 760025 - RNA, 22 nt, Human
gacagcagccacagggagaggg

SEQ ID NO: 760026 - RNA, 22 nt, Human
uuuagcagaucuauguauguga

SEQ ID NO: 760027 - RNA, 22 nt, Human
ccuggcucugcgugcagcuccg

SEQ ID NO: 760028 - RNA, 22 nt, Human
ccugcagcuuugccuccugaac

SEQ ID NO: 760029 - RNA, 22 nt, Human
ggcaggcucagcagccaaggag

SEQ ID NO: 760030 - RNA, 22 nt, Human
aggagagcuggugucuggaauc

SEQ ID NO: 760031 - RNA, 22 nt, Human
auagaucaaugagcaauuuaau

SEQ ID NO: 760032 - RNA, 23 nt, Human
aagcuuccuugacuggccccuag

SEQ ID NO: 760033 - RNA, 22 nt, Human
uuguauuagcuguaaauuuucu

SEQ ID NO: 760034 - RNA, 22 nt, Human
ugggauauaguaaaacaugaau

SEQ ID NO: 760035 - RNA, 21 nt, Human
augugaaaccuuccacgcuga

SEQ ID NO: 760036 - RNA, 22 nt, Human
uuauuauagauuaugcaagauu

SEQ ID NO: 760037 - RNA, 22 nt, Human
ucagugugaguaccaugcucag

SEQ ID NO: 760038 - RNA, 22 nt, Human
agaguaauuucugcugaaaagg

SEQ ID NO: 760039 - RNA, 22 nt, Human
gagaggagucccuaucacaguu

SEQ ID NO: 760040 - RNA, 22 nt, Human
gugcagccauuugcaugcuucc

SEQ ID NO: 760041 - RNA, 22 nt, Human
ucuucagcagggccucucugag

SEQ ID NO: 760042 - RNA, 22 nt, Human
uggcuuucccccagcccaguug

SEQ ID NO: 760043 - RNA, 22 nt, Human
auguaugcaugcuacaguuuuc

SEQ ID NO: 760044 - RNA, 22 nt, Human
cagcuggcuccaccucugggcu

SEQ ID NO: 760045 - RNA, 20 nt, Human
gaguccaggggccuguagca

SEQ ID NO: 760046 - RNA, 22 nt, Human
gagugugugacuucacuuuagc

SEQ ID NO: 760047 - RNA, 22 nt, Human
gaucauuaacaaccuuacccuu

SEQ ID NO: 760048 - RNA, 22 nt, Human
gacagcagggaaaguccagacc

SEQ ID NO: 760049 - RNA, 22 nt, Human
cuggcucuuggcuagggagagu

SEQ ID NO: 760050 - RNA, 22 nt, Human
gccugggacugcagauccccag

SEQ ID NO: 760051 - RNA, 22 nt, Human
ucaggagcagcuguaggaaggg

SEQ ID NO: 760052 - RNA, 22 nt, Human
aguaugaaucuuucagaccgua

SEQ ID NO: 760053 - RNA, 22 nt, Human
ugcuguccuguuuuggaguaau

SEQ ID NO: 760054 - RNA, 22 nt, Human
cacccaggcuggaaugcaaugg

SEQ ID NO: 760055 - RNA, 22 nt, Human
gagaaggcuucuuuuccucuga

SEQ ID NO: 760056 - RNA, 22 nt, Human
uuuggugauagugcagagaaau

SEQ ID NO: 760057 - RNA, 22 nt, Human
uuggcucauuaaagaugauaau

SEQ ID NO: 760058 - RNA, 22 nt, Human
uuuugaagaagaugggaauuua

SEQ ID NO: 760059 - RNA, 22 nt, Human
ggcucugcugguaagaugccuc

SEQ ID NO: 760060 - RNA, 22 nt, Human
uguuuuaagggucaacugucac

SEQ ID NO: 760061 - RNA, 22 nt, Human
aguccuggguucugguguuuug

SEQ ID NO: 760062 - RNA, 22 nt, Human
aauucacaauuauguugggaga

SEQ ID NO: 760063 - RNA, 21 nt, Human
aauugaagauguggagccauu

SEQ ID NO: 760064 - RNA, 23 nt, Human
aggcugccagaaauuggguaagg

SEQ ID NO: 760065 - RNA, 22 nt, Human
ugcaauuuuaauacauuagagg

SEQ ID NO: 760066 - RNA, 22 nt, Human
acuaggaacgggguuugcacuc

SEQ ID NO: 760067 - RNA, 22 nt, Human
uaacagaauagcagaaacagaa

SEQ ID NO: 760068 - RNA, 22 nt, Human
cacugggcguguccugggugag

SEQ ID NO: 760069 - RNA, 22 nt, Human
agcuucuccaucugcccagaga

SEQ ID NO: 760070 - RNA, 22 nt, Human
uaauguuuccagucuaugaugg

SEQ ID NO: 760071 - RNA, 22 nt, Human
acacagguuaaaauaauuggga

SEQ ID NO: 760072 - RNA, 22 nt, Human
aucaggaacguucauggacugu

SEQ ID NO: 760073 - RNA, 22 nt, Human
cuucaauugccaccagcuagca

SEQ ID NO: 760074 - RNA, 22 nt, Human
cagagccucucagaggucagac

SEQ ID NO: 760075 - RNA, 22 nt, Human
agugcugaagacuggcuaggga

SEQ ID NO: 760076 - RNA, 22 nt, Human
agcuggccagaugucccaaaga

SEQ ID NO: 760077 - RNA, 22 nt, Human
uccaaagcaucugagugugcau

SEQ ID NO: 760078 - RNA, 22 nt, Human
ccugggccuugaccucgugggc

SEQ ID NO: 760079 - RNA, 22 nt, Human
ggcccagcacagugcuuggggg

SEQ ID NO: 760080 - RNA, 17 nt, Human
ugcucuguggucuuuua

SEQ ID NO: 760081 - RNA, 22 nt, Human
ccuggccagcgccggcugcucg

SEQ ID NO: 760082 - RNA, 22 nt, Human
uucuguguggguagcuccuguu

SEQ ID NO: 760083 - RNA, 22 nt, Human
ucagaggcagcugauguucugu

SEQ ID NO: 760084 - RNA, 22 nt, Human
ugugccuggagucccugaggag

SEQ ID NO: 760085 - RNA, 22 nt, Human
aaggagucucagcugggccuga

SEQ ID NO: 760086 - RNA, 22 nt, Human
gcagcccaauggacugagacag

SEQ ID NO: 760087 - RNA, 17 nt, Human
uccuggcucugccacug

SEQ ID NO: 760088 - RNA, 22 nt, Human
gaaccccaacuuauaagacaga

SEQ ID NO: 760089 - RNA, 20 nt, Human
cagaggcaaggagacuugga

SEQ ID NO: 760090 - RNA, 22 nt, Human
aagaauguucuuguagucauga

SEQ ID NO: 760091 - RNA, 22 nt, Human
gaguuggcuguucgaagguagc

SEQ ID NO: 760092 - RNA, 22 nt, Human
uuguggaagcccuaugagagac

SEQ ID NO: 760093 - RNA, 22 nt, Human
cuguucugaacugccugcaugc

SEQ ID NO: 760094 - RNA, 22 nt, Human
acuucuuuucaaaucaugcaaa

SEQ ID NO: 760095 - RNA, 22 nt, Human
gugcucugaucugucugacauc

SEQ ID NO: 760096 - RNA, 22 nt, Human
aaaugguaguagcauuccauau

SEQ ID NO: 760097 - RNA, 22 nt, Human
uggcucauauugagugauuucu

SEQ ID NO: 760098 - RNA, 22 nt, Human
gaauccgugugauguggacuag

SEQ ID NO: 760099 - RNA, 23 nt, Human
auugaccuguuuagucucucccu

SEQ ID NO: 760100 - RNA, 22 nt, Human
agugcuccugaagcuugaggca

SEQ ID NO: 760101 - RNA, 22 nt, Human
ucuccaaggcccuacucuauuu

SEQ ID NO: 760102 - RNA, 22 nt, Human
cgccugggaguccacaccugcu

SEQ ID NO: 760103 - RNA, 22 nt, Human
aaaguguuuacauugcuauaag

SEQ ID NO: 760104 - RNA, 22 nt, Human
agucugugaaaagauaggaagu

SEQ ID NO: 760105 - RNA, 21 nt, Human
gaccacagggaaggucuugca

SEQ ID NO: 760106 - RNA, 22 nt, Human
uuaaaaccuagagaucagacag

SEQ ID NO: 760107 - RNA, 22 nt, Human
acaggcaauauauaaauuauga

SEQ ID NO: 760108 - RNA, 22 nt, Human
ucugcagcgugcaggcuggugc

SEQ ID NO: 760109 - RNA, 22 nt, Human
aggcacugacagauucuguguc

SEQ ID NO: 760110 - RNA, 22 nt, Human
aaagcaauugugguuuuuguca

SEQ ID NO: 760111 - RNA, 22 nt, Human
ccuuucuguguugcccuauuug

SEQ ID NO: 760112 - RNA, 22 nt, Human
uaggaaaugcugucuuauugua

SEQ ID NO: 760113 - RNA, 22 nt, Human
aggcccuguuaugagccacugu

SEQ ID NO: 760114 - RNA, 22 nt, Human
agcagagcugcaguggccugcu

SEQ ID NO: 760115 - RNA, 22 nt, Human
ugguguguuagagcucagggca

SEQ ID NO: 760116 - RNA, 22 nt, Human
uuggcaccucccuaggaagaag

SEQ ID NO: 760117 - RNA, 23 nt, Human
uuucaguugagaaugcacggacc

SEQ ID NO: 760118 - RNA, 22 nt, Human
uggcucuggccaccgggagggc

SEQ ID NO: 760119 - RNA, 22 nt, Human
cugaggcauguuacaggacaua

SEQ ID NO: 760120 - RNA, 22 nt, Human
gauuuuauauggcauacugugg

SEQ ID NO: 760121 - RNA, 22 nt, Human
cucuguccuugcacaguuccua

SEQ ID NO: 760122 - RNA, 22 nt, Human
uucaucauugccagucuuuaaa

SEQ ID NO: 760123 - RNA, 22 nt, Human
ugcuggcauuucaggacucacc

SEQ ID NO: 760124 - RNA, 22 nt, Human
ucaaaugcacguagagaaaaua

SEQ ID NO: 760125 - RNA, 22 nt, Human
ugugagagagugcauuugcaua

SEQ ID NO: 760126 - RNA, 22 nt, Human
cugcagcagaauaaucugcuca

SEQ ID NO: 760127 - RNA, 22 nt, Human
cugaagcuuaguuuacgcucca

SEQ ID NO: 760128 - RNA, 22 nt, Human
uggcugggcccccaccugccuc

SEQ ID NO: 760129 - RNA, 22 nt, Human
ugauuuaggaaacagcuacagg

SEQ ID NO: 760130 - RNA, 22 nt, Human
uagcacugagucuagcuuugga

SEQ ID NO: 760131 - RNA, 22 nt, Human
cacagcagggcauggcuguugu

SEQ ID NO: 760132 - RNA, 22 nt, Human
cagccucugacaccacagucgu

SEQ ID NO: 760133 - RNA, 22 nt, Human
ugauucugucuccuucacuccg

SEQ ID NO: 760134 - RNA, 22 nt, Human
ccagccuggguguuagaagaca

SEQ ID NO: 760135 - RNA, 22 nt, Human
ucagcaguguaguuuaucauuc

SEQ ID NO: 760136 - RNA, 22 nt, Human
ccagagaccagaacauggggau

SEQ ID NO: 760137 - RNA, 22 nt, Human
agugcaugcgcuugggaggggu

SEQ ID NO: 760138 - RNA, 22 nt, Human
ggcgggagauggggccguucag

SEQ ID NO: 760139 - RNA, 23 nt, Human
cuucaugagagcccugaggaaaa

SEQ ID NO: 760140 - RNA, 22 nt, Human
agaauuguaagcaauuugauua

SEQ ID NO: 760141 - RNA, 22 nt, Human
gaagccacagagauuguggggg

SEQ ID NO: 760142 - RNA, 22 nt, Human
aacauugcaaauaagcuugcag

SEQ ID NO: 760143 - RNA, 22 nt, Human
cuccccagcucgcgggugacgg

SEQ ID NO: 760144 - RNA, 22 nt, Human
uggcucagaaggcugccuucac

SEQ ID NO: 760145 - RNA, 22 nt, Human
gcagagugagauaugaacccag

SEQ ID NO: 760146 - RNA, 22 nt, Human
auuaucuugauaaaauggcagu

SEQ ID NO: 760147 - RNA, 22 nt, Human
uagagcagauagugaaacagaa

SEQ ID NO: 760148 - RNA, 22 nt, Human
uaauugucccugcaguuaggau

SEQ ID NO: 760149 - RNA, 22 nt, Human
agagcccuggagggcagucccg

SEQ ID NO: 760150 - RNA, 23 nt, Human
ggcagauuugguuuguuuuaaua

SEQ ID NO: 760151 - RNA, 22 nt, Human
gagcagagucuauuuccacacu

SEQ ID NO: 760152 - RNA, 22 nt, Human
augagggaggcaaggagaugcu

SEQ ID NO: 760153 - RNA, 22 nt, Human
gcccugccugccgguguggguc

SEQ ID NO: 760154 - RNA, 22 nt, Human
gucaugugaauaaguguggggu

SEQ ID NO: 760155 - RNA, 21 nt, Human
agagcacagguggacaaugcu

SEQ ID NO: 760156 - RNA, 22 nt, Human
cacagcugaccacccugcuccc

SEQ ID NO: 760157 - RNA, 22 nt, Human
aaagagaaacuuagaagccuga

SEQ ID NO: 760158 - RNA, 22 nt, Human
cggggugggaauagaccugucu

SEQ ID NO: 760159 - RNA, 22 nt, Human
ggcaggcuccaagcauccuaug

SEQ ID NO: 760160 - RNA, 22 nt, Human
aauaacagagaaggguggcuuc

SEQ ID NO: 760161 - RNA, 22 nt, Human
ggcagucagugugguucauaaa

SEQ ID NO: 760162 - RNA, 22 nt, Human
uugugauacugagcuuggcauu

SEQ ID NO: 760163 - RNA, 22 nt, Human
ucucaaaucaaacuuugagcuu

SEQ ID NO: 760164 - RNA, 22 nt, Human
auagcuuuuugucauagagucu

SEQ ID NO: 760165 - RNA, 22 nt, Human
cuguuuccugucuucucacuau

SEQ ID NO: 760166 - RNA, 22 nt, Human
cuacaaauauaaaacacagaua

SEQ ID NO: 760167 - RNA, 22 nt, Human
caugugaauuccaaagcuaggu

SEQ ID NO: 760168 - RNA, 22 nt, Human
acagauggagcuacuagguaaa

SEQ ID NO: 760169 - RNA, 22 nt, Human
cagggagggaggaaaauuugcu

SEQ ID NO: 760170 - RNA, 23 nt, Human
uuguaaaacagugugacgguucc

SEQ ID NO: 760171 - RNA, 22 nt, Human
uuuggggcucagcaggcuguuu

SEQ ID NO: 760172 - RNA, 19 nt, Human
gucagcaccauggacaggg

SEQ ID NO: 760173 - RNA, 22 nt, Human
uuacaggggacauuggggacau

SEQ ID NO: 760174 - RNA, 22 nt, Human
cuccaggccauggcugcggagg

SEQ ID NO: 760175 - RNA, 21 nt, Human
agcaggugcuguuggaggaaa

SEQ ID NO: 760176 - RNA, 20 nt, Human
aaguuuaggggaaagugaca

SEQ ID NO: 760177 - RNA, 22 nt, Human
augaugguaaauucaguauccg

SEQ ID NO: 760178 - RNA, 20 nt, Human
uagggagauaugcucuuuuc

SEQ ID NO: 760179 - RNA, 22 nt, Human
uccacccccagacagcugguga

SEQ ID NO: 760180 - RNA, 22 nt, Human
ugcaauaauguaugucacuccc

SEQ ID NO: 760181 - RNA, 22 nt, Human
augcagcugacauuuucauguu

SEQ ID NO: 760182 - RNA, 22 nt, Human
cuuauuuguacuaauaaaucug

SEQ ID NO: 760183 - RNA, 19 nt, Human
ccuagagggaaggcaggac

SEQ ID NO: 760184 - RNA, 22 nt, Human
uguguaaagcuuguuccagaaa

SEQ ID NO: 760185 - RNA, 22 nt, Human
cagguccagucacuggucugca

SEQ ID NO: 760186 - RNA, 22 nt, Human
ucucucagaacugcagcugcag

SEQ ID NO: 760187 - RNA, 22 nt, Human
uucucuguggauugggugagag

SEQ ID NO: 760188 - RNA, 22 nt, Human
gcagguguggaguggggugagc

SEQ ID NO: 760189 - RNA, 22 nt, Human
guucuuuugguagagugugcau

SEQ ID NO: 760190 - RNA, 22 nt, Human
cuggggagugaaauucuuaaau

SEQ ID NO: 760191 - RNA, 22 nt, Human
ucugcugugggucuauauuuua

SEQ ID NO: 760192 - RNA, 22 nt, Human
aguacacucaagaaaccgguaa

SEQ ID NO: 760193 - RNA, 22 nt, Human
uugcauuugaucuuggguucuc

SEQ ID NO: 760194 - RNA, 22 nt, Human
ugucucuuuggguuccucuugg

SEQ ID NO: 760195 - RNA, 22 nt, Human
ccaugagccaggcugaggaagc

SEQ ID NO: 760196 - RNA, 22 nt, Human
aauuuguggccacauuguggaa

SEQ ID NO: 760197 - RNA, 22 nt, Human
uggcaaaguaucugucccagcu

SEQ ID NO: 760198 - RNA, 22 nt, Human
aacaauaauugcgguucucuau

SEQ ID NO: 760199 - RNA, 22 nt, Human
uccaccaggcuccauguucagu

SEQ ID NO: 760200 - RNA, 22 nt, Human
cagagacaggaaucagcugcag

SEQ ID NO: 760201 - RNA, 22 nt, Human
ucaggcugugggcacuggccau

SEQ ID NO: 760202 - RNA, 22 nt, Human
cauuuacuuaaaucuuuacaag

SEQ ID NO: 760203 - RNA, 22 nt, Human
ucugucccugagagcucaggag

SEQ ID NO: 760204 - RNA, 22 nt, Human
aaucuuuuucacaagaaagcac

SEQ ID NO: 760205 - RNA, 22 nt, Human
uagcagcuguggaggggcugug

SEQ ID NO: 760206 - RNA, 19 nt, Human
ggcauccagaacuaccagu

SEQ ID NO: 760207 - RNA, 22 nt, Human
aggaccugcuaaugugccaagu

SEQ ID NO: 760208 - RNA, 22 nt, Human
aaugacagagauagaagggaug

SEQ ID NO: 760209 - RNA, 22 nt, Human
uuuguguuuaauacaaggaccu

SEQ ID NO: 760210 - RNA, 22 nt, Human
ucaggagaacuuccuucuaccc

SEQ ID NO: 760211 - RNA, 23 nt, Human
agcacuuguaucuuacuaaaaug

SEQ ID NO: 760212 - RNA, 22 nt, Human
gcagcuggcucagagagguggg

SEQ ID NO: 760213 - RNA, 22 nt, Human
ucagaacacuuucucuacugac

SEQ ID NO: 760214 - RNA, 22 nt, Human
cccagcucugcagaccugcccu

SEQ ID NO: 760215 - RNA, 22 nt, Human
acaaagugcacaagaugagaac

SEQ ID NO: 760216 - RNA, 22 nt, Human
gaauggcugaaugucuuaaauu

SEQ ID NO: 760217 - RNA, 22 nt, Human
gccuucaggaaaucaguccuug

SEQ ID NO: 760218 - RNA, 22 nt, Human
uuucucucuuaaggaguuuaaa

SEQ ID NO: 760219 - RNA, 22 nt, Human
uauuucuguaacucagggucug

SEQ ID NO: 760220 - RNA, 22 nt, Human
caugucuguguacacaugcaca

SEQ ID NO: 760221 - RNA, 22 nt, Human
uccucuuccuucuguccaaaug

SEQ ID NO: 760222 - RNA, 22 nt, Human
agcagcucgggcuacagagggg

SEQ ID NO: 760223 - RNA, 22 nt, Human
ugaaguacccguuuuuauugca

SEQ ID NO: 760224 - RNA, 22 nt, Human
gaaguagcauguugcugccaga

SEQ ID NO: 760225 - RNA, 22 nt, Human
guggccaggagaccuugggcau

SEQ ID NO: 760226 - RNA, 22 nt, Human
ucuugauuuugugaauaaguug

SEQ ID NO: 760227 - RNA, 22 nt, Human
gcugagcaggguggggaaaggc

SEQ ID NO: 760228 - RNA, 22 nt, Human
uuagcuuuugagaaugauuucu

SEQ ID NO: 760229 - RNA, 22 nt, Human
ggaggcuccacugcucuuccug

SEQ ID NO: 760230 - RNA, 22 nt, Human
cuguacagcaaguucaccuugg

SEQ ID NO: 760231 - RNA, 22 nt, Human
ggaggccaaggagggcggauca

SEQ ID NO: 760232 - RNA, 22 nt, Human
ucaggcugaggucaucugcauc

SEQ ID NO: 760233 - RNA, 22 nt, Human
gagggugacaguucuggucucu

SEQ ID NO: 760234 - RNA, 22 nt, Human
cuguggaaaauuuguauguaau

SEQ ID NO: 760235 - RNA, 22 nt, Human
auaaaaguucaagagaguacag

SEQ ID NO: 760236 - RNA, 22 nt, Human
aaguacacaucguuggccccga

SEQ ID NO: 760237 - RNA, 22 nt, Human
ccaggguaccccaagggcaggu

SEQ ID NO: 760238 - RNA, 22 nt, Human
uucuauugggcagcauugcuuc

SEQ ID NO: 760239 - RNA, 22 nt, Human
aggccugcugucuugaggccaa

SEQ ID NO: 760240 - RNA, 20 nt, Human
aucaggaagagagacugacc

SEQ ID NO: 760241 - RNA, 19 nt, Human
cuguggcugaccucuggcc

SEQ ID NO: 760242 - RNA, 22 nt, Human
aacaugaugacauuguaagcuu

SEQ ID NO: 760243 - RNA, 22 nt, Human
gcucagccgaacuucagagcag

SEQ ID NO: 760244 - RNA, 21 nt, Human
ggcagagaagcuggaaguugg

SEQ ID NO: 760245 - RNA, 23 nt, Human
gcugggcuuacucuuucagugag

SEQ ID NO: 760246 - RNA, 22 nt, Human
cuaucucuuguuuuccugaagc

SEQ ID NO: 760247 - RNA, 22 nt, Human
aguccugaugcucuggcaggag

SEQ ID NO: 760248 - RNA, 22 nt, Human
uuccugagacccucacagugau

SEQ ID NO: 760249 - RNA, 22 nt, Human
ccauugaauccucagcugcuag

SEQ ID NO: 760250 - RNA, 22 nt, Human
ugaauacacuaaaaaucacuuu

SEQ ID NO: 760251 - RNA, 22 nt, Human
cauggcugaaauucuucgcuug

SEQ ID NO: 760252 - RNA, 22 nt, Human
augcuuccuaaccauggccgug

SEQ ID NO: 760253 - RNA, 22 nt, Human
ccagggcucuaugaggguggag

SEQ ID NO: 760254 - RNA, 22 nt, Human
auaaggcaagcugucaguuugu

SEQ ID NO: 760255 - RNA, 22 nt, Human
agaaagcuccccaugagaugau

SEQ ID NO: 760256 - RNA, 22 nt, Human
aggcuggugcuuccuagggcag

SEQ ID NO: 760257 - RNA, 22 nt, Human
ugcaacaggagaguucagggca

SEQ ID NO: 760258 - RNA, 22 nt, Human
cagggcugaacugagcuuguga

SEQ ID NO: 760259 - RNA, 22 nt, Human
ccuguacaagcucuuggugaca

SEQ ID NO: 760260 - RNA, 22 nt, Human
ccaggaagacacaugcucaucc

SEQ ID NO: 760261 - RNA, 22 nt, Human
uccuccacgauggcacaccugg

SEQ ID NO: 760262 - RNA, 22 nt, Human
gaguaacauaccaaaauucaca

SEQ ID NO: 760263 - RNA, 22 nt, Human
gcaggaacuggagcuggauguu

SEQ ID NO: 760264 - RNA, 22 nt, Human
ucacaugcuugaggaaagaaaa

SEQ ID NO: 760265 - RNA, 22 nt, Human
cauggcuugucuugucuucuga

SEQ ID NO: 760266 - RNA, 23 nt, Human
ggcuugagcuggaacagcuuggu

SEQ ID NO: 760267 - RNA, 23 nt, Human
ugucuggggcgccagaagagaga

SEQ ID NO: 760268 - RNA, 22 nt, Human
uuggagagugauauucagaugc

SEQ ID NO: 760269 - RNA, 22 nt, Human
ugcugagggagggguuuuccag

SEQ ID NO: 760270 - RNA, 22 nt, Human
uauaguuaguuucauaaucaug

SEQ ID NO: 760271 - RNA, 22 nt, Human
gaagacacuaaacuggggcuuc

SEQ ID NO: 760272 - RNA, 22 nt, Human
ccuaaggaccagggcuuccagc

SEQ ID NO: 760273 - RNA, 22 nt, Human
gggucuggagggcagcccuucu

SEQ ID NO: 760274 - RNA, 22 nt, Human
gauuuuaauuauaggagguccu

SEQ ID NO: 760275 - RNA, 22 nt, Human
cacuggaggucaguggagcacu

SEQ ID NO: 760276 - RNA, 22 nt, Human
gcugcccucccagggcaagcuu

SEQ ID NO: 760277 - RNA, 22 nt, Human
uuucuuucucguaaacuuaguu

SEQ ID NO: 760278 - RNA, 22 nt, Human
aagcacaauuuaggacugaaau

SEQ ID NO: 760279 - RNA, 19 nt, Human
ggucagagagauccaggcu

SEQ ID NO: 760280 - RNA, 22 nt, Human
gcuggcucccagaggccccagc

SEQ ID NO: 760281 - RNA, 20 nt, Human
uaggcagagcugugcagccu

SEQ ID NO: 760282 - RNA, 22 nt, Human
ucuuuuuauauugacaaaaggu

SEQ ID NO: 760283 - RNA, 23 nt, Human
agcugggcaaggauccgggcucc

SEQ ID NO: 760284 - RNA, 22 nt, Human
ucagcucuuaacccucuggccu

SEQ ID NO: 760285 - RNA, 22 nt, Human
uuggccuucugguguucauuuu

SEQ ID NO: 760286 - RNA, 22 nt, Human
uucagggcagcuagaaccagga

SEQ ID NO: 760287 - RNA, 22 nt, Human
augaaagaugauuuaaaguacu

SEQ ID NO: 760288 - RNA, 22 nt, Human
agagaccuuucuccugccuuuc

SEQ ID NO: 760289 - RNA, 22 nt, Human
cucagagcccaggguacacccg

SEQ ID NO: 760290 - RNA, 22 nt, Human
ucugggaaccaaagggugcuua

SEQ ID NO: 760291 - RNA, 22 nt, Human
auuccacagaggacuccgauug

SEQ ID NO: 760292 - RNA, 22 nt, Human
ccagggaagauuagaagccacu

SEQ ID NO: 760293 - RNA, 22 nt, Human
ucuuuguuuguacuguuagaau

SEQ ID NO: 760294 - RNA, 22 nt, Human
agaugcuuaaguuuucagugua

SEQ ID NO: 760295 - RNA, 18 nt, Human
cagcugaggaccaaacug

SEQ ID NO: 760296 - RNA, 22 nt, Human
ugucugaaucucgguuuccuca

SEQ ID NO: 760297 - RNA, 22 nt, Human
guucuucagcccucagguccua

SEQ ID NO: 760298 - RNA, 22 nt, Human
uagagcuuggacugcauuuucg

SEQ ID NO: 760299 - RNA, 22 nt, Human
aaaugacagaguaagcuguuua

SEQ ID NO: 760300 - RNA, 22 nt, Human
agcagaaagcuuauuuugacug

SEQ ID NO: 760301 - RNA, 17 nt, Human
agugaaauuuacauugc

SEQ ID NO: 760302 - RNA, 22 nt, Human
cuccucuggguccugguggcca

SEQ ID NO: 760303 - RNA, 22 nt, Human
gcagggccagggcucaggcugu

SEQ ID NO: 760304 - RNA, 22 nt, Human
uuuagugccugggccaguucca

SEQ ID NO: 760305 - RNA, 22 nt, Human
ccaaaauaacagcccaauucac

SEQ ID NO: 760306 - RNA, 22 nt, Human
ugccaggcuccggaacgacagu

SEQ ID NO: 760307 - RNA, 22 nt, Human
cugccuggcuaaacucaagucg

SEQ ID NO: 760308 - RNA, 22 nt, Human
caugccuguaaucccagcucuu

SEQ ID NO: 760309 - RNA, 22 nt, Human
aacaguaugugagauuuacaca

SEQ ID NO: 760310 - RNA, 22 nt, Human
ggggcugacgggcauguggcuu

SEQ ID NO: 760311 - RNA, 22 nt, Human
aacaucaguauucucaucugua

SEQ ID NO: 760312 - RNA, 22 nt, Human
aagggugaagggugguggccua

SEQ ID NO: 760313 - RNA, 22 nt, Human
agugucaacugucuacagggag

SEQ ID NO: 760314 - RNA, 22 nt, Human
uuugcagugauucuugcaguga

SEQ ID NO: 760315 - RNA, 22 nt, Human
uuccuuuagugucauauacuuu

SEQ ID NO: 760316 - RNA, 22 nt, Human
ugaggcucacgaacagaagacu

SEQ ID NO: 760317 - RNA, 19 nt, Human
ugacugccucaggggugga

SEQ ID NO: 760318 - RNA, 22 nt, Human
acgcccggucuccauaguuuuu

SEQ ID NO: 760319 - RNA, 22 nt, Human
cauuuaauccauagaggaaugu

SEQ ID NO: 760320 - RNA, 22 nt, Human
cacugcugauuucauaggcagg

SEQ ID NO: 760321 - RNA, 22 nt, Human
uuucacaagacagcuacuguug

SEQ ID NO: 760322 - RNA, 22 nt, Human
aggggcuggaguucgagguuac

SEQ ID NO: 760323 - RNA, 22 nt, Human
agugcagaguacauuuguggca

SEQ ID NO: 760324 - RNA, 22 nt, Human
caaaccaguaggaagucuauua

SEQ ID NO: 760325 - RNA, 22 nt, Human
aggcuucuaggguuggcagcgg

SEQ ID NO: 760326 - RNA, 22 nt, Human
ccaggagggugguuacucaauc

SEQ ID NO: 760327 - RNA, 22 nt, Human
cuuauuuugcugaugacccagg

SEQ ID NO: 760328 - RNA, 22 nt, Human
gcaccagcugcaggguggcuga

SEQ ID NO: 760329 - RNA, 22 nt, Human
uguuuacuccagcugauggaac

SEQ ID NO: 760330 - RNA, 22 nt, Human
ccacaguaaagaaacaacuucg

SEQ ID NO: 760331 - RNA, 22 nt, Human
uuccaggaagcaguuagcagcc

SEQ ID NO: 760332 - RNA, 22 nt, Human
cuggccagagguuccucugccc

SEQ ID NO: 760333 - RNA, 22 nt, Human
cccacucccugcacgccugccg

SEQ ID NO: 760334 - RNA, 22 nt, Human
ccagcaagccaggucuguggcu

SEQ ID NO: 760335 - RNA, 22 nt, Human
aaggcagagauuagcagaauga

SEQ ID NO: 760336 - RNA, 22 nt, Human
gugggggacccaggugcugucc

SEQ ID NO: 760337 - RNA, 22 nt, Human
ucuguucuuggugcagcuggga

SEQ ID NO: 760338 - RNA, 22 nt, Human
uuucucuccccaaguggaauug

SEQ ID NO: 760339 - RNA, 22 nt, Human
guaggagcucauggggccagga

SEQ ID NO: 760340 - RNA, 22 nt, Human
aauaacuugaagaucucuucca

SEQ ID NO: 760341 - RNA, 22 nt, Human
uccuucagaaccugugauggaa

SEQ ID NO: 760342 - RNA, 22 nt, Human
aagucagagaugccaaagauua

SEQ ID NO: 760343 - RNA, 22 nt, Human
gcagcugcaagcacuucuggca

SEQ ID NO: 760344 - RNA, 22 nt, Human
uucucagguagugcugaugcug

SEQ ID NO: 760345 - RNA, 19 nt, Human
guuucauuaagauaggaaa

SEQ ID NO: 760346 - RNA, 22 nt, Human
aggguccauguuuccaguuaau

SEQ ID NO: 760347 - RNA, 22 nt, Human
ccaggaggggucucugucuccc

SEQ ID NO: 760348 - RNA, 22 nt, Human
ugaccugacaugaauuaaaaac

SEQ ID NO: 760349 - RNA, 22 nt, Human
uuucacagaggaggaagcugag

SEQ ID NO: 760350 - RNA, 21 nt, Human
ucccacagcgccagcuccugu

SEQ ID NO: 760351 - RNA, 21 nt, Human
ugcaauuuagacuugaacauu

SEQ ID NO: 760352 - RNA, 17 nt, Human
aauagcugcucagagag

SEQ ID NO: 760353 - RNA, 22 nt, Human
ccuuuaaguccucuuuuauauu

SEQ ID NO: 760354 - RNA, 22 nt, Human
cagcagaaauggauuuugagau

SEQ ID NO: 760355 - RNA, 22 nt, Human
cauuuauucagcucagucgguu

SEQ ID NO: 760356 - RNA, 22 nt, Human
gccaggggugcccacccaagga

SEQ ID NO: 760357 - RNA, 22 nt, Human
gaagccuugaacugcaaacccc

SEQ ID NO: 760358 - RNA, 22 nt, Human
gcucaccucgcugcaggugggu

SEQ ID NO: 760359 - RNA, 19 nt, Human
cuuugccacugauaggagu

SEQ ID NO: 760360 - RNA, 22 nt, Human
uggaaaacaaagcucucauuau

SEQ ID NO: 760361 - RNA, 22 nt, Human
cuggaaugucugcucaauguuu

SEQ ID NO: 760362 - RNA, 22 nt, Human
acucuggcaagcuuccacuucc

SEQ ID NO: 760363 - RNA, 21 nt, Human
uuagcuuucuagaaucuuugu

SEQ ID NO: 760364 - RNA, 22 nt, Human
aguccuggugacacuccucuuc

SEQ ID NO: 760365 - RNA, 21 nt, Human
auggagccuaagaguggaggu

SEQ ID NO: 760366 - RNA, 22 nt, Human
gaggcagcgggucaggaccgug

SEQ ID NO: 760367 - RNA, 19 nt, Human
cccugaggcaaaagccuuu

SEQ ID NO: 760368 - RNA, 23 nt, Human
ucagaaugcacugaauuuacccu

SEQ ID NO: 760369 - RNA, 22 nt, Human
auggaacaugaauuaauauggu

SEQ ID NO: 760370 - RNA, 22 nt, Human
uuacauguuuauggggguacau

SEQ ID NO: 760371 - RNA, 22 nt, Human
cucagcaguauacucugaagau

SEQ ID NO: 760372 - RNA, 17 nt, Human
cagugcagauaagugag

SEQ ID NO: 760373 - RNA, 22 nt, Human
ugcaggaagacuucccaagcca

SEQ ID NO: 760374 - RNA, 22 nt, Human
gcacuugggcagagacgcacag

SEQ ID NO: 760375 - RNA, 22 nt, Human
uaugcuauuuuaaugaagaugu

SEQ ID NO: 760376 - RNA, 22 nt, Human
cucccuucaggagaggcucaca

SEQ ID NO: 760377 - RNA, 22 nt, Human
uacaugaagaugaauguauggc

SEQ ID NO: 760378 - RNA, 22 nt, Human
agugucuuacaugaauugauuu

SEQ ID NO: 760379 - RNA, 22 nt, Human
gggugcugggaggcugacaucu

SEQ ID NO: 760380 - RNA, 22 nt, Human
aguagcagugacagcugaggua

SEQ ID NO: 760381 - RNA, 22 nt, Human
caaauuuaaguuagaaagcaau

SEQ ID NO: 760382 - RNA, 22 nt, Human
agaaaugugagccccuuaucaa

SEQ ID NO: 760383 - RNA, 22 nt, Human
gaggaagugcguuaugccuuuu

SEQ ID NO: 760384 - RNA, 18 nt, Human
gaaaggagagacaguagg

SEQ ID NO: 760385 - RNA, 22 nt, Human
uuaucugucuaucaagacuagc

SEQ ID NO: 760386 - RNA, 19 nt, Human
ccuggcucugagcccagcc

SEQ ID NO: 760387 - RNA, 22 nt, Human
aaacaugaguuaaaaguaacug

SEQ ID NO: 760388 - RNA, 22 nt, Human
uucuucuuuccuauaauuaauu

SEQ ID NO: 760389 - RNA, 22 nt, Human
uagaaacacagaucugguguca

SEQ ID NO: 760390 - RNA, 22 nt, Human
acucaaauuugucaacugaagc

SEQ ID NO: 760391 - RNA, 22 nt, Human
auacaaugagugagugaauggg

SEQ ID NO: 760392 - RNA, 22 nt, Human
gcaggcauggucgcugccaggu

SEQ ID NO: 760393 - RNA, 22 nt, Human
uccuggaggaauaaguuuucca

SEQ ID NO: 760394 - RNA, 22 nt, Human
cagcugugaauugucuuaucua

SEQ ID NO: 760395 - RNA, 22 nt, Human
gccugggauucucaaaggggug

SEQ ID NO: 760396 - RNA, 22 nt, Human
uguccuggggcgacuuggggcc

SEQ ID NO: 760397 - RNA, 22 nt, Human
ugugauuauauuguaguacauu

SEQ ID NO: 760398 - RNA, 21 nt, Human
uaucacaguagaauaggaucu

SEQ ID NO: 760399 - RNA, 21 nt, Human
uguucaaacguacacauuucu

SEQ ID NO: 760400 - RNA, 22 nt, Human
uuccuuguggaaacuauggacg

SEQ ID NO: 760401 - RNA, 22 nt, Human
uggaagacaguugaugggaguu

SEQ ID NO: 760402 - RNA, 22 nt, Human
aggaucuucauugugcugcaaa

SEQ ID NO: 760403 - RNA, 19 nt, Human
uuagaaacuguugacacug

SEQ ID NO: 760404 - RNA, 22 nt, Human
acucauguuuucucuagcugga

SEQ ID NO: 760405 - RNA, 22 nt, Human
ucucauguuuuaccuguccuca

SEQ ID NO: 760406 - RNA, 17 nt, Human
uagcccauggcugccag

SEQ ID NO: 760407 - RNA, 22 nt, Human
uuuaaucuauucccuaaacacc

SEQ ID NO: 760408 - RNA, 22 nt, Human
ucacauuuuccuugguaucugu

SEQ ID NO: 760409 - RNA, 22 nt, Human
gccuccuaccacacccucaguc

SEQ ID NO: 760410 - RNA, 22 nt, Human
gagcagcuaaaauucucaugca

SEQ ID NO: 760411 - RNA, 22 nt, Human
uggacuggaaugcugauccucu

SEQ ID NO: 760412 - RNA, 22 nt, Human
agcuagaaguccuagauaaagg

SEQ ID NO: 760413 - RNA, 22 nt, Human
gguagcaagcgcuugcccugcg

SEQ ID NO: 760414 - RNA, 22 nt, Human
gauuucuaguucauuaucuauu

SEQ ID NO: 760415 - RNA, 22 nt, Human
cauacaguuuucccuagaugug

SEQ ID NO: 760416 - RNA, 22 nt, Human
uauaaaauucucaguuuggggu

SEQ ID NO: 760417 - RNA, 23 nt, Human
uggccaggguacuacacccaccc

SEQ ID NO: 760418 - RNA, 23 nt, Human
gaggagggucgugcuguguuccu

SEQ ID NO: 760419 - RNA, 18 nt, Human
cagcagagacauucaaaa

SEQ ID NO: 760420 - RNA, 22 nt, Human
gcaggagguugagccaggacug

SEQ ID NO: 760421 - RNA, 22 nt, Human
uuaucaguuguguguauacacg

SEQ ID NO: 760422 - RNA, 20 nt, Human
agcuucuucugucuaauuuu

SEQ ID NO: 760423 - RNA, 22 nt, Human
ugggcugccagcucuccagaug

SEQ ID NO: 760424 - RNA, 22 nt, Human
gaaugauagagcugccuucgga

SEQ ID NO: 760425 - RNA, 22 nt, Human
ucccccucauuaccucauucaa

SEQ ID NO: 760426 - RNA, 22 nt, Human
cuugggcuuagaagguaaguga

SEQ ID NO: 760427 - RNA, 22 nt, Human
uccaggcauguggccaguacuc

SEQ ID NO: 760428 - RNA, 22 nt, Human
aaauacuguccaccauggagca

SEQ ID NO: 760429 - RNA, 19 nt, Human
uggaggccaggacacaggu

SEQ ID NO: 760430 - RNA, 21 nt, Human
uguuuacucccugcaagcacg

SEQ ID NO: 760431 - RNA, 22 nt, Human
gucugaggucauuagcucucuu

SEQ ID NO: 760432 - RNA, 22 nt, Human
gggagcugugggauugguugag

SEQ ID NO: 760433 - RNA, 22 nt, Human
acuuuacacaucuuuucucauu

SEQ ID NO: 760434 - RNA, 22 nt, Human
caucuuuauuuauauagacagg

SEQ ID NO: 760435 - RNA, 22 nt, Human
agggccacgugcaccgcggucu

SEQ ID NO: 760436 - RNA, 22 nt, Human
ugggaaaguguagccugcaggc

SEQ ID NO: 760437 - RNA, 18 nt, Human
uccagagcuacuguggug

SEQ ID NO: 760438 - RNA, 22 nt, Human
acagugaugagggaauuuugug

SEQ ID NO: 760439 - RNA, 22 nt, Human
uggaaugaaggagauggccuuu

SEQ ID NO: 760440 - RNA, 21 nt, Human
uuacaaagcuacagauguugc

SEQ ID NO: 760441 - RNA, 22 nt, Human
ccuggucagguaacugggcuga

SEQ ID NO: 760442 - RNA, 22 nt, Human
ugcacgugugagcauucacaug

SEQ ID NO: 760443 - RNA, 22 nt, Human
acaggcuuacaggcugcaagua

SEQ ID NO: 760444 - RNA, 23 nt, Human
uuucuucagaagccuugcgaggc

SEQ ID NO: 760445 - RNA, 22 nt, Human
gccuggcucugagggagcuccu

SEQ ID NO: 760446 - RNA, 22 nt, Human
uggaggaaaauuacuggggucu

SEQ ID NO: 760447 - RNA, 22 nt, Human
cuuguggagugccugcugcagu

SEQ ID NO: 760448 - RNA, 22 nt, Human
uguacuugaacuugacuguaga

SEQ ID NO: 760449 - RNA, 22 nt, Human
uucucaugaaacucgcuuccuc

SEQ ID NO: 760450 - RNA, 22 nt, Human
uucaaaguugcaugacagcuua

SEQ ID NO: 760451 - RNA, 22 nt, Human
aauuuaaggaggccuucacucu

SEQ ID NO: 760452 - RNA, 22 nt, Human
uugggguguuggauggagcaag

SEQ ID NO: 760453 - RNA, 22 nt, Human
auaaucauucacauaaggugcu

SEQ ID NO: 760454 - RNA, 22 nt, Human
cagcuuuaccaauauuuggaaa

SEQ ID NO: 760455 - RNA, 22 nt, Human
cucuggcuguuugcagcucaag

SEQ ID NO: 760456 - RNA, 22 nt, Human
aagggcugcuguagaagcagag

SEQ ID NO: 760457 - RNA, 20 nt, Human
caaaucacagguaauugcaa

SEQ ID NO: 760458 - RNA, 22 nt, Human
ugucaugaugugcacaccacag

SEQ ID NO: 760459 - RNA, 22 nt, Human
agcaggcuuucaagagucuucu

SEQ ID NO: 760460 - RNA, 22 nt, Human
aaaggucuugucuugacagagu

SEQ ID NO: 760461 - RNA, 22 nt, Human
aucugucuaugauauagucugu

SEQ ID NO: 760462 - RNA, 21 nt, Human
aggagccauguggucugaugg

SEQ ID NO: 760463 - RNA, 22 nt, Human
cagagggaccagaacauacugu

SEQ ID NO: 760464 - RNA, 19 nt, Human
auucauuggccaggguggu

SEQ ID NO: 760465 - RNA, 22 nt, Human
uuauuacacugaaagaauugcg

SEQ ID NO: 760466 - RNA, 22 nt, Human
aacugcaauuacuuuugcacua

SEQ ID NO: 760467 - RNA, 22 nt, Human
aggcagauuuucuuuacucagu

SEQ ID NO: 760468 - RNA, 22 nt, Human
agggaggaaggaacuccuucua

SEQ ID NO: 760469 - RNA, 22 nt, Human
aagauuuccuggauguaauucc

SEQ ID NO: 760470 - RNA, 22 nt, Human
acaguguccuuguggucccugu

SEQ ID NO: 760471 - RNA, 22 nt, Human
ucuucaaagaagccuuggauua

SEQ ID NO: 760472 - RNA, 22 nt, Human
cccacguugaaccgcuuacaga

SEQ ID NO: 760473 - RNA, 22 nt, Human
guaaugaauagaugguggcagg

SEQ ID NO: 760474 - RNA, 22 nt, Human
cagaggcaaaagagguggaggu

SEQ ID NO: 760475 - RNA, 22 nt, Human
gaauacaugauacaugaacugc

SEQ ID NO: 760476 - RNA, 22 nt, Human
gcugcagacugggaggcaggug

SEQ ID NO: 760477 - RNA, 22 nt, Human
cgggcagaucacacagggcuug

SEQ ID NO: 760478 - RNA, 22 nt, Human
aggaaggacuccaugguccguc

SEQ ID NO: 760479 - RNA, 19 nt, Human
auuuuucuuccucugugca

SEQ ID NO: 760480 - RNA, 22 nt, Human
acugagaggugauagugacauu

SEQ ID NO: 760481 - RNA, 22 nt, Human
uaguaaguagcuaauauuuacu

SEQ ID NO: 760482 - RNA, 22 nt, Human
agagacaggguuuugucguguu

SEQ ID NO: 760483 - RNA, 22 nt, Human
caggcacaggggaaugucuuuu

SEQ ID NO: 760484 - RNA, 22 nt, Human
aucaggaagccagucuaaugga

SEQ ID NO: 760485 - RNA, 22 nt, Human
uccugguggcuuucccugccuu

SEQ ID NO: 760486 - RNA, 22 nt, Human
uaauaaaugaaagugcuggcau

SEQ ID NO: 760487 - RNA, 18 nt, Human
ugcuuuaugcuuauauaa

SEQ ID NO: 760488 - RNA, 22 nt, Human
uuccauaaucaccuuauucuuu

SEQ ID NO: 760489 - RNA, 22 nt, Human
uuuaaauggcauuuucccagau

SEQ ID NO: 760490 - RNA, 22 nt, Human
cuggcuggccauguagagauga

SEQ ID NO: 760491 - RNA, 22 nt, Human
cuuauucauauauucucgguag

SEQ ID NO: 760492 - RNA, 22 nt, Human
cucugggaaagauugugcaggc

SEQ ID NO: 760493 - RNA, 22 nt, Human
cugugccagccugucccaggag

SEQ ID NO: 760494 - RNA, 19 nt, Human
uaacuuguagauaugaagu

SEQ ID NO: 760495 - RNA, 22 nt, Human
uaugcagugguaucauuuuaaa

SEQ ID NO: 760496 - RNA, 22 nt, Human
cacagucaccuuaucaggaugu

SEQ ID NO: 760497 - RNA, 22 nt, Human
agaugggccuucgagcaugccc

SEQ ID NO: 760498 - RNA, 20 nt, Human
ucccacugggccucaguuuc

SEQ ID NO: 760499 - RNA, 22 nt, Human
gagaggccaccugacgagcagu

SEQ ID NO: 760500 - RNA, 22 nt, Human
uaaaucagggagucaucugcga

SEQ ID NO: 760501 - RNA, 23 nt, Human
ccugugugcccuuaauucacagc

SEQ ID NO: 760502 - RNA, 22 nt, Human
acagaaacccagaaaaccucuc

SEQ ID NO: 760503 - RNA, 22 nt, Human
uuguuucugaguuuucauguau

SEQ ID NO: 760504 - RNA, 19 nt, Human
acagggaauuuccacagaa

SEQ ID NO: 760505 - RNA, 22 nt, Human
gccuggcccagggcuccgcagg

SEQ ID NO: 760506 - RNA, 22 nt, Human
cucuuauugaugaaggugcuaa

SEQ ID NO: 760507 - RNA, 22 nt, Human
aucuaaaguguuucaugaaaga

SEQ ID NO: 760508 - RNA, 22 nt, Human
ugucuuauuccuucuguucagc

SEQ ID NO: 760509 - RNA, 18 nt, Human
uuacuacagcacuuucuu

SEQ ID NO: 760510 - RNA, 22 nt, Human
auugaaaauaaggccagaaaca

SEQ ID NO: 760511 - RNA, 22 nt, Human
gaggaacccagcugggguugcc

SEQ ID NO: 760512 - RNA, 22 nt, Human
cuggagguaagaggcccugggc

SEQ ID NO: 760513 - RNA, 22 nt, Human
agaagauuuagguugacgcuau

SEQ ID NO: 760514 - RNA, 22 nt, Human
agcacgagaucgaugugccuuu

SEQ ID NO: 760515 - RNA, 22 nt, Human
auuaaggaacaaagccuuuuga

SEQ ID NO: 760516 - RNA, 22 nt, Human
ucaggccuagggagccacacca

SEQ ID NO: 760517 - RNA, 22 nt, Human
auggcuugauagaaagcuaguu

SEQ ID NO: 760518 - RNA, 22 nt, Human
aguggcuaauaacagcuaaaca

SEQ ID NO: 760519 - RNA, 18 nt, Human
uguuuauuuuucucuuac

SEQ ID NO: 760520 - RNA, 22 nt, Human
ggcuguggucugggugcucccc

SEQ ID NO: 760521 - RNA, 22 nt, Human
gcuccuggguguggcugccccu

SEQ ID NO: 760522 - RNA, 22 nt, Human
acugaaggaaagccuuugcaug

SEQ ID NO: 760523 - RNA, 22 nt, Human
augaacacaauacgugcaugca

SEQ ID NO: 760524 - RNA, 21 nt, Human
gggaagacugucaggauuccu

SEQ ID NO: 760525 - RNA, 22 nt, Human
gaagacacaauuggugggucca

SEQ ID NO: 760526 - RNA, 22 nt, Human
uagcuuuaagaugagaugugga

SEQ ID NO: 760527 - RNA, 22 nt, Human
ucggagaguucaugaagacccg

SEQ ID NO: 760528 - RNA, 22 nt, Human
uccuucagaggacggcagccag

SEQ ID NO: 760529 - RNA, 22 nt, Human
ucauggauaaaauauugguuaa

SEQ ID NO: 760530 - RNA, 22 nt, Human
cagcuucucagaaagcugaggu

SEQ ID NO: 760531 - RNA, 22 nt, Human
ugggccuccaauuccagcggga

SEQ ID NO: 760532 - RNA, 22 nt, Human
aagcugucaggagguuaccuuu

SEQ ID NO: 760533 - RNA, 22 nt, Human
aauguguaaaugaggagucuug

SEQ ID NO: 760534 - RNA, 22 nt, Human
acuguaaauuuugguugcaggu

SEQ ID NO: 760535 - RNA, 22 nt, Human
ucccagagccucugccacucug

SEQ ID NO: 760536 - RNA, 22 nt, Human
aaaagcaagaggcuggauuaaa

SEQ ID NO: 760537 - RNA, 22 nt, Human
ugucugggauguaauuccugcc

SEQ ID NO: 760538 - RNA, 22 nt, Human
ugcuggaagaauuccaugcugg

SEQ ID NO: 760539 - RNA, 20 nt, Human
gugcuuccucgcaaguugca

SEQ ID NO: 760540 - RNA, 22 nt, Human
uguguaaaagauuaguuuacua

SEQ ID NO: 760541 - RNA, 22 nt, Human
gaaguguuguaucuuuuuaaua

SEQ ID NO: 760542 - RNA, 18 nt, Human
aggccaaacuuguaagca

SEQ ID NO: 760543 - RNA, 22 nt, Human
uuuuuagaguguuaccaguaua

SEQ ID NO: 760544 - RNA, 22 nt, Human
gcuggccagugucccagggauc

SEQ ID NO: 760545 - RNA, 22 nt, Human
uacugcuucauauagggaugua

SEQ ID NO: 760546 - RNA, 22 nt, Human
cccuggugcccugggucagccu

SEQ ID NO: 760547 - RNA, 22 nt, Human
ugggucaguuugggggccagcc

SEQ ID NO: 760548 - RNA, 22 nt, Human
cagaggcugccagccaugugca

SEQ ID NO: 760549 - RNA, 22 nt, Human
gaauguaaaauugccuacaaga

SEQ ID NO: 760550 - RNA, 22 nt, Human
uguugagacugagggagucagc

SEQ ID NO: 760551 - RNA, 22 nt, Human
uucugcauguguuucaaauacu

SEQ ID NO: 760552 - RNA, 22 nt, Human
acaaagaaggaauuggucuuua

SEQ ID NO: 760553 - RNA, 22 nt, Human
agcagccaagguaaccugugcu

SEQ ID NO: 760554 - RNA, 22 nt, Human
cauggcuuuuuagcauauucaa

SEQ ID NO: 760555 - RNA, 22 nt, Human
agaaucucuacucaaguacuug

SEQ ID NO: 760556 - RNA, 18 nt, Human
ccuucagcucugccagua

SEQ ID NO: 760557 - RNA, 22 nt, Human
uagguacuuaagaucucagcua

SEQ ID NO: 760558 - RNA, 22 nt, Human
gacuuuauuuuaacggagauuc

SEQ ID NO: 760559 - RNA, 22 nt, Human
ggaggucacgacugggaugccu

SEQ ID NO: 760560 - RNA, 22 nt, Human
gcuuagcaaugugacaagaugc

SEQ ID NO: 760561 - RNA, 22 nt, Human
uguaacugccauguagccuguc

SEQ ID NO: 760562 - RNA, 22 nt, Human
acacuugaggaauguggugauu

SEQ ID NO: 760563 - RNA, 22 nt, Human
auacacacaaucagguuuugua

SEQ ID NO: 760564 - RNA, 22 nt, Human
ugugauaacuuuuacauuuucg

SEQ ID NO: 760565 - RNA, 22 nt, Human
gucacacacauuucuuuggugc

SEQ ID NO: 760566 - RNA, 22 nt, Human
gcagagccgugaauggauuuca

SEQ ID NO: 760567 - RNA, 22 nt, Human
acaguaggaauagauguagaua

SEQ ID NO: 760568 - RNA, 22 nt, Human
cuuacagagaagaaaauguagu

SEQ ID NO: 760569 - RNA, 22 nt, Human
gauaacauuuugaagugcuagu

SEQ ID NO: 760570 - RNA, 22 nt, Human
cagguccacagcccaucacugc

SEQ ID NO: 760571 - RNA, 17 nt, Human
ucugaggccucuaggag

SEQ ID NO: 760572 - RNA, 22 nt, Human
cuucccacuaaagcccuuguug

SEQ ID NO: 760573 - RNA, 22 nt, Human
auggggagagccucugucccca

SEQ ID NO: 760574 - RNA, 22 nt, Human
gccugcuguuaacugcaggaau

SEQ ID NO: 760575 - RNA, 22 nt, Human
agcugccuuaaauuacuuugug

SEQ ID NO: 760576 - RNA, 22 nt, Human
uuucacaggauucugauguagu

SEQ ID NO: 760577 - RNA, 22 nt, Human
cagcacaguccuuugcuuacug

SEQ ID NO: 760578 - RNA, 22 nt, Human
guccuagagauccgggagggga

SEQ ID NO: 760579 - RNA, 22 nt, Human
uggaaauauacaaugugucucu

SEQ ID NO: 760580 - RNA, 22 nt, Human
guacucucuugaaggccuuucu

SEQ ID NO: 760581 - RNA, 15 nt, Human
ugaagacauaaggug

SEQ ID NO: 760582 - RNA, 22 nt, Human
aggcuucccaagcagcugcaaa

SEQ ID NO: 760583 - RNA, 22 nt, Human
cagugcagacguggagggggca

SEQ ID NO: 760584 - RNA, 22 nt, Human
uuacagcagcagggacagacua

SEQ ID NO: 760585 - RNA, 22 nt, Human
uauuaugaggcuuagggaugac

SEQ ID NO: 760586 - RNA, 22 nt, Human
gagaaagggauaauuugaagag

SEQ ID NO: 760587 - RNA, 22 nt, Human
uuccaggacucguucuggcuca

SEQ ID NO: 760588 - RNA, 22 nt, Human
agcugcccuucucuugcccuug

SEQ ID NO: 760589 - RNA, 22 nt, Human
ugcgucuggaguggaguuugaa

SEQ ID NO: 760590 - RNA, 22 nt, Human
ugcuucuggguaggccucagga

SEQ ID NO: 760591 - RNA, 22 nt, Human
uagguuucagaggugccgggaa

SEQ ID NO: 760592 - RNA, 22 nt, Human
aggucaaggccaaaagaguggu

SEQ ID NO: 760593 - RNA, 22 nt, Human
gaaaucaaggcuacauucaggu

SEQ ID NO: 760594 - RNA, 22 nt, Human
cugcccgcugcuagagaggccg

SEQ ID NO: 760595 - RNA, 22 nt, Human
acccuggagcuuuucuggcccu

SEQ ID NO: 760596 - RNA, 22 nt, Human
aagggcuuaggauuuugcugug

SEQ ID NO: 760597 - RNA, 22 nt, Human
aguuucaguucugucauuuaua

SEQ ID NO: 760598 - RNA, 22 nt, Human
aggaaucccgcaccagcugcug

SEQ ID NO: 760599 - RNA, 22 nt, Human
uggcaggagacacauggcauag

SEQ ID NO: 760600 - RNA, 22 nt, Human
augcagcaguuuacaaagcaau

SEQ ID NO: 760601 - RNA, 22 nt, Human
auguuauuucugaaagaucauu

SEQ ID NO: 760602 - RNA, 22 nt, Human
uagugauuuagaauucaaaugu

SEQ ID NO: 760603 - RNA, 22 nt, Human
cucauuaaaggaaaucaccugc

SEQ ID NO: 760604 - RNA, 22 nt, Human
uagcagcugcaucauuuuacag

SEQ ID NO: 760605 - RNA, 22 nt, Human
uccagagcuacuugcucaacuu

SEQ ID NO: 760606 - RNA, 22 nt, Human
caugcuaauuaauuccaccugc

SEQ ID NO: 760607 - RNA, 22 nt, Human
acagaguuguguuuguacaacg

SEQ ID NO: 760608 - RNA, 19 nt, Human
uacauuuguguacacuugu

SEQ ID NO: 760609 - RNA, 22 nt, Human
gaggccaaucaauagggcaaua

SEQ ID NO: 760610 - RNA, 22 nt, Human
ccuggcagcauugguagagauu

SEQ ID NO: 760611 - RNA, 22 nt, Human
ucccugggucauucucuggcac

SEQ ID NO: 760612 - RNA, 22 nt, Human
uccugaauuccucuuugcaucc

SEQ ID NO: 760613 - RNA, 22 nt, Human
uuucaaguuaaauggggucuuu

SEQ ID NO: 760614 - RNA, 22 nt, Human
uggcccuguccucauuucaucu

SEQ ID NO: 760615 - RNA, 22 nt, Human
uugaauuggcaaaacugcagcu

SEQ ID NO: 760616 - RNA, 22 nt, Human
ggagcagaugucuucauggccu

SEQ ID NO: 760617 - RNA, 20 nt, Human
cucauguggcaccaggcacu

SEQ ID NO: 760618 - RNA, 22 nt, Human
aaaugaacucaaugaucuccca

SEQ ID NO: 760619 - RNA, 22 nt, Human
gauuucaaccuaacaguaugac

SEQ ID NO: 760620 - RNA, 22 nt, Human
ccugagugccaugagagcaccc

SEQ ID NO: 760621 - RNA, 22 nt, Human
ucacagacaccuuggccacagu

SEQ ID NO: 760622 - RNA, 22 nt, Human
caggcccaucugcucccaggcu

SEQ ID NO: 760623 - RNA, 22 nt, Human
agaggugacauaggagaggcuc

SEQ ID NO: 760624 - RNA, 22 nt, Human
ggaagccagaaagugagaauau

SEQ ID NO: 760625 - RNA, 22 nt, Human
uggcuggaugugagaucaagag

SEQ ID NO: 760626 - RNA, 22 nt, Human
uucuggagggcaugcugcugcc

SEQ ID NO: 760627 - RNA, 22 nt, Human
ugaaagcagauagcucuguugu

SEQ ID NO: 760628 - RNA, 22 nt, Human
gaauguuuaaggaaggcguggc

SEQ ID NO: 760629 - RNA, 22 nt, Human
acaugcaagccccugaacacau

SEQ ID NO: 760630 - RNA, 22 nt, Human
gagcugggaggacugggaacuu

SEQ ID NO: 760631 - RNA, 22 nt, Human
gaggaaaucuuaggccccaacc

SEQ ID NO: 760632 - RNA, 22 nt, Human
gacagaggguuccaaaauugau

SEQ ID NO: 760633 - RNA, 22 nt, Human
cugcuccaccuccgggucaggc

SEQ ID NO: 760634 - RNA, 22 nt, Human
ggugugaaauguucaguguuac

SEQ ID NO: 760635 - RNA, 22 nt, Human
augauugaccaucugcugggcu

SEQ ID NO: 760636 - RNA, 17 nt, Human
agagagaaaagggccau

SEQ ID NO: 760637 - RNA, 22 nt, Human
uuaaaaucuaaagcaguugucu

SEQ ID NO: 760638 - RNA, 22 nt, Human
gugguuuugccauuacaaguaa

SEQ ID NO: 760639 - RNA, 22 nt, Human
uauagugucucuagaucaaaga

SEQ ID NO: 760640 - RNA, 22 nt, Human
ugcuuucacaccaugccuauaa

SEQ ID NO: 760641 - RNA, 22 nt, Human
acaaugaacacacaaggaauuc

SEQ ID NO: 760642 - RNA, 22 nt, Human
ugucaugggucuaaacauugau

SEQ ID NO: 760643 - RNA, 22 nt, Human
agcugggguugcacacauuuug

SEQ ID NO: 760644 - RNA, 22 nt, Human
ugccugcaagaguuggggcuac

SEQ ID NO: 760645 - RNA, 22 nt, Human
gaggcccagcagcgcaggucuu

SEQ ID NO: 760646 - RNA, 22 nt, Human
gcuggagaguaguaagcaguua

SEQ ID NO: 760647 - RNA, 18 nt, Human
gcacagagcccaggcucu

SEQ ID NO: 760648 - RNA, 22 nt, Human
gacagcuugccugguacugcaa

SEQ ID NO: 760649 - RNA, 22 nt, Human
aggacacacccagcucacgggg

SEQ ID NO: 760650 - RNA, 22 nt, Human
guauaucaccccaagcagcuga

SEQ ID NO: 760651 - RNA, 22 nt, Human
ugcuccauucucuagccagugc

SEQ ID NO: 760652 - RNA, 22 nt, Human
aggggcugcuggguccgccccu

SEQ ID NO: 760653 - RNA, 22 nt, Human
ugucagggauuuaaagacacaa

SEQ ID NO: 760654 - RNA, 22 nt, Human
gccuggggcaugcagcugauac

SEQ ID NO: 760655 - RNA, 22 nt, Human
ucagaagucuggacugcuucuc

SEQ ID NO: 760656 - RNA, 22 nt, Human
cagaagcaaaugccuugcugag

SEQ ID NO: 760657 - RNA, 22 nt, Human
uugcuucauuuccucaggcuuu

SEQ ID NO: 760658 - RNA, 22 nt, Human
acaagucaguggaauuaauauu

SEQ ID NO: 760659 - RNA, 23 nt, Human
uuuuccuuuggacaggcuguauu

SEQ ID NO: 760660 - RNA, 22 nt, Human
aagaaacucacuuugggaggca

SEQ ID NO: 760661 - RNA, 22 nt, Human
ucaguuuugaaaacauugaaug

SEQ ID NO: 760662 - RNA, 18 nt, Human
uaucacugcugaacaaga

SEQ ID NO: 760663 - RNA, 22 nt, Human
acaggcugcccgcuccccaccu

SEQ ID NO: 760664 - RNA, 22 nt, Human
cccaggcagucuggcucuaaag

SEQ ID NO: 760665 - RNA, 22 nt, Human
uguggcucggccagcugcugaa

SEQ ID NO: 760666 - RNA, 22 nt, Human
auaaaggcuggcugcugugagc

SEQ ID NO: 760667 - RNA, 22 nt, Human
uccagugaucuagggagcugga

SEQ ID NO: 760668 - RNA, 22 nt, Human
aagaucaugguuuaucugggag

SEQ ID NO: 760669 - RNA, 22 nt, Human
ugggcacaggggaauggaugaa

SEQ ID NO: 760670 - RNA, 22 nt, Human
uuuagcuugaaucuuguuuaaa

SEQ ID NO: 760671 - RNA, 22 nt, Human
gcuugacuaggcucuggcgaca

SEQ ID NO: 760672 - RNA, 22 nt, Human
uacaaugcauucguugucucgg

SEQ ID NO: 760673 - RNA, 19 nt, Human
agcuccugauugugccucg

SEQ ID NO: 760674 - RNA, 22 nt, Human
ccucgaccuccccaggcucagg

SEQ ID NO: 760675 - RNA, 22 nt, Human
uucauauucaaauacucugcuu

SEQ ID NO: 760676 - RNA, 22 nt, Human
agagggcaugcuugguggccug

SEQ ID NO: 760677 - RNA, 22 nt, Human
uuuugccugagauccgagucug

SEQ ID NO: 760678 - RNA, 22 nt, Human
cagggacaauggcagagccuga

SEQ ID NO: 760679 - RNA, 22 nt, Human
gccagcucccaagugagccccu

SEQ ID NO: 760680 - RNA, 22 nt, Human
accugagggcccaaacuuggua

SEQ ID NO: 760681 - RNA, 22 nt, Human
uaauuuuaauaguauguggcau

SEQ ID NO: 760682 - RNA, 22 nt, Human
agaauucuuggugguuagaaua

SEQ ID NO: 760683 - RNA, 22 nt, Human
aaagcagcaacagcuguuagaa

SEQ ID NO: 760684 - RNA, 22 nt, Human
ugcuuuauagacaaggaaguag

SEQ ID NO: 760685 - RNA, 22 nt, Human
agagugauggguugugcugacc

SEQ ID NO: 760686 - RNA, 22 nt, Human
uggacagguuugggugccuguu

SEQ ID NO: 760687 - RNA, 22 nt, Human
cagaggcuuggcauuaucaugc

SEQ ID NO: 760688 - RNA, 22 nt, Human
aggagacauacuauaggaauau

SEQ ID NO: 760689 - RNA, 22 nt, Human
auuaauugggaacuuguugaaa

SEQ ID NO: 760690 - RNA, 22 nt, Human
gcaggaugaacuaacaccugca

SEQ ID NO: 760691 - RNA, 22 nt, Human
uuucugcaaacuuccacgucuc

SEQ ID NO: 760692 - RNA, 22 nt, Human
aaguacagaaauagcaggugca

SEQ ID NO: 760693 - RNA, 22 nt, Human
gagaaaggcauuccuaugcaaa

SEQ ID NO: 760694 - RNA, 22 nt, Human
aaagagcuugcuugcuuuauau

SEQ ID NO: 760695 - RNA, 22 nt, Human
acucuuuagagguacaucucuu

SEQ ID NO: 760696 - RNA, 22 nt, Human
uugaguguacuuuagucaucug

SEQ ID NO: 760697 - RNA, 22 nt, Human
uuauucagucugucuagggagu

SEQ ID NO: 760698 - RNA, 22 nt, Human
caugcagaggugccacgaggcu

SEQ ID NO: 760699 - RNA, 22 nt, Human
uccuuuuugguccaaggugacc

SEQ ID NO: 760700 - RNA, 22 nt, Human
gccuguuggguaacagaguuca

SEQ ID NO: 760701 - RNA, 22 nt, Human
agcaaggaaacuauggagagau

SEQ ID NO: 760702 - RNA, 22 nt, Human
uucuuauagaagcaaccauugu

SEQ ID NO: 760703 - RNA, 22 nt, Human
uggguccucgucuuccaaggca

SEQ ID NO: 760704 - RNA, 22 nt, Human
gguguggggagguucugcuucu

SEQ ID NO: 760705 - RNA, 22 nt, Human
ugaaaugacagucuuaagcucu

SEQ ID NO: 760706 - RNA, 22 nt, Human
ccuagccccagauaucucacac

SEQ ID NO: 760707 - RNA, 22 nt, Human
uguccuuuucuuuagugcagcu

SEQ ID NO: 760708 - RNA, 22 nt, Human
ugugugccagauacaagcacug

SEQ ID NO: 760709 - RNA, 20 nt, Human
uaaugcuuaacacauccccu

SEQ ID NO: 760710 - RNA, 22 nt, Human
uuguuaaagaugcagauuccau

SEQ ID NO: 760711 - RNA, 22 nt, Human
gcuguccauccacuucccagcg

SEQ ID NO: 760712 - RNA, 22 nt, Human
ggugagacuuuagaagagccag

SEQ ID NO: 760713 - RNA, 22 nt, Human
uuuccuaagauagauacuucag

SEQ ID NO: 760714 - RNA, 22 nt, Human
uucaaauccuagcccuguggcc

SEQ ID NO: 760715 - RNA, 22 nt, Human
cuguugcuaaguagugcaggua

SEQ ID NO: 760716 - RNA, 22 nt, Human
ucaguguguuacuuucuccuau

SEQ ID NO: 760717 - RNA, 19 nt, Human
cugcuccaggagcugggga

SEQ ID NO: 760718 - RNA, 22 nt, Human
cucacuguuuaauagcuggauc

SEQ ID NO: 760719 - RNA, 22 nt, Human
ccagaggaucaguacuggcugg

SEQ ID NO: 760720 - RNA, 22 nt, Human
gaaaugaaacaggcuuuuaagg

SEQ ID NO: 760721 - RNA, 19 nt, Human
cucuuaaauugucucuugc

SEQ ID NO: 760722 - RNA, 22 nt, Human
caguggagaggcaugcuuggca

SEQ ID NO: 760723 - RNA, 22 nt, Human
agcgcaggaacacgucugccuu

SEQ ID NO: 760724 - RNA, 22 nt, Human
aaugaccugggugucauuucau

SEQ ID NO: 760725 - RNA, 22 nt, Human
gggagaguagcuggaagguucu

SEQ ID NO: 760726 - RNA, 22 nt, Human
cccucaggagaugucagcugga

SEQ ID NO: 760727 - RNA, 22 nt, Human
uaggcagaaaggaaggcaaguu

SEQ ID NO: 760728 - RNA, 22 nt, Human
gcagcauugugagguccugccc

SEQ ID NO: 760729 - RNA, 22 nt, Human
ugaguuauugagaaauaacugc

SEQ ID NO: 760730 - RNA, 22 nt, Human
cagaggccagggggcucacaaa

SEQ ID NO: 760731 - RNA, 21 nt, Human
uaagacaguaugaauacuuuc

SEQ ID NO: 760732 - RNA, 22 nt, Human
uuucaaacauaucuucauuacu

SEQ ID NO: 760733 - RNA, 22 nt, Human
cucagcacacucccaucuaauu

SEQ ID NO: 760734 - RNA, 22 nt, Human
acaggcaaagggucaguagcag

SEQ ID NO: 760735 - RNA, 22 nt, Human
ucuggcucaggucagacaggga

SEQ ID NO: 760736 - RNA, 22 nt, Human
cugccuguuagucuagcaguua

SEQ ID NO: 760737 - RNA, 22 nt, Human
cccacacacuggcugcugccaa

SEQ ID NO: 760738 - RNA, 22 nt, Human
agcagagugugaaggcagggcu

SEQ ID NO: 760739 - RNA, 22 nt, Human
ccaugcauauaauagugccugg

SEQ ID NO: 760740 - RNA, 22 nt, Human
cugggaguguucuaggucacau

SEQ ID NO: 760741 - RNA, 22 nt, Human
gcaaggagccuggaggugagug

SEQ ID NO: 760742 - RNA, 22 nt, Human
auggauggccugagcacagcug

SEQ ID NO: 760743 - RNA, 22 nt, Human
auuacauauguuggcaacauuu

SEQ ID NO: 760744 - RNA, 22 nt, Human
gauuuuaucgucauccuucugg

SEQ ID NO: 760745 - RNA, 22 nt, Human
aguugaaauuagaguccuggcu

SEQ ID NO: 760746 - RNA, 22 nt, Human
cucuuaauguuuuauagauuga

SEQ ID NO: 760747 - RNA, 22 nt, Human
cacaguguuugauuuaggggcc

SEQ ID NO: 760748 - RNA, 22 nt, Human
ugccaggcuuuggucaaaggcu

SEQ ID NO: 760749 - RNA, 22 nt, Human
acacaguaucaaauuucaucuu

SEQ ID NO: 760750 - RNA, 22 nt, Human
gaaauguguuguucauuucuaa

SEQ ID NO: 760751 - RNA, 22 nt, Human
gccuccagcuggggcauuucag

SEQ ID NO: 760752 - RNA, 22 nt, Human
acagcacaggaguugaaugggc

SEQ ID NO: 760753 - RNA, 22 nt, Human
gugagauuugaguggggauaca

SEQ ID NO: 760754 - RNA, 22 nt, Human
uuuuuugucccagagagccugg

SEQ ID NO: 760755 - RNA, 22 nt, Human
ccuguguggccaggcuggaguc

SEQ ID NO: 760756 - RNA, 22 nt, Human
uagaaaugauuuugaugcuuca

SEQ ID NO: 760757 - RNA, 22 nt, Human
cuccccaccuucgcggucccug

SEQ ID NO: 760758 - RNA, 22 nt, Human
uaaguucugaagaggcgaggua

SEQ ID NO: 760759 - RNA, 20 nt, Human
aaaaacaguaaugcugaaga

SEQ ID NO: 760760 - RNA, 22 nt, Human
ugcuuaauaggaguugaacauu

SEQ ID NO: 760761 - RNA, 22 nt, Human
aaaagcuuuguuaauagguuug

SEQ ID NO: 760762 - RNA, 18 nt, Human
gacagcuguccugagccc

SEQ ID NO: 760763 - RNA, 22 nt, Human
cccucccaggaguggccagaga

SEQ ID NO: 760764 - RNA, 22 nt, Human
cagaaaacaaaccuauccugag

SEQ ID NO: 760765 - RNA, 22 nt, Human
cucccucugucuuguccagaaa

SEQ ID NO: 760766 - RNA, 20 nt, Human
cagagaccaggccagguguc

SEQ ID NO: 760767 - RNA, 23 nt, Human
uucauguggaccuagaggccugu

SEQ ID NO: 760768 - RNA, 22 nt, Human
ccaugccauacuggccacccgg

SEQ ID NO: 760769 - RNA, 22 nt, Human
ccagagccucaacacagguccu

SEQ ID NO: 760770 - RNA, 22 nt, Human
ccacuguagagauuugaaugcc

SEQ ID NO: 760771 - RNA, 22 nt, Human
ugggggcuagaacccagggauu

SEQ ID NO: 760772 - RNA, 22 nt, Human
cucuggaguucuucaagcuacu

SEQ ID NO: 760773 - RNA, 22 nt, Human
ggaaagauguaauauuaucuaa

SEQ ID NO: 760774 - RNA, 20 nt, Human
ccugucuggagacaaagaga

SEQ ID NO: 760775 - RNA, 22 nt, Human
cugcuuuaaaacugauacauga

SEQ ID NO: 760776 - RNA, 22 nt, Human
uucaggauaugugauaucugaa

SEQ ID NO: 760777 - RNA, 22 nt, Human
agucacaugaucccugggccug

SEQ ID NO: 760778 - RNA, 17 nt, Human
cuaggcuuggcagcucg

SEQ ID NO: 760779 - RNA, 22 nt, Human
uuucauaauagugcaguuuguu

SEQ ID NO: 760780 - RNA, 22 nt, Human
uaacagcaaccacagugcuggu

SEQ ID NO: 760781 - RNA, 22 nt, Human
aaaagccaagguccucuucaga

SEQ ID NO: 760782 - RNA, 21 nt, Human
gcuucuguaucuagcaggaac

SEQ ID NO: 760783 - RNA, 22 nt, Human
cagcugguuggaagggagcuga

SEQ ID NO: 760784 - RNA, 22 nt, Human
cuggggcuucaaugcuucggug

SEQ ID NO: 760785 - RNA, 22 nt, Human
cauuaaaauaucucaugguguu

SEQ ID NO: 760786 - RNA, 22 nt, Human
ccugccuucccagcuuggcuuu

SEQ ID NO: 760787 - RNA, 22 nt, Human
uuagcauucucugugugcauaa

SEQ ID NO: 760788 - RNA, 22 nt, Human
uguauacaggcauaagagauac

SEQ ID NO: 760789 - RNA, 22 nt, Human
gggaaugugaaacaguaaggga

SEQ ID NO: 760790 - RNA, 22 nt, Human
cugccucagccuucugggugac

SEQ ID NO: 760791 - RNA, 22 nt, Human
uaaaauagcuuaugucuuuuga

SEQ ID NO: 760792 - RNA, 22 nt, Human
aggcaggucacaugcuuggcga

SEQ ID NO: 760793 - RNA, 22 nt, Human
uuccaggaacaaacucaccuua

SEQ ID NO: 760794 - RNA, 22 nt, Human
uagcuguguagacacucagagc

SEQ ID NO: 760795 - RNA, 22 nt, Human
acuugggaaagaaguuucaccg

SEQ ID NO: 760796 - RNA, 22 nt, Human
ucuggagaguccugcucacguc

SEQ ID NO: 760797 - RNA, 21 nt, Human
aagucagucaguucuauacua

SEQ ID NO: 760798 - RNA, 22 nt, Human
cagcaucuucuccaaagcugcc

SEQ ID NO: 760799 - RNA, 21 nt, Human
guucuuaguuauauucucaau

SEQ ID NO: 760800 - RNA, 22 nt, Human
uugauucauggacaggccaggu

SEQ ID NO: 760801 - RNA, 22 nt, Human
cacuuuaacucacauuucagcu

SEQ ID NO: 760802 - RNA, 22 nt, Human
gaaaucuuccuucagugaagaa

SEQ ID NO: 760803 - RNA, 22 nt, Human
ggucuggcacucaugcagcagg

SEQ ID NO: 760804 - RNA, 20 nt, Human
cuacacaggguucgcugggc

SEQ ID NO: 760805 - RNA, 22 nt, Human
uucuucugugaggugugugccu

SEQ ID NO: 760806 - RNA, 21 nt, Human
ugggcccaguucccgcugggc

SEQ ID NO: 760807 - RNA, 22 nt, Human
uguauguggcuacuuuucuugc

SEQ ID NO: 760808 - RNA, 22 nt, Human
cuuugauauaaguauacauagu

SEQ ID NO: 760809 - RNA, 22 nt, Human
uacaugcuccuuaugagaaucu

SEQ ID NO: 760810 - RNA, 22 nt, Human
agcagcuucuuucacuccugga

SEQ ID NO: 760811 - RNA, 22 nt, Human
uacaacugcacaucugaaucac

SEQ ID NO: 760812 - RNA, 22 nt, Human
uuguagcuuaucaaggcuguuu

SEQ ID NO: 760813 - RNA, 21 nt, Human
cagcccagcuucuuccccagu

SEQ ID NO: 760814 - RNA, 22 nt, Human
ggagagaaauugagguagcaag

SEQ ID NO: 760815 - RNA, 22 nt, Human
acucaggaaaugagaggcucuc

SEQ ID NO: 760816 - RNA, 22 nt, Human
cacaccagagguuaccugcaaa

SEQ ID NO: 760817 - RNA, 18 nt, Human
cuucauuuguagaguucc

SEQ ID NO: 760818 - RNA, 22 nt, Human
gcagcuuucuacuuccuacagc

SEQ ID NO: 760819 - RNA, 22 nt, Human
uccucugaauguacuucauaau

SEQ ID NO: 760820 - RNA, 22 nt, Human
ucuguucuuccuacauucacau

SEQ ID NO: 760821 - RNA, 20 nt, Human
agcagauagcgggagaguuu

SEQ ID NO: 760822 - RNA, 22 nt, Human
ucuuucuacaucauuugcuucu

SEQ ID NO: 760823 - RNA, 22 nt, Human
cagcaucuuauuuucuauggaa

SEQ ID NO: 760824 - RNA, 22 nt, Human
gccaggaccucccagagcuuuc

SEQ ID NO: 760825 - RNA, 22 nt, Human
guggggacgggauggcucacug

SEQ ID NO: 760826 - RNA, 22 nt, Human
aagcaccugcaguugacaaaaa

SEQ ID NO: 760827 - RNA, 22 nt, Human
uuccuuggaguuaagacccugg

SEQ ID NO: 760828 - RNA, 22 nt, Human
augcauuggauaagaaccccau

SEQ ID NO: 760829 - RNA, 22 nt, Human
gcugucccgaaccccugguaau

SEQ ID NO: 760830 - RNA, 22 nt, Human
cccagcuguaacgggucugcac

SEQ ID NO: 760831 - RNA, 22 nt, Human
uucugggcaguuggaaauuuca

SEQ ID NO: 760832 - RNA, 22 nt, Human
caugggggcugaggcugcugua

SEQ ID NO: 760833 - RNA, 22 nt, Human
gccucacugcagccccaggaag

SEQ ID NO: 760834 - RNA, 22 nt, Human
ugaaaugacaaagguuuuucuu

SEQ ID NO: 760835 - RNA, 22 nt, Human
auguuauggcucaaacauuugg

SEQ ID NO: 760836 - RNA, 22 nt, Human
cuuccugaggugcugagcacag

SEQ ID NO: 760837 - RNA, 22 nt, Human
gggcugaaagcucucacagucu

SEQ ID NO: 760838 - RNA, 22 nt, Human
uauguacuaacuuucauucuag

SEQ ID NO: 760839 - RNA, 22 nt, Human
uucuuugggauuguagcugucu

SEQ ID NO: 760840 - RNA, 22 nt, Human
aggugugggaaacgggugaccu

SEQ ID NO: 760841 - RNA, 23 nt, Human
gcucuggcagcuugugucagcac

SEQ ID NO: 760842 - RNA, 22 nt, Human
uaggaagcauuuaaagagaugg

SEQ ID NO: 760843 - RNA, 22 nt, Human
caacuuuugacacgugugcuaa

SEQ ID NO: 760844 - RNA, 22 nt, Human
ccugaauacuggugcugaaagu

SEQ ID NO: 760845 - RNA, 22 nt, Human
aagcuggaggcugagaucacca

SEQ ID NO: 760846 - RNA, 22 nt, Human
ggaggagcccacucaaagggga

SEQ ID NO: 760847 - RNA, 22 nt, Human
ucugauuccagugacccuagga

SEQ ID NO: 760848 - RNA, 22 nt, Human
gauaaacuuguggaguuuuggu

SEQ ID NO: 760849 - RNA, 22 nt, Human
uggccaguuugcucaggcaguc

SEQ ID NO: 760850 - RNA, 22 nt, Human
cugggaagcuucgagcaggaaa

SEQ ID NO: 760851 - RNA, 23 nt, Human
ccaggccucucagagggugugcc

SEQ ID NO: 760852 - RNA, 22 nt, Human
caagauuuggcaacuuugucau

SEQ ID NO: 760853 - RNA, 22 nt, Human
gugcucaggaagcuguuccugc

SEQ ID NO: 760854 - RNA, 22 nt, Human
aaagagcuggcauuuauagucu

SEQ ID NO: 760855 - RNA, 22 nt, Human
gcagugcuugaagagguggcca

SEQ ID NO: 760856 - RNA, 22 nt, Human
agccuucaaccuagcuagagca

SEQ ID NO: 760857 - RNA, 22 nt, Human
uuguaacuguggguugauuaga

SEQ ID NO: 760858 - RNA, 22 nt, Human
uuaugcuaguauaguccuuaga

SEQ ID NO: 760859 - RNA, 22 nt, Human
cuccugcccacgugcuacuucu

SEQ ID NO: 760860 - RNA, 22 nt, Human
ucuaagaaaucagaugaugagg

SEQ ID NO: 760861 - RNA, 22 nt, Human
gaggugcuuccuuugggcucug

SEQ ID NO: 760862 - RNA, 22 nt, Human
aggcuuuauuugaucuauaugc

SEQ ID NO: 760863 - RNA, 22 nt, Human
ugccacuggacccagaacucuu

SEQ ID NO: 760864 - RNA, 22 nt, Human
caugcuuuuugacaacaagcug

SEQ ID NO: 760865 - RNA, 22 nt, Human
uaaguacauuugggaccaccug

SEQ ID NO: 760866 - RNA, 22 nt, Human
agccugcuugagaguccuggcu

SEQ ID NO: 760867 - RNA, 22 nt, Human
uucucuucaucucaguaaaugu

SEQ ID NO: 760868 - RNA, 21 nt, Human
acagcuggaaauuacuugccc

SEQ ID NO: 760869 - RNA, 22 nt, Human
acaaugaugcagaugaguaaga

SEQ ID NO: 760870 - RNA, 22 nt, Human
uuugacaguaauaaagcacaag

SEQ ID NO: 760871 - RNA, 22 nt, Human
aaguggagucccuacaaccagc

SEQ ID NO: 760872 - RNA, 22 nt, Human
ucccaggaauccguccucuaga

SEQ ID NO: 760873 - RNA, 22 nt, Human
cagcaucuguuggauggauaag

SEQ ID NO: 760874 - RNA, 22 nt, Human
ccagucccaucucugucgcuua

SEQ ID NO: 760875 - RNA, 22 nt, Human
uggagagaacagugucugaaag

SEQ ID NO: 760876 - RNA, 18 nt, Human
gggcaagcggcugucacc

SEQ ID NO: 760877 - RNA, 22 nt, Human
uaaagcaaggaauagaguaguc

SEQ ID NO: 760878 - RNA, 19 nt, Human
accuucagaguggcacaaa

SEQ ID NO: 760879 - RNA, 22 nt, Human
gcucagggaaagagcuccuguc

SEQ ID NO: 760880 - RNA, 22 nt, Human
ugcuugcugggccaauggcaau

SEQ ID NO: 760881 - RNA, 22 nt, Human
ucccacacuacacgguuguugg

SEQ ID NO: 760882 - RNA, 22 nt, Human
cccucagcuccacccucagcag

SEQ ID NO: 760883 - RNA, 19 nt, Human
gagcugagaguagcacugg

SEQ ID NO: 760884 - RNA, 19 nt, Human
cccagcuugaccaccugcu

SEQ ID NO: 760885 - RNA, 22 nt, Human
uggcucugucgccguuuggaau

SEQ ID NO: 760886 - RNA, 22 nt, Human
uuccuucuggaggcuccagggg

SEQ ID NO: 760887 - RNA, 22 nt, Human
ucagcauguucuuaggucacag

SEQ ID NO: 760888 - RNA, 22 nt, Human
aauugcuaguuuguagcauuug

SEQ ID NO: 760889 - RNA, 22 nt, Human
aaaaccacaguuacuuuugcac

SEQ ID NO: 760890 - RNA, 22 nt, Human
uaaucacuuuucauuaguaccu

SEQ ID NO: 760891 - RNA, 22 nt, Human
uaaaguuuauuugaacaucucu

SEQ ID NO: 760892 - RNA, 22 nt, Human
ugcuugugugagggccugggag

SEQ ID NO: 760893 - RNA, 22 nt, Human
cucuccagggguagaugccuuc

SEQ ID NO: 760894 - RNA, 22 nt, Human
cuuucacucgagcuccugcagc

SEQ ID NO: 760895 - RNA, 22 nt, Human
uucuucaauuauuggaaagaaa

SEQ ID NO: 760896 - RNA, 16 nt, Human
uucucugggguugugc

SEQ ID NO: 760897 - RNA, 22 nt, Human
cauguguauuauucuuguggaa

SEQ ID NO: 760898 - RNA, 22 nt, Human
agucuccuuggccucaaugccu

SEQ ID NO: 760899 - RNA, 22 nt, Human
aaguaaugguuaaauaauucua

SEQ ID NO: 760900 - RNA, 22 nt, Human
uuguggauucuauuucccagaa

SEQ ID NO: 760901 - RNA, 22 nt, Human
gcuuuagagcccagcuuggugg

SEQ ID NO: 760902 - RNA, 22 nt, Human
aaaguuccuuuuauagacauga

SEQ ID NO: 760903 - RNA, 22 nt, Human
aaagcaguauauugguaguugu

SEQ ID NO: 760904 - RNA, 22 nt, Human
cucucugugcucacaagggcag

SEQ ID NO: 760905 - RNA, 21 nt, Human
ugacaacagaacugggcaagc

SEQ ID NO: 760906 - RNA, 22 nt, Human
uacagaggcuggguuuucaggg

SEQ ID NO: 760907 - RNA, 22 nt, Human
uccaguuucauagcuaaggaac

SEQ ID NO: 760908 - RNA, 20 nt, Human
uuugcuaugcauaucugacc

SEQ ID NO: 760909 - RNA, 22 nt, Human
uggcagcagcaaauggcauauc

SEQ ID NO: 760910 - RNA, 22 nt, Human
aauagcuuggacccauugcuuu

SEQ ID NO: 760911 - RNA, 22 nt, Human
acagacauucagcuaagucuau

SEQ ID NO: 760912 - RNA, 22 nt, Human
acaaugaaagcaagaagacggc

SEQ ID NO: 760913 - RNA, 22 nt, Human
aauaucuguuguucuaagccac

SEQ ID NO: 760914 - RNA, 22 nt, Human
gcuguuccugcuuagaggucgg

SEQ ID NO: 760915 - RNA, 19 nt, Human
cuuccuugcuccccaugug

SEQ ID NO: 760916 - RNA, 22 nt, Human
cagaaagccgacuuacaaugga

SEQ ID NO: 760917 - RNA, 22 nt, Human
uguuaggacuccccagaagcug

SEQ ID NO: 760918 - RNA, 22 nt, Human
aguacaaagugcuccugguucu

SEQ ID NO: 760919 - RNA, 22 nt, Human
uugcaaauguuauacugccagu

SEQ ID NO: 760920 - RNA, 22 nt, Human
ugggaaagacucaggacaggag

SEQ ID NO: 760921 - RNA, 22 nt, Human
aagggaugcaggaaagaagguu

SEQ ID NO: 760922 - RNA, 20 nt, Human
gcaaaauaggcucuguuggu

SEQ ID NO: 760923 - RNA, 22 nt, Human
ugaggacaaucccuaacucaga

SEQ ID NO: 760924 - RNA, 22 nt, Human
ucucuuggaacacuugcucuua

SEQ ID NO: 760925 - RNA, 22 nt, Human
aaaggcuuuaaaauguacauau

SEQ ID NO: 760926 - RNA, 21 nt, Human
gcccccuggacuccucaucca

SEQ ID NO: 760927 - RNA, 22 nt, Human
uuccuggagaguuuucccaaag

SEQ ID NO: 760928 - RNA, 22 nt, Human
cugcuuuaucugagacaaguca

SEQ ID NO: 760929 - RNA, 22 nt, Human
ucuccuggccgggcuguccccu

SEQ ID NO: 760930 - RNA, 22 nt, Human
gggggagcuacaggucccuugg

SEQ ID NO: 760931 - RNA, 22 nt, Human
acaacaguccaguauagacugu

SEQ ID NO: 760932 - RNA, 22 nt, Human
ggcagcuggccuccucgcccac

SEQ ID NO: 760933 - RNA, 22 nt, Human
aaagcaggguccaaggagaugu

SEQ ID NO: 760934 - RNA, 22 nt, Human
ucacaggagucaaggaauagua

SEQ ID NO: 760935 - RNA, 22 nt, Human
ugggccuggguuccuccugggc

SEQ ID NO: 760936 - RNA, 22 nt, Human
ccugaggagauuguggcugggg

SEQ ID NO: 760937 - RNA, 22 nt, Human
ugugaacuuaagauuccuuauc

SEQ ID NO: 760938 - RNA, 23 nt, Human
gggagaauaugaggaugauggug

SEQ ID NO: 760939 - RNA, 22 nt, Human
uacacagaaauuguguagggau

SEQ ID NO: 760940 - RNA, 22 nt, Human
auuuacucgugcuucauugaau

SEQ ID NO: 760941 - RNA, 22 nt, Human
ugcaaggcacccacucugcuuu

SEQ ID NO: 760942 - RNA, 22 nt, Human
ugagccugcugucgcuggaccc

SEQ ID NO: 760943 - RNA, 22 nt, Human
aauucaaagccgcuugggaauc

SEQ ID NO: 760944 - RNA, 22 nt, Human
ugagugugcagggaaguggcgg

SEQ ID NO: 760945 - RNA, 22 nt, Human
ucccugugaaucagaagcaggu

SEQ ID NO: 760946 - RNA, 22 nt, Human
cuggucaaaaauuaugcuuacu

SEQ ID NO: 760947 - RNA, 22 nt, Human
ggcagugaaugaaacagaggcu

SEQ ID NO: 760948 - RNA, 22 nt, Human
guuguuuuuguucucuauagcu

SEQ ID NO: 760949 - RNA, 22 nt, Human
gaagccaacauuccaaguagaa

SEQ ID NO: 760950 - RNA, 20 nt, Human
guucacaggcuuccuuucag

SEQ ID NO: 760951 - RNA, 22 nt, Human
ggagccagagucugcaguguaa

SEQ ID NO: 760952 - RNA, 22 nt, Human
aggggcugggacagagccaagc

SEQ ID NO: 760953 - RNA, 22 nt, Human
ugagaauuugcauuucuaacaa

SEQ ID NO: 760954 - RNA, 22 nt, Human
ucaguucuuaguaaugcagucu

SEQ ID NO: 760955 - RNA, 21 nt, Human
aaggggcaaacccaggacacc

SEQ ID NO: 760956 - RNA, 22 nt, Human
cuguuugugauuagcagugggu

SEQ ID NO: 760957 - RNA, 22 nt, Human
gcaggggcugagcaccagcggg

SEQ ID NO: 760958 - RNA, 22 nt, Human
ggcugagccaugggcacugcag

SEQ ID NO: 760959 - RNA, 22 nt, Human
guagcugauccugaggacaggg

SEQ ID NO: 760960 - RNA, 22 nt, Human
cugcucaguaauaguccuaucu

SEQ ID NO: 760961 - RNA, 22 nt, Human
ugcauugcauuugucaugaaga

SEQ ID NO: 760962 - RNA, 22 nt, Human
aggguggccaccaaguauguca

SEQ ID NO: 760963 - RNA, 22 nt, Human
ugcucaggccagccggacagag

SEQ ID NO: 760964 - RNA, 19 nt, Human
ccagagguuugcugggccu

SEQ ID NO: 760965 - RNA, 22 nt, Human
ucuguucaugucuuuuuaagug

SEQ ID NO: 760966 - RNA, 22 nt, Human
cucccaagauaaauaaggcagu

SEQ ID NO: 760967 - RNA, 22 nt, Human
uuacaguagauacaaugaguaa

SEQ ID NO: 760968 - RNA, 22 nt, Human
ugcugagcgcauccggcggccg

SEQ ID NO: 760969 - RNA, 22 nt, Human
agcauauucaugccagacuacu

SEQ ID NO: 760970 - RNA, 22 nt, Human
ugggaccuguuacauugaguua

SEQ ID NO: 760971 - RNA, 22 nt, Human
agcuccugaaaagcgcuugcuu

SEQ ID NO: 760972 - RNA, 22 nt, Human
agaggccaggcugcagagggau

SEQ ID NO: 760973 - RNA, 22 nt, Human
auaucaaacgaaguuauuuuaa

SEQ ID NO: 760974 - RNA, 22 nt, Human
agguggccccaggccucugcca

SEQ ID NO: 760975 - RNA, 22 nt, Human
caugcacauguggcuauguaau

SEQ ID NO: 760976 - RNA, 22 nt, Human
auaaagucaaggcauuuuauga

SEQ ID NO: 760977 - RNA, 22 nt, Human
uuucauagcugaaaauguugaa

SEQ ID NO: 760978 - RNA, 15 nt, Human
auuauuugugcucag

SEQ ID NO: 760979 - RNA, 22 nt, Human
aaauaugagauguucucuuucg

SEQ ID NO: 760980 - RNA, 22 nt, Human
aaauaguuacuucugcugucuu

SEQ ID NO: 760981 - RNA, 22 nt, Human
acuggggugaaauuggaguguc

SEQ ID NO: 760982 - RNA, 19 nt, Human
uccuccuuacuuccucuug

SEQ ID NO: 760983 - RNA, 22 nt, Human
ucagacaggccucuccagccuc

SEQ ID NO: 760984 - RNA, 22 nt, Human
acuuccagauggccccaucuaa

SEQ ID NO: 760985 - RNA, 21 nt, Human
ugaagggguggcagugugcuu

SEQ ID NO: 760986 - RNA, 22 nt, Human
gaccaaggaagaggggagccag

SEQ ID NO: 760987 - RNA, 22 nt, Human
ggcaggccugagaggcagggcu

SEQ ID NO: 760988 - RNA, 22 nt, Human
ucugcgugaauuugcauugugg

SEQ ID NO: 760989 - RNA, 19 nt, Human
ggaguggguaguuaguggu

SEQ ID NO: 760990 - RNA, 22 nt, Human
agaacagggacuggaggcuuca

SEQ ID NO: 760991 - RNA, 22 nt, Human
agcccagcaguaagauuagaga

SEQ ID NO: 760992 - RNA, 22 nt, Human
acugggcugcuugagugccuuc

SEQ ID NO: 760993 - RNA, 22 nt, Human
ucucauucauccaaggauuuau

SEQ ID NO: 760994 - RNA, 22 nt, Human
gcuuccuggagggagagagcug

SEQ ID NO: 760995 - RNA, 22 nt, Human
cuccaggccagggaaguggaca

SEQ ID NO: 760996 - RNA, 18 nt, Human
cucugaaagacacaccag

SEQ ID NO: 760997 - RNA, 20 nt, Human
uuucuggguacucucccucu

SEQ ID NO: 760998 - RNA, 22 nt, Human
cuggagagaccgaaagaggcug

SEQ ID NO: 760999 - RNA, 22 nt, Human
acagacaguaugguggggcuga

SEQ ID NO: 761000 - RNA, 22 nt, Human
gggcagugucgaggucuggucc

SEQ ID NO: 761001 - RNA, 22 nt, Human
uggcugaauaaaauaugguguu

SEQ ID NO: 761002 - RNA, 22 nt, Human
cccaggcugaguuagagguguc

SEQ ID NO: 761003 - RNA, 22 nt, Human
gcugucaggaacaugccuuggu

SEQ ID NO: 761004 - RNA, 22 nt, Human
gggcuuaaggccagugugcuuu

SEQ ID NO: 761005 - RNA, 22 nt, Human
aguccaggcggguauagaggcu

SEQ ID NO: 761006 - RNA, 22 nt, Human
agugaaauuuguuuagauaggu

SEQ ID NO: 761007 - RNA, 22 nt, Human
accaggcuguugggcccagugu

SEQ ID NO: 761008 - RNA, 22 nt, Human
uuagagucaagcugcauguucu

SEQ ID NO: 761009 - RNA, 22 nt, Human
aauugcuuuuauuuagggccag

SEQ ID NO: 761010 - RNA, 22 nt, Human
cagauuucaaggaggcacucca

SEQ ID NO: 761011 - RNA, 22 nt, Human
caccuggcagcuguuggccacg

SEQ ID NO: 761012 - RNA, 22 nt, Human
uguggggacugaguggaggcuu

SEQ ID NO: 761013 - RNA, 22 nt, Human
ugccuggcuaauuuuuguaucc

SEQ ID NO: 761014 - RNA, 22 nt, Human
uuuggaauuggaaagugcugug

SEQ ID NO: 761015 - RNA, 22 nt, Human
augcaugauccugagcaaccca

SEQ ID NO: 761016 - RNA, 22 nt, Human
acaagagauuaucuacagauga

SEQ ID NO: 761017 - RNA, 22 nt, Human
uagugucuucaggagauaugag

SEQ ID NO: 761018 - RNA, 22 nt, Human
gggcucuggggucagacagccu

SEQ ID NO: 761019 - RNA, 22 nt, Human
acagaaaaugccagaagggugg

SEQ ID NO: 761020 - RNA, 21 nt, Human
ggaggucccuucugguuucag

SEQ ID NO: 761021 - RNA, 22 nt, Human
agcagcugucccuuaacaucag

SEQ ID NO: 761022 - RNA, 22 nt, Human
uauagaagagacaugugcauag

SEQ ID NO: 761023 - RNA, 22 nt, Human
agguacaucuauggggauagaa

SEQ ID NO: 761024 - RNA, 20 nt, Human
aaaaauugauaucgcuuccu

SEQ ID NO: 761025 - RNA, 22 nt, Human
ugcuuggcuuucugagcuucug

SEQ ID NO: 761026 - RNA, 22 nt, Human
gccaccagugggggccugggca

SEQ ID NO: 761027 - RNA, 23 nt, Human
ccugcucaggcgugugcccugcu

SEQ ID NO: 761028 - RNA, 22 nt, Human
ccucaaauuggcauuaauuaag

SEQ ID NO: 761029 - RNA, 22 nt, Human
gaaggagggugcggaucugagc

SEQ ID NO: 761030 - RNA, 22 nt, Human
gccagcugcaaaguauguugaa

SEQ ID NO: 761031 - RNA, 20 nt, Human
auacaaucaugaggaaaaag

SEQ ID NO: 761032 - RNA, 22 nt, Human
ugacagcugagccccaggcaag

SEQ ID NO: 761033 - RNA, 22 nt, Human
gcucuugaaaaucaaaagggaa

SEQ ID NO: 761034 - RNA, 22 nt, Human
cagcuguugucaccucacaucc

SEQ ID NO: 761035 - RNA, 22 nt, Human
cagccacuacaauugguuccau

SEQ ID NO: 761036 - RNA, 22 nt, Human
ccagagguccugcucacuggug

SEQ ID NO: 761037 - RNA, 22 nt, Human
ccaguguuauuuuagaguguga

SEQ ID NO: 761038 - RNA, 22 nt, Human
gugggagccauuuccaguaugc

SEQ ID NO: 761039 - RNA, 22 nt, Human
uuuagaaugugacuguauuuga

SEQ ID NO: 761040 - RNA, 22 nt, Human
cugucguguucacuguggccua

SEQ ID NO: 761041 - RNA, 22 nt, Human
aauuccuuuggaucuucuggag

SEQ ID NO: 761042 - RNA, 22 nt, Human
ugcuaggugcuccucccuaauu

SEQ ID NO: 761043 - RNA, 22 nt, Human
aaagccaggaggagggcgcucg

SEQ ID NO: 761044 - RNA, 22 nt, Human
guucacaaauaugcacuuacga

SEQ ID NO: 761045 - RNA, 22 nt, Human
gagccacagcaaccucaaagga

SEQ ID NO: 761046 - RNA, 22 nt, Human
cugaaugauauaagaucuuucu

SEQ ID NO: 761047 - RNA, 22 nt, Human
uaauacaauggaguugggcccc

SEQ ID NO: 761048 - RNA, 22 nt, Human
cccaggcuggauuucgguggca

SEQ ID NO: 761049 - RNA, 22 nt, Human
auucucaguucacuaguuucuu

SEQ ID NO: 761050 - RNA, 22 nt, Human
agcagcauagaugcuauccgag

SEQ ID NO: 761051 - RNA, 22 nt, Human
cuccugggcugucggcgcucug

SEQ ID NO: 761052 - RNA, 23 nt, Human
cuugcaggaagcagauggcacac

SEQ ID NO: 761053 - RNA, 22 nt, Human
agggcaaguugagugugcgugg

SEQ ID NO: 761054 - RNA, 22 nt, Human
uaggaaauauugauuucaguca

SEQ ID NO: 761055 - RNA, 22 nt, Human
ucuguuuagaugcuuuaucugu

SEQ ID NO: 761056 - RNA, 22 nt, Human
gccaacagcugggugcaugucc

SEQ ID NO: 761057 - RNA, 22 nt, Human
augauggaugucacagucugua

SEQ ID NO: 761058 - RNA, 22 nt, Human
ccaggcugccgaggaaagaaag

SEQ ID NO: 761059 - RNA, 22 nt, Human
gugguaauuuaauccuacacug

SEQ ID NO: 761060 - RNA, 22 nt, Human
uacaguggggagcucaggagag

SEQ ID NO: 761061 - RNA, 21 nt, Human
aaggagccuaggaggcucagg

SEQ ID NO: 761062 - RNA, 22 nt, Human
acccagcuguuucccgugucau

SEQ ID NO: 761063 - RNA, 22 nt, Human
caucaaaguugguauauuugca

SEQ ID NO: 761064 - RNA, 22 nt, Human
aucucagaaacauaucuaaucc

SEQ ID NO: 761065 - RNA, 22 nt, Human
cagaaauggaauuuuccaucac

SEQ ID NO: 761066 - RNA, 22 nt, Human
aacaaucuguucgauagaaaau

SEQ ID NO: 761067 - RNA, 22 nt, Human
agagcuggauggucaagauggc

SEQ ID NO: 761068 - RNA, 22 nt, Human
cagggaugcugcuuaggcaguu

SEQ ID NO: 761069 - RNA, 22 nt, Human
aaucuuagguuuggcuucaucu

SEQ ID NO: 761070 - RNA, 22 nt, Human
agugaggucauacuggagaggg

SEQ ID NO: 761071 - RNA, 22 nt, Human
gggcagugguccaggcuacagc

SEQ ID NO: 761072 - RNA, 22 nt, Human
cagcacccuuuccacugccuug

SEQ ID NO: 761073 - RNA, 22 nt, Human
cacccaggcuggagugcagggg

SEQ ID NO: 761074 - RNA, 22 nt, Human
aggugcaccugagggugucauc

SEQ ID NO: 761075 - RNA, 22 nt, Human
cugagggguauccaagggguaa

SEQ ID NO: 761076 - RNA, 22 nt, Human
cuugaaaauaagaaagacuuuc

SEQ ID NO: 761077 - RNA, 22 nt, Human
gacauguuaucucuggcuucaa

SEQ ID NO: 761078 - RNA, 22 nt, Human
auggcuguguuagaugcuaagu

SEQ ID NO: 761079 - RNA, 22 nt, Human
cccuggggcugagggauggccg

SEQ ID NO: 761080 - RNA, 22 nt, Human
gcugcuggcacuggagugagcc

SEQ ID NO: 761081 - RNA, 22 nt, Human
gcagcucuccucugugaggaac

SEQ ID NO: 761082 - RNA, 20 nt, Human
ugucauucuucuuucacagg

SEQ ID NO: 761083 - RNA, 22 nt, Human
guggcaggaucacggcucacug

SEQ ID NO: 761084 - RNA, 22 nt, Human
uuccuugaaaguuugaacugac

SEQ ID NO: 761085 - RNA, 22 nt, Human
uuuuaaucaugcuucuaugucc

SEQ ID NO: 761086 - RNA, 22 nt, Human
uagggguguuucgagagagguu

SEQ ID NO: 761087 - RNA, 22 nt, Human
cuuccccaaccccgacugugug

SEQ ID NO: 761088 - RNA, 22 nt, Human
guccucugacucagccuuggga

SEQ ID NO: 761089 - RNA, 22 nt, Human
ugccaaaauggccaaaagcuag

SEQ ID NO: 761090 - RNA, 22 nt, Human
ccuuuuggccaggucagugcag

SEQ ID NO: 761091 - RNA, 22 nt, Human
cugagaaagugaggguuaaaca

SEQ ID NO: 761092 - RNA, 17 nt, Human
uuuuguucaucuucaaa

SEQ ID NO: 761093 - RNA, 22 nt, Human
auggcagacgaggcagcagggg

SEQ ID NO: 761094 - RNA, 22 nt, Human
agcuucuuaaguuccugcagca

SEQ ID NO: 761095 - RNA, 22 nt, Human
guccagagauggacgagcagau

SEQ ID NO: 761096 - RNA, 22 nt, Human
uuuacagagagagaacuggacu

SEQ ID NO: 761097 - RNA, 22 nt, Human
aacagcuugcugcaccuuaaua

SEQ ID NO: 761098 - RNA, 22 nt, Human
cccagcaggucggugcugccug

SEQ ID NO: 761099 - RNA, 22 nt, Human
ucagggcacauucugcaguggc

SEQ ID NO: 761100 - RNA, 21 nt, Human
ucacuggaauacaauugauuu

SEQ ID NO: 761101 - RNA, 22 nt, Human
agcaguguuggugggagcaucu

SEQ ID NO: 761102 - RNA, 22 nt, Human
uggcuccaccgccgcggagcuc

SEQ ID NO: 761103 - RNA, 22 nt, Human
ucuccagggacauguuucugga

SEQ ID NO: 761104 - RNA, 22 nt, Human
agaugggcgcccuggacugagg

SEQ ID NO: 761105 - RNA, 22 nt, Human
uucccucuuuuccaacaguugu

SEQ ID NO: 761106 - RNA, 22 nt, Human
uagcagaaacuguuacagaagg

SEQ ID NO: 761107 - RNA, 22 nt, Human
aaacugucauuggaugcauuug

SEQ ID NO: 761108 - RNA, 22 nt, Human
acaaaugauuuuccaagccagu

SEQ ID NO: 761109 - RNA, 22 nt, Human
aaguucaucaaagaguaaauau

SEQ ID NO: 761110 - RNA, 22 nt, Human
auagauguacguauguaaauca

SEQ ID NO: 761111 - RNA, 22 nt, Human
aaaucacuuaaauggcuuauuu

SEQ ID NO: 761112 - RNA, 22 nt, Human
ucagucuccuuuccucuagaca

SEQ ID NO: 761113 - RNA, 19 nt, Human
agcauccagucaugggauc

SEQ ID NO: 761114 - RNA, 18 nt, Human
ccugagcccugcuuacuu

SEQ ID NO: 761115 - RNA, 23 nt, Human
acugccagauugaagguuucuua

SEQ ID NO: 761116 - RNA, 22 nt, Human
uacauugagaaccacugcuuag

SEQ ID NO: 761117 - RNA, 22 nt, Human
uuucuucuguuuguaguuacac

SEQ ID NO: 761118 - RNA, 22 nt, Human
cagucugggacugagcuccacc

SEQ ID NO: 761119 - RNA, 19 nt, Human
gacaggaaggcuaccagua

SEQ ID NO: 761120 - RNA, 22 nt, Human
gaccugaaauuugugguagaac

SEQ ID NO: 761121 - RNA, 22 nt, Human
uucuguacuucaggggcucugu

SEQ ID NO: 761122 - RNA, 22 nt, Human
uggguccacggaagacuuaggg

SEQ ID NO: 761123 - RNA, 22 nt, Human
gcauccaggacuauaugaugau

SEQ ID NO: 761124 - RNA, 18 nt, Human
ugggcacaaugaacagca

SEQ ID NO: 761125 - RNA, 22 nt, Human
uccuuuccagccucaccucagc

SEQ ID NO: 761126 - RNA, 22 nt, Human
uuacuuaaacagaaaugcagaa

SEQ ID NO: 761127 - RNA, 22 nt, Human
aacccuggcccuggaauaggca

SEQ ID NO: 761128 - RNA, 22 nt, Human
cagggucugaaacugaucacag

SEQ ID NO: 761129 - RNA, 22 nt, Human
uggagagcacugucucauuuug

SEQ ID NO: 761130 - RNA, 22 nt, Human
ugagggagcacacacugaagug

SEQ ID NO: 761131 - RNA, 22 nt, Human
ucagauuuauguggcuaggcuc

SEQ ID NO: 761132 - RNA, 22 nt, Human
auucaguaggucuagaauaaga

SEQ ID NO: 761133 - RNA, 22 nt, Human
ucccucugcuagugcuugagcu

SEQ ID NO: 761134 - RNA, 23 nt, Human
aguucacugagguugaccacugg

SEQ ID NO: 761135 - RNA, 22 nt, Human
gcucuggguagccacugccugg

SEQ ID NO: 761136 - RNA, 23 nt, Human
aaauauucuuuuuuaguaagugc

SEQ ID NO: 761137 - RNA, 22 nt, Human
cucuggcuggcaccugaucuga

SEQ ID NO: 761138 - RNA, 22 nt, Human
ugucuccauagaagagacugca

SEQ ID NO: 761139 - RNA, 22 nt, Human
uccuggcccggccgggccugcu

SEQ ID NO: 761140 - RNA, 22 nt, Human
agagucugugcuuucaucagga

SEQ ID NO: 761141 - RNA, 22 nt, Human
uacauucaacaugucacuaugu

SEQ ID NO: 761142 - RNA, 22 nt, Human
acauuaaaaaauguugcaugaa

SEQ ID NO: 761143 - RNA, 22 nt, Human
uggaauaugcaauugcauuuca

SEQ ID NO: 761144 - RNA, 22 nt, Human
acagggcuuagaacuuggccuc

SEQ ID NO: 761145 - RNA, 22 nt, Human
cucaggaggaugacugccuugg

SEQ ID NO: 761146 - RNA, 22 nt, Human
aacauaauguggccaaagucac

SEQ ID NO: 761147 - RNA, 22 nt, Human
aguguauguccugaggggagaa

SEQ ID NO: 761148 - RNA, 22 nt, Human
ccucuggucccagcucugcugc

SEQ ID NO: 761149 - RNA, 22 nt, Human
acagggcagagaggcaggcuug

SEQ ID NO: 761150 - RNA, 22 nt, Human
uucuaaugaaaguggaccaugg

SEQ ID NO: 761151 - RNA, 22 nt, Human
agaugguaaucacauuuaucug

SEQ ID NO: 761152 - RNA, 22 nt, Human
gaugccuguggugagcacacau

SEQ ID NO: 761153 - RNA, 22 nt, Human
agccagggggacgcuuucuggc

SEQ ID NO: 761154 - RNA, 22 nt, Human
agagcuccucacuucggguuca

SEQ ID NO: 761155 - RNA, 22 nt, Human
augcacuuaaauaacauaacuu

SEQ ID NO: 761156 - RNA, 23 nt, Human
agacaaacuuccuucacugcacc

SEQ ID NO: 761157 - RNA, 20 nt, Human
uccaguuuuggagacauucu

SEQ ID NO: 761158 - RNA, 22 nt, Human
uggguaggaaucgaguguaugg

SEQ ID NO: 761159 - RNA, 22 nt, Human
uggcuaugacuucguacugucu

SEQ ID NO: 761160 - RNA, 22 nt, Human
ggcacaaguuugaugugaguua

SEQ ID NO: 761161 - RNA, 22 nt, Human
cuggcuaaagagcaagaagaug

SEQ ID NO: 761162 - RNA, 17 nt, Human
ugcuucuguauugcugg

SEQ ID NO: 761163 - RNA, 22 nt, Human
acacugaauauacaaugaauau

SEQ ID NO: 761164 - RNA, 22 nt, Human
uaagaacaucuguccccagauu

SEQ ID NO: 761165 - RNA, 22 nt, Human
uugcccaccuuagucuucagac

SEQ ID NO: 761166 - RNA, 22 nt, Human
ugccagcucccuuuucuccucc

SEQ ID NO: 761167 - RNA, 22 nt, Human
acugucaugcauuauggcaugu

SEQ ID NO: 761168 - RNA, 22 nt, Human
auugggcuuuauguaggggaag

SEQ ID NO: 761169 - RNA, 22 nt, Human
uuuucucuacaaaauaaccagc

SEQ ID NO: 761170 - RNA, 20 nt, Human
uacaauauucccacuuugcu

SEQ ID NO: 761171 - RNA, 22 nt, Human
ggaguggcagcgaggaucagau

SEQ ID NO: 761172 - RNA, 22 nt, Human
gaagcaagugcaaggaagaggc

SEQ ID NO: 761173 - RNA, 22 nt, Human
ggcucugaacauggggaggagu

SEQ ID NO: 761174 - RNA, 22 nt, Human
caucugaaaucugccuacaagc

SEQ ID NO: 761175 - RNA, 22 nt, Human
aaggcugucuuuuccucuuccc

SEQ ID NO: 761176 - RNA, 22 nt, Human
uucuguuuugcacagacuugaa

SEQ ID NO: 761177 - RNA, 22 nt, Human
ugcugccagccaggccauggag

SEQ ID NO: 761178 - RNA, 22 nt, Human
aguuucacauagcucagugcuc

SEQ ID NO: 761179 - RNA, 22 nt, Human
uacuacauacagaauuuagaga

SEQ ID NO: 761180 - RNA, 20 nt, Human
acccuccacuguucacugug

SEQ ID NO: 761181 - RNA, 22 nt, Human
uggcaggcaggcagccuucuga

SEQ ID NO: 761182 - RNA, 22 nt, Human
gccaugcaauggaauaaaauca

SEQ ID NO: 761183 - RNA, 22 nt, Human
caggcaccccaggugagcacug

SEQ ID NO: 761184 - RNA, 19 nt, Human
aaugaguuccaugaaaaga

SEQ ID NO: 761185 - RNA, 23 nt, Human
agaacagugacuaauauagagag

SEQ ID NO: 761186 - RNA, 22 nt, Human
gcagcagcggggccccugcgcg

SEQ ID NO: 761187 - RNA, 22 nt, Human
guaugcaugcauguguauguac

SEQ ID NO: 761188 - RNA, 22 nt, Human
gaggaggaaaggaguugaaaug

SEQ ID NO: 761189 - RNA, 22 nt, Human
caggccucaggggcucaggcug

SEQ ID NO: 761190 - RNA, 22 nt, Human
ccuggguggcagagguugcagu

SEQ ID NO: 761191 - RNA, 22 nt, Human
cuccagauccagcugagcugca

SEQ ID NO: 761192 - RNA, 22 nt, Human
uguaacaaugaauauagugacu

SEQ ID NO: 761193 - RNA, 22 nt, Human
gagcuccaccaccuucaggcag

SEQ ID NO: 761194 - RNA, 22 nt, Human
ugugcuccaucauccauaaucu

SEQ ID NO: 761195 - RNA, 22 nt, Human
ucagggcaccaaaaaagaugcc

SEQ ID NO: 761196 - RNA, 22 nt, Human
uaaagcaaugaaaguuuugcag

SEQ ID NO: 761197 - RNA, 22 nt, Human
uucugggcauguuacauucugu

SEQ ID NO: 761198 - RNA, 23 nt, Human
uccagcucccuucaauggcacug

SEQ ID NO: 761199 - RNA, 20 nt, Human
ucccucaguccuggcuuugu

SEQ ID NO: 761200 - RNA, 22 nt, Human
gaaaggccauuucugaggguuu

SEQ ID NO: 761201 - RNA, 22 nt, Human
ucaguggauugacaugaaaaag

SEQ ID NO: 761202 - RNA, 22 nt, Human
acuuggauauguucacuagacc

SEQ ID NO: 761203 - RNA, 22 nt, Human
guggcccuauuugaggacccca

SEQ ID NO: 761204 - RNA, 22 nt, Human
acugcuagugagaaaauaacca

SEQ ID NO: 761205 - RNA, 22 nt, Human
uccuggagcuggugucuuuccc

SEQ ID NO: 761206 - RNA, 22 nt, Human
aaacuucaaggauuugcaaauc

SEQ ID NO: 761207 - RNA, 22 nt, Human
ugucacaaguaacuggcaaugc

SEQ ID NO: 761208 - RNA, 22 nt, Human
ucuucuuccucauuuauacaua

SEQ ID NO: 761209 - RNA, 22 nt, Human
uguuuuuaaauaaugauagaaa

SEQ ID NO: 761210 - RNA, 22 nt, Human
cgugugcgcacaccuguuucca

SEQ ID NO: 761211 - RNA, 22 nt, Human
agagcccuaaacccugccuugg

SEQ ID NO: 761212 - RNA, 19 nt, Human
gcugggcuuggguuuguag

SEQ ID NO: 761213 - RNA, 22 nt, Human
ccuccauguaaagguccccuca

SEQ ID NO: 761214 - RNA, 22 nt, Human
uugaggcacacacagguugcau

SEQ ID NO: 761215 - RNA, 22 nt, Human
ugcuucugggccugguguuccc

SEQ ID NO: 761216 - RNA, 22 nt, Human
aacuggaaagaucaguaggaag

SEQ ID NO: 761217 - RNA, 22 nt, Human
auuaguguuguaagaagcugcc

SEQ ID NO: 761218 - RNA, 19 nt, Human
accagcccacucccaguuu

SEQ ID NO: 761219 - RNA, 22 nt, Human
ugcaagcacucaaugcaaacag

SEQ ID NO: 761220 - RNA, 22 nt, Human
acuagacugggccagucaaauu

SEQ ID NO: 761221 - RNA, 22 nt, Human
ucuuuuaagccucuggcauagg

SEQ ID NO: 761222 - RNA, 22 nt, Human
guguggcuuucuggguuuaauu

SEQ ID NO: 761223 - RNA, 22 nt, Human
uuucuaauaucacuuccagcug

SEQ ID NO: 761224 - RNA, 22 nt, Human
aaaacuuucagggauacagaaa

SEQ ID NO: 761225 - RNA, 22 nt, Human
uuccuggguucccucucauucu

SEQ ID NO: 761226 - RNA, 22 nt, Human
aacagacaacuccuguggcuca

SEQ ID NO: 761227 - RNA, 22 nt, Human
aauccuggccuagcugggcuca

SEQ ID NO: 761228 - RNA, 22 nt, Human
cagaagguuuacacuggacugu

SEQ ID NO: 761229 - RNA, 22 nt, Human
aagcacagggacucaggaccgg

SEQ ID NO: 761230 - RNA, 22 nt, Human
cagucucucuuguagugcagcu

SEQ ID NO: 761231 - RNA, 22 nt, Human
uuugacaguccccugauguuug

SEQ ID NO: 761232 - RNA, 21 nt, Human
gauaaaaugggccuugguccu

SEQ ID NO: 761233 - RNA, 22 nt, Human
ucauggcucuaaagacauagau

SEQ ID NO: 761234 - RNA, 22 nt, Human
cagucccacaagaucuccacaa

SEQ ID NO: 761235 - RNA, 21 nt, Human
uggaggaauaaagcacagaag

SEQ ID NO: 761236 - RNA, 22 nt, Human
guauacaauacacaaugcucug

SEQ ID NO: 761237 - RNA, 22 nt, Human
uaugagaauaaucugguaaaua

SEQ ID NO: 761238 - RNA, 22 nt, Human
cucaccccuguaauuccagcac

SEQ ID NO: 761239 - RNA, 22 nt, Human
aggaagccugcaggugacugcu

SEQ ID NO: 761240 - RNA, 22 nt, Human
ggagaaugauucuuugcucacu

SEQ ID NO: 761241 - RNA, 22 nt, Human
ccucaaauaaguuuuauuuauc

SEQ ID NO: 761242 - RNA, 22 nt, Human
caggcagagugagguggucuaa

SEQ ID NO: 761243 - RNA, 22 nt, Human
agaauuagaggccauguacuug

SEQ ID NO: 761244 - RNA, 22 nt, Human
uggaggugggagggacuguccu

SEQ ID NO: 761245 - RNA, 22 nt, Human
aauaaguugcuucagcuuggug

SEQ ID NO: 761246 - RNA, 22 nt, Human
agagaagggccuguauguaauc

SEQ ID NO: 761247 - RNA, 22 nt, Human
aagggacauagacuguacaucu

SEQ ID NO: 761248 - RNA, 22 nt, Human
agucuggaccugcugggucucc

SEQ ID NO: 761249 - RNA, 22 nt, Human
ggaacacucagaaaugcucguc

SEQ ID NO: 761250 - RNA, 22 nt, Human
gacaucugaauauuagagagaa

SEQ ID NO: 761251 - RNA, 22 nt, Human
ucagaauauauucauguuguca

SEQ ID NO: 761252 - RNA, 22 nt, Human
gugcagguggauuugggcucaa

SEQ ID NO: 761253 - RNA, 22 nt, Human
acuaggggcucaggcccaggga

SEQ ID NO: 761254 - RNA, 22 nt, Human
agggccaccagagcagggcagu

SEQ ID NO: 761255 - RNA, 22 nt, Human
ucaugucaguuucuucuauaaa

SEQ ID NO: 761256 - RNA, 22 nt, Human
uccugaggacccugucaggggc

SEQ ID NO: 761257 - RNA, 22 nt, Human
aagaagguguggaaagaugcuc

SEQ ID NO: 761258 - RNA, 22 nt, Human
gggcuucagauccagggaccuc

SEQ ID NO: 761259 - RNA, 22 nt, Human
auagcuuacaggugauaucagc

SEQ ID NO: 761260 - RNA, 22 nt, Human
uuucuacucauccuuuggagaa

SEQ ID NO: 761261 - RNA, 21 nt, Human
uuuguucaggggcaaaguuaa

SEQ ID NO: 761262 - RNA, 22 nt, Human
aaggaaagacauauaaaugacu

SEQ ID NO: 761263 - RNA, 22 nt, Human
ucacccaagaccaucggaagug

SEQ ID NO: 761264 - RNA, 22 nt, Human
aggcagccuuuuuggaaacaua

SEQ ID NO: 761265 - RNA, 22 nt, Human
cucagggcuugaguguccagga

SEQ ID NO: 761266 - RNA, 20 nt, Human
uccagcccugcuucucucuu

SEQ ID NO: 761267 - RNA, 22 nt, Human
cuuaacauccugcauuuuucuu

SEQ ID NO: 761268 - RNA, 22 nt, Human
uucuggaaguuggaaauagcag

SEQ ID NO: 761269 - RNA, 22 nt, Human
uauuagauuaacuuuaaugucu

SEQ ID NO: 761270 - RNA, 22 nt, Human
ggguguguuccuaaggaaacca

SEQ ID NO: 761271 - RNA, 22 nt, Human
agcuuccuuggcgcugaggccu

SEQ ID NO: 761272 - RNA, 22 nt, Human
acccugaagcaggcacucagcu

SEQ ID NO: 761273 - RNA, 20 nt, Human
ugcugcugcuucacccccau

SEQ ID NO: 761274 - RNA, 20 nt, Human
uuauuuguuuacuuuggucc

SEQ ID NO: 761275 - RNA, 20 nt, Human
acacaugucaagcuaaaggc

SEQ ID NO: 761276 - RNA, 20 nt, Human
cagaggaguacauauguuca

SEQ ID NO: 761277 - RNA, 22 nt, Human
cauacauuuugcauauuuacca

SEQ ID NO: 761278 - RNA, 22 nt, Human
gaggccagcuaguccaggaagu

SEQ ID NO: 761279 - RNA, 22 nt, Human
uuggcagagaguaugcugaaga

SEQ ID NO: 761280 - RNA, 22 nt, Human
ucaggaggccugaguagcucua

SEQ ID NO: 761281 - RNA, 22 nt, Human
uggcagcugauuagauggugcc

SEQ ID NO: 761282 - RNA, 22 nt, Human
aauaaagcaugaggcauuuauc

SEQ ID NO: 761283 - RNA, 22 nt, Human
uuuccucuccaccaggaggucu

SEQ ID NO: 761284 - RNA, 22 nt, Human
aguggcugauguaggcaguggg

SEQ ID NO: 761285 - RNA, 18 nt, Human
ucaggcuggaaguuugcc

SEQ ID NO: 761286 - RNA, 22 nt, Human
gaaggaagccguuucucuccag

SEQ ID NO: 761287 - RNA, 19 nt, Human
cuccaagugccaaggacag

SEQ ID NO: 761288 - RNA, 22 nt, Human
ucuguacaugaguugagaauca

SEQ ID NO: 761289 - RNA, 22 nt, Human
aagaagcagcugccaggccagu

SEQ ID NO: 761290 - RNA, 22 nt, Human
cuggcccuguggccuaaggacu

SEQ ID NO: 761291 - RNA, 22 nt, Human
gaaguuuagguucuuauguuua

SEQ ID NO: 761292 - RNA, 22 nt, Human
acauacuuauguguauaugugu

SEQ ID NO: 761293 - RNA, 22 nt, Human
uauugaaaugaaugacagugau

SEQ ID NO: 761294 - RNA, 22 nt, Human
gccaucugcgcgguguccagcu

SEQ ID NO: 761295 - RNA, 22 nt, Human
uccuguguugauagagaugguu

SEQ ID NO: 761296 - RNA, 17 nt, Human
gcuggcuucuccuugcu

SEQ ID NO: 761297 - RNA, 22 nt, Human
agaugagaauuuuuagagugcu

SEQ ID NO: 761298 - RNA, 20 nt, Human
caguccugucccugcugccc

SEQ ID NO: 761299 - RNA, 22 nt, Human
ccacaucuguucuuaguucuga

SEQ ID NO: 761300 - RNA, 21 nt, Human
ccagagccugagaggauuaug

SEQ ID NO: 761301 - RNA, 22 nt, Human
ugcuguguuaaauacaagcaug

SEQ ID NO: 761302 - RNA, 23 nt, Human
ugaaugauuguacugagcuuuua

SEQ ID NO: 761303 - RNA, 22 nt, Human
agggccagagucuguguagaua

SEQ ID NO: 761304 - RNA, 21 nt, Human
cacuggaauuuucugugacau

SEQ ID NO: 761305 - RNA, 22 nt, Human
uuugaaugacaugauucaggca

SEQ ID NO: 761306 - RNA, 17 nt, Human
cugaggggagugcugug

SEQ ID NO: 761307 - RNA, 22 nt, Human
aggcuucaguuguaccuucuug

SEQ ID NO: 761308 - RNA, 17 nt, Human
ucugagaacuugaagca

SEQ ID NO: 761309 - RNA, 22 nt, Human
uuacaaagcguugagacaagua

SEQ ID NO: 761310 - RNA, 21 nt, Human
agcugagcccagaagacuggu

SEQ ID NO: 761311 - RNA, 22 nt, Human
uugcccugucuuaagcuggcaa

SEQ ID NO: 761312 - RNA, 22 nt, Human
cagcugcuuucagcaggaggga

SEQ ID NO: 761313 - RNA, 22 nt, Human
acucugaaugugcauguaaauc

SEQ ID NO: 761314 - RNA, 22 nt, Human
agagcccugagucaguucugga

SEQ ID NO: 761315 - RNA, 22 nt, Human
ucaaaggauaacugagggcagu

SEQ ID NO: 761316 - RNA, 23 nt, Human
caugcaaacacuauugcauuugg

SEQ ID NO: 761317 - RNA, 22 nt, Human
agggcucaggggccccaagcug

SEQ ID NO: 761318 - RNA, 22 nt, Human
ucacaaaugucuccuguccugu

SEQ ID NO: 761319 - RNA, 22 nt, Human
agagcugggugaagugccauca

SEQ ID NO: 761320 - RNA, 22 nt, Human
uugugugguagcuucauugaac

SEQ ID NO: 761321 - RNA, 22 nt, Human
ugcaguggaggccgugagacag

SEQ ID NO: 761322 - RNA, 22 nt, Human
cauuuuaaaugauuuaagccaa

SEQ ID NO: 761323 - RNA, 22 nt, Human
cucagucaugacgcucaggacc

SEQ ID NO: 761324 - RNA, 22 nt, Human
gugcccaggggccagcugccgg

SEQ ID NO: 761325 - RNA, 22 nt, Human
ugaaagcaaccuguaacaguga

SEQ ID NO: 761326 - RNA, 22 nt, Human
ugcagaagaauguaggcauaag

SEQ ID NO: 761327 - RNA, 22 nt, Human
cugcuggaaguuugcuguggau

SEQ ID NO: 761328 - RNA, 22 nt, Human
accuuuuauguaaauauauguu

SEQ ID NO: 761329 - RNA, 22 nt, Human
cugugagauguuucugguuaga

SEQ ID NO: 761330 - RNA, 22 nt, Human
ccuggacucaggcugugggcac

SEQ ID NO: 761331 - RNA, 22 nt, Human
gccuggcaaggcccuguugacu

SEQ ID NO: 761332 - RNA, 22 nt, Human
cuguauguuccguuuugucacu

SEQ ID NO: 761333 - RNA, 22 nt, Human
uacccucucccgguccagcuuu

SEQ ID NO: 761334 - RNA, 22 nt, Human
uaaagaacacagggaauagcac

SEQ ID NO: 761335 - RNA, 22 nt, Human
uccccagcauugagggucucuc

SEQ ID NO: 761336 - RNA, 22 nt, Human
uguaaagaaagacgcagaguua

SEQ ID NO: 761337 - RNA, 22 nt, Human
ugagcagauggaggcuucugca

SEQ ID NO: 761338 - RNA, 22 nt, Human
aaaggagacuucagaucuccuu

SEQ ID NO: 761339 - RNA, 22 nt, Human
aggcuucagaaagaguaauugg

SEQ ID NO: 761340 - RNA, 22 nt, Human
auucugucuaagcuggcuacgu

SEQ ID NO: 761341 - RNA, 22 nt, Human
ggcuugaagacuaugacauuuc

SEQ ID NO: 761342 - RNA, 22 nt, Human
agccucucaaagaaacccugua

SEQ ID NO: 761343 - RNA, 22 nt, Human
aaggaagagucuagaacaggca

SEQ ID NO: 761344 - RNA, 22 nt, Human
aucauucaaaugauuuggaggu

SEQ ID NO: 761345 - RNA, 20 nt, Human
uccagcugacauucucuuuc

SEQ ID NO: 761346 - RNA, 22 nt, Human
cuaaacuuuuauaacauugaga

SEQ ID NO: 761347 - RNA, 22 nt, Human
ucccaggcugggggccugaagu

SEQ ID NO: 761348 - RNA, 22 nt, Human
agaaaugcagucucgucaaaag

SEQ ID NO: 761349 - RNA, 21 nt, Human
ggcuccugcuuugugaggggc

SEQ ID NO: 761350 - RNA, 22 nt, Human
cugcuucagcaaagcuauuugc

SEQ ID NO: 761351 - RNA, 22 nt, Human
aucuccccgagcuuaccuccug

SEQ ID NO: 761352 - RNA, 22 nt, Human
aggucugauauuuguuguauga

SEQ ID NO: 761353 - RNA, 22 nt, Human
ucaggacaauagugauuuuuac

SEQ ID NO: 761354 - RNA, 22 nt, Human
ucugggaguuagaauacauggg

SEQ ID NO: 761355 - RNA, 22 nt, Human
uccauuuuagagaugaagaaac

SEQ ID NO: 761356 - RNA, 20 nt, Human
agaguaacuggcacauaggg

SEQ ID NO: 761357 - RNA, 18 nt, Human
ugaauguuuucuggaccc

SEQ ID NO: 761358 - RNA, 22 nt, Human
auggggagagaagggcugagcu

SEQ ID NO: 761359 - RNA, 20 nt, Human
gugcauuucaccuguacugu

SEQ ID NO: 761360 - RNA, 22 nt, Human
ucucuaauucaaccagacacuu

SEQ ID NO: 761361 - RNA, 22 nt, Human
acauuguugugcaauuauaguu

SEQ ID NO: 761362 - RNA, 22 nt, Human
acagagcaguucuggagcuggc

SEQ ID NO: 761363 - RNA, 22 nt, Human
ccccacagcuuguggagagaau

SEQ ID NO: 761364 - RNA, 22 nt, Human
uuucauguuggauacuguuuca

SEQ ID NO: 761365 - RNA, 22 nt, Human
cugagccagcgggcucacuuuu

SEQ ID NO: 761366 - RNA, 17 nt, Human
gccuucucugcccucac

SEQ ID NO: 761367 - RNA, 21 nt, Human
gacaggggaagaagcaaggag

SEQ ID NO: 761368 - RNA, 22 nt, Human
cuuugaaaacacacgaauagac

SEQ ID NO: 761369 - RNA, 22 nt, Human
ucacacaggguucuggucucau

SEQ ID NO: 761370 - RNA, 22 nt, Human
aggacuggcagugugagggguc

SEQ ID NO: 761371 - RNA, 22 nt, Human
ucugucuccugccagugccucu

SEQ ID NO: 761372 - RNA, 22 nt, Human
cagaggaaggcucugggaaugu

SEQ ID NO: 761373 - RNA, 22 nt, Human
gagaggcagaggccugaaaccg

SEQ ID NO: 761374 - RNA, 22 nt, Human
ggccacauguggcugcucguau

SEQ ID NO: 761375 - RNA, 22 nt, Human
gguccaaggcucgguggcgggg

SEQ ID NO: 761376 - RNA, 22 nt, Human
cucuggaggccuaaggaagugg

SEQ ID NO: 761377 - RNA, 22 nt, Human
cuugggccaccuggagggacug

SEQ ID NO: 761378 - RNA, 22 nt, Human
ggaggaagggcccaggcuuuau

SEQ ID NO: 761379 - RNA, 22 nt, Human
agaucugaguggcugcauguaa

SEQ ID NO: 761380 - RNA, 22 nt, Human
cagggcuggcuuccaaguuguu

SEQ ID NO: 761381 - RNA, 22 nt, Human
cugggccugugacucccauccu

SEQ ID NO: 761382 - RNA, 22 nt, Human
uuucagaagucaacuagguaaa

SEQ ID NO: 761383 - RNA, 22 nt, Human
auuuccaaaaccacuuauugcc

SEQ ID NO: 761384 - RNA, 22 nt, Human
gugucagaaacaggaaggggaa

SEQ ID NO: 761385 - RNA, 22 nt, Human
guacuuccguggacuaauuguu

SEQ ID NO: 761386 - RNA, 22 nt, Human
gccuuggcugccaagcugcuga

SEQ ID NO: 761387 - RNA, 22 nt, Human
ggcuggccucaggguccucgcu

SEQ ID NO: 761388 - RNA, 22 nt, Human
cuggcucaggguggucuggguc

SEQ ID NO: 761389 - RNA, 22 nt, Human
ugugcuucagguugucgccacg

SEQ ID NO: 761390 - RNA, 21 nt, Human
ugcccacagcaaaugcagagg

SEQ ID NO: 761391 - RNA, 22 nt, Human
ugcuggaggauuaaacaaguca

SEQ ID NO: 761392 - RNA, 22 nt, Human
cugcagaucuuguguacuuguc

SEQ ID NO: 761393 - RNA, 19 nt, Human
ggcugagcgccuuggcugc

SEQ ID NO: 761394 - RNA, 22 nt, Human
auaagagcuacagccaguucug

SEQ ID NO: 761395 - RNA, 22 nt, Human
ggcuagggaucuagaccaggac

SEQ ID NO: 761396 - RNA, 22 nt, Human
auuccuaaaguaauacacuaga

SEQ ID NO: 761397 - RNA, 22 nt, Human
ucugggccugucucagagcugg

SEQ ID NO: 761398 - RNA, 22 nt, Human
aacuucauuccuuuuuaugacu

SEQ ID NO: 761399 - RNA, 22 nt, Human
ucacaguaucuagaaaugaggg

SEQ ID NO: 761400 - RNA, 17 nt, Human
agcagcugaagcagcca

SEQ ID NO: 761401 - RNA, 18 nt, Human
uacugguccuuuuaugau

SEQ ID NO: 761402 - RNA, 22 nt, Human
agagacagacacaucgggcugc

SEQ ID NO: 761403 - RNA, 22 nt, Human
gaaaggggcauguagggaucac

SEQ ID NO: 761404 - RNA, 22 nt, Human
gcugccagcccucggggucuga

SEQ ID NO: 761405 - RNA, 23 nt, Human
aauuuccccugucucugauuugg

SEQ ID NO: 761406 - RNA, 22 nt, Human
gugccucugagcucugcuacag

SEQ ID NO: 761407 - RNA, 22 nt, Human
cacauuccuuacauucauagag

SEQ ID NO: 761408 - RNA, 22 nt, Human
cagcagcaacaacggaagccuu

SEQ ID NO: 761409 - RNA, 18 nt, Human
ucugucucuguccuugcu

SEQ ID NO: 761410 - RNA, 23 nt, Human
ugauagaugucauggucuugagu

SEQ ID NO: 761411 - RNA, 22 nt, Human
ugaugcauugccgacuuacugg

SEQ ID NO: 761412 - RNA, 22 nt, Human
guuaauacaaccaugaucuucu

SEQ ID NO: 761413 - RNA, 22 nt, Human
aggucagaaaaggagagcauug

SEQ ID NO: 761414 - RNA, 22 nt, Human
ccagguguucuuugucccuguu

SEQ ID NO: 761415 - RNA, 22 nt, Human
ccaaggcacacucugcaagguu

SEQ ID NO: 761416 - RNA, 22 nt, Human
uggcuucugucccugcuacauu

SEQ ID NO: 761417 - RNA, 22 nt, Human
uaaggcacccgugagcugccag

SEQ ID NO: 761418 - RNA, 22 nt, Human
cccagggauuauaaaggugaaa

SEQ ID NO: 761419 - RNA, 22 nt, Human
aauaacuucauguaacauuuaa

SEQ ID NO: 761420 - RNA, 22 nt, Human
aggagugugaagagccuagauc

SEQ ID NO: 761421 - RNA, 19 nt, Human
ucuagcaacccacugcaug

SEQ ID NO: 761422 - RNA, 22 nt, Human
gagcccucucuguaggcaagua

SEQ ID NO: 761423 - RNA, 22 nt, Human
uuuaguuugauguucuacuccu

SEQ ID NO: 761424 - RNA, 20 nt, Human
agggcagagggauuacaggc

SEQ ID NO: 761425 - RNA, 22 nt, Human
cuucagaauuccucagccucag

SEQ ID NO: 761426 - RNA, 22 nt, Human
accuccaggaagcucuugguac

SEQ ID NO: 761427 - RNA, 20 nt, Human
agcuccuuuguguccaggau

SEQ ID NO: 761428 - RNA, 22 nt, Human
cuacauuaaauuggcuuacuua

SEQ ID NO: 761429 - RNA, 22 nt, Human
gugcgcuucuuccugagccagg

SEQ ID NO: 761430 - RNA, 22 nt, Human
agcagcuguggaaaaguaacua

SEQ ID NO: 761431 - RNA, 22 nt, Human
gcacagcaguggcauaaacaau

SEQ ID NO: 761432 - RNA, 22 nt, Human
cacuggugaguccagaagucau

SEQ ID NO: 761433 - RNA, 22 nt, Human
gagugugggcacgggggccuug

SEQ ID NO: 761434 - RNA, 22 nt, Human
uuugggaaacuuaggggucaga

SEQ ID NO: 761435 - RNA, 22 nt, Human
gcagcuuugucacggagugucg

SEQ ID NO: 761436 - RNA, 22 nt, Human
ugagauccccaggaaggacaac

SEQ ID NO: 761437 - RNA, 22 nt, Human
ggagagaauuccauggacaugu

SEQ ID NO: 761438 - RNA, 22 nt, Human
ucuggguucuugaugcuaccuu

SEQ ID NO: 761439 - RNA, 22 nt, Human
uucuuuguuugauaaguaugcu

SEQ ID NO: 761440 - RNA, 22 nt, Human
acugcacagucccagaggaugc

SEQ ID NO: 761441 - RNA, 19 nt, Human
acagagcucucugcuucug

SEQ ID NO: 761442 - RNA, 22 nt, Human
cccaaccagaaauugacagaca

SEQ ID NO: 761443 - RNA, 22 nt, Human
uccugaaggagcaguugcuggg

SEQ ID NO: 761444 - RNA, 22 nt, Human
ucauugccauggcauuugcaga

SEQ ID NO: 761445 - RNA, 22 nt, Human
auaaauagugcugccaugagua

SEQ ID NO: 761446 - RNA, 22 nt, Human
uacuguguggugagcugucucc

SEQ ID NO: 761447 - RNA, 23 nt, Human
acaggaggggacagguggccgug

SEQ ID NO: 761448 - RNA, 22 nt, Human
ccugaggacagugugaccaugg

SEQ ID NO: 761449 - RNA, 22 nt, Human
uuucaccucagucuuuuuauau

SEQ ID NO: 761450 - RNA, 22 nt, Human
ugagggagagggcgaaaaugaa

SEQ ID NO: 761451 - RNA, 22 nt, Human
ugcugaugaguccuucuaucgc

SEQ ID NO: 761452 - RNA, 22 nt, Human
uuaaggaaacauuuuuccauag

SEQ ID NO: 761453 - RNA, 22 nt, Human
cugucuguuuuguauacaggcc

SEQ ID NO: 761454 - RNA, 20 nt, Human
ggaccagguggggcgguggc

SEQ ID NO: 761455 - RNA, 22 nt, Human
ucugcaucauuuuucagagccg

SEQ ID NO: 761456 - RNA, 22 nt, Human
uuuucaggccagaagauagacc

SEQ ID NO: 761457 - RNA, 22 nt, Human
cuucagaaugggacuguguuug

SEQ ID NO: 761458 - RNA, 23 nt, Human
uagagcagggaaaucugucagag

SEQ ID NO: 761459 - RNA, 22 nt, Human
caguccagagcccaccagagga

SEQ ID NO: 761460 - RNA, 22 nt, Human
guugggaagcagauggaugagc

SEQ ID NO: 761461 - RNA, 22 nt, Human
ggguuggcagcaccagaggagg

SEQ ID NO: 761462 - RNA, 22 nt, Human
cacauuucucuaccucacacaa

SEQ ID NO: 761463 - RNA, 22 nt, Human
gacacuguuauggugagguaag

SEQ ID NO: 761464 - RNA, 22 nt, Human
augucagaaucuacauucuacu

SEQ ID NO: 761465 - RNA, 21 nt, Human
agcagcugcaguuucuaucug

SEQ ID NO: 761466 - RNA, 22 nt, Human
aaugucuuuuaaccucuggacu

SEQ ID NO: 761467 - RNA, 22 nt, Human
uaccuagaccaguuacaaugca

SEQ ID NO: 761468 - RNA, 22 nt, Human
gagaugacaugccuguuguagg

SEQ ID NO: 761469 - RNA, 22 nt, Human
uccaggccauugacugcauccu

SEQ ID NO: 761470 - RNA, 22 nt, Human
ucagugaucuaaggguauggcc

SEQ ID NO: 761471 - RNA, 20 nt, Human
ccuuucuggagugcuguuca

SEQ ID NO: 761472 - RNA, 22 nt, Human
agagaagcugacaggggcgugc

SEQ ID NO: 761473 - RNA, 22 nt, Human
ggcuccugggcagcugcucccu

SEQ ID NO: 761474 - RNA, 22 nt, Human
acucuuuuauaaagcaucuuga

SEQ ID NO: 761475 - RNA, 22 nt, Human
agcaggcugaugggcaugcuug

SEQ ID NO: 761476 - RNA, 22 nt, Human
ugcuggaauuuugcucuugcaa

SEQ ID NO: 761477 - RNA, 22 nt, Human
uaugcacauuaucuaauccauu

SEQ ID NO: 761478 - RNA, 20 nt, Human
uuauuuccaguccagguccu

SEQ ID NO: 761479 - RNA, 19 nt, Human
uugagaacaccaaguacug

SEQ ID NO: 761480 - RNA, 22 nt, Human
uccugacuuaacuacucucugg

SEQ ID NO: 761481 - RNA, 22 nt, Human
aaggccagccugagagcuaaca

SEQ ID NO: 761482 - RNA, 22 nt, Human
cauucaguggaguauuauucag

SEQ ID NO: 761483 - RNA, 22 nt, Human
acgugcaucuuuccauaugugg

SEQ ID NO: 761484 - RNA, 19 nt, Human
acaaugaauguguucucuu

SEQ ID NO: 761485 - RNA, 22 nt, Human
agagaugaagggcauuccccag

SEQ ID NO: 761486 - RNA, 18 nt, Human
ucaaacugucauugguga

SEQ ID NO: 761487 - RNA, 22 nt, Human
augcauucuggaaaguagcaau

SEQ ID NO: 761488 - RNA, 22 nt, Human
agaagggccagcuggacaccug

SEQ ID NO: 761489 - RNA, 22 nt, Human
acugaaaugaaaucuaucaucu

SEQ ID NO: 761490 - RNA, 18 nt, Human
uggguggcuagggaguuu

SEQ ID NO: 761491 - RNA, 22 nt, Human
aauaugaauuauuguuacaagu

SEQ ID NO: 761492 - RNA, 22 nt, Human
aacuuucuugugacauuugggg

SEQ ID NO: 761493 - RNA, 22 nt, Human
aagaacaugaaccucuucuaac

SEQ ID NO: 761494 - RNA, 22 nt, Human
auucaguuauuuacuuugcuau

SEQ ID NO: 761495 - RNA, 22 nt, Human
uccuuuuuauaguuagagaaac

SEQ ID NO: 761496 - RNA, 22 nt, Human
auuuagacauguaucugauagc

SEQ ID NO: 761497 - RNA, 22 nt, Human
aaugacuuugaaauauuugagu

SEQ ID NO: 761498 - RNA, 22 nt, Human
agggccuggcuucacuuucuca

SEQ ID NO: 761499 - RNA, 22 nt, Human
ugacucugauugccuuagcuug

SEQ ID NO: 761500 - RNA, 22 nt, Human
ugguccugagcaccagccugac

SEQ ID NO: 761501 - RNA, 22 nt, Human
acccucaacaaauucacucuau

SEQ ID NO: 761502 - RNA, 22 nt, Human
uucuggacuugccuugcugaug

SEQ ID NO: 761503 - RNA, 22 nt, Human
aguuuacacuuuugauucuuau

SEQ ID NO: 761504 - RNA, 22 nt, Human
ccaaggcuuccugaccuacaug

SEQ ID NO: 761505 - RNA, 20 nt, Human
uuugucaacugcauccagca

SEQ ID NO: 761506 - RNA, 20 nt, Human
aaaauugcucugcagucccc

SEQ ID NO: 761507 - RNA, 22 nt, Human
acucaggcuagggaaaaagugg

SEQ ID NO: 761508 - RNA, 22 nt, Human
acuccagguuuucucucaaguu

SEQ ID NO: 761509 - RNA, 22 nt, Human
uucagcaagugucucuacuguc

SEQ ID NO: 761510 - RNA, 22 nt, Human
gaaggcauucuauucuacauau

SEQ ID NO: 761511 - RNA, 22 nt, Human
uaguaaaaguuuaguugaaagu

SEQ ID NO: 761512 - RNA, 22 nt, Human
gcaaacuggcaaaccugucugu

SEQ ID NO: 761513 - RNA, 22 nt, Human
gagacacaagacgcaacucugu

SEQ ID NO: 761514 - RNA, 22 nt, Human
auaauuuacuaagcucuaccuu

SEQ ID NO: 761515 - RNA, 22 nt, Human
cuccagcuuuagcucuccaggg

SEQ ID NO: 761516 - RNA, 19 nt, Human
acacaaugacacauauaua

SEQ ID NO: 761517 - RNA, 22 nt, Human
agucgcagacaugguccccuuu

SEQ ID NO: 761518 - RNA, 22 nt, Human
aggcuccauuuuccugcagcug

SEQ ID NO: 761519 - RNA, 22 nt, Human
auacacauauauacacguuuaa

SEQ ID NO: 761520 - RNA, 22 nt, Human
cucccugacaggccaugggcuu

SEQ ID NO: 761521 - RNA, 22 nt, Human
uaaaguucuuagaacaaggccu

SEQ ID NO: 761522 - RNA, 22 nt, Human
guuuuucuaaguagcgauauuu

SEQ ID NO: 761523 - RNA, 22 nt, Human
guggcacagugggagagcccca

SEQ ID NO: 761524 - RNA, 22 nt, Human
cugcaauaugaugucugagaaa

SEQ ID NO: 761525 - RNA, 22 nt, Human
gaggcagaggaagguggucucu

SEQ ID NO: 761526 - RNA, 22 nt, Human
cccccaggcucugacacaggag

SEQ ID NO: 761527 - RNA, 23 nt, Human
aguucucauucaucacggccuau

SEQ ID NO: 761528 - RNA, 22 nt, Human
cucuccuccaacagcccugccg

SEQ ID NO: 761529 - RNA, 22 nt, Human
ggucugcccacuacucuccauu

SEQ ID NO: 761530 - RNA, 22 nt, Human
accaaaaccugcuacuaaagga

SEQ ID NO: 761531 - RNA, 22 nt, Human
ggugugggaacuacagguuuuu

SEQ ID NO: 761532 - RNA, 22 nt, Human
agaaagcagcauuuaugaucuc

SEQ ID NO: 761533 - RNA, 20 nt, Human
aguagcagugugacauugac

SEQ ID NO: 761534 - RNA, 22 nt, Human
ucauucuccucuggaaaaggca

SEQ ID NO: 761535 - RNA, 22 nt, Human
cagacugggagucaggaagaag

SEQ ID NO: 761536 - RNA, 23 nt, Human
guggagagauuaguaauucaccc

SEQ ID NO: 761537 - RNA, 22 nt, Human
aggcauuuuuguuaaucuuugg

SEQ ID NO: 761538 - RNA, 22 nt, Human
caauguaucaaccagaaaguuc

SEQ ID NO: 761539 - RNA, 22 nt, Human
uacagaacugaaguagugaaaa

SEQ ID NO: 761540 - RNA, 23 nt, Human
ugcacaggacggccuuauaagua

SEQ ID NO: 761541 - RNA, 20 nt, Human
ugacucugcaaccgucucuc

SEQ ID NO: 761542 - RNA, 22 nt, Human
cugaggcagaaaaagcaagggu

SEQ ID NO: 761543 - RNA, 22 nt, Human
agcugguggggaagcugcaggu

SEQ ID NO: 761544 - RNA, 22 nt, Human
aggagcugcaaaaccggccgcu

SEQ ID NO: 761545 - RNA, 22 nt, Human
aagcugugaaaucucuagugca

SEQ ID NO: 761546 - RNA, 22 nt, Human
augauuuucugauaaagaacug

SEQ ID NO: 761547 - RNA, 22 nt, Human
gacugaggagguaagguuugaa

SEQ ID NO: 761548 - RNA, 22 nt, Human
aauaucuuggcccaacuccaga

SEQ ID NO: 761549 - RNA, 22 nt, Human
caagggccuccaccuugcucgu

SEQ ID NO: 761550 - RNA, 22 nt, Human
gaggggcugggguugacuccaa

SEQ ID NO: 761551 - RNA, 22 nt, Human
cuguccugaguucuuggagguc

SEQ ID NO: 761552 - RNA, 22 nt, Human
ccucuuugagauucaguuuucc

SEQ ID NO: 761553 - RNA, 22 nt, Human
ugcauuauuugcaugugccugu

SEQ ID NO: 761554 - RNA, 22 nt, Human
accugggaaaaggaguggccau

SEQ ID NO: 761555 - RNA, 22 nt, Human
gaaaugugugacaaguuucaau

SEQ ID NO: 761556 - RNA, 22 nt, Human
gaaaucaauuucuugguugaua

SEQ ID NO: 761557 - RNA, 22 nt, Human
ucccugagcuucaucaggcuuu

SEQ ID NO: 761558 - RNA, 22 nt, Human
aagaaguuaauaauggugagaa

SEQ ID NO: 761559 - RNA, 22 nt, Human
uucucacacuuuccacugaggu

SEQ ID NO: 761560 - RNA, 22 nt, Human
cugcugacaaaauaaaaugcuc

SEQ ID NO: 761561 - RNA, 22 nt, Human
acacagagcuggaacugcuuca

SEQ ID NO: 761562 - RNA, 22 nt, Human
augcuaaaugcuggggguacau

SEQ ID NO: 761563 - RNA, 22 nt, Human
acacaauggcgugugccacaga

SEQ ID NO: 761564 - RNA, 22 nt, Human
uucaagaucuggguuuucagcu

SEQ ID NO: 761565 - RNA, 22 nt, Human
uguucuaugcucuuuaagguga

SEQ ID NO: 761566 - RNA, 22 nt, Human
ggaccaucucuagccagagcuu

SEQ ID NO: 761567 - RNA, 22 nt, Human
agcagcacccagagccaugucu

SEQ ID NO: 761568 - RNA, 22 nt, Human
uuuagaagacagaugcacagcc

SEQ ID NO: 761569 - RNA, 22 nt, Human
aggagaccuuuugagugugaga

SEQ ID NO: 761570 - RNA, 22 nt, Human
aagcaucuaggugacugacaua

SEQ ID NO: 761571 - RNA, 22 nt, Human
ccagaaaauauggcuaagguga

SEQ ID NO: 761572 - RNA, 22 nt, Human
uuugagaagcaucugguccacu

SEQ ID NO: 761573 - RNA, 22 nt, Human
ucuguccauuuuccauuuuggc

SEQ ID NO: 761574 - RNA, 22 nt, Human
gcuggugguaaggaggaaaaag

SEQ ID NO: 761575 - RNA, 22 nt, Human
gggcuccaaccccagugaacuc

SEQ ID NO: 761576 - RNA, 22 nt, Human
guuuaacaucugugaagcugcu

SEQ ID NO: 761577 - RNA, 22 nt, Human
uuggagagggcuuggaucacac

SEQ ID NO: 761578 - RNA, 22 nt, Human
aagagcaguguuuuacucagcu

SEQ ID NO: 761579 - RNA, 22 nt, Human
gcagguagugaucgagggugac

SEQ ID NO: 761580 - RNA, 22 nt, Human
gggccugaaaccuucagggcuu

SEQ ID NO: 761581 - RNA, 22 nt, Human
gcugggcagcugaggccucuca

SEQ ID NO: 761582 - RNA, 22 nt, Human
cauugucauucuaugcuauuca

SEQ ID NO: 761583 - RNA, 20 nt, Human
cagauaaacgggaaagaagc

SEQ ID NO: 761584 - RNA, 22 nt, Human
ucaaguauaucuagucauuagg

SEQ ID NO: 761585 - RNA, 19 nt, Human
ggcuucagggaguuagcau

SEQ ID NO: 761586 - RNA, 22 nt, Human
agccaguuuaagcaggaggggu

SEQ ID NO: 761587 - RNA, 22 nt, Human
uuccaugccucuauuuagaauu

SEQ ID NO: 761588 - RNA, 22 nt, Human
gaagaacugacaaacuagauca

SEQ ID NO: 761589 - RNA, 23 nt, Human
aaaaucuucugccuaugaagaaa

SEQ ID NO: 761590 - RNA, 22 nt, Human
uaaauguguaaaccuccauuac

SEQ ID NO: 761591 - RNA, 23 nt, Human
aagagcuauacauucaccuggua

SEQ ID NO: 761592 - RNA, 22 nt, Human
uuccaccauucaugcuaauauu

SEQ ID NO: 761593 - RNA, 22 nt, Human
uccugaagaacgaagucaugua

SEQ ID NO: 761594 - RNA, 22 nt, Human
accagagaugucuaauaggggc

SEQ ID NO: 761595 - RNA, 22 nt, Human
cuguggcuaugguguacauacu

SEQ ID NO: 761596 - RNA, 20 nt, Human
ucauuccaaauaguucagca

SEQ ID NO: 761597 - RNA, 22 nt, Human
aagagcugauuaagucaugagg

SEQ ID NO: 761598 - RNA, 22 nt, Human
ugcuggcuuauuuaguaaaugu

SEQ ID NO: 761599 - RNA, 22 nt, Human
cuuccagucuuuucaguggagu

SEQ ID NO: 761600 - RNA, 22 nt, Human
acuauaaccuguuagaauagau

SEQ ID NO: 761601 - RNA, 22 nt, Human
uccaguacaggucucucauuuc

SEQ ID NO: 761602 - RNA, 22 nt, Human
caggggcuagcacuuaauguuu

SEQ ID NO: 761603 - RNA, 22 nt, Human
cugcagcuccccugagaucaag

SEQ ID NO: 761604 - RNA, 22 nt, Human
ugagcagaacacgggauccaug

SEQ ID NO: 761605 - RNA, 22 nt, Human
ccaggccaaauucagucagcag

SEQ ID NO: 761606 - RNA, 18 nt, Human
uuccaugauuccuuucac

SEQ ID NO: 761607 - RNA, 22 nt, Human
uuccuggcaccaccacuucuag

SEQ ID NO: 761608 - RNA, 20 nt, Human
gugcccugugggcuauuuuc

SEQ ID NO: 761609 - RNA, 22 nt, Human
aacccaggucuuuggcuuccag

SEQ ID NO: 761610 - RNA, 22 nt, Human
uccagggagauacuggcugcca

SEQ ID NO: 761611 - RNA, 22 nt, Human
cuguucuucugggaauggcccu

SEQ ID NO: 761612 - RNA, 19 nt, Human
gccaggagggcucuggcug

SEQ ID NO: 761613 - RNA, 22 nt, Human
uuuaccacaauuuuaaacaaug

SEQ ID NO: 761614 - RNA, 22 nt, Human
augaaaagcauaaacgcugaag

SEQ ID NO: 761615 - RNA, 22 nt, Human
ggacagcguggcugguggaggg

SEQ ID NO: 761616 - RNA, 20 nt, Human
gucagaggacccuagagcga

SEQ ID NO: 761617 - RNA, 22 nt, Human
ggaggcucgcuggucgcacagc

SEQ ID NO: 761618 - RNA, 21 nt, Human
cugguguagcacucaggugcu

SEQ ID NO: 761619 - RNA, 20 nt, Human
accccagccccucuaucuga

SEQ ID NO: 761620 - RNA, 22 nt, Human
cugagcagucugacucaagcua

SEQ ID NO: 761621 - RNA, 22 nt, Human
cugaggcaggauggccuggcug

SEQ ID NO: 761622 - RNA, 22 nt, Human
ucaacagaagugauagcuauua

SEQ ID NO: 761623 - RNA, 22 nt, Human
uaugaaaauuuagcugaagcau

SEQ ID NO: 761624 - RNA, 22 nt, Human
cuccucccucuuugccacacau

SEQ ID NO: 761625 - RNA, 22 nt, Human
acaaaggcauagugaauguuuu

SEQ ID NO: 761626 - RNA, 22 nt, Human
aaagugcugggauuacaggccu

SEQ ID NO: 761627 - RNA, 23 nt, Human
aucucucugguggucacagucag

SEQ ID NO: 761628 - RNA, 22 nt, Human
aggccaggaauccuugucccag

SEQ ID NO: 761629 - RNA, 22 nt, Human
augcacagauccuggcacuuag

SEQ ID NO: 761630 - RNA, 22 nt, Human
ccuuuacaguagcccuuuugaa

SEQ ID NO: 761631 - RNA, 22 nt, Human
ugggaacaacaugcacugccac

SEQ ID NO: 761632 - RNA, 22 nt, Human
uggcuccagaucugucuccugu

SEQ ID NO: 761633 - RNA, 22 nt, Human
gucuggcuuuugcccuguguuu

SEQ ID NO: 761634 - RNA, 22 nt, Human
uguguuaauuccacaaacauuc

SEQ ID NO: 761635 - RNA, 22 nt, Human
cagcccugucccugagggaccu

SEQ ID NO: 761636 - RNA, 22 nt, Human
aaggucuguggccaccucuggg

SEQ ID NO: 761637 - RNA, 22 nt, Human
cuagggcuagacagacgcaugu

SEQ ID NO: 761638 - RNA, 19 nt, Human
ucuugcagccccagcaggc

SEQ ID NO: 761639 - RNA, 22 nt, Human
ggcuccuguccuccuggagcuc

SEQ ID NO: 761640 - RNA, 20 nt, Human
cucaggauacugcaaaguug

SEQ ID NO: 761641 - RNA, 22 nt, Human
uugcugugaaaccaugggaagu

SEQ ID NO: 761642 - RNA, 22 nt, Human
agcgggugcugugucagcccuc

SEQ ID NO: 761643 - RNA, 22 nt, Human
gcccuuacaggguggucagcca

SEQ ID NO: 761644 - RNA, 22 nt, Human
gcucagagauguucaguagcuu

SEQ ID NO: 761645 - RNA, 22 nt, Human
cggcccugaccagaccuuaguu

SEQ ID NO: 761646 - RNA, 22 nt, Human
caggauugaaugcuucucccug

SEQ ID NO: 761647 - RNA, 22 nt, Human
ugcauggaacggucuccugguc

SEQ ID NO: 761648 - RNA, 20 nt, Human
uuacagaaaugauguuauuu

SEQ ID NO: 761649 - RNA, 22 nt, Human
auggaagcagacagguaauucc

SEQ ID NO: 761650 - RNA, 22 nt, Human
aaaaucuugugacuuaggaagg

SEQ ID NO: 761651 - RNA, 22 nt, Human
ccugccagucacuaugucaccu

SEQ ID NO: 761652 - RNA, 22 nt, Human
gguuucagcccugcuguuccug

SEQ ID NO: 761653 - RNA, 22 nt, Human
cuagggaaauaaacugaguggu

SEQ ID NO: 761654 - RNA, 22 nt, Human
cauguuaaugaauuuuugcagu

SEQ ID NO: 761655 - RNA, 22 nt, Human
uaaagugugcauggucaaauau

SEQ ID NO: 761656 - RNA, 19 nt, Human
ggacagggggagcuuuuau

SEQ ID NO: 761657 - RNA, 22 nt, Human
acagggcuccuagguggugugc

SEQ ID NO: 761658 - RNA, 22 nt, Human
uacauuugcuuugauuuucagc

SEQ ID NO: 761659 - RNA, 22 nt, Human
uccuugaaaagaaugucuccau

SEQ ID NO: 761660 - RNA, 22 nt, Human
gauauucaaguggaauuauucu

SEQ ID NO: 761661 - RNA, 22 nt, Human
uguuuauagggucugucacuug

SEQ ID NO: 761662 - RNA, 22 nt, Human
cuguauaucaugguuuugcagu

SEQ ID NO: 761663 - RNA, 22 nt, Human
ugggggcugaguaagaugagau

SEQ ID NO: 761664 - RNA, 22 nt, Human
auuaccacuuaaucaacauaug

SEQ ID NO: 761665 - RNA, 21 nt, Human
gugcggaugccgucauuguca

SEQ ID NO: 761666 - RNA, 22 nt, Human
cugggagaucuguugggacugg

SEQ ID NO: 761667 - RNA, 22 nt, Human
aaggggaaguagcaccagaggu

SEQ ID NO: 761668 - RNA, 22 nt, Human
cucugugguaaaauagcaguau

SEQ ID NO: 761669 - RNA, 20 nt, Human
cccaggugucugaagcucug

SEQ ID NO: 761670 - RNA, 22 nt, Human
agaucugguuggaguccugaca

SEQ ID NO: 761671 - RNA, 22 nt, Human
uuugaagagccacagugaaauu

SEQ ID NO: 761672 - RNA, 22 nt, Human
aggggagacuggaaucuaacau

SEQ ID NO: 761673 - RNA, 22 nt, Human
agaaacuguguuacuagaaugu

SEQ ID NO: 761674 - RNA, 22 nt, Human
augggaggaagagaagaugucu

SEQ ID NO: 761675 - RNA, 22 nt, Human
ccucagaagcucaaggacauug

SEQ ID NO: 761676 - RNA, 23 nt, Human
gcugccuccuacaaaagcccagc

SEQ ID NO: 761677 - RNA, 22 nt, Human
aucucuuaugucacauaaacca

SEQ ID NO: 761678 - RNA, 19 nt, Human
uucacaagugaugucucuc

SEQ ID NO: 761679 - RNA, 22 nt, Human
cugcuguguaucauuuuagaug

SEQ ID NO: 761680 - RNA, 22 nt, Human
cagugcccaaaggaacagaaag

SEQ ID NO: 761681 - RNA, 22 nt, Human
ucaggaagccacuccacagaga

SEQ ID NO: 761682 - RNA, 22 nt, Human
ugcaggcccaguguagaggcuc

SEQ ID NO: 761683 - RNA, 22 nt, Human
agggauggaagacuugaagacc

SEQ ID NO: 761684 - RNA, 22 nt, Human
aacagccugagagaacaaugau

SEQ ID NO: 761685 - RNA, 22 nt, Human
aucaagaguauugacaagacca

SEQ ID NO: 761686 - RNA, 22 nt, Human
agggcugaggcgagggagaugc

SEQ ID NO: 761687 - RNA, 22 nt, Human
uguccuggguggaugcuucauu

SEQ ID NO: 761688 - RNA, 22 nt, Human
aucaguuuugggggacauacug

SEQ ID NO: 761689 - RNA, 22 nt, Human
agccaggauuggcugagccuua

SEQ ID NO: 761690 - RNA, 22 nt, Human
ugcuggaaaguuaaauuuugga

SEQ ID NO: 761691 - RNA, 22 nt, Human
acugagcugcaagucagggagg

SEQ ID NO: 761692 - RNA, 22 nt, Human
acagagcccuuccuugcaccau

SEQ ID NO: 761693 - RNA, 22 nt, Human
cagacauggcgccaagugcuag

SEQ ID NO: 761694 - RNA, 22 nt, Human
guuuccaucuccaggacauaau

SEQ ID NO: 761695 - RNA, 22 nt, Human
uuuuagauuauaagucuaauuc

SEQ ID NO: 761696 - RNA, 22 nt, Human
uucccuggcucuucuacaucgu

SEQ ID NO: 761697 - RNA, 18 nt, Human
cuacauucauaggaaagg

SEQ ID NO: 761698 - RNA, 22 nt, Human
aggcauuacaucuaaauauuua

SEQ ID NO: 761699 - RNA, 22 nt, Human
agaggagugggaagcagugcaa

SEQ ID NO: 761700 - RNA, 22 nt, Human
uagugucuauugaccggaaaga

SEQ ID NO: 761701 - RNA, 22 nt, Human
aaacauguaaguucagaucacc

SEQ ID NO: 761702 - RNA, 22 nt, Human
cuccugagcucugaggaagcuu

SEQ ID NO: 761703 - RNA, 22 nt, Human
acugaauaauggucugugaucu

SEQ ID NO: 761704 - RNA, 22 nt, Human
ggcagagcuugcagugagccga

SEQ ID NO: 761705 - RNA, 22 nt, Human
agcagccaauuggaggaugaag

SEQ ID NO: 761706 - RNA, 22 nt, Human
aagccaggcaugcuuggacagu

SEQ ID NO: 761707 - RNA, 22 nt, Human
aacacugucagccuuugaugga

SEQ ID NO: 761708 - RNA, 22 nt, Human
ugcagagaaaccaguggaggac

SEQ ID NO: 761709 - RNA, 22 nt, Human
aucuuugaagaggacuugaagu

SEQ ID NO: 761710 - RNA, 22 nt, Human
gcuggagaaacaggaggaggaa

SEQ ID NO: 761711 - RNA, 22 nt, Human
aacaaaguguacuuccauacug

SEQ ID NO: 761712 - RNA, 22 nt, Human
gcuggcuguaucaccuggccag

SEQ ID NO: 761713 - RNA, 22 nt, Human
gggaagugugguuucuuuacag

SEQ ID NO: 761714 - RNA, 22 nt, Human
uauagcaaggacauaauaugcu

SEQ ID NO: 761715 - RNA, 22 nt, Human
uuucuauuuuaaaggcauaugg

SEQ ID NO: 761716 - RNA, 22 nt, Human
aauauaauuuuauuccuagagu

SEQ ID NO: 761717 - RNA, 22 nt, Human
aaguccaucucugccccacaca

SEQ ID NO: 761718 - RNA, 22 nt, Human
cucacauucacaggacagaagg

SEQ ID NO: 761719 - RNA, 22 nt, Human
guggcuuccaagacuaagucac

SEQ ID NO: 761720 - RNA, 20 nt, Human
cucagcuaaacaacacugac

SEQ ID NO: 761721 - RNA, 22 nt, Human
agaggccucccucccagcuggu

SEQ ID NO: 761722 - RNA, 22 nt, Human
gguacaauggaccauaaaagcu

SEQ ID NO: 761723 - RNA, 22 nt, Human
gagcacagcagggcucugggug

SEQ ID NO: 761724 - RNA, 22 nt, Human
caaagugcugggauuauaggca

SEQ ID NO: 761725 - RNA, 22 nt, Human
caauagaaaacucaauacuuaa

SEQ ID NO: 761726 - RNA, 22 nt, Human
cugcuuggcuuauaaccucagg

SEQ ID NO: 761727 - RNA, 22 nt, Human
guuaaugucacuuuauguggcu

SEQ ID NO: 761728 - RNA, 22 nt, Human
ucuuccugaaacccuguuccag

SEQ ID NO: 761729 - RNA, 22 nt, Human
uggaaggagacugggaagugug

SEQ ID NO: 761730 - RNA, 22 nt, Human
aacacuuuguugccuaugaacg

SEQ ID NO: 761731 - RNA, 18 nt, Human
guccacagauucuucacu

SEQ ID NO: 761732 - RNA, 22 nt, Human
auguacauaaaauguauaauga

SEQ ID NO: 761733 - RNA, 22 nt, Human
aaaguauuuuugacaggcauua

SEQ ID NO: 761734 - RNA, 22 nt, Human
gagcugccugaacaagcagcag

SEQ ID NO: 761735 - RNA, 21 nt, Human
cugugucgcucucgcugggag

SEQ ID NO: 761736 - RNA, 22 nt, Human
gcacugugcuagaagccagggg

SEQ ID NO: 761737 - RNA, 22 nt, Human
auguuacaauccaacaaaauua

SEQ ID NO: 761738 - RNA, 22 nt, Human
gcaugcauuuccauucucacau

SEQ ID NO: 761739 - RNA, 22 nt, Human
ugcuuuauguggcugauacuca

SEQ ID NO: 761740 - RNA, 22 nt, Human
ugcagcccuuccuuccucuggg

SEQ ID NO: 761741 - RNA, 22 nt, Human
agagcuuagaauuucagaugau

SEQ ID NO: 761742 - RNA, 22 nt, Human
uagggcugugucuccaggacca

SEQ ID NO: 761743 - RNA, 22 nt, Human
ccaggcugggcuacaaguugag

SEQ ID NO: 761744 - RNA, 22 nt, Human
uccaggauggugacgguggcca

SEQ ID NO: 761745 - RNA, 22 nt, Human
uagaugcugaaacauggaggcg

SEQ ID NO: 761746 - RNA, 22 nt, Human
auuguucuguagugacauguag

SEQ ID NO: 761747 - RNA, 22 nt, Human
gaggauguaaaauagacaaaau

SEQ ID NO: 761748 - RNA, 22 nt, Human
agcaugaaagcauaggacaguc

SEQ ID NO: 761749 - RNA, 22 nt, Human
aaggagcgcuuagggggcagaa

SEQ ID NO: 761750 - RNA, 22 nt, Human
uguuccugaggcaugugucaau

SEQ ID NO: 761751 - RNA, 22 nt, Human
aaaggccagguuggcugguauu

SEQ ID NO: 761752 - RNA, 22 nt, Human
aggcaccugagguggccagccu

SEQ ID NO: 761753 - RNA, 22 nt, Human
caguggaagcuggcugugaaga

SEQ ID NO: 761754 - RNA, 22 nt, Human
gcagagccugggggucugcgga

SEQ ID NO: 761755 - RNA, 22 nt, Human
gcacugaaugcuuuuacuguaa

SEQ ID NO: 761756 - RNA, 22 nt, Human
ugggugguugcugaggcuccuu

SEQ ID NO: 761757 - RNA, 22 nt, Human
gaguuaaauagcuuaggauuca

SEQ ID NO: 761758 - RNA, 22 nt, Human
ggucacaagguacuguaagaaa

SEQ ID NO: 761759 - RNA, 22 nt, Human
cagaguggcacucugcuggaug

SEQ ID NO: 761760 - RNA, 22 nt, Human
gggucccaggaaggagcagugu

SEQ ID NO: 761761 - RNA, 22 nt, Human
acugagguuauugcaauaaaau

SEQ ID NO: 761762 - RNA, 22 nt, Human
acaguguuauuucugaguaaug

SEQ ID NO: 761763 - RNA, 22 nt, Human
cagcacaggccccucucuccca

SEQ ID NO: 761764 - RNA, 22 nt, Human
uguuuacuuuccuucucacagg

SEQ ID NO: 761765 - RNA, 22 nt, Human
cccagguggcagaagcugcagu

SEQ ID NO: 761766 - RNA, 21 nt, Human
agaucauucuucugagcacuu

SEQ ID NO: 761767 - RNA, 22 nt, Human
agcuuccugucuucugcacaaa

SEQ ID NO: 761768 - RNA, 17 nt, Human
aaggagcugagagaugg

SEQ ID NO: 761769 - RNA, 22 nt, Human
uguuuagaugcaaagucucaca

SEQ ID NO: 761770 - RNA, 22 nt, Human
aucuggcuuuuaccccacggcc

SEQ ID NO: 761771 - RNA, 20 nt, Human
uucagaguuuacucaaacug

SEQ ID NO: 761772 - RNA, 20 nt, Human
gcagagccucacugcaaggg

SEQ ID NO: 761773 - RNA, 22 nt, Human
ugcuaaauucauuauugauuua

SEQ ID NO: 761774 - RNA, 22 nt, Human
cucugcugccaccagaaccacu

SEQ ID NO: 761775 - RNA, 22 nt, Human
ucagcaggugcuuuguuuacuc

SEQ ID NO: 761776 - RNA, 22 nt, Human
guuaaagaguuuggcuuucuuc

SEQ ID NO: 761777 - RNA, 22 nt, Human
aucaucuuaaaucuagaaugug

SEQ ID NO: 761778 - RNA, 22 nt, Human
aagcaucuucuaucaguuagac

SEQ ID NO: 761779 - RNA, 22 nt, Human
aggcaacaaggguagucaguga

SEQ ID NO: 761780 - RNA, 20 nt, Human
uccuugaaagugggguauau

SEQ ID NO: 761781 - RNA, 22 nt, Human
uaaggccaaggggccauagucu

SEQ ID NO: 761782 - RNA, 22 nt, Human
auggcuuuuuagacuuugguac

SEQ ID NO: 761783 - RNA, 22 nt, Human
caaaauuagggagugagcugga

SEQ ID NO: 761784 - RNA, 21 nt, Human
guguggauaugugacaggugg

SEQ ID NO: 761785 - RNA, 22 nt, Human
gagaggccaaaaucccugcccc

SEQ ID NO: 761786 - RNA, 22 nt, Human
ccuccuggaggcucuagggaaa

SEQ ID NO: 761787 - RNA, 22 nt, Human
cuagccaacaccuuauuuucug

SEQ ID NO: 761788 - RNA, 22 nt, Human
ugaguucuuuccguuagguaug

SEQ ID NO: 761789 - RNA, 22 nt, Human
auuguguccucauugaccuuca

SEQ ID NO: 761790 - RNA, 22 nt, Human
ucauguuauugacucauaauau

SEQ ID NO: 761791 - RNA, 22 nt, Human
auuuggaugcacuaaauaaaau

SEQ ID NO: 761792 - RNA, 22 nt, Human
agagagagggaaacugcuaaac

SEQ ID NO: 761793 - RNA, 22 nt, Human
ggggcugggauuugaacccagg

SEQ ID NO: 761794 - RNA, 22 nt, Human
auugcuguaaauuaucuuauua

SEQ ID NO: 761795 - RNA, 22 nt, Human
uauacaagaggugagaugagca

SEQ ID NO: 761796 - RNA, 22 nt, Human
ccugccaugccagcaugcccgu

SEQ ID NO: 761797 - RNA, 22 nt, Human
auggcagccugagcagaggaau

SEQ ID NO: 761798 - RNA, 22 nt, Human
guccagcccgggcuccgccagc

SEQ ID NO: 761799 - RNA, 22 nt, Human
uuucuaucuaggguuagaguga

SEQ ID NO: 761800 - RNA, 22 nt, Human
agugugggugagggaggcccuc

SEQ ID NO: 761801 - RNA, 22 nt, Human
ucccaggaaggauucggcauuu

SEQ ID NO: 761802 - RNA, 22 nt, Human
uaugcaauucucuuaauauucu

SEQ ID NO: 761803 - RNA, 22 nt, Human
uucuuuggggucuccagcauag

SEQ ID NO: 761804 - RNA, 22 nt, Human
ucuguaguagguuguaguucuu

SEQ ID NO: 761805 - RNA, 21 nt, Human
gccagcugggucuugcaggag

SEQ ID NO: 761806 - RNA, 22 nt, Human
ucauugaauucuggggguugag

SEQ ID NO: 761807 - RNA, 22 nt, Human
uuaacauccuguuuaaauuugg

SEQ ID NO: 761808 - RNA, 22 nt, Human
cuucaagauccauagauauugc

SEQ ID NO: 761809 - RNA, 22 nt, Human
ucacaguuuccauaggucagca

SEQ ID NO: 761810 - RNA, 22 nt, Human
agagcccaucaguggcagugga

SEQ ID NO: 761811 - RNA, 22 nt, Human
uucaaagcaagacacaauuccu

SEQ ID NO: 761812 - RNA, 22 nt, Human
uuuacagggaauauuuuggcuu

SEQ ID NO: 761813 - RNA, 22 nt, Human
gcagggcaaauguggaaaggag

SEQ ID NO: 761814 - RNA, 22 nt, Human
ucuacccagagcuaugaccuga

SEQ ID NO: 761815 - RNA, 22 nt, Human
aggggaauggguagacuguuga

SEQ ID NO: 761816 - RNA, 22 nt, Human
uuaugaaagacauuucuguugg

SEQ ID NO: 761817 - RNA, 18 nt, Human
gaaaugugauucuagggc

SEQ ID NO: 761818 - RNA, 22 nt, Human
ugcugucccuaagucucuucaa

SEQ ID NO: 761819 - RNA, 22 nt, Human
uccagcuccucuacccgaugcg

SEQ ID NO: 761820 - RNA, 22 nt, Human
aggcagcaugggccccagcucc

SEQ ID NO: 761821 - RNA, 22 nt, Human
ccugggucaccaggcccaggca

SEQ ID NO: 761822 - RNA, 22 nt, Human
uucaauacaaagaaaggaauuu

SEQ ID NO: 761823 - RNA, 22 nt, Human
aauucccaccuucucucuuuug

SEQ ID NO: 761824 - RNA, 18 nt, Human
aaauguacuguccauggc

SEQ ID NO: 761825 - RNA, 18 nt, Human
cugucagcagcuucacga

SEQ ID NO: 761826 - RNA, 22 nt, Human
ccugaagagugaauguggcagu

SEQ ID NO: 761827 - RNA, 22 nt, Human
ggaggcucuccuggccuugucu

SEQ ID NO: 761828 - RNA, 22 nt, Human
ugugcucugcaaucaguucuuu

SEQ ID NO: 761829 - RNA, 22 nt, Human
acuccccaaaacuaaccaugca

SEQ ID NO: 761830 - RNA, 22 nt, Human
gcucugccucuuugcugcguca

SEQ ID NO: 761831 - RNA, 22 nt, Human
caggaaauugcaacagucugag

SEQ ID NO: 761832 - RNA, 22 nt, Human
uuucaaaccuacuuguauguuu

SEQ ID NO: 761833 - RNA, 22 nt, Human
cucuggaauugaccugggaggg

SEQ ID NO: 761834 - RNA, 19 nt, Human
ugcaggaggacugagcaga

SEQ ID NO: 761835 - RNA, 22 nt, Human
aacagucaaaguuugguuccuu

SEQ ID NO: 761836 - RNA, 22 nt, Human
uguauuugugauaacgaccuga

SEQ ID NO: 761837 - RNA, 22 nt, Human
ccaggagagcucuaaauggcug

SEQ ID NO: 761838 - RNA, 22 nt, Human
gccuggcuaguuagugucaggu

SEQ ID NO: 761839 - RNA, 22 nt, Human
uccaguccagggaauggcugau

SEQ ID NO: 761840 - RNA, 22 nt, Human
caucaggaggagaugaagaaaa

SEQ ID NO: 761841 - RNA, 22 nt, Human
cagcucuguaaauuccuucauc

SEQ ID NO: 761842 - RNA, 18 nt, Human
agacaaacuucuucugcc

SEQ ID NO: 761843 - RNA, 22 nt, Human
ucuucaugucucugcuugaguc

SEQ ID NO: 761844 - RNA, 22 nt, Human
guagggcaacaugggcacuagg

SEQ ID NO: 761845 - RNA, 22 nt, Human
gggcaguuuauucuagaugguu

SEQ ID NO: 761846 - RNA, 22 nt, Human
cagcaguacuucucagagguau

SEQ ID NO: 761847 - RNA, 22 nt, Human
ccagcuccacugucagaugaga

SEQ ID NO: 761848 - RNA, 17 nt, Human
aguuuauuuagccuucu

SEQ ID NO: 761849 - RNA, 22 nt, Human
auuuauaacgugcagccagggu

SEQ ID NO: 761850 - RNA, 22 nt, Human
ucucugauguauaucagagaac

SEQ ID NO: 761851 - RNA, 23 nt, Human
ugggaauugcaggggguucugcc

SEQ ID NO: 761852 - RNA, 21 nt, Human
ugaaacauuugaucaaagcac

SEQ ID NO: 761853 - RNA, 22 nt, Human
auuuuuccaauuaggauaaaga

SEQ ID NO: 761854 - RNA, 22 nt, Human
uucugggaugugaaugguuuaa

SEQ ID NO: 761855 - RNA, 22 nt, Human
cagaggguggaggccaggcucu

SEQ ID NO: 761856 - RNA, 22 nt, Human
cagaggauuauggagauggucu

SEQ ID NO: 761857 - RNA, 22 nt, Human
ucacaucauuaagacuucuccu

SEQ ID NO: 761858 - RNA, 22 nt, Human
cuggaaggcagagguugcagug

SEQ ID NO: 761859 - RNA, 22 nt, Human
agggcuuugcaaugcacagugg

SEQ ID NO: 761860 - RNA, 22 nt, Human
uacaggagcacaaaagaguuga

SEQ ID NO: 761861 - RNA, 22 nt, Human
cucaggcuaagaaggccaagug

SEQ ID NO: 761862 - RNA, 23 nt, Human
cccagcgcugagcccugcaggca

SEQ ID NO: 761863 - RNA, 22 nt, Human
uccagcuggcuucggaagugga

SEQ ID NO: 761864 - RNA, 22 nt, Human
cacguuuuaugacagaagaagc

SEQ ID NO: 761865 - RNA, 22 nt, Human
cagccccucacagagcuguccu

SEQ ID NO: 761866 - RNA, 20 nt, Human
gggcuagguagccauuuggc

SEQ ID NO: 761867 - RNA, 22 nt, Human
gaagccacuauagauauucuaa

SEQ ID NO: 761868 - RNA, 22 nt, Human
gaaaucuuuuccaauuguuuag

SEQ ID NO: 761869 - RNA, 22 nt, Human
ucacaacuugaagcugauuuaa

SEQ ID NO: 761870 - RNA, 22 nt, Human
ggaaggaggaugcucuggccuu

SEQ ID NO: 761871 - RNA, 22 nt, Human
aggcaccucuuaggcugcuacu

SEQ ID NO: 761872 - RNA, 23 nt, Human
aacaggaugugcuucaucuuuug

SEQ ID NO: 761873 - RNA, 22 nt, Human
ugauuauauuaacuauguuccu

SEQ ID NO: 761874 - RNA, 22 nt, Human
acaggcagguaauuuacauauu

SEQ ID NO: 761875 - RNA, 22 nt, Human
ggcagcugagaucaugcuguug

SEQ ID NO: 761876 - RNA, 22 nt, Human
uucacauucagaaaaagcccgu

SEQ ID NO: 761877 - RNA, 22 nt, Human
uggagaggagcaccauggccau

SEQ ID NO: 761878 - RNA, 20 nt, Human
ucucuguaaaucuucuuuua

SEQ ID NO: 761879 - RNA, 22 nt, Human
gcagaaguaccucguucuaguu

SEQ ID NO: 761880 - RNA, 22 nt, Human
gaauucuaggguaaauauccua

SEQ ID NO: 761881 - RNA, 22 nt, Human
ugccuggcaacuguggugggcu

SEQ ID NO: 761882 - RNA, 22 nt, Human
ggcugagaguuuccucuggggc

SEQ ID NO: 761883 - RNA, 22 nt, Human
ugaggauuuaaugggacucauu

SEQ ID NO: 761884 - RNA, 22 nt, Human
gaaaacuaacggaaaaguuagg

SEQ ID NO: 761885 - RNA, 22 nt, Human
ugucuccacaggugucagcuca

SEQ ID NO: 761886 - RNA, 22 nt, Human
uguguggguacagaugauuguu

SEQ ID NO: 761887 - RNA, 22 nt, Human
cauuucaaacaguuacagcugc

SEQ ID NO: 761888 - RNA, 17 nt, Human
gugccuguuguccugga

SEQ ID NO: 761889 - RNA, 22 nt, Human
caauugcuuucuuaccaagaga

SEQ ID NO: 761890 - RNA, 22 nt, Human
uccugagaugagacagugcugc

SEQ ID NO: 761891 - RNA, 22 nt, Human
guuacaguggguuuggggccca

SEQ ID NO: 761892 - RNA, 22 nt, Human
ccugcucugguuuagucagucu

SEQ ID NO: 761893 - RNA, 22 nt, Human
acaggggaccuaggacccucgg

SEQ ID NO: 761894 - RNA, 22 nt, Human
cccugacucggcgcgcucccgu

SEQ ID NO: 761895 - RNA, 22 nt, Human
cacugucuauuaauauaacuua

SEQ ID NO: 761896 - RNA, 22 nt, Human
cugagggcaccgacagagugga

SEQ ID NO: 761897 - RNA, 20 nt, Human
cugccaugauugauagagug

SEQ ID NO: 761898 - RNA, 22 nt, Human
uacuuacacagcuguagaaggu

SEQ ID NO: 761899 - RNA, 22 nt, Human
ugaggcaguauucuccauucca

SEQ ID NO: 761900 - RNA, 22 nt, Human
augcauucagcggaaugcuuag

SEQ ID NO: 761901 - RNA, 22 nt, Human
aggaaacuaacuuaucuuuaua

SEQ ID NO: 761902 - RNA, 22 nt, Human
ucacaagagcuggacugucuuu

SEQ ID NO: 761903 - RNA, 22 nt, Human
uaacacaguucucuguugcaca

SEQ ID NO: 761904 - RNA, 22 nt, Human
uauaggcagaucugagaauauu

SEQ ID NO: 761905 - RNA, 22 nt, Human
ugcaggcuggaggagggacuaa

SEQ ID NO: 761906 - RNA, 22 nt, Human
agucaguuguggagauuuaacu

SEQ ID NO: 761907 - RNA, 22 nt, Human
uggcaggguggcaacuuuuggu

SEQ ID NO: 761908 - RNA, 19 nt, Human
aaauacagcagcuguuucc

SEQ ID NO: 761909 - RNA, 22 nt, Human
aacagcagcaaguaagcagguc

SEQ ID NO: 761910 - RNA, 22 nt, Human
caccugaauggaacuuugaacc

SEQ ID NO: 761911 - RNA, 22 nt, Human
agaugguuaucuuuucuuugua

SEQ ID NO: 761912 - RNA, 22 nt, Human
auaaauaucacuguugucccuc

SEQ ID NO: 761913 - RNA, 22 nt, Human
uaggccaggacagagcuuccag

SEQ ID NO: 761914 - RNA, 22 nt, Human
cuuguuuucuaaaacaucauuu

SEQ ID NO: 761915 - RNA, 18 nt, Human
auauccaauaaugaacac

SEQ ID NO: 761916 - RNA, 22 nt, Human
ugcaguggaaucuggagagcag

SEQ ID NO: 761917 - RNA, 22 nt, Human
ucacaaagugaagugugucaug

SEQ ID NO: 761918 - RNA, 22 nt, Human
uuuagacaggggcaaaauaagg

SEQ ID NO: 761919 - RNA, 19 nt, Human
uccugcagaccagaccugu

SEQ ID NO: 761920 - RNA, 22 nt, Human
cugccuguggguacaaguggaa

SEQ ID NO: 761921 - RNA, 18 nt, Human
ucugcugcugcguccugc

SEQ ID NO: 761922 - RNA, 22 nt, Human
gaggcuguguuucagugaggcc

SEQ ID NO: 761923 - RNA, 22 nt, Human
acugccugugucccuucagugc

SEQ ID NO: 761924 - RNA, 22 nt, Human
gaguuauuucagaaggaaagau

SEQ ID NO: 761925 - RNA, 23 nt, Human
ucacacagcuggucagguacaga

SEQ ID NO: 761926 - RNA, 22 nt, Human
gagcaaaauaaauucugacaaa

SEQ ID NO: 761927 - RNA, 22 nt, Human
agucagugacuuuugcugagag

SEQ ID NO: 761928 - RNA, 22 nt, Human
ugucaccaugccagcuucugcc

SEQ ID NO: 761929 - RNA, 22 nt, Human
uacacuaauguuuuugcaaagc

SEQ ID NO: 761930 - RNA, 22 nt, Human
uguuaaucaaucaacaguauua

SEQ ID NO: 761931 - RNA, 22 nt, Human
cccugcagggaggauucugaag

SEQ ID NO: 761932 - RNA, 22 nt, Human
uuuacaaguacaccuaacagcu

SEQ ID NO: 761933 - RNA, 22 nt, Human
ggaacugaggaacgaacuggga

SEQ ID NO: 761934 - RNA, 22 nt, Human
caggccaccagauacaugcccc

SEQ ID NO: 761935 - RNA, 22 nt, Human
ucucugugcccaguaguucucu

SEQ ID NO: 761936 - RNA, 22 nt, Human
uucugcuauacuuaugaauaca

SEQ ID NO: 761937 - RNA, 22 nt, Human
aagcuucauauaugugugaguc

SEQ ID NO: 761938 - RNA, 22 nt, Human
acuggcagcuguaggaugcaug

SEQ ID NO: 761939 - RNA, 22 nt, Human
acaaaugcagcauaaagugaac

SEQ ID NO: 761940 - RNA, 19 nt, Human
uagaaugcccacuuaaaaa

SEQ ID NO: 761941 - RNA, 17 nt, Human
uggaugugggaucugga

SEQ ID NO: 761942 - RNA, 22 nt, Human
aggagcugggagaaggacuaaa

SEQ ID NO: 761943 - RNA, 22 nt, Human
ccagguaccagucaaaucugua

SEQ ID NO: 761944 - RNA, 19 nt, Human
guuuucugaucuugccccc

SEQ ID NO: 761945 - RNA, 22 nt, Human
cauggaaugguugaaugacgaa

SEQ ID NO: 761946 - RNA, 22 nt, Human
auccugaguuccugccucuaaa

SEQ ID NO: 761947 - RNA, 21 nt, Human
ucagucccuggguguguccca

SEQ ID NO: 761948 - RNA, 22 nt, Human
ugcaugauguuaaacaucaggu

SEQ ID NO: 761949 - RNA, 22 nt, Human
aggcagugccuggaccccagcu

SEQ ID NO: 761950 - RNA, 22 nt, Human
acucaucaacuguuacaaaugu

SEQ ID NO: 761951 - RNA, 22 nt, Human
gacagagguguccuugagucca

SEQ ID NO: 761952 - RNA, 18 nt, Human
uggagccauugccaccau

SEQ ID NO: 761953 - RNA, 22 nt, Human
cugggucuccggcagccucggg

SEQ ID NO: 761954 - RNA, 22 nt, Human
acagaguaggugcucaguaaau

SEQ ID NO: 761955 - RNA, 22 nt, Human
auguugggaaggccgcaggcac

SEQ ID NO: 761956 - RNA, 22 nt, Human
ugaaugauuaaaacccggacua

SEQ ID NO: 761957 - RNA, 22 nt, Human
ugcacaggccuugaagggagag

SEQ ID NO: 761958 - RNA, 22 nt, Human
ucuaccuauuucuucuauuggu

SEQ ID NO: 761959 - RNA, 22 nt, Human
uaaaccuucaugauggucauua

SEQ ID NO: 761960 - RNA, 22 nt, Human
aucaucugccucaucacugcau

SEQ ID NO: 761961 - RNA, 22 nt, Human
aaauggaagaagugcaauacug

SEQ ID NO: 761962 - RNA, 22 nt, Human
cccaguccuaaagcagacgcca

SEQ ID NO: 761963 - RNA, 22 nt, Human
aggcuaagggaugacuggagug

SEQ ID NO: 761964 - RNA, 19 nt, Human
uggcagaggcaguuuguac

SEQ ID NO: 761965 - RNA, 22 nt, Human
acuguguauucuaaugacuaaa

SEQ ID NO: 761966 - RNA, 22 nt, Human
aaguggcccuaggccaagggga

SEQ ID NO: 761967 - RNA, 22 nt, Human
cccagcuucugagggggccuug

SEQ ID NO: 761968 - RNA, 22 nt, Human
ucaguguuuccuagagcauaua

SEQ ID NO: 761969 - RNA, 22 nt, Human
gagcuuugcuggaagccugggg

SEQ ID NO: 761970 - RNA, 21 nt, Human
ccugagugagaccuggcccgu

SEQ ID NO: 761971 - RNA, 22 nt, Human
aucugcaguuuguuuucucuug

SEQ ID NO: 761972 - RNA, 22 nt, Human
gaggggccggcaugugccucuc

SEQ ID NO: 761973 - RNA, 22 nt, Human
guucacauccuugugaggauuu

SEQ ID NO: 761974 - RNA, 22 nt, Human
gugggacagucagaagugagca

SEQ ID NO: 761975 - RNA, 22 nt, Human
cagagcuuccugcugggcuucu

SEQ ID NO: 761976 - RNA, 22 nt, Human
gcuggccuccugcuagauggaa

SEQ ID NO: 761977 - RNA, 22 nt, Human
aaauaguuuagcucucauuuca

SEQ ID NO: 761978 - RNA, 22 nt, Human
uaacaucaaacugcauuuucua

SEQ ID NO: 761979 - RNA, 23 nt, Human
uucaaagcuuaagcucuuuccac

SEQ ID NO: 761980 - RNA, 22 nt, Human
gcuuccaccuacuaaaugccac

SEQ ID NO: 761981 - RNA, 22 nt, Human
uauauuugcuaaaugugugcaa

SEQ ID NO: 761982 - RNA, 22 nt, Human
cugucucugauaagcucgaggg

SEQ ID NO: 761983 - RNA, 22 nt, Human
acugucaugugcuaacugucca

SEQ ID NO: 761984 - RNA, 22 nt, Human
ugcugaggagggcacccggggg

SEQ ID NO: 761985 - RNA, 22 nt, Human
gaguucaguaguuauagucuag

SEQ ID NO: 761986 - RNA, 22 nt, Human
uucaggauucucucccauuuac

SEQ ID NO: 761987 - RNA, 22 nt, Human
uccagggaaggugugaggcugg

SEQ ID NO: 761988 - RNA, 22 nt, Human
gcuucaugccaggagguuuaag

SEQ ID NO: 761989 - RNA, 23 nt, Human
ucuuccugaacuaucaggcacau

SEQ ID NO: 761990 - RNA, 16 nt, Human
uguuagcugugcauua

SEQ ID NO: 761991 - RNA, 22 nt, Human
gcauaugaucacgugugucggu

SEQ ID NO: 761992 - RNA, 22 nt, Human
agaaauguccagggcuaggauc

SEQ ID NO: 761993 - RNA, 22 nt, Human
cugguccuaaagcccuacucca

SEQ ID NO: 761994 - RNA, 22 nt, Human
augugucucuaaaauuuaguaa

SEQ ID NO: 761995 - RNA, 22 nt, Human
uaccuuuugcuuauuaugacac

SEQ ID NO: 761996 - RNA, 22 nt, Human
uggccugguuauauugcuauca

SEQ ID NO: 761997 - RNA, 19 nt, Human
uucucuggacuagaugcug

SEQ ID NO: 761998 - RNA, 22 nt, Human
agggagcugcucugcuuccgug

SEQ ID NO: 761999 - RNA, 22 nt, Human
ugggagugcaccugggacacga

SEQ ID NO: 762000 - RNA, 22 nt, Human
cugcucugaagccaggauucug

SEQ ID NO: 762001 - RNA, 22 nt, Human
ggugcugguucaggguggcugu

SEQ ID NO: 762002 - RNA, 22 nt, Human
gcucaugggcccagagcagccc

SEQ ID NO: 762003 - RNA, 22 nt, Human
gugagcaggauaggggcucccu

SEQ ID NO: 762004 - RNA, 22 nt, Human
ucuggggaugagugaugucgua

SEQ ID NO: 762005 - RNA, 22 nt, Human
auucuucaaagagugucaaagu

SEQ ID NO: 762006 - RNA, 22 nt, Human
augaagacaaacgacguugcaa

SEQ ID NO: 762007 - RNA, 22 nt, Human
auggggugcaugcagauuggga

SEQ ID NO: 762008 - RNA, 22 nt, Human
uugaaaguccuucuugaguuac

SEQ ID NO: 762009 - RNA, 22 nt, Human
ucacaucucuguuuucuaaauc

SEQ ID NO: 762010 - RNA, 22 nt, Human
acauaugaguacuauacagugc

SEQ ID NO: 762011 - RNA, 22 nt, Human
guuugcauggaagacagugagu

SEQ ID NO: 762012 - RNA, 22 nt, Human
uuuguauuacaaagucacagua

SEQ ID NO: 762013 - RNA, 22 nt, Human
agcugcaguaaagcucuccagg

SEQ ID NO: 762014 - RNA, 22 nt, Human
ucagaaguccaauaccauggga

SEQ ID NO: 762015 - RNA, 22 nt, Human
cuuccucucuugcccauaagag

SEQ ID NO: 762016 - RNA, 22 nt, Human
cugaggccucucccacuccagc

SEQ ID NO: 762017 - RNA, 22 nt, Human
ccagcuggcaggagagucaggg

SEQ ID NO: 762018 - RNA, 22 nt, Human
uugcagcaugcauagacacugc

SEQ ID NO: 762019 - RNA, 22 nt, Human
gaguauaugacuuucuuuugca

SEQ ID NO: 762020 - RNA, 22 nt, Human
ccuccagggcagacggggagca

SEQ ID NO: 762021 - RNA, 22 nt, Human
aggaauuuuaauaugcuugucu

SEQ ID NO: 762022 - RNA, 22 nt, Human
ggcuuuauuaacucauccguaa

SEQ ID NO: 762023 - RNA, 22 nt, Human
ugcuucaaaaaguuguuagagg

SEQ ID NO: 762024 - RNA, 21 nt, Human
aagugguuuacauccagcugu

SEQ ID NO: 762025 - RNA, 22 nt, Human
agaucagacuuugugacuagga

SEQ ID NO: 762026 - RNA, 22 nt, Human
cagaaaggacagagugagggug

SEQ ID NO: 762027 - RNA, 22 nt, Human
uuguuaacggaaaacuguuuuc

SEQ ID NO: 762028 - RNA, 22 nt, Human
aauaacagaaacuugagcauca

SEQ ID NO: 762029 - RNA, 22 nt, Human
caguucaggccggcugacucag

SEQ ID NO: 762030 - RNA, 22 nt, Human
cuagagaaacgccgugggagga

SEQ ID NO: 762031 - RNA, 22 nt, Human
gccuucaggugucccugugggc

SEQ ID NO: 762032 - RNA, 22 nt, Human
guggccaugugcuugcagggua

SEQ ID NO: 762033 - RNA, 22 nt, Human
auaaauagugugucauaaaguc

SEQ ID NO: 762034 - RNA, 20 nt, Human
cugaagaguggccugaucug

SEQ ID NO: 762035 - RNA, 22 nt, Human
cagagacauuaagugccaugau

SEQ ID NO: 762036 - RNA, 22 nt, Human
uccugggucccgcacaucuguc

SEQ ID NO: 762037 - RNA, 22 nt, Human
aaugaaacuauauuuagagagg

SEQ ID NO: 762038 - RNA, 22 nt, Human
auccacuuggcugguuguucua

SEQ ID NO: 762039 - RNA, 22 nt, Human
uggagguggggcucaggaaucu

SEQ ID NO: 762040 - RNA, 22 nt, Human
aggggucuugggaguccuggcu

SEQ ID NO: 762041 - RNA, 22 nt, Human
aaaaguauggugguccuuuuua

SEQ ID NO: 762042 - RNA, 22 nt, Human
gcuuaaauuguuuguggauagu

SEQ ID NO: 762043 - RNA, 22 nt, Human
agggaaagguagugaggucaca

SEQ ID NO: 762044 - RNA, 22 nt, Human
gauguguuuguuucuggaggag

SEQ ID NO: 762045 - RNA, 22 nt, Human
cauccauaugaggcacauuggu

SEQ ID NO: 762046 - RNA, 22 nt, Human
agguccaggagauuuggcaauu

SEQ ID NO: 762047 - RNA, 22 nt, Human
aggagagucuugagucacuggu

SEQ ID NO: 762048 - RNA, 22 nt, Human
uuucuugaccacuauguugaua

SEQ ID NO: 762049 - RNA, 22 nt, Human
ggacacagaccuuucuguucua

SEQ ID NO: 762050 - RNA, 22 nt, Human
agcagggcagcugaugcgcacg

SEQ ID NO: 762051 - RNA, 22 nt, Human
ucaggacagaaggcugccaggg

SEQ ID NO: 762052 - RNA, 22 nt, Human
cuugagcacagcggcuucagga

SEQ ID NO: 762053 - RNA, 23 nt, Human
acugggcugaaauuaaagguguc

SEQ ID NO: 762054 - RNA, 22 nt, Human
aauaacuuuuaaaagacccugg

SEQ ID NO: 762055 - RNA, 22 nt, Human
guuuucucugagaugccuuucu

SEQ ID NO: 762056 - RNA, 22 nt, Human
uccuagaacuccaggacagucc

SEQ ID NO: 762057 - RNA, 22 nt, Human
aucuuuaccaccaaagaaugcu

SEQ ID NO: 762058 - RNA, 22 nt, Human
uugcagcagcucuuugaauguu

SEQ ID NO: 762059 - RNA, 20 nt, Human
ucagcccagggugagcaucu

SEQ ID NO: 762060 - RNA, 22 nt, Human
aguguaugaacuuaagagagag

SEQ ID NO: 762061 - RNA, 22 nt, Human
agccagggauggcagugcccag

SEQ ID NO: 762062 - RNA, 22 nt, Human
uacagugucuggauaucaaagg

SEQ ID NO: 762063 - RNA, 22 nt, Human
ccuggcugguugucugauucua

SEQ ID NO: 762064 - RNA, 22 nt, Human
ucaguguuuuaacugucuuuua

SEQ ID NO: 762065 - RNA, 22 nt, Human
cauuucucacuccagcaacuuu

SEQ ID NO: 762066 - RNA, 22 nt, Human
agcuguguaagucauguaggug

SEQ ID NO: 762067 - RNA, 22 nt, Human
acagugacacucaggugggaug

SEQ ID NO: 762068 - RNA, 22 nt, Human
uuauucuguuggcccucucauc

SEQ ID NO: 762069 - RNA, 22 nt, Human
ccacaugcucaccaagucccug

SEQ ID NO: 762070 - RNA, 22 nt, Human
uguaguccaggaauugugucug

SEQ ID NO: 762071 - RNA, 22 nt, Human
auuguucaaagugcuuugcaug

SEQ ID NO: 762072 - RNA, 22 nt, Human
gccaggaggucagccccucaac

SEQ ID NO: 762073 - RNA, 22 nt, Human
cuggcucugaccgcgcuggccu

SEQ ID NO: 762074 - RNA, 22 nt, Human
uacauggugguggcacuugacu

SEQ ID NO: 762075 - RNA, 22 nt, Human
aagaagcaggucacagacaggg

SEQ ID NO: 762076 - RNA, 22 nt, Human
gggagggaagguaccuguguga

SEQ ID NO: 762077 - RNA, 22 nt, Human
guccucugauuucuagguauau

SEQ ID NO: 762078 - RNA, 22 nt, Human
ggcagauggggugacaagagag

SEQ ID NO: 762079 - RNA, 19 nt, Human
aucccaaggagcugggacu

SEQ ID NO: 762080 - RNA, 21 nt, Human
gggaaauuaggauugcucauc

SEQ ID NO: 762081 - RNA, 22 nt, Human
agacugugagggagauacaggg

SEQ ID NO: 762082 - RNA, 22 nt, Human
auguuuccauagaagucacagu

SEQ ID NO: 762083 - RNA, 19 nt, Human
caggaaggggcgaaucugg

SEQ ID NO: 762084 - RNA, 22 nt, Human
auuuugacugcauuacagaaca

SEQ ID NO: 762085 - RNA, 22 nt, Human
ggaagccacccagcuuugauag

SEQ ID NO: 762086 - RNA, 22 nt, Human
ccgcccacacuaaauaugagcg

SEQ ID NO: 762087 - RNA, 22 nt, Human
ucccagagucuucuccuguaau

SEQ ID NO: 762088 - RNA, 22 nt, Human
aucaggaagaucuagcgaaugu

SEQ ID NO: 762089 - RNA, 22 nt, Human
gaggacagcucuaacuaaaguc

SEQ ID NO: 762090 - RNA, 22 nt, Human
uuuauaaacaguaccacggugc

SEQ ID NO: 762091 - RNA, 22 nt, Human
uugaggucuuugagcaaacgca

SEQ ID NO: 762092 - RNA, 22 nt, Human
gacacauagaucuaucucacuc

SEQ ID NO: 762093 - RNA, 22 nt, Human
gcagacgucaccgagucgaugg

SEQ ID NO: 762094 - RNA, 21 nt, Human
ucaggcaggucccacugaaca

SEQ ID NO: 762095 - RNA, 22 nt, Human
uaacacuucagaugauuuuguu

SEQ ID NO: 762096 - RNA, 22 nt, Human
ucacaaagagaauugugggugu

SEQ ID NO: 762097 - RNA, 22 nt, Human
ugcugaaguccaucuguuugac

SEQ ID NO: 762098 - RNA, 20 nt, Human
ucucccugcccaucucagau

SEQ ID NO: 762099 - RNA, 22 nt, Human
uacaaugcugugcauguaaugg

SEQ ID NO: 762100 - RNA, 22 nt, Human
ucugaugcaauguaagucuugg

SEQ ID NO: 762101 - RNA, 22 nt, Human
gggcucagacaucccuccugga

SEQ ID NO: 762102 - RNA, 22 nt, Human
caguauuuuuaagcugcuuugu

SEQ ID NO: 762103 - RNA, 22 nt, Human
auaugcuuccccuucuuuuugg

SEQ ID NO: 762104 - RNA, 22 nt, Human
gugccgugggccuuagugaucu

SEQ ID NO: 762105 - RNA, 22 nt, Human
acaaaugaaucauacauaaugu

SEQ ID NO: 762106 - RNA, 22 nt, Human
augaauguuuggugaucagaua

SEQ ID NO: 762107 - RNA, 22 nt, Human
cuucuggcaaaacaggcagaaa

SEQ ID NO: 762108 - RNA, 22 nt, Human
uaguugcuaaaaagugccuaac

SEQ ID NO: 762109 - RNA, 20 nt, Human
ucuguaaagacuccagaagc

SEQ ID NO: 762110 - RNA, 22 nt, Human
uggcagcaugucccggccucag

SEQ ID NO: 762111 - RNA, 22 nt, Human
uauguauaaucacagaguguca

SEQ ID NO: 762112 - RNA, 22 nt, Human
caaggccaagucucugugaaga

SEQ ID NO: 762113 - RNA, 22 nt, Human
gauauucaaagauuacugauau

SEQ ID NO: 762114 - RNA, 22 nt, Human
ggcucuggugggaagguuagau

SEQ ID NO: 762115 - RNA, 22 nt, Human
uauuucuguaugcauaaaagga

SEQ ID NO: 762116 - RNA, 22 nt, Human
ugguaaaaacugcaauuacuuu

SEQ ID NO: 762117 - RNA, 22 nt, Human
cuggcugccuauagucucccuu

SEQ ID NO: 762118 - RNA, 22 nt, Human
uggcaauguaggcaagaacauu

SEQ ID NO: 762119 - RNA, 22 nt, Human
acauuuaaauaugccuuauauu

SEQ ID NO: 762120 - RNA, 22 nt, Human
gcugaaugaauguauuuuaaaa

SEQ ID NO: 762121 - RNA, 22 nt, Human
uugguggagucauuggcauaug

SEQ ID NO: 762122 - RNA, 22 nt, Human
uccaggaggcucugguugacgu

SEQ ID NO: 762123 - RNA, 22 nt, Human
augagguaguauuagaaggaga

SEQ ID NO: 762124 - RNA, 22 nt, Human
gacauguauuagucaugcacag

SEQ ID NO: 762125 - RNA, 22 nt, Human
gccugccacgcaugcagaguca

SEQ ID NO: 762126 - RNA, 22 nt, Human
uccaggcaaagggacuagcagg

SEQ ID NO: 762127 - RNA, 22 nt, Human
cuccaaaggauaaaagcagagu

SEQ ID NO: 762128 - RNA, 22 nt, Human
cagcagcuuugccaagucagcc

SEQ ID NO: 762129 - RNA, 22 nt, Human
uccucugacucacagccugggg

SEQ ID NO: 762130 - RNA, 22 nt, Human
cagucaacagagagcccgucag

SEQ ID NO: 762131 - RNA, 22 nt, Human
uuggcagagggaccagccuaca

SEQ ID NO: 762132 - RNA, 22 nt, Human
uguggcagaaccagaauucaaa

SEQ ID NO: 762133 - RNA, 22 nt, Human
auuucagagaaugaaccuaauc

SEQ ID NO: 762134 - RNA, 22 nt, Human
aagugagguuucugcuuucaga

SEQ ID NO: 762135 - RNA, 22 nt, Human
cagcuaggaaguccuuggcgaa

SEQ ID NO: 762136 - RNA, 22 nt, Human
uuuuggcucugcagguuugcac

SEQ ID NO: 762137 - RNA, 22 nt, Human
agguggagaagagaugggcagu

SEQ ID NO: 762138 - RNA, 22 nt, Human
uucugaaauuucuguagaucuu

SEQ ID NO: 762139 - RNA, 20 nt, Human
uagcaaugaguguuccauuu

SEQ ID NO: 762140 - RNA, 22 nt, Human
acagcaguggugcacugagcca

SEQ ID NO: 762141 - RNA, 22 nt, Human
aagagguucuaauuuaacuauc

SEQ ID NO: 762142 - RNA, 18 nt, Human
guguccuggcugcggcgc

SEQ ID NO: 762143 - RNA, 22 nt, Human
uucacaacugccauagccagug

SEQ ID NO: 762144 - RNA, 22 nt, Human
cagcuucuggcguggagccuga

SEQ ID NO: 762145 - RNA, 22 nt, Human
cagccaucaguaaagacagcuu

SEQ ID NO: 762146 - RNA, 22 nt, Human
gaagccugguccagagcuccca

SEQ ID NO: 762147 - RNA, 22 nt, Human
gcaggccuuuaucccugccuca

SEQ ID NO: 762148 - RNA, 22 nt, Human
uucuuacauauuuucauauggu

SEQ ID NO: 762149 - RNA, 18 nt, Human
ucuuuguuuccuucuugc

SEQ ID NO: 762150 - RNA, 22 nt, Human
acuuagcaguuuagaauauguc

SEQ ID NO: 762151 - RNA, 22 nt, Human
uacaaugugugcuucuugucac

SEQ ID NO: 762152 - RNA, 22 nt, Human
gggcucaggucagggcaucagc

SEQ ID NO: 762153 - RNA, 22 nt, Human
guuagggaagcgcuguguucuu

SEQ ID NO: 762154 - RNA, 22 nt, Human
auauuaugcuaagggaaauaag

SEQ ID NO: 762155 - RNA, 22 nt, Human
cugcugucuaguaucuuaaaaa

SEQ ID NO: 762156 - RNA, 22 nt, Human
ucuucagcaacuccccaaucug

SEQ ID NO: 762157 - RNA, 22 nt, Human
ugaaaguuacaggaaaacagau

SEQ ID NO: 762158 - RNA, 22 nt, Human
gagauucugguuagguguauuu

SEQ ID NO: 762159 - RNA, 22 nt, Human
gccaucacauccaggcuaccuc

SEQ ID NO: 762160 - RNA, 19 nt, Human
caggacaguuugccaagaa

SEQ ID NO: 762161 - RNA, 19 nt, Human
uccagcuguuuugagucac

SEQ ID NO: 762162 - RNA, 22 nt, Human
auacauucaaaggaaggauaga

SEQ ID NO: 762163 - RNA, 22 nt, Human
agugcuggcccauagcugcugg

SEQ ID NO: 762164 - RNA, 22 nt, Human
aaaccugaaggaugauacaaca

SEQ ID NO: 762165 - RNA, 22 nt, Human
gcaggcuuguugaaguaaaaua

SEQ ID NO: 762166 - RNA, 22 nt, Human
augcaguguuuggaagcuuaag

SEQ ID NO: 762167 - RNA, 22 nt, Human
cuguauauaauguaugcauggg

SEQ ID NO: 762168 - RNA, 22 nt, Human
aagcaaaggaaagcugacuuuu

SEQ ID NO: 762169 - RNA, 22 nt, Human
agguuucuggaaagguuuugcu

SEQ ID NO: 762170 - RNA, 22 nt, Human
auguguaugagugugcuucuuu

SEQ ID NO: 762171 - RNA, 23 nt, Human
aucaagucaucagcaaaauacau

SEQ ID NO: 762172 - RNA, 22 nt, Human
uacaaugauuagcuaacuugcc

SEQ ID NO: 762173 - RNA, 22 nt, Human
acaagcgggccacagugcuggu

SEQ ID NO: 762174 - RNA, 22 nt, Human
agagaggcgaguuaccugugcu

SEQ ID NO: 762175 - RNA, 22 nt, Human
aggugacugguuuaucuggcag

SEQ ID NO: 762176 - RNA, 22 nt, Human
aacagacagaaaaaugugaucu

SEQ ID NO: 762177 - RNA, 22 nt, Human
agguauagaauugaaaggguuu

SEQ ID NO: 762178 - RNA, 22 nt, Human
uuuaacuuagaagagauauccu

SEQ ID NO: 762179 - RNA, 22 nt, Human
gagagcuaggccacuggggcuu

SEQ ID NO: 762180 - RNA, 22 nt, Human
gcaugaugaaggaggaggaguc

SEQ ID NO: 762181 - RNA, 22 nt, Human
uggagcugagaaguggagcucu

SEQ ID NO: 762182 - RNA, 22 nt, Human
ccaggagacccagggaaggagc

SEQ ID NO: 762183 - RNA, 22 nt, Human
cucugagcagcggugccgaagu

SEQ ID NO: 762184 - RNA, 22 nt, Human
aggaggaggugggacacaguga

SEQ ID NO: 762185 - RNA, 22 nt, Human
auugacaaauggauguugacau

SEQ ID NO: 762186 - RNA, 22 nt, Human
aacuccucucuggugguucguc

SEQ ID NO: 762187 - RNA, 22 nt, Human
agcaguguuuugauucugggag

SEQ ID NO: 762188 - RNA, 22 nt, Human
gcagcagaaggccaaggggagc

SEQ ID NO: 762189 - RNA, 22 nt, Human
uugauuuucaauucauugacaa

SEQ ID NO: 762190 - RNA, 21 nt, Human
ccugaaauucucacuagcuua

SEQ ID NO: 762191 - RNA, 19 nt, Human
gcaucagagcagaaggggu

SEQ ID NO: 762192 - RNA, 22 nt, Human
cugccuggagcauucugaaggu

SEQ ID NO: 762193 - RNA, 22 nt, Human
gaacuguaaaauaauuggcaau

SEQ ID NO: 762194 - RNA, 22 nt, Human
uuggcuuuuaugcagcuuaggu

SEQ ID NO: 762195 - RNA, 22 nt, Human
acacauauucauauguacuuac

SEQ ID NO: 762196 - RNA, 22 nt, Human
aagcagaacugggaaguagugg

SEQ ID NO: 762197 - RNA, 22 nt, Human
uggcagaggagaauuaagauua

SEQ ID NO: 762198 - RNA, 22 nt, Human
ccagagccccugagcuucccug

SEQ ID NO: 762199 - RNA, 22 nt, Human
uggcuucuauugcuguggcauu

SEQ ID NO: 762200 - RNA, 22 nt, Human
uucuccaggggaggguucucca

SEQ ID NO: 762201 - RNA, 22 nt, Human
agcuacucugcagugcccaugg

SEQ ID NO: 762202 - RNA, 22 nt, Human
uacagcauugugucuucacuca

SEQ ID NO: 762203 - RNA, 22 nt, Human
agucaaaugaguaaauauauaa

SEQ ID NO: 762204 - RNA, 22 nt, Human
auuucucauguacaaaaacacu

SEQ ID NO: 762205 - RNA, 22 nt, Human
cuggugugauugagcccaggug

SEQ ID NO: 762206 - RNA, 22 nt, Human
aggcggcuucugaggaggcugc

SEQ ID NO: 762207 - RNA, 22 nt, Human
aaacaagagucuugcuccaccu

SEQ ID NO: 762208 - RNA, 22 nt, Human
aggaauuuaagggcucagagag

SEQ ID NO: 762209 - RNA, 22 nt, Human
uugggaaacaguauagcuaaca

SEQ ID NO: 762210 - RNA, 23 nt, Human
uggggcucuggcaggccugaggu

SEQ ID NO: 762211 - RNA, 22 nt, Human
aaaagacaggugucugcggccc

SEQ ID NO: 762212 - RNA, 22 nt, Human
agacuggguuugagacuuagca

SEQ ID NO: 762213 - RNA, 19 nt, Human
aaccaggaacuaaagcaga

SEQ ID NO: 762214 - RNA, 22 nt, Human
uccaagcucucuaugccaugau

SEQ ID NO: 762215 - RNA, 22 nt, Human
aagcuguugcccugcucuuucu

SEQ ID NO: 762216 - RNA, 22 nt, Human
uugaacauaaaucacuggucag

SEQ ID NO: 762217 - RNA, 22 nt, Human
gccuuuggagaauccagucaug

SEQ ID NO: 762218 - RNA, 22 nt, Human
aaccagcuuugauacgcauuau

SEQ ID NO: 762219 - RNA, 22 nt, Human
cgaggccagcucuaagcccuac

SEQ ID NO: 762220 - RNA, 22 nt, Human
cagcagcagcuuaguggucccc

SEQ ID NO: 762221 - RNA, 22 nt, Human
gggguggagaugguggcccuuu

SEQ ID NO: 762222 - RNA, 23 nt, Human
aaagugacuuuuauaccacuaac

SEQ ID NO: 762223 - RNA, 22 nt, Human
uggcuuuauaccuuugccuugg

SEQ ID NO: 762224 - RNA, 22 nt, Human
guggccuggcuggcaccaccuc

SEQ ID NO: 762225 - RNA, 22 nt, Human
aucauuuaaaacaagucucuau

SEQ ID NO: 762226 - RNA, 22 nt, Human
uucuaugugcuggagaauauuu

SEQ ID NO: 762227 - RNA, 22 nt, Human
agccaguguuaagugacugguu

SEQ ID NO: 762228 - RNA, 22 nt, Human
ugaguucuucacauuaccuacg

SEQ ID NO: 762229 - RNA, 22 nt, Human
cagauggcugccaagaugggcu

SEQ ID NO: 762230 - RNA, 22 nt, Human
uaguuuuacuugcgaugauaau

SEQ ID NO: 762231 - RNA, 22 nt, Human
aguuccaaagccuguauucuua

SEQ ID NO: 762232 - RNA, 22 nt, Human
ggcucucugaggaaacccuucc

SEQ ID NO: 762233 - RNA, 22 nt, Human
uuauugagcaccuacuaugugu

SEQ ID NO: 762234 - RNA, 22 nt, Human
agcaggcuacuccuguguucgu

SEQ ID NO: 762235 - RNA, 22 nt, Human
cuaguugaagaggcugucauca

SEQ ID NO: 762236 - RNA, 22 nt, Human
aaaguucuccuggauugugcug

SEQ ID NO: 762237 - RNA, 22 nt, Human
aggccuccugcagggaugagug

SEQ ID NO: 762238 - RNA, 22 nt, Human
cagcaauaagguaagcuucucc

SEQ ID NO: 762239 - RNA, 22 nt, Human
ucugucuucaucagcaugugau

SEQ ID NO: 762240 - RNA, 22 nt, Human
gaaauguugucucugcagcaau

SEQ ID NO: 762241 - RNA, 22 nt, Human
ggaacacaaaugggagagcugg

SEQ ID NO: 762242 - RNA, 22 nt, Human
gcuggcagaagagcugguucaa

SEQ ID NO: 762243 - RNA, 22 nt, Human
ucauauuuggggguguguguuu

SEQ ID NO: 762244 - RNA, 22 nt, Human
cagaggcagugggguugcuccu

SEQ ID NO: 762245 - RNA, 22 nt, Human
uuugaaauuaagauauugucca

SEQ ID NO: 762246 - RNA, 22 nt, Human
gcucugcccaggaccguccuug

SEQ ID NO: 762247 - RNA, 22 nt, Human
cagacagagcucacaagucuuu

SEQ ID NO: 762248 - RNA, 22 nt, Human
ucugcgugaugagggugcagca

SEQ ID NO: 762249 - RNA, 22 nt, Human
uagcucugucacauacacugca

SEQ ID NO: 762250 - RNA, 22 nt, Human
aagccaagugcuggccaugggc

SEQ ID NO: 762251 - RNA, 21 nt, Human
gcugccugccccucgggggcu

SEQ ID NO: 762252 - RNA, 20 nt, Human
uggguccugugggagaagaa

SEQ ID NO: 762253 - RNA, 22 nt, Human
aaaguuugcaauuuauguuaau

SEQ ID NO: 762254 - RNA, 22 nt, Human
ucaaguauuuauuucugcuggc

SEQ ID NO: 762255 - RNA, 22 nt, Human
cacauccuucagcugagcccag

SEQ ID NO: 762256 - RNA, 23 nt, Human
ccucccaggcugcgagucccgag

SEQ ID NO: 762257 - RNA, 23 nt, Human
augcuuccacagagcuugcagcc

SEQ ID NO: 762258 - RNA, 22 nt, Human
uggcucugcaccucaguguacc

SEQ ID NO: 762259 - RNA, 23 nt, Human
uggcucugagagguucagaugcu

SEQ ID NO: 762260 - RNA, 22 nt, Human
uaaguucugaguaaauacuguu

SEQ ID NO: 762261 - RNA, 22 nt, Human
ucagggacagggugcugcugcg

SEQ ID NO: 762262 - RNA, 22 nt, Human
gggcuccagaggcucacccugg

SEQ ID NO: 762263 - RNA, 22 nt, Human
agcaggagcauuuccaugauuc

SEQ ID NO: 762264 - RNA, 22 nt, Human
caggucuuuucuacugguggag

SEQ ID NO: 762265 - RNA, 21 nt, Human
acacagcugccggagacggau

SEQ ID NO: 762266 - RNA, 22 nt, Human
cuguugucuucauugucauauc

SEQ ID NO: 762267 - RNA, 22 nt, Human
uggaggagggcuggugucugua

SEQ ID NO: 762268 - RNA, 22 nt, Human
uucuuacagcccuauuacuaaa

SEQ ID NO: 762269 - RNA, 22 nt, Human
gcuucgggguccaagcgcgugu

SEQ ID NO: 762270 - RNA, 22 nt, Human
ugcaauuuggggaagaaagaga

SEQ ID NO: 762271 - RNA, 19 nt, Human
ccugaccacacaggccuug

SEQ ID NO: 762272 - RNA, 22 nt, Human
cacuguacugugaauaaggagg

SEQ ID NO: 762273 - RNA, 22 nt, Human
ucucaggguuuccugggggcug

SEQ ID NO: 762274 - RNA, 22 nt, Human
guguguuuagcauuagcagggg

SEQ ID NO: 762275 - RNA, 22 nt, Human
ugauucaucagaauaggaguuu

SEQ ID NO: 762276 - RNA, 22 nt, Human
uaccuggggcugggcuuugauu

SEQ ID NO: 762277 - RNA, 22 nt, Human
uggugcagauagugguguagua

SEQ ID NO: 762278 - RNA, 22 nt, Human
aucuuuuuacuaacacugcuua

SEQ ID NO: 762279 - RNA, 23 nt, Human
aacacaaagcugauuccaguggc

SEQ ID NO: 762280 - RNA, 21 nt, Human
ugucagagcuuguaggacauu

SEQ ID NO: 762281 - RNA, 22 nt, Human
auagacauuauaacacagagcu

SEQ ID NO: 762282 - RNA, 22 nt, Human
gaggauggauccgaccccuucc

SEQ ID NO: 762283 - RNA, 22 nt, Human
agacagacguagugugagagua

SEQ ID NO: 762284 - RNA, 22 nt, Human
aggcaagugcauuagaagagca

SEQ ID NO: 762285 - RNA, 22 nt, Human
accuuuuacggugugacuagca

SEQ ID NO: 762286 - RNA, 22 nt, Human
uuagaguagagccauuucuguu

SEQ ID NO: 762287 - RNA, 22 nt, Human
ggcuggcuuucucuccgcaccu

SEQ ID NO: 762288 - RNA, 22 nt, Human
uggggagguucgggaaucuugu

SEQ ID NO: 762289 - RNA, 22 nt, Human
aggaugaggcuggacacuucuu

SEQ ID NO: 762290 - RNA, 22 nt, Human
aggcuguguuucuugcguuuuc

SEQ ID NO: 762291 - RNA, 22 nt, Human
uuauaggcuuaguucugugugu

SEQ ID NO: 762292 - RNA, 22 nt, Human
ccuuugugaauaugcagaaaau

SEQ ID NO: 762293 - RNA, 22 nt, Human
ccugugaggucuugcaugugaa

SEQ ID NO: 762294 - RNA, 22 nt, Human
ucaaagucauggcaggcucaga

SEQ ID NO: 762295 - RNA, 22 nt, Human
auuggccauuugcauguauuau

SEQ ID NO: 762296 - RNA, 22 nt, Human
ugauuuaaaagaaacauugucu

SEQ ID NO: 762297 - RNA, 22 nt, Human
cucuggguucuggccugcaccc

SEQ ID NO: 762298 - RNA, 21 nt, Human
aggaggggucuuucccacuga

SEQ ID NO: 762299 - RNA, 22 nt, Human
ccauuccaugugcuacacauaa

SEQ ID NO: 762300 - RNA, 22 nt, Human
gcugcagccaaauucauuguca

SEQ ID NO: 762301 - RNA, 22 nt, Human
agcacugauuuaaacuggauuu

SEQ ID NO: 762302 - RNA, 22 nt, Human
aguaaacacgugggguuucuuu

SEQ ID NO: 762303 - RNA, 22 nt, Human
ucaggaagaagacggggcagga

SEQ ID NO: 762304 - RNA, 22 nt, Human
aggcagaugguaacugugauau

SEQ ID NO: 762305 - RNA, 22 nt, Human
gugacucuuaaagcaaaucuug

SEQ ID NO: 762306 - RNA, 22 nt, Human
cuggcugacaccuugauagcag

SEQ ID NO: 762307 - RNA, 22 nt, Human
uuuauguuugcauuuucaaaga

SEQ ID NO: 762308 - RNA, 22 nt, Human
ucucuggcagggauaucuggcu

SEQ ID NO: 762309 - RNA, 22 nt, Human
cuuugguucuguccuucccaga

SEQ ID NO: 762310 - RNA, 22 nt, Human
ugcuggaggaguuuacuguggc

SEQ ID NO: 762311 - RNA, 18 nt, Human
ugggagugggaguggaua

SEQ ID NO: 762312 - RNA, 22 nt, Human
ucacugaaaguaauucuaguga

SEQ ID NO: 762313 - RNA, 22 nt, Human
ccagagagagaggucaauggca

SEQ ID NO: 762314 - RNA, 22 nt, Human
uuggaagcccugugauaggcca

SEQ ID NO: 762315 - RNA, 22 nt, Human
agaagaauacuugauguucaug

SEQ ID NO: 762316 - RNA, 22 nt, Human
auucugcauaauuuccuggcag

SEQ ID NO: 762317 - RNA, 22 nt, Human
aaggcugguggauuaugagguc

SEQ ID NO: 762318 - RNA, 22 nt, Human
uagaggugagauuguggugcug

SEQ ID NO: 762319 - RNA, 22 nt, Human
gaagugaagagauuagaaauca

SEQ ID NO: 762320 - RNA, 22 nt, Human
cucagggacaaggggagacccc

SEQ ID NO: 762321 - RNA, 22 nt, Human
ggcucccaggagggccuggagg

SEQ ID NO: 762322 - RNA, 22 nt, Human
aagguccaugacucggcauagu

SEQ ID NO: 762323 - RNA, 22 nt, Human
cuuaggaaaguuucugcuuaug

SEQ ID NO: 762324 - RNA, 22 nt, Human
auguacauagcaucaucuagga

SEQ ID NO: 762325 - RNA, 22 nt, Human
cauagauuuuagguuagaucga

SEQ ID NO: 762326 - RNA, 22 nt, Human
gcugcugagaauugcaggcaag

SEQ ID NO: 762327 - RNA, 19 nt, Human
ccagucccauacaggagau

SEQ ID NO: 762328 - RNA, 22 nt, Human
aauugugcauuuuuaaaucacg

SEQ ID NO: 762329 - RNA, 22 nt, Human
agauugcuaaugaaguucuuga

SEQ ID NO: 762330 - RNA, 22 nt, Human
uaaccuuuuuaucuuaccucca

SEQ ID NO: 762331 - RNA, 21 nt, Human
uguuaugugcuucaagaagug

SEQ ID NO: 762332 - RNA, 20 nt, Human
auacacuugcccagcuugug

SEQ ID NO: 762333 - RNA, 22 nt, Human
acuuuuuuauaaggaagaagau

SEQ ID NO: 762334 - RNA, 22 nt, Human
uggaggagaccauuccacucag

SEQ ID NO: 762335 - RNA, 22 nt, Human
cacacagggagaaagaaagccu

SEQ ID NO: 762336 - RNA, 22 nt, Human
uagagcuggccgggacagcugg

SEQ ID NO: 762337 - RNA, 23 nt, Human
gcugucugucaucucugcgggag

SEQ ID NO: 762338 - RNA, 22 nt, Human
cacagugacagcuauacagaga

SEQ ID NO: 762339 - RNA, 23 nt, Human
ccagucucuuuccaaaaucacau

SEQ ID NO: 762340 - RNA, 22 nt, Human
cauaaaauggcuuguucuuuaa

SEQ ID NO: 762341 - RNA, 20 nt, Human
uccagaggccacauccagug

SEQ ID NO: 762342 - RNA, 22 nt, Human
gacaggcaguuuuccagaucag

SEQ ID NO: 762343 - RNA, 22 nt, Human
gagaagcaaucagcagccaccc

SEQ ID NO: 762344 - RNA, 22 nt, Human
cacucucagcauaaugaaugug

SEQ ID NO: 762345 - RNA, 22 nt, Human
aagauacugaugauguaggcua

SEQ ID NO: 762346 - RNA, 22 nt, Human
cuccagaggaugcaggugaggg

SEQ ID NO: 762347 - RNA, 22 nt, Human
aggcucagggacggggccccuu

SEQ ID NO: 762348 - RNA, 22 nt, Human
cugccccagugccaggcaggug

SEQ ID NO: 762349 - RNA, 22 nt, Human
uagucacaggaaguuucaaugu

SEQ ID NO: 762350 - RNA, 22 nt, Human
aauucaucauuuuauagcuagu

SEQ ID NO: 762351 - RNA, 22 nt, Human
uacagagagagggguuaccagg

SEQ ID NO: 762352 - RNA, 22 nt, Human
cuuuguagcugcuucugauuua

SEQ ID NO: 762353 - RNA, 23 nt, Human
agguggucuuguggaugcugcaa

SEQ ID NO: 762354 - RNA, 19 nt, Human
agcagcagcaccagggauu

SEQ ID NO: 762355 - RNA, 22 nt, Human
ugcagggaaugcuugcagcaug

SEQ ID NO: 762356 - RNA, 22 nt, Human
auaccugaucaaggcaaaaaug

SEQ ID NO: 762357 - RNA, 22 nt, Human
aaacauuugcaacucgguuugg

SEQ ID NO: 762358 - RNA, 22 nt, Human
uuuggcucugugucuucaccca

SEQ ID NO: 762359 - RNA, 22 nt, Human
aacacuuuuuauauauuguauc

SEQ ID NO: 762360 - RNA, 22 nt, Human
ggguaggaugguagaagggacc

SEQ ID NO: 762361 - RNA, 23 nt, Human
ggcuccuggauucaaauccugcc

SEQ ID NO: 762362 - RNA, 22 nt, Human
uuucaaagaccauuaacuauca

SEQ ID NO: 762363 - RNA, 22 nt, Human
guuauauucaaaaugaggcugu

SEQ ID NO: 762364 - RNA, 22 nt, Human
ccuucaaucagcagucuagcuu

SEQ ID NO: 762365 - RNA, 22 nt, Human
agcuguguucugguugauucac

SEQ ID NO: 762366 - RNA, 22 nt, Human
ggugggaaggccacugaagguu

SEQ ID NO: 762367 - RNA, 20 nt, Human
gugcagauguccuuucacac

SEQ ID NO: 762368 - RNA, 22 nt, Human
aagaugauagaucugucaaugu

SEQ ID NO: 762369 - RNA, 22 nt, Human
auaacagugaccucucagcacc

SEQ ID NO: 762370 - RNA, 22 nt, Human
ggccagagguguccucaguucu

SEQ ID NO: 762371 - RNA, 22 nt, Human
augagaugugucuaauggaacc

SEQ ID NO: 762372 - RNA, 22 nt, Human
gacagcuguacacuccugguua

SEQ ID NO: 762373 - RNA, 22 nt, Human
caagaucaaggugucagcaggu

SEQ ID NO: 762374 - RNA, 22 nt, Human
ggcagccaguagggccagccug

SEQ ID NO: 762375 - RNA, 22 nt, Human
gaagacaucauggagaggauag

SEQ ID NO: 762376 - RNA, 22 nt, Human
ucagugugucucugcauuuggg

SEQ ID NO: 762377 - RNA, 22 nt, Human
agaagaauuucucucaugauuu

SEQ ID NO: 762378 - RNA, 22 nt, Human
cugucuggccggcccagcuucc

SEQ ID NO: 762379 - RNA, 22 nt, Human
acuccagggugacucugucuga

SEQ ID NO: 762380 - RNA, 19 nt, Human
agauggcaaaaugcaaaga

SEQ ID NO: 762381 - RNA, 22 nt, Human
gaggcaguggucugaugcaagg

SEQ ID NO: 762382 - RNA, 22 nt, Human
ucacuguuucaucccuagcacu

SEQ ID NO: 762383 - RNA, 22 nt, Human
ccacaugaugaggaagcugaac

SEQ ID NO: 762384 - RNA, 22 nt, Human
caugaacaccaggcaugaacaa

SEQ ID NO: 762385 - RNA, 22 nt, Human
aaagaggcaaucaauguagcaa

SEQ ID NO: 762386 - RNA, 22 nt, Human
ggggaagaccuggcacuacagc

SEQ ID NO: 762387 - RNA, 22 nt, Human
cuccuucacgcaggcugccaug

SEQ ID NO: 762388 - RNA, 22 nt, Human
gggaccagaagaaggaugguga

SEQ ID NO: 762389 - RNA, 22 nt, Human
cagucacuuacaaaaauauaau

SEQ ID NO: 762390 - RNA, 22 nt, Human
cagaguggagauguguguggaa

SEQ ID NO: 762391 - RNA, 22 nt, Human
auauagaaggugcuauuuacau

SEQ ID NO: 762392 - RNA, 22 nt, Human
aggugcugccccgagaaggaug

SEQ ID NO: 762393 - RNA, 19 nt, Human
uggaacacucaaacugggu

SEQ ID NO: 762394 - RNA, 22 nt, Human
aaguccagcagugcuuguugau

SEQ ID NO: 762395 - RNA, 22 nt, Human
uacagccaucauguauguauau

SEQ ID NO: 762396 - RNA, 22 nt, Human
uguuacagaaauauugcuucuu

SEQ ID NO: 762397 - RNA, 22 nt, Human
agggcagaaaccaccuugaugg

SEQ ID NO: 762398 - RNA, 22 nt, Human
agccucucuuaucccuucaaag

SEQ ID NO: 762399 - RNA, 22 nt, Human
uggcuuccagagcugcuccacc

SEQ ID NO: 762400 - RNA, 22 nt, Human
gacacaggaaucaccuuggaug

SEQ ID NO: 762401 - RNA, 22 nt, Human
cuaaacaugcaagagcuucugg

SEQ ID NO: 762402 - RNA, 23 nt, Human
uugcuucugugcaauucaguacu

SEQ ID NO: 762403 - RNA, 22 nt, Human
gaagaagcauucugcuguuuug

SEQ ID NO: 762404 - RNA, 22 nt, Human
caggcuccuuaucuuacaacuu

SEQ ID NO: 762405 - RNA, 22 nt, Human
ugacaacuuuacaaaauucuuc

SEQ ID NO: 762406 - RNA, 22 nt, Human
auuuaugagcugaaccaugaaa

SEQ ID NO: 762407 - RNA, 22 nt, Human
gcuggagguagggagguccugu

SEQ ID NO: 762408 - RNA, 22 nt, Human
aaggucuggaugaugggugugc

SEQ ID NO: 762409 - RNA, 22 nt, Human
gcaguggcagcugaggggguau

SEQ ID NO: 762410 - RNA, 22 nt, Human
uccaggacugguucacacggug

SEQ ID NO: 762411 - RNA, 22 nt, Human
caugugugagugagcagucuuc

SEQ ID NO: 762412 - RNA, 22 nt, Human
gcacugaugcaaaaaucacuca

SEQ ID NO: 762413 - RNA, 22 nt, Human
auuaauuuuucugacagccaca

SEQ ID NO: 762414 - RNA, 22 nt, Human
gagaggcccuguggucccagcu

SEQ ID NO: 762415 - RNA, 19 nt, Human
cuacuuuauaauaugccuc

SEQ ID NO: 762416 - RNA, 22 nt, Human
ggcugggaggccgugcugaccu

SEQ ID NO: 762417 - RNA, 22 nt, Human
acagaggccgccucucucacgg

SEQ ID NO: 762418 - RNA, 19 nt, Human
uggaagaggaagggaaaua

SEQ ID NO: 762419 - RNA, 22 nt, Human
uaguuaggaauagcagcgacuc

SEQ ID NO: 762420 - RNA, 22 nt, Human
guaaauuauuucaagaucaucu

SEQ ID NO: 762421 - RNA, 22 nt, Human
cagagccacugucugccaggca

SEQ ID NO: 762422 - RNA, 22 nt, Human
cagcccuggcagcuuucagggu

SEQ ID NO: 762423 - RNA, 22 nt, Human
cagcaggcguugggagaaagac

SEQ ID NO: 762424 - RNA, 22 nt, Human
cuggcugccuggagugagggag

SEQ ID NO: 762425 - RNA, 22 nt, Human
gccuuggcugaugugcgaauga

SEQ ID NO: 762426 - RNA, 22 nt, Human
gcagagcagaggugcagguugg

SEQ ID NO: 762427 - RNA, 22 nt, Human
ccagcccuugagauggaaggga

SEQ ID NO: 762428 - RNA, 22 nt, Human
gcugcucuccauggccgugagu

SEQ ID NO: 762429 - RNA, 22 nt, Human
ggcuacaguggcucagugcugg

SEQ ID NO: 762430 - RNA, 22 nt, Human
uuugccugauucuaagagcuca

SEQ ID NO: 762431 - RNA, 22 nt, Human
ucucccaguggugcagaaagca

SEQ ID NO: 762432 - RNA, 22 nt, Human
gaaaacuauuggccuagaacaa

SEQ ID NO: 762433 - RNA, 22 nt, Human
ugugauuauuugauuaacaugu

SEQ ID NO: 762434 - RNA, 22 nt, Human
uuccuaacacaguguaagcaag

SEQ ID NO: 762435 - RNA, 22 nt, Human
gcucugggcugcccucuggaca

SEQ ID NO: 762436 - RNA, 22 nt, Human
uucauugaaccacuuuauucuu

SEQ ID NO: 762437 - RNA, 22 nt, Human
agcacaaaagcagccacagaug

SEQ ID NO: 762438 - RNA, 22 nt, Human
uuauucugacuaauguauaacu

SEQ ID NO: 762439 - RNA, 22 nt, Human
cuucuacacaucccucuugcuu

SEQ ID NO: 762440 - RNA, 22 nt, Human
acugugaguuuauuuaucugau

SEQ ID NO: 762441 - RNA, 22 nt, Human
uccagcaguccaugugagacac

SEQ ID NO: 762442 - RNA, 22 nt, Human
uggccaagccacugcugggucu

SEQ ID NO: 762443 - RNA, 22 nt, Human
agagacacaucauauaaguaua

SEQ ID NO: 762444 - RNA, 22 nt, Human
aauaaccuuacuuauuacaugg

SEQ ID NO: 762445 - RNA, 22 nt, Human
uguaaaaagcccagccgcugag

SEQ ID NO: 762446 - RNA, 22 nt, Human
uugcacaguuugaagaugacuc

SEQ ID NO: 762447 - RNA, 22 nt, Human
agaacugucacgagugacaaag

SEQ ID NO: 762448 - RNA, 22 nt, Human
uguuggcagugcuacagucagu

SEQ ID NO: 762449 - RNA, 22 nt, Human
cugcagagaauuguggggcuuc

SEQ ID NO: 762450 - RNA, 22 nt, Human
guuucauaugcaguuaacagca

SEQ ID NO: 762451 - RNA, 22 nt, Human
uaaguggguuuguaaugugccu

SEQ ID NO: 762452 - RNA, 23 nt, Human
acagacaacacugaugagagaaa

SEQ ID NO: 762453 - RNA, 22 nt, Human
ugcacccugccugccugcgggu

SEQ ID NO: 762454 - RNA, 22 nt, Human
cagcauggugccagugagucca

SEQ ID NO: 762455 - RNA, 22 nt, Human
gccgaagacgcugggcgugggc

SEQ ID NO: 762456 - RNA, 22 nt, Human
caagauuuccaacccuggguaa

SEQ ID NO: 762457 - RNA, 22 nt, Human
uuccaugaagggcagccucuca

SEQ ID NO: 762458 - RNA, 22 nt, Human
gaaccugauccaauauuuacuc

SEQ ID NO: 762459 - RNA, 22 nt, Human
uggcuggagcgcccuccucugc

SEQ ID NO: 762460 - RNA, 22 nt, Human
acacaggagauauguaauggcu

SEQ ID NO: 762461 - RNA, 22 nt, Human
ggagguggccugaaaauguggc

SEQ ID NO: 762462 - RNA, 22 nt, Human
gcugccucccccauggcuggaa

SEQ ID NO: 762463 - RNA, 22 nt, Human
agcaauaagggauccucuauaa

SEQ ID NO: 762464 - RNA, 22 nt, Human
cagggccucugugggcucucuc

SEQ ID NO: 762465 - RNA, 22 nt, Human
cuccugggcucaagugauccuc

SEQ ID NO: 762466 - RNA, 22 nt, Human
aacaaacaaacauuuugucauc

SEQ ID NO: 762467 - RNA, 22 nt, Human
aauggcaaaaggauaacaagga

SEQ ID NO: 762468 - RNA, 22 nt, Human
uggcugcaguucacaggagcaa

SEQ ID NO: 762469 - RNA, 22 nt, Human
ugcaucuguucauucguuccca

SEQ ID NO: 762470 - RNA, 22 nt, Human
uaaguccuauuccaggucucuc

SEQ ID NO: 762471 - RNA, 22 nt, Human
agaaucaaggugaagcccacag

SEQ ID NO: 762472 - RNA, 22 nt, Human
ugcauauccacaccuuaucucu

SEQ ID NO: 762473 - RNA, 22 nt, Human
ugcauuaucuuuaauguucuca

SEQ ID NO: 762474 - RNA, 22 nt, Human
acauuucuuagccuaguuccag

SEQ ID NO: 762475 - RNA, 22 nt, Human
gcuuuacauuuuggaaagguga

SEQ ID NO: 762476 - RNA, 22 nt, Human
gaucuuuauacuguaauaauga

SEQ ID NO: 762477 - RNA, 22 nt, Human
aggcuuuccugucacucaugcu

SEQ ID NO: 762478 - RNA, 20 nt, Human
uucaucagcaaagcacagca

SEQ ID NO: 762479 - RNA, 22 nt, Human
ucagcucuaaguuuuaugcaaa

SEQ ID NO: 762480 - RNA, 20 nt, Human
uccagggcaaacucaucacc

SEQ ID NO: 762481 - RNA, 18 nt, Human
uuuguccuguggcagcug

SEQ ID NO: 762482 - RNA, 18 nt, Human
agaauuauucuuguccuc

SEQ ID NO: 762483 - RNA, 20 nt, Human
ugugaaagcaguagaaugac

SEQ ID NO: 762484 - RNA, 22 nt, Human
gcaggggcuacucugagcuucc

SEQ ID NO: 762485 - RNA, 22 nt, Human
aaggguuugucucccucaaggc

SEQ ID NO: 762486 - RNA, 22 nt, Human
aguuuauucucuggucuuagua

SEQ ID NO: 762487 - RNA, 17 nt, Human
uuuauaauuggccucuu

SEQ ID NO: 762488 - RNA, 22 nt, Human
ccucaggguucggaugagaaca

SEQ ID NO: 762489 - RNA, 22 nt, Human
ucaggauaaaauguaauggcaa

SEQ ID NO: 762490 - RNA, 22 nt, Human
gguucacauauugagaguauuc

SEQ ID NO: 762491 - RNA, 22 nt, Human
gacaggcuggcaaugcccugcu

SEQ ID NO: 762492 - RNA, 22 nt, Human
uuaagugagcuugaauaaucuu

SEQ ID NO: 762493 - RNA, 20 nt, Human
guuugaaaugauugguuggu

SEQ ID NO: 762494 - RNA, 22 nt, Human
cagcucccaguggcagcuccuu

SEQ ID NO: 762495 - RNA, 22 nt, Human
gugguguaggucacaguuagga

SEQ ID NO: 762496 - RNA, 22 nt, Human
uuuccucugggcccugccaccc

SEQ ID NO: 762497 - RNA, 22 nt, Human
aagccagguuccauggaggagc

SEQ ID NO: 762498 - RNA, 22 nt, Human
ccaucuccacugucccugucaa

SEQ ID NO: 762499 - RNA, 22 nt, Human
aggaggccugcagcugccauuc

SEQ ID NO: 762500 - RNA, 22 nt, Human
ugucaaaaauaagagagauugu

SEQ ID NO: 762501 - RNA, 22 nt, Human
augugucaauuuucaaaugcuu

SEQ ID NO: 762502 - RNA, 22 nt, Human
gacaguaagucagagacuuggu

SEQ ID NO: 762503 - RNA, 22 nt, Human
uugaggacagugcuuggggccc

SEQ ID NO: 762504 - RNA, 22 nt, Human
uuuauucacuggggucugcccg

SEQ ID NO: 762505 - RNA, 22 nt, Human
uaaaacugaauacauacugagg

SEQ ID NO: 762506 - RNA, 22 nt, Human
ucauggaaggaguggccaagug

SEQ ID NO: 762507 - RNA, 22 nt, Human
auuuucuguaacuauuucuaua

SEQ ID NO: 762508 - RNA, 22 nt, Human
aaguaacuuauuugcaaacagg

SEQ ID NO: 762509 - RNA, 22 nt, Human
gcaugugucuccccaguggagg

SEQ ID NO: 762510 - RNA, 22 nt, Human
ugagaauuuuuugucaugcauu

SEQ ID NO: 762511 - RNA, 22 nt, Human
aggcaguggaaggagaaagcaa

SEQ ID NO: 762512 - RNA, 22 nt, Human
cagucugaacacugggcuacuc

SEQ ID NO: 762513 - RNA, 22 nt, Human
cucaggcucuggccauccaagg

SEQ ID NO: 762514 - RNA, 22 nt, Human
ccauuuguucgcccagcuccaa

SEQ ID NO: 762515 - RNA, 17 nt, Human
ugucuucugaagagagc

SEQ ID NO: 762516 - RNA, 22 nt, Human
uagcagaguaauacuuuggagc

SEQ ID NO: 762517 - RNA, 22 nt, Human
uucuuaaaauucaagcuagguu

SEQ ID NO: 762518 - RNA, 22 nt, Human
cagcacaggaauaugguggaca

SEQ ID NO: 762519 - RNA, 20 nt, Human
cuuugguggggguagcccag

SEQ ID NO: 762520 - RNA, 23 nt, Human
ugugcgugaugcuuuguugaagg

SEQ ID NO: 762521 - RNA, 22 nt, Human
auaucuuuguuuuugccaagau

SEQ ID NO: 762522 - RNA, 22 nt, Human
ugcuuuaccuucccagaaacca

SEQ ID NO: 762523 - RNA, 18 nt, Human
auccugggccagucuuuc

SEQ ID NO: 762524 - RNA, 22 nt, Human
uaaauagagaaucagcuuggag

SEQ ID NO: 762525 - RNA, 22 nt, Human
uaagagcuaggauuuuaaauca

SEQ ID NO: 762526 - RNA, 22 nt, Human
gcuugccuggcauuucuggggc

SEQ ID NO: 762527 - RNA, 21 nt, Human
cagaggccucaugcucugugc

SEQ ID NO: 762528 - RNA, 22 nt, Human
acacagaagaucucuuaaugcu

SEQ ID NO: 762529 - RNA, 22 nt, Human
uuauagugcauaauuaacaugg

SEQ ID NO: 762530 - RNA, 20 nt, Human
ggaacacuguucauucugua

SEQ ID NO: 762531 - RNA, 22 nt, Human
aguguccuccucugggagccag

SEQ ID NO: 762532 - RNA, 22 nt, Human
uauuggaccacagacuuuaagg

SEQ ID NO: 762533 - RNA, 22 nt, Human
gagcccuguaggaaucucucaa

SEQ ID NO: 762534 - RNA, 22 nt, Human
guuagaaagugucugcuugggu

SEQ ID NO: 762535 - RNA, 22 nt, Human
aaauguaccuugauaguuuggu

SEQ ID NO: 762536 - RNA, 22 nt, Human
caucacaggcauuuugaguguc

SEQ ID NO: 762537 - RNA, 22 nt, Human
agagccugugggagaugcagcu

SEQ ID NO: 762538 - RNA, 22 nt, Human
aaugugauuuucccaguagaau

SEQ ID NO: 762539 - RNA, 20 nt, Human
gcagccguggagacuaggag

SEQ ID NO: 762540 - RNA, 22 nt, Human
uuugagaaacugauuauuaugg

SEQ ID NO: 762541 - RNA, 22 nt, Human
ccaggcugcuuagccuuaucuu

SEQ ID NO: 762542 - RNA, 22 nt, Human
accucugccacuuucuaacucu

SEQ ID NO: 762543 - RNA, 22 nt, Human
uuccauauuguacucuuuggag

SEQ ID NO: 762544 - RNA, 22 nt, Human
uuuacacagaggacacugggcu

SEQ ID NO: 762545 - RNA, 22 nt, Human
aggccacagagagugcaugugc

SEQ ID NO: 762546 - RNA, 22 nt, Human
ccuggccucagacagagggugg

SEQ ID NO: 762547 - RNA, 20 nt, Human
ccaguccaccugagacaugu

SEQ ID NO: 762548 - RNA, 22 nt, Human
aguguuucuaaguagaugugaa

SEQ ID NO: 762549 - RNA, 18 nt, Human
gcagugccagccucuccu

SEQ ID NO: 762550 - RNA, 22 nt, Human
uagagcugauaaugaggccaag

SEQ ID NO: 762551 - RNA, 22 nt, Human
uuucucaguucucugcaaggag

SEQ ID NO: 762552 - RNA, 22 nt, Human
caggagcucuuaaggaugugau

SEQ ID NO: 762553 - RNA, 22 nt, Human
uuucuccucuccagagugcagu

SEQ ID NO: 762554 - RNA, 22 nt, Human
gagccuggguccuucccuggga

SEQ ID NO: 762555 - RNA, 22 nt, Human
ucuggaaucagaccuaauccca

SEQ ID NO: 762556 - RNA, 22 nt, Human
gaugaagccugacuucucggug

SEQ ID NO: 762557 - RNA, 22 nt, Human
gcccaggaggcagagguugugg

SEQ ID NO: 762558 - RNA, 18 nt, Human
ugcuccaggcccaugggc

SEQ ID NO: 762559 - RNA, 22 nt, Human
ugucaggaggguccagagaaaa

SEQ ID NO: 762560 - RNA, 22 nt, Human
uaggccaguaaaauguuucagu

SEQ ID NO: 762561 - RNA, 22 nt, Human
guucuucaggcugugcucuaga

SEQ ID NO: 762562 - RNA, 22 nt, Human
ucucuuccaguaagagucuuua

SEQ ID NO: 762563 - RNA, 22 nt, Human
caguggccuuuccugcugcuca

SEQ ID NO: 762564 - RNA, 22 nt, Human
gcaggcaguugcaguuuucuag

SEQ ID NO: 762565 - RNA, 22 nt, Human
cuuaauuacccaaugugguagg

SEQ ID NO: 762566 - RNA, 22 nt, Human
agccccuuggaacacagggcug

SEQ ID NO: 762567 - RNA, 22 nt, Human
uuugauacugagaaaaacaaau

SEQ ID NO: 762568 - RNA, 22 nt, Human
auucucucauuuaucuguccua

SEQ ID NO: 762569 - RNA, 22 nt, Human
caggcacugcacuaccacuuuu

SEQ ID NO: 762570 - RNA, 22 nt, Human
aucaguuauuuuuaagcuauaa

SEQ ID NO: 762571 - RNA, 22 nt, Human
cagcaagagaggcagggcaaau

SEQ ID NO: 762572 - RNA, 22 nt, Human
augggggcggcugaagcccagg

SEQ ID NO: 762573 - RNA, 22 nt, Human
cagcaaaauuugaggauugccu

SEQ ID NO: 762574 - RNA, 22 nt, Human
caggcauuucgcaaaggcugag

SEQ ID NO: 762575 - RNA, 22 nt, Human
cuucuucagaggccagccucug

SEQ ID NO: 762576 - RNA, 20 nt, Human
gcacugaagguuccagggga

SEQ ID NO: 762577 - RNA, 22 nt, Human
ccagcucugcagggccuggggu

SEQ ID NO: 762578 - RNA, 22 nt, Human
uccauuugaaaugaaagugaua

SEQ ID NO: 762579 - RNA, 22 nt, Human
ugucccuaaagaaacagacauu

SEQ ID NO: 762580 - RNA, 22 nt, Human
auauauacuuugacacauucug

SEQ ID NO: 762581 - RNA, 22 nt, Human
guguguccucaguaguggcaug

SEQ ID NO: 762582 - RNA, 22 nt, Human
cagcagugacaagacuaagaag

SEQ ID NO: 762583 - RNA, 22 nt, Human
caucuucaggggcuacaucugu

SEQ ID NO: 762584 - RNA, 22 nt, Human
uacuugcuguuaguauuuuaca

SEQ ID NO: 762585 - RNA, 22 nt, Human
cggucugagauuuuuaauaggc

SEQ ID NO: 762586 - RNA, 22 nt, Human
aagacccacaaggcugaauguu

SEQ ID NO: 762587 - RNA, 22 nt, Human
uauugcugacuuguucaguguu

SEQ ID NO: 762588 - RNA, 22 nt, Human
gagugcguguuuggggaugugg

SEQ ID NO: 762589 - RNA, 22 nt, Human
ucauuacacaguucaguggaaa

SEQ ID NO: 762590 - RNA, 22 nt, Human
uacugccugggggagacagcug

SEQ ID NO: 762591 - RNA, 22 nt, Human
uaaauuauguuccauguccuuu

SEQ ID NO: 762592 - RNA, 22 nt, Human
acuggggagugguuuugggaag

SEQ ID NO: 762593 - RNA, 22 nt, Human
uuauucaccucuauuagacuca

SEQ ID NO: 762594 - RNA, 22 nt, Human
agaucuuguuaaaugcugccuc

SEQ ID NO: 762595 - RNA, 22 nt, Human
ucaguggagagcuuccaggauu

SEQ ID NO: 762596 - RNA, 22 nt, Human
gcucuccaggucucaugcacug

SEQ ID NO: 762597 - RNA, 23 nt, Human
agugucugagugcaggcugugca

SEQ ID NO: 762598 - RNA, 22 nt, Human
cuacaguagagguugucaggga

SEQ ID NO: 762599 - RNA, 22 nt, Human
cggaggcaaacucaccuggcuc

SEQ ID NO: 762600 - RNA, 23 nt, Human
gccugggacugguagugugaccu

SEQ ID NO: 762601 - RNA, 22 nt, Human
augcauguuaagcucuuaaaau

SEQ ID NO: 762602 - RNA, 22 nt, Human
cccaggcugcaugaguccaugg

SEQ ID NO: 762603 - RNA, 21 nt, Human
ucugugccucaacccucaucu

SEQ ID NO: 762604 - RNA, 22 nt, Human
uuccugagcaccagacacugca

SEQ ID NO: 762605 - RNA, 22 nt, Human
gaacaauagugguaacaaagcc

SEQ ID NO: 762606 - RNA, 22 nt, Human
ucaguuaauauggguaaagcau

SEQ ID NO: 762607 - RNA, 22 nt, Human
aucagguagauuuaauauucug

SEQ ID NO: 762608 - RNA, 22 nt, Human
cagcugugcuagaagccacgaa

SEQ ID NO: 762609 - RNA, 22 nt, Human
guccagggaaauagcgacaggg

SEQ ID NO: 762610 - RNA, 22 nt, Human
cacugucuguguguccuugggg

SEQ ID NO: 762611 - RNA, 22 nt, Human
gaccuuccuucuuugcuccggg

SEQ ID NO: 762612 - RNA, 22 nt, Human
ugguccugcuugcugcuuaaga

SEQ ID NO: 762613 - RNA, 22 nt, Human
gucucucugacugguccacacc

SEQ ID NO: 762614 - RNA, 22 nt, Human
accuggaugcuggccuugccuu

SEQ ID NO: 762615 - RNA, 22 nt, Human
agggguuggacauaagacagaa

SEQ ID NO: 762616 - RNA, 22 nt, Human
uuuauguuccucuugagcuuuc

SEQ ID NO: 762617 - RNA, 22 nt, Human
acauauaagggaucagugacag

SEQ ID NO: 762618 - RNA, 22 nt, Human
ugggcucugcaucagugcccau

SEQ ID NO: 762619 - RNA, 22 nt, Human
acacuaauuaagcugcuuuacu

SEQ ID NO: 762620 - RNA, 22 nt, Human
guuuucaauuauaagauggcuu

SEQ ID NO: 762621 - RNA, 16 nt, Human
gaggcuggcagauguc

SEQ ID NO: 762622 - RNA, 22 nt, Human
gcccaggaguugaaugcagcag

SEQ ID NO: 762623 - RNA, 22 nt, Human
ucagaagcaaacaucacucuag

SEQ ID NO: 762624 - RNA, 22 nt, Human
ggcaggcaacggaccacuaguc

SEQ ID NO: 762625 - RNA, 22 nt, Human
gagcagcuguucugacuugucu

SEQ ID NO: 762626 - RNA, 22 nt, Human
ugagacuugugaguccuucuag

SEQ ID NO: 762627 - RNA, 22 nt, Human
ugaggccagacugaaaccaaca

SEQ ID NO: 762628 - RNA, 22 nt, Human
aaggacaaguaguauuugcauc

SEQ ID NO: 762629 - RNA, 22 nt, Human
uccaggagacacccuugugugu

SEQ ID NO: 762630 - RNA, 20 nt, Human
cagugcaacugaagaacuga

SEQ ID NO: 762631 - RNA, 22 nt, Human
cuggaauguagagacagcuuag

SEQ ID NO: 762632 - RNA, 22 nt, Human
acaguuuagaaugccacauagu

SEQ ID NO: 762633 - RNA, 22 nt, Human
ugccacaccaacaucuuucagc

SEQ ID NO: 762634 - RNA, 22 nt, Human
uuccugcuccauuugcugagcu

SEQ ID NO: 762635 - RNA, 22 nt, Human
uuugaguugcuuauuuaauagg

SEQ ID NO: 762636 - RNA, 22 nt, Human
cucuuuccaggguaccccaggu

SEQ ID NO: 762637 - RNA, 22 nt, Human
ggcugagaaucaacaaccugcu

SEQ ID NO: 762638 - RNA, 22 nt, Human
uugaacacuaaguuuccaggcu

SEQ ID NO: 762639 - RNA, 22 nt, Human
uaauccuucuuguguucauuag

SEQ ID NO: 762640 - RNA, 18 nt, Human
aguuccuuaaauuggugu

SEQ ID NO: 762641 - RNA, 22 nt, Human
agguauaugcuauuacuucugc

SEQ ID NO: 762642 - RNA, 22 nt, Human
uuaacucucccuccuuacaucc

SEQ ID NO: 762643 - RNA, 22 nt, Human
ugccuggaugugcuggccucac

SEQ ID NO: 762644 - RNA, 22 nt, Human
cugaauucugccuugaggccuu

SEQ ID NO: 762645 - RNA, 22 nt, Human
ucuguuauaaaucacacugcau

SEQ ID NO: 762646 - RNA, 22 nt, Human
caaaugcuaacuucuuuccaaa

SEQ ID NO: 762647 - RNA, 22 nt, Human
auuuacagccuugaaaacagca

SEQ ID NO: 762648 - RNA, 22 nt, Human
ugcccagcgcccacauucuguc

SEQ ID NO: 762649 - RNA, 22 nt, Human
uucagcaccuggaauagcaccu

SEQ ID NO: 762650 - RNA, 22 nt, Human
guucugcuuaaauuauugaucc

SEQ ID NO: 762651 - RNA, 22 nt, Human
aacagauauaggcagaacuuug

SEQ ID NO: 762652 - RNA, 21 nt, Human
uucauucauggcauaauauag

SEQ ID NO: 762653 - RNA, 22 nt, Human
gagcacaguccuuuuguuaaaa

SEQ ID NO: 762654 - RNA, 22 nt, Human
caagagcugaggcuggagaggu

SEQ ID NO: 762655 - RNA, 22 nt, Human
uauuaggguaaauuugacaugc

SEQ ID NO: 762656 - RNA, 22 nt, Human
gggccugagacugagggugagg

SEQ ID NO: 762657 - RNA, 22 nt, Human
gugauaaaggggaggaagugug

SEQ ID NO: 762658 - RNA, 22 nt, Human
ucucucugccaacucacagcca

SEQ ID NO: 762659 - RNA, 22 nt, Human
uuuagcagugaagugaagugaa

SEQ ID NO: 762660 - RNA, 20 nt, Human
ucugugugccaucaccuaac

SEQ ID NO: 762661 - RNA, 22 nt, Human
gacccugagcaaaagcaguucu

SEQ ID NO: 762662 - RNA, 22 nt, Human
cacagguguguccuggucuugu

SEQ ID NO: 762663 - RNA, 22 nt, Human
uuuagugauucauuuagaaaaa

SEQ ID NO: 762664 - RNA, 22 nt, Human
cuguaacucugccaagaaggcu

SEQ ID NO: 762665 - RNA, 21 nt, Human
uuauaggcugggguuugcuuu

SEQ ID NO: 762666 - RNA, 22 nt, Human
aguuggagugaacaugagauug

SEQ ID NO: 762667 - RNA, 22 nt, Human
aaaggccucuguccuagugccu

SEQ ID NO: 762668 - RNA, 22 nt, Human
guggcaugaaagcaucugugau

SEQ ID NO: 762669 - RNA, 20 nt, Human
ggcauccuucugacccagag

SEQ ID NO: 762670 - RNA, 22 nt, Human
cagugcugcaggcgccugcggu

SEQ ID NO: 762671 - RNA, 22 nt, Human
uguauacaugucugugugcaca

SEQ ID NO: 762672 - RNA, 22 nt, Human
uggagcagaaauuugaagccau

SEQ ID NO: 762673 - RNA, 22 nt, Human
cagcuccagcccaggcagcucc

SEQ ID NO: 762674 - RNA, 20 nt, Human
aggcaguguagagaugagua

SEQ ID NO: 762675 - RNA, 19 nt, Human
ugugccucuauagcaugug

SEQ ID NO: 762676 - RNA, 22 nt, Human
uugggcagucuggcugcagagu

SEQ ID NO: 762677 - RNA, 22 nt, Human
agauuuuauagauaauuuccca

SEQ ID NO: 762678 - RNA, 22 nt, Human
gagagcugggaaagccguggag

SEQ ID NO: 762679 - RNA, 22 nt, Human
cuuguacauugauuucugcauu

SEQ ID NO: 762680 - RNA, 23 nt, Human
gcccugcuccuggcugggaggga

SEQ ID NO: 762681 - RNA, 22 nt, Human
aucugggggagcugcucaugga

SEQ ID NO: 762682 - RNA, 22 nt, Human
ucuugagucuaaucugaacuuu

SEQ ID NO: 762683 - RNA, 18 nt, Human
ucccuggggcugccaccc

SEQ ID NO: 762684 - RNA, 22 nt, Human
gggacgagaucuuggcagugug

SEQ ID NO: 762685 - RNA, 22 nt, Human
uucuucaguuugguaaauguaa

SEQ ID NO: 762686 - RNA, 22 nt, Human
uggaaggcgucucgaaggccua

SEQ ID NO: 762687 - RNA, 22 nt, Human
cagugcuuugggaggcugagga

SEQ ID NO: 762688 - RNA, 22 nt, Human
ucaugugucugccaguguuuau

SEQ ID NO: 762689 - RNA, 22 nt, Human
accugggaguaugcagugguga

SEQ ID NO: 762690 - RNA, 23 nt, Human
ggagccagccuguggggagcggg

SEQ ID NO: 762691 - RNA, 22 nt, Human
uauuucugagaaccaacuuacc

SEQ ID NO: 762692 - RNA, 22 nt, Human
ucaccaccagaagagcuauucu

SEQ ID NO: 762693 - RNA, 22 nt, Human
ugcccccagacagaauccaguu

SEQ ID NO: 762694 - RNA, 17 nt, Human
aaggccauuuccaccca

SEQ ID NO: 762695 - RNA, 22 nt, Human
aucuuucaggccuaguguuuaa

SEQ ID NO: 762696 - RNA, 22 nt, Human
ucuuucuugguauaaagcaggg

SEQ ID NO: 762697 - RNA, 22 nt, Human
ugcucuggcugggaugagugca

SEQ ID NO: 762698 - RNA, 22 nt, Human
ucugcugugauucuacuagugu

SEQ ID NO: 762699 - RNA, 22 nt, Human
ugaggcucuccaagcagaugag

SEQ ID NO: 762700 - RNA, 22 nt, Human
ugcauguggaucauauguccua

SEQ ID NO: 762701 - RNA, 22 nt, Human
uggaggucugcaaggcgcugga

SEQ ID NO: 762702 - RNA, 22 nt, Human
gccuggagacagcagaggcggc

SEQ ID NO: 762703 - RNA, 18 nt, Human
gagcagaggcucaacugg

SEQ ID NO: 762704 - RNA, 22 nt, Human
gcagcuggccccuuuccuuguu

SEQ ID NO: 762705 - RNA, 22 nt, Human
auuauucucuggaggaaagauu

SEQ ID NO: 762706 - RNA, 22 nt, Human
ccaccuccaccuauugccagcc

SEQ ID NO: 762707 - RNA, 22 nt, Human
ugugaggaacaggacuagagca

SEQ ID NO: 762708 - RNA, 22 nt, Human
auaugugugaugcauggacuaa

SEQ ID NO: 762709 - RNA, 22 nt, Human
uauuucagggagaauaaauuug

SEQ ID NO: 762710 - RNA, 22 nt, Human
augcacauguaugucaauauuu

SEQ ID NO: 762711 - RNA, 21 nt, Human
auggagucaggggaaugggcc

SEQ ID NO: 762712 - RNA, 22 nt, Human
agugcccggacaacuggacaga

SEQ ID NO: 762713 - RNA, 20 nt, Human
ugguccucacaugccaucuu

SEQ ID NO: 762714 - RNA, 22 nt, Human
ucaggaaagaagaugcucagug

SEQ ID NO: 762715 - RNA, 22 nt, Human
caaagcagcggauugggauagu

SEQ ID NO: 762716 - RNA, 22 nt, Human
cuggaggaauaauggcaucuug

SEQ ID NO: 762717 - RNA, 22 nt, Human
aucaaagaaugugacugaaaua

SEQ ID NO: 762718 - RNA, 22 nt, Human
ggagggguggucaccuggcagg

SEQ ID NO: 762719 - RNA, 22 nt, Human
gacuggguccucugcuuauggu

SEQ ID NO: 762720 - RNA, 22 nt, Human
aggggagcuugccuggucaccc

SEQ ID NO: 762721 - RNA, 22 nt, Human
aacuguugucauauggucuuaa

SEQ ID NO: 762722 - RNA, 22 nt, Human
gggugcagggucuccagcagcu

SEQ ID NO: 762723 - RNA, 22 nt, Human
agggaccucuucuugcagcuga

SEQ ID NO: 762724 - RNA, 18 nt, Human
gguggccuugacuucucu

SEQ ID NO: 762725 - RNA, 22 nt, Human
cugccauccucaccagagcagc

SEQ ID NO: 762726 - RNA, 22 nt, Human
aaagugcucggauuacagguau

SEQ ID NO: 762727 - RNA, 22 nt, Human
auacauguugagaaaauaucug

SEQ ID NO: 762728 - RNA, 21 nt, Human
aggcagcaggauccagggaca

SEQ ID NO: 762729 - RNA, 22 nt, Human
aacuguaaggcuuagaacagca

SEQ ID NO: 762730 - RNA, 22 nt, Human
gcagggucgcucuaggagauca

SEQ ID NO: 762731 - RNA, 22 nt, Human
guccuguguacuccugauacuu

SEQ ID NO: 762732 - RNA, 22 nt, Human
cuguggcucaauugccuacuga

SEQ ID NO: 762733 - RNA, 22 nt, Human
agaugcagauuuggauucagga

SEQ ID NO: 762734 - RNA, 22 nt, Human
caaaugaagaaccuucucaccu

SEQ ID NO: 762735 - RNA, 21 nt, Human
ggagucagggucuggcugggg

SEQ ID NO: 762736 - RNA, 22 nt, Human
uagcaaagggaaagaagggccu

SEQ ID NO: 762737 - RNA, 22 nt, Human
uacuuuagaaggaaauaaguuc

SEQ ID NO: 762738 - RNA, 22 nt, Human
aucauuacuccuguaaaauugu

SEQ ID NO: 762739 - RNA, 22 nt, Human
ucagggagccuggacuucaagg

SEQ ID NO: 762740 - RNA, 22 nt, Human
uucggaguauugacaugugaag

SEQ ID NO: 762741 - RNA, 22 nt, Human
aggcagccugguuugaauggaa

SEQ ID NO: 762742 - RNA, 22 nt, Human
caggcccauucuaggcuugcua

SEQ ID NO: 762743 - RNA, 22 nt, Human
aaccagcugagaaugcuucugc

SEQ ID NO: 762744 - RNA, 22 nt, Human
agaggagguggugaugcuuuaa

SEQ ID NO: 762745 - RNA, 22 nt, Human
aaaugccucccauucuacugac

SEQ ID NO: 762746 - RNA, 22 nt, Human
uaaagguaugucuuaaucaaac

SEQ ID NO: 762747 - RNA, 22 nt, Human
aauggcaagagccacagaggcg

SEQ ID NO: 762748 - RNA, 22 nt, Human
uuugcugaauagauuguaaacu

SEQ ID NO: 762749 - RNA, 22 nt, Human
cugcagcaggaggcuccugcag

SEQ ID NO: 762750 - RNA, 22 nt, Human
uuucuucuaagauuucaaacua

SEQ ID NO: 762751 - RNA, 22 nt, Human
ucuuacagccacucugugaagc

SEQ ID NO: 762752 - RNA, 22 nt, Human
guucacagcaaaccuaugaacu

SEQ ID NO: 762753 - RNA, 22 nt, Human
cucagagaaaaggagcaagggu

SEQ ID NO: 762754 - RNA, 22 nt, Human
ccuguuuauccaugccaauccu

SEQ ID NO: 762755 - RNA, 22 nt, Human
acagcucauuuguaaaacggag

SEQ ID NO: 762756 - RNA, 22 nt, Human
uuaaaugagauguucagauauu

SEQ ID NO: 762757 - RNA, 22 nt, Human
cucugucccagacccaccucuc

SEQ ID NO: 762758 - RNA, 22 nt, Human
ucacagaaauaagauaguuauu

SEQ ID NO: 762759 - RNA, 22 nt, Human
cuucacacccacuaaaaugaug

SEQ ID NO: 762760 - RNA, 22 nt, Human
cccaggcucagacuggcuuguu

SEQ ID NO: 762761 - RNA, 22 nt, Human
uucaguauguguaaacuacuuu

SEQ ID NO: 762762 - RNA, 22 nt, Human
aaguauauuuagcugagcuugu

SEQ ID NO: 762763 - RNA, 22 nt, Human
aaacaagucacuuuaucuugaa

SEQ ID NO: 762764 - RNA, 22 nt, Human
cucuccauucccuacaguuuuc

SEQ ID NO: 762765 - RNA, 22 nt, Human
gggcagcaugucacuagcaugg

SEQ ID NO: 762766 - RNA, 20 nt, Human
aaacaagguugcucugagga

SEQ ID NO: 762767 - RNA, 22 nt, Human
cgggcuccgggucuuugcaguc

SEQ ID NO: 762768 - RNA, 22 nt, Human
cucagggggaaucaggucacag

SEQ ID NO: 762769 - RNA, 22 nt, Human
ccucucaaaagcacaacauuga

SEQ ID NO: 762770 - RNA, 22 nt, Human
uggugaggccaaagccaugaca

SEQ ID NO: 762771 - RNA, 22 nt, Human
cugggaagaagugggcuacauu

SEQ ID NO: 762772 - RNA, 21 nt, Human
cagccugcugcuccagggcca

SEQ ID NO: 762773 - RNA, 22 nt, Human
ucacagaaugucagaguugggg

SEQ ID NO: 762774 - RNA, 20 nt, Human
ugagcuucagauaucgugca

SEQ ID NO: 762775 - RNA, 22 nt, Human
aaggccagcuuguagggcuggu

SEQ ID NO: 762776 - RNA, 22 nt, Human
ucaggacacccugugcuuccuu

SEQ ID NO: 762777 - RNA, 19 nt, Human
ucucacaguuuccuugccu

SEQ ID NO: 762778 - RNA, 22 nt, Human
ugcccuccuccugagcccaugu

SEQ ID NO: 762779 - RNA, 22 nt, Human
cuguguaugacuccagagggua

SEQ ID NO: 762780 - RNA, 22 nt, Human
acaggcacugucaagucaugaa

SEQ ID NO: 762781 - RNA, 22 nt, Human
aucuggguagugcaagacauga

SEQ ID NO: 762782 - RNA, 22 nt, Human
aaaaguaauugugguuuuugcc

SEQ ID NO: 762783 - RNA, 22 nt, Human
gugggagcccucagggaggugc

SEQ ID NO: 762784 - RNA, 22 nt, Human
gcucaaagaauauucagaauga

SEQ ID NO: 762785 - RNA, 22 nt, Human
agaggcuccuagccacuggcuu

SEQ ID NO: 762786 - RNA, 22 nt, Human
ucacagcuuucagauuguuccc

SEQ ID NO: 762787 - RNA, 20 nt, Human
aucuggcucagauccugcag

SEQ ID NO: 762788 - RNA, 22 nt, Human
uuagggaaauaaaauuaucagu

SEQ ID NO: 762789 - RNA, 22 nt, Human
agcugcuugggaaccaucaauu

SEQ ID NO: 762790 - RNA, 22 nt, Human
acaaagugaauugcaucgaguu

SEQ ID NO: 762791 - RNA, 22 nt, Human
ugggagcagcuuugcgagggag

SEQ ID NO: 762792 - RNA, 22 nt, Human
auguuuuacccuuugcacaaac

SEQ ID NO: 762793 - RNA, 22 nt, Human
cugugugcaggugcuggguacc

SEQ ID NO: 762794 - RNA, 22 nt, Human
uuucccuuugcacucuacaauu

SEQ ID NO: 762795 - RNA, 22 nt, Human
gaagcaauuaaguuugugaucu

SEQ ID NO: 762796 - RNA, 22 nt, Human
acuucagcccagaggaagggau

SEQ ID NO: 762797 - RNA, 22 nt, Human
cuccagcuuuuucccaguuggc

SEQ ID NO: 762798 - RNA, 22 nt, Human
uuucauugucaauaaacuguau

SEQ ID NO: 762799 - RNA, 22 nt, Human
uccuucaagaugccacagcuuu

SEQ ID NO: 762800 - RNA, 22 nt, Human
ggcagcuggggcagugcccugu

SEQ ID NO: 762801 - RNA, 22 nt, Human
uuuggcucugguucuggcucca

SEQ ID NO: 762802 - RNA, 20 nt, Human
aacacugugcgugguaggug

SEQ ID NO: 762803 - RNA, 22 nt, Human
ugcuuuuugcacccuuugccgu

SEQ ID NO: 762804 - RNA, 22 nt, Human
cuuuauuguccuucuuaggugg

SEQ ID NO: 762805 - RNA, 22 nt, Human
uaauccugaucaauuuuagcuu

SEQ ID NO: 762806 - RNA, 22 nt, Human
agcagagcauggugggaagggc

SEQ ID NO: 762807 - RNA, 22 nt, Human
uccaggagauacacugcaccag

SEQ ID NO: 762808 - RNA, 17 nt, Human
ccugggaggaguuauga

SEQ ID NO: 762809 - RNA, 22 nt, Human
gaggccugucgcuaggccucug

SEQ ID NO: 762810 - RNA, 22 nt, Human
gcaggagcaauggccuaucaga

SEQ ID NO: 762811 - RNA, 22 nt, Human
uaaacagccuaaaacuuucuuu

SEQ ID NO: 762812 - RNA, 22 nt, Human
cagagcaccugcucauugccag

SEQ ID NO: 762813 - RNA, 19 nt, Human
ggcugccuccugggagauu

SEQ ID NO: 762814 - RNA, 22 nt, Human
gccagcuuggccaguggccagu

SEQ ID NO: 762815 - RNA, 22 nt, Human
ugcccugugcuggaaucuuccc

SEQ ID NO: 762816 - RNA, 17 nt, Human
gcaguuaaauuaagaug

SEQ ID NO: 762817 - RNA, 22 nt, Human
ccucucuccuuccuuugccaaa

SEQ ID NO: 762818 - RNA, 22 nt, Human
cuucuuuguucuguugucucac

SEQ ID NO: 762819 - RNA, 22 nt, Human
ugaagaaucccagggaauuugg

SEQ ID NO: 762820 - RNA, 22 nt, Human
gguggcucacgccuguaagccc

SEQ ID NO: 762821 - RNA, 22 nt, Human
uggugagcucuuuagacuggga

SEQ ID NO: 762822 - RNA, 22 nt, Human
uggaaagaauuccuaugguuca

SEQ ID NO: 762823 - RNA, 17 nt, Human
aggcugcugggccaggg

SEQ ID NO: 762824 - RNA, 19 nt, Human
gcugagggccacccagccc

SEQ ID NO: 762825 - RNA, 22 nt, Human
ccacccuggacucgaggcccga

SEQ ID NO: 762826 - RNA, 22 nt, Human
ggcugugaaguagcaggggcag

SEQ ID NO: 762827 - RNA, 22 nt, Human
gaaaccuuugccgauggggucc

SEQ ID NO: 762828 - RNA, 22 nt, Human
uggaaugccgggccaggcuccg

SEQ ID NO: 762829 - RNA, 22 nt, Human
cagagcagguaucuuuggugaa

SEQ ID NO: 762830 - RNA, 22 nt, Human
uguaugugcuugagaagguggg

SEQ ID NO: 762831 - RNA, 22 nt, Human
guuguacagcauccagugcaga

SEQ ID NO: 762832 - RNA, 22 nt, Human
aagaaucauuguaaaguucugu

SEQ ID NO: 762833 - RNA, 22 nt, Human
guauuccuucagaagacguuua

SEQ ID NO: 762834 - RNA, 22 nt, Human
gcagcuuucugggacagaaagg

SEQ ID NO: 762835 - RNA, 22 nt, Human
cuggcuuugaaggucuuuccua

SEQ ID NO: 762836 - RNA, 22 nt, Human
gggugcaggggacccuagggac

SEQ ID NO: 762837 - RNA, 22 nt, Human
cagcccagcagacuguuaccac

SEQ ID NO: 762838 - RNA, 22 nt, Human
uagaaauccccagucucauagu

SEQ ID NO: 762839 - RNA, 22 nt, Human
cucugccugccacuguucaggc

SEQ ID NO: 762840 - RNA, 22 nt, Human
ccagguggcuucugcccgaugu

SEQ ID NO: 762841 - RNA, 20 nt, Human
uuugauuucacaaggccagu

SEQ ID NO: 762842 - RNA, 22 nt, Human
agagugcccugcucugagcucu

SEQ ID NO: 762843 - RNA, 22 nt, Human
uuucacauauaggggaagcuac

SEQ ID NO: 762844 - RNA, 22 nt, Human
uccaaaggaagaggcugucagu

SEQ ID NO: 762845 - RNA, 22 nt, Human
agugaggggauucaggcaaggu

SEQ ID NO: 762846 - RNA, 22 nt, Human
gcaccaugacagugaggagaac

SEQ ID NO: 762847 - RNA, 22 nt, Human
cugagcuguuacucuguccucg

SEQ ID NO: 762848 - RNA, 22 nt, Human
cagcagcaacaauagcggucac

SEQ ID NO: 762849 - RNA, 22 nt, Human
aucagucuguguuagaaaagag

SEQ ID NO: 762850 - RNA, 21 nt, Human
ccuggagacaaagacagggug

SEQ ID NO: 762851 - RNA, 22 nt, Human
ucuuuggcauuuaggagcagga

SEQ ID NO: 762852 - RNA, 22 nt, Human
auugcaaagaaauacaugcuua

SEQ ID NO: 762853 - RNA, 22 nt, Human
agccagggcugcgagcagacag

SEQ ID NO: 762854 - RNA, 22 nt, Human
uguuuugguuuucaccgagucc

SEQ ID NO: 762855 - RNA, 22 nt, Human
agcucugugaagccagcaguuc

SEQ ID NO: 762856 - RNA, 22 nt, Human
auaauaacuccuguugaagaac

SEQ ID NO: 762857 - RNA, 22 nt, Human
uuuccuaagggaugcggcucaa

SEQ ID NO: 762858 - RNA, 22 nt, Human
uggaucugguucccugagccuu

SEQ ID NO: 762859 - RNA, 22 nt, Human
gggcugagcuaagcuggguuga

SEQ ID NO: 762860 - RNA, 22 nt, Human
aaaccuguuaauagagcgaugc

SEQ ID NO: 762861 - RNA, 22 nt, Human
acacccagagcgccagugccga

SEQ ID NO: 762862 - RNA, 22 nt, Human
ggguggcacaggugcagagggu

SEQ ID NO: 762863 - RNA, 22 nt, Human
uacaugaagaaaauuaagcagu

SEQ ID NO: 762864 - RNA, 20 nt, Human
aauuagcuuaagucaaucag

SEQ ID NO: 762865 - RNA, 22 nt, Human
ggcauccaaauaccaagaugua

SEQ ID NO: 762866 - RNA, 21 nt, Human
uugcugcccucccuuuccuca

SEQ ID NO: 762867 - RNA, 22 nt, Human
aagcuggcaaacaagcaucauu

SEQ ID NO: 762868 - RNA, 22 nt, Human
acacaggaagagagauaauaau

SEQ ID NO: 762869 - RNA, 22 nt, Human
cagagggagcccuccaggagca

SEQ ID NO: 762870 - RNA, 21 nt, Human
ugaaagaggauguggucauuc

SEQ ID NO: 762871 - RNA, 22 nt, Human
cacugucacguucugaaacugu

SEQ ID NO: 762872 - RNA, 22 nt, Human
uggaggggcaauggagcgcgga

SEQ ID NO: 762873 - RNA, 22 nt, Human
aggcgugguugaggcgagcaua

SEQ ID NO: 762874 - RNA, 22 nt, Human
uuugagcuaugggcuuggauuu

SEQ ID NO: 762875 - RNA, 22 nt, Human
ccccaacccugguuccguggcg

SEQ ID NO: 762876 - RNA, 22 nt, Human
acgacagcacaacagcauccuc

SEQ ID NO: 762877 - RNA, 22 nt, Human
cuggacagaaagggcugcugug

SEQ ID NO: 762878 - RNA, 22 nt, Human
cuuuccuaguuggucccagcac

SEQ ID NO: 762879 - RNA, 22 nt, Human
cauacuuuugcccugacauucu

SEQ ID NO: 762880 - RNA, 22 nt, Human
acaugugugacaacagagguga

SEQ ID NO: 762881 - RNA, 22 nt, Human
ugaaggcugggcucagccagcu

SEQ ID NO: 762882 - RNA, 22 nt, Human
ucccugccucucagacuuccuu

SEQ ID NO: 762883 - RNA, 22 nt, Human
gauauuuugagaaauccuauga

SEQ ID NO: 762884 - RNA, 22 nt, Human
gcagcaugagcuauacaaagua

SEQ ID NO: 762885 - RNA, 22 nt, Human
guguguucagcaagagguaagg

SEQ ID NO: 762886 - RNA, 22 nt, Human
cacaggaauaagucaaacuuca

SEQ ID NO: 762887 - RNA, 22 nt, Human
uuuaaggaugaugugauauaua

SEQ ID NO: 762888 - RNA, 22 nt, Human
uuacagcuuacauuuuaccuug

SEQ ID NO: 762889 - RNA, 22 nt, Human
acagucugccucucagagcagc

SEQ ID NO: 762890 - RNA, 22 nt, Human
gggagggauuaguucugccugg

SEQ ID NO: 762891 - RNA, 22 nt, Human
gcuucagcccaucccaguacau

SEQ ID NO: 762892 - RNA, 22 nt, Human
gaggcucugugaugugccaggc

SEQ ID NO: 762893 - RNA, 22 nt, Human
uaacuucagcgaguucucuuaa

SEQ ID NO: 762894 - RNA, 22 nt, Human
uagugcuucuacccuaggcagg

SEQ ID NO: 762895 - RNA, 16 nt, Human
uccuggggauacugga

SEQ ID NO: 762896 - RNA, 22 nt, Human
gucaaaacaaaguuaagaauuc

SEQ ID NO: 762897 - RNA, 19 nt, Human
gcuccugggccucacucau

SEQ ID NO: 762898 - RNA, 22 nt, Human
ugaagccacuuuccagaaucac

SEQ ID NO: 762899 - RNA, 19 nt, Human
agcugccugugcgcgcccg

SEQ ID NO: 762900 - RNA, 22 nt, Human
ggcccagccggcgagucucgcg

SEQ ID NO: 762901 - RNA, 22 nt, Human
uuaacaugucuugacuucaucu

SEQ ID NO: 762902 - RNA, 22 nt, Human
uguggaaugggagugagaagac

SEQ ID NO: 762903 - RNA, 22 nt, Human
agagauggauguuauuaugggu

SEQ ID NO: 762904 - RNA, 22 nt, Human
aaugucuucaguucuguauugu

SEQ ID NO: 762905 - RNA, 22 nt, Human
uacauguauguguacgugcaug

SEQ ID NO: 762906 - RNA, 22 nt, Human
caaaaguaauugugguuuucac

SEQ ID NO: 762907 - RNA, 22 nt, Human
gggcagcaucaggaggggcuuu

SEQ ID NO: 762908 - RNA, 22 nt, Human
ugcagggccccucugcaugagu

SEQ ID NO: 762909 - RNA, 22 nt, Human
aagaacuuccuaauauauuuuc

SEQ ID NO: 762910 - RNA, 20 nt, Human
gaagcagcuucauguagaca

SEQ ID NO: 762911 - RNA, 22 nt, Human
ggaagauuuuccauuccucuuu

SEQ ID NO: 762912 - RNA, 22 nt, Human
cacaugugcaaauacugaggcu

SEQ ID NO: 762913 - RNA, 22 nt, Human
gagcccugcccacuugucugag

SEQ ID NO: 762914 - RNA, 22 nt, Human
ggacugaggcccacuugaggga

SEQ ID NO: 762915 - RNA, 22 nt, Human
ucuucuccuuugccauguguuu

SEQ ID NO: 762916 - RNA, 22 nt, Human
cugggccagaccuuguggucuu

SEQ ID NO: 762917 - RNA, 22 nt, Human
aaugcuuugccaacagcuauug

SEQ ID NO: 762918 - RNA, 22 nt, Human
ugcaaaaaggcagacuggugau

SEQ ID NO: 762919 - RNA, 22 nt, Human
cagcaguggccaucuguguggu

SEQ ID NO: 762920 - RNA, 17 nt, Human
ggcucugggugucacau

SEQ ID NO: 762921 - RNA, 22 nt, Human
uggcucaguuccaucaucugga

SEQ ID NO: 762922 - RNA, 22 nt, Human
auguuaaaaaccaguacaguug

SEQ ID NO: 762923 - RNA, 22 nt, Human
uaauugucuuagucugugcagg

SEQ ID NO: 762924 - RNA, 22 nt, Human
agacacugaauguuuggugguc

SEQ ID NO: 762925 - RNA, 22 nt, Human
uggccccugaggagcaucagcc

SEQ ID NO: 762926 - RNA, 17 nt, Human
gcuccugcaggucagga

SEQ ID NO: 762927 - RNA, 22 nt, Human
gcugcagugagccaagaucgug

SEQ ID NO: 762928 - RNA, 19 nt, Human
aggucugcagcugcaguuu

SEQ ID NO: 762929 - RNA, 22 nt, Human
ucacucuggaguccgcuaccag

SEQ ID NO: 762930 - RNA, 22 nt, Human
gacagguugaaguaucaaaggu

SEQ ID NO: 762931 - RNA, 22 nt, Human
caggcacuggccagucagcaca

SEQ ID NO: 762932 - RNA, 22 nt, Human
agugaggcuaauaggcaauggu

SEQ ID NO: 762933 - RNA, 22 nt, Human
aauaauuagugggacagagaac

SEQ ID NO: 762934 - RNA, 18 nt, Human
ggcuggaagcuguugcug

SEQ ID NO: 762935 - RNA, 22 nt, Human
agcagggcuuuggcuggcuuuc

SEQ ID NO: 762936 - RNA, 22 nt, Human
aggcugugcgaggucucagagu

SEQ ID NO: 762937 - RNA, 21 nt, Human
gucacacaggccuggagcuga

SEQ ID NO: 762938 - RNA, 22 nt, Human
uuccuuguuuguagcucuggga

SEQ ID NO: 762939 - RNA, 22 nt, Human
uugcauugaugucuauacgcug

SEQ ID NO: 762940 - RNA, 22 nt, Human
ggaggcaucucuguggcugucu

SEQ ID NO: 762941 - RNA, 22 nt, Human
uagcauuaaagguaagacauua

SEQ ID NO: 762942 - RNA, 22 nt, Human
gggcaaagugguggaggcaguu

SEQ ID NO: 762943 - RNA, 22 nt, Human
aauuuuaucucuaagcaggcuu

SEQ ID NO: 762944 - RNA, 22 nt, Human
uagcaagaggugaagguuucau

SEQ ID NO: 762945 - RNA, 20 nt, Human
ggccuuggccucuuugcagc

SEQ ID NO: 762946 - RNA, 22 nt, Human
cucagaagccuucagucuuggc

SEQ ID NO: 762947 - RNA, 22 nt, Human
uugagaaauacuuuuguagccu

SEQ ID NO: 762948 - RNA, 22 nt, Human
ucacuccaucuuugcuacuggu

SEQ ID NO: 762949 - RNA, 18 nt, Human
accuccccauuuucugaa

SEQ ID NO: 762950 - RNA, 22 nt, Human
cuuauucagaccuuggauucuu

SEQ ID NO: 762951 - RNA, 22 nt, Human
cggggcugcgcucuuccugccg

SEQ ID NO: 762952 - RNA, 20 nt, Human
gugugaagcccucaggagga

SEQ ID NO: 762953 - RNA, 22 nt, Human
ccaagaugagcuggcuccaugg

SEQ ID NO: 762954 - RNA, 22 nt, Human
gaauucugguccuguccaaggu

SEQ ID NO: 762955 - RNA, 22 nt, Human
gggcugucaugugucagugacc

SEQ ID NO: 762956 - RNA, 22 nt, Human
uagaaauguugguauuaacauu

SEQ ID NO: 762957 - RNA, 22 nt, Human
uuucacacaacgugaauauacu

SEQ ID NO: 762958 - RNA, 22 nt, Human
uuuguauuccauaucaugccau

SEQ ID NO: 762959 - RNA, 22 nt, Human
ggacccugggcucugggccuau

SEQ ID NO: 762960 - RNA, 22 nt, Human
uggcagagcccagacuccaguc

SEQ ID NO: 762961 - RNA, 20 nt, Human
ugcuccuaccacuucugccc

SEQ ID NO: 762962 - RNA, 19 nt, Human
gcacaggacaucugaugga

SEQ ID NO: 762963 - RNA, 22 nt, Human
gcagcccagguggaguaaucua

SEQ ID NO: 762964 - RNA, 22 nt, Human
gcuucuguggauuggcuggcuu

SEQ ID NO: 762965 - RNA, 22 nt, Human
uugucugacuucuuuaguuacu

SEQ ID NO: 762966 - RNA, 22 nt, Human
aaggaagguacucagugauucu

SEQ ID NO: 762967 - RNA, 21 nt, Human
gagccuucccucugcccuuuc

SEQ ID NO: 762968 - RNA, 19 nt, Human
cucucuggcggugucugcg

SEQ ID NO: 762969 - RNA, 22 nt, Human
cugugcccuguggcuggcaccu

SEQ ID NO: 762970 - RNA, 22 nt, Human
agggagcucaguuggaagcggu

SEQ ID NO: 762971 - RNA, 20 nt, Human
cuuuaguuacacguuuccuc

SEQ ID NO: 762972 - RNA, 17 nt, Human
agaaacugaggcucagu

SEQ ID NO: 762973 - RNA, 20 nt, Human
cagagcagugcccaggcggc

SEQ ID NO: 762974 - RNA, 22 nt, Human
uuuugaaagggugauuuggcuu

SEQ ID NO: 762975 - RNA, 22 nt, Human
ugauauuuuucacuggccucug

SEQ ID NO: 762976 - RNA, 22 nt, Human
ugguccugggcacaguauaugc

SEQ ID NO: 762977 - RNA, 22 nt, Human
agcaggugcguuacuucacucu

SEQ ID NO: 762978 - RNA, 22 nt, Human
ugcuggcuccucgaggcuucgu

SEQ ID NO: 762979 - RNA, 22 nt, Human
ggaaaagaaagggacugauugg

SEQ ID NO: 762980 - RNA, 22 nt, Human
cuuucaugcaguugacaaggug

SEQ ID NO: 762981 - RNA, 22 nt, Human
ugcuuaaauuucagcagcuuaa

SEQ ID NO: 762982 - RNA, 21 nt, Human
acaguacuugagaucuuuuga

SEQ ID NO: 762983 - RNA, 22 nt, Human
gccucgaggcugagaaggcaca

SEQ ID NO: 762984 - RNA, 22 nt, Human
aaagguaucauguccauacagu

SEQ ID NO: 762985 - RNA, 22 nt, Human
cagagccaggccugcccucuuu

SEQ ID NO: 762986 - RNA, 22 nt, Human
cugcagcugcaguucugagaga

SEQ ID NO: 762987 - RNA, 22 nt, Human
gaauacaagccaggcacaaggc

SEQ ID NO: 762988 - RNA, 22 nt, Human
aacugauaauggacacauaaaa

SEQ ID NO: 762989 - RNA, 21 nt, Human
cucugaauccugcuucucagu

SEQ ID NO: 762990 - RNA, 22 nt, Human
uguucuucuagauugccuuuua

SEQ ID NO: 762991 - RNA, 20 nt, Human
aacaaucuagaagcuauucu

SEQ ID NO: 762992 - RNA, 22 nt, Human
agcagacucuucuccuggggcu

SEQ ID NO: 762993 - RNA, 20 nt, Human
agcugguuaucuuaauucuu

SEQ ID NO: 762994 - RNA, 22 nt, Human
gccugcccacggggcuggcaua

SEQ ID NO: 762995 - RNA, 22 nt, Human
ggaaggaagugcagacuuuaaa

SEQ ID NO: 762996 - RNA, 22 nt, Human
ugaagugggggaacgagaguuc

SEQ ID NO: 762997 - RNA, 22 nt, Human
ucaaucaaagccagauguccuu

SEQ ID NO: 762998 - RNA, 22 nt, Human
ccauggcuuacagauggagcau

SEQ ID NO: 762999 - RNA, 22 nt, Human
accugcagguguuuccacacuu

SEQ ID NO: 763000 - RNA, 22 nt, Human
auagugugugguauagguagag

SEQ ID NO: 763001 - RNA, 22 nt, Human
acucagcugaugaagcacaagu

SEQ ID NO: 763002 - RNA, 19 nt, Human
cugcucuccuugacuugga

SEQ ID NO: 763003 - RNA, 22 nt, Human
aucuuucaaucaggaaaaaucu

SEQ ID NO: 763004 - RNA, 22 nt, Human
cagggauggccuggcgggccac

SEQ ID NO: 763005 - RNA, 21 nt, Human
gagugcagcaagguagagucu

SEQ ID NO: 763006 - RNA, 22 nt, Human
ugacaguguuugcacuucaggu

SEQ ID NO: 763007 - RNA, 20 nt, Human
ugcagcugcaggaggguggg

SEQ ID NO: 763008 - RNA, 22 nt, Human
uggcuggcuguccagcugggca

SEQ ID NO: 763009 - RNA, 22 nt, Human
uucuuugguguuacccagcuca

SEQ ID NO: 763010 - RNA, 22 nt, Human
cccaaggaagacgcuugugaua

SEQ ID NO: 763011 - RNA, 22 nt, Human
caucagaagauggcucuggaaa

SEQ ID NO: 763012 - RNA, 20 nt, Human
uagagagaggauauuaaagu

SEQ ID NO: 763013 - RNA, 22 nt, Human
cuucacaggcaagucuguuuuu

SEQ ID NO: 763014 - RNA, 22 nt, Human
gaggcugagaguuuguucuacu

SEQ ID NO: 763015 - RNA, 22 nt, Human
gcuaggaagaagggugcuugaa

SEQ ID NO: 763016 - RNA, 22 nt, Human
acacauguuuacagucuucagu

SEQ ID NO: 763017 - RNA, 22 nt, Human
ugcccaaguguuuggcugaguc

SEQ ID NO: 763018 - RNA, 22 nt, Human
cugccacuagcuuucacaucuu

SEQ ID NO: 763019 - RNA, 22 nt, Human
ucuguugcauaugcugcugggu

SEQ ID NO: 763020 - RNA, 22 nt, Human
cucaagucugaguacuggcucu

SEQ ID NO: 763021 - RNA, 22 nt, Human
auguacaguggaaacuaacaaa

SEQ ID NO: 763022 - RNA, 22 nt, Human
ugcuccaggugugccucucaug

SEQ ID NO: 763023 - RNA, 22 nt, Human
uuauuguuuggguauaauuuga

SEQ ID NO: 763024 - RNA, 22 nt, Human
cucugcuucauccaccacuggc

SEQ ID NO: 763025 - RNA, 22 nt, Human
aggagccugugccuggcacucc

SEQ ID NO: 763026 - RNA, 22 nt, Human
ccugggcucacagccaaggcuc

SEQ ID NO: 763027 - RNA, 21 nt, Human
agaaaaguauuugaaucaaga

SEQ ID NO: 763028 - RNA, 22 nt, Human
agcuauugugugcccagcagga

SEQ ID NO: 763029 - RNA, 22 nt, Human
gggagcugaaguagggguaaau

SEQ ID NO: 763030 - RNA, 19 nt, Human
augacagaguugauaagug

SEQ ID NO: 763031 - RNA, 22 nt, Human
agagcagcugacagccugccau

SEQ ID NO: 763032 - RNA, 22 nt, Human
ucucagaauccuugcccaggug

SEQ ID NO: 763033 - RNA, 22 nt, Human
uaucuauaauguuuuacuuccu

SEQ ID NO: 763034 - RNA, 22 nt, Human
cagagccugccucuggcugugg

SEQ ID NO: 763035 - RNA, 22 nt, Human
uucaguuucaaauccugugaag

SEQ ID NO: 763036 - RNA, 22 nt, Human
gguaacugaggccauauucuga

SEQ ID NO: 763037 - RNA, 22 nt, Human
ccugagccucuugcacgcucag

SEQ ID NO: 763038 - RNA, 22 nt, Human
cauuacaaaguuauaaacaguu

SEQ ID NO: 763039 - RNA, 22 nt, Human
augauucucauuuuauaaacuu

SEQ ID NO: 763040 - RNA, 22 nt, Human
cagcuucccuuggcugagcaga

SEQ ID NO: 763041 - RNA, 22 nt, Human
gagcugagucugcagucgccau

SEQ ID NO: 763042 - RNA, 22 nt, Human
ccugcuguaaugugucuuuauu

SEQ ID NO: 763043 - RNA, 22 nt, Human
guaacagaggguuugcagauau

SEQ ID NO: 763044 - RNA, 21 nt, Human
ccacucaugacuccacucacc

SEQ ID NO: 763045 - RNA, 22 nt, Human
gggggccuuguuaguggaugga

SEQ ID NO: 763046 - RNA, 20 nt, Human
uccaggaaugguagaggacu

SEQ ID NO: 763047 - RNA, 22 nt, Human
acuagcagggauauuauauaag

SEQ ID NO: 763048 - RNA, 22 nt, Human
ggggcugcucccaccccugagg

SEQ ID NO: 763049 - RNA, 22 nt, Human
auaauacaugguugaucuuuuc

SEQ ID NO: 763050 - RNA, 22 nt, Human
gcaguguuggcaggauggggcu

SEQ ID NO: 763051 - RNA, 22 nt, Human
uuggaaggagucuuuggggaug

SEQ ID NO: 763052 - RNA, 22 nt, Human
cugucccucucacaccucacca

SEQ ID NO: 763053 - RNA, 22 nt, Human
gugcuuccuagguaaguaggua

SEQ ID NO: 763054 - RNA, 22 nt, Human
gccucaguguccuccuccaugu

SEQ ID NO: 763055 - RNA, 22 nt, Human
ucaguguuucaguuuggaaaug

SEQ ID NO: 763056 - RNA, 21 nt, Human
cucuguguugaggguguugag

SEQ ID NO: 763057 - RNA, 22 nt, Human
ucagauacuagcucucagccuc

SEQ ID NO: 763058 - RNA, 22 nt, Human
accagaguuuuauuaguucuaa

SEQ ID NO: 763059 - RNA, 22 nt, Human
aaugauccuuguuguuuaacca

SEQ ID NO: 763060 - RNA, 22 nt, Human
uacaaagugagcaaccucuuuu

SEQ ID NO: 763061 - RNA, 23 nt, Human
aaauaggaguaucuggaucauga

SEQ ID NO: 763062 - RNA, 22 nt, Human
ugcagccuuggcaaccagggac

SEQ ID NO: 763063 - RNA, 22 nt, Human
augcuuuauuggagacagucau

SEQ ID NO: 763064 - RNA, 22 nt, Human
uggcuggagucuggugcuagcc

SEQ ID NO: 763065 - RNA, 22 nt, Human
uaggaagaucaaguuuaucuca

SEQ ID NO: 763066 - RNA, 22 nt, Human
acauguuuaaguuuaaugaaaa

SEQ ID NO: 763067 - RNA, 22 nt, Human
gcacccagccagcaucucagag

SEQ ID NO: 763068 - RNA, 22 nt, Human
uggcuugucauguaucugaggc

SEQ ID NO: 763069 - RNA, 22 nt, Human
gggaagagggagcuggaaugau

SEQ ID NO: 763070 - RNA, 22 nt, Human
auuuuucucuuuccacugagau

SEQ ID NO: 763071 - RNA, 22 nt, Human
cacaguguggcaaauuucaacu

SEQ ID NO: 763072 - RNA, 22 nt, Human
gcugagagaucaaggcaggauu

SEQ ID NO: 763073 - RNA, 23 nt, Human
uggaagaaaaugguuuggcugug

SEQ ID NO: 763074 - RNA, 21 nt, Human
ugauccuuucccccauguugc

SEQ ID NO: 763075 - RNA, 22 nt, Human
gugauuucaaauauagagugag

SEQ ID NO: 763076 - RNA, 20 nt, Human
uguguagcaggugcugugcc

SEQ ID NO: 763077 - RNA, 22 nt, Human
cugagggcaugaacauuccaua

SEQ ID NO: 763078 - RNA, 22 nt, Human
cagugcccaagaugugccaugc

SEQ ID NO: 763079 - RNA, 22 nt, Human
agauccacucgaauccaggaau

SEQ ID NO: 763080 - RNA, 22 nt, Human
uuuagacauggcuugcucacuu

SEQ ID NO: 763081 - RNA, 22 nt, Human
cacaugagacaauuaaagacuu

SEQ ID NO: 763082 - RNA, 22 nt, Human
gaaccacaagauucaaaggggu

SEQ ID NO: 763083 - RNA, 20 nt, Human
agggaggugcugggccugag

SEQ ID NO: 763084 - RNA, 22 nt, Human
cucccagauuccugcuguggga

SEQ ID NO: 763085 - RNA, 22 nt, Human
ucuuucuucagcccuguaagau

SEQ ID NO: 763086 - RNA, 22 nt, Human
uccuugaauugugccacuuacc

SEQ ID NO: 763087 - RNA, 21 nt, Human
uccuccuccacuaggcuagcc

SEQ ID NO: 763088 - RNA, 20 nt, Human
ucucuggguucucacucagc

SEQ ID NO: 763089 - RNA, 22 nt, Human
ugcuggaauugaccuagaagga

SEQ ID NO: 763090 - RNA, 22 nt, Human
ccagcuccauugcuuaguguaa

SEQ ID NO: 763091 - RNA, 22 nt, Human
aggccacaguugaggccagcaa

SEQ ID NO: 763092 - RNA, 22 nt, Human
aggccucaguucuugccaggug

SEQ ID NO: 763093 - RNA, 22 nt, Human
cagcuauuggcaagaaguggug

SEQ ID NO: 763094 - RNA, 22 nt, Human
gagggcugauaaaugcgcaugg

SEQ ID NO: 763095 - RNA, 22 nt, Human
ucaggauguccaaaauccagcc

SEQ ID NO: 763096 - RNA, 22 nt, Human
aaguuaugaaauuuggacagcu

SEQ ID NO: 763097 - RNA, 22 nt, Human
auguaugaagcuuuguuuggga

SEQ ID NO: 763098 - RNA, 18 nt, Human
auguguggcuuggggucc

SEQ ID NO: 763099 - RNA, 20 nt, Human
uugcauuggaugugcaggug

SEQ ID NO: 763100 - RNA, 22 nt, Human
aacaguacuggacaaggaguca

SEQ ID NO: 763101 - RNA, 22 nt, Human
auuauuaaaauguguuucucuu

SEQ ID NO: 763102 - RNA, 22 nt, Human
cauugucucuugucauuuagua

SEQ ID NO: 763103 - RNA, 22 nt, Human
acaccuuugugaagugaugaug

SEQ ID NO: 763104 - RNA, 22 nt, Human
ugcuggagaugaaagggcccug

SEQ ID NO: 763105 - RNA, 22 nt, Human
aaauccaucaaaucuucuagaa

SEQ ID NO: 763106 - RNA, 22 nt, Human
uuagaaucagaagagagguauu

SEQ ID NO: 763107 - RNA, 22 nt, Human
auaucuuuguaugguucagcag

SEQ ID NO: 763108 - RNA, 22 nt, Human
gucagcaggguccccuugagug

SEQ ID NO: 763109 - RNA, 22 nt, Human
uaggccacagagaggagauuuc

SEQ ID NO: 763110 - RNA, 22 nt, Human
agagaguugaggaagcaacacu

SEQ ID NO: 763111 - RNA, 22 nt, Human
uacaaguacuguggcuuugaau

SEQ ID NO: 763112 - RNA, 22 nt, Human
uacagauauguaugcacuuuuu

SEQ ID NO: 763113 - RNA, 22 nt, Human
uguguucaucaugauaucaggu

SEQ ID NO: 763114 - RNA, 22 nt, Human
augugagggcucaggcugacug

SEQ ID NO: 763115 - RNA, 22 nt, Human
gcagggcugggacuuacuggua

SEQ ID NO: 763116 - RNA, 21 nt, Human
cacuugaaugguguuuuacaa

SEQ ID NO: 763117 - RNA, 22 nt, Human
cauggccacauuggaccgaagc

SEQ ID NO: 763118 - RNA, 22 nt, Human
uguggguguucucacuuagaua

SEQ ID NO: 763119 - RNA, 22 nt, Human
uggacucagaguugguggcagu

SEQ ID NO: 763120 - RNA, 22 nt, Human
uagugcuugagucucuccguac

SEQ ID NO: 763121 - RNA, 23 nt, Human
ccuucagaagaaguaacaggggc

SEQ ID NO: 763122 - RNA, 22 nt, Human
gacagagugcagggcuagaaga

SEQ ID NO: 763123 - RNA, 22 nt, Human
acaggccacaguggagucucug

SEQ ID NO: 763124 - RNA, 22 nt, Human
uagaggagaacacaaauuauag

SEQ ID NO: 763125 - RNA, 19 nt, Human
cacagaugauugacacaua

SEQ ID NO: 763126 - RNA, 22 nt, Human
aggaaacuucagaguuuugguc

SEQ ID NO: 763127 - RNA, 22 nt, Human
gcaggagccaggccgagcuggu

SEQ ID NO: 763128 - RNA, 22 nt, Human
aaucacauuagugaaacacuga

SEQ ID NO: 763129 - RNA, 22 nt, Human
uggaggcccccaggcaacagca

SEQ ID NO: 763130 - RNA, 23 nt, Human
uuauuuugucagaagggacuuuu

SEQ ID NO: 763131 - RNA, 22 nt, Human
uguccugggucccugcuagaag

SEQ ID NO: 763132 - RNA, 22 nt, Human
aagaauugguuuccucugucau

SEQ ID NO: 763133 - RNA, 22 nt, Human
aagauggagcacgagcagaagc

SEQ ID NO: 763134 - RNA, 22 nt, Human
agcuauagcuggaucuuaagug

SEQ ID NO: 763135 - RNA, 22 nt, Human
uucagugcuaaaaagucucaag

SEQ ID NO: 763136 - RNA, 21 nt, Human
caucacauuacucaaaguccu

SEQ ID NO: 763137 - RNA, 22 nt, Human
cuuuucacaggaggauaagccc

SEQ ID NO: 763138 - RNA, 22 nt, Human
cuggcagaguugggucucaaau

SEQ ID NO: 763139 - RNA, 22 nt, Human
ucaguacaaaggugcucucaag

SEQ ID NO: 763140 - RNA, 21 nt, Human
ucauccauggcuuuugugcuu

SEQ ID NO: 763141 - RNA, 22 nt, Human
acaugcacccaguuacacucuc

SEQ ID NO: 763142 - RNA, 22 nt, Human
ggcacagagaggcccuggaagg

SEQ ID NO: 763143 - RNA, 23 nt, Human
uuacagaaaguaugcuuuuguuu

SEQ ID NO: 763144 - RNA, 22 nt, Human
aaagccuugcccgucacuggga

SEQ ID NO: 763145 - RNA, 21 nt, Human
uaaauaauaaguugcugagau

SEQ ID NO: 763146 - RNA, 22 nt, Human
ccaggccagccuggagcauggc

SEQ ID NO: 763147 - RNA, 22 nt, Human
ggacaaaggguggagccucuga

SEQ ID NO: 763148 - RNA, 22 nt, Human
aucgcuuuacagccugcuuccu

SEQ ID NO: 763149 - RNA, 22 nt, Human
agucuauuuccccuucucuuga

SEQ ID NO: 763150 - RNA, 22 nt, Human
agcaagcagaauucuguccucu

SEQ ID NO: 763151 - RNA, 21 nt, Human
ugcuggccucaagggugacuu

SEQ ID NO: 763152 - RNA, 22 nt, Human
uugcugcuuucauuuauacagu

SEQ ID NO: 763153 - RNA, 22 nt, Human
gaagagcuauguccagggagca

SEQ ID NO: 763154 - RNA, 22 nt, Human
ggugcaugugagaaagacuggg

SEQ ID NO: 763155 - RNA, 22 nt, Human
aaaggauggcucugcauauuug

SEQ ID NO: 763156 - RNA, 22 nt, Human
cuguagccagaagcagaaggcc

SEQ ID NO: 763157 - RNA, 18 nt, Human
uguacaguuaugagcauu

SEQ ID NO: 763158 - RNA, 20 nt, Human
uucuaauuugauggaguagc

SEQ ID NO: 763159 - RNA, 22 nt, Human
ugagaauucuacaauagaucaa

SEQ ID NO: 763160 - RNA, 22 nt, Human
ucacagacacuggguuauugca

SEQ ID NO: 763161 - RNA, 22 nt, Human
ggaggcccagagaggugaagug

SEQ ID NO: 763162 - RNA, 22 nt, Human
agaguggagagaaacaacucug

SEQ ID NO: 763163 - RNA, 22 nt, Human
ugcagaaagcauugacucuucc

SEQ ID NO: 763164 - RNA, 22 nt, Human
guacaaauugauacagguuuuc

SEQ ID NO: 763165 - RNA, 22 nt, Human
caggcugcagcagcaguggccc

SEQ ID NO: 763166 - RNA, 22 nt, Human
ggcucugccgugugcucacaug

SEQ ID NO: 763167 - RNA, 22 nt, Human
uccagccacguauuaucucacu

SEQ ID NO: 763168 - RNA, 22 nt, Human
acagagauguggaugagggauu

SEQ ID NO: 763169 - RNA, 22 nt, Human
cacagcaagagcuaaaugacca

SEQ ID NO: 763170 - RNA, 22 nt, Human
agaggcacuguucuuagcgacu

SEQ ID NO: 763171 - RNA, 22 nt, Human
uccagcauuuuucaauagaauu

SEQ ID NO: 763172 - RNA, 22 nt, Human
cagcagagcuuauguuggguca

SEQ ID NO: 763173 - RNA, 20 nt, Human
guauuacaggcuuagaacca

SEQ ID NO: 763174 - RNA, 22 nt, Human
uaccagccucuguugggggugg

SEQ ID NO: 763175 - RNA, 22 nt, Human
ucaaagacauggggaagcugag

SEQ ID NO: 763176 - RNA, 22 nt, Human
auaugugugugugagaaaagcu

SEQ ID NO: 763177 - RNA, 22 nt, Human
cugucuguacaaauguggggcc

SEQ ID NO: 763178 - RNA, 22 nt, Human
guggcccaggcacccugaugac

SEQ ID NO: 763179 - RNA, 22 nt, Human
uuucucuuucaaucugcaguac

SEQ ID NO: 763180 - RNA, 22 nt, Human
uagacagaauccagcccacgcc

SEQ ID NO: 763181 - RNA, 22 nt, Human
auguguauugagcaccuacugc

SEQ ID NO: 763182 - RNA, 22 nt, Human
uauguacacacacaugcaugua

SEQ ID NO: 763183 - RNA, 22 nt, Human
cuggggagaagcgacucggcug

SEQ ID NO: 763184 - RNA, 23 nt, Human
agguucucuuaucaucucugccc

SEQ ID NO: 763185 - RNA, 22 nt, Human
aaaaguuaccucuguaauauaa

SEQ ID NO: 763186 - RNA, 22 nt, Human
ugucauuuucagcuuaugcuuc

SEQ ID NO: 763187 - RNA, 22 nt, Human
agcugcuaugacaacaccagcc

SEQ ID NO: 763188 - RNA, 22 nt, Human
ggaggcagaauagagugugggu

SEQ ID NO: 763189 - RNA, 22 nt, Human
gagucuggugauggucauuguc

SEQ ID NO: 763190 - RNA, 22 nt, Human
aagagcuucccuguuguagagg

SEQ ID NO: 763191 - RNA, 17 nt, Human
aagagguaacuguacua

SEQ ID NO: 763192 - RNA, 22 nt, Human
gcacugggaaugugagcagcug

SEQ ID NO: 763193 - RNA, 23 nt, Human
uguuuguuucuaugagagauagc

SEQ ID NO: 763194 - RNA, 22 nt, Human
cagcugaguaugcauucaagca

SEQ ID NO: 763195 - RNA, 22 nt, Human
aagcuggacacugacccacugu

SEQ ID NO: 763196 - RNA, 22 nt, Human
cagcccuguugcgcuuccggcg

SEQ ID NO: 763197 - RNA, 22 nt, Human
uuccuaacgccaguauuuucau

SEQ ID NO: 763198 - RNA, 22 nt, Human
guggauggcccugcacacaggu

SEQ ID NO: 763199 - RNA, 22 nt, Human
uuauuuaaaauguagguuggga

SEQ ID NO: 763200 - RNA, 22 nt, Human
uuugagaacuuugguauuuucc

SEQ ID NO: 763201 - RNA, 22 nt, Human
uuuagcauauccuauaaaacua

SEQ ID NO: 763202 - RNA, 22 nt, Human
gaauuuaagaggaugaaucugu

SEQ ID NO: 763203 - RNA, 22 nt, Human
uuguauuuuguuaugcuacugc

SEQ ID NO: 763204 - RNA, 22 nt, Human
gaccauuuuuacagagcauuca

SEQ ID NO: 763205 - RNA, 22 nt, Human
uuguacauucugaaucuguccu

SEQ ID NO: 763206 - RNA, 22 nt, Human
cugugagggccagagucagggc

SEQ ID NO: 763207 - RNA, 22 nt, Human
uucucuggcgcgcugugcuaug

SEQ ID NO: 763208 - RNA, 22 nt, Human
ccuggcaguucaucaaauggca

SEQ ID NO: 763209 - RNA, 22 nt, Human
cuccucccacggucucaggaag

SEQ ID NO: 763210 - RNA, 22 nt, Human
auguguagaacuguaaugccca

SEQ ID NO: 763211 - RNA, 21 nt, Human
uccccacauuucuaaacagac

SEQ ID NO: 763212 - RNA, 22 nt, Human
uucucugcagcuuaggcccagu

SEQ ID NO: 763213 - RNA, 22 nt, Human
cuggaugcuuccucucugcuag

SEQ ID NO: 763214 - RNA, 22 nt, Human
aagguacaguuuuaagaauaag

SEQ ID NO: 763215 - RNA, 22 nt, Human
acccaggacaaaauaaccaggu

SEQ ID NO: 763216 - RNA, 22 nt, Human
acuuaguauuuuucagcuuuga

SEQ ID NO: 763217 - RNA, 22 nt, Human
uacagcuuuauacccaucaaaa

SEQ ID NO: 763218 - RNA, 22 nt, Human
cagcccugcagcuggaucucac

SEQ ID NO: 763219 - RNA, 22 nt, Human
aggucugacuucaagccugugg

SEQ ID NO: 763220 - RNA, 22 nt, Human
aagaguuuaccagugcugcuuc

SEQ ID NO: 763221 - RNA, 22 nt, Human
ucuggaguccagauccauuugg

SEQ ID NO: 763222 - RNA, 18 nt, Human
aggucaggaaagcagagu

SEQ ID NO: 763223 - RNA, 22 nt, Human
ugaguggguuaucaggaaaggu

SEQ ID NO: 763224 - RNA, 20 nt, Human
aggcucaggguguuuaggaa

SEQ ID NO: 763225 - RNA, 22 nt, Human
ucccuguaguucguggucuuug

SEQ ID NO: 763226 - RNA, 22 nt, Human
caggcagcuagauuuauaacaa

SEQ ID NO: 763227 - RNA, 19 nt, Human
ucccucccuguaaucucac

SEQ ID NO: 763228 - RNA, 22 nt, Human
agugucugcggcggggaggcgg

SEQ ID NO: 763229 - RNA, 22 nt, Human
agagcaggggcaauguguugca

SEQ ID NO: 763230 - RNA, 22 nt, Human
gcugguuagaaaacagagcuca

SEQ ID NO: 763231 - RNA, 22 nt, Human
agcugugugccaggggagaugu

SEQ ID NO: 763232 - RNA, 22 nt, Human
cccccaaggccaggcugagacc

SEQ ID NO: 763233 - RNA, 22 nt, Human
uaaucacaucaggguaaauggg

SEQ ID NO: 763234 - RNA, 21 nt, Human
uuagaguugccauuauaugua

SEQ ID NO: 763235 - RNA, 22 nt, Human
cugggcuagaaggaccaggaug

SEQ ID NO: 763236 - RNA, 22 nt, Human
aaugucauuuaaaauaauucug

SEQ ID NO: 763237 - RNA, 22 nt, Human
acccugggugagaggcaaacag

SEQ ID NO: 763238 - RNA, 22 nt, Human
uaguauuuauaaucaugcuuaa

SEQ ID NO: 763239 - RNA, 22 nt, Human
gcuccuggcuucacugacauca

SEQ ID NO: 763240 - RNA, 22 nt, Human
auuuaagggauuuggagaccaa

SEQ ID NO: 763241 - RNA, 22 nt, Human
uguucucuuuuccugcugagcc

SEQ ID NO: 763242 - RNA, 22 nt, Human
ccuagaugggauggcggccggg

SEQ ID NO: 763243 - RNA, 22 nt, Human
ccucaguguuaggauaagagaa

SEQ ID NO: 763244 - RNA, 20 nt, Human
gcccaggaauuugcauuucu

SEQ ID NO: 763245 - RNA, 22 nt, Human
ucucugggacacugggucaguu

SEQ ID NO: 763246 - RNA, 20 nt, Human
accaggagauggaggcaggg

SEQ ID NO: 763247 - RNA, 22 nt, Human
agucacaugaggaaggggaagg

SEQ ID NO: 763248 - RNA, 22 nt, Human
agggcagaaguacagacacuua

SEQ ID NO: 763249 - RNA, 22 nt, Human
uagacauuagguagguucaugg

SEQ ID NO: 763250 - RNA, 22 nt, Human
cagcuuccauaagagauggaga

SEQ ID NO: 763251 - RNA, 17 nt, Human
gacaucaguacuuacag

SEQ ID NO: 763252 - RNA, 22 nt, Human
aaaagcaaguugccuagguuga

SEQ ID NO: 763253 - RNA, 22 nt, Human
agugggugggugucugacaguu

SEQ ID NO: 763254 - RNA, 22 nt, Human
auauacuuggagacuaucauug

SEQ ID NO: 763255 - RNA, 22 nt, Human
uagaaaccaucucacugcucag

SEQ ID NO: 763256 - RNA, 22 nt, Human
ccagggccaguaagauuggcau

SEQ ID NO: 763257 - RNA, 22 nt, Human
uggcucagugaagagauaacuu

SEQ ID NO: 763258 - RNA, 22 nt, Human
augaggcagagggcugugccag

SEQ ID NO: 763259 - RNA, 22 nt, Human
aauaaacuuccacuguguuuuu

SEQ ID NO: 763260 - RNA, 22 nt, Human
gaguuuaaagcauacauauuuu

SEQ ID NO: 763261 - RNA, 22 nt, Human
cugggccacaucagaugaagac

SEQ ID NO: 763262 - RNA, 22 nt, Human
gacagacaugggacuucauacu

SEQ ID NO: 763263 - RNA, 22 nt, Human
ccaggagcgggaaaaggaagaa

SEQ ID NO: 763264 - RNA, 22 nt, Human
uugcagggaccugcagaaagcu

SEQ ID NO: 763265 - RNA, 22 nt, Human
uugauuugauugaugaacuaag

SEQ ID NO: 763266 - RNA, 22 nt, Human
cuggcccuguggaggcaggaac

SEQ ID NO: 763267 - RNA, 22 nt, Human
gcuuugcauuguuuaaucagga

SEQ ID NO: 763268 - RNA, 22 nt, Human
agcagccagugggagugauaca

SEQ ID NO: 763269 - RNA, 22 nt, Human
cccugagcccauaguugacauu

SEQ ID NO: 763270 - RNA, 22 nt, Human
cucagggaugggcagauguuaa

SEQ ID NO: 763271 - RNA, 20 nt, Human
gccagcccugacacaggagc

SEQ ID NO: 763272 - RNA, 22 nt, Human
uauucaugagauaggcaguuuu

SEQ ID NO: 763273 - RNA, 22 nt, Human
aggagcccugcgggaggcagag

SEQ ID NO: 763274 - RNA, 22 nt, Human
ugcuuuaaaccauggaugugag

SEQ ID NO: 763275 - RNA, 22 nt, Human
ugaggccugcuuggaauugaau

SEQ ID NO: 763276 - RNA, 22 nt, Human
agucuuaacuaugcaaguacua

SEQ ID NO: 763277 - RNA, 22 nt, Human
gaguuauucuagguccuuugua

SEQ ID NO: 763278 - RNA, 22 nt, Human
augcaggggccgccuggccagg

SEQ ID NO: 763279 - RNA, 21 nt, Human
uuccucugcaacugaugcuca

SEQ ID NO: 763280 - RNA, 22 nt, Human
acaaugucuuugucuccuucag

SEQ ID NO: 763281 - RNA, 22 nt, Human
cuggguccccucagugacacug

SEQ ID NO: 763282 - RNA, 22 nt, Human
cuccuucagcugaaucccugcu

SEQ ID NO: 763283 - RNA, 22 nt, Human
ugcguguguguauauacacagg

SEQ ID NO: 763284 - RNA, 22 nt, Human
gaguugaagaaauaguuuugau

SEQ ID NO: 763285 - RNA, 22 nt, Human
uaaggcagguaugguaccaggc

SEQ ID NO: 763286 - RNA, 22 nt, Human
acaggacuguggaaggaucucu

SEQ ID NO: 763287 - RNA, 22 nt, Human
aaugcaaagcaagcagagauuu

SEQ ID NO: 763288 - RNA, 22 nt, Human
uguaugcuuuccuucuuucugg

SEQ ID NO: 763289 - RNA, 22 nt, Human
ugaagccagggacugacacuuc

SEQ ID NO: 763290 - RNA, 22 nt, Human
uacaaauggguuaaaauauagu

SEQ ID NO: 763291 - RNA, 22 nt, Human
gcuggagccaagcugcucuugg

SEQ ID NO: 763292 - RNA, 18 nt, Human
gaagggagcuggaaugca

SEQ ID NO: 763293 - RNA, 22 nt, Human
ccagggcauguccaagacuuag

SEQ ID NO: 763294 - RNA, 22 nt, Human
gagaggcauggaacagauucuu

SEQ ID NO: 763295 - RNA, 22 nt, Human
auguuuuaaauauguguguaaa

SEQ ID NO: 763296 - RNA, 22 nt, Human
aagcacaggaucuugaggagcg

SEQ ID NO: 763297 - RNA, 22 nt, Human
auguggcucacauagcuggaaa

SEQ ID NO: 763298 - RNA, 19 nt, Human
ccugggucugcagcauuca

SEQ ID NO: 763299 - RNA, 22 nt, Human
uggaagggagugacagucagag

SEQ ID NO: 763300 - RNA, 22 nt, Human
ucaugaacuuccuagccagacu

SEQ ID NO: 763301 - RNA, 22 nt, Human
cuguuucaugucuuccgcagcu

SEQ ID NO: 763302 - RNA, 22 nt, Human
gcagacacuugaggugggcuuu

SEQ ID NO: 763303 - RNA, 22 nt, Human
auuagcaauugugcaucuagua

SEQ ID NO: 763304 - RNA, 22 nt, Human
uacaguuuacaugagaggaagc

SEQ ID NO: 763305 - RNA, 22 nt, Human
accagcaagauuuugcuuugca

SEQ ID NO: 763306 - RNA, 22 nt, Human
aguggcaggaaaguggaagaga

SEQ ID NO: 763307 - RNA, 22 nt, Human
aacuacauagaaauuaguauuu

SEQ ID NO: 763308 - RNA, 22 nt, Human
auacagaauacuaauuccugag

SEQ ID NO: 763309 - RNA, 22 nt, Human
ucaguguucgcucagggacucc

SEQ ID NO: 763310 - RNA, 22 nt, Human
cguaugaaauuuuugacauuug

SEQ ID NO: 763311 - RNA, 22 nt, Human
ucaaaguccuugcuuuuucugu

SEQ ID NO: 763312 - RNA, 22 nt, Human
gagccccuucugcagucagguu

SEQ ID NO: 763313 - RNA, 22 nt, Human
uacauauccaggcugagaagau

SEQ ID NO: 763314 - RNA, 22 nt, Human
uuagauuuauaugugagaaugg

SEQ ID NO: 763315 - RNA, 22 nt, Human
aggccagggcacugcucuuuag

SEQ ID NO: 763316 - RNA, 22 nt, Human
uuuucagugggcaaugauguga

SEQ ID NO: 763317 - RNA, 17 nt, Human
agcaacuucucccacag

SEQ ID NO: 763318 - RNA, 22 nt, Human
uuuucucuuguuaauguacuga

SEQ ID NO: 763319 - RNA, 22 nt, Human
gacuggcucuaucuccuuggcg

SEQ ID NO: 763320 - RNA, 22 nt, Human
cccaggcuaguaugauaucagu

SEQ ID NO: 763321 - RNA, 17 nt, Human
ccuuucuucccagaggg

SEQ ID NO: 763322 - RNA, 17 nt, Human
gcucagaguacacgugu

SEQ ID NO: 763323 - RNA, 22 nt, Human
aucaauucuuaggaaaauagcu

SEQ ID NO: 763324 - RNA, 22 nt, Human
agccagcucccuccccugcagg

SEQ ID NO: 763325 - RNA, 23 nt, Human
aggaagagagagugccucuuucu

SEQ ID NO: 763326 - RNA, 23 nt, Human
ggacagggcccugcccuauggcc

SEQ ID NO: 763327 - RNA, 22 nt, Human
aaaucacagggucucuaaguau

SEQ ID NO: 763328 - RNA, 22 nt, Human
cuucuucauaggcaguccuguu

SEQ ID NO: 763329 - RNA, 22 nt, Human
aauugaacaaguaauagaagag

SEQ ID NO: 763330 - RNA, 22 nt, Human
caggcacacccacuggugcaga

SEQ ID NO: 763331 - RNA, 17 nt, Human
ucaggauccaggguucu

SEQ ID NO: 763332 - RNA, 22 nt, Human
uguugccuggggaagcucugau

SEQ ID NO: 763333 - RNA, 23 nt, Human
agcagcccaauggcaagcucugg

SEQ ID NO: 763334 - RNA, 17 nt, Human
acagucugccugacagu

SEQ ID NO: 763335 - RNA, 22 nt, Human
aucuguguaugugaccuuaucu

SEQ ID NO: 763336 - RNA, 22 nt, Human
aaggaagcagcaaugcaugauu

SEQ ID NO: 763337 - RNA, 22 nt, Human
uuugugaacacugcgcagaacu

SEQ ID NO: 763338 - RNA, 22 nt, Human
ugccucuguugagccuuggcug

SEQ ID NO: 763339 - RNA, 22 nt, Human
gaagacauguggauucuaguuu

SEQ ID NO: 763340 - RNA, 22 nt, Human
uucacauuugaaaggaaagaua

SEQ ID NO: 763341 - RNA, 22 nt, Human
uagguucagcuuccacugccua

SEQ ID NO: 763342 - RNA, 22 nt, Human
gucaggauguuuauucuccagu

SEQ ID NO: 763343 - RNA, 22 nt, Human
aggagaggucucccuuccccag

SEQ ID NO: 763344 - RNA, 22 nt, Human
gacuggaaagccuguccucaga

SEQ ID NO: 763345 - RNA, 22 nt, Human
caguuaaucuugccauuauauc

SEQ ID NO: 763346 - RNA, 22 nt, Human
cagagucaguauugaauugaaa

SEQ ID NO: 763347 - RNA, 22 nt, Human
ucauaaugaccccagaguccgc

SEQ ID NO: 763348 - RNA, 22 nt, Human
gggaagggcuccuuuuauugca

SEQ ID NO: 763349 - RNA, 22 nt, Human
uuugacaccaggagagaaaaca

SEQ ID NO: 763350 - RNA, 22 nt, Human
acacaugaaauaauauuaugca

SEQ ID NO: 763351 - RNA, 19 nt, Human
aaggcagaaguuggauaug

SEQ ID NO: 763352 - RNA, 22 nt, Human
gccugugaugcccccauaagua

SEQ ID NO: 763353 - RNA, 22 nt, Human
agagucauaguuuaacuuuugu

SEQ ID NO: 763354 - RNA, 22 nt, Human
uugcuuuguuacugcaguuucc

SEQ ID NO: 763355 - RNA, 22 nt, Human
augagugugaaguuagcucagu

SEQ ID NO: 763356 - RNA, 22 nt, Human
uaacaguaaaguaaguuagcuu

SEQ ID NO: 763357 - RNA, 22 nt, Human
uucauugucucuguuugccuuc

SEQ ID NO: 763358 - RNA, 22 nt, Human
ugacuuuaagcuaucugauucu

SEQ ID NO: 763359 - RNA, 21 nt, Human
ggagucuguggaugcuguuuc

SEQ ID NO: 763360 - RNA, 22 nt, Human
acagccaggacuuggcccucuu

SEQ ID NO: 763361 - RNA, 22 nt, Human
ucaugcccagagcaguaaauua

SEQ ID NO: 763362 - RNA, 22 nt, Human
agcaccugucacaagcagaagg

SEQ ID NO: 763363 - RNA, 22 nt, Human
ccugccagcugugggccagccu

SEQ ID NO: 763364 - RNA, 22 nt, Human
ugggagcucugagccugcuaug

SEQ ID NO: 763365 - RNA, 22 nt, Human
caggaaccuaaugaaggcucac

SEQ ID NO: 763366 - RNA, 22 nt, Human
uccaggcugcaaggccacaggg

SEQ ID NO: 763367 - RNA, 22 nt, Human
ugccugagguggucugcaaaug

SEQ ID NO: 763368 - RNA, 20 nt, Human
agguggcucuuccugggcuu

SEQ ID NO: 763369 - RNA, 22 nt, Human
augcugagguguguuuaauuua

SEQ ID NO: 763370 - RNA, 22 nt, Human
uacaauguucgcauucucucug

SEQ ID NO: 763371 - RNA, 22 nt, Human
cugcaggcucgaagacacggau

SEQ ID NO: 763372 - RNA, 22 nt, Human
uucaggauucugugucugacaa

SEQ ID NO: 763373 - RNA, 22 nt, Human
acaauuuuccccauagguuauc

SEQ ID NO: 763374 - RNA, 18 nt, Human
uaggaagcuuaauguuuu

SEQ ID NO: 763375 - RNA, 22 nt, Human
agggccagggaagcuguauuuu

SEQ ID NO: 763376 - RNA, 22 nt, Human
acuguguaugauauguacuggg

SEQ ID NO: 763377 - RNA, 22 nt, Human
gaacuaaaagcuaacaucaggc

SEQ ID NO: 763378 - RNA, 22 nt, Human
gcucacugcaaccucugcuucc

SEQ ID NO: 763379 - RNA, 22 nt, Human
aagaagaugguuaacuuucagu

SEQ ID NO: 763380 - RNA, 22 nt, Human
uacauggauguuauccuuacug

SEQ ID NO: 763381 - RNA, 22 nt, Human
gaaauauucuugucuuguuuuc

SEQ ID NO: 763382 - RNA, 22 nt, Human
gcuccugcagagauguuccaug

SEQ ID NO: 763383 - RNA, 22 nt, Human
gaagggcuuggcugggaggcca

SEQ ID NO: 763384 - RNA, 22 nt, Human
auuagugauaugugacuagacc

SEQ ID NO: 763385 - RNA, 22 nt, Human
cagcagagcugugugggaaggg

SEQ ID NO: 763386 - RNA, 22 nt, Human
ugguggcaacauugcuggagug

SEQ ID NO: 763387 - RNA, 22 nt, Human
cccagagaauuccacauagagg

SEQ ID NO: 763388 - RNA, 22 nt, Human
aguucacagcaaaguggggacc

SEQ ID NO: 763389 - RNA, 22 nt, Human
aauuuuauuaacuggauguagc

SEQ ID NO: 763390 - RNA, 22 nt, Human
uguacagagacuaccauuaaua

SEQ ID NO: 763391 - RNA, 22 nt, Human
uugcauugugauuacagaggug

SEQ ID NO: 763392 - RNA, 22 nt, Human
ggcuuugccuggaauuuccuug

SEQ ID NO: 763393 - RNA, 22 nt, Human
aaggccaugcacauccuaggca

SEQ ID NO: 763394 - RNA, 22 nt, Human
gugcaguugaagcauggggaga

SEQ ID NO: 763395 - RNA, 22 nt, Human
gcaucuaaaucacuuuaaugua

SEQ ID NO: 763396 - RNA, 22 nt, Human
guuuacuuuucauggagcauau

SEQ ID NO: 763397 - RNA, 22 nt, Human
gcaaugaggagugguagggaua

SEQ ID NO: 763398 - RNA, 22 nt, Human
uucuacaucacuuaacaugcua

SEQ ID NO: 763399 - RNA, 22 nt, Human
caagcaugucuucuuaagcaau

SEQ ID NO: 763400 - RNA, 22 nt, Human
uuugugugguggauacugggua

SEQ ID NO: 763401 - RNA, 18 nt, Human
ugagagcauucgaggcaa

SEQ ID NO: 763402 - RNA, 22 nt, Human
agucugcauucacagcaauuau

SEQ ID NO: 763403 - RNA, 22 nt, Human
augugacaguguuugacagaug

SEQ ID NO: 763404 - RNA, 22 nt, Human
cccagaggguggagguugcagu

SEQ ID NO: 763405 - RNA, 22 nt, Human
ccuuggcaaaccagggcagcug

SEQ ID NO: 763406 - RNA, 22 nt, Human
gucuugaaaaguggccaguuug

SEQ ID NO: 763407 - RNA, 18 nt, Human
uggcagguagacucaggu

SEQ ID NO: 763408 - RNA, 22 nt, Human
guaucuuuccacaucuucagua

SEQ ID NO: 763409 - RNA, 22 nt, Human
gguaggcagaucacugucuaug

SEQ ID NO: 763410 - RNA, 22 nt, Human
uagcacagacagaauggucaua

SEQ ID NO: 763411 - RNA, 22 nt, Human
auggcugcaguccgugcccugg

SEQ ID NO: 763412 - RNA, 22 nt, Human
accuggagggaaguucugacuu

SEQ ID NO: 763413 - RNA, 22 nt, Human
ggaaaucaaggggacaaauugu

SEQ ID NO: 763414 - RNA, 22 nt, Human
ccuuuuucaauauagaauugca

SEQ ID NO: 763415 - RNA, 22 nt, Human
aacaucagaaguagaagacuca

SEQ ID NO: 763416 - RNA, 22 nt, Human
aucaacaugaauuucucugaag

SEQ ID NO: 763417 - RNA, 21 nt, Human
aggauauuaggugauuugggu

SEQ ID NO: 763418 - RNA, 22 nt, Human
ucucugagcaugccauauugcu

SEQ ID NO: 763419 - RNA, 19 nt, Human
agugugagacuccaucuca

SEQ ID NO: 763420 - RNA, 18 nt, Human
agcagcugucagaaugcc

SEQ ID NO: 763421 - RNA, 22 nt, Human
cuccagggaggagcacggguuc

SEQ ID NO: 763422 - RNA, 22 nt, Human
caaugcacgcucagauuugacc

SEQ ID NO: 763423 - RNA, 22 nt, Human
cucugcuggugaccacugggcc

SEQ ID NO: 763424 - RNA, 22 nt, Human
ggugagcacugcccugggucuc

SEQ ID NO: 763425 - RNA, 22 nt, Human
augagacuaccuguaauguggc

SEQ ID NO: 763426 - RNA, 20 nt, Human
cccaggaguuugcucuuacu

SEQ ID NO: 763427 - RNA, 22 nt, Human
gcuccagcuccggcuccgaagc

SEQ ID NO: 763428 - RNA, 22 nt, Human
uccagaaaauucagaaauuguu

SEQ ID NO: 763429 - RNA, 22 nt, Human
agaguuaagacguacaugagug

SEQ ID NO: 763430 - RNA, 22 nt, Human
cugcagcugucucuacugggca

SEQ ID NO: 763431 - RNA, 22 nt, Human
ggccaggagaggagggcacuga

SEQ ID NO: 763432 - RNA, 22 nt, Human
guucaugugguuuuuaaaggau

SEQ ID NO: 763433 - RNA, 22 nt, Human
ugccuguguugauuacuuuguc

SEQ ID NO: 763434 - RNA, 22 nt, Human
cuuagggagaaugccucugcag

SEQ ID NO: 763435 - RNA, 22 nt, Human
ugcuggaauuauagaaaaauag

SEQ ID NO: 763436 - RNA, 22 nt, Human
ccaggacaggaguuggcuucgc

SEQ ID NO: 763437 - RNA, 22 nt, Human
uuuuccuucugauacuccauuu

SEQ ID NO: 763438 - RNA, 22 nt, Human
aucauaagacccagccaguauu

SEQ ID NO: 763439 - RNA, 22 nt, Human
cauggggagacaccuagggaaa

SEQ ID NO: 763440 - RNA, 23 nt, Human
aggcugcuuacugguaucagagc

SEQ ID NO: 763441 - RNA, 17 nt, Human
ugucuacucugacuaaa

SEQ ID NO: 763442 - RNA, 22 nt, Human
guggcccuaacaccguuucuca

SEQ ID NO: 763443 - RNA, 22 nt, Human
uaaaguucagugcaugaaugug

SEQ ID NO: 763444 - RNA, 22 nt, Human
gcuccagaguguggcaucuggg

SEQ ID NO: 763445 - RNA, 22 nt, Human
aagcaucuauauuccacuguga

SEQ ID NO: 763446 - RNA, 22 nt, Human
auggagccauuccugaagacuu

SEQ ID NO: 763447 - RNA, 22 nt, Human
uacaaucacccaaaaguggcuc

SEQ ID NO: 763448 - RNA, 22 nt, Human
uuucucauggaacauagcuccu

SEQ ID NO: 763449 - RNA, 22 nt, Human
agccacagcacauuguaagaaa

SEQ ID NO: 763450 - RNA, 22 nt, Human
uccuugggguaacuccagccug

SEQ ID NO: 763451 - RNA, 22 nt, Human
gcagugaaaaagugcacccugu

SEQ ID NO: 763452 - RNA, 22 nt, Human
uagcauuuauggucaugugucc

SEQ ID NO: 763453 - RNA, 22 nt, Human
guccugugagauucaugcucaa

SEQ ID NO: 763454 - RNA, 19 nt, Human
aguagcagaaagugcagug

SEQ ID NO: 763455 - RNA, 22 nt, Human
cugggacagagcagcagugggg

SEQ ID NO: 763456 - RNA, 22 nt, Human
cccucugaaccugguagcagaa

SEQ ID NO: 763457 - RNA, 21 nt, Human
aggaaugcugaggcucacuuu

SEQ ID NO: 763458 - RNA, 22 nt, Human
uggagcuggcagcggaaaaggg

SEQ ID NO: 763459 - RNA, 22 nt, Human
uaguacaguggagagcaaagaa

SEQ ID NO: 763460 - RNA, 22 nt, Human
uuguagacaucuguaucauuuu

SEQ ID NO: 763461 - RNA, 22 nt, Human
gggaaaaauaaugcacagauau

SEQ ID NO: 763462 - RNA, 22 nt, Human
uccuggccaggaugaccuaaca

SEQ ID NO: 763463 - RNA, 22 nt, Human
cugggcugucaauggcccucug

SEQ ID NO: 763464 - RNA, 22 nt, Human
aagucagaaauuauucaggaau

SEQ ID NO: 763465 - RNA, 22 nt, Human
accuggauuuugcuuagacaug

SEQ ID NO: 763466 - RNA, 23 nt, Human
aaucuggcugauguuuuuucucu

SEQ ID NO: 763467 - RNA, 22 nt, Human
auuaaggcugcacuggccuuaa

SEQ ID NO: 763468 - RNA, 22 nt, Human
ggcucuagagacucuagagaaa

SEQ ID NO: 763469 - RNA, 22 nt, Human
aggaaauaggaccagacaaagc

SEQ ID NO: 763470 - RNA, 22 nt, Human
agagucagaaagcagacagggg

SEQ ID NO: 763471 - RNA, 18 nt, Human
aaugugaauauuuacuuc

SEQ ID NO: 763472 - RNA, 22 nt, Human
gcugcuuuagaauugaaacaga

SEQ ID NO: 763473 - RNA, 22 nt, Human
agauuucacaugcugcucuauu

SEQ ID NO: 763474 - RNA, 22 nt, Human
acauuaguuucucagaucauuu

SEQ ID NO: 763475 - RNA, 19 nt, Human
aagagcagggaaagaauug

SEQ ID NO: 763476 - RNA, 22 nt, Human
cccugauguuuucucugccuuu

SEQ ID NO: 763477 - RNA, 17 nt, Human
cuucuagaaggcaaacu

SEQ ID NO: 763478 - RNA, 17 nt, Human
agcagggagucaaggga

SEQ ID NO: 763479 - RNA, 22 nt, Human
gcugagccacaggcagugcacu

SEQ ID NO: 763480 - RNA, 22 nt, Human
aaaccucuuaauggccuguaau

SEQ ID NO: 763481 - RNA, 22 nt, Human
agcuggagaugcccagcaccgg

SEQ ID NO: 763482 - RNA, 22 nt, Human
ucacugaaugcagauacgugac

SEQ ID NO: 763483 - RNA, 22 nt, Human
uggggugggguuacucauucug

SEQ ID NO: 763484 - RNA, 22 nt, Human
gcaggagcaaacugcagugugg

SEQ ID NO: 763485 - RNA, 22 nt, Human
acagacaugggccgcucuugag

SEQ ID NO: 763486 - RNA, 22 nt, Human
uggggacacagagguucguugg

SEQ ID NO: 763487 - RNA, 22 nt, Human
ugcagccugguggucacuggag

SEQ ID NO: 763488 - RNA, 22 nt, Human
aagaugcuugcaaauuucugaa

SEQ ID NO: 763489 - RNA, 22 nt, Human
caagaacaguuugccaaauugg

SEQ ID NO: 763490 - RNA, 22 nt, Human
aucuggcucgcuaggcucuggg

SEQ ID NO: 763491 - RNA, 22 nt, Human
acagcauggauaacaaggcacu

SEQ ID NO: 763492 - RNA, 22 nt, Human
aaaggagacagucuuaccugga

SEQ ID NO: 763493 - RNA, 22 nt, Human
cauuucccccucauguugcagc

SEQ ID NO: 763494 - RNA, 22 nt, Human
gggcccagcccucugcucacug

SEQ ID NO: 763495 - RNA, 22 nt, Human
cugugucugccugggauccauu

SEQ ID NO: 763496 - RNA, 22 nt, Human
gcucccacgcaauucuuuucag

SEQ ID NO: 763497 - RNA, 22 nt, Human
ugguaaagaaggcuagaucuga

SEQ ID NO: 763498 - RNA, 22 nt, Human
cuggagcccugaaugggcagga

SEQ ID NO: 763499 - RNA, 22 nt, Human
ucacuauguucggagaacucug

SEQ ID NO: 763500 - RNA, 22 nt, Human
acugacuguggauggcagcagc

SEQ ID NO: 763501 - RNA, 22 nt, Human
cuaggcuggagugcauuggcgu

SEQ ID NO: 763502 - RNA, 22 nt, Human
gggccccacuggggcugccugc

SEQ ID NO: 763503 - RNA, 22 nt, Human
uauucaagauugaacuggcaga

SEQ ID NO: 763504 - RNA, 22 nt, Human
ugggcugcuguuacaggggcug

SEQ ID NO: 763505 - RNA, 22 nt, Human
auacacauaucagguguauaca

SEQ ID NO: 763506 - RNA, 22 nt, Human
guacacacuauuuaaaguguuu

SEQ ID NO: 763507 - RNA, 22 nt, Human
guuugcauuccaauuuagggga

SEQ ID NO: 763508 - RNA, 22 nt, Human
ggcagaggugaaguucacaagg

SEQ ID NO: 763509 - RNA, 22 nt, Human
uaaauguagucaaaggagccuc

SEQ ID NO: 763510 - RNA, 22 nt, Human
aaauucuggccuaucacaguga

SEQ ID NO: 763511 - RNA, 22 nt, Human
ucccagaauccucacucuauca

SEQ ID NO: 763512 - RNA, 22 nt, Human
acagugcagugugaugaguauu

SEQ ID NO: 763513 - RNA, 22 nt, Human
ggaaauguaaucacagaggguu

SEQ ID NO: 763514 - RNA, 22 nt, Human
gagaauguggagccugugguug

SEQ ID NO: 763515 - RNA, 22 nt, Human
cagaagucacccucagaauaac

SEQ ID NO: 763516 - RNA, 22 nt, Human
gcaagaguggaacaaaggcagc

SEQ ID NO: 763517 - RNA, 22 nt, Human
acccucagacauauuccaucau

SEQ ID NO: 763518 - RNA, 22 nt, Human
guuagguagaaguuuacuuuga

SEQ ID NO: 763519 - RNA, 22 nt, Human
gcauucuuuuuaggagguuccu

SEQ ID NO: 763520 - RNA, 22 nt, Human
aauacauguuuucuacuauucu

SEQ ID NO: 763521 - RNA, 22 nt, Human
cagugacagguuccaugccgca

SEQ ID NO: 763522 - RNA, 22 nt, Human
cuaagguuggcaguggaauugg

SEQ ID NO: 763523 - RNA, 22 nt, Human
gagagcccuuagguuuagaguu

SEQ ID NO: 763524 - RNA, 22 nt, Human
ccuguacacaauuccgaggaua

SEQ ID NO: 763525 - RNA, 20 nt, Human
gccugagcuccgccuccugu

SEQ ID NO: 763526 - RNA, 22 nt, Human
aacaugauuucaugcauuuaga

SEQ ID NO: 763527 - RNA, 19 nt, Human
aguggcugggcagaagcaa

SEQ ID NO: 763528 - RNA, 22 nt, Human
aacuguagaagggacacaaaag

SEQ ID NO: 763529 - RNA, 22 nt, Human
gcuaguuucuugaauacucuaa

SEQ ID NO: 763530 - RNA, 22 nt, Human
ugcuggguagaaguauuagucu

SEQ ID NO: 763531 - RNA, 19 nt, Human
uugaaauuguuugauaugg

SEQ ID NO: 763532 - RNA, 22 nt, Human
uuccuguaugucagugaagagc

SEQ ID NO: 763533 - RNA, 22 nt, Human
aaaucaguucacguucugaggu

SEQ ID NO: 763534 - RNA, 22 nt, Human
cacagagacaugaugucauugc

SEQ ID NO: 763535 - RNA, 23 nt, Human
cauguguaauuucugguugggug

SEQ ID NO: 763536 - RNA, 22 nt, Human
acagauacaaauauacaaauac

SEQ ID NO: 763537 - RNA, 22 nt, Human
gcagggcuauuggaaggagaug

SEQ ID NO: 763538 - RNA, 22 nt, Human
gcagcccauaacauuugaggcc

SEQ ID NO: 763539 - RNA, 22 nt, Human
acugggcaauaaauucagagaa

SEQ ID NO: 763540 - RNA, 20 nt, Human
ggguccugacuuggucuccu

SEQ ID NO: 763541 - RNA, 19 nt, Human
cacagcgaagacaaggugg

SEQ ID NO: 763542 - RNA, 22 nt, Human
uccaaauugacaguagugauua

SEQ ID NO: 763543 - RNA, 22 nt, Human
ugcauggauaaaaguauauuau

SEQ ID NO: 763544 - RNA, 22 nt, Human
uauucucagugcuauaaguaga

SEQ ID NO: 763545 - RNA, 22 nt, Human
agacaguguguguauauauggu

SEQ ID NO: 763546 - RNA, 22 nt, Human
uggaagagggagcuggguggcc

SEQ ID NO: 763547 - RNA, 22 nt, Human
agcuuccuguugagagagggag

SEQ ID NO: 763548 - RNA, 22 nt, Human
guccuguuggugaauggcucuu

SEQ ID NO: 763549 - RNA, 22 nt, Human
cugggaaauugacacugauaaa

SEQ ID NO: 763550 - RNA, 22 nt, Human
auggcagaauccauaguaggug

SEQ ID NO: 763551 - RNA, 22 nt, Human
cagcuccagccaccggggggug

SEQ ID NO: 763552 - RNA, 22 nt, Human
aagcaaagacaguuugagugga

SEQ ID NO: 763553 - RNA, 22 nt, Human
gacaagacuauguagaaaguau

SEQ ID NO: 763554 - RNA, 22 nt, Human
agaagcacuagaggguauggaa

SEQ ID NO: 763555 - RNA, 22 nt, Human
ccugcagguuucccccggacgg

SEQ ID NO: 763556 - RNA, 22 nt, Human
auagcagaaaccaagcuucuuc

SEQ ID NO: 763557 - RNA, 22 nt, Human
aauuaagaaaauguuuuaugau

SEQ ID NO: 763558 - RNA, 22 nt, Human
cacauugcagcuucuuuuggcu

SEQ ID NO: 763559 - RNA, 22 nt, Human
uuguccugucaggcugggggcu

SEQ ID NO: 763560 - RNA, 23 nt, Human
ucacaucugccguaguguauucu

SEQ ID NO: 763561 - RNA, 22 nt, Human
aaagcuauucaacacgaacaug

SEQ ID NO: 763562 - RNA, 22 nt, Human
caucugcucugucugccauguu

SEQ ID NO: 763563 - RNA, 22 nt, Human
ugaggccacaguaucagaacag

SEQ ID NO: 763564 - RNA, 22 nt, Human
ccuggcugagggaccucgggua

SEQ ID NO: 763565 - RNA, 22 nt, Human
uuuaugagcaaugcugagggga

SEQ ID NO: 763566 - RNA, 22 nt, Human
uggcaaagacugcaaggacuuu

SEQ ID NO: 763567 - RNA, 22 nt, Human
ggcgcugucgugagcucgcccg

SEQ ID NO: 763568 - RNA, 22 nt, Human
ugaggcugaaacuggcgauaga

SEQ ID NO: 763569 - RNA, 22 nt, Human
auuuuaguaccucaaguaucca

SEQ ID NO: 763570 - RNA, 22 nt, Human
ucuagaaacaugacauugaucu

SEQ ID NO: 763571 - RNA, 22 nt, Human
gccagaagggguggauccaggc

SEQ ID NO: 763572 - RNA, 22 nt, Human
aggauaaauucuccaaagugug

SEQ ID NO: 763573 - RNA, 22 nt, Human
augccugccauuuagaagucuu

SEQ ID NO: 763574 - RNA, 22 nt, Human
cuccucucaggcuggauggcgc

SEQ ID NO: 763575 - RNA, 22 nt, Human
aaacuagagcaugugaguggga

SEQ ID NO: 763576 - RNA, 22 nt, Human
cacaauuuccauugagcagcag

SEQ ID NO: 763577 - RNA, 22 nt, Human
uuacaagaugggaaagggaagu

SEQ ID NO: 763578 - RNA, 21 nt, Human
auaaauucugagaggcucugc

SEQ ID NO: 763579 - RNA, 22 nt, Human
cuggagucacucauguagcugc

SEQ ID NO: 763580 - RNA, 22 nt, Human
uuccggaagguucucuagaauu

SEQ ID NO: 763581 - RNA, 22 nt, Human
agucugucugucacuucugcag

SEQ ID NO: 763582 - RNA, 18 nt, Human
uucaccagugugaugggu

SEQ ID NO: 763583 - RNA, 22 nt, Human
agccaccuccugcucugcucac

SEQ ID NO: 763584 - RNA, 22 nt, Human
gccagcucaguuucaaaguagg

SEQ ID NO: 763585 - RNA, 22 nt, Human
cugccaggccuggggugcuguc

SEQ ID NO: 763586 - RNA, 22 nt, Human
cagagcugauuggauccagaga

SEQ ID NO: 763587 - RNA, 22 nt, Human
ugaagccaaggaugccuuucuc

SEQ ID NO: 763588 - RNA, 22 nt, Human
gaagaauauauaaugauuuugu

SEQ ID NO: 763589 - RNA, 22 nt, Human
ugcuggaacucagugaaucauu

SEQ ID NO: 763590 - RNA, 22 nt, Human
ccugcucaacgaauauggcgau

SEQ ID NO: 763591 - RNA, 22 nt, Human
ucccugccuccuggcagugcca

SEQ ID NO: 763592 - RNA, 22 nt, Human
gcacaaguuucuucauuguuca

SEQ ID NO: 763593 - RNA, 22 nt, Human
agauauugugcauacugcuguu

SEQ ID NO: 763594 - RNA, 22 nt, Human
augucuguuuauccuucaagau

SEQ ID NO: 763595 - RNA, 22 nt, Human
acugggcugguuaguuuuacua

SEQ ID NO: 763596 - RNA, 22 nt, Human
ccaggaguggcuggugaccuuc

SEQ ID NO: 763597 - RNA, 22 nt, Human
caguggggggacugaggccuga

SEQ ID NO: 763598 - RNA, 22 nt, Human
caguucugguuugcagauauau

SEQ ID NO: 763599 - RNA, 22 nt, Human
ccacaagacucugucagcauaa

SEQ ID NO: 763600 - RNA, 22 nt, Human
aauuuacacuucauuuggaggg

SEQ ID NO: 763601 - RNA, 22 nt, Human
ucugagaaugguggauguggug

SEQ ID NO: 763602 - RNA, 22 nt, Human
uuucagaguuaguagagcaugu

SEQ ID NO: 763603 - RNA, 22 nt, Human
aagugucugcuggcucuacccu

SEQ ID NO: 763604 - RNA, 22 nt, Human
ggucagguuuuuaggagugacc

SEQ ID NO: 763605 - RNA, 22 nt, Human
cuggcuuuguauaguucccuga

SEQ ID NO: 763606 - RNA, 22 nt, Human
aagugcauacacuaguuaauug

SEQ ID NO: 763607 - RNA, 22 nt, Human
cagagccagcaguggggacagg

SEQ ID NO: 763608 - RNA, 22 nt, Human
gagcagcugagcuggaaugaga

SEQ ID NO: 763609 - RNA, 21 nt, Human
agagaagggauuccaggcccu

SEQ ID NO: 763610 - RNA, 22 nt, Human
agguagaagagcaaggaauaac

SEQ ID NO: 763611 - RNA, 22 nt, Human
acuaaagaugucuaaauauauu

SEQ ID NO: 763612 - RNA, 22 nt, Human
uagagcuguaucaaagagccuu

SEQ ID NO: 763613 - RNA, 22 nt, Human
cuguggcucuuuaguugagcac

SEQ ID NO: 763614 - RNA, 21 nt, Human
acagcaagccuuccuuucagg

SEQ ID NO: 763615 - RNA, 22 nt, Human
gaacuuuauaacuguaaauguc

SEQ ID NO: 763616 - RNA, 22 nt, Human
gcucuuugcacagcucugcccu

SEQ ID NO: 763617 - RNA, 22 nt, Human
aggcuuauagcuuauauuuaag

SEQ ID NO: 763618 - RNA, 22 nt, Human
uguggggaccuggcugccaccc

SEQ ID NO: 763619 - RNA, 22 nt, Human
ucaugcaagaauaauaggaagg

SEQ ID NO: 763620 - RNA, 22 nt, Human
uagauucuggagagacagcagu

SEQ ID NO: 763621 - RNA, 22 nt, Human
ugccagaagugcuuuauaagug

SEQ ID NO: 763622 - RNA, 22 nt, Human
uuaguuuucccaucuuuauggu

SEQ ID NO: 763623 - RNA, 22 nt, Human
ucaguuaccugacagugguuau

SEQ ID NO: 763624 - RNA, 22 nt, Human
cagcaucuucuagauccaggcu

SEQ ID NO: 763625 - RNA, 22 nt, Human
uguauacauacauaugugugug

SEQ ID NO: 763626 - RNA, 22 nt, Human
agaguuuggagagggugaggca

SEQ ID NO: 763627 - RNA, 22 nt, Human
ccugaggucaugguccaguguu

SEQ ID NO: 763628 - RNA, 22 nt, Human
augcuaaagggguaggccuccu

SEQ ID NO: 763629 - RNA, 21 nt, Human
cuaacuuugaguccuggcccc

SEQ ID NO: 763630 - RNA, 22 nt, Human
agacacagucugucuggaggag

SEQ ID NO: 763631 - RNA, 22 nt, Human
gcauggccucugugcuuguugc

SEQ ID NO: 763632 - RNA, 22 nt, Human
agcugcuggggagggcagacac

SEQ ID NO: 763633 - RNA, 22 nt, Human
acccagcaaagauaaacuuaug

SEQ ID NO: 763634 - RNA, 22 nt, Human
agauugauagauguuucuaaaa

SEQ ID NO: 763635 - RNA, 22 nt, Human
caguccugggcacagcccuggg

SEQ ID NO: 763636 - RNA, 22 nt, Human
gcugcaggcggccgugguggcg

SEQ ID NO: 763637 - RNA, 22 nt, Human
aggcuaggccuugcccuggaac

SEQ ID NO: 763638 - RNA, 22 nt, Human
uaaccuuugaccuugcuugugc

SEQ ID NO: 763639 - RNA, 22 nt, Human
uuauuuuguagcucugaucuuu

SEQ ID NO: 763640 - RNA, 22 nt, Human
agcagccagagucugaacauua

SEQ ID NO: 763641 - RNA, 22 nt, Human
gcucccaggaagagaagggcca

SEQ ID NO: 763642 - RNA, 17 nt, Human
uguagcuucuccuucuc

SEQ ID NO: 763643 - RNA, 19 nt, Human
auauagcauuauucaauuu

SEQ ID NO: 763644 - RNA, 20 nt, Human
uggcuccugcgguggaacca

SEQ ID NO: 763645 - RNA, 22 nt, Human
gaugguuugguaaaaguauguu

SEQ ID NO: 763646 - RNA, 19 nt, Human
uaucuguuuccugcuuguc

SEQ ID NO: 763647 - RNA, 22 nt, Human
auucugcuuaagggaggcuguc

SEQ ID NO: 763648 - RNA, 22 nt, Human
gagggucuuaccuaagcagggu

SEQ ID NO: 763649 - RNA, 22 nt, Human
ccaggcugcuuuauuacucugu

SEQ ID NO: 763650 - RNA, 22 nt, Human
caggcccagcccuuagccaggu

SEQ ID NO: 763651 - RNA, 22 nt, Human
cucagugugagugagaagugca

SEQ ID NO: 763652 - RNA, 22 nt, Human
agcugccaccucugccuuuggg

SEQ ID NO: 763653 - RNA, 22 nt, Human
gggaaggcaccaugguguucca

SEQ ID NO: 763654 - RNA, 22 nt, Human
uaacucuagucccaggcaugaa

SEQ ID NO: 763655 - RNA, 22 nt, Human
gccuuuaucuuccugauucaga

SEQ ID NO: 763656 - RNA, 22 nt, Human
uuacaaaguuuaagguggcacu

SEQ ID NO: 763657 - RNA, 21 nt, Human
cugcaggugcugccaucaggg

SEQ ID NO: 763658 - RNA, 22 nt, Human
uggaucucggcaaugcgggacu

SEQ ID NO: 763659 - RNA, 22 nt, Human
cugcuuggaggccugggugcua

SEQ ID NO: 763660 - RNA, 22 nt, Human
cuuuacaaauuagcucucggga

SEQ ID NO: 763661 - RNA, 22 nt, Human
aaaggcacacacuccuuguuau

SEQ ID NO: 763662 - RNA, 22 nt, Human
ucaggagcagcaugggugagag

SEQ ID NO: 763663 - RNA, 22 nt, Human
agguggcauuuacaccauggga

SEQ ID NO: 763664 - RNA, 22 nt, Human
uugauguugcucuuaacaguau

SEQ ID NO: 763665 - RNA, 22 nt, Human
aacacauauuuuugcugagcau

SEQ ID NO: 763666 - RNA, 22 nt, Human
agaaaugaaaccaaagccuaga

SEQ ID NO: 763667 - RNA, 22 nt, Human
ucagccuccgaaagugcuggga

SEQ ID NO: 763668 - RNA, 22 nt, Human
uauuucuggcuuugagggugau

SEQ ID NO: 763669 - RNA, 22 nt, Human
gcuuacaaggguaggaagucua

SEQ ID NO: 763670 - RNA, 22 nt, Human
cugccucuguugggcauggucu

SEQ ID NO: 763671 - RNA, 22 nt, Human
uggcuucuagagcccauccuuc

SEQ ID NO: 763672 - RNA, 22 nt, Human
agagacugcgugucagcgcugg

SEQ ID NO: 763673 - RNA, 22 nt, Human
cagggugcugcaccaucccuca

SEQ ID NO: 763674 - RNA, 22 nt, Human
agcaggacaauaugggaucagg

SEQ ID NO: 763675 - RNA, 22 nt, Human
caggaaugaggucguaaguguc

SEQ ID NO: 763676 - RNA, 20 nt, Human
uuaguugaguagcuccugaa

SEQ ID NO: 763677 - RNA, 22 nt, Human
uccauucuuuugcugucuuccu

SEQ ID NO: 763678 - RNA, 22 nt, Human
ugaauaugauugcaaauuuggc

SEQ ID NO: 763679 - RNA, 22 nt, Human
uuugagaaaugggcucugugcu

SEQ ID NO: 763680 - RNA, 22 nt, Human
cugcacugaagaaaggagcucu

SEQ ID NO: 763681 - RNA, 22 nt, Human
auacagagaagggguagaggau

SEQ ID NO: 763682 - RNA, 22 nt, Human
ggcagcaggagccaucugguag

SEQ ID NO: 763683 - RNA, 22 nt, Human
ggccucagagaaggcugugcgg

SEQ ID NO: 763684 - RNA, 23 nt, Human
ggaggucagugccugagggugag

SEQ ID NO: 763685 - RNA, 22 nt, Human
gcaagacaugucuaagguuuaa

SEQ ID NO: 763686 - RNA, 22 nt, Human
gggcuggaccgcucgccucccu

SEQ ID NO: 763687 - RNA, 22 nt, Human
aagucaaaccuugcucacagga

SEQ ID NO: 763688 - RNA, 22 nt, Human
uaguccucagcugaacugcugc

SEQ ID NO: 763689 - RNA, 22 nt, Human
aggcucugcagaccccagcugu

SEQ ID NO: 763690 - RNA, 22 nt, Human
caggcacaagaagcaaauguua

SEQ ID NO: 763691 - RNA, 22 nt, Human
acaagggauuguugaguagucu

SEQ ID NO: 763692 - RNA, 22 nt, Human
caaugcuuuuguucuuuacuca

SEQ ID NO: 763693 - RNA, 22 nt, Human
uagaaagacaaugggaagugcu

SEQ ID NO: 763694 - RNA, 22 nt, Human
gagaaggauguggcucauagcu

SEQ ID NO: 763695 - RNA, 22 nt, Human
cugggcgcguccccugaggcgg

SEQ ID NO: 763696 - RNA, 22 nt, Human
ucucagggcaauucucagcgac

SEQ ID NO: 763697 - RNA, 22 nt, Human
guguuaaugaaaaacaacucau

SEQ ID NO: 763698 - RNA, 22 nt, Human
ucugaacagaaaagaugcacaa

SEQ ID NO: 763699 - RNA, 22 nt, Human
cugaagcaggccuacuucauug

SEQ ID NO: 763700 - RNA, 22 nt, Human
agcagggcuccauuucacugcc

SEQ ID NO: 763701 - RNA, 22 nt, Human
auguaacuguuauauuuuguug

SEQ ID NO: 763702 - RNA, 22 nt, Human
aggacuggugccagacaaggua

SEQ ID NO: 763703 - RNA, 22 nt, Human
gaccacugaaugcacuucuaau

SEQ ID NO: 763704 - RNA, 18 nt, Human
cucuguguuggugugaag

SEQ ID NO: 763705 - RNA, 22 nt, Human
ucaaggcaaaguaaauauucaa

SEQ ID NO: 763706 - RNA, 22 nt, Human
uccuuaacaagauggcauuugu

SEQ ID NO: 763707 - RNA, 22 nt, Human
uuccagaaaacgcuuuauuuag

SEQ ID NO: 763708 - RNA, 23 nt, Human
augcaggguuacagggcugacuu

SEQ ID NO: 763709 - RNA, 22 nt, Human
ccugagaccaaguugcagccau

SEQ ID NO: 763710 - RNA, 22 nt, Human
agcuaaggagcaaguaggaguu

SEQ ID NO: 763711 - RNA, 21 nt, Human
ugcaccuguucacugcaguuc

SEQ ID NO: 763712 - RNA, 22 nt, Human
agcaggcuuacuuucugauuag

SEQ ID NO: 763713 - RNA, 22 nt, Human
ggcucuggggccuccucccuug

SEQ ID NO: 763714 - RNA, 22 nt, Human
uuacaaagagugccagagugug

SEQ ID NO: 763715 - RNA, 22 nt, Human
aaugcacaaaaauuguauguaa

SEQ ID NO: 763716 - RNA, 22 nt, Human
uucuggcuuaguuguuguauau

SEQ ID NO: 763717 - RNA, 22 nt, Human
uccagcucccacucucacugcu

SEQ ID NO: 763718 - RNA, 22 nt, Human
gaagcacauggcugugagcaac

SEQ ID NO: 763719 - RNA, 22 nt, Human
aaagguuuucugacccuuagua

SEQ ID NO: 763720 - RNA, 22 nt, Human
acaggcagugggccagauuugu

SEQ ID NO: 763721 - RNA, 22 nt, Human
cacacaucuuaucccaguuauu

SEQ ID NO: 763722 - RNA, 22 nt, Human
ucauugcacuccagccugggca

SEQ ID NO: 763723 - RNA, 22 nt, Human
agaaugucuaaguguucagccc

SEQ ID NO: 763724 - RNA, 18 nt, Human
caugggugacagguggau

SEQ ID NO: 763725 - RNA, 22 nt, Human
uuacacugacagcugaaaagca

SEQ ID NO: 763726 - RNA, 19 nt, Human
cuguccuuggcugcacugu

SEQ ID NO: 763727 - RNA, 22 nt, Human
gcaaagcacacuggagaugucg

SEQ ID NO: 763728 - RNA, 22 nt, Human
uccuggaggggacagcaugggc

SEQ ID NO: 763729 - RNA, 22 nt, Human
agcagggguaacagaaggaaag

SEQ ID NO: 763730 - RNA, 22 nt, Human
uccacaguuuugccacuagcug

SEQ ID NO: 763731 - RNA, 22 nt, Human
gaggaagccccauugaagccag

SEQ ID NO: 763732 - RNA, 22 nt, Human
guggcuuuguuuccaaaugaaa

SEQ ID NO: 763733 - RNA, 22 nt, Human
ccugaguccccucauucacucu

SEQ ID NO: 763734 - RNA, 22 nt, Human
cagcggccggugaggaagggga

SEQ ID NO: 763735 - RNA, 22 nt, Human
caugaggucagggggagccggu

SEQ ID NO: 763736 - RNA, 22 nt, Human
gaggcugucuguuagccuggga

SEQ ID NO: 763737 - RNA, 22 nt, Human
ugagccccggaguuucaggcug

SEQ ID NO: 763738 - RNA, 22 nt, Human
uuguccuuuaauguuuaguauu

SEQ ID NO: 763739 - RNA, 22 nt, Human
ggcugcagauuguagucuguua

SEQ ID NO: 763740 - RNA, 22 nt, Human
ugcaggaaauuccaggguggcc

SEQ ID NO: 763741 - RNA, 22 nt, Human
uucauacuguuuaaguucuguu

SEQ ID NO: 763742 - RNA, 22 nt, Human
ccagguggugaaagugggcccu

SEQ ID NO: 763743 - RNA, 22 nt, Human
ccuuuagaauacagacuuucua

SEQ ID NO: 763744 - RNA, 22 nt, Human
augaaacacacacgcgcauacu

SEQ ID NO: 763745 - RNA, 22 nt, Human
uuccaugaaauguguuaugcuu

SEQ ID NO: 763746 - RNA, 22 nt, Human
uccucacagaugggugcauagc

SEQ ID NO: 763747 - RNA, 22 nt, Human
agcuguguguuugucaugggcg

SEQ ID NO: 763748 - RNA, 22 nt, Human
cauuuguaauacugacuugcag

SEQ ID NO: 763749 - RNA, 22 nt, Human
aguuuacacuaugaaaagacua

SEQ ID NO: 763750 - RNA, 22 nt, Human
cacagcugccaugcagucagug

SEQ ID NO: 763751 - RNA, 22 nt, Human
ucacauuuguguuuuauuagag

SEQ ID NO: 763752 - RNA, 22 nt, Human
guaacacuagcucugucacuuu

SEQ ID NO: 763753 - RNA, 22 nt, Human
cuucacugcagucauggcucug

SEQ ID NO: 763754 - RNA, 22 nt, Human
ccucuguggccuuggaccagcu

SEQ ID NO: 763755 - RNA, 22 nt, Human
uuacaaucaucuaggauaaaga

SEQ ID NO: 763756 - RNA, 22 nt, Human
aagggcucacccaacucacuuc

SEQ ID NO: 763757 - RNA, 20 nt, Human
uguguaugugcacaugcgaa

SEQ ID NO: 763758 - RNA, 22 nt, Human
gugcaccagucacaugggcaga

SEQ ID NO: 763759 - RNA, 21 nt, Human
uuggccuuugucucagacacu

SEQ ID NO: 763760 - RNA, 19 nt, Human
aucugaaguaggugcagcu

SEQ ID NO: 763761 - RNA, 22 nt, Human
gggaucagcaagccacugcacc

SEQ ID NO: 763762 - RNA, 22 nt, Human
agucaggagauauuuugauaug

SEQ ID NO: 763763 - RNA, 22 nt, Human
uccugggcugcagggaagagca

SEQ ID NO: 763764 - RNA, 22 nt, Human
uugacuucagaauguugauggu

SEQ ID NO: 763765 - RNA, 22 nt, Human
uaaaucacaucgaaaucugggu

SEQ ID NO: 763766 - RNA, 22 nt, Human
ccugccuuccagccuugggcuc

SEQ ID NO: 763767 - RNA, 22 nt, Human
uucuguaucucuguguuucuug

SEQ ID NO: 763768 - RNA, 22 nt, Human
gaagaaguauuuuuguccuguu

SEQ ID NO: 763769 - RNA, 22 nt, Human
ucuuugaauacaggaagcauga

SEQ ID NO: 763770 - RNA, 22 nt, Human
gggcggugccugucuccgaagc

SEQ ID NO: 763771 - RNA, 22 nt, Human
aaaccacuccugauucacuuca

SEQ ID NO: 763772 - RNA, 22 nt, Human
agagccuguaacaucuuucuua

SEQ ID NO: 763773 - RNA, 22 nt, Human
aguggcaguggcugggcagagc

SEQ ID NO: 763774 - RNA, 21 nt, Human
auccauucuccgguuaaugag

SEQ ID NO: 763775 - RNA, 22 nt, Human
ugcugagggcuguuaaggaagc

SEQ ID NO: 763776 - RNA, 22 nt, Human
ccugcuggccacugcuccaccu

SEQ ID NO: 763777 - RNA, 22 nt, Human
gcugcugcugaggaugcaccug

SEQ ID NO: 763778 - RNA, 22 nt, Human
agaagucagccacagugggaga

SEQ ID NO: 763779 - RNA, 22 nt, Human
auguaacauaugugaucgcauu

SEQ ID NO: 763780 - RNA, 21 nt, Human
gccugggaaaucugggaagcc

SEQ ID NO: 763781 - RNA, 22 nt, Human
uauggcuuuaaauugaaggagu

SEQ ID NO: 763782 - RNA, 22 nt, Human
gcagcccaggcucgcucacugc

SEQ ID NO: 763783 - RNA, 22 nt, Human
ggcugagccuggagcaucuggu

SEQ ID NO: 763784 - RNA, 22 nt, Human
gaauugcuugugaagugugucu

SEQ ID NO: 763785 - RNA, 22 nt, Human
gaagauuucaguuaaguaucua

SEQ ID NO: 763786 - RNA, 22 nt, Human
cuguaaaacugcuuaaguaugc

SEQ ID NO: 763787 - RNA, 22 nt, Human
acugucuuguuccaagacuaaa

SEQ ID NO: 763788 - RNA, 22 nt, Human
gaauacacgcacgacacggggg

SEQ ID NO: 763789 - RNA, 22 nt, Human
aaagaacagauguguggugcau

SEQ ID NO: 763790 - RNA, 22 nt, Human
uucuuagaugauuaaugauggg

SEQ ID NO: 763791 - RNA, 22 nt, Human
uagugcuuaauaaauuucagaa

SEQ ID NO: 763792 - RNA, 22 nt, Human
ugucaauaacauuuacuucuau

SEQ ID NO: 763793 - RNA, 22 nt, Human
gcugccugguuucucagcugca

SEQ ID NO: 763794 - RNA, 22 nt, Human
uaggugagggagcauugugaga

SEQ ID NO: 763795 - RNA, 22 nt, Human
cagaugaacuaggcugcacuug

SEQ ID NO: 763796 - RNA, 22 nt, Human
cuuucuaauucucccauagucu

SEQ ID NO: 763797 - RNA, 22 nt, Human
augucugcuauucauagggaaa

SEQ ID NO: 763798 - RNA, 22 nt, Human
ugaauuuaccuugccuauauuu

SEQ ID NO: 763799 - RNA, 22 nt, Human
uucuugaauagggauugauaaa

SEQ ID NO: 763800 - RNA, 22 nt, Human
uuauuagagugcuuugagaaag

SEQ ID NO: 763801 - RNA, 21 nt, Human
uuuaucaucacgagcuugagc

SEQ ID NO: 763802 - RNA, 22 nt, Human
gagugguuagaaguaguguggc

SEQ ID NO: 763803 - RNA, 19 nt, Human
agacaguggcuaggacuua

SEQ ID NO: 763804 - RNA, 22 nt, Human
aaccagcuaaacuuugcucgaa

SEQ ID NO: 763805 - RNA, 22 nt, Human
ucagcucuaccugggagcuguc

SEQ ID NO: 763806 - RNA, 21 nt, Human
agguacaggucuugugagucu

SEQ ID NO: 763807 - RNA, 22 nt, Human
ugucacaucaggugguggcugu

SEQ ID NO: 763808 - RNA, 19 nt, Human
ucauggaagaaaugugaua

SEQ ID NO: 763809 - RNA, 22 nt, Human
acccgcccucagccuuaccgug

SEQ ID NO: 763810 - RNA, 22 nt, Human
ccauggagcgggugagugagug

SEQ ID NO: 763811 - RNA, 22 nt, Human
ccagccacagcuuccagcuccu

SEQ ID NO: 763812 - RNA, 22 nt, Human
uuguaacagcuguuuauauagu

SEQ ID NO: 763813 - RNA, 22 nt, Human
ugaggggccagaccccaccuag

SEQ ID NO: 763814 - RNA, 22 nt, Human
cugcagugaggauucuuaggug

SEQ ID NO: 763815 - RNA, 21 nt, Human
guucugaguuagaguuggcca

SEQ ID NO: 763816 - RNA, 22 nt, Human
ggcagcuccucaaaaaauuaaa

SEQ ID NO: 763817 - RNA, 22 nt, Human
gucacuuugaagcuguuuuuag

SEQ ID NO: 763818 - RNA, 22 nt, Human
auugacuagagucacaguugca

SEQ ID NO: 763819 - RNA, 22 nt, Human
uuguccugugucuguuuggauu

SEQ ID NO: 763820 - RNA, 22 nt, Human
uuugcauuuccagaguagcaga

SEQ ID NO: 763821 - RNA, 22 nt, Human
gcucacuuaauuucaugcuaca

SEQ ID NO: 763822 - RNA, 22 nt, Human
gaagaugugggaacugcugaaa

SEQ ID NO: 763823 - RNA, 22 nt, Human
uguguguguuuauaaaucuaaa

SEQ ID NO: 763824 - RNA, 22 nt, Human
agagacugcuuuauauuguacu

SEQ ID NO: 763825 - RNA, 22 nt, Human
gcgggggcggcgcagaccucag

SEQ ID NO: 763826 - RNA, 22 nt, Human
acaaacugaauggguuuucugu

SEQ ID NO: 763827 - RNA, 22 nt, Human
gcaccugggcaaggauucagag

SEQ ID NO: 763828 - RNA, 20 nt, Human
uucugggaauuggguagcug

SEQ ID NO: 763829 - RNA, 22 nt, Human
uggcugaggcacagcugccgcc

SEQ ID NO: 763830 - RNA, 22 nt, Human
aagaugguggccagaguggaaa

SEQ ID NO: 763831 - RNA, 20 nt, Human
uggcagaguugucccaccca

SEQ ID NO: 763832 - RNA, 22 nt, Human
aaggucacugaucaguugagua

SEQ ID NO: 763833 - RNA, 22 nt, Human
cuguuggacuuuucaaggucug

SEQ ID NO: 763834 - RNA, 22 nt, Human
uggcuccagcccugagcaagcu

SEQ ID NO: 763835 - RNA, 22 nt, Human
cugagcagaggucaagauacuu

SEQ ID NO: 763836 - RNA, 22 nt, Human
ugcuuucacuucucugcagcca

SEQ ID NO: 763837 - RNA, 22 nt, Human
ucagauuuccuguugaagaagu

SEQ ID NO: 763838 - RNA, 22 nt, Human
gaccagagaaaggcacuggaag

SEQ ID NO: 763839 - RNA, 22 nt, Human
agaggggcccgguucuccgucu

SEQ ID NO: 763840 - RNA, 22 nt, Human
uuuauaguagcaugauuuauag

SEQ ID NO: 763841 - RNA, 22 nt, Human
cugcuggggaggcgccucgacg

SEQ ID NO: 763842 - RNA, 22 nt, Human
aaucagagcccucugagcuuca

SEQ ID NO: 763843 - RNA, 22 nt, Human
aucagcugaugaauggaugaau

SEQ ID NO: 763844 - RNA, 22 nt, Human
caucccugucugccacucugaa

SEQ ID NO: 763845 - RNA, 22 nt, Human
ggcuccaaagggcagugugagg

SEQ ID NO: 763846 - RNA, 22 nt, Human
gggaccugcgccacucacuguc

SEQ ID NO: 763847 - RNA, 22 nt, Human
acauuuaacccucagguuucug

SEQ ID NO: 763848 - RNA, 22 nt, Human
uguugaagauaaaguucucauu

SEQ ID NO: 763849 - RNA, 22 nt, Human
ugggagcaaaugacugggagau

SEQ ID NO: 763850 - RNA, 22 nt, Human
ucugugugcccaccugacaccu

SEQ ID NO: 763851 - RNA, 22 nt, Human
uacuguuauauauagcagcagu

SEQ ID NO: 763852 - RNA, 22 nt, Human
agaggagguccuuuucugaugu

SEQ ID NO: 763853 - RNA, 22 nt, Human
aagagcuggaguuugcagcccu

SEQ ID NO: 763854 - RNA, 22 nt, Human
caccaugcuugauuuguaaugu

SEQ ID NO: 763855 - RNA, 22 nt, Human
uccugggacucaacuuagaagg

SEQ ID NO: 763856 - RNA, 22 nt, Human
ucauacauucagcagauauuug

SEQ ID NO: 763857 - RNA, 22 nt, Human
ggaaacuuguuauuguauuuuc

SEQ ID NO: 763858 - RNA, 22 nt, Human
auuuaacaagacagagaacugg

SEQ ID NO: 763859 - RNA, 22 nt, Human
augggcugaggugggauagaag

SEQ ID NO: 763860 - RNA, 22 nt, Human
aaacucucuuuucuucaguagg

SEQ ID NO: 763861 - RNA, 22 nt, Human
aacugcuugaugaagcucccac

SEQ ID NO: 763862 - RNA, 22 nt, Human
uucauuugggaugagucagaag

SEQ ID NO: 763863 - RNA, 22 nt, Human
auuccagugugcuuccuugcua

SEQ ID NO: 763864 - RNA, 22 nt, Human
ccagcucuagccccauguggcu

SEQ ID NO: 763865 - RNA, 22 nt, Human
ggcuuugcaaaaucggcuucug

SEQ ID NO: 763866 - RNA, 23 nt, Human
caucaaguacuuuugacaagugu

SEQ ID NO: 763867 - RNA, 22 nt, Human
aagaacauaaacagaaggacag

SEQ ID NO: 763868 - RNA, 19 nt, Human
uuucucucccucaucccga

SEQ ID NO: 763869 - RNA, 22 nt, Human
uggucucuccaugcccuccacc

SEQ ID NO: 763870 - RNA, 22 nt, Human
gaagagcugugauucaggcuua

SEQ ID NO: 763871 - RNA, 21 nt, Human
cagugagguccccagccuagg

SEQ ID NO: 763872 - RNA, 20 nt, Human
uguuuacucuagaggguaga

SEQ ID NO: 763873 - RNA, 22 nt, Human
gcauugguuaagagcuuugggg

SEQ ID NO: 763874 - RNA, 22 nt, Human
caagaagcccuuccugggugga

SEQ ID NO: 763875 - RNA, 22 nt, Human
cugccccucgaccaagcgcguc

SEQ ID NO: 763876 - RNA, 23 nt, Human
uucauugagcuguucuugaggau

SEQ ID NO: 763877 - RNA, 22 nt, Human
ucacuggauuaguuugaacugu

SEQ ID NO: 763878 - RNA, 22 nt, Human
aacauucuuuagcucuuccugc

SEQ ID NO: 763879 - RNA, 22 nt, Human
gcaggcugauagaggauuccau

SEQ ID NO: 763880 - RNA, 22 nt, Human
guacaauuaagugcacaaauag

SEQ ID NO: 763881 - RNA, 22 nt, Human
uggccugggucacaccaggguc

SEQ ID NO: 763882 - RNA, 22 nt, Human
ggcugcccucgucuacugccca

SEQ ID NO: 763883 - RNA, 23 nt, Human
uuucagaagugguccuaggaagc

SEQ ID NO: 763884 - RNA, 22 nt, Human
augucugauaaauaaugcauaa

SEQ ID NO: 763885 - RNA, 22 nt, Human
aacuaaaguaaccaaggauauc

SEQ ID NO: 763886 - RNA, 22 nt, Human
agaaaauuuaaagagacacaca

SEQ ID NO: 763887 - RNA, 22 nt, Human
uccagcucuaacaugcugggcc

SEQ ID NO: 763888 - RNA, 22 nt, Human
cagcaccuguuagcauuaaaua

SEQ ID NO: 763889 - RNA, 22 nt, Human
gcaguguucagugaagcaggag

SEQ ID NO: 763890 - RNA, 21 nt, Human
gaggaaugguuugcaaagcac

SEQ ID NO: 763891 - RNA, 22 nt, Human
cuucugggcauggcagagccug

SEQ ID NO: 763892 - RNA, 21 nt, Human
cuggagucauuuucugaguag

SEQ ID NO: 763893 - RNA, 22 nt, Human
cugcccaaauccuucuuccucu

SEQ ID NO: 763894 - RNA, 23 nt, Human
ggauggagccacuuugaaaccac

SEQ ID NO: 763895 - RNA, 22 nt, Human
gucugggcucccagggucggcg

SEQ ID NO: 763896 - RNA, 22 nt, Human
uccccacucucuccuggagcuu

SEQ ID NO: 763897 - RNA, 22 nt, Human
uucuccagaguuucucucacug

SEQ ID NO: 763898 - RNA, 22 nt, Human
uauuuuguuuuguauccacugu

SEQ ID NO: 763899 - RNA, 22 nt, Human
aguccauacauugagaauaaca

SEQ ID NO: 763900 - RNA, 22 nt, Human
gcucucugggugugucuagaua

SEQ ID NO: 763901 - RNA, 22 nt, Human
uaugaaauugccauuuuuaugg

SEQ ID NO: 763902 - RNA, 22 nt, Human
ucucugcucaggcaccagcccu

SEQ ID NO: 763903 - RNA, 22 nt, Human
aacugcuguggccuaguacuua

SEQ ID NO: 763904 - RNA, 22 nt, Human
uugugcagaguugccuuuauuu

SEQ ID NO: 763905 - RNA, 22 nt, Human
gagugggggguccgucucagug

SEQ ID NO: 763906 - RNA, 22 nt, Human
uaaccugaggagaacagugcuu

SEQ ID NO: 763907 - RNA, 22 nt, Human
uuauucucaucucccuacuuag

SEQ ID NO: 763908 - RNA, 23 nt, Human
gcuuccagaagacucauugacau

SEQ ID NO: 763909 - RNA, 22 nt, Human
uucucauucugacucaguguag

SEQ ID NO: 763910 - RNA, 22 nt, Human
guggcucacagcaauguuuccu

SEQ ID NO: 763911 - RNA, 22 nt, Human
gaacacugggguaucauugagc

SEQ ID NO: 763912 - RNA, 22 nt, Human
gaccuggauucaaauucagacu

SEQ ID NO: 763913 - RNA, 22 nt, Human
aaucagaccguucuggcugucc

SEQ ID NO: 763914 - RNA, 22 nt, Human
uagcaaaggccuuggacacgcu

SEQ ID NO: 763915 - RNA, 22 nt, Human
cucagcucugucacuuacuagc

SEQ ID NO: 763916 - RNA, 22 nt, Human
gaggguccuggcuaagucugac

SEQ ID NO: 763917 - RNA, 22 nt, Human
gcugggcucauuugugugucug

SEQ ID NO: 763918 - RNA, 22 nt, Human
uugggguaaggaaauauggcuu

SEQ ID NO: 763919 - RNA, 22 nt, Human
uggagccagagcgcagccuggg

SEQ ID NO: 763920 - RNA, 22 nt, Human
ggcucaggggccaggccugucc

SEQ ID NO: 763921 - RNA, 22 nt, Human
cagcuaggaaaccagagggcag

SEQ ID NO: 763922 - RNA, 22 nt, Human
uuccuggccucucucugagcag

SEQ ID NO: 763923 - RNA, 22 nt, Human
gagggacagcuaaagagaaauu

SEQ ID NO: 763924 - RNA, 22 nt, Human
auacauguuugcuggauaaaca

SEQ ID NO: 763925 - RNA, 22 nt, Human
uauuguuucuggcuguggcagc

SEQ ID NO: 763926 - RNA, 22 nt, Human
cagcuauuuugccuaucauggu

SEQ ID NO: 763927 - RNA, 22 nt, Human
gaacuuuaaaacaaaguacagu

SEQ ID NO: 763928 - RNA, 22 nt, Human
ucaaugaaagagcaugcauuuu

SEQ ID NO: 763929 - RNA, 22 nt, Human
ucugaaggucugagaaccagga

SEQ ID NO: 763930 - RNA, 22 nt, Human
uacacuaaaucuucaucuuuua

SEQ ID NO: 763931 - RNA, 22 nt, Human
cccugggacccgcugcagaggc

SEQ ID NO: 763932 - RNA, 22 nt, Human
caggagagcccggguccgggcu

SEQ ID NO: 763933 - RNA, 22 nt, Human
uuaggaaucaaauuccgaaagg

SEQ ID NO: 763934 - RNA, 22 nt, Human
ucuggagcuggagggcaaggca

SEQ ID NO: 763935 - RNA, 22 nt, Human
uucuaaacggcuucacaggaau

SEQ ID NO: 763936 - RNA, 22 nt, Human
uguuucaugauugcugucauuu

SEQ ID NO: 763937 - RNA, 22 nt, Human
ugcacgugggcucucugcucuu

SEQ ID NO: 763938 - RNA, 22 nt, Human
uugcuaaguuauagaguaucuu

SEQ ID NO: 763939 - RNA, 22 nt, Human
cuggcuggcaaguagaacacaa

SEQ ID NO: 763940 - RNA, 22 nt, Human
acaaaugacucaaacaccacuu

SEQ ID NO: 763941 - RNA, 22 nt, Human
aauaucuggagaugcuuuuugu

SEQ ID NO: 763942 - RNA, 22 nt, Human
cagacugugagcuccuugaggg

SEQ ID NO: 763943 - RNA, 22 nt, Human
uuuagacuaauuccuaaagggc

SEQ ID NO: 763944 - RNA, 22 nt, Human
uaucuguucauguuuauauguc

SEQ ID NO: 763945 - RNA, 22 nt, Human
aagagaagaaagugucuacaca

SEQ ID NO: 763946 - RNA, 22 nt, Human
uaauuucacugauaugaaguca

SEQ ID NO: 763947 - RNA, 22 nt, Human
uaugugcacauuagagagaugg

SEQ ID NO: 763948 - RNA, 22 nt, Human
cccaggauggggcugcaguuau

SEQ ID NO: 763949 - RNA, 22 nt, Human
uaagcucacuguaagaacugau

SEQ ID NO: 763950 - RNA, 22 nt, Human
ccagcucccgcaggcugcacag

SEQ ID NO: 763951 - RNA, 22 nt, Human
cagcaugaauguguucguaggg

SEQ ID NO: 763952 - RNA, 23 nt, Human
ccaagacuguuaggaguggggag

SEQ ID NO: 763953 - RNA, 22 nt, Human
ccuggaaguuggagguugcagu

SEQ ID NO: 763954 - RNA, 22 nt, Human
cagagaaaaaauccugcucuca

SEQ ID NO: 763955 - RNA, 22 nt, Human
aaagcaauuuaauggaccauga

SEQ ID NO: 763956 - RNA, 22 nt, Human
gagagaacacaaagggccagcu

SEQ ID NO: 763957 - RNA, 22 nt, Human
ccuggugcuuaccagagcuuuu

SEQ ID NO: 763958 - RNA, 22 nt, Human
acaauguucuacauauacauaa

SEQ ID NO: 763959 - RNA, 17 nt, Human
agcuccugcccauggcu

SEQ ID NO: 763960 - RNA, 22 nt, Human
agaagccagauuguagugggac

SEQ ID NO: 763961 - RNA, 22 nt, Human
uuugaaaccuaguuauaugacu

SEQ ID NO: 763962 - RNA, 22 nt, Human
augagagacaggaacgagcugg

SEQ ID NO: 763963 - RNA, 21 nt, Human
cccuguguuccacagcagaca

SEQ ID NO: 763964 - RNA, 22 nt, Human
cuagcuucaaguccuggcugug

SEQ ID NO: 763965 - RNA, 22 nt, Human
uugagaaaaccaucguaagaau

SEQ ID NO: 763966 - RNA, 22 nt, Human
ggcaggcgugguggccucagaa

SEQ ID NO: 763967 - RNA, 20 nt, Human
cugggccauccuuuuacaau

SEQ ID NO: 763968 - RNA, 22 nt, Human
uugcaucauuuccuggccgugu

SEQ ID NO: 763969 - RNA, 22 nt, Human
uccaggccuaggccaagugauu

SEQ ID NO: 763970 - RNA, 22 nt, Human
uuggcccuagacucuaaguccg

SEQ ID NO: 763971 - RNA, 20 nt, Human
uaugauaauuacaaaauagu

SEQ ID NO: 763972 - RNA, 22 nt, Human
cagcagcugcaaauggaaacag

SEQ ID NO: 763973 - RNA, 22 nt, Human
uccaugugccaaggggcagagg

SEQ ID NO: 763974 - RNA, 22 nt, Human
cuuuagacaucucauuguguaa

SEQ ID NO: 763975 - RNA, 22 nt, Human
gcaggauugggcugaaggagug

SEQ ID NO: 763976 - RNA, 22 nt, Human
caggaagcaagugauuuucuug

SEQ ID NO: 763977 - RNA, 22 nt, Human
gaaacuugauaauugaaacaga

SEQ ID NO: 763978 - RNA, 22 nt, Human
gaaauugucugugcccaagucu

SEQ ID NO: 763979 - RNA, 22 nt, Human
ugacuuugugcaagugaauuau

SEQ ID NO: 763980 - RNA, 22 nt, Human
uuuccucuucuggcaggcaggg

SEQ ID NO: 763981 - RNA, 22 nt, Human
ccauagugaauugucucagacg

SEQ ID NO: 763982 - RNA, 22 nt, Human
acugaggcuuacaaagguaaag

SEQ ID NO: 763983 - RNA, 22 nt, Human
aaauagcauaaaauaggaagcu

SEQ ID NO: 763984 - RNA, 22 nt, Human
aaagcugccaaggagaauacua

SEQ ID NO: 763985 - RNA, 22 nt, Human
ucagaacaauugggaaccauua

SEQ ID NO: 763986 - RNA, 22 nt, Human
agugaaauacugucguuuuuag

SEQ ID NO: 763987 - RNA, 22 nt, Human
acccaggcuggaaugcaguggc

SEQ ID NO: 763988 - RNA, 22 nt, Human
acccaggcuggagugcagugac

SEQ ID NO: 763989 - RNA, 22 nt, Human
cuggagauaagcagucccaggc

SEQ ID NO: 763990 - RNA, 22 nt, Human
acauucugugagucauguuuua

SEQ ID NO: 763991 - RNA, 22 nt, Human
caugucagggaagagagucagu

SEQ ID NO: 763992 - RNA, 22 nt, Human
uguggucuccccagugccagcu

SEQ ID NO: 763993 - RNA, 22 nt, Human
uugccaggagcucaucugaggg

SEQ ID NO: 763994 - RNA, 22 nt, Human
cuguggcugcagccuugguccu

SEQ ID NO: 763995 - RNA, 22 nt, Human
cacauuuagagguuagcauggu

SEQ ID NO: 763996 - RNA, 22 nt, Human
gaagccuggagaccagauguug

SEQ ID NO: 763997 - RNA, 22 nt, Human
guuaguuugaacuugucuaugu

SEQ ID NO: 763998 - RNA, 22 nt, Human
uauuuggagccuauccauagau

SEQ ID NO: 763999 - RNA, 22 nt, Human
acauccaucuuaugagauaggu

SEQ ID NO: 764000 - RNA, 22 nt, Human
ugugaggccucugcaggagcag

SEQ ID NO: 764001 - RNA, 22 nt, Human
ucauggcuggaagcucaguuag

SEQ ID NO: 764002 - RNA, 19 nt, Human
ucuuuagccagagcucugg

SEQ ID NO: 764003 - RNA, 22 nt, Human
cugcugugauugggagaaaccg

SEQ ID NO: 764004 - RNA, 22 nt, Human
uuuccugucuuuugugaaggau

SEQ ID NO: 764005 - RNA, 22 nt, Human
uuauucagauuggcuacaggau

SEQ ID NO: 764006 - RNA, 22 nt, Human
cacugcuuaguugguaaaugug

SEQ ID NO: 764007 - RNA, 22 nt, Human
agcaucuggucaugagugagaa

SEQ ID NO: 764008 - RNA, 22 nt, Human
ggccagagagccgcuguuagga

SEQ ID NO: 764009 - RNA, 22 nt, Human
acacuuuaucucaucucagaca

SEQ ID NO: 764010 - RNA, 21 nt, Human
gagcuguuacucucucuggag

SEQ ID NO: 764011 - RNA, 22 nt, Human
auuauucuugagguguuuauug

SEQ ID NO: 764012 - RNA, 18 nt, Human
ucacucauagacaucuau

SEQ ID NO: 764013 - RNA, 22 nt, Human
agaggcuaggaccauguaucau

SEQ ID NO: 764014 - RNA, 22 nt, Human
ucucugaagagucagacauaac

SEQ ID NO: 764015 - RNA, 22 nt, Human
caggggccggcuguccgugccc

SEQ ID NO: 764016 - RNA, 22 nt, Human
agaaggcaucagaaguguguag

SEQ ID NO: 764017 - RNA, 22 nt, Human
uucaaagauuuucccaaagcuc

SEQ ID NO: 764018 - RNA, 22 nt, Human
uguauuaugauuguuguucaug

SEQ ID NO: 764019 - RNA, 22 nt, Human
uggucaaaccaguuaucuguaa

SEQ ID NO: 764020 - RNA, 22 nt, Human
acuguuuaaaggcuuccuuucu

SEQ ID NO: 764021 - RNA, 22 nt, Human
aaucuauaugcuuuucacauac

SEQ ID NO: 764022 - RNA, 22 nt, Human
aaagggcugucaaauaagcaac

SEQ ID NO: 764023 - RNA, 22 nt, Human
uguuagaauauuguaauauucg

SEQ ID NO: 764024 - RNA, 22 nt, Human
agccugagccccauccagcuga

SEQ ID NO: 764025 - RNA, 22 nt, Human
caucugaauaaagacuugcaga

SEQ ID NO: 764026 - RNA, 22 nt, Human
acaugaaacuguugcauuagaa

SEQ ID NO: 764027 - RNA, 22 nt, Human
gacuacaggccggcaucagaga

SEQ ID NO: 764028 - RNA, 22 nt, Human
ccugggagguggauguugcggu

SEQ ID NO: 764029 - RNA, 22 nt, Human
ucugugcccucggugcugggcc

SEQ ID NO: 764030 - RNA, 22 nt, Human
caagauggguguugugaugguu

SEQ ID NO: 764031 - RNA, 22 nt, Human
uuacuggcugggccugagggcu

SEQ ID NO: 764032 - RNA, 21 nt, Human
uaaaacuguaacuuuguccug

SEQ ID NO: 764033 - RNA, 22 nt, Human
agcagggcugcggccccaccac

SEQ ID NO: 764034 - RNA, 22 nt, Human
uguuaaaaccacaggugaggac

SEQ ID NO: 764035 - RNA, 22 nt, Human
gacaaagucaacaguacucuca

SEQ ID NO: 764036 - RNA, 22 nt, Human
uagugcaggguuuuaagcacug

SEQ ID NO: 764037 - RNA, 21 nt, Human
ugcauaaagaaauacaaauac

SEQ ID NO: 764038 - RNA, 21 nt, Human
uucugggaaaugagcuggggc

SEQ ID NO: 764039 - RNA, 22 nt, Human
ugguagggacacuaugcagaaa

SEQ ID NO: 764040 - RNA, 22 nt, Human
uuaaaagggauguuaucuguaa

SEQ ID NO: 764041 - RNA, 22 nt, Human
aucagaaggggagguaaagaag

SEQ ID NO: 764042 - RNA, 22 nt, Human
uauaucauggagauuaacauuc

SEQ ID NO: 764043 - RNA, 22 nt, Human
auucuaauggcagagacuccug

SEQ ID NO: 764044 - RNA, 22 nt, Human
ucacauuuuaucuauuuuaagu

SEQ ID NO: 764045 - RNA, 22 nt, Human
ggcuuuaacagcagcuuugcug

SEQ ID NO: 764046 - RNA, 22 nt, Human
cuggugcuggcaacagaguagg

SEQ ID NO: 764047 - RNA, 22 nt, Human
auucuaguguuuccauuacaag

SEQ ID NO: 764048 - RNA, 23 nt, Human
ucucuuucaagagcuuaaugugc

SEQ ID NO: 764049 - RNA, 17 nt, Human
acaagcaguggccaugg

SEQ ID NO: 764050 - RNA, 22 nt, Human
cagcugcuguaacagaauacuu

SEQ ID NO: 764051 - RNA, 22 nt, Human
ccacaugugcacugcuguaugg

SEQ ID NO: 764052 - RNA, 22 nt, Human
ggcccaucucuugcucuggguu

SEQ ID NO: 764053 - RNA, 22 nt, Human
ggcagggguccugguguugacu

SEQ ID NO: 764054 - RNA, 22 nt, Human
uuauuccaauuucuccuacaaa

SEQ ID NO: 764055 - RNA, 17 nt, Human
aaucuguuuacagucag

SEQ ID NO: 764056 - RNA, 18 nt, Human
acucaaggguggagagaa

SEQ ID NO: 764057 - RNA, 22 nt, Human
aagaguuuucuauaaucuuggc

SEQ ID NO: 764058 - RNA, 22 nt, Human
cucugucagaguguugucccca

SEQ ID NO: 764059 - RNA, 22 nt, Human
ucaguaacuuacuuauucaccu

SEQ ID NO: 764060 - RNA, 22 nt, Human
ccaggcuggucugaauuucuag

SEQ ID NO: 764061 - RNA, 22 nt, Human
cugccagcagaggccagcgcug

SEQ ID NO: 764062 - RNA, 22 nt, Human
ugugggaugguuuugccagaau

SEQ ID NO: 764063 - RNA, 22 nt, Human
auguuuccagguucuuccuaug

SEQ ID NO: 764064 - RNA, 22 nt, Human
ugcaagggugacagguugcucu

SEQ ID NO: 764065 - RNA, 22 nt, Human
augcacagaaaaauugcuuacu

SEQ ID NO: 764066 - RNA, 22 nt, Human
gggagcugaucagguggauuca

SEQ ID NO: 764067 - RNA, 22 nt, Human
aacuaucacaaacagagugucu

SEQ ID NO: 764068 - RNA, 22 nt, Human
gaagcacagauaauucaaguau

SEQ ID NO: 764069 - RNA, 22 nt, Human
uuucuagcugacaaaaauguuu

SEQ ID NO: 764070 - RNA, 23 nt, Human
ucuugaaaagccuacagcaguuc

SEQ ID NO: 764071 - RNA, 22 nt, Human
auaugaaaagaagucaccauug

SEQ ID NO: 764072 - RNA, 22 nt, Human
ucugugcuagaggaguuggcca

SEQ ID NO: 764073 - RNA, 22 nt, Human
auaugagaguaaaugccgaucu

SEQ ID NO: 764074 - RNA, 22 nt, Human
ugugcaguucaaacccguguug

SEQ ID NO: 764075 - RNA, 22 nt, Human
aauacugaauuaguugagacaa

SEQ ID NO: 764076 - RNA, 21 nt, Human
agcugcccagaguagggaagg

SEQ ID NO: 764077 - RNA, 22 nt, Human
ucuaagccuguguccucugcag

SEQ ID NO: 764078 - RNA, 22 nt, Human
gagaggcugauccugcagagaa

SEQ ID NO: 764079 - RNA, 21 nt, Human
uauacaugugcacacacaugc

SEQ ID NO: 764080 - RNA, 22 nt, Human
aguuucucuuaaucuaguaucu

SEQ ID NO: 764081 - RNA, 22 nt, Human
uggcugaggagagggcggaagu

SEQ ID NO: 764082 - RNA, 22 nt, Human
uggcauggcauuuagagaauua

SEQ ID NO: 764083 - RNA, 22 nt, Human
uaguccagaaacugagcuuaua

SEQ ID NO: 764084 - RNA, 22 nt, Human
ucccuggcugggggcugccuug

SEQ ID NO: 764085 - RNA, 20 nt, Human
aucuccugcuaccacccauu

SEQ ID NO: 764086 - RNA, 22 nt, Human
ugccucugccuccauuguuagu

SEQ ID NO: 764087 - RNA, 22 nt, Human
uggcaggaucuuugagagugaa

SEQ ID NO: 764088 - RNA, 22 nt, Human
cuguaaaacacuguaguaucug

SEQ ID NO: 764089 - RNA, 21 nt, Human
aguguccuugaucuugccuug

SEQ ID NO: 764090 - RNA, 23 nt, Human
uaauuagauguugauuccugaga

SEQ ID NO: 764091 - RNA, 22 nt, Human
ucaggagcagggggaagcucug

SEQ ID NO: 764092 - RNA, 22 nt, Human
ccagcuggggaaguggggcaua

SEQ ID NO: 764093 - RNA, 22 nt, Human
uguguauguguauacacuauau

SEQ ID NO: 764094 - RNA, 22 nt, Human
aucuacaggcugaggugggagg

SEQ ID NO: 764095 - RNA, 22 nt, Human
aauagacuccagggucuauuuu

SEQ ID NO: 764096 - RNA, 22 nt, Human
ggguaggaaauccagagguggc

SEQ ID NO: 764097 - RNA, 22 nt, Human
ucaaaugcaggucuggucuugg

SEQ ID NO: 764098 - RNA, 20 nt, Human
acaugcaguggucauuucag

SEQ ID NO: 764099 - RNA, 22 nt, Human
aaugccuuggagagccuagagg

SEQ ID NO: 764100 - RNA, 22 nt, Human
uauguuucauucuuuucuggua

SEQ ID NO: 764101 - RNA, 22 nt, Human
aggcaaauugugagaaaaugaa

SEQ ID NO: 764102 - RNA, 22 nt, Human
cuguggagaugcagaccaggcc

SEQ ID NO: 764103 - RNA, 22 nt, Human
auggcccucaguccuuccuugg

SEQ ID NO: 764104 - RNA, 22 nt, Human
ugaaauucaaaacacauuuguc

SEQ ID NO: 764105 - RNA, 22 nt, Human
cagugccauauugaaagacauu

SEQ ID NO: 764106 - RNA, 22 nt, Human
gugagggcagcuuggucagugu

SEQ ID NO: 764107 - RNA, 22 nt, Human
uaggaauuaugaugcuaucaag

SEQ ID NO: 764108 - RNA, 22 nt, Human
aggcuggcauacauuuguucuu

SEQ ID NO: 764109 - RNA, 22 nt, Human
cagagcaggcccacugcccucc

SEQ ID NO: 764110 - RNA, 22 nt, Human
uggcaugaagucagcagcuggg

SEQ ID NO: 764111 - RNA, 22 nt, Human
auugcagggaggcagguagaug

SEQ ID NO: 764112 - RNA, 22 nt, Human
cgcugcagaagcguguucagga

SEQ ID NO: 764113 - RNA, 22 nt, Human
gagcuuaggccagggacaggga

SEQ ID NO: 764114 - RNA, 22 nt, Human
agcacaggaccaaggaagcugu

SEQ ID NO: 764115 - RNA, 22 nt, Human
ccugugggaggggccuggcgcg

SEQ ID NO: 764116 - RNA, 22 nt, Human
cuuaacagauacaucugugguu

SEQ ID NO: 764117 - RNA, 22 nt, Human
aggcucagauucacauuugguu

SEQ ID NO: 764118 - RNA, 22 nt, Human
uccagccaacugccuagggagc

SEQ ID NO: 764119 - RNA, 22 nt, Human
agaacacauagagaaguuuuau

SEQ ID NO: 764120 - RNA, 22 nt, Human
uccugagcccuggggucagugu

SEQ ID NO: 764121 - RNA, 18 nt, Human
uugaauucuucuacaugu

SEQ ID NO: 764122 - RNA, 22 nt, Human
ucaggaagcugaauuacaaaaa

SEQ ID NO: 764123 - RNA, 22 nt, Human
agagcugugcuuugcaccacgu

SEQ ID NO: 764124 - RNA, 22 nt, Human
ugggaugaggccucuguuguga

SEQ ID NO: 764125 - RNA, 22 nt, Human
accaggaggcuacacuguccca

SEQ ID NO: 764126 - RNA, 22 nt, Human
gcauccagucuuggcuccugga

SEQ ID NO: 764127 - RNA, 22 nt, Human
agguuucugcaauguguguaca

SEQ ID NO: 764128 - RNA, 22 nt, Human
auguccuuccauuuugaucugu

SEQ ID NO: 764129 - RNA, 22 nt, Human
caggaaauucaagagaggcugc

SEQ ID NO: 764130 - RNA, 22 nt, Human
uugaacucuggacccaugccag

SEQ ID NO: 764131 - RNA, 22 nt, Human
gugccaggugcuaagcugugcu

SEQ ID NO: 764132 - RNA, 21 nt, Human
gaaugucugccuucacaauga

SEQ ID NO: 764133 - RNA, 22 nt, Human
ugcagagcuucauugcauaggc

SEQ ID NO: 764134 - RNA, 22 nt, Human
auuauuugaguuccucucuacc

SEQ ID NO: 764135 - RNA, 22 nt, Human
gucuguccagcaacacaggagu

SEQ ID NO: 764136 - RNA, 22 nt, Human
agggucaguagugaugcgugaa

SEQ ID NO: 764137 - RNA, 22 nt, Human
uccucugcuguucugguucuuu

SEQ ID NO: 764138 - RNA, 22 nt, Human
auuuucuauucugcugguuuag

SEQ ID NO: 764139 - RNA, 22 nt, Human
cuuuacuaucaggaauaaacaa

SEQ ID NO: 764140 - RNA, 22 nt, Human
cuccagugcugucaucccuucc

SEQ ID NO: 764141 - RNA, 22 nt, Human
agaacagcaguuaugguucauu

SEQ ID NO: 764142 - RNA, 22 nt, Human
agaaacaucauuguuugguauu

SEQ ID NO: 764143 - RNA, 22 nt, Human
uuuuagaaucagguugucuggg

SEQ ID NO: 764144 - RNA, 22 nt, Human
agcuggaggaguuucuccuagc

SEQ ID NO: 764145 - RNA, 22 nt, Human
gggcuuggguauugugagaggu

SEQ ID NO: 764146 - RNA, 22 nt, Human
ucuggagaagaaacuugcucug

SEQ ID NO: 764147 - RNA, 22 nt, Human
ucugccagcaccaugauccuuc

SEQ ID NO: 764148 - RNA, 22 nt, Human
ugcagggacaggcucuggggau

SEQ ID NO: 764149 - RNA, 22 nt, Human
gcaaagacccaggugucuaucc

SEQ ID NO: 764150 - RNA, 22 nt, Human
acaaagugcugacauuacaggc

SEQ ID NO: 764151 - RNA, 22 nt, Human
acaggugauucaggcucuggga

SEQ ID NO: 764152 - RNA, 22 nt, Human
ugucuuuagaaagaagcagaca

SEQ ID NO: 764153 - RNA, 22 nt, Human
uauuguaucuuaccacauguau

SEQ ID NO: 764154 - RNA, 22 nt, Human
ucugucugcuucacuugcauuu

SEQ ID NO: 764155 - RNA, 22 nt, Human
uaauugaaaucauuucaauuca

SEQ ID NO: 764156 - RNA, 22 nt, Human
uggugcagguguugaugcagga

SEQ ID NO: 764157 - RNA, 22 nt, Human
guuuaaaguagcuuccuuuugg

SEQ ID NO: 764158 - RNA, 22 nt, Human
ucccucagcuugucuccaugca

SEQ ID NO: 764159 - RNA, 22 nt, Human
auaacagaugugaagugcuaau

SEQ ID NO: 764160 - RNA, 22 nt, Human
uagagcagccuucagagcaguu

SEQ ID NO: 764161 - RNA, 22 nt, Human
cagcugugucuaauuauggcug

SEQ ID NO: 764162 - RNA, 22 nt, Human
aggcaaggugcucuugcucuau

SEQ ID NO: 764163 - RNA, 22 nt, Human
aggcugugggguucugcuuuca

SEQ ID NO: 764164 - RNA, 22 nt, Human
cccagagaugggaggugaucgg

SEQ ID NO: 764165 - RNA, 23 nt, Human
ggccuguguuuugucugaaguac

SEQ ID NO: 764166 - RNA, 22 nt, Human
uggcagugaagcugucuuuagg

SEQ ID NO: 764167 - RNA, 22 nt, Human
ggcucuggcuacuccacccugu

SEQ ID NO: 764168 - RNA, 22 nt, Human
ucagaaagguugagucaugugc

SEQ ID NO: 764169 - RNA, 22 nt, Human
aggcugugaagguuaaagacga

SEQ ID NO: 764170 - RNA, 22 nt, Human
acugauuacacgaguucugacu

SEQ ID NO: 764171 - RNA, 22 nt, Human
gcagggccagguacaagaagca

SEQ ID NO: 764172 - RNA, 22 nt, Human
ugcugggcacacaguaggugcu

SEQ ID NO: 764173 - RNA, 22 nt, Human
gcccuggaugcucauggcauca

SEQ ID NO: 764174 - RNA, 22 nt, Human
ccucugggccuggaagggcagu

SEQ ID NO: 764175 - RNA, 22 nt, Human
auacuuuuaauuccuucugagu

SEQ ID NO: 764176 - RNA, 21 nt, Human
augucaaaugcuuuauuuuau

SEQ ID NO: 764177 - RNA, 22 nt, Human
gauuuauugucccuguccugcu

SEQ ID NO: 764178 - RNA, 22 nt, Human
aaguggcucauguggcuucugc

SEQ ID NO: 764179 - RNA, 22 nt, Human
uucucuuuucaccaguugcuaa

SEQ ID NO: 764180 - RNA, 22 nt, Human
ucugaaauggcagcgggaauga

SEQ ID NO: 764181 - RNA, 22 nt, Human
uuuucaguuugcacugcagugc

SEQ ID NO: 764182 - RNA, 22 nt, Human
ucaggcuuuuucucaaccucuu

SEQ ID NO: 764183 - RNA, 22 nt, Human
caaugaaauugagauccagaga

SEQ ID NO: 764184 - RNA, 22 nt, Human
cugugcccuuucgcugcacugu

SEQ ID NO: 764185 - RNA, 22 nt, Human
cugugacugcagcaccaaguaa

SEQ ID NO: 764186 - RNA, 22 nt, Human
agagccaggacugugucucacu

SEQ ID NO: 764187 - RNA, 22 nt, Human
aagaugaaucaguauguguccu

SEQ ID NO: 764188 - RNA, 22 nt, Human
ugaugaggggcucagaggucag

SEQ ID NO: 764189 - RNA, 22 nt, Human
cacagcagaacuuaauuucaaa

SEQ ID NO: 764190 - RNA, 22 nt, Human
ucaguccucucuggguuucuua

SEQ ID NO: 764191 - RNA, 22 nt, Human
aagugucuagcaccuggaugca

SEQ ID NO: 764192 - RNA, 22 nt, Human
guauuuguaguagcauagaauu

SEQ ID NO: 764193 - RNA, 22 nt, Human
uccuggccagaggacaaagcug

SEQ ID NO: 764194 - RNA, 22 nt, Human
gcuucuccucccgcucccaggc

SEQ ID NO: 764195 - RNA, 22 nt, Human
ccaggcagucaggguugugugu

SEQ ID NO: 764196 - RNA, 22 nt, Human
uauggcuuuuggcuucucucug

SEQ ID NO: 764197 - RNA, 22 nt, Human
gggcugugugcaguacgggucc

SEQ ID NO: 764198 - RNA, 22 nt, Human
gacuugggugucggggcagucu

SEQ ID NO: 764199 - RNA, 22 nt, Human
agacccuggggaaagucacuuc

SEQ ID NO: 764200 - RNA, 22 nt, Human
gcucugugccagggcugggcca

SEQ ID NO: 764201 - RNA, 22 nt, Human
uggcagauaaacaugugauaaa

SEQ ID NO: 764202 - RNA, 22 nt, Human
aggauggauucuguauguggga

SEQ ID NO: 764203 - RNA, 22 nt, Human
aggaauugagauccuagguuuu

SEQ ID NO: 764204 - RNA, 20 nt, Human
aggaagccaaaggcugucuu

SEQ ID NO: 764205 - RNA, 22 nt, Human
ugcaggaaaaccaacacgccuu

SEQ ID NO: 764206 - RNA, 22 nt, Human
cagcuucaacugcacagucaac

SEQ ID NO: 764207 - RNA, 22 nt, Human
cugagaacaucauucagauauu

SEQ ID NO: 764208 - RNA, 22 nt, Human
ucuggcccagccccugagguca

SEQ ID NO: 764209 - RNA, 22 nt, Human
uuccagaguauugguagcuaua

SEQ ID NO: 764210 - RNA, 22 nt, Human
ccuuuagaugaucucuuggaca

SEQ ID NO: 764211 - RNA, 22 nt, Human
caggccccauuccucuugggac

SEQ ID NO: 764212 - RNA, 22 nt, Human
caggcacugugcaagggucucg

SEQ ID NO: 764213 - RNA, 22 nt, Human
uguacagauaaagacuguaaau

SEQ ID NO: 764214 - RNA, 22 nt, Human
ggccuugguaaagggaugcaug

SEQ ID NO: 764215 - RNA, 22 nt, Human
gugugccaacaaaagacagugc

SEQ ID NO: 764216 - RNA, 22 nt, Human
gacacagguagaauaaaguacu

SEQ ID NO: 764217 - RNA, 22 nt, Human
auggcucauuuaucuugcagcc

SEQ ID NO: 764218 - RNA, 22 nt, Human
augagaaugcauucauguuuug

SEQ ID NO: 764219 - RNA, 22 nt, Human
ccagggugaggaggcucccacg

SEQ ID NO: 764220 - RNA, 22 nt, Human
aagacuuucccucaucagaacg

SEQ ID NO: 764221 - RNA, 19 nt, Human
agacaaguuuccagaagcc

SEQ ID NO: 764222 - RNA, 22 nt, Human
acaugcaaaaauauauuuauga

SEQ ID NO: 764223 - RNA, 20 nt, Human
cagcuuggaugagaggcuga

SEQ ID NO: 764224 - RNA, 22 nt, Human
ugcaugcaaagugucugcuuug

SEQ ID NO: 764225 - RNA, 22 nt, Human
ugucuuuuaccuaaugagcugg

SEQ ID NO: 764226 - RNA, 22 nt, Human
gaaugugugacucuauugagca

SEQ ID NO: 764227 - RNA, 22 nt, Human
gguuucaacuuuugugaggaau

SEQ ID NO: 764228 - RNA, 22 nt, Human
uuuuacuuuggauacaguacuu

SEQ ID NO: 764229 - RNA, 22 nt, Human
uagcugccuuugggcuccugcu

SEQ ID NO: 764230 - RNA, 22 nt, Human
ugggcucagccuucauguggcc

SEQ ID NO: 764231 - RNA, 22 nt, Human
ugggugugccauauuccauuuc

SEQ ID NO: 764232 - RNA, 22 nt, Human
uuacagaguggucuggcuaugu

SEQ ID NO: 764233 - RNA, 22 nt, Human
uuuacaccaaaaugacacagag

SEQ ID NO: 764234 - RNA, 19 nt, Human
cagggauggguagggacuc

SEQ ID NO: 764235 - RNA, 22 nt, Human
ucagcuggcaguucagaggcug

SEQ ID NO: 764236 - RNA, 22 nt, Human
agggccacaguggggccugaga

SEQ ID NO: 764237 - RNA, 22 nt, Human
aaauaguucagccacggugacu

SEQ ID NO: 764238 - RNA, 22 nt, Human
uggcagauuuaacauuggaacu

SEQ ID NO: 764239 - RNA, 22 nt, Human
augaaaugauugaaaucuuuac

SEQ ID NO: 764240 - RNA, 22 nt, Human
caagaagcaaggucagggccca

SEQ ID NO: 764241 - RNA, 22 nt, Human
ccugggcuuugagggcaggaug

SEQ ID NO: 764242 - RNA, 22 nt, Human
cccagcuaccucugcuaggaga

SEQ ID NO: 764243 - RNA, 22 nt, Human
gggcucagucggcaagccccuu

SEQ ID NO: 764244 - RNA, 22 nt, Human
gggcggggggagcuggaaugaa

SEQ ID NO: 764245 - RNA, 22 nt, Human
gccaggcaggccacgcuguguu

SEQ ID NO: 764246 - RNA, 22 nt, Human
aaaugugucauauucaaaguca

SEQ ID NO: 764247 - RNA, 22 nt, Human
acagaccugggcacagaaagga

SEQ ID NO: 764248 - RNA, 22 nt, Human
uaaggccaggcuguggucggca

SEQ ID NO: 764249 - RNA, 22 nt, Human
caacacagccauuccccuagaa

SEQ ID NO: 764250 - RNA, 22 nt, Human
cagauguuguuccugccuguag

SEQ ID NO: 764251 - RNA, 20 nt, Human
uggaccauaaacaccaggua

SEQ ID NO: 764252 - RNA, 22 nt, Human
aaaugcuaaaugcagcaaguag

SEQ ID NO: 764253 - RNA, 22 nt, Human
ucuuuacaaucuaagcauaguu

SEQ ID NO: 764254 - RNA, 22 nt, Human
uucacagggccacuggcaggag

SEQ ID NO: 764255 - RNA, 23 nt, Human
cccuggccuuggggcacaggcug

SEQ ID NO: 764256 - RNA, 22 nt, Human
acauagcaagugcucaauaaau

SEQ ID NO: 764257 - RNA, 22 nt, Human
gaaucagauacugauuucaguc

SEQ ID NO: 764258 - RNA, 22 nt, Human
uguuuaugugugugcauauaua

SEQ ID NO: 764259 - RNA, 22 nt, Human
accacuguaucuccagcacauu

SEQ ID NO: 764260 - RNA, 22 nt, Human
aaaaauuuaugguucuucucug

SEQ ID NO: 764261 - RNA, 22 nt, Human
gcugcggucacugcgggggcug

SEQ ID NO: 764262 - RNA, 22 nt, Human
uuuuuugucuugaagaaauggu

SEQ ID NO: 764263 - RNA, 22 nt, Human
uaagcaaaagucgagugugagc

SEQ ID NO: 764264 - RNA, 22 nt, Human
uagcccaggcuggagggcagug

SEQ ID NO: 764265 - RNA, 20 nt, Human
ucaaagcacugccugucauc

SEQ ID NO: 764266 - RNA, 22 nt, Human
cuacagagaacucagcugcccu

SEQ ID NO: 764267 - RNA, 22 nt, Human
guuuccacgucucaguuccaaa

SEQ ID NO: 764268 - RNA, 22 nt, Human
uucaucaugauguuccccucua

SEQ ID NO: 764269 - RNA, 22 nt, Human
gaacaguaacugucugcugugu

SEQ ID NO: 764270 - RNA, 18 nt, Human
gauauauaggaggaaagu

SEQ ID NO: 764271 - RNA, 22 nt, Human
aaacagucgucuuaauaguauu

SEQ ID NO: 764272 - RNA, 22 nt, Human
ugagaguuccuccucuuuccac

SEQ ID NO: 764273 - RNA, 22 nt, Human
caggagcaaggagcagugggau

SEQ ID NO: 764274 - RNA, 22 nt, Human
cacaauuuccuugcuucacuuu

SEQ ID NO: 764275 - RNA, 22 nt, Human
gaagcacagaaugguuaacaug

SEQ ID NO: 764276 - RNA, 22 nt, Human
gcagugcaugucggaacucauu

SEQ ID NO: 764277 - RNA, 22 nt, Human
ccugggcucaggcuugggcagc

SEQ ID NO: 764278 - RNA, 22 nt, Human
cacuccuguuccacuaaaugag

SEQ ID NO: 764279 - RNA, 22 nt, Human
ugcagcuucuccaaauauuaca

SEQ ID NO: 764280 - RNA, 22 nt, Human
agaagccaagaacagacagugc

SEQ ID NO: 764281 - RNA, 22 nt, Human
uccucagugcuagccaacugcc

SEQ ID NO: 764282 - RNA, 22 nt, Human
auucuauuuuuuaagaaguagu

SEQ ID NO: 764283 - RNA, 22 nt, Human
aggaagcugccugggaugggaa

SEQ ID NO: 764284 - RNA, 21 nt, Human
ugagucucucagcuucaggua

SEQ ID NO: 764285 - RNA, 22 nt, Human
aucacugagcuucagugcuggc

SEQ ID NO: 764286 - RNA, 22 nt, Human
cuuacacuuuccgaaagcuugu

SEQ ID NO: 764287 - RNA, 22 nt, Human
gacccugacucuaaugcuuggc

SEQ ID NO: 764288 - RNA, 22 nt, Human
gcaguauacacugauacaugag

SEQ ID NO: 764289 - RNA, 22 nt, Human
gcugcugugugggagacaggcg

SEQ ID NO: 764290 - RNA, 22 nt, Human
gcaugagggggguuaggaaguu

SEQ ID NO: 764291 - RNA, 20 nt, Human
ugagaagcuccugucuccuc

SEQ ID NO: 764292 - RNA, 22 nt, Human
uauuugcaggacauagauaugg

SEQ ID NO: 764293 - RNA, 22 nt, Human
ggagcaugcgcucugugaccga

SEQ ID NO: 764294 - RNA, 22 nt, Human
uuggcugguuucaagaaggcau

SEQ ID NO: 764295 - RNA, 22 nt, Human
ccugggccaggcuugggaaugc

SEQ ID NO: 764296 - RNA, 22 nt, Human
guggaaggaauuaacagacuag

SEQ ID NO: 764297 - RNA, 22 nt, Human
aauuuuguuuaagugaucugcu

SEQ ID NO: 764298 - RNA, 22 nt, Human
cugggagagguggugggaagua

SEQ ID NO: 764299 - RNA, 22 nt, Human
cagcaucuguaggacuccucuu

SEQ ID NO: 764300 - RNA, 20 nt, Human
gccagcugcccuuccacccu

SEQ ID NO: 764301 - RNA, 17 nt, Human
gguggaaguuucuaguu

SEQ ID NO: 764302 - RNA, 22 nt, Human
uagaaguuaugauaauaauagu

SEQ ID NO: 764303 - RNA, 22 nt, Human
uacagcuugacccauaaugucu

SEQ ID NO: 764304 - RNA, 22 nt, Human
gaucauuagcuuuucaaaggag

SEQ ID NO: 764305 - RNA, 22 nt, Human
ugacuggauugucauuacgacg

SEQ ID NO: 764306 - RNA, 22 nt, Human
augguacaauuuucauuugugg

SEQ ID NO: 764307 - RNA, 22 nt, Human
guuaaugccauuaggaaauuua

SEQ ID NO: 764308 - RNA, 22 nt, Human
agauucaugggaaagcuuuagg

SEQ ID NO: 764309 - RNA, 22 nt, Human
gaggcagcugggcuggugguuu

SEQ ID NO: 764310 - RNA, 22 nt, Human
gcacagaacuucucuuaguagg

SEQ ID NO: 764311 - RNA, 22 nt, Human
agggagcugacuggcugccauu

SEQ ID NO: 764312 - RNA, 22 nt, Human
uauggaaaguguuuucuucugu

SEQ ID NO: 764313 - RNA, 22 nt, Human
gauauuuucauucggaugcuca

SEQ ID NO: 764314 - RNA, 22 nt, Human
ugcauacuuguauguguuacau

SEQ ID NO: 764315 - RNA, 22 nt, Human
aacacugguucugacuacacag

SEQ ID NO: 764316 - RNA, 22 nt, Human
guaaacaugcuguguacucagc

SEQ ID NO: 764317 - RNA, 20 nt, Human
cccucugcacauggcugugg

SEQ ID NO: 764318 - RNA, 22 nt, Human
uuuaugcagccucaguaucaga

SEQ ID NO: 764319 - RNA, 22 nt, Human
agcuucacuuuguacuuuguca

SEQ ID NO: 764320 - RNA, 18 nt, Human
cauccuuauagcugagaa

SEQ ID NO: 764321 - RNA, 22 nt, Human
uauucccacccuaaguaguagg

SEQ ID NO: 764322 - RNA, 22 nt, Human
agagggagcccagucauagcug

SEQ ID NO: 764323 - RNA, 22 nt, Human
caguccagaguaccccaagaag

SEQ ID NO: 764324 - RNA, 22 nt, Human
cuggcucccaugagcucucacg

SEQ ID NO: 764325 - RNA, 22 nt, Human
cgcugggggaacuucagccaau

SEQ ID NO: 764326 - RNA, 22 nt, Human
agugcuuuagagaaauggugcu

SEQ ID NO: 764327 - RNA, 22 nt, Human
uauuucaucuggaacaagguaa

SEQ ID NO: 764328 - RNA, 23 nt, Human
cccagaggagcagggcgugagau

SEQ ID NO: 764329 - RNA, 18 nt, Human
ggucugagaucguuuuuc

SEQ ID NO: 764330 - RNA, 22 nt, Human
gggguggagcuaaaugucuacu

SEQ ID NO: 764331 - RNA, 22 nt, Human
aaggaggagcggaggcuuguug

SEQ ID NO: 764332 - RNA, 22 nt, Human
cuggaagguucuuugugugccu

SEQ ID NO: 764333 - RNA, 22 nt, Human
cugauuaacugaacugaauuua

SEQ ID NO: 764334 - RNA, 22 nt, Human
gaggagaagcuauuggaaggac

SEQ ID NO: 764335 - RNA, 22 nt, Human
gagagaaaagggggaauugauu

SEQ ID NO: 764336 - RNA, 22 nt, Human
uccagaaacuuuuccagucuca

SEQ ID NO: 764337 - RNA, 22 nt, Human
agaggccuccgaaaggugggcu

SEQ ID NO: 764338 - RNA, 19 nt, Human
ucugaagaauuagagagca

SEQ ID NO: 764339 - RNA, 22 nt, Human
ugucccugcuguacuuagagca

SEQ ID NO: 764340 - RNA, 22 nt, Human
cuucugccccuguagccugagu

SEQ ID NO: 764341 - RNA, 22 nt, Human
uguaacacucaaucuguuuaac

SEQ ID NO: 764342 - RNA, 22 nt, Human
cuccaggcucguccaagaucga

SEQ ID NO: 764343 - RNA, 22 nt, Human
agcuccugggcaccucuuucac

SEQ ID NO: 764344 - RNA, 22 nt, Human
uagggcugccuauggcuagaua

SEQ ID NO: 764345 - RNA, 22 nt, Human
aaauguguauaugaaacaugau

SEQ ID NO: 764346 - RNA, 22 nt, Human
gcagcccucggguacucacgug

SEQ ID NO: 764347 - RNA, 22 nt, Human
aauaaauguuaagauugucuca

SEQ ID NO: 764348 - RNA, 22 nt, Human
ggagucugagcuuguguccugg

SEQ ID NO: 764349 - RNA, 23 nt, Human
gcucuggagcugggccuggcagg

SEQ ID NO: 764350 - RNA, 22 nt, Human
aaacagagagauguauguggag

SEQ ID NO: 764351 - RNA, 20 nt, Human
gggguuggcuggcacaggga

SEQ ID NO: 764352 - RNA, 22 nt, Human
uccuggaagugcuuggugaggg

SEQ ID NO: 764353 - RNA, 22 nt, Human
guuacagugcuuggcaauaagu

SEQ ID NO: 764354 - RNA, 22 nt, Human
gagauugggucuugcucuguca

SEQ ID NO: 764355 - RNA, 22 nt, Human
guauuugcaaaucuaaaagaga

SEQ ID NO: 764356 - RNA, 22 nt, Human
guucuggaguggugccaggccu

SEQ ID NO: 764357 - RNA, 22 nt, Human
guagacaagcacaggacucaga

SEQ ID NO: 764358 - RNA, 22 nt, Human
cugccccuggcuggugaagcag

SEQ ID NO: 764359 - RNA, 22 nt, Human
cuccugcaagccuccccaagca

SEQ ID NO: 764360 - RNA, 22 nt, Human
uccagagccuucgauaagaaga

SEQ ID NO: 764361 - RNA, 23 nt, Human
uccagcugcagugggauggggaa

SEQ ID NO: 764362 - RNA, 22 nt, Human
acacauagaaaauaaauaguua

SEQ ID NO: 764363 - RNA, 22 nt, Human
acuuccugaauggggcuaauua

SEQ ID NO: 764364 - RNA, 22 nt, Human
agaguuuguaguggugaaugua

SEQ ID NO: 764365 - RNA, 22 nt, Human
ucagcauguacuucuccuccau

SEQ ID NO: 764366 - RNA, 22 nt, Human
aaacugcacuuuauuuugucaa

SEQ ID NO: 764367 - RNA, 22 nt, Human
acugagguugaaauagugaugu

SEQ ID NO: 764368 - RNA, 22 nt, Human
aagaggccacagcugacagcac

SEQ ID NO: 764369 - RNA, 22 nt, Human
acucaggcuguuuuuuccuugu

SEQ ID NO: 764370 - RNA, 22 nt, Human
ugagggcugacaggaggacagc

SEQ ID NO: 764371 - RNA, 22 nt, Human
cugaaauauuuuaaucucagga

SEQ ID NO: 764372 - RNA, 22 nt, Human
gcccagaguuugaagauacagu

SEQ ID NO: 764373 - RNA, 22 nt, Human
auuaaauguuggcauauuuugu

SEQ ID NO: 764374 - RNA, 22 nt, Human
aaggcauggcaggguuuacaca

SEQ ID NO: 764375 - RNA, 22 nt, Human
cucccuggcuuuguccugaggc

SEQ ID NO: 764376 - RNA, 22 nt, Human
gccagccagggaagggagagac

SEQ ID NO: 764377 - RNA, 22 nt, Human
uggagacugacugccuguauuu

SEQ ID NO: 764378 - RNA, 22 nt, Human
uucaacagcuuccaaagugugu

SEQ ID NO: 764379 - RNA, 22 nt, Human
cagggcaguaccgcccucuggc

SEQ ID NO: 764380 - RNA, 22 nt, Human
ccugggaggcuguuuccagccu

SEQ ID NO: 764381 - RNA, 22 nt, Human
caagggcauugcuugggaccuu

SEQ ID NO: 764382 - RNA, 20 nt, Human
aggauggcaagcaagugcau

SEQ ID NO: 764383 - RNA, 22 nt, Human
accugaaaccaacuuguguacu

SEQ ID NO: 764384 - RNA, 22 nt, Human
aucaguuuguauaugaaacacu

SEQ ID NO: 764385 - RNA, 22 nt, Human
aagacagaccacgugacagggc

SEQ ID NO: 764386 - RNA, 22 nt, Human
cugggcucaaauccuaucucca

SEQ ID NO: 764387 - RNA, 22 nt, Human
uucuaaauggggauccuuucug

SEQ ID NO: 764388 - RNA, 22 nt, Human
uaguuucugaggauugaaagau

SEQ ID NO: 764389 - RNA, 22 nt, Human
uggaucaucuuaagaagugauu

SEQ ID NO: 764390 - RNA, 21 nt, Human
ucacagacuggucagugaggc

SEQ ID NO: 764391 - RNA, 22 nt, Human
uggcugcccucaugggccugau

SEQ ID NO: 764392 - RNA, 22 nt, Human
cagcauggguuccgggggccug

SEQ ID NO: 764393 - RNA, 22 nt, Human
cacacaggagagugcuggaggu

SEQ ID NO: 764394 - RNA, 20 nt, Human
caacagaggggucuggagua

SEQ ID NO: 764395 - RNA, 22 nt, Human
cagggcucaccacugggauccu

SEQ ID NO: 764396 - RNA, 22 nt, Human
auguucuucuaucuuuauuaaa

SEQ ID NO: 764397 - RNA, 22 nt, Human
uucaagaggcuuaauucuggau

SEQ ID NO: 764398 - RNA, 22 nt, Human
gagagacugauguggcuaugua

SEQ ID NO: 764399 - RNA, 22 nt, Human
acuauacauugaauguuaaggu

SEQ ID NO: 764400 - RNA, 19 nt, Human
ugggcagguucaguaaugg

SEQ ID NO: 764401 - RNA, 22 nt, Human
aaggaggaauguagccagcucc

SEQ ID NO: 764402 - RNA, 22 nt, Human
cucucuaacgacauucccauuc

SEQ ID NO: 764403 - RNA, 22 nt, Human
cuguagcaaguuauucaauaaa

SEQ ID NO: 764404 - RNA, 22 nt, Human
cugcaggcccccuuccuggagu

SEQ ID NO: 764405 - RNA, 22 nt, Human
gcaguggcaugaugugggcuca

SEQ ID NO: 764406 - RNA, 22 nt, Human
agacaucauguuacagauuaag

SEQ ID NO: 764407 - RNA, 22 nt, Human
uaauugucaucguaguaaacau

SEQ ID NO: 764408 - RNA, 22 nt, Human
uauuagcagacaagcugcugga

SEQ ID NO: 764409 - RNA, 22 nt, Human
aaaccugauagauuuucagaau

SEQ ID NO: 764410 - RNA, 22 nt, Human
uggaggugacggggccucguug

SEQ ID NO: 764411 - RNA, 21 nt, Human
ucacaacuuugaauuucaaua

SEQ ID NO: 764412 - RNA, 22 nt, Human
auaaagcauuuccccugugugg

SEQ ID NO: 764413 - RNA, 22 nt, Human
acucugcucuguauuucacugu

SEQ ID NO: 764414 - RNA, 22 nt, Human
aaacaccagcacuguuuacaaa

SEQ ID NO: 764415 - RNA, 22 nt, Human
cucuggaguccuguaucacucc

SEQ ID NO: 764416 - RNA, 20 nt, Human
guuaggagguuggacaugga

SEQ ID NO: 764417 - RNA, 22 nt, Human
aggcagugugggccaagcuucc

SEQ ID NO: 764418 - RNA, 22 nt, Human
agacaccagaaucuguugagca

SEQ ID NO: 764419 - RNA, 22 nt, Human
gagauucucagaaguacuagga

SEQ ID NO: 764420 - RNA, 22 nt, Human
ucuuuggcuaugauuuacuguu

SEQ ID NO: 764421 - RNA, 22 nt, Human
cuuugcuugacacugugauugu

SEQ ID NO: 764422 - RNA, 23 nt, Human
gaauacagagauaaauagaacac

SEQ ID NO: 764423 - RNA, 22 nt, Human
gccaccucggcuuucucugcuc

SEQ ID NO: 764424 - RNA, 20 nt, Human
cuccaguguucaggggagug

SEQ ID NO: 764425 - RNA, 22 nt, Human
cucuuacauucuuuuacuagca

SEQ ID NO: 764426 - RNA, 22 nt, Human
ugggcuggcccaccacaccucg

SEQ ID NO: 764427 - RNA, 22 nt, Human
ggcagauggaaugagcugucua

SEQ ID NO: 764428 - RNA, 22 nt, Human
uugcaagauguuaccauuguua

SEQ ID NO: 764429 - RNA, 22 nt, Human
uugcauuuauagacugccauuu

SEQ ID NO: 764430 - RNA, 20 nt, Human
ugcagggcugccucccagcu

SEQ ID NO: 764431 - RNA, 22 nt, Human
ccuccaggaacuugagagacac

SEQ ID NO: 764432 - RNA, 22 nt, Human
gcccucugcucagcuccucagc

SEQ ID NO: 764433 - RNA, 22 nt, Human
ccucuccagcggccucagggcc

SEQ ID NO: 764434 - RNA, 22 nt, Human
cccuggaguagcacugggucgc

SEQ ID NO: 764435 - RNA, 22 nt, Human
caggccuggggcuggcuuccag

SEQ ID NO: 764436 - RNA, 22 nt, Human
gagccagcagccggcaccacca

SEQ ID NO: 764437 - RNA, 22 nt, Human
cccugcuaguugucucagugau

SEQ ID NO: 764438 - RNA, 22 nt, Human
uauauaauuuucugccauaucc

SEQ ID NO: 764439 - RNA, 22 nt, Human
ugagaguagagucuucaucugu

SEQ ID NO: 764440 - RNA, 20 nt, Human
agcuggcccccgguggccug

SEQ ID NO: 764441 - RNA, 21 nt, Human
ucagaguguguuacagcaagc

SEQ ID NO: 764442 - RNA, 20 nt, Human
ugugugcacacaugacauuc

SEQ ID NO: 764443 - RNA, 22 nt, Human
agagggagaaaagaaucaguug

SEQ ID NO: 764444 - RNA, 22 nt, Human
caggagauaaaagagaugcuuu

SEQ ID NO: 764445 - RNA, 22 nt, Human
aaguuucaugacuugguuauua

SEQ ID NO: 764446 - RNA, 22 nt, Human
ucugcagcuuuuugguggggug

SEQ ID NO: 764447 - RNA, 22 nt, Human
ugcaccaguuucucagagaauc

SEQ ID NO: 764448 - RNA, 22 nt, Human
cauggauauauuguacaguagc

SEQ ID NO: 764449 - RNA, 22 nt, Human
caagcuacuuagaaagcacagu

SEQ ID NO: 764450 - RNA, 22 nt, Human
cagagcuggccugugauuuuug

SEQ ID NO: 764451 - RNA, 22 nt, Human
aggauggcgauucgagcaccuc

SEQ ID NO: 764452 - RNA, 22 nt, Human
ugauuacaguauuugagaucca

SEQ ID NO: 764453 - RNA, 22 nt, Human
guccugggcccaggggcugccu

SEQ ID NO: 764454 - RNA, 22 nt, Human
ucugaaaugaacucuugaacuu

SEQ ID NO: 764455 - RNA, 22 nt, Human
aggccuggcuuugguuugcuga

SEQ ID NO: 764456 - RNA, 22 nt, Human
gcauccucugagagcucuagau

SEQ ID NO: 764457 - RNA, 22 nt, Human
cugaaaggcaguggguagugug

SEQ ID NO: 764458 - RNA, 22 nt, Human
ccauacacacaccaaauuugua

SEQ ID NO: 764459 - RNA, 20 nt, Human
agaaggcaggagacaaaagg

SEQ ID NO: 764460 - RNA, 22 nt, Human
gucuccagccauucucugauca

SEQ ID NO: 764461 - RNA, 21 nt, Human
gagcauggcuuacaucagcag

SEQ ID NO: 764462 - RNA, 22 nt, Human
ucugggaugagaucagagacac

SEQ ID NO: 764463 - RNA, 22 nt, Human
gaauaucccgcuaugcaaagua

SEQ ID NO: 764464 - RNA, 22 nt, Human
gaauugcuaauccaagugacug

SEQ ID NO: 764465 - RNA, 22 nt, Human
uuacucauugcuggaucuagaa

SEQ ID NO: 764466 - RNA, 22 nt, Human
ggcagguagccuagaggagguu

SEQ ID NO: 764467 - RNA, 22 nt, Human
gaaaguauucucccugaauuuu

SEQ ID NO: 764468 - RNA, 22 nt, Human
aaacacuagcaggaagcacuga

SEQ ID NO: 764469 - RNA, 22 nt, Human
ucugaggguuguagagagggac

SEQ ID NO: 764470 - RNA, 22 nt, Human
uuuauucugugcuacaugaaga

SEQ ID NO: 764471 - RNA, 22 nt, Human
uggaagacaauguacaugcagu

SEQ ID NO: 764472 - RNA, 21 nt, Human
gaguccuggcuaggguggcag

SEQ ID NO: 764473 - RNA, 17 nt, Human
ugagacagggcaggccc

SEQ ID NO: 764474 - RNA, 22 nt, Human
aaacaaguguaaacuagucugu

SEQ ID NO: 764475 - RNA, 21 nt, Human
ugaggcaggggugcuuuuguc

SEQ ID NO: 764476 - RNA, 21 nt, Human
ucagaacaauuccaugccucc

SEQ ID NO: 764477 - RNA, 22 nt, Human
ggccuugggcuggcugcaguau

SEQ ID NO: 764478 - RNA, 22 nt, Human
cacagaggauuuuuagggcagu

SEQ ID NO: 764479 - RNA, 22 nt, Human
agcauaaaggucaacguuuuag

SEQ ID NO: 764480 - RNA, 22 nt, Human
aaagcaaugcccguucauuauc

SEQ ID NO: 764481 - RNA, 22 nt, Human
cucugggucaggacacaaaagu

SEQ ID NO: 764482 - RNA, 20 nt, Human
agcacuagguguggcaggug

SEQ ID NO: 764483 - RNA, 22 nt, Human
auucaagagcuggcuuugaaau

SEQ ID NO: 764484 - RNA, 22 nt, Human
augggccaaguaaacauucuca

SEQ ID NO: 764485 - RNA, 22 nt, Human
cauggcuucaaagccuuuggca

SEQ ID NO: 764486 - RNA, 22 nt, Human
cuggcaggcaaauuggugggag

SEQ ID NO: 764487 - RNA, 21 nt, Human
ucagaguggaagacaguuuga

SEQ ID NO: 764488 - RNA, 22 nt, Human
cuacagaaaaucagccacaggc

SEQ ID NO: 764489 - RNA, 22 nt, Human
acuauacaguauguacgugcac

SEQ ID NO: 764490 - RNA, 22 nt, Human
aucuuuccuguuuucagacagc

SEQ ID NO: 764491 - RNA, 22 nt, Human
ccagagcuugacgugcaacgga

SEQ ID NO: 764492 - RNA, 22 nt, Human
uccucagacuucccuuugugua

SEQ ID NO: 764493 - RNA, 22 nt, Human
gucugaaaauaugauuuugccu

SEQ ID NO: 764494 - RNA, 22 nt, Human
uugagguauugauauuuuauga

SEQ ID NO: 764495 - RNA, 22 nt, Human
guauuauuggguaguaugguaa

SEQ ID NO: 764496 - RNA, 22 nt, Human
aaacgguugcucauaguuacau

SEQ ID NO: 764497 - RNA, 22 nt, Human
cuguggugagcaacugacugaa

SEQ ID NO: 764498 - RNA, 22 nt, Human
cccugcccaccacaugcuggga

SEQ ID NO: 764499 - RNA, 22 nt, Human
acugaggucucagguggggaag

SEQ ID NO: 764500 - RNA, 22 nt, Human
guuuagaugagauuuuagaaca

SEQ ID NO: 764501 - RNA, 22 nt, Human
gcagagugauggaaugugggug

SEQ ID NO: 764502 - RNA, 22 nt, Human
cugcccaccgugugcacgugcg

SEQ ID NO: 764503 - RNA, 22 nt, Human
uugcaccauuucacuuccauua

SEQ ID NO: 764504 - RNA, 22 nt, Human
acucucugggcaugccccacca

SEQ ID NO: 764505 - RNA, 22 nt, Human
uccugggagcaugaagagggau

SEQ ID NO: 764506 - RNA, 22 nt, Human
uguguuuguuagacuaauguua

SEQ ID NO: 764507 - RNA, 22 nt, Human
cucagcuccagcccucagcagc

SEQ ID NO: 764508 - RNA, 22 nt, Human
caccugagugucaguauucuca

SEQ ID NO: 764509 - RNA, 23 nt, Human
uugcuuccacuguaaguggagaa

SEQ ID NO: 764510 - RNA, 18 nt, Human
agcaggugugcagaaugu

SEQ ID NO: 764511 - RNA, 22 nt, Human
cuuaacuugaugucucucugcu

SEQ ID NO: 764512 - RNA, 22 nt, Human
gucuauuugggaucaugauaug

SEQ ID NO: 764513 - RNA, 22 nt, Human
aguugacauccagagacauucu

SEQ ID NO: 764514 - RNA, 22 nt, Human
gaaucugcauuuuaacaagauc

SEQ ID NO: 764515 - RNA, 21 nt, Human
caguagugcgucgcagaggac

SEQ ID NO: 764516 - RNA, 22 nt, Human
aggagagagguuuuaaaugggg

SEQ ID NO: 764517 - RNA, 22 nt, Human
augacaauauagcuuugauuuu

SEQ ID NO: 764518 - RNA, 22 nt, Human
ggggccuccagcacuaggcagc

SEQ ID NO: 764519 - RNA, 22 nt, Human
aggcugagguaggaggaucgcu

SEQ ID NO: 764520 - RNA, 22 nt, Human
aggacagagggaccagagccca

SEQ ID NO: 764521 - RNA, 22 nt, Human
ucucaccauggugcuugcuuau

SEQ ID NO: 764522 - RNA, 22 nt, Human
uaaugaacaauauaucaauagc

SEQ ID NO: 764523 - RNA, 22 nt, Human
aggcuccaggcaauguuucuga

SEQ ID NO: 764524 - RNA, 22 nt, Human
ugcuguccugcugagggaugug

SEQ ID NO: 764525 - RNA, 19 nt, Human
ugcuuaccaucugugcugg

SEQ ID NO: 764526 - RNA, 22 nt, Human
ggaggagacggagugauuagug

SEQ ID NO: 764527 - RNA, 22 nt, Human
aggcaaaucugagacauuuaaa

SEQ ID NO: 764528 - RNA, 22 nt, Human
gggagaagaaugugucaauugu

SEQ ID NO: 764529 - RNA, 22 nt, Human
caccuggaugccacaaagccac

SEQ ID NO: 764530 - RNA, 22 nt, Human
uucugcuguuuguaguaaugua

SEQ ID NO: 764531 - RNA, 22 nt, Human
uggagccaaugaacauuugcug

SEQ ID NO: 764532 - RNA, 22 nt, Human
aaguccauaguuugcauuaggg

SEQ ID NO: 764533 - RNA, 22 nt, Human
auguguuuugguggaucauuca

SEQ ID NO: 764534 - RNA, 22 nt, Human
ggcccucuguggcugccaugga

SEQ ID NO: 764535 - RNA, 22 nt, Human
agguguggcuggggcagaggcc

SEQ ID NO: 764536 - RNA, 22 nt, Human
uguguguucucaauuauugaug

SEQ ID NO: 764537 - RNA, 22 nt, Human
uguuuaagcugaugagguaucg

SEQ ID NO: 764538 - RNA, 17 nt, Human
uagcacagugccuggua

SEQ ID NO: 764539 - RNA, 22 nt, Human
ugccugaugcaggaguaucaga

SEQ ID NO: 764540 - RNA, 23 nt, Human
aaacugcaucucugagccucagc

SEQ ID NO: 764541 - RNA, 22 nt, Human
cuuccuuggcuucuggggugug

SEQ ID NO: 764542 - RNA, 22 nt, Human
ugcagcugcuggcccaggugcu

SEQ ID NO: 764543 - RNA, 22 nt, Human
cucugggcaccaaagagcagcu

SEQ ID NO: 764544 - RNA, 22 nt, Human
acucuucacacaugcugcccuc

SEQ ID NO: 764545 - RNA, 22 nt, Human
gucccagggaagaaggcagcac

SEQ ID NO: 764546 - RNA, 22 nt, Human
ucucuugggaggaaagagagaa

SEQ ID NO: 764547 - RNA, 19 nt, Human
uuguccagaaaggcauugc

SEQ ID NO: 764548 - RNA, 19 nt, Human
gcagagugggguggagggu

SEQ ID NO: 764549 - RNA, 22 nt, Human
auacacagcgaugagaggaggc

SEQ ID NO: 764550 - RNA, 22 nt, Human
cagcugugacagccaguugaug

SEQ ID NO: 764551 - RNA, 22 nt, Human
uuugaugaugaugauaaaguuu

SEQ ID NO: 764552 - RNA, 22 nt, Human
ucaaagccuguggauaguuugg

SEQ ID NO: 764553 - RNA, 22 nt, Human
uuagucucuuugcauugccaua

SEQ ID NO: 764554 - RNA, 22 nt, Human
gcccagaguggccacuuggcuc

SEQ ID NO: 764555 - RNA, 22 nt, Human
uuugacauggaauaacucauuu

SEQ ID NO: 764556 - RNA, 22 nt, Human
gcuggcuugauaguuucugcuu

SEQ ID NO: 764557 - RNA, 22 nt, Human
caaauacugagcacgcaaucaa

SEQ ID NO: 764558 - RNA, 22 nt, Human
gggggcgggagacagcagugac

SEQ ID NO: 764559 - RNA, 22 nt, Human
gauucugcugucccuaagugcc

SEQ ID NO: 764560 - RNA, 22 nt, Human
uuuauauaacagagacugcuau

SEQ ID NO: 764561 - RNA, 16 nt, Human
uagagagggcagggag

SEQ ID NO: 764562 - RNA, 22 nt, Human
augaauaaaacauuuuaaucag

SEQ ID NO: 764563 - RNA, 22 nt, Human
gaucuuuacuacugccuucucu

SEQ ID NO: 764564 - RNA, 20 nt, Human
ucuguuauuauuacauugcc

SEQ ID NO: 764565 - RNA, 22 nt, Human
cugguccuugacgcgugggagg

SEQ ID NO: 764566 - RNA, 22 nt, Human
cugcagggacccaagucuuugg

SEQ ID NO: 764567 - RNA, 22 nt, Human
uccccugagaccccucagcacu

SEQ ID NO: 764568 - RNA, 22 nt, Human
ucaggaaguuuugaaucaacug

SEQ ID NO: 764569 - RNA, 22 nt, Human
gaagaaucugaggacagucauu

SEQ ID NO: 764570 - RNA, 22 nt, Human
aaggcagccgugugacugcaug

SEQ ID NO: 764571 - RNA, 22 nt, Human
aacuuagucuuucaauuugaua

SEQ ID NO: 764572 - RNA, 22 nt, Human
uuuagcuaagacauagauucuu

SEQ ID NO: 764573 - RNA, 22 nt, Human
aagcagcugauuucacagcuca

SEQ ID NO: 764574 - RNA, 22 nt, Human
uuggaauuuuccagguacagug

SEQ ID NO: 764575 - RNA, 22 nt, Human
ucuccaagcagggcugcaaggc

SEQ ID NO: 764576 - RNA, 20 nt, Human
aggcuguugacggcugccuc

SEQ ID NO: 764577 - RNA, 22 nt, Human
uaacaacugaggaagaggcaga

SEQ ID NO: 764578 - RNA, 17 nt, Human
cagcucuuccucccucu

SEQ ID NO: 764579 - RNA, 22 nt, Human
caaggaaggagagaugaugggu

SEQ ID NO: 764580 - RNA, 22 nt, Human
gaauuuaaauuuaaaucuacca

SEQ ID NO: 764581 - RNA, 22 nt, Human
agaggcacagaggcaguccccu

SEQ ID NO: 764582 - RNA, 22 nt, Human
ugcgcgcuggcgucacuuagca

SEQ ID NO: 764583 - RNA, 22 nt, Human
ccauggcuucuuucucugccag

SEQ ID NO: 764584 - RNA, 18 nt, Human
aaguggcacaggagugca

SEQ ID NO: 764585 - RNA, 22 nt, Human
auaaaugugaaaugagcaguua

SEQ ID NO: 764586 - RNA, 22 nt, Human
aaugggaaagagacuagaugcu

SEQ ID NO: 764587 - RNA, 22 nt, Human
aguaucauguuggaauuaauca

SEQ ID NO: 764588 - RNA, 22 nt, Human
ucuuugcuccacacucuagaga

SEQ ID NO: 764589 - RNA, 23 nt, Human
uauugcacacauagaaacauaga

SEQ ID NO: 764590 - RNA, 22 nt, Human
aggggccuccucauuggagugu

SEQ ID NO: 764591 - RNA, 22 nt, Human
cucccuggaggugagcuggcac

SEQ ID NO: 764592 - RNA, 22 nt, Human
auccucugaccgcugcagggag

SEQ ID NO: 764593 - RNA, 22 nt, Human
gcucuuuggauuccuuuacaaa

SEQ ID NO: 764594 - RNA, 22 nt, Human
ucccaguggugggugcacauuu

SEQ ID NO: 764595 - RNA, 22 nt, Human
uuucuguauuuaaaagaucugg

SEQ ID NO: 764596 - RNA, 22 nt, Human
gccagucugcucccacaaguuc

SEQ ID NO: 764597 - RNA, 21 nt, Human
acacacugaguuuuccacugu

SEQ ID NO: 764598 - RNA, 22 nt, Human
ugaggggauacgguacacauug

SEQ ID NO: 764599 - RNA, 18 nt, Human
uggcucugcagccagaug

SEQ ID NO: 764600 - RNA, 22 nt, Human
ucuuuccagaggaauuuuuaga

SEQ ID NO: 764601 - RNA, 22 nt, Human
uuuuacacuucgguugugugca

SEQ ID NO: 764602 - RNA, 22 nt, Human
auccagaguaauacagaaugca

SEQ ID NO: 764603 - RNA, 22 nt, Human
aauagcuuuggucaccaucugg

SEQ ID NO: 764604 - RNA, 22 nt, Human
cuuggcuggaacuccugagaaa

SEQ ID NO: 764605 - RNA, 22 nt, Human
ggagggagucagcugauuagaa

SEQ ID NO: 764606 - RNA, 22 nt, Human
uuucuacauuuguaaccagauu

SEQ ID NO: 764607 - RNA, 22 nt, Human
gccuguggccacugcgucugca

SEQ ID NO: 764608 - RNA, 22 nt, Human
ucuuccuuguaagggcuuuaga

SEQ ID NO: 764609 - RNA, 22 nt, Human
ucuggccaggggucccugaagg

SEQ ID NO: 764610 - RNA, 22 nt, Human
augcccugccaagcaggcuaaa

SEQ ID NO: 764611 - RNA, 22 nt, Human
aguugugaauagaucugauugg

SEQ ID NO: 764612 - RNA, 22 nt, Human
aaauggcuacaagaugugcucu

SEQ ID NO: 764613 - RNA, 22 nt, Human
ggacgcagccgagggagcaggg

SEQ ID NO: 764614 - RNA, 22 nt, Human
uuucauauuauuccuugagucu

SEQ ID NO: 764615 - RNA, 22 nt, Human
cuauugaaaguguacaauucaa

SEQ ID NO: 764616 - RNA, 19 nt, Human
ugcuucuggggcuucucca

SEQ ID NO: 764617 - RNA, 22 nt, Human
acaagaguaucuuugacuuuag

SEQ ID NO: 764618 - RNA, 22 nt, Human
uuagccagugaaauggagaaau

SEQ ID NO: 764619 - RNA, 22 nt, Human
acucaguggcacuuuggaauuu

SEQ ID NO: 764620 - RNA, 22 nt, Human
auuucccagcuuugaucaguuu

SEQ ID NO: 764621 - RNA, 22 nt, Human
cagugagaauucaguagguacu

SEQ ID NO: 764622 - RNA, 22 nt, Human
ugguccuggccuugaccccagg

SEQ ID NO: 764623 - RNA, 22 nt, Human
cagcaucuuucucuucuggagu

SEQ ID NO: 764624 - RNA, 18 nt, Human
ucuucaucuccugagcug

SEQ ID NO: 764625 - RNA, 22 nt, Human
guuucagauuugguuucagaag

SEQ ID NO: 764626 - RNA, 22 nt, Human
ucucacacaacauguuacuuug

SEQ ID NO: 764627 - RNA, 22 nt, Human
gugcauuugacgaauacucacu

SEQ ID NO: 764628 - RNA, 21 nt, Human
uagaaagucaaagcuaucagc

SEQ ID NO: 764629 - RNA, 22 nt, Human
ucuaaaugugguagucauaaga

SEQ ID NO: 764630 - RNA, 22 nt, Human
gauaaauugcacuuuuucuuac

SEQ ID NO: 764631 - RNA, 22 nt, Human
aucagagacaaaaccagcacuu

SEQ ID NO: 764632 - RNA, 22 nt, Human
ucacacagugagaaagugcgga

SEQ ID NO: 764633 - RNA, 22 nt, Human
uacaggaagcacucaagaaaug

SEQ ID NO: 764634 - RNA, 22 nt, Human
gccugagaaggacacagcaggu

SEQ ID NO: 764635 - RNA, 19 nt, Human
ccagcagaagccacuccug

SEQ ID NO: 764636 - RNA, 22 nt, Human
gcauuccuacaggcugcuauga

SEQ ID NO: 764637 - RNA, 22 nt, Human
gggugaggcccauuugaggcca

SEQ ID NO: 764638 - RNA, 22 nt, Human
gccacaggugggcucugggaaa

SEQ ID NO: 764639 - RNA, 18 nt, Human
agggagagaccgcggguc

SEQ ID NO: 764640 - RNA, 22 nt, Human
aagucaucuugagucuaagauu

SEQ ID NO: 764641 - RNA, 22 nt, Human
gaagacauguuuuuaauaugua

SEQ ID NO: 764642 - RNA, 22 nt, Human
cacaauguguuggguuaaguuu

SEQ ID NO: 764643 - RNA, 22 nt, Human
ggggagaauuacauggcgugga

SEQ ID NO: 764644 - RNA, 22 nt, Human
uauggcuuaggagaguuuaacu

SEQ ID NO: 764645 - RNA, 22 nt, Human
cgagcaugaugacggcuguggc

SEQ ID NO: 764646 - RNA, 22 nt, Human
aaaggcaggacugcagcauagg

SEQ ID NO: 764647 - RNA, 22 nt, Human
acaaauaugguacucggagaaa

SEQ ID NO: 764648 - RNA, 20 nt, Human
cucucuccaucucaguggcc

SEQ ID NO: 764649 - RNA, 22 nt, Human
aguggcugccaagauauaauuc

SEQ ID NO: 764650 - RNA, 22 nt, Human
gcugccugccuugccuggagga

SEQ ID NO: 764651 - RNA, 22 nt, Human
gcagucauccagccuuuccacu

SEQ ID NO: 764652 - RNA, 22 nt, Human
uuuauugacccaaagcgagagu

SEQ ID NO: 764653 - RNA, 22 nt, Human
acugcacaaggccuggacacac

SEQ ID NO: 764654 - RNA, 22 nt, Human
agcauuuaugacuaauguaaaa

SEQ ID NO: 764655 - RNA, 22 nt, Human
ccugucugaaucaugauuuccu

SEQ ID NO: 764656 - RNA, 20 nt, Human
agguccuguuccuugucucc

SEQ ID NO: 764657 - RNA, 22 nt, Human
aacagcuuagaaauguugcuaa

SEQ ID NO: 764658 - RNA, 22 nt, Human
acaggcuugcacuaggguggca

SEQ ID NO: 764659 - RNA, 22 nt, Human
aucacaaaggucucagagcaca

SEQ ID NO: 764660 - RNA, 22 nt, Human
uacagaaaucacaucgcuuuga

SEQ ID NO: 764661 - RNA, 22 nt, Human
ccugacuuaagucuccuguugg

SEQ ID NO: 764662 - RNA, 22 nt, Human
ccacaggacacaacugcugacc

SEQ ID NO: 764663 - RNA, 22 nt, Human
gugaggugggcugggcucuaug

SEQ ID NO: 764664 - RNA, 22 nt, Human
uuuuagaaguucacuuggguuu

SEQ ID NO: 764665 - RNA, 22 nt, Human
cuagggcucgcaagggcuggag

SEQ ID NO: 764666 - RNA, 22 nt, Human
cagacagaaggaaggccaacau

SEQ ID NO: 764667 - RNA, 22 nt, Human
ccagccagaugauaagcucuau

SEQ ID NO: 764668 - RNA, 22 nt, Human
acacuuguguugaaagcuguua

SEQ ID NO: 764669 - RNA, 22 nt, Human
ggagguagucugagucauaggc

SEQ ID NO: 764670 - RNA, 22 nt, Human
uuacaugaauacauaaccauuc

SEQ ID NO: 764671 - RNA, 22 nt, Human
agaagagccuggggaccauggc

SEQ ID NO: 764672 - RNA, 22 nt, Human
auggaaaggcuguggaaacuua

SEQ ID NO: 764673 - RNA, 22 nt, Human
aguuucacuaaggucugugugu

SEQ ID NO: 764674 - RNA, 23 nt, Human
uacauuguggauggaguccuggg

SEQ ID NO: 764675 - RNA, 22 nt, Human
gcugggaacacagccaugagag

SEQ ID NO: 764676 - RNA, 22 nt, Human
ugcggguugguggcauaugcag

SEQ ID NO: 764677 - RNA, 22 nt, Human
caggagaagguuuggagugcag

SEQ ID NO: 764678 - RNA, 22 nt, Human
gcagggcuccccaggcccgagg

SEQ ID NO: 764679 - RNA, 19 nt, Human
cuuggagaaggcuaugacc

SEQ ID NO: 764680 - RNA, 22 nt, Human
gcagggcuaauggggcaaguag

SEQ ID NO: 764681 - RNA, 22 nt, Human
agucagcagugaaagcacagcc

SEQ ID NO: 764682 - RNA, 22 nt, Human
gcaguccaaaguggcucucacc

SEQ ID NO: 764683 - RNA, 22 nt, Human
ggucagccccugcucaaggccg

SEQ ID NO: 764684 - RNA, 22 nt, Human
agaaagugccucccuugggagc

SEQ ID NO: 764685 - RNA, 22 nt, Human
ugagcagagcaauaggacucuc

SEQ ID NO: 764686 - RNA, 21 nt, Human
ggagggcagcccagacuggcu

SEQ ID NO: 764687 - RNA, 18 nt, Human
ucaggcucucuggcuaga

SEQ ID NO: 764688 - RNA, 21 nt, Human
gucuuuuaagugaagagaggc

SEQ ID NO: 764689 - RNA, 22 nt, Human
gucggccacgcaggugcgguag

SEQ ID NO: 764690 - RNA, 22 nt, Human
ucacacagauugguagagcuga

SEQ ID NO: 764691 - RNA, 22 nt, Human
cuuccucccccacacacucacu

SEQ ID NO: 764692 - RNA, 22 nt, Human
gaagggcucaucagguggccgc

SEQ ID NO: 764693 - RNA, 22 nt, Human
uguuaacauaguggcgcaucug

SEQ ID NO: 764694 - RNA, 19 nt, Human
auacaugcauuuacaugcu

SEQ ID NO: 764695 - RNA, 21 nt, Human
gagagcuaacagugacagcuc

SEQ ID NO: 764696 - RNA, 20 nt, Human
ccucaggccaguuuuaaagu

SEQ ID NO: 764697 - RNA, 22 nt, Human
auugaaguccuaaucuccagua

SEQ ID NO: 764698 - RNA, 23 nt, Human
acugggccagcuacuuagcacug

SEQ ID NO: 764699 - RNA, 22 nt, Human
aaaagcagaucuccaaagucua

SEQ ID NO: 764700 - RNA, 22 nt, Human
aaagaacuaaugugcaagguuu

SEQ ID NO: 764701 - RNA, 22 nt, Human
gucuuucuuaauucaagugcuu

SEQ ID NO: 764702 - RNA, 22 nt, Human
acagggcucugacaccaaggua

SEQ ID NO: 764703 - RNA, 22 nt, Human
aauuauacaugaaggcauuaua

SEQ ID NO: 764704 - RNA, 22 nt, Human
uuacagaacugcccuaguuggc

SEQ ID NO: 764705 - RNA, 22 nt, Human
aaugcauucuuucauggaccug

SEQ ID NO: 764706 - RNA, 22 nt, Human
guggccuuuuagaauaaacucu

SEQ ID NO: 764707 - RNA, 22 nt, Human
aagugguuuuaagagguuccuu

SEQ ID NO: 764708 - RNA, 22 nt, Human
cagcugggccuccugagcccug

SEQ ID NO: 764709 - RNA, 22 nt, Human
cagggccugagggcugcucugc

SEQ ID NO: 764710 - RNA, 21 nt, Human
ggcagagcuggggccuccagc

SEQ ID NO: 764711 - RNA, 22 nt, Human
ggagcuguuauggcauaagcau

SEQ ID NO: 764712 - RNA, 23 nt, Human
uggacccugcacaccagcucuac

SEQ ID NO: 764713 - RNA, 22 nt, Human
uucagaaaucgaguuucauguc

SEQ ID NO: 764714 - RNA, 22 nt, Human
uuccuguggccuuacaucugug

SEQ ID NO: 764715 - RNA, 22 nt, Human
uguaaaauaauucuccauguuu

SEQ ID NO: 764716 - RNA, 22 nt, Human
guucauccauauuauagcaugu

SEQ ID NO: 764717 - RNA, 22 nt, Human
cagcccugcagagggcgcuccu

SEQ ID NO: 764718 - RNA, 19 nt, Human
acucaggcuuccucugagg

SEQ ID NO: 764719 - RNA, 22 nt, Human
ugguggcuucugaggauggcga

SEQ ID NO: 764720 - RNA, 22 nt, Human
ucacugugaauguuaucaucuu

SEQ ID NO: 764721 - RNA, 22 nt, Human
auagaugucauugucauccauc

SEQ ID NO: 764722 - RNA, 22 nt, Human
gccaccugcgggccguggugga

SEQ ID NO: 764723 - RNA, 19 nt, Human
uucugggaggggcugacug

SEQ ID NO: 764724 - RNA, 22 nt, Human
cucacagcugcuucaggaucca

SEQ ID NO: 764725 - RNA, 22 nt, Human
caugagcauuuuggucuaguuu

SEQ ID NO: 764726 - RNA, 22 nt, Human
cugggcaggauacuucauggga

SEQ ID NO: 764727 - RNA, 22 nt, Human
guucucagggauaacuuccccc

SEQ ID NO: 764728 - RNA, 22 nt, Human
uacacugucagauuucgauugc

SEQ ID NO: 764729 - RNA, 19 nt, Human
uagagcugcuuccuggcag

SEQ ID NO: 764730 - RNA, 23 nt, Human
ugugucugaggauauaugugcau

SEQ ID NO: 764731 - RNA, 22 nt, Human
uguggcauacacaugagguggu

SEQ ID NO: 764732 - RNA, 22 nt, Human
ccagcucuuuuggcugagugag

SEQ ID NO: 764733 - RNA, 22 nt, Human
uuaguuagucccugguaccuuu

SEQ ID NO: 764734 - RNA, 22 nt, Human
aguaaacaguuucuuagaagaa

SEQ ID NO: 764735 - RNA, 22 nt, Human
uucugaaaggcaugucagguag

SEQ ID NO: 764736 - RNA, 22 nt, Human
auccaggccugagucugguccu

SEQ ID NO: 764737 - RNA, 20 nt, Human
ucagccagcuaacaugggga

SEQ ID NO: 764738 - RNA, 19 nt, Human
acuuucuccaggaccuguu

SEQ ID NO: 764739 - RNA, 22 nt, Human
ccccaccuugcaauuguucccu

SEQ ID NO: 764740 - RNA, 22 nt, Human
gcuaggaggcccugcacgcuua

SEQ ID NO: 764741 - RNA, 22 nt, Human
aucugacaaggccacauauucu

SEQ ID NO: 764742 - RNA, 22 nt, Human
cauaauuaaauucugggcaaga

SEQ ID NO: 764743 - RNA, 22 nt, Human
aggaauucaagaccagcugggc

SEQ ID NO: 764744 - RNA, 22 nt, Human
ucaguaucaugcgguagccaug

SEQ ID NO: 764745 - RNA, 22 nt, Human
uacauuagcaaacaucuuggug

SEQ ID NO: 764746 - RNA, 22 nt, Human
ggcugccucuauuuaggaucaa

SEQ ID NO: 764747 - RNA, 22 nt, Human
aaaguguaaaagcauguuaggg

SEQ ID NO: 764748 - RNA, 22 nt, Human
ugucucugggugauucaguccu

SEQ ID NO: 764749 - RNA, 22 nt, Human
cugaggcacugguaaugggcau

SEQ ID NO: 764750 - RNA, 22 nt, Human
cugcugucccagccuccucaca

SEQ ID NO: 764751 - RNA, 22 nt, Human
uggcaugggccagggagagcug

SEQ ID NO: 764752 - RNA, 22 nt, Human
uauauuuaauccuagagccauu

SEQ ID NO: 764753 - RNA, 22 nt, Human
auuguucaauguaauaauuuug

SEQ ID NO: 764754 - RNA, 22 nt, Human
caguccuucuccauuaaggcuc

SEQ ID NO: 764755 - RNA, 22 nt, Human
ccuaagauugcaaacucucucc

SEQ ID NO: 764756 - RNA, 23 nt, Human
acacuucacccauugugauagga

SEQ ID NO: 764757 - RNA, 22 nt, Human
acaaguuuauuugauuagaaca

SEQ ID NO: 764758 - RNA, 22 nt, Human
gucagcgugcucagccuauuau

SEQ ID NO: 764759 - RNA, 22 nt, Human
aagggcaggagaagacggauau

SEQ ID NO: 764760 - RNA, 22 nt, Human
gcaaacagccaggcgcagaagu

SEQ ID NO: 764761 - RNA, 22 nt, Human
uucaguauucaaauaugucuua

SEQ ID NO: 764762 - RNA, 22 nt, Human
aauaggaagucacaucaaggga

SEQ ID NO: 764763 - RNA, 22 nt, Human
aaucagaaaauucaguggaauu

SEQ ID NO: 764764 - RNA, 22 nt, Human
gcuggcugguccagcaggggcu

SEQ ID NO: 764765 - RNA, 22 nt, Human
gggaagugaggagccccucugc

SEQ ID NO: 764766 - RNA, 22 nt, Human
ccaguuuaagacuuaucucaau

SEQ ID NO: 764767 - RNA, 22 nt, Human
agugaaauuccuggucuuuguu

SEQ ID NO: 764768 - RNA, 22 nt, Human
uauggcuuaugcugaacaccug

SEQ ID NO: 764769 - RNA, 22 nt, Human
ccaggcaucacgggcauguggc

SEQ ID NO: 764770 - RNA, 22 nt, Human
aacacuggaagggacaucaagu

SEQ ID NO: 764771 - RNA, 22 nt, Human
auggaaauggagggugcuagaa

SEQ ID NO: 764772 - RNA, 22 nt, Human
cugccucuccccagaguggccc

SEQ ID NO: 764773 - RNA, 21 nt, Human
ugcagaaagcggcuugaagca

SEQ ID NO: 764774 - RNA, 22 nt, Human
caaaagucuguccuuuaacuuc

SEQ ID NO: 764775 - RNA, 22 nt, Human
agaaagguggaugcucuggaau

SEQ ID NO: 764776 - RNA, 22 nt, Human
uucuaauacacgguaugacuuu

SEQ ID NO: 764777 - RNA, 22 nt, Human
ugauggaagguuucucggugau

SEQ ID NO: 764778 - RNA, 19 nt, Human
ucagaauucugucucuuga

SEQ ID NO: 764779 - RNA, 23 nt, Human
ugggguugaauuguagcugugcc

SEQ ID NO: 764780 - RNA, 22 nt, Human
cauuguauugaggauacuuaag

SEQ ID NO: 764781 - RNA, 22 nt, Human
cagcccacugccucugugguag

SEQ ID NO: 764782 - RNA, 22 nt, Human
ucacaagaguaaguucaugccu

SEQ ID NO: 764783 - RNA, 22 nt, Human
gggcugccuuucuucugggagc

SEQ ID NO: 764784 - RNA, 22 nt, Human
uugccucaagauuuuuuauuga

SEQ ID NO: 764785 - RNA, 22 nt, Human
ccugggcagggcuggacucuca

SEQ ID NO: 764786 - RNA, 22 nt, Human
aaagcaagacaggaguuucaga

SEQ ID NO: 764787 - RNA, 22 nt, Human
gaacuguagagaauacauuucu

SEQ ID NO: 764788 - RNA, 22 nt, Human
gaggguggguacaccagcccuc

SEQ ID NO: 764789 - RNA, 22 nt, Human
acugucauuaaugaauguaaua

SEQ ID NO: 764790 - RNA, 22 nt, Human
ugaaaaacugaauaguugagua

SEQ ID NO: 764791 - RNA, 22 nt, Human
aaguuguaugucuuagaaagua

SEQ ID NO: 764792 - RNA, 22 nt, Human
cuggaucuucagagaucaccag

SEQ ID NO: 764793 - RNA, 20 nt, Human
gcuuggaccuucugcucugu

SEQ ID NO: 764794 - RNA, 22 nt, Human
ccucccaccguaucucaguggc

SEQ ID NO: 764795 - RNA, 22 nt, Human
ccucuguggucugucuaaugca

SEQ ID NO: 764796 - RNA, 22 nt, Human
caagcuuuauccgccauguagg

SEQ ID NO: 764797 - RNA, 22 nt, Human
uuggaggacuaguuaagagacc

SEQ ID NO: 764798 - RNA, 22 nt, Human
gagccagcuauguagcaagagg

SEQ ID NO: 764799 - RNA, 22 nt, Human
aggcacuuuaggaucagguuga

SEQ ID NO: 764800 - RNA, 22 nt, Human
uauggcuugaguuucagacuau

SEQ ID NO: 764801 - RNA, 22 nt, Human
cagagcaugaauaaaaguuaca

SEQ ID NO: 764802 - RNA, 22 nt, Human
cccgagccucgguuucuuuucu

SEQ ID NO: 764803 - RNA, 22 nt, Human
agcaggaacgaguucaugggga

SEQ ID NO: 764804 - RNA, 22 nt, Human
gcaggcugccaccuucugaguu

SEQ ID NO: 764805 - RNA, 23 nt, Human
agggccucaggagggcugcaugg

SEQ ID NO: 764806 - RNA, 21 nt, Human
uggcagagugcagucuauaca

SEQ ID NO: 764807 - RNA, 22 nt, Human
uauauuauaagcccuuucagaa

SEQ ID NO: 764808 - RNA, 22 nt, Human
acuaacauguuaaucaaaagaa

SEQ ID NO: 764809 - RNA, 22 nt, Human
cucugcugcaggaaggcgugca

SEQ ID NO: 764810 - RNA, 22 nt, Human
ugucuuuauauauuuggaaaau

SEQ ID NO: 764811 - RNA, 22 nt, Human
uuucaguugauugcuuggguua

SEQ ID NO: 764812 - RNA, 22 nt, Human
cagcucugccucuggggcugag

SEQ ID NO: 764813 - RNA, 22 nt, Human
aaauaucauuuauaacuuuuaa

SEQ ID NO: 764814 - RNA, 22 nt, Human
ccugccuggcccaccuugccac

SEQ ID NO: 764815 - RNA, 22 nt, Human
ggagccagggaagcugcuuccu

SEQ ID NO: 764816 - RNA, 22 nt, Human
agagaauuacagaagaauguca

SEQ ID NO: 764817 - RNA, 22 nt, Human
ugucaugcuuauguuacauacu

SEQ ID NO: 764818 - RNA, 22 nt, Human
aacuuguaggacugcacuguag

SEQ ID NO: 764819 - RNA, 22 nt, Human
uugucugaggguuugagagaau

SEQ ID NO: 764820 - RNA, 22 nt, Human
agggcaugaaaugggcagaagc

SEQ ID NO: 764821 - RNA, 22 nt, Human
cucaggauuuaaaggggcacuc

SEQ ID NO: 764822 - RNA, 22 nt, Human
aauaaaguguauucuuugucau

SEQ ID NO: 764823 - RNA, 23 nt, Human
gccuggagaaaagcugcaguuca

SEQ ID NO: 764824 - RNA, 22 nt, Human
uuuccuucucagggagcuucaa

SEQ ID NO: 764825 - RNA, 22 nt, Human
uuggcucugaaacccaagcucu

SEQ ID NO: 764826 - RNA, 20 nt, Human
agcagcuguguuuucauccu

SEQ ID NO: 764827 - RNA, 20 nt, Human
gcuccccuucucugggccuc

SEQ ID NO: 764828 - RNA, 22 nt, Human
ugaugguugauuauaaaucagu

SEQ ID NO: 764829 - RNA, 22 nt, Human
gaccacagcagugcaagaggag

SEQ ID NO: 764830 - RNA, 22 nt, Human
ugaaggagaauuaauaggcauu

SEQ ID NO: 764831 - RNA, 21 nt, Human
augguagguggagcaggugau

SEQ ID NO: 764832 - RNA, 22 nt, Human
acuuuucuaagcaauggucuug

SEQ ID NO: 764833 - RNA, 22 nt, Human
ucagaggagaccaaggggaaua

SEQ ID NO: 764834 - RNA, 22 nt, Human
gaaagcacugugagaucuuguu

SEQ ID NO: 764835 - RNA, 22 nt, Human
uuucucucuacaguacuuucau

SEQ ID NO: 764836 - RNA, 22 nt, Human
uacaaggcuucagcucagcuau

SEQ ID NO: 764837 - RNA, 20 nt, Human
caguccaaucagaggccacc

SEQ ID NO: 764838 - RNA, 22 nt, Human
uuugacauugccaauuugcuca

SEQ ID NO: 764839 - RNA, 22 nt, Human
uggagcugagcaccuccagggc

SEQ ID NO: 764840 - RNA, 22 nt, Human
agguccagaguugagauacaga

SEQ ID NO: 764841 - RNA, 22 nt, Human
acauucugaaaaacaguguuuu

SEQ ID NO: 764842 - RNA, 22 nt, Human
uuucuacaugucaauccaaacc

SEQ ID NO: 764843 - RNA, 22 nt, Human
ucaguguuugguuucagaauug

SEQ ID NO: 764844 - RNA, 22 nt, Human
gugacagagugagacccugucu

SEQ ID NO: 764845 - RNA, 22 nt, Human
ggagcagccuguguagacgggg

SEQ ID NO: 764846 - RNA, 22 nt, Human
aaaggcccacagucagucuacc

SEQ ID NO: 764847 - RNA, 22 nt, Human
accucuuugaaccucaguguga

SEQ ID NO: 764848 - RNA, 22 nt, Human
ccaugcuggagucccuagcugu

SEQ ID NO: 764849 - RNA, 22 nt, Human
ggagcagcacugauuagcgguu

SEQ ID NO: 764850 - RNA, 22 nt, Human
agagacaccgcgcaucauggcu

SEQ ID NO: 764851 - RNA, 22 nt, Human
acuguccauaauauuggugaac

SEQ ID NO: 764852 - RNA, 23 nt, Human
agcaauaagaagggauacaugug

SEQ ID NO: 764853 - RNA, 22 nt, Human
uuuacagaagagaaggaugcuu

SEQ ID NO: 764854 - RNA, 22 nt, Human
gaggaggaggaaguggaaccca

SEQ ID NO: 764855 - RNA, 22 nt, Human
agcuccagaaagguacacacag

SEQ ID NO: 764856 - RNA, 22 nt, Human
acacauuucucccagucuccau

SEQ ID NO: 764857 - RNA, 22 nt, Human
caccagcagcggugugagggug

SEQ ID NO: 764858 - RNA, 22 nt, Human
caaguaugagaaagcuauuacc

SEQ ID NO: 764859 - RNA, 22 nt, Human
aggacccacgcacaggaacccc

SEQ ID NO: 764860 - RNA, 22 nt, Human
ugggcugcccaagguggccaug

SEQ ID NO: 764861 - RNA, 22 nt, Human
cuuguccagauguuuguuaggu

SEQ ID NO: 764862 - RNA, 22 nt, Human
gaggcucuucaauaggucaaug

SEQ ID NO: 764863 - RNA, 22 nt, Human
uuacagaaaauguguuuuaacu

SEQ ID NO: 764864 - RNA, 22 nt, Human
cuguugcugagguucaaggguc

SEQ ID NO: 764865 - RNA, 21 nt, Human
ccugagaucuggaguggcuuu

SEQ ID NO: 764866 - RNA, 22 nt, Human
ccagagucuaugaguccucauu

SEQ ID NO: 764867 - RNA, 23 nt, Human
ggggccugcaccggucugcgcgg

SEQ ID NO: 764868 - RNA, 22 nt, Human
gagguugggaaguccaagcugg

SEQ ID NO: 764869 - RNA, 22 nt, Human
cugcucuguuaauuaaacuuug

SEQ ID NO: 764870 - RNA, 22 nt, Human
uggccuuguguuuaagcaagaa

SEQ ID NO: 764871 - RNA, 22 nt, Human
uucagagaacuucauggaagag

SEQ ID NO: 764872 - RNA, 22 nt, Human
uuuaaaagggguauuaagucca

SEQ ID NO: 764873 - RNA, 22 nt, Human
uacuguacugucuuuuuugcug

SEQ ID NO: 764874 - RNA, 22 nt, Human
uaauagaaagguauuuuuugca

SEQ ID NO: 764875 - RNA, 22 nt, Human
uucuuugcccuuaaugaaauaa

SEQ ID NO: 764876 - RNA, 22 nt, Human
uacugugaauacaaaauaaauu

SEQ ID NO: 764877 - RNA, 22 nt, Human
cuucuucuuuugugggugguaa

SEQ ID NO: 764878 - RNA, 22 nt, Human
auguccagaggugagucagagc

SEQ ID NO: 764879 - RNA, 22 nt, Human
ucuugcaugauauucuguauuu

SEQ ID NO: 764880 - RNA, 22 nt, Human
agcagugaugaaaugagcaucc

SEQ ID NO: 764881 - RNA, 22 nt, Human
gauauuuauuaagugguuggua

SEQ ID NO: 764882 - RNA, 22 nt, Human
ugaagggggagauauaugugug

SEQ ID NO: 764883 - RNA, 22 nt, Human
ugcaguuuuggccauugaaggc

SEQ ID NO: 764884 - RNA, 16 nt, Human
uggggaagcucgugag

SEQ ID NO: 764885 - RNA, 22 nt, Human
cagcaggauaugguggagagag

SEQ ID NO: 764886 - RNA, 22 nt, Human
ugggcugcuuccucagcugaga

SEQ ID NO: 764887 - RNA, 22 nt, Human
cagggggcucaaaggagagugc

SEQ ID NO: 764888 - RNA, 22 nt, Human
gaguggcagaacuggggguccu

SEQ ID NO: 764889 - RNA, 22 nt, Human
uauguacaccaaggauugaaaa

SEQ ID NO: 764890 - RNA, 22 nt, Human
ggacacaagcuccggggcugca

SEQ ID NO: 764891 - RNA, 22 nt, Human
agagucugccuuuuucuccugc

SEQ ID NO: 764892 - RNA, 22 nt, Human
gcucugagauugagccuuuggu

SEQ ID NO: 764893 - RNA, 22 nt, Human
acagcaugucuaguuaaauacu

SEQ ID NO: 764894 - RNA, 22 nt, Human
acacaagaaguuaaugggcaaa

SEQ ID NO: 764895 - RNA, 22 nt, Human
aggccaaagcacagagcuggaa

SEQ ID NO: 764896 - RNA, 22 nt, Human
aagcagccuggacuugggcugg

SEQ ID NO: 764897 - RNA, 22 nt, Human
gaggggcaagaaguuggccucu

SEQ ID NO: 764898 - RNA, 22 nt, Human
aacaaugugaagugcuguucag

SEQ ID NO: 764899 - RNA, 22 nt, Human
ccagcucugcuugcccagucag

SEQ ID NO: 764900 - RNA, 22 nt, Human
acaaagucugaaaccugaggca

SEQ ID NO: 764901 - RNA, 22 nt, Human
uuucugcagguauugcauaagu

SEQ ID NO: 764902 - RNA, 22 nt, Human
agcccugcaggaugagggaggu

SEQ ID NO: 764903 - RNA, 22 nt, Human
ccugugcauccgguggucauug

SEQ ID NO: 764904 - RNA, 22 nt, Human
cuuuucucugcaccauguguga

SEQ ID NO: 764905 - RNA, 22 nt, Human
caguccuuggcuucauccgagu

SEQ ID NO: 764906 - RNA, 22 nt, Human
ucacagaacaauguuuaguucu

SEQ ID NO: 764907 - RNA, 20 nt, Human
uaacuuucuaugcuuucagc

SEQ ID NO: 764908 - RNA, 22 nt, Human
guuuagaauucuaacuuuaagg

SEQ ID NO: 764909 - RNA, 22 nt, Human
ugaagacucagaagcuaagaua

SEQ ID NO: 764910 - RNA, 22 nt, Human
gucugcccagaagacauccccu

SEQ ID NO: 764911 - RNA, 22 nt, Human
gaggggcgcugucgggucaccu

SEQ ID NO: 764912 - RNA, 22 nt, Human
agcaccaguuucgucgugacaa

SEQ ID NO: 764913 - RNA, 22 nt, Human
gauuccugcuauucacagggcu

SEQ ID NO: 764914 - RNA, 20 nt, Human
aagcaucuggauguagcaau

SEQ ID NO: 764915 - RNA, 22 nt, Human
augagaaauuuauuacaagcua

SEQ ID NO: 764916 - RNA, 22 nt, Human
ugaggagaaaugcucagagcca

SEQ ID NO: 764917 - RNA, 23 nt, Human
gccagccagaauuucuccacugu

SEQ ID NO: 764918 - RNA, 22 nt, Human
ggcuuuauguuuuucauguggu

SEQ ID NO: 764919 - RNA, 22 nt, Human
aaguauucuacaaagaaauuga

SEQ ID NO: 764920 - RNA, 22 nt, Human
ccucuguccuggggaguggagc

SEQ ID NO: 764921 - RNA, 22 nt, Human
gacugugggaagacuguagguu

SEQ ID NO: 764922 - RNA, 22 nt, Human
cuauuuucugucucuauagagu

SEQ ID NO: 764923 - RNA, 22 nt, Human
ggggaaggauugaguugaccca

SEQ ID NO: 764924 - RNA, 22 nt, Human
agguggagacccagagaaggcg

SEQ ID NO: 764925 - RNA, 22 nt, Human
aauucaguugacagcuaaugcc

SEQ ID NO: 764926 - RNA, 22 nt, Human
guggcagugaaggucauagcau

SEQ ID NO: 764927 - RNA, 22 nt, Human
cagagcagacguugagauuaag

SEQ ID NO: 764928 - RNA, 22 nt, Human
cagagggugugaaggggaugaa

SEQ ID NO: 764929 - RNA, 22 nt, Human
aguugucccggucuagccacuu

SEQ ID NO: 764930 - RNA, 18 nt, Human
gugacagcugcuagcuca

SEQ ID NO: 764931 - RNA, 22 nt, Human
ucucugaguucuccuccagccc

SEQ ID NO: 764932 - RNA, 22 nt, Human
ggugaggaaagauggugacagu

SEQ ID NO: 764933 - RNA, 22 nt, Human
uuuuucaugagacuagaaguca

SEQ ID NO: 764934 - RNA, 18 nt, Human
gccagagcauaucuccag

SEQ ID NO: 764935 - RNA, 22 nt, Human
gcacaugguaggcauuugaugu

SEQ ID NO: 764936 - RNA, 22 nt, Human
ugugcucuucuguuacuuguag

SEQ ID NO: 764937 - RNA, 22 nt, Human
ccugggugaaauaguccucaag

SEQ ID NO: 764938 - RNA, 22 nt, Human
ugccucagagaccugacaguac

SEQ ID NO: 764939 - RNA, 22 nt, Human
caaucuuaguggcuuacaaaga

SEQ ID NO: 764940 - RNA, 22 nt, Human
uucuuucacucaagaaggaucu

SEQ ID NO: 764941 - RNA, 22 nt, Human
cagaggcuguguaggcagacug

SEQ ID NO: 764942 - RNA, 22 nt, Human
aacauuguuuucccuauaucca

SEQ ID NO: 764943 - RNA, 22 nt, Human
uagcuacacugaggcugcuuaa

SEQ ID NO: 764944 - RNA, 22 nt, Human
caaaguauauuggauugaaugg

SEQ ID NO: 764945 - RNA, 21 nt, Human
ucacguggucacaugagcuuu

SEQ ID NO: 764946 - RNA, 22 nt, Human
ucguaugcucucuguguccugu

SEQ ID NO: 764947 - RNA, 17 nt, Human
uaaccucucugaaccug

SEQ ID NO: 764948 - RNA, 20 nt, Human
ugcucugucuaaaacuuccc

SEQ ID NO: 764949 - RNA, 22 nt, Human
aggcuuuggggcauucuguguu

SEQ ID NO: 764950 - RNA, 22 nt, Human
gcccugugcuuggauggcagau

SEQ ID NO: 764951 - RNA, 21 nt, Human
uuuguucaggcaaguuacagu

SEQ ID NO: 764952 - RNA, 22 nt, Human
gggagguccuaaaggggaccag

SEQ ID NO: 764953 - RNA, 22 nt, Human
cucagagccaguuagcaggugc

SEQ ID NO: 764954 - RNA, 19 nt, Human
caagauuuguucacacaug

SEQ ID NO: 764955 - RNA, 22 nt, Human
gagccugcgagggaguaaggca

SEQ ID NO: 764956 - RNA, 21 nt, Human
ggcaggauggcaguggacccc

SEQ ID NO: 764957 - RNA, 22 nt, Human
agcugccagggacugggcaugg

SEQ ID NO: 764958 - RNA, 22 nt, Human
aaucucuugguucagaagccuc

SEQ ID NO: 764959 - RNA, 19 nt, Human
cacaauuaugagacacuua

SEQ ID NO: 764960 - RNA, 22 nt, Human
uacuggaaggcuggaagucagg

SEQ ID NO: 764961 - RNA, 22 nt, Human
aaguggcuuugagcuucugcca

SEQ ID NO: 764962 - RNA, 21 nt, Human
agaaauguaucauucuuuucc

SEQ ID NO: 764963 - RNA, 23 nt, Human
agaaaaguucauaccuuuuuaac

SEQ ID NO: 764964 - RNA, 18 nt, Human
ugagccgguagauggggu

SEQ ID NO: 764965 - RNA, 22 nt, Human
cuaaaugauauuuugguuuccu

SEQ ID NO: 764966 - RNA, 22 nt, Human
gacagccaacuggggagggcau

SEQ ID NO: 764967 - RNA, 22 nt, Human
ugugggaagagcaguggcagca

SEQ ID NO: 764968 - RNA, 22 nt, Human
ucuucuuuggaugaaagaauau

SEQ ID NO: 764969 - RNA, 22 nt, Human
ccucccacauugaggacaugcu

SEQ ID NO: 764970 - RNA, 22 nt, Human
ccaggguugcuguauggcacuu

SEQ ID NO: 764971 - RNA, 22 nt, Human
gcucugguaccagcuacuccua

SEQ ID NO: 764972 - RNA, 22 nt, Human
ggagagcuagugccugccagua

SEQ ID NO: 764973 - RNA, 22 nt, Human
ugucccagauacuggacauaga

SEQ ID NO: 764974 - RNA, 22 nt, Human
cuggucccuggaccucccugga

SEQ ID NO: 764975 - RNA, 22 nt, Human
gcagaggcacagccccagauga

SEQ ID NO: 764976 - RNA, 22 nt, Human
auacauagcaggguaguagauc

SEQ ID NO: 764977 - RNA, 22 nt, Human
auuaugcuuaggaaaauaugaa

SEQ ID NO: 764978 - RNA, 22 nt, Human
uguauuugguguauuuaaugag

SEQ ID NO: 764979 - RNA, 22 nt, Human
ugagggaggccuccaucugcca

SEQ ID NO: 764980 - RNA, 22 nt, Human
uucuggaguauuccuggcaccu

SEQ ID NO: 764981 - RNA, 22 nt, Human
aauagcauagaguuaaaaugca

SEQ ID NO: 764982 - RNA, 22 nt, Human
agccccuguacccugagugcuu

SEQ ID NO: 764983 - RNA, 22 nt, Human
ucacaagauauuucaguccuuu

SEQ ID NO: 764984 - RNA, 22 nt, Human
uaccucucggggucuguuugug

SEQ ID NO: 764985 - RNA, 22 nt, Human
uuccuggccaagcagaguggaa

SEQ ID NO: 764986 - RNA, 22 nt, Human
uauuucacuccgagacucuaug

SEQ ID NO: 764987 - RNA, 22 nt, Human
auagucuuagaucagauaaagu

SEQ ID NO: 764988 - RNA, 22 nt, Human
ggaugugaaucugggcugagac

SEQ ID NO: 764989 - RNA, 22 nt, Human
gcccacuccagcuucucccaca

SEQ ID NO: 764990 - RNA, 20 nt, Human
ucauuucuugggguuccaag

SEQ ID NO: 764991 - RNA, 22 nt, Human
cagaaacacuuguagagaaguu

SEQ ID NO: 764992 - RNA, 22 nt, Human
auacaauaguguuuguuuugag

SEQ ID NO: 764993 - RNA, 22 nt, Human
acccagccuacaaagcucaccu

SEQ ID NO: 764994 - RNA, 22 nt, Human
ccugggcuucugucuagauguu

SEQ ID NO: 764995 - RNA, 22 nt, Human
ugaugauguuuaucuugguauu

SEQ ID NO: 764996 - RNA, 22 nt, Human
ggucccaaggaggaugaggcua

SEQ ID NO: 764997 - RNA, 22 nt, Human
ucuauuuuguuuccagcucuac

SEQ ID NO: 764998 - RNA, 22 nt, Human
guggaugaugagugacuacaga

SEQ ID NO: 764999 - RNA, 22 nt, Human
gccuggagcucggcugagggcg

SEQ ID NO: 765000 - RNA, 22 nt, Human
uacagaaauacagucaggccua

SEQ ID NO: 765001 - RNA, 22 nt, Human
gcagcagcugacagugggugcc

SEQ ID NO: 765002 - RNA, 22 nt, Human
cugucuucuccuuuguuucagg

SEQ ID NO: 765003 - RNA, 22 nt, Human
uccaggaugcccgcuuuugcuu

SEQ ID NO: 765004 - RNA, 22 nt, Human
gugccugcugcagcugagcagu

SEQ ID NO: 765005 - RNA, 22 nt, Human
uguacagugccaugcaguuugc

SEQ ID NO: 765006 - RNA, 22 nt, Human
auccaaagauggaaagaacuuu

SEQ ID NO: 765007 - RNA, 22 nt, Human
ucaguguucuggauuuggggca

SEQ ID NO: 765008 - RNA, 22 nt, Human
gguccccguggaggcuggagcg

SEQ ID NO: 765009 - RNA, 22 nt, Human
ccauccugcaggaccuccauau

SEQ ID NO: 765010 - RNA, 22 nt, Human
ucccuccacaccugcugguacc

SEQ ID NO: 765011 - RNA, 22 nt, Human
acacauaugccauuacagcaaa

SEQ ID NO: 765012 - RNA, 22 nt, Human
ggcucuggcggcucuuucaaua

SEQ ID NO: 765013 - RNA, 22 nt, Human
acaaugaacgcuuuuuaacugu

SEQ ID NO: 765014 - RNA, 22 nt, Human
uugcugugucauuuguuuaauc

SEQ ID NO: 765015 - RNA, 23 nt, Human
uuguacagcccagauuccucuuc

SEQ ID NO: 765016 - RNA, 22 nt, Human
ccucagggaaugggaggcuggg

SEQ ID NO: 765017 - RNA, 22 nt, Human
auacaucaccuauauauucaca

SEQ ID NO: 765018 - RNA, 22 nt, Human
cagggcucagggacugcagaaa

SEQ ID NO: 765019 - RNA, 22 nt, Human
gcucaccaagcagagacucugg

SEQ ID NO: 765020 - RNA, 22 nt, Human
aggcucucacccucugaccaga

SEQ ID NO: 765021 - RNA, 22 nt, Human
ucacugaauacuugucucaucc

SEQ ID NO: 765022 - RNA, 22 nt, Human
gcaugggcuuucucagaguucu

SEQ ID NO: 765023 - RNA, 23 nt, Human
ugcuguccaacagacuggccaug

SEQ ID NO: 765024 - RNA, 21 nt, Human
ggcuggacaucccaggagacu

SEQ ID NO: 765025 - RNA, 22 nt, Human
agcuuccacaucugucuucagu

SEQ ID NO: 765026 - RNA, 22 nt, Human
agcuucucagcuucagaacugu

SEQ ID NO: 765027 - RNA, 22 nt, Human
gcuggagagauaggcauggggu

SEQ ID NO: 765028 - RNA, 21 nt, Human
gugguuauuuucauuagcauc

SEQ ID NO: 765029 - RNA, 22 nt, Human
ggacuggguaggagcccagggc

SEQ ID NO: 765030 - RNA, 22 nt, Human
ugcaguuuuccuucaacauugu

SEQ ID NO: 765031 - RNA, 22 nt, Human
agacucugagacaugaaccauc

SEQ ID NO: 765032 - RNA, 22 nt, Human
uuggcuugaugacuggcagugu

SEQ ID NO: 765033 - RNA, 22 nt, Human
ccuccuggcccugggccuggaa

SEQ ID NO: 765034 - RNA, 22 nt, Human
augcuguggggagugaggguag

SEQ ID NO: 765035 - RNA, 22 nt, Human
ccaggcugaauauguuccaggg

SEQ ID NO: 765036 - RNA, 22 nt, Human
ugcccagguuugagugcccaag

SEQ ID NO: 765037 - RNA, 22 nt, Human
ugucugaauuuuggaaucaagu

SEQ ID NO: 765038 - RNA, 22 nt, Human
uagaaacucaggauacucuucc

SEQ ID NO: 765039 - RNA, 19 nt, Human
ccuuuuuuaacuucagcaa

SEQ ID NO: 765040 - RNA, 22 nt, Human
aucccugaaugcuccugacugg

SEQ ID NO: 765041 - RNA, 22 nt, Human
ucccaaggauaagagagucuga

SEQ ID NO: 765042 - RNA, 21 nt, Human
agaaaauggcguuuuagauuu

SEQ ID NO: 765043 - RNA, 22 nt, Human
gaggcuggaggucaaagaugaa

SEQ ID NO: 765044 - RNA, 22 nt, Human
gccauuuggcaaaacugacuuc

SEQ ID NO: 765045 - RNA, 22 nt, Human
aggggcucaagcaguguggucu

SEQ ID NO: 765046 - RNA, 22 nt, Human
agccuggccugggcaggcacau

SEQ ID NO: 765047 - RNA, 22 nt, Human
auucuacugcaaauccugacca

SEQ ID NO: 765048 - RNA, 22 nt, Human
ggguaggcaaagcaaugacguu

SEQ ID NO: 765049 - RNA, 22 nt, Human
uucuggcuuuacuucccaucca

SEQ ID NO: 765050 - RNA, 22 nt, Human
aagaggaggacgguucccagaa

SEQ ID NO: 765051 - RNA, 22 nt, Human
aguaccauuauccaguaaagga

SEQ ID NO: 765052 - RNA, 22 nt, Human
cauagaaucauagcacauuuga

SEQ ID NO: 765053 - RNA, 23 nt, Human
ucaauugaugauguucucuuuug

SEQ ID NO: 765054 - RNA, 22 nt, Human
ugacagaccacugcaacucugu

SEQ ID NO: 765055 - RNA, 22 nt, Human
gcucucugguuccagucaggaa

SEQ ID NO: 765056 - RNA, 22 nt, Human
gggcccuggacguggcggcaga

SEQ ID NO: 765057 - RNA, 22 nt, Human
agaaaguuaucacaaaauugag

SEQ ID NO: 765058 - RNA, 22 nt, Human
uuacacauuaacaggcagcuaa

SEQ ID NO: 765059 - RNA, 22 nt, Human
gugggcagcaccagggaagugu

SEQ ID NO: 765060 - RNA, 22 nt, Human
ccagagaguaggaggcauuauu

SEQ ID NO: 765061 - RNA, 22 nt, Human
cuggauuuugaugagcaguuuu

SEQ ID NO: 765062 - RNA, 22 nt, Human
uccucuucuguggauucccuga

SEQ ID NO: 765063 - RNA, 22 nt, Human
uuuauagucgucucaguaauaa

SEQ ID NO: 765064 - RNA, 22 nt, Human
gaauacacgaauagagcauggu

SEQ ID NO: 765065 - RNA, 19 nt, Human
auucuucagcagugagacc

SEQ ID NO: 765066 - RNA, 22 nt, Human
cugggcucagugucucacuccu

SEQ ID NO: 765067 - RNA, 22 nt, Human
uaaauucugaucaaguuccuuc

SEQ ID NO: 765068 - RNA, 18 nt, Human
augcagcaaucagaaaua

SEQ ID NO: 765069 - RNA, 17 nt, Human
ggaagaaaaggaucauc

SEQ ID NO: 765070 - RNA, 22 nt, Human
uaacauguuaagaaauuagaua

SEQ ID NO: 765071 - RNA, 22 nt, Human
cucagaauuuagggcucugagg

SEQ ID NO: 765072 - RNA, 22 nt, Human
caagagcugugaccucauucac

SEQ ID NO: 765073 - RNA, 22 nt, Human
agcugggugcgguggcucaugc

SEQ ID NO: 765074 - RNA, 22 nt, Human
gcaaacaaggacauacauccug

SEQ ID NO: 765075 - RNA, 22 nt, Human
cauccguuaauaaaaagacagu

SEQ ID NO: 765076 - RNA, 22 nt, Human
acacaguucaggaucaaauagc

SEQ ID NO: 765077 - RNA, 20 nt, Human
ucuuggagaggguggacuua

SEQ ID NO: 765078 - RNA, 23 nt, Human
ugucuccaucucauuacuugggg

SEQ ID NO: 765079 - RNA, 22 nt, Human
gcucacugccugggcaacaaga

SEQ ID NO: 765080 - RNA, 23 nt, Human
aauguauguuaguaucuuagaga

SEQ ID NO: 765081 - RNA, 19 nt, Human
aggugugggggcugcagac

SEQ ID NO: 765082 - RNA, 22 nt, Human
gacuaaauaaaagccaaacuuc

SEQ ID NO: 765083 - RNA, 22 nt, Human
auccucagcaucuagcaugaag

SEQ ID NO: 765084 - RNA, 22 nt, Human
caguggaauauauaggggauuu

SEQ ID NO: 765085 - RNA, 22 nt, Human
auuuuacauaaggaagguuuaa

SEQ ID NO: 765086 - RNA, 20 nt, Human
gaggcugaaguguuuuugcu

SEQ ID NO: 765087 - RNA, 22 nt, Human
ucagaaaucuugucaaggcauc

SEQ ID NO: 765088 - RNA, 22 nt, Human
uguuuccuaagugucucugaag

SEQ ID NO: 765089 - RNA, 21 nt, Human
aguguguguggaaugagaaua

SEQ ID NO: 765090 - RNA, 22 nt, Human
aagggcuggaauaucucuuaga

SEQ ID NO: 765091 - RNA, 22 nt, Human
agcuccugauacaugcaggaau

SEQ ID NO: 765092 - RNA, 22 nt, Human
ucagccagugccuugaucuugc

SEQ ID NO: 765093 - RNA, 22 nt, Human
uagugaaaguauuaaacagcug

SEQ ID NO: 765094 - RNA, 22 nt, Human
uucuucucucauagauuaaggu

SEQ ID NO: 765095 - RNA, 22 nt, Human
ucucuacacaggauucacauga

SEQ ID NO: 765096 - RNA, 22 nt, Human
cuaggccagagagaccucauga

SEQ ID NO: 765097 - RNA, 22 nt, Human
gguggccuccagggcauaggug

SEQ ID NO: 765098 - RNA, 22 nt, Human
aaagauuuaagaauaauuugug

SEQ ID NO: 765099 - RNA, 22 nt, Human
agccuuagauuugggcaagaac

SEQ ID NO: 765100 - RNA, 17 nt, Human
aggaagggcaaguuucu

SEQ ID NO: 765101 - RNA, 22 nt, Human
gcucaaaucccagcgggcuccu

SEQ ID NO: 765102 - RNA, 22 nt, Human
cuuccucuguguccugggcuuc

SEQ ID NO: 765103 - RNA, 22 nt, Human
gcccuucacgaugguaucuuag

SEQ ID NO: 765104 - RNA, 22 nt, Human
uaguacacuaccaucagguuuu

SEQ ID NO: 765105 - RNA, 22 nt, Human
uccaggcccauagacacuucuc

SEQ ID NO: 765106 - RNA, 22 nt, Human
uucugcuguaguugcaucuguu

SEQ ID NO: 765107 - RNA, 22 nt, Human
uaggaacaaguuuccuugcugu

SEQ ID NO: 765108 - RNA, 22 nt, Human
agagaacuucuccuaaaucuca

SEQ ID NO: 765109 - RNA, 22 nt, Human
uauuuagcuggagucagugcuu

SEQ ID NO: 765110 - RNA, 22 nt, Human
ucaaagcagcacauucgcaagc

SEQ ID NO: 765111 - RNA, 22 nt, Human
caugcagggagcagaggagaca

SEQ ID NO: 765112 - RNA, 22 nt, Human
agggcugccccaguccagccgg

SEQ ID NO: 765113 - RNA, 22 nt, Human
uacaacauaacgggcauucagu

SEQ ID NO: 765114 - RNA, 22 nt, Human
cccuggcagcaaucacuggugu

SEQ ID NO: 765115 - RNA, 22 nt, Human
cagguggagcugacugagggca

SEQ ID NO: 765116 - RNA, 22 nt, Human
aagcccaguaccuucagugagg

SEQ ID NO: 765117 - RNA, 22 nt, Human
ugcuuuauaaccauuucugugg

SEQ ID NO: 765118 - RNA, 22 nt, Human
aggugaguugguaggaaguuug

SEQ ID NO: 765119 - RNA, 22 nt, Human
uuaugcaugagauaaaaauugg

SEQ ID NO: 765120 - RNA, 23 nt, Human
agcccaccuuguuaguccugugg

SEQ ID NO: 765121 - RNA, 22 nt, Human
cagaaauaaacuucucacaucg

SEQ ID NO: 765122 - RNA, 19 nt, Human
aaggcuggagaaggccucu

SEQ ID NO: 765123 - RNA, 22 nt, Human
aucaggauuacacggggaugcu

SEQ ID NO: 765124 - RNA, 22 nt, Human
uuaauacaacuguugucacugg

SEQ ID NO: 765125 - RNA, 22 nt, Human
ucucuucuaauuaggguccaug

SEQ ID NO: 765126 - RNA, 22 nt, Human
gaaaacuuggaucucuagaaug

SEQ ID NO: 765127 - RNA, 22 nt, Human
ucagcagugugcccagaggcug

SEQ ID NO: 765128 - RNA, 22 nt, Human
cuggaaggucuguccccacugc

SEQ ID NO: 765129 - RNA, 22 nt, Human
agaccaagacuauaaugagagg

SEQ ID NO: 765130 - RNA, 22 nt, Human
agaagaugucacugcagacagc

SEQ ID NO: 765131 - RNA, 22 nt, Human
gcauccuggcucuaggugucau

SEQ ID NO: 765132 - RNA, 22 nt, Human
ugcccucugcaggccgccaugg

SEQ ID NO: 765133 - RNA, 22 nt, Human
cuuugugaugaggccuaagaca

SEQ ID NO: 765134 - RNA, 22 nt, Human
cugccccaccccaaccugaggu

SEQ ID NO: 765135 - RNA, 22 nt, Human
guguguguucaauaaauuuaag

SEQ ID NO: 765136 - RNA, 22 nt, Human
uauucacagguucuggggauca

SEQ ID NO: 765137 - RNA, 22 nt, Human
gucagugucuuaacagagauua

SEQ ID NO: 765138 - RNA, 22 nt, Human
ugcuggaggagaagguugcuca

SEQ ID NO: 765139 - RNA, 22 nt, Human
augaaguuccaguauaugcagu

SEQ ID NO: 765140 - RNA, 22 nt, Human
acugcaugcuuuacaugacaug

SEQ ID NO: 765141 - RNA, 22 nt, Human
ggaaugaagaaauagauggugu

SEQ ID NO: 765142 - RNA, 22 nt, Human
cugcaguuggauaaagauacuu

SEQ ID NO: 765143 - RNA, 22 nt, Human
ucuuucugaugggaagggucaa

SEQ ID NO: 765144 - RNA, 22 nt, Human
cucuacagcugcugccccuggu

SEQ ID NO: 765145 - RNA, 22 nt, Human
acacauauguggcaacuguaga

SEQ ID NO: 765146 - RNA, 22 nt, Human
agguggccaauaaauguuggag

SEQ ID NO: 765147 - RNA, 22 nt, Human
uguaucugugauguagggguuu

SEQ ID NO: 765148 - RNA, 17 nt, Human
ugcuuaauuuugacugg

SEQ ID NO: 765149 - RNA, 22 nt, Human
ugagcuguguccugggggcagu

SEQ ID NO: 765150 - RNA, 22 nt, Human
aacaggcacuaagcaugugggg

SEQ ID NO: 765151 - RNA, 22 nt, Human
cagagcauaauugacaugaggu

SEQ ID NO: 765152 - RNA, 22 nt, Human
uggacacaauguugccuuaggg

SEQ ID NO: 765153 - RNA, 19 nt, Human
agaaggcuccuguuggaga

SEQ ID NO: 765154 - RNA, 22 nt, Human
auacugaugaugugaagaaaca

SEQ ID NO: 765155 - RNA, 22 nt, Human
auucacaauagcagcuugcaug

SEQ ID NO: 765156 - RNA, 22 nt, Human
cagcuggccccacaguagaggc

SEQ ID NO: 765157 - RNA, 22 nt, Human
uagcagagugauuggccaugag

SEQ ID NO: 765158 - RNA, 22 nt, Human
acagcuguauccccagagcuca

SEQ ID NO: 765159 - RNA, 22 nt, Human
aaaaggcauuuugucaaccaua

SEQ ID NO: 765160 - RNA, 20 nt, Human
ucauauugauguagagcagc

SEQ ID NO: 765161 - RNA, 22 nt, Human
cuggauuaaguaaaauagagga

SEQ ID NO: 765162 - RNA, 22 nt, Human
ucagcaucaguauuguuuagga

SEQ ID NO: 765163 - RNA, 22 nt, Human
gaguauauauagacaugucaca

SEQ ID NO: 765164 - RNA, 22 nt, Human
accuguuuaccugcaccuguuu

SEQ ID NO: 765165 - RNA, 22 nt, Human
ccaggacaagccagagggacag

SEQ ID NO: 765166 - RNA, 22 nt, Human
augcccuucaacgugaggauuu

SEQ ID NO: 765167 - RNA, 20 nt, Human
gagucacagaagaagcugaa

SEQ ID NO: 765168 - RNA, 22 nt, Human
uugcauuuuugagcacgaaguu

SEQ ID NO: 765169 - RNA, 22 nt, Human
uccaagaauacagauuugugaa

SEQ ID NO: 765170 - RNA, 22 nt, Human
uucuggaaaagaaaguuaagau

SEQ ID NO: 765171 - RNA, 22 nt, Human
aggguccuucuguuccugagca

SEQ ID NO: 765172 - RNA, 20 nt, Human
ccagugggaagugauuaggu

SEQ ID NO: 765173 - RNA, 22 nt, Human
guggcucuccauugacauggaa

SEQ ID NO: 765174 - RNA, 22 nt, Human
cugcugccauuagggcacagac

SEQ ID NO: 765175 - RNA, 22 nt, Human
uucagcuauggagucuuaguua

SEQ ID NO: 765176 - RNA, 22 nt, Human
gagcagcugcagugcagacccu

SEQ ID NO: 765177 - RNA, 22 nt, Human
uuuggcacuguucuaggugcaa

SEQ ID NO: 765178 - RNA, 22 nt, Human
ggaggccagccugaggcugagg

SEQ ID NO: 765179 - RNA, 22 nt, Human
gaaucauucauugcucaauuaa

SEQ ID NO: 765180 - RNA, 22 nt, Human
cucagugcuucuagcuugauga

SEQ ID NO: 765181 - RNA, 22 nt, Human
aacagucacauuguucaacuuu

SEQ ID NO: 765182 - RNA, 22 nt, Human
caaggcauucuugcagguaggg

SEQ ID NO: 765183 - RNA, 22 nt, Human
uccaggcuugagaccaggcucu

SEQ ID NO: 765184 - RNA, 22 nt, Human
gauggaagaaaaaugcaugucu

SEQ ID NO: 765185 - RNA, 22 nt, Human
ugacagugaaugacaagguucu

SEQ ID NO: 765186 - RNA, 22 nt, Human
gagcacccuuugcacaucaguc

SEQ ID NO: 765187 - RNA, 22 nt, Human
ugggcuucugauguugagugcu

SEQ ID NO: 765188 - RNA, 22 nt, Human
aggugucugggcuuuggaguca

SEQ ID NO: 765189 - RNA, 22 nt, Human
uuagugucuggcuauauuuaaa

SEQ ID NO: 765190 - RNA, 23 nt, Human
aaagauguucccaaaguucacgu

SEQ ID NO: 765191 - RNA, 22 nt, Human
guguuugcuggagcucuggguc

SEQ ID NO: 765192 - RNA, 22 nt, Human
aaauauagcaauuaugccuacu

SEQ ID NO: 765193 - RNA, 22 nt, Human
uccugccugagcguggaggagg

SEQ ID NO: 765194 - RNA, 20 nt, Human
gccaacgcgcuggggcugcc

SEQ ID NO: 765195 - RNA, 22 nt, Human
gugugucuugaccaggaucgga

SEQ ID NO: 765196 - RNA, 20 nt, Human
ccuggagccuggaaggaguc

SEQ ID NO: 765197 - RNA, 22 nt, Human
auuauucauugguaggcaagcu

SEQ ID NO: 765198 - RNA, 22 nt, Human
cugcugcucuugugcauuagug

SEQ ID NO: 765199 - RNA, 22 nt, Human
acacaugaaucacugguggaag

SEQ ID NO: 765200 - RNA, 22 nt, Human
cagcagaguauggcacucaacu

SEQ ID NO: 765201 - RNA, 22 nt, Human
auuguacaacugaggguggaau

SEQ ID NO: 765202 - RNA, 22 nt, Human
cagagcugagucuucaagguug

SEQ ID NO: 765203 - RNA, 22 nt, Human
ccuccuggugggcgcuucuggc

SEQ ID NO: 765204 - RNA, 22 nt, Human
caguagcaggcaggugcuuuug

SEQ ID NO: 765205 - RNA, 22 nt, Human
gccaugcagcuuauuaaagugg

SEQ ID NO: 765206 - RNA, 22 nt, Human
cagaauuugaaguaauauucca

SEQ ID NO: 765207 - RNA, 19 nt, Human
cccagguguuugaggcugc

SEQ ID NO: 765208 - RNA, 22 nt, Human
cugcagaauggggccaagugga

SEQ ID NO: 765209 - RNA, 22 nt, Human
cucugggcugaauggcugaacc

SEQ ID NO: 765210 - RNA, 22 nt, Human
gggcugagccauuugaaccuug

SEQ ID NO: 765211 - RNA, 22 nt, Human
cacugggcaauucugagccuaa

SEQ ID NO: 765212 - RNA, 22 nt, Human
gccaugcuugguaugcugugag

SEQ ID NO: 765213 - RNA, 22 nt, Human
auuccuugggcugccuuauuau

SEQ ID NO: 765214 - RNA, 22 nt, Human
ucaggccuccagguuaccauuu

SEQ ID NO: 765215 - RNA, 22 nt, Human
aaugauguauuaguacaacaca

SEQ ID NO: 765216 - RNA, 22 nt, Human
uaugaacacacuuuggaaguga

SEQ ID NO: 765217 - RNA, 22 nt, Human
ucagacaaguaaaauaauguaa

SEQ ID NO: 765218 - RNA, 22 nt, Human
uuguuauaaagacuaaauaugu

SEQ ID NO: 765219 - RNA, 22 nt, Human
ccaggcacucagagacugggac

SEQ ID NO: 765220 - RNA, 22 nt, Human
cauguacaaggaugcucagagu

SEQ ID NO: 765221 - RNA, 22 nt, Human
cucaccacagagccuguccagc

SEQ ID NO: 765222 - RNA, 22 nt, Human
uuacacuugaaaacaggauuua

SEQ ID NO: 765223 - RNA, 22 nt, Human
ggucgugaauugaaucaguggc

SEQ ID NO: 765224 - RNA, 22 nt, Human
aaggaggaauucugaguucaug

SEQ ID NO: 765225 - RNA, 22 nt, Human
cauccagcuccugggggccacc

SEQ ID NO: 765226 - RNA, 22 nt, Human
uucucaagaacauauguagggu

SEQ ID NO: 765227 - RNA, 22 nt, Human
augggaggcagcagagcccagc

SEQ ID NO: 765228 - RNA, 19 nt, Human
gaauguuuguauucagcgc

SEQ ID NO: 765229 - RNA, 22 nt, Human
agcuucaggaacaggcagccug

SEQ ID NO: 765230 - RNA, 22 nt, Human
guuccacaaaaggucuaguuua

SEQ ID NO: 765231 - RNA, 20 nt, Human
aacauugaaagucuagaaga

SEQ ID NO: 765232 - RNA, 22 nt, Human
ggcugcuguacugaugucaguu

SEQ ID NO: 765233 - RNA, 22 nt, Human
caaugguggugucagaagagau

SEQ ID NO: 765234 - RNA, 22 nt, Human
cuccagaaauuuggaugcagca

SEQ ID NO: 765235 - RNA, 22 nt, Human
guuauguaucuugauugggugg

SEQ ID NO: 765236 - RNA, 22 nt, Human
ggccacagucucuggaaggaug

SEQ ID NO: 765237 - RNA, 22 nt, Human
cuuuccuucucgugguucucac

SEQ ID NO: 765238 - RNA, 20 nt, Human
ccuggcuuugcagcaugaga

SEQ ID NO: 765239 - RNA, 22 nt, Human
ccuucacacuuucacuuggaua

SEQ ID NO: 765240 - RNA, 22 nt, Human
gauuccacagcuucgaggucuu

SEQ ID NO: 765241 - RNA, 22 nt, Human
gcccaggggcagcgcauagugg

SEQ ID NO: 765242 - RNA, 22 nt, Human
uucucacaguaccuaacaugua

SEQ ID NO: 765243 - RNA, 22 nt, Human
cagcaucucugccugccugcaa

SEQ ID NO: 765244 - RNA, 22 nt, Human
cggccgcguccagggccgccag

SEQ ID NO: 765245 - RNA, 22 nt, Human
aucaaaguaggcauauguuuuu

SEQ ID NO: 765246 - RNA, 22 nt, Human
aguaugaacggaaggccuggga

SEQ ID NO: 765247 - RNA, 22 nt, Human
aauggcaguaguugcaugagag

SEQ ID NO: 765248 - RNA, 22 nt, Human
agguuucuucuuaggaauaugu

SEQ ID NO: 765249 - RNA, 22 nt, Human
auucucuggucauugagcauau

SEQ ID NO: 765250 - RNA, 22 nt, Human
caggcagccugcggucugcaca

SEQ ID NO: 765251 - RNA, 22 nt, Human
acugccugcucauaacauugcu

SEQ ID NO: 765252 - RNA, 22 nt, Human
cagcuauagauggacugaagag

SEQ ID NO: 765253 - RNA, 22 nt, Human
uggguggagcuccacaaccugu

SEQ ID NO: 765254 - RNA, 22 nt, Human
ggcuggccucuacagggaggca

SEQ ID NO: 765255 - RNA, 22 nt, Human
gggccacacagaaccuccuggu

SEQ ID NO: 765256 - RNA, 22 nt, Human
guugcaggaggauggcugcaua

SEQ ID NO: 765257 - RNA, 22 nt, Human
ugcuggagcccaggcggccuuu

SEQ ID NO: 765258 - RNA, 22 nt, Human
accuggagauccauggugucga

SEQ ID NO: 765259 - RNA, 22 nt, Human
gagagguaauuugaagugcaaa

SEQ ID NO: 765260 - RNA, 22 nt, Human
uacaacugugugaaggaaucug

SEQ ID NO: 765261 - RNA, 22 nt, Human
uauuauugacuauucagaaugu

SEQ ID NO: 765262 - RNA, 19 nt, Human
cugagagaugcuucacaca

SEQ ID NO: 765263 - RNA, 22 nt, Human
ccauaaggagccagacauucca

SEQ ID NO: 765264 - RNA, 19 nt, Human
uggucccauacugcuggcc

SEQ ID NO: 765265 - RNA, 23 nt, Human
cauccaggagcugagucugacug

SEQ ID NO: 765266 - RNA, 22 nt, Human
cuggagagggagcccuggcagu

SEQ ID NO: 765267 - RNA, 23 nt, Human
cuugaaugggauggaauucacug

SEQ ID NO: 765268 - RNA, 22 nt, Human
gguggccucgguggugcacagg

SEQ ID NO: 765269 - RNA, 18 nt, Human
uccagagagggagaagug

SEQ ID NO: 765270 - RNA, 22 nt, Human
uuggaaaaugaggcacagagag

SEQ ID NO: 765271 - RNA, 22 nt, Human
ggcaaagagacaugcaucgggg

SEQ ID NO: 765272 - RNA, 22 nt, Human
auugucuuagucagcucggacu

SEQ ID NO: 765273 - RNA, 22 nt, Human
aggaugaauaacugaaauggug

SEQ ID NO: 765274 - RNA, 22 nt, Human
ccagguaggagagagggauccu

SEQ ID NO: 765275 - RNA, 22 nt, Human
cuucucucggugcaucccucac

SEQ ID NO: 765276 - RNA, 22 nt, Human
uagugauugcugauauuccauu

SEQ ID NO: 765277 - RNA, 22 nt, Human
ucucaguguguugagaggucug

SEQ ID NO: 765278 - RNA, 22 nt, Human
acuuccagaggguguggaaaua

SEQ ID NO: 765279 - RNA, 22 nt, Human
cucagcucacucuuuugugcuu

SEQ ID NO: 765280 - RNA, 22 nt, Human
uuuuaccugaaccacacaguau

SEQ ID NO: 765281 - RNA, 22 nt, Human
cccuggagcugcuugcauguug

SEQ ID NO: 765282 - RNA, 22 nt, Human
agaaucaacugaaaauugguga

SEQ ID NO: 765283 - RNA, 22 nt, Human
aucuuuaggcaaguuacuuaac

SEQ ID NO: 765284 - RNA, 22 nt, Human
cagcugcaggcugugcaggaag

SEQ ID NO: 765285 - RNA, 22 nt, Human
ugagaacauacaaacagagaaa

SEQ ID NO: 765286 - RNA, 22 nt, Human
ccucuucauccuggaagcugcu

SEQ ID NO: 765287 - RNA, 22 nt, Human
ccaggacuuuaaguccagcacu

SEQ ID NO: 765288 - RNA, 22 nt, Human
ucacagccuggacaguugccug

SEQ ID NO: 765289 - RNA, 20 nt, Human
uuucaaaggcaccuaugaag

SEQ ID NO: 765290 - RNA, 22 nt, Human
uugcuugacuuuguguaccugu

SEQ ID NO: 765291 - RNA, 22 nt, Human
agagugggacacgggcgcuguc

SEQ ID NO: 765292 - RNA, 22 nt, Human
gguuuaauuaccugcaucucaa

SEQ ID NO: 765293 - RNA, 23 nt, Human
acagaugaaaguguggcucagag

SEQ ID NO: 765294 - RNA, 22 nt, Human
acgugcgugugcgcacacauac

SEQ ID NO: 765295 - RNA, 22 nt, Human
cacauuaagaauaaugagacua

SEQ ID NO: 765296 - RNA, 22 nt, Human
aggcuaggaaucaagccuuucu

SEQ ID NO: 765297 - RNA, 22 nt, Human
acaguguucuugauauuacagu

SEQ ID NO: 765298 - RNA, 18 nt, Human
ucccaucauccucuccag

SEQ ID NO: 765299 - RNA, 19 nt, Human
ucacccaggcugcuggcuc

SEQ ID NO: 765300 - RNA, 22 nt, Human
acacagaagcuuuuucuauucc

SEQ ID NO: 765301 - RNA, 22 nt, Human
uccagacuggggccaugucugc

SEQ ID NO: 765302 - RNA, 22 nt, Human
gaaaccacaguacccaggaaaa

SEQ ID NO: 765303 - RNA, 22 nt, Human
cuggcagcagcuucuggaucga

SEQ ID NO: 765304 - RNA, 22 nt, Human
agcagcagggcucugcccgugc

SEQ ID NO: 765305 - RNA, 22 nt, Human
gcugcagguuugucuagucugg

SEQ ID NO: 765306 - RNA, 22 nt, Human
ccaggccugcauucccucucag

SEQ ID NO: 765307 - RNA, 22 nt, Human
guucccaccccugagcuccgau

SEQ ID NO: 765308 - RNA, 22 nt, Human
uguaacuggacaagauauucau

SEQ ID NO: 765309 - RNA, 23 nt, Human
auguccaguuuacuucaggauga

SEQ ID NO: 765310 - RNA, 22 nt, Human
ucaacaaugggucuguaaugga

SEQ ID NO: 765311 - RNA, 22 nt, Human
ugucagagagcaggcaguagaa

SEQ ID NO: 765312 - RNA, 22 nt, Human
caaggauucucacuagacuaga

SEQ ID NO: 765313 - RNA, 22 nt, Human
agugaauaugcagcaagaaguu

SEQ ID NO: 765314 - RNA, 22 nt, Human
uuauucaggucauggacuguca

SEQ ID NO: 765315 - RNA, 22 nt, Human
guggggguggaaaggcaaguug

SEQ ID NO: 765316 - RNA, 22 nt, Human
aaaugcugaguguuuagagauc

SEQ ID NO: 765317 - RNA, 21 nt, Human
gcacagcaugaguguuggcau

SEQ ID NO: 765318 - RNA, 22 nt, Human
cagcugaagaaagagugguuag

SEQ ID NO: 765319 - RNA, 15 nt, Human
ccaggcugggugagc

SEQ ID NO: 765320 - RNA, 22 nt, Human
auucaauaagucacuguggaau

SEQ ID NO: 765321 - RNA, 22 nt, Human
aaccaagcucaauggucugagu

SEQ ID NO: 765322 - RNA, 22 nt, Human
ccaaugauggugcccacgauga

SEQ ID NO: 765323 - RNA, 22 nt, Human
guguucauugcuagugaggugu

SEQ ID NO: 765324 - RNA, 22 nt, Human
cuggcuccauuacucagcaucu

SEQ ID NO: 765325 - RNA, 22 nt, Human
agcugccugcugcacucggugc

SEQ ID NO: 765326 - RNA, 22 nt, Human
gaaaugcaggcuuggauucagc

SEQ ID NO: 765327 - RNA, 22 nt, Human
gcuuccagaucccaugcucuua

SEQ ID NO: 765328 - RNA, 22 nt, Human
uaguacagagacacuggaggaa

SEQ ID NO: 765329 - RNA, 22 nt, Human
cagauucuucauucauucuaca

SEQ ID NO: 765330 - RNA, 21 nt, Human
cagugccagccacaggacgcc

SEQ ID NO: 765331 - RNA, 22 nt, Human
gcaggaagaggcucgaagcccc

SEQ ID NO: 765332 - RNA, 22 nt, Human
cacuguggauacagaaauuagu

SEQ ID NO: 765333 - RNA, 22 nt, Human
gauucacucauauuuuacguuu

SEQ ID NO: 765334 - RNA, 22 nt, Human
ccagcccuucccaacuggccag

SEQ ID NO: 765335 - RNA, 22 nt, Human
ucugccaggagccaugagcaag

SEQ ID NO: 765336 - RNA, 22 nt, Human
ucugugcugagcucugagaugu

SEQ ID NO: 765337 - RNA, 22 nt, Human
aacuuagugagccacucuugca

SEQ ID NO: 765338 - RNA, 22 nt, Human
uuacaguauuguuaaacucuuu

SEQ ID NO: 765339 - RNA, 22 nt, Human
ucaguguguacacugagcauuu

SEQ ID NO: 765340 - RNA, 22 nt, Human
uauauuccaguucaucucuuga

SEQ ID NO: 765341 - RNA, 22 nt, Human
aggcuccagucugaaccuuggg

SEQ ID NO: 765342 - RNA, 22 nt, Human
ugcuguggcaguuuauguauag

SEQ ID NO: 765343 - RNA, 22 nt, Human
aggagccauccccaugagaggu

SEQ ID NO: 765344 - RNA, 22 nt, Human
gugcaggagcucccgcaguggu

SEQ ID NO: 765345 - RNA, 22 nt, Human
auuccuuguuucacugaaaagg

SEQ ID NO: 765346 - RNA, 22 nt, Human
aacaaaugaccugauuucuucc

SEQ ID NO: 765347 - RNA, 22 nt, Human
cugugaaacuggacagcacuug

SEQ ID NO: 765348 - RNA, 22 nt, Human
uuucacagauguuuuggagucu

SEQ ID NO: 765349 - RNA, 22 nt, Human
ccaggcuggagugcaguagugu

SEQ ID NO: 765350 - RNA, 18 nt, Human
acuggcuuuagcaucaga

SEQ ID NO: 765351 - RNA, 22 nt, Human
cccuggagucagguuggccugg

SEQ ID NO: 765352 - RNA, 22 nt, Human
ggcaccuggauguagcagugaa

SEQ ID NO: 765353 - RNA, 20 nt, Human
cuggccagaacgccuacaca

SEQ ID NO: 765354 - RNA, 22 nt, Human
aauuuccagaucagaugacuca

SEQ ID NO: 765355 - RNA, 22 nt, Human
uauuugauagagauaaaugaua

SEQ ID NO: 765356 - RNA, 22 nt, Human
cacuaagauuuaaaguauuagu

SEQ ID NO: 765357 - RNA, 23 nt, Human
cccagagcacagccuccagaugc

SEQ ID NO: 765358 - RNA, 22 nt, Human
uguuuauaccuugguauaacca

SEQ ID NO: 765359 - RNA, 22 nt, Human
uccauggguagcccugguugag

SEQ ID NO: 765360 - RNA, 22 nt, Human
caaaugauagagccgauuauca

SEQ ID NO: 765361 - RNA, 22 nt, Human
ggccaccaaaguccuguggcuu

SEQ ID NO: 765362 - RNA, 22 nt, Human
ccauccagaccaguccaugggu

SEQ ID NO: 765363 - RNA, 22 nt, Human
cucugugcuuaugcuccauggg

SEQ ID NO: 765364 - RNA, 22 nt, Human
aaacauuagacaccauaugcuc

SEQ ID NO: 765365 - RNA, 22 nt, Human
ucucacagccauuucucccucu

SEQ ID NO: 765366 - RNA, 22 nt, Human
gaguacaucuuaauuugacuaa

SEQ ID NO: 765367 - RNA, 22 nt, Human
gcacagcucaguacucccucug

SEQ ID NO: 765368 - RNA, 22 nt, Human
acacacuggcaggagcuauaaa

SEQ ID NO: 765369 - RNA, 20 nt, Human
gcuccuguccugguggaggg

SEQ ID NO: 765370 - RNA, 22 nt, Human
ggagcugggaauuggaucaucu

SEQ ID NO: 765371 - RNA, 22 nt, Human
cuuugaagagauuacugugcuc

SEQ ID NO: 765372 - RNA, 22 nt, Human
auugaaauugaugaaauucuug

SEQ ID NO: 765373 - RNA, 22 nt, Human
aaacacagcauguccuugggga

SEQ ID NO: 765374 - RNA, 22 nt, Human
ucuggcagaggaaggaggccug

SEQ ID NO: 765375 - RNA, 22 nt, Human
gcccagcacaucuggccuugaa

SEQ ID NO: 765376 - RNA, 22 nt, Human
agguucaguaaauguuaguuga

SEQ ID NO: 765377 - RNA, 22 nt, Human
augcuggcagccgagugcucca

SEQ ID NO: 765378 - RNA, 22 nt, Human
aauuucucucucaugcuucaug

SEQ ID NO: 765379 - RNA, 22 nt, Human
uucauugaaauuaagcccaacu

SEQ ID NO: 765380 - RNA, 22 nt, Human
gcucagcugcaccuggagagcc

SEQ ID NO: 765381 - RNA, 22 nt, Human
uuucuucucgacaccuuauccc

SEQ ID NO: 765382 - RNA, 22 nt, Human
agccaggacaucucuagcugcu

SEQ ID NO: 765383 - RNA, 22 nt, Human
agacugggccauuuccccagcu

SEQ ID NO: 765384 - RNA, 22 nt, Human
auacagaaguuuuccacuuauu

SEQ ID NO: 765385 - RNA, 22 nt, Human
guaggguuggagagcacaacca

SEQ ID NO: 765386 - RNA, 22 nt, Human
ggcccagcuguauauuacaguu

SEQ ID NO: 765387 - RNA, 22 nt, Human
gucauucuuaacaacucaguag

SEQ ID NO: 765388 - RNA, 22 nt, Human
agcaagcagaaaugccauggca

SEQ ID NO: 765389 - RNA, 22 nt, Human
ucuggagauaagcagcaaugaa

SEQ ID NO: 765390 - RNA, 23 nt, Human
ccagugauugccuggaaggaggu

SEQ ID NO: 765391 - RNA, 22 nt, Human
gucccucugcucuagagagcca

SEQ ID NO: 765392 - RNA, 22 nt, Human
gauaaugugccgauaauuucua

SEQ ID NO: 765393 - RNA, 22 nt, Human
auacaaguucucauguguaucu

SEQ ID NO: 765394 - RNA, 20 nt, Human
uagauucugucuguccaaac

SEQ ID NO: 765395 - RNA, 22 nt, Human
gaagucuggcugacgagaguua

SEQ ID NO: 765396 - RNA, 23 nt, Human
aacuuugccaggagacagcacag

SEQ ID NO: 765397 - RNA, 21 nt, Human
augugcagcaagcagcaugcu

SEQ ID NO: 765398 - RNA, 22 nt, Human
ccuggcagguggagguugcagu

SEQ ID NO: 765399 - RNA, 22 nt, Human
ccggcgaccgcugucggaggcg

SEQ ID NO: 765400 - RNA, 22 nt, Human
ucccacagugaaguucaugaua

SEQ ID NO: 765401 - RNA, 22 nt, Human
gcaguaaguuaauagugcuggu

SEQ ID NO: 765402 - RNA, 21 nt, Human
aagaugguuaugugcuaaaga

SEQ ID NO: 765403 - RNA, 22 nt, Human
uucuguacccucgcgauucucc

SEQ ID NO: 765404 - RNA, 22 nt, Human
ggcuguggccagcggggcugag

SEQ ID NO: 765405 - RNA, 22 nt, Human
cagcaggaccauugaggcauca

SEQ ID NO: 765406 - RNA, 22 nt, Human
acuuuccuggcccuguccucug

SEQ ID NO: 765407 - RNA, 15 nt, Human
gcccucaggcgacac

SEQ ID NO: 765408 - RNA, 22 nt, Human
uacaugaaguugucuaaacugg

SEQ ID NO: 765409 - RNA, 22 nt, Human
uaaaagacauauaacuguagga

SEQ ID NO: 765410 - RNA, 22 nt, Human
cagauaggaaaagcuaggcaua

SEQ ID NO: 765411 - RNA, 22 nt, Human
gacucuuucaaacagaaagcca

SEQ ID NO: 765412 - RNA, 22 nt, Human
guagaaauauuuaucucugaga

SEQ ID NO: 765413 - RNA, 22 nt, Human
uucugagcuacauaguacuggg

SEQ ID NO: 765414 - RNA, 22 nt, Human
guccagagaagggaggggacuc

SEQ ID NO: 765415 - RNA, 18 nt, Human
aaggcuucaaagaguaga

SEQ ID NO: 765416 - RNA, 22 nt, Human
ucagauuuuccacagacuggaa

SEQ ID NO: 765417 - RNA, 22 nt, Human
gcauuuguuccgcuuugucauc

SEQ ID NO: 765418 - RNA, 19 nt, Human
gaggcgaggcgugcaggag

SEQ ID NO: 765419 - RNA, 22 nt, Human
acucaggcacucagcccucgcc

SEQ ID NO: 765420 - RNA, 22 nt, Human
gcauuggcauuucuccagcgga

SEQ ID NO: 765421 - RNA, 22 nt, Human
ugggaaguuaggaugccaggga

SEQ ID NO: 765422 - RNA, 22 nt, Human
cuggcccagucucagaguguca

SEQ ID NO: 765423 - RNA, 23 nt, Human
uccucaguauauaaaggcagaug

SEQ ID NO: 765424 - RNA, 22 nt, Human
uucacauuugcccuuaugugug

SEQ ID NO: 765425 - RNA, 17 nt, Human
uuucugcaugauuggac

SEQ ID NO: 765426 - RNA, 22 nt, Human
agccagggucucucgcucuguu

SEQ ID NO: 765427 - RNA, 22 nt, Human
ccugaaaaucaagguaguuugg

SEQ ID NO: 765428 - RNA, 22 nt, Human
uuucacaaucaaauggugaaau

SEQ ID NO: 765429 - RNA, 22 nt, Human
ugacaaaccaguagcaauaaag

SEQ ID NO: 765430 - RNA, 22 nt, Human
caugggcuuuggaggcuggagg

SEQ ID NO: 765431 - RNA, 22 nt, Human
ugggccugacacuuacuaggga

SEQ ID NO: 765432 - RNA, 22 nt, Human
cagggagggacaauugucaccu

SEQ ID NO: 765433 - RNA, 22 nt, Human
caggaaagccgagugccauagg

SEQ ID NO: 765434 - RNA, 22 nt, Human
acagcaucauauaguggaagaa

SEQ ID NO: 765435 - RNA, 20 nt, Human
cugcuugggccccucuggcc

SEQ ID NO: 765436 - RNA, 22 nt, Human
cauccaguggucagggaaguug

SEQ ID NO: 765437 - RNA, 22 nt, Human
caagcuggcugggagaggcacg

SEQ ID NO: 765438 - RNA, 22 nt, Human
ugccagccagggaagcucaccc

SEQ ID NO: 765439 - RNA, 22 nt, Human
augaacucuugcuuuauuucag

SEQ ID NO: 765440 - RNA, 22 nt, Human
uggggagaaaugucuuuguucc

SEQ ID NO: 765441 - RNA, 22 nt, Human
aguccuggacuuggagucaggg

SEQ ID NO: 765442 - RNA, 22 nt, Human
acuacuacaagugaguacaaag

SEQ ID NO: 765443 - RNA, 17 nt, Human
augaggucauuaagaua

SEQ ID NO: 765444 - RNA, 22 nt, Human
ggaggaagcacacggcuuguau

SEQ ID NO: 765445 - RNA, 22 nt, Human
uacaggugguaaaaauauuguu

SEQ ID NO: 765446 - RNA, 22 nt, Human
cagccuucugaaugaacguacu

SEQ ID NO: 765447 - RNA, 21 nt, Human
uacauugacuacaaauaaagc

SEQ ID NO: 765448 - RNA, 22 nt, Human
uuuacugaacugcuaguacagg

SEQ ID NO: 765449 - RNA, 22 nt, Human
aacaugcucuguuucuuggaug

SEQ ID NO: 765450 - RNA, 22 nt, Human
aggcaggccgugucccuccuca

SEQ ID NO: 765451 - RNA, 22 nt, Human
uauauucauuuuaaagccaucu

SEQ ID NO: 765452 - RNA, 17 nt, Human
cuauuuuggagauuaaa

SEQ ID NO: 765453 - RNA, 22 nt, Human
ccugaagaauucaaauccagau

SEQ ID NO: 765454 - RNA, 23 nt, Human
ucagcugcuuccuccugccugcc

SEQ ID NO: 765455 - RNA, 22 nt, Human
guccucugggagccuugagccu

SEQ ID NO: 765456 - RNA, 22 nt, Human
ugcuggggucucuccggugccc

SEQ ID NO: 765457 - RNA, 22 nt, Human
aguggacauucugcacuuggag

SEQ ID NO: 765458 - RNA, 22 nt, Human
ggcagcaaauauugucagcugu

SEQ ID NO: 765459 - RNA, 22 nt, Human
cuguacauaaaggaauaggugu

SEQ ID NO: 765460 - RNA, 22 nt, Human
cugucugugaccucugcauguc

SEQ ID NO: 765461 - RNA, 22 nt, Human
aaggcagcacagcaacugcuca

SEQ ID NO: 765462 - RNA, 22 nt, Human
ucauuucaaguucugacagcua

SEQ ID NO: 765463 - RNA, 22 nt, Human
cagggcaugaggugugcuucuc

SEQ ID NO: 765464 - RNA, 22 nt, Human
gugcagaccuuaguucaagcca

SEQ ID NO: 765465 - RNA, 22 nt, Human
uuuaaaaggcagcuucuuuugu

SEQ ID NO: 765466 - RNA, 19 nt, Human
ggucagcugggcuagaggc

SEQ ID NO: 765467 - RNA, 22 nt, Human
uggcucaggauaauuuucccaa

SEQ ID NO: 765468 - RNA, 22 nt, Human
uguaguguggccuaucuuugcc

SEQ ID NO: 765469 - RNA, 22 nt, Human
uggcagggccuaccccaauauc

SEQ ID NO: 765470 - RNA, 22 nt, Human
ucauaaaguucuaagaauugua

SEQ ID NO: 765471 - RNA, 22 nt, Human
ucacaguauucaugaacaugga

SEQ ID NO: 765472 - RNA, 22 nt, Human
auuguacaaaaaaguagaccuu

SEQ ID NO: 765473 - RNA, 22 nt, Human
uauguacauaacaugaaaugca

SEQ ID NO: 765474 - RNA, 22 nt, Human
augggagugacagggccacugg

SEQ ID NO: 765475 - RNA, 20 nt, Human
cucacagucaaugcagaggu

SEQ ID NO: 765476 - RNA, 22 nt, Human
ucauauuuauauguuggcacag

SEQ ID NO: 765477 - RNA, 22 nt, Human
cccuucaggguuaaguagaggg

SEQ ID NO: 765478 - RNA, 22 nt, Human
ugcuccagccccuggugcacag

SEQ ID NO: 765479 - RNA, 22 nt, Human
ugcaagggguuuaugcagauga

SEQ ID NO: 765480 - RNA, 19 nt, Human
ugauggaauuugacauucc

SEQ ID NO: 765481 - RNA, 22 nt, Human
uuggcagugaugcagcuuguuc

SEQ ID NO: 765482 - RNA, 22 nt, Human
uucaagaugcacaguggcauuc

SEQ ID NO: 765483 - RNA, 22 nt, Human
ugggcagauuaaugcaguggcu

SEQ ID NO: 765484 - RNA, 22 nt, Human
cuucccugagcuuucucaggcu

SEQ ID NO: 765485 - RNA, 22 nt, Human
accugggagucacaccugagaa

SEQ ID NO: 765486 - RNA, 22 nt, Human
uucuuaaaacuuauggacaggu

SEQ ID NO: 765487 - RNA, 22 nt, Human
uuuccuugcacauugguuucca

SEQ ID NO: 765488 - RNA, 19 nt, Human
ucauaaggagagaggaaau

SEQ ID NO: 765489 - RNA, 22 nt, Human
aggcuggugucucuguccuguc

SEQ ID NO: 765490 - RNA, 22 nt, Human
aaguuuagcuugagauggaaag

SEQ ID NO: 765491 - RNA, 22 nt, Human
ugucuggggaacugugcaucca

SEQ ID NO: 765492 - RNA, 23 nt, Human
ugugggaauguuggagaggaaac

SEQ ID NO: 765493 - RNA, 22 nt, Human
aggcacagccucccuucacaug

SEQ ID NO: 765494 - RNA, 22 nt, Human
cuauuuucauucuuacauuguc

SEQ ID NO: 765495 - RNA, 22 nt, Human
acagauaaaaguuguuuaaaau

SEQ ID NO: 765496 - RNA, 22 nt, Human
gcccugcucuguuggucaccug

SEQ ID NO: 765497 - RNA, 22 nt, Human
uuuacccauucagacucacuug

SEQ ID NO: 765498 - RNA, 22 nt, Human
uagacacaagagaaggguauaa

SEQ ID NO: 765499 - RNA, 22 nt, Human
gauccguugcaaccaauuagca

SEQ ID NO: 765500 - RNA, 22 nt, Human
ucucauaauuagguaagucaga

SEQ ID NO: 765501 - RNA, 22 nt, Human
uaaaguauccaguuauucuucu

SEQ ID NO: 765502 - RNA, 22 nt, Human
gugacugugagucgcugugaca

SEQ ID NO: 765503 - RNA, 22 nt, Human
accuucuuccaccaaaaacguc

SEQ ID NO: 765504 - RNA, 22 nt, Human
auuugcuucugugaaaucaagu

SEQ ID NO: 765505 - RNA, 20 nt, Human
uucagggcuuuggggacacc

SEQ ID NO: 765506 - RNA, 22 nt, Human
aagauaaacucuugauuucuga

SEQ ID NO: 765507 - RNA, 19 nt, Human
ugaggggcucacagucuca

SEQ ID NO: 765508 - RNA, 22 nt, Human
auaucaguaucuauguauuugu

SEQ ID NO: 765509 - RNA, 22 nt, Human
agccagcuaagggaagcaugau

SEQ ID NO: 765510 - RNA, 22 nt, Human
uugauuuauagaauguucaagc

SEQ ID NO: 765511 - RNA, 22 nt, Human
aucauuggaggcacugugcagu

SEQ ID NO: 765512 - RNA, 22 nt, Human
ugcaggaguccaaucaggagac

SEQ ID NO: 765513 - RNA, 22 nt, Human
ucauugauggcuucuuucuugc

SEQ ID NO: 765514 - RNA, 22 nt, Human
ggcugccauaacagaguaccac

SEQ ID NO: 765515 - RNA, 22 nt, Human
ccaggaguuggaagcugccaug

SEQ ID NO: 765516 - RNA, 22 nt, Human
ugugaaaucacaggcuauuuag

SEQ ID NO: 765517 - RNA, 19 nt, Human
cccucauucacuuauucuc

SEQ ID NO: 765518 - RNA, 22 nt, Human
ugcagcaggugacaacgagugg

SEQ ID NO: 765519 - RNA, 22 nt, Human
acuggggcagugggcagugguu

SEQ ID NO: 765520 - RNA, 22 nt, Human
uugacuuuauguguauguuuac

SEQ ID NO: 765521 - RNA, 22 nt, Human
aaagugcaucaaaugacuuccc

SEQ ID NO: 765522 - RNA, 22 nt, Human
ugggcagaggcagcagaaaccu

SEQ ID NO: 765523 - RNA, 18 nt, Human
ucuggcuuuguuccuugu

SEQ ID NO: 765524 - RNA, 22 nt, Human
aggaaacaacuuggcaugagcc

SEQ ID NO: 765525 - RNA, 19 nt, Human
acugccugaggcucacagg

SEQ ID NO: 765526 - RNA, 22 nt, Human
gagguggcugcuugcugggaaa

SEQ ID NO: 765527 - RNA, 22 nt, Human
uaggaaaacgugauuuucucac

SEQ ID NO: 765528 - RNA, 22 nt, Human
aggaauagaccacuucacugag

SEQ ID NO: 765529 - RNA, 22 nt, Human
agccagaaccacuggaacggug

SEQ ID NO: 765530 - RNA, 22 nt, Human
ucagugcagugaaagguuuacu

SEQ ID NO: 765531 - RNA, 22 nt, Human
uuauaguuaguaggucauuaaa

SEQ ID NO: 765532 - RNA, 19 nt, Human
aaaucagaaucugcauuuu

SEQ ID NO: 765533 - RNA, 22 nt, Human
cuuuuacaguggaccugccauu

SEQ ID NO: 765534 - RNA, 22 nt, Human
gaggggagaaggcacuaaccag

SEQ ID NO: 765535 - RNA, 18 nt, Human
ccauuucaugauuauuac

SEQ ID NO: 765536 - RNA, 22 nt, Human
gacuucauaauauugagcaugu

SEQ ID NO: 765537 - RNA, 23 nt, Human
acaugggaaaugcaaagagaagu

SEQ ID NO: 765538 - RNA, 22 nt, Human
ggccacagagggcgggaugcug

SEQ ID NO: 765539 - RNA, 22 nt, Human
ggccaaaagcauaauccucaca

SEQ ID NO: 765540 - RNA, 22 nt, Human
cugugucuuccucugcccaggc

SEQ ID NO: 765541 - RNA, 23 nt, Human
uagaaugucauucaaugauaugg

SEQ ID NO: 765542 - RNA, 22 nt, Human
uuuuguuuucuuagaaaccugg

SEQ ID NO: 765543 - RNA, 22 nt, Human
ggcagcaguccauggcccaagg

SEQ ID NO: 765544 - RNA, 22 nt, Human
guauauauuggauaaaccagag

SEQ ID NO: 765545 - RNA, 22 nt, Human
auggcuuuccggacuuuggcca

SEQ ID NO: 765546 - RNA, 20 nt, Human
ucugauaaaaacuacuccau

SEQ ID NO: 765547 - RNA, 23 nt, Human
cagguggcuccacgagggguggg

SEQ ID NO: 765548 - RNA, 22 nt, Human
cucuuuggcguuggcagagcca

SEQ ID NO: 765549 - RNA, 22 nt, Human
ccaggaguuggagguugcagug

SEQ ID NO: 765550 - RNA, 22 nt, Human
uauuguaucuucuguuuagaag

SEQ ID NO: 765551 - RNA, 22 nt, Human
gauuuucaugauaaacuuguga

SEQ ID NO: 765552 - RNA, 22 nt, Human
aggacaauugagaguuuguuga

SEQ ID NO: 765553 - RNA, 22 nt, Human
ggagucagccugucagagugua

SEQ ID NO: 765554 - RNA, 22 nt, Human
gcccagcuccucugcagacccu

SEQ ID NO: 765555 - RNA, 22 nt, Human
cccucccuauguagaugauguu

SEQ ID NO: 765556 - RNA, 22 nt, Human
uugucugcaugauucuaggcag

SEQ ID NO: 765557 - RNA, 22 nt, Human
aguaaugucccuuaaauguggu

SEQ ID NO: 765558 - RNA, 22 nt, Human
agugucugcagugaugucucuu

SEQ ID NO: 765559 - RNA, 22 nt, Human
cuugccaguguugcagaagcuc

SEQ ID NO: 765560 - RNA, 22 nt, Human
uggucuaagagccuaacugcug

SEQ ID NO: 765561 - RNA, 22 nt, Human
aagaagcaugagaagauuuuau

SEQ ID NO: 765562 - RNA, 22 nt, Human
augacuucguuuucucucugca

SEQ ID NO: 765563 - RNA, 22 nt, Human
uucugggcaggacuggggaccc

SEQ ID NO: 765564 - RNA, 17 nt, Human
ggcaggugcggggccgc

SEQ ID NO: 765565 - RNA, 22 nt, Human
gggacaugaagcaucggaggca

SEQ ID NO: 765566 - RNA, 22 nt, Human
uuggaaggugagucccuggguu

SEQ ID NO: 765567 - RNA, 22 nt, Human
uuacaagauugauuugcuuggc

SEQ ID NO: 765568 - RNA, 22 nt, Human
uguggcugcaggcgauggagga

SEQ ID NO: 765569 - RNA, 22 nt, Human
ugaagcugccugcucacagcca

SEQ ID NO: 765570 - RNA, 22 nt, Human
ggcaugcucuuuguccacagua

SEQ ID NO: 765571 - RNA, 22 nt, Human
cagaguacugggagaacagaag

SEQ ID NO: 765572 - RNA, 20 nt, Human
acugugugaucuggaaagcu

SEQ ID NO: 765573 - RNA, 22 nt, Human
cugcucuucccacucacuccca

SEQ ID NO: 765574 - RNA, 22 nt, Human
gcucuugaccuuggagaacucg

SEQ ID NO: 765575 - RNA, 20 nt, Human
uauaacaguguugggugugu

SEQ ID NO: 765576 - RNA, 22 nt, Human
gggcuagaaauucugcagugga

SEQ ID NO: 765577 - RNA, 21 nt, Human
guuaagccuugaggugauugu

SEQ ID NO: 765578 - RNA, 22 nt, Human
uaagcuauuccugaagaagguu

SEQ ID NO: 765579 - RNA, 19 nt, Human
agugcagggagcacccuca

SEQ ID NO: 765580 - RNA, 22 nt, Human
ugcucugggauucagcagccug

SEQ ID NO: 765581 - RNA, 20 nt, Human
cauuucauugugucuucacu

SEQ ID NO: 765582 - RNA, 22 nt, Human
auaucacaaacaagucuguacu

SEQ ID NO: 765583 - RNA, 22 nt, Human
cagaggucugaugcgucccugc

SEQ ID NO: 765584 - RNA, 22 nt, Human
uuucuuauauucugucauuguu

SEQ ID NO: 765585 - RNA, 22 nt, Human
uguuaaauguuuugcuaguguc

SEQ ID NO: 765586 - RNA, 22 nt, Human
cccuaggggcaaugauggugcu

SEQ ID NO: 765587 - RNA, 22 nt, Human
aguccuggcauauagguccuca

SEQ ID NO: 765588 - RNA, 22 nt, Human
gggccaaggggagcuggaaggg

SEQ ID NO: 765589 - RNA, 22 nt, Human
gggcugagaauucagcuuuccu

SEQ ID NO: 765590 - RNA, 22 nt, Human
agcagcaggagccgugggguga

SEQ ID NO: 765591 - RNA, 22 nt, Human
gggcugcuuccuggggaaugcu

SEQ ID NO: 765592 - RNA, 22 nt, Human
gcagcugagagaagaacagggc

SEQ ID NO: 765593 - RNA, 22 nt, Human
cuggcugccacuucagggucuu

SEQ ID NO: 765594 - RNA, 22 nt, Human
ggggcuguuuuuggaauggcug

SEQ ID NO: 765595 - RNA, 22 nt, Human
agaaguuuguuauguaaacaaa

SEQ ID NO: 765596 - RNA, 23 nt, Human
uuugaagaagugaauaucauaua

SEQ ID NO: 765597 - RNA, 23 nt, Human
gcucagguggcucagggacugau

SEQ ID NO: 765598 - RNA, 22 nt, Human
acccagaggugucuagcaagcu

SEQ ID NO: 765599 - RNA, 22 nt, Human
caaugauucugcaacugugugc

SEQ ID NO: 765600 - RNA, 22 nt, Human
aaauuguccuuuuaagaaacag

SEQ ID NO: 765601 - RNA, 22 nt, Human
cuaggcccaugagguuugcugg

SEQ ID NO: 765602 - RNA, 22 nt, Human
uacacacagaggccaugggauu

SEQ ID NO: 765603 - RNA, 22 nt, Human
uuucagagccugcaaucccaau

SEQ ID NO: 765604 - RNA, 22 nt, Human
caaggcuaagcuuuggcuuucu

SEQ ID NO: 765605 - RNA, 22 nt, Human
gcuggcugaguucugucgucug

SEQ ID NO: 765606 - RNA, 23 nt, Human
cuugagcucaggaagagcugagu

SEQ ID NO: 765607 - RNA, 22 nt, Human
uagcugugaaacagcagaagag

SEQ ID NO: 765608 - RNA, 19 nt, Human
cuucuggcccugagccacc

SEQ ID NO: 765609 - RNA, 22 nt, Human
ccagaaagacuuuuuagguacg

SEQ ID NO: 765610 - RNA, 22 nt, Human
agguggcugguccaggcugcag

SEQ ID NO: 765611 - RNA, 22 nt, Human
gaaguauagcagauguuauuua

SEQ ID NO: 765612 - RNA, 22 nt, Human
cugccagggaggcugggaaguu

SEQ ID NO: 765613 - RNA, 22 nt, Human
uggguagagugcugacaaugcc

SEQ ID NO: 765614 - RNA, 22 nt, Human
gccugugcuuaacugacgugag

SEQ ID NO: 765615 - RNA, 22 nt, Human
gccaggaccucagaugcagggc

SEQ ID NO: 765616 - RNA, 22 nt, Human
gcccaggaucugcucagaucau

SEQ ID NO: 765617 - RNA, 22 nt, Human
gccaagaaugcgacagccguca

SEQ ID NO: 765618 - RNA, 22 nt, Human
ugucauuaugaggauuacaaua

SEQ ID NO: 765619 - RNA, 22 nt, Human
ugcagagauuuggcucuuaaag

SEQ ID NO: 765620 - RNA, 21 nt, Human
agggagcauguuagcuuucga

SEQ ID NO: 765621 - RNA, 22 nt, Human
aucccucagcagacagcaaaau

SEQ ID NO: 765622 - RNA, 22 nt, Human
aggcagccaucugcaggaagga

SEQ ID NO: 765623 - RNA, 22 nt, Human
uacuucaaccuucucuauuaga

SEQ ID NO: 765624 - RNA, 22 nt, Human
uccuaauugcuucauguguugu

SEQ ID NO: 765625 - RNA, 22 nt, Human
uggcagauacccaggcaaaugg

SEQ ID NO: 765626 - RNA, 22 nt, Human
uggaggcagucaccugaaguca

SEQ ID NO: 765627 - RNA, 22 nt, Human
cuggguaccucaccgcugcugc

SEQ ID NO: 765628 - RNA, 22 nt, Human
cuggcugcaggaaggagugggc

SEQ ID NO: 765629 - RNA, 22 nt, Human
aguuauaaaaggagcacugauu

SEQ ID NO: 765630 - RNA, 22 nt, Human
uguacaguaggaacuuguuauu

SEQ ID NO: 765631 - RNA, 22 nt, Human
ccugagagguuggccuguccag

SEQ ID NO: 765632 - RNA, 17 nt, Human
uuuguacaacauuuuaa

SEQ ID NO: 765633 - RNA, 19 nt, Human
guguggcagagagugacca

SEQ ID NO: 765634 - RNA, 22 nt, Human
acagagucauucacugaugaag

SEQ ID NO: 765635 - RNA, 17 nt, Human
gcaagggaugggagauu

SEQ ID NO: 765636 - RNA, 22 nt, Human
ugugugcagccucugucuuugg

SEQ ID NO: 765637 - RNA, 22 nt, Human
agcuuucguuccuuagacacau

SEQ ID NO: 765638 - RNA, 19 nt, Human
auauaggcugaaccaugcu

SEQ ID NO: 765639 - RNA, 22 nt, Human
cugagggccgggacccaguuuc

SEQ ID NO: 765640 - RNA, 22 nt, Human
ugcuggagaggaaggugggguc

SEQ ID NO: 765641 - RNA, 22 nt, Human
ucaggccuuguccugaccuccu

SEQ ID NO: 765642 - RNA, 22 nt, Human
aacagauaaguauaucuaugua

SEQ ID NO: 765643 - RNA, 22 nt, Human
augugcuucaggaugucagugu

SEQ ID NO: 765644 - RNA, 22 nt, Human
gagaaacacuguuaguuuauua

SEQ ID NO: 765645 - RNA, 22 nt, Human
aggcugaggcuuuccuuggaga

SEQ ID NO: 765646 - RNA, 22 nt, Human
caaauguguuuuuucuucuaca

SEQ ID NO: 765647 - RNA, 22 nt, Human
gcugagagcaaagcaugucuag

SEQ ID NO: 765648 - RNA, 22 nt, Human
uuucucugcugccugugucgau

SEQ ID NO: 765649 - RNA, 22 nt, Human
aagggagccaagaaagcagggc

SEQ ID NO: 765650 - RNA, 22 nt, Human
gaggacaaggccuugcaauucu

SEQ ID NO: 765651 - RNA, 22 nt, Human
uuuccaauaaggucaccuuccu

SEQ ID NO: 765652 - RNA, 22 nt, Human
uugauuuguaggaauggagacc

SEQ ID NO: 765653 - RNA, 22 nt, Human
uguucuuugcuguugauguaga

SEQ ID NO: 765654 - RNA, 22 nt, Human
cuguuaaagauaguuaagcuuc

SEQ ID NO: 765655 - RNA, 22 nt, Human
cugucccagccccguacucuaa

SEQ ID NO: 765656 - RNA, 22 nt, Human
cagacggguggucugcgaggcc

SEQ ID NO: 765657 - RNA, 22 nt, Human
ggguucagagucaggugugaua

SEQ ID NO: 765658 - RNA, 22 nt, Human
agcugugugugcuugggauuau

SEQ ID NO: 765659 - RNA, 22 nt, Human
guuucuaauuggaacuuugagg

SEQ ID NO: 765660 - RNA, 22 nt, Human
uguacaaauucaguucuagggu

SEQ ID NO: 765661 - RNA, 22 nt, Human
guggaaaugcccccaaauagug

SEQ ID NO: 765662 - RNA, 22 nt, Human
uuucuucacaggguauugggug

SEQ ID NO: 765663 - RNA, 22 nt, Human
cgggcacugccuuuguugauuu

SEQ ID NO: 765664 - RNA, 22 nt, Human
cuggccucucugagcagggagc

SEQ ID NO: 765665 - RNA, 22 nt, Human
uagugugucccuggggaguguu

SEQ ID NO: 765666 - RNA, 22 nt, Human
cuccuggaccaccuuguggcca

SEQ ID NO: 765667 - RNA, 22 nt, Human
aguuuucucacaucaaaaauga

SEQ ID NO: 765668 - RNA, 22 nt, Human
augauauauguguugagcuugc

SEQ ID NO: 765669 - RNA, 22 nt, Human
ccacgagggaaccagguggggu

SEQ ID NO: 765670 - RNA, 22 nt, Human
uguaugccuuuuucuguuguaa

SEQ ID NO: 765671 - RNA, 22 nt, Human
uuuuccuucuagagcagauuuc

SEQ ID NO: 765672 - RNA, 22 nt, Human
ucucacacuauuucaggugacu

SEQ ID NO: 765673 - RNA, 22 nt, Human
cuauggaaacucaacauuuguu

SEQ ID NO: 765674 - RNA, 20 nt, Human
cugagagucugugcuuaguc

SEQ ID NO: 765675 - RNA, 18 nt, Human
ugcaucauuuauggguca

SEQ ID NO: 765676 - RNA, 22 nt, Human
acacaguaaauauugucuccuc

SEQ ID NO: 765677 - RNA, 22 nt, Human
ucuggcagggguucugcacuug

SEQ ID NO: 765678 - RNA, 22 nt, Human
ugcaggagcagagauggcugga

SEQ ID NO: 765679 - RNA, 22 nt, Human
gcaagacaauggagcauaaacg

SEQ ID NO: 765680 - RNA, 22 nt, Human
auguagggaacuaaauucacug

SEQ ID NO: 765681 - RNA, 22 nt, Human
cccaggaggcagagguuggagc

SEQ ID NO: 765682 - RNA, 22 nt, Human
ccucacagagcccagaugucua

SEQ ID NO: 765683 - RNA, 20 nt, Human
ggcagggcaucaacagcucu

SEQ ID NO: 765684 - RNA, 20 nt, Human
cucaucucugagccuccugg

SEQ ID NO: 765685 - RNA, 22 nt, Human
ucccagccaggcucuaccacuu

SEQ ID NO: 765686 - RNA, 22 nt, Human
cuuuucucuguaccguauaucu

SEQ ID NO: 765687 - RNA, 22 nt, Human
ucugcugccugcagggcagaga

SEQ ID NO: 765688 - RNA, 22 nt, Human
cuuuggcagccucugcuauuga

SEQ ID NO: 765689 - RNA, 22 nt, Human
ggagggggaagaagcuaaagac

SEQ ID NO: 765690 - RNA, 22 nt, Human
agugggagcggcagucggggac

SEQ ID NO: 765691 - RNA, 22 nt, Human
cuggcuguguccacagaguaag

SEQ ID NO: 765692 - RNA, 22 nt, Human
acugaacacaccugcagcacgu

SEQ ID NO: 765693 - RNA, 17 nt, Human
ugugacauugggacauu

SEQ ID NO: 765694 - RNA, 22 nt, Human
ccccucucccucacuuaucaau

SEQ ID NO: 765695 - RNA, 22 nt, Human
ugcauugaucauauccuuccug

SEQ ID NO: 765696 - RNA, 22 nt, Human
uggugccuccagcugcuucucc

SEQ ID NO: 765697 - RNA, 22 nt, Human
acauucacgcucucaaagcuga

SEQ ID NO: 765698 - RNA, 22 nt, Human
cuaaagaagcuagcaaucuaua

SEQ ID NO: 765699 - RNA, 22 nt, Human
cuuugauuaucggugugaaugu

SEQ ID NO: 765700 - RNA, 22 nt, Human
ggcucugccauuuccuagcugc

SEQ ID NO: 765701 - RNA, 23 nt, Human
agaaaaacaggauuguguuccua

SEQ ID NO: 765702 - RNA, 22 nt, Human
aagacauugucauuuuauaauu

SEQ ID NO: 765703 - RNA, 22 nt, Human
cccagaugcagguucaagagua

SEQ ID NO: 765704 - RNA, 20 nt, Human
uggaauggguccuugaaaaa

SEQ ID NO: 765705 - RNA, 22 nt, Human
ugcagcugugaaagggaaccaa

SEQ ID NO: 765706 - RNA, 22 nt, Human
ccagggcagcgccccuccacgc

SEQ ID NO: 765707 - RNA, 22 nt, Human
gaucuucuagcagaaguaauuu

SEQ ID NO: 765708 - RNA, 19 nt, Human
cuucacaucugugagggga

SEQ ID NO: 765709 - RNA, 22 nt, Human
agugugaguaauucagggaggg

SEQ ID NO: 765710 - RNA, 22 nt, Human
gugacaggccacugcggcucug

SEQ ID NO: 765711 - RNA, 22 nt, Human
gcagagguguagcccccuccau

SEQ ID NO: 765712 - RNA, 22 nt, Human
acauuaugagcccacuggugaa

SEQ ID NO: 765713 - RNA, 22 nt, Human
aagugggaauagaaaugaaggu

SEQ ID NO: 765714 - RNA, 22 nt, Human
cccagagucacaugggguguuc

SEQ ID NO: 765715 - RNA, 22 nt, Human
aucacacuuuuguaaccaucag

SEQ ID NO: 765716 - RNA, 22 nt, Human
ugcuugugacagaacugugucc

SEQ ID NO: 765717 - RNA, 22 nt, Human
gagcaacaaauuagggggauuu

SEQ ID NO: 765718 - RNA, 22 nt, Human
ggagggcugagacuggggucug

SEQ ID NO: 765719 - RNA, 22 nt, Human
caguguguggauccucccagga

SEQ ID NO: 765720 - RNA, 22 nt, Human
ucaggaugguguggaggaaaua

SEQ ID NO: 765721 - RNA, 22 nt, Human
uaugaagaaaccuauccucuag

SEQ ID NO: 765722 - RNA, 22 nt, Human
auuauuucagucagacacuggc

SEQ ID NO: 765723 - RNA, 22 nt, Human
cugccccaggccucgggaggag

SEQ ID NO: 765724 - RNA, 22 nt, Human
agcuuuaaaaauccaauaucca

SEQ ID NO: 765725 - RNA, 22 nt, Human
cccagggagagcgcggaggcgg

SEQ ID NO: 765726 - RNA, 22 nt, Human
acacagcugugcaguuuuuuca

SEQ ID NO: 765727 - RNA, 22 nt, Human
uucauauaaauggaaucagaau

SEQ ID NO: 765728 - RNA, 22 nt, Human
aagacacugauacucugugauu

SEQ ID NO: 765729 - RNA, 22 nt, Human
agagucaaguagggcaugggcu

SEQ ID NO: 765730 - RNA, 22 nt, Human
cuuuauuccuacaagauuuucu

SEQ ID NO: 765731 - RNA, 22 nt, Human
gguggggauuccugaucacugu

SEQ ID NO: 765732 - RNA, 22 nt, Human
aauagcuuaguccugauucugu

SEQ ID NO: 765733 - RNA, 20 nt, Human
uaugcuuuuuauaagauuga

SEQ ID NO: 765734 - RNA, 22 nt, Human
acaauguaggaguaugacagua

SEQ ID NO: 765735 - RNA, 22 nt, Human
ccuucaugauggaaaggguuca

SEQ ID NO: 765736 - RNA, 22 nt, Human
uuucacagguaagcaauacagg

SEQ ID NO: 765737 - RNA, 22 nt, Human
uucugaaauucgacuauccaau

SEQ ID NO: 765738 - RNA, 22 nt, Human
caggcuggaguacaauugugug

SEQ ID NO: 765739 - RNA, 22 nt, Human
aaaguauucaaaaauauuuggu

SEQ ID NO: 765740 - RNA, 22 nt, Human
ucuggagcuuguuucagauggu

SEQ ID NO: 765741 - RNA, 22 nt, Human
uucugcagcaugaggcuggagc

SEQ ID NO: 765742 - RNA, 21 nt, Human
guggccagugacuacuuauug

SEQ ID NO: 765743 - RNA, 20 nt, Human
cuggggaggaggauguguuc

SEQ ID NO: 765744 - RNA, 22 nt, Human
agaucugaaucucauccgagga

SEQ ID NO: 765745 - RNA, 22 nt, Human
caguuuugguccuuucuaggua

SEQ ID NO: 765746 - RNA, 22 nt, Human
uccucagucucuaaggccucag

SEQ ID NO: 765747 - RNA, 22 nt, Human
gaguucuauuaugguuagaagu

SEQ ID NO: 765748 - RNA, 22 nt, Human
gugaggaugcagaugagggccu

SEQ ID NO: 765749 - RNA, 22 nt, Human
guggcacauugguagggucugu

SEQ ID NO: 765750 - RNA, 22 nt, Human
gagagaccuugcuaagugccuu

SEQ ID NO: 765751 - RNA, 22 nt, Human
augcugagauccucaggccaga

SEQ ID NO: 765752 - RNA, 22 nt, Human
caagucugucugcuccugugug

SEQ ID NO: 765753 - RNA, 20 nt, Human
aaauccaguguguauuuuac

SEQ ID NO: 765754 - RNA, 22 nt, Human
agcagcauguugggaugugaaa

SEQ ID NO: 765755 - RNA, 22 nt, Human
ccagcugcgggcaucgagaguu

SEQ ID NO: 765756 - RNA, 22 nt, Human
auuagcuuaucccauuucugaa

SEQ ID NO: 765757 - RNA, 22 nt, Human
guuucagaacaccccauuuggg

SEQ ID NO: 765758 - RNA, 22 nt, Human
cauaaguugcagagggugcauu

SEQ ID NO: 765759 - RNA, 22 nt, Human
agaaguuugaaauuaggagaaa

SEQ ID NO: 765760 - RNA, 22 nt, Human
gucugaaaaugcccuacgauug

SEQ ID NO: 765761 - RNA, 22 nt, Human
uuucacaugcagcagggaagug

SEQ ID NO: 765762 - RNA, 22 nt, Human
ccacaaggccuguggggcugcu

SEQ ID NO: 765763 - RNA, 22 nt, Human
cuccagauucuggaugacuggg

SEQ ID NO: 765764 - RNA, 20 nt, Human
uggagcuguaaucuugucug

SEQ ID NO: 765765 - RNA, 22 nt, Human
acagagcuucccagccugagca

SEQ ID NO: 765766 - RNA, 23 nt, Human
uccuugggccugcccagaguggu

SEQ ID NO: 765767 - RNA, 22 nt, Human
gauuuccuugcauauugguaau

SEQ ID NO: 765768 - RNA, 22 nt, Human
cuagaaacgccuuuagcacaac

SEQ ID NO: 765769 - RNA, 22 nt, Human
ucaagggaggagacacagcccu

SEQ ID NO: 765770 - RNA, 22 nt, Human
caagaccucaaaaugagagggg

SEQ ID NO: 765771 - RNA, 22 nt, Human
cuccugggggacagcggcaggg

SEQ ID NO: 765772 - RNA, 22 nt, Human
agagugcccaagccuggcaggg

SEQ ID NO: 765773 - RNA, 22 nt, Human
uaaguaaauuuauaaugugauu

SEQ ID NO: 765774 - RNA, 22 nt, Human
ugaggugaagaguggagcucag

SEQ ID NO: 765775 - RNA, 22 nt, Human
auauucacuggguacuaaaaag

SEQ ID NO: 765776 - RNA, 22 nt, Human
caaacuuuuccuggaaaagauu

SEQ ID NO: 765777 - RNA, 22 nt, Human
uugcuuuauuuggcaugccacu

SEQ ID NO: 765778 - RNA, 18 nt, Human
gccugccuagagcuugcc

SEQ ID NO: 765779 - RNA, 22 nt, Human
ucuggcuccacucugugcaugc

SEQ ID NO: 765780 - RNA, 22 nt, Human
uccagacauuuuauagcagucu

SEQ ID NO: 765781 - RNA, 22 nt, Human
ugcaucugauucucaggcagaa

SEQ ID NO: 765782 - RNA, 22 nt, Human
ggcugccccagugcucauggcu

SEQ ID NO: 765783 - RNA, 22 nt, Human
acuuuucuuaucagaaaggcca

SEQ ID NO: 765784 - RNA, 22 nt, Human
cagggcagggagcuuagaauga

SEQ ID NO: 765785 - RNA, 22 nt, Human
uggguuaaaaguugaaugaauu

SEQ ID NO: 765786 - RNA, 22 nt, Human
aaauuaagaguaacucuguaga

SEQ ID NO: 765787 - RNA, 22 nt, Human
cccagccuggugcacugugggg

SEQ ID NO: 765788 - RNA, 22 nt, Human
ucacugugguauauauguauca

SEQ ID NO: 765789 - RNA, 22 nt, Human
cccugugggaacuccugaguug

SEQ ID NO: 765790 - RNA, 22 nt, Human
uggggagagguaucauugagau

SEQ ID NO: 765791 - RNA, 22 nt, Human
uuggcuucaaugucagagacag

SEQ ID NO: 765792 - RNA, 22 nt, Human
aguggcagagucaggguuugga

SEQ ID NO: 765793 - RNA, 22 nt, Human
auucaaaugucaaauccaccag

SEQ ID NO: 765794 - RNA, 22 nt, Human
gggcuuggcacaugggcucagc

SEQ ID NO: 765795 - RNA, 22 nt, Human
cagaguuuugugaacaacuugg

SEQ ID NO: 765796 - RNA, 21 nt, Human
cugcucugacagugaggccag

SEQ ID NO: 765797 - RNA, 22 nt, Human
aaauuagucgguuuaggaauuu

SEQ ID NO: 765798 - RNA, 22 nt, Human
aggcuccacccuacagagcucc

SEQ ID NO: 765799 - RNA, 22 nt, Human
uucaguaugcugaaugauuuuu

SEQ ID NO: 765800 - RNA, 19 nt, Human
uucuggucuggaaucaagg

SEQ ID NO: 765801 - RNA, 22 nt, Human
agugacugacaccuguaauccc

SEQ ID NO: 765802 - RNA, 20 nt, Human
ucccaaaauucuacuuuauc

SEQ ID NO: 765803 - RNA, 22 nt, Human
ugcagaagaccuuccagggcug

SEQ ID NO: 765804 - RNA, 22 nt, Human
acaauucugaugguuucccagu

SEQ ID NO: 765805 - RNA, 22 nt, Human
acaaaggugagcagaagacaca

SEQ ID NO: 765806 - RNA, 22 nt, Human
cuguuuaaugcaaugaaaugag

SEQ ID NO: 765807 - RNA, 22 nt, Human
cagagcugcaaaugccccuccg

SEQ ID NO: 765808 - RNA, 22 nt, Human
uucugcaugguuggggagaagc

SEQ ID NO: 765809 - RNA, 22 nt, Human
ugcuggaaauaggcauuguagc

SEQ ID NO: 765810 - RNA, 22 nt, Human
acagaguuguaaacauuuacca

SEQ ID NO: 765811 - RNA, 22 nt, Human
cucccagacaugugccuccuug

SEQ ID NO: 765812 - RNA, 22 nt, Human
uccugccucuuuucuuauucca

SEQ ID NO: 765813 - RNA, 19 nt, Human
uugaaaauauggaucugag

SEQ ID NO: 765814 - RNA, 18 nt, Human
auggcuccagugucuucc

SEQ ID NO: 765815 - RNA, 22 nt, Human
auuugcaauuacucaugucauu

SEQ ID NO: 765816 - RNA, 18 nt, Human
guccacagcccucacagc

SEQ ID NO: 765817 - RNA, 22 nt, Human
uagugucuguccaucaguaacu

SEQ ID NO: 765818 - RNA, 22 nt, Human
ucccucagacagauguguuccu

SEQ ID NO: 765819 - RNA, 22 nt, Human
uuagaaagaguauaccagaaac

SEQ ID NO: 765820 - RNA, 22 nt, Human
uuugauaguugauuaaauucca

SEQ ID NO: 765821 - RNA, 22 nt, Human
acacagcaaggucugacuuugg

SEQ ID NO: 765822 - RNA, 22 nt, Human
cugcugcuuuugcgggagaaca

SEQ ID NO: 765823 - RNA, 22 nt, Human
cugucuguuuuaccuucuccag

SEQ ID NO: 765824 - RNA, 22 nt, Human
agcagcugcuccacuugcuuaa

SEQ ID NO: 765825 - RNA, 22 nt, Human
aacaaagaugggugggaaagag

SEQ ID NO: 765826 - RNA, 22 nt, Human
gcuagcagaaagcaggcugcuc

SEQ ID NO: 765827 - RNA, 22 nt, Human
ucaaaucucauugccuaaaacu

SEQ ID NO: 765828 - RNA, 22 nt, Human
uaggaaaaagaggcuggcaagg

SEQ ID NO: 765829 - RNA, 22 nt, Human
uacauuaacuuacguccacaug

SEQ ID NO: 765830 - RNA, 22 nt, Human
ggcagcccuuucuggccagcuc

SEQ ID NO: 765831 - RNA, 22 nt, Human
aggaaagguagcgugccagcag

SEQ ID NO: 765832 - RNA, 22 nt, Human
gcccagcugucuggcagggaug

SEQ ID NO: 765833 - RNA, 22 nt, Human
uuuccacucuggccaccaucuu

SEQ ID NO: 765834 - RNA, 19 nt, Human
ucaaaggcuuuuaggagac

SEQ ID NO: 765835 - RNA, 22 nt, Human
agcugggacagacaacuauguu

SEQ ID NO: 765836 - RNA, 22 nt, Human
uaaggcagcugagcuucuaaca

SEQ ID NO: 765837 - RNA, 22 nt, Human
uucucugcauuguaaagagcca

SEQ ID NO: 765838 - RNA, 22 nt, Human
cugcccaucgucauuuaauaaa

SEQ ID NO: 765839 - RNA, 22 nt, Human
agccaguagaucgggaggaugu

SEQ ID NO: 765840 - RNA, 23 nt, Human
agaguggccuacucacacucauu

SEQ ID NO: 765841 - RNA, 22 nt, Human
uaccaaguguauuaugcuuugu

SEQ ID NO: 765842 - RNA, 22 nt, Human
auguauaugcaugcauucaaag

SEQ ID NO: 765843 - RNA, 23 nt, Human
auuuacagcugugugagcaaguu

SEQ ID NO: 765844 - RNA, 22 nt, Human
cugugucugaauaacucugugu

SEQ ID NO: 765845 - RNA, 22 nt, Human
ggaggccucaucuugccccgug

SEQ ID NO: 765846 - RNA, 22 nt, Human
augacaagggaggguccugcua

SEQ ID NO: 765847 - RNA, 19 nt, Human
cucuccaccuaacagguau

SEQ ID NO: 765848 - RNA, 22 nt, Human
ucucuggcacucccuuauggcu

SEQ ID NO: 765849 - RNA, 22 nt, Human
gagcacagaaggagaaauaugg

SEQ ID NO: 765850 - RNA, 22 nt, Human
uagggacacugcucaugaguuc

SEQ ID NO: 765851 - RNA, 22 nt, Human
cacugugguuauuaucacuguu

SEQ ID NO: 765852 - RNA, 22 nt, Human
gauggcuugcuuagugacagca

SEQ ID NO: 765853 - RNA, 22 nt, Human
ccugcagggaaucgaggcagaa

SEQ ID NO: 765854 - RNA, 22 nt, Human
ucugggcugugccaaagcucuu

SEQ ID NO: 765855 - RNA, 20 nt, Human
agagugggugucacaggcug

SEQ ID NO: 765856 - RNA, 22 nt, Human
guuccuauauagccuuaaggau

SEQ ID NO: 765857 - RNA, 22 nt, Human
agcauauacaaacucauauaca

SEQ ID NO: 765858 - RNA, 22 nt, Human
aggcuggcuuggcucuccugug

SEQ ID NO: 765859 - RNA, 22 nt, Human
uucuggcuucaucugacaagcc

SEQ ID NO: 765860 - RNA, 22 nt, Human
ggguucuuauaguaucagagcu

SEQ ID NO: 765861 - RNA, 22 nt, Human
ggagaucugagagcuggaagug

SEQ ID NO: 765862 - RNA, 22 nt, Human
uagcccagcucaaaugaccggu

SEQ ID NO: 765863 - RNA, 22 nt, Human
gcuuccagagacugagcucuuc

SEQ ID NO: 765864 - RNA, 22 nt, Human
augcuuuaaaugucuuuugcuu

SEQ ID NO: 765865 - RNA, 22 nt, Human
guugaggagcaagcaugugucu

SEQ ID NO: 765866 - RNA, 21 nt, Human
acuuugggaggugugaggggc

SEQ ID NO: 765867 - RNA, 22 nt, Human
augaggcccaaacauuacaaau

SEQ ID NO: 765868 - RNA, 22 nt, Human
ucccugcugcacucacaccuac

SEQ ID NO: 765869 - RNA, 22 nt, Human
uguuuaaguagucucagggccu

SEQ ID NO: 765870 - RNA, 22 nt, Human
cucuggaggccguuggcccuua

SEQ ID NO: 765871 - RNA, 22 nt, Human
cugcuguuucucaaaauuaagu

SEQ ID NO: 765872 - RNA, 22 nt, Human
cuggcucuugcgacucagcuug

SEQ ID NO: 765873 - RNA, 17 nt, Human
ugcugccaagucccaac

SEQ ID NO: 765874 - RNA, 20 nt, Human
gauggguauugaagucaccu

SEQ ID NO: 765875 - RNA, 22 nt, Human
aacaugcuugcuuagaaucagc

SEQ ID NO: 765876 - RNA, 22 nt, Human
auagucuucagcacuuugauca

SEQ ID NO: 765877 - RNA, 22 nt, Human
gagacacaguuaucaggcauac

SEQ ID NO: 765878 - RNA, 22 nt, Human
ccugggugguuccggcaaggag

SEQ ID NO: 765879 - RNA, 22 nt, Human
guauaucagacacucauaugua

SEQ ID NO: 765880 - RNA, 22 nt, Human
ccugagugaccugaggucuagu

SEQ ID NO: 765881 - RNA, 22 nt, Human
aggcaauccccugaggauacuu

SEQ ID NO: 765882 - RNA, 18 nt, Human
ucuagaaacccagacucu

SEQ ID NO: 765883 - RNA, 22 nt, Human
caucucugguucagucucugug

SEQ ID NO: 765884 - RNA, 22 nt, Human
augcuguagaucuuagccucua

SEQ ID NO: 765885 - RNA, 22 nt, Human
ucacccagcgggcgcacacucg

SEQ ID NO: 765886 - RNA, 22 nt, Human
gcagugauuggaucagagaugg

SEQ ID NO: 765887 - RNA, 22 nt, Human
gagcacuuagaugcuaugaaug

SEQ ID NO: 765888 - RNA, 22 nt, Human
aggcaaagaaguuggucaggag

SEQ ID NO: 765889 - RNA, 22 nt, Human
ugcagucagcauuagcaaaaua

SEQ ID NO: 765890 - RNA, 22 nt, Human
cagcucugaggaacacuccuuu

SEQ ID NO: 765891 - RNA, 22 nt, Human
augugucuuggaguuuuaaugu

SEQ ID NO: 765892 - RNA, 18 nt, Human
aguaguggguuuagcuuc

SEQ ID NO: 765893 - RNA, 22 nt, Human
aaagugcugugggcuguaagug

SEQ ID NO: 765894 - RNA, 22 nt, Human
ugaggaggcccagguuggggcu

SEQ ID NO: 765895 - RNA, 20 nt, Human
uggagccaaggugugucugg

SEQ ID NO: 765896 - RNA, 23 nt, Human
uggcccugugcaugcugcuuccc

SEQ ID NO: 765897 - RNA, 22 nt, Human
aaguuacuggcaagggcugcag

SEQ ID NO: 765898 - RNA, 22 nt, Human
ucuacauuuuaacaagaugccc

SEQ ID NO: 765899 - RNA, 22 nt, Human
aauguauggauucaugucugug

SEQ ID NO: 765900 - RNA, 22 nt, Human
aauucauugccagaaucuauga

SEQ ID NO: 765901 - RNA, 22 nt, Human
uccuuuccaugcuucuagaggc

SEQ ID NO: 765902 - RNA, 22 nt, Human
uucuucaguguagcaacuguau

SEQ ID NO: 765903 - RNA, 22 nt, Human
uuaaauggagggggaaauacgu

SEQ ID NO: 765904 - RNA, 22 nt, Human
cucccuucugagccuuuuguua

SEQ ID NO: 765905 - RNA, 22 nt, Human
cacccagcauuggcuaagagag

SEQ ID NO: 765906 - RNA, 22 nt, Human
uauguguaggaggaggacaggg

SEQ ID NO: 765907 - RNA, 22 nt, Human
ccugagacaugaaccaggcucc

SEQ ID NO: 765908 - RNA, 23 nt, Human
ugggccuggccucccaguccagc

SEQ ID NO: 765909 - RNA, 22 nt, Human
cugagaaaguuuauguuuauuu

SEQ ID NO: 765910 - RNA, 22 nt, Human
ugaugguuuuauuaauaggacc

SEQ ID NO: 765911 - RNA, 22 nt, Human
guuuauuagaguuuucugucug

SEQ ID NO: 765912 - RNA, 22 nt, Human
ugagacagggucuugcucuguu

SEQ ID NO: 765913 - RNA, 18 nt, Human
gcagggacacagggucac

SEQ ID NO: 765914 - RNA, 22 nt, Human
ugugucuggauagguaauggau

SEQ ID NO: 765915 - RNA, 22 nt, Human
uuauucaucagugcauuaauuu

SEQ ID NO: 765916 - RNA, 22 nt, Human
augcaaaaguaauugcaauuuu

SEQ ID NO: 765917 - RNA, 22 nt, Human
gcuguggccuggcgcagagcug

SEQ ID NO: 765918 - RNA, 22 nt, Human
caacagcugaucuuugaugaag

SEQ ID NO: 765919 - RNA, 22 nt, Human
ggcagagaugugggucagaauc

SEQ ID NO: 765920 - RNA, 18 nt, Human
uggcuucugcuagcugga

SEQ ID NO: 765921 - RNA, 22 nt, Human
cuugugcaauugacauugaauc

SEQ ID NO: 765922 - RNA, 22 nt, Human
aaaagagcuugguugauuuugc

SEQ ID NO: 765923 - RNA, 22 nt, Human
cuuagcuuuaaaagugagaucu

SEQ ID NO: 765924 - RNA, 22 nt, Human
uccgcuggagagggggcugcca

SEQ ID NO: 765925 - RNA, 22 nt, Human
auggaggugccaggugugaggg

SEQ ID NO: 765926 - RNA, 22 nt, Human
cucagagaaaugucacaacaau

SEQ ID NO: 765927 - RNA, 22 nt, Human
ccauaagguuuggggccaugca

SEQ ID NO: 765928 - RNA, 21 nt, Human
ggaaaauuccauacacccacg

SEQ ID NO: 765929 - RNA, 22 nt, Human
aguggggccggugaggccgagg

SEQ ID NO: 765930 - RNA, 22 nt, Human
ugcauguguguguauuuauaaa

SEQ ID NO: 765931 - RNA, 22 nt, Human
uaauuauaacaugcuuucuggc

SEQ ID NO: 765932 - RNA, 22 nt, Human
gggccccaaaaugccaggcucu

SEQ ID NO: 765933 - RNA, 22 nt, Human
ggugccguugaggaaguaacug

SEQ ID NO: 765934 - RNA, 22 nt, Human
aucauugagauuuuuuacaacu

SEQ ID NO: 765935 - RNA, 22 nt, Human
acaggacagucuaguaacagua

SEQ ID NO: 765936 - RNA, 22 nt, Human
caggcuugggagcagagccacu

SEQ ID NO: 765937 - RNA, 22 nt, Human
uuuguaaagucuguucugaguu

SEQ ID NO: 765938 - RNA, 23 nt, Human
cugaaauaccagaaaaucagugu

SEQ ID NO: 765939 - RNA, 22 nt, Human
gagcugaggcucaggcuggcgu

SEQ ID NO: 765940 - RNA, 22 nt, Human
ccaguguguucccugccucacu

SEQ ID NO: 765941 - RNA, 22 nt, Human
gcaggcagucaucuuucauauu

SEQ ID NO: 765942 - RNA, 22 nt, Human
cuggcuguuuucaauguugaug

SEQ ID NO: 765943 - RNA, 22 nt, Human
ugucauaugcugucauagccau

SEQ ID NO: 765944 - RNA, 22 nt, Human
agacauuuggagccaacuuucc

SEQ ID NO: 765945 - RNA, 22 nt, Human
acaguucaagucuuagacaaca

SEQ ID NO: 765946 - RNA, 22 nt, Human
ugcagugugcuagauuuggacu

SEQ ID NO: 765947 - RNA, 22 nt, Human
uucucugacccccuuaaauauu

SEQ ID NO: 765948 - RNA, 22 nt, Human
cugcagcugugagugcuggaug

SEQ ID NO: 765949 - RNA, 22 nt, Human
ggcuguguuucuguuugacauu

SEQ ID NO: 765950 - RNA, 22 nt, Human
cuugaaugguaugagaguaauu

SEQ ID NO: 765951 - RNA, 22 nt, Human
uacaugcacaugaacaugugug

SEQ ID NO: 765952 - RNA, 22 nt, Human
aauguuaauucacagccaaaua

SEQ ID NO: 765953 - RNA, 22 nt, Human
cuucucagaggccagaagcuau

SEQ ID NO: 765954 - RNA, 22 nt, Human
aaagcagguugcaauuacagug

SEQ ID NO: 765955 - RNA, 22 nt, Human
gcccucuaccuuggcuauagaa

SEQ ID NO: 765956 - RNA, 22 nt, Human
agguggguaucaugagagauua

SEQ ID NO: 765957 - RNA, 22 nt, Human
ugucaguagauuauuacaauaa

SEQ ID NO: 765958 - RNA, 22 nt, Human
ugaggcccggguggaggaaugc

SEQ ID NO: 765959 - RNA, 22 nt, Human
aaaauuuucagcuugacuugau

SEQ ID NO: 765960 - RNA, 22 nt, Human
uauuaaguaucuugaugacaaa

SEQ ID NO: 765961 - RNA, 22 nt, Human
acugucacuugcaacugugagg

SEQ ID NO: 765962 - RNA, 22 nt, Human
gcugugcagauguagggagugg

SEQ ID NO: 765963 - RNA, 22 nt, Human
aaggcagucaguuguuuugaaa

SEQ ID NO: 765964 - RNA, 22 nt, Human
uaccauuguaccaagguaauuu

SEQ ID NO: 765965 - RNA, 22 nt, Human
agcgauucuaauuggagauuaa

SEQ ID NO: 765966 - RNA, 22 nt, Human
acucuucaugcuaugcucaacu

SEQ ID NO: 765967 - RNA, 22 nt, Human
cugagccccucugaccucagag

SEQ ID NO: 765968 - RNA, 22 nt, Human
agaaaauuagauuuuacugugu

SEQ ID NO: 765969 - RNA, 22 nt, Human
auaguguuacccuucuuaaagu

SEQ ID NO: 765970 - RNA, 22 nt, Human
gaguguggugaacaggagcacc

SEQ ID NO: 765971 - RNA, 22 nt, Human
cuggcuccaaauucugauguuc

SEQ ID NO: 765972 - RNA, 22 nt, Human
caggaaaucacucugauuuugg

SEQ ID NO: 765973 - RNA, 22 nt, Human
uguguuaaguauuugauacacu

SEQ ID NO: 765974 - RNA, 22 nt, Human
cuguuuauaaauagaggggagu

SEQ ID NO: 765975 - RNA, 20 nt, Human
agggucuggcccuguuccuu

SEQ ID NO: 765976 - RNA, 22 nt, Human
gacagcuucgaggaggugagcu

SEQ ID NO: 765977 - RNA, 22 nt, Human
ugcaaggguguuugagcugccc

SEQ ID NO: 765978 - RNA, 22 nt, Human
aacaggaauugcaggcagaucu

SEQ ID NO: 765979 - RNA, 22 nt, Human
ccuuccucauccauuucucuug

SEQ ID NO: 765980 - RNA, 22 nt, Human
ccuaggcuaauucaguccagua

SEQ ID NO: 765981 - RNA, 22 nt, Human
caaggaggaagaugcaggggac

SEQ ID NO: 765982 - RNA, 22 nt, Human
auuaauaaaauaccacuuuguu

SEQ ID NO: 765983 - RNA, 22 nt, Human
acaaguucugggaauuaggaca

SEQ ID NO: 765984 - RNA, 22 nt, Human
gcaaguuuagcuaacuggccca

SEQ ID NO: 765985 - RNA, 22 nt, Human
cagcagccugccuugggagcuu

SEQ ID NO: 765986 - RNA, 18 nt, Human
uccaaaaucauguauuuu

SEQ ID NO: 765987 - RNA, 22 nt, Human
agcacagauaacauggagugga

SEQ ID NO: 765988 - RNA, 22 nt, Human
gugccagggaguggaggagcuu

SEQ ID NO: 765989 - RNA, 22 nt, Human
ggucagggcuggguaugaagag

SEQ ID NO: 765990 - RNA, 22 nt, Human
uuucacagaacucacuaaggag

SEQ ID NO: 765991 - RNA, 22 nt, Human
gaagagguagcauuggcaggug

SEQ ID NO: 765992 - RNA, 22 nt, Human
uguuaaaccuaguacagguccu

SEQ ID NO: 765993 - RNA, 22 nt, Human
auaaagcaagcauaccauuaag

SEQ ID NO: 765994 - RNA, 22 nt, Human
ucauguuuguuggaaauguggc

SEQ ID NO: 765995 - RNA, 15 nt, Human
aacaggcauuuauau

SEQ ID NO: 765996 - RNA, 22 nt, Human
uuuagaaauucaucuauggccu

SEQ ID NO: 765997 - RNA, 18 nt, Human
uacaaacuccuugaaggc

SEQ ID NO: 765998 - RNA, 22 nt, Human
gcugggcucugucaugccuucc

SEQ ID NO: 765999 - RNA, 22 nt, Human
ucugacauuagauuaauuggaa

SEQ ID NO: 766000 - RNA, 22 nt, Human
ccaaacaaauccccauucuuag

SEQ ID NO: 766001 - RNA, 22 nt, Human
uuaagaggagaucauacuggag

SEQ ID NO: 766002 - RNA, 22 nt, Human
agaaaugugaauuucauuuccu

SEQ ID NO: 766003 - RNA, 22 nt, Human
ucaggcaggaagggaggacuug

SEQ ID NO: 766004 - RNA, 22 nt, Human
acagcaguuuagaggacagcca

SEQ ID NO: 766005 - RNA, 21 nt, Human
ugauucuguuuuaucaucagc

SEQ ID NO: 766006 - RNA, 22 nt, Human
gcugggccuuccgauucucaag

SEQ ID NO: 766007 - RNA, 22 nt, Human
gcuguccucuuggacucagggc

SEQ ID NO: 766008 - RNA, 22 nt, Human
uucugauugcugaugaggccca

SEQ ID NO: 766009 - RNA, 22 nt, Human
agagcagcuggcugcaucuaga

SEQ ID NO: 766010 - RNA, 22 nt, Human
uucuccagacaacagaggguga

SEQ ID NO: 766011 - RNA, 22 nt, Human
gggcuucucuuaugcuaacugg

SEQ ID NO: 766012 - RNA, 22 nt, Human
acuuuagauauuccucuguaca

SEQ ID NO: 766013 - RNA, 22 nt, Human
gccuagugcacuggcagggcuc

SEQ ID NO: 766014 - RNA, 20 nt, Human
uaagcauaguugucaggguc

SEQ ID NO: 766015 - RNA, 22 nt, Human
ugcugccaggucuugcugucca

SEQ ID NO: 766016 - RNA, 22 nt, Human
uggccucucuaccaggcagccu

SEQ ID NO: 766017 - RNA, 22 nt, Human
gaagauugaaggcugggaauua

SEQ ID NO: 766018 - RNA, 22 nt, Human
uuccaagugaaaguagcuuugu

SEQ ID NO: 766019 - RNA, 22 nt, Human
gcccaagccggagcugggagag

SEQ ID NO: 766020 - RNA, 22 nt, Human
ucuucauuuugaagaggcagaa

SEQ ID NO: 766021 - RNA, 22 nt, Human
aggcauccucucugccuugagg

SEQ ID NO: 766022 - RNA, 23 nt, Human
agacuucuccaacaagcuuggcu

SEQ ID NO: 766023 - RNA, 22 nt, Human
ucacacagcuaguaagggccga

SEQ ID NO: 766024 - RNA, 22 nt, Human
aagagcccugguugaaaauaac

SEQ ID NO: 766025 - RNA, 22 nt, Human
aacauacuuguacuaugcauau

SEQ ID NO: 766026 - RNA, 22 nt, Human
aucuuugugcuaauguaguucu

SEQ ID NO: 766027 - RNA, 22 nt, Human
ccuggcagguuacaaccaguua

SEQ ID NO: 766028 - RNA, 22 nt, Human
aagccaguccucuacugggcac

SEQ ID NO: 766029 - RNA, 22 nt, Human
cccuucucuuucacucacuauu

SEQ ID NO: 766030 - RNA, 22 nt, Human
agccagagggaucuuucuaaga

SEQ ID NO: 766031 - RNA, 22 nt, Human
gcuccuggugcaaaguuucuuc

SEQ ID NO: 766032 - RNA, 22 nt, Human
ugccucgugucugagucuguuc

SEQ ID NO: 766033 - RNA, 22 nt, Human
uuccaagagucagcugauccca

SEQ ID NO: 766034 - RNA, 22 nt, Human
caggcccucguggugagcuggg

SEQ ID NO: 766035 - RNA, 22 nt, Human
guucauuuuucccuaaugagua

SEQ ID NO: 766036 - RNA, 22 nt, Human
cauaucauuugcuuauaaaucu

SEQ ID NO: 766037 - RNA, 20 nt, Human
cauuaugguugggcacagug

SEQ ID NO: 766038 - RNA, 22 nt, Human
uuaagacacauuucucagacgg

SEQ ID NO: 766039 - RNA, 23 nt, Human
uguaugaauaugccacaguuuaa

SEQ ID NO: 766040 - RNA, 20 nt, Human
caugccugcugguaucuggc

SEQ ID NO: 766041 - RNA, 22 nt, Human
ggcagguguuuuuauauuaaag

SEQ ID NO: 766042 - RNA, 22 nt, Human
agagugauucuaguuagggaau

SEQ ID NO: 766043 - RNA, 22 nt, Human
guuucagauauauuuguacuua

SEQ ID NO: 766044 - RNA, 22 nt, Human
gcaguguggccccaguaucacg

SEQ ID NO: 766045 - RNA, 22 nt, Human
cuucauuaaugucuauaaguuu

SEQ ID NO: 766046 - RNA, 22 nt, Human
aauuagacuaauuuuacaaggg

SEQ ID NO: 766047 - RNA, 22 nt, Human
aaacugaugcucagagaggggc

SEQ ID NO: 766048 - RNA, 22 nt, Human
ugcuuaaaaagcuccaucaaua

SEQ ID NO: 766049 - RNA, 22 nt, Human
uguauacaagucguguaaacuu

SEQ ID NO: 766050 - RNA, 22 nt, Human
ugucaugcccaggagcaaggua

SEQ ID NO: 766051 - RNA, 19 nt, Human
guuuuguuugcagaacuua

SEQ ID NO: 766052 - RNA, 22 nt, Human
gcuguaugugaggccacaguga

SEQ ID NO: 766053 - RNA, 22 nt, Human
uaggcugggccugccuuccagg

SEQ ID NO: 766054 - RNA, 22 nt, Human
ucgcagaggcacgagugcagaa

SEQ ID NO: 766055 - RNA, 22 nt, Human
acagcagucagugaauauuuaa

SEQ ID NO: 766056 - RNA, 22 nt, Human
cccaugcugaguggccugagau

SEQ ID NO: 766057 - RNA, 21 nt, Human
aucuggaagaacugguaagug

SEQ ID NO: 766058 - RNA, 22 nt, Human
agcagucaggccucagagccgu

SEQ ID NO: 766059 - RNA, 22 nt, Human
ugaugggaggugcugcaggacc

SEQ ID NO: 766060 - RNA, 22 nt, Human
ucucagagauucagggagaagu

SEQ ID NO: 766061 - RNA, 22 nt, Human
acugagguaauugugaggauua

SEQ ID NO: 766062 - RNA, 22 nt, Human
acuugaauuaggccuugagaga

SEQ ID NO: 766063 - RNA, 22 nt, Human
gcugagguuucaggaguggcag

SEQ ID NO: 766064 - RNA, 22 nt, Human
gguaaaaugcagauucuuagcc

SEQ ID NO: 766065 - RNA, 22 nt, Human
gauaaguuauguaacuugcuca

SEQ ID NO: 766066 - RNA, 22 nt, Human
cugaaggacuuggugauaguug

SEQ ID NO: 766067 - RNA, 22 nt, Human
aaguccagugauacuggcagga

SEQ ID NO: 766068 - RNA, 22 nt, Human
uuugcagaugagaaaacugugg

SEQ ID NO: 766069 - RNA, 22 nt, Human
gucuggagagcugagcagaguu

SEQ ID NO: 766070 - RNA, 22 nt, Human
auacuacacauugacuauauuu

SEQ ID NO: 766071 - RNA, 22 nt, Human
gcucccagggacacuggccacu

SEQ ID NO: 766072 - RNA, 22 nt, Human
uuccuaaccucuagcugcauau

SEQ ID NO: 766073 - RNA, 22 nt, Human
gcugaaaugccuuguaaauauu

SEQ ID NO: 766074 - RNA, 22 nt, Human
agcccucauggaacagcuccua

SEQ ID NO: 766075 - RNA, 22 nt, Human
aggcuguggcaucacaucagga

SEQ ID NO: 766076 - RNA, 22 nt, Human
uaguuaaaauaauggagauguu

SEQ ID NO: 766077 - RNA, 22 nt, Human
ccaggcaauguucuaagugauu

SEQ ID NO: 766078 - RNA, 22 nt, Human
agacacugauguucagcucaau

SEQ ID NO: 766079 - RNA, 22 nt, Human
ugcuggugauuaaauccugaag

SEQ ID NO: 766080 - RNA, 21 nt, Human
gcaggguccuuuccauuccua

SEQ ID NO: 766081 - RNA, 22 nt, Human
acagagauggcacagagaaggu

SEQ ID NO: 766082 - RNA, 22 nt, Human
acacacucaauugcauaagcac

SEQ ID NO: 766083 - RNA, 22 nt, Human
caacagucucuauagcuccuug

SEQ ID NO: 766084 - RNA, 22 nt, Human
ccccagcacuaccagaagccag

SEQ ID NO: 766085 - RNA, 22 nt, Human
cccaguuguugccggcucugga

SEQ ID NO: 766086 - RNA, 22 nt, Human
gccuuggaacaauuauugcugc

SEQ ID NO: 766087 - RNA, 22 nt, Human
ucagcccaggucacguaaucaa

SEQ ID NO: 766088 - RNA, 22 nt, Human
gcaggagucccagaagguuuug

SEQ ID NO: 766089 - RNA, 22 nt, Human
cuuccucaugugcaaugcaagc

SEQ ID NO: 766090 - RNA, 22 nt, Human
gggcccugugauuucuugagga

SEQ ID NO: 766091 - RNA, 22 nt, Human
uccaggauugcaggugcacaac

SEQ ID NO: 766092 - RNA, 22 nt, Human
gcaauguuaagaucacaccugg

SEQ ID NO: 766093 - RNA, 22 nt, Human
ggucagaacaaggguaaauaaa

SEQ ID NO: 766094 - RNA, 22 nt, Human
ggccugugagccuuaguuuaua

SEQ ID NO: 766095 - RNA, 22 nt, Human
ccacugcuagagaugcaucccc

SEQ ID NO: 766096 - RNA, 22 nt, Human
gacauucacagguaaacauucc

SEQ ID NO: 766097 - RNA, 17 nt, Human
cgggcccgcggccgcuc

SEQ ID NO: 766098 - RNA, 22 nt, Human
agcugccccucauuuucaccac

SEQ ID NO: 766099 - RNA, 22 nt, Human
uaucuaaauggaauauuccaga

SEQ ID NO: 766100 - RNA, 22 nt, Human
auuuagaacuuuguuugccaau

SEQ ID NO: 766101 - RNA, 22 nt, Human
uucaaguuuugacuuaguccuu

SEQ ID NO: 766102 - RNA, 22 nt, Human
auggcuguccaguuucuagaga

SEQ ID NO: 766103 - RNA, 20 nt, Human
caauagaauguggagauaag

SEQ ID NO: 766104 - RNA, 22 nt, Human
gcaugcaggagagaaagacggc

SEQ ID NO: 766105 - RNA, 22 nt, Human
uuuaacucugucauucucuuua

SEQ ID NO: 766106 - RNA, 22 nt, Human
ccucuucugcuucaggagcacu

SEQ ID NO: 766107 - RNA, 22 nt, Human
gcauuuuauaaagaguuauuug

SEQ ID NO: 766108 - RNA, 22 nt, Human
augcuauacauaugacaucaca

SEQ ID NO: 766109 - RNA, 22 nt, Human
ugggagcaagcuacuuagggaa

SEQ ID NO: 766110 - RNA, 22 nt, Human
ggcaggaggaagaguuagcacc

SEQ ID NO: 766111 - RNA, 22 nt, Human
gccaggcugaggcucuggaaga

SEQ ID NO: 766112 - RNA, 22 nt, Human
cuuccuugcggccccugccuag

SEQ ID NO: 766113 - RNA, 22 nt, Human
gaucauugcugccuuuuucuau

SEQ ID NO: 766114 - RNA, 22 nt, Human
guacaggcagcaaacaccauaa

SEQ ID NO: 766115 - RNA, 19 nt, Human
cagaguccuugaccagucc

SEQ ID NO: 766116 - RNA, 22 nt, Human
augucuuuauaaauguauaaug

SEQ ID NO: 766117 - RNA, 22 nt, Human
augggcugagaaucaagaauau

SEQ ID NO: 766118 - RNA, 22 nt, Human
ugucugaacaaacucugccucc

SEQ ID NO: 766119 - RNA, 22 nt, Human
acaggcucacagucauuucauu

SEQ ID NO: 766120 - RNA, 22 nt, Human
uccguugacacugcauggagau

SEQ ID NO: 766121 - RNA, 22 nt, Human
gaggaagucucucuacaagaaa

SEQ ID NO: 766122 - RNA, 22 nt, Human
cuccagagguccccgcggcacu

SEQ ID NO: 766123 - RNA, 23 nt, Human
gccauggcugccccacaggccuc

SEQ ID NO: 766124 - RNA, 22 nt, Human
aaaacuaaauacgcuuugccuc

SEQ ID NO: 766125 - RNA, 22 nt, Human
ucaguuacucugauguccugug

SEQ ID NO: 766126 - RNA, 22 nt, Human
uaaagaugcccacauugcaggu

SEQ ID NO: 766127 - RNA, 22 nt, Human
cgccgccugcugcagcagcugu

SEQ ID NO: 766128 - RNA, 22 nt, Human
acagcucucccucagagaaaug

SEQ ID NO: 766129 - RNA, 22 nt, Human
aguacuuugcacuuugcucaga

SEQ ID NO: 766130 - RNA, 18 nt, Human
ucacugugugucuugggu

SEQ ID NO: 766131 - RNA, 22 nt, Human
gaggcacaucacuuggugcauu

SEQ ID NO: 766132 - RNA, 22 nt, Human
aaaugauaguauggaacuagga

SEQ ID NO: 766133 - RNA, 22 nt, Human
ggcuugaauggauauaaucugu

SEQ ID NO: 766134 - RNA, 21 nt, Human
cuccucaggaccagccacagg

SEQ ID NO: 766135 - RNA, 22 nt, Human
uccuuagacaaagagugggcuu

SEQ ID NO: 766136 - RNA, 22 nt, Human
gcuggcagcauuagacccuggg

SEQ ID NO: 766137 - RNA, 22 nt, Human
cugccauguuaccugcacaggu

SEQ ID NO: 766138 - RNA, 22 nt, Human
ccuggacuuucaggacuacugu

SEQ ID NO: 766139 - RNA, 22 nt, Human
uggauccagcugcuccuaugag

SEQ ID NO: 766140 - RNA, 22 nt, Human
gaaauugugcauuuagcaacac

SEQ ID NO: 766141 - RNA, 22 nt, Human
auauuuuggggugaugugcauc

SEQ ID NO: 766142 - RNA, 22 nt, Human
cccaagggguguugauggagga

SEQ ID NO: 766143 - RNA, 22 nt, Human
agucagagcuauguuguuauau

SEQ ID NO: 766144 - RNA, 22 nt, Human
agacuacaggagaaacucacuc

SEQ ID NO: 766145 - RNA, 22 nt, Human
caguauuuggaauauagcuaag

SEQ ID NO: 766146 - RNA, 22 nt, Human
aaauaauugaguuggucaauau

SEQ ID NO: 766147 - RNA, 23 nt, Human
uaugucaugagcauauugaaugu

SEQ ID NO: 766148 - RNA, 22 nt, Human
uucuccaaggauacaguccugu

SEQ ID NO: 766149 - RNA, 22 nt, Human
acaguggaggccauaugguccu

SEQ ID NO: 766150 - RNA, 21 nt, Human
gacaaugcagucuuuuuugga

SEQ ID NO: 766151 - RNA, 22 nt, Human
augaagacuaaugugaauggga

SEQ ID NO: 766152 - RNA, 22 nt, Human
agaucagaguggauugugcugc

SEQ ID NO: 766153 - RNA, 22 nt, Human
auuagcuuaguguuuccguaau

SEQ ID NO: 766154 - RNA, 22 nt, Human
guguaugaacgaaagaauggau

SEQ ID NO: 766155 - RNA, 22 nt, Human
aauugucuucuccuuccuggca

SEQ ID NO: 766156 - RNA, 22 nt, Human
gccaggugcauggcugagucuc

SEQ ID NO: 766157 - RNA, 22 nt, Human
uugugaauagugccgcuauaaa

SEQ ID NO: 766158 - RNA, 22 nt, Human
uagcacuuguguuaugccuugu

SEQ ID NO: 766159 - RNA, 23 nt, Human
gaaaucuagucauuuuuagucug

SEQ ID NO: 766160 - RNA, 22 nt, Human
gaaaauuucugccacaugugug

SEQ ID NO: 766161 - RNA, 22 nt, Human
guaguuagaguugugcuggaga

SEQ ID NO: 766162 - RNA, 22 nt, Human
gcugcuguuaugauguuacuuu

SEQ ID NO: 766163 - RNA, 22 nt, Human
ggacugaauggaagauauaugg

SEQ ID NO: 766164 - RNA, 22 nt, Human
uccuggcccgaucccugugaag

SEQ ID NO: 766165 - RNA, 19 nt, Human
uccucagugacaaccucag

SEQ ID NO: 766166 - RNA, 22 nt, Human
ugacucuguaccugucugccuu

SEQ ID NO: 766167 - RNA, 23 nt, Human
uauuccugguaagccugucacug

SEQ ID NO: 766168 - RNA, 22 nt, Human
acauacacacauacuuucuccu

SEQ ID NO: 766169 - RNA, 22 nt, Human
caguauaagagugaggaagggc

SEQ ID NO: 766170 - RNA, 22 nt, Human
auagaaacagaugcacuucucu

SEQ ID NO: 766171 - RNA, 20 nt, Human
uuuacauccccaccagcaau

SEQ ID NO: 766172 - RNA, 17 nt, Human
gacaggcucagugacga

SEQ ID NO: 766173 - RNA, 22 nt, Human
aggccaaguagccgcuguccua

SEQ ID NO: 766174 - RNA, 21 nt, Human
ucugucagaaaagcugaggcu

SEQ ID NO: 766175 - RNA, 22 nt, Human
uuuguagacuaccaguaauugu

SEQ ID NO: 766176 - RNA, 22 nt, Human
ccuuuacaaaguucuucauggg

SEQ ID NO: 766177 - RNA, 22 nt, Human
cugcccacaguucucugccaug

SEQ ID NO: 766178 - RNA, 19 nt, Human
agggcuuugugugcugcuc

SEQ ID NO: 766179 - RNA, 22 nt, Human
ugacaaagcaugauggugacag

SEQ ID NO: 766180 - RNA, 22 nt, Human
guggcacucaccuguaguuuca

SEQ ID NO: 766181 - RNA, 22 nt, Human
gcagggcagugugucugugggg

SEQ ID NO: 766182 - RNA, 22 nt, Human
uuucauagccuucuaaugaguu

SEQ ID NO: 766183 - RNA, 22 nt, Human
acaaauuguugggacucagccc

SEQ ID NO: 766184 - RNA, 22 nt, Human
aacagggcuuuggaagucuccg

SEQ ID NO: 766185 - RNA, 22 nt, Human
guuuccacuugagaggacuccu

SEQ ID NO: 766186 - RNA, 19 nt, Human
gcuucuguuugggcuuaga

SEQ ID NO: 766187 - RNA, 22 nt, Human
aauuauacauugaacaaucuag

SEQ ID NO: 766188 - RNA, 22 nt, Human
ucccccuccaauugccauguua

SEQ ID NO: 766189 - RNA, 22 nt, Human
agauguggccuuugggagauua

SEQ ID NO: 766190 - RNA, 22 nt, Human
auuaaggugucaauguauuugg

SEQ ID NO: 766191 - RNA, 22 nt, Human
uaagcauaagauacaugagaca

SEQ ID NO: 766192 - RNA, 22 nt, Human
uauuaguagcuugaaauuggug

SEQ ID NO: 766193 - RNA, 22 nt, Human
cgugcaaauauaugugugauga

SEQ ID NO: 766194 - RNA, 22 nt, Human
gcugucugcaucucuagagcuu

SEQ ID NO: 766195 - RNA, 22 nt, Human
uguaaacauaucagacuuucuu

SEQ ID NO: 766196 - RNA, 23 nt, Human
ucaauaacucggguuaaaauaga

SEQ ID NO: 766197 - RNA, 20 nt, Human
uuggggcauccaccgaaugg

SEQ ID NO: 766198 - RNA, 22 nt, Human
gggcccugcgacucgcggcgga

SEQ ID NO: 766199 - RNA, 22 nt, Human
gcagcauccccaggcagcaggg

SEQ ID NO: 766200 - RNA, 22 nt, Human
caguagauuugguaaacuagga

SEQ ID NO: 766201 - RNA, 22 nt, Human
gagcgcgccacaaggagcggcg

SEQ ID NO: 766202 - RNA, 22 nt, Human
auguggaaugaacaaaggaggc

SEQ ID NO: 766203 - RNA, 22 nt, Human
uccaggcacagaguuggucagu

SEQ ID NO: 766204 - RNA, 22 nt, Human
cuggccaccaagagcuugcuca

SEQ ID NO: 766205 - RNA, 22 nt, Human
ucugagagguuaagcaauuuga

SEQ ID NO: 766206 - RNA, 19 nt, Human
cugugcuuuaaacuccuau

SEQ ID NO: 766207 - RNA, 22 nt, Human
agagcugcccacacagcagauu

SEQ ID NO: 766208 - RNA, 22 nt, Human
ggcugccuccugcugggcugga

SEQ ID NO: 766209 - RNA, 23 nt, Human
ggaggcacuuaggcagagcagag

SEQ ID NO: 766210 - RNA, 22 nt, Human
uggaaagugagacauauuuaua

SEQ ID NO: 766211 - RNA, 19 nt, Human
cgcaggcuucgggucgcuc

SEQ ID NO: 766212 - RNA, 22 nt, Human
uugcccugucucacuauguuaa

SEQ ID NO: 766213 - RNA, 22 nt, Human
uugcuuuaaaauggcuaagucu

SEQ ID NO: 766214 - RNA, 19 nt, Human
agaggcaaggguggaagua

SEQ ID NO: 766215 - RNA, 22 nt, Human
aguuuuaaaugauggugguggu

SEQ ID NO: 766216 - RNA, 22 nt, Human
aucagcauucccaaaugaugug

SEQ ID NO: 766217 - RNA, 19 nt, Human
uucacauuuuuguggcacu

SEQ ID NO: 766218 - RNA, 19 nt, Human
ucucugccgaucagggccc

SEQ ID NO: 766219 - RNA, 22 nt, Human
uugaagagucuagauugguuau

SEQ ID NO: 766220 - RNA, 22 nt, Human
cacagcugcccuaacuguacuc

SEQ ID NO: 766221 - RNA, 22 nt, Human
acucaagauagggaaaguacaa

SEQ ID NO: 766222 - RNA, 22 nt, Human
auaaagcagguccccagacacu

SEQ ID NO: 766223 - RNA, 22 nt, Human
aaaugcacgcuacccagcuaga

SEQ ID NO: 766224 - RNA, 22 nt, Human
uucauggauguugguagaaaac

SEQ ID NO: 766225 - RNA, 22 nt, Human
gauucaaagacagacucauuuc

SEQ ID NO: 766226 - RNA, 20 nt, Human
gaaauguaucucuugauucu

SEQ ID NO: 766227 - RNA, 22 nt, Human
agcuccugggccaucacaacca

SEQ ID NO: 766228 - RNA, 22 nt, Human
ugggaagauaugagugaccaac

SEQ ID NO: 766229 - RNA, 22 nt, Human
ugcucuggacgcugagugguuu

SEQ ID NO: 766230 - RNA, 22 nt, Human
cugaacaucauagaguguacuu

SEQ ID NO: 766231 - RNA, 22 nt, Human
gagggggcucccugaagccagu

SEQ ID NO: 766232 - RNA, 22 nt, Human
ugcccagccaguuuaugguaau

SEQ ID NO: 766233 - RNA, 22 nt, Human
cucagagagguugaacaacuug

SEQ ID NO: 766234 - RNA, 22 nt, Human
uucuucuccgaggagggcuggu

SEQ ID NO: 766235 - RNA, 22 nt, Human
uagggaaauauagauuuagggc

SEQ ID NO: 766236 - RNA, 22 nt, Human
aagcacaugaaaaugugaagcu

SEQ ID NO: 766237 - RNA, 22 nt, Human
cuucauguucugccuguggaag

SEQ ID NO: 766238 - RNA, 20 nt, Human
uccuggucauguggcugggc

SEQ ID NO: 766239 - RNA, 22 nt, Human
aaaugcuuguaaauuuuccaug

SEQ ID NO: 766240 - RNA, 22 nt, Human
ucccucagcucauauuuaugcc

SEQ ID NO: 766241 - RNA, 22 nt, Human
gcggggggaggaacaucuugca

SEQ ID NO: 766242 - RNA, 22 nt, Human
gaaagugcaugugcccaccauu

SEQ ID NO: 766243 - RNA, 22 nt, Human
cauggccaaagaauuauauuuu

SEQ ID NO: 766244 - RNA, 20 nt, Human
gcaaauggaucccacaagcc

SEQ ID NO: 766245 - RNA, 22 nt, Human
uagcagcaccuacacgucagag

SEQ ID NO: 766246 - RNA, 22 nt, Human
ggguccagaguugaagagguua

SEQ ID NO: 766247 - RNA, 22 nt, Human
ccagggcaugggaagaacugaa

SEQ ID NO: 766248 - RNA, 22 nt, Human
uggcugaggagggucuucuggu

SEQ ID NO: 766249 - RNA, 22 nt, Human
aaggcacucagccuugggacag

SEQ ID NO: 766250 - RNA, 22 nt, Human
aguuuuaucuguaagcuguuca

SEQ ID NO: 766251 - RNA, 22 nt, Human
acccagagaacugugccuugag

SEQ ID NO: 766252 - RNA, 22 nt, Human
acagauaauacauugugcuaca

SEQ ID NO: 766253 - RNA, 22 nt, Human
ugcaggaauuuuuugcagaaag

SEQ ID NO: 766254 - RNA, 22 nt, Human
uuguaugaauguauccuaauuu

SEQ ID NO: 766255 - RNA, 22 nt, Human
uucagaggcuguaugacuagau

SEQ ID NO: 766256 - RNA, 22 nt, Human
ggcugccucugaugugcagacg

SEQ ID NO: 766257 - RNA, 22 nt, Human
guucacagaaggccagauggua

SEQ ID NO: 766258 - RNA, 22 nt, Human
agaaugucaacagccucucaag

SEQ ID NO: 766259 - RNA, 22 nt, Human
acaucacagagcccagauaaag

SEQ ID NO: 766260 - RNA, 22 nt, Human
cagaguguuucuuugggugggu

SEQ ID NO: 766261 - RNA, 22 nt, Human
uuccauauuuguguggcaaaag

SEQ ID NO: 766262 - RNA, 22 nt, Human
gcaaagcugggugugaaugcac

SEQ ID NO: 766263 - RNA, 22 nt, Human
cagcaauauacacagucuaugg

SEQ ID NO: 766264 - RNA, 19 nt, Human
ccugauggagcuggugcaa

SEQ ID NO: 766265 - RNA, 22 nt, Human
gcccacaguguagcagguacuc

SEQ ID NO: 766266 - RNA, 22 nt, Human
guaagaagaugaauccaggcug

SEQ ID NO: 766267 - RNA, 22 nt, Human
uuuguccucuccauguacaaua

SEQ ID NO: 766268 - RNA, 22 nt, Human
augacaaaggcugaaagggaaa

SEQ ID NO: 766269 - RNA, 21 nt, Human
aguugcugcugcugcagguga

SEQ ID NO: 766270 - RNA, 22 nt, Human
aauuucacuguggagcacauuu

SEQ ID NO: 766271 - RNA, 22 nt, Human
cacuaggcgccggguggcugug

SEQ ID NO: 766272 - RNA, 22 nt, Human
ucaagagagugcugcuuggggu

SEQ ID NO: 766273 - RNA, 22 nt, Human
agccagcacggcgccauggagu

SEQ ID NO: 766274 - RNA, 22 nt, Human
uucagcaguuucugagaagcaa

SEQ ID NO: 766275 - RNA, 22 nt, Human
gaaauugucagcuucuuucagu

SEQ ID NO: 766276 - RNA, 22 nt, Human
ucaauuuuaugaaacaaaguga

SEQ ID NO: 766277 - RNA, 22 nt, Human
uguccugggucaaccaggucga

SEQ ID NO: 766278 - RNA, 20 nt, Human
ccagagcugauggcugcccg

SEQ ID NO: 766279 - RNA, 22 nt, Human
uugcaaaugugaguuuagacug

SEQ ID NO: 766280 - RNA, 22 nt, Human
agcaggaaagaaaaaucugugu

SEQ ID NO: 766281 - RNA, 22 nt, Human
ugcagcuguaacagaggccuca

SEQ ID NO: 766282 - RNA, 22 nt, Human
ccaaaguccuuucuccaccugc

SEQ ID NO: 766283 - RNA, 22 nt, Human
ggaagcugaauccagagacagg

SEQ ID NO: 766284 - RNA, 22 nt, Human
ccagcuggucugugcucauguu

SEQ ID NO: 766285 - RNA, 22 nt, Human
acugaaggaagcgggcaggggu

SEQ ID NO: 766286 - RNA, 22 nt, Human
uauggcuuugggccaaaucuac

SEQ ID NO: 766287 - RNA, 22 nt, Human
ccagcuucaugggcaugcacca

SEQ ID NO: 766288 - RNA, 22 nt, Human
ucuggggaugaggaccuagaug

SEQ ID NO: 766289 - RNA, 22 nt, Human
uggcugaauaauauucuguugu

SEQ ID NO: 766290 - RNA, 21 nt, Human
ucccucagaagguagccaagc

SEQ ID NO: 766291 - RNA, 22 nt, Human
auaaggaaugauguaucaguuu

SEQ ID NO: 766292 - RNA, 22 nt, Human
ugggaagagggguauaaagaag

SEQ ID NO: 766293 - RNA, 22 nt, Human
ugguggacauucuggaugugcu

SEQ ID NO: 766294 - RNA, 23 nt, Human
auggaaauagcaugugucauuua

SEQ ID NO: 766295 - RNA, 22 nt, Human
ugaugcuguguaccucauggga

SEQ ID NO: 766296 - RNA, 22 nt, Human
aaagggccaauggagagugugg

SEQ ID NO: 766297 - RNA, 22 nt, Human
gagagggccgggggccagcucc

SEQ ID NO: 766298 - RNA, 22 nt, Human
augugagggaaaucagucagaa

SEQ ID NO: 766299 - RNA, 20 nt, Human
gcagccucaacaggcacagc

SEQ ID NO: 766300 - RNA, 22 nt, Human
aagacagccuuucccuggugcc

SEQ ID NO: 766301 - RNA, 22 nt, Human
aaaaccaggcguuuccuauuau

SEQ ID NO: 766302 - RNA, 17 nt, Human
uccaggagaggcaaugg

SEQ ID NO: 766303 - RNA, 20 nt, Human
uagcagcagaaagaacuuag

SEQ ID NO: 766304 - RNA, 15 nt, Human
ucugggcugugagca

SEQ ID NO: 766305 - RNA, 22 nt, Human
ugcauuuauaaaauguucgugg

SEQ ID NO: 766306 - RNA, 22 nt, Human
cagggagcagcgcuggggccuc

SEQ ID NO: 766307 - RNA, 22 nt, Human
uuuugaauaauucagaaacagc

SEQ ID NO: 766308 - RNA, 22 nt, Human
gggcuuuagauugcagaggauu

SEQ ID NO: 766309 - RNA, 22 nt, Human
acagaguuuauguguguacaaa

SEQ ID NO: 766310 - RNA, 22 nt, Human
ggcugcagauagccagccacca

SEQ ID NO: 766311 - RNA, 22 nt, Human
uguuuuaagcucuagaagggga

SEQ ID NO: 766312 - RNA, 22 nt, Human
caccuggcuggaagugcuccgg

SEQ ID NO: 766313 - RNA, 22 nt, Human
uccugugguaugggagugaugu

SEQ ID NO: 766314 - RNA, 22 nt, Human
cagauguggaaugcagcaggcu

SEQ ID NO: 766315 - RNA, 22 nt, Human
agcaggcuaaauaauaauacau

SEQ ID NO: 766316 - RNA, 22 nt, Human
uucucuagguuuuagaugaaga

SEQ ID NO: 766317 - RNA, 22 nt, Human
ucacugcugcugccaugaugga

SEQ ID NO: 766318 - RNA, 22 nt, Human
cugggacuuguagucucggcgc

SEQ ID NO: 766319 - RNA, 22 nt, Human
gugcaugugucuuuauaguagc

SEQ ID NO: 766320 - RNA, 22 nt, Human
agcccuaaauuaucuuuauuuu

SEQ ID NO: 766321 - RNA, 22 nt, Human
cugggcuuaggaccuggugcgg

SEQ ID NO: 766322 - RNA, 22 nt, Human
cuacaagauuuuuaaaacugua

SEQ ID NO: 766323 - RNA, 22 nt, Human
acaggucugugugcacagugcu

SEQ ID NO: 766324 - RNA, 22 nt, Human
auccugcugcuguggacuucuc

SEQ ID NO: 766325 - RNA, 22 nt, Human
aacagaguuucaaauaacaucu

SEQ ID NO: 766326 - RNA, 22 nt, Human
accuaacuuaccuagguccaca

SEQ ID NO: 766327 - RNA, 22 nt, Human
ugugacaagcauuguauauugg

SEQ ID NO: 766328 - RNA, 18 nt, Human
ucuguguucugucauugc

SEQ ID NO: 766329 - RNA, 19 nt, Human
gcuucccaccagccagccc

SEQ ID NO: 766330 - RNA, 22 nt, Human
gcugaauaauucuuuguugugg

SEQ ID NO: 766331 - RNA, 22 nt, Human
ucucugggcucaggagcccggc

SEQ ID NO: 766332 - RNA, 22 nt, Human
cucuccuggggagcacacacac

SEQ ID NO: 766333 - RNA, 22 nt, Human
auacacaggcaugcuucugauu

SEQ ID NO: 766334 - RNA, 22 nt, Human
gucuccacagcccagcugccac

SEQ ID NO: 766335 - RNA, 23 nt, Human
ugaguucucaucuuggcuucuau

SEQ ID NO: 766336 - RNA, 22 nt, Human
augcauaugccguagaauaagu

SEQ ID NO: 766337 - RNA, 21 nt, Human
agguuucucuuuuauggaggg

SEQ ID NO: 766338 - RNA, 23 nt, Human
uuguccuucugaaauauaucugg

SEQ ID NO: 766339 - RNA, 22 nt, Human
gcagggacugugaucucacaga

SEQ ID NO: 766340 - RNA, 22 nt, Human
uacagaguggugagaucuuuug

SEQ ID NO: 766341 - RNA, 22 nt, Human
augucuggaggucaucugguua

SEQ ID NO: 766342 - RNA, 22 nt, Human
aaauaugugaucagugaauaaa

SEQ ID NO: 766343 - RNA, 22 nt, Human
uggcauguugauaauggagaag

SEQ ID NO: 766344 - RNA, 22 nt, Human
ucuuuacauaguguggacuacu

SEQ ID NO: 766345 - RNA, 22 nt, Human
aucuuugggcaaugaugaggga

SEQ ID NO: 766346 - RNA, 22 nt, Human
aagauuugguaucagaagaccu

SEQ ID NO: 766347 - RNA, 22 nt, Human
aaaaauugcugagaacggaauu

SEQ ID NO: 766348 - RNA, 23 nt, Human
ugcagagugucacuugaaaacca

SEQ ID NO: 766349 - RNA, 22 nt, Human
guccugagcccucagcacagca

SEQ ID NO: 766350 - RNA, 22 nt, Human
uuuauacuccacucugcaagcg

SEQ ID NO: 766351 - RNA, 22 nt, Human
aaagaucaaguaggcauggccu

SEQ ID NO: 766352 - RNA, 22 nt, Human
cuggggugucucgucugccauu

SEQ ID NO: 766353 - RNA, 19 nt, Human
aggaaggaaccugagucug

SEQ ID NO: 766354 - RNA, 22 nt, Human
ggugaugaaaagugccuuuauc

SEQ ID NO: 766355 - RNA, 22 nt, Human
aagauuuucagugccuaaaaca

SEQ ID NO: 766356 - RNA, 22 nt, Human
uguuauugagguuacuuauaag

SEQ ID NO: 766357 - RNA, 22 nt, Human
gagggaagauuccccauauggg

SEQ ID NO: 766358 - RNA, 22 nt, Human
auauuucuggggguguguuucu

SEQ ID NO: 766359 - RNA, 22 nt, Human
agugcauauaugaagaguauga

SEQ ID NO: 766360 - RNA, 22 nt, Human
uggcaggcgggagccauagagg

SEQ ID NO: 766361 - RNA, 17 nt, Human
ugagcuucaaucaggug

SEQ ID NO: 766362 - RNA, 22 nt, Human
cugugacuagaccugcaggaga

SEQ ID NO: 766363 - RNA, 22 nt, Human
ccuggccucagccuagggcuga

SEQ ID NO: 766364 - RNA, 22 nt, Human
aaagcaugguuaaagacagugg

SEQ ID NO: 766365 - RNA, 22 nt, Human
cucccuggggcuccuccuauuu

SEQ ID NO: 766366 - RNA, 22 nt, Human
ggucugugugcuuugggaagug

SEQ ID NO: 766367 - RNA, 22 nt, Human
gcuggccugggcucaagaccag

SEQ ID NO: 766368 - RNA, 22 nt, Human
gaaaaaggauaaauacaguguu

SEQ ID NO: 766369 - RNA, 22 nt, Human
ucauugaaaacucagcaucuac

SEQ ID NO: 766370 - RNA, 20 nt, Human
aauggcuuauagcaugcuac

SEQ ID NO: 766371 - RNA, 22 nt, Human
ugagcuuccucccugcauccau

SEQ ID NO: 766372 - RNA, 22 nt, Human
ugucugccugucucugugcaaa

SEQ ID NO: 766373 - RNA, 22 nt, Human
aagacaugcaguuuguuccauu

SEQ ID NO: 766374 - RNA, 22 nt, Human
ucucugggccucccuuuccaag

SEQ ID NO: 766375 - RNA, 22 nt, Human
aauaauuuccagccaacuggaa

SEQ ID NO: 766376 - RNA, 20 nt, Human
cuguaaacugcgucuguaau

SEQ ID NO: 766377 - RNA, 22 nt, Human
cacugcuuucacaguuuguucc

SEQ ID NO: 766378 - RNA, 22 nt, Human
aguuucacaugcauggaugugu

SEQ ID NO: 766379 - RNA, 22 nt, Human
accuuuggaaauaaacacucug

SEQ ID NO: 766380 - RNA, 22 nt, Human
acucuucacuuccccugccagc

SEQ ID NO: 766381 - RNA, 22 nt, Human
ugaaaauauaguuuuccagacu

SEQ ID NO: 766382 - RNA, 22 nt, Human
gugccugugcggacucagggaa

SEQ ID NO: 766383 - RNA, 22 nt, Human
gggcuccaacggugagcaugga

SEQ ID NO: 766384 - RNA, 22 nt, Human
uauugcuucauaauuguugcca

SEQ ID NO: 766385 - RNA, 22 nt, Human
aaauaaaggaacuguuuuccca

SEQ ID NO: 766386 - RNA, 22 nt, Human
gagagugagauaauuucacaua

SEQ ID NO: 766387 - RNA, 22 nt, Human
gaaggcauuuuaugccuuauag

SEQ ID NO: 766388 - RNA, 21 nt, Human
ucagggcagugggagguuccu

SEQ ID NO: 766389 - RNA, 22 nt, Human
agccacgucccugucaggguca

SEQ ID NO: 766390 - RNA, 22 nt, Human
uggaacaagacagcauagagcu

SEQ ID NO: 766391 - RNA, 22 nt, Human
aaacucaaagucagaucagaga

SEQ ID NO: 766392 - RNA, 22 nt, Human
agcacagauucugaagaguccu

SEQ ID NO: 766393 - RNA, 22 nt, Human
uucuuuggcuuacgucuggccu

SEQ ID NO: 766394 - RNA, 22 nt, Human
ccagggcaggggcuggaguuca

SEQ ID NO: 766395 - RNA, 22 nt, Human
cucucuggaccucaacuauuuu

SEQ ID NO: 766396 - RNA, 22 nt, Human
auccaaacauguaccacacuaa

SEQ ID NO: 766397 - RNA, 22 nt, Human
uacagccucuucccuggagugg

SEQ ID NO: 766398 - RNA, 17 nt, Human
uaaauacacaaggguau

SEQ ID NO: 766399 - RNA, 22 nt, Human
ugcaggugucucugucuagcgu

SEQ ID NO: 766400 - RNA, 22 nt, Human
agcugcccaauccugcagggcg

SEQ ID NO: 766401 - RNA, 22 nt, Human
uauaggaaguauucaaagacug

SEQ ID NO: 766402 - RNA, 22 nt, Human
agccauggcgccacuagaggga

SEQ ID NO: 766403 - RNA, 22 nt, Human
aagaaagauaagguuugcuugg

SEQ ID NO: 766404 - RNA, 22 nt, Human
uacacugugguaaacucaaagu

SEQ ID NO: 766405 - RNA, 22 nt, Human
ucagaaaauaacuguuaguuug

SEQ ID NO: 766406 - RNA, 22 nt, Human
ucaugcacaugugucaccauca

SEQ ID NO: 766407 - RNA, 22 nt, Human
auuugugaucgugcgugaugaa

SEQ ID NO: 766408 - RNA, 22 nt, Human
aaaggucuucucaaacauccca

SEQ ID NO: 766409 - RNA, 22 nt, Human
ugcauugcaguuaacucaguau

SEQ ID NO: 766410 - RNA, 22 nt, Human
acccagucauccuggugugaga

SEQ ID NO: 766411 - RNA, 22 nt, Human
augcggagccccaagcuugaag

SEQ ID NO: 766412 - RNA, 22 nt, Human
uuccagaauugggagccuugag

SEQ ID NO: 766413 - RNA, 22 nt, Human
cuggcagguggagguugcagug

SEQ ID NO: 766414 - RNA, 19 nt, Human
agguggguaagcaguucuc

SEQ ID NO: 766415 - RNA, 22 nt, Human
ucagugcagcggcagcagcucu

SEQ ID NO: 766416 - RNA, 22 nt, Human
ucaguguuaaucagugguaccu

SEQ ID NO: 766417 - RNA, 22 nt, Human
auuguacaaugccuggaacauu

SEQ ID NO: 766418 - RNA, 22 nt, Human
aagccaggguuuguggaucuau

SEQ ID NO: 766419 - RNA, 22 nt, Human
gugugaaaguuccuaagacuau

SEQ ID NO: 766420 - RNA, 22 nt, Human
uuggcucaccuggagccuguug

SEQ ID NO: 766421 - RNA, 22 nt, Human
gagguagcaugcuggaagggac

SEQ ID NO: 766422 - RNA, 22 nt, Human
gagcagcucaggcacuuagcca

SEQ ID NO: 766423 - RNA, 22 nt, Human
cauguaaagcauccuucuaggg

SEQ ID NO: 766424 - RNA, 22 nt, Human
gcagagguggcaucugggcucu

SEQ ID NO: 766425 - RNA, 22 nt, Human
uggccuggugucugcgaggccu

SEQ ID NO: 766426 - RNA, 22 nt, Human
aaggaggaauaaagagguggug

SEQ ID NO: 766427 - RNA, 22 nt, Human
uggggcuccuccuggcaggagg

SEQ ID NO: 766428 - RNA, 22 nt, Human
ucagaguguggugagaugugca

SEQ ID NO: 766429 - RNA, 22 nt, Human
aaauugauuaaaguccgugcuu

SEQ ID NO: 766430 - RNA, 22 nt, Human
cagcuguucacauuuccaaaac

SEQ ID NO: 766431 - RNA, 22 nt, Human
caugucuggguauaugcauaug

SEQ ID NO: 766432 - RNA, 22 nt, Human
cacuuaaagucuuagcuuacag

SEQ ID NO: 766433 - RNA, 22 nt, Human
gugagaaaugacaaaugugucg

SEQ ID NO: 766434 - RNA, 22 nt, Human
uccuuugguucucuaagaugcu

SEQ ID NO: 766435 - RNA, 22 nt, Human
ucacacauuucucaaguguagg

SEQ ID NO: 766436 - RNA, 22 nt, Human
agucccaggcagccgagccggu

SEQ ID NO: 766437 - RNA, 22 nt, Human
uagcaccauacccggcagcucg

SEQ ID NO: 766438 - RNA, 22 nt, Human
cugcagccuaggugcagcuggg

SEQ ID NO: 766439 - RNA, 22 nt, Human
acagugauugguuuggggguga

SEQ ID NO: 766440 - RNA, 22 nt, Human
ggucucaggagacuggagagca

SEQ ID NO: 766441 - RNA, 22 nt, Human
ccugagauuuguaauuuuugua

SEQ ID NO: 766442 - RNA, 22 nt, Human
ugcaccagagcagggugcccaa

SEQ ID NO: 766443 - RNA, 22 nt, Human
gccuuccuuacaccugcucagc

SEQ ID NO: 766444 - RNA, 17 nt, Human
guuugcaugguguuaac

SEQ ID NO: 766445 - RNA, 22 nt, Human
gaaggcacugaacuccuucugg

SEQ ID NO: 766446 - RNA, 22 nt, Human
caggcacccucugaggggaagc

SEQ ID NO: 766447 - RNA, 22 nt, Human
cucaagaagagggagaccuaca

SEQ ID NO: 766448 - RNA, 22 nt, Human
ugaacacagggccaaacuugag

SEQ ID NO: 766449 - RNA, 19 nt, Human
auguucuauccuccaaguu

SEQ ID NO: 766450 - RNA, 23 nt, Human
agccacagccagagcuaucucca

SEQ ID NO: 766451 - RNA, 22 nt, Human
cucccgugauccuggaggagag

SEQ ID NO: 766452 - RNA, 22 nt, Human
guuccacaaaauguacccaguu

SEQ ID NO: 766453 - RNA, 22 nt, Human
caagggcagcagccucaagcgg

SEQ ID NO: 766454 - RNA, 22 nt, Human
aagagcaucaaugacucgcagu

SEQ ID NO: 766455 - RNA, 22 nt, Human
ucugcugcugcagcuacacuau

SEQ ID NO: 766456 - RNA, 22 nt, Human
ccugugcucccuauguaucugg

SEQ ID NO: 766457 - RNA, 23 nt, Human
agugcuggagaagcuucuggcuu

SEQ ID NO: 766458 - RNA, 22 nt, Human
cagcccugcugguuuugggcaa

SEQ ID NO: 766459 - RNA, 22 nt, Human
uggagcucaaaggccuguggga

SEQ ID NO: 766460 - RNA, 22 nt, Human
acuggccaggcagcaguagcuu

SEQ ID NO: 766461 - RNA, 22 nt, Human
gcagcugcagacccucagugcu

SEQ ID NO: 766462 - RNA, 22 nt, Human
cagccugcaggaggccgucagc

SEQ ID NO: 766463 - RNA, 22 nt, Human
cuuggcuguugggcauugagaa

SEQ ID NO: 766464 - RNA, 22 nt, Human
agguacagaugaaagucuaguu

SEQ ID NO: 766465 - RNA, 22 nt, Human
ucccacagaccaugaguggaag

SEQ ID NO: 766466 - RNA, 22 nt, Human
cccaggucuccugcuucccagg

SEQ ID NO: 766467 - RNA, 21 nt, Human
accaucuuccaugcauuauau

SEQ ID NO: 766468 - RNA, 22 nt, Human
ucaucacauaugucaugauuug

SEQ ID NO: 766469 - RNA, 22 nt, Human
aggucauuggggacuaucuccg

SEQ ID NO: 766470 - RNA, 22 nt, Human
ugcagggaaaacccaggaugcu

SEQ ID NO: 766471 - RNA, 22 nt, Human
ucagggagaggugagagccugu

SEQ ID NO: 766472 - RNA, 18 nt, Human
uaagaagguggcuccagc

SEQ ID NO: 766473 - RNA, 22 nt, Human
agauccauccagcacucuugcc

SEQ ID NO: 766474 - RNA, 22 nt, Human
cucaggaugcaggucacaggac

SEQ ID NO: 766475 - RNA, 19 nt, Human
aguguauuuuuuucuguag

SEQ ID NO: 766476 - RNA, 22 nt, Human
gcagaacauuucacaguaucuu

SEQ ID NO: 766477 - RNA, 22 nt, Human
ucugggccggagccgacggcag

SEQ ID NO: 766478 - RNA, 22 nt, Human
agcucagagauaaucaagagac

SEQ ID NO: 766479 - RNA, 20 nt, Human
cguccccuugagcagguccc

SEQ ID NO: 766480 - RNA, 22 nt, Human
aggcccuggccugacucaaugu

SEQ ID NO: 766481 - RNA, 22 nt, Human
aauagcuugccuaauccucaug

SEQ ID NO: 766482 - RNA, 22 nt, Human
aaauguccuuagagaaaaguca

SEQ ID NO: 766483 - RNA, 22 nt, Human
ugugaucugccuuggaucugca

SEQ ID NO: 766484 - RNA, 22 nt, Human
aauccauaauguugugggguuu

SEQ ID NO: 766485 - RNA, 22 nt, Human
agcacacaggccaccuccacuu

SEQ ID NO: 766486 - RNA, 22 nt, Human
aacugcaguuaccuuugcacca

SEQ ID NO: 766487 - RNA, 22 nt, Human
aggcucccaagcacugacccca

SEQ ID NO: 766488 - RNA, 22 nt, Human
ucagugcuugacagcucuggga

SEQ ID NO: 766489 - RNA, 22 nt, Human
ucaggaaaggcagagugucugu

SEQ ID NO: 766490 - RNA, 22 nt, Human
uccuuggagucaugauggaggu

SEQ ID NO: 766491 - RNA, 20 nt, Human
accaauguuagcuuaguacu

SEQ ID NO: 766492 - RNA, 22 nt, Human
uuuacuguucaacuugcaagua

SEQ ID NO: 766493 - RNA, 22 nt, Human
ucaauguucaaguaugacaaug

SEQ ID NO: 766494 - RNA, 22 nt, Human
aguaucugcaugauuuugagaa

SEQ ID NO: 766495 - RNA, 22 nt, Human
guggcuucuucuugggagcugc

SEQ ID NO: 766496 - RNA, 22 nt, Human
gcaguaaaaaaggauaugugca

SEQ ID NO: 766497 - RNA, 22 nt, Human
uuaaguugugaauaauccaguc

SEQ ID NO: 766498 - RNA, 22 nt, Human
cuggaaugagcagggcuuaugg

SEQ ID NO: 766499 - RNA, 22 nt, Human
uauucaguggaaaauguguuga

SEQ ID NO: 766500 - RNA, 22 nt, Human
gccaggacugagaaugggagca

SEQ ID NO: 766501 - RNA, 22 nt, Human
aacugcuucuuacugcugggca

SEQ ID NO: 766502 - RNA, 22 nt, Human
ucaucuguucauacacaugcgu

SEQ ID NO: 766503 - RNA, 22 nt, Human
aagagcaacuuggaaacacuca

SEQ ID NO: 766504 - RNA, 22 nt, Human
auguucuuggauguuguguaua

SEQ ID NO: 766505 - RNA, 22 nt, Human
ggagauaguccaggugaaggga

SEQ ID NO: 766506 - RNA, 20 nt, Human
agagaauucccuuuggagau

SEQ ID NO: 766507 - RNA, 20 nt, Human
uccuggaguauuccaugcuu

SEQ ID NO: 766508 - RNA, 17 nt, Human
ccugaaggcacuuccag

SEQ ID NO: 766509 - RNA, 22 nt, Human
agggcucagccuccuccucagc

SEQ ID NO: 766510 - RNA, 22 nt, Human
ucucacaguaugaauuguucac

SEQ ID NO: 766511 - RNA, 22 nt, Human
aagcugcagaugugccugugga

SEQ ID NO: 766512 - RNA, 20 nt, Human
aggcaucugagucacaucuu

SEQ ID NO: 766513 - RNA, 22 nt, Human
agcccugggcguuacugggaug

SEQ ID NO: 766514 - RNA, 22 nt, Human
gaugcugagagauuggagacua

SEQ ID NO: 766515 - RNA, 22 nt, Human
uagcuguugggagagggcuaga

SEQ ID NO: 766516 - RNA, 22 nt, Human
cagaaguaagauuacugugaga

SEQ ID NO: 766517 - RNA, 19 nt, Human
ucaguauauaauuacacca

SEQ ID NO: 766518 - RNA, 22 nt, Human
ggccaccuaggagccacaguga

SEQ ID NO: 766519 - RNA, 19 nt, Human
cagcuggaaucaucugagg

SEQ ID NO: 766520 - RNA, 22 nt, Human
ggugcuggacacguggcacucc

SEQ ID NO: 766521 - RNA, 22 nt, Human
uuucccuuguuccuuccucuga

SEQ ID NO: 766522 - RNA, 22 nt, Human
auucugcaacuguuguuggugg

SEQ ID NO: 766523 - RNA, 20 nt, Human
gcucccugguagaaauguuu

SEQ ID NO: 766524 - RNA, 22 nt, Human
aucuucaaagcacaucguuugu

SEQ ID NO: 766525 - RNA, 22 nt, Human
cuguuaagcaacaugaguaagu

SEQ ID NO: 766526 - RNA, 18 nt, Human
uugauucauauuaaccau

SEQ ID NO: 766527 - RNA, 22 nt, Human
ugcagggauccuagcugaagag

SEQ ID NO: 766528 - RNA, 21 nt, Human
uucuuuccccagaggacuaaa

SEQ ID NO: 766529 - RNA, 22 nt, Human
uauccuguguacugucuaguac

SEQ ID NO: 766530 - RNA, 22 nt, Human
cuggcugcaguagcaagagacu

SEQ ID NO: 766531 - RNA, 22 nt, Human
augggccaggcuugggaugaca

SEQ ID NO: 766532 - RNA, 22 nt, Human
ggaauaaaaauuguuuacugua

SEQ ID NO: 766533 - RNA, 21 nt, Human
ugaggccucuccugggcuggc

SEQ ID NO: 766534 - RNA, 22 nt, Human
guggcagucaucaaggacagau

SEQ ID NO: 766535 - RNA, 22 nt, Human
ugggcuuuaucaugggucuggu

SEQ ID NO: 766536 - RNA, 22 nt, Human
uccuaacuccacuagccuuggg

SEQ ID NO: 766537 - RNA, 22 nt, Human
uuggcugcuggucuuuggauau

SEQ ID NO: 766538 - RNA, 22 nt, Human
aggcaacaugacucacuugcac

SEQ ID NO: 766539 - RNA, 22 nt, Human
cagcucccagagugaccagcag

SEQ ID NO: 766540 - RNA, 20 nt, Human
acagagaucagcugaugggc

SEQ ID NO: 766541 - RNA, 20 nt, Human
accuggagacagcacucugg

SEQ ID NO: 766542 - RNA, 22 nt, Human
ugacagugaacagguuaccacu

SEQ ID NO: 766543 - RNA, 20 nt, Human
aggcagacaaggagucuguu

SEQ ID NO: 766544 - RNA, 23 nt, Human
agcacaucaaagcagggaggaga

SEQ ID NO: 766545 - RNA, 22 nt, Human
ucucaucuccauuauagcauca

SEQ ID NO: 766546 - RNA, 22 nt, Human
aaaaguaauugcgguuuuugcc

SEQ ID NO: 766547 - RNA, 22 nt, Human
gauauguaccaccucuuaaaag

SEQ ID NO: 766548 - RNA, 22 nt, Human
ugcuucugaaaugcaggucuuc

SEQ ID NO: 766549 - RNA, 22 nt, Human
caggaggugacuuccagggguu

SEQ ID NO: 766550 - RNA, 22 nt, Human
agugugcauuccucuccucagg

SEQ ID NO: 766551 - RNA, 22 nt, Human
ucugacuuuggacaguggcgaa

SEQ ID NO: 766552 - RNA, 22 nt, Human
auugacaagacaauggcucuua

SEQ ID NO: 766553 - RNA, 22 nt, Human
caugaagcucuugcaccucuag

SEQ ID NO: 766554 - RNA, 20 nt, Human
agacaaaaugacuucaugca

SEQ ID NO: 766555 - RNA, 20 nt, Human
gcuuuaagccaaaaugugaa

SEQ ID NO: 766556 - RNA, 22 nt, Human
caggggccaggcugucugcugu

SEQ ID NO: 766557 - RNA, 22 nt, Human
gguggccucugcaggccucgac

SEQ ID NO: 766558 - RNA, 22 nt, Human
ugugugaagugauuuuaagucu

SEQ ID NO: 766559 - RNA, 22 nt, Human
auguuaugucugggaaggggua

SEQ ID NO: 766560 - RNA, 22 nt, Human
ggaugacaaggaaagcaaacca

SEQ ID NO: 766561 - RNA, 18 nt, Human
caggucugucugccuccc

SEQ ID NO: 766562 - RNA, 22 nt, Human
aaggcuggcaauauauuuguua

SEQ ID NO: 766563 - RNA, 22 nt, Human
aacagcuuuagaggauaauagu

SEQ ID NO: 766564 - RNA, 22 nt, Human
uauauguugauacuaauucugg

SEQ ID NO: 766565 - RNA, 22 nt, Human
cucugggucuauaaugcagcug

SEQ ID NO: 766566 - RNA, 22 nt, Human
cugggcucagcaggccaaggcc

SEQ ID NO: 766567 - RNA, 22 nt, Human
ucuagaaucuaaacuauaguuu

SEQ ID NO: 766568 - RNA, 22 nt, Human
ugggaggcagguaggugaugau

SEQ ID NO: 766569 - RNA, 22 nt, Human
cugccagcacugccuccugagg

SEQ ID NO: 766570 - RNA, 22 nt, Human
gccacagcagggcccucucagg

SEQ ID NO: 766571 - RNA, 22 nt, Human
aagagggaaauuguuggcugcu

SEQ ID NO: 766572 - RNA, 22 nt, Human
uccaggccuggcuccauucagu

SEQ ID NO: 766573 - RNA, 20 nt, Human
gcuggaagggcuagagggcu

SEQ ID NO: 766574 - RNA, 22 nt, Human
auucagcacaauuuggccaaua

SEQ ID NO: 766575 - RNA, 22 nt, Human
acaaggaacaagcauguaguuu

SEQ ID NO: 766576 - RNA, 22 nt, Human
gcauucuucgaaguaaguagug

SEQ ID NO: 766577 - RNA, 22 nt, Human
ccuggcucucugcagauccugg

SEQ ID NO: 766578 - RNA, 22 nt, Human
ugauugccuacuaugugccaug

SEQ ID NO: 766579 - RNA, 23 nt, Human
auguggcuagugagaccaagaaa

SEQ ID NO: 766580 - RNA, 22 nt, Human
uccuagagaguaauacaguuuu

SEQ ID NO: 766581 - RNA, 22 nt, Human
ucuccaggggcugcugugccac

SEQ ID NO: 766582 - RNA, 22 nt, Human
gguuuaauugguccaggauggg

SEQ ID NO: 766583 - RNA, 17 nt, Human
uguaacaacuccuauua

SEQ ID NO: 766584 - RNA, 22 nt, Human
gccucagggggagaggccagcu

SEQ ID NO: 766585 - RNA, 22 nt, Human
aaugcucaaaauguuucaucua

SEQ ID NO: 766586 - RNA, 22 nt, Human
aggcagaauguuggaaaggaag

SEQ ID NO: 766587 - RNA, 22 nt, Human
uaaaggcucacuggcuuggggu

SEQ ID NO: 766588 - RNA, 22 nt, Human
guacuucuuaaauuaggaucaa

SEQ ID NO: 766589 - RNA, 22 nt, Human
ccuggcugggccugauuucuca

SEQ ID NO: 766590 - RNA, 22 nt, Human
cugcacagcuggccagggagag

SEQ ID NO: 766591 - RNA, 22 nt, Human
ccaggagaugggaaaguagcag

SEQ ID NO: 766592 - RNA, 22 nt, Human
aucaccauugaaaaacagguuu

SEQ ID NO: 766593 - RNA, 21 nt, Human
ucuuggcucugccacuuauua

SEQ ID NO: 766594 - RNA, 22 nt, Human
ugagcagauuuguucuaggggu

SEQ ID NO: 766595 - RNA, 22 nt, Human
ugcacuuguguuuucagaaucu

SEQ ID NO: 766596 - RNA, 22 nt, Human
gcauggcauuugaagguagaag

SEQ ID NO: 766597 - RNA, 22 nt, Human
ucuccaggcccacugauuuaua

SEQ ID NO: 766598 - RNA, 21 nt, Human
guugugguuggggcugcagcu

SEQ ID NO: 766599 - RNA, 21 nt, Human
acaaugcauggaacucauggc

SEQ ID NO: 766600 - RNA, 21 nt, Human
cagagcagcguucugcugugg

SEQ ID NO: 766601 - RNA, 20 nt, Human
cuguccccgaggucaccagg

SEQ ID NO: 766602 - RNA, 22 nt, Human
auagaaauggcagcuggugcua

SEQ ID NO: 766603 - RNA, 22 nt, Human
gugcuggggagauaggaagaga

SEQ ID NO: 766604 - RNA, 22 nt, Human
ucucaggccccugaguuucucu

SEQ ID NO: 766605 - RNA, 22 nt, Human
acaggcuuagggcuugggcccg

SEQ ID NO: 766606 - RNA, 22 nt, Human
uggcuucucccgacacccuggc

SEQ ID NO: 766607 - RNA, 22 nt, Human
auaaagaggauguauuuacagc

SEQ ID NO: 766608 - RNA, 22 nt, Human
gaauugcuucugguauguuacu

SEQ ID NO: 766609 - RNA, 22 nt, Human
acuugaauuuaguuuuuccuaa

SEQ ID NO: 766610 - RNA, 22 nt, Human
agggccuguccgcucccgcccg

SEQ ID NO: 766611 - RNA, 22 nt, Human
agugcauucucuaauuacaggu

SEQ ID NO: 766612 - RNA, 22 nt, Human
uugaauaauaugcuucguucuc

SEQ ID NO: 766613 - RNA, 22 nt, Human
uggcacaguuaaaguuguagaa

SEQ ID NO: 766614 - RNA, 22 nt, Human
cugcccagaaucacucacucga

SEQ ID NO: 766615 - RNA, 22 nt, Human
agugccagcuccacacagcagc

SEQ ID NO: 766616 - RNA, 22 nt, Human
ucucaaaguagcucccacagau

SEQ ID NO: 766617 - RNA, 22 nt, Human
caggaaaaugucaauggaaagc

SEQ ID NO: 766618 - RNA, 22 nt, Human
auguacauuuguaguaauauca

SEQ ID NO: 766619 - RNA, 22 nt, Human
agagcuguucaacguagcaaug

SEQ ID NO: 766620 - RNA, 22 nt, Human
ggggcagaguagcuggggugug

SEQ ID NO: 766621 - RNA, 22 nt, Human
cauuaauauuguucuucuuuag

SEQ ID NO: 766622 - RNA, 22 nt, Human
aaggcaaaagaggugucaucac

SEQ ID NO: 766623 - RNA, 23 nt, Human
uggaauaauaagguacauuaaca

SEQ ID NO: 766624 - RNA, 22 nt, Human
gcccugagcacugcugcugggg

SEQ ID NO: 766625 - RNA, 22 nt, Human
gucuggaagagcaggaauaaac

SEQ ID NO: 766626 - RNA, 22 nt, Human
cuggcugggguaccaguugaac

SEQ ID NO: 766627 - RNA, 22 nt, Human
aucauuagcaauuuucaauaag

SEQ ID NO: 766628 - RNA, 22 nt, Human
ucaggcccuucucccaggacuc

SEQ ID NO: 766629 - RNA, 22 nt, Human
ucacaauuuggauacagcuaug

SEQ ID NO: 766630 - RNA, 22 nt, Human
cuuagaaauaaugguuucaguu

SEQ ID NO: 766631 - RNA, 22 nt, Human
aagggcucgguagcaguccuga

SEQ ID NO: 766632 - RNA, 22 nt, Human
ugcagagugggagaggugcggg

SEQ ID NO: 766633 - RNA, 22 nt, Human
uagugcuugguggagauggaga

SEQ ID NO: 766634 - RNA, 22 nt, Human
gcaggugggggucggugcaucu

SEQ ID NO: 766635 - RNA, 22 nt, Human
agcagcugggcucagagcuggg

SEQ ID NO: 766636 - RNA, 21 nt, Human
ucauauuucucuugcuauugu

SEQ ID NO: 766637 - RNA, 22 nt, Human
ccagcucucaaggcucccuggg

SEQ ID NO: 766638 - RNA, 22 nt, Human
uggcuaggacucauccuguuuc

SEQ ID NO: 766639 - RNA, 22 nt, Human
aguuagcagcuuauuagaaaca

SEQ ID NO: 766640 - RNA, 22 nt, Human
uuauuccacagcucagaauuuu

SEQ ID NO: 766641 - RNA, 22 nt, Human
aguguucacucuguggagccca

SEQ ID NO: 766642 - RNA, 22 nt, Human
aggaagggugucaugagcccuu

SEQ ID NO: 766643 - RNA, 22 nt, Human
gcucuccugugcagaugcugcu

SEQ ID NO: 766644 - RNA, 22 nt, Human
uccaggcugugcgcaccgugug

SEQ ID NO: 766645 - RNA, 22 nt, Human
ucacagagaaaagcuaucacaa

SEQ ID NO: 766646 - RNA, 22 nt, Human
acaguaaaacauuuuuauuagg

SEQ ID NO: 766647 - RNA, 22 nt, Human
cuggagaauucuaugaaauauu

SEQ ID NO: 766648 - RNA, 22 nt, Human
cacaugcaccagaaaucaacau

SEQ ID NO: 766649 - RNA, 22 nt, Human
cagaauuuagaaaacaacauaa

SEQ ID NO: 766650 - RNA, 22 nt, Human
uuugugacuugcuucucagaau

SEQ ID NO: 766651 - RNA, 22 nt, Human
agaggcuuggccucaguucugu

SEQ ID NO: 766652 - RNA, 22 nt, Human
cuguacaucccaagauauuucu

SEQ ID NO: 766653 - RNA, 22 nt, Human
aaaguuacacgacuauuuaugu

SEQ ID NO: 766654 - RNA, 22 nt, Human
ucuggcuguuaggccugaccuu

SEQ ID NO: 766655 - RNA, 22 nt, Human
uauguacaucuugagcaaugaa

SEQ ID NO: 766656 - RNA, 22 nt, Human
agcagcaaggaacagaauggac

SEQ ID NO: 766657 - RNA, 22 nt, Human
agacuugggaccuaggaaugga

SEQ ID NO: 766658 - RNA, 22 nt, Human
uugguuuucaggggcaggauaa

SEQ ID NO: 766659 - RNA, 22 nt, Human
gcuaggcuguguuucagacccu

SEQ ID NO: 766660 - RNA, 22 nt, Human
ccugagcaaaggaaggaugacu

SEQ ID NO: 766661 - RNA, 22 nt, Human
ggauguugauugaauggccauu

SEQ ID NO: 766662 - RNA, 21 nt, Human
uuucuuucuggcucucacagu

SEQ ID NO: 766663 - RNA, 22 nt, Human
ccuaacuucacuucauugaagu

SEQ ID NO: 766664 - RNA, 22 nt, Human
ugcugcaguguuugcugaaguu

SEQ ID NO: 766665 - RNA, 22 nt, Human
uagcaacguguauaaacucaag

SEQ ID NO: 766666 - RNA, 22 nt, Human
cacagcuggugcacuagcucug

SEQ ID NO: 766667 - RNA, 22 nt, Human
ucacucuguguuucccugggac

SEQ ID NO: 766668 - RNA, 22 nt, Human
uuauuuccacaaugugguaggg

SEQ ID NO: 766669 - RNA, 22 nt, Human
ccucaugguacuuacuguagcu

SEQ ID NO: 766670 - RNA, 22 nt, Human
agauauuguuuguuucaccaau

SEQ ID NO: 766671 - RNA, 22 nt, Human
auucuguauuucuaauaagauc

SEQ ID NO: 766672 - RNA, 18 nt, Human
agcugcuugcaggccuuc

SEQ ID NO: 766673 - RNA, 22 nt, Human
agccaggaucacccggggcugu

SEQ ID NO: 766674 - RNA, 22 nt, Human
ucuauuaaugauucaauagugu

SEQ ID NO: 766675 - RNA, 22 nt, Human
acaaguggguccuacauaaagc

SEQ ID NO: 766676 - RNA, 22 nt, Human
acaugcaggaaaaugcacagau

SEQ ID NO: 766677 - RNA, 22 nt, Human
ucuuuucaucauuuaauaggua

SEQ ID NO: 766678 - RNA, 22 nt, Human
uauuucuaagagauaucuguac

SEQ ID NO: 766679 - RNA, 22 nt, Human
ccaggccagggcugcagcgagc

SEQ ID NO: 766680 - RNA, 22 nt, Human
ggacaagccucagacaaaacuc

SEQ ID NO: 766681 - RNA, 22 nt, Human
uccucagggggccaacccagcc

SEQ ID NO: 766682 - RNA, 22 nt, Human
accugcucaacuggcuucucgc

SEQ ID NO: 766683 - RNA, 19 nt, Human
agcagccauagacaauaug

SEQ ID NO: 766684 - RNA, 22 nt, Human
aggcacugaaagguggccagag

SEQ ID NO: 766685 - RNA, 22 nt, Human
agauacauugcacgaugcagau

SEQ ID NO: 766686 - RNA, 22 nt, Human
cagcuccugcagcugcugccgu

SEQ ID NO: 766687 - RNA, 22 nt, Human
agguccuggucuugagucuuaa

SEQ ID NO: 766688 - RNA, 22 nt, Human
caagauaucaaugacauaguau

SEQ ID NO: 766689 - RNA, 22 nt, Human
uacaagcucacaaauuuuuaag

SEQ ID NO: 766690 - RNA, 22 nt, Human
ccuugguuuccaggaugaggcu

SEQ ID NO: 766691 - RNA, 22 nt, Human
cugggcugucaguuuuguuuua

SEQ ID NO: 766692 - RNA, 17 nt, Human
ugauucaacuagaaacu

SEQ ID NO: 766693 - RNA, 22 nt, Human
caugugugaguauaucuuaucc

SEQ ID NO: 766694 - RNA, 19 nt, Human
ccaugccaucauuuuaaag

SEQ ID NO: 766695 - RNA, 22 nt, Human
uucucacaggauuucuuuuagu

SEQ ID NO: 766696 - RNA, 22 nt, Human
uuuguagaggguaauugacaga

SEQ ID NO: 766697 - RNA, 22 nt, Human
cacauguucuugaagccaacuc

SEQ ID NO: 766698 - RNA, 22 nt, Human
ucuuuaucaagucuguucuuug

SEQ ID NO: 766699 - RNA, 20 nt, Human
ucucuucaggagguccaugu

SEQ ID NO: 766700 - RNA, 17 nt, Human
aagacccuagucuaccc

SEQ ID NO: 766701 - RNA, 20 nt, Human
uacauauuauaucagcugca

SEQ ID NO: 766702 - RNA, 22 nt, Human
caguguuucugaguuccagcuc

SEQ ID NO: 766703 - RNA, 22 nt, Human
uuccugcuuccuggccucacaa

SEQ ID NO: 766704 - RNA, 23 nt, Human
aucaaaggauguagagaagaagc

SEQ ID NO: 766705 - RNA, 23 nt, Human
ccacuagcaccuguucaacuucu

SEQ ID NO: 766706 - RNA, 22 nt, Human
gaggcagugucgguggcaggau

SEQ ID NO: 766707 - RNA, 22 nt, Human
cagauuuaagauauuuguauug

SEQ ID NO: 766708 - RNA, 21 nt, Human
agaagggauugugguaaagau

SEQ ID NO: 766709 - RNA, 22 nt, Human
cuuggcagcuacacagguaaga

SEQ ID NO: 766710 - RNA, 19 nt, Human
agucaucucacugugccca

SEQ ID NO: 766711 - RNA, 22 nt, Human
uuucagaccugcugugcuaucu

SEQ ID NO: 766712 - RNA, 22 nt, Human
agagcagcguuuguggaacacu

SEQ ID NO: 766713 - RNA, 22 nt, Human
uggggacauagccagucuggcu

SEQ ID NO: 766714 - RNA, 22 nt, Human
uuccuggcucacagcagugggg

SEQ ID NO: 766715 - RNA, 22 nt, Human
agacauuuugauaccccuaccg

SEQ ID NO: 766716 - RNA, 22 nt, Human
cccuucagcugagugggacagc

SEQ ID NO: 766717 - RNA, 22 nt, Human
aucucaaacaucuuugaccaua

SEQ ID NO: 766718 - RNA, 21 nt, Human
ugucucaaucagaagucauua

SEQ ID NO: 766719 - RNA, 22 nt, Human
uaguggcugcagggcuguuuga

SEQ ID NO: 766720 - RNA, 22 nt, Human
auaaugcugggagaaauuguua

SEQ ID NO: 766721 - RNA, 22 nt, Human
uggcagcugaggggaggcuuug

SEQ ID NO: 766722 - RNA, 22 nt, Human
cagggccugccugguuccugga

SEQ ID NO: 766723 - RNA, 22 nt, Human
agcugagguugaagagugaacg

SEQ ID NO: 766724 - RNA, 19 nt, Human
gcccugcaggagguggggc

SEQ ID NO: 766725 - RNA, 20 nt, Human
gcauugaguauagacagaug

SEQ ID NO: 766726 - RNA, 22 nt, Human
cauguucagugacaguuauuga

SEQ ID NO: 766727 - RNA, 22 nt, Human
gcagauggaucaccugaggucg

SEQ ID NO: 766728 - RNA, 22 nt, Human
ugaggcucugcuucuguggcuc

SEQ ID NO: 766729 - RNA, 22 nt, Human
gagguggcccuugcucagccuu

SEQ ID NO: 766730 - RNA, 17 nt, Human
gcaaaggugaggagaga

SEQ ID NO: 766731 - RNA, 20 nt, Human
cuuuaguuauuaacagcacu

SEQ ID NO: 766732 - RNA, 22 nt, Human
ugauugaauauucccuugggcc

SEQ ID NO: 766733 - RNA, 19 nt, Human
acagggcagcaauaggaua

SEQ ID NO: 766734 - RNA, 22 nt, Human
ugaacauuaguugaguaaaguc

SEQ ID NO: 766735 - RNA, 22 nt, Human
uggcuucacacaggcacuuccg

SEQ ID NO: 766736 - RNA, 22 nt, Human
cuuugcugccagaacccagcag

SEQ ID NO: 766737 - RNA, 22 nt, Human
uuaugggagcaauuggggaggu

SEQ ID NO: 766738 - RNA, 22 nt, Human
uacaugaauguuucaauauugu

SEQ ID NO: 766739 - RNA, 22 nt, Human
caucauaaaauugagauaacug

SEQ ID NO: 766740 - RNA, 22 nt, Human
cugagauggaguuucgcucuuc

SEQ ID NO: 766741 - RNA, 23 nt, Human
aacaauagguuuuggcagaauag

SEQ ID NO: 766742 - RNA, 22 nt, Human
ugcccugcccaucuacccuguc

SEQ ID NO: 766743 - RNA, 22 nt, Human
agcugcucucacuggacgccug

SEQ ID NO: 766744 - RNA, 22 nt, Human
gagaggagacuuauccagauug

SEQ ID NO: 766745 - RNA, 22 nt, Human
uaugcaaaugacugguauguuu

SEQ ID NO: 766746 - RNA, 19 nt, Human
ugagaacuuuuacuuaugc

SEQ ID NO: 766747 - RNA, 22 nt, Human
aaaggaggaauggagagaugcu

SEQ ID NO: 766748 - RNA, 22 nt, Human
gugaauuaggacaaaagggcuu

SEQ ID NO: 766749 - RNA, 22 nt, Human
cuggaggcacccuuagagaggc

SEQ ID NO: 766750 - RNA, 22 nt, Human
agcugccucagucacucauggc

SEQ ID NO: 766751 - RNA, 22 nt, Human
uggugagaugcagcaacagaca

SEQ ID NO: 766752 - RNA, 20 nt, Human
ggugcgaggccagagcagac

SEQ ID NO: 766753 - RNA, 22 nt, Human
cauggcaauuucauaaacaggu

SEQ ID NO: 766754 - RNA, 22 nt, Human
auacaaagcuuucugucuggua

SEQ ID NO: 766755 - RNA, 21 nt, Human
ggcuggucgcgugcaugucuc

SEQ ID NO: 766756 - RNA, 21 nt, Human
uagcacuucgcuguaauuggg

SEQ ID NO: 766757 - RNA, 22 nt, Human
acuaaauaguuuugacagaaca

SEQ ID NO: 766758 - RNA, 22 nt, Human
aggcagcccacaggacacagga

SEQ ID NO: 766759 - RNA, 22 nt, Human
uuggcuguuuuauaggucaguu

SEQ ID NO: 766760 - RNA, 22 nt, Human
gagagcagacucucaaagcugg

SEQ ID NO: 766761 - RNA, 22 nt, Human
aacuucauggguucaaagcugg

SEQ ID NO: 766762 - RNA, 22 nt, Human
uacucuaacauuuguuagaugu

SEQ ID NO: 766763 - RNA, 22 nt, Human
cuguggccagucccacaccucc

SEQ ID NO: 766764 - RNA, 22 nt, Human
aaugucacucuguuuccucugc

SEQ ID NO: 766765 - RNA, 22 nt, Human
gagaggaguagacacuuugguu

SEQ ID NO: 766766 - RNA, 22 nt, Human
aaagagcuucauuuccauuuau

SEQ ID NO: 766767 - RNA, 18 nt, Human
agcagaauucuaggguuc

SEQ ID NO: 766768 - RNA, 22 nt, Human
ggacagugaauguggggaugca

SEQ ID NO: 766769 - RNA, 22 nt, Human
agaguucagaaagugcagguuu

SEQ ID NO: 766770 - RNA, 22 nt, Human
gauccuguuagaaauguagacu

SEQ ID NO: 766771 - RNA, 19 nt, Human
ucccagagucuagagguug

SEQ ID NO: 766772 - RNA, 21 nt, Human
ucaggaguggagagaauuggu

SEQ ID NO: 766773 - RNA, 22 nt, Human
agagucugaggcagcugcagcc

SEQ ID NO: 766774 - RNA, 22 nt, Human
ugcugggcagugugcccucgag

SEQ ID NO: 766775 - RNA, 23 nt, Human
ggaggaguucccagcccuccugg

SEQ ID NO: 766776 - RNA, 22 nt, Human
uuggaacacagcagcugauuuu

SEQ ID NO: 766777 - RNA, 22 nt, Human
ggccugcucugcagccucuaca

SEQ ID NO: 766778 - RNA, 22 nt, Human
cccagaggcugaguugggagca

SEQ ID NO: 766779 - RNA, 22 nt, Human
caguccugaggaagagcugcug

SEQ ID NO: 766780 - RNA, 22 nt, Human
ugagaccuguagcuucacagag

SEQ ID NO: 766781 - RNA, 22 nt, Human
uguuaaauugauucaccuuucu

SEQ ID NO: 766782 - RNA, 22 nt, Human
ccugucauacuaacguaguggg

SEQ ID NO: 766783 - RNA, 22 nt, Human
aaggaauucaaauuuucucugg

SEQ ID NO: 766784 - RNA, 22 nt, Human
aaugaucauuauaaagugcucu

SEQ ID NO: 766785 - RNA, 22 nt, Human
gugccuggcaugcgccggugcu

SEQ ID NO: 766786 - RNA, 22 nt, Human
gaaaguuuauagguuauauaau

SEQ ID NO: 766787 - RNA, 22 nt, Human
guuaacauucaauuaaacaguc

SEQ ID NO: 766788 - RNA, 22 nt, Human
guugugauuguagcuaaacuag

SEQ ID NO: 766789 - RNA, 22 nt, Human
gagguaacaacugaaaugagaa

SEQ ID NO: 766790 - RNA, 22 nt, Human
ggaauacuaugacacacaggug

SEQ ID NO: 766791 - RNA, 22 nt, Human
agcugguucacuaagcauaaua

SEQ ID NO: 766792 - RNA, 22 nt, Human
caaggccugccucuggcagaaa

SEQ ID NO: 766793 - RNA, 22 nt, Human
uggaagagacacuuacauucag

SEQ ID NO: 766794 - RNA, 22 nt, Human
agucacucugcuacaugacagc

SEQ ID NO: 766795 - RNA, 23 nt, Human
acugggucuaucuccagagaaga

SEQ ID NO: 766796 - RNA, 20 nt, Human
gcauccagacacccagcugc

SEQ ID NO: 766797 - RNA, 21 nt, Human
uucuucuuggacuguuuuggc

SEQ ID NO: 766798 - RNA, 22 nt, Human
cugaggcugggcugaggguaua

SEQ ID NO: 766799 - RNA, 22 nt, Human
cuuuggcaaugaaacacaagaa

SEQ ID NO: 766800 - RNA, 22 nt, Human
gcagccacugggagugcuuaua

SEQ ID NO: 766801 - RNA, 23 nt, Human
ucaucaaacagcugcucaagaaa

SEQ ID NO: 766802 - RNA, 22 nt, Human
ccuggagauuucuucaagcuuu

SEQ ID NO: 766803 - RNA, 22 nt, Human
cagaaauucccauuucagauuc

SEQ ID NO: 766804 - RNA, 22 nt, Human
uggcugagccacuuguucagau

SEQ ID NO: 766805 - RNA, 22 nt, Human
ucagcuauugaggguggugagu

SEQ ID NO: 766806 - RNA, 22 nt, Human
uuccagaguugggggagugguu

SEQ ID NO: 766807 - RNA, 22 nt, Human
cuggcucccucgcugaggugcu

SEQ ID NO: 766808 - RNA, 22 nt, Human
gccaggcuaagaaaggugugau

SEQ ID NO: 766809 - RNA, 22 nt, Human
caugugucuuuauggagccaca

SEQ ID NO: 766810 - RNA, 22 nt, Human
uguacagcugccuuuuuuacuu

SEQ ID NO: 766811 - RNA, 22 nt, Human
cucagugucuuauuguacacau

SEQ ID NO: 766812 - RNA, 22 nt, Human
agcagcucacaggauuccugaa

SEQ ID NO: 766813 - RNA, 22 nt, Human
ucccacagggcuucucuguaca

SEQ ID NO: 766814 - RNA, 22 nt, Human
agggucagagucaggugcagua

SEQ ID NO: 766815 - RNA, 22 nt, Human
uacuucauaccugcuagaaugg

SEQ ID NO: 766816 - RNA, 22 nt, Human
ucauuucccuccuacaaagagg

SEQ ID NO: 766817 - RNA, 22 nt, Human
ucccugggcaucacguugcuuc

SEQ ID NO: 766818 - RNA, 22 nt, Human
gcaaauauuucuaauuccugaa

SEQ ID NO: 766819 - RNA, 22 nt, Human
ucagagaguccuggucauuugc

SEQ ID NO: 766820 - RNA, 22 nt, Human
cagcuggaugggagaccauguu

SEQ ID NO: 766821 - RNA, 22 nt, Human
aucaagcacuucuacaugacau

SEQ ID NO: 766822 - RNA, 22 nt, Human
gcacugggaagaaugagccugu

SEQ ID NO: 766823 - RNA, 22 nt, Human
cuggagcuguuuuuucaggaaa

SEQ ID NO: 766824 - RNA, 22 nt, Human
aagagcagauuccuaguggagc

SEQ ID NO: 766825 - RNA, 22 nt, Human
cuucugagauguuguuuuacag

SEQ ID NO: 766826 - RNA, 22 nt, Human
aacuaacagucauuaaaagaac

SEQ ID NO: 766827 - RNA, 22 nt, Human
acagauguacacucauauauaa

SEQ ID NO: 766828 - RNA, 22 nt, Human
ucuuuccuguaacugcuguuca

SEQ ID NO: 766829 - RNA, 23 nt, Human
ggcugcucuuuucaugcuguuuc

SEQ ID NO: 766830 - RNA, 22 nt, Human
uaaauuaaagauuggagaagga

SEQ ID NO: 766831 - RNA, 22 nt, Human
ccucaggcuuacgggcaaugga

SEQ ID NO: 766832 - RNA, 22 nt, Human
uaugaaacauucauacaaauaa

SEQ ID NO: 766833 - RNA, 19 nt, Human
uccagggcaggaacaugua

SEQ ID NO: 766834 - RNA, 22 nt, Human
aagaauuggucacaugcuacaa

SEQ ID NO: 766835 - RNA, 22 nt, Human
agggcagcggugcuuguguuau

SEQ ID NO: 766836 - RNA, 19 nt, Human
aagagucacaggcagcccu

SEQ ID NO: 766837 - RNA, 22 nt, Human
ggacggggagcuggaaagggga

SEQ ID NO: 766838 - RNA, 17 nt, Human
uccuucagggccucaca

SEQ ID NO: 766839 - RNA, 21 nt, Human
aguuugaugcaauuucugaga

SEQ ID NO: 766840 - RNA, 22 nt, Human
uuauguacccacucauauuccc

SEQ ID NO: 766841 - RNA, 22 nt, Human
aaacccugcucuuauggaacuu

SEQ ID NO: 766842 - RNA, 22 nt, Human
cauguucaucagaucaauugua

SEQ ID NO: 766843 - RNA, 17 nt, Human
ugcccugugccuggugu

SEQ ID NO: 766844 - RNA, 22 nt, Human
ggagggcagaguccccugcuga

SEQ ID NO: 766845 - RNA, 22 nt, Human
aucauuagaccaaacuagagcu

SEQ ID NO: 766846 - RNA, 22 nt, Human
uuacuuuagggauguuuugcuu

SEQ ID NO: 766847 - RNA, 20 nt, Human
ucauacacaugagcaugcag

SEQ ID NO: 766848 - RNA, 21 nt, Human
aucauucuggaaaauucaagc

SEQ ID NO: 766849 - RNA, 22 nt, Human
gaguccaguguuuaccaggggu

SEQ ID NO: 766850 - RNA, 20 nt, Human
ucuuggaaaaaguucagaau

SEQ ID NO: 766851 - RNA, 22 nt, Human
agguucuggcauugcucaguaa

SEQ ID NO: 766852 - RNA, 22 nt, Human
gcucccagcauugcuucccagg

SEQ ID NO: 766853 - RNA, 22 nt, Human
uguaugcaaauuuauuagcaca

SEQ ID NO: 766854 - RNA, 22 nt, Human
accaggagguguuugcucaagu

SEQ ID NO: 766855 - RNA, 22 nt, Human
augcauaucuccuaucuccuca

SEQ ID NO: 766856 - RNA, 22 nt, Human
cacuggugccagagaacagaau

SEQ ID NO: 766857 - RNA, 22 nt, Human
gagagggccagggugagaacua

SEQ ID NO: 766858 - RNA, 22 nt, Human
ugaggccacaggaaagggcccg

SEQ ID NO: 766859 - RNA, 22 nt, Human
caguacuuggucaaggaagcag

SEQ ID NO: 766860 - RNA, 22 nt, Human
gggagggguugcauguuugagu

SEQ ID NO: 766861 - RNA, 19 nt, Human
ccucugugggagucaguga

SEQ ID NO: 766862 - RNA, 22 nt, Human
aagggcucccugccugaggugg

SEQ ID NO: 766863 - RNA, 18 nt, Human
acccugggcaauucacuc

SEQ ID NO: 766864 - RNA, 22 nt, Human
ggaggcucagacuccauccuca

SEQ ID NO: 766865 - RNA, 22 nt, Human
uggcccagcugcagauggugga

SEQ ID NO: 766866 - RNA, 22 nt, Human
ucagcuucgccugagguauggg

SEQ ID NO: 766867 - RNA, 22 nt, Human
gcugcagguugggcaacagagu

SEQ ID NO: 766868 - RNA, 22 nt, Human
gguggguauaguuagggccucu

SEQ ID NO: 766869 - RNA, 22 nt, Human
acacagugucagggcaggggcc

SEQ ID NO: 766870 - RNA, 22 nt, Human
uugaaaaguuuugaaacacucu

SEQ ID NO: 766871 - RNA, 21 nt, Human
agaaucauuuuucccuucucu

SEQ ID NO: 766872 - RNA, 22 nt, Human
ucagugucuucucuuuccuacc

SEQ ID NO: 766873 - RNA, 22 nt, Human
aauauuuuugaggcccuguuau

SEQ ID NO: 766874 - RNA, 22 nt, Human
uaagaggcagcauuccucgccu

SEQ ID NO: 766875 - RNA, 23 nt, Human
caguggagacucaugcuuccuua

SEQ ID NO: 766876 - RNA, 22 nt, Human
gagagugagauccuccugggga

SEQ ID NO: 766877 - RNA, 22 nt, Human
auggggcuagacaaccagugcc

SEQ ID NO: 766878 - RNA, 22 nt, Human
gggugggagaaaugaguaucua

SEQ ID NO: 766879 - RNA, 22 nt, Human
guggguggaucaccugagguca

SEQ ID NO: 766880 - RNA, 22 nt, Human
ucacagaacaagccugguggag

SEQ ID NO: 766881 - RNA, 22 nt, Human
gggccagugaacaaugagggaa

SEQ ID NO: 766882 - RNA, 22 nt, Human
accugucaacccaucaccuagg

SEQ ID NO: 766883 - RNA, 22 nt, Human
ugacagagacagauugaagcuu

SEQ ID NO: 766884 - RNA, 22 nt, Human
guuugcauauuugcacaggaau

SEQ ID NO: 766885 - RNA, 22 nt, Human
uagauuuguuuccuucucucca

SEQ ID NO: 766886 - RNA, 22 nt, Human
gacauucagccaauuacuuucu

SEQ ID NO: 766887 - RNA, 22 nt, Human
aacucuauuuacccuacuaaac

SEQ ID NO: 766888 - RNA, 22 nt, Human
aagaauguuaguuucugauaca

SEQ ID NO: 766889 - RNA, 22 nt, Human
cauguauaguuggaacuacauc

SEQ ID NO: 766890 - RNA, 22 nt, Human
gcugguuaggugagggugcgcc

SEQ ID NO: 766891 - RNA, 22 nt, Human
ccugggcagugcuggaguugaa

SEQ ID NO: 766892 - RNA, 22 nt, Human
guuaacauaggaguuuguugua

SEQ ID NO: 766893 - RNA, 22 nt, Human
ccuuucagaugggcauggaccg

SEQ ID NO: 766894 - RNA, 21 nt, Human
uuuaggaaguuuaaggcaggu

SEQ ID NO: 766895 - RNA, 22 nt, Human
gugcggaucgguguccuccaaa

SEQ ID NO: 766896 - RNA, 22 nt, Human
augcaugagcuuugugauccug

SEQ ID NO: 766897 - RNA, 22 nt, Human
acauuugugcaacguauccaca

SEQ ID NO: 766898 - RNA, 22 nt, Human
gaaaggaaauugagggacgcau

SEQ ID NO: 766899 - RNA, 22 nt, Human
cagcuuugucauuugauuuggg

SEQ ID NO: 766900 - RNA, 22 nt, Human
ugggaagaugaggugccauggg

SEQ ID NO: 766901 - RNA, 22 nt, Human
aaccaggacaauuugaauagaa

SEQ ID NO: 766902 - RNA, 22 nt, Human
gagucaacaagucagaucucac

SEQ ID NO: 766903 - RNA, 22 nt, Human
guguaaacaaugaaaacagagc

SEQ ID NO: 766904 - RNA, 22 nt, Human
auuucagguaccugugggaucc

SEQ ID NO: 766905 - RNA, 18 nt, Human
cucagagaugcccuuauu

SEQ ID NO: 766906 - RNA, 22 nt, Human
uggcaagaaacugaggccugcu

SEQ ID NO: 766907 - RNA, 22 nt, Human
cuuagaaauuguuacucauuca

SEQ ID NO: 766908 - RNA, 21 nt, Human
cagcagaguaaugcauucgua

SEQ ID NO: 766909 - RNA, 22 nt, Human
cagaaagugauuugcuauucca

SEQ ID NO: 766910 - RNA, 22 nt, Human
uaaagucaagguacuguuucac

SEQ ID NO: 766911 - RNA, 22 nt, Human
gcucuaacuauuaagaggucau

SEQ ID NO: 766912 - RNA, 23 nt, Human
ugauuuccagugagucaguggga

SEQ ID NO: 766913 - RNA, 22 nt, Human
aucucaaagcauggagcagaau

SEQ ID NO: 766914 - RNA, 19 nt, Human
aggcuuggaacagccuuau

SEQ ID NO: 766915 - RNA, 22 nt, Human
uugcuuuugggaaaacaugccu

SEQ ID NO: 766916 - RNA, 22 nt, Human
cucugggguggaggaggcugac

SEQ ID NO: 766917 - RNA, 22 nt, Human
uguauguaaaguuuguaauaga

SEQ ID NO: 766918 - RNA, 22 nt, Human
uggaaagaaaaacaggccauga

SEQ ID NO: 766919 - RNA, 22 nt, Human
ugagcaaaaguugauggugcuu

SEQ ID NO: 766920 - RNA, 21 nt, Human
uauugauucaauuucuugagu

SEQ ID NO: 766921 - RNA, 22 nt, Human
acauacuaugaauacauguguc

SEQ ID NO: 766922 - RNA, 22 nt, Human
auuucagaguagaucguuauuu

SEQ ID NO: 766923 - RNA, 22 nt, Human
agcauuuaccucaaugcaucug

SEQ ID NO: 766924 - RNA, 22 nt, Human
cugcagcaagagaagugcugac

SEQ ID NO: 766925 - RNA, 22 nt, Human
gagguucugggggucugccugg

SEQ ID NO: 766926 - RNA, 22 nt, Human
cacugugggccugucgugggug

SEQ ID NO: 766927 - RNA, 18 nt, Human
uggcagcaggaagccauu

SEQ ID NO: 766928 - RNA, 22 nt, Human
aagcagcaugcuaugcuggugg

SEQ ID NO: 766929 - RNA, 22 nt, Human
acuucuaaucagaaggucuggu

SEQ ID NO: 766930 - RNA, 22 nt, Human
ucaccaggauugggcuguaggc

SEQ ID NO: 766931 - RNA, 22 nt, Human
uucagaguaggauacuagcuua

SEQ ID NO: 766932 - RNA, 22 nt, Human
uuaguuuauaauucauuucugu

SEQ ID NO: 766933 - RNA, 22 nt, Human
ggcagcagaccccuaagucuac

SEQ ID NO: 766934 - RNA, 22 nt, Human
gccucccuguuuccugcuccaa

SEQ ID NO: 766935 - RNA, 22 nt, Human
uugcagggcaucgcguacuucu

SEQ ID NO: 766936 - RNA, 22 nt, Human
ugcuugucucagauaaaacuau

SEQ ID NO: 766937 - RNA, 22 nt, Human
cccagccucuguuugcuccucu

SEQ ID NO: 766938 - RNA, 22 nt, Human
aauuucagaacccaaauuagcg

SEQ ID NO: 766939 - RNA, 22 nt, Human
agcuuuguggcuuugcaagacu

SEQ ID NO: 766940 - RNA, 22 nt, Human
agaggaauaaauuucuguagug

SEQ ID NO: 766941 - RNA, 22 nt, Human
uucuggggccccaguguccucg

SEQ ID NO: 766942 - RNA, 22 nt, Human
ucaggaucaggggccuuuccuu

SEQ ID NO: 766943 - RNA, 22 nt, Human
gggcagcccagaacugcugcag

SEQ ID NO: 766944 - RNA, 22 nt, Human
ucugcugucuaugcaaguccuu

SEQ ID NO: 766945 - RNA, 22 nt, Human
gcccagcccugaggucacagcu

SEQ ID NO: 766946 - RNA, 22 nt, Human
aguguuugagacacauuucacu

SEQ ID NO: 766947 - RNA, 22 nt, Human
gcuggcagacugggggcagaac

SEQ ID NO: 766948 - RNA, 22 nt, Human
gugaggugaguagugagaagcc

SEQ ID NO: 766949 - RNA, 22 nt, Human
agcauucaaugauuggacuugc

SEQ ID NO: 766950 - RNA, 22 nt, Human
ccagaauccaaaacguuuugag

SEQ ID NO: 766951 - RNA, 22 nt, Human
uggaagcagugauucuugucug

SEQ ID NO: 766952 - RNA, 22 nt, Human
ucagagcuuuggagaccaggaa

SEQ ID NO: 766953 - RNA, 22 nt, Human
gaugggggccagggccugcuuu

SEQ ID NO: 766954 - RNA, 22 nt, Human
agguguguauaaacauacauau

SEQ ID NO: 766955 - RNA, 22 nt, Human
uggcucagauuuuuguaggcuu

SEQ ID NO: 766956 - RNA, 22 nt, Human
gagcuggcuaauacugacuuau

SEQ ID NO: 766957 - RNA, 22 nt, Human
caugcucugcagcagaccugug

SEQ ID NO: 766958 - RNA, 22 nt, Human
gcaguaugaguguuuuagacau

SEQ ID NO: 766959 - RNA, 22 nt, Human
guuagacaugcagaaucucagg

SEQ ID NO: 766960 - RNA, 22 nt, Human
gcacaggccaugggaggacagc

SEQ ID NO: 766961 - RNA, 22 nt, Human
ugcagccuagacauucugguca

SEQ ID NO: 766962 - RNA, 22 nt, Human
uauguucugucuguacagauuu

SEQ ID NO: 766963 - RNA, 22 nt, Human
cucuucauuaguuccuguccca

SEQ ID NO: 766964 - RNA, 22 nt, Human
cugggcugagcuguggaaacuc

SEQ ID NO: 766965 - RNA, 22 nt, Human
cuucccauauaacuaauuucug

SEQ ID NO: 766966 - RNA, 21 nt, Human
aggugccaaggagaagcaggc

SEQ ID NO: 766967 - RNA, 22 nt, Human
cuucuaugaggagagacaugca

SEQ ID NO: 766968 - RNA, 22 nt, Human
cucagugucacguuuugccuua

SEQ ID NO: 766969 - RNA, 22 nt, Human
ggugcagaagaaagcagucauu

SEQ ID NO: 766970 - RNA, 20 nt, Human
ugagccaggcuaggaagggc

SEQ ID NO: 766971 - RNA, 22 nt, Human
acaagguauccacauuaaaugu

SEQ ID NO: 766972 - RNA, 22 nt, Human
gccugagauucugcauuucuaa

SEQ ID NO: 766973 - RNA, 22 nt, Human
aauuuaacugagaguacuuuua

SEQ ID NO: 766974 - RNA, 22 nt, Human
uccucuucagagggaccucggg

SEQ ID NO: 766975 - RNA, 22 nt, Human
gcuuuacugagaugacacaggg

SEQ ID NO: 766976 - RNA, 22 nt, Human
auuccacagcuacguuuugagc

SEQ ID NO: 766977 - RNA, 22 nt, Human
gcagaaaccacagugucuuuua

SEQ ID NO: 766978 - RNA, 22 nt, Human
cagcugggagcuccauuagaua

SEQ ID NO: 766979 - RNA, 22 nt, Human
auuuauuaccucggaguuucug

SEQ ID NO: 766980 - RNA, 22 nt, Human
gggcaggugccagcucccuguc

SEQ ID NO: 766981 - RNA, 22 nt, Human
ucucagaaaaacuuugagggua

SEQ ID NO: 766982 - RNA, 22 nt, Human
aaggagcuaugcauaacugauc

SEQ ID NO: 766983 - RNA, 22 nt, Human
ugugguggcuauucuggucuca

SEQ ID NO: 766984 - RNA, 22 nt, Human
cgugaaaugaguugaauuauug

SEQ ID NO: 766985 - RNA, 22 nt, Human
cuccucagaagaggguaacaca

SEQ ID NO: 766986 - RNA, 22 nt, Human
uggagagccuggagucccugau

SEQ ID NO: 766987 - RNA, 22 nt, Human
uuuaguuauuguuacaguauga

SEQ ID NO: 766988 - RNA, 22 nt, Human
cuguuggagucauuccuuccag

SEQ ID NO: 766989 - RNA, 19 nt, Human
aaggggugagggaagcaga

SEQ ID NO: 766990 - RNA, 22 nt, Human
aaacaauguuccuauauuagag

SEQ ID NO: 766991 - RNA, 22 nt, Human
aaacauucacauuugcuaguaa

SEQ ID NO: 766992 - RNA, 22 nt, Human
cauuuacagugagaguuuuuac

SEQ ID NO: 766993 - RNA, 23 nt, Human
cuguggcccugcuucaugcagcc

SEQ ID NO: 766994 - RNA, 22 nt, Human
uuaagauuuguagagaaaaagc

SEQ ID NO: 766995 - RNA, 22 nt, Human
cccaagggagugccuggucaac

SEQ ID NO: 766996 - RNA, 22 nt, Human
ggucccugguucccucugagcu

SEQ ID NO: 766997 - RNA, 22 nt, Human
cuccucucuggaguuaugcaga

SEQ ID NO: 766998 - RNA, 22 nt, Human
augcugaauugaugcgagggag

SEQ ID NO: 766999 - RNA, 22 nt, Human
gcucagagaaagauuagucccu

SEQ ID NO: 767000 - RNA, 22 nt, Human
uugaaagaacaauucugugaug

SEQ ID NO: 767001 - RNA, 22 nt, Human
aagucacagcuaaauagcuaag

SEQ ID NO: 767002 - RNA, 22 nt, Human
acaaaugagaauguagacagag

SEQ ID NO: 767003 - RNA, 22 nt, Human
guggcaguguggagggaggagu

SEQ ID NO: 767004 - RNA, 22 nt, Human
agugugagaugauugaggagca

SEQ ID NO: 767005 - RNA, 22 nt, Human
cagcuucuucaguccuggagcu

SEQ ID NO: 767006 - RNA, 22 nt, Human
ggcagcaacgaggcuugauacc

SEQ ID NO: 767007 - RNA, 22 nt, Human
cacaugggcuuagcaggcaggg

SEQ ID NO: 767008 - RNA, 22 nt, Human
aaggcaguuaauuuggcuagaa

SEQ ID NO: 767009 - RNA, 22 nt, Human
ccucugagaccagcucugcacc

SEQ ID NO: 767010 - RNA, 22 nt, Human
ggucuggauuuugaacaaaauu

SEQ ID NO: 767011 - RNA, 22 nt, Human
uagaucauauacuugccaugac

SEQ ID NO: 767012 - RNA, 22 nt, Human
cucccaagggguaagggagcug

SEQ ID NO: 767013 - RNA, 22 nt, Human
ccuucacacagguagaagcaga

SEQ ID NO: 767014 - RNA, 19 nt, Human
ucucuacacuacauuucua

SEQ ID NO: 767015 - RNA, 22 nt, Human
cuaugagaagaaaacaagauua

SEQ ID NO: 767016 - RNA, 22 nt, Human
uucagacacagcgcugggaaau

SEQ ID NO: 767017 - RNA, 22 nt, Human
auuugaagaaaguuuucuagau

SEQ ID NO: 767018 - RNA, 22 nt, Human
uucagagaugacaccugguguu

SEQ ID NO: 767019 - RNA, 22 nt, Human
acagcaaucugagagacauagu

SEQ ID NO: 767020 - RNA, 22 nt, Human
gcucagcugagcgaaggacaug

SEQ ID NO: 767021 - RNA, 22 nt, Human
uuucuaagaugugguuucaagg

SEQ ID NO: 767022 - RNA, 22 nt, Human
ugcagcagaauauggcugcagg

SEQ ID NO: 767023 - RNA, 22 nt, Human
uagggugguuagaaggaguaug

SEQ ID NO: 767024 - RNA, 22 nt, Human
cugcucuaacugcauuaguuuu

SEQ ID NO: 767025 - RNA, 22 nt, Human
uacaacaauuuccacauuagaa

SEQ ID NO: 767026 - RNA, 16 nt, Human
aggcucagaggcugga

SEQ ID NO: 767027 - RNA, 22 nt, Human
cuguagcaguguuccagcauug

SEQ ID NO: 767028 - RNA, 22 nt, Human
ugcagggaugcuagagguaaga

SEQ ID NO: 767029 - RNA, 22 nt, Human
ggaucauuaacacauccaucac

SEQ ID NO: 767030 - RNA, 22 nt, Human
ugccagggugucaggagagcua

SEQ ID NO: 767031 - RNA, 22 nt, Human
ucccagggacucucugccuucc

SEQ ID NO: 767032 - RNA, 22 nt, Human
gugcaaaaguaauugagguuuu

SEQ ID NO: 767033 - RNA, 22 nt, Human
auuacaacuggaauggugcugg

SEQ ID NO: 767034 - RNA, 22 nt, Human
gagugggcuuggggagaguuug

SEQ ID NO: 767035 - RNA, 19 nt, Human
cacuucaauccuuuaucaa

SEQ ID NO: 767036 - RNA, 22 nt, Human
ucugcaagcgucacaugauucu

SEQ ID NO: 767037 - RNA, 21 nt, Human
caaagccaggcaacucucucc

SEQ ID NO: 767038 - RNA, 22 nt, Human
ucuucaugaaauugauugcuua

SEQ ID NO: 767039 - RNA, 18 nt, Human
ccuaggaaagggaggcaa

SEQ ID NO: 767040 - RNA, 19 nt, Human
uuaacagucaccaaggaga

SEQ ID NO: 767041 - RNA, 22 nt, Human
aaaagagaguugccagucugua

SEQ ID NO: 767042 - RNA, 22 nt, Human
gagaaagcuucagaaauggccu

SEQ ID NO: 767043 - RNA, 22 nt, Human
caugaaggaauaauuguuuaga

SEQ ID NO: 767044 - RNA, 22 nt, Human
cacaguguuccagagcaguggu

SEQ ID NO: 767045 - RNA, 22 nt, Human
aacacuuucuuccuugcucagg

SEQ ID NO: 767046 - RNA, 22 nt, Human
cugugcugucuugggagccuua

SEQ ID NO: 767047 - RNA, 22 nt, Human
auuuccaguccuaaugaucugg

SEQ ID NO: 767048 - RNA, 22 nt, Human
aaacagagggccacugaggcuc

SEQ ID NO: 767049 - RNA, 22 nt, Human
uaaggcauaaggccagaggcua

SEQ ID NO: 767050 - RNA, 22 nt, Human
ucugaggccuucagcaugaauc

SEQ ID NO: 767051 - RNA, 22 nt, Human
auagacauggucuuuugucauu

SEQ ID NO: 767052 - RNA, 22 nt, Human
ucugugugugccuguuaauauu

SEQ ID NO: 767053 - RNA, 22 nt, Human
guucauauuacuuugagugcag

SEQ ID NO: 767054 - RNA, 22 nt, Human
cacacaugucucuccaugcucu

SEQ ID NO: 767055 - RNA, 22 nt, Human
gcauacaaagguuuacaacuga

SEQ ID NO: 767056 - RNA, 22 nt, Human
aauguuauuguccuuuccaaaa

SEQ ID NO: 767057 - RNA, 22 nt, Human
gcugccuugaacuuggccuggg

SEQ ID NO: 767058 - RNA, 22 nt, Human
uucacagucacccuucuccaug

SEQ ID NO: 767059 - RNA, 22 nt, Human
aaaugcagauucaugagcccca

SEQ ID NO: 767060 - RNA, 22 nt, Human
ucugauucauucaugugcacca

SEQ ID NO: 767061 - RNA, 22 nt, Human
gggcuccaggcaggcaggaaau

SEQ ID NO: 767062 - RNA, 22 nt, Human
uuuccacacucacugcacucau

SEQ ID NO: 767063 - RNA, 22 nt, Human
aaaugaacaguugcauucucug

SEQ ID NO: 767064 - RNA, 22 nt, Human
aggcuaauauuuaugaaaccaa

SEQ ID NO: 767065 - RNA, 20 nt, Human
ugauucuggucuacgcuuua

SEQ ID NO: 767066 - RNA, 22 nt, Human
aaggcccuagaaucuauauugc

SEQ ID NO: 767067 - RNA, 22 nt, Human
cugggcagugguggcaucuuug

SEQ ID NO: 767068 - RNA, 22 nt, Human
aaagagucuggcguuuuaaugg

SEQ ID NO: 767069 - RNA, 21 nt, Human
agugucugagcgcugcuucug

SEQ ID NO: 767070 - RNA, 22 nt, Human
agcauccuccuucccagagaug

SEQ ID NO: 767071 - RNA, 22 nt, Human
aaugugacugaauauuuacucu

SEQ ID NO: 767072 - RNA, 22 nt, Human
gccagagagagucccugggccu

SEQ ID NO: 767073 - RNA, 22 nt, Human
uuauauaucuugauuuguucca

SEQ ID NO: 767074 - RNA, 22 nt, Human
agcaacagggggauggccacug

SEQ ID NO: 767075 - RNA, 22 nt, Human
guaauugaguuaccuggaccag

SEQ ID NO: 767076 - RNA, 19 nt, Human
agcaacaccguuuauuucc

SEQ ID NO: 767077 - RNA, 22 nt, Human
cccacacaaaucauggggagaa

SEQ ID NO: 767078 - RNA, 19 nt, Human
uuucugucuguguuuugcc

SEQ ID NO: 767079 - RNA, 22 nt, Human
agcucccauuaucuucugaaac

SEQ ID NO: 767080 - RNA, 22 nt, Human
acaggggcaagggcucacggcc

SEQ ID NO: 767081 - RNA, 22 nt, Human
agcugugugugaauuuggccua

SEQ ID NO: 767082 - RNA, 21 nt, Human
uggugccuucagcugucuuuu

SEQ ID NO: 767083 - RNA, 22 nt, Human
uggucucuucuuccaagauggc

SEQ ID NO: 767084 - RNA, 19 nt, Human
aaaugugcacuguuuucca

SEQ ID NO: 767085 - RNA, 22 nt, Human
gaacacagugugaucguauguc

SEQ ID NO: 767086 - RNA, 22 nt, Human
agcuguggaagacugucagggu

SEQ ID NO: 767087 - RNA, 22 nt, Human
ucugaggaguugggccagugcu

SEQ ID NO: 767088 - RNA, 22 nt, Human
ucuucaugucuugccugauaua

SEQ ID NO: 767089 - RNA, 22 nt, Human
acaugaucccaccugccuauaa

SEQ ID NO: 767090 - RNA, 22 nt, Human
uggucuguucaagguggcugau

SEQ ID NO: 767091 - RNA, 21 nt, Human
aagcaggacauaugaugcccu

SEQ ID NO: 767092 - RNA, 22 nt, Human
aagaaucaucugaacuuugagg

SEQ ID NO: 767093 - RNA, 22 nt, Human
cagggcuuugaacaggcaucaa

SEQ ID NO: 767094 - RNA, 22 nt, Human
ccugccugacagagaagguuca

SEQ ID NO: 767095 - RNA, 22 nt, Human
cuuuucauuguuuguacaugca

SEQ ID NO: 767096 - RNA, 22 nt, Human
cagaugaauaaaugaugaggua

SEQ ID NO: 767097 - RNA, 22 nt, Human
aggcccugcaggaguggggaca

SEQ ID NO: 767098 - RNA, 22 nt, Human
cccaggagauaacguucccaag

SEQ ID NO: 767099 - RNA, 18 nt, Human
uccucucuuuccccaggg

SEQ ID NO: 767100 - RNA, 22 nt, Human
auaaaaaggacagauguggucu

SEQ ID NO: 767101 - RNA, 22 nt, Human
ccagaggugcugggagaggucu

SEQ ID NO: 767102 - RNA, 22 nt, Human
aaacaguguguuucagagaggc

SEQ ID NO: 767103 - RNA, 22 nt, Human
uguauuugaguuaugaaagaga

SEQ ID NO: 767104 - RNA, 22 nt, Human
aagcagaauagaggcccuuccc

SEQ ID NO: 767105 - RNA, 22 nt, Human
aggcuugacugcugauuuugcc

SEQ ID NO: 767106 - RNA, 22 nt, Human
gugcgccagcucaaggggaggc

SEQ ID NO: 767107 - RNA, 22 nt, Human
gaaaaugccucuggcauuaaac

SEQ ID NO: 767108 - RNA, 22 nt, Human
gcugcucugcuguguaagcagg

SEQ ID NO: 767109 - RNA, 18 nt, Human
gagagcccagcagguggu

SEQ ID NO: 767110 - RNA, 22 nt, Human
gaaguucucagcuaggugaugu

SEQ ID NO: 767111 - RNA, 19 nt, Human
ccagugccggcgcugggga

SEQ ID NO: 767112 - RNA, 22 nt, Human
cugggacagcugagacaggaga

SEQ ID NO: 767113 - RNA, 22 nt, Human
ccucugcagcagagagccagag

SEQ ID NO: 767114 - RNA, 22 nt, Human
ugaccuuucucugggugcuugg

SEQ ID NO: 767115 - RNA, 22 nt, Human
aagaauguggcauuuauuuaua

SEQ ID NO: 767116 - RNA, 22 nt, Human
cuucacuuuaagccaaucauga

SEQ ID NO: 767117 - RNA, 22 nt, Human
ccaggaucuguacaccucugag

SEQ ID NO: 767118 - RNA, 22 nt, Human
cucuucuuuccaucccuagcca

SEQ ID NO: 767119 - RNA, 22 nt, Human
uucauucagcacauauuuauug

SEQ ID NO: 767120 - RNA, 22 nt, Human
gugucugcaagauagccaaguc

SEQ ID NO: 767121 - RNA, 22 nt, Human
cagcuauauuguuuucuacugu

SEQ ID NO: 767122 - RNA, 20 nt, Human
uucuuuacgaccuuucugca

SEQ ID NO: 767123 - RNA, 22 nt, Human
uagacuuuucaaaaucuagacc

SEQ ID NO: 767124 - RNA, 22 nt, Human
uuuccagguauuaauacuguau

SEQ ID NO: 767125 - RNA, 22 nt, Human
acucccuugguggagaaugcaa

SEQ ID NO: 767126 - RNA, 22 nt, Human
caauuucuuguuaauucucagg

SEQ ID NO: 767127 - RNA, 22 nt, Human
guccucugggcagcugccccac

SEQ ID NO: 767128 - RNA, 22 nt, Human
auaugaagucagacaaacuggg

SEQ ID NO: 767129 - RNA, 21 nt, Human
auuucauggugcuuuuaagaa

SEQ ID NO: 767130 - RNA, 22 nt, Human
aauguuacacagguauaaucag

SEQ ID NO: 767131 - RNA, 22 nt, Human
gccagcugccaaguugugagau

SEQ ID NO: 767132 - RNA, 22 nt, Human
caccagggcucugagcucugaa

SEQ ID NO: 767133 - RNA, 22 nt, Human
aguggcagagccaggguuggga

SEQ ID NO: 767134 - RNA, 22 nt, Human
cuuaaacugggcauucagagaa

SEQ ID NO: 767135 - RNA, 22 nt, Human
aaucacaauuacuuuugcacca

SEQ ID NO: 767136 - RNA, 22 nt, Human
agagguagaaaauaauggagag

SEQ ID NO: 767137 - RNA, 21 nt, Human
uucccuucugguuuugagaga

SEQ ID NO: 767138 - RNA, 22 nt, Human
gucugggcaccuggccugggaa

SEQ ID NO: 767139 - RNA, 19 nt, Human
uggcauguuuggcuaagga

SEQ ID NO: 767140 - RNA, 22 nt, Human
ggucagagccauggagcaacug

SEQ ID NO: 767141 - RNA, 22 nt, Human
ucacagaagcccucgcaaacua

SEQ ID NO: 767142 - RNA, 22 nt, Human
aggggugauuugggacaggaca

SEQ ID NO: 767143 - RNA, 22 nt, Human
aaaaguuugugcaaacacucag

SEQ ID NO: 767144 - RNA, 22 nt, Human
augugaaagagguguucagugg

SEQ ID NO: 767145 - RNA, 22 nt, Human
aaacagcuaauggccaggaaua

SEQ ID NO: 767146 - RNA, 22 nt, Human
cagaguggcagucccaggccca

SEQ ID NO: 767147 - RNA, 22 nt, Human
aggcuucagaggaagugcggcc

SEQ ID NO: 767148 - RNA, 22 nt, Human
uacuuucuguccuucuguuaaa

SEQ ID NO: 767149 - RNA, 22 nt, Human
agacacauaggaccacacugug

SEQ ID NO: 767150 - RNA, 22 nt, Human
ugcucaucaacaugaugaucau

SEQ ID NO: 767151 - RNA, 22 nt, Human
cugggaaauauaauaaaguggu

SEQ ID NO: 767152 - RNA, 23 nt, Human
agaaggguccuuggcagcgacag

SEQ ID NO: 767153 - RNA, 22 nt, Human
agcaguggagcgagauguuuaa

SEQ ID NO: 767154 - RNA, 22 nt, Human
uacacagauuucaguaucauca

SEQ ID NO: 767155 - RNA, 22 nt, Human
acaguggaagcaugaugcuauc

SEQ ID NO: 767156 - RNA, 22 nt, Human
augcuauacucaaagaaauuca

SEQ ID NO: 767157 - RNA, 22 nt, Human
uacagagaugccgaagagugaa

SEQ ID NO: 767158 - RNA, 22 nt, Human
aggauaaaggucauuauuccca

SEQ ID NO: 767159 - RNA, 23 nt, Human
agggugagcaagcuauggagacc

SEQ ID NO: 767160 - RNA, 22 nt, Human
uuuauuccaguguuucucaaau

SEQ ID NO: 767161 - RNA, 22 nt, Human
uuuauuagugcuuguaucacug

SEQ ID NO: 767162 - RNA, 22 nt, Human
acagcagguuuuaacuuugaag

SEQ ID NO: 767163 - RNA, 22 nt, Human
gauucugcgaugaggacgagcu

SEQ ID NO: 767164 - RNA, 22 nt, Human
agcagcugcagagggcuccccc

SEQ ID NO: 767165 - RNA, 22 nt, Human
caauuucucuuuauaucucaca

SEQ ID NO: 767166 - RNA, 22 nt, Human
acgcuucugguucuggcuuuag

SEQ ID NO: 767167 - RNA, 22 nt, Human
ugaccuauuagauuuccuugcc

SEQ ID NO: 767168 - RNA, 22 nt, Human
gaacaucuuauccauuuccucu

SEQ ID NO: 767169 - RNA, 22 nt, Human
uucagcucagucugugcagcag

SEQ ID NO: 767170 - RNA, 22 nt, Human
ugaagaaaggugugggauacuc

SEQ ID NO: 767171 - RNA, 19 nt, Human
ucucugcagcgcgcccggc

SEQ ID NO: 767172 - RNA, 22 nt, Human
ucaguuuccugguugugauauu

SEQ ID NO: 767173 - RNA, 22 nt, Human
aaggcuggaguacagugcagug

SEQ ID NO: 767174 - RNA, 22 nt, Human
aaacagcuuucagaaucucuca

SEQ ID NO: 767175 - RNA, 22 nt, Human
uuaaugacaucauaggugaagu

SEQ ID NO: 767176 - RNA, 22 nt, Human
aagauacacggucaacucucaa

SEQ ID NO: 767177 - RNA, 22 nt, Human
caucacaguuugucagaaauca

SEQ ID NO: 767178 - RNA, 16 nt, Human
ggcagcagcuccgugc

SEQ ID NO: 767179 - RNA, 22 nt, Human
gagcuuuaccuuagguucuguu

SEQ ID NO: 767180 - RNA, 22 nt, Human
augcacuguuggauauauuugu

SEQ ID NO: 767181 - RNA, 22 nt, Human
agcuuuggcuguguugcucugu

SEQ ID NO: 767182 - RNA, 22 nt, Human
gcgagccucuggaguccucugg

SEQ ID NO: 767183 - RNA, 22 nt, Human
ugccaggguccugagggccuug

SEQ ID NO: 767184 - RNA, 22 nt, Human
cguuugaaagccuuuguacacu

SEQ ID NO: 767185 - RNA, 22 nt, Human
uaaggcacuucaauguuuagaa

SEQ ID NO: 767186 - RNA, 22 nt, Human
gggaccaggugggugcauuccg

SEQ ID NO: 767187 - RNA, 22 nt, Human
cagggccuguacaagucccacc

SEQ ID NO: 767188 - RNA, 22 nt, Human
acauuucuuccuaauuaucccu

SEQ ID NO: 767189 - RNA, 22 nt, Human
aggaaaugccgcggcucucuuu

SEQ ID NO: 767190 - RNA, 22 nt, Human
cagacaugauguaagcagaggc

SEQ ID NO: 767191 - RNA, 22 nt, Human
ucuuuagccaguaucauaauga

SEQ ID NO: 767192 - RNA, 22 nt, Human
uuucaacagcucucaaaugauc

SEQ ID NO: 767193 - RNA, 22 nt, Human
gcucugugaaggguguugcuca

SEQ ID NO: 767194 - RNA, 22 nt, Human
gauccugggcccuucuggguca

SEQ ID NO: 767195 - RNA, 21 nt, Human
ugcccaccaagcuccacacug

SEQ ID NO: 767196 - RNA, 22 nt, Human
ccacaggacggaggucuggccg

SEQ ID NO: 767197 - RNA, 22 nt, Human
auaaggcacacauagauagggu

SEQ ID NO: 767198 - RNA, 22 nt, Human
guuccugacuguggaguuuggu

SEQ ID NO: 767199 - RNA, 22 nt, Human
ucaguucuaacaguuuagaaca

SEQ ID NO: 767200 - RNA, 22 nt, Human
ggcugaaacagauuucaagaca

SEQ ID NO: 767201 - RNA, 22 nt, Human
aauuuucacagugcugugagau

SEQ ID NO: 767202 - RNA, 22 nt, Human
gggaaagaagaucuagauacug

SEQ ID NO: 767203 - RNA, 22 nt, Human
gucagaagcauuuguggcugaa

SEQ ID NO: 767204 - RNA, 22 nt, Human
ggcugccuucccugagccccgg

SEQ ID NO: 767205 - RNA, 19 nt, Human
gaaggggaagguggguacc

SEQ ID NO: 767206 - RNA, 22 nt, Human
uuuucccaucuacaaagcaggg

SEQ ID NO: 767207 - RNA, 22 nt, Human
ccaugccuuccuuucccuggaa

SEQ ID NO: 767208 - RNA, 22 nt, Human
auucucuguagauggcuugaga

SEQ ID NO: 767209 - RNA, 22 nt, Human
aauuuuaugccuugcacguugg

SEQ ID NO: 767210 - RNA, 22 nt, Human
ugcugucagacagcagugguaa

SEQ ID NO: 767211 - RNA, 23 nt, Human
gcaggugguucgaacagaaguuu

SEQ ID NO: 767212 - RNA, 22 nt, Human
uaucuaagagagucaauauuua

SEQ ID NO: 767213 - RNA, 22 nt, Human
aauguaaaguugggcacaaaug

SEQ ID NO: 767214 - RNA, 22 nt, Human
aacaggaaugaggagaaaaggu

SEQ ID NO: 767215 - RNA, 22 nt, Human
uagugucuagugaguuugaugc

SEQ ID NO: 767216 - RNA, 22 nt, Human
uuagacauuaaaugccauuuaa

SEQ ID NO: 767217 - RNA, 22 nt, Human
gugcgugaggccccugagcgaa

SEQ ID NO: 767218 - RNA, 22 nt, Human
agguggagugugcagggagagc

SEQ ID NO: 767219 - RNA, 21 nt, Human
uuugcauuuuacaugugggga

SEQ ID NO: 767220 - RNA, 22 nt, Human
uccugcagagccgcccucaggu

SEQ ID NO: 767221 - RNA, 22 nt, Human
aaccagcucugcaaaaugucau

SEQ ID NO: 767222 - RNA, 22 nt, Human
gaggcucagggaguauaugaau

SEQ ID NO: 767223 - RNA, 22 nt, Human
agacccugaaguuuucuaugau

SEQ ID NO: 767224 - RNA, 22 nt, Human
caguuuccuuguuuaccuacug

SEQ ID NO: 767225 - RNA, 22 nt, Human
caugaaaaugucaaguucugcu

SEQ ID NO: 767226 - RNA, 22 nt, Human
cuggagcuggcuuccuuccacu

SEQ ID NO: 767227 - RNA, 22 nt, Human
gugaaguuuuaguauauguaga

SEQ ID NO: 767228 - RNA, 18 nt, Human
auuucucuggggugauuc

SEQ ID NO: 767229 - RNA, 22 nt, Human
caauuucaauacaaaauacauu

SEQ ID NO: 767230 - RNA, 22 nt, Human
uaccuggaaaaguuauaugugu

SEQ ID NO: 767231 - RNA, 22 nt, Human
acaaugaagauaauguugcagu

SEQ ID NO: 767232 - RNA, 22 nt, Human
ugacaaagugaggucuucagua

SEQ ID NO: 767233 - RNA, 22 nt, Human
auauuucuccaaauguuuucaa

SEQ ID NO: 767234 - RNA, 22 nt, Human
augggggaaaguacgagcaugg

SEQ ID NO: 767235 - RNA, 22 nt, Human
guccugugaccugcauccugag

SEQ ID NO: 767236 - RNA, 22 nt, Human
ugcucccacacuacucggaggc

SEQ ID NO: 767237 - RNA, 22 nt, Human
uggcuucagucucaucuuggaa

SEQ ID NO: 767238 - RNA, 22 nt, Human
agggcucuguccccagaggccc

SEQ ID NO: 767239 - RNA, 22 nt, Human
uccugaagaaggcagauauuug

SEQ ID NO: 767240 - RNA, 22 nt, Human
ucaguccuccucucauagagag

SEQ ID NO: 767241 - RNA, 22 nt, Human
acagaguauuggaaaggcagug

SEQ ID NO: 767242 - RNA, 22 nt, Human
aaaguccugacugcaggggaug

SEQ ID NO: 767243 - RNA, 22 nt, Human
gccauccucugagcacuaggca

SEQ ID NO: 767244 - RNA, 22 nt, Human
augagcaagagcuauguacaga

SEQ ID NO: 767245 - RNA, 22 nt, Human
caagcuccuuacauccacaggg

SEQ ID NO: 767246 - RNA, 20 nt, Human
ccccacacuauugagcacuu

SEQ ID NO: 767247 - RNA, 22 nt, Human
uucuagcuuuuugcaccaaggu

SEQ ID NO: 767248 - RNA, 22 nt, Human
caguacuugggaaugcugggga

SEQ ID NO: 767249 - RNA, 18 nt, Human
acaggcuauugcaggaga

SEQ ID NO: 767250 - RNA, 23 nt, Human
ucacacuggauacacaugcaaga

SEQ ID NO: 767251 - RNA, 22 nt, Human
uaaagauaagacaucaacugag

SEQ ID NO: 767252 - RNA, 22 nt, Human
ucuuucaaaugcuugaauugga

SEQ ID NO: 767253 - RNA, 22 nt, Human
ucagggcacguuucugcaaugc

SEQ ID NO: 767254 - RNA, 22 nt, Human
uccauagugaauggguaaugca

SEQ ID NO: 767255 - RNA, 22 nt, Human
cugggucuuuuucuuccauuga

SEQ ID NO: 767256 - RNA, 22 nt, Human
ucaguuuaagaugacuaacaau

SEQ ID NO: 767257 - RNA, 22 nt, Human
uugagagugccaagcauccucc

SEQ ID NO: 767258 - RNA, 22 nt, Human
auugcugguagucagugucccu

SEQ ID NO: 767259 - RNA, 22 nt, Human
cucagcucuuuauacuagcugu

SEQ ID NO: 767260 - RNA, 22 nt, Human
cuuguggcagguggauggugcc

SEQ ID NO: 767261 - RNA, 21 nt, Human
ugggggugaggccuaggaauc

SEQ ID NO: 767262 - RNA, 22 nt, Human
gcaggagcuuugcuuacugcug

SEQ ID NO: 767263 - RNA, 22 nt, Human
aauauuucuccuucguuauagc

SEQ ID NO: 767264 - RNA, 22 nt, Human
caggaguggugugagggacucc

SEQ ID NO: 767265 - RNA, 22 nt, Human
ucugaggcccugcaggcagugu

SEQ ID NO: 767266 - RNA, 22 nt, Human
ucagaauuagagcucuucuuga

SEQ ID NO: 767267 - RNA, 22 nt, Human
ggcucaggcuggagugcagugg

SEQ ID NO: 767268 - RNA, 22 nt, Human
uguauuucgcuagguacucccu

SEQ ID NO: 767269 - RNA, 22 nt, Human
gacagacacagggccaugauug

SEQ ID NO: 767270 - RNA, 22 nt, Human
gaguuuagauggcauuaaggua

SEQ ID NO: 767271 - RNA, 22 nt, Human
acaguacugaguacugaguugg

SEQ ID NO: 767272 - RNA, 22 nt, Human
uucucugggcuuuucggauccg

SEQ ID NO: 767273 - RNA, 22 nt, Human
cugggcucuagaaaggaaagaa

SEQ ID NO: 767274 - RNA, 22 nt, Human
aacauugccaugguuaauuuua

SEQ ID NO: 767275 - RNA, 17 nt, Human
uuaucuugcuguuucua

SEQ ID NO: 767276 - RNA, 22 nt, Human
ccucaggccugccagagcccca

SEQ ID NO: 767277 - RNA, 22 nt, Human
ggcagccauacucagaccuggg

SEQ ID NO: 767278 - RNA, 22 nt, Human
cccucugcaggcuggaccugcc

SEQ ID NO: 767279 - RNA, 22 nt, Human
accccaggcccagggaagaggc

SEQ ID NO: 767280 - RNA, 22 nt, Human
gacagacaggagcucacaggca

SEQ ID NO: 767281 - RNA, 22 nt, Human
ucauuccuuauccguaucuuuu

SEQ ID NO: 767282 - RNA, 22 nt, Human
cucccugcccugugaguuggcc

SEQ ID NO: 767283 - RNA, 22 nt, Human
aagacagagggaagcaaugaug

SEQ ID NO: 767284 - RNA, 22 nt, Human
cuguggcucaaaaucccaugau

SEQ ID NO: 767285 - RNA, 22 nt, Human
augcauugcucaacagaauaca

SEQ ID NO: 767286 - RNA, 22 nt, Human
aaggcugggaaacaugcaggcc

SEQ ID NO: 767287 - RNA, 22 nt, Human
uggcuggaggguuagugagaua

SEQ ID NO: 767288 - RNA, 22 nt, Human
cagcugccugcaacacaagcuu

SEQ ID NO: 767289 - RNA, 22 nt, Human
cagacuuucaaggagugaaggc

SEQ ID NO: 767290 - RNA, 22 nt, Human
ugccugcccuuuccacacagcc

SEQ ID NO: 767291 - RNA, 22 nt, Human
cuucuguggauauguucucucu

SEQ ID NO: 767292 - RNA, 22 nt, Human
auuuucaguugaaaaaguuggu

SEQ ID NO: 767293 - RNA, 18 nt, Human
cagaugagaugcaaucuc

SEQ ID NO: 767294 - RNA, 22 nt, Human
cucugcccagugcccacaggag

SEQ ID NO: 767295 - RNA, 22 nt, Human
uagggcuauucugaguaauaau

SEQ ID NO: 767296 - RNA, 22 nt, Human
caggacacaggguguggcugau

SEQ ID NO: 767297 - RNA, 18 nt, Human
ccugugcuccagcaucug

SEQ ID NO: 767298 - RNA, 22 nt, Human
agagaagauucuuauaugucuu

SEQ ID NO: 767299 - RNA, 22 nt, Human
caacuguuauaaaucaacagag

SEQ ID NO: 767300 - RNA, 22 nt, Human
agggaccugucaaugacaguua

SEQ ID NO: 767301 - RNA, 22 nt, Human
acacaugauuaaugccaagcau

SEQ ID NO: 767302 - RNA, 22 nt, Human
gggggaagaggcaugaaguccu

SEQ ID NO: 767303 - RNA, 22 nt, Human
cuggggaggaugcuacgaccug

SEQ ID NO: 767304 - RNA, 22 nt, Human
ggagccaggcaaucuguacuuu

SEQ ID NO: 767305 - RNA, 18 nt, Human
gugcugaauaacuacuuu

SEQ ID NO: 767306 - RNA, 22 nt, Human
ggaagggaauccaucugguuag

SEQ ID NO: 767307 - RNA, 22 nt, Human
aaauacuguuuuauuccaugau

SEQ ID NO: 767308 - RNA, 22 nt, Human
uuucaaauggaucccucagccu

SEQ ID NO: 767309 - RNA, 17 nt, Human
gcagaaaagucaaggga

SEQ ID NO: 767310 - RNA, 22 nt, Human
ucagaggaagccuuggugggag

SEQ ID NO: 767311 - RNA, 22 nt, Human
ggcugccugccgcccacuuggc

SEQ ID NO: 767312 - RNA, 22 nt, Human
gaauacaaauaauaccaaggug

SEQ ID NO: 767313 - RNA, 22 nt, Human
cuucagugaauguugaguaagg

SEQ ID NO: 767314 - RNA, 22 nt, Human
cccuggggagcaggcgaaggag

SEQ ID NO: 767315 - RNA, 17 nt, Human
acagagguuauacagac

SEQ ID NO: 767316 - RNA, 22 nt, Human
aaagcucagucagugguguaug

SEQ ID NO: 767317 - RNA, 22 nt, Human
gagaggagaagccugcgcuuca

SEQ ID NO: 767318 - RNA, 22 nt, Human
cugccuguggucugugaucuaa

SEQ ID NO: 767319 - RNA, 22 nt, Human
aggcuuagaaauucagcugagu

SEQ ID NO: 767320 - RNA, 22 nt, Human
uaaacagaauucaggcaagaua

SEQ ID NO: 767321 - RNA, 22 nt, Human
ugacauuucagauaugguauuu

SEQ ID NO: 767322 - RNA, 22 nt, Human
cugggacuugggcuaugcucug

SEQ ID NO: 767323 - RNA, 22 nt, Human
caggugccucaggaugagacaa

SEQ ID NO: 767324 - RNA, 22 nt, Human
aguacacagaauucuacuuguu

SEQ ID NO: 767325 - RNA, 22 nt, Human
gaaugcagcugacagucguuuu

SEQ ID NO: 767326 - RNA, 22 nt, Human
aacauugaauuuaaaauacagu

SEQ ID NO: 767327 - RNA, 22 nt, Human
ucccucagaaauucucucugaa

SEQ ID NO: 767328 - RNA, 22 nt, Human
cagucaccuugaggacucagac

SEQ ID NO: 767329 - RNA, 22 nt, Human
cuccagguuuuacaaggucuau

SEQ ID NO: 767330 - RNA, 18 nt, Human
auccuuggggcugcugcu

SEQ ID NO: 767331 - RNA, 22 nt, Human
uuuaucugcauucugaccaucu

SEQ ID NO: 767332 - RNA, 22 nt, Human
aggcagccauccaggaggcuca

SEQ ID NO: 767333 - RNA, 22 nt, Human
guagaggcagaaacugaaggac

SEQ ID NO: 767334 - RNA, 22 nt, Human
gcugggcucagaccuagugaac

SEQ ID NO: 767335 - RNA, 22 nt, Human
acuucccacacccuguuuucuc

SEQ ID NO: 767336 - RNA, 22 nt, Human
uccagggccccccaguugcacg

SEQ ID NO: 767337 - RNA, 22 nt, Human
gccuggagaauuaaaaggaagg

SEQ ID NO: 767338 - RNA, 22 nt, Human
caggcuuccgccagguuuccag

SEQ ID NO: 767339 - RNA, 22 nt, Human
ucugcuuugaccuucuugaugc

SEQ ID NO: 767340 - RNA, 19 nt, Human
uccugcccaccagccaggg

SEQ ID NO: 767341 - RNA, 22 nt, Human
ucugauaagugguguauacugu

SEQ ID NO: 767342 - RNA, 22 nt, Human
uggagcugguucuggggaagcu

SEQ ID NO: 767343 - RNA, 22 nt, Human
ucucugccaccaugagaugggc

SEQ ID NO: 767344 - RNA, 22 nt, Human
acauuaaauuucauagugauua

SEQ ID NO: 767345 - RNA, 22 nt, Human
uggcagugugugagcuguuauu

SEQ ID NO: 767346 - RNA, 22 nt, Human
cuguagccaguuuggccucacc

SEQ ID NO: 767347 - RNA, 22 nt, Human
cugugggcuccugcagcucagg

SEQ ID NO: 767348 - RNA, 21 nt, Human
acugcaaacagcagagacuga

SEQ ID NO: 767349 - RNA, 22 nt, Human
gcagaauguaggccuucagugu

SEQ ID NO: 767350 - RNA, 20 nt, Human
agcuguuuacauggauuucu

SEQ ID NO: 767351 - RNA, 22 nt, Human
aagggcacagggaaagagugca

SEQ ID NO: 767352 - RNA, 17 nt, Human
gcuccuucuaacuucca

SEQ ID NO: 767353 - RNA, 22 nt, Human
cuggagcuaauaauccaucuga

SEQ ID NO: 767354 - RNA, 22 nt, Human
acuggagacugugucuuuugau

SEQ ID NO: 767355 - RNA, 22 nt, Human
agaagagaaauagugccacugu

SEQ ID NO: 767356 - RNA, 21 nt, Human
ccuaguguuaaaacaguuuaa

SEQ ID NO: 767357 - RNA, 19 nt, Human
auagaaaggguuaaagaca

SEQ ID NO: 767358 - RNA, 22 nt, Human
gagaggggcgcgcagcucgcga

SEQ ID NO: 767359 - RNA, 22 nt, Human
uugggccaaagauguccuuguu

SEQ ID NO: 767360 - RNA, 22 nt, Human
agcugccacauggugucacugu

SEQ ID NO: 767361 - RNA, 22 nt, Human
ugcacaucuuucagcaucauac

SEQ ID NO: 767362 - RNA, 22 nt, Human
acuguacauguaaacauuguca

SEQ ID NO: 767363 - RNA, 19 nt, Human
gggguggcuggggcuccag

SEQ ID NO: 767364 - RNA, 22 nt, Human
guucaauuuagaaagcacaguu

SEQ ID NO: 767365 - RNA, 22 nt, Human
gcccugucccuuggcuucuagg

SEQ ID NO: 767366 - RNA, 22 nt, Human
caaauucagaaaauugguagag

SEQ ID NO: 767367 - RNA, 22 nt, Human
gacccagaaggagugcccuaga

SEQ ID NO: 767368 - RNA, 22 nt, Human
gcaguguuacuugguuugcaga

SEQ ID NO: 767369 - RNA, 22 nt, Human
gcugagugagguccagagcuug

SEQ ID NO: 767370 - RNA, 22 nt, Human
uuugugugcgucuggccugggg

SEQ ID NO: 767371 - RNA, 22 nt, Human
uucugggcucccacauauuuca

SEQ ID NO: 767372 - RNA, 22 nt, Human
ugucuacugagaagcuaugcaa

SEQ ID NO: 767373 - RNA, 22 nt, Human
uguaacugcuuagaagguuuua

SEQ ID NO: 767374 - RNA, 22 nt, Human
cucaguuucuucauauuguagg

SEQ ID NO: 767375 - RNA, 22 nt, Human
uucuucaugcuguugcugcuug

SEQ ID NO: 767376 - RNA, 22 nt, Human
cccuugggcuucagcccuaccg

SEQ ID NO: 767377 - RNA, 22 nt, Human
gaaagguucuugggaguucaca

SEQ ID NO: 767378 - RNA, 22 nt, Human
auauuagggucucuaaauucua

SEQ ID NO: 767379 - RNA, 22 nt, Human
uagcugucagcaaucaaguggu

SEQ ID NO: 767380 - RNA, 22 nt, Human
gaaauguauaagcuggucuuuu

SEQ ID NO: 767381 - RNA, 22 nt, Human
aggagccaagaugcugucuggc

SEQ ID NO: 767382 - RNA, 22 nt, Human
aucauguuccagaaacagugau

SEQ ID NO: 767383 - RNA, 22 nt, Human
gaggguuggugcaaaugggaug

SEQ ID NO: 767384 - RNA, 22 nt, Human
ucccacaggcccagggcggaaa

SEQ ID NO: 767385 - RNA, 22 nt, Human
agggccugagcuggcugaccuc

SEQ ID NO: 767386 - RNA, 22 nt, Human
uuucuuucaauucuccuaaugc

SEQ ID NO: 767387 - RNA, 22 nt, Human
agagucuuccaggcagccugag

SEQ ID NO: 767388 - RNA, 22 nt, Human
uacauguauguuuaucuugaga

SEQ ID NO: 767389 - RNA, 22 nt, Human
auguucauuagucaacauuucu

SEQ ID NO: 767390 - RNA, 21 nt, Human
ucacacuugauuggcuuagac

SEQ ID NO: 767391 - RNA, 18 nt, Human
ucagagagaauaguaauu

SEQ ID NO: 767392 - RNA, 19 nt, Human
ucuauguggcagugauggc

SEQ ID NO: 767393 - RNA, 22 nt, Human
ccagagccuggcaucugcauaa

SEQ ID NO: 767394 - RNA, 22 nt, Human
auuuagacaacaagccuucucc

SEQ ID NO: 767395 - RNA, 21 nt, Human
ccagagguucugggccucccu

SEQ ID NO: 767396 - RNA, 22 nt, Human
uauuccuguuccccaucaccac

SEQ ID NO: 767397 - RNA, 22 nt, Human
uccuggauuaauagggagcugu

SEQ ID NO: 767398 - RNA, 22 nt, Human
uuucacauucagauauagacuu

SEQ ID NO: 767399 - RNA, 22 nt, Human
acugagaacuuggggacagagg

SEQ ID NO: 767400 - RNA, 22 nt, Human
caugugcagacggugggcugga

SEQ ID NO: 767401 - RNA, 22 nt, Human
uccagguaugacaggccacucc

SEQ ID NO: 767402 - RNA, 22 nt, Human
auacugaaggcauucagauaac

SEQ ID NO: 767403 - RNA, 20 nt, Human
ccaggcuggcaaaugggggc

SEQ ID NO: 767404 - RNA, 22 nt, Human
uucacagggcagcagcugagcc

SEQ ID NO: 767405 - RNA, 23 nt, Human
uccagcagccaagaaggguagaa

SEQ ID NO: 767406 - RNA, 22 nt, Human
auucuuggagcagucaaagaag

SEQ ID NO: 767407 - RNA, 23 nt, Human
ucucugcauguccugagcacauc

SEQ ID NO: 767408 - RNA, 22 nt, Human
aagggcagccugacucacgguc

SEQ ID NO: 767409 - RNA, 22 nt, Human
agcaaauacuugaauaaaaaga

SEQ ID NO: 767410 - RNA, 21 nt, Human
gcagccagacgggauucaguu

SEQ ID NO: 767411 - RNA, 22 nt, Human
aaagucauuguaauauaugcua

SEQ ID NO: 767412 - RNA, 18 nt, Human
caggcccugucuggccuc

SEQ ID NO: 767413 - RNA, 20 nt, Human
uauuucacucuccagauggc

SEQ ID NO: 767414 - RNA, 22 nt, Human
uccuggccaaguagauguggcg

SEQ ID NO: 767415 - RNA, 22 nt, Human
cacugaggcuuccuuaggcaau

SEQ ID NO: 767416 - RNA, 20 nt, Human
gcuguugccaguacagaugg

SEQ ID NO: 767417 - RNA, 19 nt, Human
gcugccugucuuagccagu

SEQ ID NO: 767418 - RNA, 22 nt, Human
aagcccagaugugagaacugag

SEQ ID NO: 767419 - RNA, 22 nt, Human
ugaaggcauugaugaaggaauc

SEQ ID NO: 767420 - RNA, 21 nt, Human
agcagguaggcauucauacug

SEQ ID NO: 767421 - RNA, 22 nt, Human
ucagucuucccuccagugcaac

SEQ ID NO: 767422 - RNA, 22 nt, Human
cugguaggggugacuguuaucg

SEQ ID NO: 767423 - RNA, 22 nt, Human
gauccuugcaacucugugaggu

SEQ ID NO: 767424 - RNA, 19 nt, Human
ccuagagcaguaccuggua

SEQ ID NO: 767425 - RNA, 22 nt, Human
uggcagucggacuucuaucuca

SEQ ID NO: 767426 - RNA, 22 nt, Human
uuuccauauucugcgucugcca

SEQ ID NO: 767427 - RNA, 22 nt, Human
ugaacucuccaggcaaaugauc

SEQ ID NO: 767428 - RNA, 22 nt, Human
ugcuucgcccccuggugcagcu

SEQ ID NO: 767429 - RNA, 21 nt, Human
aguuuccucaucugcauagga

SEQ ID NO: 767430 - RNA, 20 nt, Human
uuucugugauagagaggugu

SEQ ID NO: 767431 - RNA, 22 nt, Human
uuuacaaccucauauucugaug

SEQ ID NO: 767432 - RNA, 22 nt, Human
uuaaaggcaugguuagacaugg

SEQ ID NO: 767433 - RNA, 22 nt, Human
uccagggccaagucauggaacc

SEQ ID NO: 767434 - RNA, 22 nt, Human
aggcuugaaaugaaaucuguaa

SEQ ID NO: 767435 - RNA, 22 nt, Human
aaugaugaacucagagggaacc

SEQ ID NO: 767436 - RNA, 19 nt, Human
cccagagcauccugaacuu

SEQ ID NO: 767437 - RNA, 22 nt, Human
gccagagcugagugagguucuu

SEQ ID NO: 767438 - RNA, 22 nt, Human
cuucucaacugcacuugccagg

SEQ ID NO: 767439 - RNA, 22 nt, Human
aggguggggugcuacaucuuua

SEQ ID NO: 767440 - RNA, 22 nt, Human
ugugccauuucuauucugcagc

SEQ ID NO: 767441 - RNA, 22 nt, Human
uaacauugucaguucaacugcu

SEQ ID NO: 767442 - RNA, 22 nt, Human
guuacaaacucaggugccaaaa

SEQ ID NO: 767443 - RNA, 22 nt, Human
cuguagcagacagacccuaggu

SEQ ID NO: 767444 - RNA, 22 nt, Human
gcagugaagccagaucugaaau

SEQ ID NO: 767445 - RNA, 21 nt, Human
ggucagggggugccuccaggu

SEQ ID NO: 767446 - RNA, 22 nt, Human
gccaagcuggaugaagagguug

SEQ ID NO: 767447 - RNA, 22 nt, Human
ggcuucuccagguacugagcau

SEQ ID NO: 767448 - RNA, 22 nt, Human
ucugugacuugcgggaggagaa

SEQ ID NO: 767449 - RNA, 22 nt, Human
gaugaagcuauuugguuggcac

SEQ ID NO: 767450 - RNA, 22 nt, Human
uucugggggccaggacaguggu

SEQ ID NO: 767451 - RNA, 22 nt, Human
cuuuuucaagucaaagagggua

SEQ ID NO: 767452 - RNA, 22 nt, Human
auuaaggaauguaggcaagaag

SEQ ID NO: 767453 - RNA, 22 nt, Human
gugcugucguggaacugggcug

SEQ ID NO: 767454 - RNA, 22 nt, Human
ccugggcaacauagugagaccu

SEQ ID NO: 767455 - RNA, 22 nt, Human
acagagacugggaugccugccu

SEQ ID NO: 767456 - RNA, 22 nt, Human
aguauuuguggauuuguauugg

SEQ ID NO: 767457 - RNA, 22 nt, Human
gaaggaagauucuguuggaauc

SEQ ID NO: 767458 - RNA, 22 nt, Human
uggucugauucuugcuccccaa

SEQ ID NO: 767459 - RNA, 22 nt, Human
cugcugugcaacauugcaccua

SEQ ID NO: 767460 - RNA, 22 nt, Human
cucuguccugguuuauacuggc

SEQ ID NO: 767461 - RNA, 22 nt, Human
ucaggugucaagcagggagcug

SEQ ID NO: 767462 - RNA, 22 nt, Human
uuacauguuuacggauacacuu

SEQ ID NO: 767463 - RNA, 22 nt, Human
gagggcucuaccaaguaacucu

SEQ ID NO: 767464 - RNA, 22 nt, Human
ucuugaggucaucaucugaaac

SEQ ID NO: 767465 - RNA, 22 nt, Human
ugcagacaagucgugggaucuu

SEQ ID NO: 767466 - RNA, 22 nt, Human
ugugaaggagcaugcagagggg

SEQ ID NO: 767467 - RNA, 22 nt, Human
gcugcccugacuccagcagccu

SEQ ID NO: 767468 - RNA, 20 nt, Human
acucuggggcucauuagggg

SEQ ID NO: 767469 - RNA, 22 nt, Human
uccacagaccaguaucugcagc

SEQ ID NO: 767470 - RNA, 22 nt, Human
agcugugguguuuucaagcccu

SEQ ID NO: 767471 - RNA, 22 nt, Human
gcucccagauuucagccuugug

SEQ ID NO: 767472 - RNA, 22 nt, Human
ugccaggcucaggaugucccug

SEQ ID NO: 767473 - RNA, 18 nt, Human
gggcuuuacagaguggag

SEQ ID NO: 767474 - RNA, 22 nt, Human
ccugcugggccugagcaaugag

SEQ ID NO: 767475 - RNA, 22 nt, Human
agacacugaaucagagggacau

SEQ ID NO: 767476 - RNA, 22 nt, Human
uguccuggagacacaagguggu

SEQ ID NO: 767477 - RNA, 22 nt, Human
uggcacagacagaucaggaguc

SEQ ID NO: 767478 - RNA, 22 nt, Human
ccagagagaaauggauuugagu

SEQ ID NO: 767479 - RNA, 22 nt, Human
uggcauguggcaauguugggau

SEQ ID NO: 767480 - RNA, 22 nt, Human
auuaaaugauggcaugucuuau

SEQ ID NO: 767481 - RNA, 19 nt, Human
aguguuuauguagugccua

SEQ ID NO: 767482 - RNA, 22 nt, Human
gacaaugcagaaguacuuguuc

SEQ ID NO: 767483 - RNA, 22 nt, Human
uagaaaucagcaggcauaugua

SEQ ID NO: 767484 - RNA, 22 nt, Human
uuaacacuaucugucauaauua

SEQ ID NO: 767485 - RNA, 22 nt, Human
uuucaucauguuggcagauugg

SEQ ID NO: 767486 - RNA, 22 nt, Human
ucgucugugaaauugggauaag

SEQ ID NO: 767487 - RNA, 21 nt, Human
ugagcccuugccucagagccc

SEQ ID NO: 767488 - RNA, 22 nt, Human
augcuauuaauauccagucuga

SEQ ID NO: 767489 - RNA, 22 nt, Human
uuaaacagucccagaggcugac

SEQ ID NO: 767490 - RNA, 22 nt, Human
ccagcuuuauagcuucaaagga

SEQ ID NO: 767491 - RNA, 18 nt, Human
uggacaggguggagaaaa

SEQ ID NO: 767492 - RNA, 22 nt, Human
gaagguuuugauuccacugaau

SEQ ID NO: 767493 - RNA, 22 nt, Human
cucugggcuucaagucagauuu

SEQ ID NO: 767494 - RNA, 22 nt, Human
guuucuaagcacaugugagugu

SEQ ID NO: 767495 - RNA, 22 nt, Human
gaacauuuccagaaaggaacua

SEQ ID NO: 767496 - RNA, 22 nt, Human
ucuuggccacuaccaccuggag

SEQ ID NO: 767497 - RNA, 22 nt, Human
agucugaaggauggaagguacc

SEQ ID NO: 767498 - RNA, 20 nt, Human
acauuuguggaucugagaga

SEQ ID NO: 767499 - RNA, 22 nt, Human
cagagccacuuggagaugagaa

SEQ ID NO: 767500 - RNA, 22 nt, Human
gaggggcuggcuguggucccau

SEQ ID NO: 767501 - RNA, 22 nt, Human
acguagcacugagagaugcagg

SEQ ID NO: 767502 - RNA, 22 nt, Human
ggcagguacuggggagugaaga

SEQ ID NO: 767503 - RNA, 20 nt, Human
gcugucugacaguucccaga

SEQ ID NO: 767504 - RNA, 22 nt, Human
guugaguggguuaggaugcuga

SEQ ID NO: 767505 - RNA, 22 nt, Human
aaugcucuuugaauuugucaga

SEQ ID NO: 767506 - RNA, 22 nt, Human
gaugucaucaggcuaagacacu

SEQ ID NO: 767507 - RNA, 22 nt, Human
cuucuuuucauggcuugggaag

SEQ ID NO: 767508 - RNA, 22 nt, Human
agccaaaucuaaagugaauauu

SEQ ID NO: 767509 - RNA, 22 nt, Human
ccaaggcaggggaucaaaguuu

SEQ ID NO: 767510 - RNA, 22 nt, Human
agcauaaacucagggacacaca

SEQ ID NO: 767511 - RNA, 22 nt, Human
cugggccuggagcccacgagcc

SEQ ID NO: 767512 - RNA, 22 nt, Human
ugucuuacaugagucaccccaa

SEQ ID NO: 767513 - RNA, 22 nt, Human
gcccugagggguggugucugua

SEQ ID NO: 767514 - RNA, 22 nt, Human
guugaaugaaucauucuaugua

SEQ ID NO: 767515 - RNA, 22 nt, Human
uuuccagagggugcucagggcg

SEQ ID NO: 767516 - RNA, 22 nt, Human
ucugggaacagccuggcugugu

SEQ ID NO: 767517 - RNA, 22 nt, Human
uccacagcuuuuaaaugucuag

SEQ ID NO: 767518 - RNA, 22 nt, Human
uaaccuggaugugccaacguga

SEQ ID NO: 767519 - RNA, 22 nt, Human
aaggcugcuuuuaacaugcaua

SEQ ID NO: 767520 - RNA, 22 nt, Human
cucugucacuucuccagcugag

SEQ ID NO: 767521 - RNA, 23 nt, Human
agcagcccugggaccuggccugc

SEQ ID NO: 767522 - RNA, 22 nt, Human
gguaacaaggccgauagaaaca

SEQ ID NO: 767523 - RNA, 22 nt, Human
ccucaggcuuaacuugucuuga

SEQ ID NO: 767524 - RNA, 22 nt, Human
aaaugcuagggagaaacucucc

SEQ ID NO: 767525 - RNA, 22 nt, Human
uguguuggcuugccuguuaggc

SEQ ID NO: 767526 - RNA, 22 nt, Human
agguccaggccucaugauggcc

SEQ ID NO: 767527 - RNA, 22 nt, Human
gagauggagucuuuuucuguca

SEQ ID NO: 767528 - RNA, 23 nt, Human
uugaggucggcucucugagccug

SEQ ID NO: 767529 - RNA, 22 nt, Human
aaagcaaucagauucagauguc

SEQ ID NO: 767530 - RNA, 22 nt, Human
aguuuuauguagacaauucauu

SEQ ID NO: 767531 - RNA, 22 nt, Human
guauuaggugguggaauuguag

SEQ ID NO: 767532 - RNA, 22 nt, Human
ccagcaucagcacccaaggagc

SEQ ID NO: 767533 - RNA, 22 nt, Human
auucugcaugguggugucucug

SEQ ID NO: 767534 - RNA, 22 nt, Human
ucucaggacuuugggaagcuca

SEQ ID NO: 767535 - RNA, 16 nt, Human
uggagguguuucuagu

SEQ ID NO: 767536 - RNA, 22 nt, Human
uggcauccagauacccugaggg

SEQ ID NO: 767537 - RNA, 22 nt, Human
caucuugaugcuuugacagguu

SEQ ID NO: 767538 - RNA, 22 nt, Human
ccaccugugcuugguacuccau

SEQ ID NO: 767539 - RNA, 22 nt, Human
uucugggcccacuguagcaucc

SEQ ID NO: 767540 - RNA, 22 nt, Human
aauguggacucuuguauuuuuc

SEQ ID NO: 767541 - RNA, 22 nt, Human
cuguggcauugccgaggcuggc

SEQ ID NO: 767542 - RNA, 22 nt, Human
uccaggcaguuuuccagguugu

SEQ ID NO: 767543 - RNA, 22 nt, Human
uuuuugaaggcugaugugauua

SEQ ID NO: 767544 - RNA, 22 nt, Human
gugcccaguccugccuugacag

SEQ ID NO: 767545 - RNA, 22 nt, Human
aggcagccaguucagguuucuu

SEQ ID NO: 767546 - RNA, 22 nt, Human
gucuggaaaggggcuuuuaucu

SEQ ID NO: 767547 - RNA, 22 nt, Human
ggccagggaggagaggccccug

SEQ ID NO: 767548 - RNA, 22 nt, Human
uaagauguacaaccacuucucu

SEQ ID NO: 767549 - RNA, 22 nt, Human
uucuguggcugggagccuggcu

SEQ ID NO: 767550 - RNA, 23 nt, Human
aaaugugagggaaaaucuuucug

SEQ ID NO: 767551 - RNA, 22 nt, Human
gugcuuugucuucaggaucaua

SEQ ID NO: 767552 - RNA, 22 nt, Human
ucaggaaugaggauaaacauug

SEQ ID NO: 767553 - RNA, 22 nt, Human
agccaguuuccagauauuaacu

SEQ ID NO: 767554 - RNA, 22 nt, Human
aucauguuuuaauuagcaaacu

SEQ ID NO: 767555 - RNA, 22 nt, Human
augggcuggggaagcucacucc

SEQ ID NO: 767556 - RNA, 22 nt, Human
ggucagugcgauuucccacucc

SEQ ID NO: 767557 - RNA, 22 nt, Human
cagggcuguaaauuagugcuga

SEQ ID NO: 767558 - RNA, 22 nt, Human
ucagcugcugugguauguacau

SEQ ID NO: 767559 - RNA, 22 nt, Human
aggcugcagugcagguaggauu

SEQ ID NO: 767560 - RNA, 22 nt, Human
aggcuggcucggcuuuucuguc

SEQ ID NO: 767561 - RNA, 22 nt, Human
gcuuugcugggugcuucaugua

SEQ ID NO: 767562 - RNA, 22 nt, Human
ucugccuggcucauggcaguga

SEQ ID NO: 767563 - RNA, 22 nt, Human
cagcacugugauaacugagcca

SEQ ID NO: 767564 - RNA, 22 nt, Human
cugucagcacucuacuacagau

SEQ ID NO: 767565 - RNA, 22 nt, Human
auacuaaaguauagaacuuagu

SEQ ID NO: 767566 - RNA, 22 nt, Human
ucgugucagaucagagguuccu

SEQ ID NO: 767567 - RNA, 22 nt, Human
gcugggagacagacuuggaacc

SEQ ID NO: 767568 - RNA, 22 nt, Human
accugaaacucaacuuuaucuc

SEQ ID NO: 767569 - RNA, 19 nt, Human
ugccugcuccuggcuucca

SEQ ID NO: 767570 - RNA, 22 nt, Human
cacucaggcugugucaggagga

SEQ ID NO: 767571 - RNA, 22 nt, Human
agcucccagagcucgagaguaa

SEQ ID NO: 767572 - RNA, 22 nt, Human
gcagccagaagacucagaacaa

SEQ ID NO: 767573 - RNA, 22 nt, Human
uuguuucuucaggcuuuuagga

SEQ ID NO: 767574 - RNA, 22 nt, Human
acagcaucccugaagauaacca

SEQ ID NO: 767575 - RNA, 22 nt, Human
agaaagacaaaaugcaguggcu

SEQ ID NO: 767576 - RNA, 18 nt, Human
ggugggaagccagggccu

SEQ ID NO: 767577 - RNA, 22 nt, Human
aaaggaaugagcuucuguuagg

SEQ ID NO: 767578 - RNA, 22 nt, Human
uggucccuaaagaugucuacau

SEQ ID NO: 767579 - RNA, 22 nt, Human
cagcagaggaaagcaaaucuaa

SEQ ID NO: 767580 - RNA, 22 nt, Human
ggcuucaguggccagagaugau

SEQ ID NO: 767581 - RNA, 21 nt, Human
aauuagggugccucuuauaau

SEQ ID NO: 767582 - RNA, 22 nt, Human
ggccccuguaaaauguacaugu

SEQ ID NO: 767583 - RNA, 22 nt, Human
cuggggacuugcagacacaauu

SEQ ID NO: 767584 - RNA, 17 nt, Human
ugaaggaaggaugaugu

SEQ ID NO: 767585 - RNA, 22 nt, Human
uucaacaauuaaguaucagccu

SEQ ID NO: 767586 - RNA, 22 nt, Human
gaaaaaugcuccaaaucugugg

SEQ ID NO: 767587 - RNA, 22 nt, Human
caaggcuauaauguugcuggaa

SEQ ID NO: 767588 - RNA, 22 nt, Human
ggugugguuugaagggagaugg

SEQ ID NO: 767589 - RNA, 22 nt, Human
cuccaggacaugacuuucuugc

SEQ ID NO: 767590 - RNA, 20 nt, Human
aaacauucauguacaaguga

SEQ ID NO: 767591 - RNA, 22 nt, Human
aucccugcccucauggagcuua

SEQ ID NO: 767592 - RNA, 22 nt, Human
agguagaggccuccaggcagca

SEQ ID NO: 767593 - RNA, 22 nt, Human
aaaacacugcaaagcugauugg

SEQ ID NO: 767594 - RNA, 22 nt, Human
gcucagaguuaauuggaugggu

SEQ ID NO: 767595 - RNA, 22 nt, Human
agacagacauucuagagccacc

SEQ ID NO: 767596 - RNA, 22 nt, Human
cuccagaggcccuaucccacua

SEQ ID NO: 767597 - RNA, 22 nt, Human
acuccccagacugccaugcugg

SEQ ID NO: 767598 - RNA, 22 nt, Human
cuugcagccuuaccaaggcauu

SEQ ID NO: 767599 - RNA, 22 nt, Human
ucuguguaagaccagugcuggg

SEQ ID NO: 767600 - RNA, 22 nt, Human
gcugcccauuccacuggauggu

SEQ ID NO: 767601 - RNA, 22 nt, Human
aucugguuuggggauccuugug

SEQ ID NO: 767602 - RNA, 22 nt, Human
aaugcuguauaucuuagcuaau

SEQ ID NO: 767603 - RNA, 22 nt, Human
ucucuuggugacuuaaaauguu

SEQ ID NO: 767604 - RNA, 19 nt, Human
gcaggaaaugagugauugc

SEQ ID NO: 767605 - RNA, 22 nt, Human
cagaaggcaaacaaaaggauuu

SEQ ID NO: 767606 - RNA, 19 nt, Human
cugugucacauuuaugaaa

SEQ ID NO: 767607 - RNA, 22 nt, Human
ugucuccugggucccuuccacc

SEQ ID NO: 767608 - RNA, 22 nt, Human
ggcuguccaccuaccaugccgg

SEQ ID NO: 767609 - RNA, 20 nt, Human
ccagaagguuugccacuuuc

SEQ ID NO: 767610 - RNA, 22 nt, Human
ugucauguggcaauuaaagcag

SEQ ID NO: 767611 - RNA, 22 nt, Human
guggcccacacagacagcaucu

SEQ ID NO: 767612 - RNA, 22 nt, Human
uugagggucuggaucugcugcu

SEQ ID NO: 767613 - RNA, 22 nt, Human
uguaaaucacugaacuaaauga

SEQ ID NO: 767614 - RNA, 22 nt, Human
uuauuuuuaaaaguucacacag

SEQ ID NO: 767615 - RNA, 22 nt, Human
ucugcugugauuugcuaccugu

SEQ ID NO: 767616 - RNA, 22 nt, Human
uggacaggggcugcuguuguca

SEQ ID NO: 767617 - RNA, 22 nt, Human
guguggguguacuguucuagau

SEQ ID NO: 767618 - RNA, 22 nt, Human
cugcugccccugagcucagccu

SEQ ID NO: 767619 - RNA, 22 nt, Human
caaagugcuaggauuacaggcc

SEQ ID NO: 767620 - RNA, 22 nt, Human
acuuugauaguuuaaucuagga

SEQ ID NO: 767621 - RNA, 22 nt, Human
aacuucaguugagaaaggcaug

SEQ ID NO: 767622 - RNA, 23 nt, Human
gucuuuauaguggggcacuuugu

SEQ ID NO: 767623 - RNA, 22 nt, Human
uauuccugguguuggcuggguc

SEQ ID NO: 767624 - RNA, 22 nt, Human
auuauuagugauguuguuacug

SEQ ID NO: 767625 - RNA, 22 nt, Human
gugagguccauguuaauggguu

SEQ ID NO: 767626 - RNA, 22 nt, Human
acacuauacuuccauugcuggu

SEQ ID NO: 767627 - RNA, 22 nt, Human
uacagcaaugcuacaagaugac

SEQ ID NO: 767628 - RNA, 22 nt, Human
uuaaaugucaauagauugcuug

SEQ ID NO: 767629 - RNA, 22 nt, Human
auucccaccaacaauguacagg

SEQ ID NO: 767630 - RNA, 22 nt, Human
ggcugcuucucacucauuugca

SEQ ID NO: 767631 - RNA, 22 nt, Human
uauugaccagacugacacacau

SEQ ID NO: 767632 - RNA, 22 nt, Human
aggcacugaccugcuuccuuga

SEQ ID NO: 767633 - RNA, 22 nt, Human
cuuccugggcaauguucugcuu

SEQ ID NO: 767634 - RNA, 22 nt, Human
auaacagagagcuacugaacug

SEQ ID NO: 767635 - RNA, 22 nt, Human
ugacaagagaccccuccgcagg

SEQ ID NO: 767636 - RNA, 22 nt, Human
augauggugagguugagcacag

SEQ ID NO: 767637 - RNA, 22 nt, Human
ugcuggaagagaauacuggugg

SEQ ID NO: 767638 - RNA, 22 nt, Human
uugccaggggacaucuggagcc

SEQ ID NO: 767639 - RNA, 22 nt, Human
aagugaauguagcaaacuugaa

SEQ ID NO: 767640 - RNA, 17 nt, Human
ugucugucaucaguucc

SEQ ID NO: 767641 - RNA, 22 nt, Human
aggucauuguuaagucaccaua

SEQ ID NO: 767642 - RNA, 22 nt, Human
uugaaagaagaagcugcgaugu

SEQ ID NO: 767643 - RNA, 22 nt, Human
gccugcuucucagucagcuugg

SEQ ID NO: 767644 - RNA, 16 nt, Human
accuccagucaagggu

SEQ ID NO: 767645 - RNA, 22 nt, Human
auguuacacauaggcauaaaug

SEQ ID NO: 767646 - RNA, 22 nt, Human
cugccuucuuucaaggguaagc

SEQ ID NO: 767647 - RNA, 22 nt, Human
ugcaggcagcugaaaggugccu

SEQ ID NO: 767648 - RNA, 22 nt, Human
cuacagaaggagaaauggguaa

SEQ ID NO: 767649 - RNA, 21 nt, Human
ugcucaugcaaugcaugucca

SEQ ID NO: 767650 - RNA, 22 nt, Human
cugggaggcaccgcgucgugcu

SEQ ID NO: 767651 - RNA, 22 nt, Human
gaacccaguccaggugcagccu

SEQ ID NO: 767652 - RNA, 22 nt, Human
ugccaggcauguaguagacuug

SEQ ID NO: 767653 - RNA, 18 nt, Human
ggagcccagaggacagga

SEQ ID NO: 767654 - RNA, 22 nt, Human
ucuaacucugccaggacacaga

SEQ ID NO: 767655 - RNA, 22 nt, Human
ccuuuaugucacucuggagagc

SEQ ID NO: 767656 - RNA, 22 nt, Human
uuagggaaacaaacauuuucuu

SEQ ID NO: 767657 - RNA, 22 nt, Human
ugaaguauccaucuuguucuag

SEQ ID NO: 767658 - RNA, 22 nt, Human
ucacauuucaagugcucaaaag

SEQ ID NO: 767659 - RNA, 22 nt, Human
uguauaugagucugaguguaca

SEQ ID NO: 767660 - RNA, 22 nt, Human
uagaaagacuguccagauuuca

SEQ ID NO: 767661 - RNA, 22 nt, Human
gaggagucuaguuuauggcuuc

SEQ ID NO: 767662 - RNA, 22 nt, Human
aggagccauugcaggauggcag

SEQ ID NO: 767663 - RNA, 22 nt, Human
aucaaguucugucacauuuguc

SEQ ID NO: 767664 - RNA, 22 nt, Human
aaacuucauuuucaacugcaaa

SEQ ID NO: 767665 - RNA, 18 nt, Human
cugccccuucucugagau

SEQ ID NO: 767666 - RNA, 22 nt, Human
acauucagaaucuuguagcagu

SEQ ID NO: 767667 - RNA, 22 nt, Human
aggagccaguggaguuccugcc

SEQ ID NO: 767668 - RNA, 22 nt, Human
cuucccuuccuggggcaauuua

SEQ ID NO: 767669 - RNA, 22 nt, Human
cacugaacaacaaauagugaau

SEQ ID NO: 767670 - RNA, 22 nt, Human
cuuaacaugggggguaagucug

SEQ ID NO: 767671 - RNA, 22 nt, Human
uuaucugaaacuuuugggacca

SEQ ID NO: 767672 - RNA, 22 nt, Human
aguccucugcugugcgucuuug

SEQ ID NO: 767673 - RNA, 21 nt, Human
ggcaugagggcagugagcaga

SEQ ID NO: 767674 - RNA, 22 nt, Human
gaacaaaucccuuccugucucc

SEQ ID NO: 767675 - RNA, 22 nt, Human
gugagucuguggaccgggcacu

SEQ ID NO: 767676 - RNA, 19 nt, Human
uagucucugaugaggcuuu

SEQ ID NO: 767677 - RNA, 22 nt, Human
acacaggcauagccauacaugu

SEQ ID NO: 767678 - RNA, 22 nt, Human
agaacugguggugaucaguuau

SEQ ID NO: 767679 - RNA, 22 nt, Human
gagcuuuacuucugacuggugc

SEQ ID NO: 767680 - RNA, 22 nt, Human
cugccucucaggucccugagau

SEQ ID NO: 767681 - RNA, 22 nt, Human
agcagugggugguuuuugagca

SEQ ID NO: 767682 - RNA, 22 nt, Human
uuguuaaaaauagauuuccagg

SEQ ID NO: 767683 - RNA, 22 nt, Human
cugucugcuagaacaucuauac

SEQ ID NO: 767684 - RNA, 22 nt, Human
aaggcugaggcuggagaauuac

SEQ ID NO: 767685 - RNA, 23 nt, Human
uggcucuguggaucccucaggag

SEQ ID NO: 767686 - RNA, 22 nt, Human
aacuuucuauagguugggauuu

SEQ ID NO: 767687 - RNA, 22 nt, Human
uucuggagauugagaaggcauu

SEQ ID NO: 767688 - RNA, 22 nt, Human
aauaagcaagccugugugcaag

SEQ ID NO: 767689 - RNA, 22 nt, Human
uaugaugggaggaauggaauuu

SEQ ID NO: 767690 - RNA, 22 nt, Human
gcuuccuguccaggccccacau

SEQ ID NO: 767691 - RNA, 22 nt, Human
guaccugggggauccacuucuu

SEQ ID NO: 767692 - RNA, 22 nt, Human
auagagugauguaagguaugug

SEQ ID NO: 767693 - RNA, 22 nt, Human
aggaugggucagcuagagucca

SEQ ID NO: 767694 - RNA, 22 nt, Human
aaauuccugucauuugcacuuu

SEQ ID NO: 767695 - RNA, 22 nt, Human
ucucccaguccucugugcuuac

SEQ ID NO: 767696 - RNA, 22 nt, Human
cuaggaaucaccaagauucuag

SEQ ID NO: 767697 - RNA, 19 nt, Human
acuuguuuuggaggugaug

SEQ ID NO: 767698 - RNA, 20 nt, Human
aagagcccgcagggcagugc

SEQ ID NO: 767699 - RNA, 22 nt, Human
ugacaugaaacuguguugcuac

SEQ ID NO: 767700 - RNA, 22 nt, Human
uucaaauacauucuuugccacu

SEQ ID NO: 767701 - RNA, 22 nt, Human
ccucagaugucuuaaggcacug

SEQ ID NO: 767702 - RNA, 22 nt, Human
auuaagcugguccagacaaguu

SEQ ID NO: 767703 - RNA, 22 nt, Human
guuguauucuucaauaucagag

SEQ ID NO: 767704 - RNA, 19 nt, Human
gggaccugacuaauuggca

SEQ ID NO: 767705 - RNA, 22 nt, Human
gagggcuuguaaguggguggag

SEQ ID NO: 767706 - RNA, 22 nt, Human
caucuuuggagaaacuuccguu

SEQ ID NO: 767707 - RNA, 22 nt, Human
aacacugugcuccccaggcugu

SEQ ID NO: 767708 - RNA, 18 nt, Human
uuucacaaccuccagagg

SEQ ID NO: 767709 - RNA, 22 nt, Human
uggcuggaauggagcugagccu

SEQ ID NO: 767710 - RNA, 22 nt, Human
cuguauguuucuaugaauguga

SEQ ID NO: 767711 - RNA, 22 nt, Human
ugagaaagugggugccuagcaa

SEQ ID NO: 767712 - RNA, 21 nt, Human
aaauguguuccauaaugcuuu

SEQ ID NO: 767713 - RNA, 22 nt, Human
caagggaauugugugugagagg

SEQ ID NO: 767714 - RNA, 22 nt, Human
agcaccaucacagcuguauguc

SEQ ID NO: 767715 - RNA, 22 nt, Human
ccacuguauaagcaaaaugaaa

SEQ ID NO: 767716 - RNA, 22 nt, Human
aagguccuuuugcagugugauc

SEQ ID NO: 767717 - RNA, 22 nt, Human
ugcauuucuuuugaguauaugc

SEQ ID NO: 767718 - RNA, 22 nt, Human
gcugucacaagcaucuggggca

SEQ ID NO: 767719 - RNA, 22 nt, Human
agggcucaccacugugcacucc

SEQ ID NO: 767720 - RNA, 22 nt, Human
caagcagacaguaggccuagaa

SEQ ID NO: 767721 - RNA, 22 nt, Human
uuaaauuccagccucauaauag

SEQ ID NO: 767722 - RNA, 22 nt, Human
uaccuggacaucagagagacac

SEQ ID NO: 767723 - RNA, 22 nt, Human
cccagccaaggugcugguguug

SEQ ID NO: 767724 - RNA, 22 nt, Human
aguguguagcacaugguaagca

SEQ ID NO: 767725 - RNA, 22 nt, Human
agagacugcaaugagugguagg

SEQ ID NO: 767726 - RNA, 22 nt, Human
uggcauguugagaggcaagauu

SEQ ID NO: 767727 - RNA, 22 nt, Human
guggccaguggugggcgcccug

SEQ ID NO: 767728 - RNA, 21 nt, Human
cucuuugggaucuuuggaaag

SEQ ID NO: 767729 - RNA, 22 nt, Human
gcaugcaguaaaauucagcaac

SEQ ID NO: 767730 - RNA, 22 nt, Human
uauuucugauugcucaugaggc

SEQ ID NO: 767731 - RNA, 17 nt, Human
gcagccagugcagcagg

SEQ ID NO: 767732 - RNA, 22 nt, Human
cucccucucaccggagcccugg

SEQ ID NO: 767733 - RNA, 22 nt, Human
gcauucuuuccacgaggaggua

SEQ ID NO: 767734 - RNA, 22 nt, Human
gcuggccucaucacugacuucu

SEQ ID NO: 767735 - RNA, 22 nt, Human
augcauauaaggcacauguauu

SEQ ID NO: 767736 - RNA, 22 nt, Human
aggcaaagaggauauuuugggg

SEQ ID NO: 767737 - RNA, 22 nt, Human
uggcagagaaccugggcuuugu

SEQ ID NO: 767738 - RNA, 17 nt, Human
uuuucucucuuggauuc

SEQ ID NO: 767739 - RNA, 22 nt, Human
aguccccucucgcuuggcugag

SEQ ID NO: 767740 - RNA, 22 nt, Human
acagaagaccaagaaagcuucc

SEQ ID NO: 767741 - RNA, 22 nt, Human
acauuugacucuguucauauua

SEQ ID NO: 767742 - RNA, 22 nt, Human
ugacugccccuuccauuccugc

SEQ ID NO: 767743 - RNA, 22 nt, Human
aacacuuugggcauggccuucc

SEQ ID NO: 767744 - RNA, 22 nt, Human
cugagccuguguuucucuggca

SEQ ID NO: 767745 - RNA, 22 nt, Human
uguggccuuucaaggauggaau

SEQ ID NO: 767746 - RNA, 22 nt, Human
ccugugcaugccaggguacacc

SEQ ID NO: 767747 - RNA, 22 nt, Human
uucauauuuucugcuugcucac

SEQ ID NO: 767748 - RNA, 22 nt, Human
uugcacuccagcccgagcaaca

SEQ ID NO: 767749 - RNA, 22 nt, Human
acagacuguuggccuacugagc

SEQ ID NO: 767750 - RNA, 22 nt, Human
cagaggcccagugagagggcug

SEQ ID NO: 767751 - RNA, 22 nt, Human
cugccuggacagcucuuaccuu

SEQ ID NO: 767752 - RNA, 22 nt, Human
ugaggcccucugggcugguccu

SEQ ID NO: 767753 - RNA, 22 nt, Human
uggaaaacauugagauaccaag

SEQ ID NO: 767754 - RNA, 17 nt, Human
gcaguggagggguaguu

SEQ ID NO: 767755 - RNA, 22 nt, Human
cuccagagacacuucucaugau

SEQ ID NO: 767756 - RNA, 22 nt, Human
accagcucuuucuuuucacuau

SEQ ID NO: 767757 - RNA, 22 nt, Human
guccagagagaucuucugauag

SEQ ID NO: 767758 - RNA, 22 nt, Human
agcaaagacagggacgaccaag

SEQ ID NO: 767759 - RNA, 22 nt, Human
uaggccacgaaggagaugauag

SEQ ID NO: 767760 - RNA, 22 nt, Human
cccagcucucugcucuuagccu

SEQ ID NO: 767761 - RNA, 22 nt, Human
uauagacuagcagcagaauuua

SEQ ID NO: 767762 - RNA, 22 nt, Human
guagggacccacagucuauauu

SEQ ID NO: 767763 - RNA, 22 nt, Human
ugcuggagcuccgggcuguagg

SEQ ID NO: 767764 - RNA, 20 nt, Human
gacagcuuggggugucaccu

SEQ ID NO: 767765 - RNA, 22 nt, Human
gguccucucccaagagcgcauc

SEQ ID NO: 767766 - RNA, 22 nt, Human
caggcagacauuuuugacauag

SEQ ID NO: 767767 - RNA, 22 nt, Human
cuggauuuaauuaacuguugcu

SEQ ID NO: 767768 - RNA, 22 nt, Human
ucugugugauuucagggaaguc

SEQ ID NO: 767769 - RNA, 22 nt, Human
ccaguuuuuccagugcuuucug

SEQ ID NO: 767770 - RNA, 22 nt, Human
ccaggagcagauauggacauaa

SEQ ID NO: 767771 - RNA, 22 nt, Human
aggcagguguuaacccucugag

SEQ ID NO: 767772 - RNA, 22 nt, Human
ccuggcucaguguugaaggggu

SEQ ID NO: 767773 - RNA, 22 nt, Human
gccaggaaugcauaaaugaccu

SEQ ID NO: 767774 - RNA, 19 nt, Human
aaagaacuuugggcuaggc

SEQ ID NO: 767775 - RNA, 22 nt, Human
ugggcacagaauagauggccca

SEQ ID NO: 767776 - RNA, 22 nt, Human
guguggcuaggauggcuuugcu

SEQ ID NO: 767777 - RNA, 22 nt, Human
ggggcagagcauagcuccaauu

SEQ ID NO: 767778 - RNA, 22 nt, Human
guuucuaaauguucugaguuuu

SEQ ID NO: 767779 - RNA, 22 nt, Human
accugaggcuguuagucuaggu

SEQ ID NO: 767780 - RNA, 22 nt, Human
caagugucuauaucagugcuug

SEQ ID NO: 767781 - RNA, 22 nt, Human
cagguccacggcgcccaggggu

SEQ ID NO: 767782 - RNA, 22 nt, Human
gcagugaaacaauaggaucaaa

SEQ ID NO: 767783 - RNA, 22 nt, Human
caugcuuuaccaaagcagugau

SEQ ID NO: 767784 - RNA, 19 nt, Human
caggugguaaucugagccu

SEQ ID NO: 767785 - RNA, 20 nt, Human
gaagauggguagaggcacag

SEQ ID NO: 767786 - RNA, 21 nt, Human
uauugucaaucugcuuucaga

SEQ ID NO: 767787 - RNA, 22 nt, Human
cugcuucacuucgguugcauag

SEQ ID NO: 767788 - RNA, 22 nt, Human
accucaggauguggacacagaa

SEQ ID NO: 767789 - RNA, 22 nt, Human
uggcuggaauauguggagacca

SEQ ID NO: 767790 - RNA, 22 nt, Human
auugaucaugcagaugcuucac

SEQ ID NO: 767791 - RNA, 21 nt, Human
gaaagcacagaaaggacucuu

SEQ ID NO: 767792 - RNA, 22 nt, Human
uuccuguucaggaaaguugugu

SEQ ID NO: 767793 - RNA, 22 nt, Human
accagcugccuggucuaucugc

SEQ ID NO: 767794 - RNA, 22 nt, Human
ugucacaauuuauuucucuuga

SEQ ID NO: 767795 - RNA, 22 nt, Human
gggcuggaugggagccuuggcc

SEQ ID NO: 767796 - RNA, 19 nt, Human
uggaaaauggauugaauca

SEQ ID NO: 767797 - RNA, 22 nt, Human
caggcuggagugcaauggugcu

SEQ ID NO: 767798 - RNA, 22 nt, Human
cauggcuuagaaguuccagccc

SEQ ID NO: 767799 - RNA, 22 nt, Human
aaauagauuuccuagcauugga

SEQ ID NO: 767800 - RNA, 22 nt, Human
aagcagccaccucaucuccacu

SEQ ID NO: 767801 - RNA, 22 nt, Human
ugcccugcuguggcucugccca

SEQ ID NO: 767802 - RNA, 22 nt, Human
ccagcuggugacauccccaacc

SEQ ID NO: 767803 - RNA, 22 nt, Human
cccaguggugcuggcaucugug

SEQ ID NO: 767804 - RNA, 22 nt, Human
ugguggaccuggcauugaaccu

SEQ ID NO: 767805 - RNA, 22 nt, Human
acgaugagauggggcuggaagg

SEQ ID NO: 767806 - RNA, 22 nt, Human
gggucugggcaggcgcuuccuc

SEQ ID NO: 767807 - RNA, 22 nt, Human
aaauguacugauacuuauuuua

SEQ ID NO: 767808 - RNA, 22 nt, Human
gagcugggcuggcuuccucccu

SEQ ID NO: 767809 - RNA, 22 nt, Human
ggguacagaaacugaggcuuag

SEQ ID NO: 767810 - RNA, 22 nt, Human
uuccuggggcuuagcaauggag

SEQ ID NO: 767811 - RNA, 22 nt, Human
cugcugagguccuugcucagac

SEQ ID NO: 767812 - RNA, 22 nt, Human
uccuuagguauuuagcaugaau

SEQ ID NO: 767813 - RNA, 22 nt, Human
ucaguggauauuucuguggcug

SEQ ID NO: 767814 - RNA, 22 nt, Human
uacauguguucuguuucaaguu

SEQ ID NO: 767815 - RNA, 22 nt, Human
gcagagccccucaagccagccu

SEQ ID NO: 767816 - RNA, 22 nt, Human
acaucugacaugaucuucagua

SEQ ID NO: 767817 - RNA, 22 nt, Human
ugcacagagcaggcaccagcgg

SEQ ID NO: 767818 - RNA, 22 nt, Human
cccagggcuugagucauccaug

SEQ ID NO: 767819 - RNA, 22 nt, Human
gaaguuaccgaaccucuccaug

SEQ ID NO: 767820 - RNA, 22 nt, Human
ugcauacugaacagcaugcuaa

SEQ ID NO: 767821 - RNA, 22 nt, Human
augcauauuuucuguuggugac

SEQ ID NO: 767822 - RNA, 22 nt, Human
cuggacaucagugugccuggcu

SEQ ID NO: 767823 - RNA, 22 nt, Human
uacaaagucacauugaaaugaa

SEQ ID NO: 767824 - RNA, 22 nt, Human
uugggcugaaguagagggcaga

SEQ ID NO: 767825 - RNA, 22 nt, Human
auguaacauugaauuauauagu

SEQ ID NO: 767826 - RNA, 22 nt, Human
uacuuacagagcuuauaaguua

SEQ ID NO: 767827 - RNA, 22 nt, Human
augcacagauccccaggacccu

SEQ ID NO: 767828 - RNA, 22 nt, Human
gucccaggcuccauggcagcca

SEQ ID NO: 767829 - RNA, 22 nt, Human
gggcagcagaauuggacagaaa

SEQ ID NO: 767830 - RNA, 22 nt, Human
cuucaagaagacagcagagcau

SEQ ID NO: 767831 - RNA, 22 nt, Human
cuuugaauuaacgacacaagug

SEQ ID NO: 767832 - RNA, 22 nt, Human
ugcaaccugacccagccagccc

SEQ ID NO: 767833 - RNA, 22 nt, Human
auguggcugccaccugccugaa

SEQ ID NO: 767834 - RNA, 22 nt, Human
guucacaguuucuaaucccagc

SEQ ID NO: 767835 - RNA, 22 nt, Human
augaagauaagaccaggcugga

SEQ ID NO: 767836 - RNA, 22 nt, Human
gaggagguuccggguggagaag

SEQ ID NO: 767837 - RNA, 22 nt, Human
caggugacuucugaggccuuca

SEQ ID NO: 767838 - RNA, 22 nt, Human
ucccagcacgucugcuguuucu

SEQ ID NO: 767839 - RNA, 22 nt, Human
ucugagguaccagcugguuuau

SEQ ID NO: 767840 - RNA, 22 nt, Human
caggaacaauguaagucucauu

SEQ ID NO: 767841 - RNA, 22 nt, Human
uggagcagaggaagaaggcuuu

SEQ ID NO: 767842 - RNA, 22 nt, Human
cccaggaggcagaaguugcagu

SEQ ID NO: 767843 - RNA, 22 nt, Human
aagagguuucaugauuuucuua

SEQ ID NO: 767844 - RNA, 22 nt, Human
guagacagaaagcggaaucaua

SEQ ID NO: 767845 - RNA, 22 nt, Human
auaugcuauugcuguaauuuaa

SEQ ID NO: 767846 - RNA, 22 nt, Human
augugggccgugcggguguccu

SEQ ID NO: 767847 - RNA, 22 nt, Human
cugaaaagcuuugaaccguuaa

SEQ ID NO: 767848 - RNA, 18 nt, Human
acacagguuauucucucc

SEQ ID NO: 767849 - RNA, 22 nt, Human
aacacagaguauuugaagcauu

SEQ ID NO: 767850 - RNA, 22 nt, Human
auuguuaacuauagcaucuggu

SEQ ID NO: 767851 - RNA, 22 nt, Human
uucucagauccaucagaagucc

SEQ ID NO: 767852 - RNA, 22 nt, Human
gcaguguuaggaauaaaaauga

SEQ ID NO: 767853 - RNA, 22 nt, Human
aggucacaggcuuugaaaucaa

SEQ ID NO: 767854 - RNA, 22 nt, Human
guacaaaugagaguucuguuuu

SEQ ID NO: 767855 - RNA, 22 nt, Human
aggggaugccuaguggagucuc

SEQ ID NO: 767856 - RNA, 22 nt, Human
ugccgugcccauauugugggug

SEQ ID NO: 767857 - RNA, 22 nt, Human
agcagagguuuguuggaaaccu

SEQ ID NO: 767858 - RNA, 21 nt, Human
ggcaagaaacacaaucaagua

SEQ ID NO: 767859 - RNA, 22 nt, Human
gagcuguggaaggcagggacca

SEQ ID NO: 767860 - RNA, 22 nt, Human
aaggcucccucuucucgagugu

SEQ ID NO: 767861 - RNA, 22 nt, Human
cugggugaguugaugaaggaga

SEQ ID NO: 767862 - RNA, 22 nt, Human
acauacuuaacauuaaagucau

SEQ ID NO: 767863 - RNA, 22 nt, Human
uccugggauucugcauuucuaa

SEQ ID NO: 767864 - RNA, 22 nt, Human
ucuauccugcuuagaaguaugu

SEQ ID NO: 767865 - RNA, 22 nt, Human
gaaggaagcugucuggaugugu

SEQ ID NO: 767866 - RNA, 18 nt, Human
uauaaacacacuuagguu

SEQ ID NO: 767867 - RNA, 22 nt, Human
gaaagaguaugggagcuuuacu

SEQ ID NO: 767868 - RNA, 22 nt, Human
uauuucacauaccacagagugu

SEQ ID NO: 767869 - RNA, 22 nt, Human
uugaucuuuauaauaguuuuga

SEQ ID NO: 767870 - RNA, 22 nt, Human
gaaucaauugugaagacuauga

SEQ ID NO: 767871 - RNA, 22 nt, Human
augcagcuauuugagcauguca

SEQ ID NO: 767872 - RNA, 22 nt, Human
ugcuuuaaccaucuuguuugga

SEQ ID NO: 767873 - RNA, 22 nt, Human
cuuuacagugaacuugcuuguc

SEQ ID NO: 767874 - RNA, 22 nt, Human
gucauuguguggacauggagaa

SEQ ID NO: 767875 - RNA, 22 nt, Human
ggggcugagaauucagucucgg

SEQ ID NO: 767876 - RNA, 22 nt, Human
gccuggcacauugcaguggauu

SEQ ID NO: 767877 - RNA, 22 nt, Human
caaauguguagagcuuuugggg

SEQ ID NO: 767878 - RNA, 22 nt, Human
ucuccaucugucauucuugucc

SEQ ID NO: 767879 - RNA, 22 nt, Human
aaugaagcaagcugcuguguuu

SEQ ID NO: 767880 - RNA, 22 nt, Human
agcugcccugggcuggagaugg

SEQ ID NO: 767881 - RNA, 22 nt, Human
ugggagagucuaaaaccgaggu

SEQ ID NO: 767882 - RNA, 23 nt, Human
gguccaggaaaggcagcagcacc

SEQ ID NO: 767883 - RNA, 22 nt, Human
caaauuuagguaacagucugua

SEQ ID NO: 767884 - RNA, 22 nt, Human
gcacagcagacuugguggggcu

SEQ ID NO: 767885 - RNA, 23 nt, Human
gcugucaguuguuuuugucucua

SEQ ID NO: 767886 - RNA, 22 nt, Human
cucuggagcauuucaccuacau

SEQ ID NO: 767887 - RNA, 22 nt, Human
cuuuguggcuccugcaggccau

SEQ ID NO: 767888 - RNA, 22 nt, Human
agggcugcccagugugagagcu

SEQ ID NO: 767889 - RNA, 22 nt, Human
ccaggagcuggagggugcagug

SEQ ID NO: 767890 - RNA, 22 nt, Human
ccaaggcuguggggcugugcag

SEQ ID NO: 767891 - RNA, 22 nt, Human
ucaguguuugaacccaggguua

SEQ ID NO: 767892 - RNA, 23 nt, Human
cccagcuuucccacugccgagag

SEQ ID NO: 767893 - RNA, 22 nt, Human
cuacagaaguuucccuugcuua

SEQ ID NO: 767894 - RNA, 22 nt, Human
cccagagcucagugugcaaggu

SEQ ID NO: 767895 - RNA, 22 nt, Human
ugggcugcugcggugcucuugg

SEQ ID NO: 767896 - RNA, 22 nt, Human
uggaacaaggguucauuuaaau

SEQ ID NO: 767897 - RNA, 22 nt, Human
auuuaguguguauugcuauuau

SEQ ID NO: 767898 - RNA, 22 nt, Human
ccuugcguuuuacagcuucuag

SEQ ID NO: 767899 - RNA, 22 nt, Human
cacuauuuucucuucagauggc

SEQ ID NO: 767900 - RNA, 22 nt, Human
cagaggcuaagaguguccaaag

SEQ ID NO: 767901 - RNA, 22 nt, Human
cuguccccugugcuuucacuug

SEQ ID NO: 767902 - RNA, 22 nt, Human
auauaucugcaguacugaagaa

SEQ ID NO: 767903 - RNA, 22 nt, Human
auccacuccuggaggugcccca

SEQ ID NO: 767904 - RNA, 22 nt, Human
ugagggugggcccugggcaucu

SEQ ID NO: 767905 - RNA, 22 nt, Human
caagaaauguuuacugagcauc

SEQ ID NO: 767906 - RNA, 20 nt, Human
aacagucaaauguugauugc

SEQ ID NO: 767907 - RNA, 23 nt, Human
agcaacagugggugaguguugcu

SEQ ID NO: 767908 - RNA, 22 nt, Human
agacaaagaaaccguagaagca

SEQ ID NO: 767909 - RNA, 22 nt, Human
ugagagcugccacgugaccaug

SEQ ID NO: 767910 - RNA, 22 nt, Human
gauuuugucaaauuccaaaugu

SEQ ID NO: 767911 - RNA, 22 nt, Human
auauugaucuuggaacugauuu

SEQ ID NO: 767912 - RNA, 22 nt, Human
agcugcugguuuaagggauggg

SEQ ID NO: 767913 - RNA, 22 nt, Human
acuugauuuugaaccuuucuac

SEQ ID NO: 767914 - RNA, 22 nt, Human
caguacacaagcuuucauguau

SEQ ID NO: 767915 - RNA, 22 nt, Human
aacauuuaugauugagguaaau

SEQ ID NO: 767916 - RNA, 22 nt, Human
gggucugaggaguaccauuguc

SEQ ID NO: 767917 - RNA, 22 nt, Human
uccaggcccacucgguggggcu

SEQ ID NO: 767918 - RNA, 22 nt, Human
ucaaaucucacucugcauuucu

SEQ ID NO: 767919 - RNA, 22 nt, Human
aauaagaauugccagauuugaa

SEQ ID NO: 767920 - RNA, 17 nt, Human
ggaccagggguugccau

SEQ ID NO: 767921 - RNA, 18 nt, Human
uccuuucaccccuucucu

SEQ ID NO: 767922 - RNA, 22 nt, Human
cuggcagugcccagucacuguu

SEQ ID NO: 767923 - RNA, 22 nt, Human
cuggcucaguucuugguuuuca

SEQ ID NO: 767924 - RNA, 22 nt, Human
acaagugugugcaguuuguaaa

SEQ ID NO: 767925 - RNA, 22 nt, Human
augaaugagaaagcugaaaucu

SEQ ID NO: 767926 - RNA, 22 nt, Human
gguccaggggguagauauguga

SEQ ID NO: 767927 - RNA, 22 nt, Human
caugaaaucugaguauguuucc

SEQ ID NO: 767928 - RNA, 22 nt, Human
uuccagcaggguacuuguaauu

SEQ ID NO: 767929 - RNA, 21 nt, Human
ugaggaugugcagcagcagga

SEQ ID NO: 767930 - RNA, 19 nt, Human
ucuagacaccaaaguuguc

SEQ ID NO: 767931 - RNA, 22 nt, Human
ggcuuccuggagaaggucugag

SEQ ID NO: 767932 - RNA, 22 nt, Human
auugagaaugaagggacauuuu

SEQ ID NO: 767933 - RNA, 22 nt, Human
uuccuguguguugguggcagaa

SEQ ID NO: 767934 - RNA, 22 nt, Human
uucacagaugccugaugugugg

SEQ ID NO: 767935 - RNA, 22 nt, Human
cuuucucuguguuucacaugcu

SEQ ID NO: 767936 - RNA, 22 nt, Human
agucuguguauauucacugccc

SEQ ID NO: 767937 - RNA, 22 nt, Human
aauggaaccuaguuauccacau

SEQ ID NO: 767938 - RNA, 22 nt, Human
ggaucgcggucccggcccgcgc

SEQ ID NO: 767939 - RNA, 22 nt, Human
agcugcuguuuggugagucuug

SEQ ID NO: 767940 - RNA, 22 nt, Human
uaacaguauauuuaccaaaccu

SEQ ID NO: 767941 - RNA, 22 nt, Human
uaaagugcuggauuugaguaaa

SEQ ID NO: 767942 - RNA, 20 nt, Human
accuggcuuccucuuggcau

SEQ ID NO: 767943 - RNA, 23 nt, Human
ucaucuguaaguaucuguggagu

SEQ ID NO: 767944 - RNA, 19 nt, Human
ccauggcaaugaucugaug

SEQ ID NO: 767945 - RNA, 22 nt, Human
agcugguguccuccuggagcug

SEQ ID NO: 767946 - RNA, 22 nt, Human
gaggucaggcuugcagcagggu

SEQ ID NO: 767947 - RNA, 22 nt, Human
agaaaccagacuuggcccauuu

SEQ ID NO: 767948 - RNA, 22 nt, Human
aaaguguaaggaauuuaaguaa

SEQ ID NO: 767949 - RNA, 22 nt, Human
gugggugauguacuggaggcca

SEQ ID NO: 767950 - RNA, 22 nt, Human
uccaggcauagaaggcacgcac

SEQ ID NO: 767951 - RNA, 22 nt, Human
cacuuuauauucuaagacggcc

SEQ ID NO: 767952 - RNA, 22 nt, Human
ugaacuuuugcacagaggauuu

SEQ ID NO: 767953 - RNA, 22 nt, Human
guuuucagccaggagcacauuu

SEQ ID NO: 767954 - RNA, 22 nt, Human
uuuaaacaaauaggauugccua

SEQ ID NO: 767955 - RNA, 22 nt, Human
gaugucuuggucaacuugggcu

SEQ ID NO: 767956 - RNA, 22 nt, Human
agacugggguucuggcaaggag

SEQ ID NO: 767957 - RNA, 19 nt, Human
ggagaggcuggagggaugc

SEQ ID NO: 767958 - RNA, 22 nt, Human
cuguccugugucagccugaaau

SEQ ID NO: 767959 - RNA, 22 nt, Human
uggugggggaggcugucuagca

SEQ ID NO: 767960 - RNA, 22 nt, Human
gggcuguguacuaugaggaggg

SEQ ID NO: 767961 - RNA, 22 nt, Human
gggaccugggccagaggacagu

SEQ ID NO: 767962 - RNA, 22 nt, Human
cucacagagcucauacugggag

SEQ ID NO: 767963 - RNA, 22 nt, Human
aggccacacaacucuuagagau

SEQ ID NO: 767964 - RNA, 22 nt, Human
auguauguaugcugugcuugca

SEQ ID NO: 767965 - RNA, 22 nt, Human
aaagugcacucucagugcugcu

SEQ ID NO: 767966 - RNA, 22 nt, Human
gagccauuguccaagccuguuu

SEQ ID NO: 767967 - RNA, 17 nt, Human
gucagcagcuugcuugu

SEQ ID NO: 767968 - RNA, 22 nt, Human
uaugcagcaccacucacugcag

SEQ ID NO: 767969 - RNA, 22 nt, Human
gaccacagaggugugggagaga

SEQ ID NO: 767970 - RNA, 22 nt, Human
acugauaaguugcuugcucuca

SEQ ID NO: 767971 - RNA, 22 nt, Human
aagaauaaguagaugggagaag

SEQ ID NO: 767972 - RNA, 22 nt, Human
ucuggcucaggagcuguguuca

SEQ ID NO: 767973 - RNA, 22 nt, Human
auucagaagcaaucacagugag

SEQ ID NO: 767974 - RNA, 22 nt, Human
uggccugggccugccggugcaa

SEQ ID NO: 767975 - RNA, 22 nt, Human
auguagaauuccuucuacuuug

SEQ ID NO: 767976 - RNA, 22 nt, Human
acuaguauaauugcccuaaccu

SEQ ID NO: 767977 - RNA, 22 nt, Human
uaaaaucagccgaccauggugg

SEQ ID NO: 767978 - RNA, 22 nt, Human
gccacccuuaucccaugcuucu

SEQ ID NO: 767979 - RNA, 21 nt, Human
ugcuccaggagggggcagucc

SEQ ID NO: 767980 - RNA, 22 nt, Human
auuguugggucucacuccuaga

SEQ ID NO: 767981 - RNA, 22 nt, Human
auguuuccuguuggauuggccc

SEQ ID NO: 767982 - RNA, 22 nt, Human
cacacagacagcucucugaaga

SEQ ID NO: 767983 - RNA, 22 nt, Human
augggcagagcuggugggaggc

SEQ ID NO: 767984 - RNA, 22 nt, Human
gcccugagaaugugugugucua

SEQ ID NO: 767985 - RNA, 22 nt, Human
ugucauuuaauagauaugaugg

SEQ ID NO: 767986 - RNA, 22 nt, Human
uauguguuauuugguauacauu

SEQ ID NO: 767987 - RNA, 22 nt, Human
ggcaucucggaacacgccuccg

SEQ ID NO: 767988 - RNA, 20 nt, Human
agaguagagguagauuuaug

SEQ ID NO: 767989 - RNA, 22 nt, Human
uuauuugugaaucauuuaucua

SEQ ID NO: 767990 - RNA, 22 nt, Human
cuccaguaucuguaggaaaagg

SEQ ID NO: 767991 - RNA, 22 nt, Human
gagacacuugcugugaggucgc

SEQ ID NO: 767992 - RNA, 22 nt, Human
cugggcuguaauguggcacuga

SEQ ID NO: 767993 - RNA, 22 nt, Human
ugcccauguuucucuguauccc

SEQ ID NO: 767994 - RNA, 23 nt, Human
ucaaacagguuucagagcaucuu

SEQ ID NO: 767995 - RNA, 22 nt, Human
aaguccaaggcugggugcagug

SEQ ID NO: 767996 - RNA, 22 nt, Human
guucaaauggcugcaguuacca

SEQ ID NO: 767997 - RNA, 22 nt, Human
ucuggccacuugcuucacacug

SEQ ID NO: 767998 - RNA, 22 nt, Human
auguuagaaucucugaaugugg

SEQ ID NO: 767999 - RNA, 22 nt, Human
uggcugagggggcucugcucag

SEQ ID NO: 768000 - RNA, 22 nt, Human
gcagggcuguggacacuuuggu

SEQ ID NO: 768001 - RNA, 20 nt, Human
aauaaacuacugagagaugu

SEQ ID NO: 768002 - RNA, 22 nt, Human
cacagcuggggaagcugaggcc

SEQ ID NO: 768003 - RNA, 22 nt, Human
ucuuugaucagccuuucacuga

SEQ ID NO: 768004 - RNA, 22 nt, Human
uaagaacaguguuucaucucua

SEQ ID NO: 768005 - RNA, 22 nt, Human
ucuuuguaaguuauauguagua

SEQ ID NO: 768006 - RNA, 22 nt, Human
uccuccaggauaaaauguguug

SEQ ID NO: 768007 - RNA, 22 nt, Human
aaggaagagaauccuucucaga

SEQ ID NO: 768008 - RNA, 22 nt, Human
ugcauauuguccuugauauuau

SEQ ID NO: 768009 - RNA, 22 nt, Human
uguggcccagaugagugugcua

SEQ ID NO: 768010 - RNA, 22 nt, Human
uucucugguaaacacaugcgua

SEQ ID NO: 768011 - RNA, 22 nt, Human
aauuaauauuuguggaauuaau

SEQ ID NO: 768012 - RNA, 22 nt, Human
uagcuaggguaagacuuggacc

SEQ ID NO: 768013 - RNA, 22 nt, Human
gugaauauucuuugugcaguau

SEQ ID NO: 768014 - RNA, 22 nt, Human
uuugacucaagccuuucuuuag

SEQ ID NO: 768015 - RNA, 22 nt, Human
agggcugaugcaccauguagcc

SEQ ID NO: 768016 - RNA, 22 nt, Human
gcuggccauggggagugaggag

SEQ ID NO: 768017 - RNA, 22 nt, Human
ugauguaagagauacacuugau

SEQ ID NO: 768018 - RNA, 23 nt, Human
uuuggacuugugacucuucuccu

SEQ ID NO: 768019 - RNA, 22 nt, Human
uuucuucagagagagcuuuccc

SEQ ID NO: 768020 - RNA, 22 nt, Human
cagagucccagaugccccuccu

SEQ ID NO: 768021 - RNA, 22 nt, Human
uuugacaaauaggggaauaagg

SEQ ID NO: 768022 - RNA, 22 nt, Human
ugugaggagggucaaacugagu

SEQ ID NO: 768023 - RNA, 23 nt, Human
caaaccuguuucucucaccuguc

SEQ ID NO: 768024 - RNA, 22 nt, Human
ggcaccaggaucagucugucau

SEQ ID NO: 768025 - RNA, 22 nt, Human
cagugucuacaguggcuggagg

SEQ ID NO: 768026 - RNA, 22 nt, Human
cuggagugaggucugggagccu

SEQ ID NO: 768027 - RNA, 22 nt, Human
aggccagcaugcaguucuaagg

SEQ ID NO: 768028 - RNA, 22 nt, Human
agggcccaguggagagcugagc

SEQ ID NO: 768029 - RNA, 22 nt, Human
uuguucuuuauccuggaagccu

SEQ ID NO: 768030 - RNA, 22 nt, Human
auccaaaauuuacuguagcauu

SEQ ID NO: 768031 - RNA, 22 nt, Human
ugagguucaguucuuggccaca

SEQ ID NO: 768032 - RNA, 22 nt, Human
uuucuguggauuuuccauucaa

SEQ ID NO: 768033 - RNA, 21 nt, Human
acucaaguggagaugccaggu

SEQ ID NO: 768034 - RNA, 22 nt, Human
uccucaucucggaaccugccac

SEQ ID NO: 768035 - RNA, 22 nt, Human
caggcuccacuguaggcagcuc

SEQ ID NO: 768036 - RNA, 22 nt, Human
aagauguaaaggcaauauaaag

SEQ ID NO: 768037 - RNA, 22 nt, Human
uggcucucuacaggucaagacc

SEQ ID NO: 768038 - RNA, 22 nt, Human
uagcaaagaccaaagcuaguug

SEQ ID NO: 768039 - RNA, 22 nt, Human
auacuucuuugauguucacagg

SEQ ID NO: 768040 - RNA, 22 nt, Human
agacaaauaacuuuuuaugucc

SEQ ID NO: 768041 - RNA, 22 nt, Human
gagaugcuuuguguauagacaa

SEQ ID NO: 768042 - RNA, 22 nt, Human
uagaaacuagauugauagcgga

SEQ ID NO: 768043 - RNA, 22 nt, Human
gcugcugggcacccccugagcu

SEQ ID NO: 768044 - RNA, 22 nt, Human
uuccugaagucaaagaucuaaa

SEQ ID NO: 768045 - RNA, 22 nt, Human
cguagguggcucagcaccuggg

SEQ ID NO: 768046 - RNA, 20 nt, Human
aauccugggacagaggcagg

SEQ ID NO: 768047 - RNA, 22 nt, Human
aggugggcacuccgcucgaggu

SEQ ID NO: 768048 - RNA, 22 nt, Human
agaguagccucauagacacuca

SEQ ID NO: 768049 - RNA, 22 nt, Human
uuuccugugcuuaacaaauauu

SEQ ID NO: 768050 - RNA, 22 nt, Human
ggcucuggagacauguggagag

SEQ ID NO: 768051 - RNA, 22 nt, Human
caaagucccagcugcuuagaga

SEQ ID NO: 768052 - RNA, 22 nt, Human
ugcugaagggaaggucuugaau

SEQ ID NO: 768053 - RNA, 22 nt, Human
acauccagaucucagcauggcu

SEQ ID NO: 768054 - RNA, 22 nt, Human
ggaaagagggacccagcuuggu

SEQ ID NO: 768055 - RNA, 19 nt, Human
gccacuccugaugcugccc

SEQ ID NO: 768056 - RNA, 22 nt, Human
auugaacagaaaaacucagaga

SEQ ID NO: 768057 - RNA, 18 nt, Human
uuuauuccugcccccagc

SEQ ID NO: 768058 - RNA, 18 nt, Human
uagagggggccugggcau

SEQ ID NO: 768059 - RNA, 22 nt, Human
cucugggcaaguuucuucauga

SEQ ID NO: 768060 - RNA, 22 nt, Human
caugucaacaggcccagaaaau

SEQ ID NO: 768061 - RNA, 22 nt, Human
ugcagaagcagagaguugccaa

SEQ ID NO: 768062 - RNA, 22 nt, Human
uauuccaaugucaguuauauca

SEQ ID NO: 768063 - RNA, 20 nt, Human
auccuuaaagagaauuucua

SEQ ID NO: 768064 - RNA, 17 nt, Human
acacagagauuaacaca

SEQ ID NO: 768065 - RNA, 22 nt, Human
uaggagaggugaauggcacacu

SEQ ID NO: 768066 - RNA, 22 nt, Human
caggcugcuccaggguaggaaa

SEQ ID NO: 768067 - RNA, 22 nt, Human
uugauucuggugacugauggaa

SEQ ID NO: 768068 - RNA, 22 nt, Human
caggaggaagaacucugcaaca

SEQ ID NO: 768069 - RNA, 22 nt, Human
ggaacuggagaaugcccucuuu

SEQ ID NO: 768070 - RNA, 22 nt, Human
aagcagcagccaucccccaagg

SEQ ID NO: 768071 - RNA, 22 nt, Human
cccagaaugauucagcgacagu

SEQ ID NO: 768072 - RNA, 22 nt, Human
gcuggccugucuagagccuuac

SEQ ID NO: 768073 - RNA, 22 nt, Human
ggccagcugccaccagcccuau

SEQ ID NO: 768074 - RNA, 22 nt, Human
agagcugugaaaaugagguuug

SEQ ID NO: 768075 - RNA, 22 nt, Human
aaaguguacuaugucaugaaca

SEQ ID NO: 768076 - RNA, 22 nt, Human
gggaaggagguggaccugcccc

SEQ ID NO: 768077 - RNA, 22 nt, Human
cucuuuccucgaugggcuccug

SEQ ID NO: 768078 - RNA, 22 nt, Human
uccagagcaggugucuacacag

SEQ ID NO: 768079 - RNA, 22 nt, Human
ugcagaagauggucugagcacc

SEQ ID NO: 768080 - RNA, 22 nt, Human
ccagcaucagcauugucuuagg

SEQ ID NO: 768081 - RNA, 22 nt, Human
ugggccugauuuaucaucuuca

SEQ ID NO: 768082 - RNA, 23 nt, Human
ucucugggugggcugugucuaua

SEQ ID NO: 768083 - RNA, 22 nt, Human
gcugucuggaggcucugaggga

SEQ ID NO: 768084 - RNA, 21 nt, Human
agacagcuuuaaagacacagg

SEQ ID NO: 768085 - RNA, 22 nt, Human
acauuaacaccgugaguuuggu

SEQ ID NO: 768086 - RNA, 22 nt, Human
ccuggcugucguuuugugaaau

SEQ ID NO: 768087 - RNA, 22 nt, Human
caggguggcacaucacagcauu

SEQ ID NO: 768088 - RNA, 22 nt, Human
aguuuaacuuuggaaaacuaua

SEQ ID NO: 768089 - RNA, 22 nt, Human
gggcugaccccaccccucacuc

SEQ ID NO: 768090 - RNA, 22 nt, Human
augcgugugugcaaaccauugc

SEQ ID NO: 768091 - RNA, 22 nt, Human
gcugccucuccugaguugacag

SEQ ID NO: 768092 - RNA, 22 nt, Human
augaugaagcaugguuacacug

SEQ ID NO: 768093 - RNA, 22 nt, Human
aagcagagaaaagcuuagguuc

SEQ ID NO: 768094 - RNA, 22 nt, Human
ccuggcacaagagcagcauugg

SEQ ID NO: 768095 - RNA, 22 nt, Human
aaaggcagaguuguuggaggca

SEQ ID NO: 768096 - RNA, 20 nt, Human
auucagaauaggcauguaaa

SEQ ID NO: 768097 - RNA, 22 nt, Human
aguucacugcuuaagccuuuga

SEQ ID NO: 768098 - RNA, 20 nt, Human
ucacagaaugccugaagaag

SEQ ID NO: 768099 - RNA, 22 nt, Human
uggcaucucaaacaggcagauu

SEQ ID NO: 768100 - RNA, 17 nt, Human
augugucuagugcaacc

SEQ ID NO: 768101 - RNA, 22 nt, Human
aaagcagcugcucuggccuuga

SEQ ID NO: 768102 - RNA, 22 nt, Human
aggcacuguacuagguacaggg

SEQ ID NO: 768103 - RNA, 22 nt, Human
ucagccucagguguucagauuu

SEQ ID NO: 768104 - RNA, 17 nt, Human
ggccauggugcaagguu

SEQ ID NO: 768105 - RNA, 22 nt, Human
uuucacagcauauagguguacu

SEQ ID NO: 768106 - RNA, 22 nt, Human
ccugccaggagcuggugcugca

SEQ ID NO: 768107 - RNA, 22 nt, Human
guggggaaaggaguggggcuca

SEQ ID NO: 768108 - RNA, 22 nt, Human
uaaggccaaguucauauacaac

SEQ ID NO: 768109 - RNA, 22 nt, Human
uauggcaagagaaucaacugaa

SEQ ID NO: 768110 - RNA, 22 nt, Human
uuucaaagguggaagagugaau

SEQ ID NO: 768111 - RNA, 22 nt, Human
agaagugccauacuguggucca

SEQ ID NO: 768112 - RNA, 22 nt, Human
ugagguuauuuauuaugcauga

SEQ ID NO: 768113 - RNA, 22 nt, Human
aaagaugcauaaaugccaaugg

SEQ ID NO: 768114 - RNA, 22 nt, Human
aguaugaauacagauuuucucu

SEQ ID NO: 768115 - RNA, 22 nt, Human
agauggcugauuaacuccaugg

SEQ ID NO: 768116 - RNA, 22 nt, Human
ccagugcgcaggcgccaccugu

SEQ ID NO: 768117 - RNA, 22 nt, Human
agucucagggccacccggggaa

SEQ ID NO: 768118 - RNA, 22 nt, Human
ccugcccacuccaggagcaacu

SEQ ID NO: 768119 - RNA, 18 nt, Human
gccugcaggcacgggggu

SEQ ID NO: 768120 - RNA, 21 nt, Human
uaggaacuguucugagugguc

SEQ ID NO: 768121 - RNA, 22 nt, Human
gacauuuguuccucuaagugac

SEQ ID NO: 768122 - RNA, 22 nt, Human
uggaggccaggaaggcagcgag

SEQ ID NO: 768123 - RNA, 22 nt, Human
aaugcucucugccauagcuaac

SEQ ID NO: 768124 - RNA, 22 nt, Human
cagaggauucccuagugaccug

SEQ ID NO: 768125 - RNA, 22 nt, Human
uugagcauuuguuuugaaagag

SEQ ID NO: 768126 - RNA, 22 nt, Human
uaucuguucuuagcuauagaug

SEQ ID NO: 768127 - RNA, 22 nt, Human
cgcuggucaccauggcguccug

SEQ ID NO: 768128 - RNA, 22 nt, Human
auguguauuuccaucgaucagc

SEQ ID NO: 768129 - RNA, 22 nt, Human
ucucugagcccaauguagcaau

SEQ ID NO: 768130 - RNA, 22 nt, Human
aaagcagcagcaccugcauuuc

SEQ ID NO: 768131 - RNA, 22 nt, Human
ugacaguagaagaugcuguuac

SEQ ID NO: 768132 - RNA, 22 nt, Human
gacagcaacacaugcuuagugc

SEQ ID NO: 768133 - RNA, 21 nt, Human
agcuauuucagauuugagagc

SEQ ID NO: 768134 - RNA, 22 nt, Human
gggucagggcuggcugucguca

SEQ ID NO: 768135 - RNA, 22 nt, Human
cugcacaguggguggggcguca

SEQ ID NO: 768136 - RNA, 22 nt, Human
cugucucucuaggacacugggg

SEQ ID NO: 768137 - RNA, 22 nt, Human
ccaggcuguaaacaccuucaaa

SEQ ID NO: 768138 - RNA, 22 nt, Human
aggagggagaugcccauccugg

SEQ ID NO: 768139 - RNA, 22 nt, Human
ccaggcugcuguugguguccgc

SEQ ID NO: 768140 - RNA, 22 nt, Human
gucaaacaaauuaacauaucca

SEQ ID NO: 768141 - RNA, 22 nt, Human
aacagaggcucccugcacuugu

SEQ ID NO: 768142 - RNA, 22 nt, Human
auuuguuuaucgucgauuguag

SEQ ID NO: 768143 - RNA, 22 nt, Human
uuuauauuaccuggaauagcuu

SEQ ID NO: 768144 - RNA, 22 nt, Human
ucagcaggcaggaggcaugcca

SEQ ID NO: 768145 - RNA, 22 nt, Human
caucuguuuuugucaauuacau

SEQ ID NO: 768146 - RNA, 22 nt, Human
cugggugauuccuguccaggca

SEQ ID NO: 768147 - RNA, 22 nt, Human
cugcuucauagcccuggucucu

SEQ ID NO: 768148 - RNA, 22 nt, Human
cacgaggccaucuccuucugga

SEQ ID NO: 768149 - RNA, 22 nt, Human
ugaguccugucuuugucacuua

SEQ ID NO: 768150 - RNA, 22 nt, Human
gucugucucucuccagagugca

SEQ ID NO: 768151 - RNA, 22 nt, Human
uacaugcuuccaacugccccau

SEQ ID NO: 768152 - RNA, 22 nt, Human
ucugugcuaauuuauccuuccu

SEQ ID NO: 768153 - RNA, 22 nt, Human
ucaaaguagggguaagccaggc

SEQ ID NO: 768154 - RNA, 22 nt, Human
uaagacaagccucgcauuugua

SEQ ID NO: 768155 - RNA, 22 nt, Human
uauucuccccggaucagggcaa

SEQ ID NO: 768156 - RNA, 22 nt, Human
aagagccaagcagucaucaaua

SEQ ID NO: 768157 - RNA, 22 nt, Human
uagagguacuccccucaaaguu

SEQ ID NO: 768158 - RNA, 22 nt, Human
uuuucuguuacaaaguacagcg

SEQ ID NO: 768159 - RNA, 22 nt, Human
aaaguugaguuuuauguguuac

SEQ ID NO: 768160 - RNA, 22 nt, Human
caguucucuuuccacuggaggc

SEQ ID NO: 768161 - RNA, 22 nt, Human
ggcagggcuugucucugugaug

SEQ ID NO: 768162 - RNA, 22 nt, Human
gcacacagaacauuuggauccu

SEQ ID NO: 768163 - RNA, 22 nt, Human
uagagguauaccaaaaaggcau

SEQ ID NO: 768164 - RNA, 22 nt, Human
cuggccaguuguccuggcuugg

SEQ ID NO: 768165 - RNA, 19 nt, Human
cgcucuggguuucguguca

SEQ ID NO: 768166 - RNA, 20 nt, Human
aaaugaugggaauaaucuau

SEQ ID NO: 768167 - RNA, 22 nt, Human
gucagcuccuagcaccccccaa

SEQ ID NO: 768168 - RNA, 22 nt, Human
cuuuggagaagaaugcauccuu

SEQ ID NO: 768169 - RNA, 22 nt, Human
uaaugagaauucuuuuugggua

SEQ ID NO: 768170 - RNA, 20 nt, Human
agcuccaugaaguagucacu

SEQ ID NO: 768171 - RNA, 23 nt, Human
aacagcaggaugauagaggaggu

SEQ ID NO: 768172 - RNA, 22 nt, Human
gcucugucuucagcacacagua

SEQ ID NO: 768173 - RNA, 22 nt, Human
ugagagugauugguucgaaugu

SEQ ID NO: 768174 - RNA, 22 nt, Human
caugccugccuggugggcgugg

SEQ ID NO: 768175 - RNA, 22 nt, Human
agccccucuguagcuaauagua

SEQ ID NO: 768176 - RNA, 22 nt, Human
cagcccugugcuaagcacccuc

SEQ ID NO: 768177 - RNA, 22 nt, Human
gaguaaaauaggugagaaucaa

SEQ ID NO: 768178 - RNA, 22 nt, Human
ggcacagagcuccagccuuggc

SEQ ID NO: 768179 - RNA, 18 nt, Human
acagugcugucacugcuu

SEQ ID NO: 768180 - RNA, 22 nt, Human
uuugguuugccugaguacccuc

SEQ ID NO: 768181 - RNA, 22 nt, Human
gaggccaugaauggauguuccu

SEQ ID NO: 768182 - RNA, 22 nt, Human
acccacugucaucucugaccac

SEQ ID NO: 768183 - RNA, 22 nt, Human
auccuuaaaggaauucugauuu

SEQ ID NO: 768184 - RNA, 19 nt, Human
cugaaacacagagagggcu

SEQ ID NO: 768185 - RNA, 22 nt, Human
uuuuagaaagaucccuggcagg

SEQ ID NO: 768186 - RNA, 22 nt, Human
ugugugaggugguucugagaag

SEQ ID NO: 768187 - RNA, 22 nt, Human
ugacauuuaucaaagaaauggu

SEQ ID NO: 768188 - RNA, 22 nt, Human
uuuugagauggagucuugcucu

SEQ ID NO: 768189 - RNA, 22 nt, Human
ucccugugccuauaugugcuga

SEQ ID NO: 768190 - RNA, 22 nt, Human
uacaagucauuggaugaggaau

SEQ ID NO: 768191 - RNA, 22 nt, Human
gcagaauacugagagcugauug

SEQ ID NO: 768192 - RNA, 22 nt, Human
agccuuaaaugcuagauucaua

SEQ ID NO: 768193 - RNA, 22 nt, Human
uaauuauuaugacaacaauugc

SEQ ID NO: 768194 - RNA, 22 nt, Human
cauugaaauauggaaacugaug

SEQ ID NO: 768195 - RNA, 22 nt, Human
ggcugccugcuccuccugcacg

SEQ ID NO: 768196 - RNA, 22 nt, Human
ugugcauguaccuuauucugga

SEQ ID NO: 768197 - RNA, 22 nt, Human
cuggcaggagcauucacagagg

SEQ ID NO: 768198 - RNA, 22 nt, Human
ccuggagaggagaaagggccca

SEQ ID NO: 768199 - RNA, 22 nt, Human
cuguguccaauggccuuagcag

SEQ ID NO: 768200 - RNA, 22 nt, Human
ggcuguggucauuaggagguug

SEQ ID NO: 768201 - RNA, 22 nt, Human
gggcaguggcucacgccuguaa

SEQ ID NO: 768202 - RNA, 22 nt, Human
caggaaauaucucaacacuuua

SEQ ID NO: 768203 - RNA, 22 nt, Human
cauaccuuucucaagcacaugu

SEQ ID NO: 768204 - RNA, 22 nt, Human
uuguuauuuacaacaauccuau

SEQ ID NO: 768205 - RNA, 22 nt, Human
ucauuauuuuggacuggagugu

SEQ ID NO: 768206 - RNA, 22 nt, Human
uaugccagggacuguuucacca

SEQ ID NO: 768207 - RNA, 22 nt, Human
cauaagaaauaaugaugaugac

SEQ ID NO: 768208 - RNA, 23 nt, Human
ugugccauugaggcugaggcuca

SEQ ID NO: 768209 - RNA, 22 nt, Human
aaagacacaugucucuuagauu

SEQ ID NO: 768210 - RNA, 22 nt, Human
augagguaauacuuucaguccu

SEQ ID NO: 768211 - RNA, 22 nt, Human
uccaggagguugagacugcagu

SEQ ID NO: 768212 - RNA, 22 nt, Human
cagacauggaaauuuaguguua

SEQ ID NO: 768213 - RNA, 22 nt, Human
augucuugauauuuuacuguuu

SEQ ID NO: 768214 - RNA, 22 nt, Human
ucccagcagggccgaccagccu

SEQ ID NO: 768215 - RNA, 22 nt, Human
cuucugggugccugugaguguu

SEQ ID NO: 768216 - RNA, 22 nt, Human
gauauucaacuaaagugaauua

SEQ ID NO: 768217 - RNA, 22 nt, Human
ccaguguggacucucuccuuug

SEQ ID NO: 768218 - RNA, 19 nt, Human
augucuguugaauuucaua

SEQ ID NO: 768219 - RNA, 17 nt, Human
ucugggcuucagugguc

SEQ ID NO: 768220 - RNA, 22 nt, Human
cugggccagcaacugcaaugga

SEQ ID NO: 768221 - RNA, 22 nt, Human
gugugcagggggccagcgcagc

SEQ ID NO: 768222 - RNA, 22 nt, Human
ucuguuauauagauaaugugug

SEQ ID NO: 768223 - RNA, 22 nt, Human
gugaggagucugaagcacauaa

SEQ ID NO: 768224 - RNA, 22 nt, Human
uaaguuacacuuaacuuacuag

SEQ ID NO: 768225 - RNA, 22 nt, Human
cugucuguuucugauucaaccu

SEQ ID NO: 768226 - RNA, 20 nt, Human
ucauggcugcugagagguuc

SEQ ID NO: 768227 - RNA, 22 nt, Human
guuaaacauugcuccacggguu

SEQ ID NO: 768228 - RNA, 22 nt, Human
cucugggcuccuucagcccuuu

SEQ ID NO: 768229 - RNA, 22 nt, Human
gccaggacuagagggaggugag

SEQ ID NO: 768230 - RNA, 22 nt, Human
gugagcaguugugagccccaaa

SEQ ID NO: 768231 - RNA, 22 nt, Human
ugguccugagaauccuguccuc

SEQ ID NO: 768232 - RNA, 22 nt, Human
ucaauuucuugguuugauaaua

SEQ ID NO: 768233 - RNA, 22 nt, Human
gacagcuucuugggccgggccu

SEQ ID NO: 768234 - RNA, 22 nt, Human
aagcugccagcugagcugaggc

SEQ ID NO: 768235 - RNA, 22 nt, Human
cugaaggcugaggcuguguugu

SEQ ID NO: 768236 - RNA, 22 nt, Human
cuggagccuagguugaccuggg

SEQ ID NO: 768237 - RNA, 15 nt, Human
uugcuuuaagacaug

SEQ ID NO: 768238 - RNA, 22 nt, Human
gaauuacaugacccugaguaga

SEQ ID NO: 768239 - RNA, 22 nt, Human
aggcuucuaggaaacuuucugg

SEQ ID NO: 768240 - RNA, 22 nt, Human
cagggccuccuaaggcaucuaa

SEQ ID NO: 768241 - RNA, 22 nt, Human
cggcuggguucggcugcaggcc

SEQ ID NO: 768242 - RNA, 22 nt, Human
agcaauguaaacccugaaguug

SEQ ID NO: 768243 - RNA, 22 nt, Human
ugggcaaguaucggacucugag

SEQ ID NO: 768244 - RNA, 22 nt, Human
cagcacagaguauuuuauugau

SEQ ID NO: 768245 - RNA, 22 nt, Human
uuagugcaaaccucagagacac

SEQ ID NO: 768246 - RNA, 18 nt, Human
ucugaaagcccuuuucca

SEQ ID NO: 768247 - RNA, 22 nt, Human
cccugccugugggcaucaacau

SEQ ID NO: 768248 - RNA, 22 nt, Human
gugcagguguuuuggcugccag

SEQ ID NO: 768249 - RNA, 22 nt, Human
ucugaacuccagcccugcucuc

SEQ ID NO: 768250 - RNA, 22 nt, Human
acuuucuucuacuacuuggaga

SEQ ID NO: 768251 - RNA, 22 nt, Human
uggaagcacuuggguuuuguug

SEQ ID NO: 768252 - RNA, 22 nt, Human
uguggaaaaaccacaaguuugg

SEQ ID NO: 768253 - RNA, 22 nt, Human
gaaguucucaaggaucacagaa

SEQ ID NO: 768254 - RNA, 22 nt, Human
uguggcuuuugcuagcuuugca

SEQ ID NO: 768255 - RNA, 22 nt, Human
caagcagaaaucuagaacucca

SEQ ID NO: 768256 - RNA, 22 nt, Human
agcucaggucucaggagguguc

SEQ ID NO: 768257 - RNA, 22 nt, Human
aagagcaggcugucaauggggc

SEQ ID NO: 768258 - RNA, 22 nt, Human
cagcaagccaaauguggcccga

SEQ ID NO: 768259 - RNA, 22 nt, Human
gcacacccucucaccagcacug

SEQ ID NO: 768260 - RNA, 21 nt, Human
ggauggauagggaagagauuu

SEQ ID NO: 768261 - RNA, 22 nt, Human
aaaagcacuacaauuucgcuuc

SEQ ID NO: 768262 - RNA, 22 nt, Human
cacauacaaugguguuauuugg

SEQ ID NO: 768263 - RNA, 22 nt, Human
ucuguaucuaauuuuacaguag

SEQ ID NO: 768264 - RNA, 22 nt, Human
accaggcuugaugauuugcuua

SEQ ID NO: 768265 - RNA, 22 nt, Human
cccugugguugcuagggcacag

SEQ ID NO: 768266 - RNA, 22 nt, Human
cuucuucugguuuauguggcaa

SEQ ID NO: 768267 - RNA, 22 nt, Human
ucagcaggugccucagauucuu

SEQ ID NO: 768268 - RNA, 22 nt, Human
gcuccaggagcucacagcucgc

SEQ ID NO: 768269 - RNA, 22 nt, Human
cagggcucgcucgcucgcucgc

SEQ ID NO: 768270 - RNA, 19 nt, Human
agggcugcucuggccuggg

SEQ ID NO: 768271 - RNA, 22 nt, Human
uaugucugaaucuuauuuaaau

SEQ ID NO: 768272 - RNA, 22 nt, Human
uucacauugugcagauuauggu

SEQ ID NO: 768273 - RNA, 22 nt, Human
ugcuggaauuuuucuaggauuu

SEQ ID NO: 768274 - RNA, 22 nt, Human
ggaggggccggcugccugccac

SEQ ID NO: 768275 - RNA, 22 nt, Human
aaacugcacaugaggcuggugc

SEQ ID NO: 768276 - RNA, 22 nt, Human
cugaugcuauaagccacagugg

SEQ ID NO: 768277 - RNA, 22 nt, Human
agagggcuggacgcagguugga

SEQ ID NO: 768278 - RNA, 22 nt, Human
accucucugggccugcuuccug

SEQ ID NO: 768279 - RNA, 22 nt, Human
aagaacaugguaggauaacaaa

SEQ ID NO: 768280 - RNA, 22 nt, Human
ggccaaggaugguggcucuggu

SEQ ID NO: 768281 - RNA, 22 nt, Human
ggaguggccucuccugugcagg

SEQ ID NO: 768282 - RNA, 22 nt, Human
cgcaggggaggaagguacaccu

SEQ ID NO: 768283 - RNA, 22 nt, Human
gcucuugauuuccaggagcuag

SEQ ID NO: 768284 - RNA, 22 nt, Human
uucauagcagucccuuucuggg

SEQ ID NO: 768285 - RNA, 22 nt, Human
uacauguuugguaaaugauggc

SEQ ID NO: 768286 - RNA, 22 nt, Human
agcaauuucccaucucuucugc

SEQ ID NO: 768287 - RNA, 22 nt, Human
ugcugagguuucgucugcuugc

SEQ ID NO: 768288 - RNA, 22 nt, Human
ggcuuccaugugaaauucuuug

SEQ ID NO: 768289 - RNA, 22 nt, Human
aauagcuuucucaugacuucac

SEQ ID NO: 768290 - RNA, 22 nt, Human
cagcucuuccauuuccuucagc

SEQ ID NO: 768291 - RNA, 22 nt, Human
auucuuugcaucucuggguggc

SEQ ID NO: 768292 - RNA, 22 nt, Human
gcaggagucagcccuaccuuga

SEQ ID NO: 768293 - RNA, 22 nt, Human
ucuucuuuaugucauaugccag

SEQ ID NO: 768294 - RNA, 22 nt, Human
caggaacccccacucucagcuc

SEQ ID NO: 768295 - RNA, 20 nt, Human
cagguccagcacgugcacgg

SEQ ID NO: 768296 - RNA, 22 nt, Human
cuuucucaaugccggaaggcac

SEQ ID NO: 768297 - RNA, 22 nt, Human
uuugccucucagagucuacaca

SEQ ID NO: 768298 - RNA, 19 nt, Human
caacaguacugguuugucc

SEQ ID NO: 768299 - RNA, 22 nt, Human
aucauccacuggagccggcagg

SEQ ID NO: 768300 - RNA, 22 nt, Human
cagugggcugugauggauucac

SEQ ID NO: 768301 - RNA, 22 nt, Human
agggcagcuuccauagucuggc

SEQ ID NO: 768302 - RNA, 22 nt, Human
aguuagaauagucagauuguag

SEQ ID NO: 768303 - RNA, 22 nt, Human
uucuuacaaguaugacguagca

SEQ ID NO: 768304 - RNA, 17 nt, Human
cugcuuggccucugggg

SEQ ID NO: 768305 - RNA, 19 nt, Human
ccuuugaaucaggacacuu

SEQ ID NO: 768306 - RNA, 22 nt, Human
gcaucuaaacuugcaucauugu

SEQ ID NO: 768307 - RNA, 22 nt, Human
aacaucagcacacaauagcaag

SEQ ID NO: 768308 - RNA, 22 nt, Human
uuuggaauuggcauucuauucu

SEQ ID NO: 768309 - RNA, 22 nt, Human
ccucauucuuuccugggccccu

SEQ ID NO: 768310 - RNA, 22 nt, Human
agugcuggagggaggcagguuc

SEQ ID NO: 768311 - RNA, 22 nt, Human
agucccagcucagaaccacuag

SEQ ID NO: 768312 - RNA, 22 nt, Human
ucagucaccuugacuauagcug

SEQ ID NO: 768313 - RNA, 21 nt, Human
uguggcugacacccuuuggga

SEQ ID NO: 768314 - RNA, 22 nt, Human
agggaagaagcugguaguaggu

SEQ ID NO: 768315 - RNA, 22 nt, Human
uaagaaugacaaccauaccauu

SEQ ID NO: 768316 - RNA, 22 nt, Human
auaucaaagcuaguggaaauuu

SEQ ID NO: 768317 - RNA, 22 nt, Human
uguacaaagccagaacucccaa

SEQ ID NO: 768318 - RNA, 22 nt, Human
auuaaaguugaaauugaacuga

SEQ ID NO: 768319 - RNA, 22 nt, Human
uggccucugcaauggauucacc

SEQ ID NO: 768320 - RNA, 22 nt, Human
aggcaggcagggcucacugucu

SEQ ID NO: 768321 - RNA, 22 nt, Human
acucagugaauuuucaucaaau

SEQ ID NO: 768322 - RNA, 22 nt, Human
ggagaaaauugaugaaguuggc

SEQ ID NO: 768323 - RNA, 22 nt, Human
gacccuggcagauaccgucaca

SEQ ID NO: 768324 - RNA, 22 nt, Human
aguacaauuuaaugaagauagc

SEQ ID NO: 768325 - RNA, 22 nt, Human
ccccaggccuguuggauggcgc

SEQ ID NO: 768326 - RNA, 22 nt, Human
ugggcagccaucccagccucuc

SEQ ID NO: 768327 - RNA, 22 nt, Human
aacuucaaaugugacuuugcau

SEQ ID NO: 768328 - RNA, 22 nt, Human
cccuuuaaguagaauauauuau

SEQ ID NO: 768329 - RNA, 22 nt, Human
cagaucugcuccucuguccaug

SEQ ID NO: 768330 - RNA, 22 nt, Human
cccagcacuuugaauaugucac

SEQ ID NO: 768331 - RNA, 22 nt, Human
cucuggggaaauggauauguac

SEQ ID NO: 768332 - RNA, 22 nt, Human
guauuuuaagugacuacuaggu

SEQ ID NO: 768333 - RNA, 22 nt, Human
agcaagauuuuccuugaauguu

SEQ ID NO: 768334 - RNA, 22 nt, Human
cugaagacugcugagaaguuac

SEQ ID NO: 768335 - RNA, 22 nt, Human
ccccauccuauucauguuucug

SEQ ID NO: 768336 - RNA, 22 nt, Human
acagugucucacugcugaaauc

SEQ ID NO: 768337 - RNA, 22 nt, Human
guccuucauggaguuacagccu

SEQ ID NO: 768338 - RNA, 22 nt, Human
uucaggagugucaggagugccu

SEQ ID NO: 768339 - RNA, 22 nt, Human
caguacaauuuuacaaaggacg

SEQ ID NO: 768340 - RNA, 22 nt, Human
aacaagcagaugcaaugcacuu

SEQ ID NO: 768341 - RNA, 22 nt, Human
uaugugcaugcugacuugagga

SEQ ID NO: 768342 - RNA, 22 nt, Human
auauaggcuaacaacuauugag

SEQ ID NO: 768343 - RNA, 22 nt, Human
uggcccagcaguucugccccag

SEQ ID NO: 768344 - RNA, 22 nt, Human
gggagucagugaaggagucaga

SEQ ID NO: 768345 - RNA, 22 nt, Human
auguguuuauaauuacucaauc

SEQ ID NO: 768346 - RNA, 22 nt, Human
ugaagacaagaaaacacugggg

SEQ ID NO: 768347 - RNA, 22 nt, Human
ucuacacugggggcuuugagca

SEQ ID NO: 768348 - RNA, 22 nt, Human
ccuguacaucugcucucauugc

SEQ ID NO: 768349 - RNA, 21 nt, Human
gcucagaguauugcacuguuu

SEQ ID NO: 768350 - RNA, 22 nt, Human
ucuggcaggaccaugaagcgua

SEQ ID NO: 768351 - RNA, 22 nt, Human
gcaggcacuccuaggaccauca

SEQ ID NO: 768352 - RNA, 22 nt, Human
ucucuuaauuuuggaauagugu

SEQ ID NO: 768353 - RNA, 22 nt, Human
gggguacuggcuggagccccac

SEQ ID NO: 768354 - RNA, 22 nt, Human
aggcugucaucuuugcaggcag

SEQ ID NO: 768355 - RNA, 18 nt, Human
acccuggcaugcucuucc

SEQ ID NO: 768356 - RNA, 22 nt, Human
aaggcacuugcccagagcugca

SEQ ID NO: 768357 - RNA, 23 nt, Human
uuguuuuuagagguggcaugaga

SEQ ID NO: 768358 - RNA, 22 nt, Human
ccugaacaaauggcauagccaa

SEQ ID NO: 768359 - RNA, 22 nt, Human
cagagacaguuucacagggucu

SEQ ID NO: 768360 - RNA, 22 nt, Human
uuggcucaaaacuuagauucca

SEQ ID NO: 768361 - RNA, 22 nt, Human
acuaaaugaacuauuaauacuu

SEQ ID NO: 768362 - RNA, 22 nt, Human
gguggaugcugacuguucugcu

SEQ ID NO: 768363 - RNA, 22 nt, Human
agggucaacacuuuaaacauau

SEQ ID NO: 768364 - RNA, 22 nt, Human
cauggaaugugaguuguuuagu

SEQ ID NO: 768365 - RNA, 22 nt, Human
gccucucucuacccaguaugau

SEQ ID NO: 768366 - RNA, 22 nt, Human
augcucauuuuauugagaauga

SEQ ID NO: 768367 - RNA, 21 nt, Human
ggcagugaugugaagugcauc

SEQ ID NO: 768368 - RNA, 19 nt, Human
ugccuguggcgagcaucuu

SEQ ID NO: 768369 - RNA, 22 nt, Human
aggaggucagagccccaugcug

SEQ ID NO: 768370 - RNA, 22 nt, Human
gcagggcagcucacugugguuc

SEQ ID NO: 768371 - RNA, 23 nt, Human
ccugggcauuggcugcagcuucu

SEQ ID NO: 768372 - RNA, 22 nt, Human
aagcccugggauguucagcagu

SEQ ID NO: 768373 - RNA, 22 nt, Human
uuuuaauucaaagugaauagug

SEQ ID NO: 768374 - RNA, 22 nt, Human
auagcaaagaugucaauucccc

SEQ ID NO: 768375 - RNA, 20 nt, Human
gaaaauaggccagccaggua

SEQ ID NO: 768376 - RNA, 22 nt, Human
gcuagagaccagaggccuugaa

SEQ ID NO: 768377 - RNA, 22 nt, Human
aaaguuuuuaagcaagacccuu

SEQ ID NO: 768378 - RNA, 19 nt, Human
ugacacagcuagguuugcu

SEQ ID NO: 768379 - RNA, 22 nt, Human
aucucccaaauuagccucuuga

SEQ ID NO: 768380 - RNA, 19 nt, Human
uggcaguguggcuuccaga

SEQ ID NO: 768381 - RNA, 19 nt, Human
aggguccaggcccugugga

SEQ ID NO: 768382 - RNA, 22 nt, Human
gccagcuggagacuggcagggg

SEQ ID NO: 768383 - RNA, 22 nt, Human
agggcaugcuggaggagagaca

SEQ ID NO: 768384 - RNA, 22 nt, Human
uucagcagcuuuuaguacauug

SEQ ID NO: 768385 - RNA, 22 nt, Human
uuuuuguugcagagaggccacu

SEQ ID NO: 768386 - RNA, 22 nt, Human
gaggucaggugaggaauuaaga

SEQ ID NO: 768387 - RNA, 22 nt, Human
aggcuccaaauuaccaagcucu

SEQ ID NO: 768388 - RNA, 22 nt, Human
uaaccuggggccugaagaccau

SEQ ID NO: 768389 - RNA, 22 nt, Human
aaacaauccaggaaccuguuua

SEQ ID NO: 768390 - RNA, 22 nt, Human
agggaagccccgaggaggcacc

SEQ ID NO: 768391 - RNA, 22 nt, Human
aagacuuucucccaaauccuca

SEQ ID NO: 768392 - RNA, 22 nt, Human
aucuauaucaugggguaaggua

SEQ ID NO: 768393 - RNA, 22 nt, Human
caaagcugacgaggucagcauc

SEQ ID NO: 768394 - RNA, 22 nt, Human
gacaugcauuaagacacacuga

SEQ ID NO: 768395 - RNA, 22 nt, Human
agggcucauaauuccugacuuc

SEQ ID NO: 768396 - RNA, 22 nt, Human
gugguuguuuaggucguggauc

SEQ ID NO: 768397 - RNA, 22 nt, Human
ucucuacagauccuauauagaa

SEQ ID NO: 768398 - RNA, 22 nt, Human
aaaaaagauugaugguggaugc

SEQ ID NO: 768399 - RNA, 22 nt, Human
acacacuucacccuugagcuaa

SEQ ID NO: 768400 - RNA, 22 nt, Human
cuuaggaacacuuacugguacu

SEQ ID NO: 768401 - RNA, 22 nt, Human
aaagccagugguaugagagaaa

SEQ ID NO: 768402 - RNA, 22 nt, Human
ucuuucccaguagcucucccag

SEQ ID NO: 768403 - RNA, 18 nt, Human
uucacaggaaaugucuuu

SEQ ID NO: 768404 - RNA, 22 nt, Human
aaagugcauagaguagugccua

SEQ ID NO: 768405 - RNA, 22 nt, Human
uguggcagcugcugcaggagcu

SEQ ID NO: 768406 - RNA, 22 nt, Human
accagagcuggcucugagcacc

SEQ ID NO: 768407 - RNA, 17 nt, Human
aggcuggcucacaggga

SEQ ID NO: 768408 - RNA, 19 nt, Human
gagcccucuccauggccac

SEQ ID NO: 768409 - RNA, 22 nt, Human
gacagacacuguguccucacuu

SEQ ID NO: 768410 - RNA, 22 nt, Human
uuucagagaugucuagccuauu

SEQ ID NO: 768411 - RNA, 22 nt, Human
cuugaaguugcaaaacauuaau

SEQ ID NO: 768412 - RNA, 17 nt, Human
aucuggcugcuucuaga

SEQ ID NO: 768413 - RNA, 22 nt, Human
agggagcuuuuucaugugucua

SEQ ID NO: 768414 - RNA, 22 nt, Human
ucagauuuuugagaugucuguu

SEQ ID NO: 768415 - RNA, 22 nt, Human
auucucuguuuccaagaugaaa

SEQ ID NO: 768416 - RNA, 22 nt, Human
uguacauagaucuugaaaauua

SEQ ID NO: 768417 - RNA, 17 nt, Human
ugucuuaucuguccugu

SEQ ID NO: 768418 - RNA, 22 nt, Human
acccaggacacagagaugaccc

SEQ ID NO: 768419 - RNA, 23 nt, Human
uuuauauuccuaaugucuugagc

SEQ ID NO: 768420 - RNA, 22 nt, Human
ucagauuuuauuuuccuguuac

SEQ ID NO: 768421 - RNA, 22 nt, Human
uuugaacucagcuucagacaac

SEQ ID NO: 768422 - RNA, 22 nt, Human
ucugggcucugcgaagcccuuc

SEQ ID NO: 768423 - RNA, 22 nt, Human
gucuggaaauucaauuuaaugc

SEQ ID NO: 768424 - RNA, 22 nt, Human
gcagcaguggcugcagguccca

SEQ ID NO: 768425 - RNA, 22 nt, Human
aaucucuucccaguaaaaaugg

SEQ ID NO: 768426 - RNA, 22 nt, Human
augauuuuucagcagaggaucu

SEQ ID NO: 768427 - RNA, 22 nt, Human
gagggggcuagcgcagugccca

SEQ ID NO: 768428 - RNA, 22 nt, Human
ucagcuuucucagaggccuaac

SEQ ID NO: 768429 - RNA, 22 nt, Human
ugagaucauuuauuuaccuuuc

SEQ ID NO: 768430 - RNA, 22 nt, Human
uggcuucuucauaugugaucuu

SEQ ID NO: 768431 - RNA, 22 nt, Human
uacaucaaggaacaccugguau

SEQ ID NO: 768432 - RNA, 23 nt, Human
uucugcauguuucagagcuggga

SEQ ID NO: 768433 - RNA, 22 nt, Human
ucauaaagauacuaagugaguu

SEQ ID NO: 768434 - RNA, 22 nt, Human
ggucucuguugccuccaucaag

SEQ ID NO: 768435 - RNA, 22 nt, Human
augaggcaguacacacaaagcc

SEQ ID NO: 768436 - RNA, 22 nt, Human
uauaaaguuucgaaagauguau

SEQ ID NO: 768437 - RNA, 22 nt, Human
ccaggcagaugggccggcuuca

SEQ ID NO: 768438 - RNA, 22 nt, Human
uugauguacagaauuguucaca

SEQ ID NO: 768439 - RNA, 22 nt, Human
ggcuccaggcuccuauuucacu

SEQ ID NO: 768440 - RNA, 22 nt, Human
auggccaccaucucuaaaacac

SEQ ID NO: 768441 - RNA, 22 nt, Human
ggggacucugcuucugggauca

SEQ ID NO: 768442 - RNA, 22 nt, Human
gcucagugagauauugacucca

SEQ ID NO: 768443 - RNA, 23 nt, Human
gcugccaaggaggcaggggugcc

SEQ ID NO: 768444 - RNA, 22 nt, Human
cagcacaggaagugggccuuca

SEQ ID NO: 768445 - RNA, 22 nt, Human
caggaaaaucugcccacacaag

SEQ ID NO: 768446 - RNA, 22 nt, Human
cgaggcagacaaaaguuggaag

SEQ ID NO: 768447 - RNA, 22 nt, Human
ccaggcuuuguaccaggcuuuc

SEQ ID NO: 768448 - RNA, 22 nt, Human
uguguauaagugagaaugcugu

SEQ ID NO: 768449 - RNA, 22 nt, Human
guucugcuccuguggcaaucua

SEQ ID NO: 768450 - RNA, 22 nt, Human
acaggcagcacuaaucucuggu

SEQ ID NO: 768451 - RNA, 22 nt, Human
aaagucaucuaggagcagauuu

SEQ ID NO: 768452 - RNA, 22 nt, Human
caagcuggagguuggagcuacu

SEQ ID NO: 768453 - RNA, 20 nt, Human
gcccaugaggacugcagcug

SEQ ID NO: 768454 - RNA, 22 nt, Human
auuguucuaaggguuuaauuaa

SEQ ID NO: 768455 - RNA, 20 nt, Human
aaacacagccucucuuuaca

SEQ ID NO: 768456 - RNA, 22 nt, Human
aguguuucaccguauguucuca

SEQ ID NO: 768457 - RNA, 22 nt, Human
cuccuggcuuucccagaccagg

SEQ ID NO: 768458 - RNA, 21 nt, Human
cacucaggguaugugccaggc

SEQ ID NO: 768459 - RNA, 22 nt, Human
cuucuguggauguuggaugcau

SEQ ID NO: 768460 - RNA, 22 nt, Human
agaacagguucaggguauaaaa

SEQ ID NO: 768461 - RNA, 22 nt, Human
aaguauauacuaaauguuaauc

SEQ ID NO: 768462 - RNA, 22 nt, Human
aguuauugaguaucuauaaugu

SEQ ID NO: 768463 - RNA, 22 nt, Human
agagcccucucauuggcuuauu

SEQ ID NO: 768464 - RNA, 22 nt, Human
agaagcguuccauuugaugggu

SEQ ID NO: 768465 - RNA, 22 nt, Human
gggucgggcaggcgcccucguc

SEQ ID NO: 768466 - RNA, 22 nt, Human
uuaaucucuuagcaaauuaaug

SEQ ID NO: 768467 - RNA, 22 nt, Human
cagaugcuucgugggugagcac

SEQ ID NO: 768468 - RNA, 22 nt, Human
aguuuucugcuaaaccagcuaa

SEQ ID NO: 768469 - RNA, 22 nt, Human
agauccaugugauuuggaguuc

SEQ ID NO: 768470 - RNA, 22 nt, Human
ucugcuggucaaggcugggucc

SEQ ID NO: 768471 - RNA, 22 nt, Human
aaugaggccaguagaaggaagu

SEQ ID NO: 768472 - RNA, 22 nt, Human
gguggagcuggaccaggagagg

SEQ ID NO: 768473 - RNA, 22 nt, Human
auguguaugucuuauucaaaga

SEQ ID NO: 768474 - RNA, 18 nt, Human
ucccuucucccuugccuc

SEQ ID NO: 768475 - RNA, 17 nt, Human
uuucuccuuccaucuca

SEQ ID NO: 768476 - RNA, 21 nt, Human
ggguggccgcaugggugcgug

SEQ ID NO: 768477 - RNA, 22 nt, Human
auccaaacuaugacuaguguuc

SEQ ID NO: 768478 - RNA, 22 nt, Human
caccagcaccagcucugugccu

SEQ ID NO: 768479 - RNA, 22 nt, Human
ccucucauagucuguauccuuu

SEQ ID NO: 768480 - RNA, 22 nt, Human
guggcagagccgugcagguagg

SEQ ID NO: 768481 - RNA, 22 nt, Human
uuucagagaaagcccaaagacu

SEQ ID NO: 768482 - RNA, 22 nt, Human
cagcuuuaggacucauaauaaa

SEQ ID NO: 768483 - RNA, 22 nt, Human
cucuucuuuaguccagaccauc

SEQ ID NO: 768484 - RNA, 22 nt, Human
uucucuggagggcugcccggcc

SEQ ID NO: 768485 - RNA, 22 nt, Human
gagggcaguagccucguacccu

SEQ ID NO: 768486 - RNA, 22 nt, Human
aaacugcuuuccacaguggcua

SEQ ID NO: 768487 - RNA, 22 nt, Human
uaguggauguucagagauuuga

SEQ ID NO: 768488 - RNA, 22 nt, Human
acauucacaagccuacaagguu

SEQ ID NO: 768489 - RNA, 22 nt, Human
cccagacugcagagcgggcaga

SEQ ID NO: 768490 - RNA, 22 nt, Human
agggcucugugacuaucacugc

SEQ ID NO: 768491 - RNA, 22 nt, Human
gccucugcggagcuguacauca

SEQ ID NO: 768492 - RNA, 22 nt, Human
uagggcucagaguccaguuucu

SEQ ID NO: 768493 - RNA, 22 nt, Human
ucuuucugcagcacaggggcag

SEQ ID NO: 768494 - RNA, 22 nt, Human
gguacaaugucuuacagaccca

SEQ ID NO: 768495 - RNA, 20 nt, Human
uauucaacuuuaaaaacuua

SEQ ID NO: 768496 - RNA, 22 nt, Human
gacagggacucccugguuagaa

SEQ ID NO: 768497 - RNA, 22 nt, Human
auuauaugugggauagaauuua

SEQ ID NO: 768498 - RNA, 22 nt, Human
ccaaggcugagguuuccaguug

SEQ ID NO: 768499 - RNA, 22 nt, Human
cugaggccucuuuccuuggcuu

SEQ ID NO: 768500 - RNA, 22 nt, Human
cuagagaauggcaaagauuaga

SEQ ID NO: 768501 - RNA, 22 nt, Human
ccugcuccaugcucaccaucag

SEQ ID NO: 768502 - RNA, 22 nt, Human
ugcauguuuauaacagaugagg

SEQ ID NO: 768503 - RNA, 22 nt, Human
gcaggucuggcauagagccugc

SEQ ID NO: 768504 - RNA, 22 nt, Human
ugccugcuaggcccugcugggu

SEQ ID NO: 768505 - RNA, 22 nt, Human
uagcuguucccagcucugugua

SEQ ID NO: 768506 - RNA, 22 nt, Human
cucuuccuuucccuugagggug

SEQ ID NO: 768507 - RNA, 22 nt, Human
ugccccucuugagaagcucagc

SEQ ID NO: 768508 - RNA, 22 nt, Human
ccagagucugugugugucaucc

SEQ ID NO: 768509 - RNA, 22 nt, Human
agcagcagugugguuuggggaa

SEQ ID NO: 768510 - RNA, 22 nt, Human
uuacagauuaaaaugcugaggu

SEQ ID NO: 768511 - RNA, 22 nt, Human
ugugaaggagaugaagggagug

SEQ ID NO: 768512 - RNA, 22 nt, Human
ccagcugauucgguggugguug

SEQ ID NO: 768513 - RNA, 22 nt, Human
ucucugcccauccucaguccac

SEQ ID NO: 768514 - RNA, 22 nt, Human
gagcaaggauggccggggccgu

SEQ ID NO: 768515 - RNA, 21 nt, Human
cucugguuugcauuggauuau

SEQ ID NO: 768516 - RNA, 22 nt, Human
aucuuuacaagaaauucuuuua

SEQ ID NO: 768517 - RNA, 22 nt, Human
ggagacuaccuagcaggcuguu

SEQ ID NO: 768518 - RNA, 23 nt, Human
ccauucaucucagucauugcuuu

SEQ ID NO: 768519 - RNA, 22 nt, Human
gccuuccugcagcucugagcgu

SEQ ID NO: 768520 - RNA, 22 nt, Human
gacuugggggaagauguggcug

SEQ ID NO: 768521 - RNA, 22 nt, Human
agcagggccucuggcacugguc

SEQ ID NO: 768522 - RNA, 22 nt, Human
gcccagaacagugucacauguc

SEQ ID NO: 768523 - RNA, 22 nt, Human
aaugcuuucuuauaaccacugc

SEQ ID NO: 768524 - RNA, 22 nt, Human
ugggagaagacguacuuuagac

SEQ ID NO: 768525 - RNA, 22 nt, Human
ugcugugagguugagaaggaag

SEQ ID NO: 768526 - RNA, 21 nt, Human
ccugagggugguugugaagau

SEQ ID NO: 768527 - RNA, 22 nt, Human
uuugacauugaaagcagaaucg

SEQ ID NO: 768528 - RNA, 22 nt, Human
agggccugggucuguacuccuc

SEQ ID NO: 768529 - RNA, 22 nt, Human
aagacugucuuuucugagugac

SEQ ID NO: 768530 - RNA, 22 nt, Human
auauggaaguuaccugacuuca

SEQ ID NO: 768531 - RNA, 22 nt, Human
gccuugcuuugcuucuggacag

SEQ ID NO: 768532 - RNA, 22 nt, Human
cuccuggaggauagugacuggg

SEQ ID NO: 768533 - RNA, 22 nt, Human
guuaugauggcaccacugcacu

SEQ ID NO: 768534 - RNA, 22 nt, Human
ccauccaugaacgaggaagugg

SEQ ID NO: 768535 - RNA, 22 nt, Human
aaggcuguccaggagaaaauag

SEQ ID NO: 768536 - RNA, 22 nt, Human
ugagagugguucagcucagaag

SEQ ID NO: 768537 - RNA, 23 nt, Human
uccugccagaugacuccuuucuu

SEQ ID NO: 768538 - RNA, 22 nt, Human
cacugggaaucugggaaagaga

SEQ ID NO: 768539 - RNA, 22 nt, Human
guuguuuugcaggauccuuaca

SEQ ID NO: 768540 - RNA, 22 nt, Human
cagcuccugccugggcagcugu

SEQ ID NO: 768541 - RNA, 22 nt, Human
gaaggacccucuggggucucag

SEQ ID NO: 768542 - RNA, 22 nt, Human
gcugcagcucgccuuccggccu

SEQ ID NO: 768543 - RNA, 22 nt, Human
agggcuuuacuucucaguucua

SEQ ID NO: 768544 - RNA, 22 nt, Human
agagauuuacacaugccuuuuc

SEQ ID NO: 768545 - RNA, 22 nt, Human
gcagggcugacucagccacccu

SEQ ID NO: 768546 - RNA, 22 nt, Human
agggguggagaguguugccagu

SEQ ID NO: 768547 - RNA, 22 nt, Human
ggcaggucagguccaugaccaa

SEQ ID NO: 768548 - RNA, 22 nt, Human
aaagacuaagaagaguauuauu

SEQ ID NO: 768549 - RNA, 22 nt, Human
cagacagacagccguggccacc

SEQ ID NO: 768550 - RNA, 22 nt, Human
guuauaaauaccuaauaggauu

SEQ ID NO: 768551 - RNA, 22 nt, Human
auguuacuuagaauaauucugg

SEQ ID NO: 768552 - RNA, 22 nt, Human
uccuccagucuuggugagguug

SEQ ID NO: 768553 - RNA, 22 nt, Human
caguagcaugcuuaucuuuuga

SEQ ID NO: 768554 - RNA, 22 nt, Human
gucuguccaucagcaaaggcuu

SEQ ID NO: 768555 - RNA, 19 nt, Human
cacagugcagccauuucuc

SEQ ID NO: 768556 - RNA, 22 nt, Human
cagcuccucuggccagcccugc

SEQ ID NO: 768557 - RNA, 22 nt, Human
acugaagcacauuugccaugaa

SEQ ID NO: 768558 - RNA, 18 nt, Human
ggagcugggccugguucc

SEQ ID NO: 768559 - RNA, 22 nt, Human
uuucauguauuucccaaagcuu

SEQ ID NO: 768560 - RNA, 19 nt, Human
aaauggcuuucuacuuaau

SEQ ID NO: 768561 - RNA, 22 nt, Human
accuccccacaugguagugagu

SEQ ID NO: 768562 - RNA, 22 nt, Human
uggggacacagagccaaacuau

SEQ ID NO: 768563 - RNA, 22 nt, Human
agacauggagaaggagccagug

SEQ ID NO: 768564 - RNA, 22 nt, Human
aacaguuucaguuacugaugag

SEQ ID NO: 768565 - RNA, 22 nt, Human
cuuggcugcuuuugugcacauu

SEQ ID NO: 768566 - RNA, 18 nt, Human
ucaguccuccauagagcu

SEQ ID NO: 768567 - RNA, 22 nt, Human
agggaaaggcugaugcuguggg

SEQ ID NO: 768568 - RNA, 22 nt, Human
aagcagaguccccuucccaugg

SEQ ID NO: 768569 - RNA, 22 nt, Human
gauugaaacauaggcagucgag

SEQ ID NO: 768570 - RNA, 22 nt, Human
augcaggauuagaaaguugccu

SEQ ID NO: 768571 - RNA, 22 nt, Human
cagagcaggaauaggguguuga

SEQ ID NO: 768572 - RNA, 22 nt, Human
uccaggcccugggaugggagca

SEQ ID NO: 768573 - RNA, 22 nt, Human
ggcaggcugcuugggucauguc

SEQ ID NO: 768574 - RNA, 22 nt, Human
gaggcagcaucuauggugggaa

SEQ ID NO: 768575 - RNA, 22 nt, Human
uucucucccaugaagcuucuau

SEQ ID NO: 768576 - RNA, 22 nt, Human
ucaggcugccuaucagacugug

SEQ ID NO: 768577 - RNA, 22 nt, Human
cacaagucauuuucagcaggcu

SEQ ID NO: 768578 - RNA, 22 nt, Human
uugcuuccuccuagccacuugc

SEQ ID NO: 768579 - RNA, 22 nt, Human
uggcuccaaaaacaaaugacau

SEQ ID NO: 768580 - RNA, 22 nt, Human
cacaggagcccugaggccuccc

SEQ ID NO: 768581 - RNA, 22 nt, Human
ccacugggcguuucuguccaau

SEQ ID NO: 768582 - RNA, 22 nt, Human
auggguaaggguguuugguuag

SEQ ID NO: 768583 - RNA, 22 nt, Human
cagcuguugaucucuuaagccu

SEQ ID NO: 768584 - RNA, 22 nt, Human
uuuauccagaaucaggauuuuu

SEQ ID NO: 768585 - RNA, 22 nt, Human
ccucccacuucuugcugagguc

SEQ ID NO: 768586 - RNA, 18 nt, Human
uagggcucuagggaguga

SEQ ID NO: 768587 - RNA, 22 nt, Human
acauucaaaauugugguuuaga

SEQ ID NO: 768588 - RNA, 22 nt, Human
ucuucaugaccucuguguuuua

SEQ ID NO: 768589 - RNA, 22 nt, Human
uuauuguuaggcuuuuggaauu

SEQ ID NO: 768590 - RNA, 22 nt, Human
ggaacagggauuuggccugguu

SEQ ID NO: 768591 - RNA, 22 nt, Human
aagaauuauugcaauacuagau

SEQ ID NO: 768592 - RNA, 22 nt, Human
ggcuuguugaaacacagauugu

SEQ ID NO: 768593 - RNA, 22 nt, Human
agccucugcuggcccuggcacu

SEQ ID NO: 768594 - RNA, 22 nt, Human
gcagcguggggcugagucagcu

SEQ ID NO: 768595 - RNA, 22 nt, Human
gugccuuugugucuaaaacagc

SEQ ID NO: 768596 - RNA, 22 nt, Human
gccaggcauuuguuaggugcug

SEQ ID NO: 768597 - RNA, 22 nt, Human
ggcuacaguggcacugggcuuu

SEQ ID NO: 768598 - RNA, 22 nt, Human
agcagagaccugguuuuguuga

SEQ ID NO: 768599 - RNA, 22 nt, Human
gcuguguuugacaguagcagac

SEQ ID NO: 768600 - RNA, 22 nt, Human
auggaaagggaagcaaggaaca

SEQ ID NO: 768601 - RNA, 22 nt, Human
uuuugcagaaugggaagguagu

SEQ ID NO: 768602 - RNA, 22 nt, Human
caugggcagaaguggcaucauu

SEQ ID NO: 768603 - RNA, 22 nt, Human
guuuucugccgguggugggcuc

SEQ ID NO: 768604 - RNA, 22 nt, Human
ugcugggcuguuccuguccaug

SEQ ID NO: 768605 - RNA, 22 nt, Human
uucugcugaaaacagccaugua

SEQ ID NO: 768606 - RNA, 22 nt, Human
guucacagcuuguguuuucucu

SEQ ID NO: 768607 - RNA, 22 nt, Human
gaacucuugcagugaaagcuua

SEQ ID NO: 768608 - RNA, 22 nt, Human
guuauucugccaaacuuccaca

SEQ ID NO: 768609 - RNA, 22 nt, Human
guccugggcggagggcugcugu

SEQ ID NO: 768610 - RNA, 22 nt, Human
ugauuuaugcauuauacuguug

SEQ ID NO: 768611 - RNA, 22 nt, Human
guuuuacacaccuaugaaagac

SEQ ID NO: 768612 - RNA, 22 nt, Human
ggcucugguugaccaugauggc

SEQ ID NO: 768613 - RNA, 22 nt, Human
cagugcugcaucuccaugccag

SEQ ID NO: 768614 - RNA, 22 nt, Human
agcccagguggagugugugggg

SEQ ID NO: 768615 - RNA, 22 nt, Human
guauacauacuucuagauuaaa

SEQ ID NO: 768616 - RNA, 22 nt, Human
uuucccucugugccagcuucuc

SEQ ID NO: 768617 - RNA, 22 nt, Human
cacagaauuuucucuuuacaau

SEQ ID NO: 768618 - RNA, 22 nt, Human
aaucagucauuagcucugaccu

SEQ ID NO: 768619 - RNA, 22 nt, Human
uuugucuucccccuuuaaucag

SEQ ID NO: 768620 - RNA, 22 nt, Human
aaggcagucugguuucaaagca

SEQ ID NO: 768621 - RNA, 17 nt, Human
ggccuguguggcugcag

SEQ ID NO: 768622 - RNA, 22 nt, Human
ugaaauauuuagagaguaaguu

SEQ ID NO: 768623 - RNA, 22 nt, Human
agagaaauucucaguggaagau

SEQ ID NO: 768624 - RNA, 22 nt, Human
ccaggaaugaaauguagauaaa

SEQ ID NO: 768625 - RNA, 22 nt, Human
ccagcugugccuaggagcaggg

SEQ ID NO: 768626 - RNA, 22 nt, Human
guuucauaggcaugugaccuau

SEQ ID NO: 768627 - RNA, 22 nt, Human
cuggugaccuugccccagguca

SEQ ID NO: 768628 - RNA, 22 nt, Human
ccacaugaaauugcuuauauuu

SEQ ID NO: 768629 - RNA, 23 nt, Human
aaaguguagccagguuaagaacc

SEQ ID NO: 768630 - RNA, 22 nt, Human
ggcaacaacuggacauagcugg

SEQ ID NO: 768631 - RNA, 22 nt, Human
gacugggguaaggugaggaggu

SEQ ID NO: 768632 - RNA, 22 nt, Human
uucuccccugacccugaugagg

SEQ ID NO: 768633 - RNA, 22 nt, Human
ggcccucuggcuuccgcauggg

SEQ ID NO: 768634 - RNA, 22 nt, Human
auguucuuugaaauauuuuaga

SEQ ID NO: 768635 - RNA, 22 nt, Human
auaaacaucuguuucucuucug

SEQ ID NO: 768636 - RNA, 22 nt, Human
augcacaggaaguguccccauu

SEQ ID NO: 768637 - RNA, 20 nt, Human
gcacuuggcugcugcuucuc

SEQ ID NO: 768638 - RNA, 22 nt, Human
ucugcucagguuaccuagcuag

SEQ ID NO: 768639 - RNA, 22 nt, Human
uucaguuuuauuguacugcuau

SEQ ID NO: 768640 - RNA, 22 nt, Human
gggcuccaaaaucuaugucuuc

SEQ ID NO: 768641 - RNA, 22 nt, Human
aaauuucuaagucaagaagaac

SEQ ID NO: 768642 - RNA, 22 nt, Human
ccucuggagucagaccagcuug

SEQ ID NO: 768643 - RNA, 22 nt, Human
cugauggagacuccacugugau

SEQ ID NO: 768644 - RNA, 22 nt, Human
agcgcugugggcgugcgaggag

SEQ ID NO: 768645 - RNA, 22 nt, Human
cagaaauguuuaugcuuuugaa

SEQ ID NO: 768646 - RNA, 22 nt, Human
aaauucuuucauggcuaauaag

SEQ ID NO: 768647 - RNA, 22 nt, Human
ggcaccuuggcuagugaucaac

SEQ ID NO: 768648 - RNA, 22 nt, Human
aguuauaccuuauacacauaug

SEQ ID NO: 768649 - RNA, 22 nt, Human
gacagugguuccaaggcagcuu

SEQ ID NO: 768650 - RNA, 22 nt, Human
acauuucucauaggagagccac

SEQ ID NO: 768651 - RNA, 22 nt, Human
cucgcaagucgcuccgguuacu

SEQ ID NO: 768652 - RNA, 22 nt, Human
agccagcugccuuucacaucug

SEQ ID NO: 768653 - RNA, 19 nt, Human
ucaacaguggugcugugga

SEQ ID NO: 768654 - RNA, 22 nt, Human
aggaaacugaagcccagagagg

SEQ ID NO: 768655 - RNA, 22 nt, Human
cugaaagaauaagauguuuaca

SEQ ID NO: 768656 - RNA, 22 nt, Human
aaugccaacuuggauauacauu

SEQ ID NO: 768657 - RNA, 20 nt, Human
uccugagauuuaagggguuc

SEQ ID NO: 768658 - RNA, 22 nt, Human
aacaugauaguauuuugaggug

SEQ ID NO: 768659 - RNA, 22 nt, Human
guauuuccuauagugagggccu

SEQ ID NO: 768660 - RNA, 22 nt, Human
auuccauuguguaaggauaucg

SEQ ID NO: 768661 - RNA, 22 nt, Human
gagagguagcaguaagaacagg

SEQ ID NO: 768662 - RNA, 22 nt, Human
cagguggggagaguguggagca

SEQ ID NO: 768663 - RNA, 21 nt, Human
agagcugguagguagguaggu

SEQ ID NO: 768664 - RNA, 18 nt, Human
gaccccgggaucugucga

SEQ ID NO: 768665 - RNA, 22 nt, Human
cugaggggauguuuuugacgga

SEQ ID NO: 768666 - RNA, 22 nt, Human
augcuuaaugaggguauauaug

SEQ ID NO: 768667 - RNA, 22 nt, Human
ggugugucugccaggaacugca

SEQ ID NO: 768668 - RNA, 22 nt, Human
cuggggcccugggucugcccuc

SEQ ID NO: 768669 - RNA, 22 nt, Human
gcugucacacaugggaucucag

SEQ ID NO: 768670 - RNA, 22 nt, Human
gaaacauuuguugaguacuugc

SEQ ID NO: 768671 - RNA, 22 nt, Human
uacaggguauucaaggguaguu

SEQ ID NO: 768672 - RNA, 22 nt, Human
ugaggagccacucuagcaguca

SEQ ID NO: 768673 - RNA, 22 nt, Human
cacacugacuggaaucaaggau

SEQ ID NO: 768674 - RNA, 22 nt, Human
aacacuaacauauagucagugg

SEQ ID NO: 768675 - RNA, 22 nt, Human
uaggucuguacccuguccuucu

SEQ ID NO: 768676 - RNA, 21 nt, Human
ugcacagggcccaggagagcc

SEQ ID NO: 768677 - RNA, 22 nt, Human
uaacagaaguuguucauugugg

SEQ ID NO: 768678 - RNA, 23 nt, Human
ugggcagcuucugcaugcccacc

SEQ ID NO: 768679 - RNA, 22 nt, Human
gggcuucaggagggucagccca

SEQ ID NO: 768680 - RNA, 22 nt, Human
ucaguguuuaccguauguuguu

SEQ ID NO: 768681 - RNA, 22 nt, Human
ugcaggugguuuggacacugcu

SEQ ID NO: 768682 - RNA, 22 nt, Human
cuuucauucuuagauauuagug

SEQ ID NO: 768683 - RNA, 22 nt, Human
caguagacacauuaauauggaa

SEQ ID NO: 768684 - RNA, 22 nt, Human
uccugagagcagcugcuuugga

SEQ ID NO: 768685 - RNA, 22 nt, Human
guccucaggcuugaguguuuau

SEQ ID NO: 768686 - RNA, 22 nt, Human
uagcaaugcuucauuauuuaaa

SEQ ID NO: 768687 - RNA, 22 nt, Human
cuggccugaggucggcuguagg

SEQ ID NO: 768688 - RNA, 22 nt, Human
aaggcagagucuaucuuggaag

SEQ ID NO: 768689 - RNA, 22 nt, Human
ucaucaguuuagaaaaaauaug

SEQ ID NO: 768690 - RNA, 22 nt, Human
cagcuucucgggagcgcaugug

SEQ ID NO: 768691 - RNA, 22 nt, Human
caucagcuuuucuaugugguga

SEQ ID NO: 768692 - RNA, 22 nt, Human
gucugggcuccuggcaggcagc

SEQ ID NO: 768693 - RNA, 22 nt, Human
guggagcauaacacacuagccu

SEQ ID NO: 768694 - RNA, 23 nt, Human
gaggagggucugacaaguguagc

SEQ ID NO: 768695 - RNA, 22 nt, Human
gugugugugcaucucuuuuauu

SEQ ID NO: 768696 - RNA, 22 nt, Human
uucacaaagcuggagcauuucc

SEQ ID NO: 768697 - RNA, 22 nt, Human
ugggccagagaguaagaaaggu

SEQ ID NO: 768698 - RNA, 22 nt, Human
ugugcuucucuuucucacuuaa

SEQ ID NO: 768699 - RNA, 22 nt, Human
augcaaaugcagccauugcaga

SEQ ID NO: 768700 - RNA, 22 nt, Human
uugggcuugucugggaaacugc

SEQ ID NO: 768701 - RNA, 22 nt, Human
ggcucuggggggaagucuguug

SEQ ID NO: 768702 - RNA, 22 nt, Human
caguccuugcucaaagucuaca

SEQ ID NO: 768703 - RNA, 22 nt, Human
acaggcaccuccagggguaugu

SEQ ID NO: 768704 - RNA, 22 nt, Human
gaggguggaucagccugauugg

SEQ ID NO: 768705 - RNA, 22 nt, Human
gcuuugcacagugcuguguuaa

SEQ ID NO: 768706 - RNA, 20 nt, Human
uacaaagaaugagguucagg

SEQ ID NO: 768707 - RNA, 22 nt, Human
caggaaauucuuuuuaacagaa

SEQ ID NO: 768708 - RNA, 22 nt, Human
ugacagagugacacucuugucu

SEQ ID NO: 768709 - RNA, 22 nt, Human
uuaaauguuuaaucuaacuuga

SEQ ID NO: 768710 - RNA, 22 nt, Human
gccaauuuauagccaaaaauca

SEQ ID NO: 768711 - RNA, 22 nt, Human
aggaaaaugauauucugcuguu

SEQ ID NO: 768712 - RNA, 22 nt, Human
cagacaggagacuggaucaugg

SEQ ID NO: 768713 - RNA, 22 nt, Human
aggauacauguuuuuuaucaau

SEQ ID NO: 768714 - RNA, 22 nt, Human
aaagaaaccuaucagccacaug

SEQ ID NO: 768715 - RNA, 22 nt, Human
ggccugagaauguaccagaucu

SEQ ID NO: 768716 - RNA, 22 nt, Human
cuagagaaucuuuuaagaagug

SEQ ID NO: 768717 - RNA, 22 nt, Human
ggaggccaaggaggagcuugcc

SEQ ID NO: 768718 - RNA, 22 nt, Human
auagggccuaaaaaguauugcu

SEQ ID NO: 768719 - RNA, 22 nt, Human
ugcaucuguucagagcugucga

SEQ ID NO: 768720 - RNA, 22 nt, Human
ucacauugaauggaagaauaga

SEQ ID NO: 768721 - RNA, 22 nt, Human
aaagacauggcaagagaugggg

SEQ ID NO: 768722 - RNA, 20 nt, Human
gggaggccccagaguccagg

SEQ ID NO: 768723 - RNA, 21 nt, Human
uuccacagugagaacugcaag

SEQ ID NO: 768724 - RNA, 22 nt, Human
uuugacuccuguguuucuggaa

SEQ ID NO: 768725 - RNA, 22 nt, Human
uaaccuacaugagaacuuuaaa

SEQ ID NO: 768726 - RNA, 20 nt, Human
caaugcacacagcugcuucu

SEQ ID NO: 768727 - RNA, 22 nt, Human
uacauaauaaggggcauggugu

SEQ ID NO: 768728 - RNA, 22 nt, Human
uccuugaauccuagcauccuau

SEQ ID NO: 768729 - RNA, 22 nt, Human
uuauucagugcauauauuaaaa

SEQ ID NO: 768730 - RNA, 18 nt, Human
uugcuucuuuucucuagg

SEQ ID NO: 768731 - RNA, 22 nt, Human
agagggugggcacgugauggau

SEQ ID NO: 768732 - RNA, 22 nt, Human
ugcuuauuaaacaugcauauuc

SEQ ID NO: 768733 - RNA, 22 nt, Human
agcaguuuuagggagacacauu

SEQ ID NO: 768734 - RNA, 22 nt, Human
augcuuggccccuuuauagccu

SEQ ID NO: 768735 - RNA, 22 nt, Human
ugaugagguggauucaaagcag

SEQ ID NO: 768736 - RNA, 22 nt, Human
ucauagcuaagcuccagagugc

SEQ ID NO: 768737 - RNA, 22 nt, Human
uucauuuaaucagaaucucuaa

SEQ ID NO: 768738 - RNA, 22 nt, Human
gcagggacgccagggacagcaa

SEQ ID NO: 768739 - RNA, 19 nt, Human
gcacacccugcaccaccau

SEQ ID NO: 768740 - RNA, 22 nt, Human
uuuacagucucuauagucaaaa

SEQ ID NO: 768741 - RNA, 22 nt, Human
ggcucuguggcuggccaugaug

SEQ ID NO: 768742 - RNA, 22 nt, Human
ugcuauacauguacauauuagu

SEQ ID NO: 768743 - RNA, 22 nt, Human
ucugagaaggugcaucagcugc

SEQ ID NO: 768744 - RNA, 23 nt, Human
caguggucagaacgugggagggu

SEQ ID NO: 768745 - RNA, 23 nt, Human
uggcucagcuaguuuuccauuuc

SEQ ID NO: 768746 - RNA, 22 nt, Human
uagaggcauaagagggaagcag

SEQ ID NO: 768747 - RNA, 22 nt, Human
ucagugccaugggcagacaggc

SEQ ID NO: 768748 - RNA, 22 nt, Human
acagcagcacuauugacauuuu

SEQ ID NO: 768749 - RNA, 22 nt, Human
ugagcaguggcaccaggucacc

SEQ ID NO: 768750 - RNA, 22 nt, Human
gcaggaauauaguauuucgagg

SEQ ID NO: 768751 - RNA, 22 nt, Human
cucugcaacuucuagcaguguc

SEQ ID NO: 768752 - RNA, 22 nt, Human
gggaguggggcuuaccuugaag

SEQ ID NO: 768753 - RNA, 22 nt, Human
cacuauaucuguucuuguuuau

SEQ ID NO: 768754 - RNA, 22 nt, Human
gcucugccuccccuaguguuac

SEQ ID NO: 768755 - RNA, 22 nt, Human
aucaggauggguuuggcuuagg

SEQ ID NO: 768756 - RNA, 22 nt, Human
agccugagugcuuaggacuguu

SEQ ID NO: 768757 - RNA, 22 nt, Human
uuacuugauuugaaaaucauag

SEQ ID NO: 768758 - RNA, 21 nt, Human
uaaaugugagcagggcugggc

SEQ ID NO: 768759 - RNA, 22 nt, Human
auccacccugugguggcuuucu

SEQ ID NO: 768760 - RNA, 22 nt, Human
uuuaauauucugcauucuccuu

SEQ ID NO: 768761 - RNA, 22 nt, Human
uccagcugacacuuaaggggag

SEQ ID NO: 768762 - RNA, 22 nt, Human
uaaauguguuguggaugaaguu

SEQ ID NO: 768763 - RNA, 22 nt, Human
cagucccagcugcucagaaggc

SEQ ID NO: 768764 - RNA, 19 nt, Human
aggcagcauucuggggcuu

SEQ ID NO: 768765 - RNA, 22 nt, Human
cacaggcugggaagccuaggcc

SEQ ID NO: 768766 - RNA, 22 nt, Human
uccuccucuaucagacagugcc

SEQ ID NO: 768767 - RNA, 23 nt, Human
uccugaggguuucccagccuugg

SEQ ID NO: 768768 - RNA, 18 nt, Human
acucugcggaggccccag

SEQ ID NO: 768769 - RNA, 22 nt, Human
uaaccuguuaagggcugaccca

SEQ ID NO: 768770 - RNA, 22 nt, Human
ugccuuggauugcagggaaccu

SEQ ID NO: 768771 - RNA, 22 nt, Human
ggaccugcucucccaguucucu

SEQ ID NO: 768772 - RNA, 17 nt, Human
ugugcauagaauaauga

SEQ ID NO: 768773 - RNA, 22 nt, Human
gaagcccaggcuuccuuggcuu

SEQ ID NO: 768774 - RNA, 22 nt, Human
ucauaggaguagcagugagagg

SEQ ID NO: 768775 - RNA, 22 nt, Human
ucacuggggccaugugagggac

SEQ ID NO: 768776 - RNA, 22 nt, Human
ugccugcccacgacuacagcag

SEQ ID NO: 768777 - RNA, 22 nt, Human
uuauuaagugccuacaauaaag

SEQ ID NO: 768778 - RNA, 22 nt, Human
gccagauguagauagcaaggua

SEQ ID NO: 768779 - RNA, 22 nt, Human
cagggucugaugguccucacuu

SEQ ID NO: 768780 - RNA, 22 nt, Human
gcucuguguucccuccaggcuc

SEQ ID NO: 768781 - RNA, 22 nt, Human
guucucucugcuuccaagaugg

SEQ ID NO: 768782 - RNA, 22 nt, Human
cagcccagugcacgcccguuuc

SEQ ID NO: 768783 - RNA, 22 nt, Human
cucaggauagauuguccucuca

SEQ ID NO: 768784 - RNA, 22 nt, Human
uacauguaagacaugagacucu

SEQ ID NO: 768785 - RNA, 22 nt, Human
caaagugcugagauuacaggua

SEQ ID NO: 768786 - RNA, 22 nt, Human
ugccacaguuguuugugcucua

SEQ ID NO: 768787 - RNA, 22 nt, Human
gcugaagguguguggagagagg

SEQ ID NO: 768788 - RNA, 22 nt, Human
agccaacagccagcaucaacca

SEQ ID NO: 768789 - RNA, 22 nt, Human
uucaagucaaggaaagaggucu

SEQ ID NO: 768790 - RNA, 21 nt, Human
uuuagcauuuacauauuucca

SEQ ID NO: 768791 - RNA, 22 nt, Human
uacagaauagaauagggacagg

SEQ ID NO: 768792 - RNA, 22 nt, Human
aaucgaaagcugagggagcauu

SEQ ID NO: 768793 - RNA, 22 nt, Human
ucacucuguuuuacucacuguu

SEQ ID NO: 768794 - RNA, 22 nt, Human
ugaggcaugguccugagggagc

SEQ ID NO: 768795 - RNA, 22 nt, Human
uagauucuucuuuugagucucu

SEQ ID NO: 768796 - RNA, 22 nt, Human
uuuuggaauuuauacaguaaug

SEQ ID NO: 768797 - RNA, 22 nt, Human
uuggagggacagauggcuaggc

SEQ ID NO: 768798 - RNA, 22 nt, Human
gugagguccuaauagacaucga

SEQ ID NO: 768799 - RNA, 22 nt, Human
gcccagcaggacagagugguuu

SEQ ID NO: 768800 - RNA, 20 nt, Human
aacacagauaccaaagguug

SEQ ID NO: 768801 - RNA, 22 nt, Human
caguggucccugagguugcugg

SEQ ID NO: 768802 - RNA, 15 nt, Human
aggcacugugggacc

SEQ ID NO: 768803 - RNA, 22 nt, Human
uugaaagggauauaucuuucug

SEQ ID NO: 768804 - RNA, 21 nt, Human
agauaguugggcaugcagcug

SEQ ID NO: 768805 - RNA, 22 nt, Human
uggucugauaccggauuccagu

SEQ ID NO: 768806 - RNA, 22 nt, Human
aaggcagccagauccuuugggu

SEQ ID NO: 768807 - RNA, 22 nt, Human
cugggcaccaggcaugacaggg

SEQ ID NO: 768808 - RNA, 22 nt, Human
gcucucagaugcuccagcagcc

SEQ ID NO: 768809 - RNA, 22 nt, Human
ugugugugcacaugcauauaca

SEQ ID NO: 768810 - RNA, 22 nt, Human
ucucugagggagauggccugcc

SEQ ID NO: 768811 - RNA, 22 nt, Human
cuucccacagaauucaaucagu

SEQ ID NO: 768812 - RNA, 18 nt, Human
ucagucuauuguauaaga

SEQ ID NO: 768813 - RNA, 22 nt, Human
uacugugucuuaggauguggaa

SEQ ID NO: 768814 - RNA, 22 nt, Human
aguaggaggcgggagcaugaag

SEQ ID NO: 768815 - RNA, 22 nt, Human
cucucuggauauuuguaugcug

SEQ ID NO: 768816 - RNA, 22 nt, Human
uauuaugaucgugacucaagga

SEQ ID NO: 768817 - RNA, 22 nt, Human
acuuaguggcuaugugaccuua

SEQ ID NO: 768818 - RNA, 22 nt, Human
uuauuagguuuacauaaagguu

SEQ ID NO: 768819 - RNA, 22 nt, Human
cucuccaguuauagcugauuug

SEQ ID NO: 768820 - RNA, 22 nt, Human
gcugcuuuuuggauuuggcaca

SEQ ID NO: 768821 - RNA, 22 nt, Human
uagggcaguuucauguuaucuu

SEQ ID NO: 768822 - RNA, 22 nt, Human
ugaagcagagugaaggugaauu

SEQ ID NO: 768823 - RNA, 22 nt, Human
ggcuccagcuaaugguuucuau

SEQ ID NO: 768824 - RNA, 22 nt, Human
augaaugacugucuacuuuggg

SEQ ID NO: 768825 - RNA, 20 nt, Human
aucuucuuggccagcuugcu

SEQ ID NO: 768826 - RNA, 22 nt, Human
ugccagagaggagaaagcauuu

SEQ ID NO: 768827 - RNA, 22 nt, Human
caggaagaaagaggugaggugu

SEQ ID NO: 768828 - RNA, 20 nt, Human
ucacaggagggaaggcaggu

SEQ ID NO: 768829 - RNA, 22 nt, Human
agagcaagugacagaaacaggg

SEQ ID NO: 768830 - RNA, 22 nt, Human
ugauggcuaucccuggaagggc

SEQ ID NO: 768831 - RNA, 17 nt, Human
gaguaguuacaacagac

SEQ ID NO: 768832 - RNA, 22 nt, Human
auugucuuaaacaaauguguuu

SEQ ID NO: 768833 - RNA, 22 nt, Human
uagggcugaggcaacaagggag

SEQ ID NO: 768834 - RNA, 22 nt, Human
auuacaguaacagcuacaaugc

SEQ ID NO: 768835 - RNA, 22 nt, Human
agaguguaauaagggcaagggc

SEQ ID NO: 768836 - RNA, 22 nt, Human
uauggcuucauugugcuccgca

SEQ ID NO: 768837 - RNA, 22 nt, Human
auucuuuacauuggcuucuucc

SEQ ID NO: 768838 - RNA, 22 nt, Human
uguuuuuccaugugcagaacaa

SEQ ID NO: 768839 - RNA, 22 nt, Human
agauuacagcaugggaauggga

SEQ ID NO: 768840 - RNA, 22 nt, Human
guccaugauucuguguaguaga

SEQ ID NO: 768841 - RNA, 22 nt, Human
cgcaggcuccggggugcccugg

SEQ ID NO: 768842 - RNA, 22 nt, Human
aaaaaugucauuauggaacuga

SEQ ID NO: 768843 - RNA, 22 nt, Human
ccagggaggguccuguggcuuc

SEQ ID NO: 768844 - RNA, 22 nt, Human
ggcuucuuccuggcuccuauua

SEQ ID NO: 768845 - RNA, 22 nt, Human
ucaguuuuucuauacuuuguag

SEQ ID NO: 768846 - RNA, 22 nt, Human
uaaaggccuaguaaguugagac

SEQ ID NO: 768847 - RNA, 23 nt, Human
aacugucuugcaagugugauacc

SEQ ID NO: 768848 - RNA, 22 nt, Human
cucucaaaugucauuccucuau

SEQ ID NO: 768849 - RNA, 22 nt, Human
cugccaggccuccgcugucccc

SEQ ID NO: 768850 - RNA, 22 nt, Human
ccugggcccucaccgccggugg

SEQ ID NO: 768851 - RNA, 22 nt, Human
aggcaguggagcuggaauaggc

SEQ ID NO: 768852 - RNA, 22 nt, Human
augacaagaguguucagggaga

SEQ ID NO: 768853 - RNA, 22 nt, Human
uuggcuucucuuaacccuaaag

SEQ ID NO: 768854 - RNA, 22 nt, Human
aaugcauugauugcuggaaaua

SEQ ID NO: 768855 - RNA, 22 nt, Human
ccacaguagcauccaaacagua

SEQ ID NO: 768856 - RNA, 22 nt, Human
ugauuguauagggguuauuaau

SEQ ID NO: 768857 - RNA, 20 nt, Human
ugcaggaauuugcauuccuu

SEQ ID NO: 768858 - RNA, 22 nt, Human
uauuugagcgaagcaguguuuu

SEQ ID NO: 768859 - RNA, 22 nt, Human
gcagaggcagggcccuccucca

SEQ ID NO: 768860 - RNA, 20 nt, Human
cucaguguggccugaguguu

SEQ ID NO: 768861 - RNA, 18 nt, Human
ccaguaccuccuccucuc

SEQ ID NO: 768862 - RNA, 22 nt, Human
gugcaggggaucagguugcagc

SEQ ID NO: 768863 - RNA, 22 nt, Human
gcagcauccugggccacagucc

SEQ ID NO: 768864 - RNA, 19 nt, Human
ggaaacaggggccagagga

SEQ ID NO: 768865 - RNA, 22 nt, Human
aacuuauugaacauucucgaau

SEQ ID NO: 768866 - RNA, 22 nt, Human
aggcucagagagcuguguccau

SEQ ID NO: 768867 - RNA, 22 nt, Human
ggacccagcucugagacccugc

SEQ ID NO: 768868 - RNA, 22 nt, Human
agcuguuuuccugguuagagac

SEQ ID NO: 768869 - RNA, 22 nt, Human
uuucuauaucuuaccuauugua

SEQ ID NO: 768870 - RNA, 22 nt, Human
auugaaagauauacuguucuca

SEQ ID NO: 768871 - RNA, 22 nt, Human
ucagcucucugggcucgaaccu

SEQ ID NO: 768872 - RNA, 18 nt, Human
aguaaauguuaaauauug

SEQ ID NO: 768873 - RNA, 22 nt, Human
cagcuggggagagacauggcag

SEQ ID NO: 768874 - RNA, 22 nt, Human
agcuuuaucacaauauuggcua

SEQ ID NO: 768875 - RNA, 22 nt, Human
caucuucugggacuucucaguu

SEQ ID NO: 768876 - RNA, 22 nt, Human
agaauugcuaacucuccuccug

SEQ ID NO: 768877 - RNA, 19 nt, Human
ucagggaguuuacagcaug

SEQ ID NO: 768878 - RNA, 22 nt, Human
uccugcagcauccgucgucugu

SEQ ID NO: 768879 - RNA, 22 nt, Human
ucucugugguacugagagucua

SEQ ID NO: 768880 - RNA, 22 nt, Human
ggaggccaugggcagaaucuuu

SEQ ID NO: 768881 - RNA, 22 nt, Human
uaauugaacuaacaugcaaaca

SEQ ID NO: 768882 - RNA, 22 nt, Human
agcucagagcucgggaggaugg

SEQ ID NO: 768883 - RNA, 22 nt, Human
aguacuuuacuucuuacaguuu

SEQ ID NO: 768884 - RNA, 22 nt, Human
gaggagcugggacccugucauc

SEQ ID NO: 768885 - RNA, 22 nt, Human
caggcacugugcuagauccuug

SEQ ID NO: 768886 - RNA, 22 nt, Human
cccaucacagacacuggguuau

SEQ ID NO: 768887 - RNA, 22 nt, Human
cugagguggggccugggcauca

SEQ ID NO: 768888 - RNA, 22 nt, Human
caucuuuguuuuggauauaauc

SEQ ID NO: 768889 - RNA, 22 nt, Human
agggucaccaguucauaggcac

SEQ ID NO: 768890 - RNA, 22 nt, Human
ccuggagugacagguguagccu

SEQ ID NO: 768891 - RNA, 22 nt, Human
ugucagcagcugguuugcuguu

SEQ ID NO: 768892 - RNA, 22 nt, Human
cacagggcagugauuguccaca

SEQ ID NO: 768893 - RNA, 22 nt, Human
cauuuagagaagauuacaagga

SEQ ID NO: 768894 - RNA, 22 nt, Human
acaaaggcaggauugacuuagu

SEQ ID NO: 768895 - RNA, 20 nt, Human
aggcucagagcaguaguaca

SEQ ID NO: 768896 - RNA, 22 nt, Human
cagcagauuugggaaacacugu

SEQ ID NO: 768897 - RNA, 22 nt, Human
aagccaagguuuuggucacagc

SEQ ID NO: 768898 - RNA, 22 nt, Human
ugugaaauguggauguuaauag

SEQ ID NO: 768899 - RNA, 22 nt, Human
aaacacaagaggcaggguacag

SEQ ID NO: 768900 - RNA, 22 nt, Human
gguggcagcauggucccagugu

SEQ ID NO: 768901 - RNA, 19 nt, Human
acacugaucagaucagcag

SEQ ID NO: 768902 - RNA, 19 nt, Human
uaacaagcacucugcauuc

SEQ ID NO: 768903 - RNA, 22 nt, Human
uugccaccgucauggccauuau

SEQ ID NO: 768904 - RNA, 22 nt, Human
agagcuuuuacuuacauucuau

SEQ ID NO: 768905 - RNA, 22 nt, Human
uccuuuaacuaguuaccauguu

SEQ ID NO: 768906 - RNA, 22 nt, Human
ucaggaagggcucagucugugc

SEQ ID NO: 768907 - RNA, 22 nt, Human
aucuauuucugcuaauaacaau

SEQ ID NO: 768908 - RNA, 22 nt, Human
cugugugcugaaaugcagugag

SEQ ID NO: 768909 - RNA, 22 nt, Human
auuucuagacuuagaacucuua

SEQ ID NO: 768910 - RNA, 22 nt, Human
uauagacuugaugguauuaagu

SEQ ID NO: 768911 - RNA, 22 nt, Human
aagucccuggugcuggcugcgc

SEQ ID NO: 768912 - RNA, 22 nt, Human
uguggcagaguaaggacccagu

SEQ ID NO: 768913 - RNA, 22 nt, Human
accacaggaauugcucuguggu

SEQ ID NO: 768914 - RNA, 22 nt, Human
gggacaggcaaagguaugcuuc

SEQ ID NO: 768915 - RNA, 22 nt, Human
ggaaggagcauuugccaguuua

SEQ ID NO: 768916 - RNA, 22 nt, Human
uuaagagauuuaggaacauuau

SEQ ID NO: 768917 - RNA, 22 nt, Human
gcuucuggaggagcugggcuga

SEQ ID NO: 768918 - RNA, 22 nt, Human
uuauaacaacaguuuacuuuaa

SEQ ID NO: 768919 - RNA, 22 nt, Human
augugcguguguacauauauau

SEQ ID NO: 768920 - RNA, 21 nt, Human
cccagggaagccgcagucacc

SEQ ID NO: 768921 - RNA, 22 nt, Human
acaaggcuucacacaguaugaa

SEQ ID NO: 768922 - RNA, 22 nt, Human
uuucuagucucgaucucuuaau

SEQ ID NO: 768923 - RNA, 22 nt, Human
uugggcagcauugcaguucccu

SEQ ID NO: 768924 - RNA, 22 nt, Human
ggcugccaggagggaggccagu

SEQ ID NO: 768925 - RNA, 22 nt, Human
auguuuccauguucaauuuacu

SEQ ID NO: 768926 - RNA, 18 nt, Human
ggguggugugcucuucgc

SEQ ID NO: 768927 - RNA, 22 nt, Human
gucagaggaggcugaguaggaa

SEQ ID NO: 768928 - RNA, 22 nt, Human
guggccagugggaaugggcuca

SEQ ID NO: 768929 - RNA, 22 nt, Human
ccugggagaacugcuggguugg

SEQ ID NO: 768930 - RNA, 22 nt, Human
gugcugccuccauauccgucag

SEQ ID NO: 768931 - RNA, 22 nt, Human
ggugggaggcaggcugcuccca

SEQ ID NO: 768932 - RNA, 22 nt, Human
ccucugcacuucaccuuagcuc

SEQ ID NO: 768933 - RNA, 22 nt, Human
uggcucuggagcuccugggccc

SEQ ID NO: 768934 - RNA, 22 nt, Human
acccagagcacagaugcaacgu

SEQ ID NO: 768935 - RNA, 22 nt, Human
aaugucuacaccguauguuguu

SEQ ID NO: 768936 - RNA, 22 nt, Human
ucaagauaccaccauuauaugu

SEQ ID NO: 768937 - RNA, 22 nt, Human
aggaagugggguucucucacug

SEQ ID NO: 768938 - RNA, 22 nt, Human
caggcagagacgucaguguagg

SEQ ID NO: 768939 - RNA, 21 nt, Human
gcccacagugaggaggauccc

SEQ ID NO: 768940 - RNA, 22 nt, Human
uaacuucacuggacucagcagc

SEQ ID NO: 768941 - RNA, 22 nt, Human
cagcuccuaugaguaugauucc

SEQ ID NO: 768942 - RNA, 22 nt, Human
acagggucuuagagaucaccug

SEQ ID NO: 768943 - RNA, 22 nt, Human
cagggcauaagaugaggcugua

SEQ ID NO: 768944 - RNA, 22 nt, Human
gguggcaguggucucugacaga

SEQ ID NO: 768945 - RNA, 22 nt, Human
ucucucaggaggcagguuccua

SEQ ID NO: 768946 - RNA, 20 nt, Human
cucugggcugcacccucgcc

SEQ ID NO: 768947 - RNA, 22 nt, Human
ggcaggcuagcacugauguccu

SEQ ID NO: 768948 - RNA, 22 nt, Human
ucuuagaaugucaacugauguu

SEQ ID NO: 768949 - RNA, 22 nt, Human
uuuaugauuaauccaauucugu

SEQ ID NO: 768950 - RNA, 22 nt, Human
agucauuuucugccuguaaucu

SEQ ID NO: 768951 - RNA, 22 nt, Human
uggcaaagacgcuagcuaagau

SEQ ID NO: 768952 - RNA, 22 nt, Human
acucucucacagcuuggcugau

SEQ ID NO: 768953 - RNA, 22 nt, Human
ucacaggagucauaauuacagu

SEQ ID NO: 768954 - RNA, 22 nt, Human
ucaugugucugcugcagcuguu

SEQ ID NO: 768955 - RNA, 22 nt, Human
agaaauguugaauacacaaaau

SEQ ID NO: 768956 - RNA, 22 nt, Human
ccucugcucccuggugucugag

SEQ ID NO: 768957 - RNA, 22 nt, Human
aagcauuuauagauaagaauuu

SEQ ID NO: 768958 - RNA, 22 nt, Human
uacuuacagaaggaagcaauug

SEQ ID NO: 768959 - RNA, 22 nt, Human
gccagcagggaagccuugggcu

SEQ ID NO: 768960 - RNA, 22 nt, Human
ccucuggggucuagcaauagca

SEQ ID NO: 768961 - RNA, 22 nt, Human
auagaagcaagaacagaaugga

SEQ ID NO: 768962 - RNA, 22 nt, Human
gccaaagcagucuugccucugc

SEQ ID NO: 768963 - RNA, 22 nt, Human
agcugugggagaaucucugggu

SEQ ID NO: 768964 - RNA, 22 nt, Human
ugaaggccagggauuugcagcc

SEQ ID NO: 768965 - RNA, 22 nt, Human
gagcccugauuugcagcauuug

SEQ ID NO: 768966 - RNA, 20 nt, Human
aguggcagggaaauggaaag

SEQ ID NO: 768967 - RNA, 22 nt, Human
acagauuuaggacuguagcgau

SEQ ID NO: 768968 - RNA, 22 nt, Human
cuggagcugucuucacaggccu

SEQ ID NO: 768969 - RNA, 22 nt, Human
agaagcugugguaugaaaugug

SEQ ID NO: 768970 - RNA, 22 nt, Human
gugcccugucucuugucuccag

SEQ ID NO: 768971 - RNA, 22 nt, Human
aucuguaacugcuaucaucucc

SEQ ID NO: 768972 - RNA, 22 nt, Human
gaaacauaguugagacacugcu

SEQ ID NO: 768973 - RNA, 22 nt, Human
ggcuccaugcugagcuuugaau

SEQ ID NO: 768974 - RNA, 22 nt, Human
uuuaucagaggcuauguuucau

SEQ ID NO: 768975 - RNA, 22 nt, Human
augccuggacuguaucccagau

SEQ ID NO: 768976 - RNA, 22 nt, Human
gcuagccugcaguggcuauggu

SEQ ID NO: 768977 - RNA, 20 nt, Human
gcugcucuccacggucugca

SEQ ID NO: 768978 - RNA, 22 nt, Human
caaaacauucagagagcucacu

SEQ ID NO: 768979 - RNA, 22 nt, Human
aggcaggggagcuggaagggua

SEQ ID NO: 768980 - RNA, 22 nt, Human
aaugagaagccuagguguacug

SEQ ID NO: 768981 - RNA, 22 nt, Human
ucuucauguugcuuauucuggg

SEQ ID NO: 768982 - RNA, 22 nt, Human
aaaugucuuucaauagagaaau

SEQ ID NO: 768983 - RNA, 22 nt, Human
aucuagauuagguauaagagcu

SEQ ID NO: 768984 - RNA, 22 nt, Human
uuacagaaggaacacuacucag

SEQ ID NO: 768985 - RNA, 22 nt, Human
caggagcuuucuucccaaacuu

SEQ ID NO: 768986 - RNA, 22 nt, Human
ugacucugcugugaaagcauuu

SEQ ID NO: 768987 - RNA, 22 nt, Human
cucaguacuuuauguauaugau

SEQ ID NO: 768988 - RNA, 22 nt, Human
cuggccagggugcgaucguggu

SEQ ID NO: 768989 - RNA, 22 nt, Human
uaggagccugcucugcagggac

SEQ ID NO: 768990 - RNA, 22 nt, Human
guacaggaccgcggcccccugg

SEQ ID NO: 768991 - RNA, 22 nt, Human
agugaccaucuaacgccuguga

SEQ ID NO: 768992 - RNA, 17 nt, Human
gaccaggagaaaccagg

SEQ ID NO: 768993 - RNA, 22 nt, Human
uucucccugccaaagcugccuc

SEQ ID NO: 768994 - RNA, 23 nt, Human
acugagcauuaguauuuuuauaa

SEQ ID NO: 768995 - RNA, 22 nt, Human
uucuaauuguguuugcauaucu

SEQ ID NO: 768996 - RNA, 22 nt, Human
gguacaaugguucauuuuaugu

SEQ ID NO: 768997 - RNA, 22 nt, Human
ucccagagauuuccucuccuuc

SEQ ID NO: 768998 - RNA, 21 nt, Human
cucucugcuuaugaauaguga

SEQ ID NO: 768999 - RNA, 22 nt, Human
ugaggugacaauucauucucca

SEQ ID NO: 769000 - RNA, 22 nt, Human
cagcugcaugucuguggugguc

SEQ ID NO: 769001 - RNA, 22 nt, Human
agcuggaggauaacucacuucu

SEQ ID NO: 769002 - RNA, 22 nt, Human
aagugcaucacuacucauuaca

SEQ ID NO: 769003 - RNA, 22 nt, Human
gaacaucaugaagaaaacauau

SEQ ID NO: 769004 - RNA, 22 nt, Human
cugcacacauauggcuucucuc

SEQ ID NO: 769005 - RNA, 22 nt, Human
ccuggcagguggcgcccucggc

SEQ ID NO: 769006 - RNA, 22 nt, Human
ccucuggccagagaaaggccag

SEQ ID NO: 769007 - RNA, 22 nt, Human
cuuguacaugauaaucucacuc

SEQ ID NO: 769008 - RNA, 22 nt, Human
aaucagaaauucuacaucacaa

SEQ ID NO: 769009 - RNA, 22 nt, Human
gugggugcggggagccgaggcg

SEQ ID NO: 769010 - RNA, 22 nt, Human
ugaaagucucuguuauagagaa

SEQ ID NO: 769011 - RNA, 22 nt, Human
uucucuauguguguuguaguuu

SEQ ID NO: 769012 - RNA, 22 nt, Human
uuauuuuaccuuccucugagcu

SEQ ID NO: 769013 - RNA, 22 nt, Human
caccugaagauuuagagauuga

SEQ ID NO: 769014 - RNA, 22 nt, Human
ucugcugcacaaauucaucucu

SEQ ID NO: 769015 - RNA, 22 nt, Human
ggucagcaucugguugagggca

SEQ ID NO: 769016 - RNA, 22 nt, Human
aaaugcucuggggauaagacug

SEQ ID NO: 769017 - RNA, 22 nt, Human
gguguggguccuugugcuugcu

SEQ ID NO: 769018 - RNA, 20 nt, Human
auucugcuuucugauagagc

SEQ ID NO: 769019 - RNA, 22 nt, Human
ugagaggagugauuguaaaauu

SEQ ID NO: 769020 - RNA, 18 nt, Human
cagcugugcccuguuugg

SEQ ID NO: 769021 - RNA, 22 nt, Human
ugcugagaugaauagagaccuc

SEQ ID NO: 769022 - RNA, 22 nt, Human
uggcuuccuccagagcaggagg

SEQ ID NO: 769023 - RNA, 22 nt, Human
guucacacuuuugauaugugaa

SEQ ID NO: 769024 - RNA, 22 nt, Human
ccugcaggcugcaggccaguuc

SEQ ID NO: 769025 - RNA, 22 nt, Human
guuaaacaagcuggacacugaa

SEQ ID NO: 769026 - RNA, 22 nt, Human
uccugaggcucacuuugaaugu

SEQ ID NO: 769027 - RNA, 22 nt, Human
uaagaugacuacuuaccacuga

SEQ ID NO: 769028 - RNA, 17 nt, Human
gcugaacaaggaaaaua

SEQ ID NO: 769029 - RNA, 22 nt, Human
ugcuggaaccaggaauuugaag

SEQ ID NO: 769030 - RNA, 22 nt, Human
uugggcagaggcugugcagagg

SEQ ID NO: 769031 - RNA, 22 nt, Human
caguaugucuacuggacaaagu

SEQ ID NO: 769032 - RNA, 22 nt, Human
ugucacuuuuuauagguguuga

SEQ ID NO: 769033 - RNA, 22 nt, Human
auguaggauugagugauagagg

SEQ ID NO: 769034 - RNA, 22 nt, Human
ugcauacacacauagguauggg

SEQ ID NO: 769035 - RNA, 22 nt, Human
uuccauuuuucuaacucucaga

SEQ ID NO: 769036 - RNA, 22 nt, Human
caaagauaaucacagaauaccc

SEQ ID NO: 769037 - RNA, 22 nt, Human
cucaggauauugggcuggagca

SEQ ID NO: 769038 - RNA, 22 nt, Human
acacauucaugagugcaugcac

SEQ ID NO: 769039 - RNA, 22 nt, Human
gacagucacuuccaggagagga

SEQ ID NO: 769040 - RNA, 22 nt, Human
ugcucuggguccugggccuccu

SEQ ID NO: 769041 - RNA, 22 nt, Human
uagaagauaagacaagugcugc

SEQ ID NO: 769042 - RNA, 22 nt, Human
uuccaauggaaucaugucuuga

SEQ ID NO: 769043 - RNA, 22 nt, Human
cucccuggcacagcgagagguu

SEQ ID NO: 769044 - RNA, 22 nt, Human
cuguccagcuuggcuccugggg

SEQ ID NO: 769045 - RNA, 22 nt, Human
cugggagagaagcgaagcuggg

SEQ ID NO: 769046 - RNA, 22 nt, Human
uccaugagcuagggauucauca

SEQ ID NO: 769047 - RNA, 22 nt, Human
ugcagaaauaaagauauuauca

SEQ ID NO: 769048 - RNA, 22 nt, Human
ucugggcccuaaaccagcucua

SEQ ID NO: 769049 - RNA, 22 nt, Human
agggcccuccccgcucagggca

SEQ ID NO: 769050 - RNA, 22 nt, Human
uuaugcaaagaaauagacuaau

SEQ ID NO: 769051 - RNA, 22 nt, Human
gaggaggcuguuucucugcauu

SEQ ID NO: 769052 - RNA, 22 nt, Human
gugugcauguggaagcauguau

SEQ ID NO: 769053 - RNA, 22 nt, Human
ggugcagaucuuucucuucagg

SEQ ID NO: 769054 - RNA, 22 nt, Human
gagugaaaaaggaagggccaua

SEQ ID NO: 769055 - RNA, 22 nt, Human
ggcugccuucagacuccagcuu

SEQ ID NO: 769056 - RNA, 22 nt, Human
ugaggugaccgcagaugggaag

SEQ ID NO: 769057 - RNA, 21 nt, Human
caagacauaugaguacucugg

SEQ ID NO: 769058 - RNA, 22 nt, Human
aggcuugguuaauucuguguga

SEQ ID NO: 769059 - RNA, 22 nt, Human
guggagacgggacagaagcuaa

SEQ ID NO: 769060 - RNA, 23 nt, Human
ucugagugauuagccucuggggu

SEQ ID NO: 769061 - RNA, 22 nt, Human
gacaagacaugugaugacauca

SEQ ID NO: 769062 - RNA, 22 nt, Human
acagagguguuccagaccuagg

SEQ ID NO: 769063 - RNA, 22 nt, Human
agugcauugcaucucugcuuca

SEQ ID NO: 769064 - RNA, 22 nt, Human
ggcucugccugcccagcagcac

SEQ ID NO: 769065 - RNA, 22 nt, Human
uaggaaaagucuagauugauga

SEQ ID NO: 769066 - RNA, 22 nt, Human
cuacagaauucaacaaaugguu

SEQ ID NO: 769067 - RNA, 18 nt, Human
uggcaggggcaguacgcc

SEQ ID NO: 769068 - RNA, 22 nt, Human
cccccauccaugucaggagagg

SEQ ID NO: 769069 - RNA, 22 nt, Human
acucccuuuccaggaaacacaa

SEQ ID NO: 769070 - RNA, 22 nt, Human
guuacaauguccuuacaugaaa

SEQ ID NO: 769071 - RNA, 18 nt, Human
cccucuugcacaaagcaa

SEQ ID NO: 769072 - RNA, 22 nt, Human
aaagcuauagggucaagcauuu

SEQ ID NO: 769073 - RNA, 22 nt, Human
uuugaaagccuggcuuuucucu

SEQ ID NO: 769074 - RNA, 22 nt, Human
uagcuugacuauucuaugaugu

SEQ ID NO: 769075 - RNA, 16 nt, Human
gggcaggaaucagggu

SEQ ID NO: 769076 - RNA, 22 nt, Human
gaaacacugguaaagacugccg

SEQ ID NO: 769077 - RNA, 22 nt, Human
ugggccucaucuucaaugaguc

SEQ ID NO: 769078 - RNA, 22 nt, Human
gagcuuccauccuuacugugug

SEQ ID NO: 769079 - RNA, 22 nt, Human
ucucagcagccagauccagagc

SEQ ID NO: 769080 - RNA, 23 nt, Human
ugcagcucaaagauggguaaaug

SEQ ID NO: 769081 - RNA, 22 nt, Human
gggaguggagagcaauggauga

SEQ ID NO: 769082 - RNA, 22 nt, Human
cugcagagcaaguucucuguug

SEQ ID NO: 769083 - RNA, 22 nt, Human
cccagacauaacagcagagagg

SEQ ID NO: 769084 - RNA, 22 nt, Human
cugggggucgcgccucugggca

SEQ ID NO: 769085 - RNA, 22 nt, Human
uggcugugaauggcaaauaauc

SEQ ID NO: 769086 - RNA, 22 nt, Human
uggccucuuaaggaugacacaa

SEQ ID NO: 769087 - RNA, 22 nt, Human
aacaguuugccugaaauguauu

SEQ ID NO: 769088 - RNA, 17 nt, Human
gcagcagagagacccuc

SEQ ID NO: 769089 - RNA, 22 nt, Human
acuggcuuugccucugccucuc

SEQ ID NO: 769090 - RNA, 20 nt, Human
uuucuuguacuuggagaagg

SEQ ID NO: 769091 - RNA, 22 nt, Human
cacagugaauuucaaguguugu

SEQ ID NO: 769092 - RNA, 22 nt, Human
gcucuccacugaccacggggca

SEQ ID NO: 769093 - RNA, 22 nt, Human
ugcccugugugugcaagcacug

SEQ ID NO: 769094 - RNA, 19 nt, Human
ggcugggucuggcagguuc

SEQ ID NO: 769095 - RNA, 22 nt, Human
acagaaguggcuucaaagagca

SEQ ID NO: 769096 - RNA, 22 nt, Human
auggcugccuuaauucuucagc

SEQ ID NO: 769097 - RNA, 22 nt, Human
agccagugcaacagcagugaag

SEQ ID NO: 769098 - RNA, 21 nt, Human
gccugggaagagaaagguaag

SEQ ID NO: 769099 - RNA, 22 nt, Human
ugcagcagguauggcaagcucc

SEQ ID NO: 769100 - RNA, 22 nt, Human
uccaguggguugcugagggagg

SEQ ID NO: 769101 - RNA, 22 nt, Human
uuggccuuguacaucauauuaa

SEQ ID NO: 769102 - RNA, 22 nt, Human
uggccuguggcuuaaggucugu

SEQ ID NO: 769103 - RNA, 22 nt, Human
uguguuucugagaaucccaccu

SEQ ID NO: 769104 - RNA, 19 nt, Human
ugcugacugagcugcaaaa

SEQ ID NO: 769105 - RNA, 22 nt, Human
auugguuuuguuaucuccauuc

SEQ ID NO: 769106 - RNA, 22 nt, Human
ugcuugcaagagaugcaaugac

SEQ ID NO: 769107 - RNA, 22 nt, Human
gaaugaacaaggauguucaucc

SEQ ID NO: 769108 - RNA, 22 nt, Human
uaagguuuguggggagcaaaag

SEQ ID NO: 769109 - RNA, 22 nt, Human
aauagacaauucuagccaacau

SEQ ID NO: 769110 - RNA, 22 nt, Human
ucucuggcugauauuccucugc

SEQ ID NO: 769111 - RNA, 22 nt, Human
guccuggguccccgcaggucag

SEQ ID NO: 769112 - RNA, 19 nt, Human
aggaaagguggccuuagca

SEQ ID NO: 769113 - RNA, 22 nt, Human
gaggcucuggaguagguacaca

SEQ ID NO: 769114 - RNA, 22 nt, Human
agauaaugauucugcauuucua

SEQ ID NO: 769115 - RNA, 22 nt, Human
ggagaagggccaauuccaugua

SEQ ID NO: 769116 - RNA, 17 nt, Human
cauuuguugaucaguug

SEQ ID NO: 769117 - RNA, 22 nt, Human
ggcugccagugagugcagaccg

SEQ ID NO: 769118 - RNA, 22 nt, Human
auuuauuccuuuauggcuggag

SEQ ID NO: 769119 - RNA, 22 nt, Human
aggccacagucagugggugcug

SEQ ID NO: 769120 - RNA, 22 nt, Human
agauuagguaugguuuaaguag

SEQ ID NO: 769121 - RNA, 22 nt, Human
uuauguaccugaauuaguaaag

SEQ ID NO: 769122 - RNA, 22 nt, Human
aaugaaugaaccacauauaaca

SEQ ID NO: 769123 - RNA, 22 nt, Human
uaagaauuccaucgcagaguau

SEQ ID NO: 769124 - RNA, 22 nt, Human
uacagauaggaggaaucugaaa

SEQ ID NO: 769125 - RNA, 22 nt, Human
cugcaaauaggggugugaauaa

SEQ ID NO: 769126 - RNA, 22 nt, Human
augguuaaauugguuauuuaug

SEQ ID NO: 769127 - RNA, 22 nt, Human
acauguggaggaggcgagggua

SEQ ID NO: 769128 - RNA, 22 nt, Human
uagcauaacagguaagagugag

SEQ ID NO: 769129 - RNA, 22 nt, Human
ggagcagacauaaccuuacaga

SEQ ID NO: 769130 - RNA, 22 nt, Human
agggcagccugagugcuggccc

SEQ ID NO: 769131 - RNA, 22 nt, Human
aggacuggcccugaggggaggc

SEQ ID NO: 769132 - RNA, 22 nt, Human
ugucugcuaaauuacuauuaca

SEQ ID NO: 769133 - RNA, 22 nt, Human
ugagacagccucugcacucaug

SEQ ID NO: 769134 - RNA, 22 nt, Human
gugcugauugggagcugggauu

SEQ ID NO: 769135 - RNA, 22 nt, Human
acugaugaaaacuaauaaauua

SEQ ID NO: 769136 - RNA, 22 nt, Human
ccaggcugugguuuagauagag

SEQ ID NO: 769137 - RNA, 23 nt, Human
aggcaagaacggguuguucaccc

SEQ ID NO: 769138 - RNA, 22 nt, Human
cagugcugacagggaggaaccu

SEQ ID NO: 769139 - RNA, 22 nt, Human
uucaugagcagaagggaggggu

SEQ ID NO: 769140 - RNA, 17 nt, Human
ucugucuugacugucac

SEQ ID NO: 769141 - RNA, 22 nt, Human
uuguuauuuaggucuggguuag

SEQ ID NO: 769142 - RNA, 22 nt, Human
ugccugugcccuucuuggcauu

SEQ ID NO: 769143 - RNA, 22 nt, Human
gaguccuggaacccugaaugcu

SEQ ID NO: 769144 - RNA, 22 nt, Human
ggccugaaugccugaguguggg

SEQ ID NO: 769145 - RNA, 22 nt, Human
cuccagggcagcauggcagugg

SEQ ID NO: 769146 - RNA, 22 nt, Human
uucaguuccuuaucauaggguu

SEQ ID NO: 769147 - RNA, 22 nt, Human
acacaucagaaauaugaaugag

SEQ ID NO: 769148 - RNA, 22 nt, Human
caguacuuauuucuauuuaggg

SEQ ID NO: 769149 - RNA, 22 nt, Human
aaccuuuugcaagugccuugac

SEQ ID NO: 769150 - RNA, 22 nt, Human
acaaugaauaucaugaaguacu

SEQ ID NO: 769151 - RNA, 22 nt, Human
gagucuucuacgcucacacaaa

SEQ ID NO: 769152 - RNA, 22 nt, Human
agguggcaguuguggaaccauc

SEQ ID NO: 769153 - RNA, 22 nt, Human
uugaagaugcugucucuuccag

SEQ ID NO: 769154 - RNA, 22 nt, Human
cagcagaggcacgucugugaau

SEQ ID NO: 769155 - RNA, 22 nt, Human
agcuggaaaauccaagaccuug

SEQ ID NO: 769156 - RNA, 22 nt, Human
cauguaaugcugggagcugggc

SEQ ID NO: 769157 - RNA, 22 nt, Human
ucagaauaugcuaaugacauuu

SEQ ID NO: 769158 - RNA, 22 nt, Human
aggugcaguggcucaugccugu

SEQ ID NO: 769159 - RNA, 22 nt, Human
acauucaaaauauuucugaugu

SEQ ID NO: 769160 - RNA, 21 nt, Human
caaccugagcugaacccgugc

SEQ ID NO: 769161 - RNA, 21 nt, Human
uccaaaccugucucuggcucu

SEQ ID NO: 769162 - RNA, 22 nt, Human
aucaggauagugguuaccuggg

SEQ ID NO: 769163 - RNA, 22 nt, Human
caucuuuguucuguaaacuuuu

SEQ ID NO: 769164 - RNA, 22 nt, Human
cuaguauuuaaaggcuaugauu

SEQ ID NO: 769165 - RNA, 18 nt, Human
uccagcucugccacuuac

SEQ ID NO: 769166 - RNA, 22 nt, Human
ugggcagggaucucuuuugcaa

SEQ ID NO: 769167 - RNA, 22 nt, Human
ggcuucugguaaagaccacacc

SEQ ID NO: 769168 - RNA, 22 nt, Human
cacauauaugggccccugaggg

SEQ ID NO: 769169 - RNA, 22 nt, Human
aaucuguuuuaucauuuguuac

SEQ ID NO: 769170 - RNA, 22 nt, Human
guguuaaccagcuaaacuuugc

SEQ ID NO: 769171 - RNA, 22 nt, Human
gcacagagucacuagcuaagca

SEQ ID NO: 769172 - RNA, 20 nt, Human
uauugugauagguguuaauc

SEQ ID NO: 769173 - RNA, 22 nt, Human
ugauuaaguucaaaauauagaa

SEQ ID NO: 769174 - RNA, 22 nt, Human
acagugauuauuaguugguggu

SEQ ID NO: 769175 - RNA, 22 nt, Human
uagacacauccguggaagcuuc

SEQ ID NO: 769176 - RNA, 22 nt, Human
uggcuccauucuuuaugaguug

SEQ ID NO: 769177 - RNA, 22 nt, Human
cagggacucccaggguagcucc

SEQ ID NO: 769178 - RNA, 22 nt, Human
aaagcaaacagaaccccaagcu

SEQ ID NO: 769179 - RNA, 21 nt, Human
acucaggagacuaacuauguc

SEQ ID NO: 769180 - RNA, 22 nt, Human
gcccugugugaucacaugaaca

SEQ ID NO: 769181 - RNA, 22 nt, Human
ggcucagaccucccagcuccag

SEQ ID NO: 769182 - RNA, 19 nt, Human
gagcacagcggcauuuggu

SEQ ID NO: 769183 - RNA, 22 nt, Human
ucagaaguauuaugcuaaagga

SEQ ID NO: 769184 - RNA, 22 nt, Human
aauguacagcugcugcugaagg

SEQ ID NO: 769185 - RNA, 19 nt, Human
uagcccuggccaucaugag

SEQ ID NO: 769186 - RNA, 22 nt, Human
ccagccuccauguagauagcug

SEQ ID NO: 769187 - RNA, 22 nt, Human
gugaacagauaauagaaaugaa

SEQ ID NO: 769188 - RNA, 20 nt, Human
acuuuaugaguucaauuuug

SEQ ID NO: 769189 - RNA, 19 nt, Human
uguuuucaagugggauuau

SEQ ID NO: 769190 - RNA, 22 nt, Human
cuuguugggucgugaauucugu

SEQ ID NO: 769191 - RNA, 22 nt, Human
cagcccugaaacaaccuccucu

SEQ ID NO: 769192 - RNA, 22 nt, Human
agcagucauuuuaggucaugca

SEQ ID NO: 769193 - RNA, 22 nt, Human
cuuccucuguggccagagugua

SEQ ID NO: 769194 - RNA, 21 nt, Human
acagccugucaucucaugguc

SEQ ID NO: 769195 - RNA, 22 nt, Human
gagcccagauuggaauuuccca

SEQ ID NO: 769196 - RNA, 22 nt, Human
aggaauuugggguuacaugaug

SEQ ID NO: 769197 - RNA, 20 nt, Human
cagaggcauuuucagacucu

SEQ ID NO: 769198 - RNA, 22 nt, Human
uggcucaccuucagaauauacc

SEQ ID NO: 769199 - RNA, 22 nt, Human
ugaccucuugucggagcuccag

SEQ ID NO: 769200 - RNA, 22 nt, Human
agaaauaagagcuuuccuuggg

SEQ ID NO: 769201 - RNA, 22 nt, Human
uacagaggaggggauuuuaaua

SEQ ID NO: 769202 - RNA, 22 nt, Human
agguuccucuuccucuggccug

SEQ ID NO: 769203 - RNA, 22 nt, Human
ugcagccauuuucugccaaugc

SEQ ID NO: 769204 - RNA, 22 nt, Human
ucaaaggagacacaaggagaaa

SEQ ID NO: 769205 - RNA, 23 nt, Human
uugcacaguuucggaaacugagg

SEQ ID NO: 769206 - RNA, 22 nt, Human
gccucaggacuggcauacucau

SEQ ID NO: 769207 - RNA, 22 nt, Human
gagcugggacuuggaauccaca

SEQ ID NO: 769208 - RNA, 22 nt, Human
ugaaaucuuagccauucugccu

SEQ ID NO: 769209 - RNA, 22 nt, Human
aagcaugggaaucccacagggu

SEQ ID NO: 769210 - RNA, 22 nt, Human
caaaggcaacauauacuuguuu

SEQ ID NO: 769211 - RNA, 22 nt, Human
ugcaugucaaggcacucaggau

SEQ ID NO: 769212 - RNA, 22 nt, Human
ugcaggcucaucucaagaguag

SEQ ID NO: 769213 - RNA, 22 nt, Human
cuuuggcaaggguuuuaauugu

SEQ ID NO: 769214 - RNA, 22 nt, Human
aacacugaagaccagguaauuu

SEQ ID NO: 769215 - RNA, 22 nt, Human
cuugccucugcuaaugguuucu

SEQ ID NO: 769216 - RNA, 20 nt, Human
ucuuuguuaauuuuaucucc

SEQ ID NO: 769217 - RNA, 22 nt, Human
cugaagagcaaaccaacuggac

SEQ ID NO: 769218 - RNA, 22 nt, Human
uguuuauugcugcaauugugcc

SEQ ID NO: 769219 - RNA, 22 nt, Human
acuggggaauggaacugggaau

SEQ ID NO: 769220 - RNA, 22 nt, Human
uguggccugggaaaugaguguu

SEQ ID NO: 769221 - RNA, 23 nt, Human
ggacacagagauaagugagacaa

SEQ ID NO: 769222 - RNA, 17 nt, Human
ggcagggugcuggguau

SEQ ID NO: 769223 - RNA, 22 nt, Human
acagugcaggucucaacaauua

SEQ ID NO: 769224 - RNA, 22 nt, Human
ccagagugacgugaagugugaa

SEQ ID NO: 769225 - RNA, 20 nt, Human
gcucugucuggccuacuuuu

SEQ ID NO: 769226 - RNA, 21 nt, Human
accaggcuugugggagggagc

SEQ ID NO: 769227 - RNA, 20 nt, Human
ggcaguuaaggcacagucau

SEQ ID NO: 769228 - RNA, 22 nt, Human
agugcauucuggcagaacaggu

SEQ ID NO: 769229 - RNA, 22 nt, Human
acugggcuuauuucuugugaac

SEQ ID NO: 769230 - RNA, 22 nt, Human
aacauugcagcuuaauugcagg

SEQ ID NO: 769231 - RNA, 21 nt, Human
ucacugcaaugcuaggagaaa

SEQ ID NO: 769232 - RNA, 22 nt, Human
ugguuccaguuuucaauagagc

SEQ ID NO: 769233 - RNA, 22 nt, Human
auggcccaggcaggcugguacu

SEQ ID NO: 769234 - RNA, 22 nt, Human
cgaggaaauauuuacaacugau

SEQ ID NO: 769235 - RNA, 22 nt, Human
uucaggaugcucagaguagucu

SEQ ID NO: 769236 - RNA, 22 nt, Human
ugcagaaacagucauuaaugua

SEQ ID NO: 769237 - RNA, 22 nt, Human
caguucuuaauaccaugugguu

SEQ ID NO: 769238 - RNA, 18 nt, Human
ucuuggcagcaucuggca

SEQ ID NO: 769239 - RNA, 21 nt, Human
acagggcaugcagcuggcugu

SEQ ID NO: 769240 - RNA, 22 nt, Human
gcagaggccuagguggaaggcc

SEQ ID NO: 769241 - RNA, 22 nt, Human
gugugcaggccacaggccaggg

SEQ ID NO: 769242 - RNA, 19 nt, Human
auccuggguccuccagcug

SEQ ID NO: 769243 - RNA, 22 nt, Human
aagcucauuaauuagaagcuaa

SEQ ID NO: 769244 - RNA, 16 nt, Human
ucccugggaguggugg

SEQ ID NO: 769245 - RNA, 22 nt, Human
ucuuuguaaaugccuagcauaa

SEQ ID NO: 769246 - RNA, 22 nt, Human
ugaguggagaacagaggcucuc

SEQ ID NO: 769247 - RNA, 22 nt, Human
gagagcugcaagguagggcggg

SEQ ID NO: 769248 - RNA, 22 nt, Human
ggcagaguggagugcggccucc

SEQ ID NO: 769249 - RNA, 22 nt, Human
agagccuguuuugugggagaug

SEQ ID NO: 769250 - RNA, 22 nt, Human
ucaaaggcuugugguucuggga

SEQ ID NO: 769251 - RNA, 22 nt, Human
auauuuauaagcaagcaggacu

SEQ ID NO: 769252 - RNA, 22 nt, Human
acuuccuguaaauagaauucca

SEQ ID NO: 769253 - RNA, 22 nt, Human
gcucccagguucuugggccuug

SEQ ID NO: 769254 - RNA, 22 nt, Human
ugaacaaauggaaauaaccagu

SEQ ID NO: 769255 - RNA, 22 nt, Human
accaagcuucguggaggaaguu

SEQ ID NO: 769256 - RNA, 22 nt, Human
acagggcagugucuugaaaaau

SEQ ID NO: 769257 - RNA, 22 nt, Human
cugggggcaagcagacagcugu

SEQ ID NO: 769258 - RNA, 22 nt, Human
aaggggaauagaguggguugug

SEQ ID NO: 769259 - RNA, 22 nt, Human
cuucugugaagagcagaaccau

SEQ ID NO: 769260 - RNA, 22 nt, Human
auuaauauccugcuggcuaaau

SEQ ID NO: 769261 - RNA, 22 nt, Human
cugcagcuggcucaugggauau

SEQ ID NO: 769262 - RNA, 22 nt, Human
gcacauuucucaaagaauuguc

SEQ ID NO: 769263 - RNA, 22 nt, Human
agaguguuauuugcucuguauu

SEQ ID NO: 769264 - RNA, 22 nt, Human
ugugacuguggacuuuuguggg

SEQ ID NO: 769265 - RNA, 22 nt, Human
uaguuuaauggucaacuaauga

SEQ ID NO: 769266 - RNA, 22 nt, Human
caugcagucuggagccuucugu

SEQ ID NO: 769267 - RNA, 22 nt, Human
uggcauguuuaaauggcaauaa

SEQ ID NO: 769268 - RNA, 22 nt, Human
guaaacauuacugugcuguaua

SEQ ID NO: 769269 - RNA, 22 nt, Human
gcucagagaaguugugccuggc

SEQ ID NO: 769270 - RNA, 22 nt, Human
gcacuaaaccaacauguaauaa

SEQ ID NO: 769271 - RNA, 22 nt, Human
uaaagacacugguuuuaaucau

SEQ ID NO: 769272 - RNA, 20 nt, Human
uggcaccaggugguggcccc

SEQ ID NO: 769273 - RNA, 22 nt, Human
aaacaaauuucaagcugugaca

SEQ ID NO: 769274 - RNA, 22 nt, Human
agguggucuuggcccacccagg

SEQ ID NO: 769275 - RNA, 22 nt, Human
uggucuggggaccgaggguuac

SEQ ID NO: 769276 - RNA, 22 nt, Human
gccuuuggcucugucugaccug

SEQ ID NO: 769277 - RNA, 22 nt, Human
auggcugcccacguuggugcuu

SEQ ID NO: 769278 - RNA, 17 nt, Human
gccagggagaggaagcc

SEQ ID NO: 769279 - RNA, 22 nt, Human
uuguaacacuuuucuauuaaua

SEQ ID NO: 769280 - RNA, 18 nt, Human
gguggcggggauggaggu

SEQ ID NO: 769281 - RNA, 22 nt, Human
ggucccaggcugcgggcuggug

SEQ ID NO: 769282 - RNA, 22 nt, Human
uuagugcuucuguccaaauaua

SEQ ID NO: 769283 - RNA, 20 nt, Human
ucacaacuccaucauuuccc

SEQ ID NO: 769284 - RNA, 22 nt, Human
aauguuauuucugcauaguagu

SEQ ID NO: 769285 - RNA, 22 nt, Human
gccuuuccugcucuggcauuca

SEQ ID NO: 769286 - RNA, 22 nt, Human
cugggcucuaagggagcaccgu

SEQ ID NO: 769287 - RNA, 22 nt, Human
gcauggagaagugggaacaggu

SEQ ID NO: 769288 - RNA, 22 nt, Human
auagucuuagucuauaguuuug

SEQ ID NO: 769289 - RNA, 22 nt, Human
ucuggccagcaugagaccuggu

SEQ ID NO: 769290 - RNA, 22 nt, Human
gaggcagagacuccaccuucag

SEQ ID NO: 769291 - RNA, 22 nt, Human
gaaaugugcagaauguguuaga

SEQ ID NO: 769292 - RNA, 22 nt, Human
acaaaaagggagaugagguaga

SEQ ID NO: 769293 - RNA, 22 nt, Human
ucugggaaguccucugucaugc

SEQ ID NO: 769294 - RNA, 22 nt, Human
cugagcucuaaugucagccuug

SEQ ID NO: 769295 - RNA, 22 nt, Human
guuacacagcuaagcuucuccu

SEQ ID NO: 769296 - RNA, 22 nt, Human
ucaguugcuguguaauguuuuc

SEQ ID NO: 769297 - RNA, 22 nt, Human
gaaagaccguuugggcucuaaa

SEQ ID NO: 769298 - RNA, 23 nt, Human
acuuggaagcagugaacaacuuu

SEQ ID NO: 769299 - RNA, 22 nt, Human
gauuugugcucauuuuccauua

SEQ ID NO: 769300 - RNA, 22 nt, Human
acuuagaacaggcagaauucca

SEQ ID NO: 769301 - RNA, 22 nt, Human
agcaccuugaucuuggacuucc

SEQ ID NO: 769302 - RNA, 22 nt, Human
cucagaagaacccaggguccca

SEQ ID NO: 769303 - RNA, 22 nt, Human
gaaauguaggcauaauuauuuu

SEQ ID NO: 769304 - RNA, 22 nt, Human
uggcagcacaagguggcccaug

SEQ ID NO: 769305 - RNA, 22 nt, Human
agggaaauaaucuauucugagg

SEQ ID NO: 769306 - RNA, 22 nt, Human
gaauacauuggaaaucagaaua

SEQ ID NO: 769307 - RNA, 22 nt, Human
gaaguuuuagucaaaauguaga

SEQ ID NO: 769308 - RNA, 22 nt, Human
ugauucugcuuugauccuugug

SEQ ID NO: 769309 - RNA, 22 nt, Human
gaacuggguccuugagucuaga

SEQ ID NO: 769310 - RNA, 22 nt, Human
ccucccugcuccucaacuggca

SEQ ID NO: 769311 - RNA, 22 nt, Human
aaacuguguaugcagagagcau

SEQ ID NO: 769312 - RNA, 22 nt, Human
ucucaggcuccugacauauaug

SEQ ID NO: 769313 - RNA, 22 nt, Human
ccagggugggaggcugaaggcg

SEQ ID NO: 769314 - RNA, 20 nt, Human
agagccuggaaaaagacauc

SEQ ID NO: 769315 - RNA, 22 nt, Human
gcugccuccgccggcuccacag

SEQ ID NO: 769316 - RNA, 22 nt, Human
cuggguggaucgcagccccagg

SEQ ID NO: 769317 - RNA, 22 nt, Human
auuuccaugaaggcagauuuua

SEQ ID NO: 769318 - RNA, 22 nt, Human
uguuccugaaugccuggcuggc

SEQ ID NO: 769319 - RNA, 22 nt, Human
gcauggcuccugucuuacuccc

SEQ ID NO: 769320 - RNA, 19 nt, Human
uagauaaggcauuuaaucu

SEQ ID NO: 769321 - RNA, 22 nt, Human
augacccuuacugcaucauaca

SEQ ID NO: 769322 - RNA, 21 nt, Human
cagcuccacuaaagcagcugu

SEQ ID NO: 769323 - RNA, 22 nt, Human
cuugaaagcacuuaguaaauua

SEQ ID NO: 769324 - RNA, 22 nt, Human
augaagauauucuuguuuucug

SEQ ID NO: 769325 - RNA, 23 nt, Human
uucuacagcuucuucaguuaagg

SEQ ID NO: 769326 - RNA, 22 nt, Human
uagcaacgguaugcaaucuguc

SEQ ID NO: 769327 - RNA, 22 nt, Human
caguaauuccaagugcuuauac

SEQ ID NO: 769328 - RNA, 18 nt, Human
uuauggcugugaaagagu

SEQ ID NO: 769329 - RNA, 22 nt, Human
ucaggccacggcucacugagac

SEQ ID NO: 769330 - RNA, 23 nt, Human
aaguaacagggauaauagcaguu

SEQ ID NO: 769331 - RNA, 22 nt, Human
aggccauguggccccagagucu

SEQ ID NO: 769332 - RNA, 22 nt, Human
aaggccaaaguuuucaggcuaa

SEQ ID NO: 769333 - RNA, 22 nt, Human
uccugggcagccucucuggaag

SEQ ID NO: 769334 - RNA, 22 nt, Human
acagcagaucuguggagcuuau

SEQ ID NO: 769335 - RNA, 22 nt, Human
gccaggcuggaaagaacagaca

SEQ ID NO: 769336 - RNA, 22 nt, Human
ugggccacggggguggagagcu

SEQ ID NO: 769337 - RNA, 21 nt, Human
aucagaaaauguaauggagca

SEQ ID NO: 769338 - RNA, 22 nt, Human
uguucaaguggauguggcuuuu

SEQ ID NO: 769339 - RNA, 22 nt, Human
ggaggggcuccuguucgccccc

SEQ ID NO: 769340 - RNA, 20 nt, Human
uucagaggugaaguuguggu

SEQ ID NO: 769341 - RNA, 22 nt, Human
uggcugccugaaugcaagacag

SEQ ID NO: 769342 - RNA, 22 nt, Human
aggggaaggccagccuguagag

SEQ ID NO: 769343 - RNA, 22 nt, Human
gccucagcuguugcaggggccc

SEQ ID NO: 769344 - RNA, 22 nt, Human
cugagucauugcagauguggag

SEQ ID NO: 769345 - RNA, 22 nt, Human
aaugaacagugggugagguacc

SEQ ID NO: 769346 - RNA, 22 nt, Human
aggcucucucugccccugggac

SEQ ID NO: 769347 - RNA, 22 nt, Human
cuggguggcagagccugcagug

SEQ ID NO: 769348 - RNA, 23 nt, Human
ucuuuuuaagagaucuagugacg

SEQ ID NO: 769349 - RNA, 22 nt, Human
gagcuuggugaugccuccuggu

SEQ ID NO: 769350 - RNA, 23 nt, Human
gggggcugguugacucucugcag

SEQ ID NO: 769351 - RNA, 22 nt, Human
cuucuucuggacaggcagcucc

SEQ ID NO: 769352 - RNA, 22 nt, Human
ggacuucuaagugccagacacu

SEQ ID NO: 769353 - RNA, 22 nt, Human
agacuguagggauagaggucuu

SEQ ID NO: 769354 - RNA, 22 nt, Human
uuacacaguauccaagguucuu

SEQ ID NO: 769355 - RNA, 22 nt, Human
cacaggaauauaaguuugaguu

SEQ ID NO: 769356 - RNA, 22 nt, Human
ggagaggagauuguggcauuuu

SEQ ID NO: 769357 - RNA, 22 nt, Human
aguuugaaaguauugacagaag

SEQ ID NO: 769358 - RNA, 22 nt, Human
cuucacuucacagaugccaaga

SEQ ID NO: 769359 - RNA, 22 nt, Human
gcugccacucugagcuugcuuc

SEQ ID NO: 769360 - RNA, 22 nt, Human
uggcaugggcaaaccagggaaa

SEQ ID NO: 769361 - RNA, 23 nt, Human
ucagucuucccugucaguaauag

SEQ ID NO: 769362 - RNA, 22 nt, Human
uugcuucacuacuucuaggcuc

SEQ ID NO: 769363 - RNA, 22 nt, Human
uuggcucuaggaaccaaaguga

SEQ ID NO: 769364 - RNA, 22 nt, Human
uaacuggcuuaaauuuuaucaa

SEQ ID NO: 769365 - RNA, 22 nt, Human
ucaagagacaggacguguuuca

SEQ ID NO: 769366 - RNA, 22 nt, Human
ucucugucccuaggagccuugc

SEQ ID NO: 769367 - RNA, 22 nt, Human
uugaguucuguguauccuuugu

SEQ ID NO: 769368 - RNA, 16 nt, Human
ucacacauuuguuggu

SEQ ID NO: 769369 - RNA, 22 nt, Human
auuucuguuugcuacuauaagu

SEQ ID NO: 769370 - RNA, 22 nt, Human
gaaagugcuaggaaguguuaga

SEQ ID NO: 769371 - RNA, 22 nt, Human
uguuuuguuagcacucugggaa

SEQ ID NO: 769372 - RNA, 22 nt, Human
aaaagacaucuauuucaggcag

SEQ ID NO: 769373 - RNA, 22 nt, Human
aggugcagcugacaccaugugg

SEQ ID NO: 769374 - RNA, 22 nt, Human
ucagggaaugaugcacacaguu

SEQ ID NO: 769375 - RNA, 22 nt, Human
cucacugcccugaaguuggguu

SEQ ID NO: 769376 - RNA, 22 nt, Human
uuucccucucaucucuauuauu

SEQ ID NO: 769377 - RNA, 22 nt, Human
uggcaaaguuuaucaggaauau

SEQ ID NO: 769378 - RNA, 22 nt, Human
aguguuucccaguaggaugaaa

SEQ ID NO: 769379 - RNA, 22 nt, Human
guccccucagccacccaugggg

SEQ ID NO: 769380 - RNA, 22 nt, Human
caagaaauucuguucagauagc

SEQ ID NO: 769381 - RNA, 22 nt, Human
gaaaucugucuuuguuugaaua

SEQ ID NO: 769382 - RNA, 17 nt, Human
gcuuccugugcugggga

SEQ ID NO: 769383 - RNA, 22 nt, Human
gucccacaccuugaggggucuu

SEQ ID NO: 769384 - RNA, 22 nt, Human
ugaggcuccagccaggccagca

SEQ ID NO: 769385 - RNA, 19 nt, Human
ucuggcuccgccucuuagu

SEQ ID NO: 769386 - RNA, 21 nt, Human
aggugggagaccauguagguc

SEQ ID NO: 769387 - RNA, 22 nt, Human
cugagaaauacccaagucuggu

SEQ ID NO: 769388 - RNA, 22 nt, Human
uuccagagcaguuuucagauca

SEQ ID NO: 769389 - RNA, 22 nt, Human
uaucuuuauuaugucuaucugc

SEQ ID NO: 769390 - RNA, 22 nt, Human
gucccuggggaaucagcuggag

SEQ ID NO: 769391 - RNA, 22 nt, Human
gcagugugaccgagcuugcuuc

SEQ ID NO: 769392 - RNA, 22 nt, Human
ugugccuuaugaauucuuucug

SEQ ID NO: 769393 - RNA, 23 nt, Human
guggccuccccggaaugccucgc

SEQ ID NO: 769394 - RNA, 20 nt, Human
ugcuguguggcccagcauga

SEQ ID NO: 769395 - RNA, 22 nt, Human
ucugugcugucucagagaaagc

SEQ ID NO: 769396 - RNA, 22 nt, Human
ccugagcucugcacuuuuuaga

SEQ ID NO: 769397 - RNA, 22 nt, Human
uauguauccguguguguacaga

SEQ ID NO: 769398 - RNA, 22 nt, Human
cacagcuuaugccacugauugg

SEQ ID NO: 769399 - RNA, 22 nt, Human
auucucugccauugcgguggau

SEQ ID NO: 769400 - RNA, 22 nt, Human
ucucugugguaugucauagcaa

SEQ ID NO: 769401 - RNA, 22 nt, Human
gacagcagaugaagccugcaga

SEQ ID NO: 769402 - RNA, 22 nt, Human
ugugugcacguacauacuguau

SEQ ID NO: 769403 - RNA, 22 nt, Human
gugcuuccuguauugauuccau

SEQ ID NO: 769404 - RNA, 22 nt, Human
aguguccccucugaggagugag

SEQ ID NO: 769405 - RNA, 22 nt, Human
gcuuagcagucacacauuguuc

SEQ ID NO: 769406 - RNA, 22 nt, Human
ugcguugcgcuccugcagcagg

SEQ ID NO: 769407 - RNA, 22 nt, Human
ggacucuguuuuccugaucacu

SEQ ID NO: 769408 - RNA, 22 nt, Human
agucugugugaaugugggcuuu

SEQ ID NO: 769409 - RNA, 22 nt, Human
ccaagggcuauuuacagaacag

SEQ ID NO: 769410 - RNA, 22 nt, Human
ugaacacagcauauuuuguuac

SEQ ID NO: 769411 - RNA, 22 nt, Human
gugcagggcagguguccuucca

SEQ ID NO: 769412 - RNA, 22 nt, Human
aguguaggguggucagagcaga

SEQ ID NO: 769413 - RNA, 22 nt, Human
uagaaagcaugcaaguuugaug

SEQ ID NO: 769414 - RNA, 22 nt, Human
augucuuucgcaucaguagcua

SEQ ID NO: 769415 - RNA, 22 nt, Human
agauguggcugcacccaccgcu

SEQ ID NO: 769416 - RNA, 22 nt, Human
ggccuugggauguggcugcagc

SEQ ID NO: 769417 - RNA, 22 nt, Human
cccauggcagucagagauaaga

SEQ ID NO: 769418 - RNA, 22 nt, Human
gugucccaggccucuggaauua

SEQ ID NO: 769419 - RNA, 22 nt, Human
gacccaggaagcuacuucuggu

SEQ ID NO: 769420 - RNA, 22 nt, Human
uauggcaguuacccuugaugau

SEQ ID NO: 769421 - RNA, 22 nt, Human
agggccacaguaaugcugagua

SEQ ID NO: 769422 - RNA, 22 nt, Human
ugguuugcccacucgagugauu

SEQ ID NO: 769423 - RNA, 22 nt, Human
agagccuguacuuuucugugaa

SEQ ID NO: 769424 - RNA, 22 nt, Human
cagagagggagcaguagucucu

SEQ ID NO: 769425 - RNA, 22 nt, Human
auucagucaaaccacuggucau

SEQ ID NO: 769426 - RNA, 22 nt, Human
augugaggcagcacggagauua

SEQ ID NO: 769427 - RNA, 22 nt, Human
ucugucaucaaauaugcuuucu

SEQ ID NO: 769428 - RNA, 22 nt, Human
aagcuggcucugaugucagaau

SEQ ID NO: 769429 - RNA, 22 nt, Human
ugucauaaaacacaagcuguug

SEQ ID NO: 769430 - RNA, 17 nt, Human
aggcaggcagagcggga

SEQ ID NO: 769431 - RNA, 22 nt, Human
cccagggcugcagauggaggcu

SEQ ID NO: 769432 - RNA, 22 nt, Human
auuauucuuaaugcagggauua

SEQ ID NO: 769433 - RNA, 15 nt, Human
uccaggcauucauuc

SEQ ID NO: 769434 - RNA, 22 nt, Human
cagcucucacacccuccuccca

SEQ ID NO: 769435 - RNA, 22 nt, Human
ugcccuggggagcccagccagg

SEQ ID NO: 769436 - RNA, 23 nt, Human
auagucugcgcaacugagagagg

SEQ ID NO: 769437 - RNA, 22 nt, Human
auuauccagcaccaaugucaga

SEQ ID NO: 769438 - RNA, 22 nt, Human
ggugcugacugaggauggcuug

SEQ ID NO: 769439 - RNA, 22 nt, Human
cuguuuauugagcaaucugcca

SEQ ID NO: 769440 - RNA, 22 nt, Human
uaucuguuguccaugcagaaag

SEQ ID NO: 769441 - RNA, 22 nt, Human
caccuuugaccuugcagcgcac

SEQ ID NO: 769442 - RNA, 22 nt, Human
cagcauggacagggguggcguu

SEQ ID NO: 769443 - RNA, 20 nt, Human
uccugguggauacugcuuaa

SEQ ID NO: 769444 - RNA, 22 nt, Human
agaaauuaggaaaguaacacuu

SEQ ID NO: 769445 - RNA, 22 nt, Human
gcagggcauagaggcacggagg

SEQ ID NO: 769446 - RNA, 22 nt, Human
agguuucuuuaugcugcuagaa

SEQ ID NO: 769447 - RNA, 22 nt, Human
auuucuguggcuucauucuccu

SEQ ID NO: 769448 - RNA, 22 nt, Human
aggugccugggagcucccugag

SEQ ID NO: 769449 - RNA, 22 nt, Human
cauuucaaugccuucaacauag

SEQ ID NO: 769450 - RNA, 22 nt, Human
guuaacacaggacucucugccu

SEQ ID NO: 769451 - RNA, 22 nt, Human
auucaagagcccauguuuccug

SEQ ID NO: 769452 - RNA, 22 nt, Human
ugccugcucuuaccacucuccc

SEQ ID NO: 769453 - RNA, 22 nt, Human
uguuuacuagccaacauggaga

SEQ ID NO: 769454 - RNA, 22 nt, Human
ucucuuuaaaaauagugaaaua

SEQ ID NO: 769455 - RNA, 22 nt, Human
aggcugagcugguagugaguac

SEQ ID NO: 769456 - RNA, 22 nt, Human
gcauggcuguugaagucagcuc

SEQ ID NO: 769457 - RNA, 22 nt, Human
agauacaaguuaagagaaagga

SEQ ID NO: 769458 - RNA, 22 nt, Human
ugcuuaaaaaguaacugcugau

SEQ ID NO: 769459 - RNA, 22 nt, Human
uagcaguacugggcauguguuu

SEQ ID NO: 769460 - RNA, 22 nt, Human
aagcugccagauucagucugcu

SEQ ID NO: 769461 - RNA, 22 nt, Human
ccaggaagcggugagggcugcc

SEQ ID NO: 769462 - RNA, 22 nt, Human
acugcuuccuggauggccagca

SEQ ID NO: 769463 - RNA, 22 nt, Human
agaacuguccccagagagcacu

SEQ ID NO: 769464 - RNA, 22 nt, Human
gcuccuggcuccaggcagccaa

SEQ ID NO: 769465 - RNA, 19 nt, Human
ugaguuuaaugcaaaacug

SEQ ID NO: 769466 - RNA, 22 nt, Human
ccagaggcauguucaaagcaau

SEQ ID NO: 769467 - RNA, 22 nt, Human
augagguuauauuuaauucacu

SEQ ID NO: 769468 - RNA, 22 nt, Human
cuggaucuguuugugcuugugg

SEQ ID NO: 769469 - RNA, 22 nt, Human
uuauagaaggagcauucacuua

SEQ ID NO: 769470 - RNA, 22 nt, Human
uucaaacuaguuaaaagucaga

SEQ ID NO: 769471 - RNA, 22 nt, Human
agccagugaugaagacucugga

SEQ ID NO: 769472 - RNA, 22 nt, Human
gagcaugguuccauagguuggu

SEQ ID NO: 769473 - RNA, 22 nt, Human
cuccugagaaauaagcaaguaa

SEQ ID NO: 769474 - RNA, 22 nt, Human
acccagggagugcuccuguucu

SEQ ID NO: 769475 - RNA, 22 nt, Human
caaauguauaaauguacuuucu

SEQ ID NO: 769476 - RNA, 22 nt, Human
guagaauauaugguuaguauug

SEQ ID NO: 769477 - RNA, 22 nt, Human
auaaaagucugcuuauuugggc

SEQ ID NO: 769478 - RNA, 22 nt, Human
ggccagcccuccucccuggguu

SEQ ID NO: 769479 - RNA, 22 nt, Human
ccuggcagcuaagugcuuugag

SEQ ID NO: 769480 - RNA, 22 nt, Human
agaggccaccacugucagggac

SEQ ID NO: 769481 - RNA, 22 nt, Human
uuugugcagauguauauuugug

SEQ ID NO: 769482 - RNA, 22 nt, Human
guccuucauuuccugaucucua

SEQ ID NO: 769483 - RNA, 22 nt, Human
gagcacauucccaggagcugcu

SEQ ID NO: 769484 - RNA, 22 nt, Human
uuuuaaacuauagcuggaugcu

SEQ ID NO: 769485 - RNA, 22 nt, Human
ggcuccaggguaccccuggaug

SEQ ID NO: 769486 - RNA, 22 nt, Human
agcucagaaccuccucauccca

SEQ ID NO: 769487 - RNA, 22 nt, Human
cacuucacuuggaugccuuuuc

SEQ ID NO: 769488 - RNA, 23 nt, Human
ucauucaaggcugguaucuuuca

SEQ ID NO: 769489 - RNA, 22 nt, Human
acauuugaaauucugaacagau

SEQ ID NO: 769490 - RNA, 22 nt, Human
aaaagagugacugauaaguaua

SEQ ID NO: 769491 - RNA, 22 nt, Human
ucacaugcugugggaucuguau

SEQ ID NO: 769492 - RNA, 22 nt, Human
ccuucuggaugugcuaaggaag

SEQ ID NO: 769493 - RNA, 22 nt, Human
ugaugaggcuucuuggugaaca

SEQ ID NO: 769494 - RNA, 22 nt, Human
uagcaacugccuuuacuauauu

SEQ ID NO: 769495 - RNA, 22 nt, Human
gagccaggaggcagagacugca

SEQ ID NO: 769496 - RNA, 22 nt, Human
gccaccuguuucgcuugcccag

SEQ ID NO: 769497 - RNA, 22 nt, Human
ucauucaagauuucaauagauu

SEQ ID NO: 769498 - RNA, 22 nt, Human
ucacagaaaagcugagcaucag

SEQ ID NO: 769499 - RNA, 22 nt, Human
gcuccuggcauccugcuuuuaa

SEQ ID NO: 769500 - RNA, 22 nt, Human
agaccugguuuaucaccagcau

SEQ ID NO: 769501 - RNA, 22 nt, Human
ccccagccagcuuguaguagaa

SEQ ID NO: 769502 - RNA, 22 nt, Human
ugugccuggcccagugguguca

SEQ ID NO: 769503 - RNA, 22 nt, Human
agugaaagguugagaauauucu

SEQ ID NO: 769504 - RNA, 16 nt, Human
ugcagagagcauggug

SEQ ID NO: 769505 - RNA, 22 nt, Human
gaaaugauuuuaguuuaucaug

SEQ ID NO: 769506 - RNA, 22 nt, Human
aggacaaaggaccagaucugga

SEQ ID NO: 769507 - RNA, 22 nt, Human
ugcaggaauagcuacagagcug

SEQ ID NO: 769508 - RNA, 23 nt, Human
uuagagaugauuaaaaaaucuug

SEQ ID NO: 769509 - RNA, 22 nt, Human
uccagcucaucugucuccauua

SEQ ID NO: 769510 - RNA, 21 nt, Human
uguucuaucagcucagguguc

SEQ ID NO: 769511 - RNA, 22 nt, Human
auacuucuagaaauacuaugca

SEQ ID NO: 769512 - RNA, 22 nt, Human
ggcaguuucucaggcaggggua

SEQ ID NO: 769513 - RNA, 17 nt, Human
uccugugggugcagcag

SEQ ID NO: 769514 - RNA, 22 nt, Human
uaaggcuuauauacuuagacau

SEQ ID NO: 769515 - RNA, 23 nt, Human
gaagcagaugucugaguaggcag

SEQ ID NO: 769516 - RNA, 23 nt, Human
acucguggaauucucugcgaucg

SEQ ID NO: 769517 - RNA, 20 nt, Human
uaggugagggcagauagagg

SEQ ID NO: 769518 - RNA, 22 nt, Human
acaaaauuaugaagaggccuug

SEQ ID NO: 769519 - RNA, 22 nt, Human
uaaucacaauucagaugucuua

SEQ ID NO: 769520 - RNA, 22 nt, Human
aaugcauaccaugucaucuuug

SEQ ID NO: 769521 - RNA, 22 nt, Human
auuucucauuuugcuucaaagg

SEQ ID NO: 769522 - RNA, 22 nt, Human
cccaggaguuagagguuguggu

SEQ ID NO: 769523 - RNA, 22 nt, Human
auuuuauccccacuggauuaca

SEQ ID NO: 769524 - RNA, 23 nt, Human
aagcaucuuuuccuagcuccauc

SEQ ID NO: 769525 - RNA, 22 nt, Human
uaacaaugcaaaaugaauuuag

SEQ ID NO: 769526 - RNA, 22 nt, Human
ccaggcugggcggggaaccugg

SEQ ID NO: 769527 - RNA, 22 nt, Human
caguauauucugcagagccuua

SEQ ID NO: 769528 - RNA, 22 nt, Human
gacaacagcauauggacuguca

SEQ ID NO: 769529 - RNA, 20 nt, Human
ccaagagcaugcaugaggaa

SEQ ID NO: 769530 - RNA, 22 nt, Human
gccuccccugcaauuguccuug

SEQ ID NO: 769531 - RNA, 22 nt, Human
agcagggaggcccagggcacug

SEQ ID NO: 769532 - RNA, 22 nt, Human
cccagcauccucagggagcggg

SEQ ID NO: 769533 - RNA, 22 nt, Human
uucacccaauauaacuagagga

SEQ ID NO: 769534 - RNA, 22 nt, Human
ucccacaggagccugaguccca

SEQ ID NO: 769535 - RNA, 20 nt, Human
gacaggagaguuagguaggu

SEQ ID NO: 769536 - RNA, 22 nt, Human
auauuguugacuauaagaguaa

SEQ ID NO: 769537 - RNA, 19 nt, Human
uggcuuccugacucucauc

SEQ ID NO: 769538 - RNA, 22 nt, Human
ggcugcucuccaucccaggccu

SEQ ID NO: 769539 - RNA, 22 nt, Human
auggcuguuuagcuucucugcu

SEQ ID NO: 769540 - RNA, 22 nt, Human
auagccaggagaugauggggga

SEQ ID NO: 769541 - RNA, 22 nt, Human
ccaggcccaccuuggccacuua

SEQ ID NO: 769542 - RNA, 23 nt, Human
acagaggcuuaaaugaguggcag

SEQ ID NO: 769543 - RNA, 22 nt, Human
ugugccauugagagguuucaga

SEQ ID NO: 769544 - RNA, 22 nt, Human
ucaaugucuucucaagucuuuu

SEQ ID NO: 769545 - RNA, 22 nt, Human
accugccucagugcagcuggau

SEQ ID NO: 769546 - RNA, 22 nt, Human
uccuagaaucuuuguaagauug

SEQ ID NO: 769547 - RNA, 22 nt, Human
uuauuacuguauuaauccagag

SEQ ID NO: 769548 - RNA, 22 nt, Human
uagaaacagcauauauuagccc

SEQ ID NO: 769549 - RNA, 22 nt, Human
ggucacuggucucugcuuccau

SEQ ID NO: 769550 - RNA, 22 nt, Human
aguagauucucauugaucuggu

SEQ ID NO: 769551 - RNA, 22 nt, Human
gcagcuuuguggagaggcccau

SEQ ID NO: 769552 - RNA, 22 nt, Human
cacacuugugaccgauauaaug

SEQ ID NO: 769553 - RNA, 22 nt, Human
uaaaggcucguauuguugugug

SEQ ID NO: 769554 - RNA, 22 nt, Human
agcaauaacagaaaacuuuccu

SEQ ID NO: 769555 - RNA, 22 nt, Human
ugaauuguacaguaugugaauu

SEQ ID NO: 769556 - RNA, 23 nt, Human
aaauggcuugcccucucguuugg

SEQ ID NO: 769557 - RNA, 22 nt, Human
aaguucaaggcagguccugagg

SEQ ID NO: 769558 - RNA, 22 nt, Human
uuuguacacugucuacuaugaa

SEQ ID NO: 769559 - RNA, 22 nt, Human
uuagguaaguaggaucaaaaaa

SEQ ID NO: 769560 - RNA, 22 nt, Human
ugcacacacucguguauaugag

SEQ ID NO: 769561 - RNA, 22 nt, Human
ugucaaacugugacuucuaaug

SEQ ID NO: 769562 - RNA, 19 nt, Human
guucaaacacugauucagc

SEQ ID NO: 769563 - RNA, 22 nt, Human
gcccagcuuuucacuuccacac

SEQ ID NO: 769564 - RNA, 22 nt, Human
ugcauacacaagcauacaugua

SEQ ID NO: 769565 - RNA, 22 nt, Human
uacagcuuaaaaaagccaacuu

SEQ ID NO: 769566 - RNA, 22 nt, Human
uuucauguuauuaauagugcug

SEQ ID NO: 769567 - RNA, 22 nt, Human
uaaugugaagacauaaaucaga

SEQ ID NO: 769568 - RNA, 21 nt, Human
ugaacucuggucaucuucauu

SEQ ID NO: 769569 - RNA, 22 nt, Human
uugagacugccuugucgucugc

SEQ ID NO: 769570 - RNA, 22 nt, Human
cugggcucaguggcucauggcu

SEQ ID NO: 769571 - RNA, 22 nt, Human
ucuggccagugaaaugcagaau

SEQ ID NO: 769572 - RNA, 22 nt, Human
gggagcuuaagacaguuccaau

SEQ ID NO: 769573 - RNA, 22 nt, Human
cuggagccggcgagccccagcc

SEQ ID NO: 769574 - RNA, 22 nt, Human
ggagugaguacuggaguagcug

SEQ ID NO: 769575 - RNA, 22 nt, Human
gcuggccacauugugccguccu

SEQ ID NO: 769576 - RNA, 22 nt, Human
ugcaugugucgggccugugcua

SEQ ID NO: 769577 - RNA, 22 nt, Human
uuggaaucugcaauuuaacaaa

SEQ ID NO: 769578 - RNA, 22 nt, Human
ugcccugguagacacagacugu

SEQ ID NO: 769579 - RNA, 22 nt, Human
accuggcacuacaggcaccugu

SEQ ID NO: 769580 - RNA, 22 nt, Human
uucugagguccaugcaguacug

SEQ ID NO: 769581 - RNA, 22 nt, Human
uggaaccuggccugagcuacca

SEQ ID NO: 769582 - RNA, 22 nt, Human
aaugcauuuuauuauaugugac

SEQ ID NO: 769583 - RNA, 22 nt, Human
caaucccaucaccaucugcucu

SEQ ID NO: 769584 - RNA, 22 nt, Human
uuggucacuugcuaugugccaa

SEQ ID NO: 769585 - RNA, 22 nt, Human
cccugagccgcugcuccaaccu

SEQ ID NO: 769586 - RNA, 22 nt, Human
uaagcaaaguuuauaaggcucu

SEQ ID NO: 769587 - RNA, 20 nt, Human
acagucgccuaucaaccagg

SEQ ID NO: 769588 - RNA, 22 nt, Human
ugcugagaugaauagggcuguc

SEQ ID NO: 769589 - RNA, 22 nt, Human
agagggcugccucagucagcua

SEQ ID NO: 769590 - RNA, 22 nt, Human
uccaggcucccucaggaugcac

SEQ ID NO: 769591 - RNA, 18 nt, Human
cagaaguccuucaaggcc

SEQ ID NO: 769592 - RNA, 22 nt, Human
ggcaugcaaaacaacucagaga

SEQ ID NO: 769593 - RNA, 22 nt, Human
cccaggaggcagagauagcagu

SEQ ID NO: 769594 - RNA, 22 nt, Human
agccauuggcugccuggugcgu

SEQ ID NO: 769595 - RNA, 22 nt, Human
ucacagugaggaguuacaguuu

SEQ ID NO: 769596 - RNA, 22 nt, Human
uggaaggaaagguagcagagaa

SEQ ID NO: 769597 - RNA, 22 nt, Human
uggggccugaaagguucucgcc

SEQ ID NO: 769598 - RNA, 22 nt, Human
ggcucagggaaugaggaagaau

SEQ ID NO: 769599 - RNA, 22 nt, Human
ucuuugaacucuguguauuaac

SEQ ID NO: 769600 - RNA, 22 nt, Human
ccagugugcauuaucauguguc

SEQ ID NO: 769601 - RNA, 22 nt, Human
ccuggcugaacaaagucccucc

SEQ ID NO: 769602 - RNA, 22 nt, Human
ucucuggguuuuuguccuguac

SEQ ID NO: 769603 - RNA, 22 nt, Human
cuuuuaaugagcauugcugucu

SEQ ID NO: 769604 - RNA, 22 nt, Human
cagacugaaaaucccugguagu

SEQ ID NO: 769605 - RNA, 20 nt, Human
aggucugauuccagaaucag

SEQ ID NO: 769606 - RNA, 22 nt, Human
aaggguccagcaccucggcucc

SEQ ID NO: 769607 - RNA, 22 nt, Human
uccaagcacuguuaauuaaacu

SEQ ID NO: 769608 - RNA, 23 nt, Human
ccucaugaaggucugcuuccugg

SEQ ID NO: 769609 - RNA, 22 nt, Human
auugucuguacuuuaaaaaugu

SEQ ID NO: 769610 - RNA, 22 nt, Human
gggaccaggucagggcucugac

SEQ ID NO: 769611 - RNA, 21 nt, Human
uguggcugccucuggcccugg

SEQ ID NO: 769612 - RNA, 22 nt, Human
uacaaagucagaauaacaggug

SEQ ID NO: 769613 - RNA, 22 nt, Human
ucuggcucccuggagcuccaca

SEQ ID NO: 769614 - RNA, 22 nt, Human
agagcacaaauuuuaaggaggc

SEQ ID NO: 769615 - RNA, 22 nt, Human
ucuuccagaaucucagagggcu

SEQ ID NO: 769616 - RNA, 22 nt, Human
uaaaugagggcugacaugauug

SEQ ID NO: 769617 - RNA, 22 nt, Human
ucacaugcucaccuaagccaca

SEQ ID NO: 769618 - RNA, 19 nt, Human
acaguucuaauuucugugg

SEQ ID NO: 769619 - RNA, 20 nt, Human
accagagcucucaguaugug

SEQ ID NO: 769620 - RNA, 22 nt, Human
ugggacagguuggagagaagca

SEQ ID NO: 769621 - RNA, 22 nt, Human
uuugcauuguaauauuuaguuc

SEQ ID NO: 769622 - RNA, 22 nt, Human
ggaaagggcauggccuuuucac

SEQ ID NO: 769623 - RNA, 22 nt, Human
ggagugggcagcacugcccugu

SEQ ID NO: 769624 - RNA, 22 nt, Human
cagcugcuuuaguuuuccaucc

SEQ ID NO: 769625 - RNA, 22 nt, Human
uacauuauccugucuuuguccu

SEQ ID NO: 769626 - RNA, 22 nt, Human
aauguuacgaucaacaacacau

SEQ ID NO: 769627 - RNA, 22 nt, Human
ugcuccaggagcacuuuccauu

SEQ ID NO: 769628 - RNA, 22 nt, Human
uuuacagcaacagugcagaggu

SEQ ID NO: 769629 - RNA, 22 nt, Human
uuuacacuccuggaaaugauau

SEQ ID NO: 769630 - RNA, 22 nt, Human
uuagcaaacucuguuagauucu

SEQ ID NO: 769631 - RNA, 20 nt, Human
uggcuucucuucacuccugu

SEQ ID NO: 769632 - RNA, 21 nt, Human
ucuugugugggaaacaauuug

SEQ ID NO: 769633 - RNA, 22 nt, Human
agccuggcugggaagagccucu

SEQ ID NO: 769634 - RNA, 22 nt, Human
cuuuccugagaaaggagaagga

SEQ ID NO: 769635 - RNA, 21 nt, Human
ccccucauacacucuccuugc

SEQ ID NO: 769636 - RNA, 22 nt, Human
gagacacaaacacauuuagagg

SEQ ID NO: 769637 - RNA, 23 nt, Human
uugggcucaguggcaggaagagu

SEQ ID NO: 769638 - RNA, 22 nt, Human
cucugcugcccaugaugguaua

SEQ ID NO: 769639 - RNA, 22 nt, Human
agaggcuccaccuucucugucc

SEQ ID NO: 769640 - RNA, 20 nt, Human
ucaaaauaggugugggcgga

SEQ ID NO: 769641 - RNA, 22 nt, Human
auucauggcagugguaacguuu

SEQ ID NO: 769642 - RNA, 18 nt, Human
ugcucuggucucacuugg

SEQ ID NO: 769643 - RNA, 17 nt, Human
aucuggaagcuagcuga

SEQ ID NO: 769644 - RNA, 22 nt, Human
uaaaugugcacuuuacuuuuca

SEQ ID NO: 769645 - RNA, 22 nt, Human
agagcucaagacgcucacagua

SEQ ID NO: 769646 - RNA, 22 nt, Human
guguggcugauugacaugguca

SEQ ID NO: 769647 - RNA, 22 nt, Human
aggagcagcccacuccuguccu

SEQ ID NO: 769648 - RNA, 22 nt, Human
uccagagccuuuccacccacuu

SEQ ID NO: 769649 - RNA, 19 nt, Human
uuacaugacacuccagccu

SEQ ID NO: 769650 - RNA, 22 nt, Human
ggcugcucggcagcuccugagc

SEQ ID NO: 769651 - RNA, 22 nt, Human
acccaggaaaacauggugcaga

SEQ ID NO: 769652 - RNA, 22 nt, Human
accagaaaggaauaauagaauu

SEQ ID NO: 769653 - RNA, 22 nt, Human
ucagucaacauaaauccaaggu

SEQ ID NO: 769654 - RNA, 19 nt, Human
uccccagcaccucugaguc

SEQ ID NO: 769655 - RNA, 22 nt, Human
aagcauuuuagauaaagcauca

SEQ ID NO: 769656 - RNA, 22 nt, Human
acacauuaaaacgucuacaaug

SEQ ID NO: 769657 - RNA, 22 nt, Human
ccucuacagggcauagcccaaa

SEQ ID NO: 769658 - RNA, 22 nt, Human
ggcaucaguauggccauagggu

SEQ ID NO: 769659 - RNA, 20 nt, Human
aggcagcuggccaggcaggu

SEQ ID NO: 769660 - RNA, 22 nt, Human
gcuccucuccucggagucgggg

SEQ ID NO: 769661 - RNA, 22 nt, Human
ccaguggguaggccauggugag

SEQ ID NO: 769662 - RNA, 22 nt, Human
ugacauuuuaucaauaucacag

SEQ ID NO: 769663 - RNA, 22 nt, Human
auucaucuguacuucaauaucu

SEQ ID NO: 769664 - RNA, 22 nt, Human
aggcaccuggccaguugucuug

SEQ ID NO: 769665 - RNA, 22 nt, Human
ggcucaggccagaccacgacuc

SEQ ID NO: 769666 - RNA, 22 nt, Human
uccagagcaaaguuugcuaaca

SEQ ID NO: 769667 - RNA, 20 nt, Human
ccaauaaagcucuauaggga

SEQ ID NO: 769668 - RNA, 23 nt, Human
ugagcccaggaggucaaggcugc

SEQ ID NO: 769669 - RNA, 22 nt, Human
uucuuuuuaaaguguguaugca

SEQ ID NO: 769670 - RNA, 22 nt, Human
uccaggucagacuucugugccc

SEQ ID NO: 769671 - RNA, 22 nt, Human
uaagacauccguugcuuauaau

SEQ ID NO: 769672 - RNA, 22 nt, Human
cuucuuuaccaagagauagagu

SEQ ID NO: 769673 - RNA, 22 nt, Human
uugcuugucuucccuuuaccuc

SEQ ID NO: 769674 - RNA, 22 nt, Human
uuuguugaguuacagagaugaa

SEQ ID NO: 769675 - RNA, 22 nt, Human
cuccauggcuuucgcaucugca

SEQ ID NO: 769676 - RNA, 22 nt, Human
uguagcagugucuaccacauua

SEQ ID NO: 769677 - RNA, 22 nt, Human
uuucacagcugggaagagauau

SEQ ID NO: 769678 - RNA, 22 nt, Human
aaggaaccauuugugugcaugg

SEQ ID NO: 769679 - RNA, 22 nt, Human
ugggcagggucucuguuaucag

SEQ ID NO: 769680 - RNA, 23 nt, Human
uggaauguuucuuguacugaaug

SEQ ID NO: 769681 - RNA, 22 nt, Human
auuuccuaggugcucgagugcu

SEQ ID NO: 769682 - RNA, 22 nt, Human
gccagggaacccaagggccuca

SEQ ID NO: 769683 - RNA, 22 nt, Human
cccagcuccuuggaugggcagg

SEQ ID NO: 769684 - RNA, 22 nt, Human
cugauacauaguagcaugucau

SEQ ID NO: 769685 - RNA, 22 nt, Human
acacacuucagauguaauuugu

SEQ ID NO: 769686 - RNA, 22 nt, Human
cagaaacagagaaauauuggcu

SEQ ID NO: 769687 - RNA, 22 nt, Human
ucaggagugccaguaccuuuug

SEQ ID NO: 769688 - RNA, 22 nt, Human
caggggcagucugugugcgugg

SEQ ID NO: 769689 - RNA, 22 nt, Human
aucucaggaggacccugaugcu

SEQ ID NO: 769690 - RNA, 22 nt, Human
uccuggcauugugcagggugug

SEQ ID NO: 769691 - RNA, 22 nt, Human
uugcuuuauuccuagcccuugu

SEQ ID NO: 769692 - RNA, 19 nt, Human
cuguugcuggggcucucuu

SEQ ID NO: 769693 - RNA, 22 nt, Human
aguccaauaaccucuuuccuuc

SEQ ID NO: 769694 - RNA, 22 nt, Human
agcuucuugacggauguucugg

SEQ ID NO: 769695 - RNA, 22 nt, Human
ggggcuuuugcacgugggaggc

SEQ ID NO: 769696 - RNA, 22 nt, Human
auacauaugaaugauuuggcuc

SEQ ID NO: 769697 - RNA, 22 nt, Human
agcuaaugauacaugcuccaca

SEQ ID NO: 769698 - RNA, 22 nt, Human
cucugaaaaugugguggggaaa

SEQ ID NO: 769699 - RNA, 22 nt, Human
ccugcauccgaaagugaucaua

SEQ ID NO: 769700 - RNA, 22 nt, Human
agggcugaaacauaauccuucu

SEQ ID NO: 769701 - RNA, 22 nt, Human
ucccacaggaaaguagacauug

SEQ ID NO: 769702 - RNA, 22 nt, Human
ucccagugggugacuggaggcu

SEQ ID NO: 769703 - RNA, 22 nt, Human
caaagcaggaagaauauugaaa

SEQ ID NO: 769704 - RNA, 22 nt, Human
uauuggugggggcagagagaga

SEQ ID NO: 769705 - RNA, 22 nt, Human
uagauucucccaccugccaggc

SEQ ID NO: 769706 - RNA, 22 nt, Human
uagcccagagagccaggggcuu

SEQ ID NO: 769707 - RNA, 20 nt, Human
uuggcaguuaagaaucuuac

SEQ ID NO: 769708 - RNA, 22 nt, Human
uugucaucaagaugcauugguc

SEQ ID NO: 769709 - RNA, 22 nt, Human
ucagaaaccagcucucucaauu

SEQ ID NO: 769710 - RNA, 22 nt, Human
cugacccauauaagaguggagg

SEQ ID NO: 769711 - RNA, 23 nt, Human
aaauugucguaagguggagaugu

SEQ ID NO: 769712 - RNA, 22 nt, Human
ugacuaaaauaggacauuaacu

SEQ ID NO: 769713 - RNA, 22 nt, Human
ugacacugcaaauauaaauauu

SEQ ID NO: 769714 - RNA, 22 nt, Human
ugugcucacucuaaauuaagau

SEQ ID NO: 769715 - RNA, 22 nt, Human
aucugggucugaagauaaugau

SEQ ID NO: 769716 - RNA, 22 nt, Human
cagcuuugaaacauggcucuag

SEQ ID NO: 769717 - RNA, 22 nt, Human
ugguuuuagaugccuuuacugc

SEQ ID NO: 769718 - RNA, 22 nt, Human
cuguaguugggcauuauaauag

SEQ ID NO: 769719 - RNA, 22 nt, Human
ucauccaguaugacuggugucu

SEQ ID NO: 769720 - RNA, 19 nt, Human
uccaggcugagagucagcu

SEQ ID NO: 769721 - RNA, 22 nt, Human
ccugagcugacucuccuuucag

SEQ ID NO: 769722 - RNA, 17 nt, Human
gguacaaacccauuuuu

SEQ ID NO: 769723 - RNA, 22 nt, Human
ccagucacuggaaaaugggaau

SEQ ID NO: 769724 - RNA, 22 nt, Human
caggaggacauacuggcucaca

SEQ ID NO: 769725 - RNA, 22 nt, Human
aauaacaggcucaucagaugcu

SEQ ID NO: 769726 - RNA, 22 nt, Human
ggucacugcucuaaacaaaagu

SEQ ID NO: 769727 - RNA, 22 nt, Human
uugccuguuugagagcuguguu

SEQ ID NO: 769728 - RNA, 22 nt, Human
aaugauauagcagacauagccu

SEQ ID NO: 769729 - RNA, 20 nt, Human
caugacacuguuccucugcc

SEQ ID NO: 769730 - RNA, 20 nt, Human
uggaaguucuguugcauugg

SEQ ID NO: 769731 - RNA, 22 nt, Human
uuucuuauacuauauugucauc

SEQ ID NO: 769732 - RNA, 22 nt, Human
ggcucccuggaaaucccgaggc

SEQ ID NO: 769733 - RNA, 22 nt, Human
cuggcugguccucggggacagc

SEQ ID NO: 769734 - RNA, 22 nt, Human
uccuuuuuaagucguuguggua

SEQ ID NO: 769735 - RNA, 22 nt, Human
caugcauauaugcuacaugcaa

SEQ ID NO: 769736 - RNA, 22 nt, Human
aagauucuuauuagguaauuuu

SEQ ID NO: 769737 - RNA, 17 nt, Human
ccagggaggggccgcgc

SEQ ID NO: 769738 - RNA, 22 nt, Human
ggcucugggaaauggucuuccu

SEQ ID NO: 769739 - RNA, 22 nt, Human
aaauuacagccuuggguagcuu

SEQ ID NO: 769740 - RNA, 22 nt, Human
uagggagaaacaccaauuuauu

SEQ ID NO: 769741 - RNA, 22 nt, Human
auggccagucuguuggacagca

SEQ ID NO: 769742 - RNA, 22 nt, Human
aucauaaagugcuaucugauug

SEQ ID NO: 769743 - RNA, 22 nt, Human
cuguucuaucauuaaaagcuau

SEQ ID NO: 769744 - RNA, 22 nt, Human
auguggcacagcacaguaagag

SEQ ID NO: 769745 - RNA, 22 nt, Human
acagaugaguuagaauaggcag

SEQ ID NO: 769746 - RNA, 22 nt, Human
caucuuuucagaagccauucug

SEQ ID NO: 769747 - RNA, 22 nt, Human
uuggaagcgagcacauggagga

SEQ ID NO: 769748 - RNA, 22 nt, Human
ccugcccuguguuuggggacua

SEQ ID NO: 769749 - RNA, 18 nt, Human
agcugcagaccaggaggu

SEQ ID NO: 769750 - RNA, 22 nt, Human
cugagaagguguggagaugggc

SEQ ID NO: 769751 - RNA, 22 nt, Human
aaagguuaguucuuagaagugc

SEQ ID NO: 769752 - RNA, 22 nt, Human
gcaggcucacucuguuuggcuc

SEQ ID NO: 769753 - RNA, 22 nt, Human
gggagagaugcugauugccaau

SEQ ID NO: 769754 - RNA, 22 nt, Human
aucaggaucaugcuggguggga

SEQ ID NO: 769755 - RNA, 17 nt, Human
guaaggcuugcagaugc

SEQ ID NO: 769756 - RNA, 22 nt, Human
cuagagaaaaagcuuagguacg

SEQ ID NO: 769757 - RNA, 22 nt, Human
uggggaucauaaauugauggag

SEQ ID NO: 769758 - RNA, 22 nt, Human
gaggaggaaacccuguuccucu

SEQ ID NO: 769759 - RNA, 22 nt, Human
auucugauaucuuauucuagcu

SEQ ID NO: 769760 - RNA, 22 nt, Human
augugcuuggacauucuaggaa

SEQ ID NO: 769761 - RNA, 22 nt, Human
ggccauggucaugggugagcuu

SEQ ID NO: 769762 - RNA, 22 nt, Human
gucccagaaacauauugcuggu

SEQ ID NO: 769763 - RNA, 22 nt, Human
ugcagcagacauaauguggauu

SEQ ID NO: 769764 - RNA, 22 nt, Human
ugggccagaggcauggagcuau

SEQ ID NO: 769765 - RNA, 22 nt, Human
cagaagugaaugugauaaacca

SEQ ID NO: 769766 - RNA, 22 nt, Human
agaguccauauauugauuuguu

SEQ ID NO: 769767 - RNA, 21 nt, Human
ugcuuuaugggaaaaauguca

SEQ ID NO: 769768 - RNA, 22 nt, Human
guuucucagcaacuauaugacu

SEQ ID NO: 769769 - RNA, 22 nt, Human
gacuauuuuuaucuaacugggu

SEQ ID NO: 769770 - RNA, 21 nt, Human
acaggcaauuucauaugguuc

SEQ ID NO: 769771 - RNA, 23 nt, Human
cagcccuuccugcauguuuuugu

SEQ ID NO: 769772 - RNA, 22 nt, Human
uugaaauggcagcagcugaccu

SEQ ID NO: 769773 - RNA, 22 nt, Human
uggcaaagaccgcaauuacuuu

SEQ ID NO: 769774 - RNA, 22 nt, Human
ugcagcugguuuagaacuagau

SEQ ID NO: 769775 - RNA, 22 nt, Human
ggaggaggcggcagaaguuccu

SEQ ID NO: 769776 - RNA, 22 nt, Human
gagcuuggugcacagugguuaa

SEQ ID NO: 769777 - RNA, 22 nt, Human
auguacaaaaugccacugaauu

SEQ ID NO: 769778 - RNA, 22 nt, Human
aaaaagagaaaugcucuagucc

SEQ ID NO: 769779 - RNA, 22 nt, Human
uucugcagaucaacuugacugc

SEQ ID NO: 769780 - RNA, 22 nt, Human
gacuuuauucguuaacuguuaa

SEQ ID NO: 769781 - RNA, 22 nt, Human
ugccccucuaggcccuguucua

SEQ ID NO: 769782 - RNA, 22 nt, Human
uccagagccuuucugcuugaca

SEQ ID NO: 769783 - RNA, 18 nt, Human
aggaagcaggaggaaggc

SEQ ID NO: 769784 - RNA, 22 nt, Human
ccucagaggugaacaucagugc

SEQ ID NO: 769785 - RNA, 22 nt, Human
ggguggaguagaaagaugaauu

SEQ ID NO: 769786 - RNA, 22 nt, Human
ucaguguuggcauucagaaaug

SEQ ID NO: 769787 - RNA, 22 nt, Human
acaguagugccaugaccuacag

SEQ ID NO: 769788 - RNA, 22 nt, Human
cagccagcugaauguaccauga

SEQ ID NO: 769789 - RNA, 22 nt, Human
ucagugauuucuggggugaggg

SEQ ID NO: 769790 - RNA, 22 nt, Human
gagggccagaucccaggaggaa

SEQ ID NO: 769791 - RNA, 22 nt, Human
acuccuggguugcaguccucaa

SEQ ID NO: 769792 - RNA, 22 nt, Human
ggcagccuugagggaggccugg

SEQ ID NO: 769793 - RNA, 18 nt, Human
gugcaaugaauagcagag

SEQ ID NO: 769794 - RNA, 19 nt, Human
agguccugaucagcaagga

SEQ ID NO: 769795 - RNA, 22 nt, Human
gcccucugcacagcucugagca

SEQ ID NO: 769796 - RNA, 22 nt, Human
ggcuccaguuugugccuucagc

SEQ ID NO: 769797 - RNA, 22 nt, Human
uuaaggaaagauuagcauuugu

SEQ ID NO: 769798 - RNA, 22 nt, Human
aggcuagucaagucaagcagug

SEQ ID NO: 769799 - RNA, 22 nt, Human
uuucaaaauuuugcagugguaa

SEQ ID NO: 769800 - RNA, 22 nt, Human
acauucauggguuuuacauuau

SEQ ID NO: 769801 - RNA, 22 nt, Human
uauuuuugccucucagauaaaa

SEQ ID NO: 769802 - RNA, 22 nt, Human
aaagcacauaguagaaggauuu

SEQ ID NO: 769803 - RNA, 22 nt, Human
ucacaggcucuccaccaugagg

SEQ ID NO: 769804 - RNA, 22 nt, Human
cagucucucuccuugcaggcgu

SEQ ID NO: 769805 - RNA, 22 nt, Human
gggagacccccaaugccagguc

SEQ ID NO: 769806 - RNA, 22 nt, Human
aggcucagugauguaaaauaua

SEQ ID NO: 769807 - RNA, 22 nt, Human
cuugaaaaauaugccuugcuuc

SEQ ID NO: 769808 - RNA, 22 nt, Human
agaugccuaaaucugggcaagg

SEQ ID NO: 769809 - RNA, 22 nt, Human
ccccaggagauuugggagcaca

SEQ ID NO: 769810 - RNA, 22 nt, Human
cuuguagaauugaaauggucuc

SEQ ID NO: 769811 - RNA, 22 nt, Human
gggagggacacaaagaguuccc

SEQ ID NO: 769812 - RNA, 21 nt, Human
uggcuggauagaugggaacug

SEQ ID NO: 769813 - RNA, 22 nt, Human
uagaucauaaauacuauggugc

SEQ ID NO: 769814 - RNA, 22 nt, Human
gcagcaagagguuucuguugac

SEQ ID NO: 769815 - RNA, 22 nt, Human
gcuuccugaguacacccucauc

SEQ ID NO: 769816 - RNA, 22 nt, Human
aggacaugaagaaagggcaagg

SEQ ID NO: 769817 - RNA, 22 nt, Human
agcugcccuguggggaggguug

SEQ ID NO: 769818 - RNA, 22 nt, Human
aagcacugggaggaggcugaga

SEQ ID NO: 769819 - RNA, 22 nt, Human
auucuuauuaaauagccagaag

SEQ ID NO: 769820 - RNA, 22 nt, Human
gaguccuucuggcuggcaggau

SEQ ID NO: 769821 - RNA, 22 nt, Human
agaauuguucuguagcuuggcu

SEQ ID NO: 769822 - RNA, 22 nt, Human
aucaguuuuuauuaauguagcu

SEQ ID NO: 769823 - RNA, 22 nt, Human
uacaaguauauucuagugauau

SEQ ID NO: 769824 - RNA, 22 nt, Human
cucagcucauuguggauccggu

SEQ ID NO: 769825 - RNA, 22 nt, Human
guuucucaaauuauuucagcuu

SEQ ID NO: 769826 - RNA, 22 nt, Human
gacugccagaaugugaggccug

SEQ ID NO: 769827 - RNA, 23 nt, Human
uugugggcagauuccauggggag

SEQ ID NO: 769828 - RNA, 22 nt, Human
ugaggccagccacagccacccu

SEQ ID NO: 769829 - RNA, 22 nt, Human
aggcacugguccauuuucugca

SEQ ID NO: 769830 - RNA, 22 nt, Human
gcgggcggggguucccaggucu

SEQ ID NO: 769831 - RNA, 22 nt, Human
ccagcuaguaagcaccugcauc

SEQ ID NO: 769832 - RNA, 19 nt, Human
ggcaccuuggcuaugccug

SEQ ID NO: 769833 - RNA, 22 nt, Human
cuaaacauggcuuagaacacuc

SEQ ID NO: 769834 - RNA, 22 nt, Human
aggaaacagugaacuuggcagg

SEQ ID NO: 769835 - RNA, 22 nt, Human
ucuuggcucugccacuaauuag

SEQ ID NO: 769836 - RNA, 22 nt, Human
gagcagggcuuguccuccucau

SEQ ID NO: 769837 - RNA, 22 nt, Human
auuuuucagcuucauugaggca

SEQ ID NO: 769838 - RNA, 22 nt, Human
ugguccugaggcuuguuuccac

SEQ ID NO: 769839 - RNA, 22 nt, Human
caaagauuuuagaauuugcaau

SEQ ID NO: 769840 - RNA, 22 nt, Human
aacacuaaaggucaguuagaag

SEQ ID NO: 769841 - RNA, 22 nt, Human
cacugcaggucugagauggggg

SEQ ID NO: 769842 - RNA, 22 nt, Human
agaugaauccacacauggcaaa

SEQ ID NO: 769843 - RNA, 22 nt, Human
gcgcucagaaaagauuuucuuc

SEQ ID NO: 769844 - RNA, 22 nt, Human
aggugcugugcuaugcacuugu

SEQ ID NO: 769845 - RNA, 22 nt, Human
cagagcuguauuuaucuuucca

SEQ ID NO: 769846 - RNA, 22 nt, Human
aaccccaguaccccaggauaug

SEQ ID NO: 769847 - RNA, 22 nt, Human
agggagcagggcuccuuugggu

SEQ ID NO: 769848 - RNA, 21 nt, Human
uccuguaagcuuggguggcuc

SEQ ID NO: 769849 - RNA, 22 nt, Human
gaacagaauuaccgaagaucug

SEQ ID NO: 769850 - RNA, 22 nt, Human
uagacuggugaauuagggggaa

SEQ ID NO: 769851 - RNA, 22 nt, Human
uucugacauauccagucucagu

SEQ ID NO: 769852 - RNA, 22 nt, Human
ugggggauuguuuuaaugaaua

SEQ ID NO: 769853 - RNA, 22 nt, Human
gaaucccuugcaaguuguugua

SEQ ID NO: 769854 - RNA, 22 nt, Human
auagacaugcaacacuuuuuac

SEQ ID NO: 769855 - RNA, 22 nt, Human
uccagaugcugcacauuccuga

SEQ ID NO: 769856 - RNA, 22 nt, Human
ccaggaaggaagcagggguuuc

SEQ ID NO: 769857 - RNA, 22 nt, Human
auccagagacuggggcugggau

SEQ ID NO: 769858 - RNA, 22 nt, Human
ggaaggguuuaagcaggagagu

SEQ ID NO: 769859 - RNA, 22 nt, Human
ugaccaggauacugcagggaug

SEQ ID NO: 769860 - RNA, 22 nt, Human
caggagcucaagaccacccugg

SEQ ID NO: 769861 - RNA, 22 nt, Human
uucaaucauuagaaucucaggc

SEQ ID NO: 769862 - RNA, 21 nt, Human
agcagguguaaaggaggaaau

SEQ ID NO: 769863 - RNA, 22 nt, Human
cagauuccggucaucucuccuu

SEQ ID NO: 769864 - RNA, 21 nt, Human
augcaucuaucuucuacucca

SEQ ID NO: 769865 - RNA, 22 nt, Human
ccuucagcguccccuuuacccg

SEQ ID NO: 769866 - RNA, 22 nt, Human
guggcccugagcccuuugacag

SEQ ID NO: 769867 - RNA, 22 nt, Human
gaggagcccuguuccccaggcc

SEQ ID NO: 769868 - RNA, 22 nt, Human
agcuuacugggcaguaaagauu

SEQ ID NO: 769869 - RNA, 22 nt, Human
gccuggagcuacuggacacuga

SEQ ID NO: 769870 - RNA, 22 nt, Human
cagcaagauuuuuaaagcaagg

SEQ ID NO: 769871 - RNA, 23 nt, Human
uuucugaaguugagauggacuuu

SEQ ID NO: 769872 - RNA, 22 nt, Human
guagcuuauuagggauaauagu

SEQ ID NO: 769873 - RNA, 22 nt, Human
gccuguucugcccugagagccu

SEQ ID NO: 769874 - RNA, 22 nt, Human
cauuucuaagaaggcugcacau

SEQ ID NO: 769875 - RNA, 23 nt, Human
cagugugacgaggugaggcaggc

SEQ ID NO: 769876 - RNA, 22 nt, Human
cagugccaaggauggccuggga

SEQ ID NO: 769877 - RNA, 22 nt, Human
ucucaggaagauuagggcuaag

SEQ ID NO: 769878 - RNA, 22 nt, Human
acuguagaggccuggauugagg

SEQ ID NO: 769879 - RNA, 17 nt, Human
agcugccucucccacca

SEQ ID NO: 769880 - RNA, 22 nt, Human
acucucucugauggaacuuuag

SEQ ID NO: 769881 - RNA, 22 nt, Human
auacacacugcuauccuuuuuu

SEQ ID NO: 769882 - RNA, 22 nt, Human
gcuguggcggcagcagcuggug

SEQ ID NO: 769883 - RNA, 22 nt, Human
agagaagugagcuuguucacuc

SEQ ID NO: 769884 - RNA, 22 nt, Human
ucaggaaauuaaacacuugaaa

SEQ ID NO: 769885 - RNA, 22 nt, Human
gaacaauacaggcuuuauuccu

SEQ ID NO: 769886 - RNA, 22 nt, Human
ucaguaacuucaugaccaagca

SEQ ID NO: 769887 - RNA, 22 nt, Human
uguggagaugugagcaagggga

SEQ ID NO: 769888 - RNA, 22 nt, Human
accaggcucugccaguguuuac

SEQ ID NO: 769889 - RNA, 22 nt, Human
auaauauuugcauuacugugau

SEQ ID NO: 769890 - RNA, 22 nt, Human
aauuagcauuucccauauaaau

SEQ ID NO: 769891 - RNA, 18 nt, Human
gcagggcugcacacgcau

SEQ ID NO: 769892 - RNA, 22 nt, Human
ucucagugguguuuugagucca

SEQ ID NO: 769893 - RNA, 22 nt, Human
agggccagcuagagcccucgcc

SEQ ID NO: 769894 - RNA, 22 nt, Human
ugcaguggcgccaucucagcuc

SEQ ID NO: 769895 - RNA, 22 nt, Human
ugcaucauauaaugucuaugga

SEQ ID NO: 769896 - RNA, 22 nt, Human
uagaagcagcaggacucauggu

SEQ ID NO: 769897 - RNA, 22 nt, Human
ggagagaacugaccugaaagga

SEQ ID NO: 769898 - RNA, 22 nt, Human
agaaugcaucuaaaagcagaga

SEQ ID NO: 769899 - RNA, 19 nt, Human
ccugggccuccaucacccc

SEQ ID NO: 769900 - RNA, 22 nt, Human
agugucauuccagggacccucg

SEQ ID NO: 769901 - RNA, 22 nt, Human
ugucaguuuccugugcccugcu

SEQ ID NO: 769902 - RNA, 22 nt, Human
ugcugcccguaccugugcacuu

SEQ ID NO: 769903 - RNA, 22 nt, Human
cugggccucaaucucagaguuu

SEQ ID NO: 769904 - RNA, 22 nt, Human
agagccacuccaggacucaggg

SEQ ID NO: 769905 - RNA, 22 nt, Human
gauauagguucauaguguuaca

SEQ ID NO: 769906 - RNA, 22 nt, Human
ucuggggguuaagugaggacaa

SEQ ID NO: 769907 - RNA, 23 nt, Human
uccuucaaguuaggaagugaaca

SEQ ID NO: 769908 - RNA, 22 nt, Human
aagggcuggagaggaaagguug

SEQ ID NO: 769909 - RNA, 22 nt, Human
cagauacagcuagcuccguggc

SEQ ID NO: 769910 - RNA, 22 nt, Human
gccuucagaguaccauguccuc

SEQ ID NO: 769911 - RNA, 22 nt, Human
uaucucuuuauugacaauaaaa

SEQ ID NO: 769912 - RNA, 22 nt, Human
gucccaggugcccagugggcag

SEQ ID NO: 769913 - RNA, 22 nt, Human
gacuuuaaguccuaucugugcg

SEQ ID NO: 769914 - RNA, 22 nt, Human
auuuaacuuucagccccucuuc

SEQ ID NO: 769915 - RNA, 22 nt, Human
ggcucuggucagugaggggccu

SEQ ID NO: 769916 - RNA, 22 nt, Human
gcugcccucugugacccggccc

SEQ ID NO: 769917 - RNA, 22 nt, Human
gagggugcaggaggaugguagu

SEQ ID NO: 769918 - RNA, 20 nt, Human
gcucugggagggaugugaug

SEQ ID NO: 769919 - RNA, 22 nt, Human
uuggagguuauuaacacuggcc

SEQ ID NO: 769920 - RNA, 22 nt, Human
gcugggcugcgucggggaagcc

SEQ ID NO: 769921 - RNA, 20 nt, Human
gcacaguuugggaaccaugg

SEQ ID NO: 769922 - RNA, 22 nt, Human
acuaagugauucuaagcaucuu

SEQ ID NO: 769923 - RNA, 22 nt, Human
cacagaauuaagggagaaauau

SEQ ID NO: 769924 - RNA, 22 nt, Human
caggguccggcugccuggcugu

SEQ ID NO: 769925 - RNA, 22 nt, Human
uuacacaaguucuuuaaccuau

SEQ ID NO: 769926 - RNA, 22 nt, Human
agcaccagagcuaugggccugc

SEQ ID NO: 769927 - RNA, 18 nt, Human
uaagucauuugaaaugcc

SEQ ID NO: 769928 - RNA, 22 nt, Human
ucugaaaugaccuuuccccacu

SEQ ID NO: 769929 - RNA, 22 nt, Human
agaaguauucugcauguacuga

SEQ ID NO: 769930 - RNA, 22 nt, Human
ccucagcugcuucccuggagcc

SEQ ID NO: 769931 - RNA, 22 nt, Human
uaagacauaccaaguuguguga

SEQ ID NO: 769932 - RNA, 22 nt, Human
agucaguuaaccucacagcauc

SEQ ID NO: 769933 - RNA, 22 nt, Human
aaggccaaggcugcagugagcc

SEQ ID NO: 769934 - RNA, 22 nt, Human
caggcugaucagggcugggaug

SEQ ID NO: 769935 - RNA, 22 nt, Human
uccaugcagaguccaggccuca

SEQ ID NO: 769936 - RNA, 22 nt, Human
agucucuggggaggaguggaaa

SEQ ID NO: 769937 - RNA, 22 nt, Human
ucuaccacuuugaccucucugu

SEQ ID NO: 769938 - RNA, 22 nt, Human
ucauuccauuuccagcucugaa

SEQ ID NO: 769939 - RNA, 22 nt, Human
ucucagaguuccucuggagucc

SEQ ID NO: 769940 - RNA, 22 nt, Human
cuauucugcuugaaauuauucu

SEQ ID NO: 769941 - RNA, 22 nt, Human
aaaagguagauucuccuucuau

SEQ ID NO: 769942 - RNA, 22 nt, Human
agcaauagauaaaacauuuacc

SEQ ID NO: 769943 - RNA, 22 nt, Human
caguccaggccuggaggagcca

SEQ ID NO: 769944 - RNA, 22 nt, Human
cugaaagcauuaacuccacuuc

SEQ ID NO: 769945 - RNA, 22 nt, Human
uccagggaccucccugagagcu

SEQ ID NO: 769946 - RNA, 22 nt, Human
accacuuugguauuucaauuuu

SEQ ID NO: 769947 - RNA, 22 nt, Human
ucugcuguucauucuuuuagcu

SEQ ID NO: 769948 - RNA, 22 nt, Human
uuagacagagcuccuugagggc

SEQ ID NO: 769949 - RNA, 20 nt, Human
caucaacaccuugucagccu

SEQ ID NO: 769950 - RNA, 22 nt, Human
uuacuuuagaaauagucaucaa

SEQ ID NO: 769951 - RNA, 17 nt, Human
uucauuaauaaaagcaa

SEQ ID NO: 769952 - RNA, 22 nt, Human
cucuccagccaggggcuuccug

SEQ ID NO: 769953 - RNA, 23 nt, Human
uccuggugacaugccugagcauc

SEQ ID NO: 769954 - RNA, 22 nt, Human
ccagcuugaagaugugcugguu

SEQ ID NO: 769955 - RNA, 22 nt, Human
cucuucuugaaagaggaauuca

SEQ ID NO: 769956 - RNA, 22 nt, Human
agggggcuccuuggugugcaga

SEQ ID NO: 769957 - RNA, 22 nt, Human
gccugagacagugugguccaau

SEQ ID NO: 769958 - RNA, 22 nt, Human
ugcuauuugggggcuacaugau

SEQ ID NO: 769959 - RNA, 22 nt, Human
ucacaggacccugaggguggcg

SEQ ID NO: 769960 - RNA, 22 nt, Human
cagcucugguccagggagggca

SEQ ID NO: 769961 - RNA, 23 nt, Human
aggcuccacucccugggaugugg

SEQ ID NO: 769962 - RNA, 22 nt, Human
uugugcaagaagccagcaccaa

SEQ ID NO: 769963 - RNA, 22 nt, Human
uguucuugggaaucuuacaguu

SEQ ID NO: 769964 - RNA, 22 nt, Human
ugaggccaggaucccaggcucu

SEQ ID NO: 769965 - RNA, 22 nt, Human
cagaacagacuuaacagggcug

SEQ ID NO: 769966 - RNA, 22 nt, Human
uccuggcaggguggcagcgggu

SEQ ID NO: 769967 - RNA, 22 nt, Human
ggggcccuuguggcugcaggcc

SEQ ID NO: 769968 - RNA, 22 nt, Human
cacagggaggcggucacuggcu

SEQ ID NO: 769969 - RNA, 22 nt, Human
ccugcugcuaugaaggugacag

SEQ ID NO: 769970 - RNA, 22 nt, Human
cuacuuguucacuguaggucgc

SEQ ID NO: 769971 - RNA, 22 nt, Human
gcucccaccuuugcuaucagua

SEQ ID NO: 769972 - RNA, 22 nt, Human
aagcaaaggcaggagcuuguga

SEQ ID NO: 769973 - RNA, 22 nt, Human
agggucaacauucuaaaaucug

SEQ ID NO: 769974 - RNA, 22 nt, Human
ucagaggagaugguuaccaggg

SEQ ID NO: 769975 - RNA, 22 nt, Human
cuggugcuuugcucauuugaua

SEQ ID NO: 769976 - RNA, 22 nt, Human
ugcacuggggucccagcgcacg

SEQ ID NO: 769977 - RNA, 22 nt, Human
cuggggccagugaggaggcuuu

SEQ ID NO: 769978 - RNA, 23 nt, Human
ugauucagcaaguccacuucugg

SEQ ID NO: 769979 - RNA, 22 nt, Human
acuggccaggcgaaccacacug

SEQ ID NO: 769980 - RNA, 22 nt, Human
agcugggaggcuccucugugac

SEQ ID NO: 769981 - RNA, 22 nt, Human
uuggcagaugaacacaacugga

SEQ ID NO: 769982 - RNA, 22 nt, Human
cucuggccugcuuccucaggua

SEQ ID NO: 769983 - RNA, 22 nt, Human
ggcuucugcucagccugcacgc

SEQ ID NO: 769984 - RNA, 22 nt, Human
gaagccaguguuugaagaauuu

SEQ ID NO: 769985 - RNA, 22 nt, Human
uuucucucuggcccugauuguc

SEQ ID NO: 769986 - RNA, 22 nt, Human
agaaagaacguugguuaucuua

SEQ ID NO: 769987 - RNA, 22 nt, Human
ugccaaggguaugggcaagaua

SEQ ID NO: 769988 - RNA, 22 nt, Human
ucaccuuagcuagaggaagaga

SEQ ID NO: 769989 - RNA, 22 nt, Human
uuccugggggcagcagucuuga

SEQ ID NO: 769990 - RNA, 22 nt, Human
augucaccaguuuccaaauuug

SEQ ID NO: 769991 - RNA, 22 nt, Human
auucagcauucauuaugcgcca

SEQ ID NO: 769992 - RNA, 22 nt, Human
cugcagcuuuggaaaccuguuu

SEQ ID NO: 769993 - RNA, 19 nt, Human
cugaaaaacauucucagga

SEQ ID NO: 769994 - RNA, 22 nt, Human
uagaaacaucagcuaaccaaaa

SEQ ID NO: 769995 - RNA, 18 nt, Human
cagaaaucacaccagcac

SEQ ID NO: 769996 - RNA, 22 nt, Human
agauguaacgguagguggcauu

SEQ ID NO: 769997 - RNA, 22 nt, Human
ugugaaaggggucacagggaaa

SEQ ID NO: 769998 - RNA, 22 nt, Human
gaggcagcagaacauggaagag

SEQ ID NO: 769999 - RNA, 22 nt, Human
ggaggccaucagggagggcauu

SEQ ID NO: 770000 - RNA, 21 nt, Human
uacugagaccucacagugugc

SEQ ID NO: 770001 - RNA, 22 nt, Human
auuguuaauguugcacuaaggu

SEQ ID NO: 770002 - RNA, 22 nt, Human
uaauguuugggaaggugcuuug

SEQ ID NO: 770003 - RNA, 22 nt, Human
acaucuuugcucuuauagagcu

SEQ ID NO: 770004 - RNA, 22 nt, Human
gggucuggcaugcugagaugga

SEQ ID NO: 770005 - RNA, 22 nt, Human
cuggcucugagugguaucuuga

SEQ ID NO: 770006 - RNA, 17 nt, Human
ucugcagaggcaaaccu

SEQ ID NO: 770007 - RNA, 22 nt, Human
aggcccugagcauccgagggca

SEQ ID NO: 770008 - RNA, 20 nt, Human
gcauccauauaugcaugugu

SEQ ID NO: 770009 - RNA, 22 nt, Human
agccagccgggggaccacagug

SEQ ID NO: 770010 - RNA, 22 nt, Human
uggcacagggcuuggucgcuca

SEQ ID NO: 770011 - RNA, 22 nt, Human
ugcugggggugucucaccaggc

SEQ ID NO: 770012 - RNA, 23 nt, Human
acugagguacugagguugugaca

SEQ ID NO: 770013 - RNA, 21 nt, Human
gcagccacugccuucaacaau

SEQ ID NO: 770014 - RNA, 22 nt, Human
gagaaagacguaggcugggagg

SEQ ID NO: 770015 - RNA, 22 nt, Human
uggcccuggguggaauguccca

SEQ ID NO: 770016 - RNA, 22 nt, Human
cugucauugagccugucagggc

SEQ ID NO: 770017 - RNA, 22 nt, Human
uggaaguggcagaaaaugaaca

SEQ ID NO: 770018 - RNA, 22 nt, Human
agaggaggaagagcuuuaaaau

SEQ ID NO: 770019 - RNA, 22 nt, Human
ugagcugcauuacagccucugu

SEQ ID NO: 770020 - RNA, 22 nt, Human
agcuccuggucuuuguccagag

SEQ ID NO: 770021 - RNA, 22 nt, Human
cuaauuguaagcuccuugaggg

SEQ ID NO: 770022 - RNA, 22 nt, Human
uacagguagggucuauguuaga

SEQ ID NO: 770023 - RNA, 22 nt, Human
gucaggaugggcagccaaacua

SEQ ID NO: 770024 - RNA, 22 nt, Human
uuuugccuaggguugacccguu

SEQ ID NO: 770025 - RNA, 21 nt, Human
acacaacaggcagucauuuuc

SEQ ID NO: 770026 - RNA, 22 nt, Human
guauucagaaggaugaucuagu

SEQ ID NO: 770027 - RNA, 22 nt, Human
aguucuuuugugaacauaugcu

SEQ ID NO: 770028 - RNA, 22 nt, Human
uauuucacucaguauaccauag

SEQ ID NO: 770029 - RNA, 22 nt, Human
caggacaguauaggcuuuagga

SEQ ID NO: 770030 - RNA, 22 nt, Human
cauuuauuaguuaguucgaugu

SEQ ID NO: 770031 - RNA, 22 nt, Human
agagcuaagaaacagaauugcu

SEQ ID NO: 770032 - RNA, 22 nt, Human
aaaauuuuacugguguuuccuu

SEQ ID NO: 770033 - RNA, 22 nt, Human
ucacagcucugucaauuuuaua

SEQ ID NO: 770034 - RNA, 22 nt, Human
cugggcugcuugcugaaggggu

SEQ ID NO: 770035 - RNA, 22 nt, Human
caggccugggcuggguaucagg

SEQ ID NO: 770036 - RNA, 22 nt, Human
uccuugaacagagggccugggu

SEQ ID NO: 770037 - RNA, 22 nt, Human
ucagccaguuaagucaagaaau

SEQ ID NO: 770038 - RNA, 22 nt, Human
gauccguuuauacugaguuuga

SEQ ID NO: 770039 - RNA, 22 nt, Human
augaaacucuaacuuaacaagu

SEQ ID NO: 770040 - RNA, 22 nt, Human
caccuggauauguuucagcuug

SEQ ID NO: 770041 - RNA, 22 nt, Human
ccacacuaaacugcucaaacca

SEQ ID NO: 770042 - RNA, 22 nt, Human
aggcgcagcacgugagaguugg

SEQ ID NO: 770043 - RNA, 22 nt, Human
gcucacaggcaguguugggaga

SEQ ID NO: 770044 - RNA, 22 nt, Human
agucuauuucagucuuacuagu

SEQ ID NO: 770045 - RNA, 22 nt, Human
ggacacuguucauggggagggg

SEQ ID NO: 770046 - RNA, 21 nt, Human
uuagcaaagcaaacacaugcu

SEQ ID NO: 770047 - RNA, 22 nt, Human
uuguuucagcuguaugcuaugu

SEQ ID NO: 770048 - RNA, 22 nt, Human
ugggcaaggcuggagccugcag

SEQ ID NO: 770049 - RNA, 22 nt, Human
gcucuugucaaaaauuaguuga

SEQ ID NO: 770050 - RNA, 22 nt, Human
aaaaacacaacugucuuucucu

SEQ ID NO: 770051 - RNA, 22 nt, Human
uuuaacaugugaauuuuggaag

SEQ ID NO: 770052 - RNA, 22 nt, Human
cccuggagaucgggagaggaag

SEQ ID NO: 770053 - RNA, 22 nt, Human
uuguuuaaaagaaaucauagaa

SEQ ID NO: 770054 - RNA, 21 nt, Human
cacucucccaauccuugcuga

SEQ ID NO: 770055 - RNA, 22 nt, Human
uuucaaggugcaggaggguuuu

SEQ ID NO: 770056 - RNA, 22 nt, Human
ugcugcagguguguucagugag

SEQ ID NO: 770057 - RNA, 22 nt, Human
gugugcagggaugagugcaggu

SEQ ID NO: 770058 - RNA, 22 nt, Human
ugugugcacaggaguguuugaa

SEQ ID NO: 770059 - RNA, 22 nt, Human
cguggccaguuucaagcuacca

SEQ ID NO: 770060 - RNA, 22 nt, Human
uguauuuugaguccaaucuccu

SEQ ID NO: 770061 - RNA, 22 nt, Human
ucccaggaagaucccagggacc

SEQ ID NO: 770062 - RNA, 22 nt, Human
agauacaaggcagagaugugca

SEQ ID NO: 770063 - RNA, 22 nt, Human
ggcuucuuuuuaguaaauguca

SEQ ID NO: 770064 - RNA, 22 nt, Human
ugggccucggagcacaggagac

SEQ ID NO: 770065 - RNA, 23 nt, Human
acaagauagggauaaaaagauaa

SEQ ID NO: 770066 - RNA, 16 nt, Human
ucagcuauagggauug

SEQ ID NO: 770067 - RNA, 22 nt, Human
gcucaaagaccagacagaggag

SEQ ID NO: 770068 - RNA, 22 nt, Human
uagaauugaguuucacuguucc

SEQ ID NO: 770069 - RNA, 22 nt, Human
uuugaaguguuauuucuaucac

SEQ ID NO: 770070 - RNA, 22 nt, Human
uaauugcuauuggaaugcuuug

SEQ ID NO: 770071 - RNA, 17 nt, Human
ugccaagaagagcagag

SEQ ID NO: 770072 - RNA, 22 nt, Human
aagcacagagagguaaaguaac

SEQ ID NO: 770073 - RNA, 22 nt, Human
aauggcuuugacauuuucaaau

SEQ ID NO: 770074 - RNA, 22 nt, Human
augcaauauguguuucuguuua

SEQ ID NO: 770075 - RNA, 22 nt, Human
cuggagaagcauucaaauaauu

SEQ ID NO: 770076 - RNA, 22 nt, Human
aggggccucagccuccugguca

SEQ ID NO: 770077 - RNA, 22 nt, Human
gaugaggggucauuggcuggga

SEQ ID NO: 770078 - RNA, 22 nt, Human
uugcuguaguguucugauguca

SEQ ID NO: 770079 - RNA, 21 nt, Human
aaaucacuguccaaucuuggu

SEQ ID NO: 770080 - RNA, 22 nt, Human
cacauucauggaguuugccugu

SEQ ID NO: 770081 - RNA, 22 nt, Human
gacagcaaagcagagccaaggc

SEQ ID NO: 770082 - RNA, 22 nt, Human
cagaggaaaugggaaggagaua

SEQ ID NO: 770083 - RNA, 22 nt, Human
cagggagaggcaucauagggaa

SEQ ID NO: 770084 - RNA, 22 nt, Human
uaguccuugcugggcacagagu

SEQ ID NO: 770085 - RNA, 22 nt, Human
gauggugucccaggcucaggcu

SEQ ID NO: 770086 - RNA, 22 nt, Human
aagacugauguccagucccaug

SEQ ID NO: 770087 - RNA, 22 nt, Human
uaagaggcauuagagacauagc

SEQ ID NO: 770088 - RNA, 22 nt, Human
cuacucugaauugaagugauau

SEQ ID NO: 770089 - RNA, 22 nt, Human
auccugaagcaugaaugucaaa

SEQ ID NO: 770090 - RNA, 22 nt, Human
ugucaaauaguagaaagauggc

SEQ ID NO: 770091 - RNA, 22 nt, Human
gugaaauauuuuguuuauguca

SEQ ID NO: 770092 - RNA, 22 nt, Human
cagggaggcugucuuaugccug

SEQ ID NO: 770093 - RNA, 21 nt, Human
cucuggaguuugaaggcuggg

SEQ ID NO: 770094 - RNA, 22 nt, Human
ugaggccagggauuccaucauu

SEQ ID NO: 770095 - RNA, 22 nt, Human
auauuguacuaggguuacaugu

SEQ ID NO: 770096 - RNA, 21 nt, Human
ggaacauuguuaauagucucu

SEQ ID NO: 770097 - RNA, 22 nt, Human
gggagggucugccaugcucccu

SEQ ID NO: 770098 - RNA, 22 nt, Human
aagaauacguaucaacaauggu

SEQ ID NO: 770099 - RNA, 22 nt, Human
uuuagacagcaucuggugacuu

SEQ ID NO: 770100 - RNA, 22 nt, Human
uccucaggcggugaggaggggc

SEQ ID NO: 770101 - RNA, 22 nt, Human
gagacaaaaguuggagugcaag

SEQ ID NO: 770102 - RNA, 22 nt, Human
cucugagcugaaacaugagcau

SEQ ID NO: 770103 - RNA, 22 nt, Human
agugcagggccugcccagcagg

SEQ ID NO: 770104 - RNA, 22 nt, Human
aguaaucugauuuuauagcuau

SEQ ID NO: 770105 - RNA, 22 nt, Human
uaguuuagacuucaacccuuug

SEQ ID NO: 770106 - RNA, 22 nt, Human
guacagaaugcuugguaaggca

SEQ ID NO: 770107 - RNA, 22 nt, Human
gacggagcugguugcugcggcu

SEQ ID NO: 770108 - RNA, 22 nt, Human
uccugggcgagguacuggggcu

SEQ ID NO: 770109 - RNA, 22 nt, Human
uagaaaauagggccuguggagc

SEQ ID NO: 770110 - RNA, 22 nt, Human
ggagucccagcaaagccuuccc

SEQ ID NO: 770111 - RNA, 22 nt, Human
cuggacucugcagagaaaagua

SEQ ID NO: 770112 - RNA, 22 nt, Human
gggcacaggaauuugggaugug

SEQ ID NO: 770113 - RNA, 21 nt, Human
uucuccagggggagcucucuc

SEQ ID NO: 770114 - RNA, 22 nt, Human
uggcacagaaaaaugcuccauu

SEQ ID NO: 770115 - RNA, 22 nt, Human
aguuccaugucuggguuuguga

SEQ ID NO: 770116 - RNA, 22 nt, Human
caggaacagaguggcauugucu

SEQ ID NO: 770117 - RNA, 22 nt, Human
ucaguguucuuauuuaauuagg

SEQ ID NO: 770118 - RNA, 22 nt, Human
cuucugugagucaguguuucug

SEQ ID NO: 770119 - RNA, 22 nt, Human
aggugcuuggcucgugcacaca

SEQ ID NO: 770120 - RNA, 22 nt, Human
uugauucaaccacuuaauaauc

SEQ ID NO: 770121 - RNA, 22 nt, Human
agagcuggagaugcagguuucg

SEQ ID NO: 770122 - RNA, 22 nt, Human
caggcccucgcccgcagcgacc

SEQ ID NO: 770123 - RNA, 22 nt, Human
uuugagaaacagacgaaagaca

SEQ ID NO: 770124 - RNA, 21 nt, Human
ccagcugccugcacuuuggac

SEQ ID NO: 770125 - RNA, 22 nt, Human
cucagugcaaccaaagugaucu

SEQ ID NO: 770126 - RNA, 22 nt, Human
cuggaagaguaauauaaauuag

SEQ ID NO: 770127 - RNA, 22 nt, Human
uuucagagaggcuucaaaucuu

SEQ ID NO: 770128 - RNA, 22 nt, Human
cuagggcacuaggacucaugug

SEQ ID NO: 770129 - RNA, 22 nt, Human
ggaacauuggcauuuuaaggcu

SEQ ID NO: 770130 - RNA, 22 nt, Human
ggcucgagcagcuguguaggau

SEQ ID NO: 770131 - RNA, 21 nt, Human
gucuuuuuaauugcgauuucc

SEQ ID NO: 770132 - RNA, 22 nt, Human
agggcuggcuaggugcguuccc

SEQ ID NO: 770133 - RNA, 22 nt, Human
uccugucugcucacagagcugg

SEQ ID NO: 770134 - RNA, 22 nt, Human
ccagaggaggggggucuuucug

SEQ ID NO: 770135 - RNA, 22 nt, Human
gaggaggccaguggaaggaagc

SEQ ID NO: 770136 - RNA, 22 nt, Human
accuuggaacugaaguguuuuu

SEQ ID NO: 770137 - RNA, 22 nt, Human
agaaaguuuauuccuaucuagc

SEQ ID NO: 770138 - RNA, 22 nt, Human
uaucuacauguagguauguaug

SEQ ID NO: 770139 - RNA, 22 nt, Human
cauuugugugggaacccaucag

SEQ ID NO: 770140 - RNA, 18 nt, Human
gagucuuuguuacugcug

SEQ ID NO: 770141 - RNA, 22 nt, Human
cucugaacucuugggcagcaug

SEQ ID NO: 770142 - RNA, 22 nt, Human
gguggggccugcuccagcggcc

SEQ ID NO: 770143 - RNA, 22 nt, Human
ggcagggguggccuuccuuugg

SEQ ID NO: 770144 - RNA, 22 nt, Human
cagugauuuuaaacuauggaug

SEQ ID NO: 770145 - RNA, 22 nt, Human
aaaugugagacugaguuuuccu

SEQ ID NO: 770146 - RNA, 22 nt, Human
acuucuguauguccugcauuca

SEQ ID NO: 770147 - RNA, 22 nt, Human
aaguccaaggucaccauucaca

SEQ ID NO: 770148 - RNA, 18 nt, Human
cugugcagcaaacugagc

SEQ ID NO: 770149 - RNA, 23 nt, Human
caaaccuguucuccccacaugca

SEQ ID NO: 770150 - RNA, 22 nt, Human
gccuucccuggcuaggcaagca

SEQ ID NO: 770151 - RNA, 22 nt, Human
aagccaauggauugguugcuuu

SEQ ID NO: 770152 - RNA, 22 nt, Human
cccugaggagagcgcuucccga

SEQ ID NO: 770153 - RNA, 22 nt, Human
ucacagacucuugauugucuaa

SEQ ID NO: 770154 - RNA, 22 nt, Human
uagaaguuucaaaagacuucau

SEQ ID NO: 770155 - RNA, 22 nt, Human
gcugauaaauaguugauguacc

SEQ ID NO: 770156 - RNA, 22 nt, Human
aagcuucaguucuggggcaaug

SEQ ID NO: 770157 - RNA, 22 nt, Human
gccccuucucugaggaaccugc

SEQ ID NO: 770158 - RNA, 22 nt, Human
uguacacacacguguguaucua

SEQ ID NO: 770159 - RNA, 22 nt, Human
ucaucacucauuggacaacaga

SEQ ID NO: 770160 - RNA, 22 nt, Human
ggacucaggcugguguucggac

SEQ ID NO: 770161 - RNA, 22 nt, Human
uugcuuuaaugagauuuugcca

SEQ ID NO: 770162 - RNA, 22 nt, Human
ugguuccucagggcagcuguac

SEQ ID NO: 770163 - RNA, 22 nt, Human
augguuuuauuucucuauagcu

SEQ ID NO: 770164 - RNA, 22 nt, Human
ugcuggagacauagcaggcagc

SEQ ID NO: 770165 - RNA, 22 nt, Human
gggagcgggacugcgcaggcuu

SEQ ID NO: 770166 - RNA, 22 nt, Human
gaugcgggcccgcuccacugcc

SEQ ID NO: 770167 - RNA, 22 nt, Human
acacaugcugauaagaauauaa

SEQ ID NO: 770168 - RNA, 22 nt, Human
gagcccagcccagagccauaug

SEQ ID NO: 770169 - RNA, 22 nt, Human
aucauuccacauguaccacuag

SEQ ID NO: 770170 - RNA, 22 nt, Human
aagcagaugccaagauuuacca

SEQ ID NO: 770171 - RNA, 22 nt, Human
caggaggcaucauggagcggac

SEQ ID NO: 770172 - RNA, 21 nt, Human
ugugcaguccaaugugcuagc

SEQ ID NO: 770173 - RNA, 22 nt, Human
uggcuucugggguggccugcau

SEQ ID NO: 770174 - RNA, 22 nt, Human
gaagcagcuggugagauggagc

SEQ ID NO: 770175 - RNA, 22 nt, Human
ccaccaagucccacuauaauuu

SEQ ID NO: 770176 - RNA, 17 nt, Human
ggugagaccucccacuc

SEQ ID NO: 770177 - RNA, 22 nt, Human
ucugggcagagggucuuaguca

SEQ ID NO: 770178 - RNA, 22 nt, Human
aaucaucuccgaaaaaagagua

SEQ ID NO: 770179 - RNA, 22 nt, Human
caguuuauauauaagcacauug

SEQ ID NO: 770180 - RNA, 23 nt, Human
ggugggagauuauccagaauuau

SEQ ID NO: 770181 - RNA, 22 nt, Human
uggcucugugaacagacgacug

SEQ ID NO: 770182 - RNA, 21 nt, Human
ugagcaaaauuuagagugaug

SEQ ID NO: 770183 - RNA, 22 nt, Human
ucaggccacuucacaggugauu

SEQ ID NO: 770184 - RNA, 22 nt, Human
auguuuacagaggaagugccuc

SEQ ID NO: 770185 - RNA, 22 nt, Human
cauuccagagcugccucugcua

SEQ ID NO: 770186 - RNA, 23 nt, Human
gaauaguuuuagaaauuggagaa

SEQ ID NO: 770187 - RNA, 22 nt, Human
uugagaaaagcuguguaaggau

SEQ ID NO: 770188 - RNA, 22 nt, Human
cuguggcugccucaccuacagg

SEQ ID NO: 770189 - RNA, 22 nt, Human
gggcuggaaaaacaacauacaa

SEQ ID NO: 770190 - RNA, 22 nt, Human
ccuccuggagcauuggugagga

SEQ ID NO: 770191 - RNA, 22 nt, Human
uaacacugguuaucccugugca

SEQ ID NO: 770192 - RNA, 22 nt, Human
cuggccuggucuggccucucca

SEQ ID NO: 770193 - RNA, 22 nt, Human
aauggcagaaugggccagaagc

SEQ ID NO: 770194 - RNA, 22 nt, Human
acacuuaagcaugaaguauaaa

SEQ ID NO: 770195 - RNA, 22 nt, Human
guggaccaagguggaagauaaa

SEQ ID NO: 770196 - RNA, 22 nt, Human
ugagcagagacgggggccucca

SEQ ID NO: 770197 - RNA, 22 nt, Human
ugggccugaaauucccauuuua

SEQ ID NO: 770198 - RNA, 22 nt, Human
uccuggcccuguggccugcagu

SEQ ID NO: 770199 - RNA, 22 nt, Human
aagccaguguuuuugagaguug

SEQ ID NO: 770200 - RNA, 22 nt, Human
aggggccucgcaggaccgcucc

SEQ ID NO: 770201 - RNA, 22 nt, Human
ggaggccauaguuugggaguca

SEQ ID NO: 770202 - RNA, 18 nt, Human
uuccauaauguauguaac

SEQ ID NO: 770203 - RNA, 22 nt, Human
ccaggucugcgggcggcaggca

SEQ ID NO: 770204 - RNA, 22 nt, Human
aaucuacaugcaauauuuuuag

SEQ ID NO: 770205 - RNA, 22 nt, Human
gucaaaacacuggggaauguug

SEQ ID NO: 770206 - RNA, 22 nt, Human
uagaucaggcugcuuagauaga

SEQ ID NO: 770207 - RNA, 22 nt, Human
uuccugguaaauuauguccagg

SEQ ID NO: 770208 - RNA, 22 nt, Human
uuucagaggugcuuggaaugcu

SEQ ID NO: 770209 - RNA, 22 nt, Human
uguacaaucuuggucccuuuau

SEQ ID NO: 770210 - RNA, 22 nt, Human
gccugggugaauuugauccuaa

SEQ ID NO: 770211 - RNA, 22 nt, Human
ucuccuuugaaaguuaggacug

SEQ ID NO: 770212 - RNA, 22 nt, Human
aaagacaguggauucaaaaucc

SEQ ID NO: 770213 - RNA, 22 nt, Human
ugaccugcagucaagaggggaa

SEQ ID NO: 770214 - RNA, 22 nt, Human
acauucuaugaagauaauuuua

SEQ ID NO: 770215 - RNA, 22 nt, Human
ucacuugaauucauucugcgaa

SEQ ID NO: 770216 - RNA, 22 nt, Human
accacaggguaaaguuagauau

SEQ ID NO: 770217 - RNA, 22 nt, Human
gcugagcagguguaaggaaggc

SEQ ID NO: 770218 - RNA, 22 nt, Human
guggcugcugguacucugggaa

SEQ ID NO: 770219 - RNA, 19 nt, Human
acuucuuuucaacacagga

SEQ ID NO: 770220 - RNA, 22 nt, Human
uuacugaaaauucuucaggauu

SEQ ID NO: 770221 - RNA, 22 nt, Human
gccuguggggcugaggcugccu

SEQ ID NO: 770222 - RNA, 22 nt, Human
uuucuaagaaaguaaugguuau

SEQ ID NO: 770223 - RNA, 22 nt, Human
auguguauguguauacacacag

SEQ ID NO: 770224 - RNA, 22 nt, Human
uuuacgagugcuaaugauauug

SEQ ID NO: 770225 - RNA, 22 nt, Human
auuugcauuuacauagcauaga

SEQ ID NO: 770226 - RNA, 22 nt, Human
uucaaaugauggcaguccuggc

SEQ ID NO: 770227 - RNA, 22 nt, Human
gcacagcccuggucggggcccc

SEQ ID NO: 770228 - RNA, 22 nt, Human
uccuggcuaguuuugcugaaau

SEQ ID NO: 770229 - RNA, 22 nt, Human
gauuucugggcuuuauuucaga

SEQ ID NO: 770230 - RNA, 22 nt, Human
ccuggcucagcagcucuuucuc

SEQ ID NO: 770231 - RNA, 22 nt, Human
acaaccuguucguuuccacaga

SEQ ID NO: 770232 - RNA, 22 nt, Human
gagcagcuccagccgcaugacu

SEQ ID NO: 770233 - RNA, 22 nt, Human
augaaacaaggguauuuucucu

SEQ ID NO: 770234 - RNA, 22 nt, Human
caguuucuucuauuuugaacua

SEQ ID NO: 770235 - RNA, 22 nt, Human
auacaguauaacuaauaaaccc

SEQ ID NO: 770236 - RNA, 19 nt, Human
ucugaggcuucuccccuug

SEQ ID NO: 770237 - RNA, 22 nt, Human
aaugucugaaaaucagacugca

SEQ ID NO: 770238 - RNA, 22 nt, Human
ucugaggucacagauuucaaga

SEQ ID NO: 770239 - RNA, 22 nt, Human
aucugccuccaaguccaugugu

SEQ ID NO: 770240 - RNA, 22 nt, Human
uccaaaggcccuaauaagcuug

SEQ ID NO: 770241 - RNA, 22 nt, Human
uuucccuacuuguaacuggaaa

SEQ ID NO: 770242 - RNA, 22 nt, Human
ccaagggcucuggacagagugg

SEQ ID NO: 770243 - RNA, 22 nt, Human
gagcagcuggaggccuuguugg

SEQ ID NO: 770244 - RNA, 22 nt, Human
cagaggaaaguauuucuggaag

SEQ ID NO: 770245 - RNA, 22 nt, Human
uucuucuucauuucugacgaug

SEQ ID NO: 770246 - RNA, 22 nt, Human
uaaggcacccauguucauacag

SEQ ID NO: 770247 - RNA, 22 nt, Human
ggcucaggacacagugguuuag

SEQ ID NO: 770248 - RNA, 22 nt, Human
acucugcuaaauguaaguuggu
